United States Patent Application Publication US 2006/0134663 A1 - sequence listing, part 50

SEQ ID NO: 116547 - DNA, 1000 bp, Homo Sapiens
atatgagcggaatgagttgttcctgccgggccgcatggcctatgtggtagacctggatgatgagtatgctgacacagatatccccaccactcttatccgcagcaaggctgattgccccaccatggaggcccagactacactgaccacaaatgacattgtcattagcaagctgacccagatcctttcatacctgaggcagggaacccgtaacaagaagcttaagaagaaggataaagggaagctggaagagaagaaacctcctgaggctgacatgaatatttttgaagacattggggattacgtaccctccacaaccaagacacctcgggacaaggagcgggagagatatcgggaacgggagcgtgatcgggaaagagacagagaccgtgaccgagagcgagagcgagaacgagatcgggaacgagagcgagagcgggaccgagagagagaagaggaaaagaagagacacagttactttgagaagccaaaagtagatgatgagcccatggacgttgacaaaggacctgggtctaccaaggagttgatcaagtccatcaatgaaaagtttgctgggtctgctggctgggaaggcacagaatcgctgaagaagccagaagacaaaaagcagctgggagatttctttggcatgtccaacagttatgcagagtgctacccagccacgatggatgacatggctgtggatagtgatgaggaggtggattatagcaaaatggaccagggtaacaagaaggggcccttaggccgttgggactttgatacccaggaagaatacagcgagtatatgaacaacaaagaagctttgcccaaggctgcattccagtatggtatcaaaatgtctgaagggcggaaaaccaggcgcttcaaggaaaccaatgacaaagcagagcttgatcgccagtggaagaagattagtgcaatcattgagaagaggaagaagatggaagctgatggggttgaagtcaaaagaccaaaatactaa

SEQ ID NO: 116548 - DNA, 1000 bp, Homo Sapiens
ttggttctcaaaataatacattttaagattaattgggtagaattagagttccacctttattcattgttgagcagtgatttatatttagttattatatttaggaatagaaaatagaattaaataatttaacttgattaatcaaccagaccaattttgacgtctggagaacttataaactcaatatgttatatttgttttcctgtatttaggtggagaaatgagaaaaagctttagttccaattgacagttcaggtcaatgttcaatgaacattcctatcttctaaaccagatttctctttttttttcctgagacggagtctcgctctgtagcctaggctggggacaagtggcgtgatctcggctcactgcaagctccgcctcccgggttcatgccattctcctgcctcagcctcccgagtagctgggactgcaggcaccgccaccacgcctggctaattttttgtatttttagtagagaaggtgtttcaccgtgttggccaggatggtcttgatctcctgacatcgtgatctgtctgcctcggactcccaaagtgctgggattacaggtgtgagccaccgcacctggcctaaaccagatttctttagggcacaattttttctggaatctcactcttgtttttcacagtaattttaaaaacgtttctactccaattaagaatatatatgatgttattatatatgcttatgaaacagatttatgagaaaagttttttttaaataaattatttaatcctagctctttgttattcaccagctttttaaaaaagtgtttgaaaattatacattctcgactttggggattagtttattcttgtggcatcattataaggcttaattgtggaaagctaagtacttgcttctattccttccaatgagagattataacataaactattaaaattattctgctaatatacctagatttttatttttaggtctctgtccattgcttttaattaaaattatctgttttcaaatc

SEQ ID NO: 116549 - DNA, 1000 bp, Homo Sapiens
cctcaaccacctggtatcggccaccatgagcggagtcaccacctccttgcgcttcccgggccagctcaacgctgacctgcgcaagctggccgtcaacatggtgcccttcccgcgcctgcacttcttcatgcccggcttcgcccccctcacagcccggggcagccagcagtaccgggccctgaccgtgcccgagctcacccagcagatgttcgatgccaagaacatgatggccgcctgcgacccgcgccacggccgctacctgacggtggccaccgtgttccggggccgcatgtccatgaaggaggtggacgagcagatgctggccatccagagcaagaacagcagctacttcgtggagtggatccccaacaacgtgaaggtggccgtgtgtgacatcccgccccgcggcctcaagatgtcctccaccttcatcgggaacagcacggccatccaggagctgttcaagcgcatctccgagcagttcacggccatgttccggcgcaaggccttcctgcactggtacacgggcgagggcatggacgagatggagttcaccgaggccgagagcaacatgaacgacctggtgtccgagtaccagcagtaccaggacgccacggccgaggaagagggcgagatgtacgaagacgacgaggaggagtcggaggcccagggccccaagtgaagctgctcgcagctggagtgagaggcaggtggcggccggggccgaagccagcagtgtctaaacccccggagccatcttgctgccgacaccctgctttcccctcgccctagggctcccttgccgccctcctgcagtatttatggcctcgtcctccccacctaggccacgtgtgagctgctcctgtctctgtcttattgcagctccaggcctgacgttttacggttttgttttttactggtttgtgtttatattttcggggatacttaataaatctattgctgtcagatacccttaaaaaaaaaaaaaaaaaaaaaaaaa

SEQ ID NO: 116550 - DNA, 1000 bp, Homo Sapiens
cacagcattcataggtccggcacttttgtttctggaccagtattttaacagctttattgatgaatatattgtactttggattgccctggttttctctttctttgatttgatccgctactgtgtcagtgtttgcaatcagattgcgtctcacctgcacatacatgtcttcagaatcaaggtctctacagctcattctaatcatcattaatgatgtaattggtatataggaacatcatgttttctgcaggaaagaaagtaacatattaaggagaatgggggtggataagaacaaatataatttataataatcaatgttgtataacttttattctttattattggtaacacgccctaactatcctgtgtgagaatgggaatttcaagtcccatcttgtaaattgtatatgttgtcatgcagggtttgggccaagaaagcatgcagaaaaaaatgccatgtgattgtaattatcctggattcagaataatactgtgatggggagccagatccgcagtggtggagagttctaatgttgactgtttgcaggccaaaagatgattgctttataattttaacaaatcattgtcttttagtaacatccttgtttagtgtcttctcaagctttctttactgaggaattcagcttgtgacacagatacatcccactagcttgtgaggtggaactagtaataaagaccttgaatttggattgaaaagtttcctatctttacattgttgaggaagtccttttttttttttttttttttttaattgctcaagaaatgattctctcacaggcttgggaaatcctgttagcatgcagaataatgtggtaactttgtcaatttcccattttatttttttaaataaatatatgatctaaaagccaactttttctcagttttactcagtggaaagataaactaagttttaatgttatttttttaaatttaagcaaaatttatttctgttctttaataaataagaaaatgtggtccactg

SEQ ID NO: 116551 - DNA, 1000 bp, Homo Sapiens
acaccgctctcgccgccgccatgactgagcagatgacccttcgtggcaccctcaagggccacaacggctgggtaacccagatcgctactaccccgcagttcccggacatgatcctctccgcctctcgagataagaccatcatcatgtggaaactgaccagggatgagaccaactatggaattccacagcgtgctctgcggggtcactcccactttgttagtgatgtggttatctcctcagatggccagtttgccctctcaggctcctgggatggaaccctgcgcctctgggatctcacaacgggcaccaccacgaggcgatttgtgggccataccaaggatgtgctgagtgtggccttctcctctgacaaccggcagattgtctctggatctcgagataaaaccatcaagctatggaataccctgggtgtgtgcaaatacactgtccaggatgagagccactcagagtgggtgtcttgtgtccgcttctcgcccaacagcagcaaccctatcatcgtctcctgtggctgggacaagctggtcaaggtatggaacctggctaactgcaagctgaagaccaaccacattggccacacaggctatctgaacacggtgactgtctctccagatggatccctctgtgcttctggaggcaaggatggccaggccatgttatgggatctcaacgaaggcaaacacctttacacgctagatggtggggacatcatcaacgccctgtgcttcagccctaaccgctactggctgtgtgctgccacaggccccagcatcaagatctgggatttagagggaaagatcattgtagatgaactgaagcaagaagttatcagtaccagcagcaaggcagaaccaccccagtgcacttccctggcctggtctgctgatggccagactctgtttgctggctacacggacaacctggtgcgagtgtggcaggtgaccattggcacacgctagaagtttatggcagagctttacaaata

SEQ ID NO: 116552 - DNA, 1000 bp, Homo Sapiens
gtcccaaccccagctactctgatccctctgggggctctggccaagggccagacagaccttcacagatgcctacttttggcctcatctctgcctgacaaggccagcacccaaagggttaatatttaacctctttttaaggacactggggtctgtttctggaaatgttctttagatggtggcacattcctttgggtatgttaacctaggcagtgggaggcaaatgggatggtatgtgagctaggagaagggctgaaccctcagccttgactatgtctagagcctcttggggaaggggcacctctcttgaaccccaaatgctctctcttcttattacccaaacccatggctctatttcttcttcacatccattgtctcttcatgtctattccattcccttcggccaaacagacaggtggaaaaactgagacaggcagtttcagagatggacagagaactttattttggattgtggatgtggacttttttgtacataaataagaaaaaccaaaatactccaaagatgacttcccctgcctcctactccagtatgacagaggaggatgtaaggccttagccatgatctgcaggggtctgggagtcaggcccggcctattgcttgggtctctctctatttatatatctaagttcacagtgtttcttattcccccctaagcttctagaggctcatggccctgtagttaggcctggctcattctgcacctttccagggaggtggaaggaccctgtgccctccttcccaatcttctttttcaggctcgccaaggcctaggacctatgttgtaattttactttttatttctaaagttgtagtgaagctctcacccataataaaggttgtgaatgttcaaaaaaaaaaaaaaaaaaaaaaaaaaaaaaaaaaaaaaaaaaaaaaaaaaaaaaaaaaaaaaaaaaaaaaaaaaaaaaaaaaaaaaaaaaaaaaaaaaaaaaaaaaaaaaaaaaaaaaaaaaaaaaaaaaaaa

SEQ ID NO: 116553 - DNA, 1000 bp, Homo Sapiens
aaccagccttaaacctgatttataaaccttatcaaatccgaatattagatcctttcattatcagaacagcagcttatgaactgcttcattttccaaaagtgtttcccaaaaatcagaaacctaaacacccaacaacaggaattattgccatcacattggcgttttacatatgtcacgaagttcacctagctggttttaaatacaacttttctgacctcaagagtcctttgcactactatgggaatgccaccatgtctttgatgaataagaacgcgtatcacaatgtgactgcagagcagctctttttgaaggacattatagaaaaaaacctcgtaatcaacttgactcaagattgactctacagactcagaagatgatgctaacagtgttagttttatttttgtactgcaatttttagtttaaaatatgttggatgcactcgtcaaataattatgtatactgtctgttgctgcctggtgattcataaccaccagcttaatttctgtgaatactgtatatttaacttatgaaaaccaagaaatgtaaagataacaggaaaataagttttgattgcaatgtttttaaaataagctagttttctgaggtgttttcacacgtctttttatagttacttcatcttagatttttgaagggatatgacttcctactaaggatttagtttaccacaacaattctgactacaataagacattttgaggaggatatttggctactgtaaacatggctggtggaaaatcacgattgtggcttgatgtggcaagccgaaaccacttggctctggaaatctaagttcatactggtttaattaagctctctcctgacaacccccagaattaaatgaaccatgattgtgaagagtaatttggtacaatgaaggcagtgtttgtttttaagttaaaggaaatgggctaaacataaagttcttattagataagtaaataactaaagaaagaatacaattactaaaaaaaaaaaaaaa

SEQ ID NO: 116554 - DNA, 1000 bp, Homo Sapiens
cactcgactacagaatatcattgacaaccagaagtactcagttgcagacattgagcgaataaatcatgaaagaaatgaattgcagcagactattaataaattaaccaaggacctggaagctgaacaacagaagttgtggaatgaggagttaaaatatgccagaggcaaagaagcgattgaaacacaattagcagagtatcacaaattggctagaaaattaaaacttattcctaaaggtgctgagaattccaaaggttatgactttgaaattaagtttaatcccgaggctggtgccaactgccttgtcaaatacagggctcaagtttatgtacctcttaaggaactcctgaatgaaactgaagaagaaattaataaagccctaaataaaaaaatgggtttggaggatactttagaacaattgaatgcaatgataacagaaagcaagagaagtgtgagaactctgaaagaagaagttcaaaagctggatgatctttaccaacaaaaaattaaggaagcagaggaagaggatgaaaaatgtgccagtgagcttgagtccttggagaaacacaagcacctgctagaaagtactgttaaccaggggctcagtgaagctatgaatgaattagatgctgttcagcgggaataccaactagttgtgcaaaccacgactgaagaaagacgaaaagtgggaaataacttgcaacgtctgttagagatggttgctacacatgttgggtctgtagagaaacatcttgaggagcagattgctaaagttgatagagaatatgaagaatgcatgtcagaagatctctcggaaaatattaaagagattagagataagtatgagaagaaagctactctaattaagtcttctgaagaatgaagataaaatgttgatcatgtatatatatccatagtgaataaaattgtctcagtaaaaaaaaaaaaaaaaaaaaaaaaaaaaaaaaaaaaaaaaaaaaaaaaaaaaaaaaaaaaaaaa

SEQ ID NO: 116555 - DNA, 570 bp, Homo Sapiens
cacctgcaccccgcccgggcatagcaccatgcctgcttgtcgcctaggcccgctagccgccgccctcctcctcagcctgctgctgttcggcttcaccctagtctcaggcacaggagcagagaagactggcgtgtgccccgagctccaggctgaccagaactgcacgcaagagtgcgtctcggacagcgaatgcgccgacaacctcaagtgctgcagcgcgggctgtgccaccttctgctctctgcccaatgataaggagggttcctgcccccaggtgaacattaactttccccagctcggcctctgtcgggaccagtgccaggtggacagccagtgtcctggccagatgaaatgctgccgcaatggctgtgggaaggtgtcctgtgtcactcccaatttctgagctccagccaccaccaggctgagcagtgaggagagaaagtttctgcctggccctgcatctggttccagcccacctgccctcccctttttcgggactctgtattccctcttgggctgaccacagcttctccctttcccaaccaataaagtaaccactttcagcaaaaa

SEQ ID NO: 116556 - DNA, 1000 bp, Homo Sapiens
aactttaatttgcccagttatacctcagtgttgtagcagtactgtgatacctggcacagtgctttgatcttacgatgccctctgtactgacctgaaggagacctaagagtcctttccctttttgagtttgaatcatagccttgatgtggtctcttgttttatgtccttgttcctaatgtaaaagtgcttaactgcttcttggttgtattgggtagcattgggataagattttaactgggtattcttgaattgcttttacaataaaccaattttataatctttaaatttatcaactttttacatttgtgttattttcagtcagggcttcttagatctacttatggttgatggagcacattgatttggagtttcagatcttccaaagcactatttgttgtaataacttttctaaatgtagtgcctttaaaggaaaaatgaacacagggaagtgactttgctacaaataatgttgctgtgttaagtattcatattaaatacatgccttctatatggaacatggcagaaagactgaaaaataacagtaattaattgtgtaattcagaattcataccaatcagtgttgaaactcaaacattgcaaaagtgggtggcaatattcagtgcttaacacttttctagcgttggtacatctgagaaatgagtgctcaggtggattttatcctcgcaagcatgttgttataagaattgtgggtgtgcctatcataacaattgttttctgtatcttgaaaaagtattctccacattttaaatgttttatattagagaattctttaatgcacacttgtcaaatatatatatatagtaccaatgttacctttttattttttgttttagatgtaagagcatgctcatatgttaggtacttacataaattgttacattattttttcttatgtaatacctttttgtttgtttatgtggttcaaatatattctttccttaaaaaaaaaaaaaaaaaaaaaaaaaaaaaaaaaaaaaaa

SEQ ID NO: 116557 - DNA, 1000 bp, Homo Sapiens
ttctggtggaaagtcaaacctgtcagtgctccacaccagggctgtggtcctcccagacatgcataggaatggccacaggtttacactgccttcccagcaattataagcacaccagattcagggagactgaccaccaagggatagtgtaaaaggacattttctcagttgggtccatcagcagtttttcttcctgcatttattgttgaaaactattgtttcatttcttcttttataggccttattactgcttaatccaaatgtgtaccattggtgagacacatacaatgctctgaatacactacgaatttgtattaaacacatcagaatatttccaaatacaacatagtatagtcctgaatatgtacttttaacacaagagagactattcaataaaaactcactgggtctttcatgtctttaagctaagtaagtgttcagaaggttcttttttatattgtcctccacctccatcattttcaataaaagatagggcttttgctcccttgttcttggagggaccattattacatctctgaactacctttgtatccaacatgttttaaatccttaaatgaattgctttctcccaaaaaaagcacagtataaagaaacacaagatttaattatttttctacttggggggaaaaaagtcctcatgtagaagcacccacttttgcaatgttgttctaagctatctatctaactctcagcccatgataaagttccttaagctggtgattcctaatcaaggacaagccaccctagtgtctcatgtttgtatttggtcccagttgggtacattttaaaatcctgattttggagacttaaaaccaggttaatggctaagaatgggtaacatgactcttgttggattgttattttttgtttgcaatggggaatttataagaagcatcaagtctctttcttaccaaagtcttgttaggtggtttatagttcttttggctaacaaatcattttggaaataaagattttttactac

SEQ ID NO: 116558 - DNA, 1000 bp, Homo Sapiens
cagcaaatatgacatcttggcctcagaggatgtagaaggtcaggaggcagccacactccccagcgaggggggtgttcggatcacaccctttaacctgcaggaggagatggaggaaggccactttgatgccgatggcaactacttcctgaaccgggatgctcagatccgagacagctggctggacaacattgactgggtgaagatccgggagcggccacctggccagcgccaggcctcagactcggaggaggaggacagcttgggccagacctcaatgagtgcccaagccctcttggagggacttttggagctcctattgcctagagagacagtggctggggcactgaggcgtctgggggcccgaggaggaggcaaagggagaaaggggcctgggcaacccagttcccctcagcgcctggaccggctctccgggttggccgaccagatggtggcccggggcaaccttggtgtgtaccaggaaacaagggaacggttggctatgcgtctgaagggtttggggtgtcagaccctaggaccccacaatcccacacccccaccctccctggacatgttcgctgaggagttggcggaggaggaactggagaccccaacccctacccagagaggagaagcagagtcgcggggagatggtctggtggatgtgatgtgggaatataagtgggagaacacgggggatgccgagctgtatgggcccttcaccagcgcccagatgcagacctgggtgagtgaaggctacttcccggacggtgtttattgccggaagctggacccccctggtggtcagttctacaactccaaacgcattgactttgacctctacacctgagcctgctgggggcccagtttggtgggcccttctttcctggactttgtggaggaggcaccaagtgtctcaggcagcgaggaaattggaggccatttttcagtcaatttccctttcccaataaaagcctttagttgtgtaaaaaaaaaaaaaaaa

SEQ ID NO: 116559 - DNA, 1000 bp, Homo Sapiens
ggagcctggaacagacaggaaatcaactgggtttgaaactctggtggtgacctccgaagatggcatcacaaagatcatgttcaaccggcccaaaaagaaaaatgccataaacactgagatgtatcatgaaattatgcgtgcacttaaagctgccagcaaggatgactcaatcatcactgttttaacaggaaatggtgactattacagtagtgggaatgatctgactaacttcactgatattccccctggtggagtagaggagaaagctaaaaataatgccgttttactgagggaatttgtgggctgttttatagattttcctaagcctctgattgcagtggtcaatggtccagctgtgggcatctccgtcaccctccttgggctattcgatgccgtgtatgcatctgacagggcaacatttcatacaccatttagtcacctaggccaaagtccggaaggatgctcctcttacacttttccgaagataatgagcccagccaaggcaacagagatgcttatttttggaaagaagttaacagcgggagaggcatgtgctcaaggacttgttactgaagttttccctgatagcacttttcagaaagaagtctggaccaggctgaaggcatttgcaaagcttcccccaaatgccttgagaatttcaaaagaggtaatcaggaaaagagagagagaaaaactacacgctgttaatgctgaagaatgcaatgtccttcagggaagatggctatcagatgaatgcacaaatgctgtggtgaacttcttatccagaaaatcaaaactgtgatgaccactacagcagagtaaagcatgtccaaggaaggatgtgctgttacctctgatttccagtactggaactaaataagcttcattgtgccttttgtagtgctagaatatcaattacaatgatgatatttcactacagctctgatgaataaaaagttttgtaaaacaagcttaagaattcaaaaaaaaaaaaaaaaaa

SEQ ID NO: 116560 - DNA, 1000 bp, Homo Sapiens
aaacagcacttttagacaactagctatcaaagctagatctcagctgggtgcgatggctcacgcctgtaatcccggcactttgggaggccaaggtgggtggatcacttgaggtcaggagttcgagaccagcctggccaagatggcgaaaccctgtgtctactaaaaatacaaaaactagccaggaatggtggcgcgcgcctgtaatcccagttacttaggaggctgaggcaggagaatcacatcaacctgggaggcggaggttgcagtgagcttagatcatgccaccatgccactgcactccagcctgggtgacacagccaaaaaaaaaaccactaagttagatctctacctcacagtgtccatacaaattagttccagagggaagatataccacaaaattactcaaaaatttttatacctctggtgtgggacggtcttttctaaactttaacatgagacttaaaagatataataagggaaaagataagcagatttcgcaaccaaaaaatatcgaaagtctctgtgtgatggaaaacatcaaggttaaaacacaaatgacagatatggaagaaaatatttgcagcacataaaaaaatcaacgagtacaattactttaggagaaaagcttgcttcagggtccttagagaaagtcactggggcctgccaagctgccacctaaagacaagagtgagagggctgagttcttccaggtcatcagagttgttgctgcccgtattaggccacacagtggaaccccatttatatcatagcagaagaaataggattatcaatgtgaactgcttagcatggtgcctggtatatacgagagctccacaaatgtgagctataatcctactagtaaaggatgctaagcagttccactgtggcaggtgtcatttgctagtagaatttgtaatcaaacaataggaggggaatctgtgaacgcctagaaaatgagcagaataaaggatattatctttggaagtcttaaaaaaaaaaa

SEQ ID NO: 116561 - DNA, 1000 bp, Homo Sapiens
ccgggagtaaaatgagtgacctcagaaacaagaattcctggaaaggcacatgccgaagaggaatatggtataattttaaattttaatgcaaaattttaatttgtctttattttttatcatttgaactgataagcactttttgtgtcaatataaaatatactaaaactgatgaaatgctaagacatgtcttgtgaaggaaggtttcttggagaccacttttatttactcatgagaagtggaagctcctagtatcagaagaagctgatacatagtgtcatgtgctcagtggttgccaaagtctaccaactttggggagctgcagggttctttttgggaggtgggaggaagggagatgagttttgttattttggggttttcaagcattggaaccaaaggccaaataataaacagcctttagtttttaaagtaaaattcattttatttgcagagtacacttgtatggtagactgttaaagacaattttatgactatttatgcacattataatggttacatctgctttttgtctttaaaataaaaaaaaaaatcagagaaaagcccacctttgaatacgtggctgaagataacagccaagaattggtctttcctaaaaatgcaacagataatgctgctagattgttattttgtttgcacttttttttgattggcattttaaaatcggtatttaaactgaagacattgtcatgttttattaatttaacaaagttgaaagtgactgctctgtacatcatgaccttaacaatgttaatgctgtaagtgaaagttcactgtcgtctgtatactaaatttattggtgtttctaacttaaaagtaagactgcagattatcccccaccagccttagtccaggggtgtggctctgtccgggtgcagtatgcagtcatgtggaaccttgctttctagtcctgggaaaaaaagatgtctctaattactggcttcaataaacacgaatccagactgcttaaaaaaaaaaaaaaaaa

SEQ ID NO: 116562 - DNA, 1000 bp, Homo Sapiens
ttgaagaggatgtatgccaaagagcacgctgaattagaagaactgaaacaggttcttctgcagaatgaaaggtctttcaatcctcttgaagatgatgatgactgccaaattaaaaaacgttcagcttctctaaactccaagccatcttctctacgaagagtgactattgcctctttacccagaaatattggaaatgcaggaatggtggctgggatggaaaataatgatcgattcagtagaaggtcaagcagttggcgtattttggggtcaaagcagagtgaacaccgtccctcattacctcgatttattagcacctattcctgggcagatgctgaagaagaaaaatgtgaactaaaaactaaagatgactcagagccatctggagaagaaacagtagaaaggacaaggaagccaagtctttctgaaaagaaaaataatccatcaaagtgggatgtctcttcagtttatgacacaatagcttcctgggcaacaaatctcaagtcctccatcagaaaggctaataaggccctctggctctctattgcattcattgtactgtttgcagctttgatgagcttcctcacaggccaattattccagaagtctgtggatgccgctcccacacagcaagaggactcatggacgtctctagaacatatcttgtggccatttaccagactccgacacaatgggccaccaccagtgtgacagcaggacatcctaatatatggatcttgatttttaagtttcagtatctgaacttcgtaaattagtaacttttagctgggaaagtatagcatgaaaccagaggttctcagaatgactgtaagatagcttacatttcctctttttgcctttatctccccaactaaaatacaatggggaagaagtctgcctatgatctttgaatgagctttttaaggaagaaatattatatattgtttgttaaagtttattgaaataaagaatcatttaaatcttcaaaaaaaaaaaaaaaaaa

SEQ ID NO: 116563 - DNA, 1000 bp, Homo Sapiens; identical to SEQ ID NO: 116194

SEQ ID NO: 116564 - DNA, 605 bp, Homo Sapiens
gaagtggcccttgcaggcaagagtgctggagggcggcagcggcgaccggagcggtaggagcagcaatttatccgtgtgcagccccaaactggaaagaagatgctaattaaagtgaagacgctgaccggaaaggagattgagattgacattgaacctacagacaaggtggagcgaatcaaggagcgtgtggaggagaaagagggaatccccccacaacagcagaggctcatctacagtggcaagcagatgaatgatgagaagacagcagctgattacaagattttaggtggttcagtccttcacctggtgttggctctgagaggaggaggtggtcttaggcagtgatggaccctccattttacctctttaccctgtcgctcataatgaggcatcatatatcctctcactctctgggacaccatagccactgccccctcccctggatgcccagtaatgtatgtctactggtgggagactgtgaggatcccaggattcagtattcctggcccagagggccttgctggctactgggtgttagtttgcagtcctgtgtgcttccctctcttatgactgtgtccctggttgtcaataaaatatttcctggc

SEQ ID NO: 116565 - DNA, 1000 bp, Homo Sapiens
aggaaaaggctaagaaaaaggaaaaccattctaaaacacaacaagaaactgtccaaatgctttgggaactgtgtttattgcctataatggggtccccaaaatgggtaacctagacttcagagagaatgagcagagagcaaaggagaaatctgggctgtccttccattttcattctgttatctcaggtgagctggtagaggggagacattagaaaaaaatgaaacaacaaaacaattactaatgaggtacgctgaggcctgggagtctcttgagctccacgacttcaaaattaaaatgagccatgagtcaaaccactgcaatccagcctgggcaacgagcaagacccagtctctactgttggtggcaaaattgccaacataagttaatagaaagttggccaatttcaccccattttctgtggtttgggctccacattgcaatgttcaatgccacgtgctgctgacaccgaccggagtactagccagcacaaaaggcagggtagcctgaattgctttctgctctttacatttcttttaaaataagcatttagtgctcagtccctactgagtactctttctctcccctcctctgaatttaattctttcaacttgcaatttgcaagggttacacatttcactgtgatgtatattgtgttgcaaaaaaaaaaaagtgtctttgtttaaaattacttggtttgtgaatccatcttgctttccccattggaactagtcattaacccatctctgaactggtagaaaaacatctgaagagctagtctatcagcatctgacaggtgaattggatggttctcagaaccatttcacccagacagcctgtttctatcctgtttaataaattagtttgggttctctacatgcataacaaaccctgctccaatctgtcacataaaagtctgtgacttgaagtttagtcagcacccccaccaaactttatttttctatgtgttttttgcaacatatgagtgttttgaaaataaagt

SEQ ID NO: 116566 - DNA, 1000 bp, Homo Sapiens
tacctgtcccagctccagccggtgaccagaaggaggtggacacttcagaaaagaaacttctcgagcggctccctgaggttgaggtgccccagcatctgtgatcctccgggaccccagccctcaggattcctgatgctccaaggcgactgatgggcgctggatgaagtggcacagtcagcttccctgggggccggtgtcatgttgggctcctggggcgggggcacggcctggcatttcacgcattgctgccaccccaggtccacctgtctccactttcacagcctccaagtctgtggctcttcccttctgtcctccgaggggcttgccttctctcgtgtccagtgaggtgctcagtgatcggcttaacttagagaagcccgccccctccccttctccgtctgtcccaagagggtctgctctgagcctgcgttcctaggtggctcggcctcagctgcctgggttgtggccgccctagcatcctgtatgcccacagctactggaatccccgctgctgctccgggccaagcttctggttgattaatgagggcatggggtggtccctcaagaccttcccctaccttttgtggaaccagtgatgcctcaaagacagtgtcccctccacagctgggtgccaggggcaggggatcctcagtatagccggtgaaccctgataccaggagcctgggcctccctgaacccctggcttccagccatctcatcgccagcctcctcctggacctcttggcccccagccccttccccacacagccccagaagggtcccagagctgaccccactccaggacctaggcccagcccctcagcctcatctggagcccctgaagaccagtcccacccacctttctggcctcatctgacactgctccgcatcctgctgtgtgtcctgttccatgttccggttccatccaaatacactttctggaacaaaaaaaaaaaaaaaaaaaaaaaaaaaaaaaaaaaaaaaaaaaaaaaaaaaaaaa

SEQ ID NO: 116567 - DNA, 1000 bp, Homo Sapiens
agaaggccaccagctgtttcccacgccccatgactccccgagaccgacatgaagggcgcaaacagagcactactgaggcccagaagaaagcagctccagcttctactaaacaggctgaccggcgccagtcgatggccttcagcatcctcaacacacccaagaagctagggaacagccttctgcggcggggagcctcaaagaaggccctgtccaaggcttcccccaacactcgcagtggaacccgccgttctccgcgcattgccaccaccacagccagcgccgccactgctgccgccattggtgccacccctcgagccaagggcaaggcaaagcactaaagggccagtaccagtgagtggccccacctgtgtccccgatgctgacctcacctggtcctccgcctactgtccctctcagtgccttctctcagctcccaggccaacagtagccaaacccctagagacagtgatgcctgcccgcaccctggcctggtccctggtccttcactggcgccttctcggagctggcccagggggcctggagcatggacagtgtgggcgctctccctaccttgcctccttttttcttaaagcaaagtcacttctccatcacaaccagatttgaggctggttttgatggctgggtccttgggcctggccagtcttcctcttagcctctggatctagaagggaccataagaggagtaggccctggttcctgctgtcctggtggctgggcccagcaggggccctcactcttgaagtccaggactgggtctgacctggtgggagcacctgccagaggatgctctttcccaggacggatgggccctatgtctcaggagtggggttgggggacagccttcagcagcagctcacaccctaccttccccagacttgcactggggtgggatttggagtgatgggaaggtttttaagggccggggatggatcttttctaaatgttattacttgtaaataaagtctatttttctcccgtg

SEQ ID NO: 116568 - DNA, 1000 bp, Homo Sapiens
agaactttttgatcagcctggctggtaccgtctagtactatgcagcggtcctcaagttggagaaaatgtgcctttcattcattacctctctggagacttcttgctggaatgaacagtgtgctcagggactatttggaactggatgtttttgaattattttatacttagagatattctgaattttttgagggccttttaacactccccgagctgattgtttgcaagtgtgtttgttccagagtgtggaagtataaagacatgggcatcacgtaaattggttttgtttgctattctgtgtgtcagaaccaacgagtgtaatggagagggcaggtcatctcttattgtttctaaaacaacttaaaaggtgtagattgggaagaggtgagtgatccagctttctccttttggattgaggctatgtacttggtgggggcaggggagggaatatattataatactattcagttgggataatgggaaaaacagagtatatagggtatctacccagcctagaaagcacaggaacaatacgtcatatatttggaacagttattgtctgtgccatgaccttcatgataccagtgagaagccaggctagagaaataaaatcctgaattacattttagtaattgttttcaagacaacaaaaaataaaacatttcattattcttgtatattgacatatttttcttttcttgaacaacatgcaggtgagtagcatattaatggctggctgtaaattaattttgattcctctgtcaagtagacctaaaactcactgtaagatatttcagttttttccttaaagtgatgatttcaaacctcctgaatatttgcgcgagacttttttcttaggaaagaaaaaaggctcaccttggctactgttgtcagcttacagtcatcacataccccctgaaatatttgacacttggaaatgaagttcttcctgaaaatatcactgcaataaaatacgtactacgtcaaaaaaaaaaaaaaaaaa

SEQ ID NO: 116569 - DNA, 1000 bp, Homo Sapiens
atggttgtgtttaagaatcttcctcgtcacgtttgtgttcagatctcttatgttataattagatcagagactggtagcatcgtttctctctctgaaagcaccagtgcccagagtctgctcggtaataaaattatggatccagattgttctgagagacgaagatacttgctgctgatagaggtgaaaacgagattgatccgtctggggttttacggtgtgcactgggtgctgcacagacttgtcaaggtttgctacgtcctctgggcatctgcaaaaggccctgctctctggagtgttgtatatagtgtagcaaaagagtatttatacatcccaccaatcaaaacacagctttattacctcatgcgaactcatacaaaccaatagaatttcaacatgttctgtagcttagagtgctcacttactacctctgaacaatactcacgctgtagtttgtctctttcttatctttttgcatcttgtaattaactctttgtttcccttcataaaatgtaatgtacattgtaatcttttaaaagaaaaatcagggttgcacttgcaacttttaaaaaaccgagtgtggaaacattgggtcttaattcaacacaggatcggtaaaactgttgtaaatactgagaaacattttgaatgttcttcatcttattactaatccatgcaaaaaaaaaaaaaaaaagcagcgactaattgtgatgcattcagatttcagtattcagtactgtatatttcaccctgtgtaatggggccccctctcctttctctctttttgtattgtatgcgattctgaaactgattgagtcatgaaaataatttgtggcggtgattctaatgtattaaaaacgtttcgtgttcctttctaactggattacaccctggattgaaaaagtcttcctcgtggtagttatatgtagtttcaaacatgaataaactttttgctttcatgattaaaaaaaaaaaaaaaaaaaaaaaaaaaaaaaaaaaaaaa

SEQ ID NO: 116570 - DNA, 1000 bp, Homo Sapiens
aattatggaagtggagaagatgaaaatgaggatgaagaaatggaagaatttgaagaaggccctgtggatgtccagacttccctccaggctaacactgaagctactgaagaaaatgaacatgatgaacaggtcctacaacgtgactttaaaaagacagcagaaagcaaaaatgtcccattggaacgagaagccactagtaaaaaaaataactgtcctgtgaaaccctgttacctcaatatcttggaagatgagcaacctttaaatagtgctgcccataaggagtcacctcctactgttgattcaactcaacagcctaaccctttgccgttacgtttacctgaaatggaacccttagtgcctagagtcaaagaagttaaatctgctcaggaaactcctgaaagctctctggctggaagtcctgatactgaatctccagtgttagtgaatgactatgaagcagaatctggtaatataagtcaaaagtctgatgaagaagattttgtaaaagttgaagatttaccactgaaactgacaatatattcagaggcagatctaagaaagaaaatggtagaagaagaacagaaaaaccatttatctggtgaaatatgtgaaatgcagaccgaagaattagctggaaattctgagacactaaaagaacctgaaacggtgggagcccagagtatatgagatgtcttcagaggctcatctaactctgtccttacatactcaatgcatatatgaaaacaatactaaataaacatctgatctgtataaaaatgtaaattagtttgacactgcttttttgataggtgtggtcatttctccccatggtagtttaaaacatcagaaactgaattctggacagatttaagccttgacacactgtgtttttttttttttcccccttcttttttgggtcttcatttttttccccattgtgatgtttggtaacgaatttaaaatgtagttttaaataaagtttggacttatctataaagta

SEQ ID NO: 116571 - DNA, 1000 bp, Homo Sapiens
tgtcctacggattcctctttcctccttatctgagctcttcaccagaggctaaatatgatgcattccttgtaaccaatatggttccaatgtatcctgctttcaaacgggtctggaattatttccaaagggtattggtgaagaaatatgcttcggaaagaaatggagttaacgtgataagtggaccaatcttcgactatgactatgatggcttacatgacacagaagacaaaataaaacagtacgtggaaggcagttccattcctgttccaactcactactacagcatcatcaccagctgtctggatttcactcagcctgccgacaagtgtgacggccctctctctgtgtcctccttcatcctgcctcaccggcctgacaacgaggagagctgcaatagctcagaggacgaatcaaaatgggtagaagaactcatgaagatgcacacagctagggtgcgtgacattgaacatctcaccagcctggacttcttccgaaagaccagccgcagctacccagaaatcctgacactcaagacatacctgcatacatatgagagcgagatttaactttctgagcatctgcagtacagtcttatcaactggttgtatatttttatattgtttttgtatttattaatttgaaaccaggacattaaaaatgttagtattttaatcctgtaccaaatctgacatattatgcctgaatgactccactgtttttctctaatgcttgatttaggtagccttgtgttctgagtagagcttgtaataaatactgcagcttgagaaaaagtggaagcttctaaatggtgctgcagatttgatatttgcattgaggaaatattaattttccaatgcacagttgccacatttagtcctgtactgtatggaaacactgattttgtaaagttgcctttatttgctgttaactgttaactatgacagatatatttaagccttataaaccaatcttaaacataataaatcacacattcagtttt

SEQ ID NO: 116572 - DNA, 1000 bp, Homo Sapiens
tttccaagtaatcagattgagaaaaccctatgagtattccagactacagagtttgcccaaatcaactgtaaatgacacttgtgtaacgtatatatagtgtttcatgaggtgtatataaaatagcaaattatgacagaacagtgatcacatatatttggatttatatgatatacagttacagtttactctgcagaggtaccttacctggtattctttgaattttttttttttttggaggaggaagagagcaacaaatttgattatatttttaagtgtcttagatcctgagaaagatttattgtgcattatttgaaccctgtcaatatctttttgagtaattgttttgtttcttacccttaaatagtcttgtgaagctgtaggcatgatagataacatggcttttactccttactgtttgaaaagataagtactttagcttctttctgcagccatttcatctgcgccaacactttggaacctaatactgtgtaaggctttacaatatacggattggctttttgtgacccagattgattggttgccacatgttatgtttgttgaagtggttctcatgcaaaaatattacacatttgtgttctgggttttttttttttttaaccaactcaatatgtgtttgatgatagtgaattgataaaacccgaagcttttccctgtaaatcttacatctttgcctttaaagaatgggttacaaccatcactagatcacagtagtgcctaatgaaggttgagaaccgtaggagaggctctcatgctgtaaataatgttgcaggctaataacctttcatcacttcctttgtgcgcttcctgccttaagtgacaagtagcaacatggcttgggtcccctgtgcagcatcagcttatgctgccacaagtcagtttgcaccctaggtgcccaggagctagtatccttagatctttctatcgctaacttaattctcttcgttatttatctgaccctctaactccatgtctaacttgc

SEQ ID NO: 116573 - DNA, 1000 bp, Homo Sapiens
ttgcctgactaacggtctagggtctgtaagctgacagtctgcctgctttctgattgtatccattgaagtgtatgtacattatggtaattctctgtctattaaatgtgtctaacaaaggaaggaattaagcactccacgtgttttctttataggggagttctgtacactatgattttaaatagatatttcttatatagtagtggccaaattctcattattttgtacaagataaaggttatgcatcacttttatggtattttgtgaactcagctaagggaatgcctgttcagagcctggagttgttacctttacttgaagtcatctcatccagtcccctgctttagggcaggacttcagttccactgttcatttctgaagcttctgtgtccccagcttaccctgttctgaaatgttgtattccattggacagggctgctatttttagtcagccatgcatttggattttacacttaatctagtaagtaaaaatgagaagaaaatttggcatttaaaaattgattttaagggttggcaaaagtattttttccagtaagcctttcactggatatctgtgaccaatgtttacctacgcaatgtttttgtatctgaattgcttatgtacgttttttattatattgacctaacaagaagatcaacttatgctggtatggtgatggttttgctatggcaaaatcaaagggctgatcatacatggtgccctttgggaagggggatggtgtggggctgagcacctctgggttgaatgggaatgggtcagattgggaagcctaggaagagagttctactgtagatttcctaggcactgctctgttgaaataggaacataagtctttagcaacattctgatttaatcgggtgacactgataacaaagtatgccactcagatccatttaaagtgtgcataactgtatttgaaatgtgtttttgtgtgcgtgtgtgtagaatgggtaaataaaattgttgagtaacttgaaccta

SEQ ID NO: 116574 - DNA, 1000 bp, Homo Sapiens
actggtggattttcaagatgcaaaggcttgtgcagagatgataagtacctgggtagaaagaaaaacagatggaaaaattaaagacatgttttcaggggaagaatttggccctctgactcggcttgtcctggtgaatgctatttatttcaaaggagattggaaacagaaattcagaaaagaggacacacagctgataaattttactaagaaaaatggttcaactgtcaaaattccaatgatgaaggctcttctgagaacaaaatatggttatttttctgaatcttccctgaactaccaagttttagaattgtcttacaaaggtgatgaatttagcttaattatcatacttcctgcagaaggtatggatatagaagaagtggaaaaactaattactgctcaacaaatcctaaaatggctctctgagatgcaagaagaggaagtagaaataagcctccctagatttaaagtagaacaaaaagtagacttcaaagacgttttgtattctttgaacataaccgagatatttagtggtggctgcgacctttctggaataacagattcatctgaagtgtatgtttcccaagtgacgcaaaaagttttctttgagataaatgaagatggtagtgaagctgcaacatcaactggcatacacatccctgtgatcatgagtctggctcaaagccaatttatagcaaatcatccatttctgtttattatgaagcataatccaacagaatcaattctgtttatgggaagagtgacaaatcctgacacccaggagataaaaggaagagatttagattcactgtgaatgaaaagcacagcctcagaataaaagatgatttctcaaaaatagctgattggcaaaatatcgtcatcttgacaatatttgctctatatcttatgtcttttctgttttaaactgtgcctgtagtaatagatatctgtcttgatgaataagtaaaattaggtatgcatttgtttcaaaaaaaaaaaaaaa

SEQ ID NO: 116575 - DNA, 997 bp, Homo Sapiens
aggcgctgcggcaggagggaagatggcggacgaggagaagctgccgcccggctgggagaagcgcatgagccgcagctcaggccgagtgtactacttcaaccacatcactaacgccagccagtgggagcggcccagcggcaacagcagcagtggtggcaaaaacgggcagggggagcctgccagggtccgctgctcgcacctgctggtgaagcacagccagtcacggcggccctcgtcctggcggcaggagaagatcacccggaccaaggaggaggccctggagctgatcaacggctacatccagaagatcaagtcgggagaggaggactttgagtctctggcctcacagttcagcgactgcagctcagccaaggccaggggagacctgggtgccttcagcagaggtcagatgcagaagccatttgaagacgcctcgtttgcgctgcggacgggggagatgagcgggcccgtgttcacggattccggcatccacatcatcctccgcactgagtgagggtggggagcccaggcctggcctcggggcagggcagggcggctaggccggccagctcccccttgcccgccagccagtggccgaaccccccactccctgccaccgtcacacagtatttattgttcccacaatggctgggagggggcccttccagattgggggccctggggtccccactccctgtccatccccagttggggctgcgaccgccagattctcccttaaggaattgacttcagcaggggtgggaggctcccagacccagggcagtgtggtgggaggggtgttccaaagagaaggcctggtcagcagagccgccccgtgtccccccaggtgctggaggcagactcgagggccgaattgtttctagttaggccacgctcctctgttcagtcgcaaaggtgaacactcatgcggcccagccatgggccctctgagcaactgtgcagcaccctttcacccccaattaaacccagaaccact

SEQ ID NO: 116576 - DNA, 1000 bp, Homo Sapiens
cagatgtcttgttacagacaccttcctctgtgtaagtctcctcaccttgaggggtctttagtaatgcatctgggtagcatctcaactgctggtagcatttatctgacttggaaagttggagaagaggcattcctactggagaaaaatgtcagtgttttcctataagctctgtgttagctattcattatatttgtgcttaaagatgttccttcattcatcaactaggggaagtccagatgcgggttatcttgaaagaaacaaactgacattctaggcagacagttgtctatgtggtctgagggtcagcagctgttagtctccttcctttggctcttgagacccacacatatcactttagccctaacaagggctcctcccacctccacctgttgccccagttgaaaagcatccattatgagctgaggtcagcctggatctggaattgcagcccacataaacataaaggaggatgtccctggtctgttccatccccacggatggtgttgctgctgggcaacagtgttggcttcttttaagtaccccctttcctcctcacccacctccaaactgactagcactcagagggacttatgataaaggttcagctccaggggtagtacctgagtgtgtgccatgccccttcagaccagctgcttccatcagaattccagggtcacagccccaacagaagcagcagtgcctctgtaggaggggtgctgggctctggccttctcatgcagagaggtccgggacagggtcagtatcgtgggcatgtgtatagcttcccaagttcttttacagtccctgctgggactccctgacttactttggttggttcctagtgctacttgttttacaaactacactttgtagaattgattagattaccttgtttatttaatgtgagtttgtgcctttttgtctcaatcttccaatacaggtatattgagaaaaaaagcagtctaataaaatcctagacagaaaaaaaaaaaaaaaaaaa

SEQ ID NO: 116577 - DNA, 1000 bp, Homo Sapiens
acccctggacaggccttctacgagatggcgtccttctctgagaaccgtgcccttcgactgctccaagaatcaggaaacggctttgtccgccacaacgtggggcacctgagcagaatatacccggctggatggagaacagactcctccaactacagccccgtggagatgtggaatgggggctgccagatcgtggccctgaatttccagacacctgggccagagatggacgtgtaccaggaccgcttccaggacaacggggcctgtgggtacgtgctgaagcccgccttcctgcgagaccccaacggcacctttaacccccgcgccctggctcaggggccctggtgggcacggaagcggctcaacatcagggtcatttcggggcagcagctgccaaaagtcaacaagaataagaattcaattgtggaccccaaagtgacagtggagatccatggcgtgagccgggacgtggccagccgccagactgctgtcatcaccaacaatggtttcaacccatggtgggacacggagtttgcgtttgaggtagttgtgcctgaccttgccctcatccgcttcttggtggaagattatgatgcctcctccaagaatgacttcattggccagagtaccatccccttgaacagcctcaagcaaggataccgccatgtccacctcatgtctaagaacggggaccagcatccatcagccaccctctttgtgaagatctccctccaggactaggctggaggaacccagtggggtcccccctgagtgggctgggccctctgtccacatgtggggacagggctggtgtgcctgctcccagcctcttgctcagagctaggcccccaaattgccttcagccctaacatagtgtctgctgctgcctccctggggaccaggagctagcccagtccctggagctgtccttcattccgttaggaataacaatgcagccctctccaccctccggccagcgagtggtcaaggatttttataaaaa

SEQ ID NO: 116578 - DNA, 1000 bp, Homo Sapiens
gaccctggagtggctgctgcagaagaacccacagctgggccattagccagccccgggccccgggtgcctctgcgtccgtgccaggcctcctgatgccaaggccacatccccgtgcttccagtgaccagaccactgaccaccctgactgtccaaacctgtgaccccaggccagggaacggggaggaaaccaaagaaaaccattttcagggagctcagacgtcacaggagggagcgggagcaggatgtggccctggcctcgccagagcacctgaagaagcaggccgtgagcgaggctgcgagtgccctgggcgccgtttctcacgcagtgaatgcttttccaggcctctgttgcttcctgcaccacacctggtggggtgggagcgtcctctaggtgcccctagttctttgtcctgcctcccagagggaggaaaagcccctgggggcttctggctccctgagattgggctctgagacgagacgggttcccaaggccctggtggggctggagtctcacctgtttgcatggagaaatgggctggccccacagcctcacaggagcagtttgtgggctggtttccccaggaatccagaccctaacccgtgagaatctggattttggcttgtgagccctgcttatttggagccgggtctagagggaaccctctatcagcctcaggaaaacaagacctctgtgcacctcacttttggctcactgcagcccttgtccttcacctccacacaggaccagctggaagcagaaagaagaaaggccaatttcacagggcaccaaacaagtatgaaatgtaaatcagaaatgcagacaccccagacgagagcctcacaggagggagggggccccacaggctccccaggaggctcgtgtctttggcccagagccagccttagtttgtccctgccatctactgtctgaggccatcgctgctacactttgtttttatttgtatttcatactgaagtttcaaaaaaaaaaaaaaaaaaa

SEQ ID NO: 116579 - DNA, 885 bp, Homo Sapiens
ggcccgggaaaggaccagaacaggcggcgaagactgaagcccggaggtaggagtggcaagagctcgcccagtccgcgaagggtaaactcgcgcatgcgcactggccttcaaccaagccaagcgccttggcttctgtcctggatgctcagtgttttgcggtttacgatgcgcatcgttttcccggctctggcaccagatccatactattctgtaaactgaggcggcgatgcccaaaaattggaagcaattactctaagatatcaaaagattgaagcaagccatgaaacctctgcgcggagagagccgagcccgaggcggcggggagccagcacgtgtgcgcagctccgccctcttttggcgaagcacctaggcctggcccctcccgcgacctgtagcgcggcggagcaagcgcggaaggctgggagggctgcgcgggctgcgcgtcgccatggagcccgacgggacttacgagccgggcttcgtgggtattcgcttctgccaggaatgtaacaacatgctgtaccccaaggaagacaaggagaaccgcattctgctctacgcgtgccggaactgtgattaccagcaggaggccgacaacagctgcatctatgtcaacaagatcacgcacgaagtggacgaactgacccagattatcgccgacgtgtcccaggaccccacgttgccgcggaccgaggaccacccgtgccaaaagtgcggccacaaggaggctgtgttcttccagtcacacagtgcgcgggccgaggacgccatgcgcctttactacgtgtgcacagccccacactgcggccaccgctggaccgagtgacctcctctctcccccgagtgtaataaacaccagattccatgcgtgaaaaaaaaaaaaaa

SEQ ID NO: 116580 - DNA, 1000 bp, Homo Sapiens
ttattgaacagcttatcttccacttgcaggtttatggaaacagcagtatttgaaaataaataaaaagtgggagaattccttgctgttagaagaatgtggccattattttgattttttgaatgagatatataatcaaagtactgctgaactgtgagtgcagtattctaaacatttcagctaggaataccactgatttagaaacaaaactgtttgtctctggtttctgaatttaaaatgttgggattacctgtttaaatctgtcttgggggatgtagagattaagtctgtacatgtgcgtgcacatatattcatgcaccctctgattttggttttcttgtttctgagttcttagaaagtacccacatactcttttttttttttttgtagaagtagctgtcatagagtgaagaaaaggataagactttaaacagttgattctttttgtgttttctacaaactattttttgaaatttaaatcacaaactcattttctggtttttagaaagtagatgatgatttcagaggagtaaggcatgccaagcagcatgctcagtggggttttaggctgtcacatgcagctgagaaaaggtatgttcaagtcataagtaggtaattgatagggtatgaactagtcaaaatatgaaccattatgattcaagttagattttcctctggagagacagatctgaatgttcagttctagccaaggtagattttactttcaactttttaatcagtatcactttctgtgcttaactatttggtgttaccttgtctgttttcatttgtctaaaattctgcagagatgactaaaatttgacataatggtgtaaatggattgttaaggtaactttcagttgaagattaaagcaagatgccattttccccatgactttggttttgtttacatttttccctttcagttagtatacactacacgtactgtaataaaatacaataatatgaaaaaaaaaaaaaaaaaaaaaaaaaaaaaaaaaaa

SEQ ID NO: 116581 - DNA, 1000 bp, Homo Sapiens
ggctgtcttgggggaaggcagcgcctctctagctactcaagggagggggatgtgggcacttgaagcagggacacccacagaatggtccctcttctccccaaaaggtgttcatgcctccctgtggctagtacaggctgagcactaagatgcttagtgctcagacaacctggggatgcctgtcccctacctgctcctcacccacagctacctgaggctgctctgagaagtacacacaggaatacatacgctcctctattcttcccttcatcctcatttgaacgccaggtatctcccctcctctctctcccctgcagaggcatgtagggaacagcaggagattattctcaccaaagttatgtcaagccccattggtcccagagtagctgaagggaagccaacccccctgcagcacaaataggccccccagtcccagccgtgtgctggcagatagggttgtattatttcttcttaccccatgcctgaccaagggaggtcaaaaggagaaaagtataggctgtggacaataactgatgaatatagggcccagatggaccaagtggggccggggagggatgaataaacaccctaccccgtgccctgtctttggtgagcagcagccctggggtcacagacatggaagggaccaccctggggctgactgcttttctgtgctgttggttcccaaaactagaaagaaggaagcagggagcggtgccccaagcatggctcctgccaacacctatttatttccttgtttgtgctatgctgggcaggccttctcttgtcccttataggtaccttggaggggccaggggctgaggaaggccggacccaggttccaggggcgcaggcagtgcggcttttggctgtgtacatagggtgctttattctccacagagtgatacatgctaaggtgggttgggcttggaccgatgtccccatatgtacagaactgaataaagtgggtctctgagaaaaaaaaaaaaaaaaaaaaaaaaaa

SEQ ID NO: 116582 - DNA, 1000 bp, Homo Sapiens
ccagtcccaaggtcccccacctcgtccaggaaagccagaaggaccacccccacaaggaggaaaccagtcccaaggtcccccacctcgtccgggaaagccagaaggacaacccccacaaggaggaaaccagtcccaaggtcccccacctcgtccgggaaagccagaaggaccacccccacaaggaggaaaccagtcccaaggtcccccgcctcgtccgggaaagccagaaggaccacccccacaaggaggaaaccagtcccaaggtcccccgcctcgtccgggaaagccagaaggaccacccccacaaggaggaaaccagtcccaaggtcccccgcctcatccgggaaagccagaaggaccacccccacaaggaggaaaccagtcccaaggtcccccacctcgtccgggaaagccagaaggaccacccccacaaggaggaaaccagtcccaaggtcccccacctcgtccgggaaagccagaaggaccacccccacaaggaggcaacaaacctcaaggtcccccacctcgtccaggaaagccagaaggaccacccccacaaggaggaaaccagtcccaaggtcccccacctcgtccaggaaagccagaaggaccaccttcacaaggaggcaacaaacctcaaggtcccccacctcatccaggaaagccacaaggaccacccccacaagaaggtaacaaacctcaacgtccccctcctccaggaaggccacaaggaccacccccaccaggaggcaatccccagcagcctctgccacctcccgctggaaagccccagggaccacctccacctcctcaagggggcagaccacacagacctccccagggacagcctccccagtaatcaaggttcaatgacaggaagtgaataagaagatgacagtgattcaaatgattcaaatgccatgacattggaagaaggtggtcatagctctacctttaatataccaataaaataaacagcttaaaaaaaaaaaaaaaaaaa

SEQ ID NO: 116583 - DNA, 1000 bp, Homo Sapiens
ttgttaaggatggcatggatactgtgaaaaagattgaatcatttggttctcccaaagggtctgtttgtcgaagaataactatcacagaatgtggacagatataaaatcattgttgttcatagaaaatttcatctgtataagcagttggattgaagcttagctattacaatttgatagttatgttcagcttttgaaaatggacgtttccgatttacaaatgtaaaattgcagcttatagctgttgtcactttttaatgtgttataattgaccttgcatggtgtgaaataaaagtttaaacactggtgatttcaggtgtacttgtgtttatgtactcctgacgtattaaaatggaataatactaatcttgttaaaagcaatagacctcaaactattgaaggaatatgatatatgcaatttaattttaattccttttaagatatttggacttcctgcatggatatacttaccatttgaataaagggaccacaacttggataatttaattttaggtttgaaatatatttggtaatcttaactattggtgtactcatttatgcatagagactcgtttatgaatgggtagagccacagaacgtatagagttaaccaaagtgctcttctctagaatctttacacctcctgtgtggttacaagttaactttgtaagtagcgtaccttccttccttaaaatatctagcttcctgtgccctttcatagatattcgattaatttttacattttaaacaagttgactatttcctttaggggttttgtttcaaacttttctgtcatctgtctctactacctcagaaactgcagcttggttctgatgatagaaattgaatttttccttgtagttattgtgataaagtatgaatatttttagaaagtctataccatgttctttcgttaaagatttgctttatacaagattgttgcagtacctttttctggtaaattttgtagcagaaataaaatgacaattcctaagagccaaaa

SEQ ID NO: 116584 - DNA, 1000 bp, Homo Sapiens
gcggtagcgaaggcagcagcagcggtggcgacatgagcagcggggcggcgtccgggacagggcgggggcggccccggggcgggggacctgggcccggggaccccccgcccagcgagacacacaagctggtggtcgtgggcggcggcggcgtgggcaagagcgcgctgaccatccagttcatccagtcctacttcgtgtctgactacgaccccactattgaggactcctacacgaagatctgcagtgtggatggcatcccagcccggctggacatcctggacaccgcgggccaggaagagttcggggccatgagagagcagtacatgcgtgctggccacggcttcctgctggtgttcgccattaacgaccggcagagtttcaacgaggtgggcaagctcttcacgcagattctgcgggtcaaggaccgcgacgacttccccgttgtgttggtcgggaacaaggcagatctggagtcacagcgccaggtcccccgatcagaagcctctgccttcggcgcctcccaccacgtggcctactttgaggcctcggccaaactgcgtctcaacgtggacgaggcttttgagcagctggtgcgggctgtccggaaataccaggaacaagagctcccaccgagccctcccagtgcccccaggaagaagggcgggggctgcccctgcgtcctcctgtagcccaggcaagagagaagcaaccaccacaagctctcgggactagctgccttcgcaccttgctgtgtgacctgaggccctcactgagcctcaatttcctcatctgggtctcccaggacacatcacatacccacccttacttcctggcctcttctgggctactgccactgtgtgccttctgccaacgcctcctgtccccacctaagcctggtgggggtgaggggctccgggtcactgctgtatataactcccctcccccagaaaaataaatgtcactgccaacgaaaaaaaaaaaaaaaaaaaaaaaaaaaaaa

SEQ ID NO: 116585 - DNA, 1000 bp, Homo Sapiens
ctaataagattgagtgaaaaatttgagtcaaatatctagggcattcacagagtagctgtgagttcttggtaatgtgaaaaaggccttgtttttcagaaattcctgggtttcctgttaaaaaatcttaaagcccaaccttaggaatatagtgccccaaaaggcggatgcttcttccattatcttattttctttgatactttatttaattagatgtttataaagaaatgggtttatttttccagcataaacctcagaatttaaggaaagaaaatgatgtctgttgttatagttcattgttttgcctactcagcagaagtgatgactcttaaaaattggctttgaccaaagttctcttgttttcagggaaagaacataaaagctttttgaactacagcctttttaaaagagggatgggaggatattacagtaagaaattaggctttctaaaagtatgaaacatccttcaactgggctctcttgttaataggacatcatatggtaatagactggtttgactatattgttagctgccacagtaagcaggtcattgtataggtaaatgcctgcacccataattttctagtaatagccacgaccaatttattaacagtcagggcctatccttgcctgtagttctcagtcactggatgcacaaaatcactgtgtaacattggctcacttggtgagcatagggttgactgataaaatgtttaattcccttgctagcttgtgagaagaatgagttgatgacatgctccataccagtggctagatggagtattaaggtggagcagaaaagaagtgagaacatcttgattcccctttcttttacttgatggtgtttatgaacatgccgtagtgcctttatggccagtttgagtcctgcctactttgacttttacgttcccattcctgtgttaccaccttcctcccgatttgttcacctattttgtgctttaaatctcaataaaatacttactgaggaaaaaaaaaaaaaaaa

SEQ ID NO: 116586 - DNA, 1000 bp, Homo Sapiens
tctggaagagactatcagcggcagatctctccagggaagacccatcccctagtgccagagcttgcatcctggagactaaagattgcacttttttgtagttttttgtccaaatgcaatcccatttctgtgcctcttagcatgcagttagatttggacaaacaagattcctaaggaatgactttattaactataatatggttacagctattatataaatatatattctggttatagttctaatatggagatgttgtgtgcaatgctggcctgtggtggtctgtgtaatgctttaacttgtatggaggaggccaggctcagagctgagatgtggcctgaaccttccctgtatcgatcctttaatttagaactgtcaagatgtcactttctccccctctgccttttagtggtatctgacatatactcaaaacagtaatttcctggtcacatcattaactgctaattctgtatttataaagaattttcagatggacatgtacaaatttgaactcaaaccatccccagtccagatacagggcagcgtgtaggtgaccacaccagagcctcagcctcggtccttctcagccgtcgggataggatccaggcatttcttttaaatctcagaggtagcagtaaacttttcagtattgctgttagcaagtgtgtgtttgccaatagatacccattatactaatgtgccaagtaaatgttcattgcacatctgcttccactgtgttcccacgggtgccatgaagtgtgtgaggagcccctcatctggagggatgagtgctgcgttgactactgctatcaggattgtgttgtgtggaatattcatctacataaattttatatgcacagtaatttccctttttatatgtcaagtaactatttgtaaaagttatactcacaaattattataatgattactaatatattttttccatgtttcattgcctgaataaaaactgtttaccactgttaaaaaaaaaaaaaaaaaaaaaaa

SEQ ID NO: 116587 - DNA, 1000 bp, Homo Sapiens
ttaggttttatccttccttttctttgagagttcgtgaagagggaagccaggattggggacctgatggagagtgagagcatgtgaggggtagtgggatggtggggtaccagccactggaggggtcatccttgcccatcgggaccagaaacctgggagagacttggatgaggagtggttgggctgtgcctgggcctagcacggacatggtctgtcctgacagcactcctcggcaggcatggctggtgcctgaagaccccagatgtgagggcaccaccaagaatttgtggcctaccttgtgagggagagaactgagcatctccagcattctcagccacaaccaaaaaaaaataaaaagggcagccctccttaccactgtggaagtccctcagaggccttggggcatgacccagtgaagatgcaggtttgaccaggaaagcagcgctagtggagggttggagaaggaggtaaggatgagggttcatcatccctccctgcctaaggaagctaaaagcatggccctgctgcccctccctgcctccacccacagtggagagggctacaaaggaggacaagaccctctcaggctgtcccaagctcccaagagcttccagagctctgacccacagcctccaagtcaggtggggtggagtcccagagctgcacagggtttggcccaagtttctaagggaggcacttcctcccctcgcccatcagtgccagcccctgctggctggtgcctgagcccctcagacagccccctgccccgcaggcctgccttctcagggacttctgcggggcctgaggcaagccatggagtgagacccaggagccggacacttctcaggaaatggcttttcccaacccccagcccccacccggtggttcttcctgttctgtgactgtgtatagtgccaccacagcttatggcatctcattgaggacaaagaaaactgcacaataaaaccaagcctctggaatctaaaaaaaaaaaaaaaaaaaa

SEQ ID NO: 116588 - DNA, 1000 bp, Homo Sapiens
cttcaagattatttaagtgaagatatttcttcagctctggggaaaatgccacagtgttctcctgagagaacatccttgctttgagtcaggctgtgggcaagttcctgaccacagggagtaaattggcctctttgatacacttttgcttgcctccccaggaaagaaggaattgcatccaaggtatacatacatattcatcgatgtttcgtgcttctccttatgaaactccagctatgtaataaaaaactatactctgtgttctgttaatgcctctgagtgtcctacctccttggagatgagatagggaaggagcagggatgagactggcaatggtcacagggaaagatgtggccttttgtgatggttttattttctgttaacactgtgtcctgggggggctgggaagtcccctgcatcccatggtaccctggtattgggacagcaaaagccagtaaccatgagtatgaggaaatctctttctgttgctggcttacagtttctctgtgtgctttgtggttgctgtcatatttgctctagaagaaaaaaaaaaaaggaggggaaatgcattttccccagagataaaggctgccattttgggggtctgtacttatggcctgaaaatatttgtgatccataactctacacagcctttactcatactattaggcacactttccccttagagccccctaagtttttcccagacgaatctttataatttctttccaaagataccaaataaacttcagtgttttcatctaattctcttaaagttgatatcttaatattttgtgttgatcattatttccattcttaatgtgaaaaaaagtaattatttatacttattataaaaagtatttgaaatttgcacatttaattgtccctaatagaaagccacctattctttgttggatttcttcaagtttttctaaataaatgtaacttttcacaagagtcaacattaaaaaataaattatttaagaacaaaaaaaaaaaaaaa

SEQ ID NO: 116589 - DNA, 1000 bp, Homo Sapiens
agagccagctgtgggtagttgaatctttttcccgtcacctcattgaggcctcccctctcctgcctccctccaccacttttttttttttttttttgagacagggtcttgctgtgttgcccaggctggagtgcagtggcctggtcatggcatcaaggctcactgcagcctggacctcctggttcaagtgatcctcttgtctcagtcccctgagacaatcccccacgcccagctacatattttttgtggatacagggtctcattctgttgcctaggcttgtctggaactcctgggctcaagggatcttgtagccttagcctcctaaagtgctgggattataggcatgagtcactgtacccggcctgctctaccgcttttaaggacgcttatgatcacattgcgcctacccagagaacccaggtcgtctttctattttcaggtcagctgattagccaccttagttccatctgcaactttagttcccactggctgtgtaacctaacatagtcacaggctctggggactgtcacgtggacatctttgggaggccgttattctgcccaccgcaccctccgttcatcccctgccctgccgggcacctcgctctaccccaggaaaatgtgagctcgttttcctgctcggcatgtgctccccctaaggctctgctcctccctgggcctgaaagttccttctcagcctgagagggggcccttcggactcaggcatgactcagcccggctgatgcctctgcagtgctgagtcaggatttggggccggctctcttgggtccgtccccttttcccaggtactgccttacaaagctgtggccaggaagtggccggtataaaggatgcccaaggtctttgtacgtgtgtaggagttagcgtgtttgatattgttaatataataataattattttttagagtactgcttttgtatgtatgttgaacaggatccaggtttttatagcttgatataaaacagaattcaaaagtgaaaaa

SEQ ID NO: 116590 - DNA, 1000 bp, Homo Sapiens
aagtttgcccttcgtggccttgggaagggttttgtgccctcacccacctcccagcccggaggccatgagagcctggtggaccgctggatccgcagccgcctgacagaggctgtgaggctcagcaatcaaggcttccaggcctacgacttcccggccgtcaccactgcccagtacagcttctggctctatgagctctgtgatgtctacttggagtgcctgaaacctgtactgaatggggtggaccaggtggcagctgagtgtgcccgccagaccctgtacacttgcctggacgttggcctgcggctgctctcacccttcatgcccttcgtgacggaggagctgttccagaggctgccccggaggatgccgcaagctccccctagcctctgtgttaccccctacccggagccctcagagtgctcctggaaggaccccgaggcagaagccgcccttgagctggcgctaagcatcacgcgagccgtgcgctccctgcgggccgactacaacctcacccggatccggcctgactgtttcctggaagtggcggatgaggccacgggcgccctggcatcggcggtgtcgggctacgtgcaggccctggccagcgcaggtgtggtggctgttctggccctgggggctcccgccccccagggttgcgctgtggctctggcttctgatcgctgctccatccacctgcagcttcaggggctggtggaccctgcacgggagctgggcaagctgcaagccaagcgagttgaggcccagcggcaggcccagcgtctgcgggaacgccgtgctgcctcgggctatcctgtcaaggtgccgctcgaagtccaggaggcagatgaagccaagctccaacagacagaagcagagctcaggaaggtggatgaggccatcgccctattccagaagatgctgtgatccaccacccagcttcacccctcacccccagcggctcaccatggggatggcagcaataaaatattttcccacaaaa

SEQ ID NO: 116591 - DNA, 1000 bp, Homo Sapiens
agatctttaatctgccagcagttactacgtcaggctcagttagctctagaggccattcttttgctgatcctgccagtaatcttgggctggaagacattatcaggaaggctctcatgggaagctttgatgacaaagttgaggatcatggagttgtcatgtcccagcctatgggagtagtgcctggtactgccaacacctcagttgtgaccagtggtgagacacgaagagaggaaggggacccatcacctcattcaggaggagtttgcaaaccaaagctgatcagcaagtcaaacagcaggaaatctaagtctcctatacctgggcaaggctacttaggaacggaacggccctcttcagtctcctctgtacattcagaaggggattaccataggcagacgccagggtgggcctgggaagacaggccctcttcaacaggctcaactcagtttccttataaccctctgactatgcggatgctcagcagtactccaccaacaccgattgcatgtgctccctctgcggtgaaccaagcagctcctcaccaacagaacaggatctgggagcgagagcctgccccactgctctcagcacagtacgagaccctgtcggatagtgatgactgaactgcacaaagtgaggggaacagggtgcaggagagggatctctagtttttgtggtttaatttttagtagcaggtcaaaaacctgccctcctgtgacttattccctgagacttttcaggagagccagcccacagatgatgaagaaatgatggaagttcatttggagagtcaaatgggaaaaaaacaaacaaaaaactgcctttgatacaggcaattcagtggactataataatagtggagggttgagatgtagagtttttaaaaagtgaacagttgctgttcttacatctgtaaagaaaaccataatgtctttaaatcactcttctgtaaatagatgacctttttgcagtgtaaaaaaaaaaaaaaaaaaaaaaaaaa

SEQ ID NO: 116592 - DNA, 1000 bp, Homo Sapiens
cagggcgggggggggcgggcggtgtcaggtcccagcgagccacaggaacggccctgcaggagcagggcggctgccgactcccccaaccaaggaaggagcccctgagtccgcctgcgcctccatccatctgtccgtccagagccggcatccttgcctgtctaaagccttaactaagactcccgccccgggctggccctgtgcagaccttactcaggggatgtttacctggtgctcgggaagggaggggaaggggccggggagggggcacggcaggcgtgtggcagccacacgcaggcggccagggcggccagggacccaaagcaggatgaccacgcacctccacgccactgcctcccccgaatgcatttggaaccaaagtctaaactgagctcgcagcccccgcgccctccctccgcctcccatcccgcttagcgctctggacagatggacgcaggccctgtccagcccccagtgcgctcgttccggtccccacagactgccccagccaacgagattgctggaaaccaagtcaggccaggtgggcggacaaaagggccaggtgcggcctggggggaacggatgctccgaggactggactgtttttttcacacatcgttgccgcagcggtgggaaggaaaggcagatgtaaatgatgtgttggtttacagggtatatttttgataccttcaatgaattaattcagatgttttacgcaaggaaggacttacccagtattactgctgctgtgcttttgatctctgcttaccgttcaagaggcgtgtgcaggccgacagtcggtgaccccatcactcgcaggaccaagggggcggggactgctggctcacgccccgctgtgtcctccctccctcccttccttgggcagaatgaattcgatgcgtattctgtggccgccatctgcgcagggtggtggtattctgtcatttacacacgtcgttctaattaaaaagcgaattatactccaaaaaaaaaaaaaaaaaaa

SEQ ID NO: 116593 - DNA, 1000 bp, Homo Sapiens
cctcaccctccaggtgtccttcgcacccaacagtgcgtctgaggaacgagctgcagtttgagcgttcccctgagatgtgcgtagcctccgtgtaaatgtccactcccatggcttaattgcctatcagacgcattttcccagacgaaagcaatgttgggttggggaagacagtgcagccacccagcctttaccagcagcgtacggcagacgaaggcagtcgaggtgtggaggtgatcacgaagatacatgtgtttgactgtttaatttgaaagtttacattttttatgctttgtgttggtgtgtaatttttgtactcttggtggctagtttttgtcaaatcttttttggaatattgcttaaatgttttgattttatgatagtgaagcttgtattcagtgttttgccaattaatattatatgcttgtaataaaagcaaaagaaaagcttaagtgaaagtgtttctggctggaaatgtattacataaatcatttgtatgagcatgagagatgacttgctcatgggatgagcaatgctgtgggtattggatggaccactcaggcagcctggccgcacacacacacatgcatgctacatatgtgtacgctcagaccacatgcctgcacatatgtccacacaccagcccacggctcccttcctcaccccagccctccccactcccaggttaaccaatgtcccgatttgcttcaggcggcatttgtaaactgtcaccctgcttgcaaaccctcatttaaattggtccagcatttgctaccagagtttaggccacaaactttgtaaagctcagtttgtctccttgcagaaagaggttgctgcagtttggagctggttatgccaaggaaaatacggctaaaaaagaacttactgattcccataggtgtgtcaactgacaaatgaatgttccatctccctacgacaatttgctgcccctccccaaaaaaagcactatggccaaaatttcagtttttaaaggttaagtaaa

SEQ ID NO: 116594 - DNA, 1000 bp, Homo Sapiens
cccggcagctaattccgaccaaaccgtaaccgtgaaagagtgacaaggacagcctataggaaaaacaataccacttaaaacaatctcctctctctctctctctctctctctctatctctctctctatctcctctctctctctcctctcctatctctcctctctctctctcctatactaacttgtttcaaattggaagtaatgatatgtattgcccaaggaaaaatacaggatgttgtcccatcaagggagggagggggtgggagaatccaaatagtatttttgtggggaaatatctaatataccttcagtcaactttaccaagaagtcctggatttccaagatccgcgtctgaaagtgcagtacatcgtttgtacctgaaactgccgccacatgcactcctccaccgctgagagttgaatagcttttcttctgcaatgggagttgggagtgatgcgtttgattctgcccacagggcctgtgccaaggcaatcagatctttatgagagcagtattttctgtgttttctttttaatttacagcctttcttattttgatatttttttaatgttgtggatgaatgccagctttcagacagagcccacttagcttgtccacatggatctcaatgccaatcctccattcttcctctccagatatttttgggagtgacaaacattctctcatcctacttagcctacctagatttctcatgacgagttaatgcatgtccgtggttgggtgcacctgtagttctgtttattggtcagtggaaatgaaaaaaaaaaaaaaaaaaagtctgcgttcattgcagttccagtttctcttccattctgtgtcacagacaccaacacaccactcattggaaaatggaaaaaaaaaacaaaaaaaaaacaaaaaaatgtacaatggatgcattgaaattatatgtaattgtataaatggtgcaacagtaataaagttaaacaattaaaaagaaaaaaaaaaaaaaaaaaaaaaaaa

SEQ ID NO: 116595 - DNA, 1000 bp, Homo Sapiens
gtttgtaatgtctagtggggcttcatcatcctgaaaagaaggagacagggatttttttaaagagcaagaaagtcacaatattacttctttccttccttttttccttctttcctttcttctttctctttctttctttttaaaatatattgaagacaaccagatatgtatttgctactcaagtgtacagatctcctcaagaaacatcaagggactcctgtgtcacatactgtgtttttattttaacatgggtgagggaggcgacctgatcaggggaggtgggggtacacatcaatttgagttgttcaggctactgaaacattaaaatgtgaattcccaaacttttctttttggctttgtcagggaaaagaaaaatatctttataaagaaatctttggaaattaggagaaggaatttcaggtgggtttaagtcagagctagttccccaacagaaagatcatttgaaaccagtttttatcccttctctttccttccctttccctaaatcaaatcaatattaattgtgccttatttcacttaacatagacttgaattatttttagggaaagcccctataatgaattcagaaatcactacaagcagcattaagactgaagttggaatattctgttgaccataaaaccttgatatcattctgtgtatatagaatgtaaaaggaatattacagtgttaactgccatatatgtaatatacacaaactcaattagcattgtaatggccaaatgcattcccccatgcttttctgttttcaaaaaaattgaaaaacaaatcaactcttatccccaacagctgcctaattttaggagtctgaccctccacatctcactggtgtgggtgcatggggctgtggagtgggtgtcagtatggatgtgtctgaatgtgtgaggccttggaagggactctttctgcagatactgtaaatacaagtaccattttaataaagcatgtacaataaaccaaaaaaaaaaaaaaaaaaaaaaaa

SEQ ID NO: 116596 - DNA, 1000 bp, Homo Sapiens
tgaagcgcaagggaacaagtggtttgcctggtgtcctacctgtcctgaacctggtcctgtgggccattgaaaagttagatctgtgatctctggggtttttgtggctttgttcaatgcttccactctagggcaggcagagcagtctatactctcccaagcctgcttgacctccaagtagagctgatacagagatctgtgaatattgtgatagaaattctttggtattcatacatttcagctgcaagtcagcaatttcccaggtaccatgtaagctataaaacagtcattcttaaagacagaggatagctgtgactcatgggatcatgaggtccatggctggttgcaggttccctttttccttcctcaggttttgtctcttcctgtgttgtccccagcaagggagagactgtggggtggattgggagaacagattaggagtatagcaaatgaacccagaatggaacagtggggagctaactgtgaatgaggagagtacctgctgcaggacctggaggtcaggtgtgaatgctgtattggcacagggaataaatatcctggcgtctggagccttcacctctccgtcaagtccttcctgtgatactgccatggcacaggatctgagttgcagctctgcaccctaaatcacaccctgggcattgtctgggctgcagggctgccaggttctgtacttgtgtccagctgtggccctggatgctggagctggagggttttctgtgctcagactgtagcctgtagctcttggcctgtgtagagccccctcctgtgccctcagtggctgtcgtttgttaacatcatcaggaagatgggaaaggtcaggcagaatttttctgccctacaaagggtggaagagaaaggacacagtattttcatgaatttaccatatatctttgtttttcttcaacgaaaaagttaattgaggcaatgtcatctgctcaaagttgagtggtttattcacaataaactgtaagtttctgattat

SEQ ID NO: 116597 - DNA, 1000 bp, Homo Sapiens
gccggcggagcaggttactcgcacgcggatttggctggcgtcccgctaactggtatgaaccctctgtctccttatttaaatgtggatccacgatacctcgtgcaggatacagatgagtttattttacctaccggagctaataaaacccggggcagatttgagctggccttctttacgattggaggatgttgcatgacaggggctgcgtttggtgcaatgaatggtcttcggctaggattgaaggaaacccagaacatggcctggtccaaaccaagaaatgtacagattttgaatatggtgactaggcaaggggcactttgggctaatactctaggttctctggctttgctctatagtgcatttggtgtcatcattgagaaaacacgaggtgcagaagatgaccttaacacagtagcagctggaaccatgacaggcatgttgtataaatgtacaggtggtcttcgagggatagcacgaggtggtctgacaggactaacacttaccagcctctatgcactatataataactgggagcacatgaaaggctccttgctccaacagtcactctgaagattttgccaactcatgaatggaggacacttcagtagtcatctagatccttttataagacagtttggagttattctctctcttctacctacaattagtttgaaaaattggagattttgatttgctgtgatgaaaatcctggatggctgaccaagactggcacttgttccagccattagtgagttgaagccaaagccctttggtgactcactgagtaccatggttctgttctcctctggagatcttgcacatatctgttttcctcccccatgaactagaaaaccacttactcccagaattcaggtcgtgcttgttagtactatatcaccaagtccattcatttaatgatccaaaactgtaatgttgcactgtattccaaataaagggtaaaaacagaaccaaagttataactccaaaaaaaaaaaaaaaa

SEQ ID NO: 116598 - DNA, 1000 bp, Homo Sapiens
ccacacctttgcccctgctgcgatgaccctgtcgccacttctgctgttcctgccaccgctgctgctgctgctggacgtccccacggcggcggtgcaggcgtcccctctgcaagcgttagacttctttgggaatgggccaccagttaactacaagacaggcaatctatacctgcgggggcccctgaagaagtccaatgcaccgcttgtcaatgtgaccctctactatgaagcactgtgcggtggctgccgagccttcctgatccgggagctcttcccaacatggctgttggtcatggagatcctcaatgtcacgctggtgccctacggaaacgcacaggaacaaaatgtcagtggcaggtgggagttcaagtgccagcatggagaagaggagtgcaaattcaacaaggtggaggcctgcgtgttggatgaacttgacatggagctagccttcctgaccattgtctgcatggaagagtttgaggacatggagagaagtctgccactatgcctgcagctctacgccccagggctgtcgccagacactatcatggagtgtgcaatgggggaccgcggcatgcagctcatgcacgccaacgcccagcggacagatgctctccagccaccacacgagtatgtgccctgggtcaccgtcaatgggaaacccttggaagatcagacccagctccttacccttgtctgccagttgtaccagggcaagaagccggatgtctgcccttcctcaaccagctccctcaggagtgtttgcttcaagtgatggccggtgagctgcggagagctcatggaaggcgagtgggaacccggctgcctgcctttttttctgatccagaccctcggcacctgctacttaccaactggaaaattttatgcatcccatgaagcccagatacacaaaattccaccccatgatcaagaatcctgctccactaagaatggtgctaaagtaaaactagtttaataagcaaaaaaaaaaaaaaaaaaa

SEQ ID NO: 116599 - DNA, 1000 bp, Homo Sapiens
agacatttagcacttttttctatttaaaggaacaagcggggaagggtgctaaaagataatacgtttatttattcacacttgaattgcatttgtgatcaaaataaatgtttaaatcgctaaaggaaaatacagtaagtgcttgaaagatgaaggaccaaaaggccaaaaaacagtgaaatatgatcatcatctcttgcggacttctctgcctggttttgtgtgttctgttattcaaacaataaaaagctggtggaacttactctttcttttaagataagttgtagacttcgatgtttcatgctcatgtacttcaaataatgcatgttttatagttagtccctcatcacttgaagtgacttctgagaattatgcagagtcaacatggatcatttcacagtgagatgctttatggattgaaggatatggtaaaatgtttatagtttactttgaaagtaaaatatactatgtcttggttttgaggatattggatacaaaactctcttcctttagggctactgagtcttgattcctgatcatcagaaatttcaccagaaacaacttgcttccaatatacccaattctatatgaagaattcatggagagtgtactggcactggaagagtttagtgtttcttgtatgcttgaaaataaagtatgtactgttttgaatgtgttccaagtcctctgcataaacgatgtattttggggtctggttgggcctggaaaatggatgagcacttcagaacaggtcattttcctgatattggaagtgacatgtggccctataggaggcatgatgttagttaattacacatttgcctacatctgtgggaaatggagaacaaagccatgtgggtactgtaaacacacgtttatcttttggcccaatgccatacatatggtaggcatttaattactgattgtgtttggataatttgggaattttcgactgtggtaaaatatacataaaataatacttattaaaaaaaaaaaaaaaaaa

SEQ ID NO: 116600 - DNA, 1000 bp, Homo Sapiens
ctcaagttcgaccccctcctgagggacagtcctggtagaccagtgcccgtggccaccgagaccagcagcatgcacggtgcaaatgagactccctcaggacgtccgcgggaagccaagcttgtggagttcgatttcttgggagcactggacattcctgtgccaggcccacccccaggtgttcccgcgcctgggggcccacccctgtccaccggacctatagtggacctgctccagtacagccagaaggacctggatgcagtggtaaaggcgacacaggaggagaaccgggagctgaggagcaggtgtgaggagctccacgggaagaacctggaactggggaagatcatggacaggttcgaagaggttgtgtaccaggccatggaggaagttcagaagcagaaggaactttccaaagctgaaatccagaaagttctaaaagaaaaagaccaacttaccacagatctgaactccatggagaagtccttctccgacctcttcaagcgttttgagaaacagaaagaggtgatcgagggctaccgcaagaacgaagagtcactgaagaagtgcgtggaggattacctggcaaggatcacccaggagggccagaggtaccaagccctgaaggcccacgcggaggagaagctgcagctggcaaacgaggagatcgcccaggtccggagcaaggcccaggcggaagcgttggccctccaggccagcctgaggaaggagcagatgcgcatccagtcgctggagaagacagtggagcagaagactaaagagaacgaggagctgaccaggatctgcgacgacctcatctccaagatggagaagatctgacctccacggagccgctgtccccgcccccctgctcccgtctgtctgtcctgtctgattctcttaggtgtcatgttcttttttctgtcttgtcttcaactttttttaaaactagattgctttgaaaacatgactcaataaaagtttcctttcaatttaaaaaaaa

SEQ ID NO: 116601 - DNA, 1000 bp, Homo Sapiens
tcttcaatattctggctaaatcttggtatgtggtttttaaacagtcactccgtttcaaagtctgtctttccttatagaatgtggaaattatttctccataccttgtgattttgacctgagtgctaagagaatcactctccttacctagttatctacaaatgttcattccagaaatgtttagttactgaattgaatgaagacatctcagtacactcttttaggtcatagtagttgccattttgtaaaatttcttttttcttctttgcttttttccccttatttggtttaatttttctaatgttaggagatatagtcctagatatttccatgggccagtgtgatgacttttttttaaatgaggttcagtaccataatgtttatttactggaagataatgcatttataagcattttaaaattctgtaaagtgggttagaaatatttataattttacaggcaggacagcatttgacttttatttaaaaggcggcactacttatgtaaatctgagctgtgggatatttcttgctttaagagagagacagaatctctcactgaaactcatggtcatgattttgtataatatagttcatactgtgtctgtgagtttcttcagttacaaatgggcatttagtatagttatattgactataacatgtaagtaaatagctttctactgaccctaagttatcaaggtggaaaaaaaacatgcaattcagtaattgaaaatgtggtgaaaagctgcagctgtcatcatcaaaacaactcataacatactttaaaatgttcaggtagcagtgagcattgttcatatgagaatggcggctgggtgatctctttgctgaattaatgagttcttaacatgtggacccaactgcctgtgtgagatctgtgtcttaaaacttactggaatggaaatctatgaattattgcaaattgtaatgctggaaacaaaaaataaatccttggttaaagggtttgtaatggtgaaaaaaaaaaaa

SEQ ID NO: 116602 - DNA, 813 bp, Homo Sapiens
gaaatccgcggaccgggctttaggttcgccggaatcccacgctcccgacttctgcttccgggtcggagccatggcggtggcaaattcaagtcctgttaaccccgtggtgttctttgatgtcagtattggcggtcaggaagttggccgcatgaagatcgagctctttgcagacgttgtgcctaagacggccgagaactttaggcagttctgcaccggagaattcaggaaagatggggttccaataggatacaaaggaagcaccttccacagggtcataaaggatttcatgattcagggtggagattttgttaatggagatggtactggagtcgccagtatttaccgggggccatttgcagatgaaaattttaaacttagacactcagctccaggcctgctttccatggcgaacagtggtccaagtacaaatggctgtcagttctttatcacctgctctaagtgcgattggctggatgggaagcatgtggtgtttggaaaaatcatcgatggacttctagtgatgagaaagattgagaatgttcccacaggccccaacaataagcccaagctacctgtggtgatctcgcagtgtggggagatgtagtccagacaaagactgaatcaggccttcccttcttcttggtggtgttcttgagtaagataatctggactggcccccgtctttgcttccctgcctgctgctgccccatttgatcaagagaccatggaagtgtcagagattcagaatccaagattgtctttaagttttcaactgtaaataaagtttttttgtatgcgtaaaaaaaaaaaaaa

SEQ ID NO: 116603 - DNA, 1000 bp, Homo Sapiens
gtgtacacatttacccagttgagcgttcttagaataactactgcacaagttgacaataggtcgttctctctttttttttgtttgctccctttttctttttctccccttcctccttaccctccctcccttactctccccccccaccaccaccctccacccccaactcatgaaaagattctatggactgaaaaagccccaggctgaaaggactggactgccttgattgacatggggaagggggttagtagactatgtggattgcggcagcagaggctgcagcctaacgtgtggttttaatgaccagcacgcaaggcaaaagcattttgcacagtgtttgttttcctgtcttgcacttacaaataaggtctatgggagtagcatggaaaacgtttgctgtttttcccttttttttttaattgcttttgtttaaaatttgatcgccttaactactgtaaacatagcctatttttgtgcttaagatactgaatggaaaactccattgtgtgttgctggactgttttggaaatatttggttaaatgtgtgttaatttggctgtaatggcatttaaagcaaacaaacaaacaaaaaaagctgtgaaaatggccttggagcattatctttagttacttgaagagtttctagtttttttaaaatacagtttatgttaaaataatttttattaatttagagaagacaatcaatgtctgtgagaaaacggactttcttttggattttctttttgtggtcattgtgagtgattgctttttccttttcttagtttcacattcttcctttgttctaaaacttagactgacatctagctttgacaatcatagtatgttttattttcctgagggggaataacttataatgctgtttagttttgtactattggtgtgttggtgaatttttaaactgtgtgctaactgcaataaattatatgaactgagaaaaaaaaaaaaaaaaaaaaaaaaaaaaaaaaaaaaaaaaaaaaaaaaa

SEQ ID NO: 116604 - DNA, 1000 bp, Homo Sapiens
tgtcacttaaaagagccaagattcctgttttcagtttgtggattcatcctgctggttttactttagtccctccatgtcaaagtgggcctgagaaaagctcatacatgcctcatgtgaagtgtccaccctctctgaaaatctttcttgttcaaaacagcaacgacatatcttgttaacttttacggtgacttttggaggaggggagtttggaaattgtaaaatgttatagattgttgcctatttcctgctgaaagtaaatgtttttaaaaagtatcatataaagctgaatacaaattggtttggggggagatcctttcctacccaaagtcataaatatattctttactgccttgtggaaattttatagttttgcctttcacatttgtctttagtctgtcctgaactgatttttgtgaaaattatgagttagaaattcaacttaacatttttcatattcgaagtggttgtctctgcactatttactgaaaagttcatcctttccccagtgatttgtaacactgcctctttcataaattaaatttttgtgtatgtgtgtgggtcttttgatggtttctattctgactgacatcaatttgtctaatcttgtagcagtacagtacagtcctgattattgcaactttaggaaaaggtctgataaaaaccaagatgcctccacattttgtcataattgtaaccaatttcacctctgtctccagtatcaccacaaaattgttcttccttggagtgtcttggctattcttagccaactgttcctccatattacttctagaattagaccaacaatttataaatcaaacaaacccaagagcattgaaattttgattggatttgtattgaatttatagattaatctggtaaaccatgtcatctttacaatgttgtcttccaatacatgaatatggtacagctcttcatttacttaggcctttgaaatatctttcaataaagtttataattttctccataaaaaaaaaaaaaa

SEQ ID NO: 116605 - DNA, 1000 bp, Homo Sapiens
tatccactagtgctaaaagaattcagaaggagctagctgaaataacccttgatcctcctcctaattgcagtgctgggcctaaaggagataacatttatgaatggagatcaactatacttggtccaccgggttctgtatatgaaggtggtgtgttttttctggatatcacattttcatcagattatccatttaagccaccaaaggttactttccgcaccagaatctatcactgcaacatcaacagtcagggagtcatctgtctggacatccttaaagacaactggagtcccgctttgactatttcaaaggttttgctgtctatttgttcccttttgacagactgcaaccctgcggatcctctggttggaagcatagccactcagtatttgaccaacagagcagaacacgacaggatagccagacagtggaccaagagatacgcaacataattcacataatttgtatgcagtgtgaaggagcagaaggcatcttctcactgtgctgcaaatctttatagcctttacaatacggacttctgtgtatatgttatactgattctactctgcttttatcctttggagcctgggagactccccaaaaaggtaaatgctatcaagagtagaactttgtagctgtagattagttatgtttaaaacgcctacttgcaagtcttgcttctttgggatatcaaaatgtattttgtgatgtactaaggatactggtcctgaagtctaccaaatattatagtgcattttagcctaattcattatctgtatgaagttataaaagtagctgtagatggctaggaattatgtcatttgtattaaacccagatctatttctgagtatgtggttcatgctgttgtgaaaaatgttttaccttttacctttgtcagtttgtaatgagaggatttccttttaccctttgtagctcagagagcacctgatgtatcatctcaaacacaataaacatgctcctgaaggaaaaaaaaaaaaaaaa

SEQ ID NO: 116606 - DNA, 1000 bp, Homo Sapiens
actaatgtgaaaaaaacattgctgaaaacctaaaaatgaaagtttgtgagtgtttattggttttcttaagagaaatggactattttgctctcatgtgtaatgttttctatttaaatctttcttaaatataccagctgttctctttccctgaactctcccccaggttctaggacaaatttaataacatgtaattctcctcaaatacttttgtatgtctcagtgttggtgttttcctccctaaaactaacattagggctgtgccacgggcatgactttatttttgttgggcttttttttccctgcttaaggagaggtgtcttttttggatatgagctatttattttgtgaaatgaaaattgttcacccaaatgattctcttataaactatttgtaaatgtcacttattcattagtgtttgacataatttttagaatatttattttgaatcaatcctttcattacgaaagacttgaagttttgtgtccattcttacaagccctggtcagtcaagtcccaataaatggtcagcacaaaaaagatattcttgaaaattgctctttattaaggtattacgttgagtttgcaaccagatgggaaaaatcacaaaaatgagaaggggagcagatatcttgttgaggtctggatattatctccctttataaacttggtgtaggccgtatattttgaaaataaacatctggttgaggttatttcatttggaaaccttccttagagtcctgttgctcagtgtggtccatcagacggtagtactgccacaagctgagagcttgctgggcacgcaacccagagtttctgaatcctgttccgtattttaacattcccaggtgattcacagccacattaaagttcaggagaccataggacccctgacccatgagaagaagtgattggtttcgattatagacatcaagataaagatttttctcaaaggaaagagattaatgtattaaaacaacctctgaaaaaaaaaaaaaaaaaa

SEQ ID NO: 116607 - DNA, 1000 bp, Homo Sapiens
ccttaattttagccagaaagcaaaaaaacaatagtaatgataaatgtgaacatttttgcttattcattgaatatttttctgtaattttcagcacttatgtatacactttttctgtacttactaggttaaggcagatttatttttatgatttgtttaggaattatttgattttataatggtaattttcatgatgataatgtttttggttatttggaaagatagtttagagatgaaaggtttttttgggtaacaatcccgcagctgacaaaaaatgtgaaatttccacaaaatatccaacttatgtgactaaacgcagtagtttttttaaaaggggagatagaaaataaatggttttgttggagtgcattttagtaagcctttgcagtaaaatgacggttgtaactactaaaccaaatttagttttcacagcatggttttgttgttttccccttgtttttcagaggtaaattttgcattatatccttcagtattttaacactattttggcagtttacacattactttttgtttttccttcctttttgtgaaatgtattaagttgtggttcttattgaaacagtattatataatgtttgcttaattatatcatgtgatgctcagttctattttgatttattcattagtattcacttttacctttaaagtttacttgtagcaaatatgtttacattgataaagccagatatgttttgacaatgaaatttacatatcaagtactgcaaataaaaggtggtgctatgatatatgcttaggaggacagttttaatgattgtacttgcatgaacacaatcatatgatggtaaagcagaaacttaagaaaaaattgtttatgtgttatattcaattagcttaaataagttgctttgttatattttatttgaattgaactacgctaggcctaaatgccaataaaatatacttttcactgttaaaaaaaaaaaaaaaaaaaaaaaaaaaaaaaaaaaaaaaaaaaaaaaaa

SEQ ID NO: 116608 - DNA, 1000 bp, Homo Sapiens
caaagagtacaacctagccctgaaaagactgagcttccatgacatgaatctcgctgactgtcagagcgaggtgctctttttgctacagaatctgactctgcaagagattaccttctccttctgccgtctgtttgagaagcgcccagcccaatttctgcctgagatggttgctgctatgaagggcaactccacactgaagggcctccggctgccagggaaccgcctggggaatgctggcctgctggccttggcagatgttttctcagaggattcatcctcctctctctgtcagctggacatcagttccaactgcatcaagccagatgggcttctggagttcgccaagcggctggagcgctggggccgtggagcctttggtcacctgcgcctcttccaaaactggctggaccaggatgcagtcacagccagggaagccatccggcggctccgggctacctgccatgtggttagcgactcatgggactcatcccaggccttcgcagattatgttagcaccatgtgatggggcccgtacctcacagtctcatgctcggtaccatcagcttgcaggggctgaagcatgggctgcccagaaccccaaccaccagttctatctttctctttctgtcaccttttttctcttttttccttcttcccttgcactgaggtcctggaggccttgatgaggcccagcaaacaggcattctcacagctgggtttatagtctttgggccccttactcagtatcctgggaaccctgggccaggaggttacagtggtcatcataattgctgaagagatcccctcccctgcccctgggttcctgccttccctcctcaagcaggcacccaggctttagagaagtatagggggcttcttccctgctgggcttaccacactgctctcaggcctcaaaccctttcatacctttattcttttttttaaccaaaaaagtttttcttataaaataaattttgggcaaacatcaaaaaaaaaaaaa

SEQ ID NO: 116609 - DNA, 1000 bp, Homo Sapiens
tccacacagcaagcttcacaaggggacggccctgcacagttcacagaagcctgcggagcccgtcaagaggcagccgaggtcccagtgcctgtccacgctggtccggcccgtcttcggagagctcaaagagaagcacaagcagagcggcgggagcgtgggtgcgctggaggagctggagaacgccttcagcctggccgaggagtcctgccccggcatctcagacaagctgatggtgcacctggtggagcgagtgcagaggttttcacacaacagaaaccacctgacatccacccgctgaagcgcactgctgttcagataggggacggaaggtcgtttgtttttgttctgagctccataagaactgtgctgacttggaaggtgccctgtgctatgtcgtgcctgcagggacacgtcggatcccgtgggcctcacatgccaggtcaccaggtcaccgtctccttccacccctgcagtgtgctgttgtgcacgtcagggacgctgttctctatgcccactgccctcctccctctcctggcccagcagtattgctcacgggggctccagccgccggcgtggccctcatgagctacgcctgggtcttctgcagactcatgcagccctatggccgctcagaccaaggcgcagagcaactatcagggcagctctgcctcctcctcccatgaggtggggagaggcaacagggcagcccccagaggagtgtcctggccgctgtcctcccggggcccatgatggccatagatttgccttgtggtgttggatcaggtactgtgtctgctcataagtacttgtgtcatccagaatgttttgttttttaagaaaattgaattacttgtttcctgaaatattctgaggttaatatgttagttttcatagaacattgagaggcccctgccactttcaataaagacctgacttggagacaaaaaaaaaaaaaaaaaaaaaaaaaaaaaaaaaaaaaaaaaaaaaaaaaaaaaaaaaa

SEQ ID NO: 116610 - DNA, 1000 bp, Homo Sapiens
ttttcatgcttccaggtaaaaacagatattgtaccatgtacctaatccaaatatcatataaacattttatttatagttaataatctatgatgaaggtaattaaagtagattatggcctttttaagtattgcagtctaaaacttcaaaaactaaaatcattgtcaaaattaatatgattattaatcagaatatcagaatatgattcactatttaaactatgataaattatgataatatatgaggaggcctcgctatagcaaaaatagttaaaatgctgacataacaccaaacttcattttttaaaaaatctgttgttccaaatgtgtataattttaaagtaatttctaaagcagtttattataatggtttgcctgcttaaaaggtataattaaacttcttttctcttctacattgacacacagaaatgtgtcaatgtaaagccaaaaccatcttctgtgtttatggccaatctattctcaaagttaaaagtaaaattgtttcagagtcacagttccctttatttcacataagcccaaactgatagacagtaacggtgtttagttttatactatatttgtgctatttaattctttctattttcacaattattaaattgtgtacactttcattacttttaaaaatgtagaaattcttcatgaacataactctgctgaatgtaaaagaaaattttttttcaaaaatgctgttaatgtatactactggtggttgattggttttattttatgtagcttgacaattcagtgacttaatatctattccatttgtattgtacataaaattttctagaaatacacttttttccaaagtgtaagtttgtgaatagattttagcatgatgaaactgtcataatggtgaatgttcaatctgtgtaagaaaacaaactaaatgtagttgtcacactaaaatttaattggatattgatgaaatcattggcctggcaaaataaaacatgttgaattccccaaaaaaaaaaaaaaaa

SEQ ID NO: 116611 - DNA, 1000 bp, Homo Sapiens
gttttgttttccttttaaaattctttagggagagagggatggtttctgaggggttctgaaagtatgattcaatgtgcaacatacaggtaggtcttcagcataagctgaaatatatgcatgtaaaaactttgacatctttttttttaattttccactttcttcttaactttacttctctttttgtcccccccccatcttacagaagttgaggccaagggagaatggtaggcacagaagaaacatggcaaactgctctgtgctttcaaaccaaagtgttccccccaaccccaaatttgtctaagcactggccagtctgttgtgggcattgttttctacaaccaaattctgggtttttttcttctttctttaaacatagaggtaccaccacaagggatgccctactctctcgcagctcttgaaagcatctgtttgagggaaaggtctctgggcaagcaagtggttatttggattgcttgcttccctttttccacctgggacattgtaatcataaaataacagtaaattccaaacctcaaaaactattatggcctgagcacagctgaaatctagcagagtttaactcttctgcctccatgtctgtcacttataattcaggttctgctgttggcttcagaacatgagcagaagaatcgttttatgctagttattgcattcatggttgaaactcaacttagggaaagggttccaatgtattaagcaatgggctgcttctccccaatcctccctaacaattcgttgtgtggacttctcatctaaaaggttagtggcttttgcttgggatcagtgctctctattgatgttcttgctggtctccagacacattcctgttgcattaagacttgaaagacttgtagatgtgtgatgttcaggcacaggatgctgaaagctatgttactattcttagtttgtaaattgtccttttgataccatcatcttgttttctttttgtaggtataaataaaaacactgttgacaataa

SEQ ID NO: 116612 - DNA, 1000 bp, Homo Sapiens
ttcttcagccacgaagggatggatgtgcatctgccctaagtcagattgaagcctcctcctaggctccaggaggagcatgtgcaggaagggttggcctgagccagagccggcaccccagctccttcctccagctccccgcacccaccggccctgacctggcttcccctcggctgtgtagggacaaagccgaagcccagtgccatgactgcccgcggattgaaaaacagaaacacaaaactttgacttgacttgcgaagtgaagcagggttttcatttttactctccttggtttaggtctagaaagaagaatactgacctgagaggaggcccagtgagattctgaaacctaattcttcgaaggcgtactggcccttagttcagttattttagttgtataagttgatattttttttctggaatgtagccatttgctgttatctgggaaacaagattctaacaggaaaccagcctaagacacttcaggttgagcgctgcctcggagtctgtgcccgtcgcgtcccctgcttgagttttgcacttggaagaaccctgcaccggctggcgtgtgcgacggcccagtcccatccagagcatggagcccgaccccagccagcgccttccactccatcatttcatttcacacccccgaagggaggggaggccaggaggggagctgctcctgccagaagctggtgggtgaccgttgggaatcggccacacctggtgtccatgggcagcctggtgcaattccattcatttgtacagaaacatttttgaaaaattcttttcaataagatgcaaaatcttccaacttttcaacccaacgtgatgaatatttgattttgttctagatttcctgtagctgtgaattgttaaaatgtatgattcaggataaaacgtaaacacgtgctgttagtaatttcttgtggatttcattgttttgccttcaaataaagcctttttttaaagaaaaaaaaaaaaaaaaaaaaaaaaaaaaaaa

SEQ ID NO: 116613 - DNA, 1000 bp, Homo Sapiens
agcctcaccaacctggccaagtatccagcatccacagtgcagatccttggggctgaaaaggccctgttcagagccctgaagacaaggggtaacactccaaaatatggactcattttccactccaccttcattggccgagcagctgccaagaacaaaggccgcatctcccgatacctggcaaacaaatgcagtattgcctcacgaatcgattgcttctctgaggtgcccacgagtgtattcggggagaagcttcgagaacaagttgaagagcgactgtccttctatgagactggagagataccacgaaagaatctggatgtcatgaaggaagcaatggttcaggcagaggaagcggctgctgagattactaggaagctggagaaacaggagaagaaacgcttaaagaaggaaaagaaacggctggctgcacttgccctcgcgtcttcagaaaacagcagtagtactccagaggagtgtgaggagatgagtgaaaaacccaaaaagaagaaaaagcaaaagccccaggaggttcctcaggagaatggaatggaagacccatctatctctttctccaaacccaagaaaaagaaatctttttccaaggaggagttgatgagtagcgatcttgaagagaccgctggcagcaccagtattcccaagaggaagaagtctacacccaaggaggaaacagttaatgaccctgaggaggcaggccacagaagtggctccaagaaaaagaggaaattctccaaagaggagccggtcagcagtgggcctgaagaggcggttggcaagagcagctccaagaagaagaaaaagttccataaagcatcccaggaagattagaatgcaaatggacattctctgggaggtggggcataccatagcccaaggtgacatttcccaccctgtgccgtgttccccaataaaaacaaattcacaagaaaaaaaaaaaaaaaaaaaaaaaaaaaaaaaaaaaaaaaaaaaaaaaaaaaaaaaa

SEQ ID NO: 116614 - DNA, 1000 bp, Homo Sapiens
gtggagcaactggagcagctcatcgaaagccatgatgtcgtcttcctattgatggacaccagggagagccggtggcttcctgccgtcattgctgcaagcaagagaaagctggtcatcaatgctgctttgggatttgacacatttgttgtcatgagacatggtctgaagaaaccaaagcagcaaggagctggggacttgtgtccaaaccaccctgtggcatctgctgacctcctgggctcatcgctttttgccaacatccctggttacaagcttggctgctacttctgcaatgatgtggtggccccaggagattcaaccagagaccggaccttggaccagcagtgcactgtgagtcgtccaggactggccgtgattgcaggagccctggccgtggaattgatggtatctgttttgcagcatccagaagggggctatgccattgccagcagcagtgacgatcggatgaatgagcctccaacctctcttgggcttgtgcctcaccagatccggggatttctttcacggtttgataatgtccttcccgtcagcctggcatttgacaaatgtacagcttgttcttccaaagttcttgatcaatatgaacgagaaggatttaacttcctagccaaggtgtttaattcttcacattccttcttagaagacttgactggtcttacattgctgcatcaagaaacccaagctgctgagatctgggacatgagcgatgatgagaccatctgagatggccccgctgtggggctgacttctccctggccgcctgctgaggagctctccatcgccagagcaggactgctgaccccaggcctggtgattctgggcccctcctccataccccgaggtctgggattcccccctctgctgcccaggagtggccagtgttcggcgttgctcgggattcaagataccaccagttcagagctaaataataaccttggccttggccttgctattgacctgggaaaaaaaaaaaaaaaaaaaa

SEQ ID NO: 116615 - DNA, 1000 bp, Homo Sapiens
ttgtcacttatgaactacattctcggcctgagcaggacaagttctctcaagctgccaaagtcgcagaacttgaaaagcgcctgacagagctggagacagctgtacgttgtgatcaggatgctcagaatcccctttctgcaggtctacagggagcctgtctcatggagactgtagagctgttgcaagcaaaggtgagcgccctagaccttgcagttttggatcaagtggaggctcggctacagagtgtcctgggaaaggtgaacgagattgccaagcataaagcctctgtagaagatgcagatacacaaagcaaggtgcaccagctatatgaaactatacagcgctggagccccattgcctccaccctccctgagctggtgcagagacttgtcaccatcaagcagctgcacgagcaagccatgcagtttggtcagctcctgacacacttggataccacccagcagatgattgctaattccttgaaggacaataccaccctcttgacccaggtgcagacaaccatgcgtgaaaacctggccacagttgaggggaactttgccagcattgatgaacggatgaagaagctgggaaagtgagcacatttgggagctggagaacaggggttatccctacccctgtgaactctgttaacagcttacatagggtttcccctttactataactctagcatccccatcccatttgacactgggggcaagggttcttcttgcatgtggggtttatacccctcccctgatgaatacagagtggtagctaggggttggttatcatcagaaggtggtctcccctcaggcctgggggataaggacgtgggcccagccacatgccaactcatgtccaatactgctttgcctggtgtggggaaggattgggtcttgtcccccaacacagcttctgtggctgactgtaatactgtacaactgtttctgaccattaaatgctgttgtactctgaaaaaaaaaaaaaaaaaaaaaaaaaa

SEQ ID NO: 116616 - DNA, 1000 bp, Homo Sapiens
caccaaaataggggaatggtttgatccgccagttgcaagtagaggcctttctgactcttaatattcactttggtgctactacccccattacctgagggaaactggccaggtccttgatcatggaactatagagctaccaggacatatcctgctctctaagggaatttattgctatcttgcaccttctttaaaactcacatatgcagacctgacactcaagagtggctagctacacagagtccatctaatttttgcaacttcctgtggccagtgtgtataaccccttccactatctcacagatagtcacagcgtccattccatagtctgtctcctcacatctgttagtattgacacagcacagacaccacaagccatcaggttcttcatggggcaggtgaaatacttctaccccatgggtaaatgtattcacatattaccaagagaagaagcacattatctatgatcttttggcccagttcttatttagcatttttattccagcctacttggaaacatgtttttatttgcaatatatgcctgactgaattaagcttgcttgttttaaacaaccaaatcattggaacagaaaaggatttaaaaaacaagaatgcatgatctcagagtgattaaaaaaaaatcagtggaaataaatgatcatagaaggtgcttttcaaaacaactgctattataattctcaaagtcctactctgccaaaagaagattaaaagtcatacattacattacaaggaaatgttcatgtgggaagagggttgctgaaaatcaacaacgcttgaagttaaaaagtgtgtctttgtagatttcattgtataatgtgtatttcttaggagatggctgacttgattgatctacgctaagtggagacatttcacatttttaaaaccaaatgttcaatctgtattactctttgccgtcttgtatgtagaggctatttttaaatcattaaatttttagatctctgttttcaaaaaaaaaaaaaaa

SEQ ID NO: 116617 - DNA, 1000 bp, Homo Sapiens
cttcagtaatgctgtttggattacagataacactcacctttgccctgggtactcttcttgtatgtgtttccatatatctctatggattacccagacaagacactacatccatccaacaaggagaaacagcttcaaaggagagagttattggtgtgtgattttagcctcacgtgagactccttttaagactaaaccatttgcattaaactagagccttaagtcaatctcagaaggtagcataaacaaataaaaattaactgtatggcatgatcagtgcggttatgtggaaacaacaacaaacaaacgaagctatctgagtgaactgctaatacagaaacttaatgtagacctgtttggggtctactattgttttagaatgaaggaattgtattattgtgtgtatatataatttgtaaataaaaagtatggagatgatacggtgttaaaaaaaatcatggtgaggctacaatactcaagtaacaaggtttgggacaatgtctaagggttaaagtgccaaagccatttctgtactaactgttctcttgttccggtaccggggagaaggatgacccctccttattctccaattcatgtacagtattttgtcctagcagcataaagacctagctcttttcttacaagaggcagaaacaagacaggctagttcataaacaaactgaatgtgtaactaacttctcaaaatgaatctatttcataactcggacaatttctgggtggtgactgagtacccctttagtgagtacccctttagtgctatatttgtgccattcattatctggttcatatttctttgctgttagatgatacacatttcttcaaaaaaatttctaatgtcacttttgtacttttttaaataaagtatgtttaactgttgggctctcaataatttgtgaaatttcagtgttttctataatgttaatggggaaattcagcaataaactttatttgcaaaaaaaaaaaaaaaaaaaaaaaaaaaaaa

SEQ ID NO: 116618 - DNA, 770 bp, Homo Sapiens
cggagcagctctacccctcacgacgcagacatggcagcgcagaaggaccagcagaaagatgccgaggcggaagggctgagcggcacgaccctgctgccgaagctgattccctccggtgcaggccgggagtggctggagcggcgccgcgcgaccatccggccctggagcaccttcgtggaccagcagcgcttctcacggccccgcaacctgggagagctgtgccagcgcctcgtacgcaacgtggagtactaccagagcaactatgtgttcgtgttcctgggcctcatcctgtactgtgtggtgacgtcccctatgttgctggtggctctggctgtctttttcggcgcctgttacattctctatctgcgcaccttggagtccaagcttgtgctctttggccgagaggtgagcccagagcatcagtatgctctggctggaggcatctccttccccttcttctggctggctggtgcgggctcggccgtcttctgggtgctgggagccaccctggtggtcatcggctcccacgctgccttccaccagattgaggctgtggacggggaggagctgcagatggaacccgtgtgaggtgtcttctgggacctgccggcctcccgggccagctgccccacccctgcccatgcctgtcctgcacggctctgctgctcgggcccacagcgccgtcccatcacaagcccggggagggatcccgcctttgaaaataaagctgttatgggtgtcattcaggaaaaaaaaaaaaaaaaaaaaaa

SEQ ID NO: 116619 - DNA, 1000 bp, Homo Sapiens
tttcccctttccctttgcatggttgactggctacctggccatcctcgtcggggcaggcatgaccttcatcgtacagagcagctctgtgttcacgtcggccttgacccccctgattggaatcggcgtgataaccattgagagggcttatccactcacgctgggctccaacatcggcaccaccaccaccgccatcctggccgccttagccagccctggcaatgcattgaggagttcactccagatcgccctgtgccactttttcttcaacatctccggcatcttgctgtggtacccgatcccgttcactcgcctgcccatccgcatggccaaggggctgggcaacatctctgccaagtatcgctggttcgccgtcttctacctgatcatcttcttcttcctgatcccgctgacggtgtttggcctctcgctggccggctggcgggtgctggttggtgtcggggttcccgtcgtcttcatcatcatcctggtactgtgcctccgactcctgcagtctcgctgcccacgcgtcctgccgaagaaactccagaactggaacttcctgccgctgtggatgcgctcgctgaagccctgggatgccgtcgtctccaagttcaccggctgcttccagatgcgctgctgctactgctgccgcgtgtgctgccgcgcgtgctgcttgctgtgtggctgccccaagtgctgccgctgcagcaagtgctgcgaggacttggaggaggcgcaggaggggcaggatgtccctgtcaaggctcctgagacctttgataacataaccattagcagagaggctcagggtgaggtccctgcctcggactcaaagaccgaatgcacggccttgtaggggacgccccagattgtcagggatggggggatggtccttgagttttgcatgctctcctccctcccacttctgcaccctttcaccacctcgaggagatttgctccccattagcgaatgaaattgatgcagtcctaaaaaaaaaaa

SEQ ID NO: 116620 - DNA, 1000 bp, Homo Sapiens
gcccgcgcgtcctgcccaggcaagatctccgtgcctcctgtgcgcaacctacatcagtcggggttcagcctatctgggtctcaggctgatgaccacatcgcccgacgcacagcacagaagatcatggcaccacctggcggccgctccaacatcacctctctctcctagacgcccaggaccggccctgtgagccgtgctggccccacccgaggccgcgggggccccagggcactcgcccccctccttagcattttcttttgtagaagtttctcgaaggtgcttggcggtcttgccttccccctccccacaggctctccttgtggggtcccaggtcctgctgccaagagcccctcaagagaagggctgaacctggggagatgtcactgccagggtgaggtggagccacatggcagggacaatgccggcagcctgagcccaggcaccccagtgcccgctgggcccagcctggggacagggaacctgccgggctcacagtgtgggagcagctggacaccaggcttcttggtgaaccggcgaggggccgagtcccgcctggtgggcatttgctgccgcctccccaccaccagtcactgcctcgcagagccctacactcccgcagccgctcctcagaggcctgtgcccatcgcaggcctgggaggaaagtgggcgcagagccctcctgctcacacagctgctgagacttcagggacccatcagaacttggtgcagcacagccccgcccgtggagggtcccttttacgcaccccaaggcccacacctaagcttccatgtagccctcatccagggaagttttgcgatcctttaggaagacactgtcctcttattacagattgtgtatttccgtaggcttcttagtagcagctttgtacactgaggacactgtagccaggaacctgtgcatgccacccaccgcctggacaggcagtcatcctgcctctgatgtgaatcaggcccattaaagacgtctgggtttgaagcc

SEQ ID NO: 116621 - DNA, 1000 bp, Homo Sapiens
cactacctgcgctccctggaggaggagcggacgcccactcccgtgcactataggcctcatggggccaagttcaagatcaaccccaagaacgggcagcgggagcgtgtggaggacgtgcccattcccatctactttccccccgaatcccagcgggggttgtggggcggcgagggctggatcctgggccaaatatatgccaacaacgacaagctctccaagaggctgaagaaagtgtggaagccacagctgtttgagcgagagttctacagtgagatcctggacaagaagttcacagtgactgtgaccatgcggaccctggacctcatcgatgaggcttatgggctcgacttttacatcctcaagaccccgaaggaggacctgtgctccaagtttgggatggacctgaagcgagggatgctgctgcggcttgcccggcaggacccccagctgcaccccgaggaccccgagcggcgggcagccatctacgacaagtacaaggaatttgccatcccagaggaggaggcagagtgggtgggcctcacgctggaggaggccattgagaagcagagacttttggaggagaaggaccctgtacccctgttcaagatctatgtggcggagctgatccagcagctgcagcagcaggcactgtcagagccggcggtggtgcagaagagagccagtggccagtgaccacacagctcctccatgcctgaccaacaggcccagctttccctgccaggccctttgcactgaggacacagatcccggggagctgtgagggccaccggtgggcagtgggtggatcctggtttcgtgtgctgcccatgcaccttccagcccggggccagcttggcagggatccccaggaggcctgggccgcccagaggctcctctcaggctgggccccgacgtttgcggcagtgttccttgtgcccgtggggccgggagcgagtaaagtctgggccaggcaaaaaaaaaaaaaaaaaaaaaaaaaaaa

SEQ ID NO: 116622 - DNA, 1000 bp, Homo Sapiens
catccctctgcttactctccttttcattttcaaccttccgcagcctctttgactgccaaccttaggctgccaatggcctctgctttacctgaggctctttgcagtcagtcccggactaccccagtagatctctgtcttctagaagaatcagtaggcagtctcgaaggaagtcgatgtcctgtctttgcttttcaaagttctgacacagaaagtgatgagctatcagaagtacttcaagacagctgctttttacaaataaaatgtgatacaaaagatgacagtatcccgtgctttctggaagtaaaagaagaggatgaaatagtgtgcacacaacactggcaggatgctgtgccttggacagaactcctcagtctacagacagaggatggcttctggaaacttacaccagaactgggacttatattaaatcttaatacaaatggtttgcacagctttcttaaacaaaaaggcattcaatctctaggtgtaaaaggaagagaatgtctcctggacctaattgccacaatgctggtactacagtttattcgcaccaggttggaaaaagagggaatagtgttcaaatcactgatgaaaatggatgacccttctatttccaggaatattccctgggcttttgaggcaataaagcaagcaagtgaatgggtaagaagaactgaaggacagtacccatctatctgcccacggcttgaactggggaacgactgggactctgccaccaagcagttgctgggactccagcccataagcactgtgtcccctcttcatagagtcctccattacagtcaaggctaagtcaaatgaaactgaattttaaactttttgcatgcttctatgtagaaaataatcaaatgataatagatacttataatgaaacttcattaaggtttcattcagtgtagcaattactgtctttaaaaattaagtggaagaagaattactttaatcaactaacaagcaataataaaatgaaacttaaaat

SEQ ID NO: 116623 - DNA, 1000 bp, Homo Sapiens
aactatgagacccagactttctcatccaagactgagtggagggtcagggccatctctgctgccaacctgcacctaaggaccaatcacatctatgtttcatctgacgacatcaaggagactggctacacctacatccttcccaagaatgtgcttaagaagttcatctgcatatctgaccttcgggcccaaattgcaggatacctatatggggtgagcccaccagataacccccaggtgaaggagatccgctgcattgtgatggtgccgcagtggggcactcaccagaccgtgcacctgcctggccagctgccccagcatgagtacctcaaggagatggaacccttaggttggatccacactcagcccaatgagtccccgcagttatcaccccaggatgtcaccacccatgccaagatcatggctgacaacccatcttgggatggcgagaagaccattatcatcacatgcagcttcacgccaggctcctgtacactgacggcctacaagctgacccccagtggctacgaatggggccgccagaacacagacaagggcaacaaccccaagggctacctgccttcacactatgagagggtgcagatgctgctgtcggaccgtttccttggcttcttcatggtccctgcccagtcctcgtggaactacaacttcatgggtgttcggcatgaccccaacatgaaatatgagctacagctggcgaaccccaaagagttctaccacgaggtgcacaggccctctcacttcctcaactttgctctcctgcaggagggggaggtttactctgcggatcgggaggacctgtatgcctgaccgtttccctgcctcctgcttcagcctcccgaggccgaagcctcagcccctccagacaggccgctgacattcagcagtttggcctctttccctctgtctgtgcttgtgttgttgacctcctgatggcttgtcatcctgaataaaatataataataaattttgtataaatagg

SEQ ID NO: 116624 - DNA, 1000 bp, Homo Sapiens
atgcaactttaattttgtttaacactatctgccaaaataaactttattccctataacttaaaatgtgtatatatatataatagtttattatgtacagttaattctactgttttggctgcaataaaatcgattttgaaataaatgaaatgttgaaaattttgctagttggttagatgcttatcctttaaattctacttttcttgaggggaaaaagtcttcttctggaaatacatattactgcaaaaatgtagcatccttttttaggtaggagtattatagctttcattttagtttgacatttagtgtcccaatgaattgaatttcaaatatgaatcataatcttgaaaatctttagcactaaagtcttggaatatatcaacaactgatttacatatgcagatgctatttgataccaagggctttttaaatgtcatgggggggaaaaacccaacttggtgaactcccagctaaacaaccaagacttcactgaagatttattccaattctagaattgttcttttttatttttattttttcaactgactaacttcattaccttaaaggctagaacattattctgctttatttatatggctttctcacttttattttgtagcatgggttgcatcgacttttttactagagaattttactagatatttgtcattcaagttttcatctgctttataattgatacaccttgagggtcacttttctaatacttttactataatgtggtaccacctcagccctaataaataatatttttacctaatgtcaaatctttttccagctaactaaaaactgtgtacaaaaggattgcttgtaaatatgcatgtaaatagttctgttaataacccactgttttacatttggtacatctgtgtctgctaatacagttagctttctcacttttctgcttgtttgttcagtctgaattaaaattagactttgaaaataaagcttaaatagttgtttcctctaaaaaaaaaaaaaaaaa

SEQ ID NO: 116625 - DNA, 1000 bp, Homo Sapiens
tgccctcaattcttgaagcaccagctccctgccccaccctccagtgcctgaggcagctaggggcttctgctctcatctctgaccagcagaatccacccggtgaccagtggtggcccctcagcccaccctcccggcagctcagcctgtggctcttgaggccgtggttcccacgtggactgggaggcagtctcagccacccggggtgctgttcagctgcccctccctgccatcagcaggtgggtgaggggttgcccactgggtgggggcccgtgctaggagtcaccacatgctccaacctcccactgctccctgtcaggggcccaggctgccatcactggaggctgcagggaccaagaggccatcaccgtgtctatagagagcagacagaagcagaacagagcccggggctcctgagcctctgcgtgtgccctcccagcccacaccagtgctctcggccactgagcacccagactcaggcttgggttccccagccttattggaaggcagctcccgcataccaggataacccccgcaaaccacatagcagacccccgccatcctcgcagagtgggagaggctgcagcaaggctttgcctctgcagaccccatcttagtggcacggtgcttgggcctgtgtccccgggtggtggaaccctgtaccggtctgtggccctagggtccctgctctgtctgccccggcccgtgctgtccgctgggtgaggcaggctcccccgtgccctgcctccctctgtcagggaacctgggaccccctccccactgcctgcacagaggaccctgaccctcggccagcagggtggccccaggtccatgttgggcactagggcaggttccgtgccagagtcgggggccacacgagggcctggtgccggtgaggggggcgtgcgctagagggggaaaggggcccccggccacctgtccaccgtgtgggccgtgctgtgtccttatgtcattgtaatataaatacagatttttatatctc

SEQ ID NO: 116626 - DNA, 1000 bp, Homo Sapiens
aaagttgattaacacacattttggagacctatatatgcctagtaccggggctctcatgctgctgacagctttgcatacctgtgaccaggtcagtgcctatggattcatcacaagcaactactggaaattttccgaccactatttcgaacgaaaaatgaagccattgatattttatgcaaaccacgatctgtccctggaagctgccctgtggagggacctgcacaaggccggcatccttcagctgtaccagcgctgaccccaatgcactgagcgctttgcttcttcaagagttgcggccctgatcctctcaagtggccaaaagcttttttaacttttcaatcttcaccttcccttgccaacagagggcactggggtgaattcaagattttcatcgaggtctgttcaatataggacaccccagcttgtccttggctcatccaagaactcttctgtatctaaaacaatacatctcaatcttggccaagggaaaatggactgctttgctggattggcactgagcaactttaggaaatgtcggtggagtgttcagcaagatcagacagcagtccaggtcaaaggcaaacacacacgctccagcccaaatcctcctggtggcacatcctaccccagatgctaaagtgattcaaggactccaggacacctcttaagagcctttctaagaacatgataggcttacttctgctccataataaagtgggagaaaaaagccagaatataacttaagactagataactgcgtacatgatggaccattttttttttttttggctgggtagagaaatcatataaaacgcaggctgtttagcatggagatgactctcagaacactgggagggtctggcacttgatgggggttagttgcttggcagcctgcctgccactgagggaagtcccattagagatgtatcaccaccttgtcaccaacaggatgatgtcaccaacaggatgatgtcaccaggtaataaaccttcatcctcac

SEQ ID NO: 116627 - DNA, 1000 bp, Homo Sapiens
gtgcaaacttcagagttcttgccttggctgcagtttttttccttcaagaatgcagtactaacatttatttgagtggagttactgaacagtaacatagctgtgatttttggtatttgaaacactggttttaaatattttgacttgttgagggtatgttttatatagcaagacattatatagcagtaaaaaatggtgttttatcttctatataattcctgtttttattattaacaaaacagtcctaaatagcagccctcaattgtgaaaaaatttactttaaactacattaggttgtgaatgcaggttttatcagaactatgtttttgttcagtttatctgttcatatggataaatattggttgggatgacttggtgtctaatgtgtagtgctacacacctaacttatggggccaaaatagcatgtcctaatgcttgctgctgatttaaacacattaaaggtactttgcaggaaatccttgcaccatgggattaatatccaattgctgcttgtacactcattcattactaaaagttttgagaaatttttttttccagtaatgagcttaagaaatttgtggaaaataactcacctggcatcttacatctgaaataaggaatgatataaggtttttttttctcacagaagatgaagcacacaggaacctaatgggccaactgggatgaggtgactattctgagatgactattcagtggctaacttgggttaggaagaaaataattaggtattttctccaaatgttcactggtactctgccactttatttctctcatctgttacacaaagaaccaccaggaaagcaaatcagtttggttggtaactctgtaattcctaactatcactggtttggttctggactaaaactacattgacagattgaatttgcctaatatgatgactgtttttaatatggatctgtatgtgttctattcagcacaaggaaataaaattttagttgaggattcagcactaaaaaaaaaa

SEQ ID NO: 116628 - DNA, 1000 bp, Homo Sapiens
cgggtcaggtaaaaatggcctcctggcgtaagcttttcaaggttttttggaggctttttgtaaattgtgataggaactttggaccttgaacttacgtatcatgtggagaagagccaatttaacaaactaggaagatgaaaagggaaattgtggccaaaactttgggaaaaggaggttcttaaaatcagtgtttcccctttgtgcacttgtagaaaaaaaagaaaaaccttctagagctgatttgatggacaatggagagagctttccctgtgattataaaaaaggaagctagctgctctacggtcatctttgcttagagtatactttaacctggcttttaaagcagtagtaactgccccaccaaaggtcttaaaagccatttttggagcctattgcactgtgttctcctactgcaaatattttcatatgggaggatggttttctcttcatgtaagtccttggaattgattctaaggtgatgttcttagcactttaattcctgtcaaattttttgttctccccttctgccatcttaaatgtaagctgaaactggtctactgtgtctctagggttaagccaaaagacaaaaaaaattttactacttttgagattgccccaatgtacagaattatataattctaacgcttaaatcatgtgaaagggttgctgctgtcagccttgcccactgtgacttcaaacccaaggaggaactcttgatcaagatgcccaaccctgtgatcagaacctccaaatactgccatgagaaactagagggcaggtgttcataaaagccctttgaacccccttcctgccctgtgttaggagatagggatattggcccctcactgcagctgccagcacttggtcagtcactctcagccatagcactttgttcactgtcctgtgtcagagcactgagctccacccttttctgagagttattacagccagaaagtgtgggctgaagatggttggtttcatgtgggggtattatgtaccc

SEQ ID NO: 116629 - DNA, 1000 bp, Homo Sapiens
tgccactatggagccgtggtggggctgcatgctcttggctggaaggcagtagaacgagtcctgtacccacacctgtccacctactggacaaacttgcaggctgtgctggatgattattcagtatctaatgcccaggtcaaagcagatggacacaaagtctatggagccattctggtggcggtagagcgactgctgaagatgaaggcccaggcagcagagcccaacaggggtggcccaggtggcagggggtgccggcgcctggacgacctgccatgggacagccttctctttcaagagtcgtcctccgggggcggtgcagaacccagctttgggtccggcctcccgctgccgccagggggcgcggggccggaggacccttctctttcggtgaccctggccgacatctaccgggagctctacgccttcttcggtgacagcttggccacacgctttggcaccggccagcctgcacccacggctccgcggccgcccggggacaagaaggagccggcggcagccccggactcggtgcggaagatgccgcagctgacggcaagcgccatagtcagcccgcacggcgacgagagcccccggggcagcggcggaggcggccccgcgtcggcctctgggcccgccgcctctgagagcaggcccttgccgcgcgtgcatcgggcgcgcggggcaccccggcagcagggccccgggaccggcacccgcgacgttttccagaagagccgtttcgccccgcgcggcgccccgcactttcgtttcatcatagccgggcggcaggctgggaggcgctgccgcgggcgccttttccagactgccttccccgcgccgtacgggcctagcccggcctcgcgctacgtgcagaaactgcccatgatcggccgtaccagccgccccgcccgccggtgggcgctctcggactactcgctgtacttgccgctctgagtcagtggccccttcgttccttgtaaataaatcccgcccccggaaa

SEQ ID NO: 116630 - DNA, 1000 bp, Homo Sapiens
gtattgtaatataaaggaatccattaccatgtcctataaatgacctctagccattttatgattatgttctctgtaaaactcttcaagacttcaatgagaagtttgtttataagaattatcttctcatacctttccttgtgaagagcgtattctgtttttctatcagttcgacatgaagtccacatcacatgctgttcttttctagttacatgatgtgcctttctagctttgtctagtttatagcaccttaactttaactgttcagttttatctggcagaggaaacattcttatttctttcagaagacatttctgaaatcttataagctacttaagctacgttgtcagttttatcgcaaagatgttttgtattttagccaaatctttttatagtacaaacttagaattattttacacactaaaatggttgcagttttatggcatatgtctccgatttagatggttgttctctagaaaatagtatttaaagacattttatgaaatcttcattgtcaaaacctttaataaaagtggaaatattttgaaatgccctttttcttgataccactcatccacgtgttcctgattgtccacatttcatgataaaatgagagctctgcagagaatgttagcctttctgttgtaaatgtaatcttcaagtagtcactttttgttaagttctttagaaagtagttgtcaagtacttagtcatccctattatgatatgagatagtacagcttttcaggaagcttagatctgaatttactttgaaaaacaattgtaatgaatattttatatttacattgagaatttcaactagcttctgatcaatttttaataaaaaattttcaaatcatgttagctgttaaaaaatgtataataactcagtttttcttggtttatggaaatatctatattaatgtgaaaataattaatttagaattgtgattaaagtgagcatttgtctatcaaaaaaaaaaaaaaaaaaaaaaaaaaaaaa

SEQ ID NO: 116631 - DNA, 1000 bp, Homo Sapiens
gaggtggtgctgcaccggccaggcgagaaacagcctctggatctggggaagctagtgagctcggtggcggcccagagactggttttggacactcttccaggtgtgaagatctccaaagcccgtgacaaatctccctgccgcagccagggctgcccacctagaactcaggataaggccacccatccccctccagcgtcccccagttctctggtgaaggtgcccagtagtgccactggaaagcggcagacctgtgacatcgaaggcctggtggagctgctgaaccgggtgcagagcagcggggcccacgaccagaggggccttctgaggaaagaggacctggtacttccagaatttctgcagctgcccgcccaagggcccagctccgaggagaccccaccacagaccaaatcagcagcccagcccatcgggggatccttgaactccaccaccgactcagccctctgacagctacccaacagtccaggacagctgcatggcacccggcgggccgagcatgccatgggtccgctctgcatgccctgtctgtgccatgagtgtccctggccccttcctgccatgggcaggcccgcaggaagagccggtaggggtggaaaggggactcagatgagacacaccccacagctgccaccgccttgtccctcaacaagctcacccccaatcccttgcagccaggccacaatgggggaggtgagtccagccccttggaacaggcttgcccaacatggagggatggcgttggcagtgccagcctccccagcctgtgccaagcttcaacaggggcaagaggaggggccggcccctcctcaggaagctggtatgagtaaggccttgagggtgcaggcaggcagccctgtaccccacccacatagactatactgtacatacagattttgcagtaggcttggggcagctgggtttgtccttgatgtatgatactgttattataataattattattattctgccaaaaaaaaaaaaa

SEQ ID NO: 116632 - DNA, 1000 bp, Homo Sapiens
atcacatcattagcatgaaccacccagagtggcccaagactcccagatcagctaccaggcaggatattccaagggcttagagatgaatgcccaggagctgaggataaagggcccgatctttctttgggcaaggttaagcctttactgcatagcagaccacacagaagggtgtgggccaccagagaattttggtaaaaatttggcctctggccttgagcttctaaatctctgtatccgtcagatctctgtggttacaagaaacagccactgaccctggtcaccagaggctgcaattcaggccgcaagcagctgcctagggggtgtccaaggagcagagaaaactactagatgtgaacttgaagaaggttgtcagctgcagccactttctgccagcatctgcagccactttctgccagcatctgcagccagcaagctgggactggcaggaaataacccacaaaagaagcaaatgcaatttccaacacaagggggaagggatgcagggggaggcagcgctgcagttgctcaggacacgctcctataggaccaagatggatgcgacccaagacccaggaggcccagctgctcagtgcaactgacaagttaaaaaggtctatgatcttgagggcagacagcagaattcctcttataaagaaaactgtttgggaaaatacgttgagggagagaagaccttgggccaagatgctaaatgggaatgcaaagcttgagctgctctgcaagagaaaataagcaggacagaggatttgctctggacagagatggaagagccgggaacagagaagtgtggggaagagataggaaccagcaggatggcaggggcaaagggctcaagggtgaggaggccagtgggaccccacagagttggggagataaaggaacattggttgctttggtggcacgtaagctccttgtctgtctccagcacccagaatctcattaaagcttatttattgtacctccaaaaaaaaaaaaaaaaaaa

SEQ ID NO: 116633 - DNA, 1000 bp, Homo Sapiens
taatggaggtcccagccctgggggtttaagctctgccccttccccatgaaccctgccctgctctgcccaggcaaggaacagaagtgaggatgagacccagccccttcccctgggaactctcctggccttctaggaatggaggagccaggccccaccccttccctataggaacagcccagcacaggtatttcaggtgtgaaagaatcagtaggaccaggccaccgctagtgcttgtggagatcacagccccacccttgtccctcagcaacatcccatctaagcattccacactgcagggaggagtggtacttaagctcccctgccttaacctgggaccaacctgacctaacctaggagggctctgagccaaccttgctcttggggaaggggacagattatgaaatttcatggatgaattttccagacctatatctggagtgagaggcccccacccttgggcagagtcctgccttcttccttgaggggcagtttgggaaggtgatgggtattagtgggggactgagttcaggttaccagaaccagtacctcagtattctttttcaacatgtagggcaagaggatgaaggaaggggctatcctgggacctccccagcccaggaaaaactggaagccttcccccagcaaggcagaagcttggaggagggttgtaaaagcatattgtaccccctcatttgtttatctgatttttttattgctccgcatactgagaatctaggccaccccaacctctgttccccacccagttcttcatttggaggaatcaccccatttcagagttatcaagagacactcccccctccattcccacccctcatacctacacccaaggttgtcagctttggattgctggggccaggccccatggagggtatactgaggggtctataggtttgtgattaaaataataaaagctaggcgtgtttgatgcgcttttaactttgaaaaaaaaaaaaaaaaaaaaaaaaaaaaaaaaaaaaaa

SEQ ID NO: 116634 - DNA, 1000 bp, Homo Sapiens
ttgggttttagagaagatggccaccagctggcttcctagatattttaaacttttgttctttaatatgctgtccatggctgagtttattagtacatgggcttagtgaccacaaaatattttattaagaaactgtttcaaaaataaatttgcactgttcatttttctggcctcgctgttctccatagagcaagggtaatcctagaaaaaattttttttttttaaattatgcaacgtaagatgtcctccttgatagaagtcttagctcctgtgttacaagggagaactcatttgagatcagtctgttggcattgcaatgaagtgctttgtatcaggaaagtgtacactattgaccttttttcctgttcacaagctgagccatatgtacataatctagattttgttttcatagttttgcacttttatagcctatttttgaagattaacacatttgcaagatgattgactcaatctttgcctaatccaatgagtgttacagagagcttgctgtgactagaaccataaatcttaaagggggtatgtgataatagagggctggaatttaaacctgtatttaaaaaaaagaatcaccaaatctatttgaaaacaagtcgatttgtattatgctggaattttttgggctttcagatttctctttttaaccacatttctgaatgtataaaaataccaattattttcctacagccctttgtacttcaaaatatgtttttgtgtccatcagtattaactattggtatactactggttttatatttttttttctttgagacaacagtacatataatagaggtacaattcgttggatttttgtttatgtatttatttcattccagtttgatttattttaattgttgatacttaagttgtcgaacagtagacattacttgttttatttatgatatatttcagcttaaagttatgttattatatgtggaagtgtaaatatagatttggtgttttgcaaaaaaaaaaaaaaaaaaaa

SEQ ID NO: 116635 - DNA, 1000 bp, Homo Sapiens
tacaccctgtagaccttgaatctgcagaaagcagctccgagccccagaccagctctcaggatgactttgatgtgtactctggcacacccaccaaggtgagacacatggacagtcaagtggaggatgagtttgatttggaagcttgtttaactgaacccttgagagacttctcagccatgagctaactgccccctggcggccaggaagagaaacagctcctccccgactaggtggaaggctggccaggcaccaagcatgtgtgtgcacttgtacctggtggtttctctgttagcagtccattagctcatgctgaattatttttgccttactttcttaagaaacattaattttatgtatagtgagtatattttgcatgttttaaattgtaaatggagctaagtccaagaaagtacttgaagctctcttccagcgagcttaattgcgtaatccctgttgtcctccagggtaagctgacacgtctacataactggttttccacaggcatcttcagttattgcttgtcaggtggactgttttggatttaaccatgtaatccatgggaccaattgagagtcagctacttttataggcatcaaagtattctcagacacctttaatatctttatggaaacttaatttttggccttttatcaatatgtcataacagcattctgaagtcagacattgttaaattgagctattaaactaatgagttttatgtaagttatatggtcttaatttggtacttgtaaatagcactagttagactctttagaatactccaagagttagggcagcagagtggagcgatttagaaagaacattttaaaacaatcagttaatttaccatgtaaaattgctgtaaatgataatgtgtacagattttctgttcaaatattcaattgtaaacttcttgttaagactgttacgtttctattgcttttgtatgggatattgcaaaaataaaaaggaaagaaccctcaaaaaaaaaaaaaaaaaa

SEQ ID NO: 116636 - DNA, 1000 bp, Homo Sapiens
accctgccgggccctacttctccgttactactacgacaggtacacgcagagctgccgccagttcctgtacgggggctgcgagggcaacgccaacaatttctacacctgggaggcttgcgacgatgcttgctggaggatagaaaaagttcccaaagtttgccggctgcaagtgagtgtggacgaccagtgtgaggggtccacagaaaagtatttctttaatctaagttccatgacatgtgaaaaattcttttccggtgggtgtcaccggaaccggattgagaacaggtttccagatgaagctacttgtatgggcttctgcgcaccaaagaaaattccatcattttgctacagtccaaaagatgagggactgtgctctgccaatgtgactcgctattattttaatccaagatacagaacctgtgatgctttcacctatactggctgtggagggaatgacaataactttgttagcagggaggattgcaaacgtgcatgtgcaaaagctttgaaaaagaaaaagaagatgccaaagcttcgctttgccagtagaatccggaaaattcggaagaagcaattttaaacattcttaatatgtcatcttgtttgtctttatggcttatttgcctttatggttgtatctgaagaataatatgacagcatgaggaaacaaatcattggtgatttattcaccagtttttattaatacaagtcactttttcaaaaatttggatttttttatatataactagctgctattcaaatgtgagtctaccatttttaatttatggttcaactgtttgtgagactgaattcttgcaatgcataagatataaaagcaaatatgactcactcatttcttggggtcgtattcctgatttcagaagaggatcataactgaaacaacataagacaatataatcatgtgcttttaacatatttgagaataaaaaggactagcaaataaaacacaaaaaaaaaaaaaaaaaaaaaaaaaaaaaaa

SEQ ID NO: 116637 - DNA, 1000 bp, Homo Sapiens
aaagtcaaattaacatcaaaactgtattaaaatgcattgagtttttgtacaatacagataagatttttacatggtagatcaacaaattctttttgggggtagattagaaaacccttacactttggctatgaacaaataataaaaattattctttaaagtaatgtctttaaaggcaaagggaagggtaaagtcggaccagtgtcaaggaaagtttgttttattgaggtggaaaaatagccccaagcagagaaaaggagggtaggtctgcattataactgtctgtgtgaagcaatcatttagttactttgattaatttttcttttctccttatctgtgcagaacaggttgcttgtttacaactgaagatcatgctatattttatatatgaagcccctaatgcaaagctctttacctcttgctattttgttatatatattacagatgaaatctcactgctaatgctcagagatcttttttcactgtaagaggtaacctttaacaatatgggtattacctttgtctcttcataccggttttatgacaaaggtctattgaatttatttgtttgtaagtttctactcccatcaaagcagctttctaagttattgccttggttattatggatgatagttatagcccttataatgccttaactaaggaagaaaagatgttattctgagtttgttttaatacatatatgaacatatagttttattcaattaaaccaaagaagaggtcagcagggagatactaacctttggaaatgattagctggctctgttttttggttaaataagagtctttaatcctttctccatcaagagttacttaccaagggcaggggaagggggatatagaggtcacaaggaaataaaaatcatctttcatctttaattttactccttcctcttatttttttaaaagattatcgaacaataaaatcatttgcctttttaattaaaaaaaaaaaaaaaaaaaaaaaaaaaaaaaaaaaaaaaaa

SEQ ID NO: 116638 - DNA, 1000 bp, Homo Sapiens
tgctatgcttacatttgaaaagatttcattggacagcatatttaagaaataaagttgatacatacgtagaatttccactgagaggcctagacatgaaatgctacttactagagcctgagaacagtggcccggagagctgcctgtatgacctcgccgctgtggtggtgcaccatggttccggggttggttctggacattacacagcatacgcaactcacgaaggccgctggttccacttcaatgacagtactgtaacactgactgacgaggagactgtggtgaaggcgaaggcctacatccttttctacgtggaacaccaggccaaagctggatcggataaactttaatacctcctccaaatcatcattcaccaaccataccagagaaacatttccagttttccacaaatacttgatacaagatttaatttcattatgcacttttcaatttcctattttggatttagttttgtcaatggtagtgacttactgaacatgggcaccaactaattttgttgttgttctaccagaaaacctcagcagatgttttgatttgctgctttagttgtaataattcaatttttataggtagttgtaagaacttagtcttatttgacttttttattttatgttaatgttttcagttctcactttgaggcacatttacatcaatgcttttgttcctctcacatgctgaaagcaagatgtgttccttattgtgaagagcgacacaactgcctgctgcctttccacagctataatggacatcaggttgactctaaatcaaggatcatgtgtgcacaatacttgtggcccacaaaatttcacaatgactgctgaggaatcattctttttgcctgtaaaatataacaaagggcatcattaagtagaccaggtaattactgcttgtctctcaaggctgctgtctttatcagcactaactaaataaatttgttggttcagttgtacttgtcctgcaaatacaaaaaaaaaaaaaaaaa

SEQ ID NO: 116639 - DNA, 1000 bp, Homo Sapiens
agctctaaagaccatgttggaaagagtctccagttactgaacagatgaaaaggagcctgtgagagggctgttaacattagcaaatattttttccttgttttttctttgttaaaaccaaactggttcacctgaatcatgaattgagaagaaataattttcatttctaaattaagtcccttttagtttgatcagacagcttgaatcagcatctcttcttccctgtcagcctgactcttcccttcccctctctcattccccatactccctattttcattccttttttaaaaaataatataagctacagaaaccaggtaagccctttatttccttaaatgttttgccagccacttaccaattgctaagtattgaatttcagaaaaaaaaaatgcatttactggcaaggagaagagcaaagttaaggcttgataccaatcgagctaaggatacctgctttggaagcatgtttattctgttccccagcaactctggcctccaaaatgggagaaaacgccagtgtgtttaaattgatagcagatatcacgacagatttaacctctgccatgtgttttttattttgttttttagcagtgctgactaagccgaagttttgtaaggtacataaaatccaatttatatgtaaacaagcaataatttaagttgagaacttatgtgttttaattgtataatttttgtgaggtatacatattgtggaattgactcaaaaatgaggtacttcagtattaaattagatatcttcatagcaatgtctcctaaaggtgttttgtaaaggatatcaatgccttgattagacctaatttgtagacttaagactttttattttctaaaccttgtgattctgcttataagtcatttatctaatctatatgatatgcagccgctgtaggaaccaattcttgatttttatatgtttatattctttcttaatgaaccttagaaagactacatgttactaagcaggccacttttatggttgttttt

SEQ ID NO: 116640 - DNA, 1000 bp, Homo Sapiens
tacatttccatggggccagcactgtcatgagcctcactaagctattttgaagatttttaagcactgataaattaaaaaaaaaaaattagactccaccttaagtagtaaagtataacaggatttctgtatactgtgcaatcagttctttgaaaaaaaagtcaaaagatagagaatacaagaaaagtttttgggatataatttgaatgactgtgaaaacatatgacctttgataacgaactcatttgctcactccttgacagcaaagcccagtacgtacaattgtgttgggtgtgggtggtctccaaggccacgctgctctctgaattgattttttgagttttgtttgtaagatgatcacagtcatgttacactgatctaaaggacatatatataaccctttaaaaaaaaaatcactgcctcattcttatttcaagatgaatttctatacagactagatgtttttctgaagatcaattagacattttgaaaatgatttaaagtgttttccttaatgttctctgaaaacaagtttcttttgtagttttaaccaaaaaagtgccctttttgtcactggattctcctagcattcatgatttttttttcatacaatgaattaaaattgctaaaatcatggactggctttctggttggatttcaggtaagatgtgtttaaggccagagcttttctcagtatttgatttttttccccaatatttgattttttaaaaatatacacataggtgctgcatttatatctgctggtttaaattctgtcatatttcacttctagccttttagtatggcaaatcatattttacttttacttaagcatttgtaatttggagtatctggtactagctaagaaataattctataattgagttttgtactcaccatatatggatcattcctcatgtataatgtgccccaaatgcagcttcattttccagataccttgacgcagaataaattttttcatcatttaggtgcaaaaaaaaaa

SEQ ID NO: 116641 - DNA, 1000 bp, Homo Sapiens
tgccagccggccccgaggattcccagcaccccacctatggtcttgccagcataggcttgctagttccttcttggtcagaggtagctgcagaggggggaggccaagggtttggtctaagctgtgccctgccacctggcaggaggcccactcactgcccaagtcatggcaacaggctggagcagcccaggagatgggcctaaaatgttctggatcccttgggtcctagtgttatgttccagtctgcccacctgtgctcaggatgcagccctgggatccagcacccatggaagcttctgctgggatggtgtcacctatgggttttgaaccagtgtggtatggtccttgggagctctgctctgagcttgccacactgctgagagcacccactgtcctgaccagagtctcagtggtcctgacccccaatgtgggcaggggctgggcaggagggtggggtctgctgtgggttcagaggactccacctcctggctggtttacctgctgctgcccattttctctgggtactgctggccagaggactttagcctacccctgaagagcctgtccatgtcattttcctactgccatagataccctaagcccagggccccttgaggcccagactcagcctgcccactggtgccggagacggagtggagtgggcctggatccgagggatgctacctctccctttcccacttgaggaccctggggagagatgggggcggggaaaatggaggtatgaatttggggtaagaggaagtgagatctccgcttgcaggtcagcccctgccttgcagggcgggctggcttgactcaggccctgtgagatagagggcccagcccagccccacccacagatcccctgctcctgttgtgttctgttgtaaatcatttggcgagactgtattttagtaactgctgcctaacttccctgtgttctatttgagaggcgcctgtctggataaagttgtcttgaaatttcaaaaaaaaaaaaaaaaaa

SEQ ID NO: 116642 - DNA, 1000 bp, Homo Sapiens
agggtgtgatttctttttattagggaggtgggagggggatgttgggaggcatggggggtgattaaattatcatttccaaggtgcaagtgtttatttttcaaatctataagtacatagttccaccattttggcacaagacaaaatactcatgctaagcaaaggaagagaaagacaaagccagtttttgttgcttttctaaagcaacaaataattctccaaagaaggggatgaaaatgctagttcctttaagcacttactgactgtaaagttggtccctgcttaaattcatacccatagttttgagtcggtatgacaccactgcagtgtgagcaaggtgaatccgtgtgccatgcatggaccaccttgggataccgcagcaccatcaacatccgccttgctgatggaagccacacacgctgcccagcccacagcagtcgcacgcagccgatgggctcggactcttagctggcaggctaggacacacagtgaacattaatgtactgtgaatcgttcctgataagtgaataaaacattgtgaccaaacaatcagcttattcacttatcaggaatcgactgttctgctaatttgctgttgttgtttttcatctctgttgtagttcactatttttgctgtgttctgttttctcctctcatgcttgggcaaatcactgggaatattatcttcatgtgaccatgaaacgtttctattgagtgaaaatgatatcttaacaaaatctatgcacttgctatcaggaacacaatactggatgtgtcttatatatattgaactatatagtactcgatttcttaaataaagcttaagaaaggactctgttgtgtgtaaagttaatgtgattatttttcaaagcagtgtttctaaggggtatttttgttcttttaagtcttgagtgatacaggatatttttcattaaaattatatcactggctttatgacttaatattcaataaattgactttggaaacaaaaaaaaaaaaaaaa

SEQ ID NO: 116643 - DNA, 1000 bp, Homo Sapiens
ggagaagttactcgctgtgcggggcggcgcacctgctggccgccgcggacaagcacgcgcagggcggcttgcccctggcgggccgcgcgctgctctcgcagacctcgccgctgtgcgcgctggaggagctcgccagcaagacgtttaaggggctggaggtcagcgttctgcaggcagccgaaggccgcgacggtatgaccatctttgggcagcggcagacccctaagaagcggcgaaagtcgcgcacggccttcaccaaccaccagatctatgaattggaaaagcgctttctataccagaagtacctgtcccccgccgatcgcgaccaaatcgcgcagcagctgggcctcaccaacgcgcaagtcatcacctggttccagaatcggcgcgctaagctcaagcgggacctggaggagatgaaggccgacgtagagtccgccaagaaactgggccccagcgggcagatggacatcgtggcgctggccgaactcgagcagaactcggaggccacagccggcggtggcggcggctgcggcagggccaagtcgaggcccggctctccggtcctccccccaggcgccccgaaggccccgggcgctggcgccctgcagctctcgcctgcctctccgctcacggaccagccggccagcagccaggactgctcggaggacgaggaagacgaagagatcgacgtggacgattgagcggcgccccgggtcttccgccgccctgggctcctagcgctcgaaagcccaacgcctcccggaccggaccgccgaggggagctgggacctcctctgccaactcccgcctcctcccctgtccccggccccggactcggctcctggcagccgcctcttccctctcgaagcaataaacccaggctggccggccgggccggccgccaccagcggcctccgccgccccggaagccctcgccgtgcaattctgtatggcttctatataaatatttaaacctatatagcgggttcttcccaaa

SEQ ID NO: 116644 - DNA, 1000 bp, Homo Sapiens
tggtggtgggtgatgtctacaggcgtgaccagatcgactcccagcactaccctattttccaccagctggaggccgtgcggctcttctccaagcatgagttatttgctggtataaaggatggagaaagcctgcagctctttgaacaaagttctcgctctgcgcataaacaagagacacacaccatggaggccgtgaagcttgtagagtttgatcttaagcaaacgcttaccaggctcatggcacatctttttggagatgagctggagataagatgggtagactgctacttcccttttacacatccttcctttgagatggagatcaactttcatggagaatggctggaagttcttggctgcggggtgatggaacaacaactggtcaattcagctggtgctcaagaccgaatcggctgggcttttggcctaggattagaaaggctagccatgatcctctacgacatccctgatatccgtctcttctggtgtgaggacgagcgcttcctgaagcagttctgtgtatccaacattaatcagaaggtgaagtttcagcctcttagcaaatatccggctgtgatcaatgatatttcattctggttgccctctgagaattacgcagaaaatgatttctatgacttagtccgaacaattggaggagacctggtggaaaaggttgatctcatagacaagtttgtacatccaaagacgcacaagaccagccactgctaccgcatcacgtaccgccacatggaacggactctgtcccagagagaggtcaggcacatccaccaggccttgcaggaggctgcagtccagctgttgggtgtggagggcaggttctgatgtcaccacttcactcaggctgcagccctcttggggctccaggatttgctgaaagagaaaaagatatggtttgtgaactggggcatcaatcatcttttgataaatggatcagttttaggactttcagaaaataaaagatcgctcttgaaaagctaaaa

SEQ ID NO: 116645 - DNA, 1000 bp, Homo Sapiens
tttggaataaaatgtgcctaatcctgtgttacattctgttcttaaatctgaatgccttctcatttaattctgaggaaatatcacacaagtgtcttcattgaccttgaagaaatgtatatacagttgccttataaaacaacataaatttagaccataacttttatagagaaagggttttgtcaaatgttttctgaaaatctgagtaattcaaagcatgcctctgcccctttaatatttttaataacctgcattgttgctgtctgccaaatattaaattgaaatcttcatttcaattttattatctggaaagggcactggattgctctgcaaccaaagaaagcaatatggaatgaaaaaactcattcacttttgtcttattttcttttaaggtgtattggcatgtaatttgcatagagaaggtcctctggttagtctctcaaattgaggctgtttagggaaatccttattcagttggtggcagtggttggtttaaagtagaaggaaataagatcgccttaataccagaaatgattagaagtgctgatttagattcaacaaataccatatgtccttatcattttttgtaagaagaaattggttaagtcctaactttcaatgtgtacccaaatacttgtatttatgcttttgataaaatgtattttcagcattaatacacatccgattatgccttatttatatatgaagaataaagttaccatgttatactgttatgtcctaaaattcaaatcactatttgagaaaccctcaaattggtgctttcattatataatgatacatttagacaaaaccccaaactaagccatttgaaacaagattctctccattgcagtttgtagcaatgttatttctgtgtatgtcatgagaaggctaaatatcagtgttaatttcttgtttgaatccgtgaaatcatgcctgtaaagcccaaacatttgtaacaaactccctaataaatttagagaaagtcaaaaaaaaaaaaaaa

SEQ ID NO: 116646 - DNA, 1000 bp, Homo Sapiens
ggatgagcgggcaatggctaaggagctggccagccttctctgtgatggcagcgagaacactgtggccgagggccaggagccagccgagttctgggacctactgggagggaaaactccctatgccaatgataaaagacttcagcaggaaatcctagatgtccagtctcgtctctttgaatgttccaataagaccggccaattcgttgtcactgagatcacagacttcacccaggatgacctgaaccctactgacgtgatgctcctagatacctgggaccaggtgttcttgtggattggggctgaggccaatgccacggagaaggagagtgcccttgccacagcacagcagtacctgcacactcaccccagcggccgagatcccgacacaccaatcctgatcattaagcaggggtttgagcctcccatcttcacaggctggttcctagcctgggaccctaacatttggagtgcaggaaaaacatatgaacaattaaaagaagagctgggagatgctgctgctatcatgcgaatcactgctgacatgaagaatgcaaccctctccctgaattctaatgacagtgagccaaaatattaccctatagcagttctgttgaaaaaccagaatcaggagctgcctgaggatgtaaaccctgccaaaaaggagaattacctctctgaacaggactttgtgtctgtgtttggcatcacaagagggcaatttgcagctctgcctggctggaaacagctccaaatgaagaaagaaaaggggcttttctaaagcaagaaggcctatacctattgcaaggccacagaaaagagcagatagtgccaatatcaggaaataatttatccaccaatttctgcctgacattcagctacttaatttagatataatagagtctgcaaatcacggcatgttctccattttttctcatccttgcattccttgcttgttatatacctaaaatgttaaccatatagtttttgggttttgtggccc

SEQ ID NO: 116647 - DNA, 1000 bp, Homo Sapiens
ttcctgcctatcacacgcagccatcagcccacaaagacatgactaccaacgcgggccccttgcacccatactggcctcagcacctaagactggacaactttgtacctaatgaccgccccacctggcatatactggctggcctcttctctgtcacaggggtcttagtcgtgaccacatggctgttgtcaggtcgtgctgcggttgtcccattggggacttggcggcgactgtccctgtgctggtttgcagtgtgtgggttcattcacctggtgatcgagggctggttcgttctctactacgaagacctgcttggagaccaagccttcttatctcaactctggaaagagtatgccaagggagacagccgatacatcctgggtgacaacttcacagtgtgcatggaaaccatcacagcttgcctgtggggaccactcagcctgtgggtggtgatcgcctttctccgccagcatcccctccgcttcattctacagcttgtggtctctgtgggccagatctatggggatgtgctctacttcctgacagagcaccgcgacggattccagcacggagagctgggccaccctctctacttctggttttactttgtcttcatgaatgccctgtggctggtgctgcctggagtccttgtgcttgatgctgtgaagcacctcactcatgcccagagcacgctggatgccaaggccacaaaagccaagagcaagaagaactgaggagtggtggaccaggctcgaacactggccgaggaggagctctctgcctgccagaagagtctagtcctgctcccacagtttggagggacaaagctaattgatctgtcacactcaggctcatgggcaggcacaagaaggggaataaaggggctgtgtgaaggcactgctgggagccattagaacacagatacaagagaagccaggaggtctatgatggtgacgatttttaaaatcaggaaataaaagatcttgactctaaaaaaaaaaaa

SEQ ID NO: 116648 - DNA, 1000 bp, Homo Sapiens
tgaattttagtaagggagaagaaaacctcatggatgcacaagtcaaagctattgctgatactggtgcaaatgtcgtagtaacaggtggcaaagtggcagacatggctcttcattatgcaaataaatataatatcatgttagtgaggctaaactcaaaatgggatctccgaagactttgtaaaactgttggtgctacagctcttcctagattgacacctcctgtccttgaagaaatgggacactgtgacagtgtttacctctcagaagttggagatactcaggtggtggtttttaagcatgaaaaggaagatggcgccatttctaccatagtacttcgaggctctacagacaatctgatggatgacatagaaagggcagtagacgatggtgttaatactttcaaagttcttacaagggataaacgtcttgtacccggaggtggagcaacagaaattgaattagccaaacagatcacatcatatggagagacatgtcctggacttgaacagtatgctattaagaagtttgctgaggcatttgaagctattccccgcgcactggcagaaaactctggagttaaggccaatgaagtaatctctaaactttatgcagtacatcaagaaggaaataaaaacgttggattagatattgaggctgaagtccctgctgtaaaggacatgctggaagctggtattctagatacttacctgggaaaatattgggctatcaaactcgctactaatgctgcagtcactgtacttagagtggatcagatcatcatggcaaaaccagctggtgggcccaagcctccaagtgggaagaaagactgggatgatgaccaaaatgattgaaattggcttaatttttactgtaggtgaaggctgtatttgtagtagtactcaagaatcacctgatgttttcttattctccttaaattaagagttattttgtgtttgtattcttggctggatgttataataaacatattgttactgtcaaa

SEQ ID NO: 116649 - DNA, 1000 bp, Homo Sapiens
tctacaaggacgagaaggagcagctcatcattccccaagtgccactcttcaacatcctggctaagttcaatggcatcactgagaaggaatataagacttacaaggagaactttctgaagcgcttccagcttaccaagttgcctccatatctaatcttttgtatcaagagattcactaagaacaacttctttgttgagaagaatccaactattgtcaatttccctattacaaatgtggatctgagagaatacttgtctgaagaagtacaagcagtacacaagaataccacctatgacctcattgccaacatcgtgcatgacggcaagccctccgagggctcctaccggatccacgtgcttcatcatgggacaggcaaatggtatgaattacaagacctccaggtgactgacatccttccccagatgatcacactgtcagaggcttacattcagatttggaagaggcgagataatgatgaaaccaaccagcagggggcttgaaggaggcgtctagggctttgctcccaagggctgtggctgatgatggtaaataagaacacagaagctgtagctgaacacaggctggctggtgggcttcctaggccagcccagcttgtatgggttctggctacaccagagcaccaagagcccacttgcctgggatggccccacactgtcactcagctgttctttgatcatttttttctagattgatgctcctttctcccatgcattgagctcccatctagcttcagcagggcagaacccttctccagatgtgtgtaacttatgtcttgagtatctgggagtagttgaagaacagataattccttccaaacatcaagccttgggattcttggagcaagcagaaagccagtaacttcgctctgttagaggtggaggattttcctatggttccccccatttcctgatttgtatttttagatggattaaatagtctcctgtttttaaaccaaaaaaaaaaaaaaaaaaaaaaaaaa

SEQ ID NO: 116650 - DNA, 1000 bp, Homo Sapiens
aaacagcacttttccaggaagttagtgaggaagataaggcacacatttatttataaatggatgttgctcctttgtatttttagcttccctatttgcttaaaagtacaggctccctaagagaggatggagagggagagactgaattgttagtaggtctaaacatcaaagaaaacatttttattagttacttatggaaaatcatctattacaatgataaccttcaagtgacttccattatggctggacaggcggtgagctcagtggattgcagtggtgtgctggtgattttgcacagtgagctctgcggaaggggtcaggctcaactgctgatgtgtctcacacgtagcagacaaggggtgtctgactggcttcttttgcctcaagatggtgtatgtcgtaagtgatgcaatcagctgtctgctttttaaggttgggattgtgctgactttgggattaacatgagcttctttagcaaccaagcatgaacttgattaagaccagaagtttgggagatgagtcctggcattatgtctaggactaaagcagtggctttgtatagcaagctgagtaaaggttgacatattccaaaacccttctttttaaaatgaaaaaggatggagagaaggatggaaagcctggacttaaacctttagaaaaaacttctggagagaaatcccttttaaacagttacttttgtcattgcctctggtcatttgtctaaataggaatggaaaattaaaagaaaagcaacaatccaatcttttttctaaaaattatgctggggtctcgactaaaactgaatttgaattggaaaattctggtgttggttggagttccatcttgcaagggataatacaaatcctatgatctctatgcccaatatgctgcctcaactctgagctgtctgcaaggcttagtaagtattgagtggtgttttttttttctttttatacaataccatgttaaccacatgagttaaataaatttgagaagttgtttt

SEQ ID NO: 116651 - DNA, 1000 bp, Homo Sapiens
tcggggatttacgagcaggccaagcggaggcggatctcgccggccgacacgcccgtgtccgagagttcgtccccgctcaagagcgaggtgctggcccagcgggactgcgagaagaactgcgccaaggacattagcggctactatggcttctactcgcacagctaggccgcccctgcccgcccggccccgccgcggcccggacccccagccagcccctcacagctcttccccagctccgcctccccacactcctccttgcgcacccactcattttatttgaccctcgatggccgtctgcagcgaataagtgcaggtctccgagcgtgattttaaccttttttgcacagcagtctctgcaattagctcaccgaccttcaactttgctgtaaaccttttggttttcctacttactcttcttctgtggagttatcctcctacaattcccctccccctcgtctttctcttacctcctacttctctttcttgtaatgaaactcttcacctttaggagacctgggcagtcctgtcaggcagcagcgattccgacccgccaagtctcggcctccacattaaccataggatgttgactctagaacctggacccacccagcgcgtcctttcttatccccgagtggatggatggatggatggatggtagggatgttaataattttagtggaacaaagcctgtgaaatgattgtacatagtgttaatttattgtaacgaatggctagtttttattctcgtcaaggcacaaaaccagttcatgcttaacctttttttcctttcctttctttgcttttctttctctcctctcatactttctcttctctctcttttaattttcttgtgagataatattctaagaggctctagaaacatgaaatactcagtagtgatgggtttcccacttctcctcaatccgttgcatgaaataattactatgtgccctaatgcacacaaatagctaaggagaatccacccaaacacctttaaagg

SEQ ID NO: 116652 - DNA, 1000 bp, Homo Sapiens
gttgtgtcctcagtgtactgaagctgtatgtcaggccctgcccggctgtgaagagaacattcaagatagtgaggggaagcaagcacttatttggctacttggtgtccatggggaaagaattcctaatgctccttatgtgttagaggactttgttgagaatgtgaagtcggaaacatttccagctgttaagatggagctgctcactgcttcgctgcgccttttcctctcccgacctgctgagtgccaggacatgctaggacgtttgttgtattactgcatagaggaagaaaaagatatggctgtacgggaccgaggtctcttctattatcgcctcctcttagttggcattgatgaagttaagcggattctgtgtagccctaaatctgaccctactcttggacttttggaggatccggcagaaagacctgtgaatagctgggcctcagacttcaacacactggtgccagtgtatggcaaagcccactgggcaactatctctaaatgccagggggcagagcgttgtgacccagagcttcctaaaacttcatcctttgccgcatcaggacccttgattcctgaagagaacaaggagagggtacaagaactccctgattctggagccctcatgctagtccccaatcgccagcttactgctgattattttgagaaaacttggcttagccttaaagttgctcatcagcaagtgttgccttggcggggagaattccatcctgacaccctccagatggctcttcaagtagtgaacatccagaccatcgcaatgagtagggctgggtctcggccatggaaagcatacctcagtgctcaggatgatactggctgtctgttcttaacagaactgctattggagcctggaaactcagaaatgcagatctctgtgaaacaaaatgaagcaagaacggagacgctgaatagttttatttctgtattagaaactgtgattggaacaattgaagaaataaaatcataacagagtctt

SEQ ID NO: 116653 - DNA, 1000 bp, Homo Sapiens
gcacacagttcagcctctgagctggctcacacgtgccatccccaccccggtgctccagggaaggaggacacggacccgacgtgggaggtcctcaggcagcagtggcgcctggtgtcaggtctgtctggctgagtcccgggcgtcccctgccatggcctgtgccttgcatggaggcggcggtggcactgaagagatagctttcaagggcccaacactttgcacttcggctggctgtgagtttctgctttgtaggttgtggtcacatttgcaggctgcgggcagtggcaccgacttgggcctccctttctatgtggcatatttatttatttaaacaccccagggagttacgtggtaacaaggttgtccataaagaggttgcttctatatactagaggccccagatggcaggccttgggctacgtctggcttgcatggtctcccaagggaatcaaccccatcaacaaagttcaaatcggggcagaggctgcacttgtgcccccagatgtttctgaggagccagattagggctggcattgctgtagagtgacggctgctgcccagagcgtgtcccagacatcacagcggggctcagcagttcccacagcctctgcctgccttggctaagcatgagttaagcagcaaaacgctcctccatgtctggatggggccggcaggtcctgtgtcccctgcacctggaggagagcaggctagaggcacagcggccacatggtgctggctctgaacgttggttggtggctggaaaacagccctgcttctgagggccgctcagttctgcacacgaaaccacctcctgagggctcagctctgcccccgccctgggctgcagcctctgcacgcaagcaccaggcatcctttgtgttgtcaactccgtgtaaccagtaactacagccatttacaattgactccgtttccttttgtaggtttccctgtctgtctgtgttagtagaaaaataaaatcctatgaaatctgaaaaaaaaa

SEQ ID NO: 116654 - DNA, 1000 bp, Homo Sapiens
agccaagtcagagacctcagggccccagatcaaggagctaactgatgaagaggcagagaggctgcagctagagattgaccagaaaaaggatgcagagaatcatgaggcccagctcaagaacggcagccttgactccccagggaagcaggatactgaggaagatgaggaggaagatgagaaggacaaaggaaaactgaagcccaacctaggcaacggggcagacctgcccaattaccgctggacccagaccctgtcggagctggacctggcggtccctttctgtgtgaacttccggctgaaagggaaggacatggtggtggacatccagcggcggcacctccgggtggggctcaaggggcagccagcgatcattgatggggagctctacaatgaagtgaaggtggaggagagctcgtggctcattgaggacggcaaggtggtgactgtgcatctggagaagatcaataagatggagtggtggagccgcttggtgtccagtgaccctgagatcaacaccaagaagattaaccctgagaattccaagctgtcagacctggacagtgagactcgcagcatggtggaaaagatgatgtatgaccagcgacagaagtccatggggctgccaacttcagacgaacagaagaaacaggagattctgaagaagttcatggatcaacatccggagatggatttttccaaggctaaattcaactagcccctgttttttcctccctgaactcttggggctgagctgcaaccacccaactttctttcccactcttctctgggacttgtgggcctcagggcttggggcaggcatgggactggcccaggcacacaggtcccggggcatcaggagaaaggctgggtcttgggaccttgtcctccccagttggcctactgttacacattaaaacgatttgcccagctaaaaaaaaaaaaaaaaaaaaaaaaaaaaaaaaaaaaaaaaaaaaaaaaaaaaaaaaaaaaaaaaaaaaaa

SEQ ID NO: 116655 - DNA, 1000 bp, Homo Sapiens
aattggtgctgattttataattgcgcagtttgtttagttttttcttacttttaaattccaacttaaaattatgaggtttcagaaatatattgaaagtttaacaatgtttaaaaatagaaaagcatgagtgttcatgctttaaaatgatttttaaatttgtattttatattgttttatctatctgtctttgcaagcagtcttcaggttaaagatacttctaacaggttacagtacatttcctctgtatgtaaattagatgggataatagaattcataacccataatattctttgaaagctaagctttaaacttcattttatgtcctttcacaaataaattagtttaaaacagaaagtggctacttgccattttgacatcaactcattttgcgaggcttaggcagctagacatcgtttaaaacaaaatattaacttatattacatgtgtatctatctattgtcagtcgtctctcagttcttgaggtatattattttaatcattccatgccttaatatgcttgcaatacaagaatatcttcagatgggtgaataccaaaaggctttcagtttttagtcagaaatcaagcattgggctgtggtagccaaaaaccataggttagctaaaaagatcatgatacaattattttattaagtcatggttaataacaaatgaatccagacttgtctaacagattttccatcaacaaatattgttatgtgcaaaagtattgcctatgttgttttacacaccactgcattaactagaactgctgagaggactgtatatatgattttaaacctaagttgattttttttctcactcttgaaaggagtacttctttgtgaaagcagttcttacagctttgttttcaaccagctaaaaatgttttatatattactctaacctgttgtcctccacattctattgtcctaattgtactgttttctgatttgtatttatgtcttgagacagtaactttttgaataaaaataaacctaca

SEQ ID NO: 116656 - DNA, 1000 bp, Homo Sapiens
acattaggcaggttgcttaacctttttatttcaaactctctcaactctaaagtgctaataataatctcagttaccttatctttgtcacagggtgttcttttttatgaagaaaaatttgaaaatgataaaagctaagatgccttctaacttcataagcaaacctttaactaattatgtatctgaaagtcacccccacataccaactcaacttttttcctgtgaacacataaatatatttttatagaaaaacaaatctacataaaataaatctactgtttagtgagcagtatgatttgtacatgccattgaaaattattaatcagaagaaaattaagcagggtctttgctatacaaaagtgttttccactaattttgcatgcgtatttataagaaaaatgtgaatttggtggttttattctatcggtataaaggcattgatattttagatgcacccgtgtttgtaaaaatgtagagcacaatggaattatgctggaagtctcaaataatatttttttcctattttatactcatggaagagataagctaaagaggggacaataatgagaaatgttggtgtgcttttctaagcatttaaaacataattgccaattgaaaccctaaatatgtttacataccattaagatatgattcatgtaacaatgttaaattaattataatgggattgggtttgttatctgtggtagtatatatcctagtgttcctatagtgaaataagtagggttcagccaaagctttctttgttttgtaccttaaattgttcgattacgtcatcaaaagagatgaaaggtatgtagaacaggttcacgtgattacctttttcttttggcttggattaatattcatagtagaactttataaaacgtgtttgtattgtaggtggtgtttgtattatgcttatgactatgtatggtttgaaaatattttcattatacatgaaattcaactttccaaataaaagttctacttcatgtaatccaaa

SEQ ID NO: 116657 - DNA, 1000 bp, Homo Sapiens
caatcggctatgccatttatgagtgccctgacaaagacgaacacctgaacaaagacttcttcagataccacgcttctcgggccagaagcaagacgttcatcaacctgagagaagtctccgaccggttcaagctgccccctggggagtacatcctgattcccagcacttttgagccccaccaggaagctgatttctgtctgagaatcttttcagagaaaaaagccattacccgggatatggatggaaatgtagacattgaccttcctgagcctccaaagccaactccacctgaccaggagacagaggaggagcagcggtttcgggctctgtttgaacaagtcgctggtgaggacatggaggtgacagcagaggaacttgagtatgttttaaatgctgtgctgcaaaagaaaaaggacatcaaattcaagaagctaagcctgatctcctgtaaaaacatcatttccctgatggacaccagcggcaatgggaagctggagtttgatgaattcaaagtgttctgggacaagctgaagcagtggattaaccttttccttcggtttgatgctgacaagtccggcaccatgtctacctatgaactacggactgcactgaaagctgcaggctttcagctgagcagccacctcctgcagctgattgtgctcaggtatgcggatgaggagctccagctggacttcgatgacttcctcaactgcctggtccggctggagaatgcgagccgggtgttccaggctctcagtacaaagaacaaggagttcattcatctcaatataaatgagttcatccatttgacaatgaacatctgaggctgccttgtagagatgcagcctgcccagctgaatcttggcttctggaccttgaccttcagaacttctcttggtgtggaaccattacgcccagggttcactcccctctcatcgtccggccttctcccttcatcttgatctgggaagaatgaaatgaactcagctacactctctga

SEQ ID NO: 116658 - DNA, 1000 bp, Homo Sapiens
tggcagagggtcgtctactcaatttgagctgctccacagttcccacctttgttctgtccatcacagccacaacacaggctttggcactgatagaactctataatgcacccgaggggcgatacaagcaggatgtgtacttgcttcctaagaaaatggatgaatacgttgccagcttgcatctgccatcatttgatgcccaccttacagagctgacagatgaccaagcaaaatatctgggactcaacaaaaatgggccattcaaacctaattattacagatactaatggaccatactaccaaggaccagtccacctgaaccacacactctaaagaaatattttttaagataacttttattttcttcttactcctttcctcttgatttttttcctataatttcattcttgttttttcatctcattatccaagttctgcagaccacacaggaacttgcttcatggctctttagatgaaatagaagttcagggtccctcactctagtcactaaagaaggattttactcccccagcccagaaaggtgattcttctctttaccatttctggggactttagtcttaattaggtaccttattaacaggaaatgctaaggtaccttctctgtggaacaatctgcaatgtctaaatcgccttaaaagagcccatttcttagctgctgaaatcagtgctctttcacttcttcagagaagcagggatggtacctacccggcaggtaggttagatgtgggtggtgcatgttaatttcccttagaagttccaagccctgtttcctgcgtaaaggtggtatgtccagttcagagatgtgtataatgagcatggcttgttaagatcaggaggcccacttggatttatagtatagcccttcctccactcccaccagacttgctcatttttcgagtttttaactagactacactctatttgagtttaattttgtcctctaggatttatttctgttgtccaaaaaaaaaaaaaaaaaaaa

SEQ ID NO: 116659 - DNA, 1000 bp, Homo Sapiens
tcatcagctgtccccacctgggtgccagcaccaaggaggctcagagccgctgtggggaggaaattgctgttcagttcgtggacatggtgaaggggaaatctctcacgggggttgtgaatgcccaggcccttaccagtgccttctctccacacaccaagccttggattggtctggcagaagctctggggacactgatgcgagcctgggctgggtcccccaaagggaccatccaggtgataacacagggaacatccctgaagaatgctgggaactgcctaagccccgcagtcattgtcggcctcctgaaagaggcttccaagcaggcggatgtgaacttggtgaacgctaagctgctggtgaaagaggctggcctcaatgtcaccacctcccacagccctgctgcaccaggggagcaaggcttcggggaatgcctcctggccgtggccctggcaggcgccccttaccaggctgtgggcttggtccaaggcactacacctgtactgcaggggctcaatggagctgtcttcaggccagaagtgcctctccgcagggacctgcccctgctcctattccggactcagacctctgaccctgcaatgctgcctaccatgattggcctcctggcagaggcaggcgtgcggctgctgtcctaccagacttcactggtgtcagatggggagacctggcacgtcatgggcatctcctccttgctgcccagcctggaagcgtggaagcagcatgtgactgaagccttccagttccacttctaaccttggagctcactggtccctgcctctggggcttttctgaagaaacccacccactgtgatcaatagggagagaaaatccacattcttgggctgaacgcgggcctctgacactgcttacactgcactctgaccctgtagtacagcaataaccgtctaataaagagcctacccccaaaaaaaaaaaaaaaaaaaaaaaaaaaaaaaaaaaaaaaaaaaaaaaaaaaaaaaaa

SEQ ID NO: 116660 - DNA, 1000 bp, Homo Sapiens
tcttttaaaatatctcacaatttatgtggtatttttaaagactgatcttagaccaagtcaaattcccatttatcatttagttattttttgaggttagagaataatttgtacatatttatttagacctttgatatttattaaagcaattactcacaatggaagtgaaagaatcaggagaaaagccttttaaaaagtattctccaggtttgtcagggtcactctaaagataaaaatgtaactaagtcttctgtgaaatatcatccatctaatcttgatgctgttgcagatggtggtgacacaagttaattgacaaactactgccaaatggtgcacaatattttgtaaaaagtacccagtagccccatttcatacaatgtacctaaattatgcagtaacttggcatcatcgttccctccttgttgctgtgtaattagtcagtgttgccacagtgtgtggcgctgatggagatgtcagaaccgagaacacttaaccttctttgattgtttttcaagttttaagacttcgatccacccctatgagagcaagtaattgtggaaatatttttggtgtaaaatcattccagagtatgtaatatttaactgatagctgcatgaaagtgagattcgtgttactttggcttttctgtctctgttgacacggttgcacatttccaagttactacagcgtgaaaactgtgtgtttaaaaaaaaacaaaattaaaaaaagagattgtggcctggttttgtaaaagttttaggtaaaattacaattgattgttttaggaatcattattaaaaattttctgcaaatcataaagctatatcgaggtgttgagcttagccactatgcacattgtaattattcattgtggctgtccagttctatgatgcattctggcattttgtaagctgctctgactagcaatatatagattcatttaatgtgttaacattggttaataaatgtatttaaaaaaaactaaaaaaaaaaaaaaaaaaaa

SEQ ID NO: 116661 - DNA, 1000 bp, Homo Sapiens
cgcagcacgccccgcatgagcccgcaggcccgcgaggaccagctgcagcgcaaggcggtggtcctggagtacttcacccgccacaagcgcaaggagaagaagaagaaagccaaaggcctctctgccaggcaaaggagggagctgcggctctttgacattaaaccagagcagcagagatacagccttttcctccctctccatgaactctggaaacagtacatcagggacctgtgcagtgggctcaagccagacacgcagccacagatgattcaggccaagctcttaaaggcagatcttcacggggctattatttcagtgacaaaatccaaatgcccctcttatgtgggtattacaggaatccttctacaggaaacaaagcacattttcaaaattatcaccaaagaagaccgcctgaaagttatccccaagctaaactgcgtgttcactgtggaaaccgatggctttatttcctacatttacgggagcaaattccagcttcggtcaagtgaacggtctgcgaagaagttcaaagcgaagggaacgattgacctgtgaattctttgccgtctaaggcagttgtttatgacagctgaaaactggacactccctaaatgtccacctttcagtgaagagatagttaagccaattccatttatagaccacctccagccagtgacgctccgagttgaggatgttgaacaacatgggaaggtcgcagcgtactaagtgaagaagtcagaggacagaggaatttctctttctaggagattttcattttgtgtgactcccatggggaggaacagactggcaggaagcacaccggggttaacactggttgacttgaataggattattcgatttttaaaaatacttttccatgttttctgagtgctctatgataaatcagttgcatctgtgataatacaatacatatgtggacataaacagggatcaaataaaggaggtattgctgcaaaaaaaaaaaaaaaaaaaaaaaaaa

SEQ ID NO: 116662 - DNA, 1000 bp, Homo Sapiens
gattataggcatgcgccaccatgcccggccggcttatgatttaaaacatgaattgtttatttctggaattttccacataatatttttggaccaaggttgcctcaggtaacaaactacagaaagtgaaattgcagataaaggggattactgctcctctgctctaaaattggtgtttgggtgatcagaagcaggtagccaatgggaagagcacttctgagtgataactaaagcagtttggtggccttttcacattctccaatgttcaaacatattttccactttccattttctctttcacctcattttgcctctctatcccccatccctgcttatttcttaagcccattgatggcactcattaaattgtatttagggctaatgagtcattgttccttaatatcgttttcaatatgccacaatttaggacacatttaaaattttctaaaacaatatcctaatcaatattgactaatttgagccacattcccaactctaactcagcacacactgccagtcttccccaatatctgtctcctctcaattccccaccacaccttataaaattgtaatcaaagatatctcactctgtcattgttaatctaagaataaaaacactgactttaatacggttttactaagtttcaaccttctaattaggtaggcctctaggtattctgcagatcactgctggtcttgatagccattaatatatgtttgtattatgttatttttcaactaaatcgcagttggaaaaaaacatatttaatattatgcccttggatctgttactgcatcactagcacttgtgatgcaatagaacacttcgcctgtactgaaagggccaagagtaaatgccttgttttgtttttttgttttgttttgttttgctttttgttaaaacatgtctatagagttggcagttaatgctgaatttgtcaaataccccttccaaaattatacttgtatttaaaaaataaatggatctacctaatttctattg

SEQ ID NO: 116663 - DNA, 1000 bp, Homo Sapiens
agaaaccttatgcatgtagtgattgtactaaaagctttagtcgccgttcagatcttgttaagcatcaaagaatacacactggagagaaaccatatgcatgtaatcagtgtgataaaagttttagtcaaagctcagacctcactaaacatcagagagtacactctggtgaaaagccttatcattgcaatagttgtgagaaagccttcagtcagagttctgaccttattcttcatcagagaattcacactggagaaaaactattatctgtgcacacagtgcagcaaaagtttcagtcagatctcagacctcattaaacaccagagaatccacactggggaaaaaccatataaatgcagtgagtgcaggaaggctttcagtcagtgctcagctcttaccctacaccagagaatccacactgggaagaaaccaaatccatgtgatgagtgtggcaaaagctttagtcggcgttctgatctcattaaccatcaaaaaatacacactggtgaaaagccgtataagtgtgatgcatgtgggaaagccttcagcacatgtactgatcttattgaacaccagaaaacccatgctgaggagaaaccctaccagtgtgttcagtgcagcagaagttgtagccaactctctgaacttactattcatgaggaagtccattgtggagaagacagtcaaaatgtgatgaatgtgagaaaacctttagtgtgtacaccaactctattcagtaccagagacactgtaccagaaaaaaatctaatgaatgctgttgattattgatgagtatgaaaaaggttttaatcagtgttcaactcttatgctacattaaaaccgcactggatccggatacgtgtggtggctcacgcctgtaatcccaacactttgggaggcagatgtggaagcatcatttgagcccaggagtttgaggctgcagtgagctatgattccaccattgcactccagtctgggcaacagagcaagaccctgtctattt

SEQ ID NO: 116664 - DNA, 1000 bp, Homo Sapiens
gatgaataatgtcatgaatgctcaggctaaaaagagtcttgatcaggatccagttgtacgtgctcaggaaattaaaacaaaaatcaaggaattgaacaacacatgtgaacccgttgtaacacaaccgaaaccaaaaattgaatcacccaaactggaaagaactccaaatggcccaaatattgataaaaaggaagaagatttagaagacaaaaacaattttggtgctgaacctccacatcagaatggtgaatgttaccctaatgagaaaaattctgttaatatggacttggactagataaccttaaattggcctattccttcaattaataaaatatttttgccatagtatgtgactctacataacatactgaaactatttatattttcttttttaaggatatttagaaattttgtgtattatatggaaaaagaaaaaaagcttaagtctgtagtctttatgatcctaaaagggaaaattgccttggtaactttcagattcctgtggaattgtgaattcatactaagctttctgtgcagtctcaccatttgcatcactgaggatgaaactgacttttgtcttttggagaaaaaaaactgtactgcttgttcaagagggctgtgattaaaatctttaagcatttgttcctgccaaggtagttttcttgcattttgctctccattcagcatgtgtgtgggtgtggatgtttataaacaagactaagtctgacttcataagggctttctaaaaccatttctgtccaagagaaaatgactttttgctttgatattaaaaattcaatgagtaaaacaaaagctagtcaaatgtgttagcagcatgcagaacaaaaactttaaactttctctctcactatacagtatattgtcatgtgaaagtgtggaatggaagaaatgtcgatcctgttgtaactgattgtgaacacttttatgagctttaaaataaagttcatcttatggtgtcatttctaaaaaaaaaaaaaaa

SEQ ID NO: 116665 - DNA, 1000 bp, Homo Sapiens
agaagaagaggagcccctgttgctacagagaccagagagagtacagacgctggaagagctagaagagctgggaaaagaagaatgttttcaaaataaggagcttcccagacctgtgttagaagggcagcagtcagagaggaccccaaataatcgccctgatgcccctaaggagaagaaaaagaaggagcaaatgatcgacctacagaacctcctaaccacacaatctccctccgtgaagtctttggcagttcccacaatagaggagctggaagatgaagaggagagaaaccataggcagatgataaaggaagcttttgctggggatgatgtcatcagagatttcttgaaagagaagagggaagctgtggaggcgagtaagccaaaggacgtggacctgacactacctggctggggcgagtggggtggtgtgggcctaaagcccagtgccaagaaaagacgccggtttctcattaaagcccctgagggtcctccaagaaaagataagaatttgccaaatgtgattatcaatgagaagcgcaacatccacgcagctgctcatcaggtacgagtgcttccatatccatttacccaccattggcaatttgaaaggaccatccagacccccataggatccacatggaacacccagagggctttccaaaagctgactactcccaaggtcgtcaccaagccaggccatatcattaaccccataaaagcagaagacgtgggctaccggtcttcctcaaggtcggacctgtctgtcatacagaggaatccaaaacgaatcaccacacgtcacaaaaaacagctgaagaaatgctctgtagattgagttgctggaggagtgacagccaggagccctgacttcacttcctttggtccagttttactctgatacagggtggattccaaaactggctcagtacattgcatgtagttaagccacattttaaaaataaaggcattttttaatctaaaaaaaaaaaaaaaaaaaaaa

SEQ ID NO: 116666 - DNA, 1000 bp, Homo Sapiens
cttctaaactaaaggaaacaaagcaataggtttgggggacgcccagcccccacccccgtcaccccgctcttcccaagtcctcgccccccgcccggcctcctagcctctccgcccacgcggctgctgcttctccctggggaggacccctgccctcggccattgaacactgcaccctccacaggagccgcagaggcccgaggcaccggacgctggagaccctgcgcccctgcccagcacctcctccgtgggcagctcctcgggtggggcctgcggggttccctgcgcgcagctggcgcgtgtgtggcctaatccacctggtggccctgcggggcggcatccgagcccctgtttctcctccattcatgtttaatttgcatcacaatttgttgaatctcaggtaaatgaggtctttgcatttaatgagttttatcttgacaggcgccgcctcgcccccgggccctttcgtccacatcaaaaatgcatcaagtctccacgtgtttcgggccagggcgtggcttggcattgaccttcatgaccttacatagctttagagaagccataacgttagactgcaatactaacgaccgacgcccctccgggcagagaccaccgcgcccctctgcgccccagcgacgcggcccgcggggacgtcgctgtccgtcctgctcgccctgtgccctctcactgacttctcccgggtcgtgtcttttaaaaactcctgttttcacaccttacaaagccagctctgagcagacagggcgtcctctcgtagaacctgcgcaccccgttcccagcgcatggcgccccgggccgcgagcttagcttagaccgtggtgtcctctgtccgtctgtcctgcgcctgcgcctcctcctgcatgtcggggcccctgcgtgtgttctctccggatggaatcacagccaataaacaccagtgatttcaaaaaaaaaaaaaaaaaaaaaaaaaaaaaaaaaaaaaaaaaaaaaaaaaaaaaaaaaaaaa

SEQ ID NO: 116667 - DNA, 1000 bp, Homo Sapiens
tgagaccctaattgttgcagatcctgtcctggaaccacagcttattcctgggccccagcctcttggaccccagccagttcacagacccaatcccctcctgtcacctgtggagaaaagaaggcgaggacgaccccctaaagcacgagatttgcccatccctgggaccatttcctctgcaggggatggcaactccgaaagtcggacacagccacccccacacccatcacccctaaccccactcccaccactgctagtttgtcccactgctactgttgccaacactgtcaccactgtcaccatttcaacgtccccacccaaacggaagaggggccgacctcccaagaatcctccatcacctcggcccagccagctccccgtcttggaccgtgacagcacttctgttctcgagagctgtggattggggaggcgacggcaaccccagggccaaggggagagtgagggtagttcctctgatgaggatggaagccgccccctcacccgcctggcccgccttcggcttgaagcagaaggaatgcgaggacggaagagtggagggtccatggtggtggctgtaattcaggatgacctggacttagcagatagcgggccaggcgggttggaattgacaccacctgtggtctcactaaccccaaaactgcgctcgacccggctgcgtccagggtctctagtccccccactagagactgagaagttgcctcgcaaacgagcaggggccccagttggtgggagtcctgggctggcaaagcggggccgcctacagcccccaagtcccctggggcctgagggttcagtagaggagtctgaggctgaagcctcaggtgaggaggaggaaggggatgggaccccacgccgacgtcctggcccccgccggcttgttgggaccaccaaccaaggggaccagcgcatcctgcgcagcagcgcccctccctccctggctggccctgctgttagtcacagaggccgcaaggccaagacgtga

SEQ ID NO: 116668 - DNA, 1000 bp, Homo Sapiens
atgttaatactgtttttcttctatctgtagttagtacaggatgaatttaaatgtgtttttcctgagagacaaggaagacttgggtatttcccaaaacaggtaaaaatcttaaatgtgcaccaagagcaaaggatcaacttttagtcatgatgttctgtaaagacaacaaatccctttttttttctcaattgacttaactgcatgatttctgttttatctacctctaaagcaaatctgcagtgttccaaagactttggtatggattaagcgctgtccagtaacaaaatgaaatctcaaaacagagctcagctgcaaaaaagcatattttctgtgtttctggactgcactgttgtccttgccctcacatagacactcagacaccctcacaaacacagtagtctatagttaggattaaaataggatctgaacattcaaaagaaagctttggaaaaaaagagctggctggcctaaaaacctaaatatatgatgaagattgtaggactgtcttcccaagccccatgttcatggtggggcaatggttatttggttattttactcaattggttactctcatttgaaatgagggagggacatacagaataggaacaggtgtttgctctcctaagagccttcatgcacacccctgaaccacgaggaaacagtacagtcgctagtcaagtggtttttaaagtaaagtatattcataaggtaacagttattctgttgttataaaactatacccactgcaaaagtagtagtcaagtgtctaggtctttgatattgctcttttggttaacactaagcttaagtagactatacagttgtatgaatttgtaaaagtatatgaacacctagtgagatttcaaacttgtaattgtggttaaatagtcattgtattttcttgtgaactgtgttttatgattttacctcaaatcagaaaacaaaatgatgtgctttggtcagttaataaaaatggttttacccactaaaaaaaaaaaaa

SEQ ID NO: 116669 - DNA, 1000 bp, Homo Sapiens
agaccggctcacctgtgcatatccggaaaaaatgaggaatcgggtcctcttggaactcaacagtgctgacctggactgtgacccgattcttcccccatccctgcaaacctcttatgtcttcctgggtattgttttagccctgataggcgctattttcctcctggttttgtatttgaaccgcaaggggataaaaaagtggatgcataacatcagagatgcctgcagggatcacatggaagggtatcattacagatatgaaatcaatgcggaccccagattaacgaacctcagttctaactcggatgtctgagaaatattagaggacagaccaaggacaactctgcatgagatgtagacttaagctttatccctactaggcttgctccactttcatcctccactatagatacaacggactttgactaaaagcagtgaaggggatttgcttccttgttatgtaaagtttctcggtgtgttctgttaatgtaagacgatgaacagttgtgtatagtgttttaccctcttctttttcttggaactcctcaacacgtatggagggatttttcaggtttcagcatgaacatgggcttcttgctgtctgtctctctctcagtacagttcaaggtgtagcaagtgtacccacacagatagcattcaacaaaagctgcctcaactttttcgagaaaaatactttattcataaatatcagttttattctcatgtacctaagttgtggagaaaataattgcatcctataaactgcctgcagacgttagcaggctcttcaaaataactccatggtgcacaggagcacctgcatccaagagcatgcttacattttactgttctgcatattacaaaaaataacttgcaacttcataacttctttgacaaagtaaattacttttttgattgcagtttatatgaaaatgtactgatttttttttaataaactgcatcgagatccaaccgactgaattgttaaaaaaaaaaaaaaaaa

SEQ ID NO: 116670 - DNA, 1000 bp, Homo Sapiens
gtgtctggatctaccttggtaggagggagtcagtactgttggacccataggtagcctcatccctgccactgtgtttgctccatttatgtacccatcctacccggcctgggctgacccatggggaaggctggctaatttcagtgcttctgcttggttgttcagggccatttcaggtttgggtgttttctggggatgttaacatgggattcaggctcaactcacaagaaacttttccatctcatgatggatgctgttgggcatgtccaatgtatgacttcatgagttacacagatgctaattcgtaggggcacttggaatcacatggttgttttgtgtcccatggtcaagcattctatcttatcagggcctacagtaacatgccaaaagttgcttccaacatatttctctgctttggatggggcatatttctgtgctgtggatgacatggccttactccagaatcccaggccctccactgtgactctcctactggtgcttggttcagctccaccccaaatcttaccccaccactggcactttcagcaccagggggtctgaaggatggtgactgcgccatggcctggatctgctgcagtgtcctttcctgtggaggctccactcaaagctggcatcctcctatgtcacctagagtgtgggtcaaagcaatacacctacatgtagaatgtgatgtcagaactcaaacaggctcaccaggcagtgtgcttccttccttgcatgaggatgcaagatgcaacagtttgtctttcacattggaagggacacccctggatgcccctaaccactagacctgtaaaacttcactgcagtggccacttctgaatctctgtaaggtttatttatcttcaccctctggagagaagatgttttaccaaagcctctagtgtaccttcctcctcttactcatccatcccagtcaacatgatgttgtcaatgaaataaaggaatttaatattctatagtaaaaaaaaaaaaaaaaaaa

SEQ ID NO: 116671 - DNA, 1000 bp, Homo Sapiens
gagccccttccactcagagggccacacccagcgatgccagtgaaggtggcacagcctctcttcagtttctcctgactgtgatctcactggggtagaattcccctgagagaattccctcactcacggctccctttgccagagtcagttcaatcaggtctgatgtgagcaatttacacacttgtctcagaaagtccctcagggtttgtagaggactgcaggggggcatccgctgcagactcagcctttctctgcagccatcctgcagtgggggtgagcgggcacaggctgagaactgctcttgggtggtggaagcaggtgtcacggtgcaagtctccccctgcacccctcccccagcttgagccgtgtcacccccctctccctccagcatgggcctgtgtctcaggctctctggaaggtggccctgccccggaccctcttgcaggtgtcctggtttgacttggaactagatggccatctttccaggctttggtggcccaagagcagtctgggtggatggaagtggctgtcccctcctctccagcccctgcccacccactggtggaggtgctaactagcagggacgtggcataggatgggagctgggcgtgaggtgcttggggtccattctttgtccctcagcttctcagagtccggccagcccttgtgttcccgtgccccacactttcctcctccccactgcagtgagtcaatagtccagggtggggcctggcctccctgccctgattggggactcaggaggtgaggcctggggggcttcctgccccctccttgcccacctgcctgcccccgggcagcacgggagggagagcagggtgagcacgcttgttggtttcagatgcactttctgcttgcattgccgtatctgtgcgttccttcatcctggtcctggctttatggaacaccatgtttttagcatgtttttaaataaaaacggataaagtgtcaaaagcacagcaaaaaaaaaaaaaaaaaaaaaaaa

SEQ ID NO: 116672 - DNA, 1000 bp, Homo Sapiens
tgcccactggctctctgccaaagccaaaaaggtgtcaggcagtctccagcgtgctggccgggtctcggatgccacccctgctcactgagcctgcatgggccttgcccccgaccctgtggtctctgggattggggtcggcttaccctgtagcacagacagggactcctgctgccctgggagctgtctcaagcaaaatctcttgtcccagaggtgcccatgtgggtccgctgtgtcccctgtcatcatccttgttttttctcattttggccaagggcaggctccctgggacaggcagggaacaactgcggagatattagtgattcataggtttgtacagtgttttatactttgcaaagcactttattagctcacacctgtccactcacatgaaactcgtgttaggccctgggaggccgacggtaactctcaccgtgccctcagatgaagcacagagaggttgttacttgcccgggccatccagtgggctggctgggtcttgtgtccccatctgtggacccctctagggtctgagatgagatgagaagtgtctcctgtatccacctcttcctggcctcccttcccccacttcctggtccctgtccactcctcaggttggtgctctcacttcttgaaagctctaggcacccccgcctcccgccaggctccccattggctcctggcaggccagctgagaatgaacaggagatggaggcaggcagcccaggctgcagaggtgagggatgtggggccaggcccagagggctcagcctagaggcttccaatctcagattctcctgcctgtggtcatctgtttgtccatcaccccaggacagggcagacagaggggcaaagcactgggggccccagagcctagcttcccctcagcctgggggacatcacagcatttcagtgtcagtcacattttaaactgatcagcctttgtataatgttttttaaatcatttctaaataaaacagaaatacagagtgaaaaaaaaaaa

SEQ ID NO: 116673 - DNA, 1000 bp, Homo Sapiens
gccctacctaaagttcacgcagagctacgactacctgacggacgaggaggagcggcacagcgccgagagcagcacgagcgaggacaactcgcccgagcacccgtacctcccgctcgtcaccgacgaggacagctggtacagcaagtggcacaagatggagcagaagttccgcatcgtctacgcgcagaagggctacctggaggagctggtgcgtctgcgcgagtcgcagctgaaggacctggaggcggagaaccggcggcttcagctgcagctggaggaggcggcggcgcagaaccagcgcgagaaacgggagctggaaggcgtgatcctggagctgcaggagcagctgacaggtctgatccccagtgaccacgcccctctggcccagggttccaaggagctcactacacccctggtcaatcaatggccctcactgggaacgcttaatggggccgagggcgccagcaactccaagctctaccggagacacagcttcatgagcacggagccgctgtcagctgaagccagtctgagctcggactcccagcgcctgggagagggcacgcgggacgaggagccctggggtcccatcggaagctcagagccaaattagtggctcccttcgagcgaatgcccaggacttcaacgcatgcactttgtgttgacctcatccctggcttcaccttggtttttcccatcctagttctccctatgcctgaatatcctgtcttttcttttttataagcaaccacactgtattggatgaccctagatcttctttgagacaaggcaggctgtggccatgtagccccatcacactgtgtttgtgattgtctgtgtgtctgtctcccccaccagactgtgagctccatgagggcagggaccgtgtcttgtccgttctctgtatccccagtgcttggaacagagcgagtgctcactgtgtatttaataaatggacaaagagagaggatgaccctcaaaaaaaaaaaaaaaaaaaaaa

SEQ ID NO: 116674 - DNA, 1000 bp, Homo Sapiens
tgctacctgaggggaaggcctgaggtccaggtaagaagggaaaatagactgggagtgggacaagggacttgactctgctgaaccagatgaacaggagctggaaaggcaaggagctgaagcctctgggagtctgggaagtgaagttctactcctcttggcatcaaacaaggtttgggagtgtaggaggtgcgggaaagtgcttgtggcttagattaagtggaatttagggcatagctgaaaggggaaacagaattaaagacaccagaagtagcagagaagcagggggccagagctacaacagtattcttctctgttcctctttgcctcctccccagatgggcctctcatctcccacaatctctggcctccaggatgagctatcccatcttcaggagttattacggaaaggacaccaagaatatctcctgaggatcactccaagaaaagagatccacataccattctcaatcccactgaaattgctggcattctcaaaggcagggcagagggggatctggggtagagggagggttctgtctaatcttttttttttcttttgtatctgcacttgcagcctcagctttcatacttcagcccttaagttcactaagaaggtctgagtttctgctgcagatagtggtgttaactgctccaactcttgtcttgcttagtttctacaaatatttttgcttcttgtcatttgaaggattaagaaacaaaaacaatccagaaattgatcggtttttttaggccaatcccatcccttctggataaccagatgttaaatcatgagatcagagatgctgttcatcagtcccaacaagatggcctagaaatcgcattctcacctcgccttgctgctgctttaattccaagttctatttcttcccttatagttttctatgggaatgaggcggatacaggaaacaccctatctcctctgtatttttgtagtggaatttctatttaaggggctcattaaagcatagtatttatacac

SEQ ID NO: 116675 - DNA, 1000 bp, Homo Sapiens
attttttcagtataaaatttttcactgcaaaaaaatttcagtagaaaataaggatgcagggccagttacaatagtccttaagagagttaaattatagcacatgttttgacattgtaatatcttttactacttgaacatttaaatttctaaatgagaaaggtatatatattactgtaactgtagaagggaaaagggaaagtatttggttctaaaaaatgttagccttcctcgtaaaagtagcacaagcccacttatgaatcactgagaaaaagtgaaaaacttgagttggcaaagatgcagagcagcagtgcagatggcaatgaactctctgaattctcttttaccttatttagaagaatgcagagtaaagggaccttcttggttctgcaggaacttctcaagggatgaggagacagaacccctacttccaagtgctctatttgtattacccagatgactgaagcttaagagaaggcagggaagtatacaagcagagccagttctggtacaaacaaagaatttgacagggacaatggaagggtcttcttcaccactccttaccttctatgtgatggaaagactagagcttataaaagtacttccatttttttattctcctgaataccaaaggcaattaaagtcagctacaaatgacttgccagtgtcatgttttatttttgttatagatttttaaattatttccttcaagatcaattcttatcccatataatgcttagcttccaagaatattctttactttcttctgtcttttacagctctttgcattttgtagaccttaatactcaggttaaatattcattgcatttataagatcttctgcaaaaagcccagaaatggtccttttcaggtgcctcttcaaagagctgacaccttaccttgtgcctttggcacaaatgtgcagaatagatacatcagttggtgcataatcgaaaaaaataggaattttgaacactgttcttccttctacatttatttctct

SEQ ID NO: 116676 - DNA, 1000 bp, Homo Sapiens
tgacttggggactggcaacaacaacaagattaactgggccatggaggacaagcaggagatggtggacatcatcgagacggtgtaccgcggggcccgcaaaggccgcggcctggtggtgtcccccaaggactactccaccaagtaccgctactgaggcgccctcagtctgcgcggataaatgtcgtggagccctttttgtatggaaacgttttaagctatttaaagcctttggaaaatacaggaagctccagggctggagcacctctgagatggaattgataacatggtcttaactcaccgaaataaacaagcacgtggtgagaggagcaggcctacttgtttgttctcaggaaacttaatgaatagattactgattttcctagtcaaagttaattcttacccttggagtaaaacgaaggtgtttatcctgtgagcctgtgcgttttgcatactgggttggtttgctggggctgcggtgacagcatatgccgcgagctgggctttaacagagatgtgtgctctcacagctttgcaggcgggggtctgagatcagggtgtcgcgggtggggggtcactgctgaggccgtgaggggaatctgctcaggcctgtccctggcttctgggggctgctggtggtattttcagttccttggtgtgtggatacttcgccccatctctgccttcacctgtgtcctccctgtgtgggtgctggtgtccaaaatttccccttttcgtagtgacaccagctgtgttggattggggcccaccctgctccagcatggcctaatcttaactaattacatttgcaaggatcttatgtccacaaaagtcacagtctgaggtgctgggggttaggacttcaatatataaattttgcggttacacaattcaatccatgacagaatccaaaggtttactctggttataaaaacagtacaataaaatattgtttatagccttccctgtaaggaaaaaaaaaaaaaaaaaaaaaaaaaaaaaa

SEQ ID NO: 116677 - DNA, 1000 bp, Homo Sapiens
tgcgaccccaaggacgggcacctactcatggatggcggctacatcaacaatctgccagcggacatcgcccgcagcatgggtgccaaaacggtcatcgccattgacgtggggagccaggatgagacggacctcagcacctacggggacagcctgtccggctggtggctgctgtggaagcggctgaatccctgggctgacaaggtaaaggttccagacatggctgaaatccagtcccgcctggcctacgtgtcctgtgtgcggcagctagaggttgtcaagtccagctcctactgcgagtacctgcgcccgcccatcgactgcttcaagaccatggactttgggaagttcgaccagatctatgatgtgggctaccagtacgggaaggcggtgtttggaggctggagccgtggcaacgtcattgagaaaatgctcacagaccggcggtctacagaccttaatgagagccgccgtgcagacgtgcttgccttcccaagctctggcttcactgacttggcagagattgtgtcccggattgagccccccacgagctatgtctctgatggctgtgctgacggagaggagtcagattgtctgacagagtatgaggaggacgccggacccgactgctcgagggatgaaggggggtcccccgagggcgcaagccccagcactgcctccgagatggaggaggagaagtcgattctccggcaacgacgctgtctgccccaggagccgcccggctcagccacagatgcctgaggacctcgacaggggtcaccccctccctcccacccctggactgggctgggggtggccccgtgggggtagctcactccccctcctgctgctatgcctgtgacccccgcggcccacacactggactgacctgccctgagcggggatgcagtgttgcactgatgacttgaccagcccctcccccaataaactcgcctcttggaaaaaaaaaaaaaaaaaaaaaaaaaaaaaaaaaaaaaaaaaa

SEQ ID NO: 116678 - DNA, 1000 bp, Homo Sapiens
cagaagaatgatgtaaatgtggaattttcagaaaaagagttgtctgctttggttaaacttccttctggagaggattacaatttgaaactggaacttcttcatcctataataccagaacagagcacgtttaaagtactttcaacaaagattgaaattaaactgaaaaagccagaggctgtgagatgggaaaagctagaggggcaaggagatgtgcctacgccaaaacaattcgtagcagatgtaaagaacctatatccatcatcatctccttatacaagaaattgggataaattggttggtgagatcaaagaagaagaaaagaatgaaaagttggagggagatgcagctttaaacagattatttcagcagatctattcagatggttctgatgaagtgaaacgtgccatgaacaaatcctttatggagtcgggtggtacagttttgagtaccaactggtctgatgtaggtaaaaggaaagttgaaatcaatcctcctgatgatatggaatggaaaaagtactaaataaattaatttgctctcatcgtattgtgtatattcacctaatgcccattgtgtattgatattgcattcttgaattttgaacactgaatatctttttgaaagattatacttctttacctctttgtgctttagaaattattttccttcaagtgttcaagtctaatgaagaatgaagataacattttatcacttctgtccttaaagatttcagacatggtgaaactgaataaagcatgtcatttgctcctagatagattcattctatctagttgtggggatggagaaatctttaatggtatattttcggttattgccttatttttgatacagtattctgtcagtaatttattagacctggcagctttgggtgagcttagatttttcaccttcagtgttacattgtgtttgcttttaaaaactgcttttgaatggagttgtaaatacaatttttctatgaagatgtaaaaaaaaaaaaaaa

SEQ ID NO: 116679 - DNA, 1000 bp, Homo Sapiens
gtatgacaaggatgggcgattgctccaggaatttaacaagattgagcctccgctgattttcgagtgtaaccaggcgtgctcatgctggagaaactgcaagaaccgggtcgtacagagtggcatcaaggtgcggctacagctctaccgaacagccaagatgggctggggggtccgcgccctgcagaccatcccacaggggaccttcatctgcgagtatgtcggggagctgatctctgatgctgaggctgatgtgagagaggatgattcttacctcttcgacttagacaacaaggatggagaggtgtactgcatagatgcccgttactatggcaacatcagccgcttcatcaaccacctgtgtgaccccaacatcattcccgtccgggtcttcatgctgcaccaagacctgcgatttccacgcatcgccttcttcagttcccgagacatccggactggggaggagctagggtttgactatggcgaccgcttctgggacatcaaaagcaaatatttcacctgccaatgtggctctgagaagtgcaagcactcagccgaagccattgccctggagcagagccgtctggcccgcctggacccacaccctgagctgctgcccgagctcggctccctgccccctgtcaacacatgagaacggaccacaccctctctccccagcatggatggccacagctcagccgcctcctctgccaccagctgctcgcagcccatgcctgggggtgctgccatcttctctccccaccaccctttcacacattcctgaccagagatcccagccaggccctggaggtctgacagcccctccctcccagagctggttcctccctgggagggcaacttcagggctggccaccccccgtgttccccatcctcagttgaagtttgatgaattgaagtcgggcctctatgccaactggttccttttgttctcaataaatgttgggtttggtaataaaaaaaaaaaaaaaaaaaaaaaaaaaaa

SEQ ID NO: 116680 - DNA, 1000 bp, Homo Sapiens
ggcgcaggtctcccccacggatgaggagaaggtcccgctccccgaggcgcaggtcccccgtgcgccggagatcacggtccccgggccgccgccgccacaggagccgctccagctccaactcctcccgataaacaggccactgaagctctcgcccctgtaacttataccccacccagctcagttttgtcacttttctagccaaaggaagaccagtaggaaagcaaacccttgactctggcaggatttgcaggcagcaggcagcacccctctgccagccgggccccggctgcagaagtgctgttggtttggatgctgtgtgcctgtcaagattccctccggttttctggctagaaagctcatccgtttccggtttctaagagtcagttcagtggcagagccaccagggaaaagtgaggctcttgggggtggtttgaccctgcttacctgggagcacacttttcccttccccgatgacctgggatggtggccaggccgtgcccttgctgttgctgggcagtgtccttttggaaagggagctgccccaggctttagtgcagctgccaaccctgttaggcctggcctctcgaggcctcttctgacctcaagggtcacaccccctcaaagatcctctcacccatggtagttgctgctcgtggttctgtctgtccgtgcaccgatgcacacaccgcaccccaccactgtactctgaaattggcgagtgagtggagagccagctctgcggagtcatcacgcagccatggttgtgcctgccgttcatggtggtctttcaggttatcttggcaacatgtacattgcttttattttttttcttttttgctttcattgtacagtcagtactataaaatttctcttttgagttttatacctttgtagcattttagatgacattgtgtttgtactttgttgtgtagagtggaagaattgtgttgaataaacccaagatcggaatgcaaaaaaaaaaaaaaaaaaaaaaaaaaaa

SEQ ID NO: 116681 - DNA, 1000 bp, Homo Sapiens
aatggctagaaagtacattgaacaactctcagcagaataaggagaaggtgtatatcatagcacatgttccagtggggtatctgccatcttcacagaacatcacagcaatgagagaatactataatgagaaattgatagatatttttcaaaaatacagtgatgtcattgcaggacaattttatggacacactcacagagacagcattatggttctttcagataaaaaaggaagtccagtaaattctttgtttgtggctcctgctgttacaccagtgaagagtgttttagaaaaacagaccaacaatcctggtatcagactgtttcagtatgatcctcgtgattataaattattggatatgttgcagtattacttgaatctgacagaggcgaatctaaagggagagtccatctggaagctggagtatatcctgacccagacctacgacattgaagatttgcagccggaaagtttatatggattagctaaacaatttacaatcctagacagtaagcagtttataaaatactacaattacttctttgtgagttatgacagcagtgtaacatgtgataagacatgtaaggcctttcagatttgtgcaattatgaatcttgataatatttcctatgcagattgcctcaaacagctttatataaagcacaattactagtatttcacagtttttgctaatagaaaatgctgattctgattctgagatcaatttgtgggaattttacataaatctttgttaattactgagtgggcaagtagacttcctgtctttgctttcttttttttttctttttgatgccttaatgtagatatctttatcattctgaattgtattatatatttaaagtgctcattaatagaatgatggatgtaaattggatgtaaatattcagtttatataattatatctaatttgtacccttgttgaaattgtcatttatacaataaagcgaattctttatctctaaaaaaaaaaaaaaaaaaaaa

SEQ ID NO: 116682 - DNA, 1000 bp, Homo Sapiens
ggagacacggaagcctgtgctgggccaggcagggaccctggcagtgggcaccgagggcggcctgcggggcagcgcctggttcttgctacagatcagccccaacagtcggcttagccaggaggttgtgctggacgttggctgcccctatgtccgcttccacaccgaggtacactggcatgaggcccacaagttcctgaaggtggagttccctgctcgcgtgcggagttcccaggccacctatgagatccagtttgggcacctgcagcgacctacccactacaatacctcttgggactgggctcgatttgaggtgtgggcccatcgctggatggatctgtcagaacacggctttgggctggccctgctcaacgactgcaagtatggcgcgtcagtgcgaggcagcatcctcagcctctcgctcttgcgggcgcctaaagccccggacgctactgctgacacggggcgccacgagttcacctatgcactgatgccgcacaagggctctttccaggatgctggcgttatccaagctgcctacagcctaaacttccccctgttggctctgccagcccccagcccagcgcccgccacctcctggagtgcgttttccgtgtcttcacccgcggtcgtattggagaccgtcaagcaggcggagagcagcccccagcgccgctcgctggtcctgaggctgtatgaggcccacggcagccacgtggactgctggctgcacttgtcgctgccggttcaggaggccatcctctgcgatctcttggagcgaccagaccctgctggccacttgacccttcgggacaaccgcctgaagctcaccttttctcccttccaagtgctgtccctgttgctcgtgcttcagcctccgccacactgagtccctggggctggggttttgtttgtagaaggctctggggactcctaatttctgcttccccagcctaaagcagggatcagtcttttcttgtggaataaatccttggatcgggaa

SEQ ID NO: 116683 - DNA, 1000 bp, Homo Sapiens
aagatgaaagagtttctgcgcttgaagtcctccctgatagagttgcgacatctcgaatcagcgatgcacacttggcagacacaatgattggcaaagcagtggaacatatgtttgagacagaggatggttctaaagatgagtggaggggaatggtcttagcacgtgcacctgtcatgaacacatggttttacattacctatgagaaagaccctgtcttgtacatgtaccaactcttagatgattacaaagaaggcgaccttcgcattatgcctgattccaatgattcacctccagcagaaagggaaccaggagaagttgtggacagcctggtaggcaaacaagtggaatatgccaaagaagatggctcgaaaaggactggcatggtcattcatcaagtagaagccaagccctccgtctatttcatcaagtttgatgatgatttccatatttatgtctacgatttggtgaaaacatcctagatgtcatcacaaactctgccaaatttgtggaactatgaaatgtattatttgtagacataaagacttgattgctttccagtttaatgaaagcttaaatgtccctgcgaacccacaatctctgccagcagaactggttttgttctgaatagtacagattgatgtgaacacaaagcattttgtgtaaggagaacccctttcttttaaaagaagtctgtctatttcgaggggagttacaggcaagtttggtaaaagttaagctagtatcatagtcatttaaaattgtaatagatcttaaccattttccccctcaccctaactctcttattctgccgccacaatgcaagcatagtttgatgttttcgttattgccttttttgagatgtatgtatctgtatctacctatatctatatgtgtgtatacatatataatatatacacacagatacaagtgtacacacacacaccacacaccacacacaccccactggcagctttgtggattaggatgggggtgcggggtt

SEQ ID NO: 116684 - DNA, 1000 bp, Homo Sapiens
gtaacaaattaccctctagcccagtggcttaaaacaatagaaatttattatcttgttgttttggaggccaaaagtccaaaattgaggggttggcagggctgaacgtcttctggagactctaagggaaacactcttcccgtgtcttccagtttcttgtggctgccatcattccttggtttgtgactgcatctccctctcctctgtcttcacatcacttcccctctgtatatataatctacctctgcctctctcttataaggacacttgtgacgggacttagggcccatccagattacccatgataattcccttattccaagattcttaattatatctgaaaggaccttttttccaaataaggtactatcacaggttccagggagtaggatattgaatatcttttttggggagggggcaccatgcagctcactacactattcattgcacacaaatgaatttttcactttttaagatgcattcttggtgctcaaaccagatcgaagtttgtctctaaaagctattgtctgcacaggctgctgcatgctctgttgttaaatggatggacaggctattctaaattttggttgatacttttgctactatgggcaattaacttgaaaaaaataatcgatcccaactctgtgctctgatgtacctcttctgccccttttatgacacctttgaccaaatgccttctatggttcacagtgcaggcacaaaactacctctgatacagaagggttctttacaagcttattttacataccgtgaatccctcacctaaagggagaggtgaaagcaaagactgctttgaatgggtattgagggagattgtgtccataccaagccaccctgaagaagtatttcacttgcagtagaactgtggatttgtgctgtcatttcaccttggaataaacacctatctctaagcaggaccaagaatgacttgcaatctatatgtaatggctacttacttattcaataaagttaagatatacgt

SEQ ID NO: 116685 - DNA, 1000 bp, Homo Sapiens
ccaccccttggcccctcacatcctctccaggaaggcagtgaggggctgtgacatttttccggagaagatttcagagctgaggctttggtacccccaaacccccaatatttttggactggcagactcaaggggctggaatctcatgattccatgcccgagtccgcccatccctgaccatggttttggctctcccaccccgccgttccctgcgcttcatctcatgaggatttctttatgaggcaaatttatattttttaatatcggggggtggaccacgccgccctccatccgtgctgcatgaaaaacattccacgtgccccttgtcgcgcgtctcccatcctgatcccagacccattccttagctatttatccctttcctggtttccgaaaggcaattatatctattatgtataagtaaatatattatatatggatgtgtgtgtgtgcgtgcgcgtgagtgtgtgagcgcttctgcagcctcggcctaggtcacgttggccctcaaagcgagccgttgaattggaaactgcttctagaaactctggctcagcctgtctcgggctgacccttttctgatcgtctcggcccctctgattgttcccgatggtctctctccctctgtcttttctcctccgcctgtgtccatctgaccgttttcacttgtctcctttctgactgtccctgccaatgctccagctgtcgtctgactctgggttcgttggggacatgagattttattttttgtgagtgagactgagggatcgtagatttttacaatctgtatctttgacaattctgggtgcgagtgtgagagtgtgagcagggcttgctcctgccaaccacaattcaatgaatccccgacccccctaccccatgctgtacttgtggttctctttttgtattttgcatctgaccccggggggctgggacagattggcaatgggccgtcccctctccccttggttctgcactgttgccaataaaaagctcttaaaaacgc

SEQ ID NO: 116686 - DNA, 1000 bp, Homo Sapiens
ctgtgaagcattcctgtataagagccttcctctctgggatggcctttgttgtcggtcacagttccttcagcttgtgagctggattccttttagtagcttctctgaggtgaaaccacttctttttgaccatctagcgcagctcttctttacatcaaccatttatttcaagtgtagtgtgcttcagagtctgaaagagctattgcagaattggctgttgtggctttctatggacattcacatgaaacctgttacaaacagtcctctagagacaactttgggtggatccatgaactctgtgtctaaactgatccactatgtagggtggctatccactactgcaatgcgcttggagagcaacaatactttcttgctgcactttattttggatttctatgagaaggtgtgtgacatatatataaattataaccttccattagtggtattgtttcctcctgggatcttctattctgcactcctcagcctggataccagcatcctgaaccagctgtgttttattatgcacagatatcgtaaaaatttgactgccgcaaagaaaaatgagttggtacaaaagacaaaatcagagttcaatttcagcagcaagacttatcaagaatttaatcactatttgacatcaatggttggttgcctgtggacgtccaaaccctttgggaaaggaatatatattgaccctgaaatcctagaaaaaactggagtggctgaatataaaaacagtttaaatgtagtccatcatccttctttcttgagttacgctgtttcctttttgctacaggaaagcccagaagaaaggacagtaaatgtgagctctattcggggaaagaaatggagctggtatttggactatttattttcacaggggttacaaggcttgaaactttttataagaagtagtgttcatcattcttccattcccagagcagagggcataaactgcaacaatcaatattaaatgaatgttgacataaactgaaaaaaaaaa

SEQ ID NO: 116687 - DNA, 1000 bp, Homo Sapiens
agggtggagattgcagcgctgctggatttgactgagagacaagtgaaagtgtggtttcagaaccggaggatgaagcacaagaggcagacccagtgcaaggaaaaccaaaacagcgaagggaaatgtaaaagccttgaggactccgagaaagtagaggaggacgaggaagagaagacgctctttgagcaagcccttagcgtctctggggcccttctggagagggaaggctacacttttcagcaaaatgccctctctcagcagcaggctcccaatggacacaatggcgactcccaaagtttcccagtctcgcctttaaccagcaatgagaaaaatctgaaacattttcagcaccagtcacccactgttcccaactgcttgtcaacaatgggccagaactgtggagctggcctaaacaatgacagtcctgaggcccttgaggtcccctctttgcaggactttagcgttttctccacagattcctgcctgcagctttcagatgcagtttcacccagtttgccaggttccctcgacagtcccgtagatatttcagctgacagcttagacttttttacagacacactcaccacaatcgacttgcagcatctgaattactaaaaacattaaagcaaaacaaagcatcaccaaacaaaaactcctttgaccaggtggttttgccttcttttatttgggagtttattttttattttcttcttgacctaccccttccctcctttaagtgttgaggattttctgtttagtgattccctgacccagtttcaaacagagccatcttttacagattattttggagttttagttgttttaaacctaactcaacaaccctttatgtgattcctgagagcagtatgaggcctgcaagaaagtgatcatataattgtatcttcactttctttttatttttgtattacattgggatgcattgtcatgcatattttttgtagaataaattctcctttgctataagtaaaaaaaaaaaaaa

SEQ ID NO: 116688 - DNA, 1000 bp, Homo Sapiens
cagggctcagggagaggccatgcggccagcccaggtctgcatgctgagccccatcctccacagcttgccgctgacgctctctcctgtcaccccgcccctgctctctccccagatgtgttctgagctggatgccgggttccagaatcgctgcacagttccaacaggacagcgccttcccccatgcgctgggaggggaccctccatttctccccctcacccatgctgagtgtagagccggggcctgggtggcgggtgggggccgggtgggaggtggcagtagtcttagcctgtgcactctcttccttgggtgtttggtgctggctcctggggactacaaatcccagagtgcggtgtgcccggcctcatttctgatagatcccgcttgggggaggtggtgtatggttacggagctgtgcatcttgggacatgtagtagcccaggtcggcttgtcactcgctgtgagatggggagattttgtcttttgatttagccccagggttagagtgggcagggcagagccgcgcagcacctgggagcggtacctttcccttgggcagcctggggtcccaggaacaagccagggcgagtggcatgtctgcctgagcagggtgtggccccagaaagctgaggagtgtgggctggcagagagcttcgagggcaaggccacccgcgggggcgtgtgtgtggtggggcttggcatgtgatggcagctccaggcatgccgctgcttgtatggctttctttggcctctgaccctgctgcccattctttccaacatcacagatgaactgcctctcctcctccctgcctggggagcccagtggccagggaggggagtggtggagccagtcgctgtaacactgagcctcagagacgaaccaaaaccagctgggctgagctcagatccagggggaaatgctggaagtcaataaaactgagttttgagagcttgaaaaaaaaaaaaaaaaaaaaaaaaaaaaaaaaaaaaaaaaaaaaaaaa

SEQ ID NO: 116689 - DNA, 1000 bp, Homo Sapiens
ctcagtgttcggccgctgggatgagacgaagggggaggacaacattgacttcatgcccaccatcttgtcgcgcttcgacatgatcttcatcgtcaaggatgagcacaatgaggagagggatgtgatgctggccaagcatgtcatcactctgcacgtgagcgcactgacacagacacaggctgtggagggcgagattgacctggccaagctgaagaagtttattgcctactgccgagtgaagtgtggcccccggctgtcagcagaggctgcagagaaactgaagaaccgctacatcatcatgcggagcggggcccgtcagcacgagagggacagtgaccgccgctccagcatccccatcactgtgcggcagctggaggccattgtgcgcatcgcggaagccctcagcaagatgaagctgcagcccttcgccacagaggcagatgtggaggaggccctgcggctcttccaagtgtccacgttggatgctgccttgtccggtaccctgtcaggggtggagggcttcaccagccaggaggaccaggagatgctgagccgcatcgagaagcagctcaagcgccgctttgccattggctcccaggtgtctgagcacagcatcatcaaggacttcaccaagcagaaatacccggagcacgccatccacaaggtgctgcagctcatgctgcggcgcggcgagatccagcatcgcatgcagcgcaaggttctctaccgcctcaagtgagtcgcgccgcctcactggactcatggactcgcccacgcctcgcccctcctgccgctgcctgccattgacaatgttgctgggacctctgcctccccactgcagccctcgaacttcccaggcaccctcctttctgccccagaggaaggagctgtagtgtcctgctgcctctgggcgcccgcctctagcgcggttctgggaagtgtgcttttggcatccgttaataataaagccacggtgtgttcaggtaaaaaaaaaaaaaaa

SEQ ID NO: 116690 - DNA, 1000 bp, Homo Sapiens
ctgggagaatcctttctccctgccttcttgccctgccctctctgtagcccccaccctcctgccaagctgcctctgggaaggaagaaacaggagctaggcagaagccttgagcagggaagagttcttcccttagccctgactttacttgctgtgggaagagagatgagggtcagataggtgggaggactaacttccagggtgccaagaaggaagaaaagccccaggttctcttttcttattgaggaacgatccgaccacctcacaggcctgccctgcagctggaagactcggcgctctaaggcctgtgccgtgtccagctgtgactgtgcggtgggctccatctgctggacaaaaggggaactgcaccatggcacttggcccatgggaaagagggtgtggtggtgtgccaatacctcctcgcctgccctccaagccccagctgccttccttttggattcccaagcttcaggatgtgttccctcttccagctgtgggaccgctgtcccttatttcaacccgttagcaacaatggatagagaacacagtggctattaatgaagaggcccatgctggagactggaagggttcccttgtcctagacattgaggggcccagataagaccaaaaccaagcataagagaagaaactgtctcagatctcacggccaggcctctctcctgctgctgtttttgattttcccaggtagtgggagagaggaaaggagggaaggcaagattctttccccctccctgctgaagcatgtggtacagaggcaagagcagagcctgagaagcgtcaggtcccacttctgccatgcagctactatgagccctcggggcctcctcctgggcctcagcttgcccagatacatacctaaatatatatatatatatatgagggagaacgcctcacccagattttatcatgctggaaagagtgtatgtatgtgaagatgcttggtcaacttgtacccagtgaacacacaaaaaaaaaaaaaaaa

SEQ ID NO: 116691 - DNA, 1000 bp, Homo Sapiens
cacgcccatcgtgcacacctgcccatcgtgcacacccacccatggtgcacacctgtagtcctccatgaggacatgggaaggtaggagttgccgccctgggggagggtcccgggctgctcacctctccccttctgctgagcttctgcgcacccctccctggaacttagccatactgtgtgacctgcctctgaaaccagggtgccaggggcactgccttctcacagctggccttgccccgtccaccctgtgctgcttcccttcacagcattaaccttccagtctgggtcccactgagcctcaagctggaaggagcccctgcgggaggtgggtggggttgggtggctgctttcccagaggcctgagccagaaccatccccatttcttttgtggtatctccccctaccacaaaccaggctggaacccaagccccttcctccacagctgccttcagtgggtagaatgggcccagggcccagctttggccttagcttgacggcagggccctgccaattgcaggagggtttggttcccactcagcttctgccggtcggcagcctgggccaggcccttttcctgcatgtgccacctccagtgggaaacaaaactaaagagaccactctgtgccaagtcgactatgccttagacacatcctcctaccgtccccaaatccccctgggcaggaggcagtggagaaccaagccccatggcctcagaatttccccccagttccccaagtgtctctggggacctgaagccctggggcttacgttctctcttgcccagggtgggcctggtcctgagggcaggacaggggtttggagatgtgggcctttgatagacccacttgggccttcatgccatggcctgtggatggagaatgtgcagttatttattatgcgtattcagtttgtaaacgtatcctctgtattcagtaaacaggctgcctctccagggagggctgccattcattccaacaaaaaaaaaaaaaaaaaaaaaaaaa

SEQ ID NO: 116692 - DNA, 1000 bp, Homo Sapiens
tttaagataaactataggatagatagaatggttattttatgcaagaaatattgtaccgcaagggtggtttggatgaagtctgactactttttttcaaacaaactattatattaaaactgtcatattttggctaagtttggacctataactacactttcattgtttgcatctctctatgaagatacgtctgtccaaacttttaaaaggcataactgtattttatgtgtttattctttatatagatagtattttatattttattctcacccgaagtattcacacaatctttttaaaaaaaatttgaaatggcattttgtattgccacagaggtaggatgagccatatattagtgaaatgttttattttgtaaaatataaatggattatttgccatcattagtacctctcaacttactttttagaggacaagaaacaatctgtagattggtttccatacagggaagttctccgtcctatgcaatgtttctaattaatttgcttaattctgagccattaatcctgctacactttgaatgatacattaattcagactaatctttgggggctttattttgtaagttagaactttcaagggaaacatgttcaacactattattttgttataaatttataactttgttattacattgtgtaacaaatataaggtttacgagctatgagaattggtgctatcaccattagctatttgctgtaatgtcaagaaaatgttcaccagatgcaagaatgtaccttttctttttagaaagccaaatgtactttagacatgaatgcaactatttaaagaatagcttcatcaatgttattccttacatgtcataagattcttacttaaacttggtcttctttcaaattgtttgtatgaagatgctgtacccacttgaacagtcctcaggtgtttacataaatactatgttttacagttttcatattttaaaatattaataaagttaaatcacaatagttcaaaaaaaaaaaaaaaa

SEQ ID NO: 116693 - DNA, 1000 bp, Homo Sapiens
ctgtatgaatgcatcaagtattcatttattgcccgaataggcattgcattaagtcctctgttaggtgtcaggcaagccaaaaaaaaaaaaaagatgctaagtcctaacccccaacagaagtgttcacagtgtagacgggaaaaaatgtataaacaaatgtgtaaaaagagaaatcagctcatggcttaggatggaattagagacaggtgagggacactcaggagctcattttccagctgctcttcagagtggaagggctggctggatcgggtaggtaagaatagctggattttttagaaaagaaatggatacagtctaaagaattaactcacccggtactttattctaagaagggtctggcatccatatgaggaaaaatgctcagctccaggaaagatggggagtccaagtggattaatgatgtcatgcataattttaagagacaagggagaaaacacaatgtatagccagagaaggagaagctcccatccaaatcctactaggaagagagtgggctgcagatgaatctgtgactcatgtttccctgtttcaaagggatcctggggaaggaggggaacatgcttgcagtatctctccctgtctgtctgctcacataagcattccgtccatctaagctcatcgtgctactggtatgtgtatgtgcagttacacagtttcctgtatcataaatcctagtgtgtttatacaaggagacatctgtggtttccccaaccgttccaaaaggctatttcaaaggaaccagcccacgtatgagaaatgaatgtaacactgtggacattgacttcccgcataaggcagggtgaccccctgaactccagatgtttgcacagtatcttatgtgttgttttccgttgtgacgaatgtgattggaacatttggggagcacccagagggatttttcagtgggaagcattacactttgctaaatcatgtatttattcctgattaaaacaaacctaataaatatttaacccttggc

SEQ ID NO: 116694 - DNA, 1000 bp, Homo Sapiens
gtttggagcagaaatactaaagaagattccgggccgagtatccacagaagtagacgcaaggctctcctttgataaagatgcgatggtggccagagccaggcggctcatcgagctctacaaggaagctgggatcagcaaggaccgaattcttataaagctgtcatcaacctgggaaggaattcaggctggaaaggagctcgaggagcagcacggcatccactgcaacatgacgttactcttctccttcgcccaggctgtggcctgtgccgaggcgggtgtgaccctcatctccccatttgttgggcgcatccttgattggcatgtggcaaacaccgacaagaaatcctatgagcccctggaagaccctggggtaaagagtgtcactaaaatctacaactactacaagaagtttagctacaaaaccattgtcatgggcgcctccttccgcaacacgggcgagatcaaagcactggccggctgtgacttcctcaccatctcacccaagctcctgggagagctgctgcaggacaacgccaagctggtgcctgtgctctcagccaaggcggcccaagccagtgacctggaaaaaatccacctggatgagaagtctttccgttggttgcacaacgaggaccagatggctgtggagaagctctctgacgggatccgcaagtttgccgctgatgcagtgaagctggagcggatgctgacagaacgaatgttcaatgcagagaatggaaagtagcgcatccctgaggctggactccagatctgcaccgccggccagctgggatctgactgcacgtggcttctgatgaatcttgcgttttttacaaattggagcagggacagatcatagatttctgattttatgtaaaattttgcctaatacattaaagcagtcacttttcctgtgctgtttcaaaaaaaaaaaaaaaaaaaaaaaaaaaaaaaaaaaaaaaaaaaaaaaaaaaaaaaaaaaaaaaaaaaaaaaaaaaaa

SEQ ID NO: 116695 - DNA, 1000 bp, Homo Sapiens
gaatattagatattattttgcatctgtaactaaccgtgatcatcatttcttgtaatttcttgtacatgtatattacttgttcttaatagatttttggaaacaagactttattgagatcagtttggttttcctgttaatttacctgtttgactttataatgtgttttagttttgcagaagaacactgttgtagtttagaaggcttttcataaatcccctcataggcaaagatgaaaacttcccactatttttttcccctcttaggaagacatactggaaagaaaatgtttagcatcttagtgtagtatagctattgtaaacagttcatgactagattttgattcggaaatctatactgaccaaggattaatcttaaggattgtataattcattaaagctgtggtctttccatgtggagactgatagaaaataattttgtcccaagtcttatttgctgactttttctgtcatgagtgagattgttgaacaaactgaatatatgggctatagcaagtagctttacagtacagatcttacaattaagttttgcttttgttaaagtgtgtaccattttttctgtttggagtaagacaaaaattgttttgacataggttccctagggtacacttgctctagcatactttaaaggccactgttgcaaagtctacattttatgctgaatctgcattctgtcaggcacccgtagaaagacctcagtacatgctttgcactctcctttgctccctttttccaatttcttattgcatatcattttgttgtaatacagaaagcagcatttttaaatgtccgtgttaagaattggcccactggtaccaactcacctctattttgtcagttcatagttgaagattttgttttatttcaaaaacaaagtacatttttgaaataatgtttcagaataaaataatctcacttttaagtgatccattttaaaatttgtaattcaataaagttttttttgttgttaaacataaaaaaaa

SEQ ID NO: 116696 - DNA, 1000 bp, Homo Sapiens
aggggacagacgtttttcagcagctcaacatgaactctgctcctacattcatgcattttcctccaaaaggcagacctaagagagctgatacttttgacctccaaagaattggatttgcagctgagcaactagcaaagtggattgctgacagaacggatgttcatattcgggttttcagaccacccaactactctggtaccattgctttggccctgttagtgtcgcttgttggaggtttgctttatttgagaaggaacaacttggagttcatctataacaagactggttgggccatggtgtctctgtgtatagtctttgctatgacttctggccagatgtggaaccatatccgtggacctccatatgctcataagaacccacacaatggacaagtgagctacattcatgggagcagccaggctcagtttgtggcagaatcacacattattctggtactgaatgccgctatcaccatggggatggttcttctaaatgaagcagcaacttcgaaaggcgatgttggaaaaagacggataatttgcctagtgggattgggcctggtggtcttcttcttcagttttctactttcaatatttcgttccaagtaccacggctatccttatagtgatctggactttgagtgagaagatgtgatttggaccatggcacttaaaaactctataacctcagctttttaattaaatgaagccaagtgggatttgcataaagtgaatgtttaccatgaagataaactgttcctgactttatactattttgaattcattcatttcattgtgatcagctagcttattcttgtgtactttttttaaactgtgggttttcctagtaaatttaatttacagaaatcaatggtagcatttagtaatctacaaaggaaatatcaaagtgtttttcaagcctgttatattcagtgtgtgccacaggattgaaataaatgacaatgtaattatgaaaaaaaaaaaaaaaaaaaaaaaaaaaa

SEQ ID NO: 116697 - DNA, 1000 bp, Homo Sapiens
gggaaactggaactaagggagagaaaggagacctgggtctcccaggaagcaaaggggacaggggcatgaaaggagatgcaggggtcatggggcctcctggagcccaggggagtaaaggtgacttcgggaggccaggcccaccaggtttggctggttttcctggagctaaaggagatcaaggacaacctggactgcagggtgttccgggccctcctggtgcagtgggacacccaggtgccaagggtgagcctggcagtgctggctcccctgggcgagcaggacttccagggagccccgggagtccaggagccacaggcctgaaaggaagcaaaggggacacaggacttcaaggacagcaaggaagaaaaggagaatcaggagttccaggccctgcaggtgtgaagggagaacaggggagcccagggctggcaggtcccaagggagcccctggacaagctggccagaagggagaccagggagtgaaaggatcttctggggagcaaggagtaaagggagaaaaaggtgaaagaggtgaaaactcagtgtccgtcaggattgtcggcagtagtaaccgaggccgggctgaagtttactacagtggtacctgggggacaatttgcgatgacgagtggcaaaattctgatgccattgtcttctgccgcatgctgggttactccaaaggaagggccctgtacaaagtgggagctggcactgggcagatctggctggataatgttcagtgtcggggcacggagagtaccctgtggagctgcaccaagaatagctggggccatcatgactgcagccacgaggaggacgcaggcgtggagtgcagcgtctgacccggaaaccctttcacttctctgctcccgaggtgtcctcgggctcatatgtgggaaggcagaggatctctgaggagttccctggggacaactgagcagcctctggagaggggccattaataaagctcaacatcattggcaaaaaaaaaaaaaaaaaa

SEQ ID NO: 116698 - DNA, 1000 bp, Homo Sapiens
agggtttaggagggtgtgtatgttgggaggacaggctagttgatctgtcctactctgacacacagtcccctctgccccttccttctctcttcttggtctctactcccagggggaggggggaacttactctaggaaaagccatgtctctctcccccagggtggggggacctgtgttggaggaggggtgttggggggcccccttccatgactctgtcccctgggggaggtaggacagggctgggcttccctctcatcctccccctcccaatctccttccacctccctccctcccgccagctccacgatttttcggtgtttctctgtacatagttttctggcgggataggggaggtaggatggatggggtttggggtgggtaggccatgggaggggagaagcccctccttggcaccccctcttccctgactgctgtcccctacccagccttgcccccttcatccttttgcgtttggtattgagactctcctagactctactcctctttcttttgtatggacagttccccttcagtcccatccccctacacatacacccagccggggccaaatttatacttatataaaagttgtaaatatgtgaaattttatccctgtgccctttccccacctcaggccctacccctggaccctccccaaccttccttctctcttctttggctgttgtaattatctggggtttgtactgtacatatccggggtgtgtgtgtgtgggctgggggcaacccttctgtacagagcttcctggccccctccccccccgcccctctgcttccctccccacccaccacctcaagggtagggagttgctcttcctacctgttttattttgttttctcgttctccctccccaccccactcccagccttatctatcccccctcactgtccccttttctccactcccagccccatttcctttttttctggagtgtgtggtgaaacagaaaaaaacatgtttaataaacggagattgttctttta

SEQ ID NO: 116699 - DNA, 1000 bp, Homo Sapiens
ggcgtgagccaccgcacccagccagggggaatgttctataaccagctctgtaaaggaaaagcactgatgtgtggtagtcaccaatttctgtggtgtaaatactcccaccatggttgatttcaagccaccagtggtttaataaccagctcataaatctcctaaatattttacagttgactctcatgagctgattggagtcagctggaacataccactgcctctagactaaggtcagcagatttagcaaatacagactgccccagttcattgaattttagataaatgaaataaatctataaggttaagtatgtccccagaactgcatggaacatgcttaatctaaacaatgatttgttgttcacctgaaattcaaatttagctgggtgtcctgtatttcatctggcaaccctacttcagacccaggtgtaaggtacatggatgtgctttggtcaaggaataggccaaggcagagatccatgcctgcatgactcagtgggtttggtgcacaggcacacacctccacttgttatataacctgtttgtgtaagttcatacttggtctgagccactgttgtctgtaaaaggtaattgtcctgctaatgctgtacaggggctcttggggttcggctcagctcaacatggcttgacatggtgggcacactggcgcccagtaagagagagagagagccaaagctgtccgttttgcagatggacaggaaggagccaggacacagctcagcttgctcacgcccagagagagaaaaagttaagctgctgaccctgaaggcaagggagagcaggctgcacagctgtgtgtggaagccacgggctcaagcagccaaggcagggcggacagtgtgagagagctagtgtaagctgttgatgagagctgttgctgaataaaaccatattcacctgccaaaaaaaaaaaaaaaaaaaaaaaaaaaaaaaaaaaaaaaaaaaaaaaaaaaaaaaaaaaaaaaaaaaaaaaaaaaaaaaa

SEQ ID NO: 116700 - DNA, 1000 bp, Homo Sapiens
taatatgccactgctttgtctttctgttacacatacagttttgatttatttacaatatatgctgtgccattttgatttttatattgtttggttggttgaataaatttgcgacactcaaacacttgaggtgatagttgttaaaaacaataccagtatttgatccagtttcatctcaactatgttatacctggacattttagatgtttatcaaaggtcttttatggggaagaaagtaaatgtatgaaataataaatgtgtgacatttatagggaatgttggctctgaacaaacttttgaaaacttggttgacaaaattttggatcaactgaaaaaagcatgacttttgaaatctctgaatgccttggttctcagtattatcattctttattgaatttatttcttattaaaatatgtagtttttaagactttttttctgacagtattatgtaattttttagcgtgggtagatgggagtgtcgcttgtatgttatcgtacagctgacatgtatttttgtctattctttattatcttagtttcatgctatgtatgtaccataaccaacctattgcctatgagaaacatgtaagataatgtatttacagccattgttacaagtttataatgtatttttctatcttgttttatatgtatgttatataacattcaaaaagaatttttttcttgattgagaaaaggatacaaaatgcaaaatccacaattttgataactgaaaattgccaattgttttgcagtactttattatattgggtgtcttgtcttttttgggcttttagttagctaatgaatgaatacattagacacttttgggttttagttgggattttacatagcttgcattttaattctttggttctttgctgtttctattaacccacagcattattttaataaatgttataataccaacctactaactctggactttgtctgtttattaacctttatatgtttaattaaaataaacaaataaagacaaaa

SEQ ID NO: 116701 - DNA, 1000 bp, Homo Sapiens
accccacacacactcaaggggtcgaaaacaaaccccacacgagggctctcacctccttctcctaggtagtatttattttcagcacctgtttgatgcagtttttaatcctctacctattgcactgttgtgactcgttggccattatttgatttttgtacgaaaaaaagctttgttatagaaatcagcatactatttttttaaatctggagagaagatattctggtgactgaaagtatggtcgggtgtcagatataaatgtgcaaatgccttcttgctgtcctgtcggtctcagtacgttcactttatagctgctggcaatatcgaaggttccttttttgtttgtgtaaactctaatttctatcaaggtgtcatggatttttaaaattagtatttcattacaaatgtctcagcattggttaactaatttttgccaggaccattattgatcaagcaaataaattcaacagccatttgggaaaaagaaaagcttctagtttttttgtacacattctttctgtgaggagattgagtactctgcagctggcgaggagttggttgaggcacttcttcaaggccaagggggaacacagtgttttgtttccagctcactttgtacccctcacctctgcagacacggggagaaccccggacccctggcatgcatgctggcggcggcatgcctcccttccacaagcccatgctgctgcagagggagcctgtgtttgcaaaacccagtggactgggctgggtctgctgtctgagcagctcctggctccggtgggaactgcacacaagtccactggcctggcttggccccaggcattgcaattgacagacatttgcatttcatacggtaaatgaggactcagcacagccaaccataatcagcatgtctgggatagactggtctagaataaaaatgaagtttccattgctttgtttgctttaaaaattccacaattaaaatatctgtcattgaaagcttaaaaaaaaaaaaaaa

SEQ ID NO: 116702 - DNA, 1000 bp, Homo Sapiens
agccaccttggtctttttttgggagttcaggggagtaggagaatgtcttccagaaaaatacataagctagtttctgttctgtaaagtgatatctttcatacttgaccaaagttcccaataacttcccaaccactgttcaaaagctgtgatttttgtctccccttcccaccctccagccaaggagcagccctgcccagggggcattaggtgtgggtacccggggagcaccccgttcctggaccccagtgttgcatttcctggctgaggaagggtggtcatcccagctcctgccctaccctctcacttaactggagctttgggacgcaccctccacagtgggaggtggtggtgggtggcggtggcggggcctcacgacagcttggtgctggtaagaggaagcccgtggttctggctaggctctcatgtccagacagcggggaccaggggaaaacccagccccttctgtaatcccccttcatttcctaccttccttcctcctctgtttagcaaaggagggcagctcacttggatgtccttacaacgcccctggcccccaggttgagcaataagaaaccagaaccttgcggcccagtggcccgggccagttcaggccgcctccccctcctctgcctggggccattgagcccagcctccagggcccgggcgcgtttgcaggccagtggccactgtccgggctgtgatggcaccaaggcaggtggagcaccaggtaccacacagctgggcttcccaccaggctttcccgcgggggtctcagggagcttctccccagcgctgctcggagtctgcaggaactggccttgttctccttagcccgtcactccatacagtattaggtgaggatggatgcgggcgctgtccttgccgggaagtcactgttgaagttgcagtggcttgttcacacctgtgggaagagaagtgaagactttctccttgcattaaaaagtctgaactgtgaaaaaaaaaaaaaaaaaaaaaaaaa

SEQ ID NO: 116703 - DNA, 1000 bp, Homo Sapiens
ctaaagcccagggttatggaccaactcagtgcttcaggtcttaacgcctccatacctcttcctcaccaactttactagtagctgagatttaatgggcacctattatgctacatatcatgttaggtaaatctgacctgacctctttccccaccctcctttgttgctgcttccctgaatgagtattaccccaggatgaggtctgccatcagcttagttagccattgatgcaaatactagggaaagactaggaggatgagccagggttgctactaaggactaagtgtcgcaccaaggtttgccttttgtatttgcataaagaaaggagttggagctgggtgcagtggcttgtgcctgtagtcccagctacttgggaggctgaggcaggagggttgcttgagactagcctaggtaacatagtgagaccctgtctcattaaaaaaaaaaaaaaggcatggtggcacgcactgtagtcccagctactcaggagactgaggctagaagatcctttgaacctaggagtttgagaccagcctgggcgatatagtgaggccccatctcaaaaaaaaaaaaaggggggggggggggagttgggctgtgttggaatgggcctgcagcccaacaaacaagggaactaggaccgacagtgacttcaccagcttgctaggtcagaatgagagactggtgggtctgtctacctgtttcttctacaagatccctatttgactgtaaaagtagctaatactcacatgttctccaatcccaggtagccatggtagagttgggtagagttgagcagctgccccaggatccaaatgtggtgtctgaaatggaaagaactaaggcaaccaggaaggcactgatctgccttataagcacagtcatctgaaagtcaggcctgctgcaggacaggatcccccagagaccccatttgcctctcaacactcagaccttcaactgttttttaataaatctactttttaaaaaaaaaaaaaaaaaaaaa

SEQ ID NO: 116704 - DNA, 1000 bp, Homo Sapiens
ctgaatttgaaaacatcaaggaggagtacagcgtgcgcggcttccccaccatctgctattttgagaaaggacggttcttgttccagtatgacaactatgggtccacagctgaggacattgtggagtggctgaagaatccgcagccgccacagccccaggtccctgagactccctgggcagatgagggcggctccgtttatcacctgaccgatgaagactttgaccagtttgtgaaggaacactcctctgtcctcgtcatgttccacgccccatggtgtggccactgtaagaaaatgaagccggagtttgagaaggcagcagaagccctccatggagaagcggatagctctggtgtccttgcagctgtcgatgccactgtcaacaaggccctggcagaaagattccacatctcagagtttcctacgttgaagtattttaagaatggagagaaatacgcagtgcctgtgctcaggacaaagaagaagtttctcgagtggatgcaaaaccctgaggcccccccgcccccagagcccacgtgggaagagcagcagacaagcgtgttgcacctggtgggggacaacttccgggagaccctgaagaagaagaaacacaccttggtcatgttctacgccccttggtgcccacactgtaagaaggtcattccgcactttactgctactgctgatgccttcaaagatgaccgaaagattgcctgtgccgctgttgactgtgtcaaagacaagaaccaagacctgtgccagcaggaggcggtcaagggctaccccactttccactactaccactatgggaagttcgcagaaaagtatgacagcgaccgcacagaattgggatttaccaattatattcgagccctccgggagggagaccatgaaagactagggaaaaagaaggaagagttataattcctgcctcagaaaaagcttttccattacactgtgaatgatacctgttttgttgtttctgaatttcccccgaattc

SEQ ID NO: 116705 - DNA, 1000 bp, Homo Sapiens
aggtctccttcaccgaaaacccatataccttttaagtttgtttcaactaaaatattaagtgaatgctttgcaagtttgactgtatgcaggtttatatcagaaggtgagattgaataatgcttgatgcagaatcgaaacttctcatttatctgtatattatgtttacttctaaggatatagcacaaagggaacattttttgtttaaagtgaactacagctgtgctgtgaagagagttctttataaagcctgtaggttcttttaactttggtttaaaatgtaagataggaaaatgttggatatttgaggccatgcttaatatatttatattgcagtatcctttaaaagcaaaaaaaaaaaaatgcatttatattacagttttcctctatgaaagtccttacttatatgatacaagcactgtgttttgtgcttaaactcttcagcggggtagcatcaaagttcttggggaaggatcgtatatgtgggtcccttccctagaagaatggttgctgatatggctactgcttctacatcttgagttttttaatttactttttttacactgtagcattgagactgcttgattcaagtctggtgctttgccagatgtattaatttccataaatgctttgtgagtttggttaaaatgaagattcacttgggaaaacactgcagctttagtctgtgttactatcttgttatgagtatgtaaaagtaaaatgcatgtgaatttatcatatttgcactatgaaggtatttggttaaaatacaaagacttttaagattttaaggccctttcttccaacagcttttatagttagcagccattctttattttctggatagccaggttttatcacgcttctagtcaggatgctcctattccttctaaaaattacggtctgactagtgagcaaagtcttgaatttattcaaaagtcctaaataccttctctaggtaagacacttggtagatgagagacggaaggcattgtcaagaacc

SEQ ID NO: 116706 - DNA, 1000 bp, Homo Sapiens
ctctgcagctagcatttcaaccatatgtggatcctttcatttctcagctccctggattccttcccctaaattaggacctattatttacctgtaggtaagcaagctactgtagctcttctgaggtatctgccaggctgttttctgtagcctcagattgcctatctgcttagcctgagaacaggtagatgaaaactaaactgatgcctaggcccagggtcagtctcagatggaagctgggcctgggtggggaggctagcatgcgtggctccctgggtatttctgtcagtccccatggcaagcagtgatttagtaaaacaccccagagtcagggaagccaaccaccttgaaacctttagaacatctctgctttggagaaagacccagagatcaggcagaggtgcagattcaatcattactcataacctttgagagctggcaaatgggaggagtgttagtctttgttttggaattggaccattcttgcaaccaaaaggacttagagcagtttgctcataaagacatcctttattataaaaggaagtatttaaaggatgatagagaccatcagatagaagcagggaaggtagataacttttaggaccttgatgtgaggaaaagataaaatttaaacaataaatttgccacttagattttctagcagcaaagtccgaaaagatagttatatacaaaattctgttttctgaaaacaaaattgtgattcaccttcagaattggccattttttttgtgagtttccttgcatcaaggacactgagaaacacagtcattgtcttaggtgttctatgggaggaagtgaatagagcctttaggaacttcctggtcaagcttatggtgcttattttgatctgggccacttccctccttccagtcatgagtaatcatcaaggagcaagttggagtgtttcaggtgtatattttgtagaacccaaaagattggagccttaacaataaacatcagcactaagtgacctgttaaaaaa

SEQ ID NO: 116707 - DNA, 1000 bp, Homo Sapiens
gtacacccgggaccgcctcgtgccagggcctgtgtttggaagcaaagataacttccacggcttagccatcttcctggacacctaccccaatgatgagaccactgagcgcgtgttcccgtacatctcggtgatggtgaacaatggctccctgtcctacgaccacagcaaggatgggcgctggaccgagctggcgggctgcacggctgacttccgcaaccgcgatcacgacaccttcctggctgtgcgctactcccggggccgtctgacggtgatgaccgacctggaggacaagaacgagtggaagaactgcattgacatcacgggagtgcgcctgcccaccggctactacttcggggcctccgccggcaccggcgacctgtctgacaatcatgacatcatctccatgaagctgttccagctgatggtggagcacacgcccgacgaggagagcatcgactggaccaagatcgagcccagcgtcaacttcctcaagtcgcccaaagacaacgtggacgaccccacggggaacttccgcagcgggcccctgacggggtggcgggtgttcctgctgctgctgtgcgctctcctgggcatcgttgtctgcgccgtggtgggggccgtggtgttccagaagcggcaggagcggaacaagcgcttctactgagtggcgcctccggcggggcctgtccctgggcccaggagccaatgtgaacttttttttttaccgggattataaaagaacaacaagatgaccttatttcttaactgtttcaaataaatgattaaagtattttcatacattttgcttcttgcccagcagggacaggtggcagagccgaggcttagggtctggcaccccccacagctggagacggaggctctcctggggctggtgtctcaggagcaggggtctgtgtctacagatgggctgtggcccctgcaggcagctgttgaacactggagggtcccccggaccacactggggtgggctcctgaggac

SEQ ID NO: 116708 - DNA, 1000 bp, Homo Sapiens
caccttgccctcattgtcttccctctcaagccccttcctttccactcctttcccattttaatcttgttctctccctactgtgttggtggtgctgatgaatctgccagagttgagttctatgtatttatttatctatctgtctactccatttctctcaaaagccctcaagtcacaaagtaaatggttcaagcaatggagtactgggtcacagggattcctcctttcccccccaaatattaactccagaaactaggcctgactggggacacctgagagtagtatagtagtgcaaaatggaagactgatttttgactctattataatcagcttcagagattccttaaaccttcctaatttcctgctccagggcagtaaacacaaatatttcttcaaggggtgatgaaaacctcggaagttttaatttgaggttatctgctacgaaacagtatttctaaaaggctaaagtgataagtctcttgcttttttttgatcctgctcttatattcttttttttcctcagagaaatcaggagggtagttagaggtataaaacaggaggaaatattatggaaaatgaaaatagggaaaataattgaatcattttagaagtagctaatttcttttctcaaaagagtgtcccttcttcacacctactcactttacaactttgctcctaactgtgggttgaaaactctagctaaagaaagttatcaaatcttaacatgcattcctactattatgatagtttttaaggtttcaattcaatcttctgaacggcataagtcctattttagccttacctcctgcatttgcaatacgtaatactgatcagtgggcacagttcttcagctacattgagaccctgaaatgaacaattatattctgactcgacatcttgtccccaatccttccaaaaatattgatggtgatttgtgctaccatttactcgtttatttaataaagacattcaatcccaggaaaaaaaaaaaaaaaaaaaaaaa

SEQ ID NO: 116709 - DNA, 1000 bp, Homo Sapiens
acaagctcccgctccccattgccttaagaagccacctcaagtccttctcgatggccaacggcctgaatgccaggatgatgcacggcggttcctactccctcaccaccagctccacccacaaaaggagcagcctccgcaaagtgaagctcgtccgccccccccagagcccccccaaaaactgcaccagaaacagctgcaaaatttcttaaggaaggcactgaaagaaacacggcggaatctctccaggagaagctcggcgttacccccggcagctggtggatgcatctcagatcccggttcctctcggcgaatgctgcttgcgaatgtgtgcgacgccttccgtgtgatggaaacacactaccccgtcggacttcgaatttctacgtggatgtgcatgaagctcttgttttcgatgtgtgtttgtaaagggaaaattagtactctgctcgactcttggtaacatgaaattctgaatgttactttatcatgattgcactgcaacttttttccttaaaataactgcttttgtaagaacggtgatattggagtgattagtataaattcaatggaatttgagaagcaatggcagcgggataatttagagtcactgatattacgagaggggtctttttgtaaacctccttttcaatgtcaaagcaccaatttataaaacgctgcagatgtagaggttatgtgcaactgatctgtccagtttgtgtatgaaatggatttgataaagtttttgctagttatttactacattttgggattaataagtgatttatatgcatatttttctgtaaatctacagttttttgtacaagatattctacaagttatgaagctaagggaagaaaatgccaaagatacctctagttatgttgaacacagccagcacagtttcgacaggtcaaggaagagctgtttcagtaaagaatgaagtgaaaacacttatttaggaaaatgtttctcaacaataaaatgtatagttgtttctctc

SEQ ID NO: 116710 - DNA, 1000 bp, Homo Sapiens
cgggatctggaatgggttgaaaggctcgatgtgacactgggtccggtaccggagatcggtggatctgaggcgccagcacctcagaacaaggaccagaaagctgttgatccagaagacgacttccagcgagagatgagtttctatcgccaagcccaggccgcagtgcttgcagtcttaccccgcctccatcagctcaaagtccctacgaagcgacccactgattattttgcggaaatggccaaatctgatctgcaggtgcagaagattcgacagaagctgcagactaaacaggctgccatggagaggtctgaaaaagctaagcaactgcgagcacttaggaaatacgggaagaaggtgcaaacggaggttcttcagaagaggcagcaggagaaagcccatatgatgaatgctattaagaaatatcagaaaggcttctctgataaactggatttccttgagggagatcagaaacctctggcacagcgcaagaaggcaggagccaaaggccagcagatgaggaaggggcccagtgctaaacgacggtataaaaaccagaagtttggttttggtggaaagaagaaaggctcaaagtggaacactcgggagagctatgatgatgtatctagcttccgggccaagacagctcatggcagaggcctcaagaggcctggcaagaaagggtcaaataagagacctggaaaacgaacaagagagaagatgaagaacagaacacactaaatagcatctttgaatacaaagaaccaagaaaaaggaatgaagactcgcaatttcacgacacactttgatcccttctgttggtgtcatgttgtaaacatttctttcaataaactaaagaaaaattattaaaggaacacatacctttggttaaatagtctagactaaaagattgagaagttactttccattgctatctattgataatttagacattgagttcaaattgccttcattttatgataaataatgatttaactgaaaa

SEQ ID NO: 116711 - DNA, 1000 bp, Homo Sapiens
tagagaaaataatatgtgggttaagatacatccttaaacttttttttttttgggggggggggggacggagtcttgctgcaacgcccaggctggagtgcaatggcactatctcagctcgctgcaaccttcacctcctgggttcaagcaattctcctgcctcagcctcctgagtagctgggaatataggtgcacaccaccatgcctggctaatttttgtattttcagtagaagcagagtttcaccatattggccaggttggtctcgaactcctgacctcaagtgatctgcctgcctcagcctcccaaagtgctgggattacacgcgtgagccaccacacccagcctccatctttaaacttttaaatgtggaatttctatcatgtaccgttagcctaacaagattttctttcctatttctgactggtgcctttcccctttttaggagcaacgaaagctactctcttagttatgttcttgtgatgtgacaaaatgtcaagaagataggagaagagaatattttatttcgttgatgcttttgttcccaagtgtgaccctaaacttaagctttgtaggagttgacattctttcatgtcccttccctttactcatgccgaaactatcaactgggacattttgtgcttttggtttaaaagttaattgatattatactttggttttatctaaaaagtaaatgtatttgcctttgacaaaagactgacacaagagcaaataagctttaaaatcgggtgttatgtgctttcctccatttttgagcatattatccaaaatggtctgtataatataaatgagaatgatgcagtttaagtaagccttgttataccattgtcatggacccctgtcataaagccatttcttggtttgtttgggaaagaggcatatgggatttatacagattcacttgtaaatgttggattggggatttttgtgtaaattttctcaaataaaggctagcagaaaccgaaaaaaaaaaaaaaaaaaaa

SEQ ID NO: 116712 - DNA, 1000 bp, Homo Sapiens
cacagctcagcttcaggcttcttatgtttctgaaaacagcttggatattttaatgcacgttgcattaaacctcactgaaacctgctccgtgcccggatgttgatcatgctggtggcttggttactgtgactgtagctggagtggcacaggtgacccaggcgtcctttcagctccagaatgttgcaagtctaggagagtgttccaatggctgacagaaactgcctatttgaaatggctcataagtagtatctgcagtgtgttcatccgttgctgccttaacaagtcacccacacgtagtggcttaaagcaacgaacattcactctctcacagtctgtgtcagtcggggatttgggagtgatgtatctgggtggttgtggcccagagtctctcatgaggttgcagttaagacatcagccaaggccacttcgtctgaggaaggctcaactggggctggagccacttccaagccagtgccctcacgtggctgtcggtgacagccacagttccttcccatgggggcccctacacgaagctgcttgagcatcctcacggcatggcctctgccttccccagagcaggtgaaccaagggagaggaaggagcaagccacagtgcttctatgagccaccctgagaagtctcacgtgatcacttccgccacagcctgtttatcaaaagcaagccccccaggcccagcccacgtgcagagggaggagaatgaggttctgtgttttgaagggaagaatatcagaattggtagacatttcaaactgtcacattagggatacaaaaatgaacaggctgggagtggtggctcagcctacaatcccaacactttgggaggctgaggaaggggcatcacttgaaccaggagttcagtactaacctgggcaacaaagaggcccctgtctctgataaaaagaaaaaaaatgaaaaaataaaaatgaacaggtataaaaagaaaaaaaaaaaaaaaaaaaaaaaaaaaaaaaaaaaaaaaa

SEQ ID NO: 116713 - DNA, 1000 bp, Homo Sapiens
taccaggctctggtgcatgcagcctcagcttttgaggtggatgtcgttgttgttctggatcaagaacgactgtacaatgaactgaaacgggacctcccccactttgtacgcactgtgctgctccctaaatctgggggtgtggtggagcgctccaaggacttccggcgggaatgtagggatgagcgtatccgtgagtatttttatggattccgaggctgtttctatccccatgccttcaatgtcaaattttcagatgtgaaaatctacaaagttggggcacccaccatcccagactcctgtttacctttgggcatgtctcaagaggataatcagctcaagctagtacctgtcactcctgggcgagatatggtgcaccacctactgagtgttagcactgccgagggtacagaggagaacctgtccgagacaagtgtagctggcttcattgtggtgaccagtgtggacctggagcatcaggtgtttactgttctgtctccagcccctcgcccactgcctaagaacttccttctcatcatggatatccggttcatggatctgaagtagagatcagcaggaagccttgctgcctgggacatagagatcatctggccacccctagaggcagatgggctgagataaaagactgttggggccacctgaccagtaaactgtggactagtagaaagttcatattctacctctaaaaacaggtagtggtaacctgactcttctaatcttgaaccaaaaggaaaaccatgagactgtaattggtttcttagaccacctaagatgccactttgaattctctaagaccctggagaattgcatttctttcactgtgctactatgtggtttttaaaaaatcaatgctttatattccatatgtggttcttacccatttatcatggatgaaagtgtgaattagagggactccttccaataaagttcaaactgaaaaaaaatcattttaataaatatttttgccatatcataaaaaaaa

SEQ ID NO: 116714 - DNA, 1000 bp, Homo Sapiens
ttatcatgaaaacttctttgccttaccagaccagttaatatgtgcactaaacaagcacgactattaatctatcatgttatgatataataaacttgaatttggcacacattccttagggccatgaattgaaaactgaaatagtgggcaaatcaggaacaaaccatcactgatttactgatttaagctagccaaactgtaagaaacaagccatctattttaaagctatccagggcttaacctatatgaactctatttatcatgtctaatgcatgtgatttaatgtatgtttaatttgatatcatgttttaaaatatcctacttctggtagccatttaattcctccccctacccccaaataaatcaggcatgcaggaggcctgatatttagtaatgtcattgtgtttgaccttgaaggaaaatgctattagtccgtcgtgcttgatttgtttttgtccttgaataagcatgttatgtatattgtctcgtgtttttatttttacaccatattgtattacacttttagtattcaccagcataatcactgtctgcctaaaatatgcaactctttgcattacaatatgaagtaaagttctatgaagtatgcattttgtgtaactaatgtaaaaacacaaattttataaaattgtacagttttttaaaaactactcacaactagcagatggcttaaatgtagcaatctctgcgttaattaaatgcctttaagagatataattaacgtgcagttttaatatctactaaattaagaatgacttcattatgatcatgatttgccacaatgtccttaactctaatgcctggactggccatgttctagtctgttgcgctgttacaatctgtattggtgctagtcagaaaattcctagctcacatagcccaaaagggtgcgagggagaggtggattaccagtattgttcaataatccatggttcaaagactgtataaatgcattttattttaaataaaagcaaaacttttattt

SEQ ID NO: 116715 - DNA, 1000 bp, Homo Sapiens
cccgagacccgcgagcacctcttcaaggtgctggtgatcggcgagcttggcgtgggcaagaccagcatcatcaagcgctacgtccaccagctcttctcccagcactaccgggccaccatcggggtggacttcgccctcaaggtcctcaactgggacagcaggactctggtgcgcctgcagctgtgggacatcgcggggcaggagcgatttggcaacatgacccgagtatactacaaggaagctgttggtgcttttgtagtctttgatatatcaagaagttccacatttgaggcagtcttaaaatggaaaagtgatctggatagtaaagttcatcttccaaatggcagccctatccctgctgtcctcttggctaacaaatgtgaccagaacaaggacagtagccagagtccttcccaggtggaccaattctgcaaagaacatggctttgccggatggtttgaaacctctgcaaaggataacataaacatagaggaagctgcccggttcctagtggagaagattcttgtaaaccaccaaagctttcctaatgaagaaaacgatgtggacaaaattaagctagatcaagagaccttgagagcagagaacaaatcccagtgttgctgatatatggcttctgcttctcttgtgtgtgcctcagctctgaagaagttcctgagaatgggttacagatgtcatgttagctgggagtcttcccacatgtggcacttcaaaaggcagcaccactgggcgcctgcacttatttgaaaatggaactttgggagaagtatccctgctagtggctctgtaacttaacagatgacaattaggcttttgtcattgttgccatcatatggaagataatgtttacatccttttaaacatttttatatgacaattcctcaggatttggtaaggcttccaagttgtagcttttagtgtaagtgctggggtggtaataaaatgttacctgcaaaaaaaaaaaaaaaaaaaaaaaaaaaaa

SEQ ID NO: 116716 - DNA, 1000 bp, Homo Sapiens
gagacagtttctgtggatgttcctcatctgaaattttgagaatggagagaattattctggataagttgaattgggatcttcacacagccacaccattggattttcttcatattttccatgccattgcagtgtcaactaggcctcagttacttttcagtttgcccaaattgagcccatctcaacatttggcagtccttaccaagcaactacttcactgtatggcctgcaaccaacttctgcaattcagaggatccatgcttgctctggccatggttagtctggaaatggagaaactcattcctgattggctttctcttacaattgaactgcttcagaaagcacagatggatagctcccagttgatccattgtcgggagcttgtggcacatcacctttctactctgcagtcttccctgcctctgaattccgtttatgtctaccgtcccctcaagcacaccctggtgacctgtgacaaaggagtgttcagattacatccctcctctgtcccaggcccagacttctccaaggacaacagcaagccagaagtgccagtcagaggtacagcagccttttaccatcatctcccagctgccagtgggtgcaagcagacctctactaaacgcaaagtagaggaaatggaagtggatgacttctatgatggaatcaaacggctctataatgaagataatgtctcagaaaatgtgggttctgtgtgtggcactgatttatcaagacaagagggacatgcttccccttgtccacctttgcagcctgtttctgtcatgtagtttcaacaagtgctacctttgagtgtaaactaaggtagactactttgggaatgagaacatgcaaaatcaggaaaggctgtagaaggaaatataccttaacaggctgatttggagtgagccagaaaaaaaaaataaaactctcattatttgtgtggctaattataattcagcgttatttaagcacataaagaccaaaaaaaaaaaaaaaaaaa

SEQ ID NO: 116717 - DNA, 1000 bp, Homo Sapiens
actctggatataaatactgcctatgccagactcagaggaatcgaacaggctgttcagagccatgcagttgctgaagaggaagccagaaaagcccaccaactctggctttcagtggaggcattaaagtacagcatgaagacctcatctgcagaaacacctactatcccgctgggtagtgcagttgaggccatcaaagccaactgttctgataatgaattcacccaagctttaaccgcagctatccctccagagtccctgacccgtggggtgtacagtgaagagacccttagagcccgtttctatgctgttcaaaaactggcccgaagggtagcaatgattgatgaaaccagaaatagcttgtaccagtacttcctctcctacctacagtccctgctcctattcccacctcagcaactgaagccgcccccagagctctgccctgaggatataaacacatttaaattactgtcatatgcttcctattgcattgagcatggtgatctggagctagcagcaaagtttgtcaatcagctgaagggggaatccagacgagtggcacaggactggctgaaggaagcccgaatgaccctagaaacgaaacagatagtggaaatcctgacagcatatgccagcgccgtaggaataggaaccactcaggtgcagccagagtgaggtttaggaagattttcataaagtcatatttcatgtcaaaggaaatcagcagtgatagatgaagggttcgcagcgagagtcccggacttgtctagaaatgagcaggtttacaagtactgttctaaatgttaacacctgttgcatttatattctttccatttgctatcatgtcagtgaacgccaggagtgctttctttgcaacttgtgtaacattttctgttttttcaggttttactgatgaggcttgtgaggccaatcaaaataatgtttgtgatctctactactgttgattttgccctcggagcaaactgaataaagcaacaagatg

SEQ ID NO: 116718 - DNA, 1000 bp, Homo Sapiens
gtgggcggcgggggcctgctgtgtggagtggtccaggggctgcaggaggtgggctggggggacgtgcctgtcatcgccatggagacttttggtgcccacagcttccacgctgccaccaccgcaggcaaacttgtctccctgcccaagatcaccagtgttgccaaggccctgggcgtgaagactgtgggggctcaggccctgaagctgtttcaggaacaccccattttctctgaagttatctcggaccaggaggctgtggccgccattgagaagttcgtggatgatgagaagatcctggtggagcccgcctgcggggcagccctggccgctgtctatagccacgtgatccagaagctccaactggaggggaatctccgaaccccgctgccatccctcgtggtcatcgtctgcgggggcagcaacatcagcctggcccagctgcgggcgctcaaggaacagctgggcatgacaaataggttgcccaagtgaggacggaccccttaccgatctgtgctctcctagcccaagagacccctggaggggctggagttttatccagcgcctcgtcgtatgtttggctgagcacctgtggcctgggtgcaggttaacttcttgttatcaggagcccactatgcagaggccaaaggtcggcagccagcgaggctatgaattggacctttttggtatctgtgtgactgctctgtgcccatccttagccaacttgctggcgtgacaagtgcccacaagtaacacaccaggtacccagagcagggtggacaggagagacctgaatcacagcagtgaggaattcctcaaagctgtgacctcgcccctgaacttgttcccagtgaaggtcaacagggccaccaaccagggttgaggaaccatctcagccatcctcccaggaagcccacccctgacccttactaatttttctaatgtgcaaactttttcattgaaaaataaaatatatttatgaaacaaaaaaaaaaaaaaaaaa

SEQ ID NO: 116719 - DNA, 1000 bp, Homo Sapiens
tgaagttagtggagggccttcagggccagacctgggccccagactgggtggaggagctgcgggaagccgaccggcagaaggagcagacctttcgggagaaggcagcgatgcctgtggcccagcacctgaacccagtgcaggtgctgcagctggtggaggaaacgctacctgacaactcaattctggtggtggatggcggggacttcgtgggcactgctgcccatctggtacagccccgcggccccctgcgctggctcgatcctggggcctttgggactctgggagttggtgcaggatttgcacttggggccaagctgtgccggccagatgctgaggtctggtgcctgtttggggacggagcttttggctacagcctcatcgaatttgatacattcgtcagacacaagatcccagtgatggccttggtagggaatgatgctggctggacacagatttctcgggagcaggtgccctctctgggcagcaacgtggcctgtggcctggcctacactgattatcacaaggcagccatgggtctgggggcccggggcttgctgctctcacgggagaacgaggatcaggtggtcaaggtgctgcacgatgcccagcagcagtgccgagacggccacccggttgtggtcaacatcctcattgggaggacggacttccgcgatggctccattgctgtatagggccttgtgggtcaggacgcttggctgccttcctgcccctggactgtgtccagctggtttggagtctcatcattgcttgccctgggcctatcccatgaggcccagtgactccacaacctccctgaggaggggatggaggggtcaaatctcagagaggctctcttgtgagctcttggaccctcctcttcacggacccaactgtgccgtttgtcccctctcttatggagactgaataaaccacctctggcccatgtaggcccaagtactcagtctcagaaaaaaaaaaaaaaaaaaaaaaaaaaaaaaaa

SEQ ID NO: 116720 - DNA, 1000 bp, Homo Sapiens
gccgcgtgcggagccggagcccgagcctgagtggcgccgggcccgacgtggggctcctgggccgcggcggcgggcgggcgatgctccagaggcctgaccagccatggaggccgaggcaggcggcctggaggagctgacggacgaggagatggcggcgctaggcaaggaagagctagtgcggcgcctgcggcgggaggaggcggcgcgcctggcggcactggtgcagcgcggccgcctcatgcaggaggtgaatcggcagctgcagggccacctgggcgagatccgcgagctcaagcagctcaaccggcgtctgcaggcagagaaccgtgagctgcgcgacctctgctgcttcctggactcggagcgccagcgcgggcggcgcgccgcacgccagtggcagctcttcgggacccaagcatcccgggccgtgcgcgaggacctgggcggctgttggcagaagctggccgagctggagggccgccaggaggagctgctgcgggagaacctagcgcttaaggagctctgcctggcgctgggcgaagaatggggcccccgcggcggccccagcggcgccgggggatcaggagccgggccagcacccgagcttgccttgcccccgtgcgggccccgcgacctaggcgatggaagctccagcactggcagcgtgggcagtccggatcagttgcccctggcctgttcccccgatgattgaaggcactgcttcctccacgccgacgcccgcccggattgctccccgagccccgggaccgctgtggacctcgggacctggacgccgtcctggctgcgcaggaggggccgctggcatggactaagaaatcctgacaccaagaagggcccctcgctcttgctggcagggcagcagggggactgaaggctggagcggagggacttgctgggggttggattgggggtaataaacccggacggaagcggaaaaaaaaaaaaaaaaaaaaaaaaaaaaaaaaaaaaaaaaaaaaaa

SEQ ID NO: 116721 - DNA, 1000 bp, Homo Sapiens
ctttacaaccttccttgtttggctcgggattacttcctggctgtctaataattgaaccataaccatgtaatattatgtaaaggcctggaaattactgttgctaaaaaaagtcatgtagtttcatgtagtgtagcatccttggcatcgttttccaaaatttgttccttctcccttttttttttctttcgtgtgtggcatgagtgtgtatctgtgtaaatatgattgtatatgtgttactccgatatgtaatccatttcactggctgagtttggcccctagccatgtgttaatataaagtagggcatgggcttcccaatggaaatctctgagaatgacagtggagttgtgcaagcattttacattgccacataattgacttgccattttatggttaaaaacgggcacattaggcagttgaatatgacgttaccttgcagactaaaaggttgaaggcccgaaactaacttttagctaacaataagggctgtgccccaatggaaactgagttcattttctgagaaaggtttggatgactgaaatatttcctctacagtcaaggactttggcatgcggtggctgaaactgagcttttttgtgtgggctccagttctcactgttctgcaatgctcatggcaagttgaatggtgagctagcttataaattaaagagctctgaactgtattcagaccgactgggtatctagcttactgttttaacatcattgttgaaaccagaccctgtagtccagtggtgctgccctgttgtgcaaactgctcctttttctcgtgtttttgtaaagagcttccatctgggctggacccagttcttgcacatacaagacaccgctgcagtcagctaggacctttccgccatgtattctattctgtagtaaagcatttccatcaacaatgcctaattgtatctgttatttttggtttaacacacactgattcatactaataaatattttcagttttaaaaaaaaaaaaaaaaaaaaaaa

SEQ ID NO: 116722 - DNA, 1000 bp, Homo Sapiens
ctggcgtcctgaggccacctggccccacctgctcctcagggcagcccggcgcggccaggtagggcccgagcttcagcttccaggatgcttctctggaacctcaaggcaggcagcccaggccctgggcctgatctctaaccccgtcatgctgctgctgaccacacccagccaacctgcccctccctgacccggggccccctttcctccagggcccagtctggctcccgagctcagacacagcccccaggagccgcccaccacggctgtgggaacttccaggcctcagcgcagagccctgcttggggccagcacggtgggcagctgccggccgctggggactgggccctgctcgcatgccgccccgccctccccccacctccacgactatttattgagcgcctgttgtgtgtcacggggctatgagggccgtggggtgtttgggtggattatccacacaggtcccggcccctgcccgggctggagttgccacagcctgtgctcctggtcctcacctggaggggccagcaggctgccgtcccaccacacgtggcctctgcgcccagcacggtgctcgccgacagtggtgtctgaacccttggggacgagggcctgggccgcggtgaggccaccagaggcaggagtggccctgggggtcccgggcactgtcgcgcttgctgcaggcggcccagccgtgtatttatttttcacctatctccttcctgtcaaggcaggccgggctccagggctccccttgcgtggggcatgtaggtgggggaggcgtctgcaggtcacctggggggcccagccctctcccagccttgcctggctgagctgtgttccaggggagccctggacaagccctcataggcagggagggggtttccgaggccaggcatccgccgccccgtgtcgcatcctggaataaaatgtggctctggcatggttaaaaaaaaaaaaaaaaaaaaaaaaaaaaaaaaaaaaaaaaaaaaaaaaaaaaaaa

SEQ ID NO: 116723 - DNA, 1000 bp, Homo Sapiens
gtgtctgggaaccagaaaccctacaccctccccctccagggaatgctgagttccagttttgagcagaggtgaggcagaatccactgtagccttccgccctggtatttggggggatgaccagcccaggcgttgggtgttagtctgcatgagtttgtgagaggaaataactgggtgtcctggcagtgcccttgaagttggttaggaccttcctgtaaactcttgcccctacttctaactactctataaatatatacatatatttatatataaagtgattagttgaactggcatcctgctttagcctgagacttgccataagaaactgctgagtacttggcaaaccctttcatagttttgttctccatctgtttggggtaggtgttgagcgaggcaaatggatctcgatatttcagatgggcttttgatgcactgttgccaaggaaggctttttctgattttttgacaaatgaatttttgcacactttcattggtgtctttcggcaacttacacacattgaaaatgagctattgtacatatttttatattctctttataaatgcatgtctgattgtacttgtaacaatattgtaatgaacggctgtgcagtaggcccagcgctgctgtgtctcgtcagaggaatagcttaccacgaacccctcagcatactgggaatctcttcctgaacaacgaatgtaaatttggtcaagtctactcttccgttcattcaattattttaagcatttgaattatttattgtatatcctaaatatatttctcctttggcagtgactagatttccactaatgtgtcttaatctatccctccagctggcagttactgtttttttaatcccctgaagttgtcctgtaggagacagaaattctttgctgtctgtatcccttggagtaagaaggtagtggcatgggtggagtgtgtgttctttctccaaatctattatgatgtttattaaacacttctgtagcaaaaaaaaaaaaaaaa

SEQ ID NO: 116724 - DNA, 1000 bp, Homo Sapiens
gaaggacgacaactggacataaagaagtcaagctacaaaaagctctctaagttcctgcagcaaatgcagcaggagcagattatacaggtgaaggagctgagcaaaggggtggagagcattgtggctgtggactggaaacacccgaggattacatctttcgtcatacccgagccctccccgacctcccagactatccaggagggtagcagggaacagccctatcaccctccagatataaaacccctctactgtgtcccagccagcatgaccctgctcttccaggagtctggccacaagaaggggagctttctggagggcagtgaggtccgaacgatcgtcattaactacgccaagaaaaatgacctggttgatgcagacaacaaaaatcttgtgagattggatcccatcctatgtgactgcatcttagagaaaaatgaacagcatacagtcatgaagcttccatgggacagtcttctgaccaggtgtttggaaaaattacagcctgcctatcaagtgacccttcccggacaagagcccattgtgaagaaagggagaatctgtccaattgacatcaccctagcacaaagagcgtctaataaaaaggtgaccgtggtccggaacttggaggcctatggtctggacccatactcagtggctgccatccttcagcagcgatgccaggctagcaccaccgtcaatcctgcccctggggccaaggacagccttcaggtgcagatccagggaaaccaggtccaccacctcggctggctattgcttgaagagtatcagctccctcgaaaacacatccaaggtctagaaaaggccctcaaacctggcaagaagaagtgacagactcttttgtctcacgtggtggatccggtggaaatccaagctctgggctggtaatttttatgagcattttcagcttttgcaaatacaaaatataattctttacaaaaataaatttttattctaatctaaaaaaaaaaaaaaaaaaaaa

SEQ ID NO: 116725 - DNA, 1000 bp, Homo Sapiens
gccgtgctatggccctgtaccacactgaggagcgcggccagccctgctcgcagaattaccgcctcttctttaagaatgtaactggtcactacatttccccctttcatgatattcctctgaaggtgaactctaaagaggaaaatggcattcctatgaagaaagcacgaaatgatgaatatgagaatctgtttaatatgattgtagaaatacctcggtggacaaatgctaaaatggagattgccaccaaggagccaatgaatcccattaaacaatatgtaaaggatggaaagctacgctatgtggcgaatatcttcccttacaagggttatatatggaattatggtaccctccctcagattctttcttgtggagaagttattcatgtgaagatccttggaattttggctcttattgatgaaggtgaaacagattggaaattaattgctatcaatgcgaatgatcctgaagcctcaaagtttcatgatattgatgatgttaagaagttcaaaccgggttacctggaagctactcttaattggtttagattatataaggtaccagatggaaaaccagaaaaccagtttgcttttaatggagaattcaaaaacaaggcttttgctcttgaagttattaaatccactcatcaatgttggaaagcattgcttatgaagaagtgtaatggaggagctataaattgcacaaacgtgcagatatctgatagccctttccgttgcactcaagaggaagcaagatcattagttgaatcggtatcatcttcaccaaataaagaaagtaatgaagaagagcaagtgtggcacttccttggcaagtgattgaaacatctgaaattctgctgtcaagattcccatctctaaggactccaagtgctagagacaagggggtctatgagcatttactgacttcctgttaaaacttcattttttcaaactttttgagctatgcaatatataaataaacagtaagaattttaaattaaaaa

SEQ ID NO: 116726 - DNA, 1000 bp, Homo Sapiens
ccaactatggttgcctcaatataaccttttattcatagatgtttttttttattcaacttttgtagtatttacgtatgcagactagtcttatttttttaattcctgctgcactaaagctattacaaatataacatggactttgttctttttagccatgaacaaagtggcaaagttgtgcaattacctaacatgatataaatttttgttttttgcacaaaccaaaagtttaatgttaattctttttacaaaactatttactgtagtgtattgaagaactgcatgcagggaattgctattgctaaaaagaatggtgagctacgtcattattgagccaaaagaataaatttcattttttattgcatttcacttattgggctctggggttttttgtttttgttttttgctgttggcagtttaaaatatatataattaataaaacctgtgcttgatctgacatttgtatacataaaagtttacatgaattttacaacaaactagtgcatgattcaccaagcagtactacagaacaaaggcaaattaaaagcagctttgtgaacttttatgtgtgcaaaggatcaagttcacatgttccaactttcaggtttgataataatagtagtaaccacctacaatagctttcaatttcaattaactcccttggctataagcatctaaactcatcttctttcaatataattgatgctatctcctaattacttggtggctaataaatgttacattctttgttacttaaatgcattatataaactcctatgtatacataaggtattaatgatatagttattgagaatttatattaacttttttttcaagaacccttggatttatgtgaggtcaaaaccaaactcttattctcagtggaaaactccagttgtaatgcatatttttaaagacaatttggatctaaatatgtatttcataattctcccataataaattatataaggtggaaaaaaaaaaaaaaaaaaaaaaaaaaaaa

SEQ ID NO: 116727 - DNA, 1000 bp, Homo Sapiens
tggagcgctgtgggagcgtccagcctgggtgtcgttacttgcggctccgtggtgaagctactcaatacgcgccacaacgtccgactgcactcacacgacgtgcgctatgggtcaggtagtgggcagcagtcagtgacaggtgtaacctctgtggatgacagcaacagttactggaggatacgggggaagagtgccacagtgtgtgagaggggaacccccatcaagtgtggccagcccatccggctgacacatgtcaacactggccgaaacctccatagtcaccacttcacttcacctctttctggaaaccaggaagtgagtgcttttggtgaggaaggtgaaggtgattatctggatgactggacagtgctctgtaatggaccctactgggtgagagatggtgaggtgcggttcaaacactcttccactgaggtactgctgtctgtcacaggagaacaatatggtcgacctatcagtgggcaaaaagaggtgcatggcatggcccagccaagtcagaacaactactggaaagccatggaaggcatcttcatgaagcccagtgagttgttgaaggcagaagcccaccatgcagagctgtgaatctagaggctctgagccactgttaacgcacaatgttcacagacatctgttgctgcctcaccttgggatccctgccacaagttccttgggcagtggccatgtcaccattgagatgaagatatacaacagaaaatagtggctgtgtttggaagcttcagccctgcacatttgaactagtcactctcccagacttgcgtgggtcagttctttctgagtagaggacttgctggtaaaggggcagatgctttttattagtactgataaaacaaactgagggaaacatccctcttagctgggaaacttttactcttcaggagcttggcatcatggactgttaatgtatgtgattttccccctattttctctctccaaaatgataaaaacaataattttattatga

SEQ ID NO: 116728 - DNA, 1000 bp, Homo Sapiens
cgcctccttcttctgccgctcctggtgctgcttgtgtgctcgtttggtgcggacctggtacctcttttgtgaagcggcagctgaggagactccggcgctcgccatggccgacgaaaagcccaaggaaggagtcaagactgagaacaacgatcatattaatttgaaggtggcggggcaggatggttctgtggtgcagtttaagattaagaggcatacaccacttagtaaactaatgaaagcctattgtgaacgacagggattgtcaatgaggcagatcagattccgatttgacgggcaaccaatcaatgaaacagacacacctgcacagttggaaatggaggatgaagatacaattgatgtgttccaacagcagacgggaggtgtctactgaaaagggaacctgcttctttactccagaactctgttctttaaagaccaagattacattctcaattagaaaactgcaatttggttccaccacatcctgactactaccgtatagttttctctattctttcatttcccccttccccattcctttattgtacataaagtaactggtatatgtgcacaagcatattgcattttttttttttttaactaaacagccaatggtatgttttgattgacatcaagtggagacgggatggggaaaaatactgattctgtgaaaataccccctttctccattagtggcatgctcattcagctcttatctttatattccagtaagttattttgctctcactgttttaacaaaaaaaaaaaacaacaacataaaaatccttgcataccttgttcaattggagaattttaatgtttttcatttatcattgtaaaaccaaggacaattttataacttttttgtacgtagctgttacatgtagggcaatctgtctttaagtagggataaattactctaaaacaaaaaagaatcctagatagttttcccttcaagtcaagcgtcttgttgtttaaataaacttcttgtttaaaatga

SEQ ID NO: 116729 - DNA, 1000 bp, Homo Sapiens
aaaagagtttacagattatttgttcaacaagtcactagaaattgaacctcgaaactgcaaacagccacctcgatttcctaggaaatcaactttttccttaaaatctcctggaataaggcctaacacaggccgacatggctctacctcaggtactttacgaggtcacccaacaccattagaaagagaaccatgtaaaataagctttagtcggattgctgaaactgagctggaatcaacagtgtcagcaccaacctctccaaatacaccatctactccaccagtatctgcttcttcagaccttagtgtatttttagatgtggatctcaacagctcctgtggcagcaatagcatctttgctccagtgcttttgccacattcaaagtctttctttagttcatgtggtagtttacataaactaagtgaagagcccctgattcctcctcctcttcctcctcgaaaaaagtttgatcatgatgcttcaaattccaagggaaatatgaaatctgatgatgatcctcctgctattccaccgagacagcctcctcctccaaaggtaaaacccagagttcctgttcctactggtgcatttgatgggcctctgcatagtccacctccgccaccaccaagagatcctcttcctgatacccctccaccagttccccttcggcctccagaacactttataaactgtccatttaatcttcagccacctccactggggcatcttcacagagattcagactggctcagagacattagtacgtgtccaaattcgccaagcactcctcctagcacaccctctccaagggtaccgcgtcgatgctatgtgctcagttctagtcagaataatcttgctcatcctccagctccccctgttccaccaaggcagaattcaagccctcatctgccaaaactgccaccaaagacttacaaacgggagctttcgcaccccccattgtacagactgcctttgctagaaaatgcagaaactccccaatga

SEQ ID NO: 116730 - DNA, 1000 bp, Homo Sapiens
ctagtctagcattctgcaacatttatatagactgttgaaaggagaatttgaaaaatgcataataactacttccatccctgcttatttttaatttgggaaaataaatacattcgaaggaacctgtgttatcacagtaacccagagctgtatttggctagcaatctgcctgtatctctcactattatctaaaagaaaccttccaatgcttctgttgatctcagtattgtcaggggaacagagaagttgggaaaagattactgaaatataccttttgcatttctttctagagtagctcccatatatggagatgggtgattctcttgatgccaccttcagatccttttattctccagaataattcttaacagtggttcaaatttcctttcataccttgaagtatgtgtttagtagcctcaattctccattaattaaaagtgtgggctgggcgtgggggctcatgcctgtaatcccagcactttgggaggccgaggtgggcagatcacctgaggtcaggagttcaagaccagcctggccaacatggtgaaaccccgtctctacaaaaatacaaaaattagccaggcgtgatggcaggtgcctgtaatcctagctacttggcaggctaacgcaggagaatcacttgaccgggagacagaggttgcagtgagctgagatcgtacctattgcactccatcctggatgaaagagccagactctgtctcaaaacaaacaaaaaagcgtggggacttctggggacagacaaggtgcctgttatatatttactcagtctttgccctgaatggtctcagcttgagaccatttcaaactggagagaagcaagccagccaatagaatggggtgatttacagggatttctgtttactgtcaaaatatttctcatctgcactatgtttccatttgtggtcctgaaggaaattcttataactcaacatttgtctggtcttataagtaaagacagctttaaaatctgttcactttcaaa

SEQ ID NO: 116731 - DNA, 1000 bp, Homo Sapiens
catttgatattcagtgcaatccattgcatgcattagcagttcaaagattaaatatgatcatatcaataggtacagaaaaagcatttgacaaaatccaatatccattcatgataaaacctctcaacacagaaggaatacaggagaacttactcaatttgataaagaactactacaaaaaaccctacatctagcatcatccttgatgtttccaactaaatgctttcctactaagatcaggaacatggcaaggaacaccactgcttttcagcattgtactggaagtgctatctaatgcagtgataccaaaaaaaaaggaaataaaatgcacataaatttggaaggaggaaatacaactgtctttgttctcaaataacatgattgtctttgtagaaaattctaaataacaaaaacctgctgacattaataagcaattatagcagggttgtagaatgtagtcctcaggtatatgataaaaaagaattagacatcaagtcattaaaagacatataggaaccctaaatgcttattgttaagtgaaaaccaatctgaaaaggctttctatgttgtatgattgcaattatatgacattctgggagaggcaaaactatcgagcgagtcaaaggaccagtggttgctgagagttgaggggaaaggagggatggcaggtaggtgatttttaggacagtgaaagtactctgtagggtactgtaatttgtcaaaatgcagagaatggaaaacagtgaacggaaaacacagagtaaaccctagtgtcaactctggacttcagttaataacagtgtaccactattggctcatcaattgtaacaaatgaaccataatgatgcaagatgttaataattggggagcctgtggaggatgggagggttaaaggtttatatgagaattctctgtactttttgctcaatttttctgtaaccctaaagctgctctaaaaaatgaagtgtattaagtaaataaataagtaaataaccaaccaacc

SEQ ID NO: 116732 - DNA, 1000 bp, Homo Sapiens
aggcatgccaatgactactcagttttaggacttttgtggaagaaaaattaaaagggagaagaaatcaattccactacttttgaagttctgcaacagatgagattttgtttgtaaagttttgtagtatattaaccattggtttatcactctagattcaacatattaaaatgtattcaagctcacagatttttaatcagtaaggcctatctatattagttgtcttttatttcttctccttgtggacagttgttaatgaaaggagtaaggatttccctttttttgttttgtttgttttgttttttttaaccaaattcttagagatactatagaatccaaatgagaactgaattggacctcaagtcttctattcctactaatagagttctttgtgatggtaactgctgtgtcgtttgttttccacaagttgggatggattcatgtcgatacatccccatgcccttgacctcttctggcattctcctgtgctctgacaaactgagccagccttttagatctacatgaataaacaaactattttaccaagaaaaatctcagcttgcttactgcttaattaaaaacctacaatttacacacctccctgccttcaagactgtgagctttggatagccctgcttaaatgtttgtcaacaacaagagtcgtaatgtgtcagtacattgtagctcctttgaaatttaactctttctgtgttacatgaattgttttaaggagtccggcaaacatgtttcttcacttccatgagaatggtgccaagtgtcagactctaatgagccctcagctcaggttttaatttctattgaatgctaacattcttctgattttttggtatcttttataatcatatcggtttctgctgtattaatgacaattattcatgaaaataaaaaatgaaatattttgtatactaaaaaaaaaaaaaaaaaaaaaaaaaaaaaaaaaaaaaaaaaaaaaaaaaaaaaaaaaaaaaaaaaaaaaaaaaaa

SEQ ID NO: 116733 - DNA, 1000 bp, Homo Sapiens
gatgtttatagtctgtattacttctccaaataatgaactacctgattcattgtccctttcttgaaagtttcttttttaagacaaatacattatttctgcattgatcattgaaatgttctttatatggatacattcccttatatattaaaaggcaacaggaattacaaagtctgaaaaccattttaaaccatcttttaaaaatttacccttatttccttttacctaatttgaatatgcatttgagaaaataagaggataaaggatgctaagagcctcaaaatgaaccataagtctcagataagaagtgatggtgataaacatcaaaaagtgaatggaacaccttgattggggaagatatgcaaatactttgatctaagaattgaaatgtatcaagaatttatattttgcctgcagaaaattcaaaagctactcatcctctctataatttggagtcatcttactaatgaaaataatgttttcccatatattattaaaaagcatacagtctaaataataaacagttgtaaaataatgaaggtagaaattataacactagggaaaaatttgtagcggatggcagtgttgaaggcaaatgtaaacataagggtaatggtctgtcatggcttttagaaaaagatgatagagttcatcattattttgccttcatctttgttaaggacagaaaattccctgacaggtgggcaagtatcaggttacctattttttattcctttggtacaaaagggttgaacgtcaggctaaaaaagcagccatgcatttattattaagcattttctaccgacaaggcactgtgctaggtactgtaatctaccataagtaggtaggtatttcttccactgtaaatcataggggtttgctgttttatgtgagttagcctcttccccttgtctgagcattcctcaggggaggtcacctgtgaggttcccagaactgtagttttttttaccagggtgttgtatttggaggaggaccggaattc

SEQ ID NO: 116734 - DNA, 1000 bp, Homo Sapiens
aagcattaattgacattacagttaaatgagcactgacctgagtttgagttgacttaacattgagtttaagcattaattgacattaaactgtttatgttaagaggactgggctgggcactgtggctcacgcctgcaatgccagcactttgagaggccaagactggtaggtcactggaggttaagagtttgagaacagcctggccaacagacgggagccacttttcccagcctgtgttttcatttctattctttctttcttttttcttttttttgtttttgtttttgagatggagtctcttgctctgtcatccaggttggagtgcagtggcatgatcttgactcactacaacctccgcctcccaggttcaagcgatcctcctgcctcagtctcctgactagctgggactacaggtgcatgccaccacacctggataattttttgtatttttagtagagactgggtttcgctgtgttagcctggatggtctcgattttctgatcttatgattcacccacctctacctcccgaagtgctgagattatgggcgtgagccaccgtgactggcctgttttttgtttctttaacaaaaagttatggggatttctatgagtattgtgttgaatctaaatcacattcggttatataatcattgagcaatactaatttttccaatcagtatggattgtatgtgtatttatatgtttttaatcattttgatcaatgtttgtagatttcaaggtacaaacttctcacctttatatgtttattcctaaatatttcttactttaagctctttagcaaatggaagtggtttttaattttattttaaaattatttaatgttaatgtatggaaattcaactaatttttggtgctattattctattctgcaaatacactgaatatgtttattagttccagttgtattttggttgactgtgattttcttcacagatcatgtcatctacaaacaaataaaatttgacttctttctttctga

SEQ ID NO: 116735 - DNA, 1000 bp, Homo Sapiens
cggggactagggatcctgaccacaatgactgtcctgctacatgaagtgccccacgaggtcggggactttgccatcttggtccagtctggctgcaccaaaaagcaggcgatgcgtctgcaactactgacagcagtaggggcactggcaggcacagctgtgcccttctcactgaaggaggagcagtggacagtgaaattgcaggtggtgcaggtcctggctgggtcctgccatttactgcaggtggctttatctacgtagcaacagtgtctgtgttgcccgagctgctgagggaggcatcaccattgcaatcacttctggaggtgctggggctgctggggggagttatcatgatggtgctgattgcccaccttgagtgaggggtggataaactaccctgccccaaacctctacccctaactccaggtcaggggtgcgtagaggttgggggccctggccagggacatctgccaaaggaaggaactgtagcctgggagcaatggttactttggcattagggccttcaagggctggcagtcttacagaggctggagcggtgagaatgagaggccagagggaccatagtgttgggcactgtctgaccatgttgcatttggaaggctaaatggggccatgaagaaggctggaagggacagggggtgatggcagcctacctggtgtcccctaccccacctgttctcggagaaccaagttgctacacaggaagttctccaaggtccagtttcctttctcccaccagttggtggaggcttcagggaagaccagagtcctggacagagagggtaacaggaggagtcggggataaacatcaaacatcaatcgtgtgtcctgatttgggagtgattggggggatggggtgggagagggttaattggtattctcatggcctgattttttttgtttctattccttttatatcactgtgtttgaatcgagggggaggggtggtaaccggaaataaagacctccgatcttccgcccc

SEQ ID NO: 116736 - DNA, 1000 bp, Homo Sapiens
gcccactggccccccgcagacgccgctacacgctgactccagccaggctgcgctgggaccacttcaacctcacctacaggatcctctccttcccgcggaacctgctgagcccgcgggagacgcggcgggccctagctgccgccttccgcatgtggagcgacgtgtcccccttcagcttccgcgaggtggcccccgagcagcccagcgacctccggataggcttctacccgatcaaccacacggactgcctggtctccgcgctgcaccactgcttcgacggccccacgggggagctggcccacgccttcttccccccgcacggcggcatccacttcgacgacagcgagtactgggtcctgggccccacgcgctacagctggaagaaaggcgtgtggctcacggacctggtgcacgtggcggcccacgagatcggccacgcgctgggcctgatgcactcacaacacggccgggcgctcatgcacctgaacgccacgctgcgcggctggaaggcgttgtcccaggacgagctgtgggggctgcaccggctctacggatgcctcgacaggctgttcgtgtgcgcgtcctgggcgcggaggggcttctgcgacgctcgccggcggctcatgaagaggctctgccccagcagctgcgacttctgctacgaattccccttccccacggtggccaccaccccaccgccccccaggaccaaaaccaggctggtgcccgagggcaggaacgtgaccttccgctgcggccagaagatcctccacaagaaagggaaagtgtactggtacaaggaccaggagcccctggagttctcctaccccggctacctggccctgggcgaggcgcacctgagcatcatcgccaacgccgtcaatgagggcacctacacctgcgtggtgcgccgccagcagcgcgtgctgaccacctactcctggcgagtccgtgtgcggggctgagcccggctgataaagcactttctctctgaaaaaaa

SEQ ID NO: 116737 - DNA, 1000 bp, Homo Sapiens
gcaagactaaatgaaacctagggcacggcctccgaagctgcgtgtggccccttagaggtgagcatcagagccagagcagtgagggggagactcacccaccctctccctctcccttcagctctgggaggcaggcgcagtgcccccctcccgtgggctggcccaggaccgcaggtgaaacctgggtctgtttagtttctttggtttttgtatgtttgtttgtttttgacacagtctcgctttgttgcccaggctggggtgcagtggcacgatcgcggctcactgcaacctccacctcccgggctcaagcgattctctcacctcagcctcctgagtaggtgggattacagatgcccgccaccacacccagttaatttttgtatttttagaagagatggggtttctccatgttggccaggctggtcttgaactcctggtctcaagtgatccgcccgcctcggcctcccaaagtgctgggattacaggtgtgagccaccgcacccaatcctattaggtttctttgaatcccctcatggcctgcctggtttttgttcagcctgtcttcagcttgaggagctgggaagctctggtggatgctatgaactcacttgctgaagagcagcgttcaggtgcatccccagccagggcacgtggctccctcagccatgaattcacttctcttcaggaggtttggcttggcatgaaaatacttcattcagagtatgggcaaatgcttctggaaaacccttccctgaagagagagaacgtgtgtgtgtgtgtcggtgttcacaccctcccatccttcctgcctcctgccccaaaccccgggttcctgggtctggaagggccttctctccaagctgggagctcctgggcccccaccattcactttttgtccttgctgctggcaaacagtaaagaaactcactttccctgtggcacgttatgcttcagaattaaaacaatgaagattaaaaaaaaaaaaaaaaaaaaaaaaaaaaaa

SEQ ID NO: 116738 - DNA, 1000 bp, Homo Sapiens
tcaaaaaaagttagaactattacaacccctgtttcctggtacttatcaaatacttagtatcatgggggttgggaaatgaaaagtaggagaaaagtgagattttactaagacctgttttactttacctcactaacaatggggggagaaaggagtacaaataggatctttgaccagcactgtttatggctgctatggtttcagagaatgtttatacattatttctaccgagaattaaaacttcagattgttcaacatgagagaaaggctcagcaacgtgaaataacgcaaatggcttcctctttccttttttggaccatctcagtctttatttgtgtaattcattttgaggaaaaaacaactccatgtatttattcaagtgcattaaagtctacaatggaaaaaaagcagtgaagcattagatgctggtaaaagctagaggagacacaatgagcttagtacctccaacttcctttctttcctaccatgtaaccctgctttgggaatatggatgtaaagaagtaacttgtgtctcatgaaaatcagtacaatcacacaaggaggatgaaacgccggaacaaaaatgaggtgtgtagaacagggtcccacaggtttggggacattgagatcacttgtcttgtggtggggaggctgctgaggggtagcaggtccatctccagcagctggtccaacagtcgtatcctggtgaatgtctgttcagctcttctgtgagaatatgattttttccatatgtatatagtaaaatatgttactataaattacatgtactttataagtattggtttgggtgttccttccaagaaggactatagttagtaataaatgcctataataacatatttatttttatacatttatttctaatgaaaaaaacttttaaattatatcgcttttgtggaagtgcatataaaatagagtatttatacaatatatgttactagaaataaaagaacacttttggaaaaaaaaaaaaaaaaaaaaa

SEQ ID NO: 116739 - DNA, 1000 bp, Homo Sapiens
ctggtctcgaactcctgacctcaggtgatctgaccgccttggcctccgaaagtgctgagattacagttgcgagccactgtgcgtggccagaactttataataagagacttgaagctgggtgtgacggtgcacgcctctggtcccagctgctcgggaggccgggacagaaggatcaccttgaggccaggagtttaaggccagcctgggcaacatagcaaaacctagtccctaaaattaaaaaaaaaaaaaaaaaaaaaggaaaataaaggagacttgaaatttttgaactaaatagtggtgatggctacacattgtgaatgtaattaacaccactgagttaaacacttaaaatggttaaaatggcaaattgtatgttatacctattttactacaataaaaagtataaaaaagagaagatatttaggtgacttacagcaaccaattgcaacaaaacaaaatgttaagaaatgatctttttatgaggcaattggaaatttgaacactgatcaactataggatgattggaattattaatttttaaaggtgtgataagatgctgcacttggctgggcacagtggcacatgcctgtaatcccagctacttggcaggctgaggtgggagaatcgcttgagctcaggagttcgagaccagcctgggcaacgtggcgaaatccccgtctttacaaaaacaaacaaacaaacaaaaaagatattgcagttgtgttgtaagcgtccttatctttcagagctacatagtggaatgtttatggaatatttaggataaatgatataggcatttgggatttgctgcaaaatgacccagaggcaggggtcagggggagaggtagagatgagacaagaggtagaggggagaggtagaggtagccacgagctgataattacagacaagagatgcggagtatgtgggggctcattatcctgcatagtctatctttgtatatctttgaacttttcaagaataaaaaagcttaaaaagtat

SEQ ID NO: 116740 - DNA, 1000 bp, Homo Sapiens
ccctgaggaatggctgcccacccccctcacggaggacatgatgaaggaagggctttctctgctctgtaagacaggcaatgggctggctcatgcttatgtcaagctggaggttaaagagagggacctgacagacatctacttgctgcgctcctacatccatctgcgctatgtggatatttctgagaaccacctgacagacctgtctccactcaactacctcacccacctgctctggctcaaggctgatggcaatcggctgcgaagtgcccagatgaatgaactgccctacctgcagattgctagttttgcttataaccagattactgacactgaaggcatctctcatcctcgtcttgaaaccctgaatctcaaagggaacagcatccacatggtgacaggtctggaccccgagaagttgatcagcctgcacacagtggagcttcgggggaaccagctggaaagcaccctgggaatcaatcttcctaagctgaagaacctctacctggcccaaaacatgctgaagaaggtggaaggcttggaggatctgagcaatctcaccaccttgcatcttcgagacaaccagattgacaccctgagtggcttctccagagaaatgaaatcattgcagtacctcaacctgaggagatcaaagacgctggccttcagacctgatcagactcccaggggcagccaccacatgtatgacagagaacagaggatgcctgtttttgccccaaagctggaaattcatcacaacctgaggcccaggatctgctctgtgccggtcctctgggcagtgtggggtgcagaatggggtgcctaggcctgagcgttgcctggagcctaggccgggggccgccctcgggcaggcgtgggtgagagccaagaccgcgtgggccgcggggtgctggtaggagtggttggagagacttgcgaaggcggctggggtgttcggatttccaataaagaaacagagtgatgctcctgtgtctgaaaaaaa

SEQ ID NO: 116741 - DNA, 1000 bp, Homo Sapiens
gttctgttaagagcaaatctaggagaagtgcttcagctgcccagtgcgccgtggggagtgttttaacggatcgtgtcgcaggagagcacagcccagcgttggggccgggaccgctggcgcccgacgtcggaagcatacaggtatactatgcaagtgtattctgccacaacaaccactgtctttgttacctttttttgaacaagaatatatccatcctgcctaaccctgagtttttggagcaccacagttgtcctgggagttggttgcatcttgtaggccatctgacttcctgtttttaaaacgggggtctggtcttgctaaacactacaggtaggttggtctttgaagtccactagtggagaatgtcaagacaagatacttattaccatgacatctgatgcatgtgcagcagtggggagttctagattgatctctgaatgtgatcgacgcccagcaaggacaagctttaaaatgtctgcggtctgcccttttgaagcaggactggctcactctgtcattgggagctgtcagctgcgactgcaggttctctaggaggcattccagaatagagtagcacactgtgtctgcagttctcgatgaccgaaagttatcaaaaatatttaaaatatttaaattgtgaacctattgataaagaatatttataaaaactgatctgtaggcctgtactaatctctacgcattagcaatattgactgtaaacccacattaaggaaaccactacgggtctggcagtgcgtgtcccgtggggtgtgcattttaaaactcgattcatagacacaggtaccatgttccatttccgtcatggtgaagcaaatgaattggcctggctaccactgtggtcgcgtgctacaggtttgacaaaaagatatcatgtttcgatttttttgtgtgtggacaacaatatggaagctaaaattgacatatttttatgtaaagtttttctattctttgatttttaataaactttggaaaccagttt

SEQ ID NO: 116742 - DNA, 1000 bp, Homo Sapiens
ccaactcatactcatttggatctatttagacaacgttaaccaatatatctatagctttagattatattcgataaaagtaattggactttttttctttttttgactcgttgacaagtgtctttgtaatatgtttttagttccctttttttgttgtattataggcagatgaacaaattaaatttggcctcaaagagagaacttactcccttctggatatttttgccacatttctttgcaaaaggagatatatatatctttagtcagttttgttgttatgagaaattatgggttattttgtggcatgctctttgggagctgcacagttatggggaggactcccactgctgtgcaagttaagtcttttacaaaacaaggacagcagaggagggtttgcagagacctccctctgaaaaacacaaagaatggactctctcctgggatgaggacttgctttctttacctccggttctttccatgtcttagttggatgtccctgaaatggacacaggctgtgccattgtgccagaaacattgtgttatcttttatgttgttgttgttgctgttaaactataatatgtgacttctttttttattattttttgtttgaatgctttaaaaatcttttaagtctgtggatctgctgatgtacagtgcctttgctgctatggatcaaaatcaaaagaaccgtgtagatatactttattgtataagtagaaaattacttaatttcatactagaaatggatggatgctgcaagttgaaatggactgtccattgacgttcctaatgtggtagcagaaaaaaaaaaatggtgtcttaagtgcttagtgtttgatgtcattaacagtttcgtaaaactctacagtgtagaaagattttgatactaaactgtgcgttgtacatagttctaatgcattgtattgaccaccagtacttctataatggtagattgtttgtgaattcagacttttaagcattaaacataaataacttctagaa

SEQ ID NO: 116743 - DNA, 1000 bp, Homo Sapiens
tgaatatgataacagcctgtttcacatgaggagatgttaccaatcccgttcgctctgacccttgctggctgatcaccttgagcaacttacttaacatctgtgttcctcagtttctcatgggtaatatagggataattactggcacctgcctcccaggccattctgacgtgtaaccgcatataggagcccactggctgagtagctaccatcatcgctggtggggaaactggtggtaggggtgtgagggtagtgggggtgtcagccccccaggtgtttcagaacaaggcctcgggcactcccaagtctgcctcttggctcccaccctcaaagcccatgttctgtgaggcccaagagaacacatggagtcttagcaaatgcactaatgtattccgggggactgtcacctggcaccactggggcactctgctggctacaactcatacgtcctgtggtggcattgggagagttcccccatgatgagggccaagatagaatctgtaccactcagtgctaccatccccacccctacaccacttccacacaggggcctcatggcatggtcagggtcccagctgtgggtgagagcagggcactgtccagctgtccactggggaagtcaagatgtcctaaggcccaggtcagggcatctggagtctgaaggaccctagttcctagaggcatctggcagcaagaaggtgaggcatcagggaacgggaatcaggctgggactgatcagaggtgaagggacagagagaggagaggaggaagattgagctgggggcaacagccaagctcacctgggcaggtctctgccacctccttgctctgtgagctgtcagtctaggttattctctttttttgtggctatttttaattgctttggatttgttaaatgttttctgtcttctgttaagtgtgttttctctggagatagaatgtaaaccatattaaaaggaaaaagtttcagacaagcaaaaaaaaaaaaaaaaaaaaaaaaaaa

SEQ ID NO: 116744 - DNA, 1000 bp, Homo Sapiens
taccgagctctgcgtactgcttctggcgctgccgcccaccttgtggccctgggctttaccatctttgtggctgtgcttgccaggcctggctccagcctgttctcctggcacccggtgcttatgtctttggctttctccttcctgatgaccgaggcactactggtgttttctcctgagagttcgctgctgcactccctctcacggaaaggccgagcacgctgccactgggtgctgcagctgctggccctgctgtgtgcactgctgggcctcggccttgtcatcctccacaaagagcagcttggcaaagcccacctggttacgcggcatgggcaggcagggctgctggctgtgctgtgggcagggctgcagtgctcaggtggggtggggctgctctaccccaagctgctgccccgatggcccctggcgaagctcaagctataccatgctacttctgggctggtgggctacctgctgggtagtgccagcctcttgctgggcatgtgctcactctggttcactgcctctgtcactggtgcagcctggtacctggctgtattatgccctgtcctcaccagcttggtcattatgaaccaggtgagcaatgcctacctataccgcaagaggatccaaccatgagctcttcccagcctaggggaagcctggatttgcccctccatgtaggagctgggcctagggacctgttgaactctctcagctgagtcaggggacacctcaggcactgggacagttgggcatttggaggcccgtgtgtgaattcctgctcctcatgctggagtgcctcccatttccttcccctttctctgtcatcccagaggaacataggcatcatgtgtctggatgaagctggggctgcaagactgcctctcctgcaaggcagctcatacttgtactgtatgttcagaaattttaggagagaaaaaagtaaaaaatttgtaaaaaaaaaaaaaaaaaaaaaaaaaaaaaaaaaaaaaaaaaaaaa

SEQ ID NO: 116745 - DNA, 1000 bp, Homo Sapiens
gcctcctggtgaaggtaaagatatgccagaagacggtgaagcgctacgatgtgggtgccccatcctccatcaccatcagcctgccaggcacagaccctcaagacgccgagcggagaaggcaactggccctgaaggcactcaatgagcggctgaagagagtggaagaccagtccatctggcccagcatggatgatgatgaagaggagtctggggccaaggtggacagccccctgccctcagacaaagctcccacacccccagggaagggggctgccccagaatccagtctaatcaccttcgaggcagctcccccgacgctgtaactccagaccaccttgagtgtggcacctcccctcccaagccccccttgacatcctctcagctactccagggcacctgactgctctgaggagagggaagaaggcctgctggggctttccatggccttctgctgtttctcgccaacactacccaggactcttgctacctggttccaactccagacaaccactatgccaggcccggagcctctgaggcatcggccagtccaggccctcatctgaggtaagaatgtacatcagctggcagccccaagcaagtggctgcagggacactgatgccacagctcctgggccggccctcacatctgaaactggttgccgagagccctgagccaaggcaaggatttgccaaaaatgttctgggggcccagcaaatgcaggagccgacctggggctgcacatccctgcccatccccagaaagactgttcctgtcaggatttgtttccctctgctgtggcggtgactgcttctggaccagaacagctccagctcccaggtattttctacaggaccacttgagtgggcagccaagcccaggctcgcagtatcaataaagcagttctctgaggaatgacaaaaaaaaaaaaaaaaaaaaaaaaaaaaaaaaaaaaaaaaaaaaaaaaaaaaaaaaaaaaaaaaaaaaaaaaaaaaaaaaaaa

SEQ ID NO: 116746 - DNA, 1000 bp, Homo Sapiens
acatgccgcatgcccccattggactgtactttgacaccgtggctgacaagatccacagtgtgagcaggaagcacggggccaccttggtgcactgtgctgcaggggtgagccgctcagccacgctgtgtatcgcgtacctgatgaaattccacaacgtgtgcctgctggaggcatacaactgggtgaaagcccggcgacctgtcatcaggcccaacgtaggcttctggaggcaactgatagactacgagcgccagctctttgggaagtcgacagttaaaatggtacagacaccttatggcatagttcccgacgtctatgagaaggagtcccgacacctgatgccttactgggggatttagtgccactgaagcctgcgtcagcagcccgagcggggccggcatctgctccccgccgtctgctccctctccactctcttctcaaatggctgacttctggttctccctcaagtgttttttacactgggtgttcaaatttattttaagagatagggagggaggggacataaagggaatgcatacattgctagtcacatttttaaaattaacattttggaatagtgtttatggaaatctttagcttttaatcatttttaccaatttgaacagtttaataaactggttctgctctcttctgaatctcatgcctttggcaccttggtaggtgcaggaggagctcagtgcaaaaatcactttggggcctcattaaccctttagagacaagctttgccccaggctgcggaccagacagatgcttagggaaggttgataccagcttcagtctctactggattagccctactctttcctttcccctccattatttagtgactctgtaagtaagttaaatacacccttattatttagctgttaagtaactataatgaaatctgctgcaaaatctctcttggaatccatgtgcccaggattatattagcattatttttaataaatctatatgcttaaaaaaaaaaaaaaaaaaa

SEQ ID NO: 116747 - DNA, 724 bp, Homo Sapiens
gtagccggaccctttgccttcgccactgctcagcgtctgcacatccctacaatggctaaaacagcaatggcctacaaggaaaaaatgaaggagctgtccatgctgtcactgatctgctcttgcttttacccggaacctcgcaacatcaacatctatacttacgatgatatggaagtgaagcaaatcaacaaacgtgcctctggccaggcttttgagctgatcttgaagccaccatctcctatctcagaagccccacgaactttagcttctccaaagaagaaagacctgtccctggaggagatccagaagaaactggaggctgcagaggaaagaagaaagtctcaggaggcccaggtgctgaaacaattggcagagaagagggaacacgagcgagaagtccttcagaaggctttggaggagaacaacaacttcagcaagatggcggaggaaaagctgatcctgaaaatggaacaaattaaggaaaaccgtgaggctaatctagctgctattattgaacgtctgcaggaaaaggagaggcatgctgcggaggtgcgcaggaacaaggaactccaggttgaactgtctggctgaagcaagggagggtctggcacgccccaccaatagtaaatccccctgcctatattataatggatcatgcgatatcaggatggggaatgtatgacatggtttaaaaagaactcattataaaaaaaaaaaaaaaaaa

SEQ ID NO: 116748 - DNA, 1000 bp, Homo Sapiens
aaggctcccagagtttaaattttgggatgcttctgtttgcggggacggtcggtgcagctgcaaggctggaggcggccggcagtgcccggtgctggctgcagatgcggcgctaaccttctctccccacttgaaggcatgcggctaccaagggcatccttgtggctatggtctgtactttcttcgacgctttcaacgtcccggtgttctggccgattctggtgatgtacttcatcatgctcttctgtatcacgatgaagaggcaaatcaagcacatgattaagtaccggtacatcccgttcacacatgggaagagaaggtacagaggcaaggaggatgccggcaaggccttcgccagctagaagcgggactgaggctgcctcacgtgttgcaagaacagttttgagccattgttaacaatgccttttttcttcacataaagtagttgattacgagggagtcaaattttctttttaaaaaggagcttcaatgatttgtaactgaaatatcaggttctagaagaaactggcgcttaaaccaaatcgcatggatttctttttcagtgacgttaagtgtttctcacggatggaattctagtcagctgcaggcgggaagccaggcgggtggagcccatgggagcaagggcgagtggccggtccccgctgtgccaggtgggcaggcaggagcaaggcctgcgagggaggaacgggccgctccccgccagccgccttccccagcagccgcaggtggtgccagccactccacagagcccgagggatgatctagcctgattcctgcgtgtccgaaagaacttaacgttttaaaggtgattgtcaagtaactgtgtggggttctaatgccagtttcctaattccatctcactggagatgtttaaagttggcctctatcctaatgactcaaaacttggttcttaactaccatgattgcttttgagggcccggaattataaatatatattatattttaaaaaaaaaaaaaaaaa

SEQ ID NO: 116749 - DNA, 1000 bp, Homo Sapiens
attatgaccattaacttgctttggctttattgcagtgactttccaagtttaattattcaaaactttttgaactgactgaattaacttggtatttttaagttgactttttacataaactttataaaccttttataaaaaggaaactataccattactataaatggaaaatcattttacacatcatacctagcaggtaataaaatttaaaaaataaaaattaaatattagaatgtgagaaatttattaaaatatagttctaaaaataagtttcttcctgagaagaatgatactgtttatgatgaatccatagtgaaaagacagtgacctctctttcatccagtctagtatatcactaaatcatcattacgatgtttggctatcaagtcattaattactgtcctcctttcactgagctttattcaaattttgacaatcagagcactgggaagaaataaattccacaactgcctttagccttctggatactttcttttataaaatagaaaccttttccacaccagttctgcagcagtcgctattagatgctcgtggtagaacccatcaatcatctggtcctctgggtactggtgagcatccctggtcttcatacctgtgagtgggctttgtggtgaattactgtaaatatgctaccctcacttttcttggcagttatgtccatgaaatcaagagtgtgatgttctagttatttttttttatatatatttttaaatgttcaatattcaactattgaaacaaatgtacatctgtgaactagctaaaatcatcttatgtaccactaatatgcccagcacattttgtaaaacagtcctgatttggcctccaagggtatttattgaactaccagcagtatctaggagaccacgaaggaataccacgaaggaatttatgctccagtgcttgccataatttgtctgagaaggaatctgttaaataaaagcttttatcctctaaaaaaaaaaaaagaaaaaaaaaaaaaaaa

SEQ ID NO: 116750 - DNA, 1000 bp, Homo Sapiens
acctcactgggcctgcaggagaggctgggcccccagggcctcctgggctgcagggacccccaggccctgctggacctccaggatcaccaggcaaggacgggcaagagggccccatcgggccaccaggtcctcaaggggaacagggagtggagggggcaccagcagcccctgtgccccaagtggcattttcagctgctctgagtttgccccggtctgaaccaggcacggtccccttcgacagagtcctgctcaatgatggaggctattatgatccagagacaggcgtgttcacagcgccactggctggacgctacttgctgagcgcggtgctgactgggcaccggcacgagaaagtggaggccgtgctgtcccgctccaaccagggcgtggcccgcgtagactccggtggctacgagcctgagggcctggagaataagccggtggccgagagccagcccagcccgggcaccctgggcgtcttcagcctcatcctgccgctgcaggccggggacacggtctgcgtcgacctggtcatggggcagctggcgcactcggaggagccgctcaccatcttcagcggggccctgctctatggggacccagagcttgaacacgcgtagactggggtcccgcccgacgtgtctacgtcggctgaagagacagcgggggcggcgggctcctggggtctcgcctgagacggggcacctagccctgggcgagcgccgcacccgggcccgcagcggcaccgcgcccagagcggcctctccccacgcccggggcgcgccggctcagggaggctcggggccgcccatgcagacttttggcctggcgcgatcccccaagaacccctccagggccggcctgcggaggagccgatcctcgcaccctccgctccctccactggccctccaggtcgattccctgggctccaggctcccccgcgcgggcgccgcccaccgccatactaaacgatcgaggaataaagacacttggtttttct

SEQ ID NO: 116751 - DNA, 1000 bp, Homo Sapiens
ggtgcattgacctagaggtggaggagaaatgtgcactcatggagcaggtggcccaccagacaatcgtcatgcaatttatcctggagctggccaagagcctaaaggtggacccccgggcctgcttccggcagttcttcactaagattaagacagccgatcgccagtacatggagggcttcaacgacgagctggaagccttcaaggagcgtgtgcggggccgtgccaagctgcgcatcgagaaggccatgaaggagtacgaggaggaggagcgcaagaagcggctcggccccggcggcctggaccccgtcgaggtctacgagtccctccctgaggaactccagaagtgcttcgatgtgaaggacgtgcagatgctgcaggacgccatcagcaagatggaccccaccgacgcaaagtaccacatgcagcgctgcattgactctggcctctgggtccccaactctaaggccagcgaggccaaggagggagaggaggcaggtcctggggacccattactggaagctgttcccaagacgggcgatgagaaggatgtcagtgtgtgacctgccccagctaccaccgccacctgcttccaggcccctatgtgccccttttcagaaaacagatagatgccatctcgcccgctcctgacttcctctacttgcgctgctcggcccagcctggggggcccgcccagccctccctggcctctccactgtctccactctccagcgcccattcaagtctctgctttgagtcaaggggcttcactgcctgcagccccccatcagcattatgccaaaggcccgggggtccggggaagggcagaggtcaccaggctggtctaccaggtagttggggagggtccccagccaaggggccggctctcgtcactgggctctgttttcactgttcgtctgctgtctgtgtcttctatttggcaaacagcaatgatcttccaataaaagatttcagatgctcaaaaaaaaaaaaaaaaaaaaaa

SEQ ID NO: 116752 - DNA, 1000 bp, Homo Sapiens
cagtggaaaatctgaagagatgcaagcaggaaaaagaaattaaaccaggcctgaggagcgatgcgacaggcatgatggaggtcgagtcctcctactcggacttcatctcctgtgaccggacaggccgtcggaatgcggtccctgacatccagggagactcagaggctgtgagcgtgaggaagctggctggagacatgggcgagctggcactcgagggggcagaaggacaggtggagggaagcgccccagacaaggaagctggcaaccagccccagagcagcgatgggaccacctcgtcttgaatctgaccttgtccaagaaggctggacgagagaccttctgtcccctcccagagggggaaccctggcactggcccagcagcctcttctctgagctccatgtcccagataaaccaggccagactgagaaggctccccagaggcctctgtggcctccactccgggaaagccctctgcccacacccacaggcttcacattcccaccaccttcgcaccgtgcccaggtacactttcaagacactgtaaccacaagatgttatttattgagctggcgccgggacttgggcggggcctgccctacagtgagcagcccacacaggaacgctcctctcgcgagcggcccgggcagggaccctgtcccaacaccaacacctcctctccagcccaatcttctgggtccagacctgcttgtcccttttttagaaaacacttttaaactttttaaaaattttaaaccttttttcagcagatatggagagagctgacaatcaattcacattttttaagccattttagctaaactgtcattgtgcatctctgaggttccctcatggagctccacagatccatttttagggaagggattttggctcaaaacgatctgaccacctctgccctgtccaccaggataagtgacacctaggacccaggaaataaatgccgatgatttgtgtgaaaaaaaaaaaaaaaaaaaaaaaaaa

SEQ ID NO: 116753 - DNA, 1000 bp, Homo Sapiens
gataaggccgggcgaggtgcctgggatgcttctccccttccgcgaggaagagatctaattgggtagggcgggtgtagactagcctgccgagccgcccgctggcacctgcagcctcctgggcgcccgcgggcccggcgagaaagttgttaaagggagcgaggtggttgttcctggggtccgaggcgcgcctctcacgccctgcccaacagaagccgcagtcccgtggggtctggagacgcagtttccttgttaatgacaataaatccctgctccccctgcctcagacatctacgcagcgaaatcgagcctggccttgagggtccacaccgcgaggaagatgcgtgcgcccattccagagcctaagcctggagacctgattgagatttttcgccctttctacagacactgggccatctatgttggcgatggatatgtggttcatctggcccctccaagtgaggtcgcaggagctggtgcagccagtgtcatgtccgccctgactgacaaggccatcgtgaagaaggaattgctgtatgatgtggccgggagtgacaagtaccaggtcaacaacaaacatgatgacaagtactcgccgctgccctgcacgaaaatcatccagcgggcggaggagctggtggggcaggaggtgctctacaagctgaccagtgagaactgcgagcactttgtgaatgagctgcgctatggagtcgcccgcagtgaccaggtcagagatgtcatcatcgctgcaagcgttgcaggaatgggcttggcagccatgagccttattggagtcatgttctcaagaaacaagcgacaaaagcaataactgaaaaagactgtctgtcagcgatgactttatacatcaagggggtcttgttttgctagagagtttggggtttggtttgtggatttcattgtgatttataataaggcttattttcacagaataaaataaagcaaaacgagggaggattttattgggggagtgcagcccaaaaaa

SEQ ID NO: 116754 - DNA, 1000 bp, Homo Sapiens
atgctgacactgggcccagaggtgcacccagacacgatctacagtgtggactggagccgagatggaggcctcatttgtacctcctgccgtgacaagcgcgtgcgcatcatcgagccccgcaaaggcactgtcgtagctgagaaggaccgtccccacgaggggacccggcccgtgcgtgcagtgttcgtgtcggaggggaagatcctgaccacgggcttcagccgcatgagtgagcggcaggtggcgctgtgggacacaaagcacctggaggagccgctgtccctgcaggagctggacaccagcagcggtgtcctgctgcccttctttgaccctgacaccaacatcgtctacctctgtggcaagggtgacagctcaatccggtactttgagatcacttccgaggcccctttcctgcactatctctccatgttcagttccaaggagtcccagcggggcatgggctacatgcccaaacgtggcctggaggtgaacaagtgtgagatcgccaggttctacaagctgcacgagcggaggtgtgagcccattgccatgacagtgcctcgaaagtcggacctgttccaggaggacctgtacccacccaccgcagggcccgaccctgccctcacggctgaggagtggctggggggtcgggatgctgggcccctcctcatctccctcaaggatggctacgtacccccaaagagccgggagctgagggtcaaccggggcctggacaccgggcgcaggagggcagcaccagaggccagtggcactcccagctcggatgccgtgtctcggctggaggaggagatgcggaagctccaggccacggtgcaggagctccagaagcgcttggacaggctggaggagacagtccaggccaagtagagccccgcagggcctccagcagggtcagccattcacacccatccactcacctcccattcccagccacatggcagagaaaaaaatcataataaaatggctttattttctggta

SEQ ID NO: 116755 - DNA, 1000 bp, Homo Sapiens
tctcaccctaccatgagaaagcactggtcaaccgcgatcggacactgcctcttgtggaagagatcgaccagaggtatttcagcatcatcgacagcaaagtgaagaaggtcatgtccatccccaaggggaactcagctctgcgcagggtcatggaggagacctactaccatcacatctaccacacagtggccatcgagggcaacaccctcaccctctcggaaatcaggcacatcctggagacccgctacgccgtgcccgggaagagcctggaggagcagaacgaggtcataggcatgcatgcagccatgaagtacatcaacacgactctggtttcgcgcatcggctccgtcaccatcagcgacgtgctggagatccacaggcgggtgctgggctacgtggaccccgtggaagccggcaggtttcggacaacacaggtcctggtcggacaccacatccctccccatccgcaggatgtggaaaagcagatgcaggagtttgtacagtggctcaactccgaggaagccatgaacctgcacccagtggagtttgcagccttagcccattataaactcgtttacatccaccctttcattgatggcaacgggaggacctcccgtctgctcatgaacctcatcctcatgcaggcgggctacccgcccatcaccatccgcaaggagcagcggtccgactactaccacgtgttggaagctgccaacgagggcgacgtgaggcctttcattcgcttcatcgccaagtgtactgagaccaccctggacaccctgctttttgccacaactgagtactcggtggcactgccagaagcccaacccaaccactctgggttcaaggagacgcttcctgtgaagccctaaccctagaaatcctcagtgacaaaggctgtcctgaggtaggaaaaaaaaaaagaaacagcatttctagaaacctagtcacttcctaaagcaaaaggagaaacattctttacctccaaatgttttagttt

SEQ ID NO: 116756 - DNA, 1000 bp, Homo Sapiens
gaataggctcacatgcccaaactctgggtggggaagaggaaacttactttctgccaccctcagtaagaacacacgaggaggcaggacctcccaccttcaggtctgcatcatccttttcaaatgttcctttaaatgcagcacactgagtttgtacaattgtgttaactgctggaagggacagatgcactgatatatatgcatttgctgttttggccaatattttgaaaatgtatgagctgagttgatctagctattatttaagtatttattgaagtagaggggccttcaaactactttatactagtgatagtttgagttaggtaagcatcttaaagctgtttggtgataaagaaggcagcttagattctgtggttggaaacagtgtagtcgcttccctttttaggaagccctgttaatatgctcattgaaaacatggcattgaagcaggcacttgcgtggatgtttctcacttgagcacgatatttaggctctcttccaactcactctattctgtcctcactcctgttttggatttttctctttgcatgtttgaaatgttttatgggaatgtattagaactcttttcttctaaggactgagacttccaggggattgccatcttacctgtctcttctccatgagggagaaggaagcagctagctatgtccctagctgcaggaagcccctattttttccaagcacgaagccaccagtctcccccaaggagcatcaggaagggacatggatgtgctcctgccacagggcccttcctacctttggatctgtgagaaggtgaatacaaagcagcaggcagagtaaaatctgctgggactgcctggagatttgtcaggagctgcagacaagtaccttggagcattctgttatttttggaaagttcaaatatgcagggacaaggaggttgctgactgtactgacaggctctaagtcattttctccaaaaactatctattcaattatcaggggctggtcttgaggaagg

SEQ ID NO: 116757 - DNA, 1000 bp, Homo Sapiens
tcaaagtgtttcatcaacaacaagaccattgcttcgacaaatagaaaatttgcaagcaaccctgggatcccagacatcgtcgtgggagaaattagagaagaatctttctgataggcttggtgaatcccagaccttgctggcagcagcagttgagagagaacgtgcagctacagaagaactccttgctaacaaaattcagatgtcttccatggagtcacagaattctcttttaagacaggaaaacagtagatttcaagcccagctagaatcagagaaaaataggctgtgtaaactggaggatgagaacaataggtaccaggttgaattggaaaacctaaaagatgaatatgtaagaacacttgaagagacgaggaaagaaaagacattgttgaatagtcagttagaaatggaaagaatgaaagttgaacaagaaaggaagaaagccatttttactcaagaaacaataaaagaaaaggaacgcaagccattttctgtttctagcactcccaccatgtcacgctcaagttcaataagtggtgttgatatggcaggactacagacatcttttctgtctcaggatgagtctcatgatcactcatttggaccaatgcctatatcagccaaatggaagcatctttatgctgcctgtaaggatgggagcaggatcaagcatattgaaaacctacagtctcagctaaagctaagggaaggggaaatcactcatttacagctagaaattggcaatctagaaaaaactcgatcaataatggctgaagaactagttaaattaacaaatcaaaatgatgaacttgaagagaaggtgaaggagatacccaaacttagaactcagctaagagatttggatcaaaggtacaacactattctgcagatgtatggagaaaaagcagaagaggcagaagaacttcgattagatctcgaagatgtaaaaaatatgtacaaaactcaaatagatgaacttttaagacaaagtctcagttaa

SEQ ID NO: 116758 - DNA, 1000 bp, Homo Sapiens
tcgaacagcaaaaggtcacaaattacattacccaatggtggaatattgtatacctacaacatctggggaagatgtacgagacttcacaaaggtacttaagaacaagttcaggtcgaagaagtactttgccaaacaccctcgacttggttacctgcctgtccagacagttcttgaaggtgacaacttagagactcctatcacactcatcagtatgtggccagagcactatgacccctcacaatctcctcaactgtttcatgatgacacccattcaagaatagaacaatatgccacacgactggcccagatggaaaggactaatgggtcttttctcactgatagcagctccaccacaggaagtgtggaagacgagcacgccctcatccagcagtattgccaaacactcggaggagagtccccagtgagccagccgcagagcccagctcagatcctgaagtcagtagagagggaagaacgtggagaactggagaggatcattgctgacctggaggaagaacaaagaaatctacaggtggagtatgagcagctgaaggaccagcacctccgaagggggctccctgtcggttcaccgccagagtcgattatatctccccatcacacgtctgaggattcagaacttatagcagaagcaaaactcctcaggcagcacaaaggtcggctggaggctaggatgcagattttagaagatcacaataaacagctggagtctcagctccaccgcctccgacagctgctggagcagcctgaatctgattcccgaatcaatggtgtttccccatgggcttctcctcagcattctgcactgagctactcgcttgatccagatgcctccggcccacagttccaccaggcagcgggagaggacctgctggccccaccgcacgacaccagcacggatctcacggaggtcatggagcagattcacagcacgtttccatcttgctgcccaaatgttcccagcaggccacaggcaatgtga

SEQ ID NO: 116759 - DNA, 1000 bp, Homo Sapiens
aagtccccagttgccaaggatgtggacttggagttcctggctaaaatgactaatggcttctctggagctgacctgacagagatttgccagcgtgcttgcaagctggccatccgtgaatccatcgagagtgagattaggcgagaacgagagaggcagacaaacccatcagccatggaggtagaagaggatgatccagtgcctgagatccgtcgagatcactttgaagaagccatgcgctttgcgcgccgttctgtcagtgacaatgacattcggaagtatgagatgtttgcccagacccttcagcagagtcggggctttggcagcttcagattcccttcagggaaccagggtggagctggccccagtcagggcagtggaggcggcacaggtggcagtgtatacacagaagacaatgatgatgacctgtatggctaagtggtggtggccagcgtgcagtgagctggcctgcctggaccttgttccctgggggtggggcgcttgcccaggagagggaccaggggtgcgcccacagcctgctccattctccagtctgaacagttcagctacagtctgactctggacagggggtttctgttgcaaaaatacaaaacaaaagcgataaaataaaagcgattttcatttggtaggcggagagtgaattaccaacagggaattgggccttgggcctatgccatttctgttgtagtttggggcagtgcaggggacctgtgtggggtgtgaaccaaggcactactgccacctgccacagtaaagcatctgcacttgactcaatgctgcccgagccctcccttccccctatccaacctgggtaggtgggtaggggccacagttgctggatgtttatatagagagtaggttgatttattttacatgcttttgagttaatgttggaaaactaatcacaagcagtttctaaaccaaaaaatgacatgttgtaaaaggacaataaacgttgggtcaaaatggaaaaaaaaaaaaa

SEQ ID NO: 116760 - DNA, 1000 bp, Homo Sapiens
atgaatctgatttttatgatgatgaaaattttaccagcagaaggattttttaaagttttttttttttttttaataataatctaggcatgaagagcaaaaatatcccttccggagtctttgaagctgaaaatataaaacaaataaaaaataaaaaaataaaaacccacaaaaatgttgaaccaaacctccctgctaatctccatgcccacgttctttcccaccctgttcccagtcttctgacaaactgtgtacatagcggactcctcctttctcctccgaggtggttttaaaggctttttggtgtatagaagtttgtccatttgtaaaactccggattgcgttcctccccgccttccgccccttcccttccctaaagtgatgggctttctcttttctctttttagtttacccggtttctttttaagtaatgtggaagaaaatggtttattttgtattgtggtattgaatattgtgttcctttttatgaggcaacctgattgtaaacttcatgtaactatagactggaaaaaatgagccgtgccaaagtctcccttctgtttcttcagcacattgacccatagcacacacatacacaccaccaccaacaacgcttgtgaatgtatttttctgttagctgggtttacatgtgatgttttagtgcttttgcaagttcaatttgttagttcctgtatgaaagattgtgggggaaaaataaacgtcgtgccgttagctttttccgtaataacacccttccttctgtaaatacccgttaccatatttatccatttgtaattaaattatggtattaacttgctacagaggaaacaatatttataaagaatgtttcttaactataaatatgtacaattgtgggcataaactgtttcagattttttatttgaaggttttaagtggtttgatcatttcttgtgatgttttgagagtaatgcatacagaaatataataaaatgtgttgaaactgcaaaaaaaaaaaaaaaaa

SEQ ID NO: 116761 - DNA, 1000 bp, Homo Sapiens
tgaatgtgggaaggccttcagccagagctcatctctcattcagcaccagaggattcacactggagagaagccttacaagtgcagtgaatgtggaagagccttcagccagaatgccaacctcaccaaacaccagcgaacccacaccggagagaagccctacagatgcagcgagtgtgagaaagccttcagtgactgctcagctcttgttcagcatcagagaattcataccggagagaagccctacgaatgcagcgactgtgggaaggccttccgtcacagtgcaaacctcacgaaccatcagaggactcacaccggggagaagccctacaagtgcagcgagtgtgggaaggccttcagttactgcgcagcgttcattcagcaccagaggattcacaccggggagaagccctacagatgtgccgcgtgtgggaaggccttcagccagagtgcaaacctcacaaaccatcagaggactcacactggggagaaaccctacaagtgcagcgagtgtgggaaggccttcagccagagtaccaatctcataatccaccaaaagacccacaccggggagaagccatataaatgtaatgaatgtgggaaattcttcagtgagagctcagccctcattcggcatcatataatccacaccggagaaaaaccttatgagtgtaatgagtgtggtaaagcgtttaaccagagctcatcccttagtcagcatcagagaatccacacaggcgtgaaaccctacgaatgcagcgagtgtgggaaggccttccggtgcagctctgccttcgttagacatcagagactccacgccggagagtaactaggaacatggtagaagtggagagagtcccggacatgccgactcaggacaggtgggtgaggatctgagaaatgctaaaggcttgaaagcatctgaagacatctaacttagagtctgcagcccagagccacatgcaaaacaccttcaataaacagccactatttcacatgctgt

SEQ ID NO: 116762 - DNA, 1000 bp, Homo Sapiens
caaaaatggtttgtttttaatatgtagagcattatgtgtggactactggaaggactcgtgtagggaaagcccaagaatgaccttgctgaggcctggattgggaggcacagtggccacatttggaggaagttcacatttcctggcatgcagacccaaaactgggttctggctctgcctgctgggatctgttatctctggtgggctggcagtcataattcacaattcagacagcccaggcttcctccacagtggtccaaggagcagtcctcagtgggggcaggtgtgggccctacccctaagctagaatgtggttgtcagaaccctgaaagtattagttctaaaaaaaaaaagatatatactagaagtaattgttttatcaattcattgtataataaacaggagtgagacttcattgtatgacttcagttaaaatactattttgtatgcattctttattcacttaagaagcttgtctgcaataataaagccacgtcatgtcttcttttgggagggagagagtcgatggcaggagggggttttgggtgggccactgaaaaggggtaccgaataggttgtgtgatgaaattctgtgtcttggaactggaattgagtttcgatgttgatgaactgattcaaccaggtgttgaaggcacgacagccactgctctacgaaaaggcagagtacgtttttcccttctggttgtaacctggttgagagcttcccctttatcagattggcagctaaacagttgtattagataatccttaaatctgacatccagcctgttacgctctagggctcgctgcttggcctgcgtttgctttttattgtgtatccgttcccctcctacggtgtgctcctgaatgaaggtttctatgtaagcagatgatgattttacctgtcaataccagcactgtattactaacatgcaaaatactgcagatttattttgaaaattaaagttaactggtcacaaatgtaaaaaaaaaaaaaaaaaaa

SEQ ID NO: 116763 - DNA, 1000 bp, Homo Sapiens
acgcaactggtaattgcagaatccactttgcctgtgtaagtgaaaaatatagactgttatcttgttggccctatgaaattctgcacttttcattatatactctaccttcattaattacttctggcaagatgttctgccttagcactcagttgcattcttttcctttttcttcctgttcattatgctttaattctgaggaccatatgagggtagaatatattatcttttaaaaattacaaaaatttgtataggcaaaccatttcttaaagttgatggccaaattttaaaatgttatttttcatatcatttataatcttgtcacaatccacttaaagaagtttggttatatttcagtgaaaattttcttccagagtaggttttttttcgtgggttggggggtaactttactacaattagtaagtatggtgcagaatttcatgcaaatgaggagtgccagcagtgtgataatttaaacatatttaaacaaaaacaaaaaaaatgaatgcacaaacttgctgctgcttagatcactgcagcttctaggacccggtttcttttactgatttaaaaacaaaacaaaaaaaaataaaaaagttgtgcctgaaatgaatcttgtttttttttataagtagccgcctggttactgtgtcctgtaaaatacagacacttgacccttggtgtagcttctgttcaactttatatcacgggaatggatgggtctgatttcttggccctcttcttgaattggccatatacagggtccctggccagtggactgaaggctttgtctaagatgacaagggtcagctcaggggatgtgggggagggcggttttatcttcccccttgtcgtttgaggttttgatctctgggtaaagaggccgtttatctttgtaaacacgaaacatttttgctttctccagttttctgttaatggcgaaagaatggaagcgaataaagttttactgatttttgagacactaaaaaaaaaaaaaaaaaaa

SEQ ID NO: 116764 - DNA, 1000 bp, Homo Sapiens
tcaattggaatgtaatttattaaaccatgtatttaaagagatatttttctttaaaagccaagttactttctcatatacagcattttaggaagcatgattttttttttctatcatctattcctccaagcatgtttaattgaagaaagtattaatatctctttagataagcttgtattgacctaatttggtttatgatgtgtcagagctaattcatgttcagggtgagcgttgtacctaccaacaaatttcctggttgggtatgcaaatggttattttctttttattgttgttaattgggactttctgttaatgaaaagcactattcccaagattaatagtgttctatgcacaatgaagcacctaaaaacactgcttgatattataaatttaaaacacaagtgaaagtttagccatggttttgtgcggcatcatagttatgtcaataaagtttatttaggtcatagaatatcctaaagtatcacatagttaaatttttcagtcagtgaagaccgggagggaatgtcagtgaattggcttgaatgttctgtggcaatccacaggtctagccaaatattgaaataggagtttagggtataatttgccttgtgatgtttggcagtcactgtttatactttaaaggttatattttaagctatttgagattgcttttgggaagatcactagatttatggaggaattagtcacaaatgacttgtagaaaatactgtcatatagttcatttcatcattttctgttgcaggaagccactccaccacagaatgctaatatgccagtggtacccagtacctcttgtatataggttattgcaaatattgttctgaaatgcttaacttcagaattacattttttaaagtaaataattgttttaaatctattttgtaaagatataaagtacaatagaatttctggagtacagattaaactatttgcactaacacacgtgacgtgcatgatttaataaaataactttactctccct

SEQ ID NO: 116765 - DNA, 1000 bp, Homo Sapiens
ctacagggaacactaacagtgttttaaaaggtgcagttactaaagaggcagcaaagatcattcaagatgaaagtacacaggaagatgctatgaaatttccatcttcccaatcttcccagccttccaggcttttaaagaacaaaggcatatcatgcaaacccgtcacacagaccaaggccacttcttgcaaaccacatacacagcacaaagaatgtcagacagaatgccctgttcgtgcagtttgctgaggtgttcccgctgaaggtatttggctaccagccagatcccctgaactaccaaatagctgtgggctttctggaactgctggctgggttgctgctggtcatgggcccaccgatgctgcaagagatcagtaacttgttcttgattctgctcatgatgggggctatcttcaccttggcagctctgaaagagtcactaagcacctgtatcccagccattgtctgcctggggttcctgctgctgctgaatgtcggccagctcttagcccagactaagaaggtggtcagacccactaggaagaagactctaagtacattcaaggaatcctggaagtagagcatctctgtctctttatgccatgcagctgtcacagcaggaacatggtagaacacagagtctatcatcttgttaccagtataatatccagggtcagccagtgttgaaagagacattttgtctacctggcactgctttctctttttagctttactactcttttgtgaggagtacatgttatgcatattaacattcctcatgtcatatgaaaatacaaaataagcagaaaagaaatttaaatcaaccaaaattctgatgccccaaataaccacttttaatgccttggtgtaagtatacctctgaacttttttctgtgcctttaaacagatatatattttttttaaatgaaaataaaaccatatatcctattttatttcctccttttaaaaccttataaactataacactgttaaaaaaaaaa

SEQ ID NO: 116766 - DNA, 1000 bp, Homo Sapiens
gagaagacactcttcctctaccactacctgcccgcactcaccttccaaatccttctgctccctgtggtcctgcagcacatcagcgaccacctgtgcaggtcccagctccagaggaattctttcagcgccctggtggtggcctggtactcctccgcgtgccacgtgtccaacacgctgcgcccactcacctacggggacaagtcactctcgccacatgaactcaaggcccttcgctggaaagacagctgggacatcttgatccgaaaacactagaacaagagtgtggcaaagaacacccgtgctggggtcgggacgaggttgaagggtcttggtcaatgtacgtaatgagcagggtgggcccacgctgggaggacacgggctgggctgagcagggcctctagtggaacacattgggggtctcattgaaaagctctctgatgagcacctccttttgtgcaaagttaattttttctcgacaataaagatattccgtgtcttcacccctgaactaagacacagggagtatttcagaggccagcgtaggagtcatcgacaacgaaaagccgagaacccagggccagcagtggaagcctcaagcaagaccagggcctggtccttgctaattgctgcagggtggagtttgatctggcagacccgatcctccttcatgaacacccagcaacctgagcaagtcccggccctgccctcagcgagcccggcaggcgtcccgggacagctcagtgttggagggccacctgaaccacgagccagggctggggcttgcatgtcattgtctatgacagcgtcaagactgcccttggcaccgtgctgtgtggaaaccctcccctctgagactccactgagacgtggctgagtgaaatcttcctcgtcagtggtcaaggtgtgtcatccatacagctccatgcctttgtcttttttaaatgtaattaaaaaaggaaccaactggcgtttgtaaaaaaaaaaaaaaaaaaaaaaaaaa

SEQ ID NO: 116767 - DNA, 711 bp, Homo Sapiens
gcctggggtcacagggatgccgcggctcctccgcttgtccctgctgtggcttggactcctgctggttcggttttctcgtgaactgagcgacatcagcagtgccaggaagctgtgcggcaggtacttggtgaaagaaatagaaaaactctgcggccatgccaactggagccagttccgtttcgaggaggaaacccctttctcacggttgattgcacaggcctcggagaaggtcgaagcctacagcccataccagttcgaaagcccgcaaaccgcttccccggcccggggaagaggcacaaacccagtgtctacttcttgggaagaagcagtaaacagttgggaaatgcagtcactacctgagtataaggataaaaagggatattcaccccttggtaagacaagagaattttcttcatcacataatatcaatgtatatattcatgagaatgcaaaatttcagaagaaacgtagaaacaaaattaaaaccttaagcaatttgttttgggggcatcatccccaaagaaaacgcagaggatattcagaaaagtgttgtcttacaggatgtacaaaagaagaacttagcattgcatgtcttccatatattgattttaaaaggctaaaggaaaaaagatcatcacttgtaactaagatatactaaccatcttagaattttttctaacctaataaaagcttaatacatttatttaaaaa

SEQ ID NO: 116768 - DNA, 1000 bp, Homo Sapiens
cccacctgtattctcatagcatccttggcctgctggaacggaaagagaccagagcaggaaaccccatcgctcacattagcccccaccgcctactggcaaggaagaacatggtttccaccaagatccaggacaccaaaggctgccgggcgtgctgtgtggcggagggtgcgagctctgggggcccgttcctgtgcggtgcattggagacgtccgttgtcctgcttcagtggtaccagcccatgaacaaattcctgcttgtccggcaggtgctgttcccactgccgacgcctctgtccgtgttcgcgctgctgaccgggccaggctctgagctgcccgctgtgtgcatcggcgtgagccccgggcggccggggaagtcggtgctcttccacacggtgcgctttggcgcgctctcttgctggctgggcgagatgagcaccgagcacaggggacccgtgcaggtgacccaggtagaggaagatatggtgatggtgttgatggatggctctgtgaagctggtgaccccggaggggtccccagtccggggacttcgcacacctgagatccccatgaccgaagcggtggaggccgtggctatggttggaggtcagcttcaggccttctggaagcatggagtgcaggtgtgggctctaggctcggatcagctgctacaggagctgagagaccctaccctcactttccgtctgcttggctcccccaggctggagtgcagtggcacgatctcgcctcactgcaacctcctcctcccaggttcaagcaattctcctgcctcagcctcccgagtagctgggattacaggcctgtagtggtggagacacgcccagtggatgatcctactgctcccagcaacctctacatccaggaatgagtccctaggggggtgtcaggaactagtccttgcaccccctcccccatagacacactagtggtcatggcatgtcctcatctcccaataaacatgactttagcctctgcaaaaaaa

SEQ ID NO: 116769 - DNA, 1000 bp, Homo Sapiens
ggaggtgtccaaggaccccaagggcctcgagtggctgtggagcccccagatcgtggggctgtacaaccggctgctgcagcgctgcgagctcaaccggcacacgacggaggcggccgccggggcgctgcagaacatcacggcaggcgaccgcaggtgggcgggggtgctgagccgcctggccctggagcaggagcgtattctgaaccccctgctagaccgtgtcaggaccgccgaccaccaccagctgcgctcactgactggcctcatccgaaacctgtctcggaacgctaggaacaaggacgagatgtccacgaaggtggtgagccacctgatcgagaagctgccgggcagcgtgggtgagaagtcgcccccagccgaggtgctggtcaacatcatagctgtgctcaacaacctggtggtggccagccccatcgctgcccgagacctgctgtattttgacggactccgaaagctcatcttcatcaagaagaagcgggacagccccgacagtgagaagtcctcccgggcagcatccagcctcctggccaacctgtggcagtacaacaagctccaccgtgacttccgggcgaagggctatcggaaggaggacttcctgggcccataggtgaagccttctggaggagaaggtgacgtggcccagcgtccaagggacagactcagctccaggctgcttggcagcccagcctggaggagaaggctaatgacggaggggcccctcgctggggcccctgtgtgcatctttgagggtcctgggccaccaggaggggcagggtcttatagctggggacttggcttccgcagggcagggggtggggcagggctcaaggctgctctggtgtatggggtggtgacccagtcacattggcagaggtgggggttggctgtggcctggcagtatcttgggatagccagcactgggaataaagatggccatgaacagtcaaaaaaaaaaaaaaaaaaaaaaaaaaaaaaaaaaaaa

SEQ ID NO: 116770 - DNA, 1000 bp, Homo Sapiens
gaacgtctgcttcagctacccctgccgccccggcttcgaggtgctgaaagacttcaccctgacgctgccccctggcaagatcgtggccctcgtgggccagtctggcggaggaaagaccaccgtggcttccctgctggagcgcttctacgaccccacggcaggcgtggtgatgctggatgggcgggacctgcgcacccttgacccctcctggctccggggccaggttgtcggtttcatcagccaggagcccgtcctgtttgggacgaccatcatggaaaacatccgctttgggaagctggaagcttccgatgaagaggtgtacacagccgcccgggaagcgaatgctcacgagttcatcaccagtttccccgagggctacaacacggtcgtcggtgaacggggcactaccctgtctgggggccagaagcagcgcctggccatcgcccgagcccttatcaagcagcccacggtgctgatactggatgaagctaccagcgcgctggatgcagagtccgagcgggttgtacaggaggccctggaccgggccagtgcaggccgcacggtgctggtaattgcccaccggctcagcactgtccgtggggcccactgcattgtcgtcatggccgatggccgtgtctgggaggctgggacacatgaagagctcctgaagaaaggcgggctatacgccgagctcatccggaggcaggccctggatgccccgaggacagcggccccaccgcccaaaaagccagaaggccccaggagccaccagcacaagtcctgagaagggccccctgaggtgtggtcgctgccaagcatcagtgttagggctggggctcagcctgggggagcctactggggactgagcccccaggagggccagcatgtggagagtcgctgcggctgctcctgctcacaataaagccggggccgagcagctggcaggggaggccaatccctccctcccctccccagtcctgccggctgcctccctcccacc

SEQ ID NO: 116771 - DNA, 1000 bp, Homo Sapiens
tctggggccttctcctccctgcagtgccaacatgcactgcccacagcaggagctggatccagcgtcagtgtgtcgatgggaactgaagactagtccataggagctggaagaactttgtccctttacttctgatttgaaattgtaccttttctcaggcctgtgattcacagactttaacatgaatcagaatcacctggagggctcatgcaatcagattgccagatctcgcctcagcgtttctggttcaataggttttgggggagaccaagaacgttaacatttctagcaagtttccaggtgatgctgttgttgctggtctagagactattttgagaaccactgtccaggagcgtggttttctgattgtgatctgaggttctgccccaactgcacagcagttgggctgcttgttaaaaatgcaggccaggtgcggtggctcacacctgtaatcccagcgctttgggaggctgaggcaggtggatcacttgagctcaggagttcaagaccagcttgggaaacatggcaaaacccgtctttatgtgcctggaatcccacctgctcaggtggctagggtggatggatcgcttgagcccaggaggtggaggttgcagtgagctgagattgcaccactgcattccagcctggatgacagagcaaaaccctgtctcaaaaaaatgcagactggccaggcacagtggctcacacctgtaatccgactgtaagctcatcaccttgggaggccactgtaggaggatcaattgagcctagaagttcaagaccagcctgggcaaagtagggagaccccttctctacaaatagtaataaaatgaaccgggcatagtagcatgtgcctgcggtcccagctgctctgataagaggaggctcacttgagcccaggaggttgaggctgcagtgagcagagcgtgccgctacactccagcctgatgacagaccgagacactgtctcaaaaaaataaaaaaattcagattgctgaaaaaa

SEQ ID NO: 116772 - DNA, 1000 bp, Homo Sapiens
aagacaggacacagaactaacacagtgaaaaaaatcagtaccacatttggacagtataggtgagaaaacataattataaaaatgatgccatgaaaaattccacagatcagtttagttgtatagttgtcaaagttatatgtgatatcaatgaagaaatatttgtagcatgtaaacggttatttctgtttcttaaaaagtattgttagtgggctattaaacttggatttttctttttattaatgcagtatgttctttttattcaagtatgaacttgttgagaaactatagtaatatgatttttaagagatttatgttctacttaaaatgtgaattgtacttctgagctgccttaatgcaaggtcatttatatttgttaagaggaaataatcaagatcactcatatcccaactgaatctgaggttttataaatccctcaaacgattgctgagagcctgattgtggaaagaagtgagatgcaccttattttcaagaagtcctgggaagcgctctcctagcacgtccatttccaggaggagaagcaagcagatgagaggttttccattttgtcatccaaggtagctgtgcacttgccttgttgctgaagttccaataatgtgaaaaccaaagtagaggtttttttcttcttctttttgttttctattaatttcacttataccaaagtgtttgaaagtatgaaatgtgttgcttctgagttatataaggctacttcatgacaagactgctttgtaatatttcactttgttttactacaaattcagatcactttgttttactataaattcagattatccaaatattttcctaatactatgtgggaatgctgattttcttttgttacgtagtggaaacattttgcattgtttacatagttctcatggaacatggaaatttttgaaagtgatatatgatacacattttttgtgtatgtattctaattagtgtgaataaagcagtaacattaatgcattttttaagcagc

SEQ ID NO: 116773 - DNA, 1000 bp, Homo Sapiens
gaggtgttcttgaagacaggaggaggctcccgctgttaataaatattgtttcattcttctctcttcctgtcaccttctgccaagacattgatggcttctgacatcttatttggtgtctcaaagctgtatttccaagacagtggtacaaggtgacccttaattacccgtatcatggttcttgaccagcacattcaatcctccaacctaccctactgccatgaccttccgcacatctctaagttttatctttgcaatactcaaggttctcggaaatttgctaatggttgtgataaaccatacagcttgagccagtgaggcagattgggctggtgccttcgtctgagttttcctgctttcctgcctcgtgcagattctgaggtatatctgctgccttggaagacataagaagcagtgatactccctggctcggttattttctccatacaatgcacacatggtacaatgatagaaggcaaaattgccactgtcttcttttttttctcatatatctaaggaagatatatcaggttgtgcctcatgtaccgcttctagtgaaatgtagaggaaggctcaaaggagtcaacatttagatctggaagggacaagtcatgccttgggcctagaataccctgatgagaaaagagaagaggaagggaggccatatctacaacacagcctctcggcactgctgctccttattttaactttgtcttgcattgtcctgtatttatcacagtttctgttgaacagcttttcaagtatttggggagtttatcttgccatcctccccttctggttctctgcacccacctgtcccactgcagttccttccgtgctctgtgactttaagagaagaaggggggaggggtcccggattttatgtttgtttgttttttctccttagcagtaggacttgatattttcaattttggaagaactaaaagatgaataaactgggttttttttgttgtttgtttttgtaaaaaaaaaaaaaaaaaaa

SEQ ID NO: 116774 - DNA, 1000 bp, Homo Sapiens
cagacccagctctcaatgttgaaacagaaatagaaattttgaaaaagctaaatcatccttgcatcatcaagattaaaaacttttttgatgcagaagattattatattgttttggaattgatggaagggggagagctgtttgacaaagtggtggggaataaacgcctgaaagaagctacctgcaagctctatttttaccagatgctcttggctgtgcagtaccttcatgaaaacggtattatacaccgtgacttaaagccagagaatgttttactgtcatctcaagaagaggactgtcttataaagattactgattttgggcactccaagattttgggagagacctctctcatgagaaccttatgtggaacccccacctacttggcgcctgaagttcttgtttctgttgggactgctgggtataaccgtgctgtggactgctggagtttaggagttattctttttatctgccttagtgggtatccacctttctctgagcataggactcaagtgtcactgaaggatcagatcaccagtggaaaatacaacttcattcctgaagtctgggcagaagtctcagagaaagctctggaccttgtcaagaagttgttggtagtggatccaaaggcacgttttacgacagaagaagccttaagacacccgtggcttcaggatgaagacatgaagagaaagtttcaagatcttctgtctgaggaaaatgaatccacagctctaccccaggttctagcccagccttctactagtcgaaagcggccccgtgaaggggaagccgagggtgccgagaccacaaagcgcccagctgtgtgtgctgctgtgttgtgaactccgtggtttgaacacgaaagaaatgtaccttctttcactctgtcatctttcttttctttgagtctgtttttttatagtttgtattttaattatgggaataattgctttttcacagtcactgatgtacaattaaaaacctgatggaacctggaaaa

SEQ ID NO: 116775 - DNA, 1000 bp, Homo Sapiens
accccccgtctctacaaaaaaatttaaaaattaactgggcatggtggctgaggtggaagaatggaagaatcacttgagcccaggagtttgaggctgcagtgagctatgattgcaccactgtactcctgccttaaaaaaaaaaaaaaaatcccaatagtccatgaaggctttgatctcttgggaagttcttcatagatgctgtcacatttcttaaagcaaccttttaatatgcagataataccccccaacttttttagagacagcctgtctcttaaaaaaaaaattaatttggtagtgagagcttgtgtcactgccactctgttttatccctgaaattaaaggataacataaggaggacttgggcctttctgacatcatcctgaagagacaggactttgcgtttttcctctgggacctacagtgatgagaatttaatgattatctcctccactataatcctctttagggtgattttttaaatcaaaacccagtgaatctcattactcctaagaaacgaaagattccttcaaagccttttcaggcacatggtttcaacaaagcctggctttgacattccttgtcctgaggagcactttccaggcatagttacagcttccccactgtatttacaagccagaattgtgcaactcttctggatcattaataaagtagcaagatcctcaaaaaacccaaaaacaccattctctaatagtcatgacaaatggcttcagtatggcttgttttttattttccagatggctttttctcttattttttgaagccccagtctttgattttacaggtaactttcaaaacatcatgatgctgccaaatgtacttttgtaaacttaaacattatgattcctgtattatttcagtgagagctacagtgtgatatttcagagtctattaaataaaaatgtgagtttgaattacaccatctgtgccaattacaaagcaattaaaagatttattttttatgaaaaaaaaaaaaaaaaaa

SEQ ID NO: 116776 - DNA, 1000 bp, Homo Sapiens
ctcactttcgtccaggacagtatgtggatgtcacagccaaaactattggtaaaggttttcaaggtgtcatgaaaagatggggatttaaaggccagcctgctacgcatggtcaaacgaaaacccacaggagacctggagctgttgcaactggtgatattggcagagtctggcctggaactaaaatgcctggaaaaatgggaaacatatacaggacagaatatggactgaaagtgtggagaataaacacaaagcacaacataatctatgtaaatggctctgtacctggacataaaaattgcttagtaaaggtcaaagattctaaactgcctgcatataaggatctcggtaaaaatctaccattccctacatattttcctgatggagatgaagaggaactgccagaagatttgtatgatgaaaacgtgtgtcagcccggtgcgccttctattacatttgcctaacatctttggacgtggcagaaccttacatattctgtgagcttcgatgagccagagtgatatcataaccaccagaaatcatactctcctttcttagtcacaacaaaatcacacatgtcatctttgtcaagggcataaatatatcattcatacccccattaaattttgttagaaaaattaccacattaaatatatgagttaagtagattggatttgctgaaattggtgttgggcatattagcaaaatattcttaatttgtggactcgattcttttttactacatatttcccaagttatcttaagatgtctgtaaatttaacttttattaaagttttgtcaatctttgtgaaatagtggttgtggaacagtagaaaaccatatggggactatagtgcaacctatttgggtaaagaaaccatttgctaaaatggagaaagtaaatagatttttatttaaattacagaaacatgttaaaggccggacaaaggaaagacaataaaatcataaattatcggtcctgtttaaaaaaaaaaaaaaaaaa

SEQ ID NO: 116777 - DNA, 455 bp, Homo Sapiens
cttcctctttccctcggagcgggcggcggcgttggcggcttgtgcagcaatggccaagatcaaggctcgagatcttcgcgggaagaagaaggaggagctgctgaaacagctggacgacctgaaggtggagctgtcccagctgcgcgtcgccaaagtgacaggcggtgcggcctccaagctctctaagatccgagtcgtccggaaatccattgcccgtgttctcacagttattaaccagactcagaaagaaaacctcaggaaattctacaagggcaagaagtacaagcccctggacctgcggcctaagaagacacgtgccatgcgccgccggctcaacaagcacgaggagaacctgaagaccaagaagcagcagcggaaggagcggctgtacccgctgcggaagtacgcggtcaaggcctgaggggcgcattgtcaataaagcacagctggctgag

SEQ ID NO: 116778 - DNA, 1000 bp, Homo Sapiens
aagaatttaatgatgatactgactgatgaaaatagcatttattaatgattgaggtatttgtttaaaattcagttcatccaaaatggagtaatatccttcaccttcagtgtgtaaccaagcacaaaaacagtatcaatgttgaatctgtgaatggttttccgtttactgtgatgtgctactgtaaatatacctctttaattacttctggtctctttggtgacctgtttaaatttgtgtacattattgtacatagaataaaatgttttcacatttttatgacaaaatttgaacaaatagctttttaatagatgtaatgatcatatggtgcgtcacctgtgccaaatattcttcaatgaaattatataatgtaactttggacctcagtttttctttagaaatgggtgggagaatgaaaatgcaaatcaggaaaccacattaaagtcaaggaaataaaataatttgaccagaggataaaggacatgagagagtattttaaaactaaagaaaaaattagctgccagaagcaactgaggaccttttttgaaacttgagtagcagtgtaattgagctgagtttgaaagtcctgattcagagagagactgagggttgacaaataaactgtatcaactaaactttgatataaaccagaatgtgctaaatgttttttatgtaaaattgtatatttgttagccattctgtgtctgcagtattgtcataaaattgtcctttcattcttttgaagatattacaaaacaaaaatagttttttttaaattgttttaaactaagatactcaatgatataaaaacatcctgatctgattttacgagaaaaagaaggggaatggtggggaatggtgtgtaccgatatatagtatttctttagacaacttgcagataatttctttattgaaactatcaggaagttttactatgaaattttacatacatgatggaaagtggaagacatataccaattatattccaggaaaaaatacttta

SEQ ID NO: 116779 - DNA, 1000 bp, Homo Sapiens
tgtatagcttaccgcaaggatcagactgttgctggacacgacgtctgtgtggagccaggaggaacacatgtggtgtctgtatggctgctctctacctaggacaccagctgccacttcttttgcctcatgaagaactcttgggccagccaaactgggaacctaggtgtctgggtcttgtgacaaccaaagcactttgacactaccccctgccgagagaagaggagtggatgagcctgcgggtttgcctcaagaaacttcatgagggtctcttactaactccattacactctctctcctggagcctcatctccatgtcaagcaggagggtaaagaagggaactaagagcaggtctttcaagccacacccccacctgcggatggatgggtttctctgtaggccatgcaggcctttgtcgcagcaaaccttcccagcagcccttgagccaagtaaaaccagcacaaccagccaccagtggttggtgaggcagtgcccacaaggctcatgttgtatgcctttgataaggccatcttggctttgagtagcagtgttcctcgtcacccatttccccctcaggattacaacacctgctatcaaatcatctaagctgaaaacatgagatgcgcttggaaaggcctagtcagaagccatttcctcttatcatttccctctcctatgcaccagtaaggcccgtccagagccccagcagggagtgggccctgagtccacactgtccctgagtgatccaggaggctgcccacatccccacatgtgcactgtggttccagtgtagctgctgtgagcccactgccactgcctcagaagggagccactgtgaacctcttggctccaaagagcagtggctttttgagaatggcccatacttctggcccggctggatgaagggaatgccgaccctttggcctctccccctccttccatctcttctctctcttgccctatctctctttctacttcagaaaaaaaaaaaaaaaaaaaaaa

SEQ ID NO: 116780 - DNA, 1000 bp, Homo Sapiens
aggaaaggaattatgccaggaaggtgggaccgggttatggtcgggtttctattgggaatgctctttgtgcttttgggcatctgaatggaagctttacatagaaccttaggtagaactcccccaaatcgccatatttaaaaattattttcactctattcttgcttaaaactgtactcttttgcaaattaacaattttatcactgattcagagttaaaaagaagactaacttttcaagcaaatgcatctgtaaagatgctttagattagactgtcatgtctcagtgtctatctgtatatattatttgatattcagagaatctaaagcactcgtctactgttttaatgagatttaacagcttttaacagtgagtttcgtttgtaaactgcttgaagtctgtggcattcaggcacacgtctggctggccggctgggtctcctcccgggctcagtgggcctggggcctctctgacgtggtgcctgctggagggaggctcgtcgtcaccagctgactgctggtccggcttctgaccggcctttgtcctggctccgtagcagaacactgtaaaagtgcccgcgtctttgcagtagttgcagatttcagtcgtcgtgttacttgtgcacaaacagaagctgggtcttacccgcagcacgagtgtctcgggctgcccggagtcgcccgggagcaggtgctgcagccagagttacgcgggggccacgcgggccggcgggggtggggggaacgtgggggaacctgtgtttcacgtgactcagcagtgcccgccgccgtcaccagctatgcattcactccgtttccagtgagcagatgtcttgcttggaaagtggacctgtgtctgtgtctgtcctgagaacttaccagcagaaatcctcatttctgtgctacggatttaccaaaaattgtcaagtctttttcagtttaacagttcctttacatgtgtagtatttgaggaaaaaaatcaataaacagttgatctcgtgcata

SEQ ID NO: 116781 - DNA, 846 bp, Homo Sapiens
ggctgtttcctggccgaggtgggtcggtagtagcgatggcgggtctgactgacttgcagcggctacaggcccgagtggaagagctggagcgctgggtgtacgggccgggcggggcgcgcggctcacggaaggtggctgacggcctggtcaaggtgcaggtggctttggggaacatttccagcaagagggagagggtgaagattctctacaaaaagattgaagatctgatcaagtacctggatcctgagtacatcgaccgcattgccatacctgatgcctctaagctgcaattcatcctagcagaggagcagtttatcctttcccaggttgcactcctggagcaggtgaatgccttggtgcccatgctggacagtgctcacatcaaagccgttcctgagcatgctgcccgcctgcagcgcttggcccagatccacattcagcagcaggaccagtgtgtggaaatcactgaggagtccaaggctctcctggaggaatacaacaagactacaatgcttctctccaagcaattcgtgcagtgggatgagctactttgccagctagaggccgccacgcaagtgaagccagcagaggagtgatagctgctccccatcccaaagtgggcctgggcagtcaggctccagggccctatgccaacctgcctttgttacaaggcagaggaagctttgtatttattggcttcaaggcccacctctctgtactctgggctctaaagttggaggtcaggttacctgaggtttgcaatttgcaacacccaccctccccccaatcagtgttcttatttcagtgacaataaaccatagagatgaaaaaaaaaaaaaaaaaaaa

SEQ ID NO: 116782 - DNA, 1000 bp, Homo Sapiens
cagagaatgtagaaagagtgttggttactgttatccaaggagcagttgaatatccagatccaattgcacagaaaacatgttttatcatcctctcaaagttggtagaactctggggaggtaaagatggaccagtgggatttgctgattttgtttataagcacattgtccccgcatgtttcctagcacctttaaaacaaacctttgacctggcagatgcacaaacagtattggctttatctgagtgtgcagtgacactgaaaacaattcatctcaaacggggcccagaatgtgttcagtatcttcaacaagaatacctgccctccttgcaagtagctccagaaataattcaggagttttgtcaagcgcttcagcagcctgatgctaaagtttttaaaaattacttaaaggtgttcttccagagagcaaagccctgaggactggatttccctgtgcctacttcatgatcatgaattccagttaatttataaagaggcgatttttgtgtgccattcacactggtctttttcacattgttttgagcttattgcagtatatgttttgggatttttctgtaaaatgggtgtaattttcctaatacaggtatgtaacaacaaaagaagttgcctgcatgccggtccaaattgttctgtataaagatgctcttaaaagacacaagagttatcctagaaccttaattcttttttatttgaaattttaagtcaagtcctttataaagaccatagcagtggaaaacagtgtactttttaaaaaattgctgaatataaaatctttgaaaattttctttatgtgtgaagacacaaagtatgggggaagacagcaatcaaaactaactttttgtagatagccatttcatttctttaaactgtttcaacgccaatatgtattctacaaaagagaatggttttaggctccagtgttatacttttttttatatatatatataaaaataaactttacgtagtgaaaaaaaaaaaaaaaa

SEQ ID NO: 116783 - DNA, 1000 bp, Homo Sapiens
tggagtgcagtggcgtgatcttggctcactgcaacctctgcctcctgggttcaagcaattctcccacctcagcctcccaagtagctgggattacagacgtgtgccaccatacctgggtaatttttgcatttttagtggagagggagtttcaccatgttggccaggttggtcttgaactcctgacctcaggtgatcctcctgcctcggcctcccaaagtgctgggattacaggcatgagccaccgtgctcagccgcaaaattctttatgaattttacacttggcaaatgttaatgacggaagccatagtctgctcctaatacatgtccaaagcattgactgttgtgtcattagctgcctggttacattagctccctggcttcttgtttagaccactgctaatcccttaaaaacaagaggtctggcactagtagcacaacctaaggtggcattacagatctttgagcgagccacagcaacttttctgccaagtcagcttagtttagacttcagtgaatcaggctattgctatcctaatgtatgtctctatgagtgtatttagccacacatctgcccttggttgactttctgactcattgcttgcttgcttgtttccttgctttggaaaactattgaagattgctaaaaaataccactgcaaagtgatggaaaagggtggagaacaggggagtagccaggctggatggctcaaatataaatgaatgaggaattctttatgaagtatcagtcagattttatgattaagtgatgtaatataggaattatgtaaaagggaagaatgtctgatactgatctattagagaggtactttagaggcttcttgattggcataaagttcctaaggttatagattttccccccttttggctgtatagcaaagtgttttaatccacggttgtgccttattgttccattaaaattgtatcttcgatccatcaataaatacttgtggttgaaacaaaaaaaaaaaaaaaaaaaaaa

SEQ ID NO: 116784 - DNA, 1000 bp, Homo Sapiens
gagatccggaagaatcctgagttccgtgtgcagttccaggacatgtgtgcaaccattggcgtggatccgctggcctctggaaaaggattttggtctgagatgctgggcgtgggggacttctattacgaactaggtgtccaaattatcgaagtgtgcctggcgctgaagcatcggaatggaggtctgataactttggaggaactacatcaacaggtgttgaagggaaggggcaagttcgcccaggatgtcagtcaagatgacctgatcagagccatcaagaaactaaaggcacttggcactggcttcggcatcatccctgtgggcggcacttacctcattcagtctgttccagctgagctcaatatggatcacaccgtggtgctgcagctggcagagaagaatggctacgtgactgtcagtgagatcaaagccagtcttaaatgggagaccgagcgagcgcggcaagtgctggaacacctgctgaaggaagggttggcgtggctggacttacaggccccaggggaggcccactactggctgccagctctcttcactgacctctactcccaggagattacagctgaggaggccagagaagccctcccctgactgcatgtggaagggcacacagcagcaggcagggaggaggcggaggtggcaaataaacctgggcaattttgtttatacaaaaaatagaaaaaaagttccaagtttttctttcttccctcattcttttatttttgaaaagtgccttcacgttgcatttttattggaggaaaacctcgctcgttcagtaagcataatctgattaacacagagaacggcaagcacatataaaatgatttttgtaggtcatctgcaagttcatggaagagctgggcctagaatgtgggttgtttcctggcctgtctagtctttgtagctgtgagacatagattacagcctatgctaattcaaaccttttaaataaaatgttccttatctcaaaaaaaaaaaaaaa

SEQ ID NO: 116785 - DNA, 507 bp, Homo Sapiens
cagagcctccttcaagatgctgctggtcctgctctcagtggtccttctggctctgagctcagctcagagcacagataatgatgtgaactatgaagactttactttcaccataccagatgtagaggactcaagtcagagaccagatcagggaccccagagacctcctcctgaaggactcctacctagaccccctggtgatagtggtaaccaagatgatggtcctcagcagagaccaccaaaaccaggaggccatcaccgccatcctcccccacctccttttcaaaatcagcaacgaccaccccaacgaggacaccgtcaactctctctaccccgatttccttctgtcagcctgcaggaagcatcatcattcttccggagggacagaccagcaagacatccccaggagcaaccactctggtaatctagaattcagtggcagaaaataaataagaagataacttccttcagaaagccatgacattgaaataatgtggtcataactctttc

SEQ ID NO: 116786 - DNA, 1000 bp, Homo Sapiens
gtgatcttcaccaaccagatgagcatcgggcgcgggaagctgccagccgaggagttcaaggccaaggtggaggctgtggtggagaagctgggggtccccttccaggtgctggtggccacgcacgcaggcttgtaccggaagccggtgacgggcatgtgggaccatctgcaggagcaggccaacgacggcacgcccatatccatcggggacagcatctttgtgggagacgcagccggacgcccggccaactgggccccggggcggaagaagaaagacttctcctgcgccgatcgcctgtttgccctcaaccttggcctgcccttcgccacgcctgaggagttctttctcaagtggccagcagccggcttcgagctcccagcctttgatccgaggactgtctcccgctcagggcctctctgcctccccgagtccagggccctcctgagcgccagcccggaggtggttgtcgcagtgggattccctggggccgggaagtccacctttctcaagaagcacctcgtgtcggccggatatgtccacgtgaacagggacacgctaggctcctggcagcgctgtgtgaccacgtgtgagacagccctgaagcaagggaaacgggtcgccatcgacaacacaaacccagacgccgcgagccgcgccaggtacgtccagtgtgcccgagccgcgggcgtcccctgccgctgcttcctcttcaccgccactctggagcaggcgcgccacaacaaccggtttcgagagatgacggactcctctcatatccccgtgtcagacatggtcatgtatggctacaggaagcagttcgaggccccaacgctggctgaaggcttctctgccatcctggagatcccgttccggctatgggtggagccgaggctggggcggctgtactgccagttctccgagggctgagccccgcccagctcccctccacaataaacgctgtttctccttgaaaaaaaaaaaaaaaaaaaaaaaaaaaaaa

SEQ ID NO: 116787 - DNA, 1000 bp, Homo Sapiens
ctaccggctgtgcaatgggatgtccaaccgcttctggggctggggccgcgaggacgacgagttctaccggcgcattaagggagctgggctccagcttttccgcccctcgggaatcacaactgggtacaagacatttcgccacctgcacgacccagcctggcggaagagggaccagaagcgcatcgcagctcaaaaacaggagcagttcaaggtggacagggagggaggcctgaacactgtgaagtaccatgtggcttcccgcactgccctgtctgtgggcggggccccctgcactgtcctcaacatcatgttggactgtgacaagaccgccacaccctggtgcacattcagctgagctggatggacagtgaggaagcctgtacctacaggccatattgctcaggctcaggacaaggcctcaggtcgtgggcccagctctgacaggatgtggagtggccaggaccaagacagcaagctacgcaattgcagccacccggccgccaaggcaggcttgggctgggccaggacacgtggggtgcctgggacgctgcttgccatgcacagtgatcagagagaggctggggtgtgtcctgtccgggaccccccctgccttcctgctcaccctactctgacctccttcacgtgcccaggcctgtgggtagtggggagggctgaacaggacaacctctcatcacccccacttttgttccttcctgctgggctgcctcgtgcagagacacagtgtaggggccatgcagctggcgtaggtggcagttgggcctggtgagggttaggacttcagaaaccagagcacaagccccacagagggggaacagccagcaccgctctagctggttgttgccatgccggaatgtgggcctagtgttgccagatcttctgatttttcgaaagaaactagaatgctggattcttaagtgatatcttctgattttttaaatgatagcacctaaatgaaactttcaaaaagtaaaaaaaaaaa

SEQ ID NO: 116788 - DNA, 1000 bp, Homo Sapiens
aaagctcgtgtctgcagttgttgaatatggtggtaaacgagtcagaggaagtgacctcttcagccccaaagatgctgtggctatcaccaaacaattcctcaaaggactgaagggagtagaaaatgtatatacacagcatcaacctttcctacatgaaaccctggatcatctcatcaaaggaaggcttaaggaaaacctatatccttatttaggccccagcacactcagagacagacctcaggatatcattgtgtttgtaattggaggagccacctatgaagaggctctaacagtttataacctgaaccgcaccactcctggagtgaggattgtcctgggaggcaccacagtgcacaacacgaaaagtttcctagaggaagttctggcttctggactgcacagccgaagcaaggagagctctcaagtcacatcaaggtcagcgagcagaagatgaaacggtggttgggggaagggcacagcttcctctcttgtccccactacaggttttccctactaaacaaaggtgttggagagcagctttgggttctgtgctggttgttagaactcatctccaggtagcccacggatacgtggttggcacagacacaagactcccagagttgtcctaacaataagtctgagcccatctcaacccacttttctccggtagtctttatgtatctgttagcacaatcacttcagttactgatgaattttgttgggatctgacttggggaaagggttatcagagcctagaggggcttaaaaagtaatcatttgatgtacataccacactccttggcttcctttctcttcccttaaccctttctgcttttcattaaccacattcctgcacaactcatttctgaaaacctaccatgtttctttacagagccatccaaaaattttttgtccctacatagcaattttctgtggcactgagaaaccatgtatgaccacaataaaaatccattttgtgaaaggaaaaaaaaaaaaaaaa

SEQ ID NO: 116789 - DNA, 1000 bp, Homo Sapiens
ccccatggtgcccgtacggtttggggccctgacggctgagaagctccggtctgttgtcacacctgccagggtccagttcaagacatacccgggtgtcatgcacagctcctgtcctcaggagatggcagctgtgaaggaatttcttgagaagctgctgcctcctgtctaactagtcgctggccccagtgcagtaccccagctcatgggggactcagcaagcaagcgtggcaccatcttggatctgagccggtcgagcccctgtccccacccttcctgacctgtccttttcccacaggcctctgggggcaggtggcaaggcctggccgggccttccttcctggccttagccacctggctctgtctgcagcaggggcaggctgctttcttatccatttccctggaggcgggcccccctggcagcagtattggaggggctacaggcagctggagaaaggggcccagccgctgacccactcactcaggacctcactcactagccccgctttgggccccctcctgtgacctcagggtttggcccatggggcccccccaggcccctgccccaactgattctgcccagataatcgtgtctcctgcctccactcagctgcttctcagtcatgaatgtggccatggccccggggtccccttgctgctgtgggctccctgtccctgggcaggagtgctggtgaggaggtggagccttttgaggggggccttccctcagctgtttccccacactggggggctgggccctgcctccccgttaccctccttccctgcaggcctggagcctgtagggctggactgaggttcaggtctccccccagctgtctcacccccactttgtccccactctagagcagggaggcagtgggggaggagttgtgtctcgtcttctgtctccatgtggtttttgggtgtttttcttgttgtgtcctggattccgataaaattaaagaaattgcttcctcaaaaaaaaaaaaaaaaaaaaaaaaaa

SEQ ID NO: 116790 - DNA, 906 bp, Homo Sapiens
ggggtgagtggtacccaacgggccggggcgccgcgtccgcaggaagaggcgcggggtgcaggcttgtaaacatataacataaaaatggcttccaaaagagctctggtcatcctggctaaaggagcagaggaaatggagacggtcatccctgtagatgtcatgaggcgagctgggattaaggtcaccgttgcaggcctggctggaaaagacccagtacagtgtagccgtgatgtggtcatttgtcctgatgccagccttgaagatgcaaaaaaagagggaccatatgatgtggtggttctaccaggaggtaatctgggtgcacagaatttatctgagtctgctgctgtgaaggagatactgaaggagcaggaaaaccggaagggcctgatagccgccatctgtgcaggtcctactgctctgttggctcatgaaataggttttggaagtaaagttacaacacaccctcttgctaaagacaaaatgatgaatggaggtcattacacctactctgagaatcgtgtggaaaaagacggcctgattcttacaagccgggggcctgggaccagcttcgagtttgcgcttgcaattgttgaagccctgaatggcaaggaggtggcggctcaagtgaaggctccacttgttcttaaagactagagcagcgaactgcgacgatcacttagagaaacaggccgttaggaatccattctcactgtgttcgctctaaacaaaacagtggtaggttaatgtgttcagaagtcgctgtccttactacttttgcggaagtatggaagtcacaactacacagagatttctcagcctacaaattgtgtctatacatttctaagccttgtttgcagaataaacagggcatttagcaaaaaaaaaaaaaaaaaaaaaaaaaaaaaa

SEQ ID NO: 116791 - DNA, 1000 bp, Homo Sapiens
atcgtcctgaatatgaacgtctgaaaaaatcactggccaacgcagagagccaacagcagagagaacaactggaacgccttcgaaaagatatgggttctgtagccttggatgcagggactgccaaagacagcttatctcctgtgctgcacccttctgatttgatcctgactcgaggaaccttggatgaagaggatgaggaagcagacagcgatactgatgacattgaccacagagttacagaggaaagccatgaagagccagcattccagaattttatgcaagaatcgatggcacaatactggaagagaaacaataaataggagactttagcacacttcacttgtttctagaagtccagaattttggacctccatgtgaaagaactgttcttacctctgaactgggggctcccataagggataattttcctcagagtagcaaagtttctcttattagagaaatcttgtgactcagatgaagtcagggatagaagacccttggacctggcaggttaatgctgattattccttggcctttcccttgtatttatgcaaggaaggatatactgagctgatactcttccaagcctacaacttcaagttttatcatttgaactcaagtacttttgctgctgaggaatggaatcaaaagaacgtagtctcctggtaaccacctcagatctctattattaggctagatgtatagcctctactcccccagcttcttgctcttgaccctgcactgtaagttgcccttctattagcagccaaggaaaagggaaacatgagcttatccagaacggtggcagagtctccttggcaatcaaccaacgttgctatgaaatatgcctcacactgtatagctcattataggccgtcaggtttgttgaaaaaagtgggcaagacatgattaatgaatcagaatcctgtttcattggtgacttggataaagactttttaattttaaaaaaaacaaaaaaaaaaaaaaaaaaaaaaaaaaa

SEQ ID NO: 116792 - DNA, 1000 bp, Homo Sapiens
acaccccgccccactatgggcctaccattaatagtgtataacttggaggttaaaagagccttttggacagaaaactgggccaggaaaaggcatctcagaccacaaatagagaatttgattcctcatttgccacataagtcatctgcttagcttttcctttccttttttttttttttttttttctggaggcagagtctccctttgtcgccaggctggagtgcagtggtgccatctcggctcactgcagcactgtctcggctcactgcagcctccgcctcccgtattcaagcgattctcctgtctcagcctcctgagtagctgggactacaggtgtgcaccaccacgcccggctaatttttgtatttttagtagagacggggtttcactgtgttggccaggatggtctcaatctcgacctcgtgatccgcccaccttggcctcccaaagtgttgggattacaggcgtgactcaccatgcccagccacttagttttttcttattcccacctttctatcccatagaacactcttttttatcttccctgaaccatattgatgagataaatagggctgggggctgggccccgctggtcactcaacagagtatttcccttggccgagatggaagttttgtcccaatagatgagctgctgagcatcaacaaggtgacatttttctgctgcccatttgtgtcctggagacggtggtaccctgaaggcagaggccagctgccgcaagacagcaatgacagtccacctgccgacctgattcctgcatcatggaataaccacatggctaccttctatcctctgttcccaaatggtggtggcacttatcctgaagtcgtcaatgatttccctttgaaactactttattttactaatttaaactattttgtactgatgtagccctgaggtagttcatgaaaatgctgtgcactcattccatggaataaatgttggaaagctgatcttttctgatataaaatgttgaatgatatt

SEQ ID NO: 116793 - DNA, 1000 bp, Homo Sapiens
cccattatctatgacattcgggccagacctcgaaaaatctcctcccctacaggctccaaagacctacagatggtgaatatctccctgcgagtgttgtctcgacccaatgctcaggagcttcctagcatgtaccagcgcctagggctggactacgaggaacgagtgttgccgtccattgtcaacgaggtgctcaagagtgtggtggccaagttcaatgcctcacagctgatcacccagcgggcccaggtatccctgttgatccgccgggagctgacagagagggccaaggacttcagcctcatcctggatgatgtggccatcacagagctgagctttagccgagagtacacagctgctgtagaagccaaacaagtggcccagcaggaggcccagcgggcccaattcttggtagaaaaagcaaagcaggaacagcggcagaaaattgtgcaggccgagggtgaggccgaggctgccaagatgcttggagaagcactgagcaagaaccctggctacatcaaacttcgcaagattcgagcagcccagaatatctccaagacgatcgccacatcacagaatcgtatctatctcacagctgacaaccttgtgctgaacctacaggatgaaagtttcaccaggggaagtgacagcctcatcaagggtaagaaatgagcctagtcaccaagaactccacccccagaggaagtggatctgcttctccagtttttgaggagccagccaggggtccagcacagccctaccccgccccagtatcatgcgatggtcccccacaccggttccctgaacccctcttggattaaggaagactgaagactagccccttttctgggaaattactttcctcctccctgtgttaactggggctgttggggacagtgcgtgatttctcagtgatttcctacagtgttgttccctccctcaaggctgggaggagataaacaccaacccaggaattctcaataaatttttattacttaacctg

SEQ ID NO: 116794 - DNA, 1000 bp, Homo Sapiens
aggctaatggcagagttagcaccccactctcccaagccacccctgcaagcagcatagcagggcatataccagtcaggaatgcccgttacctggttccttgcctggtctgctttcttccaagtttgcctggggcctagccctgctagaggctacagcactttacaagcaaggtatgctttcttccagcccctaggctgtgggcactgtatacaagtaggaacttcctttccttcacttcccttttaacccctagtcagagcatttcagccgtttgctacctcgattcctcctgtgttggacagaggctgggggcagtgccagcctgattcttccgacctacctgccatttgttcccgccttcagatggatggacagtttgctggctattgataggagtggggactgggtgggggcttctccctctacccagggctgggctgatccccctactgcaactaactgttgccccccaaccccgaacccccagttgaggagttgagagagtgcaggctggggtcaggacaggctgcggatgcttgtgcctatggggagttactccaacccacctattctgtctaatctccatggctttgcaccaaatcctccacccctccaattgggaggggactgttcaccaccttgtggtaagggacaacaccctaaggctggtgccagtagttatgagtagcctaccaccccctcccttacagtaacccccaccccttcaggatcagtcaagggaaagcactagaacccctgggtagggaaagaaaggagggaaaaaccataaaaggaatacttataatgtgaaggtttgtaaatagtccatgatgatgtcgtggcagagtctgatttctatatagaggtgactttttttttaagtactgtgcaagctctgtgcttctataatgtgggaaatggcttggggaggatggcccctagcttaggaagactgttgtgttatttgttcaatttcaataaaatgatttgtagatcctgc

SEQ ID NO: 116795 - DNA, 1000 bp, Homo Sapiens
gttactttgaacaaataaataaaagctttctgtagttgcttcctttatcagaaaagaacatttgataccatggtatatcatttcctcttcattaaagaacagcttttctaaatgttgggggaaatgtccatagtcattactcagtcaaaacttgtgttctcatgagcctaaggaccattctagatttattacgtgttttttgtgtgtgtgtgtgtgtgtgtgtgtgtgtgtatccataaaatgcatatgtaaatttttttttgtttttaagcattcacccaaacaaaaaaatcacaggtaaacccatgtttctgagatgccattattccaagcaaaataagagataatcccttcaagttaaattgaaaattttcctgaaaccatacatttcaagtgaaataagtaattctagataggacaatttaaattggataattttaaagtgtctataattgcagtggtttatttgcaaaattcctaaaaggaaaaattttatcactgccatcacagcaggtttcctcatccagatgaggaaactagacaaatgctagtgtgttttaactagctaaacaaaactaagttaaatgaacatttaaaagtttccctagcgggccattccttagcaaaatgttggaatccctgttgctacattgactaaaaggtcatgatgaatggaatatgtaagacttggctcatagaaacctaatcagatggttagaggtgttggcagtttaggacctgctgtcataaatgtgtgaacaaccttttgtaacctaacctattgacctgcatgttttttctttaccccaattcattacatggaggctcaatcttgagtttgctttactggttcagcaaaagccaggaagaacaactttgtagtaatcaaaatgttatccaactgtatattgtttactttattgtaaatactggtgaacagtggttaataaatagttttatattcctttatgcaaaaaaaaaaaaaaaaaaaaaaaaaaaa

SEQ ID NO: 116796 - DNA, 1000 bp, Homo Sapiens
tttgattttttgctcccttcaaagatttctgtagaaataacttattttttagtattctacagtttaatcaaattactgaaacaggacttttgatctggtatttatctgccaagaatatacttcattcactaataatagactggtgctgtaactcaagcatcaattcagctcttcttttggaatgaaagtatagccaaaacataaaaaaaaaaaaatcctcagtatagcttgcaattaagacctagatcacagtatttaagtgttttgcgttttatacatgaggtcagtgctacagccacctagcatgaactaacccagcttccacctccataaagttacctagagttgttgagttggaatatgttctggcatttacctgacctgccaatcattagggagaggcaacaaggtaattcagcctttcctcctatcagcacaaagaaactcaaagctgttttttccctttctgttccaaagcagtcttatcctgacaggagcggtctatactagtgcagatttcaacacttttttttaacgttttaattactatagtgttatgtagagatttgattgagcagctaatgtttctgaactttacttactaattttcagtgtccttaagggttctgtagtgttatcaaagcaaaaagaaaatgctgcataaaaataccaaacttcagcaactgttaatactcagatcatatacctcttaataaatagcatcttatgctaattagccctgctaaactatgtacagaggaaactgttcaagtattggatttgaaagtaagtgacttatgtttaacagaactaatgatgtattgaaacactgtattatgaaaagctaaattatacatcattgtaactatgtagaaagtgtagactaatgtataatcaaaatgctaaggatttttatatggccttgtatgaggggagtttgaatgttaataaacatgttttccactttaagatccagtaaaaaaaaaaaaaaaaaaaaaaa

SEQ ID NO: 116797 - DNA, 1000 bp, Homo Sapiens
ctgaaagagacctgttaaaccattcagaaaaagcttaagaaatgcgatatgacttccttttgtaatgctgctgatcccagtagactatgacttttgataattagcagaatttaactactgagtagttgattattttcacattttaattgctaatcactggctatataagtgtttttaagcaaaggtatttttgaagtggtgtagaacccttccaagctttcctgctcagtgttctaccagacttaccctggggcctggcttaaaagcaggattgaagaaaagggactgggggaaggaaacttattggaaaacttgatgcgaatgagtttctgcttggcacagtctctgcctgcttgctctcctttgctgatggattgcatttatcaaactattcatgctagcatttttccaacgagggaacttattccgcacgggcctactgtaggaccattgtctcgtgtaattaggaattttccatttgaaggattgctaaattgtcacagtagtaggaagtatagggaaacctctcagctgtggcactgttgtagctttggagtgcagagtgtaactctgggacaatcagatttcacatattctgtcatcttggcataagccattaaaagcttggagattactgtatttggcattaaaaaaaaatgtcacttaggtcagcactcccagacgtagcacagaaaaaccctttgacacaaaccatgtgttctgatttttggttcagaaaatattgaaactgtgagttgttttttttttaacaactgggaaaaaacaaaaacaaaaaactatagttagaaaaatggaagttccataggttctatttcttactctatgtatggctttgttttcagtctatttctaggagctttctctgaatcgctaattgtcctttcagttgaaatctaatttatacaatcattctatacttaaaggttaaatacatcttaattaattttttcttaaaaaaaaaaaaaaaaaaaaaaaaaaa

SEQ ID NO: 116798 - DNA, 665 bp, Homo Sapiens
cggggcggatgcggggacagcggcctggctaactcctgccaggcagtgcccttcccggagcgtgccctcgccgctggtacggctcctacctggtctggaaagagctgggaggcttcacagagaaggctgtggttcccctgggcctctacactgggcagctggccctgaactgggcatggccccccatcttctttggtgcccgacaaatgggctgggccttggtggatctcctgctggtcagtggggcggcggcagccactaccgtggcctggtaccaggtgagcccgctggccgcccgcctgctctacccctacctggcctggctggccttcacgaccacactcaactactgcgtatggcgggacaaccatggctggcgtgggggacggcggctgccagagtgagtgcccggcccaccagggactgcagctgcaccagcaggtgccatcacgcttgtgatgtggtggccgtcacgctttcatgaccactgggcctgctagtctgtcagggccttggcccaggggtcagcagagcttcagaggtggccccacctgagcccccacccgggagcagtgtcctgtgctttctgcatgcttagagcatgttcttggaacatggaattttataagctgaataaagtttttgacttcctttaaaaaaaaaaa

SEQ ID NO: 116799 - DNA, 1000 bp, Homo Sapiens
atgagctggagcacagcctgggggagagtgcggcccagggggcagctggagtggtgctctgggtgagctgggaaaatacaagaaccaaggaatcatgtcaggccatcaaggagtatatggacactacactggggcccttcatcctgaacgtgaccagtggggcccttctctgcagtcaagccctgtgctccggccatggccgctgtgtccgccgcaccagccaccccaaagccctcctcctccttaaccctgccagtttctccatccagctcacgcctggtggtgggcccctgagcctgcggggtgccctctcacttgaagatcaggcacagatggctgtggagttcaaatgtcgatgctaccctggctggcaggcaccgtggtgtgagcggaagagcatgtggtgattggccacacactgagttgcacatattgagaacctaatgcactctgggtctggccagggcttcctcaaatacatgcacagtcatacaagtcatggtcacagtaaagagtacactcagccactgtcacaggcatattccctgcacacacatgcatacttacagactggaatagtggcataaggagttagaaccacagcagacaccattcattccatgtccatatgcatctacttggcaaggtcatagacaattcctccagagacactgagccagtctttgaactgcagcaatcacaaaggctgacattcactgagtgcctactctttgccaatccccgtgctaagcgttttatgtggacttattcattcctcacaatgaggctatgaggaaactgagtcactcacattgagagtaagcacgttgcccaaggttgcacagcaagaaaagggagaagttgagattcaaacccaggctgtctagctccgggggtacagcccttgcactcctactgagtttgtggtaaccagccctgcacgacccctgaatctgctgagaggcaccagtccagcaaataaagcagtcatgatttactt

SEQ ID NO: 116800 - DNA, 1000 bp, Homo Sapiens
tggatctggtagggggaaaatgtgtattttattacatctttcacattggctatttaaagacaaagacaaattctgtttcttgagaagagaatattagctttactgtttgttatggcttaatgacactagctaatatcaatagaaggatgtacatttccaaattcacaagttgtgtttgatatccaaagctgaatacattctgctttcatcttggtcacatacaattatttttacagttctcccaagggagttaggctattcacaaccactcattcaaaagttgaaattaaccatagatgtagataaactcagaaatttaattcatgtttcttaaatgggctactttgtcctttttgttattagggtggtatttagtctattagccacaaaattgggaaaggagtagaaaaagcagtaactgacaacttgaataatacaccagagataatatgagaatcagatcatttcaaaactcatttcctatgtaactgcattgagaactgcatatgtttcgctgatatatgtgtttttcacatttgcgaatggttccattctctctcctgtactttttccagacacttttttgagtggatgatgtttcgtgaagtatactgtatttttacctttttccttccttatcactgacacaaaaagtagattaagagatgggtttgacaaggttcttcccttttacatactgctgtctatgtggctgtatcttgtttttccactactgctaccacaactatattatcatgcaaatgctgtattcttctttggtggagataaagatttcttgagttttgttttaaaattaaagctaaagtatctgtattgcattaaatataatatgcacacagtgctttccgtggcactgcatacaatctgaggcctcctctctcagtttttatatagatggcgagaacctaagtttcagttgattttacaattgaaatgactaaaaaacaaagaagacaacattaaaacaatattgtttcta

SEQ ID NO: 116801 - DNA, 1000 bp, Homo Sapiens
tactaaactgagtattgagccagcatttactccaggacccaacatagaactccagaaagactctgactgctgttcttgccaagaaaaatgggttgggtaccggtgcaactgttacttcatttccagtgaacagaaaacttggaacgaaagtcggcatctctgtgcttctcagaaatccagcctgcttcagcttcaaaacacagatgaactggattttatgagctccagtcaacaattttactggattggactctcttacagtgaggagcacaccgcctggttgtgggagaatggctctgcactctcccagtatctatttccatcatttgaaacttttaatacaaagaactgcatagcgtataatccaaatggaaatgctttagatgaatcctgtgaagataaaaatcgttatatctgtaagcaacagctcatttaaatgtttcttggggcagagaaggtggagagtaaagacccaacattactaacaatgatacagttgcatgttatattattactaattgtctacttctggagtctataaaatgtttttaaacagtgtcatatacaattgtcatgtatgtgaaacaatgtgttttaaaattgatgaaattcgttcacctacatttgagaattataaaattaacataaagaattttgtattttcatttaatgtatataatgttaaattcaatgtagttttattacacatttatgtaattttatttacattcttgctaattctcagcagaaatttaaataagatttaattcacatcaaataaaatttagaaaataaaatttaactcacactgcccaggctggagcatagtggcaagatcatagctcattgcaagctcaagtgatcctcctgactcagcctcccaagtagctaggactgcaggcaccatgtcactatgcccgactaatttttaatttttaattttttgtcaagacaaggtcttgctatgttgcccaggctggtcttgaactcctggcctcaa

SEQ ID NO: 116802 - DNA, 1000 bp, Homo Sapiens
gggtgctggggacagtgctgcggtggccagtggtggtgcccagaccttggcccttgccgggtcccctgccccatcggggcaccccaaggctggacacagtgagaacggggttgaggaggacacagaaggtcgaacggggcccaaagaaggtacccctgggagcccatcggagaccccaggccccagcccagcaggacctgcaggggacgagccagccgagagcccatcggagaccccaggcccccgcccagcaggacctgcaggggacgagccagccgagagcccatcggagaccccaggcccccgcccggcaggacctgcaggggacgagccagccgagagcccatcggagaccccaggccccagcccggcaggacctacaagggatgagccagccgagagcccatcggagaccccaggcccccgcccggcaggacctgcaggggacgagccagccgagagcccatcggagaccccaggcccccgcccggcaggacctgcaggggacgagccagccgagagcccatcggagaccccaggccccagcccggcaggacctacaagggatgagccagccaaggcgggggaggcagcagagttgcaggacgcagaggtggagtcttctgccaagtctgggaagccttaaggaaaggagtgcccgtcggcgtcttggtcctcctgtccctgctgcaggggctggggcctccggagctgctgcgggctcccctcaggctctgcttcgtgacccgtgacccatgacccacagtgctggcctcctgtggggccactatagcagccaccagaagccgcgaggccctcagggaagcccaaggcctgcagaagcctcctggcctggctgtgtcttccccacccagctctcccctgcgcccctgtctttgtaaattgacccttctggagtggggggcggcgggcagggctgcttttcttagtctgataccaagcaaggccttttctgaataaattcatttgactttgaaaa

SEQ ID NO: 116803 - DNA, 1000 bp, Homo Sapiens
agagtctctcaggttaaatcatgaacttcgaggatgggttcatagacatgaagtagaaaggaccaagtcaagaagaatgacaaataatcaacagaaaacccgtattcttcagggtgctctggaacagggctcaaattctcagctgatggctgttcaatacacagaaaccactagtagtatcagcaggaactcagggagtgagctacaagtgtattatgcttcacccagaagttatcaagacttttttgaagccatccgcagaaggggagacacattttatgttgtgtcatttcgaagggatcacctgctgttaccagctaccacccataacaagaccacaagaccaaaaatgtcaattgtgttaccagcaataaacataaatgagaatgtgatcaatgggcaggactacgaagtgatgatgcagattgactgtcaggtgatggacaccaggatcctccatatcaaaagttcgtcagttcctccttacctccgagatcagcagaggaatcaaaccaacaccttctttggctcccctcccgcagccacagaggcaacccacgttgtcagcaccatccctgagtcattacaatagcaccctgcagctatgctggaaaactgagcgtgggaccctgccagactgaagagcaggtgagcaaaatgctgctttctgccttggtggcaggcagagaactgtctcgtactagaattcaaggaggaaagaagaagaaataaaagaagctgctccatttttcatcatctacccatctatttggaaagcactggaattcagatgcaagagaacaatgtttcttcagtggcaaatgtagccctgcatcctccagtgttacctggtgtagatttttttttctgtacctttctaaacctctcttccctctgtgatggttttgtgtttaaacagtcatcttcttttaaataatatccacctctcctttttgccatttcacttattgattcataaagtgaattttatttaaagcta

SEQ ID NO: 116804 - DNA, 1000 bp, Homo Sapiens
cagcctcagccccaacccaagcctcagccccagcagctccacccgtatccgcatccacatccacatccacactctcatcctcactcgcacccacaccctcacccgcacccgcatccgcaccaaataccgcacccacacccacagccgcactcgcagccgcacgggcaccggcttctccgcagcacctccaactctgcctgaaaggggcagctcccgggcaagacaaggttttgaggacttgaggaagtgggacgagcacatttctattgtcttcacttggatcaaaagcaaaacagtctctccgccccgcaccagatcaagtagtttggacatcaccctactgaaaacttgcgattcttcttagttttctgcatacttttcatcacgatgcaggaaacgatttcgagtcaagaagacttttatttatgaacctttgaaaggatcgtcttgtatggtgaattttctaggagcgatgatgtactgtaattttattttaatgtattttgatttatgattatttattagtttttttttaaatgcttgttctaagacatttctgaatgtagaccattttccaaaaaggaaactttattttcaaaaacctaatccgtagtaattcctaatcttggagaataaaaaagggcggtggaggggaaaacattaagaatttattcattatttctcgagtactttcagaaagtctgacactttcattgttgtgccagctggttgaaattaaaactctgatattactttttttgaggatttttatttttgtttttgcttaaacatatagtttgtctagaagtttaaaaagctaaaagttaaaaatggtgtaattatgaaaatctaacactcaagatagtttctaaaaggaaatcagtagttaaggatacctgatttcaaaatatttaaagcataacctaactgatggtaggatgattgtatcttgaatatgtggtagggccacatctattgtaggaaaaccttgcttttatca

SEQ ID NO: 116805 - DNA, 1000 bp, Homo Sapiens
ttgaaacaccttcctgagtagtccggccttgtcaatgagtgcttgttttcctttaaacagtctgacatatttactcgtcactttcaaaccagaagcatgagaggaaggagatattgtggggtccgtttaactcgatagaaagcgcagggggatggcccccggcgcgggctcttgacccgctcagcgctgaccccaccgccctggccgaggcacttggccttgctgagctggacttcctcctcctcctcctcatgaccggggtgaattagaacgtttttaaagacacccccttccaaattctgtaacacattgtaattggagaagaaggaaactctgcaaggctaaactgtcattcacaacttggctacacatagactctagtcagttttgtctccagaaccttaggcttttgtattttttaattttaatttcactgttaatccttattgtcttttttattaagatgttggaaaagcaggaggtagttgtgcctcaattattgcaaaaatgtaacaataaagttcctcaaaataagatctgttcctcatagctatactgtgtacacataagacgcatatagggttttactgaaatctatttttaactcttatgttcgtagagaaattgtttcaaggattttgagtcataggtctgtaatttatagagatctctagaattcttattgtaattttcctacttctttgataaaagaaaaataagtcagattgttaactccaagattgaaaaaaaaaactcttgaaagaagattattagttgtaactaatttaggggttctgggcacagacatctaacctggtattgtaaggcagaggctcccattggaatggtagtggtccgggtcagttgttcatggtgtaagctttgcacagtgtattaacattgggagggtctggcttgaaaatttggccaccctcagcctctgaatgtttattaaaataaatttagtctttctttgcttaatataaaaaaaaaaaaaaaa

SEQ ID NO: 116806 - DNA, 1000 bp, Homo Sapiens
ccaactcagcttttgtggagcgagtgcggaaacggggcttcgaggtggtatatatgaccgagcccattgacgagtactgtgtgcagcagctcaaggaatttgatgggaagagcctggtctcagttaccaaggagggtctggagctgcctgaggatgaggaggagaagaagaagatggaagagagcaaggcaaagtttgagaacctctgcaagctcatgaaagaaatcttagataagaaggttgagaaggtgacaatctccaatagacttgtgtcttcaccttgctgcattgtgaccagcacctacggctggacagccaatatggagcggatcatgaaagcccaggcacttcgggacaactccaccatgggctatatgatggccaaaaagcacctggagatcaaccctgaccaccccattgtggagacgctgcggcagaaggctgaggccgacaagaatgataaggcagttaaggacctggtggtgctgctgtttgaaaccgccctgctatcttctggcttttcccttgaggatccccagacccactccaaccgcatctatcgcatgatcaagctaggtctaggtattgatgaagatgaagtggcagcagaggaacccaatgctgcagttcctgatgagatcccccctctcgagggcgatgaggatgcgtctcgcatggaagaagtcgattaggttaggagttcatagttggaaaacttgtgcccttgtatagtgtccccatgggctcccactgcagcctcgagtgcccctgtcccacctggctccccctgctggtgtctagtgtttttttccctctcctgtccttgtgttgaaggcagtaaactaagggtgtcaagccccattccctctctactcttgacagcaggattggatgttgtgtattgtggtttattttattttcttcattttgttctgaaattaaagtatgcaaaataaagaatatgccgttttaaaaaaaaaaaaaaaaaaaaaaaaaaaaa

SEQ ID NO: 116807 - DNA, 1000 bp, Homo Sapiens
gtactactctagggagtatgctggaggcagagggcaagggaggggtggtattaaacaagtcaattctgtgtggtatattgtttaatcagttctgtgtggtgcattcctgaagtctctaatgtgactgttgagggcctggggaaaccatggcaaagtggatccagttagagcccattaatcttgatcattccggttttttttttttttgtccatcttgtttcatttgcttgccccgcccccgagacggagtcttactctgtcgcccaggctggagtgtagtggcatgatctcggctcactgcaatctctgcctcccgggttcaagcttgtccaggttgatcttgaactcctgacctcgtgatctacccacctcggcctcccaaaatgctgggattacaggggtgagccaccgtgcccaacctcacttgcttcttatccttacactcccccagccccagagaaactgccacatacaccacaaaaaccaaacatcccccaatgaccttagccccattgctccattcactcccaggtgagaattcaggcaaacgtccacaaaggtcacaggcagcgtacatacggttctgttataccccatatattaccccttcatgtcctaaagaagacattttctcttagagattttcattttagtgtatctttaaaaaaaaatcttgtgttaacttgcctccatctttttcttgggtgaggacacccaggaatgacccttttgtgtctatgatgttgctgttcacagcttttcttgataggcctagtacaatcttgggaacagggttactgtatactgaaggtctgacagtagctcttagactcgcctatcttaggtagtcatgctgtgcattttttttttcattggtgtactgtgtttgatttgtctcatatatttggagtttttctgaaaaatggagcagtaatgcagcatcaacctattaaaatacattttaagccttttaaaaaaaaaaaaaaaaaaaaaaaaaaaa

SEQ ID NO: 116808 - DNA, 1000 bp, Homo Sapiens
gctgacggctttgctgtcccagagccgcctaaacgcaagaaaagtcgatgggacagttagaggggatgtgctaaagcgtgaaatcagttgtccttaatttttagaaagattttggtaactaggtgtctcagggctgggttggggtccaaagtgtaaggaccccctgcccttagtggagagctggagcttggagacattaccccttcatcagaaggaattttcggatgttttcttgggaagctgttttggtccttggaagcagtgagagctgggaagcttcttttggctctaggtgagttgtcatgtgggtaagttgaggttatcttgggataaagggtcttctagggcacaaaactcactctaggtttatattgtatgtagcttatattttttactaaggtgtcaccttataagcatctataaattgacttctttttcttagttgtatggccaggcagtccccattttaggagttggcttctgcaaattcaatccattgagctaactgttggggagcaatttggtagttgtagacatttgcagggaagggagatgtctgattctaaatgggagttgatgctcaggtccccagccaggtttgcatccagccctgagacatgtaggaaacacctttcagacccaggctctgaagattcccagaagccacaaggattgaagggaaaaggtgatcctggtaactgttccaggattgctccaggtttgagatggtattgctaaatttaaaattaaacaagaaacccaacaacagcttttaaagtgtcttctatctcattgtattttttttaacttgccccaatgatagaaaagtcttttgctgaaatgattttgatgatttttgtttatcgtttataaaaaggaaaagaaatatacaaactttgacttttgtgactttgtgaaggtttctttaagatgtgcattcctttctgcttgctctctagtaaatgttttactaccgggaaaaaaaaaaaaaaaaaaaaaa

SEQ ID NO: 116809 - DNA, 1000 bp, Homo Sapiens
aaaagggaatatcagcaccttcctagtttgggatttgaaaagtggaattaattgcagtagggataaagtagaagaaaccacaaattatcttgtgcctgaaatccattaagaggcctgatagctttaagaattagggtgggttgtctgtctggaagtgttaagtggaatgggctttgtcctccaggaggtgggggaatgtggtaacattgaatacagttgaataaaatcgcttacaaaactcacactctcacaatgcattgttaagtatgtaaaagcaataacattgattctctgttgtacttttttgtaactaattctgtgagagttgagctcattttctagttggaagaatgtgatatttgttgtgttggtagtttacctaatgcccttacctaattagattatgataaataggtttgtcattttgcaagttacataaacatttatcaatgaagtcatcctttagacttgtaatcgccacattgtttcattattcagtttcctctgtaaagggatcttgagttgttttaattttttttttctgcatctgaatctgcatgatttccaaaccctgtaccatctgaattttgcattttagcacttgcactattactcagcagcagtaacatggtaacacttaaaatggtactcggggacctccaaagactaaactgacaagccttcaaggagcccaggggtaagttaacttgtcaacggcatggtttaatcccttctttacacttgtgtaaatttcagttactggtcatagaaggctttcaatgttgagtggccttttattaacatgtttatggtactgcatagatacgggtatttattttaccctaagaagattttgaagtttaaaagtacttaaactatttggcaaagatttgtttttaaaaatctatttggtcaatctaaatgcattcattctaaaaaattttttgaaccagataaataaaatttttttttgacaccacaaaaaaaaaaaaaaaaaaaa

SEQ ID NO: 116810 - DNA, 946 bp, Homo Sapiens
cggcgcgtgtcacgtggtgtgcgtgtcgaaggtcacggcgcgctcacaatggagctctcggagtctgtgcagaaaggcttccagatgctggcggatccccgctccttcgactccaacgccttcacgcttctcctccgggcggcattccagagtctgctggacgcccaggcggacgaggccgtgttagatcatccagacttgaaacatatcgacccagtggttttaaaacattgtcatgcagcagctgcaacttacatactagaggcaggaaagcaccgagctgacaagtcaactctaagcacttatctagaagactgtaaatttgacagagagcgaatagaactgttttgcacggaatatcagaataataagaattccctagaaatcctactgggaagtataggcagatctctccctcatataacggatgtttcttggcgcttggaatatcagataaagaccaatcaacttcataggatgtacagacctgcatatttggtgaccttaagtgtacagaacactgattccccatcctatccagagattagttttagttgcagcatggaacaattacaggacttggtggggaaacttaaagatgcttcgaaaagcctggaaagagcaactcagttgtaacttggggaagttaacgatccgcccgagtgcagaggaaaaccagaaacgccttgccttcagctgaaccaccgtttgtgcgagctggatgtccttttcagtagaaaagaattttccttttgaatttataccattcatcaattttgacactttaaaaacgtgtgaaagggttaagagggaaagatactgcccaagtatttgaatcgtttagtagtaactgtccatttatcctattttgatctttttcaagtcttctgaaaggaagtagacagtattacaccctgaataaataaggtgttgttttccacaaaga

SEQ ID NO: 116811 - DNA, 1000 bp, Homo Sapiens
atctttcgatggatggagatgatcattaggtacttttgtttcaacctttattcctgtaaatatttctgtgaaaactaggagaacagagatgagatttgacaaaaaaaaattgaattaaaaataacacagtctttttaaaactaacataggaaagcctttcctattatttctcttcttagcttctccattgtctaaatcaggaaaacaggaaaacacagctttctagcagctgcaaaatggtttaatgccccctacatatttccatcaccttgaacaatagctttagcttgggaatctgagatatgatcccagaaaacatctgtctctacttcggctgcaaaacccatggtttaaatctatatggtttgtgcattttctcaactaaaaatagagatgataatccgaattctccatatattcactaatcaaagacactattttcatactagattcctgagacaaatactcactgaagggcttgtttaaaaataaattgtgttttggtctgttcttgtagataatgcccttctattttaggtagaagctctggaatccctttattgtgctgttgctcttatctgcaaggtggcaagcagttcttttcagcagattttgcccactattcctctgagctgaagttctttgcatagatttggcttaagcttgaattagatccctgcaaaggcttgctctgtgatgtcagatgtaattgtaaatgtcagtaatcacttcatgaatgctaaatgagaatgtaagtatttttaaatgtgtgtatttcaaatttgtttgactaattctggaattacaagatttctatgcaggatttaccttcatcctgtgcatgtttcccaaactgtgaggagggaaggctcagagatcgagcttctcctctgagttctaacaaaatggtgctttgagggtcagcctttaggaaggtgcagctttgttgtcctttgagctttctgttatgtgcctatcctaataaactcttaaacacatt

SEQ ID NO: 116812 - DNA, 1000 bp, Homo Sapiens
agcatgtgcagagctggccaccagcacaggcttagggcagttcagaacccacttgtttccctatcagagggacacagtgaagtggaggttaaagtaaattacaggaaataagggagaaatcttgcagttaccatgttcagatagagtgactgaaattaattgtacttactaaagtattaactagctaacagtgatgggccaagacgctccgagaactctaccgggattgtctgttctgacaacccagtgaggcagatacactttcttactgctcacatcttacaggtgagtactcataattggccagcatctcaccaccagcaagtagtagggccaggtcaatcccaggcagtctgaccccagagtggcccagctcatcccctactctgttatttgcttgttaatgattctctagattttctaaaataatgtttcttagcattgtgatgataaagctcatgatgaactttatcactagttatgccaccttaactagtcagatttcctagaattaggaaatggtgactcttgtctaaatttggttaagtgatgaatttgggttaccgtctcatgtgaacctggagattcaccagtcttaacttttgggtcattgtgttttctctacattcatgcattggatgttttgctaaataactcctgtggatttaggaatgtgtgctaatagcaatcttcctaattttcatgtttatatggaactatgcagttgagtattgaaagctttaaactgagtttatttacaaggactgagtctagcctacagagaacatacagcagccttctttggaccacagtcttatccgaggggtctgtggttgtatcagaagagccactaaaccaatccccctttccaaaattgaacctcacagacgttcctgttttttgtgattgagaaactggtcaatgaacaggaagacttagagatgtttcacaagcctttgatttttgtttcatttatttgtaataaacctcttccacgtga

SEQ ID NO: 116813 - DNA, 1000 bp, Homo Sapiens
atgtatatgtaaaatatatacttttccaagacaaaatggaacatcacttctctcttctagtttttctgaacactggctgggaaatgtaaactgtgtatgcatataagtatatgctttatgtatgcatatgtatgtagatatgtttatatctatcgtctgcatcactctcctcagtgttgatgtcaacatgcaatgacaactgataaagcgagatggtagttctgcctggtttgcagtctgagtgggaaagtcctgtttttgatgagcactccttgttagctaacatttaaattctttttgtgacctcagaatgtctctggatctttcctcattgactgactctgtgccacgtcatccatagtttattgttagtatgaacacaactgtaacatttacctggtatctacatccttacctgcattggaaaatgtttgctacctcacaacaaccatttgcctcctttaagaacactgatgggctgcactttttggatagaaatagaatttgatttcagaatgtatgcttggtgagtctcagtgcccaggaacacttttggaataatttatcagacattgaacttctgtgattaatcgcttttatagatttactcagtctttaaaattcgtctctgatttgccagagaaaaacggtggtagccatggaaatcgggagtgaaggagcactgcttcattgtggctcagcccttcctaggggcctctgccctttgatgtccttgagctactcttcagctctggaagttgtggacaaaccgtaggaatgtatgtgtgcgtgtggtggagtgattgtctgtgaatgacaggccctggctattgattgatgttgcatcaatttagcaaattcatttcctcattcttgatggcctgaatatatgtctgcacttttaatgctcctcttaaccagttgtaacatcttaccatttccctaacaaattgaattagtttaataaaatcttttgacacatgttaaaaaaaaaaaaaaa

SEQ ID NO: 116814 - DNA, 1000 bp, Homo Sapiens
tgactggtggaatcttctgttgaaggccatatactccttatgtgacctatcccgatttcaagaggctgagttgcttgtagattcctcattggaatattactcattttatgatgacaggcaaaaacgcaaagaactagaatactttggtctgtctgctgcaattctggacaaaaatttcagaaaggcatacaactatatcaggataatggtaatggaaaatgtcaataaaccccagctctggaacattttcaatcaagttaccatgcactcccaagatgtacgacatcatcgcttctgtctccgtttgatgctgaaaaacccagaaaatcatgccctatgtgtcttaaatggacacaatgcatttgtatctggtagttttaagcatgcgcttggacagtatgtgcaagcctttcgcactcaccctgacgaacctctctatagcttctgtataggcctaacctttattcatatggcatctcagaagtatgtgttacggagacatgctcttattgtacagggcttttcctttcttaatcgatacctcagtttacgtgggccctgccaggaatcattctacaatttgggccgtggccttcatcagttggggctgattcatcttgcaatccactattatcagaaggccctggagctccctccacttgtggtagagggtatagaacttgaccagttagacttacgaagagatattgcctacaacttgtctctcatctatcagagcagtgggaataccggaatggctcaaacgcttttgtatacctattgttctatataaagcaccgcaactgagaacagagcaatggcagctgctgtgtgaggaccagtgtcttctgtctcagggcttattatttgtaactccaaaatagaaatgaccatttcagaattacctaacaaacagtgtatttatttttaatatgtgatcatgatcttgtggtatatatgcaaaattattcctacaaaaaaaaaaaaaaaaaaaaaaaaa

SEQ ID NO: 116815 - DNA, 1000 bp, Homo Sapiens
cctcgccatggccgcgccggccccgggcctcatctcggtgttctcgagttcccaggagctgggtgcggcgctagcgcagctggtggcccagcgcgcagcatgctgcctggcaggggcccgcgcccgtttcgcgctcggcctgtcgggcgggagcctcgtctcgatgctagcccgcgagctacccgccgccgtcgcccctgccgggccagctagcttagcgcgctggacgctgggcttctgcgacgagcgcctcgtgcccttcgatcacgccgagagcacgtacggcctctaccggacgcatcttctctccagactgccgatcccagaaagccaggtgatcaccattaaccccgagctgcctgtggaggaggcggctgaggactacgccaagaagctgagacaggcattccaaggggactccatcccggttttcgacctgctgatcctgggggtgggccccgatggtcacacctgctcactcttcccagaccaccccctcctacaggagcgggagaagattgtggctcccatcagtgactccccgaagccaccgccacagcgtgtgaccctcacactacctgtcctgaatgcagcacgaactgtcatctttgtggcaactggagaaggcaaggcagctgttctgaagcgcattttggaggaccaggaggaaaacccgctgcccgccgccctggtccagccccacaccgggaaactgtgctggttcttggacgaggcggccgcccgcctcctgaccgtgcccttcgagaagcattccactttgtagctggccagagggacgccgcagctgggaccaggcacgcggcccatggggctgggcccctgctggccgccactctccgggctctcctttcaaaaagccacgtcgtgctgctgctggaagccaacagcctccggccagcagccctacccggggctcaacacacaggctgtggctctggacatccggatattaaaaggagcgttgctggaaaaaaaaaaa

SEQ ID NO: 116816 - DNA, 1000 bp, Homo Sapiens
atattgtgtgcttcccaaagctatagtcatagatttcttccagaaactattgtcataattgtcactggagtgcttaaatatacgtactatactgacaaaatacatggaagtgagttataatgaggcagaaacaaaatcctcggtaacattgatgatactctaccgatcaccgtggttttggaaagtcagtcaacagttgtattattgcactcaatttcattgtgacattttatttaacttcttcatcttggtggtccttgcccagttattttgcctcattagacatcaagaaatggagaaagactgaaagttaatatcttaagtgcttgttcttcatgtttccttcttgttatttatgctattctctttgtggctccattcttctttcaatcttctcagcttataaccgtctttcccttatgctaaggatagcccttacactcatcccatctatgctgtcaagggctgctggttggtgctggtacaaggagcccactcagcagttttcttacctttgcctgccctgcctttcatggaataagaaaggcaacgttttgcagcttccaaatttctgaagaaactaatctcagattggcagttaaagtcaaaatgttgccaaatatttattccttttgcctaagtttggctacccggttcaattgctttttatttttaatgtcttgactcttcagagttcgtacctcaaaagaacaatgagaacatttgctttgctttctgctgaatccctaatctcaacaatctatacctggactgtccagttctcctcctgtgctatcttctcttctatccaagtagaatgtacgccaggagctccttccctctagcaatttctactaaaatgtccaagtagaatgtttccttttacaatcaaattactgtatttattaatttgctagaatccagtaaatcattttggtagctctggctgtgctatcaataaaaagatgaaagcaacaagttgaaaaaaaaaaaaaaaaaa

SEQ ID NO: 116817 - DNA, 1000 bp, Homo Sapiens
ctctgccagcctcttgggggcagttccggcctctccgacttccccactggccacactccattcagactcctttcctgccttgtgacctcagatggtcaccatcattcctgtgctcagaggccaacccatcacaggggtgagataggttggggcctgccctaacccgccagcctcctcctctcgggctggatctgggggctagcagtgagtacccgcatggtatcagcctgcctctcccgcccacgccctgctgtctccaggcctatagacgtttctctccaaggccctatcccccaatgttgtcagcagatgcctggacagcacagccacccatctcccattcacatggcccacctcctgcttcccagaggactggccctacgtgctctctctcgtcctacctatcaatgcccagcatggcagaacctgcagcccttggccactgcagatggaaacctctcagtgtcttgacatcaccctacccaggcggtgggtctccaccacagccactttgagtctgtggtccctggagggtggcttctcctgactggcaggatgaccttagccaagatattcctctgttccctctgctgagataaagaattcccttaacatgatataatccacccatgcaaatagctactggcccagctaccatttaccatttgcctacagaatttcattcagtctacactttggcattctctctggcgatggagtgtggctgggctgaccgcaaaaggtgccttacacactgcccccaccctcagccgttgccccatcagaggctgcctcctccttctgattaccccccatgttgcatatcagggtgctcaaggattggagaggagacaaaaccaggagcagcacagtggggacatctcccgtctcaacagccccaggcctatgggggctctggaaggatgggccagcttgcaggggttggggagggagacatccagcttgggctttcccctttggaataaaccattggtctgtc

SEQ ID NO: 116818 - DNA, 1000 bp, Homo Sapiens
aagagttgctgatagtttgatctagaaaccagcagctactggctcaaattcaggttctggcgtcaaatagcgacatttccagtttctcttaaaaaccgtgtttggtttcagttgggataggcttgttttgtctgttgaaaatgtttctagttttttttctttcatttttctctcattccatttctgccttaactttagtttgttcacagggaggcaaagctgacatgaaccttttgtcgtgggacttcaggccacattggcttgaaggcattcgtttccttctggggtggggacaggccctcatggcaggcttgttcccgtggctctgagcgaggcctcttcctgctgggctcccagactcctgcatccaggcccccaccttctcggcttctggtttttctttctttttggtagaacacaacatctaccattcagttaaaccttctttatcccctcctttggcatccatttttccaaagaagagtcgagtcctctgaggtctgtgcttgaaaaccgtccgaaggcattcttgttagctttgcttttctccccatatcccaaggcgaacggctgagattcttccatctaaaaaaccctcgacccgaaaccctcaccagataaactacagtttgtttaggaggccctgaccttcatggtgtctttgaagcccaaccactcggtttccttcggattttcctccctttgttcggggtttggtttggctcctctgtgtgtgtccgtatcttgttcggtgtcctcgaggttgagcttcactccactgcggcagaggcagcgtgcacactcggatttgctacgtttctatatatcttgaagctaaatgtatatatgagtagtttgccatgagataacacagtgtaaacagtagacacccagaaatcgtgacttctgtgttctctccatttgagtattttgtaatttttttgaaatatttgtggacataaataaaaccaagctacactacacccttggaaaaaaaaaa

SEQ ID NO: 116819 - DNA, 1000 bp, Homo Sapiens
aatggagcgtcaaactaaactggacaggtacttctaagtcaggagtacagtacaaaggacatgtggagatccccaatttgtctgatgaaaacagcgtggatgaagtggagattagtgtgagccttgccaaagatgagcctgacacaaatctcgtggccttaatgaaggaagaaggggtgaaacttctaagagaagcaatgggaatttacatcagcaccctcaaaacagagttcacccagggcatgatcttacctacaatgaatggagagtcagtagacccagtggggcagccagcactgaaaactgaggagcgcaaggctaagcctgctccttcaaaaacccaggccagacctgttggagtcaaaatccccacttgtaagatcactcttaaggaaaccttcctgacgtcaccagaggagctctatagagtgtttaccacccaagagctggtgcaggcctttacccatgctcctgcaacattagaagcagacagaggtggaaagttccacatggtagatggcaacgtctctggggaatttactgatctggtccctgagaaacatattgtgatgaagtggaggtttaaatcttggccagagggacactttgccaccatcaccttgaccttcatcgacaagaacggagagactgagctgtgcatggaaggtcgaggcatccctgctcctgaggaagagcggacacgacagggctggcagcggtactactttgagggcattaaacagacctttggctatggcgcacgcttattttagggccagcggcaggggactccagcctgctggacacttcagtccagctctctcctgactggggcttgcgactcacaggattgcatcgtcccagctgctaacttggggccggggcccctcccttccacatataccttgggtttgtgcatgttttctgctgggtgggttcagagggcaatttctcttttatgtgtacatatgctaaataaacataatttaaaaaacaaaaa

SEQ ID NO: 116820 - DNA, 1000 bp, Homo Sapiens
ttatactaagcctcctcttcaaaattcacagtggcgattagcggactggagtctggtggcgattagcggactggagtctggggacatccgtggcaaagacaccagctcaactttagtgcttcccaactttatttagaatgacatggggtgggtgtctggtgtgtgtgttttccctacgcacctcccatagctattaacaactgaggaaggccagtgcagaatatttttggagaacgattttttttttaaataatatatcattcctatggggggaaagccttttttttctttttggctgagttattccctccctcccctcaataccctcagtactgactacttccctttcttttctcaggcctccccccaccgacttttgaggccagggttggccagatttagcaaaaccaaaacagagtgctgagttaaacgcaaatttcaggtaaacaaaagataattttctagcattaatatgccccacgcaatatttggaacacttatgtgaaaaatgatttgtttttctgaaattcacgtttctctctgagtcctgtaactgtccccgaggggattgagcagaagctcgggtatgagccctgaggttgactgccggttatttttctgtcctgggaacagcctgacccacctccctgtctccatgtagccagtgaggggagggggagacacagaaccaaccacagccaggggcgtccccatggcgactgtggcccggcccctcctctcttgcctgactctcctctcttgcctgactctagacactaacttagttccaggttcggtgccctgttggtgctcctgtttccaatagcttaggtcccatggtgggggaggaacctcaggggctatgcagcccccgccagctgccctcgaatcccgtccaggccaattccagattctaaactgatttttttcatgatattgtcaaaacagtgaggaaacattaaaaaaaaagccctaaagcaaaaaaaaaaaaaaaaaaaaa

SEQ ID NO: 116821 - DNA, 1000 bp, Homo Sapiens
acaaaaagatgacacaacagattgagtgggagatggaaggaaggctattacattatttccgaatttttaatactgtgtgaagtggtggcttgctgctgtaatcttttgttttgttgttgtgttactgaatgtggcatttcagggttaacattaggttcttaaaagccaaagtcagtttgtctttttgtgcctctcatctttcttttgtgttatgtaagattgattattcatttctccctactggtaggaaccatagttgtgtcctatacttgaagaggctggaaagtagcccataaccataattgcagtatttctttgtatttctctgttaagcaaagaaatattaaggaacattttttttatgtttttgtattattccataattagtaaagcaagatgaaatgtcaaattttaatcagttttttcatggatttgtgttcttacagtacttgaaaatatttaaggaagagatgaagctctgcagttttttctatgtgggatgattacttttttaaggaggattaattctgaggtagtatagtaactaaaggggaatatatgaattgtttaacaaattagaatttgtttacaactacttgaatttttaaattatgtcaaaacttacattacttgccaagcagtatgatgttataggaaacataaataagattacagaggtatcaatttggttaaaattcaccattttataagactaagcaataatcttaacaacctctttcctgaatatttaaatgtgtttgtatggtgttatgactaattgttactgatttagagactaagccctcttaaaacctttagttaaatataaaaagaaattatatatatcttgcctccctgatggaaaactatataaaattgtagacttaaaaggtttgtggaaatacattaggatatcagaaaactaaatatatggagttgctttatgactattacatgttaaataaaaatagcttaattgttaaaaaaaaaaaaaaaaaaa

SEQ ID NO: 116822 - DNA, 1000 bp, Homo Sapiens
cctggtttctaccttctgtgacaagtgtgtcccagtcaccctgtggcacttgggctattggttgtgctatgtcaatagcactgtcaaccccatctgctatgccctctgcaacagaaccttcaggaagacctttaagatgctgcttctctgccgatggaaaaagaaaaaagtggaagagaagttgtactggcaggggaacagcaagctaccctgaaaagtcaacaactcctctcgaaagaacaatgaccacagtcaacatcctctgaggatgagcaagctgattctggtttgtatattttcaaaaagaagacatctcattttgagtccttgaagatttttgtaaaggctcaagtttggttgccaaatggaaggggccatagctgcagcaattgctgacatattaaatgactcttgcctatgaccaaggccatttgatgccaggggagtttgccaatgaagtaaagggataggctcatggcccttcacaagaggaagcacactgggtaacaatgaacagtgactcagggaacttatgccccttctgtaggaaacagcagagaccaggtggaaaccttttcctgtggaaacctgtcatagaattttgtgcaatatgtatgtgtctatgaagctgtcttgtgccagtgagaaccagcaggagaatgtacaacagtgtcacttgttaacgagactgatattcaacaggcttctaagaatatgtatcttcataaactgatcactatctattatgcagctattatgtggtctatactatactgtggtttgttttcctgtccccacatctgagtgaaggtcttgctcttccctttcatatccaatgtcaattccttgtactcactgaacccatgctgatctccagggaaccatccttcctctcagaatccagagtctggaaggactgaaacctggtcatacccagtcctttcaaggggcctcttttctactaataaagatggatcaagtctcaaaaaaaaaaaaaaaa

SEQ ID NO: 116823 - DNA, 1000 bp, Homo Sapiens
ctactaggtctgctcctgaaccagtcctgctgcctggagtcagtagccagagttgttctcaggggtgctggggcagagtggagcccagggtgctgggatggctatattaggcatgttcagggatgctcattccatgactctgcctaaccatgggctcagggccaggtcctcacagcagtcacaggcccaggaaggcggcaggcagagaagtggagtgactatttggagaatagcacccatatctgtgtgccctagggctcagaggggcctcatcttccccagccctccccacctgctcaccaattccacttcctgccccaactgcaggaatgctgacaatgctgccatgcccaccatcgggtgtaggtgaaaggcatctttctgaatttcattctcttgaaggtgctgccaccccttggcactgtggaactgccaccttgggtctgtgtcacttgtaggtttctctgcctccaggttgcctcaacagcaggaggcacagcagtttcaccatctttgaggtgagggtggggtgccccagctaggaagcaagatcgctgtgctaggtctgaccaaaaccagagggcagtctagtcctgggggtaaagccctcagatcccagggtacactcttctccattccctccacccacttgcctgtcaccccagtcacctaagcaatcactgggcccagaggagaggagacagacacacactggctcctggacctaaagggtatgagctggagctaaggccagctagagcttccactgtcagccctcactgtcagccccactgcacccccctgtgcctgctgggcactgggcactagctagatgctttaggttgcttcagctgatccttcaactctgtgaggtggataccaatattctattttgcagatagaatttggcccagagaggttaactaatatatccatgatcacacagctaataaaagtcagagctcaggaaaaaaaaaaaaaaaaaaaaaaaaaaaaaaaa

SEQ ID NO: 116824 - DNA, 1000 bp, Homo Sapiens
gcgccaagagtgggaggcgcagcgcgagaaagtgaaggacgaggagatggaggtcaccttcagctactgggacggctcgggccaccggcgcacggtgcgggtgcgcaagggcaacacggtgcagcagttcctgaagaaggcgctgcaggggctgcgcaaggacttcctggagctgcgctccgccggcgtggagcagctcatgttcatcaaggaggacctcatcctgccgcactaccacaccttctacgacttcatcatcgccagggcgaggggcaagagcgggccgctcttcagcttcgatgtgcacgatgacgtgcgcctgctcagcgacgccaccatggagaaggacgagtcgcacgcgggcaaggtggtgctgcgcagctggtacgagaagaacaagcacatcttccccgccagccgctgggaggcctatgaccccgagaagaagtgggacaagtacaccatccgctaacacccgcctgccagagcggaaaccgggggtggggggagacactcatttctaggccccatcaccagtcacttgatttcgtgaccttgatttcttcccccaaatttaataaagacagagggttctcatgattcacattggttgtgctattgctgatgttatgctttggttgcttggttggtcttttctgagtattttagtgttgccacctggatttgctgcattgctctgctgagctgtattgaaaccatgactgggcccactgtcagacagaaattagaataggaggcacattttttacctggtggttatgagcatggacttgggggccacagtgactgagtttgattcccgacacagcctcctccttgctgtgtagttttgggtaagcttattaaacccccatgcctcagtttggtcacctgtaaaaggaaataacaagagcacttactttataagattgatgtgagtattaagtgaattaatatttgtaaaacgcttagctcttaataaatgtttctgttgttatta

SEQ ID NO: 116825 - DNA, 1000 bp, Homo Sapiens
accagcatataatttttaatatctttacttctatcatcccaaatcaaagaactcttctctattatgtttaatcaattgcaagcaaatagatttttctttgtaacaatttgttctgcagaaggctgtttttcacttttcctttcttttgcttctttctgtctttccttctcttttgtctggagaaatcacttagactctgtgtgcctcttctacattgcattctgctctgctatgttacctgctaggctggcttctttggactccctatatgattgatgatgtgaaaacctaaattacttgcagcatagtattacttctttgatgttctcattagcataatgttatttttgaaaaggaaagatactatcacataagttttcctcatctgttgtgatatacaccaatggataaactaacggaaactgctttttgacattaaaagacaggagaaattatatttaactaagtaaaagttaagtcagaattacttgggtgatgtgattcaatttagttaaaggatgatatagagaaaatacattatttagcattatttcttcagctataatgaattgctatagaaatcaggcagatctttctaatgtgtattgattggtcttttcagctactctgaacagattactaaggccatctcctcatctctaagggagaaaaatagtctgtagatgaataatgtaaggtaaagagttgcatgtcagtctttgtaattatttacactttaactttctccagaactcagacatgatttcaacatggtgttagatttgtgcattttattttcctgaccacctcattccagccaatgtatggttatccactctgtgtgccaaaaccaatcatgcctttcacggccctttagttcagagaagttctgcactgatttttagtctcttgatgtctcaatcttacatgtataccaatcacaatggaataaagtgttgagttgtactgtgaaaaaaaaaaaaaaaaaaaaaaaaaaaaa

SEQ ID NO: 116826 - DNA, 1000 bp, Homo Sapiens
gatgggacaaagcccaatgcgggaagtgaggagatttctagtgaagatgatgagctggtagaagagaagaagcagcaacgaagaagggtccctgcaaagaggaagctggagatggaggactatcccagcttcatggcaaagcgctttgccgactttacagtctacaggaaccgcacacttcagaaatggcacgataagaccaaactggcttctggaaaactggggaagggttttggtgcctttgaacgctcaatcttgactcagatcgaccatattctgatggacaaagagagattacttcgaaggacacagaccaagcgctctgtctatcgagttcttggcaaacctgagccagcagctcagcctgtcccagagagtttgccaggggaaccggagatccttcctcaagcccctgctaatgctcatctgaaggacttggatgaagaaatctttgatgatgatgacttttaccaccagctccttcgagaactcatagaacggaagaccagctccttggatcccaacgatcaggtggccatgggaaggcagtggcttgcaatccagaagttacgaagcaaaatccacaaaaaagtagataggaaagccagcaaaggcaggaaacttcggtttcatgtccttagcaagctactgagtttcatggcacctattgaccatactacaatgaatgatgatgccaggacagaactgtaccgctctctttttggccagctccaccctcccgacgaaggccacggggattgacatcgcccacctccgacacccagtgggcgccttggctggtgcggctgctggtccagatggaggaaaccagtgactttatggggctgagctagtagggaagcccctggaaagatgctgcgttccgaacctgtgcctaatacacgcaagggcgctgtcccgcccaaccccgcctttaaacgccacaaataaagagcattgttaccgccaaaaaaaaaaaaaaaaaaaaaaaaaaaaaaaa

SEQ ID NO: 116827 - DNA, 1000 bp, Homo Sapiens
gaatggctgggctgccaggccagacacgctaggttcttccaaagagtcccaagcccagcacctgctcctggggccacgacctccctggccgtggccacccgtcctccgcagcaggcccctgctgtccccccacctgctggctgagctcctcctggcctcgtcccctctcagctgtagctgcaccacccccgctctggctaccaggctctcccggctgggcactgcgtggccttgcccctctcccgctggcagctcctcaggggaacaggggctaccagaggctgatttctcccctctcctgggccaggggaggggtattatccctgcctcctgcccccgatgcccaaagcagcatcttccagcactttccatcgaggacttgggtggcagagtgtgggtgcagcctggctgttgctcacccaagtgctagctctgcacttcgtgtctgctgagagcaaccagaccttccatgtcctcgggcagctgcaactccccgcgagaccccgcagctgggtgggatgaacaagcaacgcagaccacaagcgagtgcctgggagggagtggcccagggtggttctggagccattgtgggtgagggtcgagggccaccgaggtcccgcgcaccgctgcctgccctgcagtggctttaacagttagttttgccaaagcctctccactcaccagcaggcggtctctgtcttcagggattgtgcctgcgtccctcgggcacctgggcccccccgcttggctccctgggggaatggcccaggcgggctgcggttcctccttagggccttctccccgacaaggagtccgacggggcggatgctgcatcctctgcctccctggtcgctgggcttcaccccacctgggaagggcagtgtgctctgtgggggctgcaatcaataaatgccgggagctgccaaaaaaaaaaaaaaaaaaaaaaaaaaaaaaaaaaaaaaaaaaaaaaaaaaaaaaaaaaaaaaaaaaaaaaaaaaaa

SEQ ID NO: 116828 - DNA, 1000 bp, Homo Sapiens
tcttctccagccagtttactggaacggccaaccaatcatatggaggctcttggtcatgaccatttaggaaccaatgacctcactgttggtggatttttagaaaatcatgaggagccaagagataaagaacaatgtgctgaagagaacataccagcatcttcactcaacaaaggaaagaaattgatgcattgcagaagccatgaagaggtcaatactgaactaaaagcacaaataatgaaagagatccgaaagccaggaagaaaatatgaaagaatcttcactttactgaagcatgtgcaaggcagtttacaaacaagactaatatttttacaaaatgtcattaaagaagcatcaaggtttaaaaaacgaatgctaatagaacaactggagaacttcttggatgaaattcatcgaagagccaatcagatcaaccatattaatagcaattaaaagaaaatagaatgtggccacttatttcactatcttcttcaaatacaaagtaaataacaagactgttgtgatcttgcattcattttctgacatgcattgttggctatttgaaatactaaaagcaaatctacagatcctttttccatcattttacagtgaccttttcttcattttggtttatttttgtaatgtgaaaagtatcactctaaaaaacatttttaatttaacaaactaaaaatattcctccaaatctcttgcttgtcattgactcttgcgtgtcaatttccctcaggttctattttcttaaaccaacctttaaaattgtcacctctgttaaggttgaactttgccaaaaaaaaaagaagttactttgtaatttttggggaaaaaagcacatacattaaaactaggtaatgttttgtatatacagttattttggatatattattgtaagttgtacaaatgtattttgaagaatatttaagaaaagcacttttgttattccatcaataaatgctctattttaaaaaaaaaaaaaaaaaaaaaaaaa

SEQ ID NO: 116829 - DNA, 1000 bp, Homo Sapiens
ggggaaaatgtagccaacatatacaaagatcttcagaaactctctcgcctctttaaagaccagctggtgtatcctcttctggcttttacccgacaagcactgaacctaccagatgtatttgggttggtcgtcctcccattggaactgaaactacggatcttccgacttctggatgttcgttccgtcttgtctttgtctgcggtttgtcgtgacctctttactgcttcaaatgacccactcctgtggaggtttttatatctgcgtgattttcgagacaatactgtcagagttcaagacacagattggaaagaactgtacaggaagaggcacatacaaagaaaagaatccccgaaagggcggtttgtgatgctcctgccatcgtcaactcacaccattccattctatcccaaccccttgcaccctaggccatttcctagctcccgccttcctccaggaattatcgggggtgaatatgaccaaagaccaacacttccctatgttggagacccaatcagttcactcattcctggtcctggggagacgcccagccagtttcctccactgagaccacgctttgatccagttggcccacttccaggacctaaccccatcttgccagggcgaggcggccccaatgacagatttccctttagacccagcaggggtcggccaactgatggccggctgtcattcatgtgattgatttgtaatttcatttctggagctccatttgtttttgtttctaaactacagatgtcaactccttggggtgctgatctcgagtgttattttctgattgtggtgttgagagttgcactcccagaaaccttttaagagatacatttatagccctaggggtggtatgacccaaaggttcctctgtgacaaggttggccttgggaatagttggctgccaatctccctgctcttggttctcctctagattgaagtttgttttctgatgctgttcttaccagattaaaaaaaagtgtaaattaca

SEQ ID NO: 116830 - DNA, 1000 bp, Homo Sapiens
ccaaggatcagatactggagccccacataatagatttcatttcactctagcctacatagagctttctgttgctgtctcttgccatgcacttgtgcggtgattacacacttgacagtaccaggagacaaatgacttacagatcccccgacatgcctcttccccttggcaagctcagttgccctgatagtagcatgtttctgtttctgatgtaccttttttctcttcttctttgcatcagccaattcccagaatttccccaggcaatttgtagaggacctttttggggtcctatatgagccatgtcctcaaagcttttaaacctccttgctctcctacaatattcagtacatgaccactgtcatcctagaaggcttctgaaaagaggggcaagagccactctgcgccacaaaggttgggtccatcttctctccgaggttgtgaaagttttcaaattgtactaataggctggggccctgacttggctgtgggctttgggaggggtaagctgctttctagatctctcccagtgaggcatggaggtgtttctgaattttgtctacctcacagggatgttgtgaggcttgaaaaggtcaaaaaatgatggccccttgagctctttgtaagaaaggtagatgaaatatcggatgtaatctgaaaaaaagataaaatgtgacttcccctgctctgtgcagcagtcgggctggatgctctgtggcctttcttgggtcctcatgccaccccacagctccaggaaccttgaagccaatctgggggactttcagatgtttgacaaagaggtaccaggcaaacttcctgctacacatgccctgaatgaattgctaaatttcaaaggaaatggaccctgcttttaaggatgtacaaaagtatgtctgcatcgatgtctgtactgtaaatttctaatttatcactgtacaaagaaaaccccttgctatttaattttgtattaaaggaaaataaagttttgtttgttaaaaaaaaa

SEQ ID NO: 116831 - DNA, 1000 bp, Homo Sapiens
tgtgaataaggccagcactcaagatgggcagccaagggtgcactgactattagctggcccataggatatctgtaaggctggtgggacagttttggacctggaatcatgtgtaactaacaaggttggacgtttcttccccatcagggtagaaaaatcatctcaaactagccaaaaggcagttttggaaactacattgggggacgttatttttatttatatatggggcctaggccaatccaggatggtagctggaataccttccttcttaaaatctgatcatggcagggatatgcagggcactttttactatttggccttctaagcagattgggaaggaggtattttctggttttcgctttcctccgacttaataggacttgccttctccctgggcagggagagaggctgggttggtgctctcccttactctactcatactgacttagagcctctggctgctgtttgggcatccaagaaagggaggggaaggaatgagctaaaaacaaaacagaatgaggtgggaaagggagattttcttctttacagaggaaaataggaaaccctccaagaattgtgcaagtaaagacatttgttgaatgcactgagtcccttggtgtagtagcaataaggaaaaatgaaattactttcctgtgcacacagtccagcctaattggtatgtgatgttgcacttagcagccatgtggtgggcatgtgtgactactctggttttcactttagtttctaaactttttatccctctcaagtccagcatggatggggaaatgtctctggatccccacagctgtgtacttgtttgcatttgtttccctttgagatttgtgtttgtgtcctgctttgagctgtaccttgtccagtccattgtgaaattatcccagcagctgtaatgtacagttccttctgaagcaagcaacatcagcagcagcagcagcagcagcacaattctgtgttttataaagacaacagtggcttctatttctaa

SEQ ID NO: 116832 - DNA, 1000 bp, Homo Sapiens
ccccacgactggagatgctggaggccgtgagccaatggaagagaaactcctggaaatccaagggaaaatcgaagctgtggagatgcacttgaccagggaacacatgaagccagtcttaggagaagtgtatctgcacacctggatcacagaaaacactagcatccccacccgcggactctgtaactttttaatgtctgatgaagagtatgatgacagaactgcacgggtgctgattggacatatctcaaagaagatgaacaaacagactttccctgagcactgtagtttgtgtaaagagatcttgccattcacagatcgcaaacaggcagtctgttccaatggccacatttggctccggtgcttcttaacctaccagtcctgccagagtttgatatatagaaggtgtttgctccatgacagcattgcccggcatccagctccagaagatcccgactggattaagaggttactgcaaagcccctgccctttctgtgattctcctgtcttctaaataatcagtgacgggaagatggaagggcatgatgaactctgccatagaaaacttcctccagcctgaagagaaggatgcactggaggaagccggaccctcacgagtggagagaagtccttggtgatcgtaaagagggcccctggagctcatttctgaatcgcactctccatttccagagactaaaggatgtcctttggaaatggctggactcagagagttggagtgcttttcacatgagcattagccccagctttgtaaccaatgaggaacacttacttgtttttaagtatcttgacgaagcaatttgaacacagtgtcccgtcatttctagaaacagaatggtctcttctagagagcttggataagaccttgctgggttgagttaggttttaatccttgccttggtttggaactgccttcgggctccagaacttaaattgcttggtccgtggcatctgatgtaccaacagagattaaaagtgggaattc

SEQ ID NO: 116833 - DNA, 1000 bp, Homo Sapiens
tagtggcacatgcagaatagactcagcctatgtcctgattccagctgggtagttctagaactttagaagctccatcttttaatgtttttatttgttatgtccccctcccggcttcccacctaaatttagagctttaaaagatgcactgcccaaataggacacacgatggtgttagctgaagtttgattagcaattaggcacttccaaggctttagtagagagagccactttagccctttgtgccatgtttgaaatttgcccttgtattaaatccttgattttttcccatttggctttgatgcccttgatccattgtttccttcctactataatgtgcttcatctgtgacactttctcttgaactctgattggattcactgtgcatgcttcagtgggatctgctccacctttcagtgacatttaagacatcatattcccgtaacattatgtctcagtctgatcgtctttaccagtatgaaagtcattcatttagtgctaccaaaggggatacacaagccctttaggaagcagtacctctcgcctggaggatctgtgccatcttggattgagaattgcagatgtgacagaatggattgaccctagttggttggtattgatgacttcagcctggaaattgcttgccttttaaagaagcatatatgggttggaattatgccaaagcataggaagctgggaataagcaaacaaatgctgatatagtcagcaaatttggatagtctctagggctcatcatttttcatactacctctctcttctggcctgtgtctaaggaattgtacaacataggccagggccaacaaagtggagaggtggacacattttcatgttcattactaaaacaaacagcaaaactattggtttgttattctgtgttttcctcaagtcagtacatactatttggtttcaggatttctttccatttctctatcaagcattaaataattgagaactgtttcttcaaaaaaaaaaaaaaaaaaaa

SEQ ID NO: 116834 - DNA, 1000 bp, Homo Sapiens
tcggagaagctggtgcgggcgctgcagactccgctgatgaggctgtgcgcctggtacctgtatggagagaagcaccgcggctacgcgctgaaccccgtggccaacttccacctgcagaacggggcggtgctgtggcgcatcaactggatggcggatgtgagcctcagaggcatcaccggctcctgcggcctgatggccaactaccgctacttcctggaggagacgggccccaacagcacctcctacctcggctccaagatcatcaaagcctctgagcaggtcctcagcctagtggcccagtttcaaaagaacagcaagctctgacagtaaacctctcctaaagcacagggccccggctaagaaaacgatcattttcaggaggggccggagttatgtatctgaagcagctttccagcaaagccaaagttgactgtgttcttgtcccgcagccggtccacactgtgaggccaggcctcaacttcctacctggcgtgacatgcacccagtgcaagacggttgtgggtgcgggtgcacacaaatgagtgggttgctgtgctgtctccggaagattctgtcgttgcccttggcctggctccctgcccggggctggtgctgtggtacctacatcttcaggaagctgtgcagcctctgccattgccatcccagggggatctggcatcctcctaaggaccggggcgcgtggcccagataagaataggtgttcctttgtgctcataaaacagaatgcggcgatggttgctttagccgtttctcaccatgcaatgcagagggacaaagggctgtgctacacttcccagttacattctgaagctcataaatgtatgagaaggtttgtgattttgcacaaggtgtgtgtagtaagttaaattgttgaacacaaaaatgttgctgcttgaggcataagttggataataggctttaaatgatcagggattcaggttcataatgaacttcacagtaaagaacacgtttgttctgt

SEQ ID NO: 116835 - DNA, 1000 bp, Homo Sapiens
tcaggtagggttcagggactgattggtcccatttgccctcaggtcagttgtttaatctcaagacctgttactactgattttattaaatcagagtctttaattcttgcatgtttgtatctaatttctgaacgaatgagcacactttaaccagttatttacagttacctttttcctttaaccggattgtgaaagcttcatgtattttaatttagattctgtgtttttaagggttctgagcatgaagctggcagatagtcggcaggactcattttttcatcatggctggctgatttctccatagattgataacagtattttgttatcttgcttctctgtagttttgcatcagctgtttaactttgagctgagtgaggggagaggggtaaagagaaagaaacttaagttttctttcacagaactccaccattgtgggctttgagagagccctaaagcattgtacctagtggtacctagtgacttccaaccaaagcctttgagtatgcactaaataggtgagaagaaaggagagaaggtttttaggttagaaacctttaaccgatagaaggatatggtatgttgtaaagctggaaccaagtttgcatttttgagggcttgagatgaagggaagactcttaccagatagtaagacagctgagttttcctcagttttctcgtcttaacactagtggacaattctagcattttgtttggaggatttcagagttaacctcatggaattcaggattttttagcaagtttgcttttggttttatcttggcttttagtaatcatgttggctggtctggtcacaggtgactgtgaaacagatgcccctggtcttgctttcatcactctaggatcatgaagtgctatgctatttcctggttatgaatattaaggttggaattacatttttattgattgtttggatcagagctcagttcctgtagaaaacgaactgtaaaagaccatgcaagaggcaaaataaaacttgaagtgg

SEQ ID NO: 116836 - DNA, 1000 bp, Homo Sapiens
agttccccgtgatctccgtggtggggtacaccaactgcggaaagaccacgctgatcaaggcactgacgggcgatgccgccatccagccacgggaccagctgtttgccacgctggacgtcacggcccacgcgggcacgctgccctcacgcatgaccgtcctgtacgtggacaccatcggcttcctctcccagctgccgcacggcctcatcgagtccttctccgccaccctggaagacgtggcccactcggatctcatcttgcacgtgagggacgtcagccaccccgaggcggagctccagaaatgcagcgttctgtccacgctgcgtggcctgcagctgcccgccccgctcctggactccatggtggaggttcacaacaaggtggacctcgtgcccgggtacagccccacggaaccgaacgtcgtgcccgtgtctgccctgcggggccacgggctccaggagctgaaagctgagctcgatgcggcggttttgaaggcgacggggagacagatcctcactctccgtgtgaggctcgcaggggcgcagctcagctggctgtataaggaggccacagttcaggaggtggacgtgatccctgaggacggggcggccgacgtgagggtcatcatcagcaactcagcctacggcaaattccggaagctctttccaggatgaacggacgcccacagaggcctgcggggtgggggcatcgctgcctggggagctgaggcgttaccgctgtgttgggggcagcttggtgtcaggtgcagcagggtcctccttgtctggttctgcacccgtctcgctcccagccatttgctgggatgaccgtgcaggccggtgacacggccgcacctgccccaaagcgggccgcccgagcgtccactccaagcctgagcatccacacaattccagtgggccctcggtgcctgctgtgaactgctttccctcggaatgtttccgtaacaggacattaaacctttgattttaaaaaaaaaaaa

SEQ ID NO: 116837 - DNA, 1000 bp, Homo Sapiens
tgagagatttctgccctagagatggcctttgtatatgggggggtggtggggggacacaaacacatcagacactccgtcctcacactggcaggacggtgttcatcgcattctcttctgtgaccagcctctaggctagcggctgcattcgtggtctgtgcaaacacttcgtggttctatatatcagcagcaagtgtgcaaaataaaggacctgttaactcagatttctggatattttggtggtagcttctagtcccagaatctgtgtttttaaaatactacatgacattctgtctattcaatcacctggtggtcatctttcttgtactaattaactgttgatgagcattttggatattctaggagaaagcctataatttcacatagtttctctttttcatgtaactgtaacctaaatgtattacttctgataaaactatatatcaaatgtcactgcaaattagttttatatctgtcatgtgagatttgtcttacttatttttcttttggttgccatggaagttatggccctgaaaatcgtctccctccccttctcttgctgtacagcatgcgttctctttttgtggttgctggctgggtactgtatttaatgaagtagagaatagcacttgcaaaaatacagtcttggtacctagagactgtcatgcagatagtataatttggtatatgtgctaatgcattgagtagaggattattttaacacactattttgcttttgtattttagttaaaataatcgatggggatgtgtagcccccccgtgtgaggatgacatcaccacatttctagtttcatggagctcaagatgtcttgtgtctgtgtggctagatggcctctgcttggtaatcttatttttaggcctaaaattcccacttaaatccaaagtaaaaatggttatactgaagcataaaccttgcctgtgtaattttaaaaaattaatagagctgtgcaaaccctgttatttttgtaaaaaaaaaaaaaaa

SEQ ID NO: 116838 - DNA, 1000 bp, Homo Sapiens
ataactatatatatataaatataaaattatatataaagggttatttgaaaccaatccatggcaacgctggtgcttgatacactgtgaagtgaatacaacattgaacagttacagatctgggacagtcccttctatgaaagtgctgaaatttaattaaaatcagtcttacatgaagtatgttccaatccatgtgggaacttgactctctcatctgtctaaagagtactggacgatataaaaatatatattttttaaacaatgtgatctcaaatttaaagactgctccagatagcctgcatttgcaatggaataactgacaaatcacaagtggtttagttgggcagggctttgatcattcaaaagtaactaaagtagctccagaatgccaagtattcgtgtaaattacggttacatgttatcatttgctgttcttacataagcactcatgaaaatatggtattctgtaacttgaattccatccattttccagacgtctactcatgtctgaggtaaatctagaaattgtcttagttttaggattgaaacagtctataaactgtatttttggtccatccaggaagctagtcccttgtttctcctttctacatgacattgcagtggtggtttctgtaattaaaatttgtttgcctcatgtccctttgtctgataaaccttcactctaccgattcagttgtgagcattctttttttccttctcaaaacctactatgatttgttttactgaacaaaggttatcaaccacacatccagtcctgacatggagcttttcagtgtttggagacatttctcaatcccctgctgtggtaggaactccagtggtgaacggcttgcgcgcctgcagccagagttgcagggaaagctcgtacttactgcgagcagcatgtaatcttttttcttcctggacataaagatagcttgagtaaactgttctatttcattctcttcactctttttactgtcttgcaaaaaaaaaaaaaaaa

SEQ ID NO: 116839 - DNA, 1000 bp, Homo Sapiens
tgcagcagcgaggaggtctcctcaggcattaccgctctggtgttcttggacaaaaggattgtggctgcacggctcaacggttcccttgatttcttctccttggagacccacactgccctcagccccctgcagtttagagggaccccagggcggggcagttcccctgcctctccagtgtacagcagcagcgacacagtggcctgtcacctgacccacacagtgccctgtgcacaccaaaaacccatcacagccctgaaagccgctgctgggcgcttggtgactgggagccaagaccacacactgagagtgttccgtctggaggactcgtgctgcctcttcacccttcagggccactcaggggccatcacgaccgtgtacattgaccagaccatggtgctggccagtggaggacaagatggggccatctgcctgtgggatgtactgactggcagccgggtcagccatgtgtttgctcaccgtggggatgtcacctcccttacctgtaccacctcctgtgtcatcagcagtggcctggatgacctcatcagcatctgggaccgcagcacaggcatcaagttctactccattcagcaggacctgggctgtggtgcaagcttgggtgtcatctcagacaacctgctggtgactggcggccagggctgtgtctccttttgggacctaaactacggggacctgttacagacagtctacctggggaagaacagtgaggcccagcctgcccgccagatcctggtgctggacaacgctgccattgtctgcaactttggcagtgagctcagcctggtgtatgtgccctctgtgctggagaagctggactgagcgcagggcctccttgcccaggcaggaggctggggtgctgtgtgggggccaatgcactgaacctggacttgggggaaagagccgagtatcttccagccgctgcctcctgactgtaataatattaaacttttttaaaaaaccatatcatcatctgtcaggc

SEQ ID NO: 116840 - DNA, 1000 bp, Homo Sapiens
caagttctgaaccaggagaggcagcctagacaaccaagtggcagcaggtgggggcattcttctaagaatgaggggcatcagcccaccccaggcacctcagtggggttccgggccacctcaggactccaagaggctgtgtggagccaccactcctagccacagctgccatgataagtccttccatgaaggactgaggagggagagtgggggtccagggctggtgctgctcttccctcagctctgccggggctctaaggtccctctatttatttctcaaccctggctggcctctcaccaggagtttaggctgaatgccttccacgtgatggaggaaaaggccaactctgtcctggtcttgctgtggcaccccatcgccccacagctcgtaccttctcaccagattcccctgaatccaaactcgtggtgcaaacctctaccttttttacaaaaagatcttattgttaatttattgtttctggcacttgggcaaaccctgtagttaatactcctcccacactagacactgggtttcaggaggagggagactgccctgctttggtcccagagaggccctctgcagataggcgtggcccctcttcagaggacactaccctagggcactttctctttgaggtggagagacccataaagccttgaccacatcactccatatggggaggagaaggatccctgtcaccttctcctctcttcacggggcccttttgcagccctaggcctcatctgtgggaagggagtccctggctcatactgcccccaccacagctccttgccctggccagaactgctgtcgaagaaaatcaggccggaaggccaagaaggcgctaagggggatgggagggcaggttttccaggctggagtcggttccacccactcgcctgtccacaggcttccttgtaagcaagtcagcagcacagctactcacgctgccatctggacttattttatgtcaatctgtttataaataaaaaccaatatagg

SEQ ID NO: 116841 - DNA, 1000 bp, Homo Sapiens
cctgataagaggtcgaaacttcagagaaatgaaaatcgggatatcagtgaagttattgctctcggtgttcctaatcctcggacttccaatgaagttcagtatgaccaaaggctcttcaaccaatccaagggtatggacagtggatttgcaggtggagaagatgaaatttataatgtttatgatcaagcctggagaggtggtaaagatatggcccagagtatttataggcccagtaaaaatctggacaaggacatgtatggtgatgacctagaagccagaataaagaccaacagatttgttcccgacaaggagttttctggttcagaccgtagacagagaggccgagaaggaccagtgcagtttgaggaagatccttttggtttggacaagtttttggaagaagccaaacagcatggtggctctaaaagaccctcagatagcagccgccccaaggaacacgagcatgaaggcaagaagaggaggaaggaataggcacaggtctctccaaagtgaatgaactcttacccataaccctaatgatgcaagtcatatgggggaacactttgtaaatggtcaggataaaaaccaaatctgggtgccagatcccagcactactttttattactggagaaatgggggggatagaaaattctactttgaattatttagttttttttaaagagtgggttgtgtttgtgcttctcccacctttcagcatttatagaacatgctgccccacatacaaagtcaagaccacttacttttatgtgacactagtagtttggggttaatgttttgtgtaagaacagctgcatatgagtaaagttaccccaaccacagtgaggaggaagatgttcacatactggaactgtcctgccaaataaattttgcccctattgtgctctgttttaatttggagtgggcaaagtaacctcttgcttggtgcaactatttgtttcaaataaaaacatttagacaaaaaaaaaaaaaaaaaaaaaaa

SEQ ID NO: 116842 - DNA, 1000 bp, Homo Sapiens
aacaacaaaaatctcattgtgtctacacatcggggtgaccttaggtcggtttgtaagtggatacaattaataaaataaaatccattgcctttttttcctgttacattaactgaagatgcacctaatcttgaggcagcttctgagttgagaattatattgttatccaatactgttgattcattttgaatctttagacacttatctcttgccgcataggctttttaaaggtgctttcacatagcacaggcattacccgtagtcgtgtcaaatagcagttggtgtcttcattttatgtatatttatcatataagtctgatttttttttttaagcgtcttgaatggttttctggagagacagcattggtaagtggcacatgacggtatcccagtcataagagggttgcatgattcctttgagtgtttgatttgaaaagcctagtcttgtctctcaagagcatctcggacccagaacattctccagtagtgcattcagttcaacacagcaagtgcttcattgcatggaaaacactttgaagacaaaaaagaaatcttatttctttttttgtagccttcctgatatttacagtaataccattaactgttttatcgatagcaaaaaaggatactttttgcaatgttattagatgttctatagtgctacaaggaattgccttccgaatggaggttcatgtataatactcatttacaattcaatatataattacacaaataatttttaaatataatcaatagtaaagactgttctgtggatggtagtgtttaatacattttctattttgtacagtgatttcaggccttttgttttcttaaaatcagcagctgtttggcctaattcttagcattattttgtcctttgcgccagtacttttttgtgcacgctttttgtgatctgtgttaaaaacctgcattgccaacattgcagctcgaacttaaacttgttattcaaataaatatttaattttttaaaaaaaaaaaaaaa

SEQ ID NO: 116843 - DNA, 1000 bp, Homo Sapiens
gggattactgatttgtctgccaagagaacaggcggctcgcttttgttctgaaatcaaatcctccaagtacggagagggtcaccaagcgtggatcgttggcattgtggaaaagggaaaccgaacggcccggatcattgacaagccgcgagttattgaagtcctgcctcgtggggccacagctgctgttcttgctcctgacagttcaaatgcctcctctgagcctagctcgtgagatgaaagaacagaagttgtttggaccttagagccattgtccacaatcacggatggttctcaagagttgattgtaagaaatttccaaagaaggctgcctgcatagtggttccggctgccctttctaggtgattggaatcagcccatctaaagcagtctttatatgcattccgaggccagagtaacattttgaactttggggggatatttgttcatcacttgggtagaagaggagcaaaaatacctctgttttctcttgccaaagtaagatgaagctattccaggttgagggatttttctttgcacggggttgattaatttctgcacagggagtgagattattaaagtaacacacacacaaagtaaattgcaaaatgaaaaaaattagaagcaaatgagttttggaccaatattgttgataaatctaaattgttaagagagatcttataatgcaacatcaaattctttattcaattttactgaagtactggctctttcctgctctggacaagaattgagcaacttgtctgatgactgggaaaggaggacctgcaaccatctgacttggtctctgttaatgacgtctctccctctaaaccccattaaggactgggagaggcagagcaagcctcagagcccaggcctcagtggtcattaagatgttaagtcttttgcggcagattcctggtgatttgatcaataaagagtaatttcttgctaaataaataaaagaaaccttgttgaaaaactaaaaaaaaaaaaaaaaaaa

SEQ ID NO: 116844 - DNA, 1000 bp, Homo Sapiens
tcggatctgggaagtctacggctccacagaaggcaacatgggcttagtcaactatgtggggcgctgcggggccctgggcaagatgagctgcctcctccgaatgctgtccccctttgagctggtgcagttcgacatggaggcggcggagcctgtgagggacaatcagggcttctgcatccctgtagggctaggggagccggggctgctgctgaccaaggtggtaagccagcaacccttcgtgggctaccgcggcccccgagagctgtcggaacggaagctggtgcgcaacgtgcggcaatcgggcgacgtttactacaacaccggggacgtactggccatggaccgcgaaggcttcctctacttccgcgaccgcctcggggacaccttccgatggaagggcgagaacgtgtccacgcacgaggtggagggcgtgttgtcgcaggtggacttcttgcaacaggttaacgtgtatggcgtgtgcgtgccaggttgtgagggtaaggtgggcatggctgctgtgcagctagcccccggccagactttcgacggggagaagttgtaccagcacgttcgcgcttggctccctgcctacgctaccccccatttcatccgcatccaggacgccatggaggtcaccagcacgttcaaactgatgaagacccggttggtgcgtgagggcttcaatgtggggatcgtggttgaccctctgtttgtactggacaaccgggcccagtccttccggcccctgacggcagaaatgtaccaggctgtgtgtgagggaacctggaggctctgatcacctggccaacccactggggtaggggtagggatcaaagccagccacccccaccccaacacactcggtgtccctttcatcctgggcctgtgtgaatcccagcctggccataccctcaacctcagtgggctggaaatgacagtgggccctgtagcagtggcagaataaactcagatgtgttcaaaaaaaaaaaaaaaaaaaaaa

SEQ ID NO: 116845 - DNA, 1000 bp, Homo Sapiens
ctgggaaaaatccagcaatggacggcagtggaagcctcagcttggctttaaccgtgaccggaggcctgtgcacctggatcaggcagccttcaggactttgggccatgtgatgccaagaggctcaggaactggcatttacagcaatgctgcaccaccacctgtgacttaccagggaaacttatacaggccgcttttgagaggacaagcccagattccaaaacttatgtcaaatatgaggccccaggattcctggcgaggtcctcctccccttttccagcagcaaaggtttgacagaggcgttggggctgaacctctgctcccatggaaccggatgctgcaaacccagaatgcagccttccagccaaaccagtaccagatgctagctgggcctggtgggtatccacccagacgagatgatcgtggagggagacagggatatcccagagaaggaaggaaataccctttgccaccaccctcaggaagatacaattggaattaagcttttgtaaagctttcccaaatcctttcatcattctacagttttatgctatttgtggaaagatttctttctcaagtagtagtttttaataaaactacagtactttgtgtatttcttttaactgtgtatatttctactgatctgatctcactgtttatgttgctttccaaagatgtatgttgcataatacagtggatctgaatttattattgcttataaaacacatttgatggaataggagtactggtttttcataatggttaaaaatgaaaccagctgtggatttcaaaacacagtgtattctagatcatctaagatccatgctgatttttattgcacaagaattaggtttgaactcgagctggaacctcagcaaactagagtatatattgttcagtatttctttggaaacatttcattaatgtacttgtcttacagaaatttctgaactttagtaaaaaaaaataaagttaaacttttaaaactcaaaaaaaaaaaaaa

SEQ ID NO: 116846 - DNA, 1000 bp, Homo Sapiens
gtcttgaaatgatttaataatatgagtgaggatttgctttctccattagagcattaagctaaaactatcaacattttaaaccaaattgccttatttttcttccaaacttcatatatgtctatcaggtaataataggcttgaaaattgatatcctgtggtgctaaagtacagtagaaagagaggagaagtgtatacatgttttattttaaattgtacgaaaggggaatttaaaaaatatgtaactgctgtttatacattggctccttactgcttattaatctgtattgtacacatgatgaaatgaagcagaagctgggagtcggcctttcctctagtaaccaccacatggctcagcatctgtgccaaacataggcgctcctagtctggtcagtgccaagaggctaccagaacatggggcaggtggctggtgttggtgtcccagcctaagagccacctgctgcagttaccatggcatgctgagttgatgcaccaggtggcagcagccatccgttattatttccaatggagacctagcccaggccaaggtaaagttagttaatagcattgggatatagtcactgtaatggtgctattaacaaacagtcaacaccattgtattttttaacttcgtgttctgtatctcctcagccatgtatcttaaatatattttgtcatcataatctttatggtgggggcagactttgcacttactgcagtgcaacacttgcactttaattttcctccaactgtctaaaattagagcaaatacattggcaatacagctgcttttgctctgagctacaatcatggcttttcatgttacttaccaagtggtgtttctggttaggaatcacagctgtaaaattgatttcagttcatcacacttcttcatgatgttgcccctaaattttgcacactatattcttgtatattatttcaaataaatggaaaaaaaagttgcttatctctgaaaaaaaaaaaaaaaaaaaaaaaaaaaaaa

SEQ ID NO: 116847 - DNA, 1000 bp, Homo Sapiens
ttaaaaactagttgttaaattttgttcaagacattaaattgaaatagtgagtataagccaacactttgtgataggtttgtactgtgcctaatttactttgtaaaccagaatgattccgtttttgcctcaaaatttggggaatcttaacatttaggtatttttggtctgtttttctccttgtatagttatggtctgtttttagaattaattttccaaaccactatgcttaatgttaacatgattctgtttgttaatattttgacagattaaggtgttgtataaataatattcttttggggggaggggaactatattgaattttatatttctgagcaaagcgttgacaaatcagatgatcagctttatccaagaaagaagactagtaaattgtctgcctcctatagcagaaaggtgaatgtacaaactgttggtggcctgaatccatctgaccagctgctggtatctgccaggactggcagttctgatttagttaggaggaccgctgataggttaggtctcatttggagtgttggtggaaaggaaactgaaggtaattgaatagaatacgcctgcatttaccagccccagcaacacaaagaatttttaatcacacggatctcaaattcacaaatgttaacatggataagtgatcatggtgtgcgagtggtcaattgagtagtacagtggaaactgttaaatgcataacctaattttcctgggactgccatattttcttttaactggaaatttttatgtgagttttccttttggtgcatggaactgtggttgccaaggtatttaaaagggctttcctgcctccttctctttgatttatttaatttgatttgggctataaaatatcatttttcaggtttattcttttagcaggtgtagttaaacgacctccactgaactgggtttgacctctgttgtactgatgtgttgtgactaaataaaaaagaaagaacaaagtaaaaaaaaaaaaaaaaaaaaaaaaaaa

SEQ ID NO: 116848 - DNA, 1000 bp, Homo Sapiens
ggttaagaaaggaaagggacagaagtcttgcaataggctgcagacattttaataccatgccagagaagagtattctgctgaaaccaacaggttttactggtcaaaatgactgctgaaaataattttcaagttgaaagatctagttttatcttagtttgccttctttgtacagacatgccaagaggtgacatttagcagtgcattggtataagcaattatttcatcagttctcagattaacaagcatttctgctctgcctgcaggcccccaggcacttttttttttggatggctcaaaatatggtgctgctttatataaaccttacatttatatagtgcacctatgagcagttgcctaccatgtgtccaccagaggctatttaattcatgccaacttgaaaactctccagtttgtaggagtttggtttaatttattcagtttcattaggactatttttatatatttatcctcttcattttctcctaatgatgcaacatctattcttgtcaccctttgggagaagttacatttctggaggtgatgaagcaaggagggagcactaggaagagaaaagctacaatttttaaagctctttgtcaagttagtgattgcatttgatcccaaaacaagatgaatgtatgcaatgggatgtacataagttatttttgcccatgcctaaactagtgctatgtaatggggttgtggttttgtttttttcgatttcgtttaatgacaaaataatctcttaatatgctgaaatcaagcacgtgagagtttttgtttaaaagataagagacacagcatgtattatgcacttcatttctctactgtgtggagaaagcaataaacattatgagaatgttaaacgttatgcaaaattatacttttaaatatttgttttgaaattactgtacctagtcttttttgcattactttgtaacctttttctatgcaagagtctttacataccactaattaaatgaagtcctttttgactatt

SEQ ID NO: 116849 - DNA, 1000 bp, Homo Sapiens
ctcttctctctccctgccctcccccactccattcagttgattcatttatgcaaattctgtttccaacttgaaaccattttgtcacatctgttggagagataatcactccttttccttaacattctgccagctttctgatgttgaagtgtttcagttgactacctgatgcaaaagctataaaataaacagtgggaaggggaaaaattggtgtcctgttttaatattttcttttgtagccttgacactgatggacattttccaagctgactcagtgttcagtgtcaacttaactctcagatagtgttgccatcaagaaagcatgcaacatcattggtttctaatgattttatggcttgtgacaatattttatctggactgacatgcctctgctgcttttgctttgtacttcattgctggtaataaaatttcagatggaaaacttacaaaatatatacttaattagaagaaaaaaatagagaaagggctattagaattaaaaaaatttgaaagtaacttaatctaacatttatggcacagtttggacatatccataattttttttgggaacacacatttctgattttttttttcccccttaaagaagaaagtctcaattccattgattttcaattcttagccactggctcattgctttgagcaatgcttgattgattctatttatattatatgatattgggttgataaaataccagttcaatgatgagttttcttaacagaatttggtttgtacttgcagtggctgaacaaagagcatggcttgagaatcaaagggatctgcatttagcaatgtgatgtcagtaaatggacataacaggattgttgtaaaggttgggcatgatgtatgcaaagtactggccagggtagactaataactgatggcatttatatgctgtgctggaatattgttaccaagctgatgtgccgttctcaccctgcagaatactggttttgtcatttcataaatgatatttttataaat

SEQ ID NO: 116850 - DNA, 1000 bp, Homo Sapiens
cctgcagtgctgggcccagagcccttggacaggcctcaggagtggtcaggaccaccaagcccctcctctccccctccacacctctagacctggggcctccggaacccccagcaggctgggcttatactagctcctgacttaggaagagcctcgtgtcacaacacgtgtccctacaggcaaagtgtcctggcatttaaaacccagattatccctgggtttgggctgcagtcacctggagaagctggtagggtaagggagagggaccctgccggtgttcactggggattctttcttttggtccttcctggaatgaacaggttccctccctgccacctgtgaggagagttggggcccagccgtcttcctggcctccttcctttcctcgtggcagaggcctgcatgtgggtgccagaggccagctctccccctccatcttgggggggcggagcagttgggcccaagctgcccgggagggtgggtgcagacacaggctgaggaccagccctggccctgccccgccatctgctttcaccaagctgtctctccaccgtggcttcccttctccctccaggccaaagtgctgctgattcccactcccttggttttcgcctgcccagcgttgctgtttgcgtggagggtggggggagctcagtggcagggaatcagcggtccgtggggtcgtggggacgggaacatgtgcccgaccgctccatcccctcctcctccttaggatgcataacctaccttgtcttttttttttttaattttctttccaggtagagtagctctttgtacataaagaatacttgaaaaattaattgtatgatgtatgagaagacagagtctcctagttttgtatcttgttgtatgactgccatgagttccaccagaaagccactctattttggtctctgtgacattttaaatgcgtgacagaagtgagcaaataaagtgaggaagaaatctatatatgagataatatagattgtattgaaatctc

SEQ ID NO: 116851 - DNA, 1000 bp, Homo Sapiens
taaggaatatgcggttaatgaagttgtggcaggaataaaagaatatttcaatgtgatgttgggcactcagctgctctacaaatttgagaggccccagtatgctgaaatcctcttggctcaccctgatgctccaatgtcccaggtttatggagcaccacacctactgagattatttgtaagaattggagcaatgttggcctatacgccccttgatgagaaaagccttgcattattgttgggctatttgcatgatttcctaaaatatctggcaaagaattctgcatctctctttactgccagtgattacaaagtggcttctgctgagtaccaccgcaaagccctgtgagcgtctacagacagctcaccatttttgtcctgtatctgtaaacactttttgttcttagtctttttcttgtaaaattgatgttctttaaaatcgttaatgtataacagggcttatgtttcagtttgttttccgttctgttttaaacagaaaataaaaggagtgtaagctccttttctcatttcaaagttgctaccagtgtatgcagtaattagaacaaagaagaaacattcagtagaacattttattgcctagttgacaacattgcttgaatgctggtggttcctatccctttgacactacacaattttctaatatgtgttaatgctatgtgacaaaacgccctgattcctagtgccaaaggttcaacttaatgtatatacctgaaaacccatgcatttgtgctctttttttttttatggtgcttgaagtaaaacagcccatcctctgcaagtccatctatgttgttcttaggcattctatctttgctcaaattgttgaaggatggtgatttgtttcatggtttttgtatttgagtctaatgcacgttctaacatgatagaggcaatgcattattgtgtagccacggttttctggaaaagttgatattttaggaattgtatttcagatcttaaataaaatttgtttctaaatttc

SEQ ID NO: 116852 - DNA, 1000 bp, Homo Sapiens
aactttccagccattttactgcagcagtctgtgaactaaatttgtaaatatggctgcaccatttttgtaggcctgcattgtattatatacaagacgtaggctttaaaatcctgtgggacaaatttactgtaccttactattcctgacaagacttggaaaagcaggagagatattctgcatcagtttgcagttcactgcaaatcttttacattaaggcaaagattgaaaacatgcttaaccactagcaatcaagccacaggccttatttcatatgtttcctcaactgtacaatgaactattctcatgaaaaatggctaaagaaattatattttgttctattgctagggtaaaataaatacatttgtgtccaactgaaatataattgtcattaaaataattttaaagagtgaagaaaatattgtgaaaagctcttggttgcacatgttatgaaatgttttttcttacactttgtcatggtaagttctactcattttcacttcttttccactgtatacagtgttctgctttgacaaagttagtctttattacttacatttaaatttcttattgccaaaagaacgtgttttatggggagaaacaaactctttgaagccagttatgtcatgccttgcacaaaagtgatgaaatctagaaaagattgtgtgtcacccctgtttattcttgaacagagggcaaagagggcactgggcacttctcacaaactttctagtgaacaaaaggtgcctattcttttttaaaaaaataaaataaaacataaatattactcttccatattccttctgcctatatttagtaattaatttattttatgataaagttctaatgaaatgtaaattgtttcagcaaaattctgcttttttttcatccctttgtgtaaacctgttaataatgagcccatcactaatatccagtgtaaagtttaacacggtttgacagtaaataaatgtgaattttttcaagtaaaaaaaaaaaaaaaaaa

SEQ ID NO: 116853 - DNA, 1000 bp, Homo Sapiens
tgtatctgtccgtggaaaatttcagtccagaagaattgaccttgaccattaataaagacactggcagagagatcttcccataataaagcaatctgattcagcatcactaaaccgataatgcatgaagcaacgataaaattacaaaagagcagcatttttaattttcacaaaatgtctcagttttcagctatacctgcacgttcataaccaacaatataaaccgtggtctcatgtaacacataaacaattcatgcctttcatagtttattattattaaagtctaaacaaaattgcaatttcttaggtaaccttatatttacaataaatgaagattaccctcaaatgctagaagctgtctaggtccgtccggtgtgtcagattttcctcagattagatgtgccaataaccaagtttattcagtaaacaacttgtacttgtttcatctggttttattactctcacccataaacagtaatgactctctgaccctctggaaatatgtaatgcttccaatcttgctttgtgtatctcatttaatttgttataaggtagtactgattttagcatattaatgcgatttcttccttgttgtttgctttggtctgtgttcaatccagagagcttaaattgtcattattttgggaagaaaacctgtatttttgttagtttacaatattatgaaatttcacttcaggagaaactgctgggcttcctgtggctttgttttcttagttactttttccgtgccgtgtattttttaattgatttttcttcttttacttgaaaagaaagtgttttattttcaaatctggtccatatttacattctagttcagagccaagccttaaactgtacagaatttccactgtaattaaaactatttagtgttagttataaatagccttcaaaaagagagattctccattacacgatcacctgcatcacagcccatggtgaatgtatgtttctgcatagcgaaataaaaatggcaaatgcactg

SEQ ID NO: 116854 - DNA, 1000 bp, Homo Sapiens
gagagacgccaactgcacccttgccacttccaaagcaatagaggcagagtggtcccctctttgccacctaggccagttttgaccctggcattaactggccttagaagaaactggatcctggtagggggtggcattttgtttgtttcttccaatctgctgaatcttttgactgcaccttacaaacagcagtctgctcccatgaccctctgcccacttccattggtctccaggccccaataatctggggttgaaactttgaggaaatgccagtgacttattccagagtgcctcagttaggggaacttctctgtaaagaaccctgggtattgagcaaaaaccttattatcgttaatgacctataattggaagcttcctgcctttttctttggttgctcctgtggaaaatactgaaaagattactttgttttattttgttgtctttttataaaaggggaggtggagagaccccttcagagcagggattgtgccgggagagtgcctctgactttgggacatttcatccacagaaatttccaagccaatggtttcttttgggttttggtttttatgtttgttttttggggtttggaaaaacatgcatttttaccgtgcacgtaaattggtcagcagaaaagggagcccagaaaaggcagcagatggaccatgcccttgctgggttttccttttctttgggactgtgaggggaaatggtttttagaggtgagggttggtccatgtggaggaaagaagtgtctctgttgggggacagaggaacctggggagtccatcgcatgtcctacaatctgctcttagacacggccttgccaggagagcctgccctcagactgcaggaccagaacccctgcctccatctttccaagcaccggggcgaaaaaccacaaaggaaaggaagaaaatttatatatatataatataaaatcacttggtgattaaaaaaataactgctccataaataaaactcctaaagtcacttatgttt

SEQ ID NO: 116855 - DNA, 1000 bp, Homo Sapiens
gtgaaaattataaccaagaaactgggagagaaatatcataagaaaaaggctattgttaaggaagtaattgacaaatatacagctgttgtgaagatgattgattctggagacaagctgaaacttgaccagactcatttagagacagtaattccagcaccaggaaaaagaattctagttttaaatggaggctacagaggaaatgaaggtaccctagaatccatcaatgagaagactttttcagctactatcgtcattgaaactggccctttaaaaggacgcagagttgaaggaattcaatatgaagacatttctaaacttgcctgagtttgaaaatttgttaacaatacattaaaatcttaaagcatcaaattggtgttcgccaaggcattatgagactctactgtgttagggtatattcttttgtataaaacaaacaggtttttgaaaatattactgtatagttgttcagctaaactttgagaagaatttaattatgtctcatgaggtatcaaactatgtaattttgtccttgttatttttgtttcctttgtaatttacttgatgagtttatatcttcattaaagaatgttattataaagtgttttatctatgacaatttagaatcatgtaattggaggaaatccttcatacactctatattttcagtagtagagtagtaaagttgaactctaagtgtgactaaattttaaatgtcaaactataaatatagaagcagctttattgtggtaataattcatataccatacagttcactcatttaaaatatacatacaattcagtggtttttagtatttttgcagaattgtgcagccatcaccactgtctgattttaaaacactttcataccccaaaatgaaaccctttaatagtcaatcgctatttttcccctctgccctagccctagacagccactaatgtactttctgtctctatggatttgccctttctggacatttcttataaatggaatcatataata

SEQ ID NO: 116856 - DNA, 1000 bp, Homo Sapiens
tgcccaccctcaggggcgtcaggagacacagcctggcctcctcagggctgaagatgcctccattcgcctgtggaccttgatttctagatttcagtgtcaatagacctgtcttcctgcacactttcagttggatgtgggtcattgtggagacagaggtgtctgccatctctgtggcctctggagagtgacgtctccctgctgggagtgctggttctcacgtgcggtttcccttgtgtatcggagctctttctcggctttctatttcccccagttctttaagcagtcaattggcacagagtttcccacgggggctgcagtggattcactgtgtcagggatgagcctggcttgggggttggtggggctctgaagcgcatttggggttctttgtagcttctaatgtgaggtttgagtccagtgcgcccacagcagcatgcccttctcaccccttgcagtgttgcaggctcaggcccctgggctccttcagcaagcaggctagtcaatgaggcatgaggatccggcacagggcatcccctggggcttcaagggcaatacccccgtgcttagggtttgccctgtgccctctgggtggggtggcctccccgcactcggcagcatggccaggctggccagggcgtgggcaggtggtgtcctgtggcacctccatcctcctgcccagccggctgtgtcacactcatctttttaaggtcaggttggttcctggcaaaaatgtacctccaggggcctccaagcataggatttggaagacaggaacggcacaggcgtccaggaaagcagctgcactcagacaatgccttctccattacttgaagcttctttctgttcagccattaaagaaacttgacaaaataggaacaggagatatttctcaattgtaaacctttgtgcagggacagttggcttccagaggtttcagctttcagttatttgagaagtttgttttagatccttaactaatatttatgaattctctcaccctg

SEQ ID NO: 116857 - DNA, 749 bp, Homo Sapiens
atggcggctaacgctactaccaacccgtcgcagctgctgccgttagagcttgtggacaaatgtataggatcaagaattcacatcgtgatgaagagtgataaggaaattgttggtactcttctaggatttgatgactttgtcaatatggtactggaagatgtcactgagtttgaaatcacaccagaaggaagaaggattactaaattagatcagattttgctaaatggaaataatataacaatgctggttcctggaggagaaggacctgaagtgtgaatgagtttccttgacttacactagattttgttttggcttataatgacaagaaaatggaattttttttcccactttctaatgtttaaatcccataaagctaagtttcccgttaaagggaagtgctttgaagatgtgtacccatttttgtaagttaatcatgattatcctggaaaaagaagaaaagaacttcttcttttgcagatgaaaataaaggtgtttttggttaactgtcattttgtttattctactgcagtagccagtggaacaaagtttgtagttattttgccacttacttttctgtcattatatgcttatttgttttgtcatttacgtgaccatttgattctcaaacaaaagttgttccaaacaaaatgatgaactttgatttgaacaggtgcatttaaacaaccggaaatgatcacttagaaaattcaattaaaatgctgttgttttgtaaaaaaaaaaaaaaaaaa

SEQ ID NO: 116858 - DNA, 1000 bp, Homo Sapiens
ctcccctccgacctgcagcgtcaagtctcctcaaggctgtgtggtggagaggcctccgagcagcagccagcagctggctcagtgcagcatggctgctaacttcaccccacccatgcagctggctgaaatccccgagacgagcaacgccaacattggcttatacgagcgaatgggtcagagtgattttggggctgggcattacccgcagccgtcagccaccttcagccttgccaaactgcagcagttaactaatacacttattgatcattcattgccttacagccattccgctgctgtgacttcctatgcaaacagtgcctctttgtccacaccattaagtaacacagggcttgttcaactttctcagtctccacactccgtccctgggggaccccaagcacaagctaccatgaccccaccccccaacctgactcctcctccaatgaatctgccgccgcctcttttgcaacggaacatggctgcatcaaatattggcatctctcacagccaaagactgcaaacccagattgccagcaagggccacatctccatgagaaccaagtcagcgtctctgtcaccagccgctgccacccatcagtcacaaatctatgggcgctcccagactgtagccatgcagggtcctgcacggactttaacgatgcaaagaggcatgaacatgagtgtgaacctgatgccagcgccagcctacaatgtcaactctgtgaacatgaacatgaacactctcaacgccatgaatgggtacagcatgtcccagccaatgatgaacagtggctaccacagcaatcatggctatatgaatcaaacgccccaataccctatgcagatgcagatgggcatgatgggcacccagccatatgcccagcagccaatgcagaccccaccccacggtaacatgatgtacacggcccccggacatcacggctacatgaacacaggcatgtccaaacagtctctcaatggctcctacatgagaaggtag

SEQ ID NO: 116859 - DNA, 1000 bp, Homo Sapiens
atgctgacctctgcctgtcctggctgggtccgatacgccgagcgggtgctgggtcgccccatcactgcccacctctgcaccgccaagtccccccagcaggtcatgggctctttggtgaaggattatttcgccagacagcagaacctgtctccagagaagattttccacgtcattgtggccccttgttatgacaagaagctggaggctcttcaggaaagccttccccctgctttgcatggctcccggggcgctgactgcgtgttaacatcaggtgaaattgctcaaataatggagcaaggtgacctctcagtgagagatgctgccgtcgacactctgtttggagacttgaaggaggacaaagtgacgcgtcatgatggagccagctcagacgggcacctggcacacatcttcagacatgcggccaaggagctgttcaacgaggatgtggaggaggtcacttaccgagccctgagaaacaaagacttccaagaggtcacccttgagaagaacggagaggtggtgttacgctttgctgcagcctatggctttcgaaacatccagaacatgatcctgaagcttaagaagggcaagttcccattccactttgtggaggtcctcgcctgtgctggaggatgcttaaatggcagaggccaagcccagactccagacggacatgcggataaggccctgctgcggcagatggaaggcatttacgctgacatccctgtgcggcgtccggagtccagtgcacacgtgcaggagctgtaccaggagtggctggaggggatcaactcccccaaggcccgagaggtgctgcataccacgtaccagagccaggagcgtggcacacacagcctggacatcaagtggtgaagtcaggccagggccttccagctgctcttggggccagagccaagagcctctcagtagagggaggggctgccctgagtggagtattaaagacacttaagaaaaccgctcaaaaaaaaaaaaaaaaaaa

SEQ ID NO: 116860 - DNA, 1000 bp, Homo Sapiens
aaactatcgacaaggagcgtttcagtgtgcaggatgtcatctacgtgcggggctgcaccaacgccgtgatcatctggttcatggacaactacaccatcatggcgggcatcctcctgggcatcctgcttccccagttcctgggggtgctgctgacgctgctgtacatcacccgggtggaggacatcatcatggagcactctgtcactgatgggctcctggggcccggtgccaagcccagcgtggaggcggcaggcacgggatgctgcttgtgctaccccaattagggcccagcctgccatggcagctccaacaaggaccgtctgggatagcacctctcagtcaacatcgtggggctggacagggctgcggcccctctgcccacactcagtactgaccaaagccagggctgtgtgtgcctgtgtgtaggtcccacggcctctgcctccccagggagcagagcctgggcctcccctaagaggctttccccgaggcagctctggaatctgtgcccacctggggcctggggaacaaggccctcctttctccaggcctgggctacgggggagggagagcctgaggctctgctcagggcccatttcatctctggcagtgccttggcggtggtattcaaggcagttttgtagcacctgtaattggggagagggagtgtgcccctcggggcaggagggaagggcatctggggaagggcaggagggaagagctgtccatgcagccacgcccatggccaggttggcctcttctcagcctcccaggtgccttgagccctcttgcaagggcggctgcttccttgagcctagtttttttacgtgatttttgtaacattcatttttttgtacagataacaggagtttctgactaatcaaagctggtatttccccgcatgtcttattcttgcccttcccccaaccagtttgttaatcaaacaataaaaacatgttttttttttttttttaaaaaaaaaaaaaaaaaaaaaaaaaaa

SEQ ID NO: 116861 - DNA, 1000 bp, Homo Sapiens
gaaaaagaagttgaaaattctggagtccaaagaaaagaatacacagggacccaggatgccgcgaactgctaagaaggttcagaggacagttttggagaaggagatgcgtagtcttggtgttgacatggacgataaagacgatgcccattacgcagtccaggcaagaagatcccggagcatcactaggaaaagaaagcgggaagactctgctcccccgtcctctgtggcccggagtgggagttgctctcgaactccacgtgacgtttctggtcttagggatgtcaagatggtgaagaaagccaagactatgatgaagaatgctcagaagaagatgaatcggttggggaagaaaggggaggcggatagacacgtgtttgatatgaagcccaagcacttgctgtctgggaagaggaaagctggtaaaaaggacaggagatagtatccgtttggttggcgtggcttcgctagagtgttgctgtttatttcctggtttggcacagtatggtttcatgaaattggagctctgtataaactgaaaaagacaaaataagtaaagcacttgttgctttgctgaaaactatggttaaccctatataggtgtgggaaatttttgtcactgcataatattacaaatattttgagtagacagtgtttccacatttaatggagtatcagttgcttcagattttcagaactgggaagatttactggtgtaactgggttgtttttgatggagaaaaaccttattttcttttgtaagagctgggagcaaacacgtttatgagtgtgtcggaatcccgtgcttaaaatacgctcttaaattattttctagtcttattttacaatgtctcattgtagtctgtcttcaactattttatccaaaataaacctccagaagaaagtagttttcatttacttagctcatgttttggtttagttatagtcgctatggatttggccaaataaaaaggcaaacaacaaaaaaaaaaaaaaaaaaaaa

SEQ ID NO: 116862 - DNA, 1000 bp, Homo Sapiens
cgatgttctctctcctcccaggggtgaggcctcaggacaaggaaacaggtatcagcatgatggtagcagaaaccttatcaccaaggtgcaggagctgacttcttccaaagagttgtggttccgggcagcggtcattgccgtgcccattgctggagggctgattttagtgttgcttattatgttggccctgaggatgcttcgaagtgaaaataagaggctgcaggatcagcggcaacagatgctctcccgtttgcactacagctttcacggacaccattccaaaaaggggcaggttgcaaagttagacttggaatgcatggtgccggtcagtgggcacgagaactgctgtctgacctgtgataaaatgagacaagcagacctcagcaacgataagatcctctcgcttgttcactggggcatgtacagtgggcacgggaagctggaattcgtatgacggagtcttatctgaactacacttactgaacagcttgaaggccttttgagttctgctggacaggagcactttatctgaagacaaactcatttaatcatctttgagagacaaaatgacctctgcaaacagaatcttggatatttcttctgaaggattatttgcacagacttaaatacagttaaatgtgttatttgcttttaaaattataaaaagcaaagagaagactttgtacacactgtcaccagggttatttgcatccaagggagctggaattgagtacctaaataaacaaaaatgtgccctatgtaagcttctacatcttgatttattgtaaagatttaaaagaaatatatatattttgtctgaaatttaatagtgtctttcataaatttaactgggaaacgtgagacagtacatgttaattatacaaatggccatttgctgttaataatttgttctcaactctaggatgtggcttggtttttttttttctcttttcttttttaaacaagaccaagatcttgcttattcttccatgaaaaaaaa

SEQ ID NO: 116863 - DNA, 1000 bp, Homo Sapiens
tgttttccagccttgtacccaccatacagatctgtttattctgtttcaccctactcctccagtgagccccatattttgggaaattatctgccttatacattaactaattcaattcatgtaacactgttgagtgcttactctttgtacctctattgtgcctatattaaaggtatacaaataaataaggccatgtctgacttcaaggaactcagtttaattttgatatattcaaagatgtgattcccaaccaactcaggatgaagtaactagtgttacaactgagttgatattctaaaatataacccagtttgtacttttattactagttagcatacacattttatggcttatgggttaataaatgaattcatggactcctggactactttcattgatgaccatatctccagggatgttgttgatccccacactgccttaaggtatattatagaaacagttttattttccatttttcttgtttcctgataataaatgtatttaggactgaaaatactcctgagtactcccctggctgtatgtctgacagtctttagctatggtgactattgtttatttttaatgggtatttcagattccaagtgtatttaaaatttctaaggagatataatatagcctgtatggtttctactttatggaattatatggtcaatatttgtaaatattctatgagttttgggtgggtagaggggtgctttgcctgttttgggtacaggtttttttggatttagcttgttaattgttcaaactttctgccttctacattcctatcttattgttcgtttaatcagtttctgaaatgtaagcattacatgactattggtgagttgtgccttttataactgaaatactttactttttctcatatcctctataattgacttctattttccttaatcaaaccagctctgggaaatttaatacatttatattaattgagattattaaaacatttggactattaaaaaaaaaaaaaaaaaaa

SEQ ID NO: 116864 - DNA, 1000 bp, Homo Sapiens
ttgataaatatgagaatgatggttttattttttaattgttacagtaagtaatccttaccacaaatgagctatttttaaaatatgcatttttaaatgaatggcttttacagataggttaatgacaattgtactgctatattatcccagtcaaaaccaatactttcttttctttattttacaaagctttaaaaaccctggaaacaacttacttcttgcttgtgtctttccatttgatgactgggaattacttttctagataactttttttgaaactactcagtgaaatgaaaaataattacaattttaaatagctaattatatctttctaaaaataaaaaagtagggctgttattagagtgccaatgaataaataacttaagcacaaaatacatagaaattggaatgtgatttatagtacaatctcatgagtatgaaaaggctatattaaaaaaaattttattgaaagtccacagtcatattcacaaaccaatactgtcattgctaatctgaactattatttttatactatatattgtagtacaataatatagaactgttgggttctgttacttctgacactcaggaagatactattggtgtattaattttatctttcttagagatgaaagtagcccgctttatgttaaagatcttactactgttggagcttataagtaatgatctacattttttatgaagatggtttttaaaacttttgttttattggaatgcatatctcttttcagggttggagaaattagcacttgccttgaaaagatattatttccttaagttatatcatcagaaaattagctctggttagagaggttagtttcagagtgctccaaaaaatatgttaattattttattttgtttaataaagaacattctcaaaacgtaaataggtatctagagaagtgagtactcaacatttggtatattgttttgagtaatggatgtttgttttttgtgtaatttgtgaataaatagtttttttctg

SEQ ID NO: 116865 - DNA, 1000 bp, Homo Sapiens
gggcgggcggcaccgcgtccagggcagcctccctccgctgagtgacacgggacaccagtgcccggccgacgcgcctttgcaggagaaatgtgcaaacctctgtggataccatttcatttccattcttgtgttgtctccaaggcccttttggagatatacttggtgttggttgtgttttttggttccttttcagagaactgtaaaccgaggctgacgtgctccactgactgtgccgaggggcgggggcaggaggacggcaagacctatttataatatttagcgaactcggtctccctcagatcccccgcgagggaggctgctggacccaccccgctgtcccccatgatagaagtctgtaaataccttggtgaccaatgcccacttcccctcctgggtcacctctgatggctgctgtccactgagaacgtgggcagtgtccaaattcctgtactgtaaagactaaaaggcgtttgctctgagactgacaaggcggaaacttccatgtgtctcctgccaggctctgtccccctacgccatcccgacacgtccccgttcccccgaaacctggctcagtgcaatactcccattgccatggggtccttcaccatggtactgtctccacagccctcagtccccaccccaggagaggcgcctgccacctcctcctcatctccggtggttcaatcgctccgcctgtccccaacccagtcccatttttatggccaaactgattctgaaacaaaatgaaactgcaaacctcgtgtgtcttaactccccccagggatgccactccattcctccgccccgtggtctggtgcgtgacaatccaaagcgccgagacgagggtgctgtgtccctcaaacccagagtggtgggcgcctctgaaaccatacagccactcctggccccaaacactggtttgcatcccaggttcctcgcccacctacccccgccacaccccgtctttttagagatctctctaataaatcgggtaataagc

SEQ ID NO: 116866 - DNA, 1000 bp, Homo Sapiens
ggattgtctgggttgaatgacactctcaaattgttcctgggatcgggctgaggccaggcctctcctggaaccacctctctgcttggtctgaccccttggcctatccagttttcctggttccctcacaggtttctccagaaagtactccctcagtaaagcatttgcacaagaatccttgtctcaggctctgcttctaaggaaagagactgaagagggacaactttttcctatgaggactcccaatctgccatttgtgtgtggctagctgtttccagccagggggctgaggcacctgcagtcacccacactctgggcctgtggcaccatctgtgcctcagctgactgagcagttctgagatgtggtgactcatgtgaagtggtgtcataggaatgaaggactgtgggcgctgggttcaaattccagttctatgcaccactccaggtagggatacccatgggggcagctgtgcctgtgtgggggaacagggtagggaaatctccataccttctcaattttgctgtgaacctaaaactgccatataaagataaagtctaggccaggcatggtggctcatgcctgtaatcccaacacttagggtggctgaggcaggcagatcacctggggtcaggagttcaagaccagcctgcccaacatggcaaaacctcgtctctactaaaaatacaaaaattagccaggcatcgtggtgggtgcctgtaatcccagctattcaggaggctgaggcaggagaatcacttggacctgggaggcagaggtttcagtgagcccagatcgcgacactgcactccagcctgggcaacagagtgacactctgtctcaaaaaataaaataaaataaaataaaataaaataaaataaaataaaaaaaaaaaaaaaaaaaaaaaaaaaaaaaaaaaaaaaaaaaaaaaaaaaaaaaaaaaaaaaaaaaaaaaaaaaaaaaaaaaaaaaaaaaaaaaaaaaaaaaaaaaaaaaaaaaaaaaaa

SEQ ID NO: 116867 - DNA, 1000 bp, Homo Sapiens
gccctaggcgagcccctttaccgggtgagcaccggcaactatgagtaccgcctgatcctgcgctgccgccaggaggcgcgcgcccgcttctcccagatgcgcaaggatgtgctggagaagatggagctgctggaccagaagcacgtccaggacatcgtgttccagctgcagcgcctcgtgtccaccatgtccaagtactacaacgactgctacgcagtgctgcgggatgccgacgtcttccccatcgaggtagacctggcgcacaccacattggcctatggcctcaaccaggaggagttcacagatggggaggaggaggaggaggaggaagacacggcagctggggagccgtccagggatacacgaggggctgctgggcccttggacaagggtggaagctggtgtgactcctgagtgccccgcggctgtggtgccgggggcagggtgcgtgggaggacggagcctgggagcggggcggggccgccgcgcaagggggcgacgcataaaggcctgctggcttggggcgcctgcctccctgctcctctgtcctcgcacagcgaacctgggctcctgcccaggacaggcaccagggtcatggcctgggacctggacactggcccctccaccctccctcccctcccggctccccggccagagggagagcttggtctctggacctgccttaggaaggagagggagggcaggaaggaaaagaaaggacttggaggtggcaggagtccgagccctgctccttgtgggcgctcacactgcccccggagcctgctgggagtggggccagccgtggacagctgaggttggggtcaatgcctcctgggcacccttgcctcgccccagaccggcccgtccagtccccatcacacctcggcggcctttatttattctgttcccccagctcggccacttctctgaaggagggctgggttctgggcctgtatcgaataaacacaaacctggatggcgcaaaaaaaaaaaaaaaaaa

SEQ ID NO: 116868 - DNA, 1000 bp, Homo Sapiens
ggtgaagaggcttttcttcactggtctcctcaagattctctctatgggtctcgacacttagctgcaaagatggcatcgaccccgcacccacctggagcgagaggcaccagccaactgcatggcatggatttattggtcttattggatttgattggagctccaaacccaacgtttcccaatttttttccaaactcagccaggtggttcgaaagacttcaagcaattgaacatgaacttcatgaattgggtttgctcaaggatcactctttggaggggcggtatttccagaattacagttatggaggtgtgattcaggatgaccatattccatttttaagaagaggtgttccagttctgcatctgataccgtctcctttccctgaagtctggcacaccatggatgacaatgaagaaaatttggatgaatcaaccattgacaatctaaacaaaatcctacaagtctttgtgttggaatatcttcatttgtaatactctgatttagtttaggataattggttctagaattgaattcaaaagtcaaggcatcatttaaaataatctgatttcagacaaatgctgtgtggaaacatctatcctatagatcatcctattcttatgtgtctttggttatcagatcaattacagaataattgtgttgtgatattgtgtcctaaattgctcattaatttttatttacagattgaaaaagagggaccgtgtaaagaaaatggaaaataaatatctttcaaagactcttttagataaacacgatgaggcaaaatcaggttcattcattcaacgatagtttctcaacagtacttaaatagcggttggaaaacgtagccttcattttatgattttttcatatgtggaaatctattacatgtaatacaaaacaaacatgtagtttgaaggcggtcagatttctttgagaaatctttgtagagttaattttatggaaattaaaatcagaattaaatgctaaaaaaaaaaaaaaaaa

SEQ ID NO: 116869 - DNA, 1000 bp, Homo Sapiens
aataatgaattctcactgtaaatttcaaaaaaaaaattacaaaagtatgtgaatttaaaaatgagagcagtcccctcaccctaccacagttccacaccctcaaggtaaacttataacttataatttgatatgtaaacttccagatcttttttctatgcgtaatcagacatacatatatactgcagtgtatctcacgtattaatttttaaaaatcttttgttttacttaattctgtttttattattattattattttgtttgatctattaaggaagaacaaggaagggaatgatctttactcaagaatttcagaaagtcagcactgaagtcctgacctatcagtagacacatttgtccctttcagatattttaggatattctagcaaagcaggccatttctcccacctgaaagtacataacttctatcacttgccacataattaaaagaactcacattaagcggttactcagacagttaatcatagaaaagattatttgcttcatcagttcatagaaaagattatttgcttcatcagttaacttgtttttataaatcagggcctgtgttcatacacagaaggggcctgagatttctgcactttaaacaagctcctcctaggtgaggatgctgtggctgttctaattacattttgagtagtaaggtctacagcattgttcctcaaacttggctacgtattggaatcacctaaaaagttaaaacaaaacatggatgtctgggtcccgccccatagagaatgacttaattggcatggggtgcagtccaggcatcatgatttttagatttcccagttggaacttgtgcagcaaagtttgggagctactgatggacatgtgaaaagtaagtataaatggaataaaattaattaggctaataggcttaacccaggaaatcctaagttccttgaatatccagtttgcatttgggactcctcatcatatacttggtatataatactctaataaaagctgcctgagttga

SEQ ID NO: 116870 - DNA, 1000 bp, Homo Sapiens
atcaacatttctggcaatttctacagaaacaagttgaagtacctggctttcctccgcaagcggatgaacaccaacccttcccgaggcccctaccacttccgggcccccagccgcatcttctggcggaccgtgcgaggtatgctgccccacaaaaccaagcgaggccaggccgctctggaccgtctcaaggtgtttgacggcatcccaccgccctacgacaagaaaaagcggatggtggttcctgctgccctcaaggtcgtgcgtctgaagcctacaagaaagtttgcctatctggggcgcctggctcacgaggttggctggaagtaccaggcagtgacagccaccctggaggagaagaggaaagagaaagccaagatccactaccggaagaagaaacagctcatgaggctacggaaacaggccgagaagaacgtggagaagaaaattgacaaatacacagaggtcctcaagacccacggactcctggtctgagcccaataaagactgttaattcctcatgcgttgcctgcccttcctccattgttgccctggaatgtacgggacccaggggcagcagcagtccaggtgccacaggcagccctgggacataggaagctgggagcaaggaaagggtcttagtcactgcctcccgaagttgcttgaaagcactcggagaattgtgcaggtgtcatttatctatgaccaataggaagagcaaccagttactatgagtgaaagggagccagaagactgattggagggccctatcttgtgagtggggcatctgttggactttccacctggtcatatactctgcagctgttagaatgtgcaagcacttggggacagcatgagcttgctgttgtacacagggtatttctagaagcagaaatagactgggaagatgcacaaccaaggggttacaggcatcgcccatgctcctcacctgtattttgtaatcagaaataaattgcttttaaagaaaaaaaaaaaaaaaaaa

SEQ ID NO: 116871 - DNA, 1000 bp, Homo Sapiens
tcaaagcaaaaagaagccatgtgtaacaaagagaaatgtgcaaatattttttaaggcagtattaagtgcaagaggagtaacatgaaataaacattctttcacatggctactgggaatataaatttcgctccagaaaggccgtagcagtttgacgataggtggcaaaaccttaagattgtgtactggggcccagaatttttatttctaggaatgtatcctgaggaaattatccgagatccccacaaactgcaatgtttaggaattgtccttatagcattgcatacacaagaaaaacagagaaaagcctgatccctgtcagtggaaaaggggttcaatgaattacggtgtgtctgcatgaggcttttatgacattaaaaattgttgaacaacggccaggcacagtggctcatgcctgtaatcctaacactttgggaggccaaggtgggaagattgcctgagctcaggagtttgagaccagcctgggcaacacggtgaaaccccgtctctactaaaatacaaaaaattagccgggcgtcgcagcatgcgcctgtagtcccagctgctcaggaggctgaggcaggagaattgattgaacccgggaggcagaggttgcactgagctgagattaagccaccgcactccagcctgggcgacagagcaagattccgttcccaagaaaaaaaaattgttcaacaataagggcaaagggagagaatcataacatctgattaaacagaaaaagcaagatttttaaaactaactatataaggatggtcccagctgtgtcaaaaggaagcttgtttgtaatacgtgtgcataaaaattaaatagaggtgaacacaattattttaaggcagttaaattatctctgtattgtgaactaagactttctagaattttacttattcattctgtacttaaattttttctaatgaacacatatacttttgtaatcagaaaatattaaatgcatgtatttttcaaaaaaaaaaaaaaaaaa

SEQ ID NO: 116872 - DNA, 1000 bp, Homo Sapiens
atatgtgtggtgaggctcccacctaacaccaatgatgaagtagatgaggatcctacaggaaacaaagccctgtgggaccgtggcttgctcaatggggcctcccagaaggcagaggtgatcatgaactaccatgtcggggagacggtgctgtccttgcagaagaccacgctgatccctggaggctcagaatcacttgtctataccaccttgtctggaggaattggcatccttgtgccattcacgtcccatgaggaccatgacttcttccagcatgtggaaatgcacctgcggtctgaacatccccctctctgtgggcgggaccacctcagctttcgctcctactacttccctgtgaagaatgtgattgatggagacctctgtgagcagttcaattccatggaacccaacaaacaaaagaacgtctctgaagaactggaccgaaccccacccgaagtgtccaagaaactcgaggatatccggacccgctacgccttctgagccctcctttcccggtggggcttgccagagactgtgtgttttgtttcccccaccaccatcactgccacctggcttctgccatgtggcaggagggtgactggataattaagactgcattatgaaagtcaacagctctttcccctcagctcttctcctggaatgactggcttcccctcaaattggcactgagatttgctacacttctccccacctggtacatgatacatgaccccaggttccagtgtagaacctgagtcccccattccccaaagccatccctgcattgatatgtcttgactctcctgtctacttttgcacacacccttaatttttaattggttttcttgtaaatacagttttgtacaatgttatctctgtgggaggaaggaggcaggctgtggtgggactgggtagggtatagtatcactcctgagttccactgctctagaatctaaccagaaatagaaacctagtttttaaggtgaaaaaaaaaaaaaaaaaa

SEQ ID NO: 116873 - DNA, 1000 bp, Homo Sapiens
gggtagctggttgctagagttacggtggggatcagaaactcttccaaacattttagcactgaggctggggtagcttttggcttttcccaggtctcaggaggtggcctgagtcagcacacatcttcccactcggtagacaggctggcctctccctcactttgagactttggcaactcctgggccacacggcctgcctctttgattactaatgattgtcagtgactcagagcttcctgggacttcgggtacccacccgctgttctccatgcaaacaaagcgccagggaaatgacccacagggatcgcagctgcagggagggccagggaggttgggggtgggagtgaatgctaaaagcagatcgtccagtgcccttttcagtgctaccggcctctcaccaagcagtcctccatgtgagcaaccccgagacaaaaatgctaagtgggatcaagagagcagcactcggagagggtgtttgccagtctgagtgtcccgcggtgcccgccaacccgcttcctgactgacctgagcaaggtcttactaagcagtcccatctctgtgggaggcatgcaacgcgtgcagggagttcaggtgccggtcggcgtagccaggcctggaggccccccaggcaggaggccgcccaaaggcggggccggcgtctcgcagactaggggctgggggcggccacagacggcctcgaaaccacagcccttaccccaatcccacgagccccgccaacgaaccacaggtgctgggctttagagaacatgggaaggcggccccagacctggcgggaacgcctttccctcagagccaggccccggccccgtctgggaagctcatcttgcgaagctgagggagctcagggcaaaggccaggctagcgcggaccggaaggggccgaggctgcacgggcctctgccagaacgctcaggacatcccggcctgggtttacaacgctgttaggaaaattaaccaatgaataaagcaacgttcagtgcgca

SEQ ID NO: 116874 - DNA, 1000 bp, Homo Sapiens
ctgtccagcagcacagaaagtgagggggaaagtgggaccagccgaaagcccactgctggtcagacttcggctacagcggttgacagtgatgatatccagaccatatcctctggctctgaaggggatgactttgaggacaagaagaacatgactggtccaatgaagcgtcaagtggcagtaaaatcaacccgaggctttgctcttaaatcaacccatgggattgcaattaaatcaaccaacatggcctctgtggacaagggggagagcgcacctgttcgtaagaacacacgccaattctatgatggcgaggagtcttgctacatcattgatgccaagcttgaaggcaacctgggccgctacctcaaccacagttgcagccccaacctgtttgtccagaatgtcttcgtggatacccatgatcttcgcttcccctgggtggccttctttgccagcaaaatccgggctgggacagaacttacttgggactacaactacgaggtgggcagtgtggaaggcaaggagctactctgttgctgtggggccattgaatgcagaggacgtcttctttagaggacagccttcttcccaacccttcttgaactgtcgtttcctcaggaactgggtcttcctgattgttgaaccctgacccgaagtctctgggctagctactccccccagctcctagttgatagaaatgggggttctggaccagatgatcccttccaatgtggtgctagcaggcaggatcccttctccacctccaaaggccctaaagggtggggagagatcaccactctaacctcggcctgacatccctcccatcccatatttgtccaagtgttcctgcttctaacagactttgttcttagaatggagcctgtgtatctactatctccagtttgtattatttcttgaaagtcttttaacaatatgataaaactaaaaaaaaaaaaaaaaaaaaaaaaaaaaaaaaaaaaaaaaaaaaaaaaaaaaaaaaaaa

SEQ ID NO: 116875 - DNA, 1000 bp, Homo Sapiens
ccctcatgatgtattggctacacttctgaacaacctcaaagttcaagaaaggcagaacagagtttgtaccactgtagcaatagctattgttgcagaaacatgttcaccctttacagtactccctgccttaatgaatgaatacagagttcctgaactgaatgttcaaaatggagtgttaaaatcgctttccttcttgtttgaatatattggtgaaatgggaaaagactacatttatgccgtaacaccgttacttgaagatgctttaatggatagagaccttgtacacagacagacggctagtgcagtggtacagcacatgtcacttggggtttatggatttggttgtgaagattcgctgaatcacttgttgaactatgtatggcccaatgtatttgagacatctcctcatgtaattcaggcagttatgggagccctagagggcctgagagttgctattggaccatgtagaatgttgcaatattgtttacagggtctgtttcacccagcccggaaagtcagagatgtatattggaaaatttacaactccatctacattggttcccaggacgctctcatagcacattacccaagaatctacaacgatgataagaacacctatattcgttatgaacttgactatatcttataattttattgtttattttgtgtttaatgcacagctacttcacaccttaaacttgctttgatttggtgatgtaaacttttaaacattgcagatcagtgtagaactggtcatagaggaagagctagaaatccagtagcatgatttttaaataacctgtctttgtttttgatgttaaacagtaaatgccagtagtgaccaagaacacagtgattatatacactatactggagggatttcatttttaattcatctttatgaagatttagaactcattccttgtgtttaaagggaatgtttaattgagaaataaacatttgtgtacaaaatgctaaaaaaaaaaaaaaaaaaaaaaaa

SEQ ID NO: 116876 - DNA, 1000 bp, Homo Sapiens
aacaggcggcgctggacctgtacccctacgacgccgggacggacagcggcttcaccttctcctcccccaacttcgccaccatcccgcaggacacggtgaccgagataacgtcctcctctcccagccacccggccaactccttctactacccgcggctgaaggccctgcctcccatcgccagggtgacactggtgcggctgcgacagagccccagggccttcatccctcccgccccagtcctgcccagcagggacaatgagattgtagacagcgcctcagttccagaaacgccgctggactgcgaggtctccctgtggtcgtcctggggactgtgcggaggccactgtgggaggctcgggaccaagagcaggactcgctacgtccgggtccagcccgccaacaacgggagcccctgccccgagctcgaagaagaggctgagtgcgtccctgataactgcgtctaagaccagagccccgcagcccctggggcccccggagccatggggtgtcgggggctcctgtgcaggctcatgctgcaggcggccgaggcacagggggtttcgcgctgctcctgaccgcggtgaggccgcgccgaccatctctgcactgaagggccctctggtggccggcacgggcattgggaaacagcctcctcctttcccaaccttgcttcttaggggcccccgtgtcccgtctgctctcagcctcctcctcctgcaggataaagtcatccccaaggctccagctactctaaattatggtctccttataagttattgctgctccaggagattgtccttcatcgtccaggggcctggctcccacgtggttgcagatacctcagacctggtgctctaggctgtgctgagcccactctcccgagggcgcatccaagcgggggccacttgagaagtgaataaatggggcggtttcggaagcgtcagtgtttccatgttatggatctctctgcgtttgaataaagactatctctgttgctcac

SEQ ID NO: 116877 - DNA, 1000 bp, Homo Sapiens
tgcatttgcaccaaacagcccatgctgatgaatttgactgcccttcagaacttcagcacacacaggaactctttccacagtggcacttgccaattaaaatagctgctattatagcatctctgacttttctttacactcttctgagggaagtaattcaccctttagcaacttcccatcaacaatatttttataaaattccaatcctggtcatcaacaaagtcttgccaatggtttccatcactctcttggcattggtttacctgccaggtgtgatagcagcaattgtccaacttcataatggaaccaagtataagaagtttccacattggttggataagtggatgttaacaagaaagcagtttgggcttctcagtttcttttttgctgtactgcatgcaatttatagtctgtcttacccaatgaggcgatcctacagatacaagttgctaaactgggcatatcaacaggtccaacaaaataaagaagatgcctggattgagcatgatgtttggagaatggagatttatgtgtctctgggaattgtgggattggcaatactggctctgttggctgtgacatctattccatctgtgagtgactctttgacatggagagaatttcactatattcagagcaagctaggaattgtttcccttctactgggcacaatacacgcattgatttttgcctggaataagtggatagatataaaacaatttgtatggtatacacctccaacttttatgatagctgttttccttccaattgttgtcctgatatttaaaagcatactattcctgccatgcttgaggaagaagatactgaagattagacatggttgggaagacgtcaccaaaattaacaaaactgagatatgttcccagttgtagaattactgtttacacacatttttgttcaatattgatatattttatcaccaacatttcaagtttgtatttgttaataaaatgattattcaaggaaaaaaaaaaaaaaaaaa

SEQ ID NO: 116878 - DNA, 1000 bp, Homo Sapiens
ccccgaagtagatgaaacagtctcacatacccaactgctcatcaacagagcagagctgatggcatgagtgagggctgggcggggtggggcctccagagctttgcagggaaccctggaaccctaggaacaaggagcctttgttccaacagagcagagaaggaggttctctatgttcagaccactggagaggatagagaggtaaaaggtggcgacagtttcccttaggggtctgcctggcaggagccacagctcaggagagttgtgagggatgggacggaggctggcgaccaggcgaggcctaggccaggctcgggagacttttctgtgctcctttctacacatgccttaaaccttccttcctgtggggtgcctggaccccttccccatctctggcagctcagagggtctctgctgctctcccctgggaaatcccctcatcctgccctctggctgcctcccagctgggcttgttctctgagggaggttccggagactcatggacttggggctctgcctgtaggaaggaggctgggccggagggaccagccaccattgtctctgttcagccaagtgtgcaagtaggctgcccgccaagagggggcctctgctacccgctgctgcctgccggctgacacactgcctccccagccttcctgctaggccaccctcctcccttcccatgcttgtaaccagctctggggcttgcacctccacaaagtaaggttggcccttggaggccatgtttgggtctccggccagggcctagggctaggccatgcacccaatgggtgcacaataaataacaggtcaacaaagagggaggtgtgtcagtgtgtgaggaagggaggtcaggcagctaggaccacctgcagtgtggcaggcttcatccctctttgctccaagtgtgtatgtgtgtctgtgcatgtgtgtagtgtctgtgtctgtgtgttcatgcatatgcaggagtcacacggtcataggccatcaaagctggaggaga

SEQ ID NO: 116879 - DNA, 1000 bp, Homo Sapiens
cctcctgcggatgggcaaataaattggtggaggacggagagaaacctctttatttccctcctgaggggtctctgggaagaggtgacgcgtgtccctggaaccccagctcggagggtctcagcctcccctgggttgggagaagtccatctttccccttagtgccaccgggctgctgagtcacgaggaatgtgttgctgctgccacccctgccccaaaggctaagggggacagccttccccttgtcagggcttgctttgaccctgcttcgttccaccccgggtcctggtggagcaccaggcaggtggtcctcgctgtgacactgaggtgctgagccagtgagctagggtggaggggctgtgtttattggaacaaagggtggtaccaaaatgcatccccatgacccacagcccccccacacccgtccttgggtagggtacggtggggtggggtgttgggtggcctgctgctcctgttgctttcacgtagagtctcggcctgggcagtcacgtggtggtcactcctggatgtgctgtcctatccagcctctcacagctgccacccgggtatagacacctgggaagtggggccggccacagccatagccccagctagtgaccccagttagcacccaccgtccagagggctccctgcaggccaggggtcccccagcgtcaccctgttggggagagaagaaagggggttcagaggccggtacctcccctacagcagcccttgggtcattggcccctctaggagtgaccctagtgacttcccctgggagccgcattttcactatctggaaaatgggctcaatgcaaaggtggcagacatttatggacacccgccacgtggtcccggagtggaacggtgcctcccactgcagcctctgcctgctctgccgccgaggcccggggatgggatgcggtgggttgcccaataaacggctgtggagtggaaattcctccagagccaaaaaggcaaaaaaaaaaaaaaaaaaaaa

SEQ ID NO: 116880 - DNA, 1000 bp, Homo Sapiens
gttttagtaattggggacaatgggataaaatgacatacaacaaatggttatcccacttgtatatttttttaaagactcttatcctgttacccttacataaaaccagttatgataattgtatgtttggaagataaattgtatgctgagccttaaaacccagtgtgactgtagaagatataatgcggacatgatttgaatttagtgacagcttggctgatgtcactgaaccagaagggtttatactgagtgaaggaaaggtaaaaagtagtattttgtatatttttgtaacaaaatataaatgaagatattttaccatgaagagattgcacttatccttgagaacagtctaaatataaatgaagatattttaccatgaagagattgcacttatccttgagaacagtctaatgatactttttttactttcagactgtttctagctaaagttctgataaaagtattgagttaatttaaactttcaaacactgtttagatcagttgaaaactaattcttaatagccattgttttataatctttagtttaaattcatctgtttgacatttggttttttgtgaacttgagtcagtcctattgaacattttgacctatattcttgcaaattatgttaatttttcatattttagtttgattttagacaattattttcaaaaagaaacctgactttttttcaccttcttgacattgtgagtgatacacgttaaaaggctatttgcccgcatcctcctctatcctgtttcgaggtagagagcttggcacttctgttacaagctgagagtctggaggtgctgagtttaacgtggctgtgcagctgatttcaaggcatgagctgaacagcgttgacacagccgtgacttacaattaaaccctttcaattacagtacagattctgtgtgctacttgatgagatgttacccaaggccagtttggacttactgctttttgtccctcatattaaattatcaaatgatgccgatgaaa

SEQ ID NO: 116881 - DNA, 1000 bp, Homo Sapiens
aagtcagcattggcgccccttcctcagatccctatcatcttgggaaacagtagcccagaggttcaggaagatgttaacttaaatgttcggggtgccccagtctgttcagcatggctgaaatccacactccgtattcttccttgaagaaactgttatctttactcaatggcttcgtggctgtgtctggcatcatcctagttggcctgggcattggtggtaaatgtggaggggcctctctgacgaatgtcctcgggctgtcctccgcatacctccttcacgttggcaacctgtgcctggtgatgggatgcatcacggtactgcttggctgtgccgggtggtatggagcgactaaagagagcagaggcacgctcttgttttgcatcctgtcaatggttattgtcctcatcatggaagttacagctgccacagtggtccttcttttctttccaattgttggagatgtggccttggaacacaccttcgtgaccctgaggaagaattacagaggttacaacgagccagacgactattctacacagtggaacttggtcatggagaagctaaagtgctgtggggtgaataactacacagatttttctggctcttccttcgaaatgacaacgggccacacctaccccaggagttgctgtaaatccatcggaagtgtgtcctgtgacggacgcgatgtgtctccaaacgtcatccaccagaagggctgtttccataaactcctaaaaatcaccaagactcagagcttcaccctgagtgggagctctctgggagctgcagtgatacagaggtgggggtctcgctatgttgcgcaggctggtcttgaactgctggcctaaagcgatccccccgcctaggcctcccaaagtgctgggtttaccagcgtgagccaccacgctgggcttcctgcatccttttaaggttcctgagggtctgcctgagaggagctgtccctgaatctccatgcagccccacctgccacatcaccaag

SEQ ID NO: 116882 - DNA, 1000 bp, Homo Sapiens
ggaagaggctcagaggaaacaccaagaagaggataaaaatgaagacaagagaagtaacgcaggctttgatggacgttggtacacagacatcaatgctactctttcctctttagagagcaaagaccacctacaggcaccagacacagaggaacacaacacaaagaaattagacaacagtgaagatgacttggaattctggaataagccctgtttgtttactcctgaatcaagattggaaactcttagacacatggaaaaacaacggaagaaacaggaaaaattaagtgaaaaaaagaagaaagtgaaaccacccaggactttgatcactgaagatgggaaagccctaaatgtgaatgagcccaaaattgacttctctttgaaagataacgaaaagcagatcatcctggaccttgctgtctataggtatatggatacctctttaatcgatgttgatgtgcaaccaacttacgtgcgagtaatgatcaaaggaaagccatttcagcttgtccttcctgcagaagtgaaacccgatagtagttctgctaaaagatctcagacaacgggtcatttggtcatctgcatgcccaaggtaggagaagtaatcacaggtggtcagcgagcattcaaatctatgaaaactacctcggacaggagcagagaacaaacaaatacaagaagcaagcacatggagaaactagaagtagaccctagcaagcactcattccctgatgtgactaacatagttcaagagaaaaaacacacacccagaagacgacctgaacccaaaattataccaagtgaggaagacccaacctttgaagacaaccctgaagtgcctccgctgatttgaaacatctggctgcgttgccattggctgagacccaccaggtccagttttggttggtgtagagaccatatgcatattattcctgggataaacacagagttatttgtcaaaaaaaaaaaaaaaaaaaaaaaaaaaaaaaaaaaaaaaaaaaaa

SEQ ID NO: 116883 - DNA, 1000 bp, Homo Sapiens
ggtgtggaccctgcaagatcctggggccgaggttagagaagatggtggccaagcagcacgggaaggtggtgatggccaaggtggatattgatgaccacacagacctcgccattgagtatgaggtgtcagcggtgcccactgtgctggccatgaagaatggggacgtggtggacaagtttgtgggcatcaaggatgaggatcagttggaggccttcctgaagaagctgattggctgacaagcagggatgagtcctggttcccttgcccgcgtgggaccccaatagaactcagcccttccatgccagcccttcctgctgcctccctcctgtctggctcctggggcccatgcttagagcccaggctccagccctgagtgcttccgagctggcggactgcccaggggccatcagaggatggtggtgctgctgctgatccggggaccgctgtcttccctcccatacgcctttcatccctccttctagggcctatggcagttctcccaggatgtgtggcgagagcctgggccagcccacagcgttcctagtcaggcagccacaccttggtcctcatcttggtcccttccaatctgaaacctcgtgcctggctcgtctgccacctacatttctctttccagctgctgttttgtaaaaagaaaaagaaaaaagaagcccaaactagtgagagtaatatctaattatctcattttttgtaggtctgtgataaagaacttagtcatcccttccacctcctactgtgaagaacagaccctgggtcccacactgaaatcccctctagtcacccattcccaccccccagggagctgcctcccaggcagggggtgcagaaaatgattgatgggctggggaaccctggagagcctcgactccggaagtctcaaggtgcctcctcctctccttagctggcccgttggttttctgagcagggggctgaactgtgaacaagtcagacaaataaagcaagggtctgcaccatcaaaaaa

SEQ ID NO: 116884 - DNA, 1000 bp, Homo Sapiens
gaggaggcctggggggcacttcgggcgccgcaacagcagcttcgagagctgtgcccaggagtgaacaaccagccctacctctgtgagagtggtcactgctgcggggagactggctgctgcacctactactatgagctctggtggttctggctgctctggactgtcctcatcctctttagctgctgttgcgccttccgccaccgacgagctaaactcaggctgcaacaacagcagcggcagcgtgaaatcaacttgttggcctatcatggggcatgccatggggctggtcctttccctaccggttcactgcttgaccttcgcttcctcagcaccttcaagcccccagcctacgaggatgtggttcaccgcccaggcacaccaccccccccttatactgtggccccaggccgccccttgactgcttccagtgaacaaacctgctgttcctcctcatccagctgccctgcccactttgaaggaacaaatgtggaaggtgtttcctcccaccagagtgccccccctcatcaggagggtgagcccggggcaggggtgacccctgcctccacacccccctcctgccgctatcgccgtttaactggcgactccggtattgagctctgcccttgtcctgcctccggtgagggtgagccagtcaaggaggtgagggttagtgccaccctgccagatctggaggactactccccgtgtgcactacccccagagtctgtaccgcagatctttcccatggggctgtcttccagtgaaggggacatcccataagtagttttgagagggtggatgggttacttgcccaccagaaacagccctagtcccaactccttgcgttcctttggcccctccctgcctacctagaatctgcctgaaagggctggagaggggcagtattgggggactgtgctagctttacccccgcaggacatacacaggagcctttgatctcattaaagagatgtgaaccagcaaaaaaaaaaaaaaaaaa

SEQ ID NO: 116885 - DNA, 1000 bp, Homo Sapiens
cttgttctccctccaggtctgatcataaacaattaccaggaactagcattgtgggacattagggcccccggcctcgggagaggtgccgcccagcttcccatgccagcccggagcccacagtgctgcccagcgtacctccctcaccgtctggggctcttctgggagcacggagcatcccctgttcctgtttcactctcagcttctcccctcgaagggactctctggccacctcctccaccgcagtccagctccctcagtctggcacccactgctacactcagcctcatgagccacttcagaccagccaggtgtcttcccgggccctgccagaccctgctcacattccctctgctggtctgtgctggtctcagaaggccaccgcgcccgcattccactcagccagggtccagctgcagcccccgccacccttccttcccttccctgtcctgggtcatgttgttgccaccctgtgtgacttttgaagctgtaaaatgagcttccagggcttgggtggcgtcggggcagggccgccgaggctgggaggaagcccttctgccttttgctggtgtttctggaatttgctttccctcacctctcacttccttctagaaggagcttcctgactggaaccagagaatgcatgtctgtccacttggtggctgctgggtggggccgggaacaagggcccctgaccctgtgtgctggccgggacctgccaccagccccccagcctgcttcttccccttaagctttgtgcccctggatgcgctaacattcactcttgtttgtccctggactggccatgaagtgaggagatggttatttaaagagaattccctatttatttgacaaaaaatccagttaatatattaatgtgaaataaaccctgtttgcacctcgatttgtttgctgaaaatgtgaaatagtaaaaatgaaataactggaaaaaaaaaaaaaaaaaaaaaaaaaaaaaaaaaaaaaaaaaaaaaaaaaaaaaaaa

SEQ ID NO: 116886 - DNA, 1000 bp, Homo Sapiens
caaaactccgctgtcagcttgctaaaaaaaaacaaagtgagacaaaacttcaagaggaattgaataaagttctaggtatcaaacactttgatccttcaaaggcttttcatcatgaaagtaaagaaaattttgccctgaagaccccattaaaagaaggcaatacaaactgttaccgagctcctatggagtgtcaagaatcatggaagtaaacatctgagaaacctgttgaagattatttcattcgtcttgttgttattgatgttgctgttattatatttgacatgggtattttataatgttgtatttaattttaactgccaatccttaaatatgtgaaaggaacattttttaccaaagtgtcttttgacattttattttttcttgcaaatacctcctccctaatgctcacctttatcacctcattctgaaccctttcgctggctttccagcttagaatgcatctcatcaacttaaaagtcagtatcatattattatcctcctgttctgaaaccttagtttcaagagtctaaaccccagattcttcagcttgatcctggaggtcttttctagtctgagcttctttagctaggctaaaacaccttggcttgttattgcctctactttgattctgataatgctcacttggtcctacctattatccttctacttgtccagttcaaataagaaataaggacaagcctaacttcatagaaacctctctatttttaatcagttgtttaataatttacaggttcttaggctccatcctgtttgtatgaaattataatctgtggattggcctttaagcctgcattcttaacaaactcttcagttaattcttagatacactaaaaatctgagaaactctacatgtaactatttcttcagagtttgtcatatactgcttgtcatctgcatgtctactcagcatttgattaacatttgtgtaatatgaaataaaattacacagtaagtcatttaaccaaaaaaaaaaaaaaaa

SEQ ID NO: 116887 - DNA, 1000 bp, Homo Sapiens
gcaggcgcggcgctgccggaccagagcttcctgtggaacgttttccagagggtcgataaagacaggagtggagtgatatcagacaccgagcttcagcaagctctctccaacggcacgtggactccctttaatccagtgactgtcaggtcgatcatatccatgtttgaccgtgagaacaaggccggcgtgaacttcagcgagttcacgggtgtgtggaagtacatcacggactggcagaacgtcttccgcacgtacgaccgggacaactccgggatgatcgataagaacgagctgaagcaggccctctcaggtttcggctaccggctctctgaccagttccacgacatcctcattcgaaagtttgacaggcagggacgggggcagattgccttcgacgacttcatccagggctgcatcgtcctgcagaggttgacggatatattcagacgttacgacacggatcaggacggctggattcaggtgtcgtacgaacagtacctgtccatggtcttcagtatcgtatgaccctggcctctcgtgaagagcagcacaacatggaaagagccaaaatgtcacagttcctatctgtgagggaatggagcacaggtgcagttagatgctgttcttcctttagattttgtcacgtggggacccagctgtacatatgtggataagctgattaatggttttgcaactgtaatagtagctgtatcgttctaatgcagacattggatttggtgactgtctcattgtgccatgaggtaaatgtaatgtttcaggcattctgcttgcaaaaaaatctatcatgtgcttttctagatgtctctggttctatagtgcaaatgcttttattagccaataggaattttaaaataacatggaacttacacaaaaggcttttcatgtgccttacttttttaaaaaggagtttattgtattcattggaatatgtgacgtaagcaataaagggaatgttagacgtgtaaaaaaaaaaaaaaaa

SEQ ID NO: 116888 - DNA, 1000 bp, Homo Sapiens
tagagctaggctttagaaaagaaaaatattccgataccatatgattggtgaggtaagtgttattctgagatgagaattagcagaaatagatatatcaatcggagtgattagagtgcagggtttctggaaagcaaggtttggacagagtggtcatcaaaggccagccctgtgacttacactgcattaaattaatttcttagaacatagtccctgatcattatcactttactattccaaaggtgagagaacagattcagatagagtgccagcattgtttcccagtattcctttacaaatcttgggttcattccaggtaaactgaactactgcattgtttctatcttaaaatactttttagatatcctagatgcatctttcaacttctaacattctgtagtttaggagttctcaaccttggcattattgacatgttaggccaaataattttttttgtgggaggtctcttgtgcgttttagatgattagcaataatccctgacctgttatctactaaagactagtcgtttctcatcagttgtgacaacaaaaatggttccagatattgccaaatgccctttagaggacagtaatcgcccccagttgagaaccatttcagtaaaactttaattactattttttcttttggtttataaaataatgatcctgaattaaattgatggaaccttgaagtcgataaaatatatttcttgctttaaagtccccatacgtgtcctactaattttctcatgctttagtgttttcacttttctcctgttatccttgtacctaagaatgccatcccaatccccagatgtccacctgcccaaagtctaggcatagctgaaggccaagctaaaatgtatccctctttttctggtacatgcagcaaaagtaatatgaattatcagctttctgagagcaggcattgtatctgtcttgtttggtgttacattggcacccaataaatatttgttgagtgaatgaaaaaaaaaaaaaaaaaa

SEQ ID NO: 116889 - DNA, 1000 bp, Homo Sapiens
gaagaagaagtatcaaaatatcaagaatatactaatgagttacaagaaactctgcctcagaaaatgtttacagcttccagtggaatcaaacataccatgaccccaatttatccaagttctaacacattagtagaaatgactcttggtatgaagaaattaaaggaagagatggaaggggtggttaaagaacttgctgaaaataaccacattttagaaaggtttggctctttaaccatggatggtggccttcgcaacgttgactgtctttagctttctaatagaagtttaagaaaagtttccgtttgcacaagaaaataacgcttgggcattaaatgaatgcctttatagatagtcacttgtttctacaattcagtatttgatgtggtcgtgtaaatatgtacaatattgtaaatacataaaaaatatacaaatttttggctgctgtgaagatgtaattttatcttttaacatttataattatatgaggaaatttgacctcagtgatcacgagaagaaagccatgaccgaccaatatgttgacatactgatcctctactctgagtggggctaaataagttattttctctgaccgcctactggaaatatttttaagtggaaccaaaataggcatccttacaaatcaggaagactgacttgacacgtttgtaaatggtagaacggtggctactgtgagtggggagcagaaccgcaccactgttatactgggataacaatttttttgagaaggataaagtggcattattttattttacaaggtgcccagatcccagttatccttgtatccatgtaatttcagatgaattattaagcaaacattttaaagtgaattcattattaaaaactattcatttttttcctttggccataaatgtgtaattgtcattaaaattctaaggtcatttcaactgttttaagctgtatatttctttaattctgcttactatttcatggaaaaaaataaatttctcaattttaatgt

SEQ ID NO: 116890 - DNA, 1000 bp, Homo Sapiens
gctggaagcatatgtccccccacccttatttatattcctttgagcattgccgttttctagacagacaatccgaaaataattgtgttgataggtctgtttaagcctgaactctgggtgtaaaatgttatccagaagctatagggagctgccttgctcaggtcattggaaatttcaaccctaagactcattggaatttctaagtccgttatgcaccattatgggcatatggagcatattcataccatgaggaggagtctttgtttatgatggactttttaatatggccataattaaactcacactcaaaaaggatgagctattgtcaaaagccaaaagaaaaacagacaaaatgaacatgaagcaaggagtccataaaacaagagttctttaccacgtttaagcaaatgtctctcaaaaaaaattgtatttctgtgcacattagctgagattcacacattttgcacctcagtagtatttcagatgagactcaatgtgtggagaaaactgctaacttgtttggttctactcttaccccctcttctgtggcaatgtggggtcagggccgtatcctaaagtatccacatggtcttaaatggaaatcatgggactctggaaagctggcatgagctggttggagcttttaaacagaagtgctttatgggtatcagatctcttctgacatcaattgtttcaaatcattgttgggctctgtcgtgttctgcaatcttccccattcccctcatgatctctggcttatcttttatccaatctgtatggactttttaggattttttttttcttatagtacaaataattttcagatcccagctttggtaaatgtgttaattctactttgtgaataaataaatgagtgatctgctaaaaatggcaattgtagaattatgttgtatgtaatgtacatatggagaaagaatgtattttgttcattttcttaataaaatgttatatatggatgctaaaaaaaaaaaaaaaaaaaaaa

SEQ ID NO: 116891 - DNA, 990 bp, Homo Sapiens
tccggagcccggctcgctggggcagcatggcggggtcgccgctgctctgggggccgcgggccgggggcgtcggccttttggtgctgctgctgctcggcctgtttcggccgccccccgcgctctgcgcgcggccggtaaaggagccccgcggcctaagcgcagcgtctccgcccttggctgagactggcgctcctcgccgcttccggcggtcagtgccccgaggtgaggcggcgggggcggtgcaggagctggcgcgggcgctggcgcatctgctggaggccgaacgtcaggagcgggcgcgggccgaggcgcaggaggctgaggatcagcaggcgcgcgtcctggcgcagctgctgcgcgtctggggcgccccccgcaactctgatccggctctgggcctggacgacgaccccgacgcgcctgcagcgcagctcgctcgcgctctgctccgcgcccgccttgaccctgccgccctcgcagcccagcttgtccccgcgcccgtccccgccgcggcgctccgaccccggcccccggtctacgacgacggccccgcgggcccggatgctgaggaggcaggcgacgagacacccgacgtggaccccgagctgttgaggtacttgctgggacggattcttgcgggaagcgcggactccgagggggtggcagccccgcgccgcctccgccgtgccgccgaccacgatgtgggctctgagctgccccctgagggcgtgctgggggcgctgctgcgtgtgaaacgcctagagaccccggcgccccaggtgcctgcacgccgcctcttgccaccctgagcactgcccggatcccgtgcaccctgggacccagaagtgcccccgccatcccgccaccaggactgctccccgccagcacgtccagagcaacttaccccggccagccagccctctcacccgaggatccctaccccctggccccacaataaacatgatctgaagcaaaaaaaaaaaaaaaaaa

SEQ ID NO: 116892 - DNA, 1000 bp, Homo Sapiens
ggagtggcagctgaaggtgcaggaactggaccccgccgggcacaagtccctgtgcgtgaacgaggtgccctccttctacgtgcccatggtcgacgtcaacgacgactttgtattgttgccggcatgacaccgcgggacggccgcaggacgcaggcgagggccgcacggctgcccaggactgctgctgagccccaggggcggaggagggagcgccctgtccacccgggcggggagagaccccgagagagactgcacttggccacagcgcctccatcccttccagactggtccagacgtcggggaggtgaaacacgtctcttctctaccagctgccgcggcgggggcaaagcccccagagcctcactggccccggcgggatgaggagaccatgccgggcgcgcacacacggcagcttctgtttgaaaacggcgaccttcgggcccttttctccagcaactgcagaggcatttcaggagttggagaacggagtacatttttaaaattttttgttccattctgatcaactaaagaaaattaaggtgtccacctctcacaaacagtgacctgcaggtcggaggggcaggagccccatcccagccgtggttctgttgccgccgagctgcgacggcctcagactgggcttcagacctggtgcggagccaggcggagggacacagagccaggactcccagccgtattgaaatggagtcaaatccgcgtggtttgtatcttctttcctttaatcttgggcattttgtttctctttctgagaacgtaacttgaaacactacagagccaataatcatataaaaagtgtatccgtaaacgctgtacagttttatataccttcacaatgtacttttgctgccttctagataatttattttgcaacacattactgcacagttgtaaataacttatgtactgtaacatcactttcagttatgtgtaaagaaataaataaattaattaaaatgcaaaaaaaaaaaaaaaaaaaaaa

SEQ ID NO: 116893 - DNA, 1000 bp, Homo Sapiens
aatgtctccaagcaaatatgctgccccctgaccccaccttcaaccctccccgccaaggcctggctcttccggaggtcaattgtgcctgcaggatcagttgagcccctgctggtgtgctgcagggtgtgatgaggtgggagccctcagtgccagcctcatcactgtgtgaccctgggtctgctcttagcctccccatggctcacgttcctgccctggatgggatgtgagtggggcccacatcgtggagctgtggtggggcctgcagtcatgaatggcaagtggtccctgatgtgcagtgtctcattagttgcactgcagttaactgtggctcctgcagggcaccctgcccagaatgcccagaagagaaccatgcatacctgcactgcatttgagagccatgagctggaggctgtggttcgtgccagcaaggagcctactgtctggtgtgctgtaggcatctggagagggagagggcctgggtaggagctgggaggaagataattttcaactatggggcttcagtactgcagcgccccgaagccaggctctgtgcttctgcctttaaggcctgttctcagcacaatgtctcaaaaataggtcatatcctgccactcccgtcgcagagccctttaatggttccaaaccctaagtccacacatagcccctggctctggcatctctccagccccactggccccgagctgcttgactcaccggcttcctatttgatgcacccaggcccccttgtggccaactccctccccttctcactgaggcagaagcactgaggtgggctggacatgggtgccctccacgtccctcatatccccaggcacactctggcctcaggttttgccctggccatgtcatctacctggagtgggccctccccttcttcaggccttgaatcaaaagccactttgttaggcgaggatttcccagaccactcatcacattaaaaaatattttgaaaacatgcagtaaaaaaaaaaaaaaaaaa

SEQ ID NO: 116894 - DNA, 1000 bp, Homo Sapiens
taaagcgaggcatgaagcaaagagctgagtgagtcctctgctctccagaggaccaagaaatacctgtgtgacacagacccacttcagtgtgtacagcaaattctatagtgcttctgagcccagcagggctttacctgcccctggagagttttagccgtcttgtgtttcttgtttacttcacaaccaaatttgtcccctcttctctctgttaagggagagaagtcactttagctggataatacctatgtaacaaactgagcagctgttatttgggcaaaatcaaaggaagaaagagactatggtcttctatttattgtgggaaggaaaacagggtggggcgggtgagtgaaaaggtggaaatccctggtaccttgcctggtggttacacagtttaaccataggccaattttaggggcctctgaagtatctttctacaaacgcagacaagctccactacccctaacctgccaggatgctcaagtccactgtcacaatccctttcagaaaacattagtggccgctgccccagctacagagacggccgaaatgctttcactccttagctttgccaactccatcctccaaaacttcccagaatacctccctttccagttctaccaaatctgtacttgggagcagcctgctggatccagaacatgacaacagagagctgcgtccacagggaacaaagccctgacctctctctccacattacccttacaaaaacaggccctccccatgagagagctacacggcaggggcagacactgtgagtataagctactttcctccctggagtgctctatgtgggcagaacatgctctccttgcctctcctggaaggtgtcttctctatggcctggctagagctgcaaaaaagggacacaccccacttcggtaaaagaaaatagggaaaggccataaacaaagacagacttgtagtttattttgtattttttttaaataaatacactttacattaaagaaaaaaaaaaaaaaaa

SEQ ID NO: 116895 - DNA, 1000 bp, Homo Sapiens
gatcatggatgtgattgaggtggtgcccgagcctggccagcccttgaccaagaacaagttcaaagtcctttacgagaaggagcagaaggggcccgtgaccgccctgtgccactgcaatggccacctggtgtcggccatcggccagaagattttcctgtggagcctgcgggccagcgagctgacgggcatggccttcatcgacacgcagctctacatacaccagatgatcagcgtcaagaacttcatcctggcagccgacgtcatgaagagcatttcgctgctgcgctaccaggaggaaagcaagacgctgagcctggtgtcgcgggatgccaagcccctggaggtgtacagcgtggacttcatggtggacaatgcccagctgggttttctggtgtctgaccgcgaccgcaacctcatggtgtacatgtacctgcccgaagccaaggagagtttcgggggcatgcgcctgctgcgtcgggcagacttccacgtgggtgcccacgtgaacacgttctggaggaccccgtgccggggggccactgaagggctcagcaaaaagtcggtcgtgtgggagaataagcacatcacgtggtttgccaccctggacggcggcatcgggctgctgctgcccatgcaggagaagacctaccggcggctgctgatgctgcagaacgcgctgaccaccatgctgccacaccacgccggcctcaacccccgcgccttccggatgctgcacgtggaccgccgcaccctccagaatgccgtgcgcaacgtgctggatggggagctgctcaaccgctacctgtacctgagcaccatggagcgcagcgagctagccaagaagatcggcaccacaccagacataatcctggacgacttgctggagacggaccgcgtcaccgcccacttctagccccgtggatgccgtcaccaccagcacacggaactacctcccaccccctttttgtacaaaacacaaggaaaaacattttttgcttga

SEQ ID NO: 116896 - DNA, 1000 bp, Homo Sapiens
ggggtggtggaggaggcggcggcggtggaggtggaggtggtggcagacgtcgagattcttactatgatagaggatatgatcgtgggtatgacagatatgaagactatgattaccgatacagaagacgatcaccttctccttattatagtcgatatagatcacgatcaagatctcgttcctacagcccaagacgctattgataacggaatggttgcaattaaggacattttttttcctctttttttttttttttttttttaattctgagatttccccaagctgtggattgttcctactccttaagaaaaaaactttggtttatttagcatctacacttttgtcagttgtgttgctgttttccacccattttattatactcttaaaagatgtaattgttgtcattttgaacagttaaacatcttgagtataaaaagaaccccaatgttatgttatgctttgtaaattttttttttgcttttacctagataaacttctagctaatcaaataaggaaagaaactgtctttttaaagcttcttttgtgttagatactgtattagagatctgcatttatcatgagttcctttttttttttaactttatttttgggaaagtaacacatgaagtagttcagtcatgtcaggtttgtctggggtggaatggaacagtcaggtagttgaaagtttttttttagagatgaaaagcttgtgaactcctgtaaaacatgctgtatttgaaatacatctgttaaaacttaaaaactaaagtgtgattttttttgttgttgttaagtttattgaagtttattcccttaatcagtgaaggacaacccttatttattacctagagcagttgtataattcgctgttagaaattttggtattgggacagtggataagcaggttatcacatagcatagaattcttaaaagatacatgtggggaaaagtagtctcaaataaaagctaatttctttgaaaaaaaaaaaaaaaaaaaaaaaaa

SEQ ID NO: 116897 - DNA, 1000 bp, Homo Sapiens
gcgacaccccctgttctccgaggatgtggtcctcaagctcttcctgtccttcagcggctcggatgtgcagaacaagttaaaggagtcagcacagtgcgtcggggacgaattcctgaactgtaagctggctaccagggccaaggacttcctcccagctgacatccaggctcagtttgccatcagccgggagctgatccggaacatctacaatagctttcacaagcttcgcgacagggccgagcggatcgcgtcgcgggccatcgacaatgcggcagatcttctcatattcgggaaggagctaagtgcaatagggtctgacacgaccccgctgccctcctgggccgctctgaatagcagcacgtgggggtccctgaagcaggctctgaaaggcctgtctgtggaattcgcgctgctcgccgacaaggctgcacaacagggtaagcaggaagagaacgacgtggtggagaagctgaacctcttcttggatctgctgcagtcctataaggacctgtgcgagcggcatgagaagggcgtgttgcacaagcaccagcgggccctgcacaagtacagcctgatgaagaggcagatgatgagcgccaccgcgcagaaccgcgagccggagtccgtggagcagctggagtcccgcatcgtggagcaggagaacgcgattcagacgatggagctgcggaactacttctccctgtactgcctgcaccaggagacgcagctcatccacgtctacctgcccctcacctcccacatcctccgcgccttcgtcaactctcagatccaagggcacaaggagatgagcaaggtgtggaacgacctgaggcccaagctcagctgcctctttgcgggaccacacagcaccctgaccccaccgtgctccccgccggaggacggcctgtgtcctcactagcgcctgaggctgaggtggtgctccctgcggccgcactaaaacctctttccaaaaaaaaaaaaaaaaaaaaaaaaaaaaaaa

SEQ ID NO: 116898 - DNA, 1000 bp, Homo Sapiens
gaacagaaccctatattactctcctgggatctgagtttctgcaggtcatttgtatgtaggaccaggagtatctcctcaggtgaccagttttggggacccgtatgtggcaaattctaagctgccatattgaacatcatcccactgggagtggttatgttgtatccccatcttggctggcttcagtttttgctgtagccctagagcactttgtttgtgggaggctggcctcttgcctacctccttgcatggacagggggatgaatatttactttcccacctccttgctttttctttcactgataccactgaatggaactggtgctgtgactcctgctgctggggatttatgtcccgagaccttagcctggctgagtggagcctgagacctgcacaacagctcatggtcatgcatgagagagaagtggctggccacagccagagggaacagtaacagcccaggggcctttattttgggaaaggctgtcccgggctgttactgtctcttctggttataaagcagacatgtggccatcttttccgcagggttagagtgggctcctttctttttggaatccttttcttctcctttggtagcagctccctgcctccagggcttccgccaccagcgtctctgctgtgttgcgcagtgcagtggggtgcaagggctttgtttctgcctgcctgaaagagagggctctggggatggagatgagaaacaacacgctctccttcagacaatgaggcattctgtcctcctgctgccattcttcatctccactgagagccagagctggtaggagccgagtgccacaggcattctgcattgctctactcttaggtttgtgtgtgtgatccttcccctccctgtcgcccactcctccctcctctggctatcctaccctgtctgtgggctcttttactaccagcctatgctgtgggactgtcatggcatttagttcagagtggaggggctttggcctgaaataaaatgcaagtattt

SEQ ID NO: 116899 - DNA, 1000 bp, Homo Sapiens
gcgcaagccaaggttacctctggaacctccaagtgaaacttgagcccatagtaaatctcttaccagacaaaggaagactcatggactttctcctccagagaaaggaatgcaagatggtcatcctgtctgtctgttcacagatgttaagtgagtcagacagagcatcgctgcccgtgatagccactgtttttgataaactcaaccatgagtataaaaagtacctggatgccgagcagagttatgcgatggcggtggaagcagggcagagccgaagcagcccgctcctcaagaggccggtgcggacccaggcggtgctggaccagtcagatgtgtacacccatgtcctgtcagccttcgtggaaaagaaggagatgcctcataaatttgtgatagccgtgctgatggaatacattcgttctcttaaccagtttcagattgcagtacagcattacctacatgaacttgttatcaaaacccttgtccagcacaacctcttttatatgctgcatcagttcctgcagtaccacgtcctcagcgactccaaacctttggcttgtctgctgttatccctagagagtttctatcctcctgctcatcagctatctctggacatgctgaagcgactttcaacagcaaatgatgaaatagtagaagttctcctttccaaacaccaagtgttagctgccttaaggtttatccggggcattggtggccatgacaacatttctgcacgaaaatttttagatgctgcaaagcagactgaagacaacatgcttttctatacaatattccgcttttttgaacagcgaaaccagcgtttgcgagggagccccaatttcacaccaggggaacactgtgaagaacatgttgcttttttcaaacagatttttggagaccaagctctaatgaggcctacaacattctgaaatcacttgctgtttttttatataaaaatgtgtacaaagttaatttattgcattaataaagctctttaaactat

SEQ ID NO: 116900 - DNA, 1000 bp, Homo Sapiens
tggacgcattggctgatggtggggtgaagatgggtttgccacggcgcctggcaatccaactcggggcccaggctttgctgggagctgccaagatgctgctggactcggagcagcatccatgccagcttaaggacaatgtctgctcccctgggggagccaccatccacgccctgcactttctagagagtgggggcttccgctctctgctcatcaatgcagttgaggcctcctgtatccgaacacgagagctacagtccatggccgaccaagaaaagatctccccagctgcccttaagaagaccctcttagacagagtgaagctggaatcccccacagtctccacactgaccccctccagcccagggaagctcctcacaagaagcctggccctgggaggcaagaaggactaaggcagcatctgtcccctctgtgattcagagcccttagttgagagcccctgccgcccctgccacccccctgccccgctcccaccattgcccctcctcagctgtgcaaggagaaagcatgcttaggaagttttcaggtccttgtgataaaacctccttaaatctgttcagaccaagcaatgcgagcttcctctcctgtcccatgttggaagttgctctgaaggggtggtagatgctggaagccagacacaaccctgcgtacgctgctcagttggtggagactggggctgggactggagtcagcccagctgggaggaggggctggggaggatctgcagctgaagcccgaggcagggttggtgtgatgccaaggcaaagtggtgaggagaaaacaggaaacgggctttctctgaattggtaaatgggaaagaagtgagcaacttaagattgtcacaattaatcacaagtgtacaggattagactgggtttatatttaactcttgcttcataggtgtaccatttaaagagtgttatttaatgctaagtttaactgctttaataaagtttatttttaaataaaaaaaaaaaaaaaa

SEQ ID NO: 116901 - DNA, 1000 bp, Homo Sapiens
agaccatccatccagaagcatgtgataagacctccttccatactggccatattttggaacactgacctagacatgtccagatgggagtcccattcctagcagacaagctgagcaccgttgtaaccagagaactattactaggccttgaagaacctgtctaactggatgctcattgcctgggcaaggcctgtttaggccggttgcggtggctcatgcctgtaatcctagcactttgggaggctgaggtgggtggatcacctgaggtcaggagttcgagaccagcctcgccaacatggcgaaaccccatctctactaaaaatacaaaagttagctgggtgtggtggcagaggcctgtaatcccagttccttgggaggctgaggcgggagaattgcttgaacccggggacggaggttgcagtgaaccgagatcgcactgctgtacccagcctgggccacagtgcaagactccatctcaaaaaaaaaaagaaaagaaaaagcctgtttaatgcacaggtgtgagtggattgcttatggctatgagataggttgatctcgcccttaccccggggtctggtgtatgctgtgctttcctcagcagtatggctctgacatctcttagatgtcccaacttcagctgttgggagatggtgatattttcaaccctacttcctaaacatctgtctggggttcctttagtcttgaatgtcttatgctcaattatttggtgttgagcctctcttccacaagagctcctccatgtttggatagcagttgaagaggttgtgtgggtgggctgttgggagtgaggatggagtgttcagtgcccatttctcattttacattttaaagtcgttcctccaacatagtgtgtattggtctgaagggggtggtgggatgccaaagcctgctcaagttatggacattgtggccaccatgtggcttaaatgattttttctaactaataaagtggaatatatatttcaaaaaaaaaaaaaaaaaa

SEQ ID NO: 116902 - DNA, 1000 bp, Homo Sapiens
gagcccgacgagttctctgactttgaccgactccgcacggcactgccgacctccgggagcagcgcaggagagctggagctgctggcaggagaggtgccggcccgaagccctggggcgtttgacatgagtggggtcaggggatctctggctgaggctgtgggcagccccccacctgcagccacaccaactcccacgccccccacccggaagacgccggagtcattcctggggcccaatgcagccctcgtcgacctggactcgctggtgagccggccgggccccacgccgcctggagccaaggcctccaaccccttcctgccaggcggaggcccagccactggcccttccgtcaccaaccccttccagcccgcgcctcccgcgacgctcaccctgaaccagctccgtctcagtcctgtgcctcccgtccctggagcgccacccacgtacatctctccccttggcgggggccctggcctgccccccatgatgcccccgggccccccggcccccaacactaatcccttcctcctataatccagggcggaagggggcctggctccatccggctgccccattccggctccctgggagatcagtgttgtgagtgcatgtgaaatgggggatccccacccccagtgcccttccccttcctggggcccactcacactacaccctcttcctttcccaccccacctccccggagagaaactggacatggggcctggggaggggagctggccagaggaggacccctttcccgtggcattagaagggggaggggtggctggggcccccacccattccccctccctccaaactcccaacccccagtcagtgtttgagcctcctcgttcccctcacgcacccgctcacgcaccctcggtgaatccttggtgatgattttggcaactttgggaataaatggcaattcccacgggcttggcaaaaaaaaaaaaaaaaaaaaaaaaaaaaaaaaaaaaaaaaaaaaaaaaaaaaaaaa

SEQ ID NO: 116903 - DNA, 1000 bp, Homo Sapiens
aaggttggtagtgaagtcaggttcggggtgcatgggctgtggtggtgttgatcagttgctccagtgtttgaaataagaagactcatgtttatgtctggaataagttctgtttgtgctgacaggtggcctaggtcctggagatgagcaccctctctctggcctttagggagtcccctcttaggacaggcactgcccagcagcaagggcagcagagttgggtgctaagatcctgaggagctcgaggtttcgagctggctttagacattggtgggaccaaggatgttttgcaggatgccctgatcctaagaagggggcctgggggtgcgtgcagcctgtcggggagaccccactctgacagtgggcacacggcagcctgcaaagcacagggccaccgccacagcccggcagaggggcacactctggagaccttgctggcagtgctagccaggaaacagagtgaccaagggacaagaagggacttgcctaaagccacccagcaactcagcagcagaaccaagatgggccccaggctcctccatatggcccagggcttaccaccctatcacacgtggccttgtctagacccagtcctgagcaggggagaggctcttgagacctgatgccctcctacccacatggttctcccactgccctgtctgctctgctgctacagaggggcagggcctcccccagcccacgcttaggaatgcttggcctctggcaggcaggcagctgtacccaagctggtgggcagggggctggaaggcaccaggcctcaggaggagccccatagtcccgcctgcagcctgtaaccatcggctgggccctgcaaggcccacactcacgccctgtgggtgatggtcacggtgggtgggtgggggctgaccccagcttccaggggactgtcactgtggacgccaaaatggcataactgagataaggtgaataagtgacaaataaagccagttttttacaaggtaaaaaaaaaaaaaaaaaaaaa

SEQ ID NO: 116904 - DNA, 1000 bp, Homo Sapiens
gcactccatcgacatgaagaagagaaattcttcttaaatgccaaaggccagaaagaaactttacccagcatatgggactcacctaccaaacaactttctgtcgttgtgccttcatacaatgaagaaaaacggttgcctgtgatgatggatgaagctctgagctatctagagaagagacagaaacgagatcctgcgttcacttatgaagtgatagtagttgatgatggcagtaaagatcagacctcaaaggtagcttttaaatattgccagaaatatggaagtgacaaagtacgtgtgataaccctggtgaagaatcgtggaaaaggtggagcgattagaatgggtatattcagttctcgaggagaaaagatccttatggcagatgctgatggagccacaaagtttccagatgttgagaaattagaaaaggggctaaatgatctacagccttggcctaatcaaatggctatagcatgtggatctcgagctcatttagaaaaagaatcaattgctcagcgttcttacttccgtactcttctcatgtatgggttccactttctggtgtggttcctttgtgtcaaaggaatcagggacacacagtgtgggttcaaattatttactcgagaagcagcttcacggacgttttcatctctacacgttgaacgatgggcatttgatgtagaactactgtacatagcacagttctttaaaattccaatagcagaaattgctgtcaactggacagaaattgaaggttctaaattagttccattctggagctggctacaaatgggtaaagacctactttttatacgacttcgatatttgactggtgcctggaggcttgagcaaactcggaaaatgaattaggttgtttgcagtcttcagttgtgttcttatgcttcagtgtcacatttcatttcatttgaaactaaaattttaagtaaagctgaaataaacttcttgtcattgtctgccttttaaaaaaaaaaaaaaaaaa

SEQ ID NO: 116905 - DNA, 1000 bp, Homo Sapiens
tggctgccattctttacagaaagggaacaaaccctgcaggttctaagaagactcttcccggttgatcgtggattatttgaggataaagtagccaatatttggtgcagcttcaatgtctttctgaagattaaggatattttgccacgtcacatccaattaataatgagcttttgttctacgtttttgagcctgcttcctgcatgcataaaattaatacttcagccctcttccaaaggattcaaatttacactggttagctgtgcgctatcattctttttattttctttccaagtacatgaaaaatccattctcttggtgtcactaccagtctgcttagttttaagtgaaattccttttatgtctacttggtttttacttgtgtcaacatttagtatgctacctcttctattgaaggatgaactcctaatgccctctgttgtgacaacaatggcattttttatagcttgtgtaacttccttttcaatatttgaaaagacttctgaagaagaactgcagttgaaatccttttccatttctgtgaggaaatatcttccatgttttacatttctttccagaattatacaatatttgtttcttatctcagtcatcactatggtgcttctgacgttgatgactgtcacactggatcctcctcagaaactaccggacttgttttctgtattggtgtgttttgtatcttgcttgaacttcctgttcttcttggtatactttaacattattattatgtgggattccaaaagtggaagaaatcagaagaaaatcagctagctgtattcctaaacaaattgtttcctaaacaaatgtgaaaatgtgaacagtgctgaaaggttttgtgaactttttgctatgtataaatgaaattaccattttgagaaccatggaaccacaggaaaggaaatggtgaaaagtcattgttgtctacacaaaataaatgtatatggagaccaaagaccaaaaaaaaaaaaaaaaaaaaaaaaaa

SEQ ID NO: 116906 - DNA, 1000 bp, Homo Sapiens
acttggttttgacccacagaatatagcacgttgtgcaaactgtcgattcagcgaaacttaaaaaagacaagaaactactgaggagcttagtaactgctgtttctgtacgtagtgtttaatcttccaagcacatctagtgtctgtcagtttctaattggcatgtgtaggctgctctgtgactgaagaattttcaaaccagctttacacccttcaggaaaaatcccttgtgattggatgtttactatctgccaggaaactggtactcaagatgttgaagctacagttattttatgatagcacacttcccttgatctgcttatttttattccatcaccatttaccctttttttttttttaaattttgtagccattcttatgatgctcttgatttgttggttacacaaatcaattttattaaaaatccaaagataagtctttaggtatattttgtaccaaattaaattagaagacaaaaattgtgctttcatagttgctacaaaggtaaataatggagagatttggtacaaaacaacaaaatatatatatattctcatatatatatatatagctgataaaattacctgaggagtgtaatgcttatttttttgtgtatatctttgcaatctattttatatatattgacaaaagagactgtgaaatacttagccatgcagaatatgtgaccagaccagagcatgtgtaggaagactttacggtaatcattaactctaccccgaaatgatggactacaagttataatgtgtgttacctacacttcaatcagtaatattagcaaatctccaaatgttagtcacattggtttgtctcccttgtacattctttattcatgatattacagtgctgtaactgggtggtcctttttaaacaaaacattatttgcaaaacagagggtattatttgtttttaaagcttttgtaaataaaggcttcaaaatgttttcttataaaaaaaaaaaaaaaaaaaaaaaaaaaaaaaaaaa

SEQ ID NO: 116907 - DNA, 1000 bp, Homo Sapiens
gtgaaaaggcggatggagaatattattgatcagtgtttgcaaaagccagcagatgtaattggaaaatcgatgaatcaagcaatctgtattccattgtatagagataccagaagtgaggattctacacgtagattgttcaaatttccttttctgtggaataataaaacttcaaatctacattatcttctttttactattctagaagattcactttataaaatgtgcatcttaaggagacatactgatatttctcaatctgtgagtaatggactaattgctattaaatttgggagctttacatatgccacaacagaaaaagtcagaagaagcatctacagttgtttagatgcacagttttatgatgatgaaactgtaacagtagttcttaaagacactgtaggacgtgaaggaagagatagactcttggtccagctgcctttgtctttagtatataacagtgaagattctgcagaatatcagttcactgggacttattctacaaggctagatgaacagtgtagtgctattcccacccgtaccatgcattttgagaagcactggagattactggaaagtatgaaagcacagtatgttgctgggaatggttttcgaaaagtgtcctgtgtgttaagctcaaatcttcgtcatgtgagagtatttgaaatggacatagatgatgaatgggagctcgatgagtcttcagatgaagaggaggaggccagtaataagcctgtaaaaataaaggaagaagtgttgtcggagtcagaggcagagaaccaacaagctggtgctgccgctttagctccagagatagtcattaaagtggaaaaacttgaccctgagctagactcctaatctagcttgccattattgtgtgtgtaattatggccaaaaggacataggagatggactaagatgtcttggaccacctttgtgtaacaaagaaataaacagtaaattttattttttcaaaaaaaaaaaaaaaaaaaaaaaaaaaaaa

SEQ ID NO: 116908 - DNA, 1000 bp, Homo Sapiens
ttccgggacgtcacggcggactttgagggccagagtcccaaatgcacccagggtgtgcgggaagcgttccgacagatcaaggacttgttcctacagggagcctacgacacggtccgctgggagttcggcacctgccagccgctgtcagacgagaaggacctgacccagctcttcatgttcgcccggaatgccttcaccgtgctggccatgatggactacccctaccccactgacttcctgggtcccctccctgccaaccccgtcaaggtgggctgtgatcggctgctgagtgaggcccagaggatcacggggctgcgagcactggcagggctggtctacaacgcctcgggctccgagcactgctacgacatctaccggctctaccacagctgtgctgaccccactggctgcggcaccggccccgacgccagggcctgggactaccaggcctgcaccgagatcaacctgaccttcgccagcaacaatgtgaccgatatgttcccggacctgcccttcactgacgagctccgccagcggtactgcctggacacctggggcgtgtggccccggcccgactggctgctgaccagcttctgggggggtgatctcagagccgccagcaacatcatcttctccaacgggaacctggacccctgggcagggggcgggattcggaggaacctgagtgcctcagtcatcgccgtcaccatccaggggggagcgcaccacctcgacctcagagcctcccacccagaagatcctgcttccgtggttgaggcgcggaagctggaggccaccatcatcggcgagtgggtaaaggcagccaggcgtgagcagcagccagctctgcgtggggggcccagactcagcctctgagcacaggactggaggggtctcaaggctcctcatggagtgggggcttcactcaagcagctggcggcagagggaaggggctgaataaacgcctggaggcctggccatgtaaaaaaaaaaaaaaaaa

SEQ ID NO: 116909 - DNA, 1000 bp, Homo Sapiens
tggtcccagggacaggctgtgctacctactgggtggtggggagggaagcttctggccatgcttgggcattcagaccaaccatcattaatgttaatagaggaaatgcagcaacgtcaaaagcaaggcaggttggttaattagatctggggcccgatgacctccctttcccactgctacagcccttttgacttcccccagcaggaagcgctgtctgtgcggctgagtctgggccacttgcttaattgcatttctggcagggaaggagaggagggatggagaagctctgctcgctgcttccacctcaccgtgtgtcctcccctcccctcccttcctctcctccccacaggcggaattgctttcttctgagccgggtgggctctcctgcagggagaatgcaggggtctgtgcttggctcttagcaaagcaggtggcccacagtgacctccaggaggtggctgattttcctttgtgccttcttatttctcagtaggaacttggaagggaagagctctgaaggagccagaggggcagccaccttgcatgagggtgaggaaggagaagcccagccagcctctacccatccctccctcccaattaggctgcactggggccgaacgcttccctgggctcccactgccttctaaggagccaaggagaattccctgcccactttctgttcctccatgcccaaactggcagatgcttctctgggagcaaggccacatgggctgatgcagctttgagtgctcaggttctgttttctggaagttgctggagaagggctgtcagggtgcttctatgaatatgggcttcagctgtagcacttggcagaaacgtgatgtgtcccacaaactgctggtggaggaagaagatgttcgtcagccaattcaacctccagccagcttcttgagcctatttggtttaaaaaaaaaaagtcttctaatcagaagccactgattttataataaataacacttgttttgaaaaaaaaaaaaaaaaa

SEQ ID NO: 116910 - DNA, 1000 bp, Homo Sapiens
tcaccaaaaacatggatactagtgccgtactggctgaaatccctgcaggaccaggaagagaaccagttcagactttgtactctcagtcaccagctctggaattagataaattccttgaagatgtcaggaatgggatctatcctctgacagcctttgggctgcctcggccccagcagccacagcaggaggaggtgacatcacctgtcgtgcccccctctgtcaagactccgacacctgaaccagctgaggtggagactcgcaaggtggtgctgatgcagtgcaacattgagtcggtggaggagggagtcaaacaccacctgacacttctgctgaagttggaggacaaactgaaccggcacctgagctgtgacctgatgccaaatgagaatatccccgagttggcggctgagctggtgcagctgggcttcattagtgaggctgaccagagccggttgacttctctgctagaagagaccttgaacaagttcaattttgccaggaacagtaccctcaactcagccgctgtcaccgtctcctcttagagctcactcgggccaggccctgatctgcgctgtggctgtccctggacgtgctgcagccctcctgtcccttccccccagtcagtattaccctgtgaagccccttccctcctttattattcaggagggctgggggggctccctggttctgagcatcatcctttcccctcccctctcttcctcccctctgcactttgtttacttgttttgcacagacgtgggcctgggccttctcagcagccgccttctagttgggggctagtcgctgatctgccggctcccgcccagcctgtgtggaaaggaggcccacgggcactaggggagccgaattctacaatcccgctggggcggccggggcgggagagaaaggtggtgctgcagtggtggccctggggggccattcgattcgcctcagttgctgctgtaataaaagtctactttttgctaaaaaaaaaaaaaaa

SEQ ID NO: 116911 - DNA, 1000 bp, Homo Sapiens
aaacatcagcgagtccacagtggagaaaaaccattcaaatgtgaagaatgtgggaaaggattttacacaaattcacaatgctattcccaccagagatcccatagtggagaaaaaccatacaaatgtgtggagtgtgggaagggctacaaaaggaggttggatcttgactttcaccagcgcgtccatacaggagagaaactgtataattgtaaggaatgtgggaagagctttagtcgggccccatgtcttttgaaacatgagagactccacagtggagaaaaaccattccaatgtgaagagtgtgggaagagatttactcaaaattcacatcttcattcccatcagagagttcacactggagaaaagccatacaaatgtgagaagtgtggaaagggctacaatagtaagtttaatcttgatatgcaccagaaggtccacacaggagagagaccatacaattgtaaggaatgtgggaagagttttggctgggcctcgtgtcttttgaaacatcagagactgcgcagtggggaaaaacctttcaaatgtgaagagtgtgggaaaagatttactcagaattcacagcttcattctcatcaaagagtgcacactggagaaaagccatacaaatgtgatgagtgtgggaagggcttcagctggtcctcaactcgtctgacccatcagagacgccacagcagagaaacacctctcaaatgtgagcagcatgggaagaacattgtacagaattcattctctaaagtgcaagaaaaagttcacagtgtagaaaagccatacaaatgtgaggactgtgggaagggctacaacaggcgcttgaatcttgatatgcatcagagggtccacatgggagagaaaacatggaagtgtagggagtgtgatatgtgctttagtcaggcctcaagccttcgacttcatcagaatgttcatgttggagaaaaaccttagtgatgtgatggtgcaataaagtcttcactcagtcttcatg

SEQ ID NO: 116912 - DNA, 1000 bp, Homo Sapiens
aagagatggcagagggtcccccttgtgggtgcgcttggatgtgcagagccttctccatggattttcttccctgtaagtgccgggcccctcaccccagctgacaggctgttgctgtgcctgctcacacctgctcctgcaggcacactgggctagggacgaggaaggagcagccacaagtggtagaactgccttggtggacaccagcctcgccctgtctttatttcctgaatggtttgtgaacttgctcacctggaccactgtatcctgccactgtccttcctggtctcgcactgccactgcatggcctcctgtcactgtgaatcgtggcccagtctcagtttgtagtttctcattaaattggccctttcactcccccttggccctttcactcccccgccctgggcctctgctctcttgcctggcttccttcttttttgagggaaagagggtggggctgcaggcagtctactggcaggacgggaggctgagtcctcagggtctcacaccctcagtgctgatgccatgccaactgcctgggacaacaccaacacgtaaggacctaattaaaccaaaccagagtcgggtgtagaccagccctgggatttccagctgtgactgggccagggcacacgttggtctcggcagtggctgtaaggtcaccttccttcctctgatgctggtttcaaccatctatatatggcatccacgcatgggatctgcaagctggagccctcctacccgcaggcttgagcacagcatcatccagccctggggaggcgcacccttaagcaagacagactgggctgaggctgacaggcagaagactaacagagcgcagtctgcacacgcaggttctgggcgacctctggccctggccatctctgcactaactcatctgaattatgaaggtggcagtcttggtcagtagtttaaagagtttccctactttttaaccctttttgaaataaaacttttacaggtaaaaaaaaaaaaaaaaaaa

SEQ ID NO: 116913 - DNA, 1000 bp, Homo Sapiens
tgttgggatagggtcagatgcaccacccatggagaggtttgtcaacacaaagacatggaaggttagaggtttgtcaacaaaaagacatggaaggttaggtttgtcaacacaaagacatggaagattagaggtttgtcaacacaaagacacaggaagaatgggctgcagaagatttagatgttttccatttgggcacattttacttagctggagaactaggtttaaaacagcctgggtaggaaaattagaagcaagctggatgcagtggctcatgcctgtaatcccaacacttttgggaggtccaggcaggaggatcacttgggcccaggaggtcaagcctgcagcgagctgagatcacaccactgcactccagcctggggtgatagaacaagaccctgtctcaaaaaaaaaaaaaaacaacaaaaacttagaattgaggagttgtacctccattggcttcctcactccaaaataggtgctgatccttcctattcctattctttgccaccttttgggtgtggtgtcaccagcctgtttagccaagtagctttgggcataggctgcccaatctgagcaaacaccagtgaggctctattgagccaagaccaagtcctcaaagcacctgaaccactgtggccttctcagcctacagcagtgtggtctcttacatggccacaaagggacacacagtgacaaaaggctcggaatgttacaatggtaaaatgagtgatctcaaatccactgacagatataaaataggcttagagaggaaaagctgcctctggtcaagtagatcatggcagcatgaattccaactcacttttttacaactccaacttctatgtttatctttgttactttcacttttttacaacctggccagaggcattttttaaatcaggcccaatatcagtattctttttgtgtgtgccaattttgttatcacatccctatgaagttgaaaaataaagttaattttgaccaaaaaaaaaaaaaaaag

SEQ ID NO: 116914 - DNA, 1000 bp, Homo Sapiens
ttaacatttgtgcaaatggcagtgaacaaggtggagtattgctcctggaaaatccaaaaggtgacaataggttggaccttttaaagctgaagagtgttgtcactagcatttttggtgtgaaaaatacagagctggctgtcttccatgatgaaacagaaatacaaaaccaaactgacttactgagtcttagtggaaaaacactttgtgtgactgcaggatcggctccctctctgatcaacagttctagtactcttctttgtcagtatatcaacctacagctcctgaatgcaaagccacaagagtgtttaatggggacagtgggcactctcctgcttgaaaacccacttgggcagaatggactcacccaccaaggtcttctgtatgaagcagccaaggtgtttggccttcggagcaggaagctaaagctgtttctgaatgagacccaaacgcaggaaattacagaagacatccccgtgaagactttgaatatgaagactgtgtatgtttctgtgttaccaacaacagcagacttctagcatgtacttatcaatgttgttcggtcagcccttccctaattacacctatcccctacacatacatgcacatagacacacacatgaacacactgaagatatttccttcaggtgtgtgtaaaatatgctgcttggattgaaattcaaatgggattgattagtcaagtaacttgagacctcacagtaatcttcacacttaaccttagacacctatgcagtcatgttgggagcaggttacaatgttacttcagcccacagtttatttctattcttgagttcttaagtacagaagatagaagtgatttaaatggcatagtatatatatcattttctggccttttaaaatttatttgagacctcttgatgaaatggacatattatatatttctgccacctggattttcctggataatttgatggaatattttaagtttcagtaaatcagaacaataaacaaactcagatat

SEQ ID NO: 116915 - DNA, 1000 bp, Homo Sapiens
aagggaaaggtggtgtgtcccctgttccctattccatctccctgggacttcctgctcatcatagtacccagtgagcccagagatcctactagactgggtcagcaattctagagaaccttccggaatagtctgggaacatggtcaaggtggaaggggctcccctagagagggtgggggtgtagttacttcccagttggccagaaaactgggccttgcagacccccttagcattttttccctttttttccttccctgctttctacttctttggggagccccttgtgttttggagtctgactggagtctcgcatcctggggcctgctccatccatccctcctgggcgccagaccctccatccaagccctgtgtctttccatagtcagggtcaggccctgcatctattccaaggggcactcagtacacattccataaattagctgggtgtccctgcacgcccaccccatgaaactcgagcaggtctctggaagccatttgttaaaaaaaaaaaaaaaagttttaaaaataccttttaattttctggtaattccagttctttgaagcatcctctgctgggtcttggggtgtgtggatggattggctgtctgatgggattggtaacccctcgctactcaagatggggggatacaaacaccttcagggaaggggagcctggttcttctcgttttccttttttttttttttttttaaaaaaaaactatttaattttttaatttatttttggttgttttttgcacaatgaagtttcagcttctcaaccttctcccctacccagggctgtggacccagactggccttgagccacagtccctctttccctcctcaccctcttccccctgcgggctcccgggtctgtccatttgttactgtgctgtgctggggattggcgccgaggtggcgtgagattccacttgtgtagaactttgttgagtaaagatcagtttcttgtgaaaaaaaaaaaaaaaaaaaaaaaaaaaaaaa

SEQ ID NO: 116916 - DNA, 1000 bp, Homo Sapiens
aaagtgcatttgcctaggacttctcagcttctcccataggtagtttaacaggcattaaaatttgtaattgaaatgttgctttcactgaaaaagtgtcttgatgtttcagttatttttaatcgccataaaaaaatagaactatcttttgggtttatctgttttctcatgcacaggcaatacacaaatttaaaatgagttgtgagccaattgtttctgaagtgttttggtagttctattaagaaatagttaaatattgtgcttttcagagcctcagagaaagggggacggggtgggggggtggggcagcggaatctgtcctggatggggccagcttaaataatactggcaaccaagattctgttaggatttctgtgcatatagtgtagtaaagaagtatcattcaggggtgaaaaacaaagagccgttttaatgatgttgagtacatttggctgttttatagcctttttcttccctcccccaaagaattctgtttgcctaactcccaaactgttggggtggtacattcctttaggaccaattaaaacataattgagggtcagtgatacatttggctgactctggttcagtattctcttaggtgattatattctctcatgtacagttacaggaaattaaaatgttaaagtaacctaaaatgaattcagaccaataaaatcaagggaaatacaagttgattgcattacttctgtatgttgcttgctattaaaaaggttaagaggccaggttacccaccagtccttgcactgttctgacactttccccaggaggaaaacaagtacaaaggttacggtggaggcataagtagaagagattgttaagaagggtattcatgtgtctttgctctttctgctttatgcctcagtttggtttaaaaacttctgtactggcaaatggtggtattcagtgtgggatagtgtcataactaatttgacaatttattaatcataaaataacaataaatctctagcttttacacttg

SEQ ID NO: 116917 - DNA, 1000 bp, Homo Sapiens
attaatttcattgtgaggtggatgggggagtgaaattgtgaggtggatgggggagtgaaatctccatggttcctgctttgtgttcctctcccagctccatctctttccctagggaccaggcactcatatggcggggtggggtcctagcctcagtttgaagaagtgggggctggagcggggttgggggtggtagggatagggcatgatcaaaggggccatttcttgcttttctttcctcatcttcactgcccccttgagctaggtggattttctcttcatgacaagagtatttggtagggaaagcaggtttaaaataaaaagacaacccaccccctgcccttttgcttccctcccatcagtctggttgacaggaagaaaccacaccatcaacaccaacaagtttctgtgttccttttacagcaaaagggactttttatataaccaaatgtggtgttttagtgactttttgataatgtacagttttttgtgaatttaaatttatttctttctatatttttaggaccaatttcatttttaataaggttaaaaagaaaaaaaaagtctagcgaaaaaactcctgtttttgccatgtgatgttccacaagtgcagctgtagaaaagtgcttgtcagttgttgaataaaaaaaccacatttgatagagattcaaaagactctgtgtattcatcttcccttctacacacctgagggggagacggcgttgggataggtatgactggcttaagagaccacaggcaagggaacaacaggggctcctgttccataccctctgtgtgggatggaaagggtcattagtgctcccgcctaaatgtctggctgagttgctggaagcaaaggggggattcagtgcatccaggtcctgccttgtgagatgtggccccagcttcctaagctgccacctctgtgttcctgtcatagcaaatatgggaccatcaccagcttaccacttcccactcacggataagacaccaagacgtagac

SEQ ID NO: 116918 - DNA, 1000 bp, Homo Sapiens
tcgcactgaatactcaacaccagagctctaatgtgggaaatggttctcctttccctctcaataaatatctatttttcatttttttactttgtagtttattttttagtgaatgtatttaattttatgaattatttatgattaaaccacatccagaatcttcgttttctgtgaaaaggaagaactagaaaattgctttaaatcttgaaaatacaaggaatgttttaaaatataaaacaaagccaagttaaactgtttacactgatgtgctataaaagcaccaaaaagaaactttactgtagagttacaagtacatttatatatatatgttgctgcatcacttgtgtagttaaattgtatttcaaaacagtgaaaaaattgacatgtatatactgttcattcttgtttatattaagtcttgttttaaatatgtattatgtgtatatattgtttgcagacattattgttcatgccttagaggattgtagcattttattttcgtctgaaggtaatgatagctatacagtctgtacagtaattatcctctaccaacactgtggcgtctccttaatcttggtagtgcctgcctttgaaacagggtgtaggggatattagttttccatttttctattttgttatataattttaagccaccagggcctaaattaaagtataatcatttgtatccatgtggaataaaattgtgacaatttcctacgcacacagtattttttcatagaaacatttccctcccatttgccttgcctcagaaataaatttaaaagacgtttgtaaccactgtgttttatctactgtgtgttgtggtggcctgttggaggcaaatagatcagattttttttgtacctacgtaagagtacttgaagttttatttaaaataaaatgttgtggaaaaggtagcattctttttttaggagtgttatttttcactatgtgtggcacggatacaataaaagacttttacaaactaaaaaaaaaaaaaaaa

SEQ ID NO: 116919 - DNA, 384 bp, Homo Sapiens
aagcctgccactgacattgaagaaccaatatatacaatggacaaacaatccagtgccggcggggtgaagaggagcgtcccctgtgattccaacgaggccaacgagatgatgccggagaccccaactggggactcagacccgcaacctgctcctaaaaaaatgaaaacatctgagtcctcgaccatactagtggttcgctacaggaggaactttaaaagaacatctccagaggaactgctgaatgaccacgcccgagagaacagaatcaaccccctccaaatggaggaggaggaattcatggaaataatggttgaaatacctgcaaagtagcaagaagctacatctctcaaccttgggcaatgaaaataaagtttgagaagctga

SEQ ID NO: 116920 - DNA, 1000 bp, Homo Sapiens
tattccctgacagacttttcttcaactcagcatgacttcaactctccaactacacctgttaccttcagtgacctggagcagttggctaaagagcaagacaaagaatcagagaaacaacttctactccaggaagtggagaatcacaaaaagcagatgctcagcaatcaggcctcatggaggaaagctaatctcacctgcaaaattgcaatcgacaatctagagaaagcagaacttcttcagggaggagatctcttaaggcaaaggaaaaccaccaaagagagcctggcccagacatccagtaccatcactgagagcctcatggggatcagcaggatgatggcccagcaggtccagcagagcgaggaggccatgcagtctctagtcacttcttcacgaacgatcctggatgcaaatgaagaatttaagtccatgtcgggcaccatccagctgggccggaagcttatcacaaaatacaatcgccgggagctgacggacaagcttctcatcttccttgcgctacgcctgtttcttgctacggtcctctatattgtgaaaaagcggctctttccatttttgtgagatcccaaaggtgccagttctggccctttcagctcctgtttcaggatctgtcctggttcctgagctctaggctgctaagctgagccacacacccctccgttttgcaccagttgcctgcaggttggatggaacacagtgccccacttttctgcaagtagctggcttgtaaagggtgaacagagccatgggaggaaggtctggcattgggatgccgccctggggacatacgaaccgcctccttccaccattgtgcactatgggaggccgctgctgcgtggagcacttaaagtccagcctccaggaccggatgcccctcctgtctcccgctcccatcgtgcccttaaatgccagatctggtggagggaagagagaagaggtaggaagaaaggtgatgaaaactcctggtcattccttgaataaa

SEQ ID NO: 116921 - DNA, 1000 bp, Homo Sapiens
tgtgtgttggaatggctgagcaaatattaaaattgttaatatgcagccatatatggaaggttcctgtggggttgttttttcgtgttttttttttttgtggtgggattatgtgcctcccattcactagaaaatgagaaaattgtctgggttccaaaatattgacattgaatggatcaatacacacacacagacatatatatatatatatgcacacatatataggcagttgcatgcctagcatgggtattttataaccatataactgagttatattggaattataaatattttccgtcacttaaatttgttctttgtttagcctgaaaacctttatggctcaagatcagattcctgactaacccctctcttagagctacagcgagctgcattaccagcttaaaacacttcttagggattaaatatagatgtaatttttcaaaatcgtttttaatttaaactgtgttttagtgtaaaattgttaaccttgtaagatggataatgtgtataagaatgtaggccttaactatttcacatgagtcaaaacaaagcagctttaaaaaaataattggaagcacaatgcatggcactgactgaatgctgttaatatttctaaaagtttctacattcagattatatgcctgattcatagtaaaatacctctaataaacactgttttatagaaaacctgacttcagtgaatatttttgtattttacatgggccagtttatatactgctatttacactattatttcctatagctacatgttctttgtaccttttgtagttttatttgtattactagattcataccttgatggtaacgctctatctggttttgggtgtttttcatgttttagcatttgtataaagaaactggtccatgtaaatactttccatgttttttcttcaaatgtttaaaccactagttgatgtatggtatctttagatatttgcctgtctgtttgctcaaaattgcttctaaaacaataaagattctt

SEQ ID NO: 116922 - DNA, 1000 bp, Homo Sapiens
ggccctgcgcctgaagagccgcgcggtggagctgctgcccgatgggactgccaaccttgccaagctgcagcttgtggtggagaatagtgcccagcgggtcatccacttggcgggtcagtgggagaagcaccgggtcccactcctcgctgagtaccgccacctccgaaagctgcaggattgcagagagctggaatcttctcgacggctggcagagatccaagaactgcaccagagtgtccgggcggctgctgaagaggcccgcaggaaggaggaggtctataagcagctgatgtcagagctggagactctgcccagagatgtgtcccggctggcctacacccagcgcatcctggagatcgtgggcaacatccggaagcagaaggaagagatcaccaagatcttgtctgatacgaaggagcttcagaaggaaatcaactccctatctgggaagctggaccggacgtttgcggtgactgatgagcttgtgttcaaggatgccaagaaggacgatgctgttcggaaggcctataagtatctagctgctctgcacgagaactgcagccagctcatccagaccatcgaggacacaggcaccatcatgcgggaggttcgagacctcgaggagcagatcgagacagagctgggcaagaagaccctcagcaacctggagaagatccgggaggactaccgagccctccgccaggagaacgctggcctcctaggccgggtccgggaggcctgaggagccgccggcagaggtctctccccagcctcaggcagggatttggggtgctggaggcagtggccaagcacatgccctagctacttcctccgctgtccagttcctcctgctgcggccttggacccagacccctgcccactgaccgcaacccttatatggggtgatagtccagcatgtggggagctcggctgcagtttattggggacggtactgtgggttgggggccttggatcccaaataaatgagtagttcctctgc

SEQ ID NO: 116923 - DNA, 1000 bp, Homo Sapiens
gccagttgtggtgctggtgcagctggagcgagaggaggaagtcacaggccctgtcattgcgcctctcttcccgcagaaacgtgaagagggctggtgggtggtgattggagatgccaagtccaatagcctcatctccatcaagaggctgaccttgcagcagaaggccaaggtgaagttggactttgtggccccagccactggtgcccacaactacactctgtacttcatgagtgacgcttacatgggatgtgaccaggagtacaaattcagcgtggatgtgaaagaagctgagacagacagtgattcagattgagtcctgaggcatttacttttgggtaaaggagagttgagcctgaattaggaatgtgtacattgtaggaatcctggttgtggggaccaggtctgtgggcctcaggtctggccagccagggctggtgctgtccccgcctacctccacttcctttcccttgctcactctggatccagtgacagcaggtgtcatgggtcaagcataaatcatatatagcattttcaggcatgttcctggtagttcttttgagtctgacattctaataaaataatttgtagaaaccatttgtctttgtagtgattccaaattaaaagttttctttctccaacctgagggcacggccaaaaagatctggttattttttagccaggaacgtgcttgttaatgagtatgtctggaggacagacctgctcattaggtgtgctgtcccctgtagcctcgtgagtcagcccagaggagggtacatgcgactgtggcctggcctcagtggtacccacacatcagcactaccacaagaaccaacactgagcctcggaagctagatcacaggttaggggtttctctagatgggggttctgaaatttgcagtgtctgctcctgggaggcagcaccagaaagggcactgaaatgtactagctggatgtgacccagtcttaataaacaggttttctaatccagaaaaaaaaaaaa

SEQ ID NO: 116924 - DNA, 1000 bp, Homo Sapiens
catggaccaggcgctcgtggacctcggcgtgctctccgaccccggctcgggcctttacgatgctgactcggagctcgacgtctttgatgcgtacttggagtagggtctcgactgctgttcccctcttccctacacgatccgcaacccatgccctggaccagccgcccagatcatgccgccgcagctggttgggggcaccatctggacggggatggttccccaggaggagaccctcccctgcctccgaggcctacctgctcccctcaaaagcttcgtgccaacagagaggttcctgtttgaacccaggagagtggaagagagattgggactgagtgctgaggttgggaaggcacctgctcccacagaagggggaacgcaagaggcatcccaagacctcatctgcctgcagtgtcaaatcgatggcctggccttggcttctgattatttgcagctgcgatggatgtttacaggaacccagccagagtttgcctccctgcacttcatcccggagcgcacctgcttcccccacttcaccttcggagaggacacttcaaactgcggacacacgcaaaagcgactcccagctccgtttgatgtgagttgagccttcaggccagctgggtttagcccgaggctggtcttagatgcagcgactgtttcaggggtgactcagaagaaaaagaagctgaggaagctgttggggggctgagggtgggattctcgctccttcatttcaggttactcgttcttcagcaagttggcaaaacagacatcatgctggtgagtgccacgttactcccctggctggaaatgcttttctgaaagtatgagtgttgtgcctacttaattctgataaacctgtctaagcaatacttaggaggcttacttctttggattaaaaaaaaatgtatgcaactccaaaaaaaaaaaaaaaaaaaaaaaaaaaaaaaaaaaaaaaaaaaaaaaaaaaaaaaaaaaaaaaaaaaaaaaaaaaaaaaaa

SEQ ID NO: 116925 - DNA, 1000 bp, Homo Sapiens
gcaccaggagacggccacagacacacactgctaaatgtgaagatggaactaaactggaaattaaattatactgacaatattatggcatttttaagatcatggcattttaatttacattagagtggagttgcatcatactcaggggttagcttccaaggtcagtacataggtaaaatgggctattaggatgatccttgaaagccctttagaagggtgccatgttggaaacctgtacatcacaacaagtagcttttcctcctatgttggaaaaaaagactgtttctttgtttgaagaccaagtgaagttgttggtgtttgtttaggggccattttgttaaaaaaaaaaagcacataacttttaacactagaatcagcccgcaagatgcttgccccgctagtggcagatgtgaactgacaaggagtgaagcgcccacccagcggatggacagcacccacctgggtttactcaagggtgtgcattcattttaggtgggatcgccacaggatttcatgttattttccttacggcttccttttcactgacctcatttgttgagttaatgtaagttaaatgtgtctatgatataactccactgtacatcatcctttgagtagtaaaggataaaagcatatatactacctatatgtatgtgctgtatgtgggcatttcattgagatctaattaatagctagcctatttatggttattcgttttagtaagttctgtgggagcaaggtatttaaaatcaaaactaataactacatcatggtttttgattaggatctaaatattcaggttttaagcctgctgcaaacttttaaaatattatgatagattctgtactacatgtgggaaacaagcaagaactaaataatcaaatgttgtcaaccaaaagtaatagttgggtattggagatttttttaaaatgtttttatgttattagctatttggagttaaataaaaacagaacaaggaaaaaaaaaaaaaaaaaaaaaaaaa

SEQ ID NO: 116926 - DNA, 1000 bp, Homo Sapiens
tcttccccatcatcgtcgttgtcgtatttgaaaccatggctgtatcctgggcctatggggccaggaggttccttgcagacctgacgatcctgttgggccaccccatctctcccatctttggttggctgtggccccatctgtgtccagttgtgctgctaatcatctttgtgaccatgatggttcatctttgtatgaagccgatcacctacatgtcctgggactcaagcacctcaaaagaggtgcttcgaccatacccaccgtgggcactgctcttgatgatcaccctttttgccattgtcatcctccccatccctgcatactttgtatactgccgcatacataggattcccttcaggcccaagagcggagacgggcctatgacagcctccacatccctacccctaagtcaccagctaacacccagtaaagaggttcaaaaggaagaaattctacaagttgatgaaacaaagtacccatcaacttgtaatgtgacttcctaacttcattaatttggcttcacataacatatcccttagaacagatccaatagacaactcttaatatcagcttgcaactgttgatctccctggatccagaaccacttttatttccaagaggaggggcattctttgggggtgttcatggggcctggacttgcaatcccttcctgggtcccatcttacctggtgaccaccatcattgttttccccatcctcttcctcaacacacatacatgcacaacacatatacaatactagtgatgtctaccagtcctgctacttctggggtgcctgtctcctggaatggagctggaggagcaatgctgttggtgaataaatcagtctactggaactccaaggactggatgtaagcagatctttttttcctatagatgtctcagatgttcagttttcctgtcacaaggcttccagtctgtattagttcattttcacactgctaataaagacatacctgaaactgggaacaaaaaaaaaaaaaa

SEQ ID NO: 116927 - DNA, 1000 bp, Homo Sapiens
gtagtatcagcgaaatcagtcatgtttataccttgaatataaatatcaggaatcatgcaattatttctactatgtatttagtagtatcttatatttgtataacattattacattttgcaaattagtatcacaactgctaagtagatgtttctgagtattagaaaaatcagtgttattacctgcaggatattaaaaaacatttgaaaaagagaaaaagaaaaatcagtgtttagaaatgttgatagttattgaatctttgaattgaattttaaaaatccattctagtaatcagagtatactttttttatagaacaaggtggcaggtggggagccctttacccttctggtgaagttaaaccatagaagtttacaatttgcctttcacaaacattagcagtccgggcatggtggctgaagcctgtgatcccagcatgttgggaggccgagtgggaggattgcctgagcctaggagtttaaaccagcctgggcaccatggtgagaccccatctctattatttaaaatgtttcttaaataaaaaaaacacaaacattagcaactagttggctagccataattcctcccttgtttcgattgccagttagaagcaatttttatttcactggttatttgcaagagaaggggtaaaaaaacagcatcagagtgcaacactgaagtgagcttactttaatttgtaagtgaagctgttgctgaacgtgaccactatcgttgctgaaatataaaattatactcactgattgtaatggttgaaattttcctgaataatcattagccaaagatcaactctctaatggtgctaatggcaatctagctaatgtgcaaatttaggaagtcttcagtactaagtacataattttcaaataatattttttaattgtctactttggatgttagctatgtcttgtgagtataaattccaattttaagcactattttgatgcaaaaaaatgaataaaaaatttaatttaaaaaaaaaaaaaa

SEQ ID NO: 116928 - DNA, 1000 bp, Homo Sapiens
aaagattatcctggctcttttctatctctgtgggcctaattgaaatatgtactcttattttagacacgcctctgttaaaacagaccaggttttcctggtctcagacctatgatgacttgtccctttgatgtcactactgtgaattgaatataattagtaaaaatagacgatgaataaataacactttatagtaagaaaacaatatattttggccatctaaaaatgagaattataattatatgaattataatttaaactgtttaattttgtttaatgtgtatattgaatcttccaaattgaagccattattctcaattaagtactacaactatgacaatgcttgacctacatttctaaaataaaaattcacattttttgataaataaactacagttttaccagaaattactatctaaatgtgtattagcagtattttttaaggtgaaattgccttggtatctaatgaatgtgtagacagggagataaaatgaaggattgccagactagttagaatagaatttaggattaggttagttttgaaaaatgatgttgtaatatatgggttctaacacatcctaccataaaaactggaggagatatgtgtaacctggttaatttgggatggtggacattttgggctaatactgacaaaatacatcttaggactagtatacatgtgacacggattgctaggaggaatgaaaaactaaactgtatagtttatattccgtaaaccattttataatgttcaaagattaggttttgttattgatagtattaaatacacagtttctcttaacagtgatgggtgaaaacattttaccggattatggaatgtttaccagaacatgttttgattcttgaatgtacataataatgccatctaacttatttacattcttgtttacatgtgggagcttttgttttcaaaaattattttgttaaaaaatctcaataaagatttattattgttgttcttttcttaaaaaaaaaaaaaaaa

SEQ ID NO: 116929 - DNA, 1000 bp, Homo Sapiens
ctcgaaccaacaccccggctcgggcctctgaggccagatcccaggtcacaccttctgctgctccccttgaggccctagatggtggcacaggtccagcccgtgagggcggggcagtgggtgggcaagatggggagcaggcacccccactgcccatcaaggctcccctcccatctgctagcacgtctccagcccccactactgtccctgaagccccagggccactgccctcactgcccctagagccatcactattgtctggagtggtgcaggccctgcgaggccgcctgttgcccagcctggggcccccaggaccaacccggagcccccctggaccccacacagcagtcctggccctggaagatgaggacgatgtgctactggtgccactggctgagccgggggtgtgggtagctgaggcagaggatgagccactgcttacctgaggggacctgggggctctactgaggcctctcccctgggggctctactcatagtggcacaaccttttagaggtgggtcagcctcccctccaccacttccttccctgtccctggatttcagggacttggtgggcctcccgttgaccctatgtagctgctataaagttaagtgtccctcaggcagggagagggctcacagagtctcctctgtacgtggccatggccagacaccccagtcccttcaccaccacctgctccccacgccaccaccatttgggtggctgtttttaaaaagtaaagttcttagaggatcataggtctggacactccatccttgccaaacctctacccaaaagtggccttaagcaccggaatgccaattaactagagaccctccagcccccaaggggaggatttgggcagaacctgaggttttgccatccacaatccctcctacagggcctggctcacaaaaagagtgcaacaaatgcttctattccatagctacggcattgctcagtaagttgaggtcaaaaataaaggaatcatacatctcaaaa

SEQ ID NO: 116930 - DNA, 1000 bp, Homo Sapiens
ttctatgctccatacacaggagtctgtgtgaagcagcacaagcggttgacccaggccatccagaaagccagggatcatggtctcctcatttaccacatcccccaggttgaaccacgggaccttgacttcagtacctctcatggggctgtgagtgctactccgccagcccccaccctggtctcaggtgacccctggtacccatggtacaactggaaacagccaccggagagagaactgtctcgccttcgccggctttaccagggtcatctccaagaagagagtggccccccacctgagtcaatgcccaagatgccccctagaacaccagcggaagcctcctccactgggcagacaggccctcagagtgctctgtaggagctgtagactgggaagagaggccaggcgtggtggctcactcctgtaatcccagcactttgggaagccaaggtgggctgatcacttgatcccaggagtttgagaccagcctgggcaccatggtgaaacctcgtctttaccaaaaaatacaaaaattagctgggtgtggtggtgcacacctgtagtctcaactattggggaggctaaggtaggatcacttgatcccaggaggcggaggttgcagtgagttgcagtcacacccctgcactccagcctgggtgacagctagaccctgtctcaaaaaaaaaaaaaaagactgggaagagagctagagggactaggagataatgtgtatgtaggtttatgtgatgggatatcaccctgaagagttgtgtcttttgtggccagtgacaaatccaggaaatgaatgttgctgatagggataaatcttgaggctgagggcgggtggtacagatgtgtatgggaaaccccaacccctatatattgtaaatagatgggctgggctaaacattgttgccgtttcatacttctaccaactcagcttttacacaataaagctctactgtctctgggtaaaaaaaaaaaaaaaaaaaaaaaaaaaaaa

SEQ ID NO: 116931 - DNA, 1000 bp, Homo Sapiens
gaggcttcgggactccctgggccgaactgtggacctggggctgacaggcaaccatggagttgtgcaccctagtcttgcggacagtgccaacaagtttgaggagaacacctactgcttcggccggaccgtggagacactgctgctccgctttggcaagaccatcatggaggagcagctggtactgaagcgggtggccaacatcctcatcaacctgtatggcatgacggccgtgctgtcgcgggccagccgctccatccgcattgggctccgcaaccacgaccacgaggttctcttggccaacaccttctgcgtggaagcttacttgcagaatctcttcagcctctctcagctggacaagtatgctccagaaaacctagatgagcagattaagaaagtgtcccagcagatccttgagaagcgagcctatatctgtgcccaccctctggacaggacatgctgaggcaggggacagtgtcccctgctaccgcccgcccctacccatggcccgttgctggatgactgttactcttttttcagaaggtgttgggattatcacaggttaagccttttgttccccgtctgcacctgaagggttgtcgcctggcctgggagagcctcttccaggttttgacctgcaggcagtgctctctaacaggaccatcacagcttctgaactgagccggagagagagaatggaattgctgacccctggaactggcgggtattctggtcattgaggagacaccatagtggaaactggggcttatgctgctgcctccagggtgtgaggtgggtggggacctgtgtcaggtgtggatagccatttctgctcaaccacacattctctaagaaacagcttgaaagctctgtctgggtcattcatttaaactagaagcagaggcacttaaaacatgtaccaggaaccatttaacaaagaatataaaatgtcacaatctgtgtactgttaaaaaaaaaaaaaaaaaaaaaaaaaaaaaaaaaa

SEQ ID NO: 116932 - DNA, 1000 bp, Homo Sapiens
gccatgcagaatgttctgctgcagatggggctgcacgtgctggcggtgaacggcatgctgattcgtgaggcccggagctacatcttgcgctgccatggctgtttcaagacaacgtctgacatgagccgagtgttctgctcacactgtgggaacaagaccctgaagaaagtgtccgtgaccgtcagcgacgacggcaccctgcacatgcacttctcccgcaaccccaaggtgctgaacccccgcggcctccggtactcgcttcccactcccaaagggggcaaatacgccatcaacccccatctcaccgaggatcagcgcttccctcagctgcgactctcccaaaaggccaggcagaaaaccaacgtgttcgcccctgactacatcgccggggtgtcaccctttgtcgagaatgacatctccagccgctcagctaccctgcaggtccgggacagcaccttgggagctgggcggagacgcttaaatcccaacgcttccagaaagaagtttgtgaagaaaaggtgaagagcgagttcccgcaggcaaattggatgggcgtctggccgccgtggagttccggtgacccatttccccagccgtgtcgtctccaggaccacccgatggaaataacaggcgggcttcacggtgcggctctgtccgcccatgccccgctgggtctgcagggaactggactgtcccatggcctgtgagcaccggagcgcctggctgcctgccaaggaagtgcaattgcataaaaacagaaagaacaacgccctggagccaatcttcaagaaaggaatttccaaaggataatatttttctaataaatgcggctgcaacctcctgtgcatttaattaaataggccaaatttttgctgcttaggtcatctcaaggctgatacttgagctgtgtgcccagagatcatgcatttagatttatatttttgccagaaaatacaaggttataataaaactaagaactaccaaaaaaaaaaaaaaaaaa

SEQ ID NO: 116933 - DNA, 1000 bp, Homo Sapiens
ggcgggagttggggcgtggggggcggcggcggtggggcggacagccggggtgcgcacttgggcccccctggccatggcggcgaaggtggacctgagcacctccaccgactggaaggaggcgaaatcctttctgaagggcctgagtgacaagcagcgggaggaacattacttctgcaaggactttgtcaggctgaagaagatcccgacatggaaggagatggcgaaaggggtggctgtgaaggtggaggagcccaggtataaaaaggacaagcagctcaatgagaaaatctccctgctccgcagcgacatcaccaagctggaggtggacgccatcgtcaacgccgccaacagctccctgctcggaggcggtggcgtggacggctgcattcatcgggccgccggccccctgcttaccgacgagtgccggaccctgcagagctgtaagactggcaaggccaagatcaccggcggctatcggctcccggccaagtacgtcatccacacagtggggcccatcgcctacggggagcccagcgccagccaggctgccgagctccgcagctgctacctgagcagtctggacctgctgctggagcaccggctccgctcggtggcgttcccctgcatctccaccggcgtgtttggctacccctgtgaggcggccgccgagatcgtgctggccacgctgcgagagtggctggagcagcacaaggacaaggtggaccggctgatcatctgcgtgttcctcgagaaggacgaggacatctaccggagccggctcccccactacttccccgtggcctgaggctcccgcagcccaccctgaccgggactgacccgccttcgggaccccgctcccagctctgagaggtcgccaaagcctgcagcctggcctgggcctggccaccccttctttccctccgcgccccgcccccgaggagcctaataaagatctcgttgtggcaaaaaaaaaaaaaaaaaaaaaaaaaaaaaaaaaaaa

SEQ ID NO: 116934 - DNA, 1000 bp, Homo Sapiens
tcctaagctctcaaaatagcatattccctagagctcaagaaagctggtccaggaggttgaaaaagctattttgttgttaaattattttctggcccttcttaatatttaaaaatgtatttccccttgtggctttcaaccacctgctcaaaaaaagagacttgttacatgaaagttttcattaaagagctgaaaacaagaatttagagagccattcctagaaaatgtcctactgccctgcatttgacaaacaagcatcctttactaacaagagcaggaattcagaggcacaagaaaaagcattggcatgagccaaagagtctgtcttaatgttacttttgaaaatctgctgagcggccaccatatgcaggctgagagctgggcacaggcgaagccattggaagcacttcaggaacaagcacacagctgtgggacttgaacatgcaagtgttcaggttgtgtcaagaagcttttctttccttctatgatggaatctgttcttttctatcctacttttttctctcttcctctcctcaccacattataccctgctcttacgcagtaaacgttttaatggcccgtttatgtctcatgcctccaaacaacactgaatttgaaaccccccattttttcttttcaccaccctgttgagcaattttcccaaaaaaagggcagcaattattaaattgaattcaagtttctagattttactaagttttattttgtcaggttttttaaattttttcagtgagcgtggtgactgcagaggttagtgctgtgaaaagctgggctaaatattctttctgtaaagtcaaacaggattccatcccctgtgaaataacacaaaatttcactctctaaaagcaacagcatgtaaactagaatgaaagaaggaaattatgtacgtatgcctaatattctttgtgaatgtctttcatttaactaaaattatattagaaaccagattgataaataaaaaattcaaagtagttttaattatcct

SEQ ID NO: 116935 - DNA, 1000 bp, Homo Sapiens
tgccatggactgtgggacctgcctcaccgcctccatggatggcaagatcaagctgaccaccctcctggcccataaagcctgatgacttgccccaagggccacccgaggaagcagtattatctgcggtggggggaggagatataggacaggaaaaccacgtgctccactccagctccctgccagtgcagtgactctgcagggaaagactggcaaggaggctcaggtgcttccatctgtggtgactggaatgggacccacgtggagtaggtgacatatgcttcccagagactggtattgtggctgtgccaggagtacatgtgagactatgggaggaaagctccggaagaaggagaaacattgcagtggctactgtgttggcccagtagaaattgacagtattttgtatatatgtgcccatttatctttttcttttttaaaaaaagagaatactcttgtggtcccctgatgtctctttctaggatgtgtgtcactttgcttcagtgacagccctcccacccagcctggctctgctggccccgaactgaacctctccaggctctcctgttgctttgccatggagccaggtcagctctctgtctgttctgctgggtaacaaggtttggcagttcctgtttctctgggcttaagtcaaggccacagaattctttttcttccctgaaagctggcagcttttgttacagaagattctcaggatgaaggcaggggctgaggcctctgctactggctgcccctttccatccagtggctgctgtttcccaagacaggctaagcgtttcttatctgaaatgcttgggacaggagtgttacagattttggattttttcagactttggaatatttgcatatatacataatgaggtatcttggtaggtctcatgtctaaacatgaaattcattcatgttttatatataccttatacatgtagcctgaaggtaactctatacagtattttaaataattttgtacatgaaacaaagt

SEQ ID NO: 116936 - DNA, 1000 bp, Homo Sapiens
attggtagatgtcctcagctatggcgtggttttgcaggtcactgttccacccacctgggcacagcatatacgctttttctcttccccataatcccgtaggggctgcgacttctgaagcacaagaggcagaggcgaacagctccaggtgcccctctggagctaccctacctcatctcccaagggagcggccacagcccagagtggggtctttcattttgtgatcttttcccttgacattcagcaaaagccctgacagtggtagaataaaggcaggatgggtgagtgcagagtgattctgcttttgttgggtttcagggaaacccataggcagattctgaacctggtggttgattctacatgtgggaattgtggctttgaagacctctggacatgagaacatatttccaagacagaggattctatggggacgggtcaccattaaatggtgtgcaagcataattctgttcaaaaatgaaggcatgtttagaggtgtgtcacagttaaaaaccaacctgaactttgcagttagattttaaaagatggtcagttagagtagaaatagcttagaatattccattgagtctaagatacagttagaaatcaacatctttgaaattagggtgtgtcttttaatcagttgatgtcagagtttaacgggcagcatttttttctttcttgggattacaaaaaatgatggtgcattctataattggcagcatcttagatctgaggaagtatgatacttgtttgacggaatggttgacggcagaattttgttaaaaagctatatcttcactgtattttaacacattatctaatttaagaaattgttaagatcccccacctggcagaggacccagtacaaaataggcactcaatagatgttacaccaactttggaagggcaaacatatttcttaatgagaggcagtccttcatgttttgcaataaaatgacttttaaaaaaaaaaaaaaaaaaaaaaaaaaaaaaaaaaaaaaaa

SEQ ID NO: 116937 - DNA, 1000 bp, Homo Sapiens
aaaaagcccaagacagcagaagcagacacctccagtgaactagcaaagaaaagcaaagaagtattcagaaaagagatgtcccagttcatcgtccagtgcctgaacccttaccggaaacctgactgcaaagtgggaagaattaccacaactgaagactttaaacatctggctcgcaagctgactcacggtgttatgaataaggagctgaagtactgtaagaatcctgaggacctggagtgcaatgagaatgtgaaacacaaaaccaaggagtacattaagaagtacatgcagaagtttggggctgtttacaaacccaaagaggacactgaattagagtgactgttgggccagggtgggaggatgggtggtcaggtaagacagactctagggagaggaaatcctgtgggcctttctgtcccacccctgtcagcactgtgctactgatgatacatcaccctggggaattcaaccctgcagatgtcaactgaaggccacaaaaatgaactccatctacaagtgattacctagttgtgagctgttggcatgtggttagaagccatcagaggtgcaagggcttagaaaagaccctggccagacctgactccactcttaaacctgggtcttctccttggcggtgctgtcagcgcacagacccatgcgcatccccacccacaaccctttaccctgatgatctgtattatattttaatgtatatgtgaatatattgaaaataatttgttttttcctggtttttgtttggttttcgttttgcttttagcctctacatgctaggatcacaggaagactttgtaaggacagtttaagttctcctgcaaggtttaatttgttatcatgtaaatattccaaagcaggctgccttgtggttttggccagccttgtgctatgttgataagattgatttactgcttaaaatcactttactttatccaatttttactgaactttttatgtaaaaaaataaaatcaattaaagaacttg

SEQ ID NO: 116938 - DNA, 890 bp, Homo Sapiens
ctggccacaccctccgcctggacgcagcagccaccgccgcgtccctctctccacgaggctgccggcttaggacccccagctccgacatgtcgccctctggtcgcctgtgtcttctcaccatcgttggcctgattctccccaccagaggacagacgttgaaagataccacgtccagttcttcagcagactcaactatcatggacattcaggtcccgacacgagccccagatgcagtctacacagaactccagcccacctctccaaccccaacctggcctgctgatgaaacaccacaaccccagacccagacccagcaactggaaggaacggatgggcctctagtgacagatccagagacacacaagagcaccaaagcagctcatcccactgatgacaccacgacgctctctgagagaccatccccaagcacagacgtccagacagacccccagaccctcaagccatctggttttcatgaggatgaccccttcttctatgatgaacacaccctccggaaacgggggctgttggtcgcagctgtgctgttcatcacaggcatcatcatcctcaccagtggcaagtgcaggcagctgtcccggttatgccggaatcgttgcaggtgagtccatcagaaacaggagctgacaacctgctgggcacccgaagaccaagccccctgccagctcaccgtgcccagcctcctgcatcccctcgaagagcctggccagagagggaagacacagatgatgaagctggagccagggctgccggtccgagtctcctacctcccccaaccctgcccgcccctgaaggctacctggcgccttgggggctgtccctcaagttatctcctctgctaagacaaaaagtaaagcactgtggtctttgcc

SEQ ID NO: 116939 - DNA, 725 bp, Homo Sapiens
gctccgggtgtcccgagagttgtcctgcgccggtgttcccacgtgcggcctgaacctgagcgcataatgttatgaggagatgggagcactagtgattcgcggtatcaggaatttcaacctagagaaccgagcggaacgggaaatcagcaagatgaagccctctgtcgctcccagacacccctctaccaacagcctcctgcgagagcagattagtctctatccagaagttaaaggagagattgctcgtaaagatgaaaagctgctgtcgtttctaaaagatgtgtatgttgattccaaagatcctgtgtcttccttgcaggtaaaagctgctgaaacatgtcaagagccgaaggaattcagattgccgaaagaccatcattttgatatgataaatattaagagcattcccaaaggcaaaatttccattgtagaagcattgacacttctcaataatcataagcttttcccagaaacctggactgctgagaaaataatgcaagaataccagttagaacagaaagatgtgaattctcttcttaaatattttgttacttttgaagtcgaaatcttccctcctgaagacaagaaagcaatacgatcaaaatgaagaaaatcacagaaatttcctatgtgtactcctcatccctcctgctgtatattttctcattttttgcgtaataaattatgttaattaccaaaaaaaaaaaaaaaaaaaaaaaaaaaaa

SEQ ID NO: 116940 - DNA, 928 bp, Homo Sapiens
gcgcgcagcgctggtaccccgttggtccgcgcgttgctgcgttgtgaggggtgtcagctcagtgcatcccaggcagctcttagtgtggagcagtgaactgtgtgtggttccttctacttggggatcatgcagagagcttcacgtctgaagagagagctgcacatgttagccacagagccacccccaggcatcacatgttggcaagataaagaccaaatggatgacctgcgagctcaaatattaggtggagccaacacaccttatgagaaaggtgtttttaagctagaagttatcattcctgagaggtacccatttgaacctcctcagatccgatttctcactccaatttatcatccaaacattgattctgctggaaggatttgtctggatgttctcaaattgccaccaaaaggtgcttggagaccatccctcaacatcgcaactgtgttgacctctattcagctgctcatgtcagaacccaaccctgatgacccgctcatggctgacatatcctcagaatttaaatataataagccagccttcctcaagaatgccagacagtggacagagaagcatgcaagacagaaacaaaaggctgatgaggaagagatgcttgataatctaccagaggctggtgactccagagtacacaactcaacacagaaaaggaaggccagtcagctagtaggcatagaaaagaaatttcatcctgatgtttaggggacttgtcctggttcatcttagttaatgtgttctttgccaaggtgatctaagttgcctaccttgaatttttttttaaatatatttgatgacataatttttgtgtagtttatttatcttgtacatatgtattttgaaatcttttaaacctgaaaaataaatagtcatttaatgttgaaaaaaaaaaaaaaaaaaaaaaaaaaaaaaa

SEQ ID NO: 116941 - DNA, 1000 bp, Homo Sapiens
ctatgggctccagtttacctcttcccgcaagttcctcagcatctctcctattgtgctctatctcctggccagcttctataccaagtatgatgctgcgcacttcctcatcaacacagcctcattgctaagtgtactgctgccgaagttgccccagttccatggggttcgtgtctttggcatcaacaaatactgagggatgggttttgggacagctccatgggcatggggaaggcactgaaacagaggactataaaacatccttctcttattctccatactgtcttctacacctttaaagcctgagaactatacaacctttcccagactcccaagaagagaagagattggcaaatggggctcctgggcccagtcctgctagtggcaagtttctttgaatcaggaaggcaggtgaggtaagggccaaatcactctcctccatagcaggaagccatttgggcagcttctttggtgattacatctttccatatcttttacacttaccaccttccagctctgttttgctgtgtatttttcttacaataatttttttcagctatagctgcagtttaatcaggatgggtagagagctgtcctcataaggctgggggtgggaagatggaatactgacctaatgtataaaacttaaaacaattctccaatcccctctcctttggtccagtaggaggtgcccttcactctaagcttaacacttagtagggaagagattctcaaatgagaaaaagggctccggctatatgggcaacaaagagggaagatacaggttgccagttatacatttatagaaagataatcccctggctttaaatagtcatgtacatacaaatatgaacaaacttaaaaaaaaaatacaaacccttggatcacatgggggcttctgggaacccccgtattcttccccctcacccaagggcagtgggcatgaatctactttttaaaaatgattaattttgacaaaaaaaaaaaaaaaaaaaaaaaaaaa

SEQ ID NO: 116942 - DNA, 652 bp, Homo Sapiens
ggacggaaggagcggcggcgacggaggaggaggatggaggcggtggtgttcgtcttctctctcctcgattgttgcgcgctcatcttcctctcggtctacttcataattacattgtctgatttagaatgtgattacattaatgctagatcatgttgctcaaaattaaacaagtgggtaattccagaattgattggccataccattgtcactgtattactgctcatgtcattgcactggttcatcttccttctcaacttacctgttgccacttggaatatatatcgatacattatggtgccgagtggtaacatgggagtgtttgatccaacagaaatacacaatcgagggcagctgaagtcacacatgaaagaagccatgatcaagcttggtttccacttgctctgcttcttcatgtatctttatagtatgatcttagctttgataaatgactgaagctggagaagccgtggttgaagtcagcctacactacagtgcacagttgaggagccagagacttcttaaatcatccttagaaccgtgaccatagcagtatatattttcctcttggaacaaaaaactatttttgctgtatttttaccatataaagtatttaaaaaacaggaaaaaaaaaaaaaaaaaaaaaaaaaaaaaa

SEQ ID NO: 116943 - DNA, 849 bp, Homo Sapiens
gacgacttcggtctgcgccggaagtgcatgagctgccgatgtggtgcttagtgattgcggtttcggtcgctctcccgtgtttcccgggctgggtatttgcctcgcaccatggcgcccaagggcaaagtgggcacgagagggaagaagcagatatttgaagagaacagagagactctgaagttctacctgcggatcatactgggggccaatgccatttactgccttgtgacgttggtcttcttttactcatctgcctcattttgggcctggttggccctgggctttagtctggcagtgtatggggccagctaccactctatgagctcgatggcacgagcagcgttctctgaggatggggccctgatggatgggtggcacggacctcaacatggacaggcatggcagagtgatgtcccccacgcagcccagcaccttaaggatgtgatcctactgacagccatcgtgcagtgctcagctgcttctctctctatgtctggtccttctggcttctggctccaggccgggccctttacctcctgtgggtgaatgtgctgggcccctggttcactgcagacagtggcaccccagcaccagagcacaatgagaaacggcagcgccgacaggagcggcggcagatgaagcggttatagccattgacattgtggccacaggccactggccctgggtggctctgtcagggtgcacagcccctcatgcctggagcaatgagggtctagtccaggggccaaaagcagtctgaggtattgggtatacttatactctatagggtcgttgaataaatggcttagaatgtgaaaaaaaaaaaaaaaaaaaaaaaaaaaaaaaaaa

SEQ ID NO: 116944 - DNA, 1000 bp, Homo Sapiens
cagatgggcctgtgtgcacccaacgtgatgctatgcatgtctgaccgacgatccctcgaccagaatcagattcaggagctcagtttctttttcacttgggtctctggattcctgtcatagggaaggtatatcaggaggggaagaggcctttctagaattttctttgagcaggtttacaatttagcttacatttttcgactgtgaacgtgaataggctgctttttgctttcttctttccagaccccacagtagagcacttttcacttatttgggggaggcttcaggggactgttctcaccttaactcagccagaaagatgccctagttgtgatcaaaggtaactcgaggtggagggtagccctggggcccctcgacatcaccgtcattgatggagcctgaaccgtgtgctcctcggcagatgctgttgttgttacttccctccaagaggctggaaaagggctcagagctgctgagcaggaaccggagggtgacccatttcaggaggtgccggtaccagcctgactaggtacaggcaagcttgtgtgggcccaacaggcccttggtagagctggtgccagatgtgggctcagatcctgggcatgatgggccgagccacctcggatcccactgattggccagccgagcgagaaccaggctgctgcatggcactgaccgccgcttccagcttcctctgagccgcagggcctgctacgcgggcaagcgtgctgcctctcttctgtgtcgttttgttgccaaggcagaatgaaaagtccttaaccgtggactcttcctttatcccctcctttaccccacatatgcaatgacttttaattttcacttttgtagtttaatcctttgtattacaacatgaaatatagttgcatatatggacaccgacttgggaggacaggtcctgaatgtcctttctccagtgtaacatgttttactcacaaataaaattctttcagcaaaaaaaaaaaaaaaaaaaaaaaaaaaaaaa

SEQ ID NO: 116945 - DNA, 1000 bp, Homo Sapiens
tcccgtcctatgacagtgtaactaaacctgaaaaggagaaacagcagcgggcagaggaaggaagaagggaaagagccaaaagacaaaaagaggtcagagaatccaagtgttagaggagaacaaaaattcagtattatacagatctaaaactcgcaagtgaaagattgtttacaaacttcctgaatattatcaatgcagaacagctgtggagactctaacctgaagatctataccaaacgtcgtctgcttaccacgtaacacagctgcatcttgagcagtgacctgccaagggcaaaggaccccgctccctagacttacagattttctaatgcttgggcaggtggttactgcatgttccacatcagtcaatgcaacttaggacaaaactaaccagatacagaaacagaagagaggctgccgggaccagcatatttccgttgcagccaaatggattttattttttcattttattgattctcagaagcagaaagcatcactttaaaagttcgtttgttcatgcaaactatatttgcattcttacattagttaagctaagcagcaaaaagaaaacacacacacacactcacatttagcccatgtcatttaattgtcagtttctttgacataaagcgcatcttctccacatgggcttcacgtggtttggagatgggtgggggaaaacaatcaggtttcttcaggctgaggaggacttgctcaggccgattccaaacattgtgctcgttcaatgcgtagaaatgatttgcatgatggcatgccgtgatcagaagtcatgcatgagatccatacaccacaggacactactaatctagtcccttgcactgggtcagcctttggacaggacccagccctgcaccgttcactgtatttggagaaaatggtaagagttccataccgggctacaattctttgagttcttaaaagtccttcatacaccttctgggtagggaaacaaccaactaattgactaacaccaccaacg

SEQ ID NO: 116946 - DNA, 1000 bp, Homo Sapiens
ggcggcctatcgggactctgggagcggctggcgccgggcgaaaaagctgccttcgagcggctgctgagccgcggtgaggccgggcggctgctgcctccatggcggccgtggtggtggaaccgcggagccggaccgcagcttctggaggagctggataatgccccgggtagtgacgccgcggagctggagctcgcccctgcgaggaccccgccggattctgtgaaagatgcctccgccgcggagcccgcggccgccgagcgggttcttggagatgtcccgggggcctgcacgcccgtcgtacccacccgcatccccgcgatagtcagcctgagccgcggcccagtctcgccgctcgtgcgcttccagctgcccaatgtgctgttcgcctacgcgcatactctcgccctgtatcacggcggtgacgacgcgctgctctctgacttctgtgccacactgctcggcgtttccggagccctgggtgcccagcaagtcttcgcctctgcggaagaagccctgcaggcggcagcccacgtgctggaagcaggcgagcacccgccggggcccctgggcacacgaggggctatgcacgaggtcgcccgcatcctgctgggcgagggcccgaccaaccagaaaggctacacgctggcagcactgggggacctggcacagaccctgggccgtgcccggaaacaggccgtggctagagaagagcgagatcatctttaccgggcccggaaaaagtgccagttcctcctggcctggaccaacgaaaatgaggcggccctcacacccctggctctagactgcgccagggctcaccaagcccatgctgtggtagccgaggaggtggccgccctcactggggagctggagcggctttggggaggccccgtgccacctgccccaagaactctcattgaggagctccctagctgaacgggttaccctggtcattaataaagctgtgactggtcaaaaaaaaaaaaaaaaaaaaaaaaaa

SEQ ID NO: 116947 - DNA, 1000 bp, Homo Sapiens
gggtgggcaccaccctgacccacagcgtcaccccactccctctgtcttatgactcccctccccaaccccctcatctaaagacaccttcctttccactggctgtcaagcccacagggcaccagtgccacccagggccctgcacaaaggggcgcctagtaaaccttaaccaacttggttttttgcttcacccagcaattaaaagtcccaagctgaggtagtttcagtccatcacagttcatcttctaacccaagagtcagagatggggctggtcatgttcctttggtttgaataactcccttgacgaaaacagactcctctagtacttggagatcttggacgtacacctaatcccatggggcctcggcttccttaactgcaagtgagaagaggaggtctacccaggagcctcgggtctgatcaagggagaggccaggcgcagctcactgcggcctctaagaaggtgaagcaacatgggaacacatcctaagacacatcctaagacaggtcctttctccacgccatttgatgctgtatctcctgggagcacaggcatcaatggtccaagccgcataataagtctggaagagcaaaagggagttactaggatatggggtgggctgctcccagaatctgctcagctttctgcccccaccaacaccctccaaccaggccttgccttctgagagcccccgtggccaagcccaggtcacagatcttcccccgaccatgctgggaatccagaaacagggaccccatttgtcttcccatatctggtggaggtgagggggctcctcaaaagggaactgagaggctgctcttagggagggcaaaggttcgggggcagccagtgtctcccatcagtgccttttttaataaaagctctttcatctatagtttggccaccatacagtggcctcaaagcaaccatggcctacttaaaaaccaaaccaaaaataaagagtttagttgaggagaaaaaaaaaaaaaaaaaaaaaaaaa

SEQ ID NO: 116948 - DNA, 1000 bp, Homo Sapiens
ctccttcccctaagccagcactgctgctccctggagcccgggaaggaggctgcctggctggaggcccgagccgatggcgcctgtgctgaggatttgtgctgtgatttgggcaaatcattccaggtctttgggcctccacccccttgtctctagtggacatttgagatcagagagcaccacagggctggctttgtgccctaacccctgggatgcagcctgcctttccataaagtcacctaggtgaggataggcgcgggagcctcggcatgacaccatggagatcggggccctcttcccagtgggttcactccttttcacacctgctgggtccctcctcacccagcaggcctggtccacctctcattgcaagccccaagcactgagccagcaggtgccagggagccacccgccccccatcgcttctgcacacctcagactcaccccatcaccttggcagcaaagcactggctctgccgtctgacccctgatccaggcagccccctctgcagagaaaagggttggggagaagcctctgcagtcctggaagatgtggggtgctgggtgagaggcatcagcccccacaagtatgtttttgtgtcttaagatagcagtttactttgaaaaagtgaaaaaggcttccgggctgtcctctgcccagtgagatggaggacgctagagaaagtgctgagtgtcccgagagaggcccccgagccagtgcatggaggtccttcggcctggctcagctgggctgcaggatgcccactttgaggagggaggcacagggcttgggcgaggggcagaggccatcagaactgcccggcttttttggaaactgaggacccaacaactaaccacgtttacacgacttgagttttgaaccccgattaatgtctgtacgtcacctttcctagttctgaccctgagccctggggaacaggaaagcgtggctggcctcttgcactgctttgtctccaaaataaactactgaaatcaaaccgca

SEQ ID NO: 116949 - DNA, 1000 bp, Homo Sapiens
tatctctgttttctatcctcttggctcttggtggaattgaattcatcttgtgtcttattcaagtaataaatggagtgcttggaggcatatgtggcttttgctgctctcaccaacagcaatatgactgctaaaagaaccaacccaggacagagccacaatcttcctctatttcattgtaatttatatatttcacttgtattcatttgtaaaactttgtattagtgtaacatactccccacagtctacttttacaaacgcctgtaaagactggcatcttcacaggatgtcagtgtttaaatttagtaaacttcttttttgtttgtttatttgtttttgtttttttttaaggaatgaggaaacaaaccaccctctgggggtaatttacagactgagtgacagtactcagtatatctgagataaactctataatgttttggataaaaataacattccaatcactattgtatatatgtgcatgtattttttaaattaaagatgtctagttgctttttataagaccaagaaggagaaaatccgacaacctggaaagatttttgttttcactgcttgtatgatgtttcccattcatacacctataaatctctaacaagaggccctttgaactgccttgtgttctgtgagaaacaaatatttacttagagtggaaggactgattgagaatgttccaatccaaatgaatgcatcacaacttacaatgctgctcattgttgtgagtactatgagattcaaatttttctaacatatggaaagccttttgtcctccaaagatgagtactagggatcatgtgtttaaaaaaagaaaggctacgatgactgggcaagaagaaagatgggaaactgaataaagcagttgatcagcatcattggaacatggggacgagtgacggcaggaggaccacgaggaaataccctcaaaactaacttgtttacaacaaaataaagtattcactaccatgttaaaaaaaaaaaaaaaaaaaaa

SEQ ID NO: 116950 - DNA, 1000 bp, Homo Sapiens
caagttgtgcagggacagatccagacacttgccaccaatgctcaacagattacacagacagaggtccagcaaggacagcagcagttcagccagttcacagatggacagcagctctaccagatccagcaagtcaccatgcctgcgggccaggacctcgcccagcccatgttcatccagtcagccaaccagccctccgacgggcaggccccccaggtgaccggcgactgagggcctgagctggcaaggccaaggacacccaacacaatttttgccatacagccccaggcaatgggcacagccttcctccccagaggacccggccgacctcagcgcctcctgcaggctaggacactggtgcactacaccccatgcctgggggccgagattctccagcagaaagatgcaatattttttgtttcctttttttccatttttttctctaaggaatcaatatttcaatatgttgagtgtgtgtccaatgctatgaaattaaaatattaaataacatatttatggcattttcttgaagagtgtggttgaagaaatatttctccttttgtttttcttttttttttgtttgttactgccacttctttttaggagcaaatctccccaggggtgtacggtatttcttgactctgggaacagctgctacccccaagacttgccacgttgttctgccctcagatggaattaggtgaatgtgtgtagctgctttttcactcgtggtcctctccctatcccttgctctgaccccagagctctgtgtatttgcatccagaggccatggaaacattctttgcatttaagagacagatttatccctgtggagagtgggtggattcattgccacactcttttctcccagggacccaggaaactaggactttgtgtgtttgctgcccacctcccttttattttttaaatgcattaaaaactgtgctagtctcctttgcatggacttcaagctgcatgaaatgcaataaatctcattttagat

SEQ ID NO: 116951 - DNA, 1000 bp, Homo Sapiens
atgaagtaaattctgatgctggcgccttcaagaacagcctaaaggacctgcctgatgtgcaagagctcatcactcaagtgcggtcagagaagtgctccctgcaggccgcagccatccttgatgcaaacgacgctcatcaaacagagacctcctcctcccaagtcaaggacaataagcctctggttgaacggtttgagacattctgcctggacccttcccttgtcaccaagcaagccaaccttgtgcacttcccaccaggcttccagcccattccctgcaagcctttgttctttgacctggccctcaaccatgtggctttcccaccccttgaggacaagttggaacagaagaccaagagtggcctcactggatacatcaagggcatctttggattcaggagctaaccaggctcttcctcgggggcgggggagattctgactcttaatctgtattgtgagaaaatcccagcaagttccatgatattaaatccaggtctgcattggcccggggcaagagtttaacatcttcggccctgcattcctacatcttgtgtctgtacacgttcttaagcagcgtgtcaggagagcaccctgttgtcttctggtaaatgtgtgcagggtcatcctgtctcctgtacctcctgggaaaggggccgctgctgtctggtgccctgtgagctgtgattgattgcctttggtcagtaatgcgttcaggagtccacaccaggcacagatggggccttgaaacgctttgtcatgcttcttcagtaccatggatttgaaatgaactcatccttgctgtgagcatccaggagcccttgagaagtttatctatgactatgaaactggcaacgtcaccccagaattacggtcagccttattccccttcacctcccagtgaacgctaagaagtttcagacaagcagagagctctatttttagaagaaatatgttacactcagaaatgatgaaaccaaatcttatattaaaaggcaaagatg

SEQ ID NO: 116952 - DNA, 1000 bp, Homo Sapiens
tcccctttgaaccaccctttcctgtctgaattctactttgcctcctttctcttcctcctctttgcatggtttgtgtgtatagacagtggaacctgaggatgggatctgctcagcctatcttcggggcaattgctgagcttcaggatgggctattaatgtgggataagcccaggtgcaaggggaggagggcaggctgggaacagagcggagaatgcccatggccctttattccttcttccctcggtccacgaacaggaagaggctgaggccatgctgggcagggtctggatgcccactttccatgcagcagcatttcattgctcaaaaccatccttcctttcctttcgcccttgtttcccacattcccttcgtcctgcccaagggcgggactgaagagctggaagaaagcagtcagtaccctcccaacggcccccctcgaaggtctccactctcctctgggctcctccttgcctaatgcagggggtcaccgctggagaagaaccaccactgtcctcgatgtgtcccaagcctggagcgaatccgtcctcttggctctcccagccctatcacaggaatcattcctgggtttctgtccctctgaggctcaccaggtgtagttggccttgttctttgggggtattagcccttctactttctttctcacccaccctgtaccctcttctgtgtgtctctgctatccccctttcctcccaccacccatgtgcatgagcaaatgtgcaacaaaaccctgggactttgcagtcaaatgaagctgagcttcccacatcccgttcttcggtttgccatgagacgatgtggggtttccactgtgtgtctgtcatcacctctttgtctttttttcctaaccctgatctcatacttgtatagagtaataacaacagttgtacttccaccaaaggcatgtggcatatttaccaatgtcatgtattctgaacaaaggcaaaaaatacaaattcctaccattaaaaaaaaaaaaaaa

SEQ ID NO: 116953 - DNA, 1000 bp, Homo Sapiens
cacattttcatttgcacgacattactcgcaggtggtggggagcctgggcttttggggaaccaggctgctctggtccccagcattgcctcctcctagcccctctagtccagtttgcctcccttaccctcattttccaaacctcttgtaccctcctctccctcccccagtggtatgtaagtgtcttgaagttcagtatgttatgatggaccaataattctgcccttcgggtttctccctacattcctgctccccagttttcatgtggggtactcaactgacattcccatggggtttccctcccatctgcctgatccacctcctcctcccaccacaagatcaattgttggccacaattgatctcttgtagaggggtggctaccagtgtgtgtgtgggggtcatcactgccttggggaggagtggggcagggcagagaatccccccaattcctgcctgaaatctctggcctcacccctgctgggggttggactgaaaaccctcctccccaatttggggggtgttgccccatcactgcccagctcctctgactgccccccctgaatttagggtgggggtactagtcactgccaatgtgtgtatgggacttgctggaaaacggggatgcttgcccctctccaggactattgagcccagagagagctgtcctctcattgggtgaactgattgaggaagggtctattgtctttttaaatggcacaattttaagggtttgagggtacagtcccttaacctgccacgggagggggcccccaaactttcttcccccccacacttctggttttctgtgtggagggggagcagggatatctaagctgtggtgtgaaagggtaggagagatgctggaggtgggggtgctgtgttctagaccccccatattatcccagtgtcccctgcccccctcttcccccaccccatgcccccaattctgtggcgcatccagattgtgaaaatgtacaataaatgtgtaatgagtaaccaggt

SEQ ID NO: 116954 - DNA, 989 bp, Homo Sapiens
gggattcccacccacccacagcccgccatggcgtctcagctccagaaccgactccgctccgcactggccttggtcacaggtgcggggagcggcatcggccgagcggtcagtgtacgcctggccggagagggggccaccgtagctgcctgcgacctggaccgggcagcggcacaggagacggtgcggctgctgggcgggccagggagcaaggaggggccgccccgagggaaccatgctgccttccaggctgacgtgtctgaggccagggccgccaggtgcctgctggaacaagtgcaggcctgcttttctcgcccaccatctgtcgttgtgtcctgtgcgggcatcacccaggatgagtttctgctgcacatgtctgaggatgactgggacaaagtcatagctgtcaacctcaagggcaccttcctagtcactcaggctgcagcacaagccctggtgtccaatggttgtcgtggttccatcatcaacatcagtagcatcgtaggaaaggtggggaacgtggggcagacaaactatgcagcatccaaggctggagtgattgggctgacccagaccgcagcccgggagcttggacgacatgggatccgctgtaactctgtcctcccagggttcattgcaacacccatgacacagaaagtgccacagaaagtggtggacaagattactgaaatgatcccgatgggacacttgggggaccctgaggatgtggcagatgtggtcgcattcttggcatctgaagatagtggatacatcacagggacctcagtggaagtcactggaggtcttttcatgtaactgcctcaaggaccctggactctgctcacccccccaccactctgcctggcctcctgctgatgaggactctaagttcccaggatacaaaaggggtggcagtgtatggttcaggaatgctgaatatgggaagcaggggtgcttgtgaccctaataaattccaagtcctcttccctgcc

SEQ ID NO: 116955 - DNA, 1000 bp, Homo Sapiens
gggactgggcgtaggcctttgtcctcatccccagcactggcctccctgtggaagatgaacatatcccagccacctgtgtacaggggctcactttgtgtgctccttgttgcctgagaagaaaccttggggtgccagggtgggggcagaagcatgggctgggttccggttcatcctcctccaccctgccgtgtgtgtgggcacaagaggacatctaaccacctgctccttggaggaggcccccaggggtggtagaggctggaaggaagccacatcaggaggacgccactccggcccttcacccttgccaagtgagctgctcacagtgtggtcagggctgcgcgtgctggaggccctcctgcctgggccttgtggggcaaatattgggtccccaggctggaaagatggacagaggcccaatgggtgaaggctttgaagagcacacagaagcccctggccccccacgagagctggagagccatgtatatggcttcaaagccacctacggcagggacacactcgtgagcatgtgtggcctgcagttcaggtgatacatttaccagtgttcttgtttgtgtggtgccaggaaattgattttggaaaaagtgaaataacattaaaggtgaatgtgaggcttctacttttatccaaaaggagctatattagctaggctgtttctgatatccaatcattggtttaacaataaaggcaatttgtttaatcagttaacggaaatttcttggcttatgaaagtgaaaagtccagtggtattggcattggcagcaggtgagcaatttcacccagtgtcttctgcctccctctgcgttggtatctgctacatcccaggccaccacctccgaggatgaaaagatggctgcctgcagcttccacggaatccctccctcactgccagagcagcatcttctctgtgtaccacctctgctgtctcagatgcccccagcaaataaacactcttctcgttggtcagaaaaaaaaaaaaaaa

SEQ ID NO: 116956 - DNA, 1000 bp, Homo Sapiens
catggctgctgagtcccctgtggcagtcaatgcactgtttaccaaatgcaggtttctgttctccctccccagcaagacctgctgaacccagatctctggaatggggccctaggaatttgcatttcaacctgcttcccaggtggccctgatgcaccccagtattagagtttattgctaaaaggaacatgccctgtcactcctggtatcctgggagtcatgtttctcttctctctcagttctacttggagcaagagctttcctgggctgcaaatgagaaaacaattcctaggaacccacagcagtactgagcatgctgggagcttgggacttggagatgaatgagccaccgttgctgctccaagtaggactacttggagtgtagctgaggccttggacgcagtatgaccaggggcagctctgccagggctgttggccaatcagtcattttcatttcttgttggaggccaggtcctctgctgaactcatttcctagctagtgttaccctaattctgatgaagatcaatggggctataattcttgtttttgttcctctttgcagcattaacagcagcaaagttgtaccccggtttgaaaggtttggcttgggcgtcctggagtccagtaatccaaagatgtagccagccatatggtttttcgctgctgatctctttctttttaaaatgtgtttctgaaacatcccaacaaccaccacgacaaaaaaacactgcctgcccagcgctgcaaaccaggagcacacgtcctagattcagactgttggccataaaccccactcgggagatggagctgcacctgctatttcttaaaatgacaccaccaacaaccaaacctgtcatgacagacagcaaatgtttacacgtatatttctcctgagtgaacctgatgttttacaataggtaataataaaaacagtctgtgcaaaaaaaaaaaaaaaaaaaaaaaaaaaaaaaaaaaaaaaaaaaaaaaaaaaaaaaaaaaaaa

SEQ ID NO: 116957 - DNA, 1000 bp, Homo Sapiens
tcactccaatgaggtgatcatgaccattggcttctcccgaacagtagaggccttcctcaaagaggctgcccgaaagaggaaattccatgtcattgtagcagagtgtgctcctttctgccagggtcatgaaatggctgtgaatttgtccaaagcaggtattgagacaactgtcatgactgatgctgccatttttgccgttatgtcaagagtcaacaaggtgatcattggcacgaagaccatcctggccaatggggccctgagagctgtgacaggaactcacactctggcactggcagcaaaacaccattccaccccactcatcgtctgtgcacctatgttcaaactttctccacagttccccaatgaagaagactcatttcataagtttgtggctcctgaagaagtcctgccattcacagaaggggacattctggagaaggtcagcgtgcattgccctgtgtttgactacgttcccccagagctcattaccctctttatctccaacattggtgggaatgcaccttcctacatctaccgcctgatgagtgaactctaccatcctgatgatcatgttttatgaccgaccacacgtgtcctaagcagattgcttaggcagatacagaatgaagaggagacttgagtgttgctgctgaagcacatccttgcaatgtgggagtgcacaggagtccacctaaaaaaaaaatccttgatactgttgcctgcctttttagtcaccccgtaacaagggcacacatccagcactgtgtcttgcctttcagatcttaacagagcagcagggcttaacttgttgattttggagcctcttagtgacctggttgcgtctgtgtcaggaacttaaactttctggttcagtagtgtgttaaacataacactgaataccttactgggatacagatttttgctcagaaatggctatgacactttttctaggctctaccaataaaagccacttgaaggttcaaaaaaaaaaaaaaaaaaa

SEQ ID NO: 116958 - DNA, 1000 bp, Homo Sapiens
aaagccttggtttagcattttgtcagttttatcttcagaaattctctgcgattaagaagataatttattaaaggtggtccttcctacctctgtggtgtgtgtcgcgcacacagcttagaagtgctataaaaaaggaaagagctccaaattgaatcacctttataatttacccatttctatacaacaggcagtggaagcagtttcagagaactttttgcatgcttatggttgatcagttaaaaaagaatgttacagtaacaaataaagtgcagtttaaaacccaactcttactcttaatttgttcctaatacgtatttttggcagggagagggaacggtccatgaaatctttatgtgatataaggattttaagtttgggccagtgaacagggtaaataaaatttaacttttgagcatatggaattttgattgcctttaaagttactattctgtatcattgattcatcaagaaaacctagatctgcactcacctcactgttcaatcattgagtggtaaaggacagaagtattttctagttctggtcagatgatataattttttttttttttttttgtgggggtgaagtcttgctctgccacccaggctggagtgcagtggcatgatgtcaactcactgcaacctccgcctcccgggttcaagtgattctcctgcctcagcctcccgagtagctgggattacaggtgtgtgccaccacacccggctaatttttgtatttttagtagagacgggatttccccatgttggccaggctggtctcaaactcctgacctcaggtgattcgcccacctcagcctcccaaagtgctgggattacaggtgtgggccactgcacctggcccagatgatataatttaactgtgttttaggtaacatgttaatgagggaaaatgtttaccagtgtagcattggatcaaaaagtttatcacacagtgttttaataaatggtttattctgcttaccttaaaaaaaaaaaaaaaaaa

SEQ ID NO: 116959 - DNA, 1000 bp, Homo Sapiens
cctttgttcttcaaatcaggtgcccaaataagtgatcagcacagctgcttccaaataggagaaaccataaaataggatgaaaatcaagtaaaatgcaaagatgtccacactgttttaaacttgaccctgatgaaaatgtgagcactgttagcagatgcctatgggagaggaaaagcgtatctgaaaatggtccaggacaggaggatgaaatgagatcccagagtcctcacacctgaatgaattatacatgtgccttaccaggtgagtggtctttcgaagataaaaaactctagtccctttaaacgtttgcccctggcgtttcctaagtacgaaaaggtttttaagtcttcgaacagtctcctttcatgactttaacaggattctgccccctgaggtgtaatttttttgttctatttttttccacgtactccacagccaacatcacgaggtgtaatttttaatttgatcagaactgttaccaaaaaacaactgtcagttttattgagatgggaaaaatgtaaacctatttttattacttaagactttatgggagagattagacactggaggtttttaacagaacgtgtatttattaatgttcaaaacactggaattacaaatgagaagagtctacaataaattaagatttttgaatttgtacttctgcggtgctggtttttctccacaaacacccccgcccctccccatgcccagggtggccgtggaagggacggtttacggacgtgcagctgagctgtccgtgtcccatgctccctcagccagtggaacgtgccggaactttttgtccattccctagtaggcctgccacagcctagatgggcagtttttgtctttcaccaaatttgaggactttttttttttgccattatttcttcagttttcttttcttgcactgatctttctcctctccttctgtgactccagtgactcagacgttagacctcttgatgttttcccactggtccctgaggctctgttc

SEQ ID NO: 116960 - DNA, 521 bp, Homo Sapiens
agaccgtgtgtttccaaaatggcggcagcgatggatgtggataccccgagcggcaccaacagcggcgcgggcaagaagcgctttgaagtgaaaaagtggaatgcagtagccctctgggcctgggatattgtggttgataactgtgccatctgcaggaaccacattatggatctttgcatagaatgtcaagctaaccaggcgtccgctacttcagaagagtgtactgtcgcatggggagtctgtaaccatgcttttcacttccactgcatctctcgctggctcaaaacacgacaggtgtgtccattggacaacagagagtgggaattccaaaagtatgggcactaggaaaagacttcttccatcaagcttaattgttttgttattcatttaatgactttccctgctgttacctaattacaaattggatggaactgtgtttttttctgctttgttttttcagtttgctgtttctgtagccatattgtattctgtgtcaaataaagtccagttggattctggaa

SEQ ID NO: 116961 - DNA, 1000 bp, Homo Sapiens
gcctctggacagctgtcctctgctggcaccgcccgaggcctctgctgccggtggtgcccagggccggctcacgctggccagcatggagacgcgtgtcctgcaggaaactatctctcggttccgggcattggcggtggaccccacggagtttgcctgcatgaaggccttggtcctcttcaagccagagacgcggggcctgaaggatcctgagcacgtagaggccttgcaggaccagtcccaagtgatgctgagccagcacagcaaggcccaccaccccagccagcccgtgaggtttgggaaattgctcctgctcctcccgtctttgaggtttatcactgcggaacgcatcgagctcctctttttccgcaagaccatagggaatactccaatggagaagctcctttgtgatatgttcaaaaactagtgggggtggaggtgaaatgtttccaagcactctggaaaacaatctactgaaacgaaacatttgcctactctttgccccagcaattcctcgtaggtgtgtgtacccagcagaaatgcccaccgaaagatattgtaagaatattcatagcagctttattcataatagccccaaactgtatattgatggtaggatgaattaacaagttgtggtatattcatataatgaaaaataatttaaaaagaatgaattacggatacatgtggcaacacaggtaaacttcacagacataaaagttgaatgaaagaagccaggccgaagttccatttatgcagagttcaggaacaggcaagactaattgacaataatagaagttggaatagtggttacttctgggtggtgggggattgatacagagggggctcatgggagccctctggtgtaccagaaatgttgattttgatctgggcagtggtttcacaaatgtattcatacgtaataattcattgagctgtgcactttattttgttagacctcaataaaaaagtaaaaaaaaaaaacaaaaaaaaccagaaaaaa

SEQ ID NO: 116962 - DNA, 1000 bp, Homo Sapiens
ggtggaggcccataggaagatcagccctgggatagtgctgtctttttgtgggtactgcagtaaagaacatccctcctgggaatgaagcaatgcttcatcccttttacgtccatctcttgtttaaattcaagtccaggcttttttatcatgtgaaatcattcattttctgggtgttttcttaaccagatcattgtgaaattattcataattattatttggccctctgcccagaaacctttgtttgcatctgaaaattgatgggatttggtcaacactaacatgatttggggaaaggagcaagtcagaatagaaattagtactcccctccttgaactaggattgtagtcccaaagaggctactgtaaggcaatcatggtgctcagagcagtgtttcgtgtgtgttttaaactggtaggaaactaggtgcatatttataaaaataaaaaacactgggagaaatgaaaaaatatatatcaaatatattcagcctggcttcaaattgtaagcatgcacaaattctgtctctggattatattatgaagcttttatgtgaaacatgtttctttgtaatgaaaaccacattggagatgtttagtaatcatattgttactggtaccaagactactagggaaatgcctttgtactttagggaagtacttttggcattttactgtacagacagaaaaaactgagatgtagcccctctcctggaagtgctaattttgaaaaactgctcatatgatgtacatgtactgattactgcctattttaataaacactcttgaaaaatgcatgttgccctgttgctgcctgccctattctcctcatctccccatcattggtacccacttgcttttaaaatccactttatcttgaataatgtaagacaaatatgttctgacataagtatttaattcatgttgccttgcataatggtcagaggcgcatgaatttgtgaaggtggaaataaactatttgtaaagtgaaaaaaaaaaaaaaa

SEQ ID NO: 116963 - DNA, 1000 bp, Homo Sapiens
ttttgaaggcttacttgatcccagcgatgtgactgctcaatggagagaaggaaagtcaatcgtaggaagaacacagtacagcttcatcactggtccagctgtaataccagggtacttctccgttgatgtgaataatgtggtactcattttaaatggaagagaaaaagcaaagatcttttatgccacccagtggttactttatgcacaaaatttagtgcaaattcaaaaactccagcatcttgctgttgttttgctcggaaatgaacattgtgataatgagtggataaacccattcctcaaaagaaatggaggcttcgtggagctgcttttcataatatatgacagcccctggattaatgacgtggatgtttttcagtggcctttaggagtagcaacatacaggaattttcctgtggtggaggcaagttggtcaatgctgcatgatgagaggccatatttatgtaatttcttaggaacgatttatgaaaattcatccagacaggcactaatgaacattttgaaaaaagatgggaacgataagctttgttgggtttcagcaagagaacactggcagcctcaggaaacaaatgaaagtcttaagaattaccaagatgccttgcttcagagtgatctcacattgtgcccggtcggagtaaacacagaatgctatcgaatctatgaggcttgctcctatggctccattcctgtggtggaagacgtgatgacagctggcaactgtgggaatacatctgtgcaccacggtgctcctctgcagttactcaagtccatgggtgctccctttatctttatcaagaactggaaggaactccctgctgttttagaaaaagagaaaactataattttacaagaaaaaattgaaagaagaaaaatgttacttcagtggtatcagcacttcaagacagagcttaaaatgaaatttactaatattttagaaagctcatttttaatgaataataaaagttaattatctttttgagct

SEQ ID NO: 116964 - DNA, 1000 bp, Homo Sapiens
tgttcgggagcctctcctaagctgcctgttcgcgcgagagtttggaggggcgggtttggggtcggtgtctgattggggctcgcaccgcagcacgctggagtcccgcttaggtaccagttagcgtcaggggagctgggtcaggcggtcgccgggacaccccgtgtgtggcaggcggcgaagcgctctggagaatcccggacagccctgctccctgcagccaggtgtagtttcgggagccactggggccaaagtgagagtccagcggtcttccagcgcttgggccacggcggcggccctgggagcagaggtggagcgaccccattacgctaaagatgaaaggctggggttggctggccctgcttctgggggccctgctgggaaccgcctgggctcggaggagccaggatctccactgtggagcatgcagggctctggtggatgaactagaatgggaaattgcccaggtggaccccaagaagaccattcagatgggatctttccggatcaatccagatggcagccagtcagtggtggaggtgccttatgcccgctcagaggcccacctcacagagctgctggaggagatatgtgaccggatgaaggagtatggggaacagattgatccttccacccatcgcaagaactacgtacgtgtagtgggccggaatggagaatccagtgaactggacctacaaggcatccgaatcgactcagatattagcggcaccctcaagtttgcgtgtgagagcattgtggaggaatacgaggatgaactcattgaattcttttcccgagaggctgacaatgttaaagacaaactttgcagtaagcgaacagatctttgtgaccatgccctgcacatatcgcatgatgagctatgaaccactggagcagcccacactggcttgatggatcacccccaggaggggaaaatggtggcaatgccttttatatattatgtttttactgaaattaactgaaaaaatatgaaaccaaaagt

SEQ ID NO: 116965 - DNA, 1000 bp, Homo Sapiens
agcccaacctcacctgcggcaatcagacacagatctactgagtcagcatcagggtccccagcctctgggctcctgtttccataggaaggggcgacaccttcctcccaggaagctgagacctttgtggtctgagcataagggagtgccagggaaggtttgaggtttgatgagtgaatattctggctggcgaactcctacacatccttcaaaacccacctggtactgttccagcatcttccctggatggctggaggaactccagaaaatatccatcttctttttgtggctgctaatggcagaagtgcctgtgctagagttccaactgtggatgcatccgtcccgtttgagtcaaagtcttacttccctgctctcacctactcacagacgggatgctaagcagtgcacctgcagtggtttaatggcagataagctccgtctgcagttccaggccagccagaaactcctgtgtccacatagagctgacgtgagaaatatctttcagcccaggagagaggggtcctgatcttaaccctttcctgggtctcagacaactcagaaggttggggggataccagagaggtggtggaataggaccgccccctccttacttgtgggatcaaatgctgtaatggtggaggtgtgggcagaggagggaggcaagtgtcctttgaaagttgtgagagctcagagtttctggggtcctcattaggagcccccatccctgtgttccccaagaattcagagaacagcactggggctggaatgatctttaatgggcccaaggccaacaggcatatgcctcactactgcctggagaagggagagattcaggtcctccagcagcctccctcacccagtatgttttacagattacggggggaccgggtgagccagtgaccccctgcagcccccagcttcaggcctcagtgtctgccagtcaagcttcacaggcattgtgatggggcagccttggggaatataaaattttgtgaagacttgg

SEQ ID NO: 116966 - DNA, 605 bp, Homo Sapiens
attactactgaaggaagaacgtgagtaggccagatcagaaaagggagctcaggtaccttccagagagtgagacccagcgcccttgtctcgcacccagtaggctttcatccccgccatggcggagctgatccagaagaagctacagggagaagtggagaaatatcaacagctacagaaggacttaagtaaatccatgtcggggaggcagaaacttgaagcacaactaacagaaaataatatcgtgaaagaggaactggccctgctggatgggtccaacgtggtctttaaacttctgggtccggtgctagtcaaacaggagctgggggaggctcgggccacagtagggaagaggctggactatatcacagctgaaattaagcgatacgaatcccagcttcgggatcttgagcggcagtcagagcaacagagggagacccttgctcagctgcagcaggagttccagcgggcccaggcagcaaaggcaggggctcctggcaaggcctgaccccatggtggggggaggggaggggaggggagggaatgaggcagctctaggatctatactgtagctaataaaatgtaaaaacacctggcaaaaaaaaaaa

SEQ ID NO: 116967 - DNA, 1000 bp, Homo Sapiens
aagctgcttctggaggtgagcgagcgggtgcggaccttgacccaggcctacttctccccggaacggcccctgcatctgtccttcacccacctggtgtgccgcagcgccatagaaggagagcaagagcagcgcatggacctgagtcacccagtgcacgcagacaactgcgtcctggaccctgacacgggagagtgctggcgggagcccccagcctacacctatcgggactacagcggactcctctacctcaacgatgacttccagggtggggacctgttcttcacggagcccaacgccctcactgtcacggctcgggtgcgtcctcgctgtgggcgccttgtggccttcagctccggtgtcgagaatccccatggggtgtgggccgtgactcggggacggcgctgtgccctggcactgtggcacacgtgggcacctgagcacagggagcaggagtggatagaagccaaagaactgctgcaggagtcacaggaggaggaggaagaggaagaggaagaaatgcccagcaaagacccttccccagagccccctagccgcaggcaccagagggtccaagacaagactggaagggcacctcgggttcgggaggagctgtgagtggctgagccagctccttgaggatgtggccacttgacttgtggaaggccatcttgatgccaggacacacaggaagcccctgtgtgacatcaggagcagaacagcaagctctctgtccctgcacccccaccatcttggggacctacaagggcctggactcagaggacagtgcacaggctagcctggagctcaccaggcctggggagctgggacggggccccgctgccggacctgcagccctggacagatggggaacactgtgcctccctgaacagaaatggcaggggaggaggctgatgctttaaatgaagaggatggtggggttgggaggtataaccctgctcctctctcccagtctgtgcaataaaggtcgtgaagatctctc

SEQ ID NO: 116968 - DNA, 1000 bp, Homo Sapiens
gatcgggtaaagataccagtgatgtggagccaactgcaccgatggaggaacccacagtggtggaggagtcccagggcaccccggaagaggagtctccagccaaagttcctgagttggaggtagaagaagaaacccaagttcaagagatgactttagatgagtggaaaaatcttcaagaacagaccagaccaaagcctgagtttaacatccggaaaccagaatccactgttccttccaaagccgtggtgattcacaagtcaaaatacagagatgatatggtaaaagatgactatgaggacgattcccatgttttccggaaacccgccaatgacatcacatcccagctggagattaattttggtaacctccctcgtcctgggcgtggagccagaggaggcacccggggaggccggggaaggatcaggagggcagagaacaactatcccagagcagaagtggtgatgcaagatgttgcccccaacccagatgacccggaagatttccctgcgctgtcttgaaagagccctgtttcccagcaccgcggagctgcactgcacacctgtggggagacttttccagctgggccaagggagtcagactctaagacaatagatgttgcttttcccgtgtcatgtaaatttgttcacttttttgggctgagctgttagaggggcttctccagaggctcgagagcaggccatttcccaagaagatgaagaatggtgactgtgtttttattgaaggaatttcaaatgaagaataatgtttaaaatgtgtatatagagatagtatagactcctccgcggaagatggaccccccggaggttgtaaaatagactccatggagactcttaggaagcagtagataccccggggctgtgctttagcgttagaggaaaccacataggagctggaacctgttaatggaaagcagtcacagctggaggtttttcggaagaaccaaggaagattaaaatacattgcacttacaaaaaaaaaa

SEQ ID NO: 116969 - DNA, 1000 bp, Homo Sapiens
aatgaacacttaatggaatttttaagtctgttctgttaggtagatggtgatgctcttgttattttcacttattcagactggattacttcttacttagttactaactcaatgaggaaaaatccctacaggatctttttttgcaaacaactgatatatgcagacaaatttttgacaaattcaccttttaaacacacttaaccatttgtgaaggttttctttagcttacattttaaacatacacaataaacactaatcctccaaactttcactgtttttattagtatgaatataaaatttgaaggtttggccaattagtacaagtctcatgatataatcactgcctgcatacatatgcacagatccagttagtgagtttgtcaagcttaatctaattggttaagtctaaagagattattattccttgatgtttgctttgtattggctacaaatgtgcagaggtaatacatatgtgatgtcgatgtctctgtctttttttttgtctttaaaaaataattggcagcaactgtatttgaataaaatgatttcttagtatgattgtacagtaatgaatgaaagtggaacatgtttctttttgaaagggagagaattgaccatttattgttgtgatgtttaagttataacttattgagcacttttagtagtgataactgtttttaaacttgcctaatacctttcttgggtattgtttgtaatgtgacttatttaacgccttttttgtttgtttaagttgctgctttaggttaacagcgtgttttagaagatttaaatttctttcctgtctgcacaattagctattcagagcaagagggcctgattttatagaagccccttgaaaagaggtccagatgagagcagagatacagtgagaaattatgtgatctgtgtgttgtgggaagagaattttcaatatgtaactacggagctgtagtgccattagaaactgtgaatttccaaataaatctgaacacttgtctttatt

SEQ ID NO: 116970 - DNA, 1000 bp, Homo Sapiens
ttttctgagggcaagggcatggtgcccacccctcaagtgtaaggaactgcgttccgcccctcaggcccccatgggggcagggatcggcttggaaatcaacgtggttgtccccgccaggccggggaaggttggagcagcccccagggaggggggcactaggtgtcattgtgcccgatgtctggctcccctgcaggagggaggctccagggtaagacagggctggcaggagcagactgcctcagcccatgtgccctgccggccagggcgtgggctcccctcggctgtggtgcctcctctggccccccaggtccacgtcctttaaattggccctttggctcttgcccttggctcccttgggcagacagcaggcttaggccattgatatcgcagttcttcctatcagcttcagtgacccagggtctgaactgcctccatcctagggcaacctggggcagacaggcctggtggggggtggggaaacctccttccacctgagcttgcttgaagggacccagagtctttgggcccagatctttaaacctttgtgtcgtgttgcagcagagtgacgatgggggttggggggttatttattttgcctgtccttatccctgcttggacacctgagcatctgattcctgtccccctggtgccatctggcctggctggagccaggaacaggagggacacttccccagaatccgcatgtttccccagtgattacactccactgccaccgtggtgcctggctttaactcccacccctgctatgactcctctctgcagagacgcgactggcggctccagcagggactacctttcttataaacccagggggaccacacacacacacacacacacacacacacacacacacacacacacacacactcttgatcccttgcttccctcccccagtgcgttctgtgatcgccaagttcaaagctgtgcacatgtggacactcaataaatgttcattggtgacgagaaaaaaaaaaaaaaa

SEQ ID NO: 116971 - DNA, 1000 bp, Homo Sapiens
aaaatcaccggaacaattgtgtgctttattttataggtagtggttattagtattacatccccattttaaaaacaaaaacataataatggttacaacacgtggagttttactaacatacatattaaatcaaagtatattcttaaaagtacttgtgaagtaaaatctttcttgtgcattttcaatacttgtaaactggaaatcagaaaatatttactatgaacaggaaaatctgacatatagccctttttgatatgtttattaataatgattcttaatggggctcataataagtttaatatgcacagcatcttagaaaagtttaacctgcaaacacttttaaaacataatgcctacttgatttatatctataaaaagactgacaggtaattatatttggaaaacatttaatgcactaactttaaagaaattgaaaattcaggtggataaatagtcttacaaaagacaatgtgctttatgttatacctatagctttggtcccatctttaattgagaaacatttatctgtataaaacatatttttggataaatatatatatatatatttgtatcgctacagaaaggctctaaaaagcatttgaggaaaatatttggttcccttttctataatcatcctttaagattcttatagctacatttggtttattcatcatatttacagtatatatattgttcttttcagtgttcacatcttgttccccatttctcacttgtgtcaccagctgtttgtgccatttttagtgtaaaagttgcagacctattagatctgcagtttaagttgccatgctgctaggaaattgtcctttttctttctagctgttaacctacttcctggaaaaagtagtagctctctgtagcattatggagtttcagtggaaccaaatttttgccattaaaaactggcattatactgaactatacattgagaaatcaatcaaaataaaaatttttactttcacaagttgcaaaaaaaaaaaaaaaa

SEQ ID NO: 116972 - DNA, 1000 bp, Homo Sapiens
ccctgaagaattccaaccccgacgagattgaaatcgactttgagaccctgaagccgtccacactgcgtgagctggagcgctatgtcacctcctgtttgcggaagaaaaggaaacctcaagctgagaaagttgatgtgattgccggctcctccaagatgaagggcttctcgtcctcagagtcggagagctccagtgagtccagctcctctgacagcgaagactccgaaacaggtcctgcctaatcattggacacggactcttaataaaacggtcttcagttccagattccttcccagcaagctatagcttaagtccattttcttccgtgaaagggacaggactccatcaagttatggaattcctcagagccctgggcctgtcccccggggtggattagtcatgtccagcagcacacgcctagtcccgccttcgggaaggctgcctgcctggccagccgcccaggcctctctgtgtaaagactgcctggctgtcctgcccagccttcctggttctctggggtcctctgggtgggtggcatctcctggagggtgatgacaatccccaacacatgcattcatgtggtgctactctgtgtgcaaagccagaccccaagtatgttttctctctttgtcccatccctctttttctgggactttggaccctaactacttccctcctgaaccttgcagtgacatcagtccaggagagctctcgttcagtgtgcggaagaacactctgacctctagagctgtcctagataaggagtgggagctttagaggcaaggcctctagaccctggaaggctcagtgaggctcttcccacagcatgcttctcactggtgccctgtaagctcgagccaccgctgactctgagcctttttggagtctttcctccttcgtctccattgttccgtgcatttccaaagcttaagttgctggtgggcatttccccagtttctatgggctccgtcttctcaagtcacatagggaaagtaccttc

SEQ ID NO: 116973 - DNA, 1000 bp, Homo Sapiens
gaacgccaggctccttctccccgtggcagagtacttctctggggtgcagctgcccccacacctttcaccctttgtgaccgagaaggaaggagattacgttccacctgagaagctgaagctgctggctctgcagcggggagaggacccaggaaacctgaatgagtcagaagaggaggaggaagaggacgacaacaacgaaggtgatggtgatgaagagggagaaaatgaggaggaggaggaagatgcagaggctggttcagaaaaggaggaagaggcccggctggcagccctggaagagcagaggatggaggggaagaagcccagggtgatggcaggcaccttgaagctggaggataagcagcggctggcccaggaggaggagagtgaggccaagcgcctggccattatgatgatgaagaagcgggagaagtacctgtaccagaagatcatgtttggcaagaggcgaaaaatccgagaggccaacaagctggcggagaagcggaaagcccacgatgaggcggtgaggtctgagaagaaggccaagaaggcaaggccggagtgagtgcctgcggcccctcacagggctgaggccagcccctagcagctggatgtggcagaggcaggccagaggacctaagtgtgatggaccagagtcacttctcctcctcctttctccagccagccctgacccctcatgctctctggctgggccagtgggcagccctcgcttcccttggatggagctgccctgctggtgcctggtcagagaagaggcctctgtgcccagcctgattctctgctcccaggagccagtgacatgaggtgcagaggcccacccagccccctacctactgcccccattcatcctggctttccacagccccctcccacacagttggacccgtgattctcagggtgctgtgatggggtgagggtagggggagcatttgttattaaatgactggacttttgtgccaattgcaaaaaaaaaaaaaaaaaa

SEQ ID NO: 116974 - DNA, 1000 bp, Homo Sapiens
cgctcttccatgaccttcttaacccgtcaggctttcgccaaggtcttcaacacaacccctgatgacttggacctacatgtgatttatgatgtttctcacaacattgccaaagtggagcagcatgtggtggacggaaaggaacggacactgttagtacacaggaagggatccacccgcgctttccctcctcaccatcccctcattgctgttgattaccaactcactggacagccagtgctcattggtggcaccatgggaacctgtagttatgttcttactggcactgaacagggcatgactgagacctttggaacaacctgtcatggagcgggccgtgcattgtcccgagcaaaatctcgacgtaatttagatttccaggatgtcttagacaaattggcagatatgggaattgcgatccgtgttgcctcacccaaactggttatggaagaggctcctgagtcctataagaatgtgacagatgtggtaaatacctgccatgatgctggaatcagcaagaaagccattaaactgagaccaattgctgtgatcaaaggatagaaccttggacagcagggctgcctgacaccaccaaccctctctgaagtggaagtggactgacatgctcttctgacatcagactcaaggcgggacaagttgcaaagtgtgcagctgtaactgctcacgccaaaatggctgatggggaggctgctgctttcaggggcccgtgcttgtaaaataaccttccaggaagaggcacattgcccacctttggaaagggaggaatatgccttctccttggttgttccacagagttttaggaaaatctgttagggatgggtagatgtcaaactgccttacgcagtcatactgatctttagccatcagattgatcttcttcacaccaagctctgtttacattccgagaggtgtcatgaagaaagttctgttcaataaggttttggaatgttataaaaaaaaaaaaaaaaaaaaaaaaaaaaaa

SEQ ID NO: 116975 - DNA, 1000 bp, Homo Sapiens
tgcccctatcaggaagagggggtatcaacacttacattcctttaatcattcctggcttcccttaccctactgcagccaccacggcagccgctttcagaggagcccatttgaggggcagagggcggacagtatatggtgcagtccgagcggtacctccaacagccatccccgcctatccaggggtggatatgcagcctacagatatgcacagcctgctactgcaaccgcagccaccgctgctgcagccgctgcagccgcttacagtgacggttatggcagggtgtacacagccgacccctaccatgcccttgcccctgccgctagctatggagttggcgctgtggcgagtttataccgaggtggctacagccgatttgccccctactgaagtgacgtgagacccctgcaaatgggacagccccccagttcatgaggcctggctattgcaatatttactagtagaggaactctatagcaagatgaagaggaaaaacaaacaaacaaacaaaaaaaaacacaaaaaaagaaagaatacttttttatacctcactatgttctttgaatatgtatttttcctttaaatttctgcctttaattcttttgttccaaagattgtgcatttttttctttttttttttaaactgtggtaaaaaaaaaaaaaaataatgcatttccatgtctgtatgtccgtgcttagcttattctatcaatcacggaagaggcagtcaaggaggaaggagagacattaggagccgataaatgcatctgatcagaaatcagcagacagaattaccaaagtgtatctggtgctgaatgactgggggacaagcagaagtggaagagatctttctgcaacaggatattcttctagtcttctgagtttctggtctttgacaggcaattctggttggctgtggctggaatccacatgctgatagataggaatttgtgcttacaaagcaggagaattaaaaagacgctttcctctcctcctttagag

SEQ ID NO: 116976 - DNA, 1000 bp, Homo Sapiens
cagctccacctagaaccaggctgccctctactgtgctcgttcctcaagcatttattaagcacctactgggtgctgggttcactgtgtcctaggaaaccaagagggtccccagtcctggcctctgcccgcccctgctgccccaccaccttctgcacacacagcggtggggaggcggggaggagcagctgggacccagaactgagcctgggagggatccgacagaaaagctcagggcgggtcttctccttgtgcccgggattgggctatgctgggtaccaccatgtactcaggcatggtgggttttgaacccataaaccaaaggcccttgtcatcagctcttaacaagtatattttgtattttaatctctctaaacatattgaagttttagggccctaaggaaccttagtgatcttctattgggtctttctgaggttcagagagggtaagtaacttcctccaggtcacacagcaagtctgtgggtggcagaagcaagctagcgctgggcattcagtacataccacgatgtgctccctctcttgatgcttggcccctggggccttcagggctttgggacatcttgtcctcaaccctctccctagatcagtctgtgagggtccctgtagatattgtgtacaccatgcccatgtatatacaagtacacacagatgtacacacagatgtacacatgctccagccccagctctgcatacctgcacctgcaccccagccttggcccctgcctgcgtctgtgctcaaagcagcagctccaaccctgcctctgtccccttccccacccactgcctgagccttctgagcagaccaggtaccttggctgcaccggtgtgtggcccgctctcacccaggcacagccccgccaccatggatctccgtgtacactatcaataaaagtgggtttgttacaaaaaaaaaaaaaaaaaaaaaaaaaaaaaaaaaaaaaaaaaaaaaaaaaaaaaaaaaaaaaaaaaaaaaaaaaaaaa

SEQ ID NO: 116977 - DNA, 1000 bp, Homo Sapiens
gacacgtggttctggtgggatgcacagtcactccacatccaccattgaaggaaaggaaaaaagggcagagacttgacactccagtcttagacaggggacaatttctttgtagttgttctgataataaactgggttccatgttgcatttcatctgtgtactgaaccactagcctaatagaccagcacggtcaactagaatgacaaacattagctactgggaactcttgttgtctcttcctcttcagaactcttgtccccccaggctccccacctctgcaagatgggatacactcttcaggaccacagtttgaaatgtctttcataaaatgtgctacaattagccttcggaatatttgctgggtgatttaaatgtgtgggtctcatttccatgctagccatggtcatctgacagtctctacgctgtgaatattgcctggtgatcaagactctcctcaaagaaatgacttgctgtcatcccacatgaactcctgatgttttttctacaaaagtccataaaatgtgaaaactggagaagatcttagaggttgaagcccaccttctcttttcacataggagggaacagaccatggaaatttaaacgacttcctcacggtcacagaactagttttttaatcctcaggcagtgcatccccccaccctacaactgagcacaacctctttccccacagtgcaattcagaatatgctcagggaatgccagccaccttgtaaaactgctgggagaaaagcatgattcccacaaggactaagtatcagtgatttgtaattttcctgttttgtattatctgctttgctgatgtagacaagagttaactgagtagcatgctttattaagcatgagaaagaatcttaagaattgtcaataaaattaacccaaaactttaataatgtgtctgtaaccaagaaaatattgatagcatcatcctaatgaaactaaacatttattttaaacttattaaattgactcttaaactaaaaaa

SEQ ID NO: 116978 - DNA, 1000 bp, Homo Sapiens
accacggaagagaaagaagatagtggttgaagccccagcaaaggaaatggagaaggtagaggagatgccacataaaccacagaaagatgaagatctgacacaggattatgaagaatggaaaagaaaaattttggaaaatgctgccagtgctcaaaaggctacagcagagtgatttcagcttccaaactggtatacattccaaactgatagtacattgccatctccaggaagacttgacggctttgggattttgtttaaacttttataataaggatcctaagactgttgcctttaaatagcaaagcagcctacctggaggctaagtctgggcagtgggctggcccctggtgtgagcattagaccagccacagtgcctgattggtatagccttatgtgctttcctacaaaatggaattggaggccgggcgcagtggctcacgcctgtaatcccagcactttgggaggccaaggtgggtggatcacctgaggtcaggagctcgagaccagcctggccaacatggtgaaaccccatctctactaaaaatacaaaaattagccaggtgtgatggtgcatgcctgtaatcccagctcctcagtaggctgagacaggagcatcacttgaacgtgggaggcagaggttgcagtgagccgagattgcaccaccgcactccagcctgggtgacagagcgagacttatctcataaataaatagatagatactccagcctgggtgacagagcgagacttatagatagatagatagatagatggatagatagatagatagatagatagatagataaacggaattggagccattttgctttaagtgaatggcagtcccttgtcttattcagaatataaaattcagtctgaatggcatcttacagattttacttcaatttttgtgtacggtattttttatttgactaaatcaatatattgtacagcctaagttaataaatgttatttatatatgcaaaaaaaaaaaaaaaaaaaa

SEQ ID NO: 116979 - DNA, 1000 bp, Homo Sapiens
tagctgagagatttttattcatttttaactgccccccaaccccactccaactccttctccaccacccattctcccaatggtctttagaaatagattttcatctgatattctgcagaaatatcaatgagacttggtatgggacaggggcagaaaacactacataggcctccaaggcaaaaccagtcccagtttctttaatgggaagaagctggaattcctggtgctcaattcttagtgaccccaatcctatacccaaatctatgatattctgggacctcagtgattttggtcccctcccacttctctagttcgtcatcctcccttcccatatccttcaaaagaaccacactagggtctccacctacttatacaatgcggatgcccaactgtttttaaggaagccagaagcatcccatggaccatggggtgagtgtcctccaagagccccctgagctcagccctctgcctggagggctccagacctttctgagccctgcttggaggcgagcattttcactgctaggacaagctcagctgttgaggacacccccaccccaaatttcagttcttacgtgattttaaccattcaacatgctgttgggttttaattctctaattattattattattgttattattttttaggaccagttgtagtgaattgctactgaaagctatcccaggtgatacagagctctttgtaaaccgcagtcacacattagggttagtattaaactttgtttagatgtaccataattaacttggctagttgattgtttgaagtctatggaagaaatagttttatgcaaaattttaaaaaatgccagtctggtcagggaagtagggggtttcaatgctgttgggaaccaggaaggtgggacagccggcaggtagggacattgtgtacctcagttgtgtcacatgtgagcaagcccaggttgaccttgtgatgtgaattgatctgatcagactgtattaaaaatgttagtacattactcta

SEQ ID NO: 116980 - DNA, 1000 bp, Homo Sapiens
tgggactgcagctgaagaaggtgcacaggagagacccctgcccacagatgagatggcaccaggcaggggcctctggttgggaagactatttggagtgcctgggggccccgcagaaaatgagaatggagccctaaagtccaggagaccatctagctggctgcccccgacagtgagtgtgttggctcttgtgaagcggggggcacctcccgagatgccttctcctcaggagcttgaggcctcagcacccaggatggtgcaaacccatagggcagtgcgggctctctgtgatcacactgctgcaagacctgaccagttgagcttccggcgtggggaagtgctgcgtgtcatcaccacagtggatgaggactggctccgctgtgggcgggatggcatggagggtctggtgcctgtggggtatacctcccttgttctgtagccctgggaccctttcctgcgtatgtgtctccttcctgtcacctgggaatggaatggccagtgaacaccatcccagaagcattttccctctgcaaaatgacgtttcttcccacgtctgtttctgctaatatttaaaataaactttccttcttccctcctatacccacctgtaaggtgaaatctgctcttcttccaaatatataaaaaaggaattgccctccaggtaatccctttcctttttcccgtctatataagggaatgtcttccttcctatctatctgcaaaatggaaatctagacctccttcttcatccataagtggactgtgccagtacaatacatgcctcagcccccaagcctagaaggacctctagtctccttcctgtgtggaatcttccccactccatccctcccaagttgcctgtattgataatgtactcactcatgctgtactaggtgctgaagcctggacacccttggtgggtgggcctgtggtgatggtttgcatccttcctcccttgtcccaataaagtatgggagttgaaaaaaaaaaaaaaaaaaaaaaa

SEQ ID NO: 116981 - DNA, 1000 bp, Homo Sapiens
gggagaagctgaggcttcctcttccactcctgctacaggtgtcttcttgaagtcctgggtctatcagccaggagaggacacagaggaggaggaagatgaggacagtgatacaggatcagccgaggatgaaagagaagctgagacttctgcttccacaccccctgcaagtgctttcttgaaggcctgggtgtatcggccaggagaggacacggaggaggaggaagatgaggatgtggatagtgaggataaggaagatgattcagaagcagccttaggagaagctgagtcagacccacatccctcccacccggaccagagtgcccacttcaggggctggggatatcgacctggaaaagagacagaggaagaggaagctgctgaggactggggagaagctgagccctgccccttccgagtggccatctatgtacctggagagaagccaccgcctccctgggctcctcctaggctgcccctccgactgcaaaggcggctcaagcgcccagaaacccctactcatgatccggaccctgagactcccctaaaggccagaaaggtgcgcttctccgagaaggtcactgtccatttcctggctgtctgggcagggccggcccaggccgcccgccagggcccctgggagcagcttgctcgggatcgcagccgcttcgcacgccgcatcgcccaggcccaggaggagctgagcccctgcctcacccctgctgcccgggccagagcctgggcacgcctcaggaacccacctttagcccccatccctgccctcacccagaccttgccttcctcctctgtcccttcgtccccagtccagaccacgcccttgagccaagctgtggctacaccttcccgctcctctgctgctgcagcggctgccctggacctcagtgggaggcgtggctgagaccaactggtttgcctataatttattaactatttattttttctaagtgtgggtttatataaggaataaagccttttgatttgt

SEQ ID NO: 116982 - DNA, 1000 bp, Homo Sapiens
ccaactcgaatctgtgtgaaactttcattccttcagatttggcttgacaaaggcaggaggtacaaaagaagggctggtattgttctcacactggtctgctgtcgctctcagttctcgataggtcagagcagaggtggaaaaacagcatgtacggattttcagttacttaatcaaaactcaaatgtgagtgtttttatctttttacctttcatacactagccttggcctctttcctcagccttaagaaccatctgccaaaaattactgatcctcgcatgatggcagccatagtgcatagctactaaaatcagtgaccttgaacatatcttagatggggagcctcgggaaaaggtagaggagtcacgttaccatttacatgttttaaagaaagaagtgtggggattttcactgaaacgtctaggaaatctagaagtagtcctgaaggacagaaactaaactcttaccatatgtttggtaagactccagactccagctaacagtccctatggaaagatggcatcaaaaaagatagatctatatatatatataaatatatattctattacattttcagtgagtaattttggattttgcaaggtgcatttttactattgttacattatgtggaaaacttatgctgatttatttaagggggaaaaagtgtcaactctttgttatttgaaaacatgtttatttttcttgtctttattttaacctttgatagaaccattgcaatatgggggccttttgggaacggactggtatgtaaaagaaaatccattatcgagcagcattttatttacccctcccctatccctaggcacttaaccaagacaaaaagccacaatgaacatccctttttcaatgaattttataatctgcagctctattccgagcccttagcacccattccgaccatagtataatcatatcaaagggtgagaatcatttagcatgttgttgaaaggttttttttcagttgttctttttagaaaaaaag

SEQ ID NO: 116983 - DNA, 1000 bp, Homo Sapiens
cgtctccggcgtgcccgcagaggtgctgtgcaacatcgaggccgacacctactggtgcatgagcaagctgctggatggcattcaggacaactacacctttgcccaacctgggattcaaatgaaagtgaaaatgttagaagaactcgtgagccggattgatgagcaagtgcaccggcacctggaccaacacgaagtgagatacctgcagtttgccttccgctggatgaacaacctgctgatgagggaggtgcccctgcgttgtaccatccgcctgtgggacacctaccagtctgaaccggacggcttttctcatttccacttgtacgtgtgcgctgcttttctcgtgagatggaggaaggaaatactagaagaaaaagattttcaagagctgctgctcttcctccagaacctgcccacagcccactgggatgatgaggacatcagcctgttgctggccgaggcctaccgcctcaagtttgcttttgccgacgcccccaatcactacaagaaatgagcccaggcccacccgcagctggcctcactgtcccgggtggcgcgccccacctgcctggctggtggtaggcccctgtgagctggtcccgggctgctaaaaggccttgtgaggtggccccaccctccaggggagctggtgaagatgggccacagacctggtctagggctgacaaagacagggacagcctttgttttctgagataccaaagagagccaggggagggccccgggttcggcggccagaggcaggtcaggggtcccctctccctctccctgcaatgtccttgccaaatgactgcctcctgctgcccctagtccggggcagcctaggaggcccaccctctttggagtcctgctgtctgggtgccagggccggaacgaggtagtggccatctcatacctactctgaaatgcaaaacttctattctgttgagtgaaagaataaaatgtagacaaaaaaaaaaaaaaaaaaaaaaaaaaaaaaaaa

SEQ ID NO: 116984 - DNA, 1000 bp, Homo Sapiens
atgtggttgggtaatgcaaatgtagttatacaaagaaaaatacagatgtctccagacctgaggactttttaatagggcagttgttgtgttggtggcacattggatatttctaacatgtacaaagctatgtattttgatttactttcatttcttgctatgtatatgtacttttcttaaaatgccaagaactttctcttgctatcattgctccttttgaaacaattcaattttcatgtctacagctgactgttttgttaagattgagtcatcgacattcaggatttaagtctgaggtagtcaaccctcaggaaaaaaaaatggcttatctgaaatcagtactgtggaaatgaactatattagctattatgaataatgtccagtataagaatatgcttctggaattgagttctccttttaagtaccaatgatacttaaatttctcagaaatgtaatggtgtgtcattgccttgaaatgcttgcttagggcttcttttatgttatcttaaaaagtgctggtgaattttccattttttacatccatttcacatgtaagagacacaaaagtctagattggtcttgatattgagataataaaaagtaagtagcattaagaaaggtaacaatcttcattctacagatgaactcattgaaacaatttaggggaatgaggggcaaaaggggagaaatactgctaaagaacatgagcataaaaatgcgtgcgtttcagtgtttaagaaggcttgataaagaatgtcacttttttatttaactgataagatttttgttattttttactttgataagtaaaccaaagaatatttgtatttcaagcagtttgtgtggtgtttctatataattttctgtgtataaataataaagtaggcatttgtttattttgtaaaaaagaaatgaaaatctgctggccagctatgtcctctaggaaatgacagacccaaccaccagcaataaacatttccattgtcaaaaaaaaaaaaaaaaa

SEQ ID NO: 116985 - DNA, 838 bp, Homo Sapiens
cttcccactccaacgctgggtgacattgagctcaccagcgccaccgtccccggcgaagttctgcgctggtcggcggagtagcaagtggccatggggagcctcagcggtctgcgcctggcagcaggaagctgttttaggttatgtgaaagagatgtttcctcatctctaaggcttaccagaagctctgatttgaagagaataaatggattttgcacaaaaccacaggaaagtcccggagctccatcccgcacttacaacagagtgcctttacacaaacctacggattggcagaaaaagatcctcatatggtcaggtcgcttcaaaaaggaagatgaaatcccagagactgtctcgttggagatgcttgatgctgcaaagaacaagatgcgagtgaagatcagctatctaatgattgccctgacggtggtaggatgcatcttcatggttattgagggcaagaaggctgcccaaagacacgagactttaacaagcttgaacttagaaaagaaagctcgtctgaaagaggaagcagctatgaaggccaaaacagagtagcagaggtatccgtgttggctggattttgaaaatccaggaattatgttataacgtgcctgtattaaaaaggatgtggtatgaggatccatttcataaagtatgatttgcccaaacctgtaccatttccgtatttctgctgtagaagtagaaataaattttcttaaataatgactgtgttttattgttttgatccaagtcaagtgtagcctctcagccttttggagaaaaatgaaacaatttatttcaacttgaataccaactcttcagagaagcaggtaccata

SEQ ID NO: 116986 - DNA, 1000 bp, Homo Sapiens
ttcgccatccaggcagaactaagccaggcataaccacagccaagcagattaaccccaggcagaccgataaaaagacctccagataggcagacagacagatggaccaccaacctggacagacagccaaagcttcagagatacagtccacaggtggacaaagggatccccagccagagagagagagaccagccaacagcttgatagaccagtgcagccagagagaccaccaaacagagcccccaaaagacagacatctctgctagctggacagccaggtggaccccctaagttagtcagattactagacagatataaacagatcccctgctgaacagatatacagagttctcagaccccaccccaccctcaggtgggctggctggctgacagaccttctggccagacagactcctaaccaaccagatggacgccagacaggcagacatcagtccacatggaatcctgacatcccagccagccggccagactctcatcttgatgtcttgatggatggaccccagctagtcagacatgatcctccagattgacagacaagtcccccaaatgagtacacatctccagctattcagacagatggacccccagcaaatcaggacctatctaggcagaccccagccagacccccgccagacagactcccaaccagactgaccccttactattcacacagcctgccgagtagctgggactacaggtctaattttttttttttttaagaaatgagtttttgccatgttgcccagactggtcttgaactcccaacctcaagcaatcctcctgcctcagcctcccaaagtgctgagattacaggtgtgagccaccaggctcagccccctaagatttgaaacactttaaatggcccatggtagggttcctgctaggataaaacattaagcggctgttaaaagaaataaaaggaggacacgtctctgtgcaaaaaaaaaaaaaaaaaaaaaaaaaaaaaaaaaaaaaaaaaaaa

SEQ ID NO: 116987 - DNA, 1000 bp, Homo Sapiens
tccagagaagggggccctaaccacccaggatgaaaatggccagaccaagcgcaagttgcaggcaggcaagaagagtcaggacaagcagaaaaagcggcagcgagaccgcatggtggaaaggatccagtttgtgtgttctctgtgcaaataccggaccttctatgaggacgagatggccagccatcttgacagcaagttccacaaggaacactttaagtacgtaggcaccaagctccctaagcagacggctgactttctgcaggagtacgtcactaacaagaccaagaagacagaggagctccgaaaaaccgtggaggaccttgatggcctcatccaccaaatctacagagaccaggatctgacccaggaaattgccatggagcattttgtgaagaaggtggaggcagcccattgtgcagcctgcgacctcttcattcccatgcagtttgggatcatccagaagcatctgaagaccatggatcacaaccggaaccgcaggctcatgatggagcagtccaagaagtcctccctcatggtggcccgcagtattctcaacaacaagctcatcagcaagaagctggagcgctacctgaagggcgagaaccctttcaccgacagccccgaggaggagaaggagcaggaggaggctgagggcggtgccctggacgagggggcgcagggcgaagcggcagggatctcggagggcgcagagggcgtgccggcgcagcctcccgtgcccccagagccagcccccggggccgtgtcgccgccaccgccgccgcccccagaggaggaggaggagggcgccgtgcccttgctgggaggggcgctgcaacgccagatccgcggcatcccgggcctcgacgtggaggacgacgaggagggcggcgggggcgccccgtgacccgagctcggggcgggcggagcccgcgtggccgaagctggaaaccaaacctaataaagttttcccatcccaccaaaaaaaaaaaaaaaaaaaaaa

SEQ ID NO: 116988 - DNA, 1000 bp, Homo Sapiens
tttctcctttgtttcttgcagttaatgtaagaatactttaaatctctaagcttctgaagtgttagaggtagagatggtctagtaaagatgtagtagtaatgttttatccatttagcatgtgtttattttttcatatgtactcaaaggtgacttattggttcacctcagtgatattacagctaaaaaaatcattcattagcaaaaggaaaagtggtctcaacctaacatcagaagtgtttcttattattattttatattgagttgaatattgaactctaacagttttctacatacaaaacacagtgtcatgaaggttattcataattgcattatagaggaatgtagtatgtcataagtactttgtaaagatttgacattcaactgtagtatccatatgttgcttaaatttccttatgagccccatgatggaaagacttaaagatgaatttgagaaaaattgaaagaaattagattatcaggttctgttaaattgttacatgtatcttgcttaaatttctgtttattaatttatatccacccaagtacataaagcaaatttggaggaaacaactgaagttgtgcaatattttctgataattgctttttttattcttgtgttttctacttaaacataatgtctgtgtcatcaagtattatagtcagacttttctttttttctagattgttaaaattggcaaatgaacttttttaaaaatcatcttccatgttgcagttagtctttcttttcattacaagtctttcacagaagtttggtggtaatattgaaagaactagcattgggcagaatgtgtcttttttaggcactttatattctcaacatacaatgttaagaaccatcaattttgacttttactaagttgttaaataaagttataatacagctgtgaagggctaaagttagagttgattacataagtaagtattccccatataatcttttaaaaagttgtgtatgattattttaaaatctctctctcta

SEQ ID NO: 116989 - DNA, 1000 bp, Homo Sapiens
aattttaatttggatttcagtccttgcttatgttttgggagacccagccatctaccaaagcctgaaggcacagaatgcttattctcgtcactgtcctttctatgtcagcattcagagttactggctgtcatttttcatggtgatgattttatttgtagctttcataacctgttgggaagaagttactactttggtacaggctatcaggataacttcctatatgaatgaaactatcttatattttcctttttcatcccactccagttatactgtgagatctaaaaaaatattcttatccaagctcattgtctgttttctcagtacctggttaccatttgtactacttcaggtaatcattgttttacttaaagttcagattccagcatatattgagatgaatattccctggttatactttgtcaatagttttctcattgctacagtgtattggtttaattgtcacaagcttaatttaaaagacattggattacctttggatccatttgtcaactggaagtgctgcttcattccacttacaattcctaatcttgagcaaattgaaaagcctatatcaataatgatttgttaatattattaattaaaagttacagctgtcataagatcataattttatgaacagaaagaactcaggacatattaaaaaataaactgaactaaaacaacttttgccccctgactgatagcatttcagaatgtgtcttttgaagggctataccagttattaaatagtgttttattttaaaaacaaaataattccaagaagtttttatagttattcagggacactatattacaaatattactttgttattaacacaaaaagtgataagagttaacatttggctatactgatgtttgtgttactcaaaaaaactactggatgcaaactgttatgtaaatctgagatttcactgacaactttaagatatcaacctaaacatttttattaaatgttcaaatgtaagcaagaaaaaaaaaa

SEQ ID NO: 116990 - DNA, 1000 bp, Homo Sapiens
ttcagcagtacgtgcgggactccagggtccaccagattctagaaggtagcaatgaagtgatgaggatactgatctctagaagcctgcttcaggagtagaacccacacttgttctggcctggtgttcagtgcgactgcagtcagtgttgagtggtgccatgtgggccgctctattccaaaggaatcatggattagacccaagggctgagctcctctagggcaggacctgcaccctgtgtgttggcaccagcatcgggtcttggactggggcagaatccccagtggaaccggaagagctggactgatgagaaacatcagaagaacacatactaccttgttttcctaatgccagaagggtgaccagtgaagattcaccgtcaaaccatgaaagtcctttcttggatccactttatcttgattagtctgcattttactagttcactggatccctcctctaggggcctggggactttcactgatgctcttcctgattctagagcaaaggtgtgggaaggggaaatggaggaatgccctcctgtctgtgtcgttctctgtgccacagctacagatgcagaaggtttctctggatagcacacctctgaatgtaaatcatgataaaatggatatttggaaacttactcctaagctgtgatgtagggtgtatttctacttctggactgcctcaatatcaagggctgagacttttgaatgttgaatattcgttgggtttcatgttaagacgcctgtggtccaggagtgctattcagtgtttctgttcctgataaacactttgaatatttttttgtgtttttgtttccttttctgaagctgttcctccttttaaatatttttaatcacattgataaaatctatccttcatccacctctggttctactatagttgatttttattttaaatgtttaattgtatttgattaaacacttaactggattttggaataataaaactctcgtccaatttggcttttaaaaaaaaaaaa

SEQ ID NO: 116991 - DNA, 1000 bp, Homo Sapiens
gcttctgatccctttaagaaattacagggccagccgggcatggtggctcacgcccgtaatcccagggctttgggaggccttggcaggtggatcacctgagatcgcacgttcgagaccagcctgaccaacatggagaaaccccatctctactaaaaacacaaattagccaggcgtggtggtacatgcctgtaatcccagctactcaggaggctgaggcaggagaatcacttgaccccaggagacgtaggttgtggtgagctgagatcgcgccattgcactccagcctgggcaacaagagcaaaactccgtctcaaaaaagaaaagaaaagaaaagaaatcatagggccaagttcaaaggaaatgcacagaacatatcttcacattagagttaagaattctctagcaaacaacagatttttttgttgttgttagtcacaaatacttagaactggaaggctctttgttattattgaatgtacccctcagccttctcagcatttccttatcccaagactagtgtgctttctgctacactgctagttttcagttttgttcttacccaattgttttttcttttcaacattaccaatttacagattcagtttattacatttacattaatcctcacttatgatttgagcaagctcatttccagaaaagtttactttaagatcatcaataggatttgctaatttcagtgaagtcattttgcttcaggggtaaattatcctagttaccaagtcctatttggacataaagaaaatcctacttatagaaaaggagaaaataattaaacagtcttcatttttaagtaactgatttaaaaggaaaataataaaatatgttcgtttatcatttcagaaattgctgtaacacactggaaaattcctgaacaatatagattttatcgttaataaaaaacactagctttcgttccttagaatgtcttttcttttgaataaacagtattgggtgatttaaaaaaaaaaaaaaaaaaaaa

SEQ ID NO: 116992 - DNA, 1000 bp, Homo Sapiens
gagtggtgattctgctaacatttttatctacgttttataacttggtgagtgacgatgagagccctgcacctggccagagtgtcacaggcaaaaggcatcgggaagcaggagcatcttcttggcagccaggctgggccatcttctcctggacacctgctgtgtaccaggaacttcgtcacctccttgaatgctggcggttcatttcatgatcagtgttaagcattttcctccatgggaaggaagcatgggatatagaaaagcgaagggctgtcctttacaaattctggttctgcaacttcctagcgtgactttgggcttgggcaagtttcttagccgttctgagccttcatttcctcatctgtacaatgagattaatagtacctatcatctaccttcaggattgctgacagacagaatttgaaataaaatatgcaagttagctaatacaaaaagtagatgatccaaaaatggtagccactcacccttcacaaactgaagtccatggaccacggaagtcgagaattaatgtacacctgtatcatgtgtaggaaaccagaaatgtgttccttatttcttgttcccaaacaggattaactgtgaagactaatttataaatgtgaacctaagaaaactccacctctgaaggaaatcatttgaattttgtttttgtacgtaaagttaaccttccaattgtctgagctgtcgtcactgacttcatgacagtctggccctccagacaagagcagcgctggcatcgggcaggtgattcctgacacctgctgcctgcaggcattcactgaccaggcctttcctggaggaaacacccagggccgggcggctgctgtttccacacgtggactcggatctgctgtgacaccgtcagcccgacagtctctccatatgcagcctttcctctgtacttttctccatggttgaaataaaacagggtgactgggagttacttagaattcatgaagattttaaaaaaaaaaaaaaaaaa

SEQ ID NO: 116993 - DNA, 1000 bp, Homo Sapiens
caaatcagcttatattttttatcttgatgactcctgctccagaatcgctagactaagaattaggtggctacagatggtagaactaaacaataagcaagagacaataataatggcccttaattattaacaaagtgccagagtctaggctaagcactttatctatatctcatttcattctcacaacttataggtgaatgagtaaactgagacttaagggaactgaatcacttaaatgtcacctggctaactgatggcagagccagagcttgaattcatgttggtctgacatcaaggtctttggtcttctccctacaccaagttacctacaagaacaatgacaccacactctgcctgaaggctcacacctcataccagcatacgctcaccttacagggaaatgggtttatccaggatcatgagacattagggtagatgaaaggagagctttgcagataacaaaatagcctatccttaataaatcctccactctctggaaggagactgaggggctttgtaaaacattagtcagttgctcatttttatgggattgcttagctgggctgtaaagatgaaggcatcaaataaactcaaagtatttttaaatttttttgataatagagaaacttcgctaaccaactgttctttcttgagtgtatagccccatcttgtggtaacttgctgcttctgcacttcatatccatatttcctattgttcactttattctgtagagcagcctgccaagaattttatttctgctgttttttttgctgctaaagaaaggaactaagtcaggatgttaacagaaaagtccacataaccctagaattcttagtcaaggaataattcaagtcagcctagagaccatgttgactttcctcatgtgtttccttatgactcagtaagttggcaaggtcctgactttagtcttaataaaacattgaattgtagtaaaggtttttgtaataaaaacttactttggaaaaaaaaaaaaaaaaaaaa

SEQ ID NO: 116994 - DNA, 388 bp, Homo Sapiens
ctgtggagggcgagctgagccctggccgccgccacaatgggccgcgagtttgggaatctgacgcggatgcggcatgtgatcagctacagcttgtcaccgttcgagcagcgcgcctatccgcacgtcttcactaaaggaatccccaatgttctgcgccgcattcgggagtctttctttcgcgtggtgccgcagtttgtagtgttttatcttatctacacatgggggactgaagagttcgagagatccaagaggaggatccagctgcctatgaaaatgacaaatgagcaacgcatccggatgacggttccctgtctctgaaagacctttctctggaagaggagtctgcattgtagtgtctcaaagacacaataaacttcctatggtctga

SEQ ID NO: 116995 - DNA, 1000 bp, Homo Sapiens
atgttgggaggtgccatgactttcgggaaactgcggatgtcattgccaaggtggcgttcaagatgtacttgggcatcactccaagcattactaattggagcccagctggtgatgaattctccctcattttggaaaataaccccttggtggactttgtggaacttcctgataaccactcatcccttatttattccaatctcttgtgtggggtgttgcggggagctttggagatggtccagatggctgtggaggccaagtttgtccaggacaccctgaaaggagacggtgtgacagaaatccggatgagattcatcaggcggattgaggacaatcttccagctggagaggaataaccatccctacaactcgaggatagccatcaggagcactgttggaatcagcaggcctctgtgctccctctgccctccagaactcagtgactcttgaacatggatgttatatattcttataacctgtttccattctccattcaaataaagagcagactgcgatatagtccatttaccccatgtgtgcacattcaggagcgacagtctctgcccccattcccttgagaggggctggatgtaatcacctttggttggactagaaagagctcaaaccattttacattcctgtttgaatttttccaaagcaaaactcactttgaccccattaagaggcaagcctggcacatctatccctgggcctttagaaagccatttgcctcaaatggctatagggttgtggggtggagggaggaagggctgggagggagtggggaggaattgctagctgtagtgtgacacattgtagtgtttgccaggaaaggagccagtcatgccggaaacactgacttctgggaagccacccaggtctcattcctccctgctgttggaggcaacatctcctctttttacagagggtacatccttttttcttacaaattcttcaataaagacacattcttgagtgaaatcccaaaaaaaaaaaaaaaaaa

SEQ ID NO: 116996 - DNA, 1000 bp, Homo Sapiens
aacaggagagaggcaatgatgagtgatcaagaattagagtgccctggaggtcactcacaagtcctcatggagactctgccgtgacctcgcgcatgcgagcaccttcctgtctctcattttcaccatctgactggggctaggtttggttagagggcggctgtagagcaccctcaggagaagtggcgccgcaggggtcacgcatggtccagccctcaggtgggagggaagtccttgttggcagagggatgtggggcgggaatgaggaaaggggagggcatgatcctggcaaatagtctttccttttccgtaattacagagaaccaggattttttttaattattgttattataattataattattattattattgacatgaggaaacctagcactggcagagggcaccttctctgcttttaatctttcaggtttgactcctggcactggttttgatacttggaattttgaggttcagggaattcagagaatttggtagcacagtgtattgggagaaagggaaatttcgggtgacagattgatcaccctggctgacatgtttctggaagtgggtgggtgggtttgattgagaacactttgggctcctgcagtgatggtgggaaagaaaaattctttccaaagctgcacttctcttaataattctctcccctcaaaagaaagattatgataaagaataatttggagtaataagtaacaagatagaattagaaaaatgttgaatttctgaatgaccattcagaggtgtggctttttccacgtctttttctcctgcaatgaactgctcccacgtcctgcactgcaataccagtctaatgaacactttgtgaaacaaatcgtaagtatgtacgcacgcatatcaaactatgctctgaggataaagcaagttctaatttgtggaaaaaggattaaatatttctgttttctgaaaagagttattttgtattttgttttctattaaaatgtatttagtttcaaaaaaaaaa

SEQ ID NO: 116997 - DNA, 1000 bp, Homo Sapiens
caggagtttaaggctgcagtgagctatgatgatgccactgtactgcagcttgggtaacagattgagaacctgtctcattaaaaaaaaaaaaaaaaaaaaagccgttagacacacaggaaaaatccagaagggtaaactaaactaaagctacaattaatatgggaatttggaagaagtggtaggatttaaaatacagaaacagtttatgtataggatagctataagtaaatactgaaacacattatgcctctgtaattggggttgacacatgaacagaatagcagacacaatgcatatgaaagttacagaatatggtaaaagtggggtaaagatgggtttttaatgatactaagataactgaaaataggcatatagatatattccaagccgcctgacgatctaattgtaaaaagtaaagcatacaaatactagaagaaaatggaggaaaacgacattatatgtgacttaaaacctagaagaaataaataaaactattgatcaattttaactacataaaaatgtttataggacaagaaaaaccccaccataacccaaggcaaacaatgtattgacaggattccaataattaagaatacttcatacaaaaagaaatgtaaatgacctttaacatgtaaagatgctcaccttgttcagaagagaataaaccagtgtttttacctttcacttgaaaaagaagtataaaaacaactgtattgagttgaggctgtggagaaataaggacacatatatgggaatggaatgcaaaagttaaactttggttaacaagaatatttgggcaggtgcagtggctcacacctgtaatcccaacaccttgggaggccaaggtgggcggatcacttgaggtcaggagttcaagaccatctggccaacatggtgaaaccctgtctctactgaaaataaaaaaaactagctgggcatggtggcagatgcctgtaactccagctactcgggagactgaaggacaagaatcacttgaacc

SEQ ID NO: 116998 - DNA, 1000 bp, Homo Sapiens
cccagccagctggctgtgccagggcagagccatgccacatctgtatatagatggggtttttccaatacagctggttcgtgataaactgcatgaaactcctgccgtcctgcgcctgctggggcctccaggcaaggccacgtggggttgggggtggggctggtccttctccctcccacaggcctgtgttcttggggctgctcccatgcagacaggatcacctaacagagatggaagccagggcatggatggggctttgggtcctcgaggttggaccccagcttcttgccaccttcccctccgggcagtcagctctccatccatccccctctttaatctatgaatctataggctcggtgtgtgtaacacacacacccctatcgttgtccttcaaatactcagcattaccattggttgaggccaaattcagagctttctcaaatcagatttacaatctccattttcattaacggggaaacatccccgagccactgagtgctgtgctttgtcactgaaggttagatctgaacccagggtgtcaacagctgctctcaactccccacctctgggcactgaggagtatttcccctcattctacctctctaaggctatgcacccctccccacgtcttccagctgggggatggggggagtcataggaaaagcccccatctcccatctgggatagggaccttccatcagccttaaccctgggaaatgcctgctgcccccagtgactcttggtttcgtctcccacatacagaagcagggtggaggggaagggtgggtctcagttagcaggggtccccagggcaagtcagcctcctccctccatgcctctctggtcagtgtgccttagggtggcctctcactcccaccactctgggccccttgggggaggactggggagggggccgtgggagagccctgacgctggaacctgtatacacaataaaggacagtctcacagaaaaaaaaaaaaaaaaaaaaaaaaaaaaaaaaaa

SEQ ID NO: 116999 - DNA, 1000 bp, Homo Sapiens
ctttccgtgtctgtgatcacaagcggaccatccggaaaggcctgacagctgccacccgccaggagctgctagccaaagcattggagaccctactgctgaatggagtgctaaccctggtgctagaggaggatggaactgcagtggacagtgaggacttcttccagctgctggaggatgacacgtgcctgatggtgttgcagtctggtcagagctggagccctacaaggagtggagtgctgtcatatgggcctggacgggagagccccaagcacagcaaggacatcggccgattcacctttgacgtgtacaagcaaaaccctcgagacctctttggcagcctgaatgtcaaagccacattctacgggctctactctatgagttgtgactttcaaggacttggcccaaagaaagtactcagggagctccttcgttggacctccacactgctgcaaggcctgggccatatgttgctgggaatttcctccacccttcgtcatgcagtggagggggctgagcagtggcagcagaagggccgcctccattcctactaaggggctctgagcttctgcccccagaatcattccaaccgacccactgcaaagactatgacagcatcaaatttcaggacctgcagacagtacaggctagataacccacccaatttccccactgtcctctgatcccctcgtgacagaacctttcagcataacgcctcacatcccaagtctatacccttacctgaagaatgctgttctttcctagccacctttctagcctcccacttgccctgaaaggccaagatcaagatgtcccccaggcatcttgatcccagcctgactgctgctacatctaatcccctaccaatgcctcctgtccctaaactccccagcatactgatgacagccctctctgactttaccttgagatctgtcttcatacccttcccctcaaactaacaaaaacatttccaataaaaatatcaaatatttaccgtcaaccc

SEQ ID NO: 117000 - DNA, 1000 bp, Homo Sapiens
agtgggtgcacgtgttaatcggaaaagtggtcctggagctggagcgcttcctgccccagcccttcaccggcgagatccgcggcatgtgtgacttcatgaacctcagcctggcggactgccttctggtcaacctggcctacgagtcctccgtgttctgcaccagtattgtggctcaagactccagaggccacatttaccatggtcggaatttggattatccttttgggaatgtcttacgcaagctgacagtggatgtgcaattcttaaagaatgggcagattgcattcacaggaactacttttattggctatgtaggattatggactggccagagcccacacaagtttacagtttctggtgatgaacgagaccctgagtgagtcggaaaacttcgaagcagctgttggcaagttggccaagactccccttattgctgatgtttattacattgttggtggcacgtccccccgggagggggtggtcatcacgaggaacagagatggcccagcagacatttggcctctagatcctttgaatggagcgtggttccgagttgagacaaattacgaccactggaagccagcacccaaggaagatgaccggagaacatctgccatcaaggcccttaatgctacaggacaagcaaacctcagcctggaggcacttttccagtgaaagcaggccaggtgcggtggctcacgcctgtaatcccagccctttgggaggccaaggcgggtggaacacttgaggtcaggagttcaagaccagcctggccaacatggtgaaacctcgtctctactaaaaatacaaaaatcaaccaggcatgacggtgcacgcctgttatcacagctacttgggaggcagcggctggagaattgcttgaacctgggaagtcgaggctgcaagtgagctgagatcatgccatggcagtctagcctgggcaacagagcgagactctgtttcaaaaaaaaaaaaaaaaaaaaaaaaaaaaaaaaaaaaa

SEQ ID NO: 117001 - DNA, 926 bp, Homo Sapiens; identical to SEQ ID NO: 29969

SEQ ID NO: 117002 - DNA, 935 bp, Homo Sapiens
gaagtgggtaagggtaatatggaggagcttccggcaggccccggcggctgaaagccggggcagaagtgctggtctcggtcgggattccgggcttggtcccaccgaggcggcgactgcggtaggagggaagaggttttggacgcgctggcctcccgccgctgtgcattgcagcattatttcagttcaaaatgaactatatgcctggcaccgccagcctcatcgaggacattgacaaaaagcacttggttctgcttcgagatggaaggacacttataggctttttaagaagcattgatcaatttgcaaacttagtgctacatcagactgtggagcgtattcatgtgggcaaaaaatacggtgatattcctcgagggatttttgtggtcagaggagaaaatgtggtcctactaggagaaatagacttggaaaaggagagtgacacacccctccagcaagtatccattgaagaaattctagaagaacaaagggtggaacagcagaccaagctggaagcagagaagttgaaagtgcaggccctgaaggaccgaggtctttccattcctcgagcagatactcttgatgagtactaatcttttgcccagaggctgttggctcttgaagagtaggggctgtcactgagtgaaagtgacatcctggccacctcacgcatttgatcacagactgtagagttttgaaaagtcacttttatttttaattattttacatatgcaacatgaagaaatcgtgtaggtgggttttttttttaataacaaaatcactgtttaaagaaacagtggcatagactccttcacacatcactgtggcaccagcaactacttctttatattgttcttcatatcccaaattagagtttacagggacagtcttcatttacttgtaaataaaatatgaatctcaaaaaaaaaaaaaaaaaa

SEQ ID NO: 117003 - DNA, 1000 bp, Homo Sapiens
tgcataaagaggtggaggtcatcgaggccaccaagaaggccttgcaacagaaggtcagccaggccttcgagcagctctgcctcttgcaggaagtccaacagcagctcaactccgaccatcggggcaaaatggagacactagagatcgacagaggctgtctctctctcaacctcagatccccaaacatctcgctgaaggttgaccccacacgtgtacctgatggctccaccacactccagcagtgggatgacttcagtcggttcaacaaggaccgagcggaggctgagatgaaggcagccacagagctgagggaggccactgctctaactattgctgagaccaacaacgagcttgaagcccagagagttgcaacggaatttgccttcaggaagcggctgcgggagatggagaaagtgtacagtgagctcaagtggcaagagaagaataccttggaggagatcgctgagctgcaggaggacatccggcacctggaggaggatctgcgcacaaagctcctgagcctgaagctgtcccatacccggctagaggccagaacctaccggcccaacgtggaactctgccgggaccaggcacagtacggcctcaccgacgaggttcaccagctagaggcaaccatcgctgccctgaagcagaagctggcgcaagcacaggacgcactggacgccctgtgcaagcacctggcccggctgcaggctgacattgcctgcaaggccaactccatgctgctggacaccaagtgcatggacacacggcgcaagctgaccgtgcctgctgagaggttcgtgcctgaggtggacaccttcacacgtaccacaaatagcaccctgagtccactcaaaagctgccagctggagctggcctagccttggaggactgcaggaggagggcagggttgggtgggcaatggaaggagggaggagagaaatgaatggaataaatgcagaggatctcaaaaaaaaaaaaaaaaaaaaaaaaaaaa

SEQ ID NO: 117004 - DNA, 1000 bp, Homo Sapiens
acatcgaccttttttcaggtgtgctatacttatgtttcaaagagaatttgccctccgactggttgcaaaacctggagataagttatactgcagactctcaattaatacacagctgttggcacgtgtggaccatctaatgaaagtgggaaagaataacttcagaccaccgcccaaggtggaatccagtgttgtaaggatagaacctaagaatccaccaccacccatcaattttcaggaatgggatggtctagtaaggataacctttgttaggaaaaacaagacactctctgctgcatttaaatcaagtgcagtgcaacaactcttggaaaaaaactacagaattcactgttcagtccataatattataataccagaagatttcagcatagcagataaaatacagcaaatcctaaccagcacaggttttagtgacaaacgggcccgttccatggacatagatgacttcatcagattgctacatggattcaacgcagaaggtattcatttttcctaggtatttggaaaacagaaattttcaaggtcaagaaaagaaatgaattttgtattttttgtatttgagaagataatgcttttgctttactgagacattatttacttgactatttttggttcaatactactactgttgtcaccatttatgattctgaattttaaagttggaaagttctaagtatcaaagtttttaatatataatgctggtccaatctattcataataatcttcaagttcaggagccgcagagacgcacaactttacacttatcatttctaacagtttattgtataaagatgttactcttctatttactgttatatactgtaaggccttctttaggcctttagctctgttcctccagtaataaaaaagttaaaatatgcttcactagtcacacattccccataccatttcgtgttattcacattccccgtaccatttcttgttattcacatgtacagtaaaacaattgtttcttaaatta

SEQ ID NO: 117005 - DNA, 1000 bp, Homo Sapiens
ctcataacctctcagcctgaggaaaagcgattctgaacccttcagtcctgcttgggaggacgcagcccactgcccagaaacaagaaacacgataccattctggccttccccaccccacatcctctcttggccttactgaagatgggggaagggtaagaaggaagggtgtaggccaaggctcaccccagtgctgctggcttctcctctccacccctcatatgggcgtggggtcctcaaacatcacctttacctgagaggccccaagaagctgagctggcagagagctccaccatttggtgctaaaaaaaaaaacgtcctgaggttcatgaccaccatccagtttctggcctttacacagtcacctttcactgaggtcaggagcccctgagcagtggctgctccctgacaaccacagccatttctctgcacgggggtcattcataggactaatgtatttcatgatctactgtgcacatccaggcctgtggccacagtcccctgctaaagttgctcaggtgttctagtcctgacttcacctttttgatttggtgtgtgccctagggtatgtacccttccccatctgagcctcggtgtgtccatgtgtctggcgggggatgggtggactgtatgatttccaaggactctaccagtcagtggttctgatgtcatcgggtggaggtggtgttctatacctaaaggatgacctgctccagaaacagcaccagcacagcatgtattttcttctcttctgaaagttctggcttgtagacccctcccctcctttgcaaaggtatgggatagaggggtcagatgcagatctctactgtaaaatgggctccctggtatctcctgtcttccctactgctccaaaccctaaattttggttgtacattttattttgaaaggaaaataaattttttttttgggccaacaaaaaaaaaaaaaaaaaaaaaaaaaaaaaaaaaaaaaaaaaaaaaaaaaaaaaaaaaaaaaaaaaaaa

SEQ ID NO: 117006 - DNA, 1000 bp, Homo Sapiens
gatgaaatacaagatgacagcagtgatttgcatttagtgactttggatgaagtaactgaagaggatgaagactctctggcggattttaacaaccttaaagaagagcttaattttgttactgttgatgaagttggagaggaggaagatggagataatgatttaaaagttgagttagcacaaagcaaaaatgaccatcccacagataaaaaagggaatagaaagaagagagctgtggacacaaaaaagacaaaacttgaatccttgtcccaagtgggtccagtaaatgagaatgttatggaagaagatctaaaaaccatgattgaaagacacttaacagctaaaactccaaccaagagagttagaattgggaaaactctgccatcagaaaaagctgttgtgacagaaccagcaaaaggtgaagaggccttccagatgagtgaagttgatgaggaatctggattaaaggattcagaaccagagcgaaaacgcaagaagactgaagactcttcttcaggcaaatcagtggcgtctgatgtccctgaggaattagactttcttgtacctaaggctggattcttctgtccaatttgttccctcttctactcaggtgaaaaagcaatgacaaatcactgcaagagtacacgtcataagcaaaatactgagaaattcatggccaagcaaagaaaggaaaaggagcagaatgaggctgaagaaagaagctctaggtgattgggggaaaggaaagaattcactagaaatttgtttagggtccagttgatttgtgtatttttgttatcatttaatttgtaattttcgtttcagaagcaaatattcgtgttgtacaaatttctgattgccctaaatgtagagagactgatggggaaagtatgatgggtttgatttttatatcaaatcatcaggcatggagaaatatcttttagaagtgttaaaataaatgttcctactgtatatttaaaatacaaaaaaaaaaaaaaaaaaa

SEQ ID NO: 117007 - DNA, 1000 bp, Homo Sapiens
ccacaaaagagtccgaagaagatgactcagagaaagagtctgatgaagactgctctgaaaaacagtctgaagatggctccgaaagagaatttgaagaaaatggtctcgagaaagatttggacgaggaaggttctgaaaaggagcttcatgaaaatgttcttgacaaagagttagaagaaaatgactctgaaaactccgaatttgaagatgacggctctgaaaaagtgttagatgaggaaggctctgagagagagtttgacgaagattcagatgaaaaggaagaagaggaggatacatatgaaaaagtatttgatgatgagtctgatgagaaagaggatgaagaatatgcagatgaaaaggggcttgaagctgctgataaaaaggcggaagaaggtgatgcagatgaaaagctgtttgaagagtcagatgacaaggaagatgaagatgcagatggaaaggaagttgaagatgctgacgaaaagttgttcgaagatgatgattccaatgagaagttgtttgatgaggaggaagattccagtgagaagttgtttgacgattctgatgagagggggactttgggtggttttgggagtgttgaagaagggcccctatccactggcagcagctttattctcagtagcgatgatgatgacgatgatatttaatcccttaaacttgctttttagggagagtcctccatctacatttgcctgtgcttcagggtaattactagtagtgttacatgaacatgtgcatagtggtaggatgccatcagattaaagcattgaagtgtttcattgttacctgtacctaatggttttaaatatatgttaattgattgtttagttaaaatgtcatagttacaatgcaagtaaactggatacttgttcttttgtcagatttgttaaatgcatgcagaataatatttttaagagtattgattgaagtttgtgatattcatcaataaaaatgagttgataataaaaaaaaaaaaaaaaaa

SEQ ID NO: 117008 - DNA, 1000 bp, Homo Sapiens
accggaggatgtggccgtgcccgccgagcactcttgatctgagctgacctgtgtgtgtgtgtgggggggggtggggccttcacctaagacctctgcagcagacctggacagacaggcccctcccgcctgtccatcgctctagctgctaatacagccctggctgtggaatccttcaccgtctcagctggtatcagccccagcctgccttgtgccatatctcagcttggatctctgctagagtccccccaaccatatatcatagagttgaatcacaatgagaccgttggctttgaatttgagtcgttggttcccatggtgagatgcttgttaagactttatacttgggtcaatctctcactttattttgtagaaccatttgaaatcctaggatgtgcttgttctggaaggatgacatgggcccagactgaacaagtcagcttgatgatcttaaatgatggaagtataggacgttgcttattttaaaacaagggaaggacacaaaatggaatgactgcttagtcctttctcagatactcttaaaacaattttttattgttaaatttgtggtaatacatggtcacaaccgtggatcaaacaaggtcagtctaaagtggcaggtcctaggtgtgacctgataccaccaccctttgtggcagcaccgggctggactgccctgatccctgggacgtgagacttagcttccagccagtgtgaatcattgtatctgtctcataatcacagcacagctgcagacacaacaacgtgcagcattttttacataaaaatatggtagaattaatttatgacatggaaatgccttacgtggtatcacacttagtcttgaaaaaaacaccaaggtgacgtttaaaatttttagtacatatcctcaaattggagctaagttatacttcttttataaccttttgggcatctggtcgagagaagacaagattttctctatttacagtgaggcaataaatatgtttgccacctttaaaaa

SEQ ID NO: 117009 - DNA, 1000 bp, Homo Sapiens
aagagttgtggcagccttgaaatggaatcgattctccattctgggccacagcttcggtggcgtcgtgggcggaatgtttttctgtaccttccccgagatggtggataaacttatcttgctggacacgccgctctttctcctggaatcagatgaaatggagaacttgctgacctacaagcggagagccatagagcacgtgctgcaggtagaggcctcccaggagccctcgcacgtgttcagcctgaagcagctgctgcagaggttactgaagagcaatagccacttgagtgaggagtgcggggagcttctcctgcaaagaggaaccacgaaggtggccacaggtctggttctgaacagagaccagaggctcgcctgggcagagaacagcattgacttcatcagcagggagctgtgtgcgcattccatcaggaagctgcaggcccatgtcctgttgatcaaagcagtccacggatattttgattcaagacagaattactctgagaaggagtccctgtcgttcatgatagacacgatgaaatccaccctcaaagagcagttccagtttgtggaagtcccaggcaatcactgtgtccacatgagcgaaccccagcacgtggccagtatcatcagctccttcttacagtgcacacacatgctcccagcccagctgtagctctgggcctggaactatgaagacctagtgctcccagactcaacactgggactctgagttcctgagccccacaacaaggccagggatggtggggacaggcctcactagtcttgaggcccagcctaggatggtagtcaggggaaggagcgagattccaacttcaacatctgtgacctcaagggggagacagagtctgggttccagggctgctttctcctggctaataataaatatccagccagctggaggaaggaagggcaggctgggcccacctagcctttccctgctgcccaactggatggaaaataaaaggttcttgtattctca

SEQ ID NO: 117010 - DNA, 1000 bp, Homo Sapiens
caaggcagccggtgccctgctcaatgggcctccacagttcagcaccgccccagaaatcaaggcccctgagcctctgagctccttgaagtccatggcggaacgggcagccatcagctctggcattgaggaccctgtgccaacgctgcacctgaccgagcgagacatcatcctgagcagtacatcagcacctccggcctcagcccagccgcccctgcagctgtcagaggtgaacataccgctgtcgctgggtgtctgtccactgggccctgtgcccctcaccaaggagcagctctatcagcaggccatggaagaggccgcctggcaccacatgcctcacccctctgactctgagcgtattcggcagtacctcccccggaacccctgtccgacgcccccctaccaccaccagatgccacccccacactcggacactgtggaattctaccagcgcctgtcgaccgagacactcttcttcatcttctactatctggagggcactaaggcacagtatctggcagccaaggccctaaagaagcagtcatggcgattccacaccaagtacatgatgtggttccagaggcacgaggagcccaagaccatcactgacgagtttgagcagggcacctacatctactttgactacgagaagtggggccagcggaagaaggaaggcttcacctttgagtaccgctacctggaggaccgggacctccagtgacaccggcccctccctctacccacccccttcccccgcatgctgatccccctgcccaggtgagggccctgccctggaagactggagggaggccccaagccacggggcatccccctctcccaggaagcagggagggggccgggaggttttcctctcagccccaccctgggggcccgggggcgagggctgccccctcctcccctccccagtgagggacattttttggtaaacctattttcattttggaaaatatttatgaataaatagttttatatgacggctggc

SEQ ID NO: 117011 - DNA, 1000 bp, Homo Sapiens
aagggattcttgccagagacgaagaagcgcaagaaacgcaagtcagaggatggcacgccagcggaggatggcacacctgcagccaccggcgggagccagccccccagcatgggcaggaagaagaggaacaggacaaaggctaaggtcccagcccaggcaaacgggacgccaaccaccaagagtccagcccctggcgcccccacccggagccccagcacccctgccaaatccccaaaactgcagaagaaaaaccagaagccgtcccaggtgaatggagctcccgggtcccccacggaacctgcaggccaaaagcagcatcagaaggctcttcccaaaaagggggtcttgggcaaatcaccactgtccgcgctggcacggaaaaaggcaaggctgtctttggtcatcaggagtcccagcctgcttcagagtggggccaagaagaaagcacaggtgaggaaggcagggaagccctgagcacaggtacgggcccccctcagcccctgcctccatctgcctgagacgcctatttttttttttttaaaaccatgattttaatacgcaagctgtttctaaggcgctgccactggggagggtggctgttgccgcctgcccgggcatcctgctctggcaagcacagcctgagccattcctgcgggggtcccagggtgcagagacctccccacccccagttctgggctgggatcctggctccagggccatgtccagggctctggtgtttgcctgggttggtgcatgttgatgtgctggctgcaggcaggtgtgaccatctctcgtgcctgccacctctttgcccccaggcttttttgctgtgagggagccaccagggggtgatttaaataggtttatttcttcatttacaagaggaatatatttggcttctctcttaagactctgagattcacaatcagcagctctaaaaaataaaggagcagtttggcttccggaaggaagaggaggctaaaaaaaaaaaaaaaaaaaa

SEQ ID NO: 117012 - DNA, 1000 bp, Homo Sapiens
aatggccaagatgcttgaggaaaatacaaatatccttaaatttggatatcagtttacacagcagggaccacgaaccagagcagctaatgctataacaaaaaacaatgacttagtgcgtaagagacgagttgaaggagatcaccagtaagtctgcaaaggtgtaatctttggaagacttcagaagatcaccaagggctcatgttggtgacatcatgtaaaattttcctgggtagaagggaaaagactggaaaaatttttttagtgacatgcattttttttttagttgttatcaaattgtaaaatcagtaatgtgatattttatattctgaaacatttctactttctgctaaaatcaattttaatttagtttaattgaatgatttatgatgaatcttgggcaaaaaaatacaactgtaaaaaatttcacaggtcatttgtgtagaataatttgaacattgtgaggaccaatcttttttaaatcaaaagggatgttgctggtatcagaattgttattgcttcatttagacataaaacacttaagtgttttcttcactccgtgacctggagagttttccattttttaaaatacatgaacttggcaagggtgtgatttttctttatcaagagaacaaaatgccagaatgttaaaacagttaactcaaaatctagtcatctgtgtaggagctaaagcaggtctccagggagagagggtggtcgtctgtgcattccaggttactgcacttgtctgatgtgacgtagcaacacccaggtcttcttaaaacaaagtcatcagctttgccaggttacatactttatttaaaagtatagtgaggtcgaagttcattccagtgtttcattttaataatgtgggcattattaaatttttgtggaagctaatagtaaaaaataaaagctgttttcaccacctccctccccaccccccaaaaaaggcgtacagccaactcttagttatttagggtaagagaaaaaaaaaaaaaaa

SEQ ID NO: 117013 - DNA, 1000 bp, Homo Sapiens
gaattgctccctgattaaaatgagatatggctatttggaagacactgcattttagccagtgtacctgggcacagactcggggctgccctgaagctgatgaaggcttgaaggacggaagggctgagccacatgaaggcagcactcagggccaggggagagagaagaggatcagcagtgcagccccaggatgcctcgcagacgtgccttctgccatgattgtgaagttctagccacgtggaactctctcggaagaactggttgttaaagagcacctctgccttcttcctctgttgccatgtgatctctgcacacgctagctctccttcgccttctgccatgctggaagtagcctgaggccctcaccagaagcagacgctggcaccgtgctgcttgtacagcctgcagagccgtgagccaagtaaacctctttaattacccagcctcaggtgctccgggaacgccttccgcggaatgaagcggcccatgcccttgttgacgttgatgtttccgtcttcaaagacgatcttgccctggctgatgaccactagtggggagccgtggcactccataccctcgaagatgttgtactccaccgcctgcaccaacagcctcagtgttacttcccaggatttgctctgccccaaacgagctgttcataacagcgattttgcctaacattatatcataagcgtgttccaatgtttttttttctctctaaaaataccttttattgactgtaatattccactgtatggtccacagtgtatataaccaacaactcaccgttgcgcatgtaggctgccggtggctttctataatcaaatcaatattgttctggggcatcacaaagaggaagggggtcccccggggttatgcaatgtggctgctttgactgtactggacataaaaataagtaaaatgttcttcattttacttaaaatgtgtctttaaataaaatttttttctctaggtttctaaaatcaaaaaaaaaaaaaaaaaa

SEQ ID NO: 117014 - DNA, 1000 bp, Homo Sapiens
ctggaacaggaggtgtcacggcccatagaccacgacctggccaactggacgccagcccaacccctggccccggggcgaacaggcggcctggggccctcggaccggcagctgctgctcttctacctggagcagtgtgaggccaacctgaccacactgaccaacgccgtggacgccttctttaccgccgtggccaccaaccagccgcccaagatctttgtggcgcacagcaagttcgtcatcctcagcgcccacaagctggtgttcatcggggacacactgtcacggcaggccaaggctgctgacgtgcgcagccaggtgacccactacagcaacctgctgtgcgacctcctgcgcggcatcgtggccaccaccaaggccgctgccttgcagtacccatcgccttccgcggcccaggacatggtggagagggtcaaggagctgggccacagcacccagcagttccgccgcgtcctaggccagctggcagccgcctgagggtggtgaccccaggagggaggcaggggaggggtgcggcggtcccagctccctggctcccatgtcaagagtcgctgtgccacaggcttagggacaggaccccagctctgcgtcggtcctggtgccctggatgcccaggaatctgtatatatttatggccgggcagggtgtggggccatgcctcctcaggagccgaagcccaggggccggccagtggccttccccagcatgcaccacgggcccgggttgggtcaccagacggggctggagtgtgagggtcctgcagcctgcaggacctcgtgccaccccgagggctgagcctggtcccacgagggtgccgtgtcccctgacagggccagtgcagtttggtgtgtcctccgccttaccaggagaagaacctgaagaactatttttcgttattggttttccaatcatttgactaagagtctccatttaaataaagtttttaaaaggaagagcaaaaaaaaaaaaaaaaaaaaaaaaa

SEQ ID NO: 117015 - DNA, 1000 bp, Homo Sapiens
aggctgtggagtcccagagccagcagttcactggtgctcattccacactggttagatacttcagttgtcacccctgggaagattctcccacctcctccctttgatggaaccaccctccccagaggctgcattgaggagactccacagactgaaaagtgagtttgcagaaaccttggggaaaagggccctttcaaagaagtggataagagggaggagatcattgagtgacccagaaagctcttttgaaaagacagactcctcaaggagagataaagaggaaagcacctctttcattttttagtgtgagctaattccatcagactgctgtcctcctggacccatctgagatgtgcagtagcaaggagaggggggatcattttagagagtgggtcattggcagggagtgctccggagggaggcagaggggagactgtggtagaaggaagacagaactcacacatgctcccaggattggggacagggacagaggaggtaacagaaggcaaaggccagtttccccgttatcatgaaggggcccactcaggacaggaacaaggacaactcctcctcctcctcctcctctcctgctgctcctgggataccaggtcagtgatgtagtcttgcagtttggcaacttcctagcctgagaatccctagtggggctgtgggaaacacatttccacgttgcaagcatgcaactccaaagaatctgtgatgccactgaaatgagatgggaatgatccagctctttcagcatcttggttgaacttgctttcattgtccctgggatattgtggaaggaaaggtgactgtgtgatctgattctgtggtcaaggacttgcatcttgtgtttctatccccaagccttcctggtgtctccaactcctaccccattgcatgggttgttgcggacatccaataaagatttttttagtgcttctggaaaaaaaaaaaaaaaaaaaaaaaaaaaaaaaaaaaaaaaaaaaaaaaaaaaaaaacc

SEQ ID NO: 117016 - DNA, 1000 bp, Homo Sapiens
gattacagacgtgaaccactgggcccagcccaaaccttcaccttctaagggcactgggatgaacggaccgatcggcttgagggtgggcaaaggggtgtgggctaggttataaggaagtggtaccaaataactgtgtgcctgagttccaccgcaagattactaaaagcaggaccagaccagaaactgctaaagaacatggcctgtttgacatgttcatgagtcacctgacccacagcatatatgcttgtgactaaaccctccactcctgattctcaagagtgtatcacctgtcagcaaaatgaatagtgggatattttgggccattttaaatgtgaaattttgcctctttaatgttaattcaaaactatatcaatgttttcttgttcccacctctaacccaaggaaaaaagagaaaacatactatgcaaaggaagtttaaacttaagttttccttaagggtcagcccaacaatgactttcagtcaaatggattaaactggaaaatgtttttgtttctgttgtaaacagatcatcctaggcgaaagttttttttgtttgtttgcttttaaattagtttatttctaaatcttagtcttccacatttctagaggccacctgacacaagtccctgtatctgaagtctagcatctcaaggctgatctggaagtgtgctagtatgctccctagtggataacttaatcttttaatacagttccgtcattcccatcttgttttcagaagagaaggtggctacagccaggcataacatatccactgtgtgcatagagggtctcttcacgttgatgcttggcattccatcagctttctctaagtctttgctcaagttcaaccttaaaatgatgttagacaacaggtcccagtcagttccctctattttcacccattttgctcacaagccatattggcccgattagtggtactgtctgactcacgtgtgtgatccaaataaaggtagctgctgaccaaaaaaaaaaaaaaaa

SEQ ID NO: 117017 - DNA, 1000 bp, Homo Sapiens
gccgcgtccacggggagccgaccagcgacctcagtgacattgactgacggcccggccgccagcgcgggtcttgtccatagtgttgataagctgtacatgtttgtatattgttcaaaacttaacttattctgatttttagttatagctctttaattctttttccccggggaggggggaggttttatttccaagttttctaggaacccatctccgtctgggcgctgtgagtggggtgggcacgtccgggcagcccagtgcgtctgtcgcacgtccccaggccgtgctgctggcgtcactttctttgatatgtagctttttcttaaagacttttgaatgtttaataattttgtaaatcatgctctttacacagagtaccacttatttaataagacgggatgtaaatttacaatgacaaatgtgtattttaagaaagaaaatgacattattttgaatggtactttgtggaaagaggggagaataaagttatgctgtgtacatcacttgcagatcaccaaaaacactccgctgcccgtgaccgccggtgggtgtgtccccgctcccgtcgtcccgcccacctcaaaccccgcaggtgtgcctcccagcggattatttattgtagaaagtgtattcatttgctttataatgaaaaatacatttgcaaaggtatattgatatgcatttttatacaggcacataaaaattcaacttggcttgggagcagaatgcattgcattgtataaatgactctggcctgtgtgtactttgattttataacttgtaatcttttgtttacaatgaggggctttctgtaacttgttttaatttagaacactttggtagcaatagaaactttggatacatttttgtatggtacctgtgatgtatatagaattagtactttatttttatttttaagaggtaaagcattatgttggggaaagtagggtgggtttccaaatttgcattttttatattaaaaataaagtcaagaaaaaaaaaa

SEQ ID NO: 117018 - DNA, 1000 bp, Homo Sapiens
cagattcagaagttcatggtgcagaacagatcagcaagtgagagaaattcttctggtgatgctgattcagctcatatggagtatccctatggagagctcatcatctccctgggcttctttcttgtcttctttttggagtcgctggcattgcagtgctgtcctggggctgctggaggatcgacagtgcaggacgaagaatggggtggggctcatatcttcgaactccacagccatggacatttaccctcaccctcaaagggtcccctccgagcccttgtcctcttgctgtcactctcctttcactcagtgtttgaagggctagctgtggggctgcagccgacagtagcagctaccgtgcagctctgccttgctgtcctggctcataaggggcttgtggtgtttggtgtaggaatgcggctagtgcatttaggtaccagctcacgatgggcagtgttctccatactattattagctctcatgtcccccctgggcctagccgtagggctggctgtgactggaggggactctgaaggagggcggggcttagcccaggctgtgttagagggtgtggcagctggtaccttcctgtatgtcaccttcctagaaattcttccacgggagctagctagtcctgaggcccctctagctaagtggagctgtgtagccgctggttttgccttcatggcctttattgccttgtgggcctgagagattcctggcttttctgatggacctatttaggacaacctctctatccccagggagacctcccaaatggctttgaccctcagacatttctttactcagactaaatagcattcagtaggactggactggaccccaggtttcctttacatgagatcccatttctcaccctggactaagacaaagatatttaggttgagcagctattaattggagaattggtacagagacgctccagattttattcttatcccatttatgctactgtgtgtaataaaatgcccattttaccctc

SEQ ID NO: 117019 - DNA, 1000 bp, Homo Sapiens
cgtggggctggcctggctggccgtgggcagcatgtgcctcttcatcgccggctttgcggtgggctgggggcccatcccctggctcctcatgtcagagatcttccctctgcatgtcaagggcgtggcgacaggcatctgcgtcctcaccaactggctcatggcctttctcgtgaccaaggagttcagcagcctcatggaggtcctcaggccctatggagccttctggcttgcctccgctttctgcatcttcagtgtccttttcactttgttctgtgtccctgaaactaaaggaaagactctggaacaaatcacagcccattttgaggggcgatgacagccactcactaggggatggagcaagcctgtgactccaagctgggcccaagcccagagcccctgcctgccccaggggagccagaatccagccccttggagccttggtctgcagggtccctccttcctgtcatgctccctccagcccatgacccggggctaggaggctcactgcctcctgttccagctcctgctgctgctctgaggactcaggaacaccttcgagctttgcagacctgcggtcagccctccatgcgcaagactaaagcagcggaagaggaggtgggcctctaggatctttgtcttctggctggaggtgcttttggaggttgggtgctgggcattcagtcgctcctctcacgcggctgccttatcgggaaggaaatttgtttgccaaataaagactgacacagaaaatcaggtcagtgtctctgggctttgtgcaagctcagtttgaaaagggtttattcccatcactgcccaggacaccctgtggctttacttgctcatggtcagccaagcttacccttcacactgagaagtcatttctggctacttccttgggctcagttccctgggtcatcagccatcaaatcttgttgagtttaaaaaataaacagcaaaaaaaaacaaaccaaaaaaaaaaaaaaaaaaaaaaaaaaaaaaa

SEQ ID NO: 117020 - DNA, 1000 bp, Homo Sapiens
aaaggcacaggagatttctaaacattgtgaaaagttgaatagattatatatttattctcataatactttcactaatactaaataaaatttggggaacactttttatttttatataatttccaatttacagaaaagtttcaaaaatagtacaaagagctctcttacccagattcactaattgttcatacgtgctttatctttcatgctttctctgtacacacacacacacacacaaatttttcctcaatcatttgaaagtcagttataggcatcatgccccttaaaccctaaatacttcagtgtgtaatactgaataattactaaaaatgattttctcagaaaaaaaaactcccacaattctggaactataatactgtaagccttagaataaataatactttcaagttccaatctaaagttctttttgagttttgttgcccgttttatgcttgatgtgtatagtaatagggtaggctatttattttattaaaattttttttagagacaaggttttgctgtgttgcccaagctggaacttgaacgactgggctgaagtgatcttcccacctcagcctcccaagtagctgggaatacaggtgtctgccaccatacccagtttcatttttgttttttatacccgaagttcatttcctttgtctccctaaaactgaactgtaattttgggaggttttcattagtggaagctcttcatttataaagctatttgaaggggtttaggaatttatatcacatggtaattgtagagaaaaagaagctatatacctcaaaatcgtgccctctttacatatgtcttatcaggtataacatgttgaaatgtcacattagtagtaaagtggggtttatttatatagtggttaagaaatgtcagtttacactgctgtatacttcttcttctgtgtccctaaggcctggtacagtgccaagcacatacttggtatccaataaatatttgttggatgaaaaaaaaaaaaaaaaaaaa

SEQ ID NO: 117021 - DNA, 1000 bp, Homo Sapiens
tcagttatcatttgacagattcttatctgtactagaattcagatatgtcagttttctgcaaaactcactcttgttcaagactagctaatttatttttttgcatcttagttatttttaaaaacaaattcttcaagtatgaagactaaattttgataactaatattatccttattgatcctattgatcttaaggtatttacatgtatgtggaaaaacaaaacacttaactagaattctctaataaggtttatggtttagcttaaagagcacctttgtatttttattatcagatggggcaacatattgtatgaagcatatgtagcacttcacagcatggttatcatgtaagctgcaggtagaagcaaagctgtaaagtagatttatcacacaatgactgcatacagacttcaaatatgtcaatagtttggtcatagaacctagaagccaaaagccacacagaagggcaagaatcccaatttaactcatgttatcatcattagtgatctgtgttgtagaacatgagggtgtaagccttcagcctggcaagttacatgtagaaagcccacacttgtgaaggttttgttttacaaatcacttgatttaacacactcaggtagaatatttttatttttactgttttatacccagaagttatttctacattgttctacagcaagaatattcataaaagtatccctttcaaatgcctttgagaagaatagaagaaaaaaagtttgtatatattttaaaaaattgttttaaaagtcagtttgcaacatgtctgtaccaagatggtactttgccttaaccgtttatatgcactttcatggagactgcaatacgttgctatgagcactttctttatccttggagtttaatcctttgcttcatctttctacagtatgacataatgatttgctatgttgtaaaatctttgtaaaaaatttctatataaaaatattttgaaaatcttaaaaaaaaaaaaaaaaaaaaaaaaaaaa

SEQ ID NO: 117022 - DNA, 970 bp, Homo Sapiens
agcagcgctccctccgcttccggccgagcccgcgccccccagaccccgagagctcgcagctccggcccggcggcgatggcgcggagcgtgcgcgtgctggtggacatggacggcgtcctggccgacttcgaggccggcctcctgcggggcttccgccgccgcttccctgaggagccgcacgtgccgctggagcaacgccgcggcttcctggcccgcgagcagtaccgcgccctgcggcccgacctggcggataaagtggccagtgtgtacgaagccccgggctttttcctggacctggagcccatcccgggagccttggacgctgtgcgggagatgaacgacctaccggacacgcaggtcttcatctgcaccagccccctgctgaagtaccaccactgtgtgggtgagaagtaccgctgggtggagcagcacctggggccccagttcgtagaacgaattatcctgacaagggacaagacggtggtcttgggggacctgctcattgatgacaaggacacagttcgaggccaggaggagaccccaagctgggagcacatcttgttcacctgctgccacaatcggcacctggtcctgcccccgacaaggagacggctgctctcctggagtgacaactggagggagatcttagatagcaagcgcggagctgcgcagcgggaatgagcggggatgccgcgggcagcagctggagctaaaggaagggcaggcccacaggggccaccgcagagccgagtcggggcggcatcgtgctggtgcctctggccccgtggagtggagcaggcagacaccgttaagcgctgtgctaccgggccccaggcccagccacccggtacctcccgagaggctgtccctggaccctggctggcatggaaatacagtgggaaaaccagtcgggacctttaataaaagaccttggctttctaaaaaaaaaaaaaaaaaaaaaaaaaaaaaa

SEQ ID NO: 117023 - DNA, 1000 bp, Homo Sapiens
tattgaaaaccagtcaaggtggttttagttcatagattttgttagatgttctttccacctggcctatgatgtttagatgttcatacttgactcacatttacccagcccctcctgcgtaccaggagctgtgttaggcactttatatacattattctatgtggccctcactgatgccccagggaagtatgcattagccttcccattttgcagttgaggaggctgagtagcctcagaagggtttaggcgaccttctgaaactcacagaagtcacgtgatggagagaggattcaaagccagggcctcagaccctcacacacttgtctgtgctatgatgtatgcaggatcccagcattgatacccaatgacaaactatggagaacaagcaaagtatgcaggccccctgcagcctcccaggacaggctggcaagggaggagggccggccagcatttggtggcccatcagtctggccatctgtcacgtcacagaagcaaaccgtgccttctggctctgcgccccatattcccagcatcatagacatccaacagcaccagcaggagagtgggctagcctgctggatgctgttcgtgcctgtccctgctctgcctcccacccagttgcctgaatcatcccagctcagatgcagccactgtctcttgtcaagtgggacctcatactattctcagaaggctaacttgagaggtttggggccttgttccccagagggtccccagggactctgcagtgtccttggcaaatccccactgtactcaatgccctacattctcttctgtggtctctcccctggcttgcttcatggccactgaaccaatcactttgtatgctatgctcctactgtgatggaaaacaaaatgagtataacttattttatatccatattcagactatatagagaatattctatgcatctatgacgtgcttactactgcagtgcatttgtcattagtcttcatgttaatacagtacatttattctttggta

SEQ ID NO: 117024 - DNA, 1000 bp, Homo Sapiens
ccttccttcttttttgtttttgcccccaattctgcccatacccatttctttctttccttccttccttcttttttgtttttgcccccagttctgtccacaccccttccctttcctgtcctgtcctttctttctttcttttttgatagaatcttgctctgtcgcccaggctggagtgcagtggtgagatctcagctcactgcaacctccacctcctgggttgaagtgattctcgtgcctcagcctcctgagtagctgggactgcaggcacgcgccaccacgcccagctaatttttgtatttgagtagagacggggtttcaccatgttggccaggctggtctcgaactccgcatctcaggtgatctgctcgcctcggcctcccaaagtgatgggattacaggcatgagccaccgtgcccggcttcacacccatttctttaaaaaggatcccgtagcaggcagaaaagccccttccatcctgctcctctgatactgtgcccccttggagatatttccgtcctccacccacgtgtctgtggctggaactgcccagcctgctcctggccccctggaagcctccccacagctggtaatctggacttaaggattgctgggccaccgcctctctgcctaccaccattccatatttaagtggagcccctacgtagaaaggccccggggctttattttagtctccttttcagggatgtcgtgggcgggggagggggttcttggtgctacagccctctccccacccctaaagggacgccgacgctgtttgctgccttcaccacatattagtgcttgaccctggcaggggaccccatggaaaagatggggaagagcaaaatacatggagacgacgcaccctccaggatgctcgctgggattcccacgcccaccactgtcccccaccccatggctgggaggggcctctgaacggaacagtgtccccacagagcgaataaagccaaggcttcttcccaaaaaaaaaaaaaaaaaa

SEQ ID NO: 117025 - DNA, 1000 bp, Homo Sapiens
gttgccaatttcaagtcactgtcatccttccagggctcgaatcagacgcctctcaatgcaccctctgtatcagtcctgggtgattgcagctgttcagggcaacaacgaagtgtccatgtgggacatggagactggtgacagaagatttactctctgggccagcagtgcaccaccactttctgaattacagccttctcctcatagcgtccatggtatctactgtagtcctgcagatggaaatcctatcctactaacagctggctcagatatgaaaataaggttttgggacttggcttacccagaaaggtcctatgttgttgcaggaagtactagttccccatctgtgtcctactacaggaaaataattgaaggcactgaagttgtccaggaaattcagaataagcagaaagtaggaccaagtgatgacacccctcgaaggggcccagagtccctgcccgtgggacatcatgacatcatcactgatgtcgccacattccagaccacacagggcttcatcgtaactgcttctagagatgggattgtgaaggtgtggaaataaaacctactgatttgtataaattttaatagttataaatataatactataactcgagaaaaggcatttctagagaacagattcatttgcttaattttcaaaattatgtctccatattactgtttcatgactgactgactaaatgacacccaaaatggttaagatgtacttgactagtttacttatgcatctctttgcaagaatcagccagccaacaatgtctgggatttttattgtatatgttatagaggtgagaaatgtaaaatatgaaaatgaatatgtttattttgtattgaaaaagatggttgaaaagatggttgtaagctattatagtataaacacatttttgctattaaaaatgctattcaaagcagttaaactgtaaaaaaaaaaaaaaaaaaaaaaaaaaaaaaaaaaaaaaaactcgagggggggcccggtacc

SEQ ID NO: 117026 - DNA, 1000 bp, Homo Sapiens
caaggaaacagcaacacaggctgcgctgttggtaggagtgaaaaccagtataattcttctgaaaaacatttatcagaaacttaaaatatttcataccgtttgatccagtagcttcttctaaatcataaatgcagacaatctttaggtaaagacatactcattaagtgttatttattttactcaagaactggaaaccaactaaatgccttctatagaagtaatttttgatgaggagaaatggtacaatactaattaacaacttggtttaacatgtttactgagcatctgttaagtgttgggggaaaaagcagcaggatccagagctataggtacagtgtgatctcagctttgcaaacacattttctacatagatagtactaggtattaatagatatgtaaagaaagaaatcacaccattaataatggtaagattggtttatgtgattttagtggtatttttggcacccttatatatgttttccaaactttcagcagtgatattatttccataacttaaaaagtgagtttgaaaaagaaaatctccagcaagcatctcatttaaataaaggtttgtcatctttaaaaatacagcaatatgtgactttttaaaaaagctgtcaaataggtgtgaccctactaataattattagaaatacatttaaaaacatcgagtacctcaagtcagtttgccttgaaaaatatcaaatataactcttagagaaatgtacataaaagaatgcttcgtaattttggagtaggaggttccctcctcaattttgtatttttaaaaagtacatggtaaaaaaaaaaattcacaacagtatataaggctgtaaaatgagaattctgccccctcacctcttaccccagtactattctccagaggtaatctattaacaatttcttatgtaattttcaagaaatttgtatgcgtatataagcaaatatgtaatctttattttttaaataaatgggatcatattataaaaaaaaaaaaaaa

SEQ ID NO: 117027 - DNA, 1000 bp, Homo Sapiens
agcaatggggtcatgcatgtggacgagtgtgtggagtttcacagactgtggagtgccatgcagtttgtctactgcattcccgtggggacacacgagttcacagtcgagcagtgctttggtgatgggctacactgggctggctgtatgatcatcgtacttcttgggcagcagcggcgttttgctgtgctggatttctgctaccatctacttaaagtccagaaacatgatggcaaagatgagattattaaaaatgtgcctttgaagaagatggtggagagaattcgcaagttccagattctcaatgatgagatcatcaccatcctggataagtacctgaagtcaggcgacggggagggcacgccagtggagcatgtgcgctgcttccagccgcccatccaccagtccctcgccagcagctgagggcacgcgctgcactccgtaactcaacatggcatgcctttctctccgtaaactatttagtgagatttttagggactatttttcagtatctctgtacctgttaaagggggtgcttttcgatctaaaaacttaattttataaaattgacttatttttctagactaaaattgtatatgcttttggtaattaggaactcttgagaatattggctgctgattgttgccatcacgttcctacaaaattgtttttctatgggatgttctggcagctgtgtcataaaatgctgctgggttcattcattcattccataagaaacttaataccagcaaatgcattaaatcccttgccagttaccattaactgtaactatttagcttttgtttagggatctttctgatggtcttttatgagcaatcttagttctaagtcattgttcccatcccttttttgtgtgtttcagaaaatagtgaacttgattcccctgcttccactaaatccagttgtgacaaaatctaacgtgacatcagatcgaaaggttatagaaataaaactaatgagatctaaaaaaaaaaaaaaaaaa

SEQ ID NO: 117028 - DNA, 1000 bp, Homo Sapiens
ggagaatctgtaaagctgttacacccatttcatgagcagttcagtgattactctgggtcccagattctacgtctctgcaaattccaacaaaagaaaaccaagattgctcagtttctagagtctgttgccaacatgtttgcagctgctcagcagctctcgcagaacatcagttcagaaactgcacaactcctcctggtagtctctgatgggcgaggccttttccttgagggcaaagaaagagtcctggcagcagttcaggctgcccggaatgcaaatatctttgtcatctttgttgtattggacaatcccagttcacgggattctatcttggacattaaagtaccgatatttaaaggacctggagagatgcctgaaatccgatcctacatggaagagttcccattcccatactatatcattcttcgagatgtaaacgcacttcctgagacactcagcgatgccctcagacagtggtttgagttggtgacagcctctgaccacccatagaacagaaagaagagtccaaagtgagacttaactgtggtcagaaggtcacattgcttacccaggtgctcccttttggacaactacaaaaaattttattgtaatatttttattttacaacgtgatcttacagcctacagaatgctctctggctcccggctttgcctgggctgaggtttttataccaaacctggaagcagcagcaggtgcctgaactcgtaactagagaagagttatccttcttccctgccttggaagccctggcctgggaggaggtcataccccaccgttggagcccagctgcctgttttcttttgcaggggatctgggcacctgtgccttgaggagatgctgccaggagcatgggactctgacagtcctttgtataaaggactaaagggagctgcccttttgaccctgttctaagctctgccttgccaagcccatagtgtgtgcccaaaagctgtcaagtggccaagacagctcgtttctggag

SEQ ID NO: 117029 - DNA, 1000 bp, Homo Sapiens
agtaatattgccgttctgctgattttaaatatacaatacatcatacatactttacaagcaagttaaatggagataaagttgaaatcatagaagatgcaaatgacctttcaaaatcaacacaatgtgttctgaaactttcgtgactaataccatgcatctgtgatcaatgaactatgtggttttgaatcggatgtagaccattagtactactacttgagctaaacttctgcatggttcataatttttaaagtgtgtagttaatatgcatgttatcgtcctttcttccattcttaacagtatgtgcccatttgcaaaacaaaaatgctaataatcagtaatagtcctataaaagatgttaactctgtttagtcattgactgatcttgctctaaccttaaaattttgtgattattgacctctgttgcatttattctaaagccccccaaaaattatctagccgtttcgaatatcaacattaccctggtgtattcactgctgtatgcattattgttctttgttgctgttttatgccttcatattagcaaatatgaaattctgtgaaaaaaaaccctttgatcttaaaaaaaaaaaaaccaccccccccttctgtagcaggaaacaaattgcttgttcttgagaactttcccatcaagaatttagtagaagcaggtatacttctatcattttgatgtttttgttaatgtttccaaacaatgtactttgaaatcagaatcacttcttatcgttttcatatacttctgatgctcttcatcacattagtgatcagaaatgaggtgtaattccccaacccctgcccgcaagagctaagtaggatcttactgtaagttgaagggagttttgccctaactcatggattgtgcaagaatgaactgctgttgggtttgattgactgtcgatggattgtggtgtggtgtatctgaaggctattgaatgcaacttacaatgcttaataaaaatctttattcttttagtataaagta

SEQ ID NO: 117030 - DNA, 1000 bp, Homo Sapiens
agggtctccctttatgtcagtacaactgttagggcggccttcccatttactttaggtttcaagaggattcaccggaagcacatgccccggtctagtcccatttgaaacagttctgctttactgagaccctaggccggtctccttgctgaccctagcgctgctgcctaggtgccatttcctttcctcctcagtcaaatacaggctgcacattttgtcacttaatgccagtacaatctgtgttactcctaaggacttttgggattttgatgagacctgcgagggagaagacactgagaagccagtgatctgcaagcatttgctcttgtttccacatcacctctgggatatttcagctgttgtttccaaatggcaaatcatcaactaaaagcacttgtttcaagttttgttctgcactcccacgactgaagttgtagattgagctgaataaccatgggaagtgaccaagcaaagacactcgattggagtcagttgaatatttgtaccctcagtggagcccttctggtcttttcttccacttctgcagaatttcctctagcaaatacttctttctccttgcttgcctccaccatgatatttgaataagagatggccagaggataacacttgtctcttaaaaactaagctaaaaagaacctagaaccttcaattgagcagttgtgaaaattgctaatggtgccaaggccaagcaaagagtttcagaaaatgactgagaaggagcgataacccccagaatgcaaaatcaggggcatcattatccggtgcttgaacaaggagctccgctctacaactggtttttttaggacttgtgaggaacacagcaacggaaatccatccacaaaggatgcagtgccccaacttgtactgcgcctgaatagtcatgtgataatttactgaagaaatctagtgtactttaaatttttttcataaaagtttacattgtattgtaggttaacattaaatgttttatagcaaaaacttc

SEQ ID NO: 117031 - DNA, 1000 bp, Homo Sapiens
tctgcattccacagcttctcagttgccatttgatttcccaacttgtccggaagtgtttccagaatactgatcactttttttttttgaggcatctgacaaagtcacaaagtctcagactagaaataattacccagtatgatcatggcatccaagaccagagtctcagaactcattaagaaacagtttacttggaatggagaatacccatctgtaatacaggtcctgtcatttcattcatctcaaattattttgaattcttcccaaatggctgctggatttaggtggtaataggggctgtgggccataaatctgaagccttgagaaccttgggtctggagagccatgaagagggaaggaaaagagggcaagtcctgaacctaaccaatgacctgatggattgctcgaccaagacacagaagtgaagtctgtgtctgtgcacttcccacagactggagtttttggtgctgaatagagccagttgctaaaaaattgggggtttggtgaagaaatctgattgttgtgtgtattcaatgtgtgattttaaaaataaacagcaacaacaataaaaaccctgactggctgttttttccctgtattctttacaactattttttgaccctctgaaaattattatacttcacctaaatggaagactgctgtgtttgtggaaattttgtaattttttaatttattttattctctctccctttttattttgcctgcagaatcgttgagagactaataaggcttaatatttaattgatttgtttaatatgttatataaatgtaaaagagtgtataaactgtagagatagcattggcaagacattgtacagatgcaaccttttacacaacatcattgtgtaatttgtaaagattcacgtgtagttctttattatagtgattttgggctttgtacccactgaatgccattttttgtgtttttaaattattttctttatcttgttacaaaaactgagatgtggggtttttttttttt

SEQ ID NO: 117032 - DNA, 1000 bp, Homo Sapiens
attgcccctcagctgctttaagtgactcagcaccctgcctcagcttcagcaggcgtaggctcaccctgggcggagcaaagtatgggccagggagaactacagctacgaagacctgctgtcgagttgagaaaaggggagaatttatggtctgaattttctaactgtcctctttcttgggtctaaagctcataatacacaaaggcttccagacctgagccacacccaggccctatcctgaacaggagactaaacagaggcaaatcaaccctaggaaatacttgcattctgccctacggttagtaccaggactgaggtcatttctactggaaaagattgtgagattgaacttatctgatcgcttgagactcctaataggcaggagtcaaggccactagaaaattgacagttaagagccaaaagtttttaaaatatgctactctgaaaaatctcgtgaaggctgtaggaaaagggagaatcttccatgttggtgtttttcctgtaaagatcagtttggggtatgatataagcaggtattaataaaaataacacaccaaagagttacgtaaaacatgttttattaattttggtccccacgtacagacattttatttctattttgaaatgagttatctattttcataaaagtaaaacactattaaagtgctgttttatgtgaaataacttgaatgttgttcctataaaaaatagatcataactcatgatatgtttgtaatcatggtaatttagatttttatgaggaatgagtatctggaaatattgtagcaatacttggtttaaaattttggacctgagacactgtggctgtctaatgtaatcctttaaaaattctctgcattgtcagtaaatgtagtatattattgtacagctactcataattttttaaagtttatgaagttatatttatcaaataaaaactttcctatataattaaaaaaaaaaaaaaaaaaaaaaaaaaaaacaaaaaaaaaaaaaaaaaaaa

SEQ ID NO: 117033 - DNA, 1000 bp, Homo Sapiens
ttcattgtccacaaggtgagagaccaggaggaggaggaggaagaggaggcggcggcagcggagatggcagtggaggtggcagagccagaggagggctccggggaggaggtgcccatggagactagagagaatggactggaagaatgtgccggtgagcctttgtcagctgacccagaggcgaggagattgctgggcccggcccctgaggacgatggtggccacaatgatcacagtcaaccacaggcctctcaggaccaggacagccacacactgtcccctcaggtgtgaccggagactttgcagtgtgcatggtcaggggtggtgccgaagtgtcttccacctgccctgcggaccgtggaaaataaaaggctctgcccccagtgtgagtgtgaccggttgtaccctggagtagtgtctgccctgagctgccagtgctgggtatcccccagccccaggaaatgtggggtcggccaggaccctcacagctctgaatttgcttctgttatttatggcttttcgctgcttcttggtgccccatctcttgtctgtgtccttccaaccccaagctgcttatgtggcccaaccccactgctgtcaactaggcttgaaccccacagcggctgtgctcttctgggaggttcccgcttgctgccttcagccagggcgctcctcagagctctattttcctgcagacaccagctctccttcctgcctttagatcctgagaaggagggaaatgaggggtgctgacacagtccctctgggagagctctgcctagtctggtttggcgagggcccttgatcaccttgcccctcctccctgtcttctctgattcttttccctcaaaatagtcctgagaactaattgtcacagacattggaatatttgtactgctctcgtgccatttgagaggctgctgccccaggcaggccagcccctactcctcttggctacactcatgttgctcagactatatttcaaataaaaaatcttctcacc

SEQ ID NO: 117034 - DNA, 1000 bp, Homo Sapiens
actcattatgttgtcagagccctagagctggctagtgtaacactgactatgagtaggtgggcccacacttgagttgaggtgatttcatggtgtctttccaggctcttgatagggtgtcactgcatgcaagccatgaatctgttttgagaatcctctccattttcccaaataaaaacctatcacaacagtgactatatcactcagcattggatctaaatataaaagtggtgctttcagtgtttttggcagatagtgttccataagctttccatcagaagggattttagacaccttagaggtccgtgctacatcgtcacagttcctccgaataaccttaggtggtagtgttacttgcctttgacacctctgcatatgttttaatgactagatccaaactgtgttgttcttaaatcaaaaattggataatttgtaatatttatgtgttaatcacacagtatgctctctgaagttctcttaagccttcagtttatactcttaatttaattttctttctgagctggagaactggctttgcactttggttacacagaacattggtttccaattcagtttaactgaaatttgctgctgatatgttgagtttgttctttaaaaaatagctcatatatctcatctttcctcctgtcttagaagaacagacctaactagtgaatgtattaatgaaaatgcatctatttcagagctgacatgaagagtttagtttttttactttataaactgtgaatatgagtatgccagctgcatacgatgtaactaatcatatttaaatatatttcactttctctttgactttagaccttttgaagtctgtataaacttgttttgaaatatagtctctgcttacgaatgtcataacaaaataattttttgcatgataaaaaattactttgattacaaaaggcatattctttcatggtttctgcaatgagaggaagtgtaatgattattttaatatttctattaaatatgtttaactgta

SEQ ID NO: 117035 - DNA, 1000 bp, Homo Sapiens
tacttggcactgttatctgctgtttctgcttcaattaaagacgaaaaattctttgaaaattacaaccagtcccttgaaaagtggtctctctcacaagctgtcactggtctaatagacacaggaagaatatctgaagctgaaactctctgcacaaagaatttaaaaagtaaccctgatcagccagccgttatcttacttttgagacaagttcagtgtaaaccactcctggagtcacaaaagccactcccagatgctgtacttgaagaactacaaaaaacagtcatgtccaactcaacctctgttccagcttggcagtggctggcacatgtgtatcaatcccaaggaatgatgagagctgcagagatgtgttacagaaagagtctacaattggcatcccaacggggcagttggagtgggaagctctcaagtctgttgagactagcactacttgcattaaaagtctgtatggctaacatttccaatgatcactggccatctttggttcaagaggctacaactgaggccttgaagctttgcttttgtccactggctgttcttttacaagctttgttacaattcaaacgcaaaatgggggcaagagagacacggcgtcttttggaaagagtggtatatcagcctgggtatcccaaatctattgcatcaactgcacgttggtacctactgagacacttatatgccaaagatgactatgagcttattgacgtgctggtaaacaatgccaaaactcatggagatacaagagcattggaactgaatcagagattgtcctcacaataacattggattattttatagtaaggaagcaaagaaaaagctgtaagaatgaagcaatgaatcaagacttctacccaaagcaacatttttttaaactatatttattccttttctaaaggaatctagagaagttgaagtttttaagttaggaatgcaattttctgttaactccaaacctgattttaatctgaaaaaaaaaaaaaaa

SEQ ID NO: 117036 - DNA, 1000 bp, Homo Sapiens
gagcatgtcactgcacagaagatgaagaaagcctattatctgacccagaaaattcctgatcaggacttctatgcatctgtgctggatgtcctgacaccagatgatgttcggattctggttgagatggaagatgagttttctcgccgtggtcagtttgaacgaatttttccttctcatatctcctctcgctatctccgcttttttgagcagccacgatatttcaacattctcaccacccaatgggaacagaaataccatggcaacaagcttaaaggagtagatctgctccggagttggtgctacaaagggttccacatgggagttgtctctgattctgctccagtgtggtctctcccgacatcacttctgactatctcaaaggatgacgtgatactcaatgccttcagcaaatcagagactagcaagctgggaaaacaaagctcctgtgaggttagcctactactctctgaagacgggaccacgcccaaatccaagaagactcaagctggcctctccccttatccccagaaacccagttcctcaaaggacagtgaggacaccagcaaagagcccagcctttctacccagacgttacctgtgatcaagtgctctgggcagacttcaagactttctgcttcctccactttccagtcaatcagtgactccctcctggctgtgagcccataactggcctctctccaaaagcctctgcccaggagcatgggcatcagctacctcacgggaaccagcctgctgttcagaccagtctgaccccctacccctttcaccctgtccctcctcagagtattttttgaagtggttgcattatagagatgggtatttgtagggccggagggatggtagtgatggggagaaggtgaggaagggtcaccctctgtcacctgtctgcctggctggcacctcatatctcagcagagaagccagtggtggccacgcagccttataaagcaggttttggtttccaaaaaaaaaaaaaaaa

SEQ ID NO: 117037 - DNA, 1000 bp, Homo Sapiens
gaagaactttggctttagccttcaagacgcactgagcagggctcgggagcgaaggctgctagagggctatgagatctatgtgacccctggagtccagccaccaccacctcagatgggagagattattagctgctgtggaggcacatacctacccagcatgcctcggtcctataagcctcagagagttgtgatcacatgccctcaggacttccctcattgctccattccactacgggttgggctgcccctcctctcgcctgagttcctgctgactggagtgctgaagcaggaagccaagccagaggcctttgtcctctcccctttggagatgtcatccacctgagaactccactacccttttccctcccagaccacgaattagaagatatgtggaagaaagaactcagggcgttagaaaggattggggtatattgatacaacttgtcctggaacatgggtgggaccagaaatctttatgaataaatgaaaagataagggatttggaagccacaggttgttttttgtttgtttgtttgtttttttaatggccattttattttatttgtatttatagttttttatttgtatagatttaggggatacaagatttcttacatgcatgtattaaatggccattttaaaattagctagtttcatgctcagatgtcataagtggcagctatctttagccagactgttgcagttattgctcgatgccactcatggtgtcctacctcctatttggaaaccatctctatttttttcttactgagattcttactttggggtcaggaacttgaagggatgcttggagtgagtagatttgagggtccagttatggagtgctactaaaacattttcttctctcctggcctctggaagcatctttagctttgactttgggcaagtctctgtacttttctggccagcttttccaggatttataaaattagagcttcggcttgacctctgtgataaataaatattcactctgtgcctt

SEQ ID NO: 117038 - DNA, 1000 bp, Homo Sapiens
ggccctgagcttcggaagctgccagtgccacagggacccaaccccgtggtggtggtgctgcagcaggtcttccagcttatccagaaggtgctgagcaaatggttgaatgatgcccaggttgtggaggcggtgtgcgctatctttgagaagtctgttaagacgctgctggatgactttgcccccatggtgccacagctgtgtgagatgctgggtcggatgtacagcaccatcccccaggcctctgctcttgacctcactcgacagctggtccacatctttgctcatgagcctgcccactttcccccaattgaggccctcttcctgctcgtcacctccgtcacactcactctcttccagcaagggcccagggatcatcctgatattgttgattcatttatgcaactcctggcacaggctctgaagcggaagccagatttgttcctgtgtgaacgattggatgtcaaatctgtgttccagtgtgctgtgctggccctcaagttccctgaggcacctactgtcaaggcctcctgtggcttctttacagagctgctgcctcggtgtggggaagtagagtctgtgggaaaggtggtacaggaagacggtcgtatgctgctcatagcagtgctggaggccattgggggccaggcctcccgcagcctcatggactgctttgccgatatcctgttcgccctgaacaagcactgcttcagcctcctgagcatgtggatcaaggaggccctgcagccacctggtttcccctctgcccgcctcagccctgaacagaaggataccttcagccagcagatccttcgcgagcgagtgaacaagaggcgggtgaaggagatggtgaaggagttcacactgctgtgccggggtctccatggcacagattacacagctgactactgaggggtgcccccatcccatccaccccttctcttcatccttccctattcccaaagagtaaacctggaccctcaaaaaaaaaaaaaaaaaaaaa

SEQ ID NO: 117039 - DNA, 1000 bp, Homo Sapiens
cctgagacgtgtgacctggatgatcctccaaaccctattggtcccaccccctgggaaaggccatggtgccagtttgaaaggtgctagctacctgaagccttgatatttcttcatggctgccgcacattcttccaccttggccagaacaggttctgaaaaccacttctctaccttcaccaccaccactgcccatcttgatctctttgagggttttcccatttcacttgatcttatttttgtttatcccttcctgcactttgtcaagagagtcctccagtttctatccaggaatgttcacatccaaagggttggacccacggatcattctgaatcttcctgcccctcctcactgcttaaccctgagaaccacaaatataatggaagcagttccccccaccctcaccccatctctttaagctcatcctagcaagacctctagagaccctagagactcgactttagtccttccccgccatggcacagtggggaaggtgtcaatggggagtgtcacggacaggaggtaggatcctgccgctcgcgtcttagtgtttctccctcaagactttccttctgttttgttgtcttgtgcagtattttacagcccctcttgtgtttttctttatttctcgtacacacacgcagttttaagggtgatgtgtgtataattaaaaggacccttggcccatactttcctaattctttagggactgggattgggtttgactgaaatatgttttggtggggatgggacggtggacttccattctccctaaactggagttttggtcggtaatcaaaactaaaagaaacctctgggagactggaaacctgattggagcactgaggaacaagggaatgaaaaggcagactctctgaacgtttgatgaaatggactcttgtgaaaattaacagtgaatattcactgttgcactgtacgaagtctctgaaatgtaattaaaagtttttattgagcccccgaaaaaaaaaaaaaaaaaaaaaa

SEQ ID NO: 117040 - DNA, 1000 bp, Homo Sapiens
ccgtggggcccaggggctggggccacagccttgccattttcgttgccataccctcttgccttactcgcggtggaggccggatttgcacgggcagacgtgcacctgggcccgtggggagcttgttctgaccagacgtacagattttcattctcagaaagccttacttttcaaccaaatttttgtagccagttttgtgaatttgtacactgaaagaaaatttaaataaaggggaagtccacattaaaaagaaaacaaaacaaaccctaactaacttccaaatgggtctcctggtgcgggggcgtgagtggccgtgccctgggtgtgctgcctgtctgagcaagcttccctagctgtggaaccccgggccccctgctgcgggctctgccttggtgtcatgcctgctgcacccccgtttccactgacgtgccgtctgtggctatgggggtggtcactggaatgacggtcactccagacgtcagccggcagggatgcagcaggctggccgcgcaccggggctcgggcaccctctggccccacactggcaatgatgccacaccttgccatgtccacgctgttggtcaaacccctctgtcatgcctctttaaagagaaaagaagagaaagattttttttttttttaatggcagaccgaagtggagatcttgtagcctagataggatagtctgaccttctagcatagtctttttggcaaatgatttgtgttttcagtgtgtggggaagctgtcctgggggctggggcgacagatagcacataggctgtttctggggctgcaggggcttccctgagctggatgttgtgggtgttgccgtgcttcaggaagtgtggcgaccagaaagcgtagacccggggcccagggtctgcccgcccctgcagcctggcctccccgcacaggctgtggcttgcactccagccgctctagtctctcaggaatttgcttgttacttgtactgtgtaaataaagcttcctggttcaataccc

SEQ ID NO: 117041 - DNA, 1000 bp, Homo Sapiens
agttgtaaaaagaaaaggaatgaaataaccgacccatcatcttctcacccaccctcattgcattccgctgtagtgaaaggacgagccatttctgggcacgtggcagcagtcgctgatctcccagctgaggggctgagcactggaatgctgtggctgcactggccccagtccatagaggggtcaactatgctggctggactggctgccttgttcctggcctaggacttagcttcataactatcacctgcaccgactaggctgaggtgctggtacttgccccaacccctacttttgtatttatatgtgtgtgtgtgtgtgcgtgcgtgcgtgcgtgcgtgtatgtttggtctggaccagcttctgccagcccctggcctttactttcttccttgcctatgcagggcaaacaaaatgtgaaattctgccctcagctgagctgagtaagggctcctgggggttggctggagatgggtgtggcatctgtccaggcctggaaccgtctcaagacagtgctggcaaagctgcagtattgagatgctaaggagctgatgccacctctttgtcttcccctaaaggagaacatggggataacatgggtgtgtgcccacaacactctaggtgcagagcccctgtggcaaagtattacagggtgtgggtggggattaccctgaatcggggattttaatgatggaagcaggcagagcctggtgggtgattctgtcaacagaaaattgcaatcatgcaggggctgggagggttaggatgaaaaaactggggccattggaggcccactgtaggtgggagggagctgattttggggtggggggtgggactagagggcaatactgaaggggttaaacaggtttttgctcctcaagaatttgtttgcctgggcccaggattggagggcttcacaccaataccctgtgtatacaagaatcagatttataatacttccccttttttgttacgtatgaacactataaaccaaattattttg

SEQ ID NO: 117042 - DNA, 1000 bp, Homo Sapiens
tttcctgaggaacttgatttttctgtccctggatcgccttgtcataattgggtctgttccttttactaccactcttgagtccatatatgaaatcattaaagttggatgatcagttttttataaaaatatatatttttgtccaagaaaaaaaaaagcatacatatgtgattatggctaaatcaaaggtaactggaatgtatatacttttgctaatgttccagcaacactgctattatactatccaaatttttattgtaacaaaacctctttaagcaattggtgattgccatgggacttttcccatgtcttctgctgtaattatcctgtgcagaactaggaagaaatttttttcaggactgctctatggtttcctttaaaagaaaaaaacttctgtttgtttttagcagtcattatttacaatttgcagtgattaacttggcaaggcttccttccgtgtttatccctgtagccatcatttaagtcaggaacagtcagaaaaatatttattttattttttttttgggtgtctgcaaaggtaaaaatccattaaaaccttaagttaaatataaatgttacaactcaatgtttgcttttagattttatacagtatttgttttgttttggttttgagtgtatataatgcagcattagcaatatggttccaatagaggagttaaatatatattgttaaaggagacctgtagcagtcaaagattttattgatttaatgacaaaggaaattaatgaaaatgtttttgtttttctgctgtaattctgcattaagctcacatgaaaatcatgattctagagtttggaatgcaaaattaattgttttaccctcaagctgggaatatttttcaaaataaatactataatatagatatcaaattattacctccccatgttatgttgaaaatttttttattaaattgataaaactttatttccattatattcataatgttctgttatacataacattaaaatgttcattaaaatc

SEQ ID NO: 117043 - DNA, 1000 bp, Homo Sapiens
aggtgacgtgggcgtggtcacctcacctgcaaggctttgtggactctgcacaccgtatgacccccggttttacagtttttagctgttgaattttggaaattggcactgggtgaaaaggtcggaggactggctcttgtagtcacagagtggctgcaggcctttgaagagtggaggaaagaaaagcccttctccttgccccgcacacatttcactcccactgtactgggcttccaagctttggcattcaggcccctatattttctgtaggaaaaatcgttgagaacacttttctatatgggtgattttgagaccatcgttacgctgtgcgtaaagaatgtacagagaaatttgtaggtattttttgaagaacattaatttgttaatgatatgtagctatttaatttttccctttcctattgtaatcattcattttttttgttgttcggaaaaaaaaagttgatctttttttttgtcgtagatttgtctgtaaaagtgcaggaacagttattctatgagaacactgcatctgcattcatagccacgagtttgttattgctacaggctactgagcgtcgtaacaggaaaaccacccacagctgaccggctcggtggaggacactcctgggacaggtctctttgtcagtgaacaagggcgtcactctgggaggggtcggcggtgctggcggccgggtccctggtgcactgacctatctgggataggcagtaccctggaggggggcctggggcagaggaggcagcagaaaaccaaacatttcactgagaaagccccctccctgctctaagaaggggctccgtgaagttcttcccagagccgcgctgcctgcagtgcgctctgaccttctcttcatgtgtgtaaatctgtaatataccattctctgtggcctgtttttcctggaagaagaaaaaaaaaggtttggcaggccatctttttttgtacttaaaagtagccttaagaacaataataaagtgctcttaaacc

SEQ ID NO: 117044 - DNA, 1000 bp, Homo Sapiens
agctgagaagcgggaggtggagcgctcagccctgcggctggagaaggaccgtgtagccctcaggaggacgctggacaaggtggagcgggagaagcttcgtagccatgaggacacagtgcggctgagcgcagagaagggccgcctggaccgcaccctcacgggggctgagctggagctggcagaggcgcagaggcagatccagcagctggaggcgcaggtggtggtgctggagcagagccacagcccggcccagctggaggtggatgcgcagcagcagcagctggagctgcagcaggaggtggagcggctgcgcagcgcccaggcgcagactgagcgcaccctggaggctcgggagcgggcccaccgccagagggtgcgtgggctggaggagcaggtgtccacactgaagggccagctgcagcaggagcttcgaaggagctcagcacccttctccccaccctccggccccccagagaaatgagctcctgctggcatctggagaacacccctgtgcctgggacaggggaggacccttcttttggacagcccccccccccagagcccggtcccttgggggcctcaagctggggtgggatgaggaggcgctctgctggcagtgctgaggacgggtactccagctccaggcctggagaggcttcccagcaacacctgcagtccagcccccctcttctaggatgagccactgtagatcattaaagttcctccttgagaggctgagccgtagccaggattggggagagcccttgtctctggtcagccctggagcatgggatcgtgggaaagaggagggggaccaggcccagggcaggggtcagaggcccaggccctgacttcggcttcccagagatctctccgccttagttaagagcatgtgtcgggaaattcctcagagtgctcagagtccctgtatttttatacctttttacaatgttaactgttcagaactgttttttgtaacaaaaccttgtttttaaaaaag

SEQ ID NO: 117045 - DNA, 1000 bp, Homo Sapiens
cccaccccagcagtctcttctgcactggccgtggcggtccccctagggcccatcatggcagtcacagcagccccagccatggtggccaccctggggacagtgacaaaggacgggaagacagatgccccgccagaaggagctgccttaaatggcccagtgtgatgctgctgccgcccggccacggcccaccctggtcaggctgcctccttaatcgagaaaactacctggtgatgcaatcttttttttttttaatttaatttaattttaaaataaatgctgcattggtaaagctggcagttgaaaccagttggacggcccagcttgcgtctcttctgcctgagtgggcctctcaggtcactcgtgccctgctggaggacagaggggcacctcagccgcccccaagcccagagcacagcaataaggtcggcctgcaggagccggggtgggggtgggggtggggggggcaggaccctgagatgccaccaggacctgatgggccaggaagggcgtggacatggaggctgtttttacagttttttttttgttgttgttttgtttttaaagaatacagaaggagccaagcttttttgcactttgtatccagctgcaagctcagggcagagtcaagggcctgggttggaaaaacctgactcacaggaatgcataattgacccttgcagctacccaatagcccttggagctggcactgaaccaggctgcaagatttgactgccttaaaaacacaaggccctctaggcctggcagggatgtccctgtgcccagcacagggtgcctggcagggggagaccacaggtatgcaggtggggggacatggtgtggcactgggggctcgaagactggtttctagcactaccggtcacggccatgtcgtcctagaagggtccagaagattattttacgttgagtccatttttaatgttctgatcacctgacagggcaccccaaacccccaactcccaataaaagccgtgacgttcgg

SEQ ID NO: 117046 - DNA, 1000 bp, Homo Sapiens
attccacaggttccactgtgtgtcagctacaagggtgagaagaacagtgtggactggggtgaccttaacctggtgctgccctgtctggagtaccacaacaacacatggacatggctagactttgccatggctgtcaaaagggacagccgcaaagccctggttgcccaggtaatcaaagagaagctaaggctgaagtctgcaacaggctctgaggtccggggaaagctagaaactaaatcggacctgaacatgcaacagcaggaagaggaggagaaagcccggctcctcattggtttaagtgtgggcgacaagaaccctggcaagaagtccatctttggcaggcgcaaatgatttggcgattcgagtggctgcagtacaggatctgactctggctcaggctccagggacttgtggggtgggaggggcttcccgttatccacgaggatttgtgggtgtcagagcccataggcatcactcttcagcacctggtctgttcgctgcagggcatggtggacagtaatgctgagttctgtctcacactgatcaggctcagggccagagaggcaacaagagagcaagacccagggaatgggcccagggcaggaccctattcccttggggtcaagtgaaagggtagggggatagtcctgatcaagtgtgataaatttttatagacatatataaatatatatatattatatatatatttctaagtgtaactgtccttcctctgtgccaggaaacgggagggggctgatcctctgatcctcactccactgtcatgtttgaaagaggtattggtgttctggagtgggggtcaacccctccccagtctctgtgctaagttcacttgggaggatggcagtaggagccagggctggccatgggtcccctacccttccccgtaggatataccctggagaatggcaaaatgatttaaagagaaaaaaaaagatattttaaatttgatgctcaaaaaaaaaaaaaaaaaaaaaaaaaa

SEQ ID NO: 117047 - DNA, 1000 bp, Homo Sapiens
aagcattgtttcaaaagtttttttatatttattttttttaaggaaaaggtatagacaaccagctaaactgcctttttggtgtgcacacacatttcatgtgcagacgtgcctctgtgtaaatgtacacatgaacttcatgtgggcttaattttctgtgctataaacaaaagtgtttattttttattaacctcatggatatttagatggaaagtgatggcattcacaggcttgatgtattccactgttattactgttacctgcacaaatgaaaaacaatactcaacagtaattccactcccatgaaactttggtcattgttatgcattaagtggggcttatctttggtttggagttcatttgaactcttgaaccttagtttagtgaagatgaactgtctgttcttaggtagaaacggtgtttatttaaaaatcagttttaaaaaatgagctaccatatgtgctgtctattataaatgggacaccaaacaaaattttctattacagttgtgtacttgcaaacattttgctatacagtacttcatagatgcatacaaatgagctcacttattacaaagacaaacgtttaatttgctaaatattttaacaagtttgttatatattttatttaatttaaaagaaatctcttaccaacctacatatttattactataatttgctatgacttcaggttaatttatttgtgtttgcatagtttgagcaggatgttttgtgaagtatgtttgtatttatttgcctactttgtacttgatgtgttttgtaatgtgcactgaatttgttttcttttcaactatgttaatgatcaatactgtaaattgggtcttttgtaaacaaaaaggcaatgatgtatgcattttttttaatttgaggtagtttgtttgtatactgtttctccaaacacttaatatttcttacatcaaagcaacaaaattgtgttcagtgctgtacatttggtgtatggtaggaaataaaaattgataacg

SEQ ID NO: 117048 - DNA, 1000 bp, Homo Sapiens; identical to SEQ ID NO: 115368

SEQ ID NO: 117049 - DNA, 1000 bp, Homo Sapiens
agctctggggcctccaggccatgtggctgttcccacggcccagtcctcgctgcagtaacccctgggggctctgaccacctatgggggccgggcaggagcctctggggcctccactccgacatcaggacctgagatgaccgctgtgtggcgctctctccctgggcagggtggatgccacaggcccctctggctcccaggtgctgcttctccacaggtgcggcctggcccggcctcctaaaggccacaccctccccacgcacttcccaggccagaatccaaacatcgggaaccctgttttcttctgggtgtgtctcacttagaaatcgtggttcttccccgagggtgcatgttgcaggagggagagggcagggaagactcacagcagagcaggagggggcctgtgcttctcggggtctgcaccccaggcacagcggtgtcaccccgcaggaccgcgggcctgccccaacccccagcattcccgggtgggcccagaccccatcaccaagactggccacccgctgcgtgtgtgtgcgcgcgcgtgtacgtgtggccccacatccgccgccttccacgctaggatgtaagaggtcgcctcctattgtacatttggggaaagccttgggtgtaaatcagtgtaaacttggaggagagatttttctatcatgtagagtaggtattttttatagattgaaggttgatcaattttttaatactttcaagagaaaactgtgtatacacatgaaatatatatatatatatatatatatatatgtataatatataaagactggcaccctgcctctctgtgcccaggcccagccctggtgacatggcaccactcagcagtgctgtcactgtaagcatggactcccaggagacagtgtgggaaacgctcctgctttaattccccgagaaacggctcttcctgcctggatgcaggagggcaggggccaccacagattaaagctgttactgcacaaaaaaaaaaaaaaaaaaaaaa

SEQ ID NO: 117050 - DNA, 1000 bp, Homo Sapiens
tcagaagaaaacaggttaacaatcaagtagtgaaagcactatattctagtcattaactcaacggagccagtctcaactctgctgggagcacccacaggtctctgtgggggagacagggactataacagggaggcagaattcaggttggcttgacaacacaccttaggaacatgtgctaaggggctaaggaggcatcagctgtcttccttattctaccagggctgaaaatcggagtcacttaggaggcagcatgagaacagtggcacaccaccagtgaggcacatgttgcctttttgtctttaagcaacaccttagacagggcctgaaccctgggtgggggcactggatgcctgaagtaagtaagttttctcagtggggcagtctcataaaatcaccaggacattgaccacctgacctcccctaactagtgctggccaaggcctgagagttcacagaacctgctaggtcttaagagccaaaggaaggaagtggttgagggccaggaaagagaaggaatgtcatgccagggtgttactcctcaccaaaacttggcagttctttttggggccatgggacacctttctctgaagaggggttggataaggcaaaggttgaagtgtcttctctaggcacgttttctagcatgtttccttttacttggttctgtctcacaaagctgggaggtagatgattcttccgggtcctgagcacctgcttcatgaaggaagataggtagcccagagaagaagttttggacttaacaacataccaaggcagctctggcctgtgactcaggcgtttgttggagagctgcaggaaaaccactgcagtgtgcctgcaacaggacaagacccactcctgtttctggcggtaccagctaccctggaatggtggcgtgtcctgctgtacccaactgacttgcttaggtacctggcagctgtgaccacagctcaagtaaaaaaacaaaaacaggcaaataaataaacatgcttaacatgtc

SEQ ID NO: 117051 - DNA, 1000 bp, Homo Sapiens
aaagttaaccaaggaattattcttttctcaccaatcaacacttttaagaaatatatatatatatacacacacatatacacatgccttctatatattgtaacttaaagaaaatacttataaaaagacttcatttttagtgattgacaagcaaacgggttcatttaaaacaggttcctcttttgttagttacagggggtttttttgttgtttttttgtttttgtttttgttttgcgggggtggtggggtttgagacggagtcttgctctgttgcctaggctggagtgcagtggcgcgatcttggccccctgcaacctccgcctcccgggttcgagcaattctcctgcctcagcctcccgagtagctgggattacaggcgtgtgtcaccacgcctggctaatttttttgtatttttagtagagacggggtttcaccatattggccaggctggtctcaaactcctgaccttgtgatccacccacctccgcctcccaaagtgctggaattacaggcatgagccaccgcgcccggcccaatcatgtgtttttgttgaaatgatcctaccagtgattagtggctattgagagttttacagggttatacattgttaagggaccaagaatcaagtacaaaaaattaaaaaggaactgtaaaatcccttggtcattcataaataaatatctaaattaggaatactaattaattgaattttcactcatgagtatgttctgaatatttaatatttatttctattattttcatatgttaagatattccattaaatctaacttaaaagaattgtatgtataaattggcattaggatacaaatgtaaatgtttttaatgaaattttgcaactttttaatattttaacatagttttctatttgtctttatttcaagtaccagaattacaaaatatctaagtaatatatttttgttgtcgttttagggcttaagggttaattcacccagagtatattaatataataaaaagatcact

SEQ ID NO: 117052 - DNA, 1000 bp, Homo Sapiens
agaatatattaaatgtatcctaatggatgaaagaacttttttaaacaacaacattgtctacacgttcatgacacatttccttctaaaggttcaaagtcaagtgttttctgaagcaaactgtgccaatttgatcagcactcttattacaaacttgataagccagtatcagaacctacagtctgatttctccaaccgagttgaaatttccaaagcaagtgcttctttaaatggggacctgagggcactcgctttgctcctgtcagtacacactcccaaacagttaaacccagctctaattccaactctgcaagagcttttaagcaaatgcaggacttgtctgcaacagagaaactcactccaagagcaagaagccaaagaaagaaaaactaaagatgatgaaggagcaactcccattaaaaggcggcgtgttagcagtgatgaggagcacactgtagacagctgcatcagtgacatgaaaacagaaaccagggaggtcctgaccccaacgagcacttctgacaatgagaccagagactcctcaattattgatccaggaactgagcaagatcttccttcccctgaaaatagttctgttaaagaataccgaatggaagttccatcttcgttttcagaagacatgtcaaatatcaggtcacagcatgcagaagaacagtccaacaatggtagatatgacgattgtaaagaatttaaagacctccactgttccaaggattctaccctagctgaggaagaatctgagttcccttctacttctatctctgcagttctgtctgacttagctgacttgagaagctgtgatggccaagctttgccctcccaggaccctgaggttgctttatctctcagttgtggccattccagaggactctttagtcatatgcagcaacatgacattttagataccctgtgtaggaccattgaatctacaatccatgtcgtcacaaggatatctggcaaaggaaaccaagctgcttcttga

SEQ ID NO: 117053 - DNA, 1000 bp, Homo Sapiens
tgcattcagtgttccggcatccacaggagccttggtgttcacttctccaaagtccggtctctgacccttgactcatgggagccagaactagtgaagctcatgtgtgagctgggaaatgtcatcatcaaccagatctatgaggcccgcgtggaggccatggcagtgaagaaaccagggcccagctgctcccggcaggagaaggaggcctggattcacgctaaatacgtggagaagaagttcctgaccaagctgcctgagattcgagggcgaagaggtggccgggggcgcccaagggggcagcctcctgtgcccccaaagccttccatcaggccccggccagggagcttgagatccaagccagagcccccctctgaggacctgggaagcctgcaccctggggccctactgtttcgagcgtctgggcatcctccatctcttcccaccatggctgatgcccttgcccatggagctgatgtcaactgggtcaatgggggccaagataatgccacaccgctgatccaggccacagctgctaattctcttctggcctgtgagtttctcctccagaacggggcgaacgtgaaccaagcggacagtgcgggccggggcccgctgcaccacgcaaccattcttggccacacggggctcgcctgcctgttcctgaaacggggagctgatctgggggctcgagactctgaaggcagggaccctctgaccatcgccatggaaacagccaacgctgacatcgtcaccctgctacgactggcaaagatgagggaggctgaagcggcccaggggcaggcaggagatgagacgtatcttgacatcttccgcgacttctccctcatggcgtcagacgacccggagaagctgagccgtcgcagtcatgacctccacacgctgtgacccgaggcccacggggcccgcgcctgcctcccttccccgccaccgggccctctgccattaaagcctccgtgcttcgctcaaaaaaaaaaaaaaa

SEQ ID NO: 117054 - DNA, 1000 bp, Homo Sapiens
aaccccaaagagacttgcgcacctgaaaagcttgtctactgaagaattactccagttgtaagattgagccctctcctactctcccccaactcttatgcacagaacacaggcagtctccactattgataccagttaaaaatttcttgttattgttgctgttgttgtttgtataaaggaattgaacaggctgcttgcagagagataagagttggtgctccagaaaaaaatttctcttctagtggaaataagtgcccctacccccagccggtcagctaattctctactgacagctgagacctcctactcaagtgcctgttgccttcaggtatagaagaggtttcctgaagaaacagacctaactgtacaacagcagaggaaacccatgccaactgttatacaagttaacagttatgttgattcttaaatgggaatggtgagttagaaattcccagacatgggcgatggggagggaagaggaataagaaaagttacgaggtagaattaggggccttgaaaatatgacaaactctgagggaaacaaagacaatgtggaaagaataacttaattttaattccatctccagagagatttgaggtgtatttaagatgaaaaacaggatactacaaagaaacggaaaactcaggagttcaagaccagcctaggcaagatggcaacatcccgtctctacaaaataatttttaaaaattagccaagcatggtggcatgtgcctgtggtcctagctacttgggaggctgaagtgggaagatcacttgagcccaggagttcaaggcttcagtgagccatgatggtgccactgcactccagcctgggggacagagtgagaccctgtctcttaaaaagcaagaaaagaaagagaagactgagaataagaagatctctttgaaaataaaataagactgctaaaagtatttggtatacagtctggaaaataaagttgagggaatctctccagataaagagcaaaaagaaatagatag

SEQ ID NO: 117055 - DNA, 1000 bp, Homo Sapiens
cctcaacaagggagcctccacagtattgaaaagttaatataattaatgtaagtgggcaagttgtatggggaatgggtagtctaaattgctcattttagccagtaaaaacattaaattagtttcttagatcaagaaaaggaaatgttagaagttatttttcccttccagaggggtctatatgtgtaagcaaccaggacttttgaaataagttgcatctctggatttgtgatctgtctcctggatgattatctctgttttgggagacaggtattttttcttcatgcctgctctagtctcatctcatatctttaattcattcagcaagtatacacaatagtattatcgtctactgtttgttgtaaatatatatatattattttctttttggtctgagtaggcttgtattggtaccctaggacataaaaatcacatatatcatgtttcagtaaatgcagtgaaaggaactatattattaaattgctgggaatttctgtaaatttgagactacctttatattctccaacacaagaccgtgtaggtgtcccttcagagagtatatttttctagcttggcttctttattttctttatttttttgagatggagtcttgctcctgtcgcccaggctggagtgcaatggcacgatctcggctcactgcaacctccgcctcccaggttcaagtgattctcctgtctcagtctcccgagtagctgggattacaggcacttgccaccattcccagctaatttttgtatttttagtagagacggggtttcaccatgttggccaggctggtctcgaactcctgaccttgtgatctgcccaccttggcctcccaaagttcagggattacaggcatgagccaccatgcccggctgttttttttaagatagaaaaatatacttcatgtatagcctattgacagataatgactgatattttttcttatagataacacataataaacattgtgaagactaaaaaaaaaaaaaaaaaaaaa

SEQ ID NO: 117056 - DNA, 1000 bp, Homo Sapiens
ctccataattagataaactctttttggattataatcagaattttgccttttttcttctcaaattattacatatgtatgtattatatatccacatatatagttttccctgattaaatggatattaaaataattgcgggtgcttcaggactttttgcttctatatttaagtatattgtttttatagcaagaacatattctgaatgttttataaatctttaataatttatatgtaggtaatatttttgtatcacaatgcattatttttttcctcctttccttccaaactataccactgtatttaccacttctaagagtgactgacgacgggccagatgacccttgaagtagtcattatgtagcaataaatgaagcctgaaacaggtttttttacttccactttaatccttagaaatttcttggcaacttcgcatattttcattgacaccggtgtataagtataaatttaaatgaactaattacttttgcatattttaaattctttatatggtagttattttttataacaggatattaacataagttaaatcctatgtatttgaaattgttacagagctttcctctttacttcaaacagcaaaaaagtggggggcatattgtagtcctgtcatttaagttatgtaaaaaatttaatcattattttgatgctttaaacattctcatgtgtaatatatgtttttgtatcaaaaacactcatatatttcaagaaaaagaaattatgttaaatagccctgttttaagaaaaatatttatgaagcatctcaacttgaagatcaagtcaaagttataactcaggatctgaggtctcaagctaggagagactgagaattttaatcagtttgggcatatagtttggactgaatcacatctgtagtacttagccaaagacaatttggaggagaatatcagccttctggaagtagctacttcctgaacaatgtaaagtgtcgcagatattcaataaaatggcaacctgttaaaa

SEQ ID NO: 117057 - DNA, 1000 bp, Homo Sapiens
ggtggtccagacggctgtggacctgcagctgtggacacacagggacagccacgtccactttggcctggaggacgtgcccctgctgacatggctcctgggctgcctgtccctggtccttgtggtggtgaccaatgagatcgtgaagctacatgagattcgggtccgagtccgctaccagaagcgacagaagctgcagtttgaaactaagctgggcatgaactctcccttctgagccactggctgtggtggctgtagttgcccccgtccctggggctaaagccagacccatttctgaacaggggagtttgtatcatgaatgtttccaggtttgctcctgcacccgtggcactggaaacccagctccccgtgtcagaccccgctgtcttcctgagccctggggctcactgtggaggagctgacggcctgggcccttggccagtcctggctcttccctgggcctcaccagggacactcttgaatgtatggcctcaggcgctccctagagggggcctaaaccccctcacctgtgagctaccccctttagggatcccttgcccccttggagatcccttgccccccagtgcctctgctcgtgggtccctggacacggccttgaagccaaccttctttggaggagcaacagcagcagccttggccgacgcgtccaactcccaaggctgccgtggagggcaggggggtggtgcttgcctggatgtggccccgagtgcctcccctccctccctctgtgggggagtctcccgcctgaacctgaagatggagcagggcccccgcttcgccctggagcctcttcctgtgcctggctcaagctggctgcctgtcagtcttggggaatctggcccaggtctcctcagcctctgccccagttctgggagaagtttctactggtgtatattttttactggaaatgagccttttaggaatgaatgtagactggtttgtattaaaatgtgtcaattgctaaggaaaaaaaaaaaaaaaa

SEQ ID NO: 117058 - DNA, 1000 bp, Homo Sapiens
attgtgtgattttcccccgttaacatgtctttctaaaattgtctattaaagcagaggaaatacctgccaaaggaagtatgtattgcattaatcagggcataactaatattctcctgttcagaataatacttatttacgtgtgaaagcaacatggatgtgattcccaacacagaattttcatgacccttttattgtatacaaataaataccataacagttacttggttagacatcaaatctgtgtgcatgactatgtgcttatccacttaagacaataggtaaaaggggatctgagaaattatgtaatagggagtgggaataaaactacttaattcctgtgggcaggttatattttaagttcaaatgcattgctttaacctttggttacttttattctgttaaacagaattgaagaaagagtattataccagagtgtagtaggctagggtgattgtaagaactctgtaatagaatgtcattgtggatgttacctttttcagatccaagcatataaaaagcctgtatattttttaaaaacacatcttaactccacgctttacgatattataaaagttgaatggttcctcttggtaaggatatttgcttacaagtgctaggaaataactcactgatacctgcgttaacatactttgttttgcctagagaggggcaataaaaatgaaccaaaggatatttccagaaaggattaagaaagctgtttaagaaggccatgactctttaggtgtgtatgtgtacctttcagcatcctaggaatttttatactaaaagcaaaatgttttttccagttagtcttcttcaaggaattactattgttccttttgtcacaggtaaaatcagtgttgggaattataatttgagaaaaatattacccagtaacattgaatgtagatggctaaacgattcttactcagtgtgatgtataatgatgcaacagggacccttgtaaattgtcatacgccaataaaatgtcacaagtaat

SEQ ID NO: 117059 - DNA, 1000 bp, Homo Sapiens
gctgtcctgtggagcttttcctcctgcttgggcctagctaccatctccctctaatcccaggttctctacactgccctggggtttaccagctggattggcttctggttgagaaatcaaagctgggcgtatgattgacttaacccttcaggtattgttacttgaataagtcaagtgcctagcctcacccacctatgatctgtcctttcccagcctcgctggtagtcctggtcaaggagatctaggtctactccattcctcctggcccacctggggcattcactggcagcagctgtgcttcagtggagcaggtggttctcagctgcttgttagtatactgcatgtgacactgttcccacatacaaggctgacttctgaggattggagcaggctctggcggggaccagagctctgcgtgctgctgctgccaccaagaagtgttagcagaagcagtagcagccaactggccctcctgactttggcccagagcacatgcgtggcttgctgaacccaggctcaggtttatccccaaggccccagctttgagaagggggaaggcccctggtaagttattgatgcccccatatttcagctactgctctctttccaaggccttgcatggaaaggcctagccattgtctgaggcagcaatctttggcatctacaggtggcagcagcctttcaccagggctccatctgtgaagagtctcagccatgactttgagctgagcttgggagaagtaaagcaactgttaaggccagcccttgcccctcagacctgccatgaaaggaatgagccctagactgactcctgcagcacccccgggacaggctgggaccagctgtttgtctccaggtgtcagagtccctcctcctcctccaacctctccaacctactttgtttggaaataccgagctacacttcaaaatgtattcaagggatttccaataaatttttttctgtactttaaaaaaaaaaaaaaaaaaaaaaaaaaaaaaaaaa

SEQ ID NO: 117060 - DNA, 1000 bp, Homo Sapiens
ttgacaacatattattccataaaaccagtttagggcacaggccagttcctgattagaacacaggacctgtgggagggactatcagagatgcaaaaattacttcaagatgagtttattgttttcatttgtattgcaaaagttagaagtcattttacaaattaaaaaaacatttttttcttggtagtctttaaaaattaggggattgaaaggatccaggatgggctttgtgtgtgtgtctcagattctcatttattagtgagcacacctgtgtatatatataaatcacaaggagatcatcaagggaaaacattttgcatgtgtaaagcttcatgaagttctctttaaaaaataccaaagcttgtttatttctgataattaacctaagcccttatgaaaataaacaaaatgaagggattatgacaggtattaccaaaaacaccaaaaggaacaaaggggcctgcgttaaaacctaattgctaatgcttcacaactaggagagcatgccgtcttgatgtttaaaaaacccagggtctccacccttcctttgatttgtgcaattctgtcttccacagttccggagccttcagtgaggggtagctacatgccccatgcctgccctttctttccttctttgctcactttactatgggtgtattttaatcttgtataaaaatatgcatgaatgagtcatgcacatgtatacgttatgtatttgacaagtggtggtgaaacaaaatcaaaacagatttgatttgtgtttttgaaatgtcagtacattttgtgccactaacactgtgatgtataaaagagctgtttgaatgccttttaatgttgtgttttgtactctggaatcatatggaaaaagtttgatttgtaatttcaatacatattttaaatgtattgtgtcttacgtagtttgtccccccctttagcagggattcctttttaaagctattttggctggaatacaggtgacttttgtaaaaaaaaaaaaaaaaaa

SEQ ID NO: 117061 - DNA, 1000 bp, Homo Sapiens
ggcaggaagaatgtgctgaaacagcagtttctgtgataccaaaggaagttgataaaatagtgttcgatgctggatttttcagagttgaaagtcctgttaaattattctcaggactttctgtctcttctgaaggcccttctcaaagacttggaacacctaagtctgtcaacaaagctgtatctcagagtagaaatgagatgggcattccacaacaaactacatcaccagaaaatgccggtcctcagaatacgaaaagtgaacatgtgaagaagactttgtttttgagtattcctgaaagcaggagcagcatagaagatgctcagtgtcctggattaccagatttaattgaagaaaaccatgttgtaaataagacagacttgaaggtggattgtttatccagtgagagaatgagtttgcctcttcttgctggtggagtagcagatgatattaatactaacaaaaaagaaggaatttcagatgttgtggaaggaatggaactgaattcttcaattacatcacaggatgttttgatgagtagccctgaaaaaaatacagcttcacaaaatagcatcttagaagaaggggaaactaaaatttctcagtcagaactatttgataataaaagtctcactactgaatgccaccttcttgattcaccaggtctaaactgcagtaatccatttactcagctggagaggagacatcaagaacatgccagacacatttcttttggtggtaacctgattactttttcacctctacaaccaggagaattttgaatttaaaaataaatccaaacattttccttcatattatcaatgcttatatattccttagactattgaaattttggagaaaatgtatttgtgttcacttctatagcatataatgttttaatattctgtgttcatcaaagtgtattttagatatactctttctcaagggaagtggggatattttgtacattttcaacacagaataaaaaatgtactgtgccttg

SEQ ID NO: 117062 - DNA, 1000 bp, Homo Sapiens
atggcgttggaaagaaatgaaaaaccctggttaatcaaagatgttccagagtgcctagaactgagagggaaatggaactcatttggaactccccgtgaggaggtcgaggcgcacagggcaagcaggaagaggcgagggcacttgggggtcattatttgagatcgtaagtcttgtttcccacagacctggccgcgtcaggcagatcatcgcctggggggcctttgccaacgtggggtctcttctaacttcagcacttgacatgcggtcaccggtggcagcgcggtgtgttgaagggaaacggtagctattcattcacagttgccaagagcagctccgcgcctgctggatcgtggatgcagcgtaaacatcttccttcagacgaggcattaaccccatggttaatggactggtcaccagtttttattttatttttatgaatctacctttccattgattgatttaagttcaggccacttttctgtcttttatttggttactgttgttatttgtttttaagttaggatgctttttaacagcctttagaagccgctgctgaaattgatactgggggaagggttccccttccttctagagcagaaaagggagagaagtgttgtattcctgtttggtaacctcagtctcctgtaagacctcctaccacatggcgagtatacaccaatcaggagagggtagctgcctgcataggagcctcgcttccgattattcccttcccaatattattcatccagacttagccacagtgcacaaaagcaaacctgctagagaggcagtgaacaccacagcttctccccagcttggtgccttttacatcgggtttgttctccttccatggtgtgttgctgacattgtcactgagtcccatgtgaggtgctggtgagtattacctttcatctgtgccatgctctagaaccttgaccttgatagttcaccacgtctgatggatccctgttttaaataaaaacgattcactttaaagcct

SEQ ID NO: 117063 - DNA, 1000 bp, Homo Sapiens
gcaaggagatgaatgagatgtctcatggcctcttctagccttaaaagttgaccattacagtgactttatggctccaaagttcttgaagcatctccagccctagactttgacaagaaaaggtagctcagcatctctactttccgtgagtacctgcaggagtccagccaatgtattagagctgatcattaagctccttcagtgagggctaagatcctattctcgatgagcatagggggacagccttgttttatgccacttttctctccccataccttcccctcatgtgtacttagccacctgtgttgctttgaatctgctgccagttctggctcaaatgtggcacaaaatcagtacatcagacacaccatgaaatccctgtggctataaattctaaggaatcttttgacacttccagcccaaagaacttatttttatttcgtattatataagagtccccacctctactccacgtaccccaaaaagataagctgtcctcagatcctccttctacccaggagggaaataatggatattgccaagggaacaatcagaactcatctggctttgaaaacgacctgccaagtttggctagcaggttcagacaacaagagagtaacaattggtggagagccacaggtagctggaaaagatactcccagctgacagggtgataaaaggcagggaagaattgggcctgtgctgatccaggaaggttttattgtttgcttgttttttgtatttactcgtgactaaattttattcatttaagtcagaattttgatatttgaaataagactactttcccttttcttactatctataaaaaagacgaggcagggatgctgtgttctttctgtcaaattctaaatgtgatctttgccattgcttatttgaattcaagaaagctatactttttcatcacatataactcacagtttcatttttgcattgttggattagacttaataaaacctaaatggaaaataaattcctaaatctg

SEQ ID NO: 117064 - DNA, 1000 bp, Homo Sapiens
ccttctcccgcatctcctgggtgcccccttggctttgcctctcctgtgtcctgtctttctgcgttttagaagtgagagcctctccttcaccttttgagcaactgagtcatctcaagtcctgagctctgctctgccgcctgctggtgccttgtaaaggtatactcgttacaggccctagaggttctaatggtccagggttaagtgagaggagactgtactttgtttcaaaggatccttcaccctgatctgcagtgaggtggatagatcacctggagtccctcgtctgtggtcttggaggcttaaattgtaaaatacatcccttatggaatcctaaattcctctaggtgtttttggaaggcgcatttgagccttgtgagctaaaatggaatggatttaatatttcctatctggcatttccatcttgcccctggtacacaagtcactggcctggaactcagccttgattcactgtccgtcttcacggattagctgtgctgttatgttgtctgtgctgcagattggcccatgtgggaagtcgggggggacctgatttcctgcttggaagacttgggggactgccgagcatatcaaagtgtttatagtcaccaagtgaactgcagcacaaccatctcctctccagcaagccctgaagtcagtagtgcctgcaggtgaaaccaaccagccctgtgttagaggaggaaaagcggagatgacatggaagtctccaagcctgtgccatccacctgccaaggaaaagcacaaggtgctatctacttttctctctaggatttagattatcatttatgtgctgttgcacagtgaaacctcacctgtgtgggcgtgaaagctgattggcattgtttttgattcagctttttggatggctaattgttttcactgtgctgtgggaatgcctctgtattttttcccctctttggccatctttttctgaaaataaagtgatggatcctctagccaaaaaaaaaaaaaaaaaaaaaaa

SEQ ID NO: 117065 - DNA, 1000 bp, Homo Sapiens
gcagggaagcatctgtcttgtcattccaggtgccagaatcctctcagagtcattgaagggtgttcacccatcccacccaaggcttggcacactgccagtgtcttagcagggtcttgtgagggctgggggcatccaggcactcagaaggcaaaggaaccaccctacccatttggcctctggagggggcagaagaaagaaagaaacctcatcctatattttacaaagcatgtgaattctggcattagctctcataggagacccatgtgcttccttgctcagtgcaaaactgatgattctacttgctgtagatgaatggttaacacgagctagttaaacagtgccattgttttgccagtgaagcctccaaccctaagccactgggacggtggccagagatgccagcagcctctgtcgcccttagtcatataaccaaaatccagaccttatccacaacccggggcttggaaaggaaggtattttggaatcacaccctccggttatgttgctccagtaaaatcttgcctggaaagaggcagtcttcttagcatggtgagctgagttcatggcttttttttgtagccagtcctgtccctggccatccatgtgatggttttggatggagttaaacttgatgccagtgggcagtgcatgtggaaagtatcagagtaaggctctcccctccagagccctgagtttcttggctgcatgaaggttttctttagaatcagaattgtagccagtttctttggccagaaggatgaatacttggatattactgaaagggaggggtggagatgggtgtggcagtgtatggtgtgtgatttttattttcttctttggtcatgggggccaaggagaaaggcatgaatcttccctgtcaggctcttacagccacaggcactgtgtctactgtctggaagacatgtccccgtggctgtggggccgctgcttctgtttaaataaaagtggcctggaagctggcaaaaaaaaaaaaaaaaaa

SEQ ID NO: 117066 - DNA, 1000 bp, Homo Sapiens
cagagttctatgttggaagtattcttcgtgttactacagctgacccatatgccagtggaaaaatcagccagtttctggggatttgcattcagagatcaggaagaggacttggagctactttcatccttaggaatgttatcgaaggacaaggtgtcgagatttgctttgaactttataatcctcgggtccaggagattcaggtggtcaaattagagaaacggctggatgatagcttgctatacttacgagatgcccttcctgaatatagcacttttgatgtgaatatgaagccagtagtacaagagcctaaccaaaaagttcctgttaatgagctgaaagtaaaaatgaagcctaagccctggtctaaacgctgggaacgtccaaattttaatattaaaggaatcagatttgatctttgtttaactgaacagcaaatgaaagaagctcagaagtggaatcagccatggcttgaatttgatatgatgagggaatatgatacttcaaaaattgaagctgcaatatggaaggaaattgaagcgtcgaaaaggtcttgattctgagaatgaatttggttagttgcagaagatacattggctctaagaggatatattttgagaccaatttaatttcatttataagaacatagtaattaagtgaactaagcattcattgttttattaatactttttttctaaaataaaacttgtacaccagtttattactctaaaaagagaattacacatgccaaatggaccaatgtccatttgcttattggaggcaaagctacaatagaagtcagagcatcaccagaatggtctttaatgagcatggaacctgagcaaagggaataggtgggatgaattttttttttaattgtgaaacaattcataagcacaatatgatttacagaataataaacattcatgtacccactatcaggttaagaaatagaacatttattaatatgtaggaatgttaagaaataaaacatttaataaga

SEQ ID NO: 117067 - DNA, 1000 bp, Homo Sapiens
ccttcctgcccccactcccctggcttaggcaggtaggggaattagggccatgctggaagaagcttaaccatgtgttcaaagaacggtttcttgcttgcttggtcctggaactccccttggctgccccaggcctccttggcccatgggtgctgggggaggtggatgtcagatctggtaggttgcagcagagaaaataaatgtgccttgagagaccactcagagagggtccaagggtgatggagaaggaagcatggcctgggagcttggaagggaggggtggtgggtggcggcatcttgactgccccctgttgtcccacacgtggggggtggtcaccccccttcactccagcccgcctgccttcagccttccatgagcttcacctgcttccaacttcactttggagggggtggggtccgttggcatcaacacggggaccctctgcttcaccaaagcccgagccctcagcccctggggagaacaaatggctgagctttgatacctggggtcgtcgagaggctgcgggctggcggcagtcccaggggagagacaccacagaaggagacccagacatcccgaggaagttcccagcagagcaaactgctttccagcctgaagcctgcttaaactgtgtgatgtgcaataactgagcttagagttaggaattgtgttcaagtgcttggatttccgtctgtagatttaactgctgaaattgtatctctcagtaattttagatgtcttttaaaaaattgaaaaacaaagtgttagactgtgtgcgtgtgcgttgatgggcactcaagagtcccgtgagtcatccagccctgcctttcccctgcgcccccatcctctcacgtcccgccctgcctccacttggggaccctgcctcgtgtcgtctttatctgcctattactcagcctaaggaaacaagtacactccacacatgcataaaggaaatcaaatgttatttttaagaaaatggaaaataaaaactttataaacacc

SEQ ID NO: 117068 - DNA, 1000 bp, Homo Sapiens
cggaaagaagacccggtcctgcccgagctcaacaatcccagggcgggagcccatacccaggctggctcctggggcgacgccacgccagagggagggtttagtacatgggagggctagccccgggacttggggccaatacggaaaccctaccccttccatgctcatctcactgcccagtgaagggggcaagggcagcgaggggcaggacccctgctgctcatgggggtgggggttcccaaccctttccgtgaaagggaccgtgagtagtggaaaccaggacgtcccctacacctacccatgggtggaagctaaagagtccggggggaaccaagagcctgggtccctcccactactatcttgggagggagaagggatggagcaggagcgggctaagagggctgcgggggccttgtaatttattgctttgttccccaacatggggatgggggcgggcaggggcgtggggagggcgttttggggtaggggaagcccagggtgggcagggggtgggttggggtgggggtgctctcgggttgtgtctgtgaccgtgactgcgtacctgtgactgtgcagcgcccgtggtgatctggggtagggggcacccctacagtgggacccctcccccattattctttctgtccagcccctccctcccactggagcagctccagagccattcctcacccccgtgacctctcccagccagggctgagaggattcgaggtggctgggagggtttccaggccccctgccccttccccacaaactgggtgatagggcggacttacctggcccagccctgcctccctcagccaacccagcccttgggctgtctgtgtcagtggtttccggtctttttttttttttttttttctggctaaaatagtttgcaaaggaccaggtaattggggaggggagagaggtgggggcaagggggaaatgcccccccatctccttggaggcagtggtgtgaatcttcttcaacagcaattaaagagga

SEQ ID NO: 117069 - DNA, 1000 bp, Homo Sapiens
aagattttagatggtattcaaattaatattttctatttagttatatatttaatgtataatataaaaatatgattagcatattgacctgtagtttgatagatgttctgtctaggataaagctaactgtaaaaaaaaatagtgaatcagtttaaagaaaaacataacgtaaaagtgggcacagatccagagaggtagcaaaaatcacaggggtggttccatgaatggctgacacttaggaaactctgaattaggccatcctcgagactagcccaccattcacctctgttcatcccccgtgggctcataatcgttttcatttcacctttgatttggaaggaagaagtttcttgcccaaatgcctggatgtgtctgcttgactttcagaacttctcacctcagccctaaagagggagcctgtgggttctcagagagatatcacaatttgagtcccaaagaagaggccagatacccacccaccttcccccaaatcttaagcacctgcgccagtacagtcaagaagaggaaagtgtgtgaagacccaggtctggctctgccacttgcctggccatgtcaccttgaagctgtgacctgactccctatattgtttcctcagttgtagaccaaaggcaatggtgtctgccctcctaccttagaagacaaatgcaagggcatttcaccacagagaggacctttgtgctcactttggcccaggaggcagtgatgctcatggttgcatgactttatgagtcgctgggccagggtgaggacctgggcctcctgactcctggcccagagttcttgtccatcagttcatactgcaattttatgtgaaagcattatgactgtcctacccatgggagagtaaatgtagattgaatgctaggagtcttaaagctggagagtatagattttgaggtccccatttgggaaacatgtgccagaaatgtctaggtgtttaataaaacagatattggattatctcaaaaaaaaaaaaaaaaaa

SEQ ID NO: 117070 - DNA, 1000 bp, Homo Sapiens
ggtatcttgaactcctttcttctgagttgagcagactcactggcttaagcatcccataagcctattatttagtgtgaatttgggacttttatttgtatgttgtcttaacttactgagcctgtgacttgtatttagctgtagtcaagcctcaccagccatatctcatctctgagaggaagactggatagtgagtttggttttggttttggttttaaacccttttaccttttcagtctggcagctcctactgctgctttcctaagttactcaaagcactgcttcttggtccttgttttcttttgccttgtactatcttgtataatgtttactaaaagagcctccccataaatcagagaggcaaaaaggtagcatataaaaagaagaaccaaaagaagagaaaacctgacttctagatgactgtggtgtcatctaaaaggcagaggtgcctgaccctcaggaatgtgtatgatgcaacagagctgaagaatgggttcccttcacctactgctggccattgtcccttctgttggagattcctttctttatggttgctgttcataaccccttcaacacccccccttgctggtcctgccggtcacagttgaggattttggctgtgatgggctcatactcataatggcctgttgagttgtttttagtgacaggttttgtttgctgcacacctcattggcttgcttaccaacaccagctagaagtggtccctctttcatatccaaaccagaacacatttgggtattcctgagactttatagagcgtgtattgtttgttatacgaacctaacctaccttgttgttttctcatattaagaaatttaaatctactttgttttagtgaagctattttggtaatgtataagcaattttggttctgtttagggagaattcagggtttccatgacttgatttgagctttgcatatttcaaataagtaacacagccattttaatttagctaaataaaaaaatttcttttttctctc

SEQ ID NO: 117071 - DNA, 1000 bp, Homo Sapiens
aggaaaaagccttaatggccatgaataacctgagtgagaattatgaaaatcagggccggcttcaggtgtacatgaataaagtgatggatgatatcatggcctctaacctgaactcagcagttcaagtagttggactaaaatttctaacaaacatgactattactaatgactaccagcacctgcttgtcaattccattgcaaactttttccgtttgctatctcagggaggtggaaaaatcaaggttgagattttgaaaatcctttcgaattttgctgaaaatccagatatgttgaagaaacttctcagtacccaagtgccagcatcatttagttccctctataattcttacgtggaatcagaaatccttattaatgcccttactctatttgagattatctatgacaatctcagagcagaagtgtttaactatagagaattcaataaaggttcccttttttacttatgcactacatctggagtgtgtgttaagaaaattagagccttagcaaatcaccatgacctcttagtgaaagtgaaagttataaaactagtgaacaaattctgattggttatgtaccgtcaaaagacttgaagaaatttcatgattttgcagtgtggaagcgttgaaaattgaaagttactgcttttccacttgctcatatagtaaagggatcctttcagctgccagtgttgaataatgtatcatccagagtgatgttatctgtgacagtcaccagctttaagctgaaccattttatgaataccaaataaatagacctcttgtactgaaaacatatttgtgactttaatcgtgctgcttggatagaaatatttttactggttcttctgaattgacagtaaacctgtccattatgaatggcctactgttctattatttgttttgacttgaatttatccaccaaagacttcatttgtgtatcatcaataaagttgtatgtttcaactgacaaaaaaaaaaaaaaaaaaaaaaaaaaaaaa

SEQ ID NO: 117072 - DNA, 1000 bp, Homo Sapiens
gttctggaccaagtgggtaaggatgcggaaggattgcaatgcccgccagcacagtggcggcaacattgaagacgtggacggaggaggggccccgacgacaggtggcaacaatgccccgagtggtggcagccaggagagcagcgcagaacagcccagaaaaggcggtgctcagcacggggtgtcatcctgtgaagggacacagagaacaggcaggaggaaaggcaggagccagtccgtgcaggcacactcagcgctaagccaaaggccgcccatgctgagctcatctggccccatcttagagagccgccaaacattcctccagacgtccacctcagtgcacgagctggcccagaggctctcgggcagccggctctccttgcacgcctcggccacgtccctgcactctcagcccccgcccgtcaccaccaccggccacctgagtgtccgtgagcgggccgaggcgctcatcaggtccagcctgggctcctccaccagctccaccctgagcttcctcttcggcaagaggagcttttccagcgcgctcgtcatttccggactctctgctgcggaggggggcaataccagtgacacccagtcatccagcagcgtcaacatcgtgatgggcccctcagccagggctgccagccaggccactcggcacctctccgagccatgtgagccccctgatgccaccgagcaggggcagcttcatgaccgatgtctggctgaggctgtggcggacactctcggggttgtctgcaggagagcaagccaggaggacatgggcctggacgacacggcctcgcagcaaagtgtgtcagacgagcagtgacgggcgtgcggccgggcggggaggctggctcccccacacctcccacctgcattgctctccctcgtgctccccaaatcaccacaaccaaccaataccgcgatccatgagggactcctcctgtggaaaaggagagctgttccagaacacagaactgatctcaggtttttg

SEQ ID NO: 117073 - DNA, 1000 bp, Homo Sapiens
cggccacgcccagtgtccgaaagaaggccggcagcttttctcgccgccttatcaagcgcttttccttcaaatccaaacccaaggccaatggtaaccccagcccccagctctgaggacccagctctgaaagggcacgagttctctcagcccattccccacctccccttccataccccttcctggatctccagtgcctgggccaggaaagccctctgggttccgggaagccccgtccaccctgggccatggggccggttggaaggatacttggaacgggaagcacatgagaggtgggcacccggtgccgaggacatggacgagggactggtggctgggagggagaggagggccctgtccggcatgtgtgggtattccccagaagcatttgcctcctgctgagcctggtccctgagcggagtcccagggtgctcagctcttcagctgacccttcttcccttatttattctcttttctatttatatgtgtggcttaggaccctccgtgaacagatgatagagggcatctctcccaggtgacccttcttttctgtcccaggagggtgggtaattccctttgggatggggctcccacacctccctcaggtccccactcagaccagcaccagtgtctgcctctgagaatgttggcagctcacagagagcagggccggcccgggatggggggcaggtactccccaccttcctgcctcccctcctgctcctcatccctccctccccctttattaccgttttttgtacttgatgccttctctgtgagcagtggctctgtgggaaggagggagccgggagcctggtgggaagccttccccagagagatggctttaggggctttatttaaagactgtgatgatggagccacgcaaggctgcacctctgtgtgttgggagacgatgatgatgtccattgctgtgtgatggcttggaatttaatttattaaagtcaaattggagtttaaaaaaaaaaaaaaaaaaaaaaaaaaa

SEQ ID NO: 117074 - DNA, 1000 bp, Homo Sapiens
tacaaaactcatcaggatgactacccactggccagcctcccgctgctgggctacagcgtgagcatccccagggaggccgatggcatacacaaagactatgttttcaagctccagttcaaatcccacgtctacttcttccgggctgagagcaagtacacatttgaaaggtggatggaggtgatccagggggccagcagctcagccgggagggccccaagcatcgtgcaggatggcccccaaccctcctcagggctggaggggatggtcagggggaaggaggaatgacgctcaacctgcccaggtttggacacaactacaaagaacagcaggacacagaggtgacctctgtcctgaggcttctcaacagatgggaagtggctgtggtctcactggatccccactggcaccagcagtgtgggtgggcctcatgtaacatctgggaggggcttcatccccccacccaggacctagtgcatgccagcagctatctggggccctgggaaaaatgtgcgagtcttgagcgcggagccgctcaagccacagctcccaggcccctggctcaaagacgcagacaaggcctgagcagtgctctcggcatcggaccaaagcctgggcacaccctgcctctctccccagagcagggtccctgccgaggactggcctagagcaagcactggaaaagaggccctgccatacaccctgcgtacccactgccaggaccctctcagacaagcgtggcacagccatgctgaccttccatctggtgaaccaagtggcagccccaggggcctgccctgcaggtcacagctaaacaagtctggcagaagccacgcttgttccccatgtacctctagagaagcagaaaccaaagtccccctgtgccctgggagggtggggccgtctaatttattactgcccagcattccttccaacgggaagtagatgggcgactgctttgttcacacacatttgattaaaaataaacaaacagcatctcccc

SEQ ID NO: 117075 - DNA, 1000 bp, Homo Sapiens
aaagaaggacggcggcccctggccaaccaggaaggcacaggcagggctgagtttgcatgacaggaggagctcgggctcggaggaaagcattttagacctgaggtatcgacgaagggtcaacagggatgaccaggagcaggacgccttgggcagtgacgccagtgacttcagcgacacctccacggaggacagtggcggcagctcagtagtgaaggtctaagccctcgagctgtgggttcgcgtcctgggttgcgtgcattcgtggaaagcggcgtagccgtgcgtgtgtgtgatggttccgtggctgcaaggaagggaaacagtctattatacatagccctgtatatatgtacaccaacatgaaacttttatttaacagacgtgtcctggtaaatatgatttttgtagctttttgtaaattatttaaagtgatgtaaaagatatttttggaaaatactgttgttcaattttgtagggtgttcctaactgcagttttctgtgttctgcatacaagtcttagcttaggaaacatttggttcttaccatcacagccaggttcacagaggctctgatgctttttggttgattgctggtgagaatggccggcggtggctgcagtggtagcctgaggaaggccaagctgccctccctgggaatcactcagatgccccaagatgtccgttgggaagctcccaggacagcactttttatacagaggacaccgcctcggccccacgtccttagaggccagagcacatctgaaaactgcaatcacagccgtccgctggaaaaacgtttcgaagcacagtggccagcgagcgagcacgtggctactccctgttgcatgtcaaatccacacagatgtcagcggcagctgctcggcagcccagccctgggcctgggtgggttcatgtccaatcttgttcgatcactagatgattctaacatcgaaataaacctctttttatatggcaaaaaaaaaaaaaaaaaaaaaaaaaaa

SEQ ID NO: 117076 - DNA, 1000 bp, Homo Sapiens
taggagagagcgaaattcgcgatgcaatgatggcaaaggccgagtacctctgccggataggtgacaaagagggagctctgacagcctttcgcaagacatatgacaaaactgtggccctgggtcaccgattggatattgtattctatctccttaggattggcttattttatatggataatgatctcatcacacgaaacacagaaaaggccaaaagcttaatagaagaaggaggagactgggacaggagaaaccgcctaaaagtgtatcagggtctttattgtgtggctattcgtgatttcaaacaggcagctgaactcttccttgacactgtttcaacatttacatcctatgaactcatggattataaaacatttgtgacttatactgtctatgtcagtatgattgccttagaaagaccagatctcagggaaaaggtcattaaaggagcagagattcttgaagtgttgcacagtcttccagcagttcggcagtatctgttttcactctatgaatgccgttactctgttttcttccaatcattagcggttgtggaacaggaaatgaaaaaggactggctttttgcccctcattatcgatactatgtaagagaaatgagaattcatgcatacagtcagctgctggaatcatataggtcattaacccttggctatatggcagaagcgtttggtgttggtgtggaattcattgatcaggaactgtccaggtttattgctgccgggagactacactgcaaaatagataaagtgaatgaaatagtagaaaccaacagacctgatagcaagaactggcagtaccaagaaactatcaagaaaggagatctgctactaaacagagttcaaaaactttccagagtaattaatatgtaaagccatgtaactaacaaaggatttgctttagagataattatttggaatttttatagcttacttcacaatgtgcccaggtcagctgtataaaataaatactgcattgttgtttc

SEQ ID NO: 117077 - DNA, 1000 bp, Homo Sapiens
ctttccatatcatatttcattaatgatcagttagtgtcaaggagtcaaaacagattaaaattaatttcatgtgtatatggtggaaatttgtggctagtgtgatttttgtttgtttccttttaagtactgttgatcagttgtgacacttactggttaaacttacgttgctaaagatttctctataataagccacacattatatttagactatattaagggaccttggttttcttctagatagcagctgtcccaaagaaaatatttcttctttgtctgttaagatttagctattatctgccagttgttaagaggttttggttccaaactcaaccagcaatgttgagagctgaacttaagatagctgttgtactttttgctttccatctgttactgtccttcattcttggctccctactatctataaacagctgctgtgaagaagaaaagttgaataagagttggcttaaattttaaaaaagaaaaagaaaattgaggttttaggattttcatggtaacaagctctggtataagctaaggctggcaagttcagatactaaaatattatttgatcatatcttggatccttttgaaaaagttaagactatatgaaggtaaattagaaataagtatgaatattaataaaatagcatttatcttatttctctattttatgttgtgacttaacctaattttatttttttaacattttcttatttcttataatatgaatgctgatatttaaaggtagatctatgtggtattctttgtgtttcttaattgtttaactcttaagattatttgtgatctggatttatgtatttgttagatacatacgaattgttaaaatggaatgcaagtttttcaaaagcccaggtctaaatgtaatggttggtttattgttctataaccccagcccatcattttctgtgtaaatcataaacaataaacagaatatactcggtggtcaaaaaaaaaaaaaaaaagaaaaaaaaaaaaaaaa

SEQ ID NO: 117078 - DNA, 1000 bp, Homo Sapiens
gacatgtggctaaagggtcaaaaaggatgtaagacttggagccagagcatagtatttcctgaaataacaagtttagtgctttaactatggctacatgtgcttaaggaattttgagccacttatttttgaagatgctgaggacatgtagagtgctttttgtagtgagctaaccttgatctctaaggactaactacccaggtccaggtcttcactaggggtactgacagtgtttaagctttactccacctccttacttagaaatcactttacgatttatttccattttccacttttatagaccatccttttgcttatatgctagatttttctggtgagggaagggttgtgttcttcaggggtcttttgttttgaaatactcaggatggggagaggtttatttaagaacgaattataattatggtttacactgttgggagtaaaggagcatttttacaccccttaagggtgcttaattctgttgaaaccaaaaagatttgtctacaaatgctatcttttttagaaactattagaaatgactccctttcaaagtcaatctttggaaaatattgaggaggtcactaattagttggtgcagttaatataattcaagatgatttggatgatgggaagtttgagaccgctgcattttgtttttaaattatgcaccttctgataacccccaaatacagaaatgttctacatctctgaatgacctctgactttaaaaaagtttttatttgcatggctgtatttacattaacactgacattttcttctactcttctcccttctttcatcttggggttgggtagagaaacacaaaggaaactgaagcatgtgccattctatactgtcattccaaattctcatggactattgcctgttgtgaaaatgtttgaaactgcactgaaagctgcatctgtctgtatctttcttttgtaaatgacctcacatgtaaattcaccaaataaatattacattcaaaaaaaaaaaaaaaaaa

SEQ ID NO: 117079 - DNA, 1000 bp, Homo Sapiens
gcctccttgctggcattgaattaacacagggacaaaatttggttaattttttatttctaactctcccaacaaacccctgttgcccagtatttgtttggtggcctttaaccacctgagggaaaaaatgagcttattcaagctgccaatatttatctatgggctgtagcagtacactgaattgtactgtgccagggatattgagatgctctgggggtgtattgtatacctgccagttttcttcatttctgaattgagttttcttttcttgatgttggtttccttcatatcacctcaaggtttagatttgtgaaggaataagcatgatggaaataatagtcttgaaaggagatatgttgtatataatcaggaggaagaggaaggaaggacttacccattttgatattttgctgtaggtggccagttttgtttctcatagggaaatctgacccacctgtcatgttggctcctaaggaactgctgttgtaagcggctcatcaagagttgaacttcacgtagccttgttgggaatatggaaaaggaagaaagccacaggactgcccattcagtcttgggaagattgggatgattctgcacaagcaaaaatgactgaagtttatgtatagacacacctctaccaatccatcttcagctgactgaatgttgtatgatagcccttctccaaagcagaggtagaatgttcaggtttcaccatggattttctacttatttcgtttttggaatcaccttacagattccaggtcccttttgtatatattctttattcttttgctttttaaaaaataattttgtttcatatttaaagcacttgtattagtcaatgtttcgtgttccgcattatttgaaccatttgcccttacagaaagagaaatacttgttagtgttttaaataaaactgatgtaggaaaaaaaaaaaaaaaaaaaaaaaaaaaaaaaaaaaaaaaaaaaaaaaaaaaaaaaaaagaaaaaaaaaaaaaaaaaa

SEQ ID NO: 117080 - DNA, 1000 bp, Homo Sapiens
cacagattaaaccaaccacagatcaaaaatagaaaaaaaaaaaaaaagaaaaaaagaatgtaaaattttaaaaatacagtttaacagctgtaaaagttttactataacatttacattgtgttaggtattttaagtaatttaaaggttacagtatacaggcggttaaagtatacaggaggatgtgcatcggttatatgcatatagcaagccatttcatataagaggcttgaacatccatggattttggtatagaggaggggtttaaggggtgtcctgcaatcagtccccctctcataccaaaggatgactgtatatttcttaaatgaagagactttcattctttaaatattattgacttacagtttaaaaataaataaataaaagcatactatagttgtaaaaacaaataattttaatagtatattcagtggctgaagtgatagggagtattaatcattatttcttcagtataaagttattcttcctgaaaaagtaagatatacctgggaaatattcttggatccttcacacatccacttaatttcttgaaggaagaaaacagacaaaagacatgtaacaacagaaacaaataaaccacttactgtaaaatttcagaaattgtgggctcattccctccctctagtttatttatttgctcatctttatcacctaatggtagtttgttttctttggtagagtatatggcagtcccacatcgatgataattggtgctcccttcatccaactggatcactttgagattcagttttacatcattttagcattttgtttgtatatcagttgtgatgagccactgataaaattttgttctaaaatgaaacatattactttgttagtacattttttagtgtcacactgacttttaaaatttgaatgatatatagactttgtttttttaatgcaatatgaatatttgctcatgttttctaaattccttataaaataaaattaattcgaattcaaaaaaaaaaaaaaaaaa

SEQ ID NO: 117081 - DNA, 1000 bp, Homo Sapiens
agtgctgggattacaggcgtgagccactgcgcctggccgtgactgattttttttcatgtagaattgtcaacacgagagatcacagtggagcactttgaaagaccgtcggttgtgtgcacgcacgcacacactcatgcacacgctgacacgcggttgcatggagtccaggttactcaggccggcacttctgagtgacaggtgccacctgcgtgtgtcttggcgtccacatcacacctgtgacggaagcacttctggaagtgaacactcgttttgaaagcttgattttgtagctttggaagctggaagcgatggtgtttggtgccgagtcctgtgtcatcctcggggcctatgagctccgtaccagccactcaaaagtgtctgaacagaaccgctccgtgactggtagctgggtctgaggattcaggattgtggcgttattcaaagaggagactttgaaattccccgatggctggaatgtggagcccaggtgcctctggtggagggtcatctgcttttccagactgtggttgtgaaccggctccttctccaagaaaggttgcaagctgagaacatccagaggtgagactcagacacattgaaagtgactgcatttagggaggtttaacgagttcttactgatcattccacttgttactggttaagataatttgcccacgggtttgtttccaagtcctcttctaggaccaggctcctggtatttcaggggctggttggctgcacagacagcccctcttctgctgtccttgaggacagacaccaaaccagaggtggaggaagaacggtaggaaggctgatggcaaaagcggctgtgtgtcgaggttattttaactttttactactttttgttactgtttctgcaaatgctaacacataaaccatgacctaacttttgtcaccttggatatctattgaatgttaaacatctctaataaagatggccaccacttaatgtgtggaaagtgatggccttctcgtgggc

SEQ ID NO: 117082 - DNA, 1000 bp, Homo Sapiens
tgaaggttgggcagatgcagattctgagacaacagattgccaatgaattaaattattcttgtcggtttgattctaaacatctggcagctgctctggagaatctcaataaggctctcctagcagacattgaagcccactatcaggacccttcacttccttaccccaaagaagataacacacttttatatgaaatcacagcctatctggaggcagctggcattcacaacccactgaataagatatacataacaacaaagcgcttaccctattttccaattgtaaactttctatttttgatcgctcagttgccaaaacttcaatacaacaaaaatctgggaatggtctgccgaaaaccgaccgacccggttgattggccaccacttgtcctgggactgctcactctgctgaagcagttccattcccggtacaccgagcagttcctggcgctgattggccagtttatctgctccacggtggagcagtgtacaagccagaagatacctgaaattcctgcagatgttgtgggtgcccttctgttcctggaggattatgttcggtacacaaagctacccaggagggttgctgaagcacatgtgcctaatttcatttttgatgagttcagaacagtgctgtaactgtttttcctacttcttcaatggaaggattgtccttagatcttcccaccatcacaaatgaatttgaagatgaaaagaaactcagttgctcatacaactgcattttttctgtctattatgggaaacatcagacgttctgagtaagatatatctcatggcattagttaatataactgatattgtttaaatcatggtattacatgcaatttatatcagataaaagcagaacacatttttgtactgcctctcttaaatgctgaatgtaactgttatgtataaatccatttagttttatgttctaaagaactatttgtgcaactccagattttcagtaaaatagtattactagtaaaaaaaaaaaaaaa

SEQ ID NO: 117083 - DNA, 1000 bp, Homo Sapiens
aattgacatagtagcattgaggatacgctgatctagaaagccaagtatttgagcaacatctatagagatctacttttctcctatgtctcctaggctttccatgataattagggagagaagacatattgactctgactggacaccctgattcctccaaatatatataccactgtgtattaatctttctctcagtgttttataggagtactaacatttattgctctgtcaataatgaaaggctcgatgtaatatagctgtaatttactttccatatgaatacagtggctaggttcataaaagagaattgtgtgagtctgggattaccacatctaaaacattattctttaatgggataatacaattcattgagcagctaccacttaaaaaacttgcaggacagttagagcctgcatttctagttaagatggatcttgtaaatttaaaattggattaacattggagtgctggggtggctgcaataatttgggggctaactccatttggtttccaagatctcacttctgcattatctttatggctctttaaaccagccacctagccaatcaagggcaattcccatctcatccatcactcaggtctttgtaaagggtgcagccaagctctgcagacttttgcaggattgtctagcctgagtaccgggctacttcttaaatgccgtcactcctgctgagataaatgcgtctttaaaaatagtctctgtggcaggtcactgggggacaatgtacagcattctggccatccacttctttttcacttcatgttctaccccaagagactcccgatgtcggctgtggagggttaaagggatgaggctttcctttgtttagcaaatctgttcacagttcttgatgatgtattttatgatgcccagcttggaaatagttgctttccatagtctcaactgtattgtgtcatctcctgatgctgatttttgatcttttgttttattaaaaataattagtgaaaaaaaaaaaaaaaa

SEQ ID NO: 117084 - DNA, 1000 bp, Homo Sapiens
tccctctgcctaggccctggtgaaaccacaggtatgcaattatgctaggggctggggctctggtgtagaccatggaccaaaagaacttcttggagtctgaagagtgggcctcgggtgccctctcacatctcctgttggatgctgggggagaagcaataaacctcagccctctggcctccactttcctctcaatttgggctgcaaatatgaagcctgaattttatgaaattagctttctgattcttatttattaatagattaagttctgaggcagctccgcaggactgtgtgtgaatgtgtatgtatacttacatatgtgtgtgcatgtgccatggggcggggggtatcactatactgtcctcaaatataagccaagggtaatttcagcggatgcacacacaaccctgcctcccacagttcctcccctaatctggtttctgtgttgagcctgggatggaggagccctaggccagcctgggataagagtcccacagtctagggagatctgagggcatccgacaaggcccatctccttccctcctcaagaggcagaggcctcctctggagtgagaggctccacccactacagcacaggcgggaatagcacagctgccctcccatgctccctacctgtcccctcacagggaggggagcaggggagggaaagaaaccaggcatctggtcaaaccagcagatcaaaaagcacaaagagctggggcagaggcaggaagcaggggccctcctggcagctcctctgagtggggagaggttgggcagtgagtgagggacccctaatgcagggactagaagcctcagtttccccattttacccttccacacaatagcctctgtaggttaggctgccccatcccaccctactctgtgtggctgctttctttggtgccctcccctcaccccactgtagctgtgacgtgttgtagtttttagatgtttgtaaaatgtttaaaaaaatgttaaaagaaaaaaaaaaaaaaaaaaa

SEQ ID NO: 117085 - DNA, 1000 bp, Homo Sapiens
aacatgatcctggtggatgatgacttctcagccatcatgaatgcagtggaggaaggcaagggtattttttacaacatcaaaaactttgtccgattccagctgagcacgagcatctccgccctgagtctcatcactctgtccaccgtgttcaacctgcccagccccctcaacgccatgcagatcctatggatcaacatcatcatggatgggccaccggcgcagagcttgggggtagagcccgttgacaaagacgccttcaggcagccaccacggagtgtgcgggacaccatcctcagcagagccctcatcctgaagatcctcatgtccgcggccatcatcatcagcgggaccctctttatcttctggaaggagatgcctgaagacagagcaagcactccccgcaccacgacgatgacgttcacttgttttgtgtttttcgatctcttcaacgccttgacctgccgctctcagaccaagctgatatttgagatcggctttctcaggaaccacatgttcctctactccgtcctggggtccatcctggggcagctggcggtcatttacatccccccgctgcagagggtcttccagacggagaacctgggagcgcttgatttgctgtttttaactggattggcctcatccgtcttcattttgtcagagctcctcaaactatgtgaaaaatactgttgcagccccaagagagtccagatgcaccctgaagatgtgtagtggaccgcactccgcggcaccttccctaatcatctcgatctggttgtgactgtggcccctgccgtgtctcctcgtcaggggagacttttaggaggccgcagccttccatcaccggatcagtttttcctcttaggaaagctgcaggaacctcgtgggctccagggacccaggcccacatccatccagcgttcccgctggctgtgggacagacagggaggggcctgtacagaaacaccacactgtttattaaatcacaatgatttttatt

SEQ ID NO: 117086 - DNA, 1000 bp, Homo Sapiens
gtgacagccatcacaaatagccacattctgctctactctccaacataccagattctacactgttgttatttcatgagacgtgaatgttgcagagagtggggggattctggttgttaaggaacttacactggggagctttactcttccgtgtcaacaatgtgactacatgttctccagattagccacacatgcaaacatcagtgtccttctagctttagccgagaaagaaaccagtcccagggaatgaatggtggtctccccactcccggcagcactttaggcagcccataagctatgcgagaatgtgaacgctcaccttgctccgtcacggttctgacctaccacataaacaggaagaagccagtgaccggaacagctctaggaataacaagtcagaatagaagtgtcctttatattaccagaaaatatgggcttggcctaagtcgctgtctcctaacctgccggggtcattccccaccaaacaccccatactaaggagccatgagccacctggacattcaccttttctttgaccatctggagtctggggcaacttaaggaggcaccacacagtggtgcaggcacatttccaagcgtaggtgtccctggcttttgtggccaaagctagtgttatggtcaacaacaggccagggtctgtggggcactgaccttgaaagtggcaaaatggaggtttcacaggctgtgcgggagcaggacggcttgcttcatctaacaatctcagtttcctttaaaaaaagaaagaaaggaaaagatttcataagcaggtgtcagtggacagtttaagtacttaaccatttctctttcttcttatggatgtgaactgtgctgtggataaatcatttgtatttcttgaatgttctctatgactaacagttattaagtcggttgtgtatatgtgtaactaatgtaactgccttttaaaatttcattacaataaaaatgactttgctctgaacaacaaaaaaaaaaaaaaaaaaaa

SEQ ID NO: 117087 - DNA, 1000 bp, Homo Sapiens
tgtattaataaggcattgccccctgtttgcactcagggttaatatgtcaaatgaaatttaagaaggaaatggaagaattcaggtacattaattgcatattattttgggaaagatgagtcctatacgtggcaatttttcaatgtcatctgaagccagcattatcttccaaagaaatcgatcttttttttctaaaaaaaaaaaaatgcttttgccttcccttcccttcccatccgccatatttcttcagcctttcttctcgatcacccgtgtattctttgaccagtaaatgaccacacctcaatgatggtaaaacagcatcatcagtaagctatcttatatgcctcatcctgtgagtttgagcttcaggaaacatgagtaaaagtatatgtaatgtatatagtcgtatatgtattctagcaagaaaaacatatttattttgacaaaggggaacactgactttctgaaggattcagaaagaaccttagtgaaaggttctcagtctctgagagtggaccctaattaacataaagaccattcatcagcgaataactactgagcaactctagtgtgccagcacaggccagacatactagtgagccaggcacatctggccttgggaaactcatcctacaggggaaggccagtttttttcccttcaattcctcaagtctgggtggtgacaaggtaggggctaggtactggactaccacaggtttttaggaactaaggtgtttctcataaacacaaaatgttgggtgaaactgggaacaactactcagaagctcatttatttgcttaaatggaaagtgtgggagccactaccctctcttttgatctgccaaggatttcctctcagagctgttgcacagacagagattgtacttggtaagataccaaacaagacagatatggatctaaatttctaatgtgttctatgggtttcaattctgaaaaaagaaaatgaataaagattttaataaataaaaaaaaaaaaaaaaaa

SEQ ID NO: 117088 - DNA, 1000 bp, Homo Sapiens
actggacacaccagctacttcagatcccctctctgaagagaaaggaggaaagaaaagaaaaaaacagaaacagaagctcctgttcagcacctcagtcgtccacaccaagtgacactactggcccaggctaccttctccatctggtttttgtttttgtttttttttcccccatgcttttgtttggctgctgtaatttttaagtatttgagtttgaacagattagctctggggggagggggtttccacaatgtgagggggaaccaagaaaattttaaatacagtgtattttccagcttcctgtctttacaccaaaataaagtattgacacaagagatctcttcctgccaaggtttttagttcattgccagtttagtctttttgacccatgtgtaattaatttttctcaacccaaagtaagattgagtcccctttgagatgcattagagcagtccaacccagaatggcacacactgctctgctgtagcatcatgtcagggcttcctggactcagtacacctctcagtttgtcttttaaaaaacagctgaatctttactacctatttagttctccttgttaaagaaacaggggtgggaataaaatggatttaggacacccagtttgaattgcagtttttttttttctgacacatggccaggctgtggtgccagcttaatggagtaggctgtccttggcacttgcatgtgtgaaaggagggttttgcctcttcttgagcatggcttgagttggtaaggaaagctgtaactcacgaagccctgagacctgctacccctaagatcgagcttgttttcagtgactggcttgagtcataggaggaggagtctggtacagctgcaggagagcagggccatctgaagcggtagcattgccaccatctccctctcatctagagcagttttcttatgccttggtttgagctgaatttgatgtgaattcttttgctgcttaataaagtgacctctaggtgcattagaatgcgaa

SEQ ID NO: 117089 - DNA, 1000 bp, Homo Sapiens
tgacactgtctacctgttccatatgccccgaaaacgaatgatttccctgcgattccttgcttggtactttctggacctgaagattcaaggggaaacccatgacagtattgaggatgcccgcacagcccttcagctgtaccgaaagtatctggagctaagcaaaaatggcactgagcctgagtctttccacaaggtgctcaagggtctttatgagaagggcagaaagatggactggaaggtgcctgagcctgagggccaaacaagtcccaagaatgcagctgtcttctcctcagtgctggcgctctgactacccttcccaaagaaccacggccctctccctttactgttctatagccccagaactgggagatggcttcctaagttggctataccttgtccacttccagtactggacgtgctcagggtctagggtcacagatggtgctattaattgaactggaacacagcagaattgttgcaaaggttctaggagccagattcattccttcttcattctttgcaaaacagtggtacagacatggagtctagaattgacccagatggaaagtaattggtattcttaatatcctgggtgactaatatccaggcagagaagctcctggaaccataactgtaagttcctagctggctagggattgaagtcctggacagtgacagaggataccacagtagttcaagacttagcacaagtcaccaactgcttcagggatacctggaggggccagcaagtagagtgttggtggcccaagcaaaccagtgttgccaataccattgccaaaagggcctttggatcctggacaaagcttggctgccggcttcatttattcctgctgatggctgagaagcatctgtcttccatcccacttgcctgtcccaagttttgttccattttttaaaaatttgttgtaaactgcatgttttataaaataaaaataaaatatcgtttgttatttatctcaaaaaaaaaaaaaaaaaaaaa

SEQ ID NO: 117090 - DNA, 1000 bp, Homo Sapiens
ggctcatgggtctgagagcccccacccactaggcttgattgcatccctgttgtgccctttaagagacatgtttccaccccacccccaaccttgtcccaagtgccctggactaaatttcctgtgccagtgactgcagttggccaagggacaatgtggaaaacccagtgtccatctttccaccctccctgatctccagaaccttcgactgacccccttgtctttatgctgatgttgagttttgggattgttactggttgaagtgggggcagatgcctgtcaccaaggtgttgactgtgtgagaaaagcagtttgggtgacaaatcctgtgtggcacaagttggatcgcttcctagaaataagcaacacctctcccaaaaagcagcccacaaggcaggggcccagcagcccagccatcactcatctttgaggaaatgagttggtagcctctgtgcactgtttggtggccacatcacaggtgatgtcctgttcacatacctgcttgtatttaaagccctcagtctgtcctgttgtgtggggcgaagtgatggactctgccaggtggacatgctgtgggtggatgttcccggcgtgtgccgggcctgaatggacaggggccacttcacagcatgtcagggaaaatcactgtcacacaattccaatggattttgtgctctttttgaaaaaaaaaaattctttagcgtaaacatgaattttttttcaatgtagcccctggggaatgaatgaaattttgagcttcttcaatacgtaaaattaaatttataccactgagggagagaccctttctgaaagaagtatggccaaaagcactttaatgctgctgacattgttgtttttatgttcatttgctggagcgcaagacgtgctgacacagtgagttttctctgatgtatttaaggtgatgtatttgcttgagttactcctgtatcattgctcataatattggaaactaaaataaaacctagttggaaatccaaaaaaa

SEQ ID NO: 117091 - DNA, 1000 bp, Homo Sapiens
tgtagatggcatttaggaccacagcttgctggatttgtgttagctatgggaataacttgattttgtataagctatttagagtgaggctggaggtggcagcttcacagaactggagaaccaggccaagtcccctccccaacctaattaggtcattcaggacagctaagtcagtatatttagagcaatactagcatacgtttttcttaattgttatcagcattgaccaagtggtttggaaggaggcatgctttaatatcacaataattttgatttgtaaaccaagaaattaatcctgtgtttatctaacttcataatagcaattattgcccgaagctatagtggcatatttacaaaagttcttattactgggcggactgataacatttaaaaaataattgtgtttgaccccaaatgactttatacccaattctacataaaaatatagaagatctatctttttttgttaccttcagatgttcactaaataactcagtttttaagcagaagttttcagggcattaaatatatgttgtgtatgaagtatctcaaactggaacataaatttagtgatcaaactgccattcacagtgtaaggcagcacttaaatttcgaacctaaagtttagatgcattgtataaaaaaacctaaaagcagtatctgttatttagctgtaaaccaagttggaagctattcggataatttcttaaatattgatgaactttggagtactgtttcttccttcaaactgaatgtaattaattcatgaataaatgcaccttatatgtttaaacaatctttgtatacttttgggatttttggtgcttatatgctaaatcacattcagcatgtgtattttgacatttaaaatacttccctcaattctgtaaattaaaagaatagttattttacagttccagggattgtgaaataaatgttgcagttttttaaaataatgaaaataaatactcttggttttgctttgtgaaaaaaaaaaaaaaaa

SEQ ID NO: 117092 - DNA, 1000 bp, Homo Sapiens
acggaggcctgtgcgcccacacacggtcgagaaacctgtgcccagcagctctggtggagatgcccacgttccccatggctcccaggtcattaggaagctggtcatggaacccaccttcaagccctggcagatgaagactcacttcctgatgcccttcccggtgaattacgtgggtgaatgcatccgaactgtcccctacacggacccagatcatgccagtcttaaaatccttgcacgtttgatgactgccaaattcttgcatacagaaattcgagaaaaaggcggtgcttatggtggaggcgcaaaactcagccacaatgggattttcaccctttactcttacagggacccaaatacaatagagacgctccagtcttttgggaaggctgtcgactgggctaagtctggaaaattcacacagcaagacatcgacgaagccaaactttctgtcttctcaaccgtagatgctcctgtcgctccttcagacaaaggaatggaccacttcttgtacggcctctcggatgagatgaagcaggcccacagagagcagctctttgctgtcagccacgacaagctcctggccgtgagcgatagatacctcggcactgggaagagcacacacggcctggccatcctcggacccgagaacccgaaaattgccaaggacccatcctggatcatccaatgagcagccgtggcgctcgactgcacaggagcccgagacaatacacctccgagctgaatatgaaaagtcagaaatgctactgctttttccaagaatattatgtcattgagtgtcgccaaagcccttgactggcgagtcaaaaactcagatctatcttaagagtgaccaggaagaggttcattgaaataatcatgcatgaagcgccaaagatgcaccatgtagaattttcactttgtactggcaggctcgttttacctcattctagaatatttaagaatctaaaaataaagggcaactctgacttaaaaaaaaaaa

SEQ ID NO: 117093 - DNA, 1000 bp, Homo Sapiens
tccctctccctccacagtctccttggcattccatgacaagtttgtcaacctacacttttatatagacatgtcattatttcatggtcaagcctgtagtattaaaatgatttttttaaaagatgtaaactgtgcttagttaattggttatattttgttctgtttttttttttttttttttttttttttgaggcagagtcttgttctgttgcctgggctggagtgcagtggcgtgatcttggctcactgcaacccccgccccccgggttcaagtgattctcctgcctcagcctcccgagtagctggaattacaggcatgcgccagcacgcccggctaagttttgtatttttggcagagatggggtttcaccatattggccaggctggtctcaaactcctgaccttgtgatccgcccacctcagcctccgaaagtgctgggattacaggcgtgagccaccacgtccaactgccttattttgttctgaataaatttacagtattgggcagcaattctggattctagacttgagaccacagaatcaaccatttcatgaggttgtactgtaattatacactggaatattcaggtagtcatctttgatttttcattcaagtaaatatagccataagaaaatatctgctatacaggaaaaccagtattaagcaaataccaccatccttaacagaaacaaaaatatatatatatattatttttaaaaattagcattgtcatacagtacaattcttagtgaagtgtattgtggaacaatttagaaacttcctttttttcccctagattaaggatactttccttgacttgagacttgtggtcttcaggaaaactactcagaatataatgactcctcatcagtatcatattgtatataaataatgaaatgcattaagaatattcacaacattgaacccaggaggcggagcttgcagtgagccgagattgcgccactgcgctccagcctgggcaacagagcgagactccatctc

SEQ ID NO: 117094 - DNA, 1000 bp, Homo Sapiens
cttaagagttgaatatgctgctttagaactttaaaacaaggtgtaaatgattttcattttttacaaatgaaaaataattcctttgtattgatttcacttaccagcacattctctacaatggtgacttagacaaaagtataagattcatagactttatatttgtatgacatacaactaggacaaacatagatatgacatttgctgcctcagtgtagcaattggaaatatttataagttatatgaaagcctgttttgggctgaaagaatgatttagaaaactagtgataccaaataagtatattcagttcaataattattttcaatgatgaatcacttagtgtgaaagacttgccttgtgtattctttatgtaattacaaatcactgtcaattttatgggaagctcatagtattttaatattttattaacatggaactcttgtttttttaatctttagaacttaaattctacaagaattttaaatattttctgtatataattatgacattgtcacacagaaattacacattttatgtgccagaagccttaaacatctttctgtgaaaatgctgatatattgtgacagttatttcacatttgatatgtagagaggaataggggttagtttatgtttatattgaaaaactttaaagactatttggaagttccagaaattctggttttaattcaagtaaaatgataaaatagtcattatatagttcagatgctaatattctaagtaataatatatatttacattgaagctaaaactgttaagcaaaacaatgcccatttgtcggcttacagctcttccggagtctagagcctgttggtgttctgtccctactttaagaatttaattgctcacttattctgaaagctttgttcaaacaagatgatattaaatttgttttcactaaaactactgggatatctgcctcttggggatttttttttcaatttaataaaagcaagttgtatatttggggtgctttttaaaa

SEQ ID NO: 117095 - DNA, 1000 bp, Homo Sapiens
aaagggtttcatgaatggaaacctaagtaaaactaagctcattagtgacagacttgttttcttcttgttattcctccagcaactccctcaccaccacgcctccctgcctaccatccccggaagggtgcttattctttaacaaagagaatctaaaaaaaaaaacaaaaaactgttgtctaatatatctacagtaaatgttacactagagcttttattttcctctgtagcttttcagaagaagcaatttaccttggatttgtaaatcaagctgaaacttttttgatgttcatgtactcatatgtcttgtaggtggtaggtgtcacttgtgtgtatgtgtaagtgaagtatgatgcatgctcattcacttggtccctttgaaataagggaaaggatcacagtgctgctgggccatgatggtatgtagaagggtctgtcagcacacatggaaagcccccatttgcacagatgtagaactttaataatccagatgcaatcattggaagtatttaatatgcaattggtagcaccttagctaattaatctgcatatgaagcattttctgatatatttaataagaggtatagaagctcttcaagcattaaaatagagttgatgtttcattccatttgttttatccatcaaaaaatgcactctcacagtggagttgaagtctaatacatgatacatgtgggcctgttagtcttcgaagcttccagatggtttgtgttttgaggtacaaaaaaatgctgcagatctagaaatgcatatatttagcgggtatttgaaagatagaagcattatttataactgaagagtataacacttatcttcttaagtaaatgctctcataacttgtatacatttttgcaggtacaaattcaaaagtatgtaagcattgtataatgtgacaattgtataatttatgtaatctgatgcatgaatcagaatttttatataatatatgattattgacttatagttgattaaagtgtttaaactt

SEQ ID NO: 117096 - DNA, 1000 bp, Homo Sapiens
tcctgccactgccctcccattacctagatggcacctcctttggtgaaaccacggccaatgttccttagctgcaccaggcccgaagctgttcccatgcttgagcttccatggggaggatgctgagtgagcagtttcctacgccgtggatctagcaagccatggagacaggtagcatttgtaagatgctgcacaggagcagcattatccccaaagatattacagggtagacacgttttaactgaaatcaatcaagataactttattcaaagagcagcccgctttgtgtgactaaaatgaaacaagacagttgaattgtgtgacttgaagattaccaatgattttgaggcttttctataataaaaagaggttctaaccattatttgggaacaaagagagttttcatcttttttcagatcaaaaccattctgtaaaatctttgttgtttaattaaatgtgccgttatttacccctgatgttatttatgactatgtgccgattcctgcttgggctgtttgctgttggctggtaataatatatttgatttaaatgctgttgactgtgctattaactgctgccgtcagtaaactccaaagatctttttgttttggctttagtatcatatgtgctttttctgtatcctgagcgctctatatgatcatgttaatttaaagctttatacacattgttgtttttgctggtctcatctttggtaatatgctataccccactgctgcccgacactgccctttagctgcagagctggattagctgttgaccatttgatgctgttgtctgtctggcagggactgaatgacctgatgtcagatttagattcttcctggggattacacagctatgaatgtatttgcttctaaaacctcccaaagtgaatctaatcttaaaactacaagttgtaagtattctgaaattgggaaacatttattttaaatgcaatcaggtagtgttgctttttacagcataataaatatatgtttcaaaa

SEQ ID NO: 117097 - DNA, 1000 bp, Homo Sapiens
aagaaagctacctgtggaaaatggaccaggttgggggggtgattgcaaagtctccccaaagcctggctcctcatgctcagtgccaggggcagaacactggggagccaggtatagagagccttcctgtcataactgccagtcctcttcctccaaggcctctgcatattctcatgttcccctcacccatcatgccagccacccctatccctcttctagcagggccaagatggggacagtagcagccctctggacttgggatgtgatgataaagcaagcctagggccagggtttggggagcagagagagccaagaagttgaccacgtgtgatttccagcccttcccactgggacttgacttcccaggtcaaggagtccgtctcattctggctggtcgagtgaccagaggcctgtgtgaatgtgtgcacctgcttttcctgcctggaatgttttctggctcagctgcagcaacatctgtgagcccagtgtctgccctgtgtccctgggctcgctccaagtgcaggaacgtacatgcagggcccaacatgatgatggtgtgaagggcaggaaacagtcctctgaaggagtggggaggtgggcagtctgcccccgccaggtaccatcgcctcctgccagcttccttagaccaggcagggctgccatggtgctagctgcaagtccatcagtattgaccgtctcgctccatcttggccctccggagtcccaagtttccttttcatcaaatctgacaagagagaagaaacatgggtgtgcttggcccacagggcctggtggtgatggacctccccgctccctcaagctctggatggctgcagtgttgtactagactttgttcaggctgttctcatctcagtattgccccttcctttcactttcacacttcatctcattcctgttgtcactttccccgaaacgaataaagtctccccagctcctgctgtgtaggctgggcagaaaccacaaaaaaaaaaaaaaaaaaaaa

SEQ ID NO: 117098 - DNA, 1000 bp, Homo Sapiens
agattgatgatcttacagcagaactggagactgcaggttcaaaatgtctacatctggatacaaagaaccaaattcttcaagaggagttgttatctatgaaaacagtacaaaagaaatgtgaaaaactacagaagaataaaaagaagttggaacaagaagtgatcaacctgagaagtcatatagaaaggaatatggtagaacttggtcaagtcaaacagtataaacaggagattgaagaaagagcaagacaggaaatagcagaaaaattaaaagaagtcaatctatttttacaggcacaagcagcatctcaagaaaacttagagcagtttagagagaataattttgcttcaatgaaaagtcagatggaactcagaattaaagatctggaatctgaactctccaaaataaaaacttctcaagaagactttaataaaaccgaactggaaaaatataagcaactctatctagaagaattaaaagttagaaaatctttgtcaagtaaactaaccaaaactaatgagaggctagcagaggtcaacaccaaacttcttgtggaaaaacagcagagcagatctttgttcaccactctcactaccaggccagtcatggagccaccttgtgtgggaaatcttaataatagtttagatctcaacagaaaacttattccaagagaaaacttagtgatctctacctcaaatccacgggcttcaaataatagcatggagaactacttgagcaagatgcagcaggagttggaaaaaaatataactagagaactcaaagaagctgctgctgaattggaatctggatcaatagcttcccctctagggtctactgatgagtcaaatctaaatcaagatctagtttggaaagcatcaagagaatatgtacaggttttaaagaaaaattatatgatctgaaagataagattttattactgggctgtttatgtgacattttgtttctcattaaatattaatatatgacatgtaaaaatatt

SEQ ID NO: 117099 - DNA, 1000 bp, Homo Sapiens
acccccactcagacagtgtacaaactaagaaggcctaactgaactaagccatatttatcacccgtggacagcacatccgagtcaagactgttaatttctgactccagaggagttggcagctgttgatattatcactgcaaatcacattgccagctgcagagcatattgtggattggaaaggctgcgacagccccccaaacaggaaagacaaaaaacaaacaaatcaaccgacctaaaaacattggctactctagcgtggtgcgccctagtacgactccgcccagtgtgtggaccaaccaaatagcattctttgctgtcaggtgcattgtgggcataaggaaatctgttacaagctgccatattggcctgcttccgtccctgaatcccttccaacctgtgctttagtgaacgttgctctgtaacccttgttggttgaaagatttctttgtctgatgttagtgatgcacatgtgtaacagccccctctaaaagcgcaagccagtcatacccctgtatatcttagcagcactgagtccagtgcgagcacacacccactatacaagagtggctataggaaaaaagaaagtgtatctatccttttgtattcaaatgaagttatttttcttgaactactgtaatatgtagattttttgtattattgccaatttgtgttaccagacaatctgttaatgtatctaattcgaatcagcaaagactgacattttattttgtcctctttcgttctgttttgtttcactgtgcagagatttctctgtaagggcaacgaacgtgctggcatcaaagaatatcagtttacatatataacaagtgtaataagattccaccaaaggacattctaaatgttttcttgttgctttaacactggaagatttaaagaataaaaactcctgcataaacaaaaaaaaaaaaaaaaaaaaaaaaaaaaaaaaaaaaaaaaaaaaaaaaaaaaaaaaaaaaaaaaaaaaaaaaaaaaaaaaaaa

SEQ ID NO: 117100 - DNA, 1000 bp, Homo Sapiens
gtccaacagctctgatcattttgggcttcaagtctctctctgtgactggtgattttgtgggttgaaacttctggcaaaagggggcagcccttgggagctgggggccaggggattgacttggttccctgacaagggtaccaggtccaccccttctgaaaagcagctgttagtttactcttgggctcttttacacattggatatctcttccttgggtagagggttctgacctaaaattccactttaggagtttgtcgtcttggactcaacaactaacaaaatgaaaaggacccagcaagcctcacttgtggaatgaaaatggggcattcaggaaagcacctgtcctggccccacagtatgtcagctgtataggcaatagtagtagctgtctcttagaagggaaataatgtatcacctctttccagaacgaagcaaagttgctggcttagtagagccctcaattcatagaggttactgtaattgggcctggctcactgatgctttcgccaactgaaactactaggatcctgtgtgtgttcaaactcagtgccattaacaaacccaaagtgaagcggtcactcctctcagtggaaagagcacgaggatgttctcagctctggccaatactccatttcataaaccatgttacatttttgttaagccttggctctggatgtggcctagatatttgatattctaattggaaattacagattaaaaagcaccctttctttgtacagtgggggtaaaagtcacagctgcttagtacaaccatctgggttgctcaagtagatgcccataataagagactattttctgataagactgactggaatcaagctgccgacagctttctccatccagattgtgacggttgctacctggatccatcattttactggtatggcaaaaaatcacccatgtgacactgggtgacatggtaaaagtacatggtacttttacagtaccatgtactgtacaaaataaaggtctctttatctg

SEQ ID NO: 117101 - DNA, 1000 bp, Homo Sapiens
cttcaggccaccttccacgggatccgttctgcccccagctcctcggacagtgcaaccagagacccctctacctctgtcccagcctccggggcccaccagcccccccagaccacagaaggggagaagagcccagagcccttggggcttccccaaagccagagtgcccaggccctcacgcctcctccgatacccaatggctctgccccggaagggcctgcatccccaggctcccaatagctgcctggtgcggcagcggcggccaaatcttccgtcctcccgtggatctcccggggtgggggcagggcgggtcccacgatggcccccattgccctcatcaccctgacacccccacattctctcctctggacccccaggaggctggtgccagggagacaggcccaacccacccccatttgcactgagaagagaagttttggagcgttgcctcctagaataaagatacagagagtcaaatagagagaatggagagagagaaacatatattatatattatatagagagagggaggagagcgagagagagtgaggacaccgaactgggctggcggctccaaagcacagccttccctgttccgtcccagcgggagctggtgttaggggtcccaaggttgccacccacgtgcccagctgtcccacgctgcagcgcagacggccacgcccacacccggccttttagctcaggtccaccatgggggacggcccagcgtgggtgggggtgccagagggtcccgagtgggggccgtgcctttgcccagaccctgcactttcaaccaggccagtccggctctggggagcaggggcctccccggcaacagccccaggggccttgagggtctgaggtcccagccctgttgccaagtgaccttgtccccagctccctcctcccaggctggtgtgagtgtgcgtgcgtttgtgccgagcttctatttcatattgcaaatataaataaaggaaggcagtttacgaaaaaaaaaaaaaaa

SEQ ID NO: 117102 - DNA, 1000 bp, Homo Sapiens
gttgggtgacccccagtcacaaatgctgcagcaacagccttcagctccagtaccactgtcaagccagtcttcattcccacagccacatcttccaggtggccagcccttccatggcgtacagcaacctcttggtcaaacaggcatgccaccatctttttcaaagcccaatattgaaggtgccccaggggctcctattggaaataccttccagcatgtgcagtctttgccaacaaaaaaaattaccaagaaacctattccagatgagcacctcattctaaagaccacatttgaggatcttattcagcgctgcctttcttcagcaacagaccctcaaaccaagaggaagctagatgatgccagcaaacgtttggagtttctgtatgataaacttagggaacagacactttcaccaacaatcaccagtggtttacacaacattgcaaggagcattgaaactcgaaactactcagaaggattgaccatgcatacccacatagttagcaccagcaacttcagtgagacctctgctttcatgccagttctcaaagttgttctcacccaggccaataagctgggtgtctaaaaggacagcttctcttccactcaatattgccatttttccaaagaaacatgttaaaaaaaaaaattataagacatggactagtcctcattagcatgtttgcatagcaaccagtcaagagcatttacactatttctgctgatatactcaccttagaactgctcagaaccctggtgctttatttttgttttaatcttttgttgccagtgatgattttcctattctgcaaatagtgtatttcctggattacacatagtatggtttcctgaagtattctgataaatgtgttttttaaaacctcaatatactttttagaaaaggagcatctggttatgcataaagcagagctaaaactaaatttctttcatgtcctccctacttcctcagtgtcaatcagattaaagtgtgtaatcctaaaaa

SEQ ID NO: 117103 - DNA, 1000 bp, Homo Sapiens
gtagtggatgtttttgaagtatctaaaatagtagcagaatattttatacttggtccttgcaatggtgtgagttttaatgattgcattatcgtgattggtggttatgagtttcagaaatctatacttggcatccaactcatgagtggattttatataggatggaacaggaaggtatgtcctgtcagtatcttaaccctttcaacaagacatttacctatttgtctttccttacgttctcaaaatattaactcgaattgtaaattaagcaaaaatttaaaaagtatatgttgatgggacaagaagaatagtatttatttaataaaacatatattatattgaactatgtgttaattcatttgtatcttttaaaaaattatcactgttaaagccattgactcctttagtacactgagaaaaatcttatagtaaaactagcctttcacattaaggttttggtgtgtattttgttaaataactaacatgctgctctattttctgggtgtagaaagtatttggctctaggaaacatttacttgtttgtgaaaacaataccccaaggtaataggaaaagtttgagttaagtgtttttaattcagtcagtgaattcagaataagtacattcatgtataacatagggacagttctgctgctgttatttatatgcaattcttctggtaaatagcaatagaataaaacatatttcaatgtttgtgtataggttttatattattattccactaggaatggcataagaatttatagataaattcttgtaacattaaaggattaaaatgtttttacattgtttttgggtgtctccttcttgtgcccatatctgataagctttatggattattgcatttaattccttttatttggagggttttacttccttgttaacatataaagttataaatgaaggacaaggaggagatggaaaatgtgtatttattgttaattcttaaaatagtgtgtaaataaaataacatcagtgtgcttt

SEQ ID NO: 117104 - DNA, 1000 bp, Homo Sapiens
gatcatgacgtcagggcctctgaagagagaagggatgttggcctccaccgtgtcccagtccaacgtggtcattgcgcctgctgccatcgccagggctcctggggtcccggagttccacagcagcatcctggtgacagatctcggccatggcacgagcagcccgcctgcccccgtctcccggctcttcccaagcacagcgcaagaccccctggggaagggcgagcaggtcccgctgcatgggggcagcccccaggtcactgtcacagggcccagtcgggactgcccaaactcagggcaggcctctccgtgtgcatcggagcagagccccagtcctcaatctccccagaacaactgctcagggaaatccgaccccaaaaatgtggctgcactaaagaaccggcagatgaagcacatctcagctgagcagaaaaggcgcttcaacatcaagatgtgcttcgacatgctcaacagcctcatctccaacaattccaagctgaccagtcacgccatcacactgcagaagaccgtggagtacatcaccaagctgcagcaggagagaggccagatgcaggaggaggcccggcggctgcgggaggagatcgaggagctcaatgccaccatcatctcctgccagcagctgctccctgccacgggagtccccgttacccggcgccagtttgatcacatgaaagacatgtttgacgaatacgtgaaaacccggaccttgcagaattggaagttctggattttcagcatcatcatcaagccgctgtttgagtcgttcaagggcatggtgtccaccagcagcctggaggagctgcaccggacggcgctctcctggctggaccagcactgctccctgcccatcctcaggccgatggtattgagcacgctgcggcagctgagcacctccacctccatcctcacagacccggcacagctgccagagcaggcgtccaaggctgtcaccaggattggcaagagattgggagagtcctag

SEQ ID NO: 117105 - DNA, 1000 bp, Homo Sapiens
tttgttgtgaaggaggaaaagaaggactcgaatgagctctcagacagtgctggggaagaggactcggctgacctcaagagagctcagaaagataaagggctgcacgtggaggtgcgtgtgaacagggagtggtacacgggccgtgtcacagccgtggaggtgggcaagcatgtggtgcggtggaaggtgaagtttgactacgtgcccacagacacgacaccaagagaccgctgggtggagaaaggcagtgaggatgtgcggctgatgaaacccccttctccggaacatcagagccttgatacacaacaggagggcggggaggaggaggtgggccctgtggcccagcaggccatagctgtcgcagagccctccacttccgaatgcctccgcattgagcctgacaccactgccctgagcaccaatcacgagaccatcgacctgcttgtccagatcctccggaattgtttacggtacttcctgcctccaagtttccccatctccaagaagcagctgagtgctatgaattcagatgagctaatatcttttcctctgaaggagtacttcaagcaatatgaagtagggctccaaaacctgtgcaattcctaccagagccgtgctgactcccgggccaaggcctccgaggaaagcctgcgcacctccgagaggaagctccgcgagacggaggagaagctgcagaagctgaggaccaacatcgtggcactcctgcaaaaggtgcaggaggacatagacatcaacacagatgatgagctggacgcctacattgaggacctcatcaccaagggggactgaaggcaggagagagagcagctcccctgcccacctgcccctcaaccctgtagctgcagggggaggggacttcattcatgggttggtggtcgcaccttggtttgacttacacgggacatttgtgtttttggaggaaaagataccctgattctttgaatcttccttaagtttataaatatttattttttaaaag

SEQ ID NO: 117106 - DNA, 1000 bp, Homo Sapiens
gatttgtacaatgtgggaattttgttacctttttaatcaagggcaacttccttttccagcactaccattgtaaggtttttttcaggagggagggctaaccaccttgcttttctcttttctctttttcttttttttatttttgttttattaatttggggaaaggggtgttagcattagtgccatgatatctactggattttaagtagggagactttatttttaaaggtaggttgaaatttgggagatttctcggcaggaagggctgaaatccaggcccctgtctcaacttggagagaggtgacagacggcagatcttccaaatcaaattcctttccagttcttcccctggctgcctttttgggggtccctgccttagccccacacaaggctttctgaactgccaagaggggatctggcttctcaactgctcggcctcttgggccaggctgtgcccagccagccctgggagaactgggtagcaggtggctgacttctttaagcacctttctaaataccagcagaagaggctcccgcctctgttagcatgatcagtactattgtgacattaaaacaacaacaataagatcttcctatctggagggtacagaggtgaatggctttggttttcatttctcttcttcactgccttttctcggtgtggtatttgacaagattttagctcaaagcctcaccatgaattgattttttttgtttgtgtgtgtgtttgttttgggacaattttagatacctgagtgcactttttcagttagtcctaacttttaaaagaaggaaaaccaagagacatatctggtgtacgtgttgcagtatgaactctggttgcaatccctccccgtcccacactgccccccatttgagtacaccgcacaagtcaaacgctaggaagtttgaataaaaccaatttttctaacttgttgctcatttgttgtaactcaataaagcaaagactaaacatttttataacctttaaaaaaaaaaaaaa

SEQ ID NO: 117107 - DNA, 1000 bp, Homo Sapiens
acttattctcaatatttatgtataaaccatgcttctcagctttcaaatttcaagataaaatttaagtattcagtaaaatgatggttaacatgttttaaaaaatctttaatggagaagttaaatatttggtgagattttagtctggctataaatgctttgtttgatatatatatgtgcacatatatatattacttaaccatatgaattttatttccttattctgaatatacttgtagttttacttctttctgtttatgtacccaattccttatgattattttgtttcttctgcaatatcaagatgttatttattttgagaaatgcttatttttatgactatttattccaatgttttaacaagaagcacagagatttatagtattcttaatagtatgtgcagaagttacatcatttaaaaaacccttgctgtaaagtaggataacttgaatattcattctaataattagactaagtgaaaatctgagaaagagttaattgcaatgtgatagtgggtagaaaggagagaaaaacccactgaagggttcaaatacatgtgaattctactgctttaagagaaataaaacaaataagcctagggaaatattagagtctaaaaaaccctagagttactctcttttgggaacataaggaggtatacagaactgcagacctctaaacataagtaggaaaaagaaaaataaaagaatattaccaataattaaaggtgccagatcaaaatagtaataaatcaacaaataatttttgattgactggtggaattagatttactaaataaaaatggcttaaattttgactgtactaactataaatgtaatgaattataataattataaatggtataaatgcattctacaatgtgattattttctgtattttagtatatagtataaaatggaattattgggttaaagtacttttattacatttcttaatccattgtttttacctaataaaatttcctcctctatattccaaagtt

SEQ ID NO: 117108 - DNA, 1000 bp, Homo Sapiens
ccccagagtagactaacaggctcagtcccctgttgtccttgtggagactaggccttggccctggccctgagactctgtgagggggctggagcagcctggttatttcctatctgtaccaaagaggagtatggtgggagagggagtggagtgcagtgtggcttgggcctggtgctgggaacctgctagctgagcacttccacaagggcatacccctgggggcaggggctggggctgagaactgcagccctgggtcttcccttagggaggaagggcagatgaacccagcaggcttaggaggtggcactgggtgaggacagctgggcaggggctgcagagggaggtggaaatgaaccctgagggctcccccaacttgccatgccctgtcccttagtagatgagttgctcctgattggtcattgggtttgggtgaggcctggaggcttcagaggtgaatttatgcttgggaagcctgatcccaaacctgaagggaagggacttggatctccttatattgaataagctgtttggaggaaggtgtctgtctgggaggatggggcagtaaatgaggttggcagagtggcagtgggggctctgcagagccagccttggagcctgctcattctgggcccttgctgccaaggagcccagcctcacctagcaggaaaggagatgaaggccctcctcccaggaggtagggtcttggctgccccgaacttaaatgcttttgaaatctcttagatgtggaaatattttttcgaacctgaaaatgcagctggtagaatttcaatggaagcataatccatgtaaaatatattttagttgatattttgtaaaatgcactttttgtgtgtgttgatcctggtttcccagatctgtatttcagtgtttacaagggaggaaggacctttcctcacctcccttttgacagagattagaagtacttctttaagaaaaaaataaatttgagaaattgtattgatttagaaaaaaaaaaaaaaaa

SEQ ID NO: 117109 - DNA, 1000 bp, Homo Sapiens
tcaggtgtttgcgacaggggttgggccagctgaggcaagctgtcttttttcccttttctttttaatagatgcaacatttttataataatcctagagaccttttttctaccaaagatcacagaccagaaaaagttccatctaaaatatcatgcccaggaaagcacatgggatcaaaagtaaaatagcatcatgtgtgatctcgtcttccagcgtgccgctcagttccccgaatccgtgtgcacacgtgtgatctcgtcttcagtgtgccgctcagttccctgaatccgtgtgcacactgcgtatgtgtacgcgcagcatgctatactgaactcaacaagatcttggctgtacataaatatttgtaaaagagaccctttgcacctttttactgtaatgttgagacttcattacttaaatgttctacggaaggttctggtgtggttgttggagccggagggagcgtgtcagcacgtgctgagggcatggggcctgccccctgggcacccatccacaagctgggccacggagctccagcttctcaggacaaagccccggggctggcgcatcctgagggtctctgggggtgtttgccaggctcctgggatgggccgctttcagaagccctgcagtgcctccagatggaaaggcgggcccggcctccggttgggtctgcattttggagagtccacaccacggaccaggttttcccccaaggcttggctttgtgtagctactaacttcttggggcattctgagagtgtgggcagagagaattatgtggcctcatcctcccccaaggctgtgcttgcagcccgggcaccttcccactttctagctctggagaggttggattttgcttttgtaaacacatgaatccttatgataaaagtctgtcagtcaaaaatacatttataaattatttaatgccagtcctcatgtaacctcaggtatcttcagcttgtggagaataaatctggtttaataaaaaaaaaaaaaaaaa

SEQ ID NO: 117110 - DNA, 1000 bp, Homo Sapiens
gcggctgatggatgcggacgtgaagcgcaggcaggcgcccgccctgggctgccccgccccgcccgccccgcgcccgctggcgctgccttgcggccccggagaggtgctggacctcacctacagccccccggccgaggccttcccgccgcccccgcacttctctttcccggcgccgctgtccctggacgccggccccggcgtcgtgccgctgggcacccccgacgcccaggccgaccctgcggccctcgcgcaccagggctgcgacatcaacttcaaggaggtgctggaggacatgctgcgctcgctgcacgcggggccgccctccgagggcgcgctgggggagggcgcgggggcggggggcgcggcgggcggtggtcccgagcggcagagcgtgatccagttcagcccacccttccccggcgcccaggctcctctctgacacgcctttaggcgaaacatgccccaagacacagggaccgtttctcccctaggagcagcggtggggagcagggccaaggtcccctgaccactgctcagaggagccctaggccctggccgcagtgccttcagcgcccgacccgggcccccacctggtcagccctggcggggcccactcaggacagctgggggccggggcgtggcagggccctctctgtgcctctcctcctaagtaggaaggggctccgggtggctgctctgggactgggcacccacaagggctcagtgggcccaaacccttgaaatccgtgaaaccgggtggtcccaagagctagaaactcaggaaaccccaggtgctcagggccccgcgtctcgggggctccgtggggcagacccctgctaatatatgcaattctccctcccccagcccttccctgacccctaagttattgcccgctcacctctcccaggccccaggccgcggagctggcagggtggcgcctgcggtttctatgtatttatagcaagttctgatgtacatatgtaaaggacttttttaaat

SEQ ID NO: 117111 - DNA, 1000 bp, Homo Sapiens
tgcgggcccggaactacgagtacctgatccgcctcttccaggagtgggaggctcatcggaacctgtcccagctccctaattttgccttctctgttccactggcgtatttcctgctgagccagcagacagacctccctgagtgtgagcagagctctgccaggcagaaggcctctctcctgatacagcaggcgctcaccatgttccctggagtcctcctgcccctgctcgagtcttgcagtgtgcggcccgacgccagcgtttccagtcaccgcttctttggacccaatgctgaaataagccagccccctgccctgagccagctggtgaacctgtaccttgggaggtcacactttctctggaaagagcccgccaccatgagctggctggaggagaacgtccacgaggttctgcaagcagtggacgccggggacccagccgtggaagcctgtgagaaccggcggaaggtgctctaccagcgtgcacccaggaatatccaccgccatgtgatcctctctgagatcaaggaagccgtcgctgccctgcccccggacgtgaccacgcagtctgtgatggggtttgatcctctgcctccttcggacacaatctactcctacgtcaggccagagaggctaagtcctatcagccatggaaacaccattgctctcttcttccggtcactgttgccaaactataccatggagggggagaggcccgaggaaggagtggctgggggtctgaaccgcaaccagggcctgaacaggctgatgctggctgtgcgcgacatgatggccaacttccacctcaacgacctggaggcgccgcacgaggacgacgctgagggggagggggagtgggactgagcgtccgcagaggtgaccgaaaagccgtatgatgatgttcccgatttctctgttggtcggagtcggccagttgcctgaagtagggaagctgagtgtgtcgctccctggtccactgtttctcctataaatgtaaatgggtc

SEQ ID NO: 117112 - DNA, 1000 bp, Homo Sapiens
ggaggaaccacctgccaagctgctggatgaccttttccgaaagaccaaggcagctccctgcatctattggctcccactgactgacagccagatcgttcagaaagaggcagagcgggccgaacgggccaaggagcgggagaagcggcgaaaggagcaagaagaagaagagcaaaaggagcgggagaaggaagccgagcgggaacggaaccgacagctggagcgagagaaacgtcgggagcacagtcgggagagggacagggagagagagagagaaagggagcgggacaggggggaccgagatcgggatagggaaagggaccgagaacgaggcagggaaagggatcgcagggacaccaagcgccacagcagaagccggagtcggagcacacctgtgcgggaccggggtgggcgccgctagctgggaaaacactagagctgcaggtaccagccactcggccccagggggttatggccacagagggataggcacagtctccaccaccctggagccaagggtctttcacatcacctatccctacatacataccaaatggaaaagtggccatccttttccccccaaacacacccccttaacctatctcttgggacttagcccgaccctccctctcatttcccattaagtctgagaggcaagagctaggttaggcaaggaggtggttggccagagatggggaacagccaggtgccccagtcctctgatttttcctccatcctgcttaccacctccctgggtacttacagccttctcttgggaacagccggggccaggactgggtcacctatgagctgaatcagcatctcctcctgagtcccagggcccctgcagttcccagtctcttctgtcctgcagcccttgcctctttcccacaggttccactttatatccaccttttccttttgttcaatttttatttttattttttttattattaaatgatgtggtctatggaaaaaaaaataaaaatctgacttagttttt

SEQ ID NO: 117113 - DNA, 1000 bp, Homo Sapiens
atcttccaaagagtcaatgtcagacatcaggcctctgttgcctgcttctctcgaggcactagattaggagtcttcaataagagacttaacatgaggtatatggaagatgaggcaccgagataagttcatcattaggtgtgagcactgctcacccttgctggcaagttctccttaagggcctgaagcacaggtgtccaaagaaaagcgttaagtccatcttaatagaatctatgtggtatatgatgtggtcagcccctggtctgtgatcagcaagaacctacagcacagattatgccctgcccacttcaatgaatacctactctcctccattctccatcactttttttgctatcaagaactccggaccttgcccatggagaagtttagagaggaactcttgtggagagctggtttattttctgccctgtgcgacgagtttcagctggccaagaaaggagtcaagttattaaaaagcatcacaatgtagatctccaggctggttttttgttttttgttgttaagactggggaaagggggactatttattctgccttaaatcaatggcaaataagtcaagatgacattttgtgaatgtagactatggatacactcctaatagattgatgtagtcataaaagggggtcaagtagatgtttttctgttatgtaagcaataatttttccgtgtcttattgagtatggctagcgattatttattacatgctagatgggttctttgcatgtgggttccatataggtgcagaaatttcctcagccactggagggatttcgaccatatttgtcatttggatgagctgttattagattgaaatctacacatcatttcattaaaaattgtgccttagaaaacgcaaagctgttgcacatggcgataaattatggatgcagtacattgaagagagatgaagtcacttccaagtttccaagacttctcatggaggtgtttgctgttttacaggaaaaaataaaaataaaaaaag

SEQ ID NO: 117114 - DNA, 1000 bp, Homo Sapiens
ttccataactagaaggtggaaaccaaaaccctcatggtagtatttcctctggcagctggtgctgtgggcaactgttttgttcaatcgggtttcttttctttttgcctctaatgcagaaatcaacagaatcactcacacatacaagtacactcacatacataaactaattatttctctggatatctttctgtgttccatgtaaatttatttaccaacatctattgtcaacatgtacatctaccttagtatggtctgcattctttttctgagagtacctcatagggctcctgcctgatctttgtagtttgttcattcatccatccacctgttcatttgttcatccatgtattctaacatttctatgtagtgtgcaactctaatgtcatgcttttgaagaagagaatagctgcccatagcagccatccgtctggataatagcaaaacactctagataagttattttgcactttcttatgtataaagttggtagaaacttatttttgctttgtatcatttaaatacattttgttttggtaaatgaactgtgtataaaatatttatgccgttaaaactgtttttagaaagtatttttaatttcagcaagtttggttacttgttgcatgactcttaacacagctgactttttgtgtcagtgcaatgtatattttttgtcctgttattaacttgtaagccctagtaatggccaattatttgtacagcaacagaagtaaattgaagatactggctaagactggattgattgtggacttttatactatattgcagaaaccaatatctgtttcttggtggttatgtaaaagacctgaagaattactatctagtgtgcagtctgtgatatctgaatgttcattgtatatttgtctctgatgcaaaaaggtagagtaacacaattacaatacatgattaaatgcaatagtccaggtacttaagtaatttttttttcatttcaaataaatacctatttaccaccaaaagaaag

SEQ ID NO: 117115 - DNA, 1000 bp, Homo Sapiens
atttggtggaaatatattctaaattgaacaagccaggctgtccagggtggcaagaggatttttgacctggatttatacagggaccaaagactgaatgctcagcctctgtgcttagactttcatggtccttaggatagaagtgagtctctagccctgctacaccagagagctgaagagagatgtggtctggttccatccatacttgctggcatcctttgttaagccttctgagggcagtcttctttgaggtagaccttggaggcctgacatcgaagacctgtgtgttttattttcataaaagtatatatccttggtctaaagtgtcttcttttaatataacactagtaaaaatgacatggtatgaccagcactgagtgctatagaaccacacatgtgtacatgttctggatgccaaatgagactgtgtgtaaatgactaagtgtagataactagaaattagataggggtcatcaggcgtttcggtatacctataaccagcactcggaattcctgacactgtttacttgatttaggaaagtttatgcctgctgcttctctgcctctttgaggtactcccagccgtcttactacagtcctgtaaatttaagtgcaatatatagaaacatatggatatatacagattatatatagggtgtaactataaagcaggtagactacttttttgcatcttggggaagtgagctcattactttaggttcaaattatgccaagaattttagatgtgatcagctggcttaagccaactcatgtcatgataaagctggattttcaagtccatgttttcttactccaactcttagagactcattgttccttaggtttgttagagttgagattttttttctccctgtcatctttgtactctctcatgtttgcatgtcttacattttgttgccggagaacaaggaagtccatctgtaaggagtttcctaaacggagaattaaaacctagtatttaacaccaaaaaaaaaaaaaaaa

SEQ ID NO: 117116 - DNA, 1000 bp, Homo Sapiens
tcttcccagggctctgcagtaaaaacaaaggacaacccagccaagcagaggaagaagctgccgaaggggacagactccactgccagacggccagccgtttgctgtcctgccgcccggctcagtcggccagacttcctctaggagtggtgctgctaccttgtatgtttacataatgctttagcccaaggacacatcaccaacccatggactcgcagacaccggggctgggtttctctttcctctttttggagaaaaggaacagggcagtggaatgaaaattttttgtttgtttgtttttaagaaacaagaaaacagaactgcctttgcactaaattagtgacttggacttttgcccagtgaagacaggctgtgacactctggatgtcttggtgtgtgtagacacacattgcagactcttaacgcaggaaggacttcaaacttctgctgagaccttggggtcaaggaacatttcattggttttttttgtccacccccatctcccttgctcatttggatgcgtcaccttaattctcctgctgccaccgtctttgattcaccgggatgtacagtttacagttgaagagcaaacagaaaggttttctcttggtgggatatgcagaacttgggatgtgtgtatatataaatatataatatatataaatatatataatactgacttaaaaaatcaaatcccccgacatacgttttttttaatctgtgccaaaaatgtgttttcagaggaaatcttattttcatattcagactttgtattgcccactcatttgtataagtgcgcttcggtacagcacgggtcctgctcccgcgatgtggaagtgtcacacggcacctgtacaaaaagactggctaacccctcttcctattaccttgatctcttcccccaacttcctaacacttattaatttatgaaactgtttttctcagcgcagttttgttttgtgtgtccattggattacaaactttattaaaaaatataaaacac

SEQ ID NO: 117117 - DNA, 1000 bp, Homo Sapiens; identical to SEQ ID NO: 115409

SEQ ID NO: 117118 - DNA, 1000 bp, Homo Sapiens
gtgtgtgtgtgtgtgggttctttcttatccatctcgtggtgatacactctgattttcaagctcctcatttacggctctgtgctacccctaggtagcaagagagaggctgggaaaagtgtggacgtggccagagcgagagagtagcggaggaaaggagcaatccatgcacactctgtacagttgtttttctacggttcaacagtctgtttattgtacttccaatggttttattataatacagtatacgggacatatattttatttctttgtagctacttgtgttttattggtattataaacctgataattatttacatgtttattactgtaattttataaatttatgcaattggtggtgcttcctttcttcaaaatacagattttaaaaaatcatttctagattatttttttcctccacagtccttttttttcacctaacgcacctaaatcttgaaactacattgttgttttagcttcgccagtgtcaccccttgcaaaactatgaattgagccccatgttttaggtgttactcatggatgaggaggctgttctttcctatgccctgtatttctggataagtggattgtgtaccctttagttaaatttcacctcccgacttcagcatagatcacaggaaatcacatggcacacggttaaacacgtatggcttcaaatccatagccggtggtgtaaaatgatcatattcattcaaaggcctacacagtacaaatgagcacgctgccatgtactggtttgagcagtaggggctgcatcgcacagcgctcgtcccccgggacttacactgcatgattccctcgctgtatatcctcaaccctcccataatgcaaggccttgttcattgatgtgctttcgtcggctgtcggaaagttctgagcagtggctccagaccaccttgtcttgctacttggaactttttattcataccagcctttgaaaagttactgtgccaataaagaggtacaactgtgttcttctatt

SEQ ID NO: 117119 - DNA, 1000 bp, Homo Sapiens
gtcctcgctccacccacccacgctgctgtcacctgaggggaatctgcttcttaggagtgggttgagctgatagagaaaaaacggccttcagcccaggctgggaagcgccttctccaggtgcctctccctcaccagctctgcacccctctggggagccttccccaccttagctgtctcctgccccagggagggatggaggagataatttgcttatattaaaaacaaaaaatggctgaggcaggagtttgggaccagcctgggctatatagcaagaccccatcactacaaattttttacaaattagctaggtgtggtggtgcgcacctgtggtcccagctactcgggaggctgtggtgggaggattgcttgagtccaggaggttgaggctgcagtcagctcagattgcaccactgcactccagcctgggcaacagagcgagaccctgtctccaaaaaaaaaaaaaaagcaatgtttatattataaaagagtgtcctaacagtccccgggctagagaggactaaggaaaacagagagagtgttacgcaggagcaagcctttcatttccttggtgggggaggggggcggttgccctggagagggccggggtcggggaggttggggggtgtcagccaaaacgtggaggtgtccctctgcacgcagccctcgcccggcgtggcgctgacactgtattcttatgttgtttgaaaatgctatttatattgtaaagaagcgggcgggtgcccctgctgcccttgtcccttgggggtcacacccatcccctggtgggctcctgggcggcctgcgcagatgggccacagaagggcaggccggagctgcacactctccccacgaaggtatctctgtgtcttactctgtgcaaagacgcggcaaaacccagtgccctggtttttccccacccgagatgaaggatacgctgtattttttgcctaatgtccctgcctctaggttcataatgaattaaaggttcatgaacgctgcg

SEQ ID NO: 117120 - DNA, 1000 bp, Homo Sapiens
tcccacatgctgagccgccacaaagaccaaagaagtgatggcttttctctgtcccctgctgctctgaggggagaggggtgggtctcctgagccactcagatgggaaagtcccttactcggcccctccctccccagcagccccaagctttacactggatgcagcgatcaacccaccactcaccaggcctctcctcccctctgcccccggctcttagctccagctgctccaggtagttggttcatccttccccctctctccctccctgcttccccttcagtgcttacttggctccagccctccagctgcagcccctggggaaaagcagcctcccttctcctctccctccactccctcgctccctccctcagcccctgtctctgccaggtgcctcctctcagtcaggcttcagagcagccctggagacaggagggccatgttaaaagctttttcacagttttaagaagacaagtggagggtgaggatagtggtggggggtctggcaccatctcattgctttaatcccagcaacacaggtggcagcttctcccccttccttcccaccccagtccctcttcccacccctctcttctagcttggtaatgaagtatatttattggtgaaggaaacagctgctgctgcttctcctgctgctgggacctgctcccctgtctcttctccgtgacctttctctagccagggagaagggagagcaggagtattggggctgggccctggggcccaaggaccagctgggtcccctttgctttcttgtgttccagccacctgccatttcctccctgcctcccaccctccctccctgccccctgtcctgcttcccaccccctgcctgcccagcctgggccctgcagtgtggagagacacataagccttactgtcctctgggggcaggagccgagcctttttgttgctccgctcccaggagagtgagggtgacgcaattgattaaaaccattttgttctaggaaaaaaaaaaaaaaa

SEQ ID NO: 117121 - DNA, 1000 bp, Homo Sapiens
tcttattattcactactggaagtcctgacccaggaccatatgaactttattgcaagcctggaacctcacgtcatcatgtatattctctcttccatttctgaaggacttactgcacttgacaccatggtatgcacaggctgctgctcctgcctggaccacattgtgacatacctcttcaagcagctgtcacgtagcaccaagaagaggaccacacccctgaaccaggagagcgaccgctttctgcacatcatgcagcagcatccagagatgatccagcagatgctgtccacggtgctgaacatcatcatctttgaagactgtaggaaccagtggtctatgtcccgaccactacttggcttgatattgcttaatgaaaagtatttttctgacctaagaaacagtattgtgaacagccagccaccggagaagcagcaggccatgcacctgtgttttgagaacctgatggaaggcatcgagcgaaatcttcttacgaaaaacagagacaggttcacccagaacctgtcagcattccgtcgagaagtcaacgactcaatgaagaattccacttatggcgtgaatagcaatgacatgatgagctgacacctccttggactctacctgtacagagcagcgtccctttggtttggcccagaggggcgaacaattgcaagggagagggcctggctgatcctggctcttttctccaggggtgtggggaaaatggcaaaggtcaactagctgcttccccagggaataggggtgtgagtacactcactagggggcagggcgctgctggttcctgggggactgggtgggaagggtggtgggaggagataagagatacaaactgagactccagcctctcctcctggggccacccaagtggggagaacccctagtgtcctgccataacctgccttgtataaacatgtacattttttcataacattttgaacaaggtttatattgactcaagtttaaaaacgaaaaaaaaaaaaaa

SEQ ID NO: 117122 - DNA, 1000 bp, Homo Sapiens
agaagcagagattgatattcgtttgagagaggaattttctaaaatgtgttttgaaacattactccagttttccttcagtaataaagtcacaacacctcaagaaggctacatctcacgaatggcactctcagtgcttttaaagaggtcccaagatgtactacatcgctatatagaggatgaaagattaagtggtaaatgccctcttccaaggcaacaagtaacagaaattatatttgttttaaaagcagtcagtactcttattgattcacttaagaaaactcagcctgagaatgttgatggaaatacctgggcacaagtaattgccttatacccaactttagtagaatgcatcacctgttcttcttcagaagtctgttctgcacttaaagaggcactagttccttttaaggatttcatgcagccaccagcatccagagttcaaaatggagaatcttgaccggctacaatatatttgaaagcaggaagatagtctaaaaaatgtttgctcctaattgagtcttctgtgagaaggacatttcttactgcaaataattcttggcagctgttgttggcctcctttaaattctacttacctgagttcagtaattcatattacaggcttgcacatcaacaaaggctcctgaatgaacagcagtgtaaggctttaataaattaaactgatgggagggataattaacactacagtatacatgctaccatatctccagttggtgatttaaagtgagcttatgtacagtttgtggtgtatgtgttaatgatgtactttttaaaaagaaagaagagatatttcaattcagtcagatttattagtctggtgtttttgcaccctttttcaagtacaaaatcgtactagaattttatgcaagatggtactgtaacattccatattatctataaccagcctttgttaacaaagggaactgatatacttgtgtgtataataaatggtacagttctgtataaaaaaaaaaaaaaaaaa

SEQ ID NO: 117123 - DNA, 1000 bp, Homo Sapiens
cctgaaaatgggaaaattcacactgggtttctggactgtagtattggaagccttagttatagtatattaagcctataattatactctgatttgatgggatttttgacatttacacttgtcaaaatgcagggggttttttttggtgcagatgattaaacagtcttccctatttggtgcaatgaagtatagcagataaaatgggggaggggtaaattatcaccttcaagaaaattacatgtttttatatatatttggaattgttaaattggttttgctgaaacatttcacccttgagatattatttgaatgttggtttcaataaaggttcttgaaattgttaccagtgaattcagtttataaatcttattacaaaagacttacccacgtacctgaaatagctgccgatagaccagtgagaggtaggttctcctctgcccgttattaccgaccaaaaaaaaaactggacatcaattttttagtaaaccaaaaaataagtctcaacaaatgcctttgccaaaataaggttttattttgaaagtcatttgatgaaagtcatttgaaagacactgaggagggaaggaggcctaagacccaacagatgtaggatccagatctggattcgtgccagccccaccaatggtctgtcaggccaagaaggtgctttctttggtaattcatgttttttaacttcctggagaagagatcttttcccacaagccatcttcattttttttgtagagtagggctttatttccagaaaacagtgtgtgagctggagatgggtgtttttttaaaaacatcaaggtagatctaatatgttcaacaaagtggggtggctcagccagaggcgaagtggaaagattctgaaaacacaagatggtgggcattagagaagccaaccttactgtcccctgctgtgataaagatgtcaaagtatctttgttcttggacacaaatatatataataaaatacgttaagaaacgaaaaaaaaaaaaaaaa

SEQ ID NO: 117124 - DNA, 1000 bp, Homo Sapiens
atgcctaaaaaaactcatcagccatctgatgaagtgggcacatccatagagcaccccagggaggcagaggaggtaatggatgcagggtgtcaagaatcggcagggcctgagaggatcacagaccaggaggccagtgaaaaccatgttgctgccacagggagtcacctctgcgttctcaggagtagaaaattactgaagcaactgtcagcctggtgtgggcccagttctgaggatagtcggggaggccggcgagctcccggcagaggccagcaaggattgaccagagaggcttgcctgtccatcttgggccacttccccagggccctggtttgggtcagcctgtccctgctcagcaagggcagccccgagcctcacaccatgatctgtgtcccagccaaggaggacttcctccagctccatgaggactggcattactgtgggccccaggaatccaaacacagtgacccattcaggagcaagatcctgaaacagaaagagaagaagaaaagggagaagaggcagaagccaggacgtgcctcttctgatggcccggcgggggaagagcccgtggctgggcaggaagctctgactctagggctgtggtcaggccctctgccgcgtgtgacgttgcactgctccagaactctcctaggctttgtgactcagggagatttttccatggctgttggctgtggagaagccctggggtttgttagcttgacaggcttgctggatatggtgtccagccagcctgcagcgcagaggggcttagtgctactgaggcctcccgcctctctgcagtatcgatttgcgaggattgctattgaggtgtgaatgcgtgcttgtatcccagcagggcatagataatacgttattattgtctgccaagttctacatgtggagaatctgcttctgctttaaaatatcatgtgaaactccctggaaacaagaataaaaaattatgtattatgcaaaaaaaacaaaaaaaaaaaaaaaaaaa

SEQ ID NO: 117125 - DNA, 1000 bp, Homo Sapiens
cccagtataggatatgcttgtatccccccgtcactcctccgcctgttttttaaacttttccaccacctgcgtccaaaaagaatgttatagcgagtgctcttaaatgttgaacctgggtgttgcttccgggccagtctgcgtggctccatgaaaagctcactgctgccccagccgggcttcttagaggaggtcagttgtcctatgtatcatcatttactctgggaatcctactgtgaaatcatgtctgtatttttctggagcagttcacatagagtagaatgtggaatttcccgtgaacgtctccttcctcccccgtatctgccgcctgtcacttcgccaccgtgctagaatactgttgtgttgtaagatgactaattttaaaagaacctgccctgaaaagttcttagaaacgcagtgaaagggaggaacttgtcctttacccagtttttcctttgtaggatgggaaagtataaaaaggcacagaaggttgtcatgggctgttccttgggggtttttatcctgctcaccgtggagataagcctgcggcttgtctaaccagcgcagcgcaaaggtctcgatgccttttggtaacatccgtcattgcagaagaaagtttacacgacgtcaaaaagtgacgttcatgctaagtgtttttccagaaatattggtttcatgtttcttattggctctgcctcctgtgcttatatcatccaaaaactttttaaaaaggtccagaattctattttaacctgatgttgagcacctttaaaatgttcgtatgtgtgttgcactaattctaaactttggaggcattttgctgtgtgaggccgatcgccactgtaaaggtcctagagttgcctgtttgtctctggagatggaattaaaccaaataaagagcttccactggaggcttgtattgaccttgtaactatatgttaatctcgtgttaaaataaaatataacttgtgaaaaaaaaaaaaaaaaaaaaaaaaaaaaaaaa

SEQ ID NO: 117126 - DNA, 1000 bp, Homo Sapiens
tctcgttcttgcagtttgcttggaacagggccagagccccacatgagattgtcagcaggagtgaggagcgccagtccctactcctcagcagggacccagcacagcaatccggttgttctcggttagactgggtcggggccaggggagaagcagtcacccctgtgtagagggttcccgctgtgcttctgagcagttgctttgttcagaagtgttaggagggtcagattgtgccataattgttattaaagagaaaacacgcccaccttcctttctcccctgctggccattgttcattgagttttactgagggcagcctttgtggaagtcagggaggttgccaaaggcctgtagatgcctcctgacaaggtcttgattcctggttttctagcacccatttgcattttggtcttcagcacaaagccttgttccctgtggccggacttctgggcaataagactggggagtgactgttgagcagtctgctgtcaggagagatggctgaaaaggtgatcatcttggtgctaaacaagtaagaggcaactgccctgtttttgtttgttttgaggcacaatgaaactttagccaaactctgcaagagggtcccatctcctgccatggccaggtgtgagagaccaaaccgagaaaacagcatactctatcacttaagccttgggtagaatgggaattctttaccctgggtaaacgttttaacaaaaaaatggaacttaacttcggtttggactgtggtcgtgctgaggcaggagtggggttgccctcttggggctgaatctccaggcctcacgaggtcccctgtggggatgctgctatttctaagatgcaaattgcacatttcctagattttgtatctgtggatttggataagggaggggaacacggacaaattgcttgtacaatttgaaatgggcctcaatggtacttcaaaccttttgattattcctaaataaaaacataaatatatttcacaaaaaaaaaaaaaaaa

SEQ ID NO: 117127 - DNA, 1000 bp, Homo Sapiens
atgggggtcattcctgcctcttggcaccaggttggggggcatgtgcttgttgggcaccaaagtgatggaaccctcaggtgctctccgggagcctgaacctcctgactgaggaacatgggcagaacatgtttattgcacagagtgggcgctgcgcacaggcgtggctgtacacgtgctctcagctcatcatcctttccagtaactttaaaaaaacatccctcaggtcctgatatatttccttggattcatttcacttggctagaaattacactgtgctcaatgccttaataaatccctgaaagaaataaaaaccactgtgtgcaatgccttgctgtggcccccaaccactgcttaggcctcccaacttctccccaggccaagtatggggccctggctgtgttctggaagttcaagacacttagtcctccacagtgggtggaagagtgcaaggtctgccaggtcagatggagacgcagaacctgctggtgcaagctgggcaggtcctgaccaacctgcatcaggggatgccctgagctccacaggtcttcatgggcaggggttgtgggtcctggtgaaggaagtgcatcctcaggcctgggctgtagcaagctgtctgcccttgggttcaagaaccagactgtggagccaaaggtgaccgcagggggccccagggctggagccacaaggataccctcactttgcatgaggagctgaaactgaccagtgtccagtgttagcccccacatggggctgctcttgcttctactaaaagatacagcagttacccccttatccacaggggatacagtggatatctaaaaccagacccccagtggatgtctaaaaccacagataataacaaaccttatacatactgttttttcctatgcatacatacctgtgattaagtttatgaattaggcaccttaagagattgacaacaataactaataataaaatgtaacggttatactgtaaaaaaaaaaaaaaaaaaaaaaaa

SEQ ID NO: 117128 - DNA, 1000 bp, Homo Sapiens
ccagctcctacctcttcattcacttaacaagtagttattggctgtgcacagtggctcacgcctgtagtcccagcattttgggaggctgagtgggatgaccgcttgagcccaggatttcaagtccagcctgggctacatagtgagaccgtgtctctgtttttttaaaagctagttgttgaccagctaccctgagccaggcaccaccctgaaggagcttcttttcctctggggagaagcaaattcatgatgtgtgtgctggagatctggcactcatggccagtgctttccagtatcttgaactcttcgggggtcctgttgacccatttcgtgacctacctccgtgactgctctttttcctctgtctcttaagtgtgatggttttccagagtccaatcctcaggactttcccgtccacacacaggcctggtagtcaggtggctctaaaccattaggtgggttgtagacctctctcaagctgccacctccttgctgtcgccagatcgtatttcagtctgtcaggggttatctgtatctggaggttccactgttgcttcagtctcagttacttagaatggaacccagagtcctgcccctttccacctacatgctcttacttgaaagcacctgagacttattgggtccctgattcctgcttcgtctgtatccgcagagtagttgcatgtcatttggcctgttttctaaataatcccacatcatgtcctccctgcacttacattgccactgctctgatttgggcttttttttttttgggacaatgcctctgtcccaattctgagtaacagctctggttcttgccactaccagagttctctagcaaatctgagcatctgacagggtgaaaaattctgaatggcttcctgatgcctgactttatgggatcaaattcaagttgcacgctggcactcagtgcccttctggtatcatctgccaagaccagggcctgcttcaccacagccacaataaagtcctttcaagccct

SEQ ID NO: 117129 - DNA, 1000 bp, Homo Sapiens
cattgatgttgatgttccaccagaaacaccttaagtgtatactgttgtgtaatgtctctagaaaggaatcctgtcttaaaactgggttttgctgttttttgaagtttctacctaaaatcatttttggtatatcctgataatctctataatactagaattgtctgcaaaatatagtaagaagaattggagcctaatagctgattcctcccaatttatctgttatgttttgtcactattcacattttagtcttttctacgataaaaattgtatgtgtactttcatgccagtataggaaacctcaatcttttttttttttcgcctttaagaaggttttcagtgattatacctcaggtatttctgagtgtcctattgtctaataggagaaatatcttcccgagctcagaattaaaagttctcctaaattatgaagatcccaaatcttatgtaaataaccttaggcatgagtccttagggagaagttaatgaccattgttaaagtgcttttttagaaaatgttgtgctgtatgttcttgatttgacataaatgaatagactttggcaagggaggaaataagttaaaaggcagcttacaagagcctattccctataaagggtataattttacacagtactcaaagcttgttatcttttctgaccattttagtacagaattagtacttggtggttactaacatcaacttgtgacatctagaactagggctcttagtgtttagtgggccacttctctgatgtcagatgcatgcagacctgtactccacatgcaacccaacagcagtgcagtgtgataactgagcggtcgcatggcagaggacatccccctcagagtgggcacaagtgccctctagggcagccaggggaatactattgttcgatacctgggatttgactttgtcaaacagctctttgtgcccctatctttgttttgtcaaatgtagatcagttaataaacatgagtagcttgaattttcaaaaaaaaaa

SEQ ID NO: 117130 - DNA, 1000 bp, Homo Sapiens
cttaatggctgcattagataggatcctcacatcccattcagaaccaaaactgatacagtgaaacaattaaggtgagcaaatagttttaacttttcttttttttttttaagtttcattcttcctagaatatttttctaacaatttttatttcagctttaaagatgggtcatatagccaaacgggccatataatccaacattgttgagatgtcttaggacatctaaggcaaaactggcacatttgttctgcagactattgcaggaatgttttttcctagcatttctatattatctgtccattctgaggaaccagtgaatgtcctataaatgcacctcctgtcaaaaccatgcctgagaggtcccggctgggagtgacagggtgcttcttagattctattggtccttctctcattctccgaacttactcctttttatgggtaagtcaactaggtttacagtcccttatttttaatgcctaagttttgacagcaggaagaaaacaattttttaaaaattctcattacatagacgcacaagaatatgtcacataaagaaaatgtgtttagaatactggttttctatttacgcatgatattttcctaagtaaaattgccaagtggacttggaagtccagaaaggaaaataatttaaattaatgctggtgatcttaacaatattttgtaaaatgatgcttcccccttctccatggtctagtcaattttgtacaattaggtatctgactttacaagtttgttatcctttctaatttttactgaactgaaagcacaaagaagactacacagaaaatctggaaacagttgcaggtgttgggaggaagatgaaatcgagctgtcttttaacttttgtatgtgttttatcagaatttgctggactatgctggcaaggactttgtttacgatcaaattgtactagtgtctgcagggtttgtcagtactcgtcaaagccaagtccaattaaaaaaaaaagtctttgccctccaa

SEQ ID NO: 117131 - DNA, 1000 bp, Homo Sapiens
ggttggaagatgctcagcctcacaaaagctccaagccctttgggagccaaagtgtctgagagtgtgaccctctcctgtaaagtatttatcccacccattaatataatttctgtataataaacttgacctgaaattatttcattctttatattaaacttttaaaaatgttttttattttcaccttagatatgggaagagttttttttttttttttttttttaacaggataacttgagcaggctaggcctcttaaaaaaaaatttgagctaaaactcatttttcttttggcattttcttttcaatgttcttataagcaaagttcatccatgttgtagcatgtgttcaactttattttttcatcgggtaatattccattgtatggaatggtagtactacattttatttatcatgcatcgattggtggacatttggatcgtttctacttcttgactattatacataatgctgctaggaacttttgtgtatgagtttttgtgtggacatatgttttcatttctctttggtatatgcctgggagcagatttgctggatcatatgaaactctatttaacccttgagggactcccaaactgttttccaatgtggtgacacaattttatatcccatcaacagggcatgagggttctgatgactccacatccctcagtgctttttattatctatcttttaacttagccatcctagtaggggtaatgtggcatctcattgtgattttggtttgcatttccctgatggcgaatgatattgagcatcttttcatgagcttattggccatttgcatatcttcttaggacagctatctttagatcacttgctcattttttaattgggttatttgtctttttattattgagttgtaagagtccttttatagcctggcacaagtccctttaactggtatatgattataaaatttttctccgtgagctgtttcatttccttgatgatgtcctttgaaatactaaagcttttaattttg

SEQ ID NO: 117132 - DNA, 1000 bp, Homo Sapiens
cttaatctgtgtgttagtgtcatcatctgtaagtcaggaataatcataccaccaacttcctatggtaattaggagcaaatgagttattacaggcaaaacacttagaacagttcctggcatatagtaatacccaataaatattaactgctactttgaaaatatcctatcacgctgatttttgacctcactgcagcaattttcagttattccagattatctagcttatggattctggtggtaggggttgtttggttttggttttcactgtctctgtctcatctagtacctaccttagtttattttgcaacttactaatactttattaatggggagggacgagtagatggtaaaaagaaggaaaaggaggtaaaaggtgaaaggaacaacattaattaacaattttacgtcatgtccctggacataaaagtttagttagtattaaatttttcactaatacaaaataaaaaaatattgttttatgagttttatgaattcatgcccttcctttactctattagcataagcagtaaatttttttattttaatatagcccaataaacctagagtatacatgtacaaaatacatataattgttaacgtgtattaaccgaaaaatgacccaagacttagttcttgccctactgtatctgccttgtttggttggttctgtgaccttaagcaaataactcctgtgagcctcaattttatttgtaaagtgatggaataaaacccctaaaatcttacccacctctaaagatatttgtttctgtgaccttttgctagtagcatttcaagttaaaatctggtttgattttgctacccatgaaatacagttcggcccttacttattgatgacttaacctaaacagtgaaaatatgcactgtaaagggtggggtgatgtggcttaacaatcagacttcttctatttttgctgctatggtggttgtattagagaactgatgtattatcttgaataaagactttgtcttgtttactgcc

SEQ ID NO: 117133 - DNA, 1000 bp, Homo Sapiens
tcttaagaatggaaagggatgacatttacctatgtgtgctgcctcattcctggtgaagcaactgctacttgttctctatgcctctaaaatgatgctgttttctctgctaaaggtaaaagaaaagaaaaaaatagttggaaaataagacatgcaacttgatgtgcttttgagtaaatttatgcagcagaaactatacaatgaaggaagaattctatggaaattacaaatccaaaactctatgatgatgtcttcctagggagtagagaaaggcagtgaaatggcagttagaccaacagaggcttgaaggattcaagtacaagtaatattttgtataaaacatagcagtttaggtccccataatcctcaaaaatagtcacaaatataacaaagttcattgttttagggtttttaaaaaacgtgttgtacctaaggccatacttactcttctatgctatcactgcaaaggggtgatatgtatgtattatataaaaaaaaaaacccttaatgcactgttatctcctaaatatttagtaaattaatactatttaatttttttaaagatttgtctgtgtagacactaaaagtattacacaaaatctggactgaaggtgtcctttttaacaacaatttaaagtactttttatatatgttatgtagtatatcctttctaaactgcctagtttgtatattcctataattcctatttgtgaagtgtacctgttcttgtctcttttttcagtcattttctgcacgcatccccctttatatggttatagagatgactgtagcttttcgtgctccactgcgaggtttgtgctcagagccgctgcaccccagcgaggcctgctccatggagtgcaggacgagctactgctttggagcgagggtttcctgcttttgagttgacctgacttccttcttgaaatgactgttaaaactaaaataaattacattgcatttattttatattcttggttgaaataaaatttaattgactttg

SEQ ID NO: 117134 - DNA, 1000 bp, Homo Sapiens
atgcctgggtgattttttaaattttttatacagacaaggtcttgctatgttgcccaggctgatcttgaattcccgggctcaagtggtcctcctgcctcagcctcccacaggatcgggattacaggcaagagcctccacgcccggccatgaaatataattcttaatatcatacaggaaaaagtcagcgggtcaagctagcctgtggcccagccacaactagctgacaaagcttcctggccttccctttaacacagttctgctgccatagttccatctataaaatgggaatggagggaaataggggaactgggagagagaacacagccttgccaagcagcaatgttagcctgatccttcctccacctagctcgccatctcgcccttggaaaatggctcctggaggattaggcagccatctgcaaggagaggggcaacctgggacaagacacccagagggtaaggattccaggaatgaagctgccatttctggttgggaggagaagaggaaacttttaagagaaagggctccattatgagcatgggttcagggccctgcattacccaatcagaacagccgggatgagcaggaggccagctcccaggaggaaggggaaccccttcataaagttcagagtggctgggtagagtgagttgaagatgccggaggccgtcagcatggccaggctattcacacaggccacagcagaaaagagagcacctgtgaagaaataaataccatactctggagtccgaaagggccatattccaactctggcaccaccacctcacagctgtgtgaccgggagtagtcacttaacctatgtctccccttcctcaccagtaaatcctgctacatcatgtactgtgacaaggattcagtaaggtcatatgtggacagtagctggcacagaggggctactaaacaaatggctgctattaaatccacattaaaagtacatgtgatctgacagaacccagcacataaaagaaaaaaaaaagt

SEQ ID NO: 117135 - DNA, 1000 bp, Homo Sapiens
ttttttgagacagagtctcattctgtcacccaggctggagtgcagtggcgcaatcttggctcactgcaacctccgactcccaggttcaagcaattctcctgcctcggcctcctttagtaggtgggattacaggtgcataccaccacacctttctaatttttgcatttttagtagagatggggtttcaccatgttggtcaggctggtctcaacctcctgacctcaagtgatctgcccgcctcagcctcccaaagtgctgggatgataggcgtgagccaccacacccggccaagcacaggcttttgaatggtctccctctccccagcccaggtacatgaggccaaggtgaactgtgcatcctgagaccttgtgtccctgagtctcctttctgagtgcaagctgcactgtgagctggctgtgggatactcacacattcccacattctcctttctgccacatctcgcccttctggacctgcactgggagaaattcaggacaggagtgaactcaaggccatgaactcactggatttccatttttaggcacccatagggatgtttttaggatgtaagtttctgaggagaaagctagctctagcatgaagcttttttggattggcttctccatcgtgttggggtaacattttttttccaattttttttttcccaaaacatcgtctcagctcatttatcaagtaggtaaaatgagccttttgtgtacacacagaggcacatgtgcacgcacacacaacttgtgaacacacatttctgttaaagaagttagaaaatgagagatgggttggggcttgaagtgcatcagaggtatgaatgttgtaaaactgtcaggagatgtaaaattcctttctgaagtgtctcttctgtgaaagggttcagagcagattttgcttactatgtagtgttgcccttaagtacagtggtgtaattttattcaagattgtgctcttctatcaaaagcctctggaaataaatgttccgggatca

SEQ ID NO: 117136 - DNA, 1000 bp, Homo Sapiens
tagacagaaggtgcagaaaagggcatcaaaaagaggctggattttttaaaaggcagctttccaactttgcacacaaacaggtaacaggaaggtacagcaaaaatcctctcatctgaaacactgtcagcagaaacaaaacctgtaaaaatgactaatcagctgcacatattgatgctctctgcaagttacctttaagtgttttttttttcttatacttgaagttgcttttacgatattattttggtggctttcttttctctctttgatgggcaatagaggaagtagataatgggatttaaggacgcctgggggagaaaagggaggatgtggcattgtctttttttttttttttttttttttttttagcatagaggtttaatcaaactcccatatgttgaaattgctcctcatattactggttttacatggacacagaaactaggcactttagaggtgcacttgcatggcaggctgggcccccttttctatattttattttcctttttagtatagtggtacttaaaatcactggttcacttaaaaaaacaaacaataaaatgttaaactctactaatgtacaaataagctgaaaagttgcattttatgtgtattttttgccatagcaggtactgtatttctcatgctggatttcaaaaaaaaaaaaaaaagtatcaaaaacaaaaaaaactaaagggtggtgttttattggattgtgacaggttgagtaataaggaattaagtcgtcgtcatttcattaaaactgagagatgatgtaatgcatatataagagttttctgaagggttttttttgggcttttaaacagcttatttttgtttttgtttagtttttttattttattttattttggaaagatatgattgtattatgtgcaactcagttgcttacattataactacaaaatatttttgggttcctggaaaaaaaagaaaaaagactaataaatgtgtttggctgctaagcaaaaaaaaaaaaaaaaaa

SEQ ID NO: 117137 - DNA, 1000 bp, Homo Sapiens
aatatatgtaaagaatttaagacaagagtactgaatggatgatttgtcataggctttcccctttctttctgttctagcagcaggaaaagtttctctatatcctctccctctacctgtaacaattttgttttctactgttaattacattgtgtatttatagttctatgcttactgttgtgcatatactggcaataaaactgtacataacattacttgaaaaagttaataatgtatatcagtttttctgtctcactgtgtaacaagtcactcagttttattttaactttagacggtcttgtatcagtggtggtctcttgaattttgtaagttcatctgaggagaaaagatttttcaggtgtagctaccacaatcaaaggtatatagctacatacgcatgtatatattacagcttatctgtaagaagaaaatgcattttaaacacaactcttctcagtagcattttatgacctttggatatgtttgtaatcatttcgaatcaaaatattgatttaattttgacctctggtttaagatactgctttaactactgttgacaaccaagtagagtgacttaagctgaacagtaactaactggaaaattagataagcacctggcatctaatggcaggcaggcactcaagaaatgaattaactacataatggaaaagtatggtttaatgtgtccaaatgaaagctagtagatgtaaacatggaaaaattgtgtttacaattttataatctcagttgataagactataagaaagctgattatttaaatcactatatacaatacacccttaatttgttcattccagaaacatactgagatgtcagctacttaaaaatggtcacaaaaagctactgtttatatttttcctcctgctattctctcccaaattaattattaataagtgttgttcatttactgcactgctgagaactaattaaaattatatattccagattgtaaaaaaaaaaaaaaaaaaaaaaaaaaaaaaaa

SEQ ID NO: 117138 - DNA, 1000 bp, Homo Sapiens
tccatagccctgcctctactttccttccttggaatcaggggttcctttagcccatttgctttctctaccttggggaccccaggggccaagcagttctccatctagtcacaccaaaggcaaaaagcctggctacctcccccctagcacgtgagtccctactcccctcccctctgtttctgcccagctttgcttattttggggatttcaaggcagcagagggtagtgaggggagagcaggagaagcctctgtcctgtataggcaactgcctgactatgcggtgactgctgtaaccaagatcaggtccccagcccttttgtccattaacaccccttcttgatctttcaaaggcagctaattgctagcaaatccccccgattccggccttttccctctatttctttgttagaagttttctgtggagctgaaacccagcctctgtttgactgggtttcatttagcttagttgggttcttggagccccctgtttgttgttttgtgttgtttccaatgaaaagcaagtttaccctcagagttatgcttttccaaagaggctgatgtctttgtttttgttttttttaatgtttcaggttctaagtgaagtgagttggggaggggttgggagtgttagtaatcaaggtttagaacaccatgagatagttacccctgatctccagtccctagctgggggctggacagggggaagggagagaggatttctattcacctttaatatatttttacaaaaaaagcaaacaatttaaaaacaagcccaccgcttctgtacatgtctaaatatatttttagaagtgggtaggattgtgaatttctgatgcagggcctttttataaataggttagggtagcatcattcagacttctctgttgtttttgtccctgtctttttcttatgttgtgttactaatgtaatttatattttttttagatcctccctttcctatagagataaaagtgatttatcttggcaaaaaaaaaaaaaaaa

SEQ ID NO: 117139 - DNA, 1000 bp, Homo Sapiens
ttgaattggatgaaaatagacagagattattgcagaaatgcaaggaacttatgaaaagagctaggcaagtatgtaacctgggtgcagagcagactcttcctcaagaataccagacacaagtacccaccattccaaatggacacaactcctcactccccatggttttccaagaccttccaaacacattggatgaaattgatgctttattaactgaagaaagatcaagagcttcctgcttcacgggactgaatcctacaattgttcaggaatatacaaaaagagaagaagaaatagaacagttaactgaggaactaaagggaaagaaagttgaactagatcaatacagggaaaacatttcacaggtaaaagaaaggtggcttaatcctttaaaagagctggtagaaaaaattaatgaaaaattcagcaatttttttagttccatgcagtgtgctggtgaagttgatctccatacagaaaatgaggaagattatgataaatatggaattcgaattagagtcaaatttcgaagtagtactcaactgcatgaattaactcctcatcatcaaagtggaggtgaaagaagtgtttctaccatgttatacttgatggcacttcaggagctaaatagatgtccattcagagtagttgatgaaatcaatcagggaatggacccaatcaatgaacggagagtgtttgaaatggttgtaaatactgcctgtaaagaaaatacatctcaatactttttcataacaccaaagctcctgcaaaatcttccttattctgaaaagatgacagttttgtttgtctacaatggccctcatatgctggaaccaaacacatggaatttaaaggctttccaaaggcggcggcgccgtattacattcactcaaccttcttaataaaagtaaagagagggaacttgggaattttttttgttaaattctgtttataagtatggctcaactgaataaaaggagattcactaaaaaaaaaaaaaaaa

SEQ ID NO: 117140 - DNA, 1000 bp, Homo Sapiens
agccgaacgacgggagtcgctgcagaagcaagaagccattcgtgaggtggactcctcagaggacgacaccgaggaagggcctgagaacagccagggtgcacaggagctgagcttggcacctcacccagaagtgagccagagtgtggcccctaaaggagcaggagagagtggggaagaggatcctttcccgtccagaggccctaggagcctgggcccaatggtcccaagcctattgacagggatcacactggggcctcccagaatggaaagtcccagtggtccccacaggaggctcgggagcccacaagccattgaggaggctgccagctcctcctcagcaggccccaacctaggtcagtctggagccacagaccccatccctcctgaaggttgctggaaggcccagcacctccacacccaggcactaacagcactttctcccagcacttcgggactcacccccaccagcagttgctctcctcccagctccacctctgggaagctgagcatgtggtcctggaaatcccttattgagggcccagacagggcatccccaagcagaaaggcaaccatggcaggtgggctagccaacctccaggatttggaaacacaactccagcccagcctaagaacctgtctcccagggagcaggggaagacacagccacctagtgcccccagactggcccatccatcttatgaggatcccagccagggctggctatgggagtctgagtgtgcacaagcagtgaaagaggatccagccctgagcatcacccaagtgcctgatgcctcaggtgacagaaggcaggacgttccatgccgaggctgccccctcacccagaagtctgagcccagcctcaggaggggccaagaaccagggggccatcaaaagcatcgggatttggcattggttccagatgagcttttaaagcaaacatagcagttgtttgccatttcttgcactcagacctgtgtaatatatgctcctggaaaccatc

SEQ ID NO: 117141 - DNA, 1000 bp, Homo Sapiens
gtattccaaagggataatcttgcatattaagaaaactccaaataatctttaaactgccttgaaaaataaacctctttgactgctgagcggcagagtgcttacccttgattgtcttgattttatatatttatttctaaggggagaaaaaggggtcagacagagtaatatgatacattttcttaaaaacttctctaagttgcacaaaactgaacaatcatcaagcacttatttactggctaatgttgaataaattagggtgccttcatctgggttttctttagtacctaagtctacaaccctttctctttttctattgtgtttcgaactccacattgcaatactctgttgtcatggaatacaacctttagatgtttactgctgaagtaggtcagaaattgtattatttgatttgcctcaaacatccactgtaatgttacatgcaccttttttgaagcatgaactctgaattatgtttttataaatctgactaggcaaacctagattctggtttcacaatggatttattttctctctcagtctccattttaacagtgcttttgaagtttatacagaaagctttaaaagttagtttgtgcccttggtttttattcttaaaactgctaaaatacctctgtaagccttatcctttattctttcatatgttgtataataaatgtatagatttcattgaccaactaaaatgttgggtgtctgtaaatgagaccaaaacgtgggttgcttttttcataaaataatttctattgggggttactgttcaatgacagcaggtaacctataactgtgaatgcttcgtgtcgtcagtatttgcattacattcataaaagtgtgcaagtcctgtgactcccagcttaactgaaatactgttatgccacctaacttgagtacagcaaactggttttaggtttcaatgacattgatgtaaaatgatatcccatgaataaaaagtatttgtgtttggtttcagaaaaaaaaaaaaaaa

SEQ ID NO: 117142 - DNA, 1000 bp, Homo Sapiens
cgaggggccgcagagtcacacgctggtgccgggggtgctttggggggagctgcgccgatcaccagattaagcacatgtcctatcccaggcggtggagcggagcccccgtggctctggactgcgcggacgttggcgtcaggatgaccacacggcggcctttcccgaatggggacagaacccgctctgagccgtgggtctggctcctgtaggggactggctctcttggtgcaccaggggagggggacatatcccagtgaaccccaccttggcgcctgaggcaacacagggtgggcactgacccacccccaggggcggctgcagaggcagtgcccgcagacaatggccacacctctctccccagggcccggcagtgcccaaggatgggtccggggcctcggggccaatgagcgcctcttcctaggtgctgggattcagtccccaaacacagcgggaggggtccctggggcagatggggctttaccagcgtcgggtggtttagttcgagtcccttttgtggagaaagggagatgaaaactgaccacgtgccaggtgtggccgaagcccccagggagggccacattcggggagcggggggtcgggggagggccaccgactggctctgctgccagcacaggcccctccctggaagtcctcgggagcggagcgcggatcggcacgggctctgggctccccgtggagagaagctgtagtttttaccaaattgtgtacatctgggcagatgtttaatttctgtgactaatcactgaactagacgaatgttaaattttttatgtctgaagcctgagtctattttggatctgtaaataatcattgccagtgtgacttttgttcaacaaaaggattgtactgtattaagaaccgatgaaaaaaattctcctgtaacatttttttaagaaaactttgtttgtttaaagaaaaagtattgtataaattataatttttatttaaataaacctaaaatgctttgtgctaaggctca

SEQ ID NO: 117143 - DNA, 1000 bp, Homo Sapiens
tcaggaccatggcttcttcccgtcagcccaggccacagccgccttccaggcccgctatgcagacatctttccctccaaggtttgtctgcagttgaagatccgtgaggtgcgccagaagatcatgcaggctgccactcccacggagcagccccctggagctgaggctcctctccctgtaccgccccccactggcaccgctgctgcccctgcccccactcccagccccgcagggggccctgaccccacctcacccagctcggactctggcacggcccaggctgccccgccactgcctccacccccagagtcggggcctggacagcctggctgggagggggctccccagccctcccccccacccccaggtccctccacagctgccacaggcaggtgagggacccctgagaagatgccaggacttatagtaccccctcaggacatggacagtatgtgggggcaggaaggttatctcctcccgggtaaagccatttcgtcctctccagtttggggcggaatgaggcctgctcctcttgtaaatacccccttccctcgaagctccctcccggtgctggggggcagctgaggggctgcaggggcagtctccctcctccaagcccctgtacataacctggagcgtgtgaccttcagagcttttcactttatgcaaaatggctcctgtgagggctgcaagctggagggtggtgcaggccttgggccacagggaggcgcctgtggaatagggggagttcatgcaccccttttttccccagaggggctggactcaggttagtttgggggtgggggctcctgcactttgccacaggcacggggagggttttctcctcaccccctctgccctcccaacttgggttgtactttctaagaaggtgattccccctgcccttgcccccttccccagaacaaaacatgttgatcatgtgcaatatttcttactgtgccgagaagccgcaatgagcgagattaaagctgtttaacacac

SEQ ID NO: 117144 - DNA, 1000 bp, Homo Sapiens
aagtacgcaagtgacaagtacaaagacatctacacagagctcagcatcgcgaaggctaaggctgactgtgacatcagcaggttgaaggagcagctcaaggctgcaacggaagcactgggggagaagtcccctgacagtgccacggtgtccggatatgatataatgaaatctaaaagcaaccctgacttcttgaagaaagacagatcctgtgtcacccggcaactcagaaacatcaggtccaagagtctgaaggaaggcctgacggtgcaagaacggttgaagctctttgaatccagggacttgaagaaagactaggtgtgtcccatccaagttgagcacgcgccttccccagcttgcagcagcacaccccaagcgctgcttttcacctgtacctttgttttattattattattattattgctgttgttgtcatcgttaactgtgggcatggaatgcgtgaggctggcttctgggttgtccacaccactctctgctgtgttgacttcctgttgtcttcatcaaagcttttttccgtggtattctaaaattaggccagcagtgggggctgggagggcatctgtgttagtcctttcctggctgtgacccgccacactcactgtcagtattaaggcccagcagcctgttgataagctaccctgtctcaccatgtgctggtgtggaaacggggcccagccagcacgcctcaaggtagatggaatccccactggtcagagaaaaagctatgcggacactccagcttggcctgggtcacagcactgactcctcacccgctagtctggctgttaagaggagaaagtgcactgccttccagcccaggaggaggacagcattttgtatttgttccactgatgcagcttagaaccacacccctgagagtcgtggcaaacctttcacaacctggaaaatgttgaaagcaaccattcctatttttgtttgttttttattaaatcttgcacaaaaaaaaaaaaaaaaaaaaaaa

SEQ ID NO: 117145 - DNA, 1000 bp, Homo Sapiens
tcaggaaaaatgcttcaccagtccgtaaagccaagttgtattttttttattgcccttttttccttctgtatttttaaagaaggatgttaatttttgactatatattttaaaaaaatctaagcagggggacatgcaaaaacaatcatcatccacttggatgtcattttatagattaacactgtgtgcttttgtatggaaaaaatatatataatttaatagtataaaaaataaaatatatattcatttgcacttacgtgaaacacaaactttgctctacaaaatttcgtgtttcttagtgattttaaaatgcatgtattgcatgtaaaggaaaaccattacaattaatgtttatcacacctttatcttggtctttgttgatttgggttttgttggggtttttgttactgtttttaaattacagtaggcttctatatatcctggatttctgaactggtcttgttgacaaggattcccaagaaatggatcttttcactggctgactctcccatatctgcaagagattctgcaggaactgggtgtgcacacggtgttgtagccagttcaggtactgaatatttaggatttggtgaagttcactgtattgctatatttttgtagataaataaaactcaataaattgttaatcattctctttttgctgtatagaattgcttatatcactctttctttcatgacattggttaacatttaaatgttcctcctgtacttgtgttgtctgtgaccgcttatagagttttattgttattggtgtttacctgaatacctatgcgtacacacacacatatttccttaatacttctgaactcattatcttttagaataataatactactacactttaccagcaattaacttctccctacccaaaatgtttttcttcctgtctgaaaatggaactaatttgtcttattcgtgcttatatctgtattaaatgcaataaagttagtttttgaaatgtaaaaaaaaaaaaaaaaaaaaa

SEQ ID NO: 117146 - DNA, 1000 bp, Homo Sapiens
gagaaaatggaaccacccatccgtgaggcctctttccggagggagccgcacacttggacttgagagtttgccagcagcgagctcggatgcatctctccaaaagccaccaaggtcggcgcgtctgaagagcgttttgcggtcatcagacttcctcatctgaaaacacagaacatactgaccctttcaagtacttagtcattttcctgaaagtgtggtctgtttcagaatgctgtggcaaccagtgttttattttatgccttgctcgttgtacatcatgatgactgatggtcttcaaggttgtgaggaaagccgtctccctgcttgactcgactgctgtcccagaggagagtcctgtgcgacctgagcgggggtggctgccatttccagcatgcaggtgacttccaaagaatgagtcaggtggcactgaaagccatgggttctgaagaggcgaatttgttgaaaagtcccaagggtctgaatgaaagcatctttaatcaacactcaacactcgcaatattctagaaaaccatatactgtgctggttgaggccaaaggttaacattgctccactgttcaccaaggaagggggcagtggccatccgccgcggcctcacgtgcgttgtaacaagccctcatcacatgtgtgagtcttacgtgcacaaaaagagaaggctttggtactgaaactggacaccttgtgtactcgataccttcacagcttctattggacatattttctttttaggaatgaaggaaaattctcccatttttgagccattcttttgtcaattctacaaaattgcatgtaactttataaatatttttaaaagatatagttttgtaaatatttaatattccgctaatttgattttgaattgtaaatgtcaagtattctgtttttggggtttttatgttttattatactttgttaaaaaggacaaattgtacatttttagaatgtttttatgagtaaatttaatgtactgaaaataaaaatttt

SEQ ID NO: 117147 - DNA, 1000 bp, Homo Sapiens
cactgccctgccattttctgggcccagagagccaagccttaagcagtggccctccagagtaccccagaaacagggtggcatgggcttggcatcttggagccaacttgcatctacccccagagccccaggcagtagggatgctcgttgggagcgcagagagccagccctgaggggtgcgaaggaccggctgactataggcaagcaccttgatatgggctctccccagctaaggacacgggacagagggtggccctcgcccaggccagagagggagaagaggaccagccagagtgcccggcgccctacctgcacagagtctaggtggaaatcagaagaggaagtggaaagtgatgacgagtatcttgccctccccgctcggctgacacagacattttgctgtcagctggaagagctgatctgctggctgtataatgttgcagatgttactgaccacgggactgcagccaggtccaatcttacaagtctcaagtcttctctgcagctttaccggcaatttaagaaagatatagatgaacatcagtctctgacggagagtgtcttacagaagggggagattcttcttcagtgcctgttggagaacaccccagttttagaggatgtccttgggaggatcgcaaagcagtctggtgagctggagagccacgcagatcgcctgtatgactctatcttggcctctctggacatgctggctggctgcacccttatccctgacaaaaagcccatggcggcaatggagcacccatgtgaaggggtttaacctggcatcttctcaggcagaggtgcaacctgtcggccaaacactggctagtgagaaaaaaaaccttcaagaagtccttgcaagagccattcaacactgaagtcaagggggaaaccttcaatatactagctttaaaatgcctttctcctccctgaatggagggctgagttactatttttatttacaatgaatccttccaaactaaaaaaaaaaaaaaaaaaa

SEQ ID NO: 117148 - DNA, 1000 bp, Homo Sapiens
tttggctcggccgcctacttggaaaggggaaaattattttatactttttgtgggaccatcgagtactgtgcaccggaagttctcatggggaatccctacagagggccggagctggagatgtggtctctgggagtcactctgtacacgctggtctttgaggagaaccccttctgtgagctggaggagaccgtggaggctgccatacacccgccatacctggtgtccaaagaactcatgagccttgtgtctgggctgctgcagccagtccctgagagacgcaccaccttggagaagctggtgacagacccgtgggtaacacagcctgtgaatcttgctgactatacatgggaagaggtgtttcgagtaaacaagccagaaagtggagttctgtccgctgcgagcctggagatggggaacaggagcctgagtgatgtggcccaggctcaggagctttgtgggggccccgttccaggcgaggctcctaatggccaaggctgtttgcatcccggggatccccgtctgctgaccagctaaacaccaatttcttcctgcttttctccacttggtttggaaaatcacacagttttcaggctccatctgtttggagaaaatacattctgaagcatccccaattcaccttctaaaaactcatgtgcaggtttgataaacaccagaacagaagacagtgatgctgtattattttagatttattacatagatttggaattcacttttttcatgacctagaaaaaaacattccagtgttcaactgttttatattattaaagggcttttaatttgtgaacttctgaaggcatgagtgttttctctttctacttttgtatatgtgcatgttttgtttcctctgacttggtatatgctcatctgagtgacggatatgtgaaatttgtagaactggttagtcaaatggccagactatttcattaatttatttcctcaaatgcttttcaaattaaagcacctttgttagtaaacagtt

SEQ ID NO: 117149 - DNA, 1000 bp, Homo Sapiens
tcaataacttttttttttccaggttcccgtgcttgctatcacagtatcattgttaagtgacacttttgtctctcataacaccatcacactcttccttccaagtctgagctgtgctggggtttgaactaaaagccatatgtggaatattgacatgtgtaagaagcactttcagaatgttgtcctttttaagaaatgattctcaaaataccagtttttattccaaaaatttagagaacaaacccggaatatgaagtgcagattgtaacatggagctatttttttttcctaatcccataatacagctcctaaaagttgtgtgggatttgcgttgcataaatagccatgtgaattccacaagaagcaccagggaaagtttagagatttgcggcaatggaccgaagaacgggccaggaagtcctccaatttcctttggtctttccaggagattggactacacattgtaaagactgactgggtttcaactagtcaaaaagcactttcttctgttttcaatccctgttcgatttgtgcttctgtgcttgtaggagagatggccagggtggcagccctcatgcaggttgaagtatatgtagcctcagcctgatattcttggtgcgaaggtaaaaaaaaaaaaaataaataaaaccattggcctggttgagggcgtgaccaccaagacatatatgttgtgcccgtgttcatcctgtgtatttatactgtatatgtagagtctagatttatatactgcaatgtaaaatatatatatatttaccttttttaaagacaatggaaattccaagtagctaaaacttagcttcatttatttaatgccactttaaatgtcttaaatttgtttcctggtggacagccgggtaatgcttttagctgctcgcatgcttgtctttctgcatctccatcatctgtttaccttttggttaaactaataaactagtttgggacttggctggcatgtgctgccagacccaaagggaaaaaaaaa

SEQ ID NO: 117150 - DNA, 1000 bp, Homo Sapiens
gtgctaaaactaggtgagttgccaaacccaaggcatcttaccaacagctggtttgggggctggtttccctggtgttgtgtgttacctaccctttggcttggcttgacctctccttgtgagctcacctgagccctcccagggccaggttcctgacagtgttggtttttgcacatccactggaaaggtgtcattaatgacccagtgttagaatgcaagaggtcaggttattctagccctcatggctgaaggcccagtcctggctccaccactcctccagccagagggtctggaccatccagtgcctgtcctcgccacagggcctccagggagcattcgggtcaaatccatggacaccctgggctacaaaccaaggctgctgttcatcccacatcgtgtggggcagtgtccatcccctgcagctacttggtgacttaacaactccaggagccctgtcagctgccctcctccacctaaaccccttcgactcttctgctttgacaaagaaaatgacattggggaggggaggtgctccgcctcccagcttttctcaaaatagtcctatagatactggtaatctggaaatgaagaagtaattctgtctctgcacctacttttgcagaatgttcaaggaagtattctgtgttagtattaatgccaaaaagttgtttttaaaggttttgtactcagcacatcatacaaaccacattacttctgtcacttcagggcatcgggactggctggcgcccttgttatgtgctattttaatcagtgtaacattggtcaagttgttacccatgtatgctgtgtttatcatgtgtatatcgtccagaaagtattaaggctttaggtagatgcaactggcgaaccttggagagggaatgctgattgtcttgaccaaacccacagcctgtctcttctcttgtttagttacttacggcaataaatcatctatgagttagtgcaccgtgaaaaaaaaaaaaaaaaaaaaaaaaaaaaaaaa

SEQ ID NO: 117151 - DNA, 1000 bp, Homo Sapiens
atcacatggtgatcgaggaacagatggaaaagcaagcagagatagtaggaatgtagacaagaagccagataaacctaaaagtgaagactatgagaaggacaaagaacgagagaaaagtaaacacagagaaggagaaaaggacagggataggtaccacaaagatagggaccacactgacagaactaaaagcaaaaggtaaaatttgcaggctgcttcaggattacatttaaataactgttaaaatgttgtatcttgtaaacaaaagaaagattgcctgctaggattgtgccatctttaaaatttttactattggtcatttgcagaacagtaaattctgtgtgttggtacagagtgctctgtaccagtgctcatcatcccttcttcataccaacggtccctagttataggaatttaatatttttaaaagttttacattgctgtatattcaaagatttgttttattaatatgcaataaaggcttagaaattttagttttattccttaattggtaaatatggttaactatggaatatatttacttcctctagtgaatgtcctttatataatgactaatttgggagtaatgtgtgctctgtaagtttgttttaaattgcactgtttttaaagaaactgtagaggagcaacaaaaatccaagcaacttcataatcagattatgctaatcatttagttgagcagtttttgaccaagaatcagaagcccaaggggtacatttattgctttaatctgcactcattgaagtcatttattaccatatactacagctttgtggtaggccattattttcattttcatttttggctcttcagaaacttgaatacttaagcttgtacatgatcttgtgttttgctatcctttttactgtaaaatgtaaatattttaagggatattttgattctaaatatgataaaataatttctcacctattttgtgtgtgtgacttgaaattcagtagtaaaagaatttcttctttaaagcttt

SEQ ID NO: 117152 - DNA, 1000 bp, Homo Sapiens
gtccttcactttgtcgaccgaagtgggagctcaacagctgcatgaggagggcagcgcgtgcattagccagtcgccactggagggctctgctgccctccggtcaatacactgtagttactgcctagccagcagcagtcttctgcatcaagaactgaaaccttgctcggaggtgatttttatagcatcctttttaattaaaggtgaaatacagattgctatataatgtctgaaaaaacctgatactacttcaagagtttctgctcagaagaaaatgagagttatcataataggaagctgtggcggtccatgccaactgtgctgtgtcacatacagcgatgagagtggctttcatactttttttttttttaagttaacaccctcctttacccccagcagtatctcaggttatagaatcagagatgcagcagtgacaaatggcattttaacttgtaaaatcgtgtgatgatgcttatcattttgaaatagaagaataaaaacctggtcccgtttcaccagacatgaatttcaagtggagtcgtcgttctctgagagtgagtgtcttgacattttcacccaggccctcctgtcatcacatcaccggctgtcactggcgggtggccgtaaacgtcctgcgttgctatattaggatctctgcagttcaggcttcaaaaccagttcagtgtatccgggcgacgggtagtggtggtgcatgcctgtctgtgtgccccgctggcgagctgtagttgcggcttgcgtgcctcgcggcccactacagggctgcagacaatcgaggcgagggcgctggccgccagcagctcacagcgcgggggtcatgtggtcgctcctcgagggtttcgtttttgttctgcttcattaagactggaatcaagcttacatgtaaactattggtaatttaagtttccttttgtgtcattcagtgtaaaactgtctaatttgaaaaaaaatgtaggttatgaaaataaagatttaggcactgttc

SEQ ID NO: 117153 - DNA, 1000 bp, Homo Sapiens
tgaggagctgtcacagagagggcctcagctctgacctgacacctgctctccccagcctgttttctcttttctaaaagacaaattatggtaccataagctgccaaagatcccctcctgcctcagacccctttgccaggggctttgggggctgagcagagccacatccagagtggggtaatagctcaggcggcccgcttcccatttctcaaaccccgctctgccccattgttctcctttcccttatactttttattaccttgctcaagggccagagatctcaagtgtcaaccttgaggtcccagctccatcccctagttgcagactcatcaccatggttaccatagtgactgcttcattgccatggttacatactaattgctgcagctctgtggcccagcccactgcttcagctgtgggccatctgagggtacgtgccatcatctctccagcccaggcccctgggcatctcatgctggggggaagggactgaatacctttttccttccccctgcctgtgtcttcagccctgatgcacaggctgccagccccccagtccagccctctcccttccactggtgccttgcttagagccagaagggatgaagccgggggatctatggaacagaggaggagcgatgcagttgggagaggaagctagaagggttatggttggagttctgtacagtgttgagtttccgacagggaaagaggattcctccaatgcgcctagagagaaagcctgagcaggagatgatgcagcagaggggaagggccctgtggtgccgccgcccttccttcagcctccgaagggtgatggaaatggagagtggaggaccaggcctccagctgtctggcctcgcccttcacgccttaacactaagcccacctcccctgctctccttcccagcattgagcccttggttgcctgggcccaggctgggggttttcagtatttgtaagcatttcagcagaacaataaagcctttggactacggaagtg

SEQ ID NO: 117154 - DNA, 1000 bp, Homo Sapiens
tgggattgagctaacctgaaacaaaggtagcaggcaggacctaatgaccagaggttaaatcctcatcaagagagaccaggcggctggaggacaagcggctctaaccctgggggcggccatgttgtccaggcccaggcccctccaggactgtggctgcctcccctccacggcctccagggcggctggctggaaagccacgcgtatgctgccctctacaggctgctcggcctccctgcagctcagcgcagcccagggctccaagtgaggcccagaagcccatgggcagggctggggggacgaagggggaacccggagcacctccacttctagggaagatggacagcgtgggggcacacctgggcctcccggaagctgtggacgaaagggagagcgggtcctccagggcaaggggaacgggaaataggtctcctaggtgcctgaagcgctgagcaacctgggtaccctggtggggatgcagggaaggccggggcagagaaagcgaaggtcgacccagggctgtaggaagccataggagagtgaccacgggattccctgagaaacagggccggccccccaacttcagggacccaccgcccattccccgagagctgtcggaaccagatgcaacccggcagcccagagaactctcctgggaggctgtgggtgagccaggccaacattggtgtccctgtccccagagggaggagcaggcaggagagagaggggaaggaggtatgaatcccagtccccaggaacctagctctttaaactctggggagtcggattcaggaaacacccccaggaggccaagcctgaaaacagaggggagggaggaaggaaggagtcccagcaggagcacagccctggtttcctgtcactcagagctgattcacaggaggaggggaggttggggggcgggagacaaaaaccacacctctttttatataaggtttcatatttaatttggtcatggattcataaatacataagtattttgtac

SEQ ID NO: 117155 - DNA, 1000 bp, Homo Sapiens
gttctctccagatgagagagaatcttttcaacagctggtattgggaagctggggccagggcatgatcctgataaacaccttaaatgtcttgtcaactggatgcaaattttgcaattggtgtcattttttttaaagtcaaattacaaggaagtacccagatcaggcagtggtaataccaaaggtcatcaaacacatacaaggaacatcttgatcatagggcatgtggggaagtttactgggccatcacagacttttgttctagtgattgtatgtattaggagtcatagcatgccctacggcagatctggattcttatacactaagatgtgtcttaagaatcacagtgcgtgcttcatccctttattgaagaacagaaaattatgactactctacaaggtggataatattttggtacctgtgcttgccacagccctgttcctcaaagctgaattgatagatttctctttgacttccaagacctagcagttataaggcaccttgaaataaattgtttgtgcctggaaatgcagggagggcaatagctttgtaaattggtttacatttttctccttgaatttttctagggtcctagtgcttccgaatcatttaatggcattgtcggatatcttttacatttcaattgcaatccatgaaattacatttagaagattcttagtacttaactgtagtcttctccatgaattacacgttagaatagactggcagcaacggaatatgcagcaagtaagcctctagcttatagtttcatccctacccctcatgcctgcgtgagtctgtacagggatatgtgtgtgtgtgtgtgtgtgtgtgtgttagagaggaagaggaagagcagaatgtctgtatactacatgctgctaaggtagtgaataaatcagtaatgcaatattgtgggtccaaactactctttgcactactttatttacagtagtaaataaaattatttttatacaattgactaccaaaaaaaaaaaaaaaa

SEQ ID NO: 117156 - DNA, 1000 bp, Homo Sapiens
gaagagctggctgatattaagcaggcctatctggacttcaagggtgacatggatcagatcatggagtctgtgctttgcgtgcagtacacagaggaacccaggataaggaatatcattcagcaagctattgacgccggagaggtcccatcctataatgcctttgtcaaagaatcgaaacaaaagatgaatgcaaggaaaaggagggctcaggaagaggccaaagaagcagaaatgagcagaaaggagttggggcttgatgaaggcgtggatagcctgaaggcagccattcagagcagacaaaaggatcggcaaaaggaaatggacaattttctggctcagatggaagcaaagtactgcaaatcttccaaaggaggagggaaaaaatctgctctcaagaaagaaaagaaataatggaatttttctcttcaaaggtccttaggtgtaaattgatgccatcgtaggcaaggtgcaggcaagatttgaaggcaaaagtcaattcagctcttgagaaaaggtgtctttccagcctgaatttttcagattgactagaccaagcagaatctctcaacctgatcttagtatttcctagaaagcacttgacattgtgtgaggtctcacctgaaggaacttggtggtgacatttgggagggtggagggaggcagtgtccttcctgacagcacttgcctccatggatcttctgtacacagaactcttatctaggatgtggttctgttcatgctgctttctgcgatgtgcgtgtctgttagaataggctctctacccagctagaacaccttccagacacttgctggacagctatcttccacatacttcccagtttacatttggtcttaatgatcttgaatagatcctctcttcattttactcagccaggttttgtactgatgtacaggtgttaaattacttcaagcatttttgtaagaggtgtatataattcaataaaaaaggtaagacatgatgattaaaaaaaaaaaaaaa

SEQ ID NO: 117157 - DNA, 1000 bp, Homo Sapiens
gcaccagcagctccgacggggataagaagcccatggtggacgcccagcacttcctgccggccggagacagtgtttcacaaaatgattttccttctgaagctcccatctccttgaatctttctcataacatctgcaatcccatgaccgtgaatagtctcccacaatacgcagagccttcctgtcccagccttcctgccgggcccacaggtgttgaagaagataaaggtctttactcacctggagacctgtggcccactccgccagtgtgtgtgacaagcagcttaaactgcaccctggagaacggcgtgccttgtgtgattcaggagtcggccccggttcataatagtttcattgattggagtgcaacatgcgaaggccagttttccagcgcatactgtccattggaattgaacgattacaatgcctttccagaagaaaacatgaactatgccaatggcttcccctgtcctgcagatgttcagacagactttattgatcacaactctcagtctacctggaacaccccacccaacatgcctgctgcctggggacatgccagtttcatcagctctccgccctacctcacaagcacccgaagcttgtctccaatgtctggactttttggttccatctgggccccgcaaagcgatgtgtatgaaaattgctgccccatcaaccccaccacggaacattcgacccacatggaaaaccaagcggtcgtgtgcaaggaatactacccggggttcaacccgtttcgcgcctatatgaacctggacatatggactaccacagcgaataggaatgcaaatttcccactgtctagagactcgagttactgtgggaatgtgtgaaaataattggatttttaaacaatgtgaataaagaggcttgtgttttgattactagtgtaaactggttattgagatagattatgacattggtggatattttggcacttttatatgaaaataaattttttaatgaaaaaaaaaaaaaaaaa

SEQ ID NO: 117158 - DNA, 1000 bp, Homo Sapiens
gcattacctcagtgccatcctgcggctctttgtggagcagctgtcccacaagacacccgactggctcggctacatgcgcttcctggtcatcccactgggctcccaccccgtggccaggtacctaggctccgtggactaccgctacaacaacttcttccaggacctggcctggagagacctgttcaacaagctggaggcccagagtgcggtacaggacacgccagacattgtgtcacgcatcacgcagtacatcgcaggggccaattgtgcccaccagctccccatcgcagaggccatgctgacatacaagcagaagagccctgacgaagagtcctcccaaaagttcattccctttgtcggggttgtgaaggttggaattgtggagccatcttcggccacatcaggcgactcggacgacgcggccccctcgggctctggcacgctctcatccaccccgccgtccgcatctcgtgcggccaaggaggcctcacccaccccgccctcctccccgtcggtgagcggaggcctgtcctcccccagccagggtgtcggcgccgagctgatggggctgcaggtggactactggacggcagcacagcctgcggacaggaagagggacgccgagaagaaggacctgcctgtcaccaaaaacacgctcaagtgcactttccggtccctccaggtcagcaggctgcccagcagcggcgaggctgcagccacgcccaccatgtccatgaccgtggtcaccaaggagaagaacaagaaggtgatgtttctgcccaagaaagcgaaggacaaggacgtggagtctaagagccagtgcattgagggcatcagccggctcatctgcactgccaggcagcagcagaacatgctgcgggtcctcatcgacggcgtggagtgcagcgacgtcaagttcttccagctggccgcgcagtggtcctcgcacgtgaagcacttccccatctgcatcttcggacactccaaggccaccttctag

SEQ ID NO: 117159 - DNA, 1000 bp, Homo Sapiens
agagttggctgtgtattgactgaaagatgggtaattattttaaatatgcatttacacacatttaggtatcagaagatgcttagggaacaatggataccaatgatagaaaatgatacctttacaggggcagaaaaatccccactcttccttattgcctcttcagaaccctttagaaagtataaaatattgcctccaacatgctgaaaaagagtatctatgcataagtatcagagaagtccctcaagcaatcagtaggtgtgttctatttagagagagtttaaagttctcttagcatcagacaacttgattcctaaggtttccagtgtgtcaccaacaaaaagtgcattgatagggacctttgtctcttcctccctttgattaattgcccggcatcacagtttactagattaccaagtgttacatcatattaaataaaatgtagcagaaccatctgcatcaatatattcctgtttagatttttgcaggagagaagttaaaaggatttgctccttgtatgatgtaagtggcccaccccaattttgtaacatgatgcaagtgtctggcactaagggaagcaagagtagggttgtggaaagaccaagctgatggggagggacttgtttacgggaatttttttagttttccttttcaaaggaaaacattaaaatcccttaggaatttggtattcacatctcagagaactacaacacaaaagtgcagacttatatttgagaattaatgttaaccctttgtgtctagtttgaagcttcttgtatttgtctaaaacaacaagccagaattttgtatctcctttgataaaaagtgtgtataatgtaaagtagttttgcatattcttgtgctgcacatgggctgaatttttaaattttttttaaaaacttgaagcagaaccttgtaatttgtgtaaatgacaagtgtaaaatcctaccataaaatgctaaaaatatgcactgtttcaaataaaaccaagaaatgcagcatt

SEQ ID NO: 117160 - DNA, 1000 bp, Homo Sapiens
agtggggccatcatctgccccacctgtccctcctaaggatcatggtggtatcttctctcgagatgcacccactcatctaccctctgtggatctttcgaaccccttcacaaaggaggcagccctggcccatgctgccccaccccctcctcctggagagcacagtggaattcctttccctaccccacctcctcctccccctcctggggaacatagcagcagtggtgggagtggtgtccccttttctactccaccccctcctccaccccctgttgaccactctggagttgtacccttcccagccccaccactggcagagcacggagtggcaggggctgtggcagtatttcccaaggaccatagttccctccttcaagggaccctggctgagcattttggggtactcccaggacccagggaccacgggggccccacccaacgggacctcaacggccctggccttagccgtgtacgagagagcctcaccctaccctcccattctctggaacacctgggcccaccccatggaggaggaggtgggggaggcagcaacagcagcagtggcccccccttgggtccctcacacagagacaccatcagccggagtggtataatcttacggagtccccggccagactttcggcctagggaaccttttctcagcagagacccatttcacagtttaaagagacccaggccaccttttgctaggggccctccgttctttgcaccaaaacgcccattcttccctcccaggtactgatggaaaccgagggaaaggcattttgaacagtctagagaacattggaagtaggagtttggtttattgttgttgtttttatttgttttctctttctcgattttttttttattataacaaagggcctctcttccaaagtaagaaatcacatacgcttacgttttactattcaattcaatcctccctcccattgcacttatctaccttccccaagttgtttgtattaaaaaaaaaaaaaaaaaa

SEQ ID NO: 117161 - DNA, 1000 bp, Homo Sapiens
tgcaaaggtacatattaagcttagggatttttgaatttttacgtcagtttatattttaattcttactgtacttggcatgcgcaataaagcagcacatgtaaaaaaaaatacacagtgcaaggactttattataaaggttggatgtagttttccttagaaatttaggtgagagattttggccttttttattggataaattgggccagaaaggcagggtagatttcgaagcactggttctgttgaagttaagtttattaagcctgggaacattaaaagctaatttataaaagcaatactttttaatatgaaaacttactgcaaagtttgtttatacttttgcctaaaaaggaaattggatgggatactgtggcaaatcataaaaaaccagataattgaactttgaagttatagaaaatcagagaggggtaagtttatagggcattttgttctgatggttcaaccagaggtctgggaaatagcactgttggcccaaacagaacaggcttttagaagataaaagcgacaagaaggaatctggtgaattttagtcatcccagctttttagtcttaaccacagttctcactctcttaaatggtacctcaaaaagctggagcctctctgccatgattatgcttctacaaatttcttttataaagagactcaaagctaatgatagcttaaaagaaaagttaatgccttctcattggaaatgtataatcaaataagtagttaagggcttttggtattaaagatattctgaagctctgaaatgctagaaaaaaatttggaatggagtatatgcctgaaaaggttttggattcagaaagaaaaaggatggttagtttaatcagtgattctttttaaactcttcaaatatcatgaacaagatactaaattgtacctaaggatttgtatttctttacaatttgttctaaatatctgtttaatgactagttgatatttgtgcatgttatttaataaagagttatatttttatag

SEQ ID NO: 117162 - DNA, 1000 bp, Homo Sapiens
ttacaaagccatctatgctactgggagtctgaagatacagtattgctcgtcctcaaagagatctaccaaacccagggtatcttccttgatcagcctttacagtaaaaatgacccatctatggctgcttaatacggacattgagggatccttccccagaaaatccacctgtttgttgctgcaattttcctctcctcagctgcgtcatttcctgcatgttgcctgccacttactcaccactggggtctttggaagataatcttcctctttggaaatgaatggaaaagcaaaaggccctattacttttaaccactggcttcatataaacacttgccatttttttctgcatagctgggggtggtttgtgtctttaattctttgatgatagtttatagttgccacactttattgattagtacttgacagggtgtaaagcctattttgggtttgatttgttttgggtggggtagacatgtttttaaggaacttattgcttatctttagaaaatgttctagtttggaaacagattcttgagattcagaaggcattttggagtacacttatctcttgtttgtgttgaactgaaggctaagtctcagtggacatggaaaagacttttgggtgatttatttttgaacctgcatttctttcttatgtgtagtgtatgaagaaagactagaatgtagctttaaaaaagtgttgtttactctcttagaactgacagacttattgccagaaatcactgatgttcattgtttttgcaactgtttgagctgctgtaagagtctaaagttgacaagttagttcatgttaggtgcatctttataaagcaaagatgttgtatatcctaggcctcccttttatatttgatagaagttatttgctaatagcttctattcttacgttgaaaatagttgtaaaagctgatgaacctgaaattgtgtagcctctacaggctgctgaggttctaaataaaaccttttagtggtgcctttatggtg

SEQ ID NO: 117163 - DNA, 1000 bp, Homo Sapiens
taaactgacctgactccattttgtttttaaatgtgtgggttatgttgcagctgttgcagtcccccagatacctattattttacacaatttgacctataggaggacactgagtaatttacaaacacaactgcattcataaatgggaatagaacgtgaaagccagctctttcagaatatcctctattaatactgaatttagatatctttattccatttattatggtacaaataactgatgttttaaccagagtaatgacctcagtggatttgctttaaccctcacattttttttttaatgtttcacatgttacattattagctgaatacgttagaaaatgacagatggtagagacttccatagaattaagagggttctcatggaggggataggaagtaggtttaaagcctaccagtgtaacctaccagtacaactgtgaatcctaggcgaggcaaaaatgcacttccactgaaacgaagcatttctgaccgctttttcttggttatgaatcttaatttcgaatataagatgataggtaagcgcagctttcttggataatctgaattcccaagtgccaggagtaggatttcattataaaattaatagctaatcttattctatctcctgaagatttaattgctattgttacccattcgaaatcagctgtactgtgtgaacgaaataaagacaataatacgaacccctctctggctgcacggtcgcttatggcagttccacacagtagttggcgcccaatggggggtccctgagacttgcatgtaaaactagtctagatgtcttctttttttgtaagttttatttttgtaattgtgcatgtaaagcatcattgaatcaatggatctgttgaagaactcagctgctggaaaccatgcaaaatgttttgaattgcccttaaaatatggaaaatgttttctgaatgctttatattctttctgctgtaaattaaaaatgaagaaaatttccccaaaaaaaaaaaaaaaa

SEQ ID NO: 117164 - DNA, 1000 bp, Homo Sapiens
cctctcggggctgggctggggccgctcttggccccaaggttgccccgggccagcagcccagccagcagcacagtctctatggtgctgaggaagagcagcagcagcaggatggtgaagtagtaaactgggggaggcagggcacagggagatgctcaggggccagtccctgtgtctctggtgcccagcgagctgagcaccagtgggtgaccggggagaaacagggcagactgggtaagggagcagggcttactgagcagtgggttgcaggaggaggagctgggcagggcctgcaccagggaggagtggaggacgaggtaactcagcagcaatgtcaccttgtagcctatgcgctcaatggcccggaggggcagcaaccccccgcacacgtcagccaacagcagtgcctctgcaggcaccaagagagcgatgatggacttgagcgccgtgttcttcagcctcagctggaaggggaaaagtcagggccttcccggcgggggggaaggaggtgggcatcgggggcatggggcctggcctctggccgtgcatcctcactcccacccgcctccagcagccctctgtcggcctcctcccgacttgactcaccgtcacctggaagcagggcaccagctgctggggtgggacttgggtcttcagatcataaactacgtattccctcttgacactcacaatctcgttcaccacgtgggcctggaactctaactccatcgctgaggggtgggaatgagaactatgaaccaggaaggagagatcccagctgccaagtctgggggtagcagactggagcccaggggtgatggagacttttgatggcttttggcagggacagacttggacacaaaaccgatccatagaagggcttcccaaaccttgttttgcaacatcccaaattgtctccagttgaaggaaggcctttatcagattcatagatgagctttcattgtaaaaataaatgtactttgcaccacttcatgatggaggg

SEQ ID NO: 117165 - DNA, 1000 bp, Homo Sapiens
gaggccccattggagacacgtgaatggcgtgtgcggccatcagttcccggctggggggcaggtgttgcttcggcccccgccctccggccggcgtgtgcgagtgcgcccctggctgtgagtgttgaccgttcctctcccctgtacatagcccgagccagtcctgagtgggtgactcctgagtgggtgacgcgcagacgggatttctcaggtcatttgtatggtcgacatgatggctgctgctttggctgccaccacccccgggcccagcctgtctgaaagttcagggtttaggccgaaaaacccggtggggaggggtggggagccggagctctgtggcggggctggagggctggggtgcactttagtttggggcgggacgggagccgccgttgtgactggcgtggtctggctgctgctcccgaacggaggggtcggggttggcttgctgggccctcagagcccagtgggtggctctgactcggctccctactccctgcacccagctgggcgcagccttggggcctgcggtctgaatgtatccctcccctcagttttaacctgagctgccgaacgcacagtgggccgggggcgaggctgggggaagcggggcccaattacggatcccgggagttacaggtgccgacgtgatgtcgcttctctggtgcccagctcccttcctggtctgagactagctctgggggtggcgggggcccccacacgctgctcccgctccaccctgcccgtgctgctgctctgtgcctgctgtcagagccctggtgggggaggatgtggccaccctgagacccggaggagacgggcgtctgcctgggtttgcggagagccgcttatgggtgtggtccgtccagacaccttgtttcaagggggatgggcgtgagcgggcaagcagagcatccccaccgctgagcaagaactttttcttgtttttaaaccatcacgtcctcatttcacattggaataaagtgagtttttgaaacctgcg

SEQ ID NO: 117166 - DNA, 1000 bp, Homo Sapiens
aaattcatcaccacagggtcctgttgttttgtttgatttttagatttttttaaattattattaaggttgtaatgtttttctccgagttgtcagaaataactggaagaatacaatatatggccattatggagccaggggctagttggtggtttactatacatttgggggctacctggtcacatttaatctaggtttttttttctttttttaagtaaaggtgtggtctcttccctgtacttatgaataaggacaaagccctatttttgtttccacataaagatcagctactgaattggtgaatttcctgacagacaatgctatctaaccatagttcatgttaggggaagcatttttccatcagtttctttaaaattggattgtctggtgagttttgatattaaacattatgtagctaagttttttttttttagcatttcttttttatttttcaatctatattcacaggcccatacttcagtcagtccaatcatagtacagtgatgtggtggtagatgctatgaatttcttcattgtaaaatacggatcatttgtattttggggtgataaaatagttcaccatgggtatgagatatttattctttaaatcaaagtaaattagaatttttaaaaagcacaaaactgcaggacagtttatgaaataggtggcactattagggaatcttcctttaaagcaagaaatcatgttatttagaaagaaaaactaatcttaaacatactatttctaataaatatttatatttttatgaaataaagaggtatgtggaaattaatatttggtgatgttggacagtggaaaagtatctagagtttttacctgccttatctgaattcttcttgaaacttgagcttaaactctaatagctgtttccctttctattctgaacaactgtctccatttttcaagtgtgagagataagggctaatgatgacatctcatttattttgagtaaacattaaaattgttttacaagtctacttg

SEQ ID NO: 117167 - DNA, 1000 bp, Homo Sapiens
tcggaccttgtgatttggattgtcacctagcctttgtaaccgcttggtgcctcttaggacttaagactaccctacaggaaccctgtactcaaggccgatttttgtaactgtaaatgatgtgtacaacattcaagtctgcattctgcacaagataggagggcggaagagtcagaggaccctgtgcttgctggtggtgctaacacaatttctggtgttcaaccttggtctcaaatagctgcttttgtatatgattcacgagcttttttagagtttatatttttttaaactaccgaagacattcattatctgcaaattaagactcaccttcactttccaaaatagctgagggttgttggcttgttgtagctgaccaccaaaagcagtcactgcaaatcttttaattcttccctatcaccttttgtattttaatgcaattattttggtccagaactgacctgtattttctgtattgtacacaaaagctaataattttgtgtactttttatttattttggaggttttatatgatcttcaattgagtattaaataatttgcctagattaagcctaaaatgatgaccagctaattaaagaagatattttgaatctggttctgagctaaagttgagtaaattcttagctaagaaaaaattggaaatccatcatctatattagcaacagattctcagagtaaattgttaacttctatgatttatgataatcaagctggacttgatcatacaagttagtctcataatgtattggaccaaaatgtaaacttcattggtcagatttagaagcattcatgctcacaagttttgggaaagtgaaaaataataaaatcatcttggattttattctgtatattaaaatttatcttttaaggaaacaatctgtatactacttgcttgtatagccttttgacccttcttgagtttttcagaagcctttaatttttatactttcaataccatatttacattatatactttaattaacaa

SEQ ID NO: 117168 - DNA, 1000 bp, Homo Sapiens
ggaaggaaggaaggaaagaagggagggaaacagggagaaagggaaaaagaagaaaaagagaaagatgaaaataggaacaaataaagacaaacaacattaagagccatattgtaagatttccatgttaatgatctaatataatcactcagtgcaacattgagaatttttttttaatggctcaaaaatggaaactgaaagcaagtcatggggaatgaatactttgggcagtatcttcctgatgtcttcttagctaagaggaggaaaaaaaggctgaaaaaatagggaggaaattccttcatcagaacgacttcaagtggataacaatatttataagaaatgaatggaaggaaatatgatcctcctgagactaactttgtatgttaaggtttgaactaagtgaatgtatctgcagaggaagtattataaagatatgtcattagatccaagtgctgattaaatttttatagtttatcagaaaagccttatattttagtttgttccacattttgaaagcaaaaaatatatatttgatatacccttcaattgccaaatttgatatgttgcactgaagacagaccctgtcatatatttaatggcttcaagcaggtacttctctgtgcattatagaatagattttaataatcttatagcattgtatattattattgctgttgtcactgttattattattgtggatactggcccttggtgtgttgcatagctccctatgtattctctgtttccatctttaagttcccagaccaatatacattaagagttttgcatggtctaaattgtgtttattccaaccacgtggaaagctcctggaaagaaattttacattcggttgttctgtgctcctaatgacacttgaccttgttgaacaaatggcagagcctttcccaaggatttgattgtttgtgaattatctgcatgtgtgcttttttttggtgtgtatttcattaaaaaatataaatatttatgaaaaaaaaaaaaaaaa

SEQ ID NO: 117169 - DNA, 1000 bp, Homo Sapiens
attctagaattatatgctaaatgcatattttatgatttgctgtattaactgatgataaaactaatggcagaaaaagaagttgagcaatttctatgtaatgtacagatactagcattgcacatatagtctgctttctgttcctccagaatttgagtcctgttaatgtagtagaaaaaaaaaaaagaaattttctttttcttttgtgctggtcttgcaagtttgtctaccagtaagagagcaaagtttccttcctttcttctctttcttcattttctttttttcttttttgccttttattcctttaaaatttcgcctggcaaaaaataaataaatggaactatcactttataagaatcattttctagtaatgcaaacaaattattttttacaaaaaaacaaaataaataaaattagacttccttccctcactatatatctttatgcagtcagaatatttccaacagtgttttttgcaaattagagcaggacaaacttttatgtttacagggcacgtctgttgtaatgcaaagcatatttggcaagcagttcatcaccaggacactagctatgattctagaagtcaaaaggtgtctatagaactagtggggcttctgcatgtgaaaaacggttttccataggcattaaagtgctgaatgctcagtctgatcaacaagtgggcacctgcactaccactttttagaggaaattcactccctcgtaagcattggaaggtcaaattattttgaagtgatttttttaaaaaaaagtcttctgtttattaacaggaaaatttatttatttgacaggattttgagtaatgtaggaatacaaaaggtaaattagcagcacatataatttttttttaatttatgatccattttgtatggtctcaaagttggatgacctcattactaatatttgttgtaaaagtgaaacttgtttgccaaccaataaacaactgattgagatttagaagatattgtaaaaaaaaaaaaaaaaa

SEQ ID NO: 117170 - DNA, 1000 bp, Homo Sapiens
gaggacgagcgtttccgcctgctgctgaggatgctggagaagcggcagatggaccgagcggagcacaagggtgagcttcagacagacaagatgatgagggcagctgccaaggatgtgcacaggctccgaggccagagctgtaaggaacccccagaagttcagtctttcagggagaagatggcatttttcacccggcctcggatgaatatcccagctctctctgcagatgacgtctaatcgccagaaaagtatttcctttgttccactgaccaggctgtgaacattgactgtggctaaagttatttatgtggtgttatatgaaggtactgagtcacaagtcctctagtgctcttgttggtttgaagatgaaccgactttttagtttgggtcctactgttgttattaaaaacagaacaaaaacaaaacacacacacacacaaaaacagaaacaaaaaaaaccagcattaaaataataagattgtatagtttgtatatttaggagtgtatttttgggaaagaaaatttaaatgaactaaagcagtattgagttgctgctcttcttaaaatcgtttagattttttttggtttgtacagctccaccttttagaggtcttactgcaataagaagtaatgcctgggggacggtaatcctaataggacgtcccgcacttgtcacagtacagctaatttttcctagttaacatattttgtacaatattaaaaaaatgcacagaaaccattgggggggattcagaggtgcatccacggatcttcttgagctgtgacgtgtttttatgtggctgcccaacgtggagcgggcagtgtgataggctgggtgggctaagcagcctagtctatgtgggtgacaggccacgctggtctcagatgcccagtgaagccactaacatgagtgaggggagggctgtggggaactccattcagttttatctccatcaataaagtggcctttcaaaaagaaaaaaaaaaaaaaaaaaaaaaa

SEQ ID NO: 117171 - DNA, 1000 bp, Homo Sapiens
cagacactacgatgcactcctcaagctgtcttttgtgcttagatcatccataggtgtttcttctgcttgaagctgctatatcatctttatttattcagggtattttcatattggaagccttggctagtctgctctagctctgggttctgtttagagattggtttatttctgaatattcaagaaaggaaaatgactgggcctttctttcttttcttctcctctgggatgggtagtctccctttcctagaaaggttattataactttaaggacaggcttcaagtgggaaggcccctacttttgcacttctccaagtgcaggtcacaccaggggcagaccctgtcgctgcgtttctgaactgtgaaggagcccattcgggtgggagacttcagatgggctcagtacctgtcccagccacaggcttcttgtccacctcttctcccctgcccaccagctgctcagcgcataagaccttcccgacaggctctgcgtgtgcagctctctgcgtccctcctgggccctccagcgtcagacactaatgggagttcccgagatgctcgggtttgagcagggagcaggcagagctgcagtcagagacattagaaaaccagtctgaattgggtctgtctttgagatgcccaggccagcagaaagcagctcagaagtattgttgctcatggtgtggcaatggactgaactgtaatgaaaatgttatttaatctttgtctctgtattttgatacttgaatgactttcccttttgttttactgtatataaaattgttaatctgtctgattttgtctgaattataaacactttgaggtaccaaacataaccaatctgtgcaacaacatagactgacctcagtacccaagagagtgtaaatatttctgggcttccagctttggttttgttattttcataactgtacacaacttagaacagactgaattaataaatgagaagcgacatgaacgcagccttaaaaaaaaaaaaaaaaaa

SEQ ID NO: 117172 - DNA, 1000 bp, Homo Sapiens
ctgaaggccagcgtggacagcaggtgaggcaggtgctcctcacacccagacctgggcatcttcattgagggaaagaaaacagtcattgtgcaaaattctgttagtcagtgattctttacttgcaaattcaggggcttagaaaatgaaagcaaacacaaaaccttgagtgtgctttgggaaccaaatggaccttctgggacaagctgagcaagctgtatgaacgccacgtttgtgaagagctgagggtatcaggagggccgacgctgtgttggcatgcgcagtaggggatgagggttagccatagtattctttgcaaatgtgaaagcgagacattatatcttctcttgcttggtgtaactaatcactgttaatttcaggaaacagaactcattaaaactccttagcaaaccaggtctacatcctgttttgtttgctgagtgaggttagtgggagtggtcaaattggtactcttggaggaagaaaaactgtccttccttctccaaaaaaggaaaaattataataatataaatgacaaaaataaaagaattctgtttcctggaataagcatttcttattcctagttgtagggactcctatttttaccttccgttacagtgttgattcataagaaatattgttacatttgagataacttcatctgtatggggtatttatttgcaatgatgtctgagtactgtattttttctgtgcattaccttagtgtcagaatgttggtctttattttaaagtcatatgcatgttctcctgccaaggaacctttacacagacccaaacaaaaaaataataatcaaatgccttcaatttctgagaaaatgaggcagagcatggaaaaggaataggaaggagaaattaattgagattttcaggacacagacatatgatgtgaatgcctacaaagccagtgcgcataggaacagtgggcctgggtaaagagtcacattggtaggaccaataaagaataataaaaagacaaagcaca

SEQ ID NO: 117173 - DNA, 1000 bp, Homo Sapiens
ttttctttgaataagaaaaagtatctagcaaggatattacttgtgccttgaggctagcaattataggatagattcatctaaaatatggtattctgcattttggttttttttcttaagtgaataataccagtcttcaaagaaaacaaggtgaagacctattgcttcaataatcaagaatgctttgtgtgttttgaggtaggagcatgatcaagtatgctttggggattttctgtatttaggagatcctggattcttaattgttggctaagttccagtcaagtaggaatcagtgcagcctgtaagttctccacattgacacacacacacacacacacacacacacacgacatgctcctttctgtggcacatgcctgtattactgaaagctaaatcctcaaaacctagtaaggggactaatgattcattaaagtaaattgatggttttgctactaattcctatcccatacatttgacacaaaagaagtgttggtaatggataaataacatatcccgggcagatgagctcaacctagtaggtaagagtttggtttggtcacagttgcctatgagtgtgggtttcaaaagaaacataaagccttaacttagaatttcattatgttttagaatcatcactgccttaatattcaagcatctatttaagtcctaataaaggagaaatgcatgtttatggcttttttgtaaatataaatgcagtgatctatggcttaaaaaatttgtttctgtgacaatgtttgtaaatctagccaatagagtcatttacagaagaaaaatgagcatgtaataatacaagaactgtttccccctcaaaacctgaacctgaattatttgtaaaaactgaaatttaatgattaaagagaagccagaattgtacccttttttgtgaattcttgaacgtactcataaatatgacttattgtattgccttaagttttcactcattgtcttttgaaagccatatgataaaatgattttatttaat

SEQ ID NO: 117174 - DNA, 1000 bp, Homo Sapiens
tactcataacttttctttgaattgagtagtgaaaggaaggaggaggaaaggaaattaaatgtccttctagtattctctggactcaagtctgacatatgagataataacctatattgaaatgccaagaattgtatctgaaacaagagaacagtttgacacatttatcatgccttcatattacatattaactgaaaccaattaataaacatatgaaatatccattgcacaaggcaaaggcacctaaaccttttgtttctttttctacatagcagaaattgattttttttttatttttttaggggaacctatataattatgacccagtgatgtcttttggtgacttaagcttatgaattcaggttacaattgagttgattctagatggttactaccttgaaaaggatgttggtgccttatgtgacacgagccagagcctgctgggaataaacaaagcagattcatgccaacaccaactcgtagctttagtggcagatgggagtggtcacagactcccaaaatgtggggctttggatttccacaccatcccacgtgtgtgtcatcttcctctttcacactcttgatgataatttgaaaatgatgaaatcacctctgaatttgcctatagcatgagcacattcttatgacaacataacaaatagctcataatgtgaatattagaaactgttacagcctgcagttaccataattttccatgtttgtggaattgatattgaaatagcagggctaaggaattactggcaagttttagcctgtgggtaataccttagggttatttaaatatttgtaattttatttaaatgttcatgaatgtttgaaaggaacaaaattatcagggatggctctttgccatgggtcttattttcaccctcttttctgtaagaaaaaagaacaatgtcttaatgtatttttaaagtttttggtatagtttctaattccaattttaataaaagttttatagataaaaaaaaaaaaaaaaaaa

SEQ ID NO: 117175 - DNA, 1000 bp, Homo Sapiens
tcgtcaagctggcaatgcaagagttactagattatattttaattcacaaggcaacaagtgtggtgttgcggatggagagggttttctgagtatctggcaagttaaccaaactgcatcaaatcctaaaccttatatgagttggcagtgccacagtaaagccacaagtgactttgcatttattacctcttcaagtctagttgccacatctggacactccaatgacaatagaaatgtttgcctctgggacacattaatatcacccggaaacagcctcattcatggtttcacgtgccacgatcatggtgccacggtactgcagtatgcacccaaacagcaactcctaatctcggggggtaggaaaggacacgtctgcatttttgacatcaggcaaaggcagctcattcacacgttccaggcccatgactcagctattaaggctctggccttggatccctatgaggaatattttaccacaggttcagcagaaggtaacataaaggtttggagattgacaggccatggcctaattcattcatttaaaagtgaatatgctaagcagtccatatttcgaaacattggggctggagtcatgcagattgacatcatccagggcaatcggctcttctcctgtggtgcagatggcacgctgaaaaccagggttttgcccaatgcttttaacatccctaacagaattcttgacattctataaagattggggttttatttttatatacatttcagttaaaaggcacactacagtcatcactaggcaattctgctttctaagcagttgtattgaaaacagagaatctctgtgtagatttgaatatgacccaagctgagtattatctaaacaggttggtggaatgaatgcgcatgtaccttattatgctgacatactaaaaaaaataaaacctagtattgtatgaaggatagctattctttacagcatttagcaaacctgattcagaaaacatttgagattagcaaattagtaact

SEQ ID NO: 117176 - DNA, 1000 bp, Homo Sapiens; identical to SEQ ID NO: 115350

SEQ ID NO: 117177 - DNA, 1000 bp, Homo Sapiens
aaatctttttgtagactctatagtaccctctctattcactagcttctgaaaagggaggagtatttttagtttgacaatttaataatttaaaaacaagacatctccaggtaggaaaaaatgaaagctatttcatgcaaacattatctaatttagcttaaaagtgaaagtggtaatactgttggtttctgtaaatgttgcagggttttaaactttataattactttaatatttttgataactagaaatctagtattgccataaaggaaactaagtgcccatcaaagatttgtttggtataaataaagaattatttgttttgttttcaatgacagtaagctacaaatcatgatgcttaaaaactttctaaagatgaattgtgtggcagtgattggtctgtttgtggagaatgtatgaaagctattaatattctagaatagattaataaattggctatgttgttccaatgaatgtacagcacttccattaacttttgaaagcaacacagccttaaactcaatgcttttgctttatgacatgggaatgttctgtcatcaatggagtgtattcttgtaatagaattctttatatcgttctcaattctatagactttcaagcctatgtatgaatatgaaggggtttttttttttttgctttgttttctttttagattttgtacattccatctttataggtctgtttcatatgttttatgtatagaacactaagtcttgcactctctgacattgatactgatatattctcgtcatttgttcttttatgaatcaaaatgttgactgcctatttaaagaaaagaatgaacgctgtgcatcaaagtgtttgtatgttcgtagctacatacgtaccacagtattttggatgctttagtctacaatgaaactttcaattaattctgtcttgaaacataggagaaacaggattcatgtgtatctctttaccatgcacaaaatctcaaatcattataataaagcttgttttctcc

SEQ ID NO: 117178 - DNA, 1000 bp, Homo Sapiens
cttagaaaggatctcgaacattgctggacgtcctcatagtactcacaaagggctagccttgaatgtcactcgcccagtcttcagtctcctgacttagagatacaatcacgtcacaggtctcttggcctcaatctgaaaactgctgccgccgcgccgaggagactcgcatgccgccaccacctcactgggagggcgccgagcccaccgtcgccccctagaccctgacagctgcagctgccttgccttgccgccgcctccctgcagggcccctgttccaatgaaaaacagaacacaaaagagcagagcacctaagcctgtctctgcctccctgtctaccggactggccagggcccaagacccccgctgctccactgcggggctgggcgggctgactccctgcttcctccaagctgctgcctcccctgcagccagggtctgggcagggtgcagccggtcctcggggcacgcagcttccttcaagtacactgtgtgtgcttcccggacctgcggcgatgccacgggcctgccttttctatgcgcctcactagcttaccaccctgtgcaggtaatgcaactgactttgtctcatcagtctttttctttccctgccaccctttatttatcaagcgtaatgttacactttaaaggacagcaaataagaactttgtagaatcccaccaggactttgctaacaataatgtttggaaataaagaagtgctctgaaaaaatatcagccaccaaaatagttatgttggcactgtgttcacacgcatggtccccacacccccaggttgggtgggtttttttgttttttgggtttttttggggggggggctttttcatgttacatccatatctgtatttatatcttatttgtttcactttcaagtgtatcatggcaaatgtacagatttttttgttaataatgtgctaggatttgctaaaaaagaaaaaaaaaaaacccttttgagtttgccctagaataaatgagacttaatt

SEQ ID NO: 117179 - DNA, 1000 bp, Homo Sapiens
gaaggtcctctcaccaacaatgggcaggaactcccggatgtttcctgtcaggttcccatccatgatctgccagtggaatatgtcctagggaagaggatactacattccgagaccccgcaggccccgccctccttccgatctgcgaagtacccccttccacttaccatttgtaattggaggttgggtcttcctaccttctgtaagatggctgccgctgtaagagaagccagggaggggaccgtgagcctcaagagcacaggaatcaaaagggacagaaggagagacagggctggggtcgtaccctgctggggcgtgtccaggaagtactgggggtcagtgatgcgggtgttgatgggctccagcagtcccacgaggtcctcctagcagcatgtcgggtgctgtgaatagagctccttcccaagtttgtcccccatcagtcagtcactggtcaaggccctcacctgttcctctgacctaggctggcagcctcacgtgctgtccccactgtgcacccccttctccgcacacccacagagacatgtaagtacgtgtgtgtttccacctttctcacctgagccaaaaccccagctgcatgcctcaggttctccagaaaaacggcctccatctcagccttgactgctattcgatcagctccctggggtactcggccagccatcaggtggatcctgtggggaagatggactggaggccttgcctcccttggctctctctgcacctcttccaggattccctgactgtgccagccctcgtccgtctccccaggtctccagtccatggcacctgggtcacgatgcccaggtatcccagcactttcagagacacttcagtgatggctgaggggcaagccctttcccagacatctcagtgtccacccaccgcctcctgcctccagtactttccaaaacctttccttccctcggtccttctccgcaacctgtaacctgctaaattctcacctttaaaaattgtcctgaccttt

SEQ ID NO: 117180 - DNA, 1000 bp, Homo Sapiens
caggaaggtgggtcccggcaacacgcaggggatgagtggacctggaactgacaatggcgtgctgccaagtgttcctgagaggtgtttaggcacagcagaggggacgcggggggcaagaacagcaggacgctggtttaaaaataactcaccgccaaacctgtggagcagtgtggggcatcctgccagaggtgcacaggctggagtttcaggcactgcaggctgatgacacacagggagagtggccctgcctcctgtcctccccggggtttttgcagactcgaagtctcactgcaccagtgtctttgatggtggtgagggtgggtgatggtgcccagcaccaacagttttagtggcctgtccttgacctgccgtggtcctttgtaaactatggctccatgctgtgtgacagatcaacgtgctgatggtaagtagactaggcttccccaggcatgccgtccgtgggggcctgaagagacagtgagtgccattggccccattcgcagatgtgggagactctgctcaggcctgtgaggctgggcagcccttcaccagagttcggaggagcagtgtgtggcgccacgtcccgactggccatacccacacagaagcagtgctgcccggggcctcatctgggccagcttggactctgcttcctccaggagcagcagggaagctctgggccacctccctggatagcaggaacttgacctgccatgtgtgccctgccttcctggccagctgtgcttgttatcttccattctcacaaactgtctttgaagcaatagaataaagaatgtgtgttttctttcctggtatacatacatgatcccatgctcccaagctccattcttccttccctcaactctctgccctccacagagctatggagaaggctggagatgaaagctttgtagtgaggactgataaagatctcatcactgctccttataataaacctaataaagcaagaaaccaagcctaaaaaaaaaaaaaaaaaaaa

SEQ ID NO: 117181 - DNA, 1000 bp, Homo Sapiens
ggatgaggcccagagacgaaagctggatgtctctgtcaagtctaattcctccttcatgtcaagagagcgtgagctgctggggaaggtgcagctggacctagctgagacagacctttcccagggtgtagcccggtggtatgacctgatggacaacaaggacaagggcagctcctaggagctggcgagtcccagcctgactgctctgtcttcctgccttcgtctcgctccatcaccgcctcaatgtgatgagcctaaagctagggtccaagggcagagcctgtgcccttcagccctttcacctaacaggcccatattcgggcctttgcctgaccaaagagaagaaccgtatgttccctttactgcacggcctttatccttctgggcccctggggcggggacctgagctggctgtttcctgctttgcctgcacattgttctcccttcctcccaactcctcagggccttctgtatctgtgcctggccagtggcagcactagcagtggtattagcttatgccaaatacagctttggaaggatctttttttctttaactagatggtcaccttcttccctaccacacatgggtgggaaggtggacaggctaacctctccagctgtgagcctcttagactactgcatgtagcaaatgttcagcagctcaggcccccatgtccagttctgtccccactgtcctcaaccctgtcctgaaaattctactgctttgatggctggggccagtctcttgtcactttggaaactgaggacgcgtggattctactcaagcctccaagtagtggcatatcagtcttggagctcctagctggtgatacggagagggctttggaggacttgggacagcagggccaatttttttgcccaagtgcctaggctgctaactcactgactagaacttaatctggtactttacagttttgcaccaactctgccaagccactggatcttacattaaacatcatactcaaaaaaaaaaaaaaaaaaa

SEQ ID NO: 117182 - DNA, 1000 bp, Homo Sapiens
ggaaaaacagtatgggaagagttctttgtaatgtaaggaaataacaatgtagttctctattaatttagcaaatttgtacattcacaaaaggcagtttgtctactacagcagaaggctggttaactgccagaaaatgtacctccaggccctgcatgccgtcagtaacccgcccggcattggtgctctactgtctttggctagagcttagttgtgtttaaataatcatctttatatttggggttttaattacagttccattagtgcctgtagattagtgaacagaaaattgctttggaagagattctgccctgtagacactatgtgaataactgaagtaacactagactgaatctcctttttggagtatgtatcttctctcacttgttcaagtacaggcacactgttcaaccgcatggtatctttctgttgtgtgacttctacaaatgtaattttaaatgaaattaagttaacatggattcattacgttcctggccctgtagacacgtgtaagattatttaaaattctttcatttttttctgcctcttactatacgactgtagtgcaacaaatattttaaagcccccttttcttctttattttcattagttgtacattgatttcagtgtcaacacatttaaagattcattcatgttgcacagtggcttacatgaacgtgaaactgtgatataaggttttctttcatactcataattagcccaaaacagttgccaaactttgccattgtgctcctgcatttgtgtttgagctgctatatatttgtggaaattacactgaaagttgactaagagactattgaaaaagcatgaataattaaatatacatgtgagagacatctcatctgctgtattttacttagtgaatattgttcactcttccgtgtctgatgtcttgctgaatgctgtgactcatagtttacttttgttcaaaatagtttgcactttttgttaataaaatcaacttgagaaaaaaaaaaaaaaa

SEQ ID NO: 117183 - DNA, 1000 bp, Homo Sapiens
gtggtttgcttcaagggcatgggtcaggattcctgccaggtccccgatgtgtatccaggggaagaattggtggcctgagccgatggggccccccaggcccaggcgaaagggcagcagcatgtggcccatggcaccacccccacggcccagcacaacccctagagcaggaaagagggaaggtacaggggtcctctcagccttgaaggagcccactgctcctcctggtttctgtttccccttcctcactctccccatgctgacttggctctgtaacagaagtgagcagtatggctgtctttaagacctcacaccttctcatctgcaggttggctagaagtggtggcatcctctcactctgtaattgtaatctcagctctcctaatcccatcacttccccagcccagagaagacattccaaccctgtctgatacccaggcccgtttctcacctgagcgcaccaccacctggcgtgtagaatctccaggaagcctggctgcagcttcccatttggttacgaggttggagaaaaagtcaaagtcccctcctgggctgtcttcatcatactccgcagtcagactgggctggtagtaagctgccggtggaacacaatcatttgccctgggtgtccttggtcctgcctggctctctgtagtggaggctccccttggcctcaccttctctggcccttaggatctccccatttggagacagagccatttggatattttccccttgaacttctccatgacctgaagcgttccttccctggaggaactctggttgcagggctaaacttagaggctgctagagtgtagtggttaagaacaggaacttgggtaccaggcgcctgaattttaatcagctccctcatttattaactctctgacttgatgcaagttacttaacctctctgtatagaattttcacatctttaaaatgggaataatagtacctacctcatagggttgttgtaaggaataaatgataataagcataaaac

SEQ ID NO: 117184 - DNA, 1000 bp, Homo Sapiens
tttccaccagtcttatagcatcttacatgatcaaatcatcacagaataaccccgtgatagattattgatagcaatagagaggggctttgtcactgatttttctctcagattccttttccatctctcatccataaaggaaggactgaaatccaaaggcattctccttttgtacctacagtatccagaacccacgtgggcagccttctgcttatgacaataattggcccattgcatgcagagagaatgtcttcatagagagaatgtcattaaatacttgaatctgcatgacagtttgacttgaatgcaacagcaggaaaattttgcaagttacataattgtatatacagtaggttttcttaagtctcttcggttcatcctttgtaatttgtgtgtgtatctgtagtattgcaggcttttggagactattcttacaggcagtatgtcagtcatcaaagaaaatgctgtcacctgccattgttgtatttgtgggtatttatagttgtatgtatgtaaatgcatcagtgtgtagattgcatatcagtgtatggtacatgtacatcaaaattatttttgtccttaatcagtgtgatatgaaaagcaagtacaacctcataggactgattatataatgaagttgttgagagtatatatagtggtattgttttattaaacttaaactcaaataatattttgattaaaatttttaataagactttatgctagaaaattctttgagctttgaatcaccagggcaaaaatgactttcaactaaccttgtgaatcttttgcagtgtactgtgtgcaataccaagggcatagctccctgtaatttgggaaatacagaaagaaaagaaaaaaaaaaaaaaaggcagcctgtgcagtcttagtaactttagtattaagagcacttaaagtcaaactgacaattttgggcttattacaaaatgtgatgctttaaagcacacgttctttattgttgttgtaattagtccataaaaaa

SEQ ID NO: 117185 - DNA, 1000 bp, Homo Sapiens
tggaacaaaatattggtcatctaaaaactttctgttttctggggtctgggaaaatagaaaataagatttcaaatattaaataagcttaaaggaaccaagcatgtgacttttactttgtattctggttgatttgtcttgtccaagttatattagaaaagttgaggagtcgaggagcctgtaattaattttcctgtcagtgactgtcagacatcttcctgcttattagagcatccctagcaacaaggctaaaccttcatgacagtgctggcaggtgggcttgccctagcatgtggggcaggtttgttgtttttttaatagctttattgagatattcacatatcatataattcatccatttaaagtgtataatcagatgggttttggtatattattgatttttaattgtggtgaaatatatatataacaaaatttgctattgtaactatttttaagtataaagttcagtgaggtaggccagcttttatgacgcacctgaagataactttggttttaatcctaccctaaatgaagcatatgcctctatttttcctgtccccagtgctgggcttcttcacataccaacatttctgtgcttttaccaacagcattttagctcagaaggctcgcttactttgggcatttgctgtattttggttttgaaatacttgtaatttgacttattcttgggataatattttagttttcagtcattcaagggcacatttggctgacggagctaataagcgtaataaaatgcttagtagtttataccatcttttagttaaacattttaaagattaagactattcaaatgtactttgcggaaattaacctgtttgtatgcctggctttgtttacaaacatatatctatatctatatatatagatacagatacagatacatatctggtggaacaaagaaatacctgtaccattcccacttgctctttgatagccacctcctaggaatggagacaataaaactctgtatttgcatgtg

SEQ ID NO: 117186 - DNA, 1000 bp, Homo Sapiens
cgaccgccctgccccccgtcaccgaatcggacactcatcctttctcacacttcccacacatgatccttcttcccttcatcaccaaaggagcctctgtatggaaacatgtccagtgttgctgcccagtgtgtatgcctcccagtacccactctgctcggccgccttgggggttccgcttcctgttccagttcacctaaaggctgattgtgcaggcccagcactgtggctggactgccgcgccacgggcaccaggacccctaagaccaagtgacaactgggagagcctcagcatatactcttctcctccgatctcacagcctgtcatgctgctcagtgtggttctcacccctgcaagctcaaattcagttccctgaatggagtcaggtgctggaggccgtggcagcggagggtggttggggttggggctgggggtggactggtgtgagggcagaccagggccaggtagacggggctgtttggtgcctgaaggatggcagacgcctggtgtcaggaggggccgccaccaaggagcagcagctggggcagaggagctggggtcaggggccacccctctctgccgatctccctgcctgggctggctgtgaggccacctttgtcccaggcccagcctcaaggcaaggagggcgcttcactgaggtgtgaattgtacgtacaggctttttatataccaaaagtattttttgactagaccattcaaagctacccgaactatgttggaaatttttttttttctcattaaaatacaggcccttaggctctatttttcatgtatgagtcgtgtgtaatttatgtaaaaatgtgtgtacagactcactgatgcagcactgtagcccatcaccttggagcactgactgtacatagtgtggtgaagaaaagtgaacgcccttgtagagcagcccgaccacaggagcatggccgctgccagcccagacgctgctgacgctgtgtaaatgtgcacaataaacccgtctcaccccgg

SEQ ID NO: 117187 - DNA, 1000 bp, Homo Sapiens
catgtgagcccctgccagggccaagtccttctcccgaacccagggtcctgggaactgcagatcccggggggattcagcccttctcccactgtgctggcagaggcactcctgtgacgctgaatacagtgaacagggacattcccgccactcggggacagatgggcacaagggaggggaaactccatcaggaagtgctcccctgggcagaggcgcccactgggtgctgtgggctcaggagggggcggggcaggagctggtgccaaccgggaaccagagccccacagccatacagcccattggtgacaaggtcctgagaacacagtggccaggtgtccccaggctcctggcccctccgacgacctcaactctgcccagcccggtccctggccatcagcgacgctgtccgccccccgtcagatcccatgtgtgccatgtttatcatcagtgttttgtatttttgtactgagtatcggagcactttacagaagctgactgtacattcctgttctgttgtgaagagaacattcccagaccctggcaccctcctgagccggcgtgtgccggtccagccctccgagatgccacaattccttggatgggggagaagttcaaggaatttctgctcggccacgcggtgggaaccccgcgtccccgccatgtggcagaggggtctcagtcgtgctaggcatcgggcggcagcgccgacagcccttccctcgccagtgcccctcggccactcctgggttggagcccgattttatttgtaaagttgacagtcgagcaaatgttcctattttcgtgggatctgcacacgtctttgtcagttgtggtcatgatcttagtcacctgctaattatttttacaatgattacaacatttcctcactgcgggatatttctgacccgctttagaacttaagacctgattctagcaataaacgtgtccgagatgagcggtgaaaaaaaaaaaaaaaaaaaaaaaaaaaaaaaaaaaaaaaaaa

SEQ ID NO: 117188 - DNA, 1000 bp, Homo Sapiens
cggcctggccttcctctgcctgcaagtgagcagggatgggctggggagttgcttgtgccaccaagacgtgccaggtctgtactcctgttgtctttttccctgctcctggtgccctgaagagaccagcaagggggcagaccccgcactcgccacaccgccgctgcagcttgggccccatccgccctctggacctgtgtagggcctcactgctggagcggggaaaccgcagctcagcccaggcccagctggggagaaggcgctacctgcgtgggaccctcttctctggaaacctaatcctcctttcatttcctctgggcaggactctctggccttctgtggcctgcaatgccaggccatgtgcccctctgccctctagttctccaagtccccagcccggccagtggtgccaggcagcttgccacttgggagggcagaagccaggaattccacacccttgtgttgcgcccggagcccgcccttcgcctcccagcccctcaagacaccgctggctgctggacaccctcttcacttgtgtgtgtgtgtgtagcggaaaaggacaagacggtgcagtcggctgcatactcccagtcgggagtgtggtcagtctgcctgctgctgtgcggtagctccagaaccacctcgttcctggttttgtttggattttggcatcttgtttttctaacaacaaacaatggagaaaaagaattgattcttagtgacacagaagattgccttacgctcgtgagcgtgagaagccataagagagagaccgaattctgtggctcagcacacaggactgacccacagcccaggcagcgggtgtgtggagatggcgccctgtcctgccaaggggcgccaggagcagagccagggcctggcgagctggcgtggagcccacaggattcagcagcatggacagtcactcttgcactattccttctccaagccagaaaccacatttaatttcataaataaatttatgaaaagtaacctggctgct

SEQ ID NO: 117189 - DNA, 1000 bp, Homo Sapiens
tcttcatatggaaggccttatagttcgggaacggattttaggtgctgacaatattgatgtttctcatcccatcatttacagaggagctgtttatgcggataatatggaatttgagcagtgtatcaagttgtggcttcatgccctgcacctcagacaaaaaggtaacaggaacacccacaaggatcttcttcgatttgctcaagttttctcacaaatgatacatttgaatgaaactgtgaaggccccagacatagaatgtgttttgagatgcagtgttttggaaatagaacaaagtatgaacagagtgaaaaatatttcagatgctgatgtccacaatgctatggacaattatgaatgtaatctctatacctttctgtatttagtgtgcatctctaccaaaacacagtgcagcgaagaagatcagtgcaaaattaacaagcagatctacaacctgattcaccttgatcccagaactcgtgaaggtttcaccttgctgcatctggctgtcaactccaatactccagttgatgatttccacaccaatgacgtctgcagctttccaaatgcacttgtcacaaagctcctgctggactgtggtgctgaggtgaatgccgtggacaatgagggaaacagtgcccttcatattatcgttcagtacaacaggcccatcagtgattttttgaccttgcactccatcatcattagcctagttgaagccggagctcacactgacatgacgaataaacagaataagactccgctagacaaaagtacaactggggtatctgaaatactgcttaaaactcaaatgaagatgagtctcaagtgcctggctgcccgagcagttcgggctaatgacattaactaccaagaccagatccccagaactcttgaagagtttgttggatttcattaagtgactggatatgtaaagtcgtttaatgtggtgctaaaaagtaaaggacttttaatcacaaaaaaaaaaaaaaaaaaaaaaaaa

SEQ ID NO: 117190 - DNA, 1000 bp, Homo Sapiens
gccagaccaggccccagctgaggcccccacagagaagacagaggtgtctcctgttcccaggacagacagccatgaggctcgggcaggggctttgcgagcccgcatggcacagcggctggatggggcccgatttcgctacctcaatgaacagttgtactcagggcccagcagtgctgcacagcgtctcttccaggaagaccctgaggcttttcttctctaccaccgcggcttccagagccaagtgaagaagtggccactgcagccagtggaccgcatcgccagggatcttcgccagcggcctgcatccctagtggtggctgacttcggctgtggggattgccgcttggcttcaagtatccggaaccctgtgcattgctttgacttggcttctctggaccctagggtcactgtgtgtgacatggcccaggttcctctggaggatgagtctgtggatgtggctgtgttttgcctttcactgatgggaaccaacatcagggacttcctagaggaggcaaatagagtactgaagccagggggtctcctgaaagtggctgaggtcagcagccgctttgaggatgttcgaacctttctgcgggctgtgaccaagctaggcttcaagattgtctccaaggacctgaccaacagccatttcttcttgtttgatttccaaaagactgggccccctctggtagggcccaaggctcagctttcaggcctgcagcttcagccatgtctctacaagcgcaggtgacctctggatcttccttgaaaggggaggcagatctcaaactccaggctcagaactgtgaagactgtttccagcctggctgtgagccaagacctggttcctggtggaccctgaggacaaagtgtgataaaacctctggctcagacttgctctactgaaggcttcttggttataagatgcataaagtcactggggctagctaaacaataaagagtttattgtgagaaaaaaaaaaaaaaaaaaaaaaaaaaa

SEQ ID NO: 117191 - DNA, 1000 bp, Homo Sapiens
tcactttacattcctttcaatccaactgatcaaaactggtacccacacttgccctttctccctctctccagcacactcccctctaagaaagtaaaagcaaagctttcttaatggcaacactttgggcctgttctgttgctcctgccttatttctctttcaaccctgtacatgactcgtgttcaccatccccttgatcagtgtccatccgcgctaatttgcatcatgaactgaacagtgtgtgagtggtcacctactaaacccagctctgggggcagagctgtcttccccatctctggtgctcctaacacctgtgagatggtcctgtcgagaggactaggaaccgataggaggagagtccttctcggcagagctcactgcaaacaactggaattgaggttgcacactgtgatttttacaccgaaaagccaaaaggagctggccatccagggcctagggagaccagccttcctcagctatgcttgccgaaaccagcatgatgcttcaaagagccctgctccacccctcatggcatggatccttttcctggtgtggactctgaagggtcagtcttcggggaagagaggtggggtggggctactagcatcccaatttagaaaatagaggagtttgtagccagcagcctgtaaactggaaacactggtctcagccaacctcctcagggcgccctggcttctccccaaggagatgaggagcggtgatgccagcaccgggatgcgcagagcactggaagggctggtgcagatctacttcccatgcagaagagaagtcacatcttccagggaatcgcaatgttgtggcgtctgacttgtatgtcacatttgtgtaaaatggtatattctttaaaatagtgttgataactggaatattgtatgtatgcttggagatgctttgtgtgaacctaagactgtcactcaacagatgttggattggggaaaatccaaagcacaacttcaaaataaaatacatttttaggtttcg

SEQ ID NO: 117192 - DNA, 1000 bp, Homo Sapiens
tttaatattctactcgagctttatggaagccaaatcatgtgcatgtgtgtgtgtgcgtgtgtgcaagctttgaacctccttccacagccgcatcttctcatgacacaaagcttttgataagtactttcctgtgggtcgctcagcgcctcatagcatctcattcaattgcaagaatagaggccagacacggtggcgcatgcctgtagtcccagctaactgggaggctgaggcaggaggatcacttgagcccaggagattgaggctgcagtgagcatgatcgcgacactgcactccagcctgggtgacggtgagactttgtctcaaaaaaaaaaaaaaaaacaatggaaggcagacagcaagtccctgaggacacatcacacagtgtcctgtagctaagtgtctaggaaaaaacaaaaactccaaacccttcagtggatgaggacaaggtcgcagaaaggcattctgttgacagatgaacagccgaaagctggccagaccctcctgtatgcctctgcccttgtcctgtgggttgagggggtctgaccaggaggccacctacagcaggaagtgaggctgccatgtttccttgagacacagctgcctctccccagctctgtccctgtagtcacctgccggtgggcgaggatcctctccctgggataagcactcccagccccgtttatcagaaacacaggcaaggaaattggaactgccacccagcccagcatggtggctcaattggttggttgcgttgtcagttgtctcttcgttttgttaaggtttttaataagtacgtttggcataatgtcttttaatgggtttgtaatatttgtaacggttttagcagcctataacttttcagctggtgcttttacttagggaaaaaaacaatttgtaaatacagaacattgtttaaaagacataaccatagaacatagcttcctgtttgtggattttgtttcctatatattcaaagtaaaatgacttacaggagccaaaa

SEQ ID NO: 117193 - DNA, 1000 bp, Homo Sapiens
ccctttgcattctaatgagacggaccgactcccccggtgtgtgcgttctactgcacgattagccagggccttgtctcctgcctttgaactgagtcagtggagctctactgaatactctacatggactgagagccgctggaaagatatccgtgcccggatatttctcatcgccagcaaagagcttgagttgatcaccctgacagtgggcttcggcatcctcatcttctccctcatcgtcacctactgcatcaatgccaaagctgatgtccttttcattgctccccgggagccaggagctgtgtcatactgaggaggaccccagcttttcttgccagctcagcagttcacttcctagagcatctgtcccactgggacacaaccactaatttgtcactggaacctccctgggcctgtctcagattgggattaacataaaagagtggaactatccaaaagagacagggagaaataaataaattgcctcccttcctccgctcccctttcccatcaccccttccccatttcctcttccttctctactcatgccagattttgggattacaaatagaagcttcttgctcctgtttaactccctagttacccaccctaatttgcccttcaggacccttctactttttccttcctgccctgtacctctctctgctcctcacccccacccctgtacccagccaccttcctgactgggaaggacataaaaggtttaatgtcagggtcaaactacattgagcccctgaggacaggggcatctctgggctgagcctactgtctccttcccactgtcctttctccaggccctcagatggcacattagggtgggcgtgctgcgggtgggtatcccacctccagcccacagtgctcagttgtactttttattaagctgtaatatctatttttgtttttgtctttttcctttattctttttgtaaatatatatataatgagtttcattaaaatagattatcccacacgaaaaaaaaaa

SEQ ID NO: 117194 - DNA, 1000 bp, Homo Sapiens
tgtggtttgtttctggtttacagtggtggctgacaccccttgtaagaaagcattcctgggaagtcttctgtgggtccaaacatgttgctccgatcatcacaggagagcaaaaggccctagataccccctttggaatgtgagagtcttgttgtctgatatttgccactgagctggtgaagcccctctaaagagatctcgaccctggggagcagaattcttgtcatctatgaggggtcctgagaaagacttgtcattttttttcctggagttcttcccattgaggtcctaggatttgcacaccactgtcccacaagagctttcctgcctaatgaaaggaggtcttgtggtgtgtgtctcctctcttctctatagttcccgagttggcccccattgcagcccccaccctgtgggtagtcttccagaagtgatgcagtggtgtgagatgccctgcaccttgttatttgggagactttgagagtcattcacttccatggtgactagtgtttgttttgcctgattttatattctgtgttgcatttctccccactccctgccctgctttaataaacagcaaaccaatatctaggaagaatgactgagggatagtattgggtattggccccatggcaggaacagccacttgcatctggtcccggtgccacactgcggtgcttggtgtggttgtggagcctgtccctgcgcgccttgctcccgttgagccacgctgtctggtgggtgattctctgccctgagccaccaccctggactggcccagtctccagagctggcacaccctgcctgttttctctttttagacacaacagccgcagtttggccagccactaagtcccaccagctgaggtccgaggaaagcggggtgactcatttcccttgtccagggcccgaggagagtgaggtgtccagcctgcaaagctattccagctccttggtgttggtttgcaataaattggtatttaagcaaaaaaaaaaaaaaaaaaaa

SEQ ID NO: 117195 - DNA, 1000 bp, Homo Sapiens
tctgtaaatggatgtattgtacagagaacatgaacgtctcttcctaattttacatcttcagcatcattgcattaaagtggtgtaatctccttctctacatctgttgtcagagccactgagtgctgtgctgctcgacgtgagggtgaaatgattgacttgtgacctgccaggttgcccgatgccctgttgggtcaccggctggacctgctgcagcctgcagagccacagtcagcctgcccacatgccaccgagcaaacgcatcttgcttttcacatctctcctcctacagccttaatggctgcttgctgccatatgtgacaaatcaccaccaccagtgttaagtgcttctggattcatgggtgagttccctgggcagcccccaggaaggccttccagatctggctccagggtcaccacctgtcacagcaatacctgggaccatgctctcctgggactgtgaggctccttttgacgtacttttgacatcaggcaggtttgggaagaaacaaagccatgcctgctcctgcctctctcccaacatgtttccagcaagtagatgcccctgtgtgtgttttcccttgccttgtttcctgccttatatcttgtatttcgacttattacagagttgagggttcttgcttaatttagatcaagtataaaatttgtatgacttcaagtctcattttatctgaaaggtttttttctcatttaatctgatgtggcattttcgtcatctgaagcatgagtgacaagttgggaatgatgtggtgatttagaatgcagtattggccaagtccaagttgtcaacttaagcgtctgtttaccaaagaccgggaacaggggcccaaacatgtccagtcctcttcttccctctgctggaacctttggggacactcaagggtacagtttgacactgatctggtccatgaggctgcccagagaaagcactgcttctgtatgtctcttgtggtattggaacaataaacccgtacaacctgca

SEQ ID NO: 117196 - DNA, 1000 bp, Homo Sapiens
actgctggtgggagcaggaaggagcagtgcccctcgagcagccaggaagcctgcggatctgggaaatggctctgccttaggcacttctcgggaatttgaggccagcctgaggaactgcaggactcaggtgcaatgtgccagccacttggaactgctaactgagcctccagatggtagtgaatggtctctttgccttcaggctggatgaggaagtcatttaggaaatgttcaaataaccaatatgtggaaatggacacagggatcttctgaagttgctttgaatcaaaaggcaggcagtgctggttcctctgcctgtgtccccaccactccccagctctgtcatgcaggcctgtcctccccaaccccagctggatgtgcctcccaggcctgctgtggttctgacacacaggatcccaggcaaggcaccacttcctcacatgaatgaggagcagcaagtcataaccactcccttgggtatacaatttgctgtgtagtgaagtggaaccaggctcaggctgctggtcccaacctcagagccccaccgcagcccagtagggatgcagcacgccccagagggctcatgtgggccccagatggcaatgccaccattgttgatgtgactccagagccagttattaggaagagcaagctcaccacagaggagtggaactgaggccccccagatgttgcctccggtgtccaagccacagcggtctggctgttgggaagatggccaggaatggactcataccattggcacattaggctaatcctggttttatgtgaagtcagcaattaagtgttcccactagaactgacctaagccactgattaatatttaatgagggaaggtaggggagaatctagccattttataatgccagaaatctatatatgttatctgatgccatttttctgaagtagcctcacatgtggtccccctgcagttcagcagttaacagatgacttttttagtgtaataaaatgtttatcatctatg

SEQ ID NO: 117197 - DNA, 1000 bp, Homo Sapiens
gtgctgtatggaacaatgctgggcattaaagttataaatgtagagacaaaccggtgtgtgcggattttaggcaaacaagaaaatattagagtgatgcaattggctttgttccaggggatagccaaaaagcatcgtgctgcaactactatagaaatgaaagcttctgaaaatcctgttcttcagaatattcaagctgacccaacaatagtctgtacatcattcaaaaagaatagattttatatgtttaccaaacgagaaccagaagatacgaaaagtgcagattctgatcgagatgtttttaatgagaaaccttctaaagaagaagtcatggcagctactcaagctgaaggacctaaacgagtttcggacagtgccattatccacaccagcatgggagacattcacaccaaactttttcctgttgagtgccctaagacagtggaaaacttctgtgttcacagcagaaatggttattataatgggcatacatttcaccgtataattaagggctttatgattcagactggagatccaacaggtactggtatgggaggagaaagcatatggggaggagaatttgaagatgaatttcattcaacattacgacatgacaggccgtacacactcagcatggctaacgcgggatcaaatactaatggatcccagtttttcataacggtagtaccaacgccttggcttgataataagcatacagtatttggacgagtgactaaaggaatggaagttgtacagaggatctccaacgtcaaagtcaatcccaaaacagataagccctatgaggatgtcagcatcataaatattactgtcaagtaaaataagatttgttttaatgtacttgcaaataaaaatacaatattaaacagattattttacattaggaagcttaggacttgctgaatatacagatcatgtttcaaagatacagtatttttgtattttttattaaaggctattttttaaaaaaaaaaaaaaaaaaaaa

SEQ ID NO: 117198 - DNA, 1000 bp, Homo Sapiens
taaaagtatttttaagccaagtttcctgtatacctctgaactgttttgattttgagttcatcatgatagatctgctgtttccttataaaaggcatttgttgtgtgagttaatgcaaagtagccaagtccagctatatagcagcttcagaaacatacctgaccaaaaaattcccagtaaccaggcatgatcaatttatagtggtcgtttacatctaataattatcaggacttttttcaggagtgggttataaaaacattcaagttggtctgacagtattttgttaaggatatttgtttgtatgtttattcagtatacttacataaaaattatttcgccatcagccaaaactcagtaatcatgacagctgtctgttgttttatgaagtttatttctcaagaaaatgggaataaatttgggatttgttcagcttttttactaaagatgcctaaagccacaggttttattgcctaacttaagccatgacttttagatatgagatgacgggaagcaggacgaaatatcggcgtgtggctggagccttcccactggaggctgaaagtggcttgtggtattataatgttcagatttcaagaggaaggtgcaggtacacatgagttagagagctggtgagacagttgggaactctttgtgcttgtgatctactggactttttttttgcaggaagtgcattctctggtccttccctattttctgttctggatgtcagtgcagtgcactgctactgttttatccacttggccacagactttttctaacagctgcgtattatttctatatactaattgcattggcagcattgtgtctttgaccttgtatactagcttgacatagtgctgtctctgatttctaggctagttacttgagatatgaattttccatagaatatgcactgatacaacattaccattcttctatggaaagaaaacttttgatgatgaaacaataaagattttaaatatcaaaaaaaaaaaaaaaaaa

SEQ ID NO: 117199 - DNA, 1000 bp, Homo Sapiens
tcaaattcttctcattgcagaactttatccctggaagccttcatgtgggctgctagtgagttacattaattactgcaaatcagtggaattctcaagagacaagataagcttcatgtacatttgtcacctctctttcttccctatcctgccctgctgtcccaatcctagcttttctatataccatcctaaagggtttttaagccctaacacttgtctagcaaatggagagcctaatttaccaaaatgaaacttgtaaatttttgtgtcattgtatgtaagtttactttttatggaggaaggattctagataatgacaaatgaagattatgacatgtatttcactcctgtgattaggttctacgcacatgggtcataactcgcatgtcgagccccctctagtgaagggtaggagagctcagcctcggatggccaacattcagttgttcaggttcattcgtcaaagttaagttttagaactatttgtactcagtaacaaaaatcattttctttttttttttttttttctgttgtggaaaagcgtgaatttgttattaagcatttgattttctgtgtccttaagtacttcctgaagatgaagcaaaattttaatctggcaattatgaaaaagaaatattttagctctgaaggatttagtagattctgttagattagggaggccttacagactgactttacttaaagaggacgcgtcactcgctgtcagtgtggtgtgggctttatttgcttaaataccttcatttgtatagtacgtctcacttgaaattgctttgtatacattttgtaaaaatatttataaaatgttttgtaaaaaaaaaaaaactataacaaattgcagtttattttgttatgttggataaatactgttaaaagaaaccagtcagtaactatattgttaatccatggttaggaaatgtttagttggagattacaaattgaaacaaccattgcaatacagccaaagatttgggaaaatgaaaaa

SEQ ID NO: 117200 - DNA, 1000 bp, Homo Sapiens
tgacagaggaaaagcagcttggtttgcggccttgtgcccagtctcgttgaggcgcttgtccctgtctgctttcctggggcatgcctgatcagcgtgggctggagctcctagaccaaccccagctttctcaccaggttcagcaaggaggcctgggggtcagacaccaatgttgagcacctcctgagggcgccgtttccttcattcctcttagattccatagttgccgccatgaaaagactgctcttgagccccaaggcacaggcacgtgctctgggaaatagacaggagtggtatttccgccctctcggagggctggtgttcaccaagtttccctcctcgctgcaacccaatgacacctgtattgttccagcgctccaggactctgggttcttaagatttctgggagcgttgttcacccaccccctttaggaaccaggctggtgttcttgcttgaaagcgttgtgccctctgagtgtctggctgatcacatcagagaggtctgcgtggcagtttggggctgtcacgtgaccagtgacccacactctctgctgcccagtactgccaagtggggagggtcctgcctttttctctgccccaggtctgggacgcaggtgatgccagccaggcccaggagtgcccagcatcccccaactgatgacacagtagcactgattctgtcttttcctcagaatctggcctttttccatggcaatgaggtggggcccagcctcctctaaagtgactttgtttctgcacagttgtaactgctcttggggatgtcagtgaggctgggagcagggagccacgggatgctgagagaggaggcccgagaggacaccccaccctccagcgtggcctttgatccagacttagggacgaggctgtcactggtgggcaccctctgttcctgtttgtgtgtttgaatagtctgaaatgctgtgactttttttgtgtgaataaagatatgaaacttctgaatctcaaaaaaaaaaaaaaaaaa

SEQ ID NO: 117201 - DNA, 1000 bp, Homo Sapiens
cctgtgttatatgtgtttcacgcacatatttgcagttggattttctccaacagaaagtggattcactactggcacattaacaagcaccaataggtttttattccaactccgagcactgtggttgagtaacatcacctcaattttttattatccttaaagatattgcattttcatattctttatttataaaggatcaatgctgctgtaaatacaggtatttttaattttaaaatttcattccaccaccatcagatgcagttccctattttgtttaatgaagggatatataagctttctaatggtgtcttcagaaatttataaaatgtaaatactgatttgactggtctttaagatgtgtttaactgtgaggctatttaacgaatagtgtggatgtgatttgtcatccagtattaagttcttagtcattgatttttgtgtttaaaaaaaaataggaaagagggaaactgcagctttcattacagattccttgattggtaagctctccaaatgatgagttctagtaaactctgatttttgcctctggatagtagatctcgagcgtttatctcgggctttaatttgctaaagctgtgcacatatgtaaaaaaaaaaaaaaaaagattattttaggggagatgtaggtgtagaattattgcttatgtcatttcttaagcagttatgctcttaatgcttaaaagaaggctagcattgtttgcacaaaaagttggtgattcccaccccaaatagtaataaaattacttctgttgagtaaactttttatgtcatcgtaaaagctggaaaaatccctttgtttctatttataaaaaaagtgcttttctatatgtacccttgataacagattttgaagaaatcctgtaagatgataaagcatttgaatggtacagtagatgtaaaaaaaattcagtttaaaagaacatttgtttttacattaaatgtttatttgaaatcaaatgattttgtacataaagttcaataatat

SEQ ID NO: 117202 - DNA, 1000 bp, Homo Sapiens
gatcaagggctgaaaaaagtcattcagaaagtagaagcttttgagcatcgaatgtattctcatccacttcacaatgatccaaatttggaaactgtgtatacgctttgtgaaaaaaaagcacagattgcaatagatattaaatctgcaaagcgagaactgaagaaagcaagaacagtcctacaaatggatgaactcaaatgtcgcaaacgtgttttaagaaggttgggatttgctacttcttctgatgtaatagagatgaaaggacgagtggcttgtgagataagcagtgctgatgagctccttctaactgagatgatgtttaatggccttttcaatgacctttctgcagaacaggcaacagcattattaagctgctttgtgtttcaagagaattctagtgagatgcccaaattaacagaacgattagcaggaccacttcgtcaaatgcaggaatgtgctaaaagaattgcaaaagtttcagcagaagccaaattggaaattgatgaggaaacttatctaagctcatttaaacctcacttaatggatgtagtatatacctgggcaactggagctacatttgcccatatctgcaaaatgacagatgtctttgaaggcagcataattcgttgtatgaggcgcctggaagaattgcttcgacaaatgtgtcaagcagcaaaagccattggaaacactgagctggaaaataaatttgcagaaggaatcaccaaaatcaagagagatattgtgtttgctgccagcctctacttgtagagtcagctaaaggaatgtgagattttaaattattgaccacctgtttgattacagttgactacaaatgcctgcaagtgtggatttggttctcccatacattttaatatgtattatatttaaatcaaacatcattcatagaaagcatattacatacatgtttatacataagcattacatttttttaataaaaatgtatacaggtgggtaaaaaaaaaaaaaaaaaaaaaaa

SEQ ID NO: 117203 - DNA, 587 bp, Homo Sapiens
taaatcttttctgcttactgaaaaggaagagtctgatgattagttactgatcctctttgcatttgtaaagctttggagatattgaatcatgttaccatttctgtttttttccaccctgttttcttccatatttactgaagctcagaagcagtattgggtctgcaactcatccgatgcaagtatttcatacacctactgtgataaaatgcaatacccaatttcaattaatgttaacccctgtatagaattgaaaggatccaaaggattattgcacattttctacattccaaggagagatttaaagcaattatatttcaatctctatataactgtcaacaccatgaatcttccaaagcgcaaagaagttatttgccgaggatctgatgacgattactctttttgcagagctctgaagggagagactgtgaatacaacaatatcattctccttcaagggaataaaattttctaagggaaaatacaaatgtgttgttgaagctatttctgggagcccagaagaaatgctcttttgcttggagtttgtcatcctacaccaacctaattcaaattagaataaattgagtattt

SEQ ID NO: 117204 - DNA, 1000 bp, Homo Sapiens
cttatcttgtcttcaaatgtgcaggaaatttgaaactgtcatctggaataggttccatctcttatgtgtgttagatcaaaccaaagaagcccccagccatgcccaaatgctgcttcaaaagcctgccttccagtccttacaaaaaccttgcaggattaaatgtgttaacttttttatttttgtacagtttctaagtgatttttgctagtgatgttaaaatgaattaagtttatttgaggggtgtgagcacctcctccatttaaataaactggtgactttccttttattttttaaaagtggaaacccgttgtgtgcctctcgatttaagggtttctgatgacattattcttaagaccagcattgatcctttatatacaaatatatgttttccttgttttttattgctatttcagaagaaaatgaaccttttattttgctctacccagtaactgcgctggtacatagacgcactgagcaaacaaacttttgtaaccacctctgactacttttgtatatcaaagttgattacttttgaaatatttggatctagtttctaagttattttagtgttttatatgttccccaaaattactttgaatctgtcaccagcataatgagttcttggtgatacaatggtgagacttgtaatgagcaaaaagctacctggagtagctcctcttttccttctttcttagtaacctgttttttgattaccgtaagacatcacagattacctgaaaccccttccagtataactaggccctccttccttccacatttaattgcttaatagtttgaagaaactattggaaatgggcattttatatgacatgtatggctttacaatattaaatatgagcaaaaagaaaaaatatgagaaggtttatgtgggtctgtaaggtatggctgtggaaagatattgtagtagttttgacactattgttattacctttaaaatcatttacccaataaaatgttaaaaccgaaaaaaaaaaaaaaa

SEQ ID NO: 117205 - DNA, 1000 bp, Homo Sapiens
gggaagcatgaaccacagggtccctgagggccttcgacaaaagtgtgtatttgtcccggggagggtagcagtgggccatggggcttcttgtgccctaaaggggactggctgctgtgatcttctaaggggcccagggccaaccctgtaggcttcccctctgctggggacggtagttgcttttctctctcctgatgctaggttggggcccaccctgctccctgttcctgctagggcctgccagtgcccctgagcttgctttccacattctcccagggtatggagacctagacctgtctttggggccattagcatctggggttatagcaagaagagtggggagcatggaactcctgggctcttgtggggacgttcagggtatcggggtgcgaggtctgtctgcaccggcccccacatctaaccaggccctgatgtaggggtcgtccgctcaggctgcccccttgggctcttgcagctcttgttcaggtagtcgcccttctggtttgttctctgtggggcagttggtgggggctgggggaagaggctggcagaagttaccctggatagggaagggggaggaggggacttttagagccagcaggccccactgtattatgtatatatttttcaaggtctgtttttctaactgaaaagctaagggcttgattcctagccccgttctgtggggcactgggtgatactcagtttcttgttcctggccgtggagaggggcctggggcactggttccggctgtgtctggtggtctggctgcggggaaggggcaagaaggcgggcaggccttcactgcagcactgagcctcaaatccgctctggagcatgaggctggatgcagtggtggtgaggccgccccgctccatcccgaggcagccagggtttgttttgcgctctcctgtcacaaatgctgcactattggttcttaagttttttatctccagatcctaatttatgcctatgcaaaaaataaatgacgcccaagagctg

SEQ ID NO: 117206 - DNA, 1000 bp, Homo Sapiens
tactggacagttcccttggagctcactgcgggagacggacagaggaatgtcagctgagtacagttttcccatatggaagaccagccacactgtcaagtgggaaggcgtatggcgagaactgggctgcctctcaaggacggcgtcatttgctgttcgaaaagaaagcggacattcactgaaatcatctctttcgcacgccatggtcatcgattctcggaattcttccatcttaccaaggagaggtgctttgctgaaagttaaccaggaactggcaggctacactggcggggatgtgagcttcatcaaagaagattttgaacttcagttgaacaagcaactcatatttgattcagttttttcagcgtctttctggggcggaatgttggtacccattggtgataagccgtcaagcattgctgataggttttacctcgggggacccacaagcgtccgcggattcagcatgcacagcatcgggccacagagcgaaggagactacctaggtggagaagcgtactgggccggcggcctgcacctctacaccccattacctttccggccaggccagggtggctttggagaacttttccgaacacacttctttctcaacgcaggaaacctctgcaacctcaactatggggagggccccaaagctcatattcgtaagctggctgagtgcatccgctggtcgtacggggccgggattgtcctcaggcttggcaacatcgctcggttggaacttaattactgcgtccccatgggagtacagacaggcgacaggatatgtgatggcgtccagtttggagctgggataaggttcctgtagccgacacccctacaggagaagctctgggactggggcagcagcaaggcgcccatgccacacaccgtctctcgaggaaacgcggttcagcgattctttgactgcggaccctgtgggaaaccccgtcaataaatgttaaagacacactccgaaaaaaaaaaaaaaaaaaaaaaaaaa

SEQ ID NO: 117207 - DNA, 1000 bp, Homo Sapiens
aaattccgagacctcttgcaggaagggctgacggagctcaacagcacagccatcaagccacaggtgcagccttggatcaacagctttttctccgtctcccacaacatcgaggaggaagaattcaatgactatgaggccaacgacccttgggtacaacagttcatccttaacctggagcagcaaatggcagagttcaaggccagcctgtccccggtcatctacgacagcctaaccggcctcatgactagccttgttgccgtcgagttggagaaagtggtgctgaaatccacctttaaccggctgggtggtctgcagtttgacaaggagctgaggtcgctcattgcctaccttaccacggtgaccacctggaccatccgagacaagtttgcccggctctcccagatggccaccatcctcaatctggagcgggtgaccgagatcctcgattactggggacccaattccggcccattgacgtggcgcctcacccctgctgaagtgcgccaggtgctggccctgcggatagacttccgcagtgaagatatcaagaggctgcgcctgtagctgcctggatgagcacacctggctcatcacacttgcaggcctgttccctaaggggccccagccaaggagctgagcgaggctgtctggcttgggggagatctgacagcccagacctttctacggctggcagcagagaaacaaagtctggacccactccatgctctgccctcagacctggccaggtgatgctctgggggcagcatctccccaccgagagaagcgggctcctaatgaggtgggaaagccacggcaggcagcgagcagcccaggccagctttctgcatggatggtcagtctcttgccctcaaacactacagcaaacaagctacccctgccagtcctagacaacttgggtacatctggggacctagcagttaggcttgactttgaggagaggctgtgatgtttatgatccctgaataaagctactccttgg

SEQ ID NO: 117208 - DNA, 1000 bp, Homo Sapiens
agaattgaagaaataccatagtatttattttacaccccctctcccacgaagtttatgtttggattacatgcacgtgtgagattatttgcaataattcataggttccaagggtgttgatgaatagtcatacatttttttggactttgttataattcattgtggtaagaatgattgaaatgcagatttaacaatcttataatctattgaatgccatttttgataaagcactggaggtcttattgccaaactgattgtaatgaggcagtaagggtgaaaacattgtacatgttgtgaagaaagtatttaaatccaacttttgaacagatttaacaaacatgaggaacttttttatttagaaggataattttgaagatgaaaatgtattcatcttaattgttttttcaaatttaagggaataatttataccatcttttcagacaagaatgtacagcaaaaataaggggaacagtagtatactgagagtgtgtgtatgtatagtgtatgcctttccaagcttgccagtctttttggctttgaacactgcccatcagctacagtcattactgttccccaacccacaactatcttttaagaagtcttagttcacagtgaaaggaatgatgactttgaaattatggatttatattaatggcactataaaccaatggtaatggtaatttttaaacttgctaaatattgagaaactaaactactaagttaataaattatatatagcagtgtagctgttctctctagatggtgtctcacaatggatttctgttgcttgactattttcttagtgaatatttatactaaggtagtgactgagatttggtgatctggctgagtattttgaaacacattttgaataatatggcttagtgttaacggggacttaaatatgatttttttttcttactcatttcaccttccctgtactgtatgtttggaattgatcataaaacatctccaaaagaaaataaaaaaaaaaaaaaaaaaa

SEQ ID NO: 117209 - DNA, 1000 bp, Homo Sapiens
ctatcaagatggtcaacttcccccagaaaattgcaggtgaactctatggacctctcatgctggtcttcactctggttgctatcctactccatgggatgaagacgtctgacactattatccgggagggcaccctgatgggcacagccattggcacctgcttcggctactggctgggagtctcatccttcatttacttccttgcctacctgtgcaacgcccagatcaccatgctgcagatgttggcactgctgggctatggcctctttgggcattgcattgtcctgttcatcacctataatatccacctccacgccctcttctacctcttctggctgttggtgggtggactgtccacactgcgcatggtagcagtgttggtgtctcggaccgtgggccccacacagcggctgctcctctgtggcaccctggctgccctacacatgctcttcctgctctatctgcattttgcctaccacaaagtggtagaggggatcctggacacactggagggccccaacatcccgcccatccagagggtccccagagacatccctgccatgctccctgctgctcggcttcccaccaccgtcctcaacgccacagccaaagctgttgcggtgaccctgcagtcacactgaccccacctgaaattcttggccagtcctctttcccgcagctgcagagaggaggaagactattaaaggacagtcctgatgacatgtttcgtagatggggtttgcagctgccactgagctgtagctgcgtaagtacctccttgatgcctgtcggcacttctgaaaggcacaaggccaagaactcctggccaggactgcaaggctctgcagccaatgcagaaaatgggtcagctcctttgagaacccctccccacctaccccttccttcctctttatctctcccacattgtcttgctaaatatagacttggtaattaaaatgttgattgaagtctggaactgcaaaaaaaaaaaaaaccaaaaaaa

SEQ ID NO: 117210 - DNA, 1000 bp, Homo Sapiens
acagaatctgtcaaagaacaagaaatgaagtggacagacttagccttacagtacctccatgagaatgttccccccattggaaactgacgcttggctcctttcttgtggatggattttctcaaagtacacagataaagcacggtttgtttcagtctccaaattcaaacctttgagtaataaatcagcactcaaaaatgtacacccatttagtttgtggtagcaaagtgcaatgcgaaattgaatgagaaactgagatttctcagtaatggtgaatatttcgctctttaaacctaaaactcttcattgagtagcttatatttgaacatgattggttaaacatttgcctctacctctgattttgctttgctgtcaaagtttaacaccttccaactacttatgtgtgtcctgtaacacaggtgattgaacgtatgagagggaaaggcaaagaaaaaggaagccagacactaggagaattattaacttctcatacttccccacattgagaagcattcggagtgtatttagcctgtagatgttgtgatatgcaaatatcccattccctggttactggcattcctaagattcttcatggtattttcaaactttggataaatttacagattagaaagatatctgacagttaatctctgttctccttacaaattccttttgtgctgctggaaaggatctttggctaggtggatgactagttttattcaaagccttttctcaaagccctttcagttacaaccaccccactatggaatcagtatttagttatacatttgtataagaacctgtattttgaaaaacacattcatgtatatttattcctggaattatttgcctgttaaacagtgtctttcatgttctctccccagattgtaaactctgtaagaagctgcttgtatctgtatcccttgttgaaactctgaaaacactgaataactaaaatctcttctcatccttacaaaaaaaaaaaaaaaaaaaaaaaaaaaaa

SEQ ID NO: 117211 - DNA, 1000 bp, Homo Sapiens
caactccgcccctacccaaggaccgacagcggctcccggagcctgccaccctgggcttctcggcacgggggcaggggctggagctgggcctcccctccactccaggaacccccacgcccacgccccacacctccatgggctcccctgtgtcatccgacccggtgcacatgtcgcccctggagccccggggagggcaaggcgacggcctcgcccttgtgctgatcctggcgttctgtgtggccggtgcagccgccctctccgtagcctccctctgctggtgcaggctgcatcgtgagatccgcctgactcagaaggccgactacgccactgcgaaggcccctggctcacctgcagctccccggatctcgcctggggaccaacggctggcacagagcgcggagatgtaccactaccagcaccaacggcaacagatgctgtgcctggagcggcataaagagccacccaaggagctggacacggcctcctcggatgaggagaatgaggacggagacttcacggtgtacgagtgcccgggcctggccccgaccggggaaatggaggtgcgcaaccctctgttcgaccacgccgcactgtccgcgcccctgccggcccccagctcaccgcctgcactgccatgacctggaggcagacagacgcccacctgctccccgacctcgaggcccccggggaggggcagggcctggagcttcccactaaaaacatgttttgatgctgtgtgcttttggctgggcctcgggctccaggccctgggaccccttgccagggagacccccgaacctttgtgccaggacacctcctggtcccctgcacctctcctgttcggtttagacccccaaactggagggggcatggagaaccgtagagcgcaggaacgggtgggtaattctagagacaaaagccaattaaagtccatttcagaaaaaaaaaaaaaaaaaaaaaaaaaaaaaaaaaaaaaaaaaaaaaaaaaaaaaaaaaaaaa

SEQ ID NO: 117212 - DNA, 1000 bp, Homo Sapiens
gcaagccgcctcttctcggccatcgactgcagatgatgaaagagcgggattcaactttgttttcttttcctgtggccccagtgaaacctcctgccctccctgcacgtctgtgtcttcatttctaaaatgggggtgatgctttcatattgacctcaccccatactacctcacagatgtgttgtgaggattaataaaattatgtctatggtattttcagtttctggagaaaaatacttatagacagtttaactattacatagatatataagtgatctcagtttcttgtttgctgtgatactaatgtgttgttttaacttattccataaaatgacagttgtgtcctagccacatcagacagctatctaagctctggactacccctttgtgcagctgaatcactgcagggttgaccatgcctggtgccacagccatggtttccatttctagatgaaaggatggcctaggacataggtctcaaagactcttggatcagaatcaggagattagggaaaacaggatggatacctgagcactaacagcagtagacgtagacctctgtcctttaccatctgaggtcttctggattctttgtggggttaattttgatttgatgtcatctgtttgcccttcatcttgcttgcaagtgtgcatggttcaatccctcacatccaggaaatgaattttgcaattgggccagatgctaatttgcacgttgattcaccttctttgcctttaagccttttttttcttttttttttttttggcaaatgaatgtaccatttcaactttgattttaatagtgctagttgatattggtaataatgctaaccaagagatcaatgccagatttttctcttggggtaagttagctgaagtcatttaaagatggaaaggtgggaaaattctttgatatttgatgtcattgtatccacatttgttgtaagacatattgcataccaattataattatatcaattaaagttgataaaagcttcaaaaa

SEQ ID NO: 117213 - DNA, 1000 bp, Homo Sapiens
gctaagattcacatccatagcccccatggctttgaggagaatcctctctgccattcttccaatctccccagtgggttttgctattattttctaaattgggttaagtctaagaaggtgggggtgagcagggggtttatctgtgtgtagtgagtgcttcatgtgtggaatattcattttcttactgcagtgggacttggggttgaagccacccctcctactctgttggcttagccctgagatggtgacaggctggcctgcagtcagcatcattgtgcatgtgacagcatcaatgtgattagtaatttgtctgttcctcccttgaactgtctgtttagtctgaggtttttaaacttgcaggcagctgactgtgatgtccacttgttccctgatttttacacatcatgtcaaagataacagctgttcccacccaccagttcctctaagcacatactctgcttttctgtcaacatcccattttggggaaaggaaaagtcatatttattcctgcaccccagttttttaacttgttctcccagttgtccccctcttctctgggtgtaagaagggaaattggaaaaaaaattatatatatattctccttttaatggtggggggctactggagaggagagacagcaagtccaccctaacttgttacacagcacataccacaggttctggaattctcatcttcgaacctagagaaataggtgctataaacagggaattaagcaaaatgctggatgctatagatcttttaattgtcttaattttttttctattattaaactacaggctgtagatttcttagttctcacagaacttctatcattttaaactgacttgtatatttaaaaaaaaaatcttcagtaggatgttttgtactattgctagaccctcttctgtaatgggtaatgcgtttgattgtttgagattttctgtttttaaaaatgtagcacttgactttttgccaaggaaaaaaataaaaattattccagtgc

SEQ ID NO: 117214 - DNA, 1000 bp, Homo Sapiens
aacagatttccgcacgtcctcgttccacacgctcacgccgatggagccagtggccccccgtccggacacgccgaggctcacggcatctccctggcttctcgtctgaacccgccccagattcatcacttctccagcagtttttatagtgacatgaatggtgtcatgacaattcaagcaaaaccgcttcagcggagacctgcctattttgctgacagaacgcagaatgagaaggaggacaaagcatcgggtggaggggcaggtgctctctcctccgcaccgcacagactgggacgggcctcagacactcatggattatcaccttctgcaaagaaaacaccagtgccctggaggctgccttctcttgcttcagattcacagagactaaaaactcccaacatctatagtgacgaagttcttcggggaacaaaactgccgactggcgtggaccacatggcttccccactggttcaaacgtcacggagcaggttccccccgctagtcacggagaccagggggcagaatacagcagttcctggatgccgccttgtttcttacagaggaaggcatctacaaaaccgtgtgttgagtgccatgcctgacggtacagaacgatcgcgtcttcgagaaagaacagccaccctggaacggttgtcaaggcccagcacaacccacacgttccggcagtcggatacgcctcgaaaaagttcattgacacaaatggaatttgctgctcacacatggacaggtcaaagtattttgacaggttcacaatatgtgcctaaatcttttcagaggacaactttgactttcaagaggagattccaagtgacatcttgaaaccacctcaccagaaccattggagcacctgtggcctcggcacactgcttatcacttgaaaaatggaggaacaagtgttatatttatctgtgtgtctgacagtgtgagatgttagaccgagagaaaagcaaacaaataaatcacttaatcttgaacacttaaa

SEQ ID NO: 117215 - DNA, 1000 bp, Homo Sapiens
gctttgacagttatcccagggagcgtgagaaaatccctgggtctagaatgggaactggagaggaccctgagaggagacgggctgggcggcgacccccacagggctctcgagaacagattctcccctccagtatgggccctggctgtggcccccattcctcaggactgcacagaggaggactggctccggctccgtcgggctcacccttaaccactattcctggctctgcaaaccccagactttgcacacagccccaggctccacacagaaatgtgaacttggcctcagacaggctggcccttcctaggctctaggggctaggggggagtggggagccaagaggtcccatattcctgagtgcaggggtagtccctctcacctgcttcctcagacgactctggaagcttccctctaccaccgggcactgagacgaagctccctgacagccgagactggcagccctccatctggtccgtaccctcgccagaggcccccctacatcaacctcctggcgatgccctggtggagcagatgggtgctctgggagtcctgtgcttcctgatccaatggtgccaaacccttcatctcccccagaagcgcagcatacccctgggacccctcggccactgcccactcggggagccttctctgtttctggggcctcccccaccatagctctgattcccaccccacataggaatagcctgactgagggggaaggggtgggagagaagatacagacatggaggaggggaggctgctctggcaaagtcttcaaggcttttgggggtccaggcctggggtcaagaaggaaaatgtgtgtgagcatgtgtgtgagtgaggcgtgtgtgtgagcgtgtgtgtgagtgaggcgtgtgtgtgtgtctttcctaggacccaccataccctgtgtatgtatgcatgtttttgtaaaaaggaagaaaatggaaaaaaatctgaacaataaatgttttatttgctttaaaaaaaaaaaaaaaaa

SEQ ID NO: 117216 - DNA, 1000 bp, Homo Sapiens
cagatggggccaacaaaccgcctggacttctggagcccacgtccactctggtccgtgtgaagaaaagtgcggccaccctgggcatcgccatcgagggtggcgccaacacccgccagcccctgcctaggattgtcactattcagagaggcggctcagctcacaactgtgggcagctcaaggtgggccacgtgattctggaagtgaatgggctgacgcttcggggcaaggagcaccgggaggccgcccgcattatcgccgaggccttcaagactaaggaccgtgactacattgactttctggtcactgagttcaatgtgatgctctagaggccaaggcctgagggcctcccaccactgcccagcccctggtcccagtccctttccaccgttggcttcatcaagctccttgcggggttggggctgcatggccagggtggcaggaagacatcccccctccatcccagcccactggaccagaactgggagaggaagagagcaggacaaggcagacagaaggtcaggtcaggaactggtgctgtactgggtacacagtaggcgcccaggacaagtgggttgcaagacaggaagaaaggaaaaggaagggcagagtgctggtttctccaggttgggttgggggcactgctgtcccccctccagctaggacccagcccatccccagatgcctgagcctttgtccaaagtgaggtcactcgagaattcatggacacggcccccagtcagggggcatcttgcaagacctttagtgccacaaataagcatcgagcacctccccattcacacccccattcctcctggctccttatcccccatggtgtttattatttatttccctccccatgcccctggggaccccaaggccccagcttccctctgcacccccagcctatcccagaggccttgcaggtgaccagcagtgtcattgtatttatatacagagcttatgactttaatttttcaataaagaaatctgaacaaggtta

SEQ ID NO: 117217 - DNA, 1000 bp, Homo Sapiens
gatgtgatagaactgaagtatctaggaattctgcctttgtcatttgttttaatttgtgtgccctgttcattttttttgtctttcccaaatcttggtagtctccttatagttgaagataaaatgttgagtgcacttattttagaatatcctagacataactgtctaagtaaaagcgctctattaatctaaaacactacaagagaatttaacaccatctctcaaatgcttttttggagagcttaatgggattctgaatatttgcaatgtggagtttccgccccgatctcacgtcagtgagggtctcctgtctctcaagtgtgtttcctttggctgttccctaatacaaaacacggacatatttttactcgtagcactcaatttagtaacttctagatgctaccgttgacctgagttaaattcatttagtcgtgtacgtaaaaactctccttttagtgtgttattttcttggccttcccttttaaaggttaaagtttctaacctaagaattaagtacgcgttcaggaagctgttgtctaggccttccccttgtgaatctgggttcattccaatacggcaagtaagagttggaaactttgagaacacagactataaaggcagcagcccgaacactgtcagactctaattggcgaccctgggaaacagttgccctgctattctttaaagaaagacgtttattctgatgataaaaacagttagccagactgtttttaaagcacctggcgggaagcagaaggttggatccaagcccttgttcagatttggtgcctgataagacaggggtttctctttttgtgacctttattattattattttgttaactgttgtaaccagttagctgttgtgttttaagatagaaaggaacaagactaaaattgtaaatactttgtaaacatcagcatttgtacttgaatagtaggattttaaagggcattgatagcataccaaacaaaaggcaaaataaagtgacctttttatata

SEQ ID NO: 117218 - DNA, 1000 bp, Homo Sapiens
gaaaaggaagcaatgcagacacgagaaggagggctcagccttgctgagacactttcttttgtgtttacatcatgccaggggcttcattcagggtgtctgtgctctgactgcaatttttcttcttttgcaaatgccactcgactgccttcataagcgtccataggatatctgaggaacattcatcaaaaataagccatagacatgaacaacacctcactaccccattgaagacgcatcacctagttaacctgctgcagtttttacatgatagactttgttccagattgacaagtcatctttcagttatttcctctgtcacttcaaaactccagcttgcccaataaggatttagaaccagagtgactgatatatatatatatattttaattcagagttacatacatacagctaccattttatatgaaaaaagaaaaacatttcttcctggaactcactttttatataatgttttatatatatattttttcctttcaaatcagacgatgagactagaaggagaaatactttctgtcttattaaaattaataaattattggtctttacaagacttggatacattacagcagacatggaaatataattttaaaaaatttctctccaacctccttcaaattcagtcaccactgttatattaccttctccaggaaccctccagtggggaaggctgcgatattagatttccttgtatgcaaagtttttgttgaaagctgtgctcagaggaggtgagaggagaggaaggagaaaactgcatcataactttacagaattgaatctagagtcttccccgaaaagcccagaaacttctctgcagtatctggcttgtccatctggtctaaggtggctgcttcttccccagccatgagtcagtttgtgcccatgaataatacacgacctgttatttccatgactgctttactgtatttttaaggtcaatatactgtacatttgataataaaataatattctcccaaaaaaaaaa

SEQ ID NO: 117219 - DNA, 1000 bp, Homo Sapiens
acgcagagactgagaaattctggatgttttaccgttttgatgccatcagaaccttcgggttcctgtcacgactgaagttggcacagactgccctgacagtggtagctttgccaccaggctattacttgtactcccagggcctcctcactctcaacaccgtgtgcctcatgagtgggatatcgggctttgccctgaccatgctgtgctggatgagctatttcttacggagactggttggtatcctgtatctgaatgagtctggcaccatgctgcgggtggcccatctgaacttctggggctggcggcaggacacatactgtcccatggcagatgtgattcccctgacagaaaccaaggaccggcctcaggagatgtttgtgcgtatccagcggtacagtgggaaacagaccttctacgtcaccctgcgctatggacgcatcctggacagagagcgtttcacacaggtgtttggggtacatcagatgctcaagtgaacaactgggacctggacctctgggtaaccctgggtcgcctggattaacaggaaggctgagggtgtgggcaaggctgaagaaaggggactgggtacttggagactttgcctgggcccctgggaacatgtgttttgtggtgaataaattcacaaggcaagagctggtgtacaggtttaggaaaaaggctctaagcaagttcttacagcacttgtttgtgacattcagtcagataatggccagaagtttttgttaagagccagttcttagaagaacctatgccaaggtcacccatagagtccattggtgtgaaagagaaaggcaaagaggtgtggcgggggagcataagatttggagtcagaagtctcagttctgtcatttgtcctggagcaggttattgagtctctttgaatcttggttttcacatctgtaaaatggaaagtcctgcttgtttcatgggatgggtgtgggaataaacaataaatgtcaaaaaaaaaaaaaaaaaaaac

SEQ ID NO: 117220 - DNA, 1000 bp, Homo Sapiens
tgcttctggaggctctgatgaacaagtgatggtttggaagagtaactttgatattgttgatcatggagaagtcacgaaagtgccgaggcccccagccacactggccagctccatggggaatctgccagaagtggacttccctgtccccccaggcagaggcaggagtgtggagtctgtgcagagccagccccaggagcccgtgagtgtgccccagacactgactagcacgctggagcacattgtgggccagctggatgtcctcactcagacagtctccattctggagcagcggttgacactgacagaagacaagctgaagcagtgtctggagaaccagcagctaatcatgcagagagcaacaccatgatcaggggagcaggaatcaggagctcggtggatttgcaggtggcaggccagggatttgtaccatgggacttgggtaaataaaggggactgaactctgtgggaatcacatccatactggagccctggatttttgcagttctgccctccaccttgctatctgcaccaggaggctctccacctggcagccagaggtccccagtgggccgggctcacacacaaatgatgcttcagacccgaatgagaggaccacattttgcttaatgtaaaggagccacttgaaaatgtctgctccttcggggtcctgagattgtggctccccctctggaggaggtggctccacgatgccttgattttcactcatcatttggacatgtgactggcttttcctacctctgccatggtgtagaaattgattgcacattgattggatgagccgggggttttctctaaatctgactaaaggcccaaagtgggcccgtctgagtcaggtttgttgagaacaagccctctcaagtgggtggtggcttttcagtggccctgatttctgttccacacgtgttcactggagccaggtgacttcctccttgcgtgagtgagggcacaggaatctcaaaattaaacctgacttcattgc

SEQ ID NO: 117221 - DNA, 1000 bp, Homo Sapiens
ccctattcatggtattttaagagatcatttgtatattatttatcacactgttgtaatgatgttttgagatacttttataacaaaattaacatcaaaaaggtatatactttttaaaaaaaatttacttttattgatgtgtactcttcctattgatgagttaattccataaatctctacttagtttaacttattggatcaaattatcttcagcatgtatatctggggaaaaaaggtccgaattttcacatttatatttaaacttcaattttttatatttaaacttcaattttttagcaacagctgaatagctttgcggaggagtttaatagttacacattcatgctaatatacatttcctttaaacatccacaaattcttaaaaagattgaatcagtaaatttcatttcagctaaaaatggagtctaatatattgtttcaaaagatacatttttacccaccataaatgttacaatatctgaatatgctttgtcaaactatccctttatgcaatcgtcttcatattgtttttatgattctaatcaagctgtatgtagagactgaatgtgaagtcaagtctgagcacaaaaagataatgcacaatgagattgcctaccattttataggatatttactatgtatttatacgttaagacctctatgaatgaatgtatcagagaatgtctttgtaactaactgtttaattcaatctgtaataaaaatctaactaactaactcatttatttctattaaaaaggtattgtcctttaggcggggaatgggaatccttgctgcactgttgcagtcattctgaaaggacctttccctgtacttacctttcaacatgcttcaatcttatcaacgctacattttgtatttttcaaacaggtataaattctgcaataaagagatgtagtttttttttaaaaaaaaaaaaaaaaaaaaaaaaaaaaaaaaaaaaaaaaaaaaaaaaaaaaaaaaaaaaaaaaaaaaaaaaaaaaaa

SEQ ID NO: 117222 - DNA, 1000 bp, Homo Sapiens
gttcccctttctttccagagatattttttccagaaactacagtctaccagcatcaagcttgctctgtcaccatcgccccggaatcctgcagagcccattgctgtccagaataaccagcagctggcgctaaaggtagagggagtggttcagcacggatctaaaccaggactcttccgcaaaattcagtctgtctgtctgaatgtttcttccacactgcagagtaaatctggacaagactacaagatacccattgacaacatgaccaatgagatggagcaaagggttgaacctcataatgattacttcagtactcaatttctgttgaactttgctatccttggaacacacaacattacagtggaatcttctgtgaaagatgccaatggtatagtatggaagactggtcccagaactaccatatttgtaaaatccctggaagacccttattcccagcaaattcgcttacaacagcagcaagcccagcagccattacagcagcagcagcaacgcaatgcctacacacggttttaaccatggaatgaatgcactgcagactctcaagagatcaatcaaattgccagaaacagtttggtttttcatatggaataagtattaaagttacagtgtagttcatttattcattgatttttgtaatgtaatattctggaaaaaattttgttttcttaaaaattttgtctgacagctgggcgtggttgctcacgcctgtaatcccagcactttgggaggctgaggtgggcggctcacgaggagatcaagaccatcctggctaacacagtgaaaccccgtctccactaaaaaatacaaaaaaattagccaagcatggtggcaggcgcctgtagtcccagctacttgggaggctgaggcaggagaatggtgtgaacctgggaggcggagcttgcagtgagccgagactgtgctccagcctgggcgacagagcgagactccgtctcaaaaaaataaataaatacattttgtctgg

SEQ ID NO: 117223 - DNA, 1000 bp, Homo Sapiens
cttaagagactgattttttgtttcatctgcatttggtcttctctgttttgactctttcactgcagtaacctggctgtggctgctcaggttcccctcctcatgccccttggtacccttccctgtctgctctcccatgccatgtacacacccacaacccgtccttccacttggaatatttttaccacctatcctgatctttgaaggtagggttaggactacttaacctctattcccactcccctgcaaactgggggttgtgggaagtgagcagccatctccctgtgtgattttttttttttttccctctgattcactttgccatgtttccttcacatccagatccctgtcggtgttagttccactcttggtctttcacgctccccttgcctgtggaacattgtctggtcctagctgtggttcccattgttcccccttcacccttctctgttaaccttgtgcctgtctcctgtatgatcacatcaccaaaaagggggaggggggagaagactctttttttttggccattttgtaatcgtataaaaatagtagacaactgcttaatggttggggttttttcacaattttcaacattagtgatttttttttctgtttgcaagttaaagggtttgtcattgtttctttaaaaaaaaatacaataatgcaccatatccctatgcataaagtgcttcttctatttataaggttgaaaattctgaataacccttttagcattgaaaaaaaaaacaaaaacaaaaaatggaaaaaaaaaaccttgtattttgtaaatattttcttttcctgctttggagctgtgtaatggcagcgaaacatgtagctgtctttgttctatagaaatgcttttcttcagagaagctgatctttgttaatgtcttgattctgttcgcaaagcacagactagtgcttaaaaaaaaaaaagaaggaaaaattgaaaaaaataaaaaaaaaagttacagaaagaaaaaaaaaaaaaaaaaaaaaa

SEQ ID NO: 117224 - DNA, 1000 bp, Homo Sapiens
tgtggctgcagggcgagccgctgcatttctgctgcctagacttcagcctggaggagctgcagggcgagccgggctggcggctgaaccgtaagcccattgagtccacgctggtggcctgcttcatgaccctggtcatcgtggtgtggagcgtggccgccctcatctggccggtgcccatcatcgccggcttcctgcccaacggcatggaacagcgccggaccaccgccagcaccaccgcagccacccccgccgcagtgcccgcagggaccaccgcagccgccgccgccgccgccgctgccgccgccgccgcggccgtcacttcgggggtggcgaccaagtgacccgctccgctcctccctgtgtccgtcctgtgtccgcgcgcgcgggtgcctttcccgccggggactcggccggtgtgcttcgtgctgtagttatcgttagttcctcttcccgagatggggccgccgagagaccccagcgcctttgaaaagcaaggtttgtgctgcgcttccagttccgaaaagcagatgtttaagcccttggactgagggtgggatcgcagctccgaagacggagaggagggaaatggggccctttcccctctattgcatccccctgcccgactccttccccgcacccacgtgccctagattcatggcagaaaatgaccaaatcctgtgtatttgttttatatatttaataactgttttaaatgaaagttttagtaaaaaaaatacaaaacaaaaagattaaattgctattgctgtagtaagagaagctctttgtatctgaacatagttgtatttgaaatttgtggttttttaatttatttaaaattggggggagggcatgggaaggatttaacaccgatatattgttaccgctgaaaatgaactttatgaaccttttccaagttgatctatccagtgacgtggcctggtgggcgtttcttcttgtacttatgtggttttttggcttttaatacagacattttcctcca

SEQ ID NO: 117225 - DNA, 1000 bp, Homo Sapiens
agggaaatgtaaaataaatctgtttatggatattgagtgcatcttgtatgtgcctaatattgataggatgagatgtctgaacaaatttttataatattgctgtgaaggagcttgctattgaaccacagaaatcccttaatattcaggttttaaaactggcaaattctcacaggacctcaggcacagattattgaggttgggagagagtgagtagatgtagaaaaggagaaaaacaacacacgccctgttctctacagtacaactgtgtgcaattaagcaatggtacttgatgtaggctctaacactcatcaataaataagtgttgtaaaataatttataacaggtaatcgatagtgtgtaatgaatggactattaataattgattatctagaaacgaactgctttcgtgggcttttaatattttaatgtgaagcatatgcagtgtgctttctgcatttatttttctaccaaataatacagataatgagaaattggtgaaaatgcctacgcaaagtgttgacagtgtgaaagcagtgcgagtgcggccttttagtcaggttagtgatggatgttacgctgccttgttgaaaatttcactgactttgattttattacttttttaatgatagttatcaaacttgtatttaagctgcttgtcatttatggaatattgaacttatttaaatgaacttgttaaatgaataaagagctaaacataattcagtaaacaattcctttgcgcaagtagcacaataaacatggatgcaacgtatgtcaagttaatacttttttaaaccaacgcaatttggtgaatatagatgtgtggtacctgtttttaataagtgtactttttttcccccctccgtgaatgtagatcataagcaaacaaattgcctgttctaaatgaactttacatatattttaaatgaatgtatgtacttacgtataaatgtctttatatagcttgaataaaaacactgctcattaaaaaaaaaaaaaa

SEQ ID NO: 117226 - DNA, 1000 bp, Homo Sapiens
aactgcagccatcattcattaagttttgggtagtgctctaatggtttgttcactttaataaagacagattttggtaaagtagaatatttttcattctgagcatgtttgtcccaaaaggtgatgcacttaagctgacagtcccttcagtggttttgttaggtcacggcttgtcctgtctggattctgcatctggaagcgctgcatgctctcagaggagcgtgccgtttcccctgtagatggatacttttgttttgttgcctatttaaaaacaattaagtggttatttgcagttatttcagaactccaagtaagtggatggctttgggttctttctgccttggtcccaatggtgttgatgcttctgtggagcgcggacattcccaggagcaggtgcgtgccagccatggctgccagacactgctgcaactgaccagctgccggaagattctggagccactaacattagttttgcacatattttcttgggagtgttacttgaatctatctcaaactgcagaaaaaatcaaaagatcaataattgggagaaaaagagacaaatttaactgttacataattttagatagacaaaaaacatgagtgagtcgtgtacataaggagggaacatggtacagaaggctagaaggaattataggtcttattcccctttcctcagtcctttgaagagaagtacagtctcttgcgattttgtatatatcgtgttcgacacagccgctctctgtcctgtaaatagggaactaaaggctgtatgatttctcaagtgctgagttacacagtcctgagtgagctttctgttaccatactttcacacgtgggctttatttctcactgtatgtttgatatgatattactgtatttattttaagaaagcactaagatgtaataaagtgatgaactaatttgctttaaaaaaaaaaaaaaaaaaaaaaaaaaaaaaaaaaaaaaaaaaaaaaaaaaaaaaaaaaaaaaaaaaaaaaaaaaa

SEQ ID NO: 117227 - DNA, 858 bp, Homo Sapiens; identical to SEQ ID NO: 30145

SEQ ID NO: 117228 - DNA, 1000 bp, Homo Sapiens
gttagcataaaagaacttggagaggaaaaaagtattaacaaaactgcagtctgcactctttaaacctgtttaaggctcttcatcctggttagcaaaaggtgtgaatgtaatgtgatggaatttaaaagttttatgagaccaggcacagtggctcacgactgtaattccagcagtttaggaagccgaagtgtgcagatcacctgaggtccggagaccagcctggccaacatggtgaaaccctgtctctactagaaatacaaaaattagccaggtgtggtggcgggcgcctgtaatcccaactactcaggaggctgaggctagagaatcacttgaacccagcaggcggaggttgcggtgagtcgagatcacgccattgcactccagcctgtgcgacaagagcgaaactctgtctcaaaaagattttataagaaagcagagcttttccttgaagctcttttgaagtggtagcttaattagtattttgttgaaaatactttaaagatgcctagtgaaaagcctactaaagtgctgtgagattggggtttagaacattttattttcaggctttatggcctattttccattgtgtcaagtgcaaaactaccctggcccaaaggaagggcagagaacataattacatcttaggccacatttcattctttgcagctttgctaatccagttgctcaagttctttacctcaacctgaaggaatgaagcattattacattttgtgaatggtgttcagcctataagacgaagtctcacaagacctataggaaagtttaccatctgcctaaatattaaaatatccatctgttattcacattaatacacagaatgaaaatagaggtctaggaattatcaaaggtactgcaaaaatactgtatagaacttatttgtaaatagcacatacattgatagatggggtgtgggaccaacaaaccaaattaaaagaaattgtttttctttcagtacactaaggtgtgtgttttcaaaacc

SEQ ID NO: 117229 - DNA, 1000 bp, Homo Sapiens
ttagagtttcactttgtactatttaaatttatggaactagtttccatactgacttgtaaggttttggggtcatatataaggactaaagccaagctaggcaaaacaatgacagcaccgttttttcagtgaagctctcagaatgtccagtacagatgttgcagataattccaagaactccttcagcaggtgttcttcaccattcgtaaacagtattttaagatgttcactttgctcttctttttggttacatacattttaataactggtatgttgaagtagtgtctaaaagtatctagtctttattcacagtacattatattgtgtgatgcactggactaactcttgtttaccattcatgtaacaaaacccagcacattatctgcactataagctcaaagaatgtcacatccgcccagacagctctttgatgagggtgatgggaactgaataaaccatacggactggcagtaacaagggcttttactgttctgttcagtggaaccttcttggtcaaattgtaattagctagcattatatttatatacagggtcttttttctttaccgatgtattttcctactcatagccaaccaataaattcagtatctgtttcaaatattttagaagtgtagtttgtatagctgtagtactgaggtttgaggaaaaataaatgttgatcagcagaccacgtatttaaaattctgaatcttctgggacagggttgtaactcagccttccaaagggaagagtgcagggggacggggccatgatatggggaaatggtgtaaactaatgtatttctttattggctgttattctgtataacactcatatctttgccaaagttcaattttatatttaggcaactgatggtccttttgcatttaggattttcgttgttgttaccttatacctcatgatataaggaatgggctcatgtgtcttccgtcttttggaaggaggttgacatattttaaataaatgcttttaaatacagtaaa

SEQ ID NO: 117230 - DNA, 1000 bp, Homo Sapiens
gttgttacaactctgtctacagcagttccctgacattcctgaatcagtcacctgtgcttgcttaaaaattttcttgagcattggtgatgacagtcttcaagaaacagatgttaatatggagtcagtttttgactatagtataaattctgtacatgatgagaaaatggaagagcaaactgaaattcttcaaaatggcttcaatcctgaagaagataaatgcaataactgtgatcaagagttaaataaaaagccccaggacgaaacaaaggagagcacttcatgccctgtggtacaaaaaagagcagctctacttaatgcaattcttcattcagcatatagcgagacatttcttctgcctcatttgaaagacatcccagcacagcatatcacgctgtttcttaagtatttgtatttcctgtacctgaagtgtagcgaaaatgctactatgactcttcctggaatacacccacctaccttgaaccagattatggattggatatgtctacttctggatgcgaattttactgttgttgtaatgatgccagaagcaaagaggctactgataaatctttacaagcttgtaaaatctcagatatctgtttattctgagctcaacaagattgaagtaagttttcgggagctacagaaattaaatcaagaaaagaataatagaggattatattcaattgaagtgctggagctcttctgatattatcaattctccttcatagacattttataaagctcttttatgtgaactcttgcttcatccaggcaagaacggtgttttgtttgcgaccatctcagtgtcaagagaaacgtgtcagtgagtacctggaccatcacttaactgatgctccggggtaggactgcaggtttcacatgaacctgttctaggctgtggacattggtgtggagaggttctgcaattttttaaaaatatgtaactgggttgattttaagtaaaattatttgtgtattgataaaagtctaatttctt

SEQ ID NO: 117231 - DNA, 1000 bp, Homo Sapiens
caagcgggatcactgccagtggggaagccccttctctgtcattgagtatgaatgcaagcccaacgagacacgcagtctgatgtgggtgaacaaggagtccttcctctgaaagtggctctttctgatgctactggacaatcttttcagaaatctacttttagataaaccagcgcaggccttaaacaaggcatgccacaccattgctgttccccatctggtactaatgacctactagccctggttattttgaaagtgtaattcccctctgacacaatatccctcacatacaagatggtgatgtaccactcccgagaatattcccatctgtattttgtgctgatgttcctgcatccagttgttctcggtcatacttttgaccacttgtgactggagttcagtggccctggcaggcttgtcctgctcttgaccattccactgactaactttggtgttttgtttccaagttaagtgattcctccttttttttgttcaatgttaaatttaaaaataacaatgtgtatgggtcctcccatgtgtaatatggtaacatgtaacttgcagtgtttgccagctttcaaagcaggctttgtgaaaatgtaatacaaacagcagtgaatgggactcaaatgttgtgcttcctataaacagctccgctctttcagggaaggatggtaacaaactagaaggacaaatatgtacgtatttataacgtattaaaactcttttaagtagcttaaggtattgtgcaatggcctagcctagtagaaatgggggaaaagcattgctgtggaccattgttaaagtgacaggagttgtagggttacccctttgacaagcttccatagtcttcagacacgcacattgatggcatccctacagtcttcttcacttgaactttgtaaaactgcatatggacctgtaatcaacttttgatatttcttaataaaggcgttgaaaatcaaaaaaaaaaaaaaaaaaaaaaaaaaaaaaaaaaaaaaaa

SEQ ID NO: 117232 - DNA, 1000 bp, Homo Sapiens
agtacggagcactcaacagagttcatgttctttggtggaatgagagtgcagatagtcgtgcagctgggagacataagtcccatgaggatcccagagttgtggcagctgttcgggaaagtgtcaactacctagtatctcagcagaatatgcttctgattcctacatcgttttcaccactgaaatagttttctactgaaatacaaaacatttcattaactgctataggatctgtctgctaatggtgcttaaattctcccaagaggttctcacttttatttgaaggaggtgttaagttaatttgctatgtttcttgcattatgaaggctacatctgtgctttgtaagtaccacttcaaaaaatagttctgtttactttctgcatggtatttcagtgtctgtcatacattaaaaatacttgtcactgttttaagatcttgactcttcatttgtttcagaatagctcttctactgtattctgacaactctttgctttatagcattttgttgtattcaaatgataatggtagcatttccatgcttgtgacagcatttttaagttattaatatattttatcaacctttccatcatgtctgttttcctggttttttttggttgttttttgaccagtaaaatttattttgtaataccaaataggatttaagaaaattaacgtatttctttactatggaaaaccacattgtcatttgtgacatcatctatattaaatatggttttcacattagttatttgtcacttacttggaaaatgatgctgttaggtcctggtattaaaaatctagaaaagacttgttggtttatgtgctgaaatgtctttatttataattaattttaactactatttacttcatttcggatcctgtttaacaaagatacttgagacatccatttgttttaatgaaatctgtatggatatggaaatgcttgccctaataaaagcctacatatacctccaaaaaaaaaaaaaaaaaaaaaaaaaaaaa

SEQ ID NO: 117233 - DNA, 1000 bp, Homo Sapiens
tcccaggataaacactgctgggcaggcgggcaggcaggcctggggctgccctgctcactctcattgtctggcctcaggacttagccatactagaccagtcagcttgcctggaagagggaggtcccactatgcctttgggagacacctatacttaggaaaaagcctttgttgtcctcccatccatccattaagctgctatctcagcctgtcccttctgccccaggggcttgcctggcttggctgcagtgcactttgaaatgaagtatctgtcctttggcccagcccctggtttgcttgtagaaaacatggtaggcttccccaaggcatctgcagggaactttggcagcttggggcaccctgaattagcaaaaatggggggtgatgaggtgctgaagaaggatacttaacagcttagtgaggaggcaagagctcctctgggaccaccacttcttcaggagagggcctgtgggcttgcttttggaaggcctcaggcagacacgtgccctctgggtgatgtctgtctgctgccaggatggagcagaggagcgccacacatggaggaaagcccctgtaacgttacctaccttaaactccactcatcaaatctgagaaaagtatccactggtccccagggtttcagtcatgcttttgggggtcattgggtattagagaagtaagtatcttttctgagagagggggagtcaccccccctactggggattcctctgggctttattcactcccagccctggccctgacctttgtgggcctccctaatgcccagggcatggatggcttcagaggagtttttgaatcgaagcccagggtccttgttgatgtttcttctccgagccacacttggaggaaagttgcaggtgggttgggcagggagcaggcatggttctgctttgctgtttgtcttcctagttaaggctctttataaagagcttcttcttcatgttttaagcactttatgaagaataaaacattcatgtactgc

SEQ ID NO: 117234 - DNA, 1000 bp, Homo Sapiens
tccataatatgaaatagattattcaataattgagaaactttatgtgtaatcatgagagtataagaatctggattatctaacattgttagccctgtgtatgtacagttcaaaaagttcatttataaaagtagtttcctgttcctagtgtgatgtatcacaaattgtgctgaggttattttagtatgtgtgtttcattcccgtgcttctgttctgaagtcctggaatacagttttcagtgtaattaattcaactgcacttaacactaatgtccgtgttggtatagaaatgtctaaatcctatactctagttgaggaagatcttccataattttatggtattacacagggaaagctatgactgcaggatcagtctaactatactattaggtgcatgtattctcttttcactaacttatacttgtctatctagaatacaggtcttccagtcagctggtcatttaccaggtgtggacttaagttgctgggcttgcagtaagaattgccagccactcattgtgcgggtctgcgtggagctttaatcagaaaaagcctccactttctgtattatgttaacattggctcatgcatataactatctgctgctgatgtagttctccatcttcaagatttagagtgggttaaccaggtcattacatcttaatttaataacaagcattactgtagagtgattgtgtatagatctgttagctgtcagggtgtgttttttttaacctgttgtgtgcgtgtgggggttaggattagtaaggtgaactgttcaggaattctctgcactagctgtgcagaagagcagataactagcgctgctctggcattaatcccaggaaccactagcagtagtggggcgccgccaatctaacatgagcacaggtgcttcatgacaaacattactagcatgttcaactgcaccatgttctggcactgtattttgaatgacattaatttattaaataaattgtatatattcaaaaaaaaaaaaaaaa

SEQ ID NO: 117235 - DNA, 1000 bp, Homo Sapiens
gatgggagaggaaaaagaagaggaaaaaccctgatctgggattttcagattatgctgctgcccagttacgccagtatcatcggttgaccaagcagatcaaacctgacatggaaacatatgagagactgagagaaaaacatggagaagagtttttcccaacatccaatagtcttcttcatggaacacatgtgccttccacagaggaaattgacaggatggtcatagatctggaaaaacagattgaaaaacgagacaaatatagccggagacgtccttataatgatgatgcagatatcgactacattaatgaaaggaatgccaaattcaacaagaaagctgaaagattctatgggaaatacacagctgaaattaaacagaatttggaaagaggaacagctgtctaatcccttcaagaactgtttatagaagcttgagaatggggtaaaaatttctgctagcaaaatcaagttctttttgaaattttatcagtaatccagaatttagtagtccatgccttctcactcagcatttagaaataaaaatgtggtttcttaaacgtatatcctttcatgtatatttccacatttttgtgcttggatataagatgtatttcttgtagtgaagttgttttgtaatctactttgtatacattctaattatattatttttctatgtattttaaatgtatatggctgtttaatctttgaagcattttgggcttaagattgccagcagcacacatcagatgcagtcattgttgctatcagtgtggaatttgatagagtctagactcgggccacttggagttgtgtactccaaagctaaggacagtgatgaggaagatggcagtggccaccggaggactggagcagtccctcctcatggcggcctgtgaccaaggtcggggaggagtggagctatccttccatgatctgatcatgtacagttccctttttaaaaagcaataaatgcttgggattagaatttctaaaaaaaaaaa

SEQ ID NO: 117236 - DNA, 1000 bp, Homo Sapiens
ttaaagagacagggctttgctgaaaaccaaacatgggccagctgggctttttaacaacctagagactttccggagctgcctggaacagagcctgcgggaaacggggcttgccagagacactcacagtttccttcatggcctgttttggtcccctaagaatctccacatcattgtctttcttgtgccttttccttggtgagcaacagaaagggaagggttccaagcctctaaaaatgtgctttgtgatcaggagtgcgctccaaaccaaatacgcgcgctgccctttcgaggccagtgagctcagcctccaaggctttaaagccacatttcagcaagagaaagcgctgagagctcgcaggttcattaaagaaggcaaagcactggtttctctccttagaaaagtaggtttcttggcttgatgtagactggcttgctttgatttttagtgaagggaatgtacgtaaaacaaaatagggcttggctggtcaaaggagacaagcaggatggatggatggatggatggatggatggatggatggatggatggatgaatagatagatggtgtttgcatgtaaattgcagagaaaacaaaaccaaagctgattggaaacaattaattgtgggtgtctgagggggaaggtcgcagctttgggcagctttgagaagcggtacaagagttctgtgcctgtgtgtccagccctggagccagccagtgcatttattttaagctcttagaagcaactccttggcccaggaatgcgtgacccctgagatgggtccacgcatctctctacacttccttctctccgtgggatactggactcgtgcctctgcgcccattctcttctcacgcatatccatgagctttaatttcactttctgatcacggtacgtccataaagccagtattacacttaaatgaagtattcttttttgtaatcgttttttttagaaggtaaacaaatttaataaagctaccaataatgttgaaaaaaaaaa

SEQ ID NO: 117237 - DNA, 1000 bp, Homo Sapiens
gggaagcacaagcatgagacctttataacgtcaagtggaaaatctgaatacattgaacctgccaaaagagctcatgttgtgccaccaccaagaggaaggggcaggggaggatttggacagggtatacgacctcatgatatttttcgtcagagaaaacagaacacaagtagaccaccatctatgcatgtggatgactttgttgctgctgaaagtaaagaagtggttcctcaagatggaatacctccaccaaaacggccactcaaagtatcacagaagatttcttcccgtggtgggttttcaggcaatagaggaggacggggtgctttccacagtcagaataggtttttcacaccacctgcttcaaaaggaaactacagtcgtcgggaaggaacaagaggctccagttggagtgctcagaatactcctcgaggaaattacaatgaaagtcgtggaggccagagcaattttaacagaggccctcttccaccattacgaccccttagttctacaggttaccgcccaagtcctcgggaccgtgcttctagaggtcgtgggggacttggaccttcctgggctagtgcaaatagcggcagtggaggctcaagaggaaagtttgttagtggaggcagtggtagaggtcgtcatgtacgctcctttacacgataaaaatccttttgggaacatcttaactgtatatgaacatttcacgaggacaataaaaataagacattgaaggaccaatttagacttagcagttatctggagacatctgagagaatatttttatctgaagaaagcagaatttgtttgatacctaacaagatttcaataaaaatccaaactttgtatgtacgtttgtatatattttcccttttttgtatgactatttatttagaaaatttctaggtgaaaaactaaatgatgttttgtatttttcttgcctatagcacagatattctcaaactttctcagctcatgacactatttagtgcctcagtac

SEQ ID NO: 117238 - DNA, 1000 bp, Homo Sapiens
ctgaaaacaagttcataagatgagaaaaatctacgagcttcttatttacaacactgctgccccctttcctcccagactctgacatggatgttcatgcaacttaagtgtgttgttcctgaactttctgtaatgtttcattttttaaatctgacaaactaaaaagtttaacgtcttctaaaagattgtcatcaacaccataatatgtaatctccaggagcaactgcctgtaatttttatttatttagggagttacataggtgatgggggaaattgttaactacctttcattttcctgggaagtcaaggttacatcttgcagaggttgttttgagaaaaaagggcccttctgagttaaggagccatagttctatcaatgatcaaaagaaaaaaaaaaaaaagagaaactgttgcagtatgattcagatcatttaaaaaagcaaaatcaagtgcaattttgtttacaaatggtgtatattaaagatttttctatttcagatgtactttaaagagaaatattagcttaactcttttgacatctgctattgtgacacatcccattgctggcaatgtggtgcacactccgaaacttttaactactgttttgtaagcctccaagggtggcattgcagggtccttaggcaatgttttgtttgcctttatgcagagaggtgctccaagtgctgtgattgagcaccgtgctagaggaactgtaatgcttcagaagttgtagcttatacaaaggaaacaggtcctgctggcttaatttaaacagttattgcatgaagtagcgtggaggccctggactgctgctcgttctttaggatggactgttctggtatctggtattggtttagagactgttaataagggacatcacaaggtgatgggattcatttgaagcactctatttctgttttaatgttttatccaattttgccttcccaagatttttgttctacataaaaagttcatgccactttttaatataaaaaaatttaac

SEQ ID NO: 117239 - DNA, 1000 bp, Homo Sapiens
tgtttgttgagtttgaattgtgtaacatctttgatcagtgggtgtatctgtaatgaaggaggttcaagaggctgtgctttccaagtgatagtctataggagtgtttaatttcttgcagctccatctggttgctgcatttgaagcatggcattaatttgtatttgccctgttctttgacctaaagttgaagggtttagagtttttaacctgatctgtagagcagagaggttgaaagcacttaactcttgtttagtatcctcattgccttgctgcctgggtatctggcccctttccataaacatttcttttcagttcatgtagttctttaatagaaagctgctattatgtatattgtcatttgtgaaggaagttggagagtcacagctttactgtgacaggttttgcccaaggctttgatacctgtcacccagggtatcttaaaagcaagttgttctcccactactttcctttccctctgccctgccattcctattacaatgctgtgaaaaaagttctgcttcttaggtgaatgggtactttctattttgtttctaaacgagcaattttgaggatgaaatgggaagatatcattgcttcctttttgcacctattgggtatgtacactctggccgaagggagtccttatgtttagtttcaaaatatattactttcctggattctcttcttcactttttctgactttgggtccattttcttttcattgcctccttttccaggcagctctattcttgcagagccatagcaggacatgttaaaattccaatagaaaacactaaaaggaaagtctgtggaatcactagtgactaaatactgggaacctattttctcaatcttcctccatgttgtgttctttgtattcttgagatgataatatattatgtatttgaattcctgaaaaatggaaaatgtttaagatatatgtatataaagtgtatgctgtattggtgcaataatggtaattaaaaatatgaaaaaagtg

SEQ ID NO: 117240 - DNA, 1000 bp, Homo Sapiens
cctgcatgacaatgccaacatcacctttgcccagaacgagacgttcgccctcctgggcaccatcatccagctgcaacccaaatcatcttctgcaggcagccagggccgggaggagatagtggaggacgtcacccaaaacattctgctcaaggtgcctgagcctatcaacttgcaatgggtgatggccaagtacccagtgctgtatgaggaatcaatgaacacagtactagtacaagaggtcattaggtacaatcggctgctgcaggtgatcacacagacactgcaagacctactcaaggcactcaaggggctggtagtgatgtcctctcagctggagctgatggctgccagcctgtacaacaatactgtgcctgagctctggagtgccaaggcctacccatcgctcaagcctctgtcatcatgggtcatggacctgctgcaacgcctggactttctgcaggcctggatccaagatggcatcccagctgtcttctggatcagtggattcttcttcccccaggctttcttaacaggcactctgcagaattttgcccgcaaatttgtcatctccattgacaccatctcctttgatttcaaggtgatgtttgaggcaccatcagagttaacacaaagaccccaagtagggtgctatatccatggattattcctggaaggtgcccgctgggatccagaggccttccagctggctgagtctcagcccaaggagctgtacacagagatggccgttatctggctcttgccaacacccaaccgcaaggcccaggaccaggacttttacctgtgccccatctacaagacactgactcgtgctggaacactatcaaccacaggacactctaccaactatgtcattgctgtggagatccccacccatcagccccagcgacactggataaagcgtggtgtggccctcatctgtgccctggactactagactcagacagaagggctggggccattaaagctgaattttctaagc

SEQ ID NO: 117241 - DNA, 1000 bp, Homo Sapiens
tgcatcacctcaagtgtgtagacattgatgagtgtggcacagagggagccaactgtggagctgaccaattctgcgtgaacactgagggctcctatgagtgccgagactgtgccaaggcctgcctaggctgcatgggggcagggccaggtcgctgtaagaagtgtagccctggctatcagcaggtgggctccaagtgtctcgatgtggatgagtgtgagacagaggtgtgtccgggagagaacaagcagtgtgaaaacaccgagggcggttatcgctgcatctgtgccgagggctacaagcagatggaaggcatctgtgtgaaggagcagatcccagagtcagcaggcttcttctcagagatgacagaagacgagttggtggtgctgcagcagatgttctttggcatcatcatctgtgcactggccacgctggctgctaagggcgacttggtgttcaccgccatcttcattggggctgtggcggccatgactggctactggttgtcagagcgcagtgaccgtgtgctggagggcttcatcaagggcagataatcgcggccaccacctgtaggacctcctcccacccacgctgcccccagagcttgggctgccctcctgctggacactcaggacagcttggtttatttttgagagtggggtaagcacccctacctgccttacagagcagcccaggtacccaggcccgggcagacaaggcccctggggtaaaaagtagccctgaaggtggataccatgagctcttcacctggcggggactggcaggcttcacaatgtgtgaatttcaaaagtttttccttaatggtggctgctagagctttggcccctgcttaggattaggtggtcctcacaggggtggggccatcacagctccctcctgccagctgcatgctgccagttcctgttctgtgttcaccacatccccacaccccattgccacttatttattcatctcaggaaataaagaaaggtcttggaaagtt

SEQ ID NO: 117242 - DNA, 1000 bp, Homo Sapiens
ccagcctccctcaggttactctgcaccccacagatggtttgatggctgtgctgtatactggaggggagggcaggactctgggagaacagcacttctttcatgagacctttgttactcggtggttactgggtcctgtgcctgtccgttttggggcatgcagccctctatcatttttggctccgagaagagggcaaggggcccccgcagggtacttctgtgcttgccctcgccctgccagcaggcagctgtgcccctggcctgcccttcccgggaccccttattccaactcagctcctctttgcactggaatggggcactccaacacccctcagggaccaccctccccacagtatgcactcagccccacagaacccaccagtctttctgggaactcacacctgcccgccatcttggtactttaggttaatccctcaagcatgaaagctggatcttttggggtttaagaagcccaagccttgttcctgccctggcctagggagcactcaggagggttccttggtcctcatctctcccacctccgttccctctgggccccacactagccacagcgcgggccttgtgctggagtttgagcctgggacagggagagggaggcttggagacagtctgacccagtgccctctaggccacccacttctaggcctgccctgccgccgtggagccctgggcaagctctttcccctttctgggcctgggtctccccatctcttcaatggggctgataccttcacagcccacagcatgggcacttatgaggacaaagtgaatttaacctggaaaagaatgtatttgagagtttcttttaaataatcagcgggtgttggtgatttgtagcccttctgcccttaaatgcttccttgggcaagagctgtctgtcctccctgcaggaggctgagtgtaaagagtatcattcattgtttctctattaaattattttctctaaaaaaaaaaaaaaaaaaaaaaaaaaaaaaaaaaaaaa

SEQ ID NO: 117243 - DNA, 1000 bp, Homo Sapiens
gtatcctttgcaacagccgatgagtcatctcctgtatacacccaagtggttgaaaacacagattcccccatctggaattttcaacagcagtcaaggctatcaaaagagctgcttctggacccacaacaaaccctggtcttcaaagtttggcataaaggagatgaggagagggtgattggctttgcctcggtggacctctccccacttctctctggcttccagtttgtctgtggctggtacaacatcacagacttcagtggagagtgccaggggcagataaaagttgctgtctcccctttggagagtttgatacacttcaaagaagaaaggcaagcaaggcgtggagtggagacctcaaaatcactgatcccaatatacagtcccttttccttccctgcctctgatacgtatgctgcattctccagccacatggcaaggcagaccctagaccaacttgctcatgcctcctcaaaggagcttgatttctcctctcctgggagaagtgataccacaagaagccaagcatcacgccatgaagagcatgtgcagaacattcgccggtttcatgaatccctgcatcttcagggagaggcacccttgccatgtgatgacaaactgaccacatcacctttgtcctcccaaacctccattctgacttctctcaggaagaatctgagtgagcttgatcagattcagaggtacttccgccagaagctcaccaagcctttcctacccctcagccctcagactcaaacggccatctcacagcaccaggagagctgtagggaccatcttgggccaggtgccagcagcctagaccctgggagccagtgtatcctggagaaatccagtaacctggtgttgcaagtcagctccttaatcacaggtagttactgaagtaactggaagcatgaacatgcccaccaggactcccagctcccaacgattcctgagcatgagcagatagtctctgaaagcatttccacagatgtatccacaa

SEQ ID NO: 117244 - DNA, 1000 bp, Homo Sapiens
aaggcaaagcggcaaaccccaaaatggtgagcagtctccccagcaccgccgacccctctcaccagaccatgccggccaacaagcagaatggatcttctaaccaaagacggagatttaatccacagtatcataacaacaggctaaatgggcctgccaagtcgcagggcagtgggaatgaagccgagccactgggaaagggcaacagccgccacgaacacagaagacagccgcacaacggcttccggcccaaaaacaaaggcggtgccaaaaatcaagaggcttccttggggatgaagacccccgaggccccggcccattctgaaaagccccggcgaaggcagcacgctgcagacacctcggaggccaggcccttccggggtagtgtcggtagggtttcacagtgcaatctctgccccacgagaatagaagtttccacagatgcagcagttctctcagtcccggctgtgacgttggtggcctgagctaggaggaaaaagagcagttttcactcagttttggttccctgcccgaggtgctgacccaattcgctgccaaaagagtgtcaatcagaatatacaaatcccgtatggttgtgtcatcctctcttaatcatttttactaattctaataatcagctctagcttgcttcataattttcatggctttgcttgatctgttgatgctttctctcatcaagactttgcagcattttagccaggcagtatttactcattattaggaaaatcaagatgtggctgaagatcagaggctcagttagcaacctgtgttgtagcagtgatgtcagtccatagattgtctttagagagttaatgttacaaaaaagaattcttaataatcagacaaacatgatctgctgaggacacatgcgcttttgtagaatttaacatctggtgtttttctgaaaaaatatatatacatatattgctttatttgaaacaaattaaaatatgctgcatttgaaaaaaaaaaaaaaaaaaaa

SEQ ID NO: 117245 - DNA, 1000 bp, Homo Sapiens
ggctgcagtccctgggggccgggaggatcccgccctgtggcccgtggatgctcagcggccaggcactgacctgccatgcctcgcctggaggctcagctgtgggcatccctccatggggttcatagaaataagtgcaatttctacacccccgaaacaattcaaagggaagcagcatttcttgttaactagttaagcactatgctgctagttacagtgtaggcaccccggcccagcagcccagcagcccacatgtgttcaggaccctccctgcccaccccctccctgccgtatcgatcaccagcaccagggtggcccgtgtgcgtggggccagcgtcgccgggctgcccagcctggctctgtctacactggccgagtctctgggtctgtctacactggccgagtctccgactgtctgtgctttcacttacactcctcttgccaccccccatccctgcttacttagacctcagccggcgccggacccggtaggggcagtctgggcagcaggaaggaagggcgcagcgtcccctccttcagaggaggctctgggtggggcctgctccccatccccccaagcccacccagcactctcattgctgctgttgagttcagcttttaccagcctcagtgtggaggctccatcccagcacacaggcctggggcttggcaggggcccagctggggctgggccctgggttttgagaaactcgctggcaccacagtgggcccctggacccggccgcgcagctggtggactgtaggggctcctgactgggcacaggagctcccagcttttgtccacggccagcaggatgggctgtcgtgtatatagctggggcgagggggcaggccccccttgtgcagagccaggggtctgagggcacctggctgtgttcccagctgagggagggctggggcgggggccgggcttggaacgatgtacgataccctcatagtgaccattaaacctgatcctccaccgcgaaaaaaaaaaaaaaaa

SEQ ID NO: 117246 - DNA, 1000 bp, Homo Sapiens
gccggaaggagcttcaggtgagcactgctcatgtgtggatgcccctgcaacaggcttccctgtctgtagagccaggggtgcaagtgccatccacacttgcagtgaatggcttttccttttaggtttaagtcctgtctgtctgtaaggcgtagaatctgtccgtctgtaaggcgtagaatgagggttgttaatccatcacaagcaaaaggtcagaacagttaaacactgcctttcctcctcctcttattttatgataaaagcaaatgtggccttctcagtatcattcgattgctatttgagacttttaaattaaggtaaaggctgctggtgttggtacctgtggatttttctatactgatgttttcgttttgccaatataatgagtattacattggccttgggggacagaaaggaggaagttctgacttttcagggctaccttatttctactaaggacccagagcaggcctgtccatgccattccttcgcacagatgaaactgagctgggactggaaaggacagcccttgacctgggttctgggtataatttgcacttttgagactggtagctaaccatcttatgagtgccaatgtgtcatttagtaaaacttaaatagaaacaaggtccttcaaatgttcctttggccaaaagctgaagggagttactgagaaaatagttaacaattactgtcaggtgtcatcactgttcaaaaggtaagcacatttagaattttgttcttgacagttaactgactaatcttacttccacaaaatatgtgaatttgctgcttctgagaggcaatgtgaaagagggagtattacttttatgtacaaagttatttatttatagaaattttggtacagtgtacattgaaaaccatgtaaaatattgaagtgtctaacaaatggcattgaagtgtctttaataaaggttcatttataaatgtcaaaaaaaaaaaaaaaaaaaaaaaaaaaaaaaaaaaaaaaaaaaaaaaaaaa

SEQ ID NO: 117247 - DNA, 1000 bp, Homo Sapiens
agattgacggcttccgagcctattacaagcagtggctgacagtgatgcccgcagaggaaaccccgcacccctggcagaagttccggaccaagccccagggggaccaggacaccggcaaggaggctgatgacggatgtgcccttgggggcaggtgatgggagcacagctggaacaatgtgctcggcccccagtgctctgtgggagccccaggacaagtgagctggtgtcacctcctgcctgggggaagagccaggccctgaggaacagccgcagcgtgtcacaggtgttggtgaggacacacactaggcccaaggtgcctgtgctcccagcaggtccaagtgcagctccagccacctttgcgtgtcaccttcacgggacttccagctccagctacctttgtgtgtcacctcacacaccacaagggggctggggcatctggtccctggggcctgggccgccccgccgggttccataggccgatgctctgaaagaagagacgtggggctcgagagatttaaagattttatttttacaaatcacagctgatagacagcgaagccttccccatagagaccgtgctccaactcgggcctggggcactgctcgctgctcccaggaagggggtggcgtgacaggcaggaacctgcgaagtccagagtccagggtggagcgcgccagcctcagccagagcagccacgacagccacagtgtgtgcactcgatgatgcggccctgcaacggaggaggacagtgagacgatgccactgcgccacgctcgcccctgcacactcacatatgtggcaaccctcccacgaaggacctgccaccatgccatatagggacacacctcagaaacccttccttgacagctctggacagggaaaatttggctccctcatgaaggtagaaccagctgctgttgacaccgaggttacatctgtatgtctatttataatatgttctgcaaatccaacacacgtttgccaatcaagaaaaagaaa

SEQ ID NO: 117248 - DNA, 1000 bp, Homo Sapiens
tccttgctgttggttttacactgccttccacattgcaacagcaagttgatttcttgtgatcccagaattttctaagaggatgagttgaatctatagcagcattgtcagtacagaccagtggttctcaaactttaaaatgcctcagcatcacttgggagcttattgaaatgcagatcccagagtcagtaaatctgcctgtgaagtatgatagtctgcatttgtaatgagcattcaagtgattctgatgcaggtgagctgggggcatacagggaggaacactgccctggactatccattgcatttttgcctctaaacaactacagaattttctagggttttaaattatgtaaaatgtttacttattctgagcttagagagaatggggagggtatttttaaattttattgttttatttctttaagtttttctttgctttaagattataggtattaggtttgtttttgtttttccacttatcttgagttcactttgatgttaaatctattgctacttcagttgtaaaaccagccaaaagtttctggatgaaggtcaagtttgaccttttaggagttattgtacataaaggcttcatccacgaaccatccagcgcacagaagcaagtgcaaaaatgacacaagcacaactctccagacgtggctccttctcctttctcagtgcagactctcactgaaagctgctattttcatcctccttgtggttgcttttcttgtttctcttccattgtacatgtgggttatataccatatgttaaatatgcaataaagtgtttacaggatgcccttctgaagggtagtcctttgtaaagctgtacagactttgcagtttaagcacaatgtgcacatgttagttttatatacagcaaaacttgattttttgcagatggaaaggtattttgtttctatacaaagtaaatggattgtttgtgcttaatgtaaagccgctttataaaactgtaaaataaagtttttttcttaaaaag

SEQ ID NO: 117249 - DNA, 1000 bp, Homo Sapiens
ggcctgggagagagactattcttaatttttctttcttacaaaaactgatttttcccataaatatttttacttcagaggactaggaccattttgttttgggcccttctgctgaaaatttgtctcgtttaagaggcagctagaatctttaccatatgtatgaatttgtataatttcatttttggatagggataaacttttgcttctgataaaagcctggaatttcatctggtcctcagagcattgcgtgtgtgtcttgctgtagcccggaaaaggttttgtgtaaagattctgggatggcaagttgtttgccttttctgaaaagagaacatacagaacctgtccatctttaagaccttcatccatggaatctactatacaggaggatgcagtgggctggaggggatgggcgaaaatgggagcaggaagcctggcctggcttctggtcatggcctcctaaaaccttaaacttcaagtagaaatgtactcaagccctatttataaacaaatacttttcctgcctccaccaaacccctacagaacatcacctggaattgccactcacactgggttggagtcattgggcagctgtgcctgtgcgagaggtgctgtggtctgggcagcccctggaaaagcacctttgctgcctgtcattgttgcctgaagaaggctggagttgctctgagagcagtttgggtttggagtattatatttggcttctatttttattattttggatcaccattctccctatcccttcttgcctccctcccttctaaacatgtgtaataactatacagagactgctacaaaattgtatatagtttttggatcaaatagcatgaggggagaggaaaccattaaaagttggggctcctactctcctttgctttgtaaattcaaaagttgggggtgggtaagagggatagttaaaatgtttacaaaactttaggctccctcggaacttttgccagtgtggaggaaaataaaaaagaacttaaat

SEQ ID NO: 117250 - DNA, 1000 bp, Homo Sapiens
gttttcatatctgaactcctaaataagtgaaattacagtagattatattaacaaaatactttttaggtagccatgcttgagactttttaaaaatataactttttccttaaagttttcagctatagcaaaaggtagttatgtatgccagacctaatatgagctgccaccaacacccctagaactttcagccatggtgtcttcagaattgtagcgcatttctgaatctagcaaatcctccttttacccgttgaatgttttgaatgccctgactctaccagcgcccataaatgatctctagaaggactgttagtaccaatctgtttttcaactttgaagctaaaaaccctgatatggtaatattatggtgcatagcagaggtctcggaaaaaaaatatttctgttcactttactttcaggttaaaaatgtttctaacacgcttgcaacttcccttatggcattaatcttgttgagggagagagacagaatcctggactctccaaagtatttaactgaaagtagggcctgctctgacagggcccatgtcccacaaggctgcttggcctcagtgggtgcttggctgtgctggatgatatgttgatctgtattggataaggaccaatgacagcaaagcaaaaatggctttaaagcttggtgttacttttcttaagttgtttaattatagttaagcaatttcaaaaatgctccaaagaaatgtgaaaggaccttttgtcacagcacttcagaaaatacacaacagccccttctgcccccgcacagaaatgctgcagagtatataaaacttgagacatttttgtaggatgcctgacgaggtgtagccttttatcttgtttccggatgcatatttattacgagtactctggttaaatattgaaaagttatatgctgtagtttttagtattttgtctttgtaatttacagaagttattggagaaaataaacttgtttcattttgcaaaaaaaaaaaaaaaaaaaaaaaaa

SEQ ID NO: 117251 - DNA, 1000 bp, Homo Sapiens
acaggatctgtccagataatcgatattttcagtatacaaatgtaaataatcacagatgagaatgtacttagctgtattttcaaataagtaatcttccccccttttgtaggactttaaaactaggcatcaatgaacctgtttttcctattatgcctggaatttagtcatgataccttgactcattccatcatatttcaagaggattcagagtgctagaaattattttggtagcctgtaacacacggcaacactggtccttgggcctatgatgacccacagatgactcagtatagagttcattgctaattataaattactagtgaatctttttgatattttaagctctagtgggaaaaatctggccacttttgtgtttttatgaaggccatggaataaaagggtccaaagatttaaatatttttatctaatattttgattgttttcttaactttctccttaaaacattcagtagtgataaagatatagaaactgcactgtaggagaattggaatatttaaggctggttgacattttttattttcattttatatcttttgtatagctctacaaggcagtgttttgtaatttggtttcattatgaagatccagtacttggcagccatagtttagacaatattgttcagtgctgtttgcttgcatgttaacaacaaaaccttttagaggacccacaaatcatgatattgaacacagttccgaggcattcagagcatcagagcaagtaccatggcaatacatgtgtagactgttggagatgtcccgggccaatttcaagaaagaaaactgtaaatactagttctacttgctctgaaattatgagtttatgcgttttcccagccctccgaatcactgactggggcgttttgtgccccagcaataactggcagcatggcatacctgcagtaccccttacaatattaaagcaaagtttttattctaaaacagaataaaactgttcaataaaaaatgctcgtcaaagttc

SEQ ID NO: 117252 - DNA, 1000 bp, Homo Sapiens
tcccagtgtggccttctcgtcgcggctggggggctcccggggcgcgccggggctgctcatggctgtcgggcaggacctttactgttactcctacagctaattctgcagggcacagcccagagccatgtggatttgacttacgggagtaaagcgtaactttttactgcatctaatgagggtgttttaagtgacactcagtgtacacagatcccatcctctggctgctaggagagaagtgctgaatgttccgtgtggagatgctcaggaaagttatttgagttaaattgctggctgagagagcttggaagtccttttcataaaaggtacctctttccttttcttattgaattcttagaacttagttaaccctccctgccttttcttaacaaaaaggacttttctaaggactgaagattggcaaaaacgaaaagcttcttcctccaagagcccattgaagaagcccagtgatgagacggtgagatggtttgagtcctcggtgcctgggtagcaggaagaaagacctgcatcctgcatctgtacttggggaagccagcggagaggacggggaggttacttctctaagtttctgcagaaatattgaaggctggagtttggaatccttaaacttggccttctcaaactcagcagcagatctccgggattctgctgttattatccaaaggcgttggaaggaaagatggatcttcttacatgctagaagttttaaacggtccttaacatgcctttgttcaagcaccttccagaatgtaaggttcagcagctctggtttctattacggtgacttgaatgtcagattcaagggcccggcgtcaaaggaaattggttttgactttttgtaatctaggagcgacagttcgtgagatgtttattcagtgttaaagagcctgtttttctaccaaacaataaaaccaagagaagaatcaaaaaaaaaaaaaaaaaaaaaaaaaaaaaaaaaaaaaaaaaaaaaaaaaaaaaaaaa

SEQ ID NO: 117253 - DNA, 1000 bp, Homo Sapiens
aggggaaggttggggggacccagcaaggactcagagagtcagacagtgccacttggccacttggggtaaagccagtgccagcaataacagtttatcatgctcattaatttgggatttcaaaacacaaatgaaaactcacacccacccacccccaagtgcatgtctccatcacttaaaaagtaagttccatttgaaaatatcctttcttttttttttcttcctatttttgtttgtttatacaaatatctgatttgcaagaaaaagtgcatgggaggggttttagtggtttaatgaatttttaattaagaaagggtagtttggtagtctacttaaaaatgtttctgggaaattcactagaaacattaaccaataggattttggtgagcttagcttctgtattcctactgccgcccagaaaaggggcagggctctgcagccgccaggacagacgagcaccccatgcctatacctccctccccgagctaagtcccagggcatctgggccttgcctggagactgggctagctctgtaggctcggagagcctggggagggtgccaaccccacctctagtattttgggagatagggaaagtgaaccgacttccccttcccatacccctcagggtggttccctaccagccaggcttactacttctagaagaaagcagagtgccagggagtgagattgcatccctgggcttagaagtgacggagagaagacttgtttagtattttgccatcagcacaaggaaaaccaggagagagtctgcctccaggactctgagccttctgcctcgtatgttcagaaggtggataggtcttcccactccagcatggcttgaactcttaggggtctgcagtgctccatctccattggtggccccagctcagtaactatacctggtacatttcctgtgtgcaatcagtaccttgaaggcagaacattctgaataaagttggaaaaagaaccaaaaaaaaaaaaaaaaaaaaaaaaaaaaa

SEQ ID NO: 117254 - DNA, 1000 bp, Homo Sapiens
aaatccatatcttggccctggttatcctggctttggaggctatagtacattcagaatgccacctcacgttcccccaagaatgtcttccccatactgtggtccttactcactcaggaaccagccacacccatttcctcagaatcctctgggcatgggttttaatcgacctcatgcttttaactttgggccacatgataattcaagtttcggtaatccatcttataataatgcactaagtcagaatgtcaacatgcctaatcaacattttagacaaaatcctgctgaaaatttcagtcaaattcctccacagaatgctagccaagtttctaaccccgatttggcatctaattttgttcctggaaataattcaaattttacttctccgttagaatctaatcattcttttattcctcccccaaacacttttggtcaagcaaaagcaccacccccaaaacaagactttactcaaggagcaaccaaaaacactaatcaaaattcctctgctcatccacctcacttgaatatggatgacacagtgaatcagagtaatattgaattaaaaaatgttaatcgaaacaatgcagtaaatcaggagaacagccgttcaagtagcactgaagccacaaacaataaccctgcaaatgggacgcagaataagccacgacaaccaagaggtgcagcagatgcctgcaccacagaaaaaagcaataaatcctctcttcacccaaaccgtcatggccattcgtcttctgacccagtgtatccttgtggaatttgtacaaacgaggtgaacgatgatcaggatgccatcttatgtgaggcctcttgtcagaaatggtttcatcggatctgtactggaatgactgaaacagcttatggcctcttaactgcagaagcatctgcagtatggggctgtgatacctgtatggctgacaaagatgtccagttaatgcgtactagagaaacttttggtccatctgcagtgggcagtgatgcttaa

SEQ ID NO: 117255 - DNA, 1000 bp, Homo Sapiens
ctgggatgatgtgtgaaacctgacacctagatttatttggaaatattctatgaccactttacagatgaggaaactgaggcctcaagcgtggaggggtagagtgaagagtagaacccaggtctgatgccaaagctgctttcttctctgcctcctcctcacgcaactcacacctccttttcttctagctttgttgtcctcccaggaaccaaaaaaccccagctattttctgaccaaaatgtgtttcataacaaaccatctggtgcctttccacacagaactggcaggagcctcgtgtcctgctagctgtctctcttgttgatttccgtgaaaatgcaagtgtttgaagtctgctcattccgagggtgaaacaaaatccaaccctgtcagaatcatgctgttctctttgctgacactgtgaccctgggtcgggacagaccagcagcaatctgtctttagaatcgctttccttcctccccttttgcccccgtggggctcccggcatcctgaaagccagcaaagcctccagcatcttttccatcctgaggtgcctcccagtggcctggcttgtcggagcaagtttcatcagccctagggaaaacacggccctcctgggaacctccttacctggagtaaccggacaccttagacggaggtgcctgagggtggggtgggatttgcagggtcattatcagaacatgaggataacttccttgcccctgctctgtagccacctccttggcaccggcctctatttgtcataaggcggcgtgggcgaggcctgacacaggccagccttggcacgaggggggccaggggttctgagaagcgctgccctgtgagagccacgctggccttcgtctccatctctggttgacgggctgtccgtgtgcctcctgtgtgtctgcagacaagtcttgctgtgctttatttgtgaaactttaatgaggaaaaaacaaataataaatgttctcgttttgaaactcaaaaaaaaaaaaaaaaa

SEQ ID NO: 117256 - DNA, 1000 bp, Homo Sapiens
atattatttctgttacttgaatagtagatattcatcatcatgcttttgcacttgaatttgcaactgaatggattttaaaaaataattctttaatgggatcatgagcatgaaatgggatcctgcatcacttgttttaactatttattttgccatgtttacattttgtatcttgtaaaaataaatccaactttgtgtctaaaaagttaaagattcatagctaggaaatgaaattcttgtaatttttttctaaaggaactgtaaagttttcacttggttcattttgtttcacaatttgactagatggactttttggtaaatactttagtggcatttcactgtcaaatatgaagttcaaggcaaaatagtattttctattactgtgcaggggaaagggatggatcgatacatgcaaatttaatgtagtaactcacttttccatatattttgaatgtatatttctatttatgataccaatttataaaaaataattacacagaaaaaatggaataggaaaaattatgcatctagcacatttaaactgtgcaaatatgaaaatttttcgaggattacattttatctgaaggctgcatattttaactggctttaaaactgtaacacatcacataaaagatactttaccaggtatgtattgcattatatcattgcaataattattggaagtctagatatcgagccatcccaggtgttgggcggggggagggttgtggcaagattgtcttttcaattttggagagttttcctgtggctacaaggcaagtaacgggttggaaaaagtctgactgtaagcgttggacaccttcatagtgtagtgttttagtgactttttttatacggttcttgtaaattagatacgtgtagtggtgtttcagaatgtttgtttatgcactagttcagacaactttccctgttacttgttcttgataagtgaaaactgcagggaaataaaaaatacatatcaaaacaaaaaaaaaaaaaaaaa

SEQ ID NO: 117257 - DNA, 1000 bp, Homo Sapiens
tgccaaatggtaaagaaatgaaaagttttcacagtgactactgaatataccaagagcttttggcagtactgctggctttctgggtgattaattaggtaaacttgaatattcccagtaaatgtttgagaatgcataaaattataccaatttaaaaatataaatttttgccactgttttgtgaacggaggatttgtacgctaaatttcatccttatttggcgtcaaagttgatgcaaagtttatgtaccatgagacttctagtgattgcctactttcacatttatttaaatttttgtgaaagaaaatacagttttaaaggctataggaatgtgttatatgtaccttaaacagataatttaattttagcaatttatcataactgatacttagctaacaattgtccataacttgtttaagtgtaagaaataccatttcaggaatgaaaaagaaggaatactactttctaagaaagaagatcttataatagacatatttagtaggttaaactactcctttgaaagaataagttttggttcaaagtcaataatgaagacgagatttgtttttctcttctctggctgatttttaaggatattatgtagttcatttagttaacagaattgaaatgtttgatatggcaagataggtatggtaatttcaaagtgaattgggaattcctctggctcatagaacccttttttttttcctttaagtattcttgagatacaaaaaaaaaaagtaaataaaatttcaaaaaaaaagttccggatctgtttttaagctccatctggtcctcataacctgcaagatttttcttaaaacctttcagctgaaagtgggggtaaaggtggagtaatctgtggatttgtttctgttgtcttttaaaatgtcaaatatataatatgtaatttttttaaaaaccaccagatacagaaatgtgctttaacatcagttgaaacctaaattttcttatgttgtggtgattgtattaaaaaaaaaat

SEQ ID NO: 117258 - DNA, 1000 bp, Homo Sapiens
tgtgatccacgcacttcagacctcccaggacaccgtgcagtgtcggaaggccagctttgagctctatggcgctgacttcgtgttcggggaggacttccagccctggctgattgagatcaacgccagccccacgatggcaccctccacagcagtcactgcccggctctgtgctggcgtgcaagctgacaccctgcgcgtggtcattgaccggatgctggaccgcaactgtgacacaggagcctttgagctcatctataagcagcccgtcaccacttccccagcctccacaccagggcccagctgccttctccccatgtactccgacaccagggccaggtcctcagacgacagcacagcaagctggtgggcactaaggccctgtcgaccacaggcaaggccttgaggactctacccacggctaaggtcttcatttccctcccaccgaaccttgatttcaaggtggcacccagcatcctgaagccaagaaaggtgggcctcgacctgtgactcacacccagtggacagtgctgagcacggggtcagggctggagggcacaggcagagggcagctcccaggctggctggcaccccaagggaagagctggtctccctcagaagccccttcctccacagacttctgatcatctccctcttctcccctcctttcacaccgaggctcctgctctcctgtgcctccgaggcccccagctggaagtgccttgttgcctctgccctttgaagtcggaacaattcctagcacctgtcggaaggtcaaggccaaaggcaaattcaaggccagactgtgacaaacccagggctgaggcctgccccatgaagaggctgagccccctgaaacccctgccccttgttggtacattccagaggcgcaggggcctgggggatatgaagctagggaagcccctgcttcgattccccactgcccttgtcctggatccaacaccaaataaaaagaaacaagtgaaaaaaaaaaaaaaaaaaa

SEQ ID NO: 117259 - DNA, 1000 bp, Homo Sapiens
tcctaaaagcaccactattttagcataataaaagaaagtccaaagagctcctatatagactactccagataacttcgcttctttgatacttgtagcttattgtaattttttttaagaaattcaaggtcattattattgtacaaaataagcgctttgattaacacagctatatagtttttttaatttttaaaaaacctgtggagacggtgatcttgtctttaaaacatgatagtcctttcagtataatgtcttagattaaagacgttgcctttaatatctgttgggaaggaaatgtccagacttttcaaatctcttattatatgtttcctttttttgtttacatagggaacaatgtttatagtcgtgtgtacagtgggggtctacaacaagaagtgtatattttcaaacaattttttaatgatttaacaatttttgtaaatcattttcaggcttctgcagctgtagattctcactgtgaatcccttgcttgctcatgcataagtgtatttgcaataccaaatatacaggtttagtatttttgcctgttagtgattgtttcacatgtgtaacgttttggttgagatgttaaatggtggacgagtactgtggatgtgaatgtgggaagtaattttaatcatatgtaattggtcacaaggcctaatttgcagtaactattgctgttttatttaacaatgccttgttgctttgtatgcattaatgtttggatgtaaagattgtgtgtctatccaacagggagccacagtatttaaattgaccaacctaatgttacaactactttgaggtggccaaatgtaaactaaaagccttaattaaagtggtgcaattttgtataacttagcatcagtagttcaataaatttggattgccatgcaagggcttgcattataattacttgccacttgaatgtgttttgtgtaatgttttaacagtgctagtaaataaatacgggtttaccctggtaaaaaaaaaaaaaaaaaaa

SEQ ID NO: 117260 - DNA, 1000 bp, Homo Sapiens
gctggaatggagggcagggatccatgggagatgtcgggatgaaggtgggagctggaggtgcagggggacctggaacatggatgggagtggacaggcctttctccttagaggccagaggtgctgccctggctgggagtgaagctccaggcactaccagctttcctgattttcccgtttggtccatgtgaagagctaccacgagccccagcctcacagtgtccactcaagggcagcttggtcctcttgtcctgcagaggcaggctggtgtgaccctgggaacttgacccgggaacaacaggtggtccagagtgagtgtggcctggcccctcaacctagtgtccgtcctcctctctcctggagccagtcttgagtttaaaggcattagtgttagatacagctccttgtggctggaaaacacccctctgctgataaagctcagggggcactgaggaagcagaggccccttgggggtgccctcctgaagagagcgtcaggccatcagctctgtccctctggtgctcccacgtctgttcctcaccctccatctctgggagcagctgcacctgactggccacgcgggggcagtggaggcacaggctcagggtggccgggctacctggcaccctatggcttacaaagtagagttggcccagtttccttccacctgaggggagcactctgactcctaacagtcttccttgccctgccatcatctggggtggctggctgtcaagaaaggccgggcatgctttctaaacacagccacaggaggcttgtagggcatcttccaggtggggaaacagtcttagataagtaaggtgacttgcctaaggcctcccagcacccttgatcttggagtctcacagcagactgcatgtgaacaactggaaccgaaaacatgcctcagtataaaacaaacattataaaacgaaaaaaaaaaaaaaaaaaaaaaaaaaaaaaaaaaaaaaaaaaaaaaaaaaaaaaaaaaaaaaaaaaaaaa

SEQ ID NO: 117261 - DNA, 1000 bp, Homo Sapiens
acccacaaggaagacctcaatggtggctccctgatggattacatgcacgactcagataacaaagccctaagcaagctggtggcagcatgtggtgggcgaatctgtgcctttaataaccgtgctgaagggagcaatcaggatgaccaagtgaaggaactaatggactgtattgaggatctgttgatggagaaaaatggtgatcactataccaatgggttgtacagcctaatacagaggtctaaatgtggacctgtgggatcagatgaaagagtaaaggaattcaaacagagccttataaagtacatggaaactcaaagaagttacacagccttggctgaagcaaactgcctaaaaggagccttaatcaaaacacaactgtgtgttttattttgtattcagttgtttctcagattgataattctgtggctttgcatactgcacagcatgtgcaatttgttttgttgcttactctttagtatgtgcaatttattctgcagtttgctgtttattatacccaaaaagttaatgatatttttgagaacagttattagactagaacgcaagactcctaggttatagttacagatcccagttattatttactcactatcatttagtgggtgaatcacagtaatttccctgtaaaatgtggtacctgaagtcatatttgagattctatgaaatgtttaaatctgaacatcactccaattattaatgaaccaaatcatacgataagttactgtttgcattgaaatataatatcaaagccttttgaaatctgtaaacataaaattcctctcattttcaaatatctaaagccagttttatgttcctaaaatctcattttcttctttctagtactactatttctactgaatataatgaaaatggcaataaaataatattacataaactgtaaaaaaaaaaaaaaaaaaaaaaaaaaaaaaaaaaaaaaaaaaaaaaaaaaaaaaaaaaaaaaaaaaaaaaaaaaaaaaaaaaa

SEQ ID NO: 117262 - DNA, 1000 bp, Homo Sapiens
ccaggcattggccctgtatgtacagcacggagcccctgctaacccacagaacttcaatatctacaaaaggatcttcactgacatggtgagctctcctggaaccaactgtgccgaggcctatcatagctgggctgatcttcgagatgtcctcttcaacctgtgtgaaaacctggtgaagtccagtgaggcaaactctccagcccatgaggagttcaagacgatgctgctgatcgctcattactatgccacgcgctctgcagcccagagtgtcaaacagctggaaaccgtggctgccaggctttctgtttcactcttgcgtcacacccagctactacctgtagacaaagccttctatgaagcaggcattgctgccaaggcagttggctgggataacatggcattcatcttcctcaatcgctttttggacctgaccgatgcaatcgaggaagggactctagatggccttgaccactctgattttcaggatacagacattccctttgaggtgccactcccagctaagcagcatgtaccggaggctgagagagaagaggttcgagactgggtgcttacagtctccatggaccagcggctggagcaggttctgcctcgggatgagcgtggcgcctacgaggcctccctagtggcagcgagcactggtgttcgagccctgccctgccttattacaggataccccattctgaggaacaaaattgaatttaagcggccagggaaggctgctaacaaggacaactggaataaattccttatggccatcaagacctcccacagcccagtgtgccaggacgtgctgaaattcatcagtcagtggtgtggagggctccccagcaccagcttttcctttcagtagttggtagagctgaggaagagttagggcctctccctcattaaagttttataaataattgaaaaaaaaaaaaaaaaaaaaaaaaaaaaaaaaaaaaaaaaaaaaaaaaaaaaaaaaaaaaaaaaaaaaaaa

SEQ ID NO: 117263 - DNA, 1000 bp, Homo Sapiens
ttgcttttcgcaaagcattattgaatccagttacttcaagacaatttcaacgttttgtggctctaaaaggagatttattggaaaatggtttactcttttggcaagaagtacaaaaatataaggacttgtgccattctcattgtgatgagtctgtcatccagaagaagattacaactattatcaactgctttattaattccagtattccaccagctttacaaattgacattccagtagagcaagcccagaagattattgaacaccggaaggagttaggaccatatgtatttagagaggcacagatgacaatttttggggttctgtttaaattctggcctcagttctgtgagtttaggaagaatttaacagatgaaaatattatgagtgttttagagagaagacaagaatataataagcagaaaaaaaaattggcagtcctagaagacgaaaaatctggaaaggatggaatcaaacaatatgcaaatacttcagtgcctgctatcaaaactgctttactcagtgattccttcctaggcctccaaccatatggccgacagccaacctggtgctactcaaagtatatagaagccttagaacaggagagaattcttcttaagatccaagaagaactagaaaaaaagttgtttgcaggcttgcaacctctcacaaattttaaggctagctcttcaactatgtctttgaaaaagaatatgtctgcccacagcagccagaagtgacagcattcttgtgaatgtttacatcctgctgctgataggttcaaggaattctttaaaccagattctgctgacatgagaagctccagtgatttgtttttttgaaggtctgtatcagagcaagcctaacatctaaataaagtttgattctggattttccaggtgggaaataaataaagaaaatttggcttgtcttaaaaaaaaaaaaaaaaaaaaaaaaaaaaaaaaaaaaaaaaaaaaaaaaaaaaaaaaaaaaaaaaaaaaaa

SEQ ID NO: 117264 - DNA, 1000 bp, Homo Sapiens
gctgaccatggatgacttggggaccttgtatggacagaactggctcaatgaccaggtgatgaacatgtatggagacctggtcatggacacagtccctgaaaaggtgcatttcttcaatagtttcttctatgataaactccgtaccaagggttatgatggggtgaaaaggtggaccaaaaacgtggacatcttcaataaggagctactgctaatccccatccacctggaggtgcattggtccctcatctctgttgatgtgaggcgacgcaccatcacctattttgactcgcagcgtaccctaaaccgccgctgccctaagcatattgccaagtatctacaggcagaggcggtaaagaaagaccgactggatttccaccagggctggaaaggttacttcaaaatgaatgtggccaggcagaataatgacagtgactgtggtgcttttgtgttgcagtactgcaagcatctggccctgtctcagccattcagcttcacccagcaggacatgcccaaacttcgtcggcagatctacaaggagctgtgtcactgcaaactcactgtgtgagcctcgtaccccagaccccaagcccataaatgggaagggagacatgggagtcccttcccaagaaactccagttcctttcctctcttgcctcttcccactcacttccctttggtttttcatatttaaatgtttcaatttctgtatttttttttctttgagagaatacttgttgatttctgatgtgcaggggatggctacagaaaagcccctttcttcctctgtttgcaggggagtgtggccctgtggcctgggtggagcagtcatcctcccccttccccgtgcagggagcaggaaatcagtgctgggggtggtgggcggacaataggatcactgcctgccagatcttcaaacttttatttatatatatatatataaaaatgccacggtcctgctctggtcaataaaggatcctttgttgataaaaaaaaaaaaaaa

SEQ ID NO: 117265 - DNA, 1000 bp, Homo Sapiens
cactgactcctccaccattgcctcccccagacccccctgcccctcccactcttcttcataactgccacctttgccagaagctccagagagactccccaacctgccatgcctgcctccaccccaaccgtacagtccccactgcgctgtccagcccctggtaccatacctatggcctggctcccccctggccttggagcccggtgcccctttcacttcctcagcctcagcaatgttcccttttcagtgtcatggagctggctcgcctcaagtctttcgttttcccaggctaggtagggctgtgaggaatgcattaagagggtttgggagtttctgagaacctggaggagcaaagcttgattcagatcctgtctgcctcgctgggtccttggcaggtcccctgtcctcctgggtgggagcttatggggtggtggggcagaaggactgaaggtaattcactcctagatcgcagtggctggctgcttggccaggacagtgatgccaccagggagagcttccgcttggtgaccagggacatgtcccagatggacatagaagcccctctctgcctccctgggattttttagacttttacttttgatttccctaggatggaagagtataggtgggagataagggaagtggggtgagaggagaaaggaaatgttggcatgggcctgtgtgatgtccctgaggcagaagagccggggactgatgggttcaggtgggagctgctgggtgaggcagggaacccttttcactcccattccttagctttagtctaatggagccaaggactgctgggaccttcaaccctgatcttttgtcttccagtcttctcttagtgtcctgctcctaggtttccctctcttctggttcttctcccaggtattctcttcccaggcctctctggccactgctttgtatcagggtttttcacgcttttgtagaactgaggtttcaataaacagtttcagttgcaaaaaaaaaaaaaaaaaaaaaa

SEQ ID NO: 117266 - DNA, 945 bp, Homo Sapiens
cggccgctgaattccgcgcactcgcgtggccttcgcgaaggtgtcgctgccaagaaacgtgtcctgcgcgctacgccgtctgtttctagggcaacgccggcgtctcttagcaaccgcgcgcggcctaggtgggtccccccggcacccccagacctgccatggcgaccgcgagtcctagcgtctttctactcatggtcaacgggcaggtggagagcgcccagtttccagagtatgatgacctctactgcaagtactgctttgtgtacggccaggactgggcccccacagcgggtctggaggaggggatctcacagatcacatccaagagccaagatgtgcggcaagcactggtgtggaacttccccattgatgtcacctttaaaagcaccaacccctacggctggccacagatcgtgctcagcgtgtatggaccagatgtgttcgggaacgatgtggttcgaggctatggggccgtgcacgtgcccttctcacctggccggcacaaaaggaccatccccatgtttgtcccagaatctacgtctaaactgcagaagtttacaagctggttcatggggcggcggcccgagtacacagaccccaaggtggtggctcagggtgaaggccgggaagtgacccgtgtccgttctcagggctttgtcaccctcctcttcaacgtggtgaccaaggacatgaggaaactgggctatgacactgggccttctgatacacagggtgtgttggggcccagcccaccccagagcttcccccagtgaaggctccacaggctgcacagtctctgataatgaagggctgccttcccgaagtcagccgctgcccatcggcctgaggggcagcctggtggccagagctgggggcactacagaatagttttgataataaagtctcattttcagagaaaaaaaaaaaaaaaaaaaaaaaaaaaaa

SEQ ID NO: 117267 - DNA, 1000 bp, Homo Sapiens
catgggacagaggaagagcccggctggaatctgacttacctggaccgctgtccttgtgaggcattgaatgcccagtgcagtatccgagagactgtttaataacctgtcttcccagccaattggtggtgctggaatcccctaggagccttcagtctgggagaaacagagccagacatagacagttccagcatcacagaaccagaagaagagacctgcaactgtgagagtccagacaggaagcagagaaggcgtccttgcggaaagggcattttagctgaggctttggagtacgaataggagctcagcaggcagacgaatgaggaataaaggtcagagaaggtcagagctgagtgacgtttggaatccaccccgtttattgtagaactgggggttcagagggcaggtgcctcagagttgaggccacacagtgaggtctggtgggtgaaaggacccaggaacgaggcgttcaggaaagcaggttgtcagagctatgtggagtctgtgggtggcaggggcagccgctccagcctttgaagactttgaaagccagagattcctggcgcaggcttggacttcctgggagctcctccaagtacccaggggcatcagagctgcctgggtgttacatggcccagggaacccaggttcagggtaggacaggcaagaccagatacccaatgtgcaaagtgaaaacactgggctccctgttaaacgatgaagaattcaagacagtgacagcattacgtcacccctggggacagaggtcagcctaaggtgacacacggggactactgtgcttccggaggctccctgtgtcctggaggagaaaagcattagagggggcagctggacaagctcccaactgcagagtcccagccctggctggggcagggccccggcctgggactcagcatttctgatatgccttaagaattcattctgttttgtacaattattttttaaaagtaaacgtgtggagaaagaaaaaaaaaaaaaaaaa

SEQ ID NO: 117268 - DNA, 1000 bp, Homo Sapiens
ggctgaggctgcggaaggtcgaccaggggctctttgtgcagttggtccaggccaacacccctgcatcccttgtggggctgcgctttggggaccagctcctgcagattgacgggcgtgactgtgctgggtggagctcgcacaaagcccatcaggtggtgaagaaggcatcaggcgataagattgtcgtggtggttcgggacaggccgttccagcggactgtcaccatgcacaaggacagcatgggccacgtcggcttcgtgatcaagaaggggaagattgtctctctggtcaaagggagttctgcggcccgcaacgggctcctcaccaaccactacgtgtgtgaggtggacgggcagaatgttatcgggctgaaggacaaaaagatcatggagattctggccacggctgggaacgttgtcaccctgaccatcatccccagtgtgatctacgagcacatggtcaaaaagttgcctccagtcctgctccaccacaccatggaccactccatcccagatgcctgaagccactgcagggcagggcaggcagggggggcttcccgccctcctgcagcaaagggcaaccaccctcggatgatgggttgcagccggcctgctgcttaaggtgggggctgccatgaggggggcgtgtccaggagggtgaccatgggatggcttatacacacaggcctccttggagcctcagactccaagctaggctgaggctcaggcagggcccacaggcagccgattctcttgtgctgatttaaatgctggacacggaggcaggctgtttaaacgctgcttaaagtcgcaactgggcccctttcaagaaattttgctctaccaggaaaacagttacacattttaagagaacagagctacgttctttgtgagagctttttccttgccttgacttgctctttgtcacagactgcataagttgtcagccttgactatcttttgaataaagatttgattttaaacaaaaaaaaaaaaaaaaa

SEQ ID NO: 117269 - DNA, 1000 bp, Homo Sapiens
tttgggagaggagctgttacagtgcgaagtaccccagcggctcctagaaatggcatgtggagacccccagccaaatgtgaaggaggctgccctcattgccctccggagcctgcaacaggagcctggcatccatcaggtactggtgtccctgggtgccagtgagaaactatccttgctctctctggggaatcagtcactgccacacagcagtcctaggcctgcctctgccaaacactgcaggaaactcattcacctcctgaggccagcccatagcatgtgattccagattcctgcggtccagcctccaactttggttgccagctctttcttattctactacacaagccgccaactcagctgagagctaaagagactagaaaagagataagctgccaactcaactgagaacaagaaactagaagagatttatatataaagcttcttccttctcccagatgcaggatgttttcaaccagtaaattttattgctgttggtgccagagaagagtcctttcttctctacatccaggggccttttctccaataatgtgcctttaactctagggacctgcctcacggaccttagggaaaaacctcaacctgaaagatctcttcctttctggagctcctttaatcttcccagcaggtttttgccttagacgtgctggccccaggacagtgatgaagacagagcctgtctcagctctaggctgtggggatcaatgccatcagtccctgttattgagggattatcccttagccaacattcctatctgtgggtgggcgtggagagtgtatctttttttggggtgtgtgtgtatatgtgtgtgtgtatgtgtgtgtgtgtttaatagttctgtttgtaaactcttttaataaaagttgtgcctcaccatacttgaagctcccaggacaagggttgagaggctcaacccctctttcagcttctatgtggtgttggaggtgctggtatcgtgttcacacaaaaaaaaaaaaaaaa

SEQ ID NO: 117270 - DNA, 1000 bp, Homo Sapiens
catccaccctgacacccaaaggggtttttttgttttgttttgtttttgagacagggtcttgctttgttgcccaggctggagtgcagtgacgtggtcatagctcactgcagcctcaacctcctgggctcaagtgaccctcctgcctcagcctcccaaagttctgagatgataggcatgagccattgtgcctagcctattttgatttttttcttagagtcaaggtcttgctctgttgcccaggctgatcttggacttgcgagccaccatgcctggctgggttttttaaaaatagaatctcactgatagcctgcaagaaacagatgcagtgcctgcttccgtatcagtccaaggagccctcgtgtttgccacctttacctttgaacctccccctgcctccctgcctgtgtccgcttttgcagctcaatgcagccatgacaaggaaagaaaagacaaaggaaggccagagagccgcgcagttctctgcaggtgcagatgcaggcagtggaggtggcctgagcaggcagaaggacaccaagcgccctatgttgcttgtcattcatgacgtggtcttggagcttctgactagttcagactgccacgccaaccccagaaaataccccacatgccagaaaagtgaagtcctaggtgtttccatctatgtttcaatctgtccatctaccaggcctcgcgataaaaacaaaacaaaaaaacgctgccaggttttagaagcagttctggtctcaaaaccatcaggatcctgccaccagggttcttttgaaatagtaccacatgtaaaagggaatttggctttcacttcatctaatcactgaattgtcaggctttgattgataattgtagaaataagtagccttctgttgtgggaataagttataatcagtattcatctctttgttttttgtcactcttttctctctaattgtgtcatttgtactgtttgaaaaatatttcttctataaaattaaactaacctgccttaaaa

SEQ ID NO: 117271 - DNA, 1000 bp, Homo Sapiens
taccgagccctgcagcagctgcagcgagacctgggcccccaccactttaacgtgctcgccttcccctgcaaccagtttggccaacaggagcctgacagcaacaaggagattgagagctttgcccgccgcacctacagtgtctcattccccatgtttagcaagattgcagtcaccggtactggtgcccatcctgccttcaagtacctggcccagacttctgggaaggagcccacctggaacttctggaagtacctagtagccccagatggaaaggtggtaggggcttgggacccaactgtgtcagtggaggaggtcagaccccagatcacagcgctcgtgaggaagctcatcctactgaagcgagaagacttataaccaccgcgtctcctcctccaccacctcatcccgcccacctgtgtggggctgaccaatgcaaactcaaatggtgcttcaaagggagagacccactgactctccttcctttactcttatgccattggtcccatcattcttgtgggggaaaaattctagtattttgattatttgaatcttacagcaacaaataggaactcctggccaatgagagctcttgaccagtgaatcaccagccgatacgaacgtcttgccaacaaaaatgtgtggcaaatagaagtatatcaagcaataatctcccacccaaggcttctgtaaactgggaccaatgattacctcatagggctgttgtgaggattaggatgaaatacctgtgaaagtgcctaggcagtgccagccaaataggaggcattcaatgaacattttttgcatataaaccaaaaaataacttgttatcaataaaaacttgcatccaacatgaatttccagccgatgataatccaggccaaaggtttagttgttgttatttcctctgtattattttcttcattacaaaagaaatgcaagttcattgtaacaatccaaacaatacctcacgatataaaataaaaatgaaagtatcctcctc

SEQ ID NO: 117272 - DNA, 1000 bp, Homo Sapiens
  misc_feature (956)..(956): n is a, c, g, or t
atagctctgggagcaggatccttacttcttgtcatcacctacccactaatgaaaagaatttcatactggcctcaactagccttgggcttgacatttaattggggagcgttacttggatggtctgctatcaagggttcctgtgatccatctgtttgcctacctctttatttttctggagttatgtggacactaatatatgacactatttatgcccatcaggacaaaagagacgatgttttgattggtcttaagtcaacggctctgcggttcggagaaaataccaagccgtggctcagcggcttcagtgttgcaatgctgggggcactgagcctagtgggtgtgaacagtggacagactgctccctactacgctgccctgggtgctgtaggagcccatctgactcaccagatttacactctagacatccacagacctgaggattgttggaataaatttatctccaaccgaacactgggactaatagtttttttagggattgtccttgggaatttgtggaaagaaaagaagacagacaaaacaaagaagggtatagagaataaaatagaaaattaatgaatgaaatttatctaggaatttttaatacattttttacaaaatataattagatttgaatacaaaatctgatacaatatgttaaagaattaagaacctgaagatgaagatttagagcatatttacctggattttacttatttgctagcaaaattcccccttgtcacagaaaccagggactcttcaggatttgagatggccttgagtattttagttgatacattcttctgcccattataattctcacctgaagttatggggattgcacgggttttggcactttagaaaaagcctgatgtgggtcttacataaatgaatgtctgtataagaaaatggactcttttttttaggtaaaaaaaaaaaaaaaaaaaaaaaaaaaagtnctctgcgttgttaccactgcttgccctatagtgagtcgtattag

SEQ ID NO: 117273 - DNA, 1000 bp, Homo Sapiens
ctgcttcacagaagaaaagcctggttcataaaactttgcctgatgttctagcagaacctttatcaagtgaaagacatgagtttgtgatggcacaatatgtgaatgaatttcagggtaatgatgcacctgttgaacaagaaattaacagtgcagaaacttactttgaaagtgccagagtagagtgtgcaatacaaacatgtccagaattgctgcgaaaagattttgaatcactgtttccagaagtagctaatggcaaactaatgattctgactgtaacacaaaaaactaagaatgatatgactgtttggagtgaagaagtagaaattgaaagagaagtgctcttagaaaagttcatcaatggtgctaaggaaatttgctatgctcttcgagctgagggttattgggctgactttattgacccatcatctggtttggcattttttggaccatatacaaacaacactctttttgaaactgatgaacgctaccgacatttaggattctctgttgatgaccttggatgctgtaaagtgattcgtcatagtctctggggtacccatgtagttgtagggagtatcttcactaatgcaacaccagacagccatattatgaagaaattaagtggaaattagcagaaatatccattcatttgctgtactatttgtatgtaatatttgggttgatctataaacactgtcagactaaagtttttaaaatatacttatttctaagtatttatttcagcatttatgaatttgcaacattggcaagtgatttgggattttaaaattgcaaatgttcatttattcatatcattgaatacacgttgaacacatccacattgtataggatgtggtaattagcttgtaaccagggtatgatctgctattgttatttctcctctttattggaaaaaggcctcagttttaattattttcttcccaaaataaatcacacatttggttacaaaaaaaaaaaaaaaaaaaaaaaaaaaaaaaaa

SEQ ID NO: 117274 - DNA, 1000 bp, Homo Sapiens
aggtcgagagagactttgcctccgtgtattcccgtctggtgctctgtaagaccttcaggttggatgaagatggcaaagtcctgaccccggaggagctgctctaccgggctgtgcagtctgtgaacgtgacccacgatgcagtgcatgcacaaatggatgtgaagctccgctcactgatctgcgtggggctcaatgagcaggtgctgcacctgtggctggaggtgctctgctccagcctgcccaccgtggagaagtggtaccagccctggtccttcctgcgcagcccgggctgggtccagatcaagtgtgagctccgagtcctctgctgctttgccttcagcctctcccaggactgggagctccctgcgaagagagaggcgcagcagcccctgaaggagggcgtccgggacatgctggtgaagcaccacctcttcagctgggatgtggacgggtgaccccctcctccccagcccaacctcgggcctgcgtctgaggtggcccaggaccccaagctgcagagcccagggaagagcagctccagagccctggccggggccgcgggatatcaatatcaggctgccccactccacgttccccagcacatcccaggtggtgggagcagagggtaccctgccccaccagggtccttagggatgctctaggccaaaccacagtttgtaccaaaaaccttgtgaggaggtgggggagccatgtctgtgctcaggaagagggaaggggatgggggtggctagtaggctcctggcctctttggtttataaataaactgtgtctgtctttgagaaagcacctacctgtcttctgtgcagctagggctgcagagctgtattcaggtccaaggttctgcccttccttgagtggtctagaaggcactgcgtggcccctcagatgctgggacacaacagacccgggacccagctgtgctacccaccccttccatggactgaataagatggactaacaggccaaaaaaaaaaaaaaa

SEQ ID NO: 117275 - DNA, 1000 bp, Homo Sapiens
aataatagtttttcttacaactaagctggccccagccttgtcttgatattaatacatgaaatttttataattgtctcattgtctcatttagaaacatccatatttttctgctttttctattgccattttttatttgtgcatgaattgattattgagaaaatgtagcagtttgcatatttaaaaattaatcattttgcattttacatttaaatatgctaacatcactgtcatagaattcccaaatttcatttgtagatactgaactaagggctaatgtcaggagctgatttttaatgataaagctgcagatgggctaaataaaagccaaattaatcctacaatcaggtattatgtttttaaaccaagttgagtgaattggtagtggacttgggaaatcttccccagcagaatctggatgaatggcacagaattgaaatctctttgtttcccaccatttccctttaagtgctctgctcctttgtaaaaagttaaagatttgaaagagaatctcatattcccgaggcattaggaagaaaggatttaatcccttcaatttggggcttaatcttgtttaaaaaaatgtaagtgaagatggaaggctggagagaatgattgctttttgtacagttaaataaggtcacaatattcttacatactttgttttacaactgtgttttcattttttcaaatgtctggccatttagcaaagttatttactatttactgtgtacatagaaagctttattatgtgtggtgtatctaaattttttttgctgaaatacattatggtcaatcaagccaagcctgcatgtacagaatttgtttttttttcaaataaattagttgttttcttatttttttggcttagtatgttgaaataaactatggtatcttcatcattttgtacatttcctttttgaggaaggtttctttataagtgcaagggctaccctaataaaggaatgtatatacttaaaaaaaaaaaaaaaaaaaaaaaaaa

SEQ ID NO: 117276 - DNA, 879 bp, Homo Sapiens
gcggagtctccaactgggagagctgcagctgccgagaggaggagaacgctgaggtcggtcggaccaacggacgcgctgaccgctgccaactgcagctcgcgctgcctcctgctcgcgccgtgccactaaggtcactcccgcctccgagagcccagagccgagatggaaacggtccaggagctgatccccctggccaaggagatgatggcccagaagcgcaaggggaagatggtgaagctgtacgtgctgggcagcgtgctggccctcttcggcgtggtgctcggcctgatggagactgtgtgcagccccttcacggccgccagacgtctgcgggaccaggaggcagccgtggcggagctgcaggccgccctggagcgacaggctctccagaagcaagccctgcaggagaaaggcaagcagcaggacacggtcctcggcggccgggccctgtccaaccggcagcacgcctcctaggaactgtgggagaccagcggagtgggagggagacgcagtagacagagacagaccgagaaggaagggagagacagagggggcgcgcgcacaggagcctgactccgctgggagagtgcaggagcacgtgctgttttttatttggacttaacttcagagaaaccgctgacatctagaactgacctaccacaagcatccaccaaaggagtttgggattgagttttgctgctgtgcagcactgcattgtcatgacatttccaacactgtgtgaattatctaaatgcgtctaccattttgcactagggaggaaggataaatgctttttatgttattattattaattattacaatgaccaccattttgcattttgaaataaaaaactttttataccaaaaaaaaaaaaaaaa

SEQ ID NO: 117277 - DNA, 1000 bp, Homo Sapiens
cagtgcctgcagctaacccaggcagccaggagacccgacaggcagcagaagtcctggagccagtgacctcagtttcagctttcctgggcaccagcctggaccttgcccatggctatgccaagccttgggaatctcagcctcccctccgtaggttagactgaagcatggcagaggctgttgtggacaatcaagaggatgaatggggggatctcaaggcccaaatgctggaccacatctcctgctgttctgggtaaccttgagctatgtatgacacaactcttctatgcctggatgtggtgttcaggaagctcattctgatgccctgggctttggccttgccagggaacttcacatacagatgagaatggggaaagggtaacttattgcagcagccccaggcagtaccaggaggaggtacatgtatgtccgtgttgcaaaaataatacatgcctcaaaaacctgcctaggggagccctagtgcctgggtgctgtggcctgaggtagcaggtgggaagttagggatgtcacagaaatgtctgtgtctgaatccaggattggggtgggtgttggagagggctttcagctcccctcctcccaggggggcctctttttttaacggctgccgtgcccttcctggcccagccctaaacctaaattcaaatctcctccatgcctttgcgcaaaggacctccctcttgcactctaagccttagtttcctcctctaaaaaaagggggtctctaaacaggagctacctcatagggttgttgaggattaagtgaaccaatacatatacagtgcttagcacttaataagtattcccccctgcgacacctagctgaactatggtttggtgtctgatcttgagaggttgatgtaaccttttaaaggcctcagttcgctcacctgtgaaatgggtctaagaatagcactgatctcacagggttgtgatgcagattaaaggagatggcatgtgtaatgtaaaaaaaaaaaaaaaaaaa

SEQ ID NO: 117278 - DNA, 1000 bp, Homo Sapiens
tggaagaggtgctgccccgccatggcagtggccaccatggggcctggcacatctctctgagcaagcccagcgagaaggagcagcaccttctcatgacactggtgggcgagcagggggtggtgcccactcaagatgtcctttccatgctgggtgacatccgcaggagcctggaggagattggcatccagaactattccacaaccagcagctgccaggcgcgggccagccaggtgcgcagcgactacggcacgctcttcgtggtgctggtggtcattggggccatctgcatcatcatcattgcgcttggcctgctctacaactgctggcagcgccggctgcccaagctcaagcacgtgtcgcacggcgaggagctgcgcttcgtggagaacggctgccacgacaaccccacgctggacgtggccagcgacagccagtcggagatgcaggagaagcaccccagcctgaacggcggcggggccctcaacggcccggggagctggggggcgctcatggggggcaagcgggaccccgaggactcggacgtgttcgaggaggacacgcacctgtgagcgcagcgaggcgcaggccgagtgggccgccaggaccaagcgaggtggaccccgaaacggacggcccggagcccgcaccagccccgcgcctacccggccgcccccgcgcctggccctcggcgcgggctccttcccgcttcccccgacttcacacggcggcttcggaccaactccctcactcccgcccgaggggcaggcctcaaagcccgccttggccccgctttcccgcccctgaaccccggccccgcgggcggcgggcgcgcttcctgcgccccgggactcaattaaacccgcccggagaccacgcgggcccagcgaaaaaaaaaaaaaaaaaaaaaaaaaaaaaaaaaaaaaaaaaaaaaaaaaaaaaaaaaaaaaaaaaaaaaaaaaaaaaaaaaaaaaaaaaaaaaaaaaaaaaaaaaaaaaaaaaa

SEQ ID NO: 117279 - DNA, 1000 bp, Homo Sapiens
tgaaaacatacctctagatgaaagtcgaaatgaaaagctggatcagctgcagttggaagggttgaaatacatagaaagaaatgaacaaaaaatgaaaaaagttgcaaaaatattaagtcaagaaaaaacaactctgcagaaaattaatgattggataaaattaaaaactgatatgtatgaaggacttccattcttttcaaaattgtgatgagtatatgcttatgttctcataaatgaaggtctgtttagaagatcaaccacattcaataaggaattgtggggttcgacatgagttaactttgaaatacgtatgaattctggagaatcctgaaaaagacggtgcttcaaccagcttgcatagcacagagaatattcttggttacagaattcatatgggaactaggcttttaagatgttaataattagctaagctttagtaacccttactgtgctagtagattttagtagatattggtgttatattgtttgatgtttgaaaatatattaatatatgtgccgaacaagaaaccgaaagctatattgtactgtgtatttttactttagtcctcataatcatgttgaatttatgtgatcattgattttatttcatatggaaaagctaatttcttcttaaatttacattacctaatattctcactagctatgttctccaatccacactgccttttattgtaatatcatctaaatagatgcagaaaaatggaattttctctattaaagtattttacatttgacataaaaaagaaccagatacagttttctattcagatatgtttattttaacattgtttggttaaaaaaggtgaagttccagtcaaccactttttacccctgaaatttcaagataatgctatattaacttttccagatctaacactagcttattcttccctgttataaaatggtttgaacttactgaggagatattcctatcattaacaaaaataaactatttaaataaccaaaaaaaaaaaaaaaa

SEQ ID NO: 117280 - DNA, 1000 bp, Homo Sapiens
gtccccggtgagcggcgtgcgcagggaaggcgctcggggcggcggccgtggccgggggcggtggaagcaggcgggccggggcggcggcgtctgtggccgtggccggggccggggccgtggccggggacggggacggggccggggccggggccgcggccgtcccccgagtggcggcagcggccttggcggcgacggcggcggctgcggcggcggcggcagcggtggcggcggcgccccccggcgggagccggtccctttcccgtcggggagcgcggggccggggcccaggggaccccgggccacggagagcgggaagaggatggattgcccggccctcccccccggatggaagaaggaggaagtgatccgaaaatctgggctaagtgctggcaagagcgatgtctactacttcagtccaagtggtaagaagttcagaagcaagcctcagttggcaaggtacctgggaaatactgttgatctcagcagttttgacttcagaactggaaagatgatgcctagtaaattacagaagaacaaacagagactgcgaaacgatcctctcaatcaaaataagctgcgctggaacactcatcgtcctgcaccatggcatgcgctttcaagactctgcttgctcatacgctgtttgctctgcttggaatgtgcttacccccttccccttcatctggtgaactcctactcatccaagacccagcttcattgtctccatctctgggaagcctgccctgcatactccaggcagaaccaatcctttcctccataatgcttccctggtgctttgccattgtatttgtgacttgtttgtctgcttcagctagactgtgagctccatgagggcagggaccatgtctttttttgcttttgcacacggtaggtacttaatattgctttatgtttatttgatttaccatccacctcattctagaagtgtatagtggtaataaatgtttattaaataaataaattataccgtacattattt

SEQ ID NO: 117281 - DNA, 1000 bp, Homo Sapiens; identical to SEQ ID NO: 115458

SEQ ID NO: 117282 - DNA, 1000 bp, Homo Sapiens
aatgtggcaaagcctttaaccagtcatcgacccttactacacataatataattcatactggggaaattccctacaaatgtgagaaatgtgttagagcttttaaccaagcctcaaagcttactgaacataagttaattcataccggagagaaacgttatgaatgtgaagaatgcggcaaagcttttaaccgatcctcaaaacttactgaacataagtacattcatactggagagaagctgtacaaatgtgaagaatgtggtaaagcctttaaccagtcctcaacccttactacacataagagaattcatagtggagagaagccctacaaatgtgaagaatgtggcaaagcttttaaacaattttcaaatcttactgaccataaaaaaattcatactggagagaaaccctacaaatgtgaggaatgtggcaaagcttttaaccaactctcaaaccttactagacataaggtaattcatactggagagaaaccctacaaatgtggagaatgtggcaaagcctttaaccagtcctcagcccttaatacacataagataatccatactggagagaatccccacaaatgtagagaatctggcaaagttttccacctatcctcaaaacttagtacatgtaagaaaattcatactggagagaaactctacaaatgtgaagaatgtggcaaagcctttaactgatcttcaacccttattggacataagagaattcatactggagagaaaccctacaaatgtgaagaatgtggcaaagcttttaaccaatcttcaacacttactacacataagataattcatactgaagagaaacagtacaaatgtgatgaatgtggcaaagcttctacctgatcctcaaaactcattgaacacaagaaaattcatactggagagaaaccttacaagtgtgaagaatgtggcaaaacttctaaccatttctcaacctttactaaacataagatgattcatactggagagaagttacacaa

SEQ ID NO: 117283 - DNA, 1000 bp, Homo Sapiens
tcctgggacgggagcccacttcctcagagcaaggcggccttgaaggatctggttctgctgccggagaaggcaaacccgctttgagtgaagaggaaagacaggaacaaactaagaggatgttggagctggtggcccagaagcagcgggagcgtgaagaaagagaggaacgggaggcattggaacgggaacggcagcgcaggagacaagggcaagagttgtcagcagcacgacagcggctacaggaagatgagatgcgccgggctgctgaggagaggcggagggaaaaggccgaggagttagcagccagacaaagagttagagaaaagatcgagagggacaaagcagagagagccaagaagtatggtggcagtgtgggctctcagccacccccagtggcaccagagccaggtcctgttccctcttctcccagccaggagcctcccaccaagcgggagtatgaccagtgtcgcatacaggtcaggctgccagatgggacctcactgacccagacgttccgggcccgggaacagctggcagctgtgaggctctatgtggagctccaccgtggggaggaactaggtgggggccaggaccctgtgcaattgctcagtggcttccccagacgggccttctcagaagctgacatggagcggcctctgcaggagctgggtatggctgcaagactagaaaccaggactagaaactgggggagtagggaggcatgcctaggaaaaggagggatgcaaagagaaggggctttgtgaacatggtgcaaggccaggaattttgggagcaaaaaccaagtatccttgtggttcaagcctgttttcttccatcttcaggactcgtgccttctgctgttctcattgtggccaagaaatgtcccagctgagggcctttgtcccattgtccctctgtgaccccttcatctttgataaagcactgacatctccttcctaataaatagaccctgagttctgtaaaaaaaaaaaaaaaaaaa

SEQ ID NO: 117284 - DNA, 1000 bp, Homo Sapiens
tggtttggggatgtagaagctgaaactatgtacaggtgtggagagagtatgctctgtgtcgtcccagacatttctgcattccgagaaggttggagatgggtccggcaaccagtccaggttccagtaactttggtccgaaatgatggaatcatttattccaccagccttacctttacctacacaccagaaccagggccgcggccacattgcagtgcagcaggagcaatccttcgagccaattcaagccaggtgccccctaacgaatcaaacacaaacagcgagggaagttacacaaacgccagcacaaattcaaccagtgtcacatcatctacagccacagtggtatcctaactaccgtctttttgctaggacttaaactgacttgagtgtggcaaaaagttaacaaaaaaggagaaaaaatgaacaatcgtttgtggtttcttgggaaaacttttcataccaggtgatactattcaaaaaccccgttgtctccctgcaagtgctgatttgaaatgcagaagccacagtaaaaaaaaaaaaaaaaaaaaaaaaaaagaaaaaaaaatcaaaatgtataaatattggaaatcaagtttttcagctgttttgttggttggttggttggtttttgtttggttttgtttaaatgggcaagaagtaaataatgtggctggaatacaagttgaacaaactagaagacacaaatctaacatagtttttatggaccaaggaacttgtatattgtataagctttagtaaaaggtacattttcaccatacctttttttatatcacggtattatagtacaccttgttaccaaataggttgttctcttccccacccacctttgagcttttgctctaaaatacattcaggttccaagcctgaccatccttgtttaatctatcatactcttccaggttttttttttttggtctaaggctggaacttttttcttttttttcagctgaagtcttatgacttttcatgagtcaaaatt

SEQ ID NO: 117285 - DNA, 1000 bp, Homo Sapiens
ggcctgccctgagtctgctggggagtgggcattctctgccagggacccatgagcaggctgcatggtctagaggttgtgggcagcatggacagtcccccactcagaagtgcaagagttccaaagagcctctggcccaggcccctccccaccagggctttgcagatgtccttgaaagacccaccctagagccctttggagtgctggcccctcctgtgccctctgccctggtggaagcggcagccacaagtcctcctcagggagccccaagggggattttgtgggaccgctgcccacagatccaggtgttggaagggcagcgggtaaggttcccaagccagccccaacacccttcccacttggcacccagagggggctgtgggtggaggcctgactccaggcctctcctgcccacaccctctgggctgagttccttctttcccttggacgcccagtgctggccttggaggacggtcagctggaggatggcggtgggggaggctgtctttgtaccactgcagcatcccccacttctccacggaagccccatcccaaagctgctgcctggccccttgctgtaaagtgtgaagggggcggctgagttctcttaggacccagagccagggccctcaacttccatcctgcgggaggccttggccgggcactgccagtgtcttccagagtcacacccagggaccacgggaggatcctgacccctgcagggctcaggggtcagcagggacccactgccccatctccctctccccaccaagacagccccagaaggagcagccagctgggatgggaacccaaggctgtccacatctggcttttgtgggactcagaaagggaagcagaactgagggctgggatattcctcatggtggcagcgctcatagcgaaagcctactgtaatatgcacccatctcatccacgtagtaaagtgaacttaaaaattcaatcaaatgaacaattaaataaacacctgtgtgtttaagacatg

SEQ ID NO: 117286 - DNA, 1000 bp, Homo Sapiens
ccaagaattttggttttgtgtagagtataaaaagtgtgtattgctgtgtaatattactagcaaattttgtagatttttttccatttgtctataaaagtttatggaagttaatgctgtcatacccccctggtggtaccttaaagagataaaatgcagacattccttgctgagtttatagcttaaaggcctaaggagcactagcaacatttggctatattggtttgctagtcaccaacttctgggtctaaccccagccaaagatgacagcagaacaacataatttacactgtgatttatctttttgctgagggggaaaaaatgtaaatgttctgaaaattcactgctgcctttgtggaaactgtttcagcaaaggttcttgtatagagggaatagggaatttcaaaataaaaaattaagtatgttctgtgttttcattttaactttttttatggtgtttaatttgtggttggctgcaactgtgtatcatgtatatggaacttgtaaaaaagttctcgacattcagatcttaagagatgaaatcacttttacctataaaaaccacttttattgcggtttgactgcattgagctctaggatattaaatgatatcactaatattttgcatgtaatttgctcatttgagtgagggcactttttttgtacatatgatggggccaatgcacaatacttttatcacaatcaactttttctttgtatccctatttcaatgagcagtcagtctcaagaggttactgcacttcagttctaactagacatttgtactaaggtatttcagttatgtaaactcagcctgggcactttctgataactgtaaaatgttttataagatcatgattattgaagatacattttggaaaattttaaatgttcgtgagcagcttaactacttttgtatctagccttttttaagtatcttgttacatttacttttttaaataaagaaattacagaagaaatgtcaagaaaaaaaaaaaaaaaa

SEQ ID NO: 117287 - DNA, 1000 bp, Homo Sapiens
tggcccagtgcataaaaaagatgttatgaaggcttcagtgatgttggaacatgaccctcagtatgcagtaattttggccttcgatgtgagaattgaacgagatgcacaagaaatggctgatagtttaggagttagaatttttagtgcagaaattatttatcatttatttgatgcctttacaaaatatagacaagactacaagaaacagaaacaagaagaatttaagcacatagcagtatttccctgcaagataaaaatcctccctcagtacatttttaattctcgagatccgatagtgatgggggtgacggtggaagcaggtcaggtgaaacaggggacacccatgtgtgtcccaagcaaaaattttgttgacatcggaatagtaacaagtattgaaataaaccataaacaagtggatgttgcaaaaaaaggacaagaagtttgtgtaaaaatagaacctatccctggtgagtcacccaaaatgtttggaagacattttgaagctacagatattcttgttagtaagatcagccggcagtccattgatgcactcaaagactggttcagagatgaaatgcagaagagtgactggcagcttattgtggagctgaagaaagtatttgaaatcatctaattttttcacatggagcaggaactggagtaaatgcaatactgtgttgtaatatcccaacaaaaatcagacaaaaaatggaacagacgtatttggacactgatggacttaagtatggaaggaagaaaaataggtgtataaaatgttttccatgagaaaccaagaaacttacactggtttgacagtggtcagttacatgtccccacagttccaatgtgcctgttcactcacctctcccttccccaacccttctctacttggctgctgttttaaagtttgcccttccccaaatttggatttttattacagagtctaaagctctttcgattttatactgattaaatcagtactgcagtatttgattaacca

SEQ ID NO: 117288 - DNA, 1000 bp, Homo Sapiens
taagtgtttgagtaaaaaaattgaaggtacttttttaaggaaaaaaatttatatgccacagtttacatagacatttcagattcaacacgtactcttgaatataatggtttcttttacttggtcaaaatgcatgtatagcatttctttcatcttagttccttgtgtttgcctatgtggtcctttatatattttttattgtatcgaagaaacaaaactatcttcaaaaataagttaatttggatatatttgtcatatcaaactacaaagtgtacaaagttaagtttagcccttttctagaaagtgatctttaaaattaaaaatgctcctcttttaaattcaccaaatttatgtgtgggaaggcaccaaaatgattttgtaagtgccactgcaatattccctttcaagtgtggcctaaatttcaatcttaaggatggaatgcatgtctgctccttgttctgaaaaatgtaggcatctactacattttaaaacacagtgaaacatatacataagcctataaaaaaagatttgtgcaatttgaaagcctgttaattttttatgtagacatacctacacacgaaagggttaaattcacagccttactagttccttgcttccagtatttcaattggtctcctcccctcattattattattactactagtactattatttttgcacatagttaactgcccttcaatatgattcttaaaaagtgctgtttctgtggtatcgtattctctaaataatcatatttaattttttaaaacaaggttgcagtttctaattgtttcgttcctgtgtttttgctggtgtgtaataaaagcaagttttttcttttcatggttatttaatacattagctgcctgtaaataattcttgttataatgctctggaatgtgttgtagaagttgtattagattagttttaaacccttgtttgaaagccacattgttttggttatttctattaaattagaaaattgaaaaagttttcaaatgaa

SEQ ID NO: 117289 - DNA, 1000 bp, Homo Sapiens
acagaatgggagaaaatttttgcaacctactcatctgacaaagggctaatatccagaatctacaaagaactcaaataaatttacaagaaaaaaacaaacaaccccatccaaaagtgggcaaaggatatgaacagacacttctcaaaagaagacatttatgcagccaaaaaacacatgaaaaaatgctcatcatcactggccatcagagaaatgcaaatcaaaaccacaatgagataccgtctcacaccagttagaatggtgatcattaaaaagtcagcaaacaacatgtgctggagaggatgtggagaaataggaacacttttacactgttggtgggactgtaaactagttcaaccattgtggaagtcagtgtggcgattcctcagggatctggaactagaaataccatttgacccagccatcccattactgggtatatacccaaaggattataaatcatgctgctataaagacacatgcacacgtatgtttattgcagcactattcacaatagctaagacttggaaccaacctaaatgtccaacaatgatagactgggttaagaaaatgtggcacatatacaccatggaatactatgcagccataaaaaaggatgagttcatgtcctttgtagggacatggatgaagctggaaaccatcattctcagcaaactaccgcaaggacaaaaaaccaaacaccatatgttctcactcataggtgggaatggaacaatgagaacacatggacacaagaaggggaacatcacacaccggggactgttgtgtggtgggggtaggggggagggatagcattaggagatatacctaatgctaaatgacgagttaatgggtgcagcacaccaccatggcacatgtatacatatgtaacaaacctgcacgttgtgcacatgtaccctaaaacttaaagtaaaataaaatttgaaaaaagaatatagaatcaatcaaaaaattcaaaaaaaaaaaaaaaaaaaacatggtg

SEQ ID NO: 117290 - DNA, 1000 bp, Homo Sapiens
catcctgagtgaaggtgaggaatcgccctcccctgagctcatcgacctctaccagaaatttggcttcaaggtgttctccttcccggcacccagccatgtggtgacagccaccttcccctacaccaccattctgtccatctggctggctacccgccgtgtccatcctgccttggacacctacatcaaggagcggaagctgtgtgcctatcctcggctggagatctaccaggaagaccagatccatttcatgtgcccactggcacggcagggagacttctatgtgcctgagatgaaggagacagagtggaaatggcgggggcttgtggaggccattgacacccaggtggatggcacaggagctgacacaatgagtgacacgagttctgtaagcttggaagtgagccctggcagccgggagacttcagctgccacactgtcacctggggcgagcagccgtggctgggatgacggtgacacccgcagcgagcacagctacagcgagtcaggtgccagcggctcctcttttgaggagctggacttggagggcgaggggcccttaggggagtcacggctggaccctgggactgagcccctggggactaccaagtggctctgggagcccactgcccctgagaagggcaaggagtaacccatggcctgcaccctcctgcagtgcagttgctgaggaactgagcagactctccagcagactctccagccctcttcctccttcctctgggggaggaggggttcctgagggacctgacttcccctgctccaggcctcttgctaagccttctcctcactgccctttaggctcccagggccagaggagccagggactattttctgcaccagcccccagggctgccgcccctgttgtgtctttttttcagactcacagtggagcttccaggacccagaataaagccaatgatttacttgtttcacctgaaaaaaaaaaaaaaaaaaaaaaaaaaaaaaaaaaaaaaaaaaaaaa

SEQ ID NO: 117291 - DNA, 1000 bp, Homo Sapiens
acatttcaaaccaatttcaaattattttgcaaaagttcctaaatttgtaaacatacatattgctgtatttaaattccatatatttagccccattacactaggtacggcggcgaagtgctaaaagggaacggcgatgaacaaatgtaattaataactttctctgtgaaagctttggaaaaatcttttttttttttttttttttttggtcaagcttgaggctgaataaagcctttgatgcacaaaatgggactgctgaagagtggacagttggaccttactttggtgaccccatacatttgtggtcacatgctttagccatacacatggtaacattgactatggagtcttgtgaaagtgtaatgtgcgatggctatgtagacataaagaagaaacttgtaaatatcttttttcttttttttaatgtttctgatttctgaagtgcttgtatagcttttatctgcggctttaaactgacagtacccgactgtttattggatctattgatttgaaaagaatttgttaggatagatcttaagcagtaatctgtcagtgtttgtatttgtattttctgcaattttactgtgaaaaaaaatttgttttcaacaattggtgtcattttcttgatgtcactatttgttggagagttaaatggtctcttccctttgtgtatcttacctagtgtttactcctgggcacccttaatcttcagaggtgctaaattgtctgccattacaccagaaggatgcctctgataggaggacaaccatgcaaattgtgaaatagtcctgaagttcttggattactttacacctcagtattgatttgtcccagaattttctggcctttcatggcaatgaaaattttaagaagaaagatttaaagtattttaattttaaagagtgtgttataaaataatgtactgaattctttatcccattttatcatcctttcagtttttattaatctactgtatcaataaaattctgtaatttgaatgagt

SEQ ID NO: 117292 - DNA, 1000 bp, Homo Sapiens
catttctttcaagctcaaatctttcactggatgttttgaggggtaatgatgagactattggatttgaggatattcttaatgatccatcacaaagcgaagtcatgggagagccacacttgatggtggaatataaacttggtttactgtaatagtgtgctgttcatggaaaccgagggctgcatcttgtttatagtcatctttgtactgtaatttgatgtacacaacattaaaagtactgacacctgagaatttctgctcaagtagtatcagtgatcatttaaaatttggaggggtctttggtttacagccatgtgacaattaaaagcactaaagggagatcatgttaaagctcttaatttatattaaaacagtagcctttgtctttaaaaaagttgttgctcatgaatattataaaatgatctacaggtttcaattcaacctgtttctaggtttttttgtaaatttagttttgattaagcattataagcatttgagtctataaactttatagtagcatctttcagaataaacatttttaattgatttcagtggcaactctcaaattgattacaatatgagatatatcagtgtcgtccattaacactcataagaataatatttactgtgtcagtgctattttaggattatagttattgtttgattatttcaggttgaaaagtagaagttccaaggttttgattttggtctggtctttaagtgaaaaattaaagcaaccagtagatgtaggttaaacttttacttcatagacttaatatgtgattaatatattgccaagcaacactgttaaagaaaagtaaaactcattttttcttgttcttaatttatatattacaagatactgtaaggtattctttatgaagttgatatataaaaatttacatttttagaacattagtgaatggatcatcttttacaattaaaagtatattttgattatcagtttcttagcaaaaaaaaaaaaaaaaaaaaaaaaaaaaaa

SEQ ID NO: 117293 - DNA, 1000 bp, Homo Sapiens
atcgaatgatggccattgcacccaatgttacagtcatggttggggaattagttggagcacggcttattgctcatgcaggttctcttttaaatttggccaagcatgcagcttctaccgttcagattcttggagctgaaaaggcacttttcagagccctcaaatctagacgggatacccctaagtatggtctcatttatcatgcttcactcgtgggccagacaagtcccaaacacaaaggaaagatttctcgaatgctggcagccaaaaccgttttggctatccgttatgatgcttttggtgaggattcaagttctgcaatgggagttgagaacagagccaaattagaggccaggttgagaactttggaagacagagggataagaaaaataagtggaacaggaaaagcattagcaaaaacagaaaaatatgaacacaaaagtgaagtgaagacttacgatccttctggtgactccacacttccaacctgttctaaaaaacgcaaaatagaacaggtagataaagaggatgaaattactgaaaagaaagccaaaaaagccaagattaaagttaaagttgaagaagaggaagaagaaaaagtggcagaagaagaagaaacatctgtgaagaagaagaagaaaaggggtaaaaagaaacacattaaggaagaaccactttctgaggaagaaccatgtaccagcacagcaattgctagtccagagaaaaagaagaaaaagaaaaaaaagagagagaacgaggattaacagaaaggaattacgattatatcacccggacacacatcatgcttaagattcaactgggagcataccagggatgctctctaacgtaatcaagggaaggttcagtaagacaaagtgatttatcatctataacttcaaacctatttgtcttgacatcaactctgttaaccttatgtcatcatttcttagagtctttgatatacaaataaaattttctttgtattttaaaaaaaaaaaaaaaa

SEQ ID NO: 117294 - DNA, 1000 bp, Homo Sapiens
tttttagaaaaatcaactgaaagagaaactcgccaagaatatgccctggctatgattcagtgcaaagttctgaaacagttggagaacttggaacagcagaagtacgatgatgaagatatcagcgaagatatcaaatttcttttggaaaaacttggagagagtgtccaggaccttagttcatttgatgaatacagttcagaacttaaatctggaaggttggaatggagtcctgtgcacaaatctgagaaattttggagagagaatgctgtgaggttaaatgagaagaattatgaactcttgaaaatcttgacaaaacttttggaagtgtcagatgatccccaagtcttagctgttgctgctcacgatgttggagaatatgtgcggcattatccacgaggcaaacgggtcatcgagcagctcggtgggaagcagctggtcatgaaccacatgcatcatgaagaccagcaggtccgctataatgctctgctggccgtgcagaagctcatggtgcacaactgggaataccttggcaagcagctccagtccgagcagccccagaccgctgccgcccgaagctaagcctgcctctggccttcccctccgcctcaatgcagaaccagtagtgggagcactgtgtttagagttaagagtgaacactgtttgattttacttggaatttcctctgttatatagcttttcccaatgctaatttccaaacaacaacaacaaaataacatgtttgcctgttaagttgtataaaagtaggtgattctgtatttaaagaaaatattactgttacatatactgcttgcaatttctgtatttattgttctctggaaataaatatagttattaaaggattctcactccaaacatggcctctctctttacttggactttgaacaaaagtcaactgttgtctcttttcaaaccaaattgggagaattgttgcaaagtagtgaatggcaaataaatgttttaaaatctaaaaaaaaaaaaa

SEQ ID NO: 117295 - DNA, 1000 bp, Homo Sapiens
tgcctccattgtctccaatgcagccaatttcagaggaagaggctattcagattattgcagaccctccattgccaccagcttcattcacacttcgagactatgtggatcattctgagactctgcagaagttggttcttctaggcgtggatttgtccaagatagaaaaacatccagaagcagcaaacctccttctgagactggattttgaaaaagacattaagcaaatgcttctgtttcttaaagatgtgggtatagaggataaccaactgggagcattcctgacaaaaaatcatgcaattttctctgaagaccttgaaaatctgaagaccagggtggcttatctgcattcaaaaaatttcagtaaagcagatgttgcacagatggtcagaaaagcaccatttttgctgaacttttcagtggaaagactggataacagattgggattttttcagaaagaacttgaacttagtgtgaagaagactagagatctggtagttcgtctcccaaggctgctaactggaagtctggaacccgtgaaagaaaatatgaaggtttatcgtcttgaacttggttttaaacataacgaaattcaacatatgatcaccagaatcccaaagatgttaactgcaaataaaatgaaacttaccgagacgtttgattttgtgcacaatgtgatgagcattccccaccacatcattgtcaagttcccacaggtatttaatacaaggctgtttaaggtcaaagaaagacacttgtttcttacctatttaggaagagcacagtatgatccagcaaaacctaactacatctctttggacaaactagtatctattcctgatgaaatattttgtgaagagattgccaaagcatcagtacaggactttgaaaaattcttaaaaacgctttagatttttatgtatgttaaaatgcagtattgtaaagtgaatatatatatgaataaatgaatatatttttaaatgccaaaaaaaaaaaaaaaaaa

SEQ ID NO: 117296 - DNA, 1000 bp, Homo Sapiens
gacttgctggccacctacgggcccctggacaatgtccgcatcgtgacgctggccccagagttgggccgtagccacgaagtgatccgggcgctgacggcccgtggcatctgcgtgtccctagggcactcagtggctgacctgcgggcggcagaggatgctgtgtggagcggagccaccttcatcacccacctcttcaacgccatgctgcctttccaccaccgcgacccaggcatcgtggggctcctgaccagcgaccggctgcccgcaggccgctgcatcttctatgggatgattgcagatggcacgcacaccaaccccgccgccctgcggatcgcccaccgtgcccatccccaggggctggtgctggtcaccgatgccatccctgccttgggcctgggcaacggccggcacacgctgggacagcaggaagtggaagtggacggtctgacggcctacgtggcaggtgagcgccctgacccactgggtcccaggtcccagcccgcatgccaggtggcccacgacccccccagagcctgccctctctgctctcaaggcaccaagacgctgagtggcagcatagccccaatggacgtctgtgtccggcacttcctgcaggccacaggctgcagcatggagtcggccctggaggctgcatccctgcaccccgcccagttgctggggctggagaagagtaaggggaccctggactttggtgctgacgcagacttcgtggtgctcgacgactcccttcacgtccaggccacctacatctcgggtgagctggtgtggcaggcggacgcagctaggcagtgacaaggacctcggctgagaggacacctggccgcagcgggatgccatcagggccgggtggttggggagctggtctccagggagtgagtcgggagccctgctggattgatgcccagggcctgtgcggccgccctggaggcggtggctgggataaacgtgcacccagcaggaaaaaaaaaaaaaaaaaaaa

SEQ ID NO: 117297 - DNA, 1000 bp, Homo Sapiens
gctgacaggccagtgggaagccctgtatgatgagattcgtcagtttcgcaaggcctgtggggaggctcatcttaaaactatattagcgacaggagaacttggaactcttactaatgtctataaagccagtatgatagcaatgatggcaggatcagattttattaagacctctactggaaaagaaacagtaaatgccaccttcccggtagctatagtaatgctgcgggccattagagatttcttctggaaaactggaaacaagatagggtttaaaccagcaggaggcatccgcagtgcaaaggattcccttgcttggctctctcttgtaaaggaggagcttggagatgagtggctgaagccagaactctttcgaataggtgccagtactctgctctcggacattgagaggcagatttaccatcatgtgactggaagatatgcagcttatcatgatcttccaatgtcttaaatcagtcaccagttccagaaaagttctttacgacaatgtttaaaaattatttttctacgtaattgctaaaattatttaattaaaaaattgggcagtaggtaactggcattcctctctttaaaatttctaccgaacttaatggaatggaaaaagcaaactcatccacatgtggtactcatttcaggcacatctgaaatgatcttaattactagaagatctgcactattaactttgtgaagagtttctcctaaaaactttaagtaaaatgttaatggtagctttgataacatcaaattctaagggagaaaaaaacaatattaaaccgcccaagcagtgtgccctagcagaggaaaatgcaacatctcgcaagcgctgctgtaacgacttcaggagtcactgattcagcactaatttcctgctgtgaaaactcatctttcatttttgccgtggataggcgcttttattaattgttgtcctaatgaaatttctgacattgtcatatacaacgatgaatatcattaaaatttttaa

SEQ ID NO: 117298 - DNA, 1000 bp, Homo Sapiens
gaagcatggcgatgaaatctacattgctccttcaggagtgcaaaaggaacgaattcagcctgaagacatgtttgtttgtgatataaatgaaaaggacataagtggaccttcgccatcgaagaagctaaaaaaaagccagtgtactcctcttttcatgaatgcttacacaatgagaggagcaggtgcagtgattcatacccactctaaagctgctgtgatggccacacttctctttccaggacgggagtttaaaattacacatcaagagatgataaaaggaataaagaaatgtacttccggagggtattatagatatgatgatatgttagtggtacccattattgagaatacacctgaggagaagaccctcaaagatagaatggctcatgcaatgaatgaatacccagactcctgtgcagtactggtcagacgtcatggagtatatgtgtggggggaaacatgggagaaggccaaaaccatgtgtgagtgttatgactatttatttgatattgccgtatcaatgaagaaagtaggacttgatccttcacagctcccagttggagaaaatggaattgtctaagccaaaagaaagtctaattatatacagagataaagctaaacgtaattattatttaaatgaaagctatttttttaaatgaattgaaatttttcatgatgctactaatttgccactaaatactgcaaatggtcaccctgaatctcttctgacattggatgttatttgcttatattcttataattttaaatgagggcacagtgaaatgaaaattttatactctatgtttctgtttatttttaaatccttaacagcaaaatatttgcctttaatttcttttttatatatactctcgagagaattcctcttaatttttaaagatgctggtgataataaaattcattagaaaatttcctcattgtggaatgagcattctcttgttttaatgttggtgtcagaaaataaatatgaaacattaagtcc

SEQ ID NO: 117299 - DNA, 1000 bp, Homo Sapiens
cccgagtagctgggattacaggtacacaccaccatgctcaactaatttttcttttttgggcggggggggtggatatttttagtagagacaaatacttttgtatttttaatacagaaaagtatgcctcggcctcccaaagtgctggaattacagacatgagccactgtgcctggcctgctcactttctgatgctgcttttttgttgtttgtttgtttatttgtttgttttgagacggagtctcgctctgtcaccaggctggagtgcagtggcgcaatctcggctcattgcaacctccgcctcccaggttcaagcgattctcctgcctcagcctgcggagtagctgggactataggtgcgtgccaccacgtccagccactgatgctgttttgccactgatgctgttttgaaattgatattttgtctcataaaaactaggccaggcatggtggctcattcctgtaatcccagcactttgggaggccaaggtgggtggatcacctgaggtcaggagttggagatgagcctggacaacatggcaaaaccccacctctactaaaaatacaaaaaaaattagctgggtatggtgtcacgtgcctgtaatcccagccactggggaggctgaggcaggagaacctcttgaacccaggaggtggaggttgcagtgagctgagattgcgccactgcattccagcctgggtgacagagtgagactgtctcaaaaaaaaaaaaaaattaatgatggtcaaagggtataaaatctcagacaggaagaatatgttttatgctttttttgagttctgttgtacagtgtggtgcctatacttaataatggggtattatacatttcaaaattgatgttctcatcacagaaatgtatttgaagtattgcatatgttaactagcttgatttaactattccatattgtatccacaatttatgatatcactttgtaacccatacatttatacaattataaattgtcaatttacaataaaaaa

SEQ ID NO: 117300 - DNA, 1000 bp, Homo Sapiens
gcgagcacagcgacgccagccccatgtccatcaacgaggtcatcctgtcggcgtcaggggcctgcaagctcatcgactcactgcactcctactgcttctcctcccggcagaacaagagccaggtgtgctgcctgcgggagcaggtggagaagaagaacggcgagctgaagagcctgcggcagagggtcagccgctccgacagccaggtgcggaagctacaggagaagctggatgagctgaggagagtgagcgtcccctatccaagtagcctgctgtcgcccagccgcgagccccccaagatgaacccagtggtggagccactgtcctggatgctgggcacctggctgtcggacccacctggagccgggacctaccccacactgcagcccttccagtacctggaggaggttcacatctcccacgtgggccagcccatgctgaacttctcgttcaactccttccacccggacacgcgcaagccgatgcacagagagtgtggcttcattcgcctcaagcccgacaccaacaaggtggcctttgtcagcgcccagaacacaggcgtggtggaagtggaggagggcgaggtgaacgggcaggagctgtgcatcgcatcccactccatcgccaggatctccttcgccaaggagccccacgtagagcagatcacccggaagttcaggctgaattctgaaggcaaacttgagcagacggtctccatggcaaccacgacacagccaatgactcagcatcttcacgtcacctacaagaaggtgaccccgtaaacctagagcttctggagccctcgggagggcctggctactgtgcctcaacggttcggctcctcaacagacagtccctgcggcagaagtgggtgtggccgtgagcctctgcaggctcaagagtgttgtccagatgtttctgtactggcatagaaaaaccaaataaaaggcctttatttttatggctgaggattttgaatattaaaaaaaaaaaaaaaaaa

SEQ ID NO: 117301 - DNA, 1000 bp, Homo Sapiens
tgccccccaagcatcagtgtacccagcccagtgactgacgtggagccctgggcttcgcgtagagtcacctagacggggcgaaaacgggaaaaggggccttaactggggcacctggctcctttgagagctcggagtttctgactggactgcgcaacaccccagaggcaaggtgaacgcgagggcctataatgcaagaaccaaggcgagtcacgcactgtctgggcaaaagaggagtaaagacccctcagctgcagcccggcagcgcattcctacccagggtccgccgccagagctttaccgcgcggtcggatagttacactactgtccgggacttcctagccgtgccgcggaccatctcaagtgcttccgccacactcatcatggcggtggcagtaagtcacttccgcccgggaccggaagtgtgggatactgcgagtatggcggcgtcaaaggtgaagcaggacatgcctccgccggggggctatgggcccatcgactacaaacggaacttgccgcgtcgaggactgtcgggctacagcatgctggccatagggattggaaccctgatctacgggcactggagcataatgaagtggaaccgtgagcgcaggcgcctacaaatcgaggacttcgaggctcgcatcgcgctgttgccactgttacaggcagaaaccgaccggaggaccttgcagatgcttcgggagaacctggaggaggaggccatcatcatgaaggacgtgcccgactggaaggtgggggagtctgtgttccacacaacccgctgggtgccccccttgatcggggagctgtacgggctgcgcaccacagaggaggctctccatgccagccacggcttcatgtggtacacgtaggccctgtgccctccggccacctggatccctgcccctccccactgggacggaataaatgctctgcagacctggaaaaaaaaaaaaaaaaaaaaaaaaaaaaaaaaaaaaaaaaaaaaaaaaaaaaaaaa

SEQ ID NO: 117302 - DNA, 600 bp, Homo Sapiens
agtcttggcggaggtgaccaaagccacgtaatgtccgtagttcgctcatccgtccatgccagatggattgtggggaaggtgattgggacaaaaatgcaaaagactgctaaagtgagagtgaccaggcttgttctggatccctatttattaaagtattttaataagcggaaaacctactttgctcacgatgcccttcagcagtgcacagttggggatattgtgcttctcagagctttacctgttccacgagcaaagcatgtgaaacatgaactggctgagatcgttttcaaagttggaaaagtcatagatccagtgacaggaaagccctgtgctggaactacctacctggagagtccgttgagttcggaaaccacccagctaagcaaaaatctggaagaactcaatatctcttcagcacagtgaagcgggagtggaagaaggatctaaagggaaaaactgacatgtttatgttatggaaaaagaaatttttctaagtttcatcacaaactgtgtccagtttctctgtggtgtttatgaaatagctaaaagcaaatgaagtaaagggcatactatggtttttcacaaaaaaaaaaaaaaaaa

SEQ ID NO: 117303 - DNA, 1000 bp, Homo Sapiens
ctcaagaagactcagctcatcaaagctgctccagcagggaaaacaagttctgtgtttgaagacccagtcatcagtaaattcaccaacatgatgatgataggaggaaacaaagtactggccagatccctcatgattcagactctggaagctgtgaaaaggaagcagtttgagaagtaccatgccgcttctgcagaggaacaggcaaccatcgaacgcaacccctacaccatcttccatcaagcactgaaaaactgtgagcctatgattgggctggtacccatcctcaagggaggccgtttctaccaggtccctgtacccctacccgaccggcgtcgccgcttcctagccatgaagtggatgatcactgagtgccgggataaaaagcaccagcggacactgatgccggagaagctgtcacacaagctgctggaggctttccataaccagggccccgtgatcaagaggaagcatgacttgcacaagatggcagaggccaaccgtgccctggcccactaccgctggtggtagagtctccaggaggagcccagggccctctgccgcaagaaacagtgtgagctactgccacgctgaaaactacctgtgggttaaggatgtagttcctttgtaagggtgggcaggcctcgtaagaaagatgtagcagcatattcactatccgttaatccttctttctttgaggctggaacttgctctctctgcccctatttccttgtaaagagggagcacattgacttgggaatttcctccaggaaactcagggctgttttctcttcccttaggttggggcggacctttggacatataaaggaagcagttttagtatcagaaaagatttattagaaaattctcacgctgaactggtgtagcatgtggtgcagcattcagtgaaactggctggaggaaataggcttgtttccagagttgtccttatacaaaatgtataaaaagcagtttctggtgaaaaaaaaaaaaaaaaaaaaaa

SEQ ID NO: 117304 - DNA, 1000 bp, Homo Sapiens
tatgctctgtgtctgtgggaaattctcactggcgaaattccattcgctcatctcaagccagcggctgcggcagcagacatggcttaccaccacatcagacctcccattggctattccattcccaagcccatatcatctctgctgatacgagggtggaacgcatgtcctgaaggaagacccgaattttctgaagttgtcatgaagttagaagagtgtctctgcaacattgagctgatgtctcctgcatcaagtaacagcagtgggtctctctcaccttcttcttcttctgattgcctggtgaaccggggaggacctggccggagtcatgtggcagcattaagaagtcgtttcgaattggaatatgctctaaatgcaaggtcctatgctgctttgtcccaaagtgctggacaatattcctctcaaggtctgtctttggaggagatgaaaagaagtcttcaatacacacccattgacaaatatggctatgtatccgatcccatgagctcaatgcattttcattcttgccgaaatagtagcagctttgaggacagcagctgacagcattcggcgtatacctaaggagagttttttccccgaactgacagcaacgattccaaccacggcaagctggcttccaactataacattttactctcaaaggtctccttaaattgggcttgtttttacttgtcctatttaattccccactattagcaggctttggatttgtgcctaaggaataatatgcaaaagaaccaagacagaatgtatatgaagaattgtttttaattttgtaaattaaaaaaaaatttagatcgttacttggaaatggagcctaagtctgtggtggacagataataattatgttttcctgggctgaattatgtagacttgtgtttgacagctatgggtttatttcttagaacattgttcattttcttttctcattatgttacttctagtgttcacctctgtgattaaagattctttggtgaaatag

SEQ ID NO: 117305 - DNA, 1000 bp, Homo Sapiens
ttacagcatggatgaatgcaattggtttgatcatcactgccctaccagagccatattggattgttcttcatgatcgaattgtgagtgtcatcagcagccccagcttgacgtctgaaacagagtgggttggctatccattccgcctctttgatttcactgcctgtcatcagtcctactctgagatgagttgtagctatacgttagctcttgcacatgctgtgtggcaccattctagcatcggacaactttctctcattccaaagtttcttactgaagtacttcttcctatagtgaagaccgaattccagttgctttatgtataccatcttgttggaccatttttacaaagatttcagcaagagagaactcgttgtatgatagagattggtgtggcgttttatgacatgctgctgaatgttgaccagtgtagcacccatttaaattacatggatcccatctgtgacttcctctatcacatgaagtatatgtttactggtgacagcgtgaaagagcaagtagagaagattatctgtaacttaaaaccagctttaaaacttcgtcttcgattcatcacacacattagcaagatggagccagctgcagtgcctccacaagccatgaacagtgggtctccagcacctcagtctaatcagtaaaaagtcagagtacacagcaagggttccaaattaagaggaagcaaaacgctgcccagatcctgagaaacctggagaaaatcaaccttagtagtttcaactcatacattgtcttgtttgattttgttctttgttttttatcctctttaagcacagatgcgtgttgaagtctaaggtgttctgtcatcacactctctttactagaataagtgtgcccaggcagaaaaaaaagtgtattcaatgttgctggcatgtgtggattcacagctcgtggctgtaaggaaatctgggggtttcataaatccattaaaatccttttagagttgccaaaaaaaaaaaaaaaaaaa

SEQ ID NO: 117306 - DNA, 1000 bp, Homo Sapiens
catcctccacgtgctctacacagactgcatccggcagtgcagcgggccgctctacgtggaccgcatggtgctgctggtcatgggcaacgtcatcaactggtcgctggctgcctatgggcttatcatgcgccccaatgatttcgcttcctacttgttggccattggcatctgcaacctgctcctttacttcgccttctacatcatcatgaagctccggagtggggagaggatcaagctcatccccctgctctgcatcgtttgcacctccgtggtctggggcttcgcgctcttcttcttcttccagggactcagcacctggcagaaaacccctgcagagtcgagggagcacaaccgggactgcatcctcctcgacttctttgacgaccacgacatctggcacttcctctcctccatcgccatgttcgggtccttcctggtaagcgggcctcccggcgcagcgttgaggataacgtgaaaggtagcagctgcctccttctctgtgagctgatctggcgtccacaccccaggtgttagctgacactggatgacgacctggatacttagaaaggggcttcaggaagggatgtgctgtttccctctacgtgcccagtcctagcctcgctctaggacccagggctggcttctaagtttccgtccagtcttcaggcaagttctgtgttagtcatgcacacacatacctatgaaaccttgaagtttacaaagaattgccccagctctgggcaccctggccaccctggtccttggatccccttcgtcccacctggtccaccccagatgctgaggatgggggagctcaggcggggcctctgctttggggatgggaatgtgtttttctcccaaacttgtttttatagctctgcttgaagggctgggagatgaggtgggtctggatcttttctcagagcgtctccatgctatggttgcatttccgttttctatgaatgaatttgcatacaataaccaaccagactcagtaaaa

SEQ ID NO: 117307 - DNA, 1000 bp, Homo Sapiens
gtccaaaccagccctcgtcactccccacaccacgtggttaggtgggtagaccccacagccctgtgtgaggagcttctgcttccactggagaacccgtgtcagggcagggcccgcttgctgctcacaggcctccacgcctgtggggatctgagtgttgccttgctgagacacttctcctgctgtcctgaggtggtggccctggcctcagtgggctgctgctacatgaagctgagtgaccctggcggctacccactgagtcagtgggtggctgggctgcctggctatgaactgccctaccggcttcgggagggggcctgccatgccctggaggaatatgctgagcggctacagaaagctggccctggccttcgaactcactgctaccgtgcagcactggagacagtcatccgacgggcccggcccgagctccgtcggccaggcgtgcagggtatccccagggtccacgagctcaagattgaagaatatgtgcagcgggggctacagcgagtggggctagatccccagctgccactgaatctggctgcccttcaggcccacctggcccaggagaaccgtgtggtggccttcttcagcctggctctactgcttgccccactggtggagacgcttattctactggaccggctgctgtaccttcaggaacagcttttccatgctgagctcctgcccatcttcagtcctgaactctctcccagaaacctggttctggtggccaccaagatgcccctgggtcaggctctttctgttctggagactgaagacagctgatgcagcctgaggagacatctcagaccccatcatctgaaagtgcccagagagcacagtggcagagtacatctcatccagagaaacagcaccctgcatcctccagagtcctggttccttcagtttcatcccctttctctccttccatggattatgtaatacattgtaaagttttaattaattaaaaattggatatctgaaaaaaaaaaaaaaa

SEQ ID NO: 117308 - DNA, 1000 bp, Homo Sapiens
ttgatgggaaaacaaatcctaaaattcagagcatctatttggaaaggtttccaatctttaaggcttgttttagtgctaatggggaagaagttttagccacgagtacccacagcaaggttctttatgtctatgacatgctggctggaaagttaattcctgtgcatcaagtgagaggtttgaaagagaagatagtgaggagctttgaagtctccccagatgggtccttcttgctcataaatggcattgctggatatttgcatttgctagcaatgaagaccaaagaactgattggaagcatgaaaattaatggaagggttgcagcatccacattctcttcagatagtaagaaagtatacgcctcttcgggggatggagaagtttatgtttgggatgtgaactcaaggaagtgccttaacagatttgttgatgaaggcagtttatatggattaagcattgccacatctaggaatggacagtatgttgcttgtggttctaattgtggagtggtaaatatatacaatcaagattcttgtctccaagaaacaaacccaaagccaataaaagctataatgaacttggttacaggtgttacttctctgaccttcaatcctactacagaaatcttggcaattgcttcagaaaaaatgaaagaagcagtcagattggttcatcttccttcctgtacagtattttcaaacttcccagtcattaaaaataagaatatttctcatgttcataccatggatttttctccgagaagtggatactttgccttggggaatgaaaaggcaaggccctgatgtataggttgcaccattactcagacttctaaagagactatttgaagtccagttgagtcacaagagaagcctgtcttgatatatcatctcagaaactttcctgaatatgtgataatatatggaaaatgatttatagatccagctgtgcttaagagccagtaatgtcttaataaacatgtggcagcttttgtttgaaaaaa

SEQ ID NO: 117309 - DNA, 1000 bp, Homo Sapiens
tcatttagtgagctatgttgcctcttctgctgtccaccttgtccagggaagattgcttcaaaattagcgtttttgccacctgatccaacttacacactgatgtgtgatgaaagcggaagccgttggactttacatctgtctgaacgagcagactggcagtattcttctagagaaaaagatgctattgagtgtttcatgactagaaccagtaaaggcaacagaattgcttgtatgtttgtacgttgttcacccaatgcgaaatacactttactcttctcacatggaaatgctgttgatcttggtcaaatgagcagcttttacataggactaggatcacggattaattgtaatatattctcatatgattattctggatatggtgccagttccgggaaacccacagagaagaacctctatgcagacattgaagctgcttggcttgctcttaggacaagatatggcattcgccctgaaaatgtgattatatatggccaaagtatagggacagtaccgtctgtggatcttgctgctcgatatgagagtgctgctgttattcttcattctcctctgacttcgggaatgcgagttgcctttcctgataccaagaagacctactgttttgatgcattcccaaacattgacaaaatctctaagataacctctccagtattaataattcatgggactgaagatgaagtcattgacttttcacatggcctcgcattgtttgaacgttgccaaagacctgtggagcctctctgggttgaaggagcaggtcacaatgatgtggaactttatggacagtatcttgaaaggttgaaacagtttgtgtcacaggaactggtgcagaaacataaagaagggaagtgattttctcaaggtctacagttttcaatgacggtactatgtattccattatcttctctttaccaaacttaactggattaatataccaatgatcctttcaaattatatgacataaacttatttgctctccaaa

SEQ ID NO: 117310 - DNA, 1000 bp, Homo Sapiens
gagccctgacctctgacctctacgcacccatggtggctggcgcgctggcccgcctgggcaccgtgactgtgatcagccccctggagcttatgcggacaaagctgcaggctcagcatgtgtcgtaccgggagctgggtgcctgtgttcgaactgcagtggctcagggtggctggcgctcactgtggctgggctggggccccactgcccttcgagatgtgcccttctcagccctgtactggttcaactatgagctggtgaagagctggctcaatgggttcaggccgaaggaccagacttctgtgggcatgagctttgtggctggtggcatctcagggacggtggctgcagtgctgactctaccctttgacgtggtaaagacccaacgccaggtcgctctgggagcgatggaggctgtgagagtgaaccccctgcatgtggactccacctggctgctgctgcggaggatccgggccgagtcgggcaccaagggactctttgcaggcttccttcctcggatcatcaaggctgccccctcctgtgccatcatgatcagcacctatgagttcggcaaaagcttcttccagaggctgaaccaggaccggcttctgggcggctgaaaggggcaaggaggcaaggaccccgtctctcccacggatggggagagggcaggaggagacccagccaagtgccttttcctcagcactgagggagggggcttgtttcccttccctcccggcgacaagctccagggcagggctgtccctctgggcggcccagcacttcctcagacacaacttcttcctgctgctccagtcgtggggatcatcacttacccaccccccaagttcaagaccaaatcttccagctgcccccttcgtgtttccctgtgtttgctgtagctgggcatgtctccaggaaccaagaagccctcagcctggtgtagtctccctgacccttgttaattccttaagtctaaagatgatgaacttcaaaaaaaaaa

SEQ ID NO: 117311 - DNA, 1000 bp, Homo Sapiens
aatgctatcttttctggagattgcatcctaggggaaggaacaacggtatttgaagacctctatgattatatgaactctttaaaagagttattgaaaatcaaagctgatattatatatccaggacatggcccagtaattcataatgctgaagctaaaattcaacaatacatttctcacagaaatattcgagagcagcaaattcttacattatttcgtgagaactttgagaaatcatttacagtaatggagcttgtaaaaattatttacaagaatactcctgagaatttacatgaaatggctaaacataatctcttacttcatttgaaaaaactagaaaaagaaggaaaaatatttagcaacacagatcctgacaagaaatggaaagctcatctttagtttcagattaaagaaagctttgttttattttgctttgagagaatggtatgttttcttaactataggttattttatagagaatataaaagtataaaacattaaaaataaccctagatatactttaaaataatgttatatttatgctaaaatatgtaaattacactatacaaccatatgataggttatttctctaaccttgtcttctaacgttttaccaaaaattcataatctaatagtttatcagttttcaatagattaaataaaatgattactttaaaaataataaaatttatctaatttaaagttgatattatttttggccgttagttatctattactagtgatcagttatactgttttctatagctactttatttaacagcacagatttctatgcacctttactctttcctcaacccttgtctctatctgtacataattgctttgtcttgatgtttctatcaactatatcatgactatctattggttccataactctgtatcatgtgtattttcttattctggtataccacaaatgattcatgcaaatgaatttttggtgattgaaaaatattaaattcccaatttaaagtattatatgata

SEQ ID NO: 117312 - DNA, 1000 bp, Homo Sapiens
attttcaaggtgttagagactgtgatgatgtcgctaagtcctgcaagaagacaaaaggactgagtagaattaaattagactctatacattccagtgcctagccagtttgttagaaaagatgatggacttggggaattcatagcttctggccttaaggcttccaccttttcattgcttgctgacctttttcaaaacgaactgactcagttcagcagaccaccagtaccagactcagaattgtgatagaggagcattttgaacagtgccgtattgtgacatgctgtattggctactccagaaagtaggagtaaagatggaaaggagaaagaagcaacctctgagattccagtggtgtgtgggggcaagatctgatggaaactgaaaaagagaacgaagactaaacaaagagaaaggaaagagaagaaaccctaaatgggcaaaggaaagcacatcctgtttgcggagctttgaaatattggaaccatttctaattgctcctgtttttctgggtaacaccagttttctgtagttgccactaaagcagtagactcttgagtctcacttgtctctgagagagacagaagttagaaagttttgacttggcgattccgaaagtatgcctttgttggcacttaaatgtccagtgagacttcttggcaccttagagccctctgagatactgattattttaggttcttctccctactttcagatgttttcagcccaacactgggtgctctcttccactacagagaatcctgaagaaaagggaaggtgtttcccatgatggtgaatgtcactgccatgaattcctgaatctacctgctgctgggagtcagagtccaagcataacccgtgtagcataaaagcagcgctgtagccctattccagtctttttcgttaatgtccagagtgaacaacaagagttagtcaatcattaactgttgactgttgattctcataataaatgcagcataacgacaaaaaaaaaaaaaaaaaa

SEQ ID NO: 117313 - DNA, 1000 bp, Homo Sapiens
atttgaacccttcggaaatcttgatcagccagatctttattacgagtactacccgcacgtgtaccctgggcgcaggggctccatggtccccttctcgatgcgcatcttgcacgcggagcttcagcagtacctggggaacccacaggagtcgctggatagactgcacaaggtgaagactgtctgcagcaagatcctggccaatttggagcaaggcttagcagaagacggcggcatgagcagcgtgactcaggagggcagacaagcctctatccggctgtggaggtcacgtctgggccgggtgatgtactccatggcaaactgtctgctcctgatgaaggattatgtgctggccgtggaggcgtatcattcggttatcaagtattacccagagcaagagccccagctgctcagcggcatcggccggatttccctgcagattggagacataaaaacagctgaaaagtattttcaagacgttgagaaagtaacacagaaattagatggactacagggtaaaatcatggttttgatgaacagcgcgttccttcacctcgggcagaataactttgcagaagcccacaggttcttcacagagatcttaaggatggatccaagaaacgcagtggccaacaacaacgctgccgtgtgtctgctctacctgggcaagctcaaggactccctgcggcagctggaggccatggtccagcaggaccccaggcactacctgcacgagagcgtgctcttcaacctgaccaccatgtacgagctggagtcctcacggagcatgcagaagaaacaggccctgctggaggctgtcgccggcaaggagggggacagcttcaacacacagtgcctcaagctggcctagctgcctccaacacactacgtcagaaggacccgggtctttgaaactgtgtcttgaagctaatgtattaatgtgacatggaggaactcaataaaactcctgcttcactggtgaaaaaaaaaaaaaaaaaaaaaa

SEQ ID NO: 117314 - DNA, 896 bp, Homo Sapiens
gtcgcggccgccagctaggggcgcgggaaggcggggctcggatgcaatcgggacctcctcctggactgggccgggggcggactccgggacccagggcgccgggagccggcgggctacctgcgagtcgagttagcgttgtcgccgaaccgaagcctcgctcgccatgggggaggtggagatctcggccctggcctacgtgaagatgtgcctgcatgctgcccggtacccacacgccgcagtcaacgggctgtttttggcgccagcgccgcggtctggagaatgcctgtgcctcaccgactgtgtgcccctcttccacagccacctggccctgtccgtcatgttggaggtcgccctcaaccaggtggatgtgtggggagcacaggccggtctggtggtggctggttactaccatgccaatgcagctgtgaacgatcagagccctgggcccctggccttgaaaattgctgggcgaattgcagaattcttccctgatgcagtacttattatgttggataatcagaaactggtgcctcagcctcgtgtgcccccggtcatcgtcctggagaaccaaggtctccgctgggtccctaaggataagaacttagtgatgtggagggactgggaagagtcacggcagatggtgggagctctactggaagatcgggcccaccagcaccttgtggactttgactgccaccttgatgacatccggcaggactggaccaaccagcggctcaacactcaaatcacccagtgggttggtcccactaatggaaatggaaatgcctgagccagggccagcggggcccggttccaataaagagacttgggctgaaaaaaaaaaaaaaaaaaaaaaaaaaaaaaaaaaaaaaaaaaaaaaaaaaaaaaaaaaaaaa

SEQ ID NO: 117315 - DNA, 860 bp, Homo Sapiens
cggaggcgggcacttggggggaaagttgagacgtgattaccgggttgggcgggccccatctgggaggggtttgtgggtgaactcggggtccaccgcccgctgaggagatggatgaggacgggcttcctctcatggggtcaggcatagacctgaccaaggtgccagctattcaacagaaaagaacggtggcttttctaaaccaatttgtggtgcacactgtacagttcctcaaccgcttttctacagtttgtgaggagaaactggcagacctttcacttcgtatccaacaaattgaaacaactctcaatattttagatgcaaagttgtcatctatcccaggcctagatgatgtcacagttgaagtatctcctttaaatgtcaccagtgtcacaaatggagcacatcctgaagccacttcagagcaaccacagcagaacagtacacaagactctggactacaggaaagtgaagtatcagcagaaaatatcttaactgtagccaaggatccaagatatgccagatatctcaaaatggttcaagtgggtgtaccagtgatggcaataagaaacaaaatgatatcagaaggactagacccagatcttcttgagaggccagatgctccagtgcctgatggcgaaagtgagaaaactgtagaagaaagttcagatagcgaatcttcttttagtgattaagcttaattttgataagaattacatatgcatgcataggggtacatttacattctgtaagagattgagcctgaactctcttagtcataaaaacatcaaatggccacatgtccactaccaagcttcttctatgttaaaaaaataataataaagcagttttaacctgccaaa

SEQ ID NO: 117316 - DNA, 1000 bp, Homo Sapiens
taaacagacataagtatccccttaacctgtacctactttttggatttacgctgttggaagctctgactgtggcagttgttgttactttctatgatgtatatattattctgcaagctttcatactgactactacagtattttttggtttgactgtgtatactctacaatctaagaaggatttcagcaaatttggagcagggctgtttgctcttttgtggatattgtgcctgtcaggattcttgaagttttttttttatagtgagataatggagttggtcttagccgctgcaggagcccttcttttctgtggattcatcatctatgacacacactcactgatgcataaactgtcacctgaagagtacgtattagctgccatcagcctctacttggatatcatcaatctattcctgcacctgttacggtttctggaagcagttaataaaaagtaattaaaagtatctcagctcaactgaagaacaacaaaaaaaatttaacgagaaaaaaggattaaagtaattggaagcagtatatagaaactgtttcattaagtaataaagtttgaaacaatgattaaatactgttacaatctttatttgtatcatatgtaattttgagagctttaaaatcttactattctttatgatacctcatttctaaatccttgatttaggatctcagttaagagctatcaaaattctattaaaaatgcttttctggctgggcacagtggctcacgcctgtaatcccaccactttgggagaccgaggcaggtggatcacgaggtcaagaggttgagaccatcctggccaacatggtgaaaccccgtctctactaaaaatacaaaaattagctggatgtggtggcacacacctgtagtcccagctagtcaagaggctgaggccagagaatcgcttgaacctgggaggtggaggttgcattgagccaagatcacgccactgcattccagcctggtgacagagcgagactcagtctcaaa

SEQ ID NO: 117317 - DNA, 1000 bp, Homo Sapiens
taaagtaatagttggatgcttttggtcctgtgttgcttttaaaaacaccttataaaagaggagagtatttgataagcaattttcatagtagtaaagttttttttcatctcttaaactaaattgaccatgcatataatattctttgtttaaatgaaagcatactgttgaaacccgcagtgttgcatttagaaaacagttgaacagaatgtcaatgtgcattcatgcaaaaaaacatttaatctgcatctgttttagaaaagggggaaatgaagcaacttgtctaaaaatactgctttacaaagcatttcagcctttccccctcagttttgcattgattttttgacaagtctgtagagcctaatagtttccatcaaaggcctagatctcttatttagcatttttttcagctcttctctcagaagttcagctgttgaaacgaaaactgtactttgtaccctcacatacaaagggatcaaatttgacctggtgttattttagccccaaatttatgacattacacaatattaaaatgtaaatgtttctttacccaaactacttctagatattctagtatttgcttctggtggaattaaatgacggtaaaattggctaattatttgaatgaatgaatggatggatgttttgcatgctcaatttctaggtcctttgtctagaaaggaaatttgcctcagttgaattagtgaaatatttctgtcgttgatattaaaagtgacttctgagtacagttaagttcctcctatttgccactgggctgttggttagaagcataggtaactgattaagtaggtatgatactgcatttgaaataagtggacacaaactatcctttctccaccatggactcaatctgagaacaacagcattcatttccattcatttccatactggcttttgattatatgcagattcctagtagcatgccttacctacagcactatgtgcatttgctgtcacaataaagtatattttgtcttgcaaa

SEQ ID NO: 117318 - DNA, 1000 bp, Homo Sapiens
atttcatgttatttggttgcatgaagttgcccttaaccactaaggattatcaagatttttgcgcagacttatacatgtctaggatccttttatcaaggcagttatgatcatcgttttcctgccttgaccccaccatcatcaaacactcagttaaatataaattaacattttttagatgaccactcaacataatgcttaagaatggaatttcctctctgtgacagaacccaggaattaattcctaaatacataacgttggtatattgaagacgaaattaaaattgtccttcagttttgaggccatgtgtaaagtttaaccatattgtaaaatatctattccgtattagaaatagctagttgacagcttatacttctcaaaattcatattgttatgtacacaaactaagtttctatatgtgaagttagtgagtctttttgtgttactccaaaataaaggcaatgatttatttttttcccagtgccaatacaattttgagctaagcactcaaggtggatactttacattttaaagctggaatcagcaacagccctatgggaaaccagacaaagcattgacttttaaatgtagacttttaaaataaactgttttcttttggaactacaattagaatagttaatattcatccttaaaccattattatgtgtacattattgttgctattgtgataatagagaattttatttatttttatgccagcttatattgtgagaacacatttagtcagtttgggttttatcaatcctgttaatgcttgtccttggaacatctttcgcgtattcacggtttgtagttgaaaagtttactgtaaaaaaatcaaaaacaaaaaaatgtattgtttttacagaataaatttattgggatgtgtactgggagtaagatttgaggttgtaagcaaactaagttagtgtaatttggcttcatatatgtaacgtgaggtattaatgtaattcatatattaaagcaaaaattgttcgcagc

SEQ ID NO: 117319 - DNA, 1000 bp, Homo Sapiens
acattgtgttagtgaagactgtgttttcagggttaaatgattggtatcaatgtatatagagtaaaattattgcaaaatttaaaaatgatttttcttggcattctttttaaatactctgaaacatatatgcaaatgagaaacctttaatcatactaaagccagttatgttaagaatttttcctttggattttataattaagagttgcttataaatacttatgacattgagctcttactgttttagttgtcttaaaacaatgggacatgtcatgaactggtttctttttttaaaaaattcttgatgtgaattccactgttacctgaccatgtatattcagatgaatgtactctttcttgttccttgttaccagattaatctgagagaatgtggattcatcctgtcatctttctcatactcaaatacttaaaatggttcttttgcccaaaagtctcagagtcttcattttggtacagtggagtcacaacttgtaaggtggttaggttttaaagaccgtgcctaaggacaaaattgagcatgctcagaatggtccttgaaaatctcctaaattaccaataaatttctctttgtagtcttaaagtttaaatccctgtggagtgatatgtaggtatgaatatattatgcttatattaagtacaaaaatacaaactgcatatcaagagattcttatagcattaataatttccatgcatgtgtctttttccagtaggtatggttgaatttatgtaaatttattgctaatcccatcccttacgatctagagtataagctgcgcaagggcagaagtttttatctggtttgttcatggatgtattctaagagctgagaacagggcctggacacaataagcattcaataaatatttactgaatgaatgaactcctacctatattcctatttataatttggctccactttatcctactttagctcccattcaattcaataaaaaaaacatttttttgaacacatagcaaaaaa

SEQ ID NO: 117320 - DNA, 1000 bp, Homo Sapiens
acggacatgaaatttgctttgtcggggatgaagcatttcgagaactttctaagatggatccagagggaagcaaattgttggatgatgcaatgtcagcagataaaagtgacgagtggtttgccaaacacaataaacccaaagcttcaggttaacggaagacatgatgcagagcaagcctctgtgattcctgcccagcacctgtgaggcctgacgtgtcagttcccaataaatgctcttctgatttgtttcccgtacaggcaaggaggcttgggtagtgcagatttgtgtatttcaatctttgaaagctctgatgtaatttagaaatgaaatccaatcatgagtccaggtagagaacgcctgctgtaatctacactgttgctgggactgcgcattctgtatataactgtgttggatgagtgacagatgattgtccagactaggacagcggcatgaacatgactttggttgggattgcggatagttagggttacctctgaatcgtgtagcttttatgagagcagctgtgcaagtgaatccacattaatgccttgtcgtggtgccattcccagcgcctgacgatacgctcttctattgtcttattctggcaggttttgacgttttaaattttttaaagaaattttattccttggaccaaaaggtttggttaaccacccccctcttacttgctttcacattttgagtgtccagaggaaacagaaaggaatgagtgtgtgacgttgctgcacgcctgactctgtgcgagcttctttctgtgtatatattttgttttatttttttccgtgtatatttttaatcccgacagaacatcatgtgagatttctttaaaatggattaaacgatttcttcagcctgaaaaaaaaggttttgaaaatgttttcttgtagttttgtttggttctaaacaacaaataggttttaatcactcgaaatggaattatattgtgtattcattgaataaattttttttgaaagtaaaaaaa

SEQ ID NO: 117321 - DNA, 1000 bp, Homo Sapiens
ttgcagtgtgtctgaggtttgtgtagtagtggaagattttaggtatgtagagcaagttgaaaatggattgagactgcatggtggcataaatgagaaattgcctgtagcatctagtctacttgaaggaagtggagacataaggagagacaaaaacaggtttgtgccataaagtattttttcaaagacaccaagatgtggtaaatgaaaattattagttcacttccctgctgccatgaaactttgccttaagaaggtgctggattccaaggtttgtaaaggcatctcggtaaagactgctttttgaatgcatatgattttgcatcagctagactgagttgattctgaccagacttgatggttttaagtcggaaccgataaattttaaaaaggagaaaaaataatttgacctagtagtataaaacatgaggctttaatggtactttgctatgaaaagaaaacactgtattccttatgcaaaacacatgtatctttcattatttataagtggcctctcttagctcagttactcaattcatacgtaatattttttaaaataattttatatctgtgtaccaccccatatatttcatattactgtttcacatgtacagctttctacttctttgtaagaacaccaaccaaccaaggtttaagtgattaataggcttgagcaccgggtggcagatgttctatgcagtgtggttcaagtttctttgaccgcacttatatgcattgctagtatggaatttaagataccatacacagtctctcatggacctatctctattgtagaattatgacttatgtcttacttggcaaatttttctgaatgtgacctttttttgctgatttgctgggtttgggattaactagcattattttgccacctttatattgtatttataaaaaaaagtactatcaatcaatcatactactttggattgttgtgctggtgtaatgtggatttaacatcaataaatatttgacaaataaaaaaaaa

SEQ ID NO: 117322 - DNA, 1000 bp, Homo Sapiens
gggctctggcgctacccgaggtacagaagcaagtttgaggtcgggctgaagcagggtcgctggccagccgtgcgtcgcgctcgccagcggctcccccttctcctcggcgggcctgcggttctgatttcgtccctgacgcttcccgaccctgcccagccagatatgcacccaatgtccagggagcgtgcaaaatttgtcaaaagtggccttttattgtaaaacgacacgagagctaatgctgcatgcccgttgctgcctgaatcagaagggcaccatcttggggctggatctccagaactgttctctggaggaccctggtccaaactttcatcaggcacataccactgtcatcatagacctgcaagcaaaccccctcaaaggtgacttggccaacaccttccgtggctttactcagctccagactctgatactgccacaacatgtcaactgtcctggaggaattaatgcctggaatactatcacctcttatatagacaaccaaatctgtcaagggcaaaagaacctttgcaataacactggggacccagaaatgtgtcctgagaatggatcttgtgtacctgatggtccaggtcttttgcagtgtgtttgtgctgatggtttccatggatacaagtgtatgcgccagggctcgttctcactgcttatgttcttcgggattctgggagccaccactctatccgtctccattctgctttgggcgacccagcgccgaaaagccaagacttcatgaactacataggtcttaccattgacctaagatcaatctgaactatcttagcccagtcagggagctctgcttcctagaaaggcatctttcgccagtggattcgcctcaaggttgaggccgccattggaagatgaaaaattgcactcccttggtgtagacaaataccagttcccattggtgttgttgcctataataaacacttttttctttttttttcctctctttctttttaaaaaaaggaaaaaaaaaaaa

SEQ ID NO: 117323 - DNA, 1000 bp, Homo Sapiens
agaacatcgaactgaacaagaagagtatgtattcccgtgtgccagagtgccaggtcaccacatactattatgttgggtttgcatatttgatgatgcgtcgttaccaggatgccatccgggtcttcgccaacatcctcctctacatccagaggaccaagagcatgttccagaggaccacgtacaagtatgagatgattaacaagcagaatgagcagatgcatgcgctgctggccattgccctcacgatgtaccccatgcgtattgatgagagcattcacctccagctgcgggagaaatatggggacaagatgttgcgcatgcagaaaggtgacccacaagtctatgaagaacttttcagttactcctgccccaagttcctgtcgcctgtagtgcccaactatgataatgtgcaccccaactaccacaaagagcccttcctgcagcagctgaaggtgttttctgatgaagtacagcagcaggcccagctttcaaccatccgcagcttcctgaagctctacaccaccatgcctgtggccaagctggctggcttcctggacctcacagagcaggagttccggatccagcttcttgtcttcaaacacaagatgaagaacctcgtgtggaccagcggtatctcagccctggatggtgaatttcagtcagcctcagaggttgacttctacattgataaggacatgatccacatcgcggacaccaaggtcgccaggcgttatggggatttcttcatccgtcagatccacaaatttgaggagcttaatcgaaccctgaagaagatgggacagagaccttgatgatattcacacacattcaggaacctgttttgatgtattataggcaggaagtgtttttgctaccgtgaaacctttacctagatcagccatcagcctgtcaactcagttaacaagttaaggaccgaagtgtttcaagtggatctcagtaaaggatctttggagccagaaaaaaaaaaaaaaaaaaaaaa

SEQ ID NO: 117324 - DNA, 1000 bp, Homo Sapiens
tatctgtttttttttttaatgttgcacttgtagtttcattacaaaagatcagatcatgaaaggcagtaactctccaggactggaatatctgattgctcagtgttaatagtagttcatgctgtggtgagattgttaaaagggtgcaagactgttgcttctctttttttagatatttttctatctctcacttctcagggatgaaattctttttcaaagttttgaagttccttgcaacttagccatgatgtgagtggttatccctagataaaattaaaaggatttttaaaaagtaattactgcacataaaatgataaataggtaatttgaataattttattttaagctccttggttaattattttgtctattgtctcagctataaattcaaatttatacatactattgagtattaatattctctgatttcagggagaattctgtcagtcacatgatgattatgtttttgtttaacattctttccatgcacttgttattttattaatttgcctgaatgatgagaccagaccagtgtctacagattttcattgtcagaaaaatctataagtctgccctttttacaatgatgatttaaaaaaaacaacagcgtaaatattagcccacaagagcagtcctaaacaatcacaattacactgtactacccaagaagactgtttattgtgaagcatttacctttcaaaaaatcattacatttctatttcttggtggagcagcacattgtggagtgtgattcttaattcttcattgagtttgtcaataggacattgatgctggataggttgtcttttgtttttatgtctcagaccatcttgtgagattgtttgcctatctcataatacagttttatgcagaaaggttgaaactatgtaaatggtttttatggaaattatcagttacaatattttaaaggtgtagaatggcatctttgtttataggagaacatttgtaaataaagttaaatttctaagtcaaaaaaaaaaaa

SEQ ID NO: 117325 - DNA, 1000 bp, Homo Sapiens
atcagctgttagttctttgccagaactccttgagaaaaaaagacttattgatctccatacaaatgttgccactgctgttttagaacatataaaggcaagaaaattggatgtatattttgaatatgaagaaaaaataatgagcaaaactactctggataaatctcttctagatataatatcagaccctgatgcaggaactccagaagataaaatgaggttgtttcttatctattatataagcacacagcaagcaccttctgaggctgatttggagcaatataaaaaagctttaactgatgcaggatgcaaccttaatcctttacaatatatcaaacagtggaaggcttttaccaagatggcctcagctccggccagctatggcagcactaccactaaaccaatgggtcttttatcacgagtcatgaatacaggatcacagtttgtgatggaaggagtgaagaacctggttttgaaacagcaaaatctacctgttactcgtattttggacaatcttatggagatgaagtcaaaccccgaaactgatgactatagatattttgatcccaaaatgctgcggggcaatgacagctcagttcccagaaataaaaatccattccaagaggccattgtttttgtggtgggaggaggcaactacattgaatatcagaatcttgttgactacataaaggggaaacaaggcaaacacattttatatggctgcagtgagctttttaatgctacacagttcataaaacagttgtcacaacttggacaaaagtaacacagaagaaccttactatgataatctacttggaatgtggataaatgtaaaaagaagaaaagttagaagagcaatatgtttccttctctgtaacagtgtcctaacagtgaaaatcagagttatttgttaatttttaaggaaattatatacttaatatgtattgattaaaagaaacatttcagaaataaaatttcaacattgttaaaaaaaaaaaaaaaa

SEQ ID NO: 117326 - DNA, 1000 bp, Homo Sapiens
cctttaccccttcttaatattttacagcagtacgtttttttgtaacgtgagactgcagagtttgtttttctatatgtgaaggattacaacacaaaaagttatcctgccattcgagtgctcagaactgaatgtttctgcagatcttgtggcatttgtctctagtgtgatatataaaggtgtaattaagacagagttctgttaatctaatcaagtttgctgttagttgtgcattagcagtataaaagctaatatatactatatggtcttgcaacagttttaaagcctctgcataattgataataaaaatgcatgacattcttgtttttaatagacttttaaaatcataattttaggtttaacacgtagatctttgtacagttgactttttgacatagcaaggccaaaaataactttctgaatatttttttcttgtgtataagtggaaagggcatttttcacatataagtgggctaaccaatattttcaaaagaacttcatcattgtacaactaacaacagtaactagcccttaattatggtgacagttccttattggtgtgtgtgagattactctagcaactattacagtataacacagatgatcttctccacacaccccatcacccagataatttacagttctgttaacagtgaggttgataaagtattactgataaaaaattatctaaggaaaaaaacagaaaattatttggtgtggccatcttacctgcttatgtctcctacacaaagctaaatattctagcagtgatgtaatgaaaaattacatcttactgttgatatatgtatgctctggtacacagatgtcattttgttgtcacagcactacagtgaaatacacaaaaaatgaaattcatataatgacttaaatgtattatatgttagaattgacaacataaactacttttgctttgaaatgatgtatgcttcagtaaaatcatattcaaatttaaaaaaaaaaaaaaaaaaaaaaaaaaaaaaaa

SEQ ID NO: 117327 - DNA, 1000 bp, Homo Sapiens
atatacccgaagctgctggataattttatcccagggtggctgaatcacggaatgcacacgacggttctgccctttatattaatcgagatgaggacatcgcaccatcagtatcccagcaggagcagcggacttaccgccatatgtaccttctctgttggctatatattatgggtgtgctgggtgcatcatgtaactggcatgtgggtgtaccctttcctggaacacattggcccaggagccagaatcatcttctttgggtctacaaccatcttaatgaacttcctgtacctgctgggagaagttctgaacaactatatctgggatacacagaaaagtatggaagaagagaaagaaaagcctaaattggaatgagatccaagtctaaacgcaagagctagattgagccgccattgaagactccttcccctcgggcattggcagtgggggagaaaaggcttcaaaggaacttggtggcatcagcacccccctcccccaatgaggacaccttttatatataaatatgtataaacatagaatacagttgtttccaaaagaactcaccctcactgtgtgttaaagaattcttcccaaagtcattactgataataacattttttccttttctagttttaaaaccagaattggaccttggatttttattttggcaattgtaactccatctaatcaagaaagaataaaagtttattgcacttctttttgagaaatatgttaaagtcaaaggggcatatatagagtaaggcttttgtgtatttaatcctaaaggtggctgtaatcatgaacctaggccaccatggggacctgagagggaaggggacagatgtttctcattgcataatgtcacagttgcctcaaatgagcaccatttgtaataatgatgtcaatttcatgaaaagcctgagtgtattgcatctcttgatttaatcatgtgaaacttttcctagatgcaaatgctgactaataaagacaaagccaccctgaa

SEQ ID NO: 117328 - DNA, 1000 bp, Homo Sapiens
tcttccccctccttcagcgctttgacaggcctctggtgaccttcgacctcttgggagaagaccagctggttctcggaaggctggcgcacaccttaggggccctgatgtgcctggctgttaacaccacggtggctgtggccatgggcaaggccctgctggaattcgtgtgggcccttcgcttccacatcgatgcctacgtgcgccaggggctgttgtcggccgtctcctccgtcctgctcagcctgcctgctgcgcgcctgctggaggacctgatggacgagctgctggaagcccggtcctggctggcggacgtggctgagaaagacccggacgaggactgcaggacgctggcactgagggccctgctgcttctgcagagactcaagaacaggctcctcccacccgcgtctccctagtccctggaggcctccccaggaccaccctcgccgacagcaaggcaggcggctgagcagcggcctggagcagcagagccaggctttgtagcgaggccaggtcttcggccgcatccggtacggagagtgcagatgcaggaaggcccggcctgccgctatttatagtgcagccagtccgctaaaaatacactgggcctgggcactgcccgccgggacatggcagcctggacgtggggctggggctgtgggcgctgctggcggggttgactcttccagtgagggcagaaccaggctggcaggaggggaggacggtgtacctgctgctcagagcccccaaggctctcctctgagagccaccaagcaggacagagcagctcttgtcccaggtccctcgggctgagcgccgtgtcaccaggagaatagtgctcacagcccaggcagggtgtgtggctcctggatgggctcgtggggcgggatgggacagggcacgggctctcagaaaataaactgctttattggaaaaaaaaaaaaaaaaaaaaaaaaaaaaaaaaaaaaaaaaaaaaaaaaaaaaaaaaaaaaaaaaaaaa

SEQ ID NO: 117329 - DNA, 1000 bp, Homo Sapiens
ggccctgctcacagtggtgtcccaggtgctgtgtttcctggccatcgagtggtacctgcccctgcttgtgtctgcgctggtgctgggctggctgaacctgctttactatacacgtggcttccagcacacaggcatctacagtgtcatgatccagaaggtcatcctgcgggacctgctgcgcttccttctgatctacttagtcttccttttcggcttcgctgtagccctggtgagcctgagccaggaggcttggcgccccgaagctcctacaggccccaatgccacagagtcagtgcagcccatggagggacaggaggacgagggcaacggggcccagtacaggggtatcctggaagcctccttggagctcttcaaattcaccatcggcatgggcgagctggccttccaggagcagctgcacttccgcggcatggtgctgctgctgctgctggcctacgtgctgctcacctacatcctgctgctcaacatgctcatcgccctcatgagcgagaccgtcaacagtgtcgccactgacagctggagcatctggaagctgcagaaagccatctctgtcctggagatggagaatggctattggtggtgcaggaagaagcagcgggcaggtgtgatgctgaccgttggcactaagccagatggcagccccgatgagcgctggtgcttcagggtggaggaggtgaactgggcttcatgggagcagacgctgcctacgctgtgtgaggacccgtcaggggcaggtgtccctcgaactctcgagaaccctgtcctggcttcccctcccaaggaggatgaggatggtgcctctgaggaaaactatgtgcccgtccagctcctccagtccaactgatggcccagatgcagcaggaggccagaggacagagcagaggatctttccaaccacatctgctggctctggggtcccagtgaattctggtggcaaatatatattttcactaactaaaaaaaaaaaaaaaaaaaaaaa

SEQ ID NO: 117330 - DNA, 1000 bp, Homo Sapiens
tacatttaacagatcatttataaagcaggagtccattttaacacttaccgactttttttggtttggaaacatattaccacgtcttaataggatggtgcccatataggtgagcatccctttagatcatgggaaccagcagactgcattcctaatcttcattatgcctgagacttgtcttacaatgttacctttaagtgaatcacataattgtctttggaacttggtctcccaacacttattgtgattgcaaagtgtttaccagatatttgatgaggtgctatgtttgtgaaaaacatatcatgtaattcaaaaacactattgatattgaataccagataccactatgtagtaagtcttttaggatgattttaatttagtcgtgcgtcattttctgattctcatcattgggagatcttaaatcttagcaagcattagcaatattaaatgccaaaattccattgaaactttcaagttggagcaattgtctgtgtttgaaaagatgaaataaaaataataatcaagggcaaagctttgagtgcccagaagggaaagctgtaccagttgctaacctgtcttgtttcaggagccaccatgtttttttttcagtgttaacaacaatcatgataattaaattaaaacactagtttgttcacttgtaggactgcagttctgaattttgggttaaaggttttggctgctgtaagaatgtgaatttgaatgtattttgaattgtaagagcaaaagaacgtttttgtacaattttttttcatttaattggaatgatcttcaggtttctacaaatagggtaattgtaaatttaaagcattagcatttattggtgaataatgtatatatccccattccaagaaatataagtgagtgaagttgaaataaaatctttaaaatttactatattgccagtggtttcacaacagttctcttgtatttatttatcaattaaatcaaataaaaatgattatgtcaaaaaaaaaaaaaaaaa

SEQ ID NO: 117331 - DNA, 598 bp, Homo Sapiens
gagcccggaaggtccggcgcccagagctaacgggagtcccaggttaaacactttaagatgagaaaaattgatctctgtctgagctctgaagggtccgaagtgattttagctacatcaagtgatgaaaaacacccacctgaaaatatcattgatgggaatccagaaacgttttggaccaccacaggaatgtttccccaggaattcattatttgtttccacaaacatgtaaggattgaaaggcttgtaatccaaagttactttgtacagaccttgaagattgaaaaaacacgtctaaagagccagttgattttgagcaatggattgaaaaagatttggtacacacagaggggcagcttcaaaatgaagaaattgtggcacatgatggctccgctacttacttgagattcattattgtatcagcctttgatcattttgcatctgtgcatagcgtttctgcagaaggaacagtagtctcaaatctttcctcataatgataacaaaatgctcttgcatgattttttaacaatatatttaaacaggaagttgtcactgatatactttattaaaaggatttttatcaaaaaaaaaaaaaaaaaaa

SEQ ID NO: 117332 - DNA, 1000 bp, Homo Sapiens
caggcttgggaactggtggaatactaggatatttgtttggcagcaatagagcggcaacacccttctcagactcgtggtactacccgtcctatcctccctcctaccctggcacgtggaatagggcttactcaccccttcatggaggctcgggcagctattcggtatgttcaaactcagacacgaaaaccagaactgcatcaggatatggtggtaccaggagacgataaagtagaaagttggagtcaaacactggatgcagaaattttggatttttcatcactttctctttagaaaaaaagtactacctgttaacaattgggaaaaggggatattcaaaagttctgtggtgttatgtccagtgtagctttttgtattctattatttgaggctaaaagttgatgtgtgacaaaatacttatgtgttgtatgtcagtgtaacatgcagatgtatattgcagtttttgaaagtgatcattactgtggaatgctaaaaatacattaatttctaaaacctgtgatgccctaagaagcattaagaatgaaggtgttgtactaatagaaactaagtacagaaaatttcagttttaggtggttgtagctgatgagttattacctcatagagactataatattctatttggtattatattatttgatgtttgctgttcttcaaacatttaaatcaagctttggactaattatgctaatttgtgagttctgatcacttttgagctctgaagctttgaatcattcagtggtggagatggccttctggtaactgaatattaccttctgtaggaaaaggtggaaaataagcatctagaaggttgttgtgaatgactctgtgctggcaaaaatgcttgaaacctctatatttctttcgttcataagaggtaaaggtcaaatttttcaacaaaagtcttttaataacaaaagcatgcagttctctgtgaaatctcaaatattgttgtaatagtctgtttcaatcttaaaaagaatca

SEQ ID NO: 117333 - DNA, 1000 bp, Homo Sapiens
gacctagttcttaccttttcttgcaaccaacacacttgcaattgtgtctggtatgcttgttcctgctgctaataaagtaaggcccattactgtatcgggaatttctagtgtttcccctgtaataaacagatatttcaagttacaaatcttaaagattcactaaccatcctttgcagttattttggatatttccttcgtgaacaaaaataaaataggcacatttagaattcagagccaatatgtgcttgcttattagttttttagctagcaacatatttgaatcaggctggtaattcgggtaacccaggtagcacagatttttaatgacatatctaaagatacgtaacagctaaaattctgccagtgagaaattttcctgtttgatattcttacaaaagatgtttatgtccaccattatctcatcagggctgtgctgaatatttgataatgagactgatcattccgctttttctttcttaaaaatattagtcagagttaagcaaattaattatagctatctttaagctataaatgtgttaacatgtatatataccatttattatgttctactttagtgatataccttaatttagtgggctttggcagggcgggggagggggaacgttcattaatctctgaggaaaacaaaacctgttttctacttgagtctaacatatggtcccaatttattaatacttctgttaaatttgatgtcaggtcaacatttttcagaaatgtatttattctcagaaacagaaccagagagaagttaaacaaaaggttatgtaactgttcctttaatgttgtaattgaaaacttggtttagcgtcttttttttctttctcttttttttttcttaaaatgccaactaaaataattagaaagtagcttatttattgcatgcttatacattgatattggaattggaattggttgttaatttctgttactggctttgctagaattcatatgtgcataaataacactaatatttatcatc

SEQ ID NO: 117334 - DNA, 1000 bp, Homo Sapiens
tttggttctaaatttggaacagtatatataattaaaagtaaggaacattagaggatttaattagaataaatacatgttttggaaatacagtgacctcttgcagtgtcacaaaagtgcaaagtgatattagctgtcatctgcaatacagaatctcattgcttttgcacatggagcatataggaaactccaaacagatcacaatgaggtttctaaatctgttgggttctgtcttctattgggttctgtgaagcaaaccactgtagctttagctgggttcagtcatatgactcgttggtggaatgcctaggtttttcatcttacatgcagtcttgggggtggatgaatacataatttcttatgtattcgtgtatccattagtgaatagttcaagtctgtttaagagtgtattgagatggcattctctgcatgttaaagatcttaatggcaaccagcacctcttaagtatggtttaaacatattcttagctaattttttccattagtttttgaaattggtggcagttgtctgatccacaagggcaagatcttctgagtactctggggtgtgagtatgtgtgcacacgtgtgtgttggagtgagtgagagaatgtgtctgtgcatgtggccatgctttcctagaatgtcaagtagatatttttacactttgagttttaaagcaattactatcagactgagatcttgtatgccaaactttaatctgcttttatgttttcaggctgaaggtgtgaaaatcctaagaggatttcatattgaatatgtgtacacaatcttaactatcgtggtggaaaacatactactataatttattattatatcttccagataatgttattcatttagaacaaataaggtatattttttagaatcaactttgtaagcactataaaatctttaataagttataaggtctatgatgtgtttactttaaaaattgctgttaaaagcaacacgtattaaatatgtaattatcaaaaaaaaaa

SEQ ID NO: 117335 - DNA, 1000 bp, Homo Sapiens
ttgggaagtgtgaggtcatgagagtggagccctcatgaatgggatcagtgccttatgaaaggccctagagagatacctcatcctctccacagtgtgagacttcaaggggaagtatgagacttctctgaggaagcagacccttcacaagcaaaatcagccagcactttgatcacggacttcccagcctctaggactgtgagcaataaatgtttgatgtttataagccacccagactgtggtattttgttatagcagcctgaacagactaagacgggggtgttgcttccatcaaaggatgtactaagttgtggattatttgtgaaattgaattacaaccttttccttaaggtcttttaccacctcccccccaaaaaaatcccccaaaactgattcagattttcatactttaatgaaatattttataatttgcaaatttttaagtaatttatgaaaaacctagatcagtggatctcctctctggctgcccattagaatgtcctgtggagattaaacttttttttttcagtttatggaccaagagttttgatttatttagggtggagttcaggatcagaatggtttcagaagctcccaggtgattccggagtgagttggagctgcaagcccctgagctagattataagatgcttctgggaaagaaccacattttaggaatttgcttcccacccagtgccctgcatttaatcagcacctgatgacttggcaggacttgccccaccagggtctggctttgaagggtagtggacaccaggatcctttggattaatcctctgccacctctctcttttcctcaaccgagagtgaatttatgtaattgagtgaaagtctacgaatcataattgtaataaattaaggctgggcatttgtttgaaattagataggataaagccaaaggtttgaacaagttgtggatggtttgtaaaaattaatcttacaaaataaatgctgtgtgtgaacacgttgattaaattcaaaaaaa

SEQ ID NO: 117336 - DNA, 1000 bp, Homo Sapiens
tggctcactctgctcaagcaaaactaaaatctcctcaagctgtgttacaactcggagtgaacaatgaagattcaaagagcctggagaaagttcttgtggaattcagtcacaaggagttgtttgatttctataacaagctagagactatacaagcacagctggattcccttacatgatgttttcgaagactgtttttttcatcacgctcctgccacctcattattttgcattgaagatacattgccaggttgtgttttctgaaggattcagtgacttgctttctgtaaattatatggcttatcacttcttagacaaataacaaccaatagagatcattgttaagaatactgaggttctaatatactttctttagttctgtgagccaacagtaattattaagaacactttccctttaaaggaaacaaaagtgaataccatattgtttttactgtcatagtgttgctttcttgcctgtcctgctaagtttttacttgctggatgataccataatgtatcaaggagcgtccatggatacaagataagatgtgtaccttagtagaatacagagctttggtaattacatgaataaaattaagaaaatagccatatacaatcaaatacactatggcatttttatttgaatatgatgagtatattttgcttcggaaataatataggaaggaaatgtaaaatagtgagtagtatggtatcagttaattccagtctgagcttctctgtcaacttcagtttctctctcagtttaatgatttaataatagtccaggtttttgtgtgtttttctttatactgcaaattaataatgattcactttatagtttgggagacagaatcaggtcttgaataaaataattgtaatgagtgctaaatgggcaccattattcgaatcagataccttttatattctctttccataaatacgttgatttctgtcaataaaatttttgtgtcataaaaaaaaaaaaaaaaaaaaaaaaaaaaaa

SEQ ID NO: 117337 - DNA, 870 bp, Homo Sapiens
aggttggaactattgaagcccgctttcaggttcttttccccattttccctttgaaaggaagacttctggcttctcctaaatctccgttctctgggtaaggggagtccaagcctctgtcatgaggaacggaaatgcgagggcctcgggtgttactctaaaatccgccctcagcttgcacgccggaagctgcgattcctgcagcggaagaggcgtgatctggccttcgactcgctatgtccactaacaatatgtcggacccacggaggccgaacaaagtgctgaggtacaagcccccgccgagcgaatgtaacccggccttggacgacccgacgccggactacatgaacctgctgggcatgatcttcagcatgtgcggcctcatgcttaagctgaagtggtgtgcttgggtcgctgtctactgctccttcatcagctttgccaactctcggagctcggaggacacgaagcaaatgatgagtagcttcatgctgtccatctctgccgtggtgatgtcctatctgcagaatcctcagcccatgacgcccccatggtgataccagcctagaagggtcacattttggaccctgtctatccactaggcctgggctttggctgctaaacctgctgccttcagctgccatcctggacttccctgaatgaggccgtctcggtgcccccagctggatagagggaacctggccctttcctagggaacaccctaggcttacccctcctgcctcccttcccctgcctgctgctgggggagatgctgtccatgtttctaggggtattcatttgctttctcgttgaaacctgttgttaataaagtttttcactctgaaaaaaaaaaaaaaaaaaaaaaaaaaaaaa

SEQ ID NO: 117338 - DNA, 1000 bp, Homo Sapiens
gctcctttcccttccctgtactggggtagctcctgcctgctctccctgcgttgcctagggtaaagcctccagatttgccatactgagcccctcttcctagcatcaggcgatacatctgagttcaaatgtcttcccaggctcagggacctccattccttgagattgtcttggcatggcccagccctgcctcatgggatggacaatgcatggggtggtctttatttttccctttcaaataaaacactagtcaggtaccgttttatcccagtcgtactcttccaggtttggaagacccagagaggccaagatcccatccttagccatagcgagcggtggtggtggatagcatcacaagaaacgagcctgaaaatcaggtccagccggtccaagcacatggcctcccatctgggagagcccactgtcccactcccacatgtctgggcacctgccctgggctgaggccaggctgctccaggggcctcctgcgccctcacctgccacagagcaacccaggttaaatacagcccatgcacaaagccacaggccaaagcctatggaattgtttttaatcatcaaatttaaccattttcataactggttcctggaggtgtgcagtgcccccttgcctcttcaaacctacagcttctctttgccatttgtggatttcacatcactccacacagaaacattacagcctggcatccccagtctttgccttcttccagctgcctcgacacagcactgtggcctgtccctattgcccaggcacgccatttccaagggcaggaaggggcagtgtcctgaagcccatcttttctgtgactgtcttaggtgatgtgtagccccctccacctttccactcaacaacctcccacccctgtcctgctgcatggtccggagtctgggacctactttgttttttgttatttatgaccttgtttaaagaaaataaatatctcccaacctttaaaaaaaaaaaaaaaaaaaaaaaaaaaaaaaa

SEQ ID NO: 117339 - DNA, 1000 bp, Homo Sapiens
catcgacgcctatatcgccacgcaccccaccgccttccccgccaccatcatgttcgccatgaagtgcctgtcgctgctcaagttcctcatggacctgggctgcgacggcgagccctgcttctcatgcctctacggcaacggcccgcacccgccggccccgcagccctccagcaggttcaacgacgcgcccgcggccgacaaggagcccagcgtggtgcagttctgtgagttcgtatctgccccagaggtgagccgctgggcggggcccatcatcgatgtcctcctggactacgtgggcaacgtgcagctctgctcgcggctgaaggaacacatcgacagctttgaggactgggccgtcatcaaggagaaggcagaacctccaagacctctggctcacctttgccgactgcgggttcgaaaggccattgggaaataccgtataaaactcctagacaccttgccgctcccaggcaggctgattagatacctgaaatacgagaacacccagtaactggggccacggggagagaggagtagcccctcagactcttcttactaagtctcaggacgtcggtgttcccaactccaaggggacctggtgacagacgaggctgcaggctgcctccctctcagcctggacagctaccaggatctcactgggtctcagggcccagagctttggccagagcagagaacagaatgtgtcaaggagaagaatcatttgtttacaaactgatgagcagatcccagaccttctctaccttcaggaatggcagaaacctctattcctggggccagggcagagcttgaggtgttctggggaaggtggtgctcagagccttccctgtgcccctccacttgttctggaaaactcaccacttgacttcagagctttctctccaaagactaagatgaagacgtggcccaaggtagggggtagggggagcctgggtcttggagggctttgttaagtattaatataataaatgttacacatgtg

SEQ ID NO: 117340 - DNA, 1000 bp, Homo Sapiens
gtgcaggaactggcaaatcatgtctccttcatcagttcattgagaataagttcaaacaggactccaaccacacaatcggcgtggagtttggatcccgggtggtcaacgtgggtgggaagactgtgaagctacagatttgggacacggctggccaggagcggtttcggtcagtgacgcggagttattaccgaggggcggctggagccctgctggtgtacgacatcaccagccgggagacatacaactcactggctgcctggctgacggatgcccgcaccctggccagccccaacatcgtggtcatcctctgtggcaacaagaaggacctggaccctgagcgggaggtcactttcctggaggcctcccgctttgcccaggagaatgagctgatgttcctggagaccagcgctctcacaggcgagaacgtggaggaggcgttcctcaagtgtgcccgcactatcctcaacaagattgactcaggcgagctagacccggagaggatgggctctggcattcagtacggggatgcgtccctccgccagcttcggcagcctcggagtgcccaggccgtggcccctcagccgtgtggctgctgagctctgtggagccagctcacctgttctccaggaccagccctgctggggcccaggcccaggctctgagaggccgtgtcctaacctgccctggccccggagaagctacgttgccacctgtcccccttccctggcctggtggggcctggctttggggcaagactgagccacgggggaagggggaatcccgtacctgctgctgcttcctctgtcttggctaacgtctgtccccctgaacccctaaccatatcccaagagctcccaaagcctgagaccagggtcatttgtccccaactccccatctggccctgctgttgctagtacctgttatttattacctggaggcctgtccagcacccaccctacccccataaagcattgtttacaaaaaaaaaaaaaaaaaaaaa

SEQ ID NO: 117341 - DNA, 1000 bp, Homo Sapiens
gggtatcacacatttctcaccaggcctcctttcctatgggcattggtgcctcccagaggtttcttgggctgctggctggtgagagaggacccttaaagaagatcaagccaagctgaccttggaccctgtccagcacagcttctggcacaggatgcttggtgaatgtaccctttctttccctccctgcagctctgagggagcccctgaccttgtagtgggtggaggaggtaaggggcctccctccctaaatctgcctcttctgcaagctacttggagacttgcctagttgtacccacccctccaggtccctggtgctagagcttctgagaagggcctttccctttcctctttgcctgctatataaggcaggctcctgtggctctgctggctcagtgtgggctgcaggaggactgcagactcagctgcaattctgaggggggtttgggaggcttgtgcgaggtctcaggcctgtgtggggagctggtgcctcttcctgcccgtatctttctcttccaagggcagtgctccaaggcagggactggagaagccaaggggagagtctaaaagggctagagcatttttaaaaatagacacagggtcttgggactggggtttcggattgagttgcaagcagggagaaaacctgaaggtcggtgcccctatggggctgaccagtagagaatttcctttactgtatttttgtgtctggtcttccctttctggcttctaggacatccatgccaggtgaggtgcctgggtccctgttacaagtcaggagccctgtagggagacccctccttttgtacaagtacctgaatgctgcgacaagcagatttttgtaaaattttatattagtttttaatgtcagtggcgactcggttcctggggctgcagccagcctgggacttttgtaagaatttttgggtgactcacttagatgtcgtttccttcttgccccctcttcctctctgtaatctaagtgcattaaacatctttgcag

SEQ ID NO: 117342 - DNA, 1000 bp, Homo Sapiens
gaggcagagaaactgtcttgggacctgatctacctcggacggaagcaggtgaaccctgagaaggagacggccgtggaggggctgccgggcctggtggtggctgggtactcctactggacgctggcctatgccctgcgtctggcgggtgcccgcaagctgctggcctcacagcctctgcgccgcatgctgcccgtggacgagttcctgcccatcatgttcgaccagcaccccaacgagcagtacaaggcacacttctggccacgggacctggtggccttctccgcccagcccctgctcgctgcccctacccactatgccggggacgccgagtggctcagtgacacggagacatcctctccatgggatgatgacagcggccgcctcatcagctggagcggctcccaaaagaccctgcgcagcccccgcctggacctgactggcagcagcgggcacagcctccaaccccagccccgagatgagctctaggtccaggtgatgactgcaaagcagtgtccaggagcaggccactactgcccagagagcagaggaggaggttgttggcagggactgcagatcctgtcagacctggccaccaccttgggcatggccactctgccctctggacctgtctttcatcgggagaaaccactcagagatggatcccattccctaaaggtctcacagcaaaggagcaggactcccaggcccctgtaccctgcctggcctgattcagggccttgtggcccccagcttctgtttcaagctgggcagaccccaggatcccttccctccctaaggactcagctgaggggcccctctgcccccttctacctccacctcagcaccctcccccagcttgatgtttgggtctccccagcaccctcctccctggccggtgcaaagtacagggaggtaaagcaggacccttgcagacatgttgcccagcacacagtaggccctcaataaaagccatttgcactttaaaaaaaaaaaaaaaaaa

SEQ ID NO: 117343 - DNA, 1000 bp, Homo Sapiens
ggcccaggcatcctgggtttcaccagtgacgcgttctagcagacactgactgcgcacctgctctgtagcagacacggaagagtccaagggagcagccacgttaggaagagagacttgggaacagctacacagggagctagaacccctgctccccctgtccccaccccaggagagtaaggggacgagggccagctctctggcatcaggctgcttggacatgaaaccccgtctccaagctcaagctgggagaccctggcccagtttccttatctccttgggcccagccttccccttgctagctagttcttacttcataaggttttagagagaaataaacgcagtaatgcatgaagagtgccgggcatggtgctgagccctgttcctgctctccctccagggctgctgagctagaattcccacctatgtctttccaagggactgttcacggcttgggacttggtctctgtcctgccccatcctcgtcacttgggaccacgagccctggttcagtcacccagggaagcctcccagcggctcatgaagcatcgagctccaagcccagatgccaagctccctggctgagctgaatgatgtcactcatggtggacgcgttctgctcacgggcccagagccctgtgaaatgcatcaaggtcctctccgctggccagcagcatccccaggcttctctcaggcgcccgtgttcacattttctccagcctgagacgcagcctcccgcctggaagggcctgtgccagcaccaggcagagggcaagacggagagggcagagcaagaactgcactgcatctcactgcagtctgaatctagacatcgccattccccgaggtgcgacctcagactaatgacatcctggctgagcctctgtttttctctctaggaaatgggggtgataattgtgcctacctcagatagacagtgccagaattaagtgagtcaagccaagtaaagcccagagaagattctcatcaaaaaaaaaaaaaa

SEQ ID NO: 117344 - DNA, 1000 bp, Homo Sapiens
tcacagggggtagaacaagtggtactaggattatacattgtaagaggtgacaacgttgcagtcattggagaaatcgatgaagaaacagattctgcgcttgatttggggaatattcgagcagaacctttaaattctgtagcacactgaggaaaaactacatacttggacatctgtaaatctttgtacagaaactgattattctgaggatgatatatggagtttttatgagtgtgtcactggattttgactccttattgattcattgtaatatgtaaattaaaatatttctacattttattgaaaaaaaaaaccttttttttttgcctaaatataagtttggtagcttggtttcttttttttattaaatagtgtgaaaatataatgggcattctgaaaacttttagaaaaaagtagtactttttgatactttagtatttatggaaactagtggaaaagagaaattagtgtgctatataaatcaggcattcaagtaacagtaatacaggatatatgtgttttctttccctgatgtttaggaaaatcacaggagggtaaatctttgctggagttatctgaatcattggcatttatccgattccactggtggtagtttgctagtgcttctaaaagttgctccctagcactgagaggtgtgggtaggtaaaaatgtgtttgcttgagaaaagcaaaaatgctaacaaggttttgatagattggcccaaaattctaacttgaatattaagaatgactaggaatggtagaattgacagagatgattagtaaagtctcttgatgcccaattggttaggtatgaaagtaatatgaacacattaatgttgaattttacagacagtatatttgaaaaaaattgattccatgtagtcttcaatttttaatttttaagaattggagaatttctaatgttaaagttagtttataaatgtgagtaaataaactctaagtttgtatcgaaaaaaaaaaaaaaaaaaaaaaaaaaaaa

SEQ ID NO: 117345 - DNA, 1000 bp, Homo Sapiens
aatatactacatagatactataaatcacctatggtacagatttatgaattagaggaacataaaattgaaacatggagggagctttatttacaagaaacatttaagcctttagtgaatatatctccagatgcaagcctcttcgatgctgtatactccttgatcaaaaataaaatccacagattgcccgttattgaccctatcagtgggaatgcactttatatacttacccacaaaagaatcctcaagttcctccagctttttatgtctgatatgccaaagcctgctttcatgaagcagaacctggatgagcttggaataggaacgtaccacaacattgccttcatacatccagacactcccatcatcaaagccttgaacatatttgtggaaagacgaatatcagctctgcctgttgtggatgagtcaggaaaagttgtagatatttattccaaatttgatgtaattaatcttgctgctgagaaaacatacaataacctagatatcacggtgacccaggcccttcagcaccgttcacagtattttgaaggtgttgtgaagtgcaataagctggaaatactggagaccatcgtggacagaatagtaagagctgaggtccatcggttggtggtggtaaatgaagcagatagtattgtgggtattatttccctgtcggacattctgcaagccctgatcctcacaccagcaggtgccaaacaaaaggagacagaaacggagtgaccgccgtgaatgtagacgccctaggaggagaacttgaacaaagtctctgggtcacgttttgcctcatgaacactggctgcaagtggttaagaatgtatatcagggtttaacgataggtatttcttccagtgatgttgaaattaagcttaaaaaagaaagattttatgtgcttgaaaattcaggcttgcattaaaaaactgttttcagaccttgtctgaaggattttaaatgctgtatgtcattaaagtgcactgtgtccctg

SEQ ID NO: 117346 - DNA, 1000 bp, Homo Sapiens
ctgtgccccccccagagcctagaggatgtttcatgggatcccagccacgccgggcataggagcccctgggaacaagccggagctgtatgaggaagtgaagttgtacaagaacgcccgggagagggagaagtacgacaacatggcagagctgtttgcggtggtgaagacaatgcaagccctggagaaggcctacatcaaggactgtgtctcccccagcgagtacactgcagcctgctcccggctcctggtccaatacaaagctgccttcaggcaggtccagggctcagaaatcagctctattgacgaattctgccgcaagttccgcctggactgcccgctggccatggagcggatcaaggaggaccggcccatcaccatcaaggacgacaagggcaacctcaaccgctgcatcgcagacgtggtctcgctcttcatcacggtcatggacaagctgcgcctggagatccgcgccatggatgagatccagcccgacctgcgagagctgatggagaccatgcaccgcatgagccacctcccacccgactttgagggccgccagacggtcagccagtggctgcagaccctgagcggcatgtcggcgtcagatgagctggacgactcacaggtgcgtcagatgctgttcgacctggagtcagcctacaacgccttcaaccgcttcctgcatgcctgagcccggggcactagcccttgcacagaagggcagagtctgaggcgatggctcctggtcccctgtccgccacacaggccgtggtcatccacacaactcactgtctgcagctgcctgtctggtgtctgtctttggtgtcagaactttgggggccgggcccctccccacaataaagatgctctccgaccttcaaaaaaaaaaaaaaaaaaaaaaaaaaaaaaaaaaaaaaaaaaaaaaaaaaaaaaaaaaaaaaaaaaaaaaaaaaaaaaaaaaaaaaaaaaaaaaaaaaaaaaaaaaaaaaaaaaaaaaaaa

SEQ ID NO: 117347 - DNA, 1000 bp, Homo Sapiens
taggaagcttttaaaagacactaaattgtactctaaaagacactaaattgtactaattgtacaaaggtcaagccaattttatgaaacagtcctacagagtaatatatgtgatgcagtgtaagaaggaaaatactcatctctaacattatggtaataacatttagcctcttaggagttggagcagggggatgggtaattacagatttgcagactatagaaagagtttcatttttttgtgaccccacagagtctcaaatttttattccactacctgctagagcctactgtgaaatcactgctccatatttgccagtggaggaaatgggcatagagtagagaatagcttcatatgtttacacgtttgcatagactacacacatgtcatgcgtttatggcaggtagctggtatttattccccaaagtaataatgttgaagtatgggtctcatcattcccatacacagaaacacaaaacactttgatcataaacttttttcttcagaagccaaactaacttgcagaataatagagccactggtttaatgtttcctcaagataggttttagtgtaagctagtattctgtgtgttcgtagaaatgattcaatacctgcagctggtgaattaggaattgtatttgttgccttttttatattagatgaggtgcaaaaattttaatgctagtcagtatgcaccaccacaggaaagttagatcccattagcacttgagactacagctttggaaacttaggctaagttaatttggatttgttacttgattcacctactgaccttttcttttgtttgaagtgcttatcagcataatgagctaagtgtcatgcatatttgtgaagaaacacccttgtttggtcccttttgggacagagaggtactccttgatctttatgaatgaccggttactgttttgccttattgcttaacttaatgtagtgaaataaagcagaccaagcttgaaaaaaaaaaaaaaaaaaaaaaaaaaaaa

SEQ ID NO: 117348 - DNA, 1000 bp, Homo Sapiens
atgctgctcaccttacaccagcacctggacctttccagcagtgagaagttccatgaactccaccgtgacttgcaccagggcattgaggcagccagtgacgaagaggatctgcgctggtggcgcagcacccacgggccaggcatggccatgaactggccacagttcgaggagtggtccttggacacacagaggacaatcagccggaaagagaagggtggccggagccctgatgaggttaccctgaccagcattgtgcctacaagagatggcaccgcacccccaccccagtccccggggtccccaggcacggggcaggatgaggagtggtcagatgaagagagtccccggaaggctgccaccggggttcgggtgagggcactctatgactacgctggccaggaagctgatgagctgagcttccgagcaggggaggagctgctgaagatgagtgaggaggacgagcagggctggtgccaaggccagttgcagagtggccgcattggcctgtaccctgccaactacgtggagtgtgtgggcgcctgagtgtcctgacagcccttctgcaacgtttacccaccctggttcagagcccagcttctcctggagagccggaccctcagggccctgaaccgtcgctctctggctgctcctctgtcccttgagggaggaagtcctgggacccagggaggggaggggcctttgtctagggaagggactggtagggaagggacgagtctaggctgagggcaagatgggaggtcagaggtgacagaagcgttcaggggtgcctgggcctccccaggagctgtggactcagttcctgacctctgctttggggttcctggggtgggcttggggtgagtgtagttctggcctagcagcaccctcttgtggcttgttctagcgtgtattaaaacttgacacacacccacacacaaaaccaaaaaaaaaaaaaaaaaaaaaaaaaaaaaaaaaaaaaaaaaaaaaaaaaaaaaaaaaa

SEQ ID NO: 117349 - DNA, 1000 bp, Homo Sapiens
aaaacaggaccttggcacaccgtcagctcgaactcaacactggcagccaccgtctcacccctgcggaggagcgctcccgtctcccacaggtgccttaccgcgttccctcccgctgctttcatttttctgacctaataattacgggaaatggaaagtctgggccagcatcaataaaatgacaccaaaaataagtagatgaaatcaaatgaatatgagaacatcttgttcttcaatatcacgggtttttgttaatgtttcataagtaattctccccacttgatttttcttctataaaatcccatagaacaatgtttatgctatagccatttaatatatgtacaaattgtaaagaatatgtataaatgttttacacgaatgtaagagcatgtagaagccaacatataaataaattgtttaaaaaaactgtacagtaaattctcaaagcactttttcaaaacactttttggactttgtgtgtgatttttgttgttgttgttaagtactttttattccagctgctgaaaatggtccaggtaatgaattcttccccaaatcctatttcttctgacatgaattcatcatttcagttccgtaggtcagtgttgcggtccgggaagcgtatcataaccacctgggagttgccaagaagcagacagtctcccagtgtctgactctcggatatttggatttgactggtgtgaggcaaagtgaaaaagggatgggggaaatggagatggcacgggctcctcagagcgtggtagccgactgtgaggaaaagcagagggaatgtgaaagaaaataagagaatccacgggatttgatgcctggaagattctccttcaagtggcaacatggcatatatatccttctccggggagtcacatgcaccatttggttcttagatacgttgatgttttgatttttaatgatttgtatcaacctgtaggtaccacagaagagctgtagtcatacaatcacataacttttacaaatatagtgg

SEQ ID NO: 117350 - DNA, 1000 bp, Homo Sapiens
ctgaagatccaacccagtgctttctgctttttgccaaccagacagaaaaggatatcatcttgcgggaggacttagaggaactgcaggcccgctatcccaatcgctttaagctctggttcactctggatcatcccccaaaagattgggcctacagcaagggctttgtgactgccgacatgatccgggaacacctgcccgctccaggggatgatgtgctggtactgctttgtgggccacccccaatggtgcagctggcctgccatcccaacttggacaaactgggctactcacaaaagatgcgattcacctactgagcatcctccagcttccctggtgctgttcgctgcagttgttccccatcagtactcaagcactataagccttagattcctttcctcagagtttcaggttttttcagttacatctagagctgaaatctggatagtacctgcaggaacaatattcctgtagccatggaagagggccaaggctcagtcactccttggatggcctcctaaatctccccgtggcaacaggtccaggagaggcccatggagcagtctcttccatggagtaagaaggaagggagcatgtacgcttggtccaagattggctagttccttgatagcatcttactctcaccttctttgtgtctgtgatgaaaggaacagtctgtgcaatgggttttacttaaacttcactgttcaacctatgagcaaatctgtatgtgtgagtataagttgagcatagcatacttccagaggtggtcttatggagatggcaagaaaggaggaaatgatttcttcagatctcaaaggagtctgaaatatcatatttctgtgtgtgtctctctcagcccctgcccaggctagagggaaacagctactgataatcgaaaactgctgtttgtggcaggaacccctggctgtgcaaataaatggggctgaggcccctgtgtgatattgaaaaaaaaaaaaaaaaaaaaaaaaaaaaaaaaaaa

SEQ ID NO: 117351 - DNA, 1000 bp, Homo Sapiens
aacgcgctatgccgggaaggtggtggtcgtgaccgggggcgggcgcggcatcggagctgggatcgtgcgcgccttcgtgaacagcggggcccgagtggttatctgcgacaaggatgagtctgggggccgggccctggagcaggagctccctggagctgtctttatcctctgtgatgtgactcaggaagatgatgtgaagaccctggtttctgagaccatccgccgatttggccgcctggattgtgttgtcaacaacgctggccaccacccacccccacagaggcctgaggagacctctgcccagggattccgccagctgctggagctgaacctactggggacgtacaccttgaccaagctcgccctcccctacctgcggaagagtcaagggaatgtcatcaacatctccagcctggtgggggcaatcggccaggcccaggcagttccctatgtggccaccaagggggcagtaacagccatgaccaaagctttggccctggatgaaagtccatatggtgtccgagtcaactgtatctccccaggaaacatctggaccccgctgtgggaggagctggcagccttaatgccagaccctagggccacaatccgagagggcatgctggcccagccactgggccgcatgggccagcccgctgaggtcggggctgcggcagtgttcctggcctccgaagccaacttctgcacgggcattgaactgctcgtgacggggggtgcagagctggggtacgggtgcaaggccagtcggagcacccccgtggacgcccccgatatcccttcctgatttctctcatttctacttggggcccccttcctaggactctcccaccccaaactccaacctgtatcagatgcagcccccaagcccttagactctaagcccagttagcaaggtgccgggtcaccctgcaggttcccataaaaacgatttgcagccagaagaaaaaaaaaaaaaaaaaaaaaaaaaaaaaaaaaaaaaaaa

SEQ ID NO: 117352 - DNA, 1000 bp, Homo Sapiens
attgatgtggacttcatagacacaaaggcttcgaagcacaagccaaatatgtcaatatttgtatgtaagaaactaattatgtaataggtaatgaaactgaaactatactatgcccttaaggagatccagtttaattcaaggtgatcttttatttacctgtacaggagtgtaaacttttttgtgcttttatttttcaattgtgagaaccactgattggtatgttcaacaaatttgtgtatacaaagaaatggataaatcactgctatataagggaaactaccttaggaaagaatgtttactgaatgtttattttattttattttttttttactatagagtgaggggttgttaacaaagaatatatattggtcattcttacaactactatttaaagtcagcaacttttcactgaatttgatagattttatgtttggccatatcttcatgctcacatttgatttctgaagacctcctacatacacttcaataaaagttaaatggacatactccctcttttttgatttactggtacatttttaaaataataaatctgccataaaatgcattatatctggagacttgcacttgtatggatgaatttattacattcaacatatttaattttatgccttctaattctaagatgcagaaaaaaataaatgaacatgattttattctatgccaacatttgggcctctgaatgtatctgttatttgaatttaagtatttgaaaaggaatggtcaatttgaaagtcattctaaactgattttttttttctaaagggctccttttttcctggactatgtggttttatgactaaagtcacatgtatgtattaaacattgaggctctgtagaggagagaggatgtacctctctggtgctgttacagtacattctgtacctgccatacaggctcattttcatgcaaattcttcctagagccaaataaataaagacttaggtgaattagtatgtcttgtttctaaaaaaaaaaaaa

SEQ ID NO: 117353 - DNA, 1000 bp, Homo Sapiens
cgtagaaatattgaaagattaaaaccatctctacaatttgtctcctggaatcaagaaggctggaagaccagcctgtgttccgtacctcctgtgggccattctcattcgttattagctttagcaaataacacatgtgtgaagcccaccttcatggaactgaaagagagattcatgaggctctacaagaaaaaggctcaccttcatcactatctacaagttgaagggatggaagaaagctgtttcacagaagctgtgtcatctttatcagcactcatacaggaatatgaccaactggacgccacaaaaaacatgcctgtgcaggatttacccagactaagcatagctatgtgaaaaagaaaccctcaaaaatactttcttaatttcacattgttttttctgacctttctgtttcaacatttttgtaatttggaaactccagttttttcatattatcgggaaatatttttgtctaaaagagtgatttctgtttaatcgcaatttgttggtaataccaatgtgtgaaattagtgaaatcttagtaccttaacttcaaacatttctcttcagaaaagttcccttttctaaaattgagataacatagttcttgaatattttgctgtatttatagcctcatatttaggcatttatgcactgatgtgtcttcaataaaaatcttgtacagatatatttttataattatttataatttatattttgatattctatttaagttatcctgattctttaaaagtagttattgggagtagaagaacacaatataaatatttccgtgtaatagccaccaacttttcaggcataggttttattacaactgttaaggaggttttgcttcttctttagataacaacttgtttgcccaaaagaatcctaatttgtacacttaacatgtatttgtattaaactttttaaataattgctttcttatcaaaccaattgattttataataaatgtctatatttttcaaaaaaaaaaaaaaaa

SEQ ID NO: 117354 - DNA, 1000 bp, Homo Sapiens
cctccttcccgccgcctttcggtggccctggtttcggcgcgcccgggcccggcctgcattacgcgccgcctgcgcccccagccttcggtctcttcgacgacgcggccgccgccgcggcagccctgggcctggcgccccccgccgcccgcggtctcctcacgccgcctgcgtccccgctggagctgctggaggccaagccaaagcgcggccgccgctcttggccccgcaaacgcaccgccactcacacctgcagctacgcgggctgcggcaagacctacaccaagagttcgcatctgaaggcgcatctgcgcacgcacacaggtgagaagccctaccactgcaactgggacggctgcggctggaagtttgcgcgctcagacgagctcacgcgccactaccgaaagcacacgggccaccggccattccagtgccatctgtgcgatcgtgccttctcgcgctccgatcacctggcgctgcacatgaaacggcacatgtagccgggacgcccccgcccacctgcgcgcggccgtggcgggtcccacgcgccgggcgcggccccctcccaaactgtgactggtatttattggacccagagaaccgggccgggcacagcgtggctacagagggtctccctcgatgacgacgacgacgacgccaccaccccagcccccgtctgtgactgaaggcccggtgggaaaagaccacgatcctccttgacgagttttgtttttcaaaatggtgcaataatttaagtggcatcttctctcccaccgggtctacactagaggatcgaggcttgtgatgccttgtgagaaataagggccttaatttgtactgtctgcggcattttttataatattgtatatagtgactgacaaatattgtattactgtacatagagagacaggtgggcatttttgggctacctggttcgtttttataagattttgctgggttggttttttttttaattaaaaagttttgcatcttttaaaaaaaa

SEQ ID NO: 117355 - DNA, 1000 bp, Homo Sapiens
gtcttgctgaatgtgtctaggggttcatcttcagtaatcgacattccactagtgccatagttaacttcatgacatgtagacattcaaaacttgagccttggatgttcctgtggacctgacagttaaaaatataaagaacctaggattcaattccaactttctctgtttgccttgggttgaataacttatcttttggagaatagctttaagtggcttagacactgataaaattcagctgtgttgttgacgctcatctcttttgtcttacgcttagccatatttaaatcttgaatttaatagagtctagtgaaaaaaatgagtgggaagaatgaatataaaagtaataatataaggaaaaagggaaagtaaactatttagaatgtagttttgttatattcccagcatttcaatatttattagttacttgtaaattactgtggctgtgtagtttataaatgtctgtgcactatattaattagaagaccatagaacatgccagcaggttggctaatgctatgggggtttttaccacagttgccattgtggaagaaattatttggtacattaataaaaaaagttggtaaaacatggttttatacctcagtgtataagatgtgcaagacaaatatgcttatttccttttctagaatataagtgatattatttgcttatgacactaacactattaatgacaggagtcaatcagcctttacagctatcaaaatataatgagatcccaatgatgattcttttttactttgaatgttaattagtttgggactttgattggctggcaaacattttatcattgtcagaatttaatttagatttcaaaaatagcttacaggattttaaacatggtgtggtattctaaagccttttttttaaaaaaagagatctttttgagagaaacaaatgaggattgtaaagtttggggacttacctctgtagcattgtgaaaataaactttgattaagctgatttgaaaggaaaaaaaaaa

SEQ ID NO: 117356 - DNA, 1000 bp, Homo Sapiens
gtcagtctagaggtctcactgcaccgagttcataaactgactgaagaatcctttcagctcttcctgactttcccagccctttggtttgtgggtatctgccccaactactgttgggatcagcctcctgtcttatgtgggcacgttccaaagtttaaatgcatttttttgactcttggccaaaatttagaagatgctgtgaatatcattttgaacttgtgtaaatacatgaaagagaaaacctttgtctggaacttcttggctttgtgcaagctgtgtccaaggcaagtacataaactggtaccttgtaatgaagaggcagctgatgccatgcacttgtctgagggcatagctccatgtcttctgacattcctggtgtcccaaagaatagcaaaaagccagtttgaatattatgtaacttatttttttaatgtggacaggggaccttgaaaatcactaagttattaaaaatgtggatgtgctagaattggatatgtccaggaacatgggaagggctcactattggaatcccatgagtttccattttgtctctacccaaacgtattccaaagctgactgcatttgtaccatcttatttcttttggggattatacacctcagccgcctgagatgggggtcagctctttatataaagggaaaccagaccaggcctaaagcccacccctaccctcacccccccaatcctctcctgaaacttaaaaacagtgggaatataggaaagggaaccaaatctcattaattaattgttctcccccattaccccactgaatgaatggccatacaggctaagctgaataatgacaaagttgaaaggaccaatacagccccttttataaggattttgaatgttttgcaaatgtattggtccctgtgttgtattttgtagccttttcctgggcttcagctcccctacttcttgtatgtgtatgcatactgtagctaaccattaaagtcatgacacacaaaaaaaaaaaaaaaaaaa

SEQ ID NO: 117357 - DNA, 1000 bp, Homo Sapiens
aaaaaaatccttccattgaatagaaacttcaaagtccttcatcagatcatggcattagctactttagcaaaatagtgtaaactttggttctgagtaaaaatgacttccctaccacagttgtgaatgttaatatgctgataaaactgccaagatatatttgataggtaggggattaaactcatggtttgtcaaaagagtgtttttttctagttttattcttaacagatatgttgaggtattcatatttgtttccttttgtggttttaatgaagacaatttgtaaagtaatactgttatgtatatgctaaatgttggtaaatactaattaatttccatcatttgtagacttgttttgcaatgggatatatttttacttataataccaatttaggctgggcgcagtggctcacgcctgtaatcccagcactttgggaggccaaggcaaacggatcacgaggtcaggagatcaagaccatcctggccaacatggtgaaaccccatctctactgaatacacaaaaattggctggacatggtggcgcatgtctgtaatcccagctactgtaatctcagctactcgggaggctgaggcaggagaattgcctcaaccgggaggcggaggttgcagtgagccaagatcgcaccactgcactccagcctggcaacagagcgagactctgtctcagaaaaaaaaaaacaaaaaccagtttaggctgggtatggtggctcaccagcactttgggaggctgaggcaggtggatctcttgaggtcgggagtttgagaccagcctggccaacatggtgaaaccctgtctttactaaaaatacaaaaattagccaggcatggtggcgtgtgccagtaatcccagctacttgggaggctgaggcgcgagaatcgcttgaaccctggagatggaggttgcagtgagcagagatcgcaccactgcactccagcctgggcaagagtgagactgtgtctcaaaaggaaaaaaaaaaaaaaa

SEQ ID NO: 117358 - DNA, 1000 bp, Homo Sapiens
ggtggtgcacatttcacagaaaccttagcacagtatctagcttctgagttccaaagatccttcaaacatgatgtgagaggaaatgcgcgagccatgatgaaattaacgaacagtgctgaagtagcgaaacattctttgtcaaccttgggaagtgccaactgttttcctgactcattatatgaagggcaagattttgattgcaatgtgtccagagcaagatttgaacttctttgttctccactttttaataagtgtttagaagcaatcagaggactcttagatcaaaatggatttacagcagatgatatcaacaaggttgtcctttgtggagggtcttctcgaatcccaaagctacagcaactgattaaagatcttttcccagctgttgagcttctcaattctatccctcctgatgaagtgatccctattggtgcagctatagaagcaggaattcttattgggaaagaaaacctgttggtggaagactctcttatgatagagtgttcagccagagatattttagttaagggtgtggacgaatcaggagccagtagattcacagtgctgtttccatcagggactcctttgccagctcgaagacaacacacattgcaagcccctggaagcatatcttcagtgtgccttgaactctatgagtctgatgggaagaactctgccaaagaggaaaccaagtttgcacaggttgtactccaggatttagataaaaaagaaaatggattacgtgatatattagctgttcttactatgaaaagggatggatctttacatgtgacatgcacagatcaagaaactggaaaatgtgaagcaatctctattgagatagcatcttagtgttttagagaaatcaagaatttttaaaaacaagaatatcaacatttggttttgtgtataagtggtgtttgtattaaaatactttttcaatgaactgtataaactatgttttattaaactacaatatatcagtaaaaaaaaaaaaaaa

SEQ ID NO: 117359 - DNA, 817 bp, Homo Sapiens; identical to SEQ ID NO: 30220

SEQ ID NO: 117360 - DNA, 1000 bp, Homo Sapiens
ctgcccttcctgctgaacttcagagggagctgaaagcagcgtatgatcaaagacaaaggcagggcgagaacagcactcaccagcagtcagccagcgcatctgtgccaaagaatcctttacttcatctaaaggcagcagtgaaagaaaagaaaagaaacaagaagaaaaaaaccattggttcaccaaaaaggattcagagtcctttgaataacaagctgcttaacagtcctgcaaaaactctgccaggggcctgtggcagtccccagaagttaattgatgggtttctaaaacatgaaggacctcctgcagagaaacccctggaagaactctctgcttctacttcaggtgtgccaggcctttctagtttgcagtctgacccagctggctgtgtgagacctccagcacccaatctagctggagctgttgaattcaatgatgtgaagaccttgctcagagaatggataactacaatttcagatccaatggaagaagacattctccaagttgtgaaatactgtactgatctaatagaagaaaaagatttggaaaaactggatctagttataaaatacatgaaaaggctgatgcagcaatcggtggaatcggtttggaatatggcatttgactttattcttgacaatgtccaggtggttttacaacaaacttatggaagcacattaaaagttacataaatattaccagagagcctgatgctctctgatagctgtgccataagtgcttgtgaggtatttgcaaagtgcatgatagtaatgctcggagtttttataattttaaatttcttttaaagcaagtgttttgtacatttcttttcaaaaagtgccaaatttgtcagtattgcatgtaaataattgtgttaattattttactgtagcatagattctatttacaaaatgtttgtttataaagttttatggatttttacagtgaagtgtttacagttgtttaataaagaactgtatgtaaaaaaaaaaaaaaaaaa

SEQ ID NO: 117361 - DNA, 1000 bp, Homo Sapiens
gtttacattacccttgaaatgttttcagtcaacccttttcagtgtaagatcagcacatttggtggctgatgctgttctcctttgactgtaccgggagccagattctatcatatgcatgtgtaatcccctgtaatacactcaggtgctcacaaatagagcagattgtcatattgtaacatgcgtgtgccagacaccgggcagtacactttggaaagaatgtgaaatccttttaatttttaatccatagcttactgcttgtgcagtcacctgcctcttgaggttgctcattgcccttggacctgtgaggaggccttcagattagtaattggtgcttagtactatttatgcttaaatagatcttccagtacaatgttgaagtcttttttatggataataacgtgtttgatggagtaacttattatttttttttggttggtggtttacacgttaatagaggtagtacaatttctttggaaaggtgtcttttgaagccagctgttaagcttcatacattacctcccttctcaaattcggtaagacagtagttttggggaacttttttgcccatgtgtcttttaagtgtgattttaaaaaaatgagtggttcagttcattcccctaaacagaagaaaagaccaaataattaccttccattcctcttcatgtgggaatatagagagggttcatgtggcattttagagaaaagataatttatcctcattcaacacaggcccagaaaattgtgtcccagaaggatgtcagtaattgtgactaggccaggccttttagcattttgctaagacttgaaacaaaaaatgtaaatacaaaagaaatcaagttttgttttgaaagatgccttctagaacttactgtgtattaataaattgtcactttcattgtctttattgtaactccattgatcccgtatcttaacggttcacgtctagccaaataactgttttggaataaaaaccttggtggtgaaaaaaaaaaaaaaaaag

SEQ ID NO: 117362 - DNA, 1000 bp, Homo Sapiens
aaggcagtacatccgagcagcaggatgagctacaggaagaatcagaaatgtcagaaaaaaagtcatgctcctcttctcccacccaaagtgagatatccacatcgctgcctccagatagacaaaggagaaaaagggagcttcgcaccttttcattttctgacgatgaaaataaacctccttcaccaaaggaaataaggatcgaagttgctgaaaggcttcacctggacagtaaccccttgaagtggagtgtggcagacgttgtgcggttcatcagatccactgactgtgctccattagcaagaatattcctagaccaggaaattgatgggcaggccctgttgctccttacccttcccactgttcaagaatgcatggacttaaaattgggccctgccatcaaactttgccatcacatagagaggatcaagtttgctttttatgagcagtttgccaactgagaaggacaaccaaagtgagctggatctttgaagcacaaatgcagcaaatccttcaccctgctttataagtggagctggaatagtcctggggctctggggcctgcaggtatcagcttgctctctttgcactttcggggaaggaggactcacagtgaggaagcaaaaactgtgcacagaagtggatcacctgctggtggaaatgtggacatctcttgttcagcagatggcagtttttaaaaaataaaggttgtgaggaaaagacttatataagaagaaaagcatttccagtggtgtggcctgaaaacaaagaataacctaggctgctggaaagcacccttttggttgttttcattctgttccctcccattgtagattgaactttgttctctgctttctttttcttggaaagagaggacttagctttaagtcagcactgatttgggactgttcctaaggcatatcagtgcttcattgtcattgtgtttttaaactttttaaaattaaaacagttcattttggggatgaaaaaaaaaaaaaaaaaa

SEQ ID NO: 117363 - DNA, 1000 bp, Homo Sapiens
aacgacggccccaagccggggcagtcccgattctgaatattcagcagctcgctgaagtttgtccctaaaggcaaagaaacttctgcctcccagggtcactaggcgggcagcccacacccaccccagacggccaccacactgaggccacacgttggccattccaccttggagttggaaccctgggcgtcgagacaggaaggcagggcgcagtggttgaaacatcaggacactcccaaggccccggctctgaacaagaccttttcgtttcttggaaaagagactcatttgctgatggttcatgccttctgctgggacaggcctgggctgtgcagccacactgtcggctgacttagccccctgctcactctaggtgcctccaggaggtgagccctgggtgcagctggtctctgaatgacgttacaccctcaccttcttttcctggccctgtctctggactctcccctgtgaggcccaattccaagacagactctcgtcctcaccgaagcttaggcccacatctcccaggctgcttaggagacagaatggaaacggaggccgcccctgccagccgccctggccctggtcactgcatgatccgctctggtcaaacccttccaggccagccagagtggggatggtctgtgacctgctgggaaggcaggctgatggggcacacccttggcctctcgtccacgaggggagaaacctaaaccctgtttcacaatctgtgcggaagtagcttgcctcacttctgcttaggaaagcggctgttgctccataactctaaccagcacagggctgaggcctgcagtgcacacctgcagggaggcccttcccaaggtgtggtgactgtgccttactgtacatgctcggaggcctggccatataggagggtgggtgatgctgaaatcaccccccatcttaagtaattactttctggagtaatcaggtggaaatccatagacaaatgaaacattcagaaaaaaaaaaaaaaaaaaaa

SEQ ID NO: 117364 - DNA, 1000 bp, Homo Sapiens
caaacggaagaggcgctctagcagttccagttccagctcctcctcttcatcttcctcctcctcctcctcctcctcttcttcctcctcctcttcctcttcttcttcttcctcctcatcttcctcctcctcgtcgtcttcctccccttcccctgctaagcctggccctcaggccttgcccaaacctgcaagccccaagaagccaccccctggcgagcggaggtcccgcagcccccggaagccaatagactccctcagggactctcggtccctcagctactcgcctgtggagcgtcgccgtccctcgccccagccctcaccacgggaccagcagagcagcagcagtgagcggggttcccggagaggccagcgtggggacagccgctcccccagccacaagcgcaggagggagacacctagccctcggcccatgagacaccgctcctccaggtctccataaattgtctttgggggattccaccacacccaatgctctggagccacaaggagtgtcccttcttccccagcagagccgtgggagggtccttgtctgctctcctttgaaccttggcagcccttggatggagggctccctttccctccccttttttttttctttgttcctgtgaaatgttaatctccgtgagttcttcctggttcatgtgttctggggggtttggggtgggagggaatgcagatgggagttgggggaggggaggatacagttcaggataccccagcctggagtcagggccagggaggcatggccccacttgtatccagaagttcccaggggtgattgtgatggtggttgggactggaggttgtataaggtgttcttggaaggaaggggcaggagttggaattagttggtccctactgtcccccatgaggttgtgaacccctccccccaacttttcatgtttcttaaaggcattttggttttttaaaatctgtacagcaagagcaactttttctgtcaaataaaaatgagaaatgcagg

SEQ ID NO: 117365 - DNA, 1000 bp, Homo Sapiens
acagctgatctatatgctaccaaggagagaatagaatactccaaaaccttcaaggggaaatattttaattttcttggttactttttctctatttactgtgtttggaaaattttcatggctaccatcaatattgtttttgatcgagttgggaaaacggatcctgtcacaagaggcattgagatcactgtgaattatctgggaatccaatttgatgtgaagttttggtcccaacacatttccttcattcttgttggaataatcatcgtcacatccatcagaggattgctgatcactcttaccaagttcttttatgccatctctagcagtaagtcctccaatgtcattgtcctgctattagcacagataatgggcatgtactttgtctcctctgtgctgctgatccgaatgagtatgcctttagaataccgcaccataatcactgaagtccttggagaactgcagttcaacttctatcaccgttggtttgatgtgatcttcctggtcagcgctctctctagcatactcttcctctatttggctcacaaacaggcaccagagaagcaaatggcaccttgaacttaagcctactacagactgttagaggccagtggtttcaaaatttagatataagaggggggaaaaatggaaccagggcctgacattttataaacaaacaaaatgctatggtagcatttttcaccttcatagcatactccttccccctcaggtgatactatgaccatgagtagcatcagccagaacatgagagggagaactaactcaagacaatactcagcagagagcatcccgtgtggatatgaggctggtgtagaggcggagaggagccaagaaactaaaggtgaaaaatacactggaactctggggcaagagatgtctatggtagctgagccaaacacgtaggatttccgttttaaggttcacatggaaaaggttatagctttgccttgagattgactcattaaaatcagagactgtaaca

SEQ ID NO: 117366 - DNA, 1000 bp, Homo Sapiens
gaagttcaatgtggagaagccgctcatcttcaacacataccagtgctacctcaaggatgcctatgacaatgtgaccctggacgtggagctggctcgccgtgagggctggtgttttggggccaagctggtgcggggcgcatacctggcccaggagcgagcccgtgcggcagagatcggctatgaggaccccatcaaccccacgtacgaggccaccaacgccatgtaccacaggtgcctggactacgtgttggaggagctgaagcacaacgccaaggccaaggtgatggtggcctcccacaatgaggacacagtgcgctttgcactgcgcaggatggaggagctgggcctgcatcctgctgaccaccgggtgtactttggacagctgctaggcatgtgtgaccagatcagcttcccgctgggccaggccggctaccccgtgtacaagtacgtgccctatggccccgtgatggaggtgctgccctacttgtcccgccgtgccctggagaacagcagcctcatgaagggcacccatcgggagcggcagctgctgtggctggagctcttgaggcggctccgaactggcaacctcttccatcgccctgcctagcacccgccagcacacccttagcctccagcaccccccgcccccgcccaggccatcaccacagctgcagccaaccccatcctcacacagattcaccttttttcaccccacacttgcagagctgctggaggtgaggtcaggtgcctcccagccctgcccagagtatgggcactcaggtgtgggccgaacctgatacctgcctgggacagccactggaaacttttgggaactctcctcgaatgtgtgggcccaaggcccccacctctgtgacccccatgtccttggacctagaggattgtccaccttctgccaaggccagcccacacagcccgagccccttggggagcagtggccgggctggggaggcctgcctggtcaataaaccactgttcctgc

SEQ ID NO: 117367 - DNA, 1000 bp, Homo Sapiens
tagcctatctgaatgaggaccaaaggttagagccctctttctccccgaagaaagagcccggaaaaacatggcagagcaaagagcaaaatcctttctcccccgaatgctttaccagtttctcagcaacatttattcaagatgatttttaccaggaaccttatcaaaggcaaaaccacagctgcttgggttgaagtccccatcctggcctcctctcagccgccagacatggccaggaaccctgtggttcccaagaacaatttaaagatcactctttgatttgaaagaccaccattatcattttactaaattcttatatatacttgtgccttttccaactttcagttctcttaagaaaaacatccactgtagctttataaaataccttagtatcagctaggtccaagtctccaggcaggactatcaaaatggactccttcttcctatcagctctagaaccccagaggacttgcccagtaggccagctgagcacttaccaggcagcatctccctggccttccacagtctcgcctgtctgtctctggccttggtggacctggctccctccctaggaggcttttgccctcagcttgaatacagttcctggtgcatcaaagctgtaagttctcagctgctggcctgcactcatcacctcttcctacaaataaacatttggaaaaaagtccatcttcaatatgcttaaagagaagggtaggagataaggagaaagaacagatacggtttttttcccctttaaggcctttagattttgaggtactgtaaggggcctagaaggacaaaaggctttcattccctcttccttttggcaggcaggttatcagtccttggcagaagggcccagccctatccttttctgtatcaaacaaaatccttgaggttggtatacaagttaaggctgaaaaaaggccttaaattcccagtaaagaatgtgaaagcaagcatgtaaaataaactggtcttcatgaaaaaaaaaaaaaaaaaa

SEQ ID NO: 117368 - DNA, 1000 bp, Homo Sapiens
aaccctgagcacaacagcaacctggccaatatcttagaggtgtgtcgcagcaaacatatgcccaagtcaacgattgagacagcactgaaaatggagaaatccaaggacacttatttgctgtatgagggtcgaggccctggtggctcttctctgctcatcgaggcattatctaacagtagccacaagtgccaagcagacattagacatatcctgaataagaatggaggagtgatggctgtaggagctcgtcactcttttgacaaaaagggggtgattgtggttgaagtggaggacagagagaagaaggctgtgaacctagagcgtgccctggagatggcaatcgaagcaggagctgaggatgtcaaggaaactgaagatgaagaagaaaggaacgtttttaaatttatttgtgatgcctcttcactgcaccaagtgaggaagaagctggactccctgggcctgtgttctgtgtcctgtgcactagagttcatccccaactcaaaggtgcagctggctgagcccgacctggaacaggccgcacatctcattcaggctctcagcaaccacgaggatgtgattcacgtctatgataacattgaataaccaggctacatgtgcccccgggttccttcctagaaatgtggcagcccattccagcacacaggcttctgcagcaatctctgagggtaaagccggtgggaggctcagcaggccaggaggcccaaggacaggacttgcgaccttgaagccaaaggaatctcacttgtggggcctccttgtcagctctgctgctgtctcagagccatctggatgagtgtcccgacaccctctcggatgcagggcaggaccacccagctggtcagactctgatgttgggtagctggcctctgtggggattgtaagtgccctgaggcgctctgtactagaaactgctcttaataataacggtgattattggttgctgcaaaaaaaaaaaaaaaaaaaaaaaaaaaaaaaaaaa

SEQ ID NO: 117369 - DNA, 1000 bp, Homo Sapiens
gctgaccaaggtgggcatgcagcaaatgtttgccttgggagagagactgaggaagaactatgtggaagacattccctttctttcaccaaccttcaacccacaggaggtctttattcgttccactaacatttttcggaatctggagtccacccgttgtttgctggctgggcttttccagtgtcagaaagaaggacccatcatcatccacactgatgaagcagattcagaagtcttgtatcccaactaccaaagctgctggagcctgaggcagagaaccagaggccggaggcagactgcctctttacagccaggaatctcagaggatttgaaaaaggtgaaggacaggatgggcattgacagtagtgataaagtggacttcttcatcctcctggacaacgtggctgccgagcaggcacacaacctcccaagctgccccatgctgaagagatttgcacggatgatcgaacagagagctgtggacacatccttgtacatactgcccaaggaagacagggaaagtcttcagatggcagtaggcccattcctccacatcctagagagcaacctgctgaaagccatggactctgccactgcccccgacaagatcagaaagctgtatctctatgcggctcatgatgtgaccttcataccgctcttaatgaccctggggatttttgaccacaaatggccaccgtttgctgttgacctgaccatggaactttaccagcacctggaatctaaggagtggtttgtgcagctctattaccacgggaaggagcaggtgccgagaggttgccctgatgggctctgcccgctggacatgttcttgaatgccatgtcagtttataccttaagcccagaaaaataccatgcactctgctctcaaactcaggtgatggaagttggaaatgaagagtaactgatttataaaagcaggatgtgttgattttaaaataaagtgcctttatacaatgccaaaaaaaaaaaaaaaaaaaaaaaa

SEQ ID NO: 117370 - DNA, 518 bp, Homo Sapiens
ggaactgcaggcccacctgtctgcaacccagctgaggccatgccctccccagggaccgtctgcagcctcctgctcctcggcatgctctggctggacttggccatggcaggctccagcttcctgagccctgaacaccagagagtccagcagagaaaggagtcgaagaagccaccagccaagctgcagccccgagctctagcaggctggctccgcccggaagatggaggtcaagcagaaggggcagaggatgaactggaagtccggttcaacgccccctttgatgttggaatcaagctgtcaggggttcagtaccagcagcacagccaggccctggggaagtttcttcaggacatcctctgggaagaggccaaagaggccccagccgacaagtgatcgcccacaagccttactcacctctctctaagtttagaagcgctcatctggcttttcgcttgcttctgcagcaactcccacgactgttgtacaagctcaggaggcgaataaatgttcaaactgta

SEQ ID NO: 117371 - DNA, 1000 bp, Homo Sapiens
gacctttagtcctctacctcagagccccgagtcatttctgaccaccccgttctgtgtcctcactcttgtccctgaatgggtccctgtgtggatctcagtgtgtgtgtggtttctccactcctccccgctcatgtcccacacctgccatattgaaccgtttctgcactaatcttctccacgggcacggagtggagggaacgtcttgggaaaggggagagcttgacctccatctaggtttcttttatctggagaaaaagaacacttttgaactatgtaatgcttcaccctgaaaggcaagctaacgctaacttcccaggtgacagtagcaggaacaaggaagggtaatgtttccatgacagacacttgcttcccttgggacaagtcccagaagaactacctgaagcaccaaagctccccaccccagcctggtggcagaggaagcaggtggcaccaactcaccaaagggacttgggagccaccttctcactctgtggaagtactttagtgagagctgactggcaagataaaaaccctgaaattcccagaagttacagatgccttaaagactttctttggaagatcattgcctgtactattccttttttgtgtggcataaataatatattaacctgttacaactgacaacattggttttctgcagctagggagtcttgagtcgagactgctcgccttgatgacttgctcttttttggcagatgtgtggagttggctgttacgacatccctgtgtgatcccagaggaggggcagtagctgggcagaaactgcaggcacacatttgggtggatcacctggcttccagccccttcggggtggtgctcagtgtggggtgatggtatcatagaggaccacggcgcttatcagcattgtttctttggagtctgtgtaatggaatgtatttttcaaatactgatatttgcattttctgtaacaattccttataataaaatgaagtaaaattgtgaaaaaaaaaaaaaaaaa

SEQ ID NO: 117372 - DNA, 1000 bp, Homo Sapiens
caggccctgcccccggggcccatgcagaccctcatctttttcgacatggaggccactggcttgcccttctcccagcccaaggtcacggagctgtgcctgctggctgtccacagatgtgccctggagagcccccccacctctcaggggccacctcccacagttcctccaccaccgcgtgtggtagacaagctctccctgtgtgtggctccggggaaggcctgcagccctgcagccagcgagatcacaggtctgagcacagctgtgctggcagcgcatgggcgtcaatgttttgatgacaacctggccaacctgctcctagccttcctgcggcgccagccacagccctggtgcctggtggcacacaatggtgaccgctacgacttccccctgctccaagcagagctggctatgctgggcctcaccagtgctctggatggtgccttctgtgtggatagcatcactgcgctgaaggccctggagcgagcaagcagcccctcagaacacggcccaaggaagagctacagcctaggcagcatctacactcgcctgtatgggcagtcccctccagactcgcacacggctgagggtgatgtcctggccctgctcagcatctgtcagtggagaccacaggccctgctgcggtgggtggatgctcacgccaggcctttcggcaccatcaggcccatgtatggggtcacagcctctgctaggaccaagccaagaccatctgctgtcacaaccactgcacacctggccacaaccaggaacactagtcccagccttggagagagcaggggtaccaaggatcttcctccagtgaaggaccctggagccctatccagggaggggctgctggccccactgggtctgctggccatcctgaccttggcagtagccacactgtatggactatccctggccacacctggggagtaggccaagaaggaaaatctgacgaataaagacccccgctgccccataaaaaaaaaaaaaaaaaaaa

SEQ ID NO: 117373 - DNA, 1000 bp, Homo Sapiens
tataaactagctggaccatgatctagttcaatgatttggctcctattgaagatggcttctaagaaaacaagatgcacagaggacacagaaggacttggcagcagggtgatgacctgatcatttgttgatgggatggtggcttacctcttattcacagcttacacttatgcatgccaaatgtaaggccatgaaaatcagtatttcaaataacttaaaaaatgctttactactaaaatgtaaaaaattaatgtgctcacctcggcagcacatatactaaaaattaataagacccagcttgaaaattgagcctgataacaagattacaaattcacaatacctaatacttagggaaatataaaaatttaagcatgaatgcgttctggaacacgttagaagaaaaataaaagccaatgagtttttttttaattctcctttctcaccaatgggcaatagcccataattgaaataaatttctgattgaaaggtataggaaacattaaaatgcattactaagagaagtaatataattttcttacaaagtatttttcccaaagatagctttactatttcaaaaattgtcaaattaatgcatgctccttacaacaaacaaatatcaaaaagagtttaggaattctactagccagagatagtcacttggagaaactttctatatatccttctaaatatttttctgggcatgcttatgtatgtacatcagttgtttctttttattttgaaccaaaaatgtggtttcttttgtacacattacttaaactttctttccagtcaacaatatattgtggatttattttcactgttatatttaactatatataaatacgcatatattgtaattttaatgtctgcttagcaccccactgataaccaaatcacagtttatttaaataattttaatgacttttcaaaaacaatttattgatgcaaaaagcaaggttgagatgacaatgtttctttcaataattaaaaaatactgcttcac

SEQ ID NO: 117374 - DNA, 1000 bp, Homo Sapiens; identical to SEQ ID NO: 116627

SEQ ID NO: 117375 - DNA, 1000 bp, Homo Sapiens
cgtcagagcgcggctcagatgtggcctctgcccagcttcccaacttcaggcatgctcttgtggtgttcgggggcctccagggtctggaagctggagcggatgctgaccccaacctggaggtggctgaacccagtgtcctctttgacctgtacgtcaatacctgtcctggccagggtagccgtaccatccgcacggaggaagccatcctcatctccctggccgccctgcagcctggcctcatccaggcgggtgcccggcacacctgaaagttctaaggggccgaggacatcagtgaagcagcagtgaaaccaggggctctgcaggtcacttgggacggacgccaccagacttgtctccaaaaatcaccacctttaatactccccggcctgcacacacccacagtctcactgggctccaccctcacttactgcccgccgtgatggccttgaggctgcctgcccgcgccaggatgtttggcacaaagagcagccccgaagcccgctcaatgctctcgatgggcaccaggaagcgctccagtgggatggcctcatccacaggtgcgttgggcatcacgtaggtgcggagctcaatttgcccacctgctgcctccaggatcagcaccttgaagaagtgtgtgggcactgccacgtggttcttgccgatgacctggtactttacgtaggatttcccatcagcctctgtcctgtgggcagacccaggcacacgtgggcagggggcctggatgaacccaaagccacctcttccaggcagccttccctgatctgtcctctaacttctgtcaacctgcaggaccacgccctcactgtgagacttctgtagcctgcctggctcctccttgaggctggaactctctccagggtggttaactctttccctctgttttccttatgcccaacactgggtcaggcagagtgggcgacaataaacgctgctaggagaatcgaaaaaaaaaaaaaaaaaaaaaaaaaaaaaaaaaaaa

SEQ ID NO: 117376 - DNA, 1000 bp, Homo Sapiens
cgcaaatgctcgttgcatcctgggagtcgtagtgctcagcacggtagtgctacaaaaggactacatttccccaaatgcccgcaaagccttgtgcacgccttccggaaggagtttgttacacgaggtctgagagacagaggcagcgtgtttgagctgctggtgcggtggtcagcgcgatgcccaaggccaagggcaaaacccggaggcagaagtttggttacagtgtcaaccgaaagcgtctgaaccggaatgctcgacggaaggcagcgcgcggaatcgaatgctcccacatccgacatgcctgggaccacgctaaatcggtacggcagaacctggccgagatggggttggctgtggaccccaacagggcggtgcccctccgtaagagaaaggtgaaggccatggaggtggacatagaggagaggcctaaagagcttgtacggaagccctatgtgctgaatgacctggaggcagaagccagccttccagaaaagaaaggaaatactctgtctcgggacctcattgactatgtacgctacatggtagagaaccacggggaggactataaggccatggcccgtgatgagaagaattactatcaagataccccaaaacagattcggagtaagatcaacgtctataaacgcttttacccagcagagtggcaagacttcctcgattctttgcagaagaggaagatggaggtggagtaactggtttacatcacagctgccccaggctgaggcgtcccccggaccagtgaagctggagccagggtgtaaggcaaggaggtgctgtgtggctccagaggggctggccaggtcccatggaatcagaaggttacacacacacgtgcacactccccgctctggggaaggaactgttctcagaggctccaatttatattcatctgggggttcacggaaaagccagaacctgctgttttcagggtgggtgatgtaaatatagtgtgtacataataaagcaaatatattttaaa

SEQ ID NO: 117377 - DNA, 1000 bp, Homo Sapiens
ataaagatgagctgaagtcaacgtcaaaagctgtcgaaaccgttcacaatttgtgttgcaacgagaacaaaggggcctctgaactagtggcagaattgagcacactttatcagtgtattaggtttccagtggtagcaatgggtgtgctgaagtgggtggattggactgtatcagaaccaaggtactttcagctgcagactgaccatacccctgtccacctggcgttgctggatgagatcagcacctgccaccagctcctgcacccccaggtcctgcagctgcttgttaagctttttgagactgagcactcccagctggacgtgatggagcagcttgagttgaagaagacactgctggacaggatggttcacctgctgagtcgaggttatgtacttcctgttgtcagttacatccgaaagtgtctggagaagctggacactgacatttcactcattcgctattttgtcactgaggtgctggacgtcattgctcctccttatacctctgacttcgtgcaacttttcctccccatcctggagaatgacagcatcgcaggtaccatcaaaacggaaggcgagcatgaccctgtgacggagtttatagctcactgcaaatctaacttcatcatggtgaactaatttagagcatcctccagagctgaagcagaacattccagaacccgttgtggaaaaaccctttcaagaagctgttttaagaggctcgggcagcgtcttgaaaatgggcaccgctgggaggaggtggatgacttctttacaaaggaaaatggcaggcgctgggctcccacgacccctcaggacagatctggccgtcagccgcgggccgctgggaactccactcggggaactcctttccaagctgacctcagttttctcacaagaacccagttagctgatgttttattgtaattgtcttaatttgctaagaacaagtaataagtaaatttttaaaaagcctttctgctgggttggattaaaaaaaa

SEQ ID NO: 117378 - DNA, 1000 bp, Homo Sapiens
tcctagtcgccggcttcaggtcactgccggctgaacggagctgccgtcgccatgtttggctgcttggtggcggggaggctggtgcaaacagctgcacagcaagtggcagaggataaatttgtttttgacttacctgattatgaaagtatcaaccatgttgtggtttttatgctgggaacaatcccatttcctgagggaatgggaggatctgtctacttttcttatcctgattcaaatggaatgccagtatggcaactcctaggatttgtcacgaatgggaagccaagtgccatcttcaaaatttcaggtcttaaatctggagaaggaagccaacatccttttggagccatgaatattgtccgaactccatctgttgctcagattggaatttcagtggaattattagacagtatggctcagcagactcctgtaggtaatgctgctgtatcctcagttgactcattcactcagttcacacaaaagatgttggacaatttctacaattttgcttcatcatttgctgtctctcaggcccagatgacaccaagcccatctgaaatgttcattccggcaaatgtggttctgaaatggtatgaaaactttcaaagacgactagcacagaaccctctcttttggaaaacataatttgaataaaataatttttaatggattctgaaatttgtcatgttttgaagataactgactccatctaaaagtatgaggtcaaaggatcacgaaacctaagtttaaaaactgcttagagactgaagcttaattaaaaatctttattaaaaattaaaaacattgaaaaatgaaaatatgttcatcattaaagacttttttccccttaagcttaaaataccattcaaaggcaagacattttgttttggctatgattcattttttttacttaaaaataaaacctataccaaacagtagtgtgccaagtaaaaaaaaaaaaaaaaaaaaaaaaaaaaaaaaaaaaaaaaaaaaaaaaaaa

SEQ ID NO: 117379 - DNA, 612 bp, Homo Sapiens; identical to SEQ ID NO: 23369

SEQ ID NO: 117380 - DNA, 1000 bp, Homo Sapiens
gctgagagcgaagctggaaaagaaaccaaagaaacccaaggcagcagagtctgcttcaaaaccagatgtcagtgaagaagccccagggccatcaaaagttaagacagggaagcctgaagaagccagccttgattctagagagaagaaaaccaacttggctcccaaaagcacagcaatgaatgagagctcttctggaaaagctgggaagcctccgtgtggagccacaaagaggtccatcgctgacagtgaagaatcggaggcctacaagtccctctttaccactcacagctccgccaagcgctccaaggaggagtctgcccactgggtcacccacacgtcctactgcttctgaagcccgcactgccaccgctcctgccccagaaggttgtttagtttccacgtaggcaggtcgctttgtgcctctgagtgcgctgctgtgtgttctctctatagttctgtgtcataaagctgtcctgggccagccttcaagctgggtgttggccactcttgatgtgaggcgtgtcggttccaggggggacatgggaggggctgcacagtggcccgaggtcatgcttgcttccacctgcaggtgcatttggtcctttccatggccaggaagccctgtgggctgcactttttatgcttgcagtaacaagagactccagagtcctcaccggtgcagagttggcacatattaattaactaaaattctaatgatcttgctaccagcaataaatcaagtaggccaagtgaaactgggctttaaaaaggatggatttcaaatacactgtgcccactagaagcttcgaagggcctcgtccctctgctacagccctgggaggagccaggatccttgttggtctagctaaatactgttaggggagtgtgccccatctcatcatttcgaagatagcagagtcatagttgggcacccagtgattgggttcaaaaataaagctggtctgcctctccaaaaaaaaaaaaaaaaaaaaaaaaaaaa

SEQ ID NO: 117381 - DNA, 1000 bp, Homo Sapiens
gggatagatgatccactgaaatcttttccagctctaagattttaaattgtccttttagattagacttgctgagtttaattcagattacctaattttaaaatgtttctgaaaagtgaacagagttaccttacagagttttggatctttccagggatagccaatgattttatcccccagaatccttcacctttcaaggagttatttaacaatgagcccagtgactcaatagggcccaaacctttttattttacaatatgagctccaagacacttactgatctactgtgaatataaaatgttattagccttatcaaataaataaatgagcacagctctttgttcgctctattgaactgggtgataattatttagatgtgaatgttaggtcagttctactgtaataactaatcgtaaaagttgtaaatttgtttaatggatgaaatgtacactttttgtattctgtacagctttgtcttttttaaatatgaagtacttaaatgtacttactatgataggaaatataatgtgtgccttctaggatttgtgaagtggtttcatgaactctaaggaatttgttttccctatcctaactcagtaacagagggtttactccgattatgtatagaaccttagtttgagaaaatgaattttactatgtactgaatttagaggttgagaataataggatctgtgttattcttagtacccactgataaattgtgcaataaataatctttcgcaagtgattttagctaattgaagagattattttcctatgtaatttcacattctaatatactaaatgtttatattccttagagaactattttatattgtgcgctgggggcttgtgatgtttgtgtgctgttttaaaattcatttcaaattggactcgatttccttatatctaatatatatctgggagaaaaggctgcttgaaaatatcttttgattcagtgatttttaacattgggaagttgagtttattaaaaggtagtctg

SEQ ID NO: 117382 - DNA, 1000 bp, Homo Sapiens
tcacctacagcgccaccaccgggagcagaggagcggggccggccccgggccacccccggagccaccgcctccttcccagcggggttcggccccgcaatctggagccaagccgtctccgcagcctgcgacctgggtggagggcgcctcaagtccccggcctccttctagcggtgctgggccggggtcccgtcggaagcccgccagccctgggaggaccctgcgcaacgggcgaggcggtgaggccgaacccctggacctgtccttgcgggcagggccgggaggcgaggccgggcctgggggtgccctccaccgctgcctcttctgcccgttcgccactggagccccagagctcatggccttgcaccttcaagtgcaccacagccgccgggctaggggccgccggccaccccaggctgacgcgtccccgccctatgcccgagtaccatcaggagagacccctcccagtccttcgcaggaaggggaggagggctccgggctgtccagacccggagaggcagggctgggggggcaagaacggtagtgggccctcaggggcgattagcttagtgagcttaccccgccggagcgggggagcgctagaggtagttgggtagagaagccagcagggggcagcgtgggacccatatcccagccccaggcggaccagaggtggaaggcgcggcgggcgtaggagggtgggctggcggtacccacccagcccaagggagtcacagtgccttagaagtggcagaggtgagggtcaaagaacggggtccctgggctggcagagaaggtttgtgtccctgttgaggagccactctgccagtctttgctggtccataggcgtgagagtttatttttgtacaaggggtgagggtggggggcactgtacccttctagccccatcaggggccctgtagacgtcgctatttttggtacgattcctgtcatccctattgcagagtcgtgtccccaataaacaggtgtcttaaggcacagg

SEQ ID NO: 117383 - DNA, 1000 bp, Homo Sapiens
gcggccggactctgtatttcggaccccactccagtgctccctgggtcataccaggatctgcctctgtccacaaagatgagggaaaatgatgactgtgctgtgctctctacttcctgcggttactgcgtgattctaaagctgccactcggaacagcgagtcctctgccgtcgagagcagggaggggtagggtggacaggcgatgccgtggaaagacgtctcggtggaaactgccatggtggaaaggtggcgcgcttctcacggctgagttgctgcgcctgcagacggaagctccccacaggcagagctgcttggatgtgtgagtcatgaagccagagaagccccgctccatgagcagtgactccccaggccctgtgacctccctcctgtcttgcagctcctcctggcaccagtccccagggctctcctgttggtagttcctgcttttcttcttggaaattcctcgtggacctcgagatctttaccctaaaatagttctgttgaatttcaccctggcaatgtaaattgatagcttatcttcacagatgccagacaatggacaactcaccatcagtcctctgctcacctgagacaaatgcatgtctgattgcttcctctgccctattgtttatgtgaaaatgcagattcactgagccagactaaggcatcagtgactgttcctctacctgcctctcacatggagattgtgtattcagtgaaaggctgatcaaagacccaaaggaatgcaacagtttatctcttatctacctatgacctgcgagctgcccaccacccccagttgttgcgcctttccagacagaaccagtgtacatcttacacgtattaattgatgtcctgtgtctccctaatatgtatcaaagcaagctgtgcctcgaccaccttgggcacatatcctcaggacatcatcctgaggctgtgtcactggcatgtccttaaccttggcaaaataaactttctaaattgaaaaaaaaaaaaaaaaaa

SEQ ID NO: 117384 - DNA, 1000 bp, Homo Sapiens
tggcctcggccggcagcgccgaaggtgtcggtggggcccccacgcccaaggggcaggcagcacctccagccccacctctccccagctccttggacccacctcctccaccagcagccgtcgaggtgttccagcggcctcccacgctggaggagttgtccccacccccaccggacgaagagctgcccctgccactggacctgcctcctcctccacccctggatggagatgaattggggctgcctccacccccaccaggatttgggcctgatgagcccagctgggtgcctgcctcatacttggagaaagtggtgacactgtacccatacaccagccagaaggacaatgagctctccttctctgagggcactgtcatctgtgtcactcgccgctactccgatggctggtgcgagggcgtcagctcagaggggactggattcttccctgggaactatgtggagcccagctgctgacagcccagggctctctgggcagctgatgtctgcactgagtgggtttcatgagccccaagccaaaaccagctccagtcacagctggactgggtctgcccacctcttgggctgtgagctgtgttctgtccttcctcccatcggagggagaaggggtcctggggagagagaatttatccagaggcctgctgcagatggggaagagctggaaaccaagaagtttgtcaacagaggacccctactccatgcaggacagggtctcctgctgcaagtcccaactttgaataaaacagatgatgtcctgtgactgccccacagagataaggggccaggagggattgaaaggcatcccagttctaaggctgctgctaattacagcccccaacctccaacccaccagctgacctagaagcagcatcttcccatttcctcagtacccacaaagtgcagcccacattggaccccagacacccctctgcagccattgactgcaacttgttcttttgcccattgaaaaaaaaaaaaaaaaaaaa

SEQ ID NO: 117385 - DNA, 914 bp, Homo Sapiens; identical to SEQ ID NO: 22485

SEQ ID NO: 117386 - DNA, 1000 bp, Homo Sapiens
tgcagtgagctgagatcgcaccattgcactccagcctgggcaacaagagcgaaactctgtctcaaaaaaaaaaaaaagaggtgggtggattacttgaggtcagggtttgagatcagcctgaccaacatggtgaaaccctatctctactaaaaatatagaattagccaggcatggtagcgcacgcctgtaatcccatcttcttgggaggctgaggcaggagaatcgctagaaactgggaggtggaggttacagtagccgagatcgcgccactgcattccagcctgggcaacaaaagcgaaactctgtctcaaaaaagaaaaaaaagaaaaaaaagcacgtgaccttatgaggctctcgctgtattgttattttaaggactataaagagtttgatttaaaattatgcagggcccctatgtgggattttttaaaaagcaaactggtgtgtattctcatgtggtttgcacagcccagcctcacagcactattgtaaaccctgctctttctgtctcgctagacagatttttttgtttgttttcttttttctggttgttttttgttgttgttgttgttgttttacagctgaaaccaaccagcaagcccttgatgaccaagaggcgtttctttcaaagctatagggcacaaacaattgaccatagatgactccgtttgcattcttctgcagaattatttccttcagggacagattttccaacctaagaaactacctaccgtgtgtattctcttgacggggagagatgaacccttcagctgctaagatccaagaaaacgcctcactgccttaaccttaactgttcttcctggcgctaaaaagagctgtattttttaaagtgctggggcaaacaaagcaaccccaaaagagttgatgtgtgttttaaaagaaaaaacccaatgaggaacaattggagatttttatgcagaaactaaataatccttaataaataaatctctattttggaatcacaaaaaaaaaaaaaaaa

SEQ ID NO: 117387 - DNA, 1000 bp, Homo Sapiens
ctggggaggagccttcagtcggccctggatgtcagcccaaagcatgtgctgtcagagaggtctgtgctgcaggtggcctgccggctgctggatgccctggagttcctccatgagaatgagtatgttcatggaaatgtgacagctgaaaatatctttgtggatccagaggaccagagtcaggtgactttggcaggctatggcttcgccttccgctattgcccaagtggcaaacacgtggcctacgtggaaggcagcaggagccctcacgagggggaccttgagttcattagcatggacctgcacaagggatgcgggccctcccgccgcagcgacctccagagcctgggctactgcatgctgaagtggctctacgggtttctgccatggacaaattgccttcccaacactgaggacatcatgaagcaaaaacagaagtttgttgataagccggggcccttcgtgggaccctgcggtcactggatcaggccctcagagaccctgcagaagtacctgaaggtggtgatggccctcacgtatgaggagaagccgccctacgccatgctgaggaacaacctagaagctttgctgcaggatctgcgtgtgtctccatatgaccccattggcctcccgatggtgccctaggtggaatccagaactttccatttgcagtgtgcaacagaaaaaaaaaaatgaagtaatgtgactcaaggcctgctgtttaatcacagataagcttctagaacaagccctggaatgtgcattcctgccactggtttcaggatactcatcagtcctgattagcctcccggagggccccagtttccctcccgtgaatgtgaagttccccatcttggtggcctgcccttcagccagtgtcctagcaaagctggatggggttgggccggcccacaggggggacccctcctacccttgacacctctgtgctttggtaataaattgttttaccagagaaaaaaaaaaaaaaaaaaaaaaaaaaaaa

SEQ ID NO: 117388 - DNA, 1000 bp, Homo Sapiens
cagaatttgacttttattatgataatcagtgtaaaatgatatactactattgcttgtatattgtggtatacggtgtcaggtttcagggttttttttcaacgttaaatattctagaaactttctgaaataatttctgtttaaaaatattgaatatttgcttcatttcaaatactcccttttgacaaaaaaacttaggtataactgttgatgaaaaaccagaaaaaagtccagaactctttggtgactccaactatggatagcttattttgaaaaaggagaattgcaaattttaccaaaagatggagaaaagcacattaaaaagataccaacattcagaaattcatttcagcatgttattattggaaattatttaaactaatttagataactataagatacttattgtccatttataccctgtaaagccgttttagaatgtaatattttaggtaatccaaaatgtactaaattaaattcatttttagttatgagaaatctttgcttatatgacaaatgaaaagaataacaagttgtcaaatgaaaagaatgacattgaaacatttgtattgtctcttcttaaactatcttattgacttattatttaagccttttaatactaagtatgaaacaacctatggtctggaaatttgtatcgcaaagctatatgtgcatatgttatttaattcatctaacgctacacaaaagcataaaataatgatttttcactctctttaaaaatactaaatcatttatgtccatttctcaattttttcattgatctatgctttgagtttgctttctcaacattattgtattttccacttattattactgtataacatatgctagtgtttagttggattaatcttacctaaaagtactgaaaaatgctttttagtactttttcatattttatacatttattttccgaatgtatcattgaataattttattgagttataaaagtatcttattgctatttaataaaaaattaacacat

SEQ ID NO: 117389 - DNA, 1000 bp, Homo Sapiens
tccgttcaagccccaacatggagcagggaagcacctataaaaagaccttcctcggctcctccctggtggactggctcatctccaacagcttcacggccagccgtctggaggcggtgaccctggcctccatgctcatggaggagaacttcctcaggcctgtgggtgtccgaagcatgggagccattcgctctggggatctggccgagcagttcctggatgactccacagccctgtacacttttgctgagagctacaaaaagaagataagccccaaggaagaaattagcctgagcactgtggagttaagtggcacggtggtgaaacaaggctacctggccaagcagggacacaagaggaaaaactggaaggtgcgtcgctttgttctaaggaaggatccagctttcctgcattactatgacccttccaaagaagagaacaggccagtgggtgggttttctcttcgtggttcactcgtgtctgctctggaagataatggcgttcccactggggttaaagggaatgtccagggaaacctcttcaaagtgattactaaggatgacacacactattacattcaggccagcagcaaggctgagcgagccgagtggattgaagctatcaaaaagctaacatgacaaggacctgagggaaccaggattcctccctcctaccagatgacacagacaagagttcctggagaatgggagtgttaagacttttgacttctttgtaagttttgtactgctttggagagtgaatgctgccaagagttcctcagattacaaacagcagtggtgccatttccttccccatcttcatgttacaaacctggaaaggctagaacagccattaggcgtcagcatcttgacttttccccagcatcacaaacagccatttcctcgggcaccaaagtaggttccctttgttggaacaattacactggccatgccataatgttgaataaaactctcttcttatgagaaaaaaaaaaaaaaaaaaa

SEQ ID NO: 117390 - DNA, 1000 bp, Homo Sapiens
tgatatttttgtaacagaatatagctcttaactgaaaatccagaaccagaaacataaatcttgagtttcttttcatgtacataaaaagcaatagccttttagtatagatagccctgagccaaaaagtaatagaattttctctagatatttaatacagagagtgtatagactgactctaagttaataatgtgcaaaatatcttaaacatccctccccttattcaacaattatgtatcagtgatcttgaaccattgttttatatttttcacctttgtaacctcatggaaagaggctttacatactttctatgtactatttacttagaagggagcccccttccagtcatgaaacttcatttgttttatccatatccctgaggactgtgtagactttatgtcagttctgtgtagactttatgtcagtttttgtcattatttgaaaatctattctgacaactttttaattcctttgatcttataagttaaagctgtaacaactgaaattgcatggatcaagtaagcatagttttatccagggagaaaaataaaaggaagccatagaattgctctggtcaaaaccaagcacaccatagccttaactgaatatttaggaaatctgcctaatctgcttatatttggtgtttgttttttgactgttgggctttgggaagatgttatttatgaccaatatctgccagtaacgctgtttatctcacttgctttgaaagccaatgggggaaaaaaatccatgaaaaaaaaaagattgataaagtagatgattttgtttgtatccctacccatctcctggcagccctactgagtgaaattgggatacatttggctgtcagaaattataccgagtctactgggtataacatgtctcacttggaaagctagtacttttaaatgggtgccaaaggtcaactgtaatgagataattatccctgcctgtgtccatgtcagactttgagctgatcctgaataataaagccttttacctt

SEQ ID NO: 117391 - DNA, 1000 bp, Homo Sapiens
tacttgttgtgaaccaaaccagtgatactttgcagaattgcacattagaactagctacactaggggatctgaaacttgtggaaaagccgtctcctttgactcttgctcctcatgacttcgcaaatattaaagctaacgtcaaagtagcatcaacagaaaatggaataatttttggtaatatagtttatgatgtctctggagcagcaagtgacagaaattgtgtggttctcagtgatattcacatcgacatcatggactatatccagcctgcaacttgcactgatgcagaattccgtcagatgtgggccgaatttgaatgggaaaacaaagtgacagttaacaccaacatggttgatttaaatgactacttacagcacatattaaagtcaaccaatatgaaatgcctgactccagaaaaggccctttctggttactgtggctttatggcagccaacctttatgctcgttccatatttggtgaagatgcacttgcaaatgtcagcattgagaagccaattcaccagggaccagatgctgctgttaccggccatataagaattcgtgcaaagagccagggaatggccttaagtcttggagataaaatcaacttgtcacagaagaaaactagtatataaaaataaacaaaaagtccttgaagctttacagttaatttaggtatgggcttactggactccaacatcttttgtactctttcatgcttatatagaatctgagttcatgctgaatacttttcagccaataatttatagcctttcccttaaatcaagattgagtttaaaattatagtttgtcttttgtcttaacagttctgaatgctgtcctcaaagtatataatgtttcatgtaccaagacccttttcacagtacaataaacagatctattcataaatttttgttattttataaataaatgattacataattttagttataaaaaaaaaaaaaaaaaaaaagaaaaaaaaaaaaaaaaaaaaaaaaaa

SEQ ID NO: 117392 - DNA, 1000 bp, Homo Sapiens
tgttgtggagtacgctttggactgagaagcatcgaggctataggacgcagctgttgccatgacggcccaggggggcctggtggctaaccgaggccggcgcttcaagtgggccattgagctaagcgggcctggaggaggcagcaggggtcgaagtgaccggggcagtggccagggagactcgctctacccagtcggttacttggacaagcaagtgcctgataccagcgtgcaagagacagaccggatcctggtggagaagcgctgctgggacatcgccttgggtcccctcaaacagattcccatgaatctcttcatcatgtacatggcaggcaatactatctccatcttccctactatgatggtgtgtatgatggcctggcgacccattcaggcacttatggccatttcagccactttcaagatgttagaaagttcaagccagaagtttcttcagggtttggtctatctcattgggaacctgatgggtttggcattggctgtttacaagtgccagtccatgggactgttacctacacatgcatcggattggttagccttcattgagccccctgagagaatggagttcagtggtggaggactgcttttgtgaacatgagaaagcagcgcctggtccctatgtatttgggtcttatttacatccttctttaagcccagtggctcctcagcatactcttaaactaatcacttatgttaaaaagaaccaaaagactcttttctccatggtggggtgacaggtcctagaaggacaatgtgcatattacgacaaacacaaagaaactataccataacccaaggctgaaaataatgtagaaaactttatttttgtttccagtacagagcaaaacaacaacaaaaaaacataactatgtaaacaagagaataactgctgctaaatcaagaactgttgcagcatctcctttcaataaattaaatggttgagaacaatgcataaaaaaaaaaaaaaaaaaaaaaaaaaaaa

SEQ ID NO: 117393 - DNA, 1000 bp, Homo Sapiens
aggtgcccagcagcggtggaagctgcaggtgcaggagcagcggaagacagtcttcgatcggcacaagatgctcagctagatgggctggtgtggttgggtcaaggccccaacaccatggctgccagcttccaggctggacaaagcagggggctacttctcccttccctcggttccagtcttccctttaaaagcctgtggcatttttcctccttctccctaactttagaaatgttgtacttggctattttgattagggaagagggatgtggtctctgatctccgttgtcttcttgggtctttggggttgaagggagggggaaggcaggccagaagggaatggagacattcgaggcggcctcaggagtggatgcgatctgtctctcctggctccactcttgccgccttccagctctgagtcttgggaatgttgttacccttggaagataaagctgggtcttcaggaactcagtgtctgggaggaaagcatggcccagcattcagcatgtgttcctttctgcagtggttctttatcaccacctccctcccagccccagcgcctcagccccagccccagctccagccctgaggacagctctgatgggagagctgggccccctgagcccactgggtcttcagggtgcactggaagctggtgttcgctgtcccctgtgcacttctcgcactggggcatggagtgcccatgcatactctgctgccggtcccctcacctgcacttgaggggtctgggcagtccctcctctccccagtgtccacagtcactgagccagacggtcggttggaacatgagactcgaggctgagcgtggatctgaacaccacagcccctgtacttgggttgcctcttgtccctgaacttcgttgtaccagtgcatggagagaaaattttgtcctcttgtcttagagttgtgtgtaaatcaaggaagccatcattaaattgttttatttctctcaaaaaaaaaaaaaaaaaaaaaaaaaaaaaa

SEQ ID NO: 117394 - DNA, 1000 bp, Homo Sapiens
gccgctcccctctcctcgccccgccaccgggacgagaggcgcccgccgctgcatttccggcgacacctcgcagtcattcctgcggcttgcgcgcccttgtagacagccggggccttcgtgagaccggtgcaggcctggggtagtctcctgtctggacagagaagagaaaaatgcaggacactggctcagtagtgcctttgcattggtttggctttggctacgcagcactggttgcttctggtgggatcattggctatgtaaaagcaggcagcgtgccgtccctggctgcagggctgctctttggcagtctagccggcctgggtgcttaccagctgtctcaggatccaaggaacgtttgggttttcctagctacatctggtaccttggctggcattatgggaatgaggttctaccactctggaaaattcatgcctgcaggtttaattgcaggtgccagtttgctgatggtcgccaaagttggagttagtatgttcaacagaccccattagcagaagtcatgttccagcttagactgatgaagaattaaaaatctgcatcttccactattttcaatatattaagagaaataagtgcagcatttttgcatctgacattttacctaaaaaaaaagacaccaaacttggcagagaggtggaaaatcagtcatgattacaaacctacagaggtggcgagtatgtaacacaagagcttaataagaccctcatagagcttgattcttgtatattgatgttgtcttttctttctgtatctgtaggtaaatctcaagggtaaaatgttaggtgtcagctttcagggctctgaaaccctattccctgctctgaggaacagtgtgaaaaaaagtcttttaggagatttacaatatctgttcttttgctcatcttagaccacagactgactttgaaattatgttaagtgaaatatcaatgaaaataaagtttactataaataataaaaaaaaaaaaaaaaaaaaaaaaaaaaa

SEQ ID NO: 117395 - DNA, 852 bp, Homo Sapiens
ggatcgactgacgccggggccgggatggcgacgcctcggccctgcgcggacgggccctgctgctcgcatcccagcgcggtgctcggcgtacagcagacgctggaggagatggacttcgagaggggaatctggtcggcagccctgaatggagacctgggccgagtgaagcatttaatccagaaggccgaggacccaagtcagcccgactcggccggctacactgcgctgcactatgccagccgcaatgggcactacgctgtgtgccagttcctgctggaaagcggagctaagtgtgatgcccagacccacgggggtgccactgctctgcaccgagccagctactgcgggcacactgaaatcacgcggctcctgctatcacatgggtccaaccccagggtggtggatgacgacggcatgaccagtctgcataaggctgctgagaggggtcacggggacatctgctccctcctcctgcaacacagcccagccctgaaggccatccgggaccgaaaggcacggctagcatgtgacctgctgccttgcaacagtgacctgcgggacctgctatccagctgagccgccaccctatctccagctgcctttaaagggtacacagaccagttctccaagcccctgccttggtcagcatccatgctgctgggcagggaactgaggccagaccacccaggaagagccccagtctggtcactgtggaagcgagggagtagatttggtgtggctaaaagtgtttaagactggacagatgatcatattctaaattagttcatatgagacatctatttatttggaaaaaaataaagttatatccttaccccaaaaaaaaaaaaaaaa

SEQ ID NO: 117396 - DNA, 1000 bp, Homo Sapiens
gagaggtgggggcctctccagggcacatctggagttcttctccagcttaccctagggtgaccaagtagggcctgtcacaccagggtggcgcagctttctgtgtgatgcagatgtgtcctggtttcggcagcgtagccagctgctgcttgaggccatggctcgtccccggagttgggggtacccgttgcagagccagggacatgatgcaggcgaagcttgggatctggccaagttggactttgatcctttgggcagatgtcccattgctccctggagcctgtcatgcctgttggggatcaggcagcctcctgatgccagaacacctcaggcagagccctactcagctgtacctgtctgcctggactgtcccctgtccccgcatctcccctgggaccagctggagggccacatgcacacacagcctagctgcccccagggagctctgctgcccttgctggccctgcccttcccacaggtgagcagggctcctgtccaccagcacactcagttctcttccctgcagtgttttcattttattttagccaaacattttgcctgttttctgtttcaaacatgatagttgatatgagactgaaacccctgggttgtggagggaaattggctcagagatggacaacctggcaactgtgagtccctgcttcccgacaccagcctcatggaatatgcaacaactcctgtaccccagtccacggtgttctggcagcagggacacctgggccaatgggccatctggaccaaaggtggggtgtggggccctggatggcagctctggcccagacatgaatacctcgtgttcctcctccctctattactgtttcaccagagctgtcttagctcaaatctgttgtgtttctgagtctagggtctgtacacttgtttataataaatgcaatcgtttggagctgctgccccctttcttcctggcctcggctgctggaattggaatcaggctgtactctttccatccatttgggcttct

SEQ ID NO: 117397 - DNA, 1000 bp, Homo Sapiens
tatgttgtgaagacttatcccaacagagtgttgagaacatccagagcccgtgttgtagtcaagccatctaccaccgcaagtgcatacagaaatatgcccacacatcagcaaagcatttcttcaaatgtccacagtgtaacaatcgaaaagagtttcctcaagaaatgctgagaatgggaattcatattccagacagagatgctgcctgggaactcgagccaggggctttctcagacttatatcagcgctatcagcactgtgatgcccccatctgtctgtatgaacaaggcagagacagctttgaggatgaagggaggtggtgcctcattctgtgtgctacatgcggatcccacggaacccacagggactgctcctctcttagatctaacagtaagaaatgggagtgtgaggagtgttcacctgctgcagccacagactacatacctgaaaactcaggggacatcccttgctgcagcagcaccttccaccctgaggaacatttctgcagagacaacaccttggaagagaatccgggcctttcttggactgattggccagaaccttccttattagaaaagccagagtcctctcgtggcaggaggagctactcctggaggtccaagggtgtcagaatcactaacagctgcaaaaaatccaagtaacaccttctgagtagctgctgtcccacacaatagggtatgaagctgcgctcctccatcgggtttggggagggagcactctgggactgtgagacaaggaagcagggccagcagtgagactatgagccaagcaaagagaagtctcagtggagcatgaggagggagcagtccagatgccaacaaggaaatgcgtttatggctacaagagtgcctctgctttctcctcctctcctcccaccaaggattcttccaccttaatcttgttttcatatgcctcttcttacttcacccatgtttgttgttatgcaaataaaggttttctctccaaaaaaaaaaaaaaa

SEQ ID NO: 117398 - DNA, 1000 bp, Homo Sapiens
taagacacctagtctaatggccttttgggaaaaaacaaatcactaactcataatcatttatatccattattttctgcataaatgtaatgctattgtacagggtttggtagaataaatattcagactgactaaactgttctaaatcctcacaaaaaagtccccaaacaacatgcctcctaaaaaacattttcctatcttttacaagaggtatgaacatttgtagggttccacatttgcatctagaaatccaatgctctttagaatgttattacgaatagaaagatggccaggatgacctttagtgttacatgatgttcagcaaattttaattcaaaccttgatatgcctggacactgaaaagtaaacgcatcacctcctattttataccctaccttctggttcccaattgggagagcacatagagggaaggagacaatatagaaactacggagtccgctggtagtgggctgcatggtgtgacagagcccttctctgtaaaatggaaatgacaccactagccatctcaatagttacaagaattaaaagagatacagtacctgaagtgcttagcgcatggtagcatttcataaatgtttagtgtcaatactaatgctctaataatgtaaattgttaataatttatttccctaatatcaggaaatcccagttgtctatgtggcccagtgcttaaaaacgccttcttgcatgaggggattgaactatacaatgtttgttaactttgtatttgtattttttcctataaaatcttaaaataaaattaggagatgtgttctgatgtaacagtaggattagcaattttcatttattccttccatatatatttactgaatggctactatatgcctggtattgttctttgaaagcagaaacagcaggaaaaaaagtccctccctcatagagtttacattctaaaagggaggaaatagataataaaatatacattacatttaaaaaaaaaaaaaaaaaaaaaaaaaaaaaaa

SEQ ID NO: 117399 - DNA, 1000 bp, Homo Sapiens
actctggcaggactaatccccttcgttgctccaccactggtcatgctgatgacaaaaacttatattcccatattagcttttactcagatggcttatggagccagtttcctatctttcttgggtgggatcagatggggttttgctctaccagaaggtagtccagccaaaccagactaccttaatttagctagcagtgcagctcctcttttcttttcatggtttgccttccttatttctgaaagacttagtgaagccatagtcacagtaataatgggtatgggagtagcattccaccttgaactttttctcttaccacattatcccaactggtttaaagccctgaggatagtagtcactttattggccactttttcatttataatcactttagtagttaaaagtagttttccagaaaaaggacataagagacctggtcaagtataaaaaatataaaagtctgggaagtgaggagcacctctgcccagctgctgccccgtctgggaagtgaggagcgcctctgcctggccgcctgaccatctgggaagtgtgacaagcgcctctgcccggccgctgtgcaaccttccacgtgtgaagtgacagccttgtgtgtgatcttttctgtcttccccaagtttgcattttcgacattaaagtttactttttagttaaaagtttaaaaatatatatataaatacactgtagataacatttgtatgccagctacacctttttctacttctgtttggctttttttccccacaccaatggtaatttatcttcacagattgttcttcatttctagaaattgttacttcatggtaattacttgagcaaaagcttgaaaatccctgacaagtacttttcatctcatagtatattagttttcactcagtcattttatgaataatatagttatccacttaaacatttcaatattttaaccatcttgaaaattaaagattaaaaatccaaaaaaaaaaaaaaaaaaaaaaaaaaaaaa

SEQ ID NO: 117400 - DNA, 716 bp, Homo Sapiens
aggccgctatcgagcagggtccgagggctgtgtcagaaggctgggcagccatggcgtcctatttcgatgaacacgactgcgagccgtcggaccctgagcaggagacgcgaaccaacatgctgctggagctcgcaaggtcacttttcaataggatggactttgaagacttggggttggtagtagattgggaccaccacctgcctccaccagctgccaagactgtggttgagaacctccccaggacagtcatcagaggctctcaggctgagctcaagtgccccgtgtgtcttttggaatttgaggaggaggagactgccattgagatgccttgccatcaccttttccattccagctgcattctgccctggctaagcaagacaaattcctgtcccttgtgccgctatgagctgcccactgatgacgacacttatgaggagcacagacgagataaggctcgaaaacagcagcagcaacaccgactggagaacctccatggagccatgtacacgtgaggaggttggggctgagtgctggccctctgcgtcttccttattaaccttgaatcctcattaaaggtttctttacccaccctgaggctgtattgatcacagacctggccaggggctctgcatcctccatcaggtctctacttctgttggggaaggtgatcctaaatcgcagaaggcaccaggctgcggttttcctccctgctggcc

SEQ ID NO: 117401 - DNA, 676 bp, Homo Sapiens
cggatggggcgtaggtgggcggtgcgcccacagctgcctgggtaaggcccaagatggctgtcttcgccttagtactcgtgtgaagttggcggggacggttcctgtcatcttcttgggcttatttggtgtgctgttgaaggggggagactagagaaatggcagggaacctcttatccggggcaggtaggcgcctgtgggactgggtgcctctggcgtgcagaagcttctctcttggtgtgcctagattgatcggtataaggctcactctcccgccccccaaagtggttgatcgttggaacgagaaaagggccatgttcggagtgtatgacaacatcgggatcctgggaaactttgaaaagcaccccaaagaactgatcagggggcccatatggcttcgaggttggaaagggaatgaattgcaacgttgtatccgaaagaggaaaatggttggaagtagaatgttcgctgatgacctgcacaaccttaataaacgcatccgctatctctacaaacactttaaccgacatgggaagtttcgatagaagagaaagctgagaacttcggaaaaggctcatctgtcaccctggagaagggaaactgtacttttccctgtgaggaaacggctttgtattttctctgtaataaaatggggcttctttggaaaaaaaaaaaaaaa

SEQ ID NO: 117402 - DNA, 1000 bp, Homo Sapiens
ctctgatacctgatgaggaagaggaaaaggaagaggcaaagtcagcagagtttgagaagcctgaccctacaaggaatccttctagaaaaagaaagaaggagaagaagaaaaagaaacatagagataggaagtcatctgactctgacagctcagactctgagagtgatacaggcaagagggcaaggcacacatcaaaagacagcaaggcagcaaagaagaagaaaaagaagaagaagcacaagaagaagcacaaggagtgagagtataaagagtgtagggggtggttgagagtaagaaaccaggagccttgtgccttgagactcctggaaagactcaatagtgagaatatagcctcccaccccattaacttcgctcccatgggagatggcttcccctcatgcaacaggcaggtttgggagttagaggtcaaaagcagctgcctgaatgagttgttgtttccttatcactcctggtccctttgcaagtgaaccctgcagctcacccattcattcacccaacttccttcattcagcaggaggccctattaccctctccagctgccactgccagagctggattcctgtaaaggagtccaggctagagccacagagactgttgtggaggtgagttcggctgtagttagagtgattggacccttcctattggtctgtcctgggccaactggtgggtgatctctgctgcatccaacatgggagcagagactggcagcaggaggggggaacatggtgagaagtggtgctcacttttcccattcctcctaacatagttctactatgctagaagtggcatccagcggccacagctagaaaacagtctgcagtgtgacttaacttgtgtattgcattccagcagaccactgaaccagacagcgaagccaagatcattgttctactttgtatttactactgtgtgaatcagttgattctacttcaggtccttgcttaaattcctgtcactaaatggaaatgtgtttggtttt

SEQ ID NO: 117403 - DNA, 1000 bp, Homo Sapiens
gcacccccagtttccttccctggaaccctgcagagctcacagggcccaggacaccaacgccgcataggaccgcccacatgggaacgcccacatgggaccgcccacataggaccgcccacataggaccgcccacatgggaccgcccacatagaaccgcccacataggaccgcccacatgggaacgcccacatgggaccgcccacatgggaccgcccacatgggaccgcccacatagaaccgtcctccagtggtgaagcggaaacacttagctttatccaccctccccactgggaactgggcacgcctgttgtgagtgccctttcctggaaggtgtttttatctggaagatagaatccaagtatttataactcattgtcagccaaatgctatcatgaacgtaggaaacttgatttttttgttttgatcatggcctctacatgcacctttccagagtggtctcttctcgggccctttttagtccctttccaaagctgcccccaccaccctgctcctctggcctcagtgcacagtggcccccagcctcggccaggcctgctctgctcagcgcccaccgcccaccacccctcctgcttccccgagcctgaccctgttccgcccactggcaatcagggctgcgcacttccctgtccacggtccccaggccttcctgtcttgtcccttttgatcattaactcagggtttcagctccaacctcgctgagttggtgcagctccgggtcattcctggggtgggaatcggatcatccctgactcagcttataccttaattttatttgcagaggattcttttctcaaaatgctctggcatttggacacacatcacatgtcgatatttgcataggagtcattttcagtggaataacatttttaatgtgtggttttacggttcaaggaactacatgatgattttgaggaaacacttgccagaaactaaattaacgaataaaagatttcagtgcccgaaaaaaaaaaaaaaaaaa

SEQ ID NO: 117404 - DNA, 1000 bp, Homo Sapiens
gaattaagcatgaaattaacaccatcttatgacttggcaccttttcgaatcagccgtttcccaagcctgggcaaagcccacctttgacctctggccagaagcctcccttctgtgcacaggagccagtttcacagatggagaagatgtctcagatgaagggagtgtccctgagatatcatccttttcttctgcctcgcctgaatcccccataaacaccagatgattgagtctaccttctttccttggcccgctccctttttcttctgcctcacttgaatcccccgtaaacaccagacgattgagtctaccttcttttcttggccacctccccattcacaactactttctcgctcccagaaggttgatcagatattctacaatcacagagtagcaaggacgtttgagatgggtatatcagtaagaagagggcacaagaactggctctggagaccaaagcagttgttaaaaattctctttgctgggggccgggtgtggtggctcacacctgtaatctcggcactttggggggctgagacaggcggatcacctgaggccaggaattcaagaccagcctggccaacatggtgaaaccctatctccactaaaaatacaaaattagctgggtgtggtggcgcatgcctgtaatcccagctacttgggagactgaggcaagagaatcacttgaacccgggaggtggaggtggcagtgagccgagattgcgccattgcactccagcctgggcaaaaagagtgagactctgtctcaaaaaaaaaacaaaacaaaaaaaacctctttgctggtatatttgaagagcttgggatggatttgactaaatctgccccgaggagggtgaacaaggtgatctcagagatcactactgctcttggagttccttctcctaaagctaaggccagcctccatcacaaatgcccataaaatctggctcgtctttgatgaacaataaatatttgttgaacaaataaataactgccctgcatt

SEQ ID NO: 117405 - DNA, 1000 bp, Homo Sapiens
agaacttactgcaaaaacaagacaaaactaaaaaaatacaactgagaagggtgaagagaagtatgtttgttaaacagtaaaaatgaatagtatacttcttaactaggtttacaactggtggaccacacaccaggcactaatcacctggtgaggatttggcatatccaccaaaaaatgcatccgatttaaccaacatctccaccagcgctacggactcctcccaattctgacatctcttgcagacaatactatgctctctacacactgtttagaaatggaaaggtgatctgcactgtatcttgggtttgttggctatgcttcctttgatgacatatattatacagtatatatatacatatattttttttgttagagttctagccattttatttctccgcagggtcctttctcagacattactgcatgctgtatatggcgttagctgtgtgttgatcttctaaaagatgatagagtttactggtaattgtgtaatcagctcctgcctttttattttcttgggttatttacatgtcagagacatttataaaaagtgaaaggataaaaaaaaaaaaaaacaactaataccgggcgcagcatctttccaggtgtggctctgcgctaggccaccccaggtggccccgctttctccattctgccctgtggcgttaacagacagcaagcagctgaacaagcagtaccgtcagtacccacttgctttagcccattatgggaatctctgatgcctttgtgaccactggagagtttaatcctcttggtttattttatttcccacctttgtgtgagtgtgtatgaaagagaagaaaatgcaatttttaggtaatcttttttttttttcccctcccctgaaagtctgggaacctgagagtcctcggggaggggtcctggatgtgatgagggaaagggggattgggggatccgggagggtggggttgtctctgacttgacattaaaaagtgttccatgtccctcttcaaaaaaa

SEQ ID NO: 117406 - DNA, 1000 bp, Homo Sapiens
cgacctgctgcacaaccacctcaccgtgcgcgtgatcgaggccagggacctgccacctcccatctcccacgatggctcgcgccaggacatggcgcactccaacccctacgtcaagatctgtctcctgccagaccagaagaactcaaagcagaccggggtcaaacgcaagacccagaagcccgtgtttgaggagcgctacaccttcgagatccccttcctggaggcccagaggaggaccctgctcctgaccgtggtggattttgataagttctcccgccactgtgtcattgggaaagtttctgtgcctttgtgtgaagttgacctggtcaagggcgggcactggtggaaggcgctgattcccagttctcagaatgaagtggagctgggggagctgcttctgtcactgaattatctcccaagtgctggcagactgaatgttgatgtcattcgagccaagcaacttcttcagacagatgtgagccaaggttcagacccctttgtgaaaatccagctggtgcatggactcaaacttgtgaaaaccaagaagacgtccttcttaaggggcacaattgatcctttctacaatgaatccttcagcttcaaagttccccaagaagaactggaaaatgccagcctagtgtttacagttttcggccacaacatgaagagcagcaatgacttcatcgggaggatcgtcattggccagtactcttcaggcccctctgagaccaaccactggaggcgcatgctcaacacgcaccgcacagccgtggagcagtggcatagcctgaggtcccgagctgagtgtgaccgcgtgtctcctgcctccctggaggtgacctgagggctgcagggaaggcagctttcatttgtttaaaaaaaaaaaaaaaagacggaaaaaaatgtgtcacatactattacatccacacctgcatacacactcgcaacatgtctacacacgtccacacacacagacacacagataccccaaatcctctca

SEQ ID NO: 117407 - DNA, 1000 bp, Homo Sapiens
ctaggccctgccgcagaaccaccatccctgggaggccctgcagagcccacctgtggggaaagagaaggggcagcttccggattttcttttgggggttagaaggtcaggtgtggagactgctcgccagtctctgtgagcctaggccctgagctggggaggtggggaagattcgggcatgtgagtgcccccagaactgtcctggctccttccgtattaaacgcatttgcattttgagaagtgtccttcccacttcagccctccggagagactaccctagtctttctggggtgtttatgtcctcagctgaagcctggcctagttgctgagaggggctggggagatggggcgggagggccagactcagtgctgctgtggagctaggtgcttcccccttcccctgagactggtggactgaactccagtcaagttgagttcaagtgaaagattcttccagggttttattttttcccctcctaacaaagtctcatagtgttaacactggttctgcaatatctctgaggtgcaaagaatgcacttttccctatggggcccagagtttgccttttctgccaggcagtcaccatgcttccctaccccagcctgtttcttttggcttggtttggaccacagtcctctgctacccagggttttagagcccctgctctaggaaacagtttaagaaatcattggccccttcccagcacattgaatgggtaagcagacaggccatgatttagttggccagcactaactccacctctgttctccttgaacagcttcccctccagcccactgctttaggatgacacaatgaataacacctagtcatagaaatcagtctctctggtttgttttgtattatgttgtacatcattaaagatctaaatacaaaggatatacagtcttgaatctaaaataatttgctaactaactattttgattcttcagagagaactactaataaaaatctaaaaggtaaaaaaaaaaaaaaaaaaaaaaa

SEQ ID NO: 117408 - DNA, 1000 bp, Homo Sapiens
acaaatcttgtcaacctggatcttagacttcatctgaatcgagttctttgccctcctttgtgcctgcagctcatatggaggtctttgccaccaatgggagatgagccaaaactttcgatctaggtgggtgatgtgtagcagttcaagggaagggtgctgtgttttcatagcatggagtcggaggagagggccatttagcagggggagcagaagaggcaattcctcctgggctaggggttgtcagtgaggtttcaacattttgttagctgtgtgcagcattcccagagcttcagtctctgtgcatactcagctttgtagaaccatgctgcaaagccatataccgatggggttatccatgcaactatctccattcctacaatgtccttaatatgagatcatcaaacattgatagtagggactccatggaatatttgcccagtaatggtaagaaatctttcgggtaagagtatggatggttcttcttttacccaatctgcttatagctttttttgtaaacagggaaatgttgagtggtacttgtattcccttatcaaattaatcacatagcttttatacagaaactcttcctgtgtgagctgttaaggtgccaaattggctgtcatttgtattcatgacacataccataaagcatctgctaatgctttaatggattgattcaattaagacctgagtgacactatttgtaaatataactagttgtgaagcacacatacctttattttgggaatttatgagaaaatatagaaaaccacagatcagggattcatatatgtagctcaaaaattcccaaaagtttactgttagagttggcaatttcctatcactatttcagtgtcagaacaaactgaaaataatggctcgtgtttatgttgaagataaatagcaccattattgggggaagttattcaaaagcaggcttttgagcaccatagtctaaatgccaataaaaataattcatacatagaaaaaaaaaaaaaaa

SEQ ID NO: 117409 - DNA, 1000 bp, Homo Sapiens
cgctccccagaacctggaccttcctcctccatcggatctccccaggcttcatctcctccaaggcccaaccactacctgcttattgacactcagggtgtcccctacacagtgctggtggacgaggagtcacagagggagccaggggccagtggggctccaggccagaaaaagtgctacagctgccccgtgtgctcaagggtcttcgagtacatgtcctaccttcagcgacacagcatcacccactcggaggtaaagcccttcgagtgtgacatctgtgggaaggcattcaagcgcgccagccacttggcacggcaccattccattcacctggcgggtggtgggcggccccacggctgcccgctctgccctcgccgcttccgggatgcgggtgagctggcccagcacagccgggtgcactctggggaacgcccgtttcagtgtccacactgccctcgccgctttatggagcagaacacactgcagaaacacacgcggtggaagcatccatgagccgggctgccgggtgccccaggtaccacaggactttgcagggagcctggactcctgtccagacacctggtgagagcctgaggctggtgttcagggccctggacacagacacagagcagccgcatctcaaaggcagagccctgcctgaaggaggaatccgtgagtaatcttcaggtcctccgtgttctggagctgagatgggaatgagcccctacacagaatggagtcctctagcctaaagatatcagctgttccatggcagagccttgactggatggaggtggggagtgtggtgtgtaaagtctctggcctcataaaaggtggctgtgggtcgtcaggaatctgcgccatcttcctggggcttctgcgctgttgttggggaagggaccccagtcctgccttccaccccccaaccaggcctgagactgatcaaacaataaacacgtttcccactctgaaaaaaaaaaaaaaaaaaaaaaaaaaaaaaaaa

SEQ ID NO: 117410 - DNA, 1000 bp, Homo Sapiens
cgaccgggacctggcactcgccgatgaggccagcaggaacgccgacctgtccatcacgctgggtacatcgctgcagatccggcccagcgggaacctgccgctggctaccaagcgccggggaggccgcctggtcatcgtcaacctgcagcccaccaagcacgaccgccatgctgacctccgcatccatggctacgttgacgaggtcatgacccggctcatggagcacctggggctggagatccccgcctgggacggcccccgtgtgctggagagggcgctgccacccctgccccgcccgcccacccccaagctggagcccaaggaggaatctcccacccggatcaacggctctatccccgccggccccaagcaggagccctgcgcccagcacaacggctcagagcccgccagccccaaacgggagcggcccaccagccctgccccccacagaccccccaaaagggtgaaggccaaggcggtccccagctgaccagggtgcttggggagggtggggctttttgtagaaactgtggattctttttctctcgtggtctcactttgttacttgtttctgtccccgggagcctcagggctctgagagctgtgctccaggccaggggttacacctgccctccgtggtccctccctgggctccaggggcctctggtgcggttccgggaagaagccacaccccagaggtgacagctgagcccctgccacaccccagcctctgacttgctgtgttgtccagaggtgaggctgggccctccctggtctccagcttaaacaggagtgaactccctctgtccccagggcctcccttctgggccccctacagcccaccctacccctcctccatgggccctgcaggaggggagacccaccttgaagtgggggatcagtagaggcttgcactgcctttggggctggagggagacgtgggtccaccaggcttctggaaaagtcctcaatgcaataaaaacaatttctttcttgcaaa

SEQ ID NO: 117411 - DNA, 1000 bp, Homo Sapiens
acccaagagaaaatgctacagttttatagattgcacatcattctttaaggcatacttttacctcaggaaacttactctagtatgttctcatatattgaattctcaactaagtaactatttctttatacctataaactagtacctaattcactgttagttaaatgagctatagataaggcagctaaatttctgaaagatagccagagtaagtaagcagccactgcaagctctgaatcagttttttaaaaaaaagaaaaaaaaaaaaaaggagctgtgccccattgaacaatgacaacatcacaaggggaagggagggattttgccaaaagttagaaaggtggagctgtaagccatgtgcttgttgcctttgacagtgacagtgcgcgtcttacaactaattccactaggcatgggaatgtcacctcctttgccactgtaccccatcaagcttactctgaatcaaaggttttgtaaaacttttgaaaatgaacttagctgcaaaatatagctaaccactttcaattgcaagctttgcaaagtgaagagaggttcgtacttctcataattggtatttagcacaattgtaagatacagttttactgtttgtacatcgtttttttccattaaacttttctagagaagacaaaagcttacactggtgacatggataagtgagatggtgtctaacgagcagtgcaatattaggcggtgcaatagaggccctgttggcaagatgagttttgctggagagctggacagtgttggttagcttcctgcattgattgcccctgggcgttcttcccccttaactgtgaaagcagagtctataaatgaactctttgctcttacaaggtaatttacatattttctttctgttgaaataactgaaaatgttaaatctaccagtttatgtcttgtaaacagagtgtcatatgtatttaagttgtgtatttttataaagtaaagccaagtatcaaacaccggaaaaaaaaaaaaaaaa

SEQ ID NO: 117412 - DNA, 1000 bp, Homo Sapiens
ccagcactggactgaagttcttgcagacaccccacctgtgcccctatcatcaggggaactgctccacctgagaggaccaactctttaatttttagtaaaacctgaaggtgatgggccgggcgcagtggctcacgcctgtaatcccaacaccttaggagtccgaggtgggtggatcacgaggtcaggagatccagcccatcctggccaacatggtgaaaccccatctctactaaaaatacaaaaattagccgggcgtggtgacacgtgcctgtagtcccagctactcgggaggctgaggcaggagaatcacttgaacctgggaggcggaggttgcagtgagctaagatcacgccactgcactccagcctgcggacagaccaagacttcatcccccccaaaaaaaaaagattggaggtgatttacagtgaaagacacaaataaaatacaactgttcaatggaaatagaaaataaacaccataaaagagagaagagaggtaatttgttagcatcaagagtcaagttgctatatggtcaaaggttaaatttatctctaaaaaatggcaggattcaaagttgtacatacatgtgattacttctgttttttacacccacatacagtacaaaagattattaaaaatattcccaaaaggcaggtgcaatgatgcacacttatacccccagccactcaggaggctgatgcaagaggatcgcttgagcccaggagttgaagtccagcctaagcaacatagtgaaaccccatctccaaaaatataataataattctctcaaaatactaaacagaggtggttttattgataagattttggctgtttggttttccactattctctattggctaaaatttgtttaatgagcatgaaatgtttttattttattttgcttatttttatgattgcaaaaaatgatatgagtttctccctgccaaggcaaaaaatatatatatatacctataaaaaaaaaaaaaaaaaaaaaaaaaaa

SEQ ID NO: 117413 - DNA, 916 bp, Homo Sapiens
ggacgcagagaagccagagactttcgcttccggctgccgcaggcgcttcgctggtgcaggtaagctccgcacactctcggccggtcccgagtccgactccctcaagggtgacgcgagctctgccctttaaccggaaacgtctccctgctcaccccacccccgcgcagacgcagtgctgagcacacagctaccggacaaagagtgacgcccggagctggagttatggcggctacggagccgatcttggcggccactgggagtcccgcggcggtgccaccggagaaactggaaggagccggttcgagctcagcccctgagcgtaactgtgtgggctcctcgctgccagaggcctcaccgcctgcccctgagccttccagtcccaacgccgcggtccctgaagccatccctacgccccgagctgcggcctccgcggccctggagctgcctctcgggcccgcacccgtgagcgtagcgcctcaggccgaagctgaagcgcgctccacaccaggccccgccggctctagactcggtcccgagacgttccgccagcgtttccggcagttccgctaccaggatgcggcgggtccccgggaggctttccggcagctgcgggagctgtcccgccagtggctgcggcctgacatccgcaccaaggagcagatcgtggagatgctggtgcaagagcagctgctcgccatcctgcccgaggcggctcgggcccggcggatccgccgccgcacggatgtgcgcatcactggctgagcggtggagctgcgggcggccagggccgggcgctctgtgcggactggggccatgatcgggcccgggggcctgagcctgggaccccaccccgtgttaatgaaaaatgagttttggcagcgccaaaaaaaaaaaaaaaaaaaaaaaaaaaaaaaaa

SEQ ID NO: 117414 - DNA, 1000 bp, Homo Sapiens
cccaggaaggggtatttccaacacttggcgtctcaatgaggataaaagggagggactgtaggttgtccagcataaggagccccagagttctttcaccagcagacagattctccatgtgttttcccactgttaaggactctgtccaaagaacctcagcatcagctccctcaagcttaatgatccaggctgcagaagaaagttgtcactccagtgagttacccagggctccagggagcccacagcagcatcagacccatccaggggctacagggcctgcccccctgcaggtagaaacacagtatacccgtttgtcatctggtttggcaggacccaggaccctcagcaatgagtctgagtgttcaaagcccactttagaacctaaagcattttgggttaataaagcaaaattttgcttatgttatttggtggtgtcaccgcagcttataccaagacaccatggctcagacatgggatcaggacacacctttgagatcccactgttagcaagaaaaggctgtccaaggcaggcagtgtggtagttgtctgattttgtttaccacacgccaggtcccagggaagtcttgcacagactcttagcagacaagcagggaaaagagagggtcctggtgggtggaaggattgggaaggggattctgggcctggaagcctgctccttcccctctcagccgtctcaggactactgttggattgcaaacagcatctctgacccagtcttcggactcattctgtaaatggaggagctgaggtcagaggggggctgtgaactactcaagaccacatgcttgcagtcctacaggcttcccgacccacaggccagctacggattttgcacttttgctccaggccacttgtgtgtgtatgtgtgtgtgtaccactgccatctgaacaaactatgcaataccacctgctcccttccaggagcattttaataaaagattttttttaataacagaaaaaaaaaaaaaaaaaaaaaaaaaaa

SEQ ID NO: 117415 - DNA, 1000 bp, Homo Sapiens
tcttcttgcatgtccacagtaatgtatttgtggtttttattttgaacgcttgcttttagagagaaaacaatatagccccctacccttttcccaatcctttgccctcaaatcagtgacccaagggagggggggatttaaagggaaggagtgggcaaaacacataaaatgaatttattatatctaagctctgtagcaggattcatgtcgttctttgacagttctttctctttcctgtatatgcaataacaaggttttaaaaaaataataaagaagtgagactattagacaaagtatttatgtaattatttgataactcttgtaaataggtggaatatgaatgcttggaaaattaaactttaatttattgacattgtacatagctctgtgtaaatagaattgcaactgtcaggttttgtgttcttgttttcctttagttgggtttatttccaggtcacagaattgctgttaacactagaaaacacacttcctgcaccaacaccaataccctttcaaaagagttgtctgcaacatttttgttttcttttttaatgtccaaaagtgggggaaagtgctatttcctattttcaccaaaattggggaaggagtgccactttccagctccacttcaaattccttaaaatataactgagattgctgtggggagggaggagggcagaggctgcggtttgactttttaatttttcttttgttatttgtatttgctagtctctgatttcctcaaaacgaagtggaatttactactgttgtcagtatcggtgttttgaattggtgcctgcctatagagatatattcacagttcaaaagtcaggtgctgagagatggtttaaagacaaattcatgaaggtatattttgtgttatagttgttgatgagttctttggttttctgtatttttccccctctctttaaaacatcactgaaatttcaataaatttttattgaaatgtctaaaaaaaaaaaaaaaaaaaaaaaaaaaaaaa

SEQ ID NO: 117416 - DNA, 1000 bp, Homo Sapiens
tactgtgggaatgaccatggtcatggctgtgttccagcacaacttgatttaccaagacaagctgtgggctgtatttggtcctcaggctgtggcttgctagcccctgctctaatggattgtgttggcggcaatggcaagattcccttgctgagaacatgcagatgaataaccttatagctgggatgcagagaggagaaagttctgtaggtaataagtgcactgtattccctctgagctacttcctgggcatagttacatgtatggccagtgtgtgtacttgagccatcaggctcagacacttgttgaatatacctctcattgcattagtttgtaattgtgctagtgctgggtgctgagctcagctgcccggatgacctttccagactgaaggacatactcccctaacagctgggagtgctgctggctggccatttacttccagcccttatgaggagtttcccctgctgaagagccctgcctgccccagatcatacccccttcctgcctgtaacccttaccggctccatatggggtacaaaggtctggcctcctcaccccaacttgggaaaccctctggggccatcccagctccagagccccttgtggggtcagtgagacctcattgtggccacattacagcccagtgcctctccctgacaagcctgtacccagccggctcagcccacagcactgtcctatgaaccttcctgcacgccattctccacctcagtatctgctttcggggaacccaacctgcgacagtgcttctgtgtgttttcagtcctgcaggtttgaactctgactttggagacttttccagttatctcgtggaatgacagattgtgcctgtatgatatcaggcacaattaatgcaaattaggcagacctatttattctagatgtgaatttgctatttattttaaatgttgattttatgtgttatgtgactctgaacttattgccaaataaaagtttgaattgtaaaaaaaaaaaaaaaaaa

SEQ ID NO: 117417 - DNA, 1000 bp, Homo Sapiens
gagaggtctccccagccaggggcttccccgcaagaggacatcgccaacttccaggtgctggtgaagatcttgcccgtcatggtgaccctggtgccctactggatggtctacttccagatgcagtccacctatgtcctgcagggtcttcacctccacatcccaaacattttcccagccaacccggccaacatctctgtggccctgagagcccagggcagcagctacacgatcccggaagcctggctcctcctggccaatgttgtggtggtgctgattctggtccctctgaaggaccgcttgatcgaccctttactgctgcggtgcaagctgcttccctctgctctgcagaagatggcgctggggatgttctttggttttacctccgtcattgtggcaggagtcctggagatggagcgcttacactacatccaccacaacgagaccgtgtcccagcagattggggaggtcctgtacaacgcggcaccactgtccatctggtggcagatccctcagtacctgctcattgggatcagtgagatctttgccagcatcccaggcctggagtttgcctactcagaggccccgcgctccatgcagggcgccatcatgggcatcttcttctgcctgtcgggggtgggctcactgttgggctccagcctagtggcactgctgtccttgcccgggggctggctgcactgccccaaggactttgggaacatcaacaattgccggatggacctctacttcttcctgctggctggcattcaggccgtcacggctctcctatttgtctggatcgctggacgctatgagagggcgtcccagggcccagcctcccacagccgtttcagcagggacaggggctgaacaggccctattccagcccccttgcttcactctaccggacagacggcagcagtcccagctctggtttccttctcggtttattctgttagaatgaaatggttcccataaataaggggcatgagcccttcctccc

SEQ ID NO: 117418 - DNA, 1000 bp, Homo Sapiens
agtccagatactaagagcaaagatgtttcaaactgggggcctcattgtcttctacgggctgttagcccagaccatggcccagtttggaggcctgcccgtgcccctggaccagaccctgcccttgaatgtgaatccagccctgcccttgagtcccacaggtcttgcaggaagcttgacaaatgccctcagcaatggcctgctgtctgggggcctgttgggcattctggaaaaccttccgctcctggacatcctgaagcctggaggaggtacttctggtggcctccttgggggactgcttggaaaagtgacgtcagtgattcctggcctgaacaacatcattgacataaaggtcactgacccccagctgctggaacttggccttgtgcagagccctgatggccaccgtctctatgtcaccatccctctcggcataaagctccaagtgaatacgcccctggtcggtgcaagtctgttgaggctggctgtgaagctggacatcactgcagaaatcttagctgtgagagataagcaggagaggatccacctggtccttggtgactgcacccattcccctggaagcctgcaaatttctctgcttgatggacttggccccctccccattcaaggtcttctggacagcctcacagggatcttgaataaagtcctgcctgagttggttcagggcaacgtgtgccctctggtcaatgaggttctcagaggcttggacatcaccctggtgcatgacattgttaacatgctgatccacggactacagtttgtcatcaaggtctaagccttccaggaaggggctggcctctgctgagctgcttcccagtgctcacagatggctggcccatgtgctggaagatgacacagttgccttctctccgaggaacctgccccctctcctttcccaccaggcgtgtgtaacatcccatgtgcctcacctaataaaatggctcttcttctgcaaaaaaaaaaaaaaaaaaaaaaaaaaaaa

SEQ ID NO: 117419 - DNA, 1000 bp, Homo Sapiens
ggcacagcgacctcatcccccaagtggacacggtttgcctgctaactcgcaaagcaattgcctgccttgtactttatgggcttggggtgtgtagaatgattttgcgggggagtggggagaaagatgaaagaggtcttatttgtattctgaatcagcaattatattccctgtgattatttggaagagtgtgtaggaaagacgtttttccagttcaaaatgccttatacaatcaagaggaaaaaaaattacacaatttcaggcaagctacgttttcctttgtttcatctgcttcctctctcaccaccccatctccctctcttccccagcaagatgtcaattaagcagtgtgaattctgactgcaataggcaccagtgcccaacacatacagccccaccatcatccccttctcattttataaacctcaaagtggattcactttctgatagttaacccccataaatgtgcacgtacctgtgtcttatctatattttaacctgggagactgttgtcctggcatggagatgaccatgatgctggggttacctcacagtccccaccctttcaaagttgacatatggccatcccattggccagaatccacagacacacctaagcctgtggcactgggacagaatagattttccatttgagaggcacttcctgtgtcagtcttgtttgaaggaggtggtgatggtggatagaggtgaaggaggtagggagtgccctccaagtgcaaaaataacaaatatgattattgaccatcggggaattctcacacattgatttgttttttaagcaattgccagaaacccccttttttagcttttgcttggggtgggggtaggagttaaggtttattcaatcctgtcctgggtagggcgaaagttaatctagccatgtgatttttcagaaaagtaagtggaacatgctgccacttttcaattctgtcagtgcttccacatggaaacaaaatgcaataaaatttttccaaaacctgat

SEQ ID NO: 117420 - DNA, 1000 bp, Homo Sapiens
cctagttaagtggaaatgtgtttggagataggggaaatcacataactggtacaagtatggggtaattgcttaaacatgcctggtggaagtctgatagcgtctctgcacgtgacctctgacaaagcccatcccaggagacggggtgaagctattccccacactctcctgtgaacactggagtcttgcaagacccagggagaacccactgcttttcccaggaggctccaggattaggaaatgtgtgtatttagtgaaaaataggtttgtagtgaaatagttactatttcatgaaagtagatatttttagaatttttgaaataccacagttgttttcctggattataaggaaaggcacattacatttagtcttcctttcgatataaaactctttgaagaaatatgatttttagaaatcagctacccattatagcacaaaatcagccaaagcagaatttttaaaaattggcttttttaggattctttttctccccctcccatcttagtcttaccttgagggaacagtcatatgagaaggaactttgtcacatctaagctgtggtgtgttccccatgtgtgtgtacaacactggtgactccaggaaccattttcacctattaccagtgttccctggggactcctcttaatgtttccaaatgggaaggacagttgatttccaacatgaggttttttgttttttatccagaaatattttcagcaaaactttccaactgagtggagtctgattaaggatttatttgaaaatggtgggattcattggcccataggtacattggaaaatgtatatctctccagctgtactgtagtgccctgcaggctgtttatatgttcacagttacttttttttttttttttaaataaaagtcatttaatgtagaatacttttaatttcactttctgtattttaattttgttgaagggctgattgggatttccatgttcttattaaaaatctaacaaatctgaaaaaaaaaaaaaaaaa

SEQ ID NO: 117421 - DNA, 1000 bp, Homo Sapiens
taagatccttttcttctcttataaatcatcctcttaatgaaaattagcctaacaaaagtttggagactggaatcctactttgagccactgacttgaaataactcttttggcaagttgcctgacaccctgtcttaccaaggtggcatatttgcatttttactgcttaaaacatttttttttttttaccatccttatccaaatttatcatattgatggtaggactaacaggctttttagaagctggctttaactttgagtctcaagctacaatgctgttgggcagcctggtcttcccacgtgagggtttaactttgtttatttgcctccagttattccaaaatgcttattaaatgaaaggcccaggaacatgtttattttagtcacctttgctttttaacaattttgttttgtaatcaatgagtaattcatgatgaattatttttgactaatggatagccgaaggccaagcttttaattctaataggtaatgttcttcttttgtcttattgaaacaatgagaatactctgtgcatttcaaatgcactccgattatgctgtggttttattcacataagcacaatatgtgttttatttataacttcataacaaacttataatataataatttaccttagcagacatgcaaaagcctattcttgtgtgacttactttctttaagctaataatataaaaataaatatgtatcttaaaaatctataataaaacattagaaattaaagatatgtgctttttattttgcagatgagttcatttgcttctgtagatgtgttttcagagctaggtacagaggaatgtttgctacctttagcggtgaaaaaagaaagagagtcaagaattttgttggattgtgtttgtgtgtgcatatatttgatatcatcatcatatttgtaatctttggacttgtaatcatagcctgtttattctactgtgccattaaatatactttaccttatacataacgaaaaaaaaaaaaaaaaaa

SEQ ID NO: 117422 - DNA, 1000 bp, Homo Sapiens
ggaataactgctgcttgtaaacttcgttttgatcgaatatttttcagagcagcagcagaagagggacacattattccccgaagtttggaccttcttggattagaaaaactggactgtggtagatttcctagtgatcactggggtcttctgtgcaacttagatataatattgtaaaatgcttttcaagtgtgggttttgccctgattgttgcaaatacaatttccaccttctggaaaggtaggtttgctgtggaggaaataatgtactagatcattgtcacagaaaaaccaactatgatttatggttgtgttttcagaattcaacattaaagattaatgtttatttaaacgaacacattcctgcattcaggatgtgaggccatttaataaaaagggcacaaagcctgtcagagttttcaacggtgcttatagctgccagctggattccaaacaggtaccacattgtctctgagctaatgtttatatttttccattcaggcaccgaaatagttaatatttgaaataagtcttcaaaagaaaacataagagattattgagttcttgggactggatcctttatttcataagttcagatcatcttaaatgaaaatgccatgattatctgcagttaagtagatgacagctattctacatcagacttgatttttgtcagctaattacataattggtaagctataattgaaaccttatggcttaaaattccttaactcctttttgattcatgtttgtagtcatgttgtcaacagaggcaaagttaagcttgatgatggttaaaatcggtttgatagcaccatgggacatttttctaacaaaaataaatgcatgaagagacatagccttttagttttgctaattgtgaaatggaaatgctttacaggaagtaaatgcaaattacttttaagtgtgctttaaagaaaaatattttccccacaagagaaatttaaataaagaattttatttgtttaaaaaaaaaaaaaaaa

SEQ ID NO: 117423 - DNA, 1000 bp, Homo Sapiens
ggaagattttatttgcccttccggaagaaatcagtatctatgcaaatcttgaaagacgaaatcaaagcccattaatgattcagaatcagtgcttgacctcctgtattctgaatggtgaactctggaagcagggattgtgtctggctctttttagagctggaagtgtagtggctttcattaaatacttgctgtaaagtctttctaagaccaattattatcttagcatgtttcagtatcttctctatcataggccctaagttcattgggggaaaaaaaataagaagattcaacagaatcagcatttgaagtgtaccattggtagttgtttatgaaattaccagatattcataaatgtgacaaatgaacagcaggattatgaattatcaaaggaaaaagtatttgctgaggtgaaaaaatctgatgtttgaggaagtttttatttttatttatttgttttgtttttttttttttttgaggcagactctctgtcgccaggcttctcctgcctcagcctcacgagtagctgggactacaggcatgcaccaccacgcccagctaatttttgtatttttagcagagacagggaggaagtttttatttttataaacaaaatctgatgttcagaggccccgtttcttacaataaatgttgagtcttagttaagcaggaatttatgaacacccatttcctgactttttgctttaatttagatttttctccatcctgtttctagcacaaaaatttgcctgctgtgttacaaaaataaatttatgttgtcctgtgccataaagtgatatatttaatatttttattctttggttttgaacattgtaagttcctaaaaacattttattaaacaagtagacattttgttattaaaaaaatgtgatctgtaatttctttgtgcagaatgatttgaagtattgtattcagtttacatgcattattggtttataattaatatctaatgaaaatacatgttgttatattgtaaaaaaaa

SEQ ID NO: 117424 - DNA, 1000 bp, Homo Sapiens
tggctcacatggtgtagaacatagagtttacaagcacttctcctcagataacagtaccagtactcatcaagccagtcacaaacagatacatcagaagaggaaaaggcacccagaggaaggcagagaaaaatcagaggaggagcggtctaagcataagagaaaaaaaagctgcgaggaaattgacttagacaaacacaagagcatccaaagaaagaaaacagaggtggaaatagaaaccgtacatgtcagtacagaaaagcttaagaatcgaaaggagaaaaaaagccgagatgtagtctctaagaaagaggaacgtaagcgtacaaaaaagaaaaaggaacaaggccaagaaaggacagaggaggaaatgctttgggaccagtctattcttggattttgaagctttcaaagttggttctcccaaagttaaattgaaaaaataggtgagagcttggttttatgatatccgtgttcataccacttttcttatgtgaataggttctttaacttctaacaaaggcctagtaaacaaagtgtttagcatgcttgctctccaacacagaaattgcttttcctcattttctaaaagcattattacattttttgaacatatagtgtaatttcctttaatgaaagtgactctgcttttattcatcaaattgctttgatggtggaaatattttctgttgggaggttatttattttaaattggaggattaatgacctttgcacaatctgtttcttgattgggtttgttatagttttgagttgggtattttatgttcattggtttttctctgtgaagcaatttttttctcctttattagatctaacttgcagtgtattttctaggctggaaagtggaaaatgaaatatattatgatcttaggttacataaagtttctaaagtttcaaagagtcttgatacaaaatcagtttatattctgaaaatatttataataaagtattctaatttctaaaaaaaaaaaaaaaaaaaaaa

SEQ ID NO: 117425 - DNA, 1000 bp, Homo Sapiens
ccgagccgtttgtttaggtagagaagacaagtccaaagagtgtgtgggctttcctgtttctaaactttcgctactataaaaccaaaaaaaggaattgagatttcaccaaccccagtgcccagaagagggaaggggagtggctggagggagcagggggtgggacagtgtatcaaataagcagtatttaatcacctctggcgggggcctcgtgcaaggggagactgacaccaagaacagccagtaggttcttctcccctgcactctgctccctgcgcggtaaccccaccactcctgaagcctgcccagtctccttccttccctgcttggtgagtcgcgcatctccgtggttatcccgctgtctcctctccaagaacaagcagagcccgggccactggcccttgcccaaggcagggaagaaggatgtgtgtgtccaggaaggaaaaaaaggtggatcagtgattttacttgaaaacaagctccatcccttttctatatttataagaagagaagatcttgagtgaagcagcacgcgacccaggtgtgtgtgaattgaatggagacgtttcttttctctttctttaatttttgtttttgttctttttttctttaaggaaagttttattttactgttcattttactttcttggtaacaaaaactaaaataaggaatagaaaagctgtttttcaggctgacagtccaattaagggtagccaagaccttgcatggtagagtaggaatcatagtgtcagtgaggtcccgtgagtctttgtgagtccttgtgtcatcgttcgggcactgtttttttatgcaagggcaaaaatctttgtatctggggaaaaaaaacttttttttaaattaaaaaggaaaataaaagatattgaggtcttcctagtgttacttaaattaagatcaaggtaagaaacattgtaaaaaaaaattacaaaagtgctatttgtttcctaaaaacagtgatttctattaaaaaggtgtcagaactgg

SEQ ID NO: 117426 - DNA, 826 bp, Homo Sapiens
aactgagctgaaatcctaaaggccgcggagtcggcggtgttgtaggtagcggtaccttgagtggcaacagaattcgattaaattacaatgggaaacatttttgaaaagctctttaaaagtctacttgggaaaaaaaagatgcggattcttatattgagtttggatacagctggaaaaaccaccatcttgtataaattgaagctgggggagactgtgcctgccgtccctacagtaggtttctgtgtggagacagtagaatataaaaataacaccttcgctgtctgggatgttggcagccacttcaaaatcggacctctgtggcagcattttttccagaacacaaaagagctatcagcttcccagtttgcacaattcatcaagaaattatgcggggtcaccggcacaaatgatgaggcatctcctggaaagcttaacttcttatccatcccatctcttggacagatgatgccagttaattactttgaataaatatgggcaaaagcttatcattatcaacaaatgagaagaaagaaaccctatgccaggtaacaccaaagctttggcccagtgccctctgttgaaacatcctaggctttttctttccactcctattacaactgatctgatttggccccttcacacctcactcctagattttgctagacctttctattttgtctccctgaattaagcttttccttttggacactttacatatggattctaaaacaatcctctgcatgtctacacttgcacataatgcaaaaaacaaaataaaataatcttcctgttttgatcaaaaaaaaaaaaaaaaaaaaaaaaaaaa

SEQ ID NO: 117427 - DNA, 1000 bp, Homo Sapiens
acaaaaggctgaaatggctttgcttatgatggatgaggacgaggacagtaagaaacacttcaattacaacaagattgtggagcaccagaatctgagcaaaaagaagaaaaagcagctcatgaaaaagaaggaattaatagaggatgactttgaggtaaatgttaacgatgcacggtttcaggcaatgtacacttcccacttgttcaatttggacccctcagatcccaatttcaagaaaacaaaagctatggaaaaaatccttgaggagaaggcccggcaaagagaacggaaagaacaagaacttactcaggcaataaagaaaaaagagagtgagattgaaaaggaatcacaaaggaagtccattgatcctgctttgtcaatgttgattaaatctataaaaaccaaaacagagcagtttcaagcaagaaaaaagcaaaaagtcaaataactggatgttacttatttttgaactgaatacatcttttcctaaaatgtacaaaaataataggagggaatatttattgggaacaaagctatctttcaagaacatgaataaaatctttttctggacatagtaaaatttttctccataaataattgtacttaattgtggatgactgacaaatttttattgtatattcctacagatcagtcataattaaattacctgcattatagggtttataaaatttttatattttacaatgttcagttctaactagtggaaagttactctagctttttaaaaggctgtttacaattctgtgtaaaaatagagcagtatctactcaagtttgtgtaaatgttagggataatttgaaaaatatatatatttaatacattaatttctctggaagcaggaggcatgtttaaataactattaaaataatttatttttctagccataaaggatggaagtcaagaactttttgttgtttagtcatgttaagtatagtttatgaaattaacttgtaaataaaagtgtaaaatattttcatta

SEQ ID NO: 117428 - DNA, 1000 bp, Homo Sapiens
tgttttcattctggaaccatactatcaaatggcgacagactgttccgttccacccccgtgaagtaatcatgcaccgtgtgaatagtatcaagcaggattgctttcattgtatggagcatgaccagcgtgtgactcattctgacatttcagatcctaagaattctaagaacactactagaagcatttgttccctcctagtcaatgcttcatactttttcttgggattcttttagcccttgacattcttgtcccccaaacctgtaagtaggtgaattcctaagataagtgtgtattttcattccaggtgaaaagcaggatgtaccgagcactttattcagtgcatagctttaagccagtgttggattcactaagtggacagccagtctcccagctctctgccttccccaaaagggtcgtagtaggtcacccttctacagcagctaactagagtcctaactaatgggatccagcagggccatttctccagagggccagtatcctattaggagactcttggaattcttaggttctactcaagagtggaaggaccaatcacctctgatattctgtggaaggttttggggtcaaattctgccctctgcattctgtgcaacttgtataaaagtcaagttagtattacatgaatttggggtagggttagtgctttgaaaaaatgttgaaccggctgggcgcggtggctcacgtctgtaatcccagcactttgggaggccgaggcgggtggatcatgaggtcaggagttcgagaccagcctggccaacatagtgaaaccccatctctgctaaagatataaaaaattagcccggcgtggtggtgcacgcctgtaatcccagctactcgggaggctgaggcaggagaattgcttcaacctgggaggtggaggctgcagtgagccgagatcgcaccactgcgttccagcctgagcgacagggcaagactcagtctcaaaaaaaaaaaaaaggaaaaaaaaaagaaaaaaaaa

SEQ ID NO: 117429 - DNA, 1000 bp, Homo Sapiens
gatcagccctctggcccagcagatgagtcatctgtcactaggcagcaccggaacatacatgcctgcaacgtcagctatgcaaggagcctacttgccacagtatgcacatatgcagacgacagcggttcctgttgaggaggcaagtggtcaacagcaggtggctgtcgagacgtctaatgaccattctccatatacctttcaacctaataagtaactgtgagatgtacagaaaggtgttcttacatgaagaagggtgtgaaggctgaacaatcatggatttttctgatcaattgtgctttaggaaattattgacagttttgcacaggttcttgaaaacgttatttataatgaaatcaactaaaactatttttgctataagttctataaggtgcataaaacccttaaattcatctagtagctgttcccccgaacaggtttattttagtaaaaaaaaaaaaacaaaaaacaaaaacaaaagatttttatcaaatgttatgatgcaaaaaaagaaaaagaaaaaaaaaaagaaaagaaaacttcaattttctgggtatgcacaaagaccatgaagacttatccaagtgcatgaccggatttttgtggttttgttcattttgtgtttaatttgtgttttttttttccagctgtatgaaatgggctttctgaagtttaaatagtccgacttcacccatggtgttctgtgcttgcagtgcgagtgttgctgtaattcagtgttgccgtcagtgtctcttttcttagctttctgtctttctttcaacgtagtgtgaagtgtcttatccttttctatgaattccaatttgccttaactcttttgatgctgtagctgtttcagtaaaagttagttcaaactaatgatgtagaatgctttgaccaaatgagctggtctattatgccttgtaaaacagcagcatagggcttttaaaaggtagtcaataaaagttgctgaaattttggcttttttaaaaaaaaaaaaaaaaaa

SEQ ID NO: 117430 - DNA, 1000 bp, Homo Sapiens
agtgctggagcatggtatgaccagattttatcacagtgccatttgaagggaaaggagttcagacagacagacgtattccccaaaaagggataccccaggccgatggtgttcagccatttagcagctgaaaaaggaaacagtgcacaccaatgggaggcagcctgcgtagccctcatcaggcaagacagactgaatgcaggagtgggtgattagctgctccttgaacttgaggctgccttggcagcaggggcacagcaggcctcaagagcccctaattgtctcagggttcaaaggaagacactgacctttcccatcccggtagcttcagggaagatcatagttaataacgtctctcaacaaatgattacttctttgtttccttgtggcttcttgtctgtctgagtcaacgaatacacagacttactggattatagaagagaaaattcacatctgccttgttaatctaataaatataattacagccccttaatgtgttgtcaatgagtctaagttgacaaattcagtggcagcccagccacctcctatcaatcaatcagggaagaaatgcaggggagactggggccctcagtgaggggctgcctggcattactcctccaaagactgctgcccccagaacaggcagggggtgtgggagggccagtttcccgccactgggtccaaggagcctttgttcaaaggaagaagtgggccacggaagaacgggcctgcttctctcgtgcctgtgcttctgacctccaggaactgtaaacaggaacacctatgtgtaactgaaggcatgagacatctgtacaggaagcatcccagcgcccacatgggcatgagacagtctgcactgcgcctggtgaaatgcgtgtgtgtacagacagtccactgggcagcacaggtatcctcatgttctttatttgcacagagtgaaatgtcagaagttacatgtaaatgaattcacagtcaataaagtccacgtctacctggaaaaaaa

SEQ ID NO: 117431 - DNA, 1000 bp, Homo Sapiens
gacagttactgcagagctcctaagtcaccactcaaccagtggctgtttcacaaggatttgagggcacttgcctgtcttgtgaggtctgtgccacaaggtgagtctgaactgactgctccagctaagtgatcaggcacgttgagagtatatggtgtcctcagcacatacacctgtgggaaaacggaccgctcttggctcctgactcccagggtacagcgcccagtaactcatccttcattcagaggtttgctggccttcccggtttcccaaggagcaagacctctgtctgccctttggcccggcctctgctctgactcctttttttacataagaaccaatctgtgtttcacattgggctaagtggattccttatccctttgttatatatattttttgcaacttggatttccagtttgtttacagagtagtcttaggtagtagcaaaagagccaaagaagagatttgtattgctgagctcaaagccaagcagaggccggcagtggaggctgagcagggactctccaggcttctctgcccataaacacccgggtcccaggccctccttcctttccctttggtgctccctcctccccatgtaccattgcgcgtgcagctggagcagaataccctcatttttaggaatctagtgatgcctcttgcctcagggaaacgtttctttgatggggagtttgagatttcttttccttgtttatgctttatttgtggtaatgaaagagcgaatgactgaacagccatggcaaggcagacctacaggcgaggccgcagcagagggtggggcagagcagcctcggggtctgggggctgcaggggtttccctggcgcagcgaaagtctctgagcacttaccgggcgtgaccgtttcttaggtgtgagaggggctgtggcttttgtgcagcgactatgttggtgttaggggtggtgtggagattgttaatcttgtataaagcaattcaataaattgtttcaaggtttccaaaaca

SEQ ID NO: 117432 - DNA, 1000 bp, Homo Sapiens
gtagttgaaaaatcccagcttcctctgtgcctccactctggccctaaatgctcctccagcatctgtttctcccttgggactgtgtctcatgtttgtgtgaatgtagaccaggaaagggggctgcaaaaatgttgagtctaatgttcgtaagcatcatagaaattcctgtcttcatattaagatgtactgctttaaaacacaactccagagcccctccccaagctcccctccccaagctcctgaagacccggtttctgagggagggaaattgctacttggattgagagtagctggaatgtaagtgaccccaggctttgctcagggcctttagcctatgtcccccccacataaagagagcttctcagagcctgactgaagagctgacgttttgctttttcatatgccaattaaacccggtctaaatccaaatgcttctccagccatccaggagtggctgtccttttcagtcttgtcttttatataggtagctgagggggaagatttagaagccttgcactcactaaatagattaaacagagcaggcttgtttgttgaattgctccaaagtccaacagacacacactgagcaggtgttttacactcacattccctttttgccccttaaatagaaagtgcaggtaaaggtttatacaacaagaaagcacattgaaaataatttgatactctaacaatccattaacatgtgtaggggttacggtgaggatcatgtgttgtattcgaaaaacggggagagggatgcttaattggccctcgcttgctatttttttctcatttcttcacaataggaccgtctttggcagcagcaaaatgtatttcagtatggcagtctttcctctcttacattattggtaagattatactaacaaaatgtttccccttgtacaattatgctgtgtttttaaaaaacattgacctgtgtgtttttataaaagaaaaagtatgttgtgccttcttcttaagaataaagttttctaaaggg

SEQ ID NO: 117433 - DNA, 1000 bp, Homo Sapiens
tcctgtgtcgctgccaccagggctatgagctgcatcgggatggcttctcctgcagtgatattgatgagtgtagctactccagctacctctgtcagtaccgctgcgtcaacgagccaggccgtttctcctgccactgcccacagggttaccagctgctggccacacgcctctgccaagacattgatgagtgtgagtctggtgcgcaccagtgctccgaggcccaaacctgtgtcaacttccatgggggctaccgctgcgtggacaccaaccgctgcgtggagccctacatccaggtctctgagaaccgctgtctctgcccggcctccaaccctctatgtcgagagcagccttcatccattgtgcaccgctacatgaccatcacctcggagcggagagtacccgctgacgtgttccagatccaggcgacctccgtctaccccggtgcctacaatgcctttcagatccgtgctggaaactcgcagggggacttttacattaggcaaatcaacaacgtcagcgccatgctggtcctcgcccggccggtgacgggcccccgggagtacgtgctggacctggagatggtcaccatgaattccctcatgagctaccgggccagctctgtactgaggctcaccgtctttgtaggggcctacaccttctgaggagcaggagggagccaccctccctgcagctaccctagctgaggagcctgttgtgaggggcagaatgagaaaggcccaggggcccccattgacaggagctgggagctctgcaccacgagcttcagtcaccccgagaggagaggaggtaacgaggagggcggactccaggccccggcccagagatttggacttggctggcttgcaggggtcctaagaaactccactctggacagcgccaggaggccctgggttccattcctaactctgcctcaaactgtacatttggataagccctagtagttccctgggcctgtttttctataaaacgaggcaactgg

SEQ ID NO: 117434 - DNA, 1000 bp, Homo Sapiens
ttccctgtctgggtttagcatgcctggaaaacctggtgttgtttgtgtggaaggcccacaaagtgcctgtgaagaattctggtcaagactcagaaaattaaactggaagagaattttaattcgccatcgagaagacattccttttgatggtacaaatgatgaaacggaaagacaaaggaaattttccatttttgaagaaaaagtgttcagtgttaatggagccaggggaaaccacatggactttggtcagctctatcagttcttaaacaccaaaggatgtggggatgttttccagatgttctttggtgtagaaggacaatgacatcaagagtagttgaaagtatcttgccactgttggccttttgatttttttttcccactttttcttgaaagattaagtaattttattttagttccattctagaatgttggggagtggggcacaagaaaaaatagtatagctgaaatgcatctgttaaaaatgtcatgattgaaagcagaactgagtttcaaattacaaccttaaaattgttgttagatatttcttcacatatcagctgcccattttgaaaaagaaattatccataaaggtaatgttggtgctccaatttgccagccattcccaacccccttctcccttacctgccttcactaaagaacccagaaaagctaattgctcccctttcagcctctgttgcaactaacaactctcagtggcctcaggacacagctttggccttgggaattctgggaaaacttttacttcctgattaaagatacatatgcagctaggccacctcctcccccccttactgccataaacaccaaagtgatgactggagctggaggagttatttgaaccacgacggaagggccaagagagccacgaagatgccagttgccacattgttgagctgctgacccaacaccagccattgcctgtctctaaacatcttatgaaataaaaccagttttgtttaaaaaaaaaaaaaaaaaaaaa

SEQ ID NO: 117435 - DNA, 1000 bp, Homo Sapiens
tttatttccactaagtgaaaaaagaactgtgtttttaaactgtaggagaatttaataaatcagcaagggtattttagctaatagaataaaagtgcaacagaagaatttgattagtctatgaaaggttctcttaaaattctatcgaaataatcttcatgcagagatattcagggtttggattagcagtggaataaagagatgggcattgtttcccctataattgtgctgtttttataacttttgtaaatattactttttctggctgtgtttttataacttatccatatgcatgatggaaaaattttaatttgtagccatcttttcccatgtaatagtattgattcatagagaacttaatgttcaaaatttgctttgtggaggcatgtaataagataaacatcatacattataaggtaaccacaattacaaaatggcaaaacattttctctgtattcattgttgtatttttctacagtgagatgtgatcttgccaaagccaccagaccttggcttccaggccctcctgtagtgagttgattgtctgcacttgccttgcccaatagccagtaggctacagcttttgccccacacccttattttcagattctggatcattcttgtttacaactgaaatatatataacctcagtccaaagtggtgattgatttgagtatttgaaaattgttgtagctaaatgaagcatgattagtcttagtatgaatatcatttaatctttaaaaaatcaagtaaaaatgtttatctgataatgtttaaataatttacaatataaactgtaaaacttattaggcatgaaatcaatcagaagagaaagaaaaatgctggaacatgcttgatgtattatgtaaaaagcatatttaaacaagggtcctcaaccctgactgcagataagaatcacttgggttacttcagatgcctaacaccttcctctcatacaaataagaattggtagctttcttaaaaaaaaaaaaaaaaaaaaaaa

SEQ ID NO: 117436 - DNA, 1000 bp, Homo Sapiens
cagtacttcccaaaccactgtcgacagcggtgaggtaaaaaccttcttggccctggctcacaaatggtgggatgaacaaggagtatatgcacctcttcattccatgaatgacctgagggtgccatttattagggacaatcttctgaaaacaattcctaatcaccagccaggaaaacctttgttggggatgaagattcttgacgttggctgtggtggtgggctgttaactgaacctctagggcggcttggggcttcagttattggaatcgaccctgtggatgaggacattaaaacagcacaatgccataaatcatttgatccagtcctggataagagaatagagtacagagtgtgttccctggaagagattgtggaagagactgcagaaacatttgatgctgttgtagcttctgaagttgtagaacatgtgattgatctagaaacatttttacagtgctgctgtcaagtgttaaaacccggtggttctttattcattactacaatcaacaaaacacaactttcctatgccttgggaattgttttttcagagcaaattgcaagtattgtaccaaaaggtactcatacatgggagaagtttgtttcacctgaaacactagagagcattctggaatcaaatggtctgtcagttcaaacagtggtaggaatgctctataaccccttctcaggttactggcattggagtgaaaataccagccttaactatgcagctcatgctgtgaaatccagggtccaggaacacccagcctctgctgagtttgttttaaagggagaaacagaagagctccaagctaatgcctgcaccaatccagctgtgcatgaaaagctgaagaaatgaattgtttctgagaactatagtaatatggcttggatatctgatgttttcaaatacaaaaatgtacaatttatcctttgagagagaatcatgaagaaaagaaggtcaataaaaagggctaaaacctgaaaaaaaaaaaaaaaaaaa

SEQ ID NO: 117437 - DNA, 1000 bp, Homo Sapiens
attcaggaatttataattgcttcttcatactggagtgtatattcagagacaagtaacatggacaaactattgccacattcctcagtgctcacttggaatacagaaattcctggaataactcttgtgacagaagacattgcattgcctcttatgaaggtgctcagctttaagggctactgggaaaaactgaactccaacctagaatatgttaagtacgccaagccacacttccactataacaacagtgtggtcaggagagagtggcacaacctgatctctgaagaggtatgagtgggtcagtgagaacaaagccagcagcgaggcatagtggactggatccaggtgatgcctttaaatcataaggctggcttccatgtgcagcactcttcccaattgccagggacttgatcattgtcattactgatctcaatgggcagagatgcttctatgatctctgttctcctagggaggaaactgaaaagcagaaagtttaaggggacacacagcacattcatagtagaagtatgattaatatccatgtctcagatgtgttctcaggttacttatgtagttaaaaattgatattaaaaaatctaggtgttcccaacttagtggtcattaggggttggggtagttggagggagaatagtggacgtgactcactgtccaggggtgacccagggaaatctttgggggtgatcgaagacttctatgtgttgattgtggtggtacattgtgggacatgaatctaaacatgataaaatgacatagaatgacacacacacattgtgccaatgtcaatttttgattttgatattgtgctctagttaggtaagatataagcactgaggagactgggtggagggtacattgcatctctctctagtatcgctgcatgtagattagtgttgttgtgtgtagtatatagttgactcgcagtttcctgtgaatctgtaattgtttcagaataaaatatttcttaaaactttaaaagaaaaaa

SEQ ID NO: 117438 - DNA, 1000 bp, Homo Sapiens
cggggggccgtggcctctgtcactttcgatgacttccataagaactcagcccgcatcattcgcactgctgtctttggctttgagacctcggaagcgaagggccccgatggcatggccctgcccaggccccgggaccaggctgtcttcccccaaaacgggctggtggtcagcagtgtggacgtgcagtcagtggagcctgtggatcagaggacccgggacgccctgcaacgcagcgtccagctggccatcgagatcaccaccaactcccaggaagcggcggccaagcatgaggctcagagactggagcaggaagcccgcggccggcttgagcggcagaagatcctggaccagtcagaagccgagaaagctcgcaaggaacttttggagctggaggctctgagcatggccgtggagagcaccgggactgccaaggcggaggccgagtcccgtgcggaggcagcccggattgagggagaagggtccgtgctgcaggccaagctaaaagcacaggccttggccattgaaacggaggctgagctccagagggtccagaaggtccgagagctggaactggtctatgcccgggcccagctggagctggaggtgagcaaggctcagcagctggctgaggtggaggtgaagaagttcaagcagatgacagaggccataggccccagcaccatcagggaccttgctgtggctgggcctgagatgcaggtaaaactgctccagtccctgggcctgaaatcaaccctcatcaccgatggctccactcccatcaacctcttcaacacagcctttgggctgctggggatggggcccgagggtcagcccctgggcagaagggtggccagtgggcccagccctggggaggggatatccccccagtctgctcaggcccctcaagctcctggagacaaccacgtggtgcctgtactgcgctaactcctgattaatacaatggaagtttctgggcaaaaaaaaaaaaaaaaagtttcca

SEQ ID NO: 117439 - DNA, 1000 bp, Homo Sapiens
cattaaaatgaatttctttttttttaagacagagtttctctctgttgcccaggctggagtgcagtggcgcaatttcagctcactgaacctctgcctcccaggtcaagtgattctcctgcctcagcctctgagtagctgggattacaggcacacaccaccagccagctaatttttgtatttttagtagaggcggggtttcaccatgctggtcaggatgttctccaactcctgacttcatgatccacccacctcggcctcccaaagtgctgagattacagacgtgagccactgcgtcctgcctaaaatgaattttctagatgattgaataacagtagtagtcctttgatagaagataatgacttggtttatggccttaatatactacttaattacttaagatgtttattaatagaatgataaatgtacagagtaacctataagcatgacatacttttgctttcagtagtttcatgtaaagaaaaaaacttgaaaatagtaatacctgagtacccatgggaataatagacactggggaggtagggtggggagcgggacgaagagctgaaaaacttacctactggggactgtgctcactacctgggtgacaggatcatacgtaccccaaacctcaacatcacacagtatactcagctaacaaacctgcccatgtgtttcctgaatctaaaataaaaatcgaaataatttttttaaaaaagaaaaagacaatagtattacccatgggacaaaatttgtactattagcaagaatcattttgtgtctcatttagaaacaatttgacttttgttccagtgtttaaactttgacaaaaatggttttgaatagatctttataacctgatgcctaaatacaagattctctgataccttcatttaatatatcaatattggcctaaaacgtattctgtaaagcttaaattggtattaactatgatcatcttgatgtctatgatagataataaacaaggtcatacataccttaa

SEQ ID NO: 117440 - DNA, 1000 bp, Homo Sapiens
tcagcttactgtaacctctgcctcctggattcaagtgttagtagctgggattacaaaagcatgtggccccacgcccagctaagttttgtatttttagtagacatggggtttcaccatgttgcccaggctggtcttgacctcccgacctcaagtgatctgcctgccccgacctcccaaagtgctgggattacaggcttgagccaccgtgccaggcctgttttgtttgtttttgtagagagatggggtttcgccatgttgcccaggctaatctcaaattcctgagctaaagcgatctgcccacctcggcctccgaaagtgctaggattacagatgtgaaccactgtgcctggcctgtttgtttgtttgtttaaaacatttctccatcactcattccaggtcccagagcaaactctctctgctctcggagcctgtgacactggctatgtgctccacagtttcagtcccaggtcatactctccaacagttttcagagctccatatatatgtagatgccatcctttctaaaaacttctcacgacctcctggaatattcctattgatctcattttatttagcatcagctcaagaaactaagtcttagtgcacagtatcacaacaaagaaaaagctttgtttttataactggtaaaaacaagaaaagattctcatcaaaatgaaaatataaaattaatcatttctcaccaaagagtatgcctgggagcctccagctgttaaaagacaatgctattactacttcttatcaaaaatctgtaatgccctgtgatttttatgatacttcttcaatacaaagtgttaatatgtgtcatcagtataataacaaccaacaaaatgccactttcagaaaactgtatgtaaattttttgtaacaatgtaaaaaagaaatggggagtaagtgttcacatcattaaaaggctttgaattcatggaaatacaaaaaaaaaaaaaaaaaaaaaaaaaaaaaaaaaaaaaaaaaaaaaaaa

SEQ ID NO: 117441 - DNA, 1000 bp, Homo Sapiens
actgagtcaaaaaggtgaaaaattatccatttcctatgcgttttactcctcagagaatgaaaaaaactgcatcccatcacccaaagttctgtgcaatagaaatttctacagatacaggtataggggctcaaggaggtatgtcggtcagtagtcaaaactatgaaatgatactggtttctccacaggaatatggttccattaggctgggagcaaaaacaatgttttttaagattgagaatacatacctgacaacgatccggaaactgctcctcaccactcccgtcatgcctgctgtcggcgtttgaccttccacgtgacagttcttcacaattcctttcatcattttttaaatattttttttactgcctatgggctgtgatgtatatagaagttgtacattaaacataccctcatttttttcttttcttttttttttttttttttagtacaaagttttagtttctttttcatgatgtggtaactacgaagtgatggtagatttaaataattttttatttttattttatatattttttcattagggccatatctccaaaaaaagaaagaaaaaatacaaaaaacaaaaacaaaaaaaaaagagggtaatgtacaagtttctgtatgtataaagtcatgctcgatttcaggagagcagctgatcacaatttgcttcatgaatcaaggtgtggaaatggttatatatggattgatttagaaaatggttaccagtacagtcaaaaaagagaaaatgaaaaaaatacaactaaaaggaagaaacacaacttcaaagatttttcagtgatgagaatccacatttgtatttcaagataatgtagtttaaaaaaaaaaaaaagaaaaaaacttgatgtaaattcctccttttcctctggcttaatgaatatcatttattcagtataaaatctttatatgttccacatgttaagaataaatgtacattaaatcttgttaagcactgtgaaaaaaaaaaaaaaaaaaaaaa

SEQ ID NO: 117442 - DNA, 1000 bp, Homo Sapiens
tgctctgctagaaccagtttttccaatcgcatgtcatcgactctgtgagggtccagatttttcaacagatttcaattacaaacccccacagaacataccagaaggctctggcatcctgctgtttatcttccatgcaaactttttgggtaaagaagttattgctcggctctgtggaccgtgtagtgtacaagctgtagttctgaatgataaatttcagcttcctgtttttctggacagtcattttgtttactcattcagccctgttgcaggtcccaataaactcttcataaggttgacagaagcaccctctgccaaggttaagttgctaataggtgcatacagagtgcagctgcagtgaccaaacagaagggactgggcggagttctcttcagaccgattcctatactctctttgacagcagtttggaattcttctagcacatctatgtaaagttttgtctgtaaacctcttgcagttaagcctgttgtctgttgtagtctgtaagatgcgacatagctgtgtctgtgccagtatgccggaatctcagtgcagtgtccagactgcgtatttcagtttttccacaatgtggatagtacatatgaggattatttaagaaaattaaagacttcactttcttttttctggagacggagtttcgctcttgttgcccaggctggagtgcaatggtgcgatctcggctcgctgcaagctctgcctcctgggttcaagtgattctcctgcctcagcctcctgagtagctgggattacagacacccgccatggcacccagctaattttgtatttttagtagagatggggtttatccatgttggtcaggctggtcttgaactcctgacctcaggtgatccgcccgcctcggcctcccaaagtgcttggattacaggcatgagccaccgcacccagcaagagttattttcttaacttgaaattttctactagccctggtgaacttctgtgcttaaaaaaaaaaaaaaaaaaa

SEQ ID NO: 117443 - DNA, 1000 bp, Homo Sapiens
gccgcctggcaccctgcagggcaccaagctacctgtggagccgaggaaaaggtatgtgtatgtgtggcactgcccccagggaccaggcctagagactccgcttgttgcagacaccagtggagcctattttcgccgggaaggattaggtagcaactacctaggtggtcgtagccccactgagcaggaagaaccggacccggcgaacctggaagtggaccatgatttcttccaggacaaggtgtggccccatttggccctgagggtcccagcttttgagactctgaaggttcagagcgcctgggccggctattacgactacaacacctttgaccagaatggcgtggtgggcccccacccgctagttgtcaacatgtactttgctactggcttcagtggtcacgggctccagcaggcccctggcattgggcgagctgtagcagagatggtactgaagggcaggttccagaccatcgacctgagccccttcctctttacccgcttttacttgggagagaagatccaggagaacaacatcatctgagcatgtgtgctctgcactggctccactggcttgcatcctggctgtgttcacagccttgtttgctgcttccatcttccccagtactgtgccaggccttctccccctccccagtgtcctctcctctcaggcaggccattgcacccatatggctgggcaggcacaggcagtgaggccgaggccaatagcgagtgatgagcgggatcctaggactgatctgtagcccatgctgatgtcacccaccagggcaatccatctggaggcctgagcaccctggcccaggactggcttcatcctggcactgaccaggaaagactgcctctgaccctcttagcagacagagcccaggcatgggagcactctggggcagcctggctcaggtttattgattttcgtctgtttaccctatccattaatcaatacatgtaattaactccttccctccaaaaaaaaaaaaaaaaa

SEQ ID NO: 117444 - DNA, 1000 bp, Homo Sapiens
gctctgttaccagccttttggtgtgtctttatgttcatttggagagtcagggcgaaagacaggtgatgtagcacttctgtttttaataattattgcttaaaatacctattaatagttttgggtcatttaaagggacttgaggaagctacccaggattacagaagagtgtccacctaacaagatggtctggcagtttcctagttttgtatctggttcaatagaaatatgtgaaagtggtaatgtcatcatttgatgcagagtccgggtttctctataataaatccctttgccaaatgcatgagttgcagacttgctactggcaagagtgaagcaagtgggtgagtaaaactattttgacgtgggagcgttttcagataggagtttagtcttgacgaaagtgtccgtgcaggaattggactccgaggagggttacagtatctcctgacgggacctgccactcgcatctgggcaatgttgacatttgaggtggcaggcaggatgcctgccttctaatatatttgggtgagtaactgagccagccaagggaaggttgaatgattaaatcagaaatgggattcttggtaaactgaagacttttatttgggaatgaaaaaccttaaaaaaatctcttcatcgttgaactgtgcattttccctgcattttttcccaacaaaattttgttgggggttatgttactgaagaatgaacagatgagtaagtggaggtgttatgtaaaggcatattgtactcgaaatctgaagacctgcagcagatttaaattacaactcttgttataactttttaaaagattgtgaaaatatcaaaatataaatgaatcaagttttaatatactgtatgatgggtggatgaggctgtccattgtaccatttgtttgaattctcaggcatggtttggcagtgcaagaattctgtaacattaacaaattcaataaaaagtaaatatatggaaaaaaaaaaaaaaaaaaaaaaaaaaaaaaaaa

SEQ ID NO: 117445 - DNA, 1000 bp, Homo Sapiens
gttctgtgatcatggagaaatacaaagtcctattgattgcttcttctatagccttgtagagtttctagagagatgtatttatgagggtgataactagcccaggattgatttctttcctaaagtccctagtgacatgattgagcagtaaagaacggccaaatcacacagtcagctaaaagcactgtggggaagagagtgtttataattatgttatttattgctggatgctgagaatggtctgatattcgtgctacctaggcaatccattgacatttctccaatcagagcatgtggaccttggagccaggcatgctcagagaagcctaggtgggctaccatgaccccgaggaagagcaggctttgttttccatcagcacgttgggggccctgccctgaatggtcaatttttcacatatatatctctctatttttttaatcaaactctggtctcactgccttatctcacaccaactctgtttcctcattgccccctgagatggcctgtcttctggggtatagcttggatgtcttcttggatggttctgcttagaatgagtgtcaaggaggaaagagagggagatggaggatgtgtttgtgcgcctgtgtgtgtgtgtttgtgtgtgtgtgtgtgtgtgagagagagagagagagagagagagaccagcatcttcaagagaagtattctgcttatacaaaatccttaacacctcatggtgttattcttcaccatgtttatatatatatatatatatttttttttttttttagaattttctacccttggcatgaggggaaatgattgatattcaagcaagttctctaggaaaaaaaaaaacttcccaactcagatttctgtgtcagctcagaatgtatctttttttcatgctttgctctttggatttataactctgtttagactattccatacattttaggtatattttgtgccttcagacactgcaaataataatcagcatttggattaaagttgtttaataat

SEQ ID NO: 117446 - DNA, 1000 bp, Homo Sapiens
cagcctgggagacacagcgagactctgtctccaaaaaaaaaagtgctttttgaaaatgttgaggttgaaatgatgggaaccaacattctttggatttagtggggagcataatagcaaacacccccttggttcgcacatgtacaggaatgggacccagttggggcacagccatggacttccccgccctggaatgtgtggtgcaaagtggggccagggcccagacccaagaggagagggtggtccgcagacaccccgggatgtcagcatcccccgacctgccttctggcggcacctcccgggtgctgtgttgagtcagcaggcatggggtgagagcctggtatatgctgggaacagggtgcaggggccaagcgttcctccttcagccttgacttgggccatgcaccccctctcccccaaacacaaacaagcacttctccagtatggtgccaggacaggtgtcccttcagtcctctggttatgacctcaagtcctacttgggccctgcagcccagcctgtgttgtaacctctgcgtcctcaagaccacacctggaagattcttcttccctttgaaggagaatcatcattgttgctttatcacttctaagacattttgtacggcacggacaagttaaacagaatgtgcttccctccctggggtctcacacgctcccacgagaatgccacaggggccgtgcactgggcaggcttctctgtagaaccccaggggcttcggcccagaccacagcgtcttgccctgagcctagagcagggagtcccgaacttctgcattcacagaccacctccacaattgttataaccaaaggcctcctgttctgttatttcacttaaatcaacatgctattttgttttcactcacttctgactttagcctcgtgctgagccgtgtatccatgcagtcatgttcacgtgctagttacgtttttcttcttacacatgaaaataaatgcataagtgttagaagctcaaaaaaaaaaaaaa

SEQ ID NO: 117447 - DNA, 1000 bp, Homo Sapiens
cttatcaacctgggtccctcacacttcgccagttgcgtccccgtggacagtcatgagtctagaggaaaggggcatctggtctcaggcccgtgctctcgggtggcctccacctgctccctttctcctcactggcctttctttccgtctagcctcctcttcaggaaatgtcctgactctcctcagctcccccttcacccctccttgcccgcctaccctccctccagaatagcccctcacccttcttccccttctagttgatccttttcacctccctgatccccttcatttcttcaccgcggttcctcgtcataggggttctcactctgaactttccctctctactacccatggcaggaacctagtacaggtctcccacccagggccttccaccctcggctcctgtgctgggagaaacttccaggcgtggacagcccagcctgaggcattccagtgctggggcaccgtcgcctaacctggtttctagctttgccctcactccccggaaaaactgacactgacacaggggccctttccttgcccctttagctggtacctcagtggggaggcttccttaccaagaatgagttcctgaaacccagggccagagacaaggacaacttaggggaagacggggttttcggtggagccaggggcaaatcttaatgggaccagtgggggataccccagagcccatggcctgactgcacagcctgcctggaggatgggtgcgcagctctgccctccctgaggcccaggactatgccagaagcgatggggtaccgtgtaggggagccaaggccagtagtttgggggtaggagtcccctagagtctcagaagactgggctctttggagtacagggtccccggcctctcctttaagattctctccccagctggaaggccgatgactgggtggtcgggagggagacccagctctcctttctgtcccgtttgcagcactggttttgtttccttaataaatttttagttatgaaacat

SEQ ID NO: 117448 - DNA, 1000 bp, Homo Sapiens
aaaggaacacgaacaaaagatgcagttgctattacatcatttcaaagaacaagatggagaaggcattatggaaactttcaaaacatatgaagataaaatccagcagttggaaaaagatctttatttctataagaaaaccagccgggatcataagaagaaacttaaggaactggtaggggaagcaattcggcggcaactagcaccatcagagtatcaagaggctggagatggagtcctgaagccagaaggaggaggcatgctttcagaagaattaaaatgggcatccagacctgaaagtatgaaattaagtggaagagaaagagaaatggacagttcagcaagcagcttaagaacacagccaaatcctcaaaagctctgggaagatatcccagaattacctccaattcatagttctttagcaccccccagtgggcatatgttaggtaatgagaataaaacagaaacagatgataatcagtttacaaaatctcacagtcgactgtcatcccaaattcaggttgtgggaaatgtgggacgacttcatggtgtcacacctgtaaaactgtgtcgaaaagaattacgtcaaatttccgccttggaactatcattgcgacgttccagtcttggagttggcattggatcaatggctgctgattccatcgaagtatctaggaaaccaagggacttaaaaacttagacattgaataatagaacttttagtagatatgtaaaaagattcctttttctaacctgttaaaaactaaagctcaagttcactacctctttcctcagaataaaggaagaaggggaggaaggaatccctaattcttttatatgctatagatgtgtacatcttctatatatatttggggagttttagtttatattcccatagtaatcaaacatgttttccaatacttgataacatttaaatatttataaatacgcttaaatgtttttccaggcatatttgaagattaaaactagtaatagactaaaa

SEQ ID NO: 117449 - DNA, 1000 bp, Homo Sapiens
ctggaatgtatattaccaaatgggaatttccattgtaggtttttgctagtcccacccccattttagcctaatttggcttaaacgcagtatggggagaattgttcccattccatgtgttctgaattcagctcatctcccagcatatagatatatcctcctttaactccgaccagaacccttcttcctgtggcactccccacccatagaccttcagatcatctcccacaccctggatctcactctcctcttagtaacagagacactcctgaggttggacttccttgcttttctctacttccaaatcacaatttcttacaaccaagctttgtgctcccgagtaagcagggatgtactaggggaatgtaaaactgcaaacttaaaaacctgcatcttcttgaagcatcagttttacttaccaaatggtttagagtcataagatgacctatttttatataaaagttatattatagaataaaatgttcatacgcatagactgttaagataaaaaaataggaatcttgcaaggtaattcttatttgcaagtgggttatgtgttcactctcctctacctttatggtattttggtgttcacttacgaagcatacaactagaaccatatccaagcagactctgggttgctgttaacccagggcctagacttctagtgcctctgaggcagaaccaaaggagcctgcactggggaaaatcccttttcctgcctgcctgtctgcctgtgacctgtgtacgtattacaggctttaggaccagctgattgttatgcttgcaggatggttttgaaacagaaacaatacttgtttactgtaggaatcctatttatattatttttcagtcctgtgaatgctgtgaaaagatttattcctttgaggccaggaagctcccaggcatatatgcttctaggttaggattgtcctgactcactaaagatgccaggatattggggctgaggggagtttgaggtgttaaaaaaaaaaaaaaaaaa

SEQ ID NO: 117450 - DNA, 1000 bp, Homo Sapiens
ccgagaccaagggacggtccctggagcagatcgagtccttcttccgcatggggagaaggtccttcttgcgctaggtcaaggtccccgcctggagggggccaaacccccagtggctgggcctctgtgttggctacaaacctgcaccctgggaccaagaggcagcagtcatccctgccaccagccagagcacaggaagagcagtgtgatggggcctcagcagcgggtgcccctggctcgggacaggtagcactgctgtccagccacagccccagcccaggcagcccacagtgctgcacgtagccatgggccgcaggagtgcatacaaccctgcatccagggacacggccctgctgggtgacctcaggcctagtccctttcccttgcgtgaaggacacgccccacagaaggctacggggaggactgagaggacagggctggaggcagccaagtaacgtagtcatatcatcgcgctctgatctggtggcatctggctgtgcaaggaagacccggctttgccctcacaagtcttatgggcaccacagggaacatcctggacttaaaaagccagggcaggccgggcacagtggctcacgcctgtaatcccagcactttgggaggccaaagcaggtggattacccaaggccaggagttcaagaccagcctggccaacatggtgaaaccccgtctctactaaaaaatacaaaaaagctgggtgtggtggcacacacccgtagttccagctacttgggaggctgaggcagcattgcttgaacccgggaggtggaggctgcaatgagctgagatcatgccattgcactccagcctgggcaacgagagtgaaactccgtccccaccccctgccaaaaaaaaaaaaaaaaaagccagggcaaaggacctggcgtggccacttcctcctgccccagcccaacctctgggaacaggcagctcctatctgcaaactgtgttcacccttttgtaaaaataaaggaactggacccgt

SEQ ID NO: 117451 - DNA, 1000 bp, Homo Sapiens
gatgccagtgggactcatgcgccctatgagggctgcagggccagtgctgcccctcggactcctcgaggggttgggtgctaagcgcgagcctcgccgtccctgctggagccctcgcctgcctgcccctctgcctgtgctcctggcagtgtggcttcccggtgctcacctgcacagcagttaacagcagaggccgagcgggagcctctggggagcgaggctgaaacctgaacctgcccatggagacagttgtggtgagggttgccacacacagtgagggcggagcagggtggctgagggcacaggtgcctgggtctgtcccacggggcagggctttggggctgtgatgctctgggaagccagcttgggtcctgggtctacagagggccctggccccggagcccagccagctctgcctctctcagggcctggagtcctgggggagctcagccagctctgcctttctcagggcctggagtcctggatgaatcctgcaggtttttggttgcaccggcccagggaggaagcggggggtttgtcaggtgggctctcctggaggtcctcgagtggcaggggtgaggaggggattatctgaggcatctggagatgtatatcctgtggtttcccctgcccctctgtttccgatgaggtgtacggatgagtgacctgcactaagaagtgagttgccacagtgaaaatgggttggtttttgtcttcgacgctcagggtctgggcgcctcgcatttgcagtctgttgtgacagacacggggagctccgcgtgccagcctgtggctgccctgctgtgggggtcctggggccggcgaggccccttcagtcttgttctggggggacggcccactccggggagggggtgtgctgtgctgagcgctgtatccctgaatatagtttattttttctacatttgaattctgttgtagatttatgtaaaaatacattctttttgaaaataaaaattttcatgtcttctaatttaaaaaaaaa

SEQ ID NO: 117452 - DNA, 1000 bp, Homo Sapiens
ttgtctcctgtagacccagtggaacccataagtaattcagaaccatcaatgaattcagatatgggaaaagtcagtaaaaatgatactgaagaggaaagtaataatccgccacaacagacaatgaaataagtaggactgagtatttatgtgaaaactctctagaaggtaaaaataaagataattcttcaaatgaagtcttcccccaaggagcagaagaaagaatgtgttaccaatgtgagagtgaagatgaaccacaagcagatggaagtggtctgaccactgcccctccaactcccagggactcattacagccctccattaagcagaggctggcacggctacagctgtcaccagattttaccttcactgctggccttgctgcagaagtggctgctagatctctctcctttaccaccatgcaggaacagacttttggtgatgaggaggaagaacaaataatagaagaaaataaaaatgagatagaagaaaagtaagaaccaagattcatatgaagtgatattagattgttccttttacaaaagtgtttagcttcaagactggaaagggaatatgagtgtaagtttactatatgtaaagctaagatgtggatttacaggaagaaccctggtttgaataactgatctgaaattagtagttacctgtaaatggcagatcttttaggaaaataagagaaaggtaagggctcttttgaataaactgctgttttatttgtggcacaactgatcaatcttggaaattctttaagtatttttaataagaaatgaattatcatttcttgccagaatttgctaccttaaggtgattgggaaaattctgttgcaagaacattaacatttagtatgactcctttttactgtattcttgcagttaataactgcagctattatgttaataacaagttgtttgtattttatttttgtttataccagtcttaaagatccaggttctgaataaaaaaattaattgatacaaaaaaaaa

SEQ ID NO: 117453 - DNA, 1000 bp, Homo Sapiens
agcatcccggaggatctagagagccagaaggccatggtggcatttttcaactcagctgtagctagtgccgaggaggagcaggcacggctatgtgggcagctgaaggagtgcactgccagcgcctggctcatctgttggcctcggcccagaaggaacctgaggcagcagccccagccccaagaactgggggtgatcccatgtgtggggagacccaccaggccctgcagggggccatggagaagctgtgggagagtacatcgcactgtaccagagccagagggcagtgcggaaggaggaggagtgcatcagcaggctggcccaggacaagggagaggtgaaggtgaagctgctggagctggcgtggcttgtggacgactgcaacaagtggcatagcagattcctggcagctgcccagaaccctgctgatgagcccactccaggggcccccgccccccagtagcttggggctactgacaagccagggtagtgagtagagtcctcaggcacagtgggcacgcaggagcaggggagggctcccacagcaccctgcctccctctctccaaagatctttgtgaggtgagccttgccagcagtggggagtctgcacaaggagaggcggggaagcattctccctgtgacaaccccactgagcagcagatcatgcaactgcttcatgagatgcagaacctccaggagcacccaggcttgggcagcagcccttgcattccttttttgtaccagactgatgagaacaatgaggtgaagatcaccatcatctaaaagccggccactgtcagcaaaacctggggaagtggggctggaggctctgcccctaccatgtccctaccaccccttcccagtcaaccctttaccctcacagtagcaagcataagacccctgtctaatgtggggagacaggtggagatgaggtgaagatcaccataatctaaaaggccactaaataaaaaaataaaaaattttaaaaaaaaaaaaaaaaaa

SEQ ID NO: 117454 - DNA, 1000 bp, Homo Sapiens
cccccagacaagagttgatggagacccagggattggacaccatctcccaaccccagtactcctgctctccggtgccacctcaccttctttggcttcttccctcttgcctccttctgttctttctgctctcccctcttttccctcctcctcacttccctctggctagcccacccctgcactctctctcattgccgctgccactatcacctgtctctctgccagctgatgtgccctgttgccccccaccccatcccgcacagaaccatccctgcattccacaggggactcgggcaagggtgccgaagatagacaagaggcacacagagacagaccaactggcagccaggcagccccagaggagagagacattcagacagaggaaagtctccctgcccctcattccttccaagatgagaaaaacttgccgccaccccccgacactgatgccagggaggtgggaggaagaagtgggaaatttcccttcccagtacccccaagaacgtctgagccttcaatgttgaattttttctttattaaaattacttttatcttataaaatcaactaatcaaaaatgatatagacgacagcactggctctgtgaaggtggcatctttctgggcaggcaggccatggggcatggaggagggtgcaaagatatgggttgctgtcttctggcctccagctgcatggaggccggcccagggtctagggtgtgcactgggcaagggcagggcggcaggtgtcaggccggcttggacaatgaaaccctgaccttgctgcattccttttgcttccaccaccactagcttctttggaatcttggggtgggggtcatctttggggattatggctgccacccgggatttgagtgtagggagtgtgggagcagccttggcagatggggcacccgtgccctgcaggtgttgacaagatccgccatctgtaatgtccttggcacaataaaaccaaatgtcagtttcaaaaaaaaaaaaaaaaaaa

SEQ ID NO: 117455 - DNA, 1000 bp, Homo Sapiens
ccggctgaccgcagccaggagtccagcaccctggagggcggcccctcggcccgcaggcagcggtggcagcgggacctcaacccagaacctgagccagaatcggaagagccagacggaggctttaggacgctgtatgcagagctgcgcagggagaacgagcggcttcgcgaggccctgaccgagaccacgctgcggctggcgcagctcaaggtggagctggagcgggccacgcagaggcaagaacgcttcgctgagaggccagccctcctggaactggagagattcgagcgcagggccctggaacgcaaggccgcagagctggaggaggagctgaaggccctgtctgacctccgcgctgacaaccagcgcctcaaggatgagaatgcagcgttgatccgcgtcatcagcaaactctccaagtgacccggagggactttcccgcacccgtatttatacagctgcttctgccacacgcaccccttcccccgtgtgaacacgagtgacagggctccgggggaagtctcagagaagccatagcccccctgggacctccggactgggaggggagcagagtccccaggagccgagggggccacccgaggccaggatggaggtgggaggccgagccaagcagggggacgttgccagaggggaccagggccagagacgggaccaggaaggaactgaggaccaagaagtgcaaggatcagtagccaggaccagagtggccgcctggaggtccccatctcacgtgtgatgccaccccgtcacccctcccctcctgagcagggatccaagaatgtgccaagagtcccgccagcctcagccaggtgggcctgtatatagggtccatgtgcaatagggagggacgtcttctattttttgctgccccctccccgcccactgtctggggcagggggagaaggtattttcgagataaagcacaggcaccacaaataaaagtcgtgaagttgccactcaaaaaaaaaaaaaaaaaaaa

SEQ ID NO: 117456 - DNA, 1000 bp, Homo Sapiens
gcatcccccggaccatcccccctgactgcatcatagtcgactcagacaacttcaagttcgtcgtggacccatacgaggaggcccagggcccagaaatgctaactcctgtctccatcacccaagacattttggaaagattccaagacacattcacgtcgcgatgggcgggacatctgggaagcaagcactttcccagccaggcccagtgggagcaggccctgggcagctgcagcggtttcttcttctatggaatggagagcttcctgtcccatatattagtggagagattggtcgccatgaacttgcaagagtgccaggtggcagtcctgctggacctggcgcggtcctaccagagcttgaagaggcacatggagagcgtggagcacaggagatctgttggccgttgggaagccaattggagaaacggtgcgtctccttcagaagatgagtggcgacgaggcggtgaaccaaggcgaggcttctcagaccttgaaggacaagctgctgctgctccaaagctccgagctccttcccaccacgctcaacttggtcctgtatgggctgccgcaccaagccatcgggtagtgcaggcctggacctgcctcccatcagctgctggggccccagcacttgcctctgcccttggctctgcccctctgccaacccatccccacctcccggctcccatccccagctcccagctcgctctccccttcctgggcctctccccagcccttggtgcagcctcagccagggaccctcccccagcgacttcccgcaaggcagccgcctggacctcgagctctgcctgcctgtgtgcgccatggggtctgcgtcggggctggagctgcgtctcttcccggggccaggacaagggcggcctccccttggcggcgctggtgctgagttgcttagaccagaagactattcagaccgtgagcctgtttttgatttgagtgttccactaaacaaacaacaaaagccaaaaaaaaaaaaaaaa

SEQ ID NO: 117457 - DNA, 1000 bp, Homo Sapiens
ctgtttaatgaagtgtcccgagcaagagaagcagtcctggatgcccactttcttgttttggcttcagatttgggcatagagaaagcaaagcagctgcgctcagacctgagctcctttgacatgttaagatatgttgaaactctactcacacatatgggtgtaaatccgctagaagctgaagaactcatccgtgatgaagatagtcctgattttgaattcatagtctatgactcctggaagataacaggcagaacagcagaaaacacctttaataaaacccatacattccactttctgttgggttcaatatacggagagtgccctgtgccaaagccacgagttgatcgtccaagaaaagttcctgtgatacaagaggagagggcaatgcctgcccagttaagaagaatggaagaatctcatcaagaagcaacagagaaagaagtagaaagaatcttgggattgttgcagacatattttcgagaagatcctgataccccaatgtccttctttgactttgtggttgatcctcattctttcccccgtacagtggaaaacatctttcatgtttccttcattatacgggatggttttgcaagaataagacttgaccaagaccgactgccagtaatagagcctgttagtattaatgaagaaaatgagggatttgaacataacacacaagttagaaatcaaggaattatagctttgagttaccgtgactgggaggagattgtgaagacctttgagatttcagagcctgtgattactccaagtcagaggcagcagaagccaagtgcttgatgctagctgaaggactcaaatggatagtgaagtccaaaacggaaagcggcatgtattgtacatattgtatgattcaacatttttaaaggcagattgtttttagtaaaatgtagcttttgatagttaataaatttgtcatggttgtctttgattaaaggaaactcaccgccatattcacaaataaaaaaaaaaaaaaaaa

SEQ ID NO: 117458 - DNA, 1000 bp, Homo Sapiens
cagcccccttccacctggaccgtggccacacttttttggttatttagtttgtcacagtcttggggacatgggatcatttgagcttaaaaaatactgggggccgggcacagtggctcacacctgtaatcctaacactttgggaggctgaggtgggcggatcacttgatgccaggagttcgagaccagcctggccaacacggtgaaaacccgtctctacaaaaactacaaaaattagccgggtgtggtgactcacagccgtaatcccagctactcgggaggctaaggtgggagaattgcttgaacctgggaggcggaggttgcagtgagccaagatcacgccactgcactccagcctcggtgacagagcaagactgttttgaaaaaaaaaaaaaatgggaacattttaaatgattttcacctttattatgcatctattttcatggggtttcccgatatctcactgtccagtcccttcatttggggaatgtgttggattagggaacagggttgaagatttgaagtttagactaaagagctgggaacagcttcagagtcaggctcagcctgactcatgcttgacacccccacgcccagggagggttgggggatgtgaggagggcagggaaatctgagagcctccttccagccccataacgctgttaacaagtaggaaaaattaaagctcccggccaggcgcggtgactcacacctgtaatccgagtactttgcggggctcaggtgggaggattgcttgaggccagcctgggcaacatagtgagacccccatctctacaaaaaatacaaacattagctgggcgtctgggcatggtggcacacacctgtagtcccagctactcgaaaggctgaggcgggaggatggctttaccaccatgtcaaggctgcagtgagctcatgatcataccactgcacttaacttggcaacagagcaagaccctgtccctaaaataaataaaaggaaaacaaaaaaaaaaaaaaaaaa

SEQ ID NO: 117459 - DNA, 1000 bp, Homo Sapiens
cctgggctacaaggacctggacctcatcttctgcgccgacctgcgcggggaaggggagtttcagactgtgaaggacgtcgtgctggactgcctgttggacttcttacccgagggggtgaacaaagagaagatcacaccactcacgctcaaggaagcttatgtgcagaaaatggttaaagtgtgcaatgactctgaccgatggagtcttatatccctgtcaaacaacagtggcaaaaatgtggaactgaaatttgtggattccctccggaggcagtttgaattcagtgtagattcttttcaaatcaaattagactctcttctgctcttttatgaatgttcagagaacccaatgactgagacatttcaccccacaataatcggggagagcgtctatggcgatttccaggaagcctttgatcacctttgtaacaagatcattgccaccaggaacccagaggaaatccgagggggaggcctgcttaagtactgcaacctcttggtgaggggctttaggcccgcctctgatgaaatcaaggcccttcaaaggtacatgtgttccaggtttttcatcgacttctcagacattggagagcagcagagaaaactggagtcctatttgcagaaccactttgtgggattggaagaccgcaagtatgagtatctcatgacccttcatggagtggtaaatgagagcacagtgtgcctgatgggacatgaaagaagacagactttaaaccttatcaccatgctggctatccgggtgttagctgaccaaaatgtcattcctaatgtggctaatgtcacttgctattaccagccagccccctatgtagcagatgccaactttagcaattactacattgcacaggttcagccagtattcacgtgccagcaacagacctactccacttggctaccctgcaattaagaatcatttaaaaatgtcctgtggggaagccatttcagacaagacaggagagaaaaaaaaaaaaaaaaaaaa

SEQ ID NO: 117460 - DNA, 1000 bp, Homo Sapiens
gaaatgaaagcaagcctgaaaccaagcaattgagagtgagaaagaggagagagactattctccaaaccttttttgttttgttttgtttccgatgtttacacatgttgcctgagctggttaaccacatcggcagcctcagctaccacaacatactgactaaatgatgatatttactcaagttcagtctgcagccaaaaccattagggtgtgcattgcagactgttttgttgtcttttttttttcttttttcctttttttttaagtggaggggaaaagaagagataaacaaggaatattttgtcaaacagtacacaataatttaaagagaatgtatttcttttttgcatttaatggcctcagacatttctttcatcagtctaaaagttagaaatatccctttattttaacttttatgtcgtttccatttttcatgtttttgtaattattttttctatgttcacatcagcattcacttccgttaaatttgccaaaggaaactgttaatatgtttctgttgttattattcctgtaggatttattgtacctcacagtatttattgtttcccaaaataagcatcattagttggggattcagtatttttgttgtgaaaatttcagaaacaatagattcttaaagataagctagctatgtctaggagctttatcttttcacctccttcagaggatgctatggggtccattttaattcttcatttgttctacggggaggaaagaccaaaagtatttgcagtacaaaagaaactatatcaaacactatgttaaatgacaagtgtttatggtaaaaagctgaggaattagtaataatcgtttttgttttcttgtactttgaattccccaaagtcttaattgctttattttggtgttgtgttaaattgaacagacagatgttttcctttgttttataccatataagactctgtacagtatgtttgtgaaagattgaactagaataatgaaagtttgtttgcaaacaaaaaaa

SEQ ID NO: 117461 - DNA, 1000 bp, Homo Sapiens
attgtcacatctaatgctaggcaccagaaaccatttgagccaggagtgtgaatgaataattccagagacactttagacattttttaatgttttatatgaacattttacatttgtgtgattgccttagatattaaattttcctagtgctgataaaaacagcaacattcataacttattttatatattgttccaaagaaaagaatttgttttaatggtttcaaaataactgcacctgaatttgtttatgtgccttaagttctctagtgctatttcaacttttttttcaatctaaatgaagcttaccttagataaggttcatatttgtttcctatagagtaaataaacttccccttcttaaattgtgtaataagcaccaacgtgtggttgcttggcagaatgagaatgttaagggagattgttggatgtttggagtttcattatattttttgtttttattttttgatacctaggtgctttttaaaatattcagacaaatatctatcttacattgattaaacccgtgtaaattcatttgcagtatctacatcgaatgtcaaaaaagtatacttatttttgttccatacttatgtacaattttttccctcttcaggctttttcatttacctttttgaaaaagcacttactctccccttccctatcacccctcccccaaggtttctttatttaaatttttattgagagttgttggagctctaagacaatacaaatttagagttgaacaaaagtataatctgctttacaactagtatagacctaaggtcatttgctttcaattagaggctccagagtcttcatagtggaaagaatgctttgtatttaattgttcttagttaagttgtagcacgtgaatacttacttacatgttttgtttaaatatacttcttgcatagtttaattttttaaaagttgtatctaataaaatgtcttttaaccattattacttgactatatggttgtattaaattttgtttacgaaaaa

SEQ ID NO: 117462 - DNA, 1000 bp, Homo Sapiens
gggccacaagcctacagccactccaataaagatgccgtacaatgaagctgagaacaagagaagttatcacctgtgtgacctctgtgatcgaatcatcattggggatcgcgaatgggcagcgcacataaaatccaaatcccacttgaaccaactgaagaaaagaagaagattggactcagatgctgtcaacaccatagaaagtcagagtgtttccccagaccataacaaagaacctaaagagaagggatccccagggcagaatgatcaagagctgaaatgcagcgtttaagagacatgtccagtggcctttggaaaggtggtggggatccagttcaggagggaggggtatgtttgtctcccagtctgggcaaaggagtgctatgcggaattctctgcatagcagaaaagctcccaccattttcttttgatgtggttttaaagtctcacgttctctataatagaaacagcaggtcttgtcagctccttgtgtggctgatgtgtctggaaatgatgtagttcaggaaagcattttttttttctttgaaccttaaaggttctattattaaaagcagcacagattccacatttttatacatgaggatcttctttgtggtgaataccaggattgactgcatccctttaaagaagttttatgtccctgactctggctaaaattatctaatttccagatgcttttgtagatgactgaagtatttgtgagccacatattgggagttctagatttgagtgaatggcaggaaagggccatctccattgagatgattaagtgaaccaaactagttctcggaattctacagagaaggagggaatcagactgaagaagctgtgacataggacttgaagaccaaagactttgaaatttgcgagctgctcatgtgtgagttattatcactgctgtctttctattgagttacaaatctatatttttattgaagtttaaataaagaaaaaatttaaaaaaaaaaaaaaaaaaaaaaaa

SEQ ID NO: 117463 - DNA, 1000 bp, Homo Sapiens
gacccaggaggcagaggttgcagtgagccaagatcacgccattgcactccagcctgggggacagagcaagactctatctccaaaaaacaaaaaagataagcagctttagaatatggcgcattcaaaacagtctcagtaacaaagacattaaaagaaaacaatttactttctaattaaaattttgtgtttcttaagatcaaatcatataggtaacttcatagacctaaattaaaagtgatttttggctggactggcaacaatgttcccaatgtctttactttttaaaaaaggcttttcatatttaagcacatacctattttgtagacttacattgtttaatatttattttaatcttaatatttttacattattatattgcattatttattttttctaagttccagaataatagtgtcattattatagactatatgttttgaagtttgatattataatgggatattcattttttgttcttttcttgactcctttctcaagtgtgtgataaggtctgctgataaaatatttaaccccaagaaagtgaaaactaatataaaattagaaagacctatccaaattagacagtcaattccattaaaataagaagtgagaaaaacaatgttgggcattgaggtgtaaattttgcccagatgtatacccagtgtgaaatatcttctaataaaaatatatttggctcttatccctgcacatgtagaggcataaaaattggtaaacatgtcccgctgtgtagaactttaaaaaaaaggcatttttgaaagtgttgagtggcactgataactggtgaagcctacagccatccgcccaaaagtctgttctgatggcactgagttttcattgttctggatgtataagtctgtgtgtcaggtacagctgggcccagccagcttgagtcactcttgtacaagcttgtttttttctgtcttgtgaatgcacttgataatttaaaaataaaaatatctgtttctctgcaaaaaaaaaa

SEQ ID NO: 117464 - DNA, 1000 bp, Homo Sapiens
aaaagcagacggataactgatgtgaattggacagtttctattgcttttccttttttccatcccttccctaccatcaaaagcatacctgctctaattaaaaaaaaaaaaaaaaaaaattcaagttcagctgatttgttggtaagccgcactagaaaggtatacatagtaatgtatatttatttacatactgaagtcctaaatttatattagaaaaatgtaaataatcgggggtaaacatttttgaagatttattctttttgtgttgctggggtgtatacatttatgtctttgtgaaatacactggtggtgtccttcttacaaaacttttgaaataaaaaaaaaactcaaatcttcactgtctgtgaaatccccttcagtcttttcagattgcattgactgtcctcttgatttttcatattacatgtcaaattacttttgctatcataaataagctccaaagtcccccatttaatttttttttaattttgtgtatgatgggtttcagatctggcttttgttaacattttggggcttttttaatcttttcaatctggcgtattgctgtttgaccttttgcaaggtacttaattgctcttttgttatagggtatggatcattgtcagaacttgattggaggggtttaaagagattgtgtctgtttaaaatcagtatgattcagagaaggaccaaattatatgaatgtcttacaatggaatttacttgttactgatttttttgttctattgtaccactattttttgaggattttgcacagtgtaaaatgacataatcatagattgctatggtttaggctgtatatacagtgaaaactatgggttttaaatgtttggggaaattcctatggaaaaaagagagacatgtagaagaacctctaacaaggttaatgtgcatgcccaaggtcttttgaaatttcagtgtgtaaatttccttttagcttatacaaaaataaaataatttaaaagaaaaaaaaaaaaaaaaa

SEQ ID NO: 117465 - DNA, 1000 bp, Homo Sapiens
cgttttttatatacttcaactttctgaaaaagtaaacttcgacaagttcccagcaactgcttgtttgtgcatgagtagggcttactaagtgcatagatgtttctacagtgaggtgtcctttttataaggtgcacttttggagtttttctgatgccaatctcaacattgtctttttaatactgtcaccagatattgccatttttctttttgttaaaagattatatgatcaagataaattggggtggtaaatcaggtgcctggtaatttatctctttgcacatgggcatcattttaaaaagcttgcttccactcttttctgtagaatttgacggaacacagctatttccctatgcaaggtacagccttacaaagatttctgcagtgatttgtgtgaagaagagaacgtttgtctttttcaatgaagctttgcagatcaccatgtggttgaaggttttagttgtggacacagtggtccctccttaatgatgaagatcactgccttgggcttcatggaaaacaggcccagcctggggctgcgtttggatttattgtttttattccacacttcctacttggtctctggaagttttaccacatgtaacagattcctttatatgtagtggaaatcactatttgtagaaactgtcaggtcaaaatatttaactgactgttgacatgtattttcttttttccttgtttttgttttttggggttttctgctttaagatatataccactatgtatatccagttaactgagagaattttgactctcttaataaaactgcattaagtttttgattttgtagaaattagcttttgtctaggcaactagtggttatactctgcaaatattgtaatgaatttttacttttttgatttttgtaataaaaattggtgcagataaaatgtcaaatgaacaaaccagtgttctaagagtgttactaacattttgttctaaaactgtccttcacaaattgaataaaaaactctcacactca

SEQ ID NO: 117466 - DNA, 1000 bp, Homo Sapiens
tgcagtggcgcgatcttggctcactgcaagctccgcctcctgggttcatgccattctcctgcctcagtctcccaagtacctgggatgacaggcgcctgccaccacgcccggctaatttttaatttttttgtatttttagtagagacagggtttcaccatgttagccaggatggtctcgatctcctgacgtcgtgatcagtccgcctcgtcctcccaaagtgctgggattacaggtgtgagccactgcacccgaccgatactcacatttttaaactttttttttaattttattttggtagctaggttttatattgttcttaaatttattttactctattttatttttccatcacttctttgtcccagattcatgaaatttgctgatgtccattttatgtctacttttgaactcttctctttgtgtttgttttgttcttattacaaactccaagacatttcttagaattgtctacagatttcgtgtagctacttattggtagcttcttaatttcatacttgtccagaccattagacattattacatgctctgtcttgggcctatcattaacattagcttagggattctgatttcaaagacataaagaattggcaaaactcttcttacagaacttaaaacaagttttaaagttacatttctatacatctaatacataataccttcttagccattaatgtaattcctctggataaagataatatattcaaaaaatattgggaccaaaaaatgcacttgtttcttgctcatatatatatagatgtatattttttttaatttcttgtttgtttattttggttacattgaatacagatttgctgaacagttttgatgttatttttttaataaaatttgtattgttaaagtgccttggaaatttctaataaataacttcatataaaaaaaaaaaaaaaaaaaaaaaaaaaaaaaaaaaaaaaaaaaaaaaaaaaaaaaaaaaaaaaaaaaaaaaaaaaaaaaaaaaaa

SEQ ID NO: 117467 - DNA, 1000 bp, Homo Sapiens
acatggaccgcggcgagggcggcaccaccaatccgcacatcttccctgagggctccgagcccaaggtctaccttctctaccggcctggacactacgatatcctctacaaatagggctggctccagcccgctgctgccctgctgcccccctctgccaggcgctagacatgtacagaggtttttctgtggttgtaaatggtcctatttcacccccttcttcctgtcacatgacccccccccatgttttattaaagggggtgctggtggtgagccgtgtgtgcgtgtccctgctctgctgcccgcctggctgctctgtctgctgccccctccccccaggtgggtccccctgcttttcacctatctactcctgagcttccccaacaggagcaggtttgaggggccaggcctcttggaggcccctcctgcttcgttgggttctgcttccttcccttcttagctggctcaggggcttctatgggatcctggaagttccttagggacttgcccagggtcccagggccacccacacttcatctgctccctcataggccccacctccacgtcccggctgggccccagaccccagcttcctgccctccaccgggagtctgcatggttgggagtcctgggtggaggggcctttgtgaggctggacccggctcagggcaggtggaggagctgggcctcccacagggtgcccgggcagtgccatcctggtgggggagggcagccttcaaacgtgtggggtctacagtcctcaggtctaggcagggcagccggttctccacctccccatccgccccaggccccctgcctgtgcctgccttgcaccccctctgcttgggccacggtgtctctgcattgcctgcctttttgccttcacctcttttcttccccgccccctgcacattcggggtctcagcccccaggctgtgagctccttgggggcaggccctcaataaatgtgaactgctgctgccgccaaaaaaaaaaaaaaaaaa

SEQ ID NO: 117468 - DNA, 1000 bp, Homo Sapiens
tgaactgcacacattttaaatttgtatatttatatgaaatggaaatgttcatttttagattgttaatagaaattggggagcaacttttgagtatctttagtttcctgaaggacaccgaattctccattagataaaccaccaagactgttcacatcatctctctaacattgcacgcttcctttgtgtacttaagtgattctcgaaatatacagaaccaatgtatgctaaccagatgcattgtttgcttcagatccatggtgttaataccatgtatattttataaagataatttggctgtgttaaaagagaattacctgagtccaagaatgtggaaatgtatctgacaaaaaacatcaaaatcattagcaaaacataggacttagaatgttaatgtacaagttaagactaaagtttaaggactaaggttccttggattatatgacttgttaagattgccacagttccgatctcaacagtgtggggtgaaacaagaagactgtatcttcagcctttttcctataatcatggatgatttggtcttattcaaaaggaccgcacatattagtactcttaagagcatcttccaagactccagcagtgagcatttagagagtgtgttgtcttccagagtcatgaatgattttgtttagctatcaggtctactacctctaaggacatttcatagcagcatctcttgagttgcctgcatcagtgtggaggaagtgtgtcacagtgaacaaatccagggagctgataattggcaaaagaccacttttaccactcaggctctatttgtgccttagcttggttatgagtaaaaattagaattatgctgcctacctcacagaggtatcatgaagatagcatttagaaagggctttgttgtggtggggtatcttcagttagtttttaaatgggaataaatatatatgagggaatgctacacagcactcctcttgtccttgatccccaaaaaaaaaaaaaaaaaaaaaaaaaaaaa

SEQ ID NO: 117469 - DNA, 1000 bp, Homo Sapiens
tttcagtatgcagaaaataaatggaacagaggtgacacagaatgatatgataatggctgaaaggctctttggaatcctagcacatgtagcatcttctgagttaccccagtatcgtctgatttccattctgggtgatgccaggaaaaagcaatttcggtatctactagaatccaaaggaaaaaaacctggtattatcaacgaagaaaataatgacagcaaaagacttgtaggagaaaacacaaatcgtgctacattaaattatactacaagagacttttataatgaaaagctagaggaaataaaggaaaagaagaaattctgtaaaacatatatagaagaccttgtgaaggaagccacagaaatcaacatgaaaaatgaggctttgcagaagctttggccacagatgttcattgagcttgttagggatgcagtcatagaaattcgcaataaaaattcctatatgaagctctgcctacagcagataacagaccaaaaataaaaatggcctttagttacagttgattttggcagttttattttttgaaggttgaaaatatgcaggttatacatgttaaaacaacaacaacactatcctataaactagaaagactagtataaaagcattattgcccactgttctcatagctaaaagttaagaaggaaagaaggaaagcaggagaaaggaaggattaattgcctgtatgtgaggaccaaacaacctttgggaactaaacagttttcagagatggcgtggcactgcatccttggttcttgctttgattggtgccctgctatagcccaaagcacgtagtatttgctgatgattcagcatgagctgcatctacctacttttagctgataattttcagttatttccctttttattttatgtcatgatttcaaagccaaaaatatgttctttttatgagtgaagaataaacttactaacaaattagtcaaaataaagtatgtttgcctccttaaaaaaaaaaaaaaaaaa

SEQ ID NO: 117470 - DNA, 1000 bp, Homo Sapiens
cgaaatggcttatccccaccgccatgtaagttaccatgcctgtctcctccctcctacacatttccagctcctgctgcagttattcctacagaagctgccatttaccagccctctgtgattttgaatccacgagcactgcagccctccacagcgtactacccagcaggcactcagctcttcatgaactacacagcgtactatcccagccccccaggttcgcctaatagtcttggctacttccctacagctgctaatcttagcggtgtccctccacagcctggcacggtggtcagaatgcagggcctggcctacaatactggagttaaggaaattcttaacttcttccaaggttaccagtatgcaaccgaggatggacttatacacacaaatgaccaggccaggactctacccaaagaatgggtttgtatttaagggccccagcagttagaacatcctcagaaaagaagtgtttgaaagatgtatggtgatcttgaaacctccagacacaagaaaacttctagcaaattcaggggaagtttgtctacactcaggctgcagtattttcagcaaacttgattggacaaacgggcctgtgccttatcttttggtggagtgaaaaaatttgagctagtgaagccaaatcgtaacttacagcaagcagcatgcagcatacctggctctttgctgattgcaaataggcatttaaaatgtgaatttggaatcagatgtctccattacttccagttaaagtggcatcataggtgtttcctaagttttaagtcttggataaaaactccaccagtgtctaccatctccaccatgaactctgttaaggaagcttcatttttgtatattcccgctcttttctcttcatttccctgtcttctgcataatcatgccttcttgctaagtaattcaagcataagatcttggaataataaaatcacaatcttaggagaaagaataaaattgttattttcccaaaaaaaaaaaaaaaaaa

SEQ ID NO: 117471 - DNA, 1000 bp, Homo Sapiens
gcaccctgtctgccgacagcaccctgctggccatcagccgccacctccgagatgtgcgcaagatccggctgaccgtgaggggcctctctgcccctggcctggctgtgctggagggaatgccggccctggagagtctgtgcctgcagggtcccctcgtcaccccagaaatgccctcccccactgaaatcctctcctcctgcctcactatgcccaagctcagagtccttgagctgcaggggctggggtgggagggtcaggaggcggagaagatcctgtgtaaggggctgccccactgtatggtcatcgtcagggcttgccccaaagagtctatggactggtggatgtaactactccacctgcccttgggacccatcccagttttcatcattgagccccagaccctctgagcagcaccttgaagagggcagataatcagacttgaggaaactgaaagccccaggttgagagaacagaggcctagggacctccagaccattggaatcactgtttgccagctgtgtggccttggtcatatcatcagcctctgggaagcctagttcccacatctggaaataaggatgatcatagctacctcacggttacattgcaaagccttactctaaaagctcccagcctccagaggctctcaatgaagagtcaccttcatggtcgtcttcaggaacaggacggatgaagaaggggtggggttaagactcaggggcacctgagggtctgagcccccttatgagtacccaagaaggactgtctatgcatgcacacccacaagcctatacaccatttatatacctacacgcacgcaagagacgcggagagataggcgatgcagactcgcgattcaatgatcgatatgctcataaaagtgctcaattatattttctgtattttgtatgctgtattttccaagacgtatattattttactattaaagaaaaaaatcatttttttttcccgagaaaaaaaaaaaaaaaaaaaaaaaaaa

SEQ ID NO: 117472 - DNA, 1000 bp, Homo Sapiens
ggcacgagccaccacacctggccaaaaaaatttatattttttgagacaaggtctcactctgtcacccaggctggagtacagtgggttgatcatggctcactgcatccttgacttcctgggctcaagtgatccacctcagcctgcctggtagctgagacttaacaggcatctgccaccatgcttgactaatttttgtgatttttttttggtagagaccaggggtttcactatgttgaccaagctggtcttggaactcctgggctcaagtgatcctcctgccttggcctcccaaaatgctgggattacaggcatgagccactgtgcctggctggatatgaaattttttttttttttttttttgagacagggtttcgctcttgttgccagggctggagtgcaatggcgtgatcttggctcactgcaacctccgcctcccgggttcaagcaattctcctgcctcagcctcccaagtagctgggattacaggtgtctgccaccatgccaggctaatttttgtattttcagtagagacggggtttctccatgctggccaggctggtctcgaactcctgacctcaggtgatccacccgcctcagcctcccaaagtgctgggattacaggcaaaagccaacacacccggcctggatatgaatttataataccctacagtgcaacacaagaagatgcactcaaagcactgatgtgaggaagtacttgccccgtagcagctattcactctaccagtgtaaacaaactctaagctagggcaagacagcacagacacaagtatatactaaccaggggtttaatataaatacaaccagcatagaaagacccaaaactatacagaaaccaaaaccagaatgccatgtggtggaggcaaagggcagaatttctgacccctttggctcagctgcccttccccacaaataaaaaccaacaaagaggaaaaaaaaaaaaaaaaaaaaaaaaaaaaaaaaaaaaaaaaaaaaaaaaaaa

SEQ ID NO: 117473 - DNA, 1000 bp, Homo Sapiens
gggtcctgaggactcccgctgctcctggagtcttggggaggggtccggctccacggggtcggggtgggggctaccaggaaacctttgcctcctggggctgtgcaggaccggctagccagcgctgggaaccagggctgagttcagcccagctctgtccaccccaaccccagggctaggggaaggagctgggagaaggagccccacctctcccaggcgagtatctgtcccaggagcccacacagagggacacccagctctggtctggccttcgtgttggcttcaaggtggtaacagagagagctgcagagtgggggtgtgtttgccagtccctgcatgggtgaatgttggggtgcccactgctccccaggcaggcccccaggactgtcagctccccttcccacagagcacccacctggaggtgtcacctgccggcaagcgtgggccattcatccacctgtcagtcaacaacacccgctgagcatcggcttgtatcaaaaggtccagacctaaggggaaattttatctctttctttctttctttcttttttttttgacacagagttttgctcttgttgcccaggctggagtgcaatgacacgatctcggttcactgcaacctctgcctcctgggttcaagcgattctcctgcctcagcctcccgagtagctgggattacaggcgcccgccatcacgcccgggtaatttttttgtattgttggtagagacggtgattcactatgttggccaggctagtcacgaactcctgacctcgtgatccgcccacctcggcctcccaaagtgctgggattacaggtgtgagccaccgtgcccggcctctttttatttattcctaaaatattaccttgaggccaaattctgcgcttaaggagaatgtgcaccaagtgctggggtgggggctggttataaacgaggccacaaatcatgcttgttaataaattgtgtggttcaaatctgaaaaaaaaaaaaaaaaaaaaaaaaa

SEQ ID NO: 117474 - DNA, 1000 bp, Homo Sapiens
agaaaaacggaagctacaacgagagttacgaacagcactggacaagattgaggagatggagatgaccaacagccacctggccaagcggctggagaagatgaaggccaataggacagcacttctggcccagcagtaggaaaaccacccttcaacctgggtgatgctccttggggccctacctagagggactgacttttgtccattgacacaaaccccttttagtactgttttgagttttgtcattaaaacagccacctttgtattttataatttatgacagaatgaagtcattttgaatctacatgaatgaacactttggattttgttgtagtttgattctagggtagaaccagtccatgctgtttttattttttatctccgtaattgtagaatcatgtttactcaacgtttttccccagctgcctcagtaactgggcactcggaggccttggcacgggttctggaggacagacagcaattctatgagtgctcactgagatacttgctggagacctcagaaaacacaagtgccttctccacggtgcaattcagacttcagtgatctccagtggtcaaaagacatttacccttaatatcagacaacatttatattttagtgaagaaacaagttctcgggtggggaatctatgtttcactcagatttatatgtttggaggaaaaaaagcctttttttgtaaaatatttaaatttatataagaaaatgttagaaaaaaatatggggagtgtatataaaacttgctttattgcatggggcaggggaagtccaggcctaatactcctaaagtaagagttgggtcctttttttcttcaatacaactgtgctgtaccttgtaaagtattttatctgctgcttatttgtggaatgaaacctcaaacaaacccaaagggggagggtagggcagggcaggcagattggaaatctgcctgcagattctattaaatacacccttttgccaaccaaaaaaaaaaaaaaaaaaaa

SEQ ID NO: 117475 - DNA, 799 bp, Homo Sapiens
tacttgtctttccgtatgggtagcttggcacttccctctgtggctctgctcagaactggcggtttttcccagctccttgcccagaccaatacttccatgctgtcttcaagccctgcttcctgcacatctcccagcccagatggggagaacccatgtaagaaggtccactgggcttctgggaggagaaggacatcatccacagactcagagtccaagtcccacccggactcctccaagatacccaggtcccggagacccagccgcctgacagtgaagtatgaccggggccagctccagcgctggctggagatggagcaatgggtggatgctcaagttcaggagctcttccaggatcaagcaaccccttctgagcctgagattgacctggaagctctcatggatctatccacagaggagcagaagactcagctggaggccattcttgggaactgcccccgccccacagaggcttttatctctgagctgctcagtcaactcaagaaactccggagactcagccggcctcagaaataagcctgagagaccatctttagcagcctcagcactgccaggcctgccctgaaactccagatcctggctaagagggaaatagctccttgggacacaaacaagaaatgtggacaaggagggacatttgcatactcctactgtctgtgtggtcacagctagtttctgtcagctgggctctctgggagaaagctggctgttgtccaatgccttccttggcagccaagtggataaaacctttaggagcccaaaaaaaaaaaaaaaaaaaaaa

SEQ ID NO: 117476 - DNA, 1000 bp, Homo Sapiens
gtggtgcggcccagcttgcagctggcctgggctcacaccaatgccacagtcagcttcctttctgcccactgtgcctctcaccttgcgtggtttggtgacagtctcaccagtctctctcagaggctacagatccagctccccgattccgtgaatcagctactccgctatctgagagagctgcccctgcttttccaccagaatgtgctgctgccactgtggcacctcttgcttgaggccctggcctgggcccaggagcactgccatgaggcatgcagaggtgaggtgacctgggactgcatgaagacacagctcagtgaggctgtccactggacctggctttgcctacaggacattacagtggctttcttggactgggcacttgccctgatatcccagcagtaggccctgccttcctggccactgatttctgcatgggtagaccatccaagactgcagcgggtagaaggtggcagttcttcatgggagtctttttaacttggtgcctgagttctctcctagactttagcagcctcctgttgcaattcttggtcacagctctagccacagcagaaggaaaggggcttccagaagaatatagcaccgcattgggaaacagcagcctcacctccacctgaagcctgggtttggctgtcagtggacatggggagctggatggaaatgcctctcacttcaaaatgcccagcctgccccaaatgcctctaagcccctccctgtcccctcccttgtagtcctacttcttccaactttccattccccatcatgctgggggtcttggtcacaaggctcagcttctctccactgtccatccctcctatcatctgtagagcagagcacaggcagttgtgtgccttgggcccagggaaccctccatcaacctgagacaggactcagtatatggttcttgggtatgccctaccaggtggaataaaggacacagatttgatttctaaaaaaaaaaaaaaagaaaaaaaaaaaaaaa

SEQ ID NO: 117477 - DNA, 1000 bp, Homo Sapiens
cagcgggacgtactggaggtcctggatgacagtcgtaagtggtggaaggttcgggacccagcggggcaggagggatatgtgccctacaacatcctgacaccctaccccggaccccggctgcaccacagccaaagccctgcccgcagcctgaacagcactcctcctccaccaccagccccagccccggccccacctccagctctggctcggccccgctgggacaggccccgctgggacagctgcgatagcctcaacggcttggaccccagcgagaaggagaaattctcccagatgctcatcgtcaacgaggaactgcaggcgcgcctggcccagggccgctcgggaccgagccgcgcagtcccagggccccgcgccccggaaccgcagctcagcccgggctcggacgcctccgaggtccgcgcctggctgcaggccaagggctttagctccgggaccgtggacgcgctgggtgtgctgaccggggcgcagcttttctcgctgcagagggaggagctgcgggcggtgagccccgaggagggggcacgtgtgtacagccaggtcaccgtgcagcgctcgctgctggaggacaaagagaaagtgtcagagctggaggcagtgatggagaagcaaaagaagaaggtggaaggcgaggtggaaatggaggtcatttgacctgccaggcgcccttcgcaaagagtgacgaggccccgtgggagaacggactcctcagactctccccaatagcggaagtcgatcttctgaaggatggccaatctgctccggccctggtcttcccccatcccggtggacagacttaacgatccttgctgcagtccctccggagaggatctggactggctgggagtggggagggcgtggagacagtctacggaaagcgctagcagacccccgagagggtgcagtggagccctgagcattgtaatatgcggcccagcctataaacagcctccgtgcttagcaaaaaaaaaaaaaaaaaaaa

SEQ ID NO: 117478 - DNA, 1000 bp, Homo Sapiens
ctctccctcctcgtagtttttgtgctggtgcagagggggtgctcccctgtgtccaaggctgccctggcgctggggctgctgggcgtctactgctaccgggcggccatcgggagtgtccggttcccgtggcggccggacagcaaggacatttccaagggtattattgaagctcgttttgtttatgtctttgtccttggcattctgttcacgggcaccaaagacttacttaaatctcaagtcattgctgcagacttcaaactcaagactgtaggtttatgggagatatatagtggattagttcttctggcagccttgctctttagaccacataatcttccggtcttagcatttagcctcttgattcagactctaatgactaaattcatctggaagcccctgagacacgatgcagctgagattactgtgatgcattattggtttggtcaagcattcttctattttcagggcaactccaacaacattgccaccgtggacatctccgcaggcttcgtgggcttagacacctacgtggaaatcccagccgtgctcctgacagcgcttgggacgtacgcagggcctgtgctgtgggccagccacttagtgcacttcctgagctcagaaacacgcagtggttcagcactgagtcatgcttgcttctgctacgcactgatttgttctattccagttttcacgtacatcgttttggtgacatctctgcgttatcatttatttatatggagtgtattttctccaaaacttctctacgagggaatgcacctgctcattacagctgctgtctgtgtattcttcacggcaatggatcaaaccagactcacacagtcttagactaagctgaacactggaaaaataatacatgcttaaagtctgctgttattctaaaatgaaagatatgaattcaacaaagttgatggataactttctttgactgctctacctgaatttagactaagcagtaaatagtttaataaaagatcacttt

SEQ ID NO: 117479 - DNA, 1000 bp, Homo Sapiens
gtggacagtctgaagaaagaagcttatgaagtggaagttcacaggctgctcagtgaggctgaggttctggaccacagcaagaacccttgtgaagactctttcctgccagacacagagggccacacctacgtggcctttattcgaatggagaaagatgatgacttcaccacctggacccagcttgccaagtgcctccatatctgggacctggatgtgcgtggcaaccatcggggcctgtggagattgtttcggaagaagaaccacttcctggtggtgggggtcccggcttccccctactcagtgaagaagctaccctcagtcaccccaattttcctggagccacccccaaaggaggagggagccccaggagccccagaacagacatgagacctcctccaggaccctgcggggctgggtactgtgtacccccaggctggctagcccttccctccatcctgtaggattttgtagatgctggtaggggctggggctaccttgtttttaacatgagacttaattactaactccaaggggagggttcccctgctccaacaccccgttcctgagttaaaagtctgtttatttacttccttgttggagaagggcaggagagtacctgggaatcattacgatccctagcagctcatcctgccctttgaataccctcactttccaggcctggctcagaatctaacctatttattgactgtcctgagggccttgaaaacaggccgaacctggagggcctggatttctttttgggctggaatgctgcccctgagggtggggctggctcttactcaggaaactgctgtgcccaacccatggacaggcccagctggggcccacatgctgacacagactcactcagagacccttagacactggaccaggcctcctctcagccttctctttgtccagatttccaaagctggataagttggtcattgattaaaaaaggagaagccctctgggaaaaaaaaaaaaaaaaaaaaaaaaa

SEQ ID NO: 117480 - DNA, 1000 bp, Homo Sapiens
tgttccagccaaattagcagtgtataaatggcacctaggtaagagcagagctgcggctcggtgacttgatacttggggcagcccgatgctgtgtgtggggcaggggaggcatccttactggagaggcagggcccagccattgggcacctctgggaaggggaggggaccatgaggcagccagcccctggcaggggcgactgtgccaccgcaggcagcgctccagtcgggaatggccaggatggcgccctcttgttggagtttttggttagcttttacgttttcttctccacccacggcacaggtgataaaataggatccttggtgcggagcttaaaattatgccagaaagccaacagctcccctcgtggggccttgccttaaacttgcctggtttgtacattttttgccggacgcatcaagaagcaatctgtgacaaagtctgagggtcttcctttatgcttgccctccacactaagagaagttggcgtctccctcctgggaattgttttgcctttctgttcatctgtgaactgttttttgtttttaattactctgtaccccatccgaatcagggcttctaccactgctgatgcaaaaccacaaagggacctacctgagccaccgtcctagccaagcgagcaaacctgcagggggtttggaagtggacttggtcaccgcagaagcgtgtgcgccgttgggggaagagctgtgtcacagccagagggacaaagtgtgggtgatcctggagacgccagtttccgagattgttctgcatattcgtttgcacattgttgtctgggttggacatgcgtgtgggcttcagtgtgaggcttttaatatgtatatcctgttatcaataaaacaattatccaagtggttgaatcctgtgagacttggcaagtgtgtgcaaatcaagtatacttgacttttcaacctcttctttcaatgtaacttttatatgaaataaagtaatcaattaacagttaaaaaaaaaaaaaaa

SEQ ID NO: 117481 - DNA, 1000 bp, Homo Sapiens
ttgttccctaacctgtctctcgtagcaaagtcacttttataacagtttaccactatgcttgattataatgtgaaaggcggaattctgagtgtgttaagatggtattaatcatgtcggtgtcatgtcactaagtttaatgctgctgtttttaaaaaaaaaaaaaagtttttttaaaaagccaatctatgtactaaattgcttccaggtaatttttgatttcctaaagtgcactgaggttatctggaagattgggtgtattttttggtgactgctgcattcatcagcaatgaacagtttccactgtatagtcctaggggtcagggggtgggggtttcattttccattcctcagcacagagcagaaatgatagatttttattgtttggagtaacgttggtatgcagcagaggaacgtaaacatttggtcttggttcagaagcctaacagattgctagacaagagaaaaaacttgaagaaaaaagaagcttaatttcatgcttcataagtagcatttatatttatagcaccaatgtacattttgaaactttctttcaggggtgggagttatggggaaggggtgggtgtgaaggggtagatgaaagctttaatttagaaagaaagttcaagtaaaggaaattattttgattaaatatattttatttgatctgggtatttttggaccacattattaaattaattgttaagctgcagttgagttgttcaagtgagagttttgataagccacttatgggccgcgttgtgaatcacttgccagttgtactttatggagcttattttatgatttaaaatactgtactgtacataggaggtatgttaccttctccttatttgtatgtttaccatatactttgatatttgaaatgttatgtactggaaaggccacttatatttctagaacagattggattttatgcaaccttttttccttgaattaacagcaataaaaaaatgaaaaacagcttaaaaaaaaaaaaaaaaaa

SEQ ID NO: 117482 - DNA, 1000 bp, Homo Sapiens
ccagtcaagatcgaaagatacctcccccaattggaacagagagactggcccgaattcggcaaggagggtctgttgcacaagccccggcggggaccagttttgtcgctcccgttggacacagtggaatctggtcatttggtgtcaatgctgtgtcagaaggcttatcaggttggtcgcaatctgtgatggggaaccatccaatgcatcaacaattatcagacccaagcacattctcccaacatcagccaatggagagagatgattctggaatggtagccccctctaacatttttcatcagcctatggcaagtggttttgtggatttttctaaaggtctgccaatttccatgtatggaggcaccataataccctctcatcctcagcttgctgatgttccaggaggccctctgtttaatggacttcacaatccagatcctgcttggaaccctatgataaaagttatccaaaattcaactgaatgcactgatgcccagcagatttggcctggcacgtgggcacctcatattggaaacatgcatctcaaatatgtcaactaagttagaaggtctttactctttagccttgtttaagaaacctatgaccttggaagaaccatggggatttttttttaatgtgcctaagaaattttctctgaggctttagcaatggaaatttgattgcccattgtataagaacaaattgatttcctatccacctgattatgttctctggttagtttagccattttgaacttaagatcatatgaccttagtgcttttggctaaacatacagaatactacttgtatgcagaagagaattagttgattacatgtttcaaccttttagggtgataaatacatgtataattgtttacatacttaaaaggaaaaagttgagtaaatttcttgtcatatagtggctctacgtaatgtagcctgtattaatgtgaaatatttaccagaatattcaataaaaagatgaacagtctttagaaaaaaa

SEQ ID NO: 117483 - DNA, 1000 bp, Homo Sapiens
tatgtaagggcattccttaagcattcagcagaacttgtatacatgctagaaagcaaacatctctctgtagtcctacaagaggaggaaggaagagacttgagctgttgtgtagcttctcttgttcaagtgatgctggatccctattttaggacaattactggatttcagagtctgatacagaaggagtgggtcatggcaggatatcagtttctagacagatgcaaccatctaaagagatcagagaaagagtctcctttatttttgctattcttggatgccacctggcagctgttagaacaatatcctgcagcttttgagttctccgaaacctacctggcagtgttgtatgacagcacccggatctcactgtttggcaccttcctgttcaactcccctcaccagcgagtgaagcaaagcacggtcagtaggataaaaagttgtacaaaacaagattattttccttcacgagtttgaagtttctggtcacaattcattgatgtagaggatttatgactaagcagggtctcaagccaaacttgaaaccattctgaaccaaagtgccatttcacccacctcgaaccaacaacagaagctgacaaatgccgtggagaccattgagggaaacagaaaggggcagctcttgtggaccttcaggaagcctttctaggaagaggattgccctcatagtgagctccggggtcttcagcctcagccgtaaggccctgggctaggcagtgtgacctagggagcgggaaacctgagttctggccctggtctgggaaaagtgctaggcccatgttccactcaggcttcagcctgagagtccaggttgctaacctgtaaaatggatctgtcaaactaacacttatgcctttagtctcattgtatgaggtgtaacattttgtaaactgtgaatcattatgcaaattttcctaaagacatatgaattattctggatttgttggtataaaagacaaaatacactggtcaaaaaaaaaaa

SEQ ID NO: 117484 - DNA, 1000 bp, Homo Sapiens
gtttgacaaaggacttcagaaatgggcttgggaaccagctgagttcaggatcccacacctctgctgcatctcagtgtgactcagcgagttccagaatggtgctgcccatgccaaggctacatcaagactgtgcgctgaggatgtccgtgggcttggctctgctgggtcttctttttgctttttttgtcaaggtctataattagaatacaactaatggaaacatctataaagaagaatacatttctaattaaaatcttcaatgaacaggaaagcgacatctccattctccaagggcaataatttgtactggtcatgctgcctccttctcagccactcttcttaatgaggctccccctgtctcacattgagttgggcccattggttatttgacctaaaacctaatcaccgctaccatagcacatccttcaaattaaactgcttttggtttacttttagcaagaaatgcaagcggttgcattttttctgtttgtttcaatctctaatctttaagtcagaacctaattgtacagtggctctggccatcttttcctcatgtggaagaattttctatctttaataaactttttctttgttttttttttccagatggagtttcgctcttgtcccccaggctggagtggtgcagtggcacgatctcaggtcactgcaacctctgcctcctgggttcaaacgattctcctacctcagcctccctaatagccaggggctacaggcatataccaccatgcccaactaattttttaattttttgtagagatgagtgtcactatgttgcccaggcttgcctggaactcctagcctcaagcagtcttcttgcctcagcctcccaaagtgctgggattacaggcgtgagccactccacccagcccagattaaatgtttttatttctacctgccatcattggtctttactaagtgaagtgacttctttctttaacaataaatggaattggtatactaagcaaaaaaaaaaaaaaaa

SEQ ID NO: 117485 - DNA, 1000 bp, Homo Sapiens
tccctgctggtctaagtagaactgtagattcatatgggctggtgttcctgtgcgctgtgggtgtggtgattcagcctggcatttctaccataagtttttggtctgctgatttgctgccctgtcttctcttactttactttatcaatacctggcaaactgaccagaattaccttcctcatggcaaagggggattatggtgaattgttgttcttatagtctgtttcatgaagcacaagtggaatttaatacataaaagagaaaaatatcttagtttgctaccagcatccagcatgaagttgtaaagtggggattaggcacgtgacagtatagcacccatttgaatttaaataaaagtgaaccatatttatctggttatataaaactaaaaatgggggtgtttatataaaactaaaaactaagaatgatgtaaccttttgtctgtgttatctgaacactctacttcctttgcagccttagtcacacaactgagtcatctcaagtactctttaaggacacacagcccaggctgttctgagtcagaataggcccctacaggtatattttaaaactcttcgtaattctaatgtgtactgctggtatagctgaactactgacctggatcttagtcctagcctttttgcttttgcaatttcagtatcttcatctctaaactagggaaacactgggattctttcttagctgtgggggaaggtatttggttagatgactttgaatgaatagactgctgtgctgaaagagctttatcacactgtctcaaagtatgtaaagatacataggtggatgctcttactgcagcagtcatgaatacatttttagccatttacctaaggaaaaagacagtttttctaggtaccatgaaggaagattgaccctgttggtatgcctgtgggggtgggatgtgagtgggactgataaactgatacttttggttcgtatgtacatactggaagaatcttcataataaatgagactacacaac

SEQ ID NO: 117486 - DNA, 1000 bp, Homo Sapiens
taaaactccttgttaatccagtgatcttttaggccaaggaaatattttgtgatggtgttctgggtccatacaccagcaatgaaggagatagatttgtgtacttgtgttttttaatcagcattaacatgggcaggcaccctcatttatagatgtcaggaaacattcagtgaaaaacttgtagaatgggatgtgataacgaggttccagtaatctgagcagtctaacgaggcccacctcctccaccacagaacgtggctatgttccaagtgctactctcactcagcctgttgcggatcttcatggcctcaggagacttgtttctccatgggctcttctggactgcacacttccaccatagcttgctgggttgatctagatgtctgtttgttgtatggaaattttgggggaaaaaatccaaaacacaaactgtgggttgaaatattaaccgtctccttggttccttggtattcaccgtgcctgatctgcacatttcatcgtggctgtttctgtatagcctatactgcattagcccaagagattgttgctttgtaactttttgcactattgttttggctggatttgtattacacacagttttaaaaaaaacaattccacactattctctgccttttttttcctatttatttcttcccgcacaaattccacatagaggccttcccatccagctctacgtgatttggctgcacttgaacactgattgtccatttacagccctcagcaatgtgccttctaaatggcatgacatatgtagatgtgctgcagcgcttgttaatggtcacaataaatgccacttcaccaaggaagtctcagatgaacaattatgaacatccaaattttattggggggcaataatcaactgaattgcaaaatttgggggaaaatggcactatccgtgtacgaatcgaatacaaatcaaagatttgtcacatccctaataaaaacaagatggagatgtctctgcaaccatatttgtaagcta

SEQ ID NO: 117487 - DNA, 1000 bp, Homo Sapiens
tcgggcaccccctgcctgagctcgcggatgaactgagacgcaaactgcagcaacgccagccactgcccgactccaaccccgaggagtcatcagtatgaggggaacccccaccgcgtcggcgggaagcgtgggaggtgtagctcctacttttgcacaggcaccagctacctcagggacatggcacgggcacctgctctgtctgggacagatactgcccagcacccacccggccatgaggacctgctctgctcagcacgggcactgccacttggtgtggctcaccagggcaccagcctcgcagaaggcatcttcctcctctctgtgaatcacagacacgcgggaccccagccgccaaaacttttcaaggcagaagtttcaagatgtgtgtttgtctgtatttgcacatgtgtttgtgtgtgtgtgtatgtgtgtgtgcacgcgcgtgcgcgcttgtggcatagccttcctgtttctgtcaagtcttcccttggcctgggtcctcctggtgagtcattggagctatgaaggggaaggggtcgtatcactttgtctctcctacccccactgccccgagtgtcgggcagcgatgtacatatggaggtggggtggacagggtgctgtgccccttcagagggagtgcagggcttggggtgggcctagtcctgctcctagggctgtgaatgttttcagggtggggggagggagatggagcctcctgtgtgtttggggggaagggtgggtggggcctcccacttggccccggggttcagtggtattttatacttgccttcttcctgtacagggctgggaaaggctgtgtgaggggagagaagggagagggtgggcctgctgtggacaatggcatactctcttccagccctaggaggagggctcctaacagtgtaacttattgtgtccccgcgtatttatttgttgtaaatatttgagtatttttatattgacaaataaaatggagaaaatgaaaaaaaaaaaaaaaaaa

SEQ ID NO: 117488 - DNA, 1000 bp, Homo Sapiens
tatggcccaacatagcttctgctctgtcttactgactcaatacctttaggatttgtatcagagtttggatactagtgttagtggtggtgtcaccactacttaattgggagataatgaaaccaatcatggatgctgtttttattgggcatgtcatctaagagaggagaaatagctgggttttgggtctaattatgaataaggactgattcagaaaacgagtttatggtaggtagactaaagtttcacatcagactgtaccattgtgatttagacctatctaaaattcagagcatatcatctgggctacctcagggtcaccacccatgtattgggcttagtcaggattgacagatacattctcagctggcctgtcatataaaacatactgtcattgagcttaagctccgcttgttctgaggtttcacctccatgtgtttcattggtgcaaaagtggatctcttagttggtcacttaattctttctttttcagaaagatagtatgttcactggtatatttggtcactcttagaaccttccttcacattgttttttatgggacccatgaatggttagcctttcttttctattgtagaaggaaataaataggagtaaaaagaccattgtagtaaataagttcaaggggaacttgggaccagaaaccactgttatgtacaaaaaaatggcaaattcaataaactcaaatttaaaataatttttaaattaacagttatgataaattttatattttatacaaatagattgcttagaatggttctcaagaattataagagaaatgaactcacagtacaaaaattttataattactatacttgtgttttgtttgggggctgggaaatgtatttttacattgtagccaatcattttatatttgtcaatttaaatcttatgggtcttttttttttatctctcttgatgtcagattttatagtctttttaaataaatccatttaattaaaacgttaaaaaaaaaaaaaaaaaa

SEQ ID NO: 117489 - DNA, 1000 bp, Homo Sapiens
cagcttcctttccaaggatgaatggccctgcaggcaagagtttcgtcccatttcctagagtggggagcctccctggcacaaacccagctgctttccccagaccagggggtccaatggctgcaatgtacccaaatggaatgttgcccccttaaacaccattttccctccaggaccaccttggtttctaggcactgtggttcttggcaggggctgtcttaggtaaaagggtagttgtggagctacagtctgaagaacatagcttgggctcaagttcaaatgagccatctttttcctttgcgtttttcttgactgaaggtgagatgttatttgtggcatgtgaactgtggcaggtgggaataatcctgcccttgagagaaaggatctccagcctcccagaagcctgctgtgctttcgtcccacagctttctgcccattgtttcttactagtttcttgaattgttcttgtggacttttcctcagggatacattggcctgcaggtcccagttcacatgtagtcccctgctcaccattggagaatcagctcactgctctctagaaacgtggcgttggtgaacggaccatgcttccgtagctctgacctgggcagcttggacctggtcatcctctactgccatacctttccctgggggcttgaacacagaacagggagatggacaaccacttcaaagaaagacccaccgaatgcagtttctgcttgactgactgggcctgcagctcccttctcctgggacttagaggtggccagatttaaggcccctctactcatccaactccctcttcactggtactcccaatcaatcaaagaacctcaaaatttaaactgatgtggatgggaatatgggaattagggtgggggtgggggatgaagggaagaaatcactgtgctttgttcggcctggtgtgcaaggatggttggtggttttcctgcattgtatcttttcttactgtttctttaataaatgggatgagagggcaaaa

SEQ ID NO: 117490 - DNA, 1000 bp, Homo Sapiens
cacactggggagagcccatacaagtgtgcagtgtgtgggaaaatcttcaacaatagctcccacttcagtgcccaccgaaaaacccacactggtgaaaagccttacaggtgttctcactgtgagagaggcttcactaagaactctgccctcacccgtcatcagacagtacacatgaaagcagtactctcatcacaggaaggaagagatgcgttatgagtgtgtcggtaaactgtcagattaagttcctcaggtcagcatgtatgagctttcttctgctgtggagagatctagccagtccctgactttgcaacagacctactgactactggatcttaagacccatgtctaggaccaggagtcagcataaggacgctgacctctcctggctgtgcctgtgactccagagtcctatcttactgtgacttaaagtttgatggagagaaagctgtaggatccataaattctaccaggaaaccagggtcttcctgttcctagcactgagaatgggcacccagtggtccaagaacactttctgggctaacatagtcctcacacagggctgagaaagaaagtgtctcctttcctggaaagcacatgtaaaagttaagggcctgaatctcttctaaaccaataattgacctctaggcacccaccgtaatactgctaccttcagggcagaagacactgctctttgtaacccagccaccaccaaaaagcaaacagaaagaaggaaggatggttaagccattggataatactgaatctgtttccctaagtgacttaaccttagagcaagcacaacatccaggttaattttttgtaagatttctccttttattattgccctcatcatagttcctgattgtctcttaaagtaagtggtttatagacattactatttctgataataatttacaaactactataaacaaatttataaacattactaatttctgatgaaaataaagttgtttctccctccaaaaaaaaaaaaaaaaaa

SEQ ID NO: 117491 - DNA, 1000 bp, Homo Sapiens
catcccgaactttttaaagtatttatgaagcgtcagagacttattttccctgtaatagaatgcaaaatcagggaaaatgggttgctttgtgtctcaagtattgtctttatttttgagactattttcatacagttgtcatacacaaggcgcatatatatatttgtgaattaaaatctgtagctgagtctacattgttatgagtcaccattttcacacaacatcatgaatcttcactgttagtactttcatatagaattcggttgaaggaaagattgatttttgtgtagatgtttaatataactttacaactatatctcattgaaaataaagtcattggggatttttacctctaatttggatggaaagcacaagaagccacacattcattaatatgcaacaaatgttgtatttatgttactgaatatttctatggattaaaatagaaaaagtttaattgattttttcttttaaattttaataacaggttcaccagctggtagaaaatagagacacatgatgatttgcattgtaataatttctgtgtgtatgtgtgtgtgttgttttgtttttataaagaaaagtgtgtttgtacccatgagttcagcatttctgccatcttgctattttcattttccctgtggaagatgcatggttgcatccttttccttctgaccaacacttagtctttaactttgtaaggttcggtttaaggtttcagggttagcactatagttttggttcattttctcattaacgataaaatatgctgtaaggcactataagaatataaatgattctattacaattgaaagttacttgacattacatgaattgaactgcctttcattatcttcagacactttgttttagtatttttttttaatttgctaggtttgtatatagaagatcctttcattatcaagaatgagtatggttgcttttgccatggttgcttttactattaataaatgtatctagcctacccaaaaaaaaaaaaaaa

SEQ ID NO: 117492 - DNA, 1000 bp, Homo Sapiens
attttcaagaaatgattcctgcctttggaattttcagactgctgatcatcatcctgataattgtgttggacatgggatttgctctctatagaaggttctttgttcctgaagatgggtctccggtgtcttttgcagctcacattgcaggtggatttgctggaatgtccattggctacacggtgtttagctgctttgataaagcactgctgaaagatccaaggttttggatagcaattgctgcatatttagcttgtgtcttatttgctgtgtttttcaacattttcctatctccagcaaactgacctgcccctattgtaagtcaattaataaaaagagccatctggaggaaataaaaaaaaaaggaagactctatgaagaaacagagaagtctcagaaaaggctaacaattttatatagaggacaaaacagcattaaactcatcagttgcaaagattgcctataaaaggaccttaggatttaaggaaggggcttcttaatgtagaaagggaagaagaagagagaaaagaagggtagtaaaaactagagattggggccaggcgcagtggctcacgcctgtaatcccagcactttgggaggctgaggcgggtgaaatcacctgaggtcatgagttcaagaccagcctgaccaatatggtgaaaccctgtctctactaaagaaaatacaaaaattagccgggcgtggtggcgtgtgcctgtagtcccagctacttgcgaggctgaggcaggagaattgcttgaacctgggaggcgaaggttgcagtgagccgagattgcgccactgcactccagcctgggtgatagagcgacactcggtctcaaaaaacaaaacaaaacaaaacaaaattagagattgggtctttcccaggcatatggtattctataaaacagacttactctccttggaggatatattttggagaatgcttcataaaatctatgaatactgtacaatgctgataataaaaactttttatacctga

SEQ ID NO: 117493 - DNA, 718 bp, Homo Sapiens
gtggcccgggaggcgccgaggccagcgatgggcgtgcagccccccaacttctcctgggtgcttccgggccggctggcgggactggcgctgccgcggctccccgcccactaccagttcctgttggacctgggcgtgcggcacctggtgtccctgacggagcgcgggccccctcacagcgacagctgccccggcctcaccctgcaccgcctgcgcatccccgacttctgcccgccggcccccgaccagatcgaccgcttcgtgcagatcgtggacgaggccaacgcacggggagaggctgtgggagtgcactgtgctctgggctttggccgcactggcaccatgctggcctgttacctggtgaaggagcggggcttggctgcaggagatgccattgctgaaatccgacgactacgacccggctccatcgagacctatgagcaggagaaagcagtcttccagttctaccagcgaacgaaataaggggccttagtacccttctaccaggccctcactccccttccccatgttgtcgatggggccagagatgaagggaagtggactaaagtattaaaccctctagctcccattggctgaagacactgaagtagcccacccctgcaggcaggtcctgattgaaggggaggcttgtactgctttgttgaataaatgagttttacgaaccaggaaaaaaaaaaaaaaaaaaaaaaaaaaaaaaaaa

SEQ ID NO: 117494 - DNA, 1000 bp, Homo Sapiens
gtttttaggcagcctttactaaagttatgcaaacacacagttccccatttactacattaatgcccttgacagggagtagctgcttggttttataggtattagggctcatgaaggccggggaacaactctaatccttttggggcaggagggagggtttttttagggttgcggggagggaactgcaagtgcctgaggaccagagtggcctctagccccgaattgaacacttttaaacctaaagagccttattattattagctcgagaaataccacatgccagtcttcccaggaaggtgacctgcctgaccatgaagcaacaaaagagcataggcagacttaaagttggatagacctgggttcaaatcatagttcagctttcaataactgtatgtatgattttggctaaaggatttgactttctctcaactgcagttttcttaatctttgaaatgcaaataatgtttatctcagaagactatttctaggattaactgagagattaaaggaacagcagcacttaggctcaaaatcgcccctacaaagcagtagttgtttcttaattgctaagtaatctgtttgcactctaggaaaagtaaatggagaggtaaaagaaaggcattggggacaaatgaaagagatgatgtagatttttcggatgggtgggtatattttattttccagtttattttcatatttctttactgtgttatttctggaaactttaatgttttaaacctcttttataaaattcaatgacgactactagaattcttttcaaaagttaacttatctccaaagtggctgaaaatattgtttaccattacatgattatgaaatgactgtgaagaatataaaattaaacttagtgacttaattagtcactgccttgctaactttgctgtaatttttttaaacgtcttgtttttaatatagcaaactatctcaatactggctggattaggttaaataaagaatttttatgttcaaaaaaaaaaaaaaa

SEQ ID NO: 117495 - DNA, 1000 bp, Homo Sapiens
ggaaaactttcttatgtgaaaacttgccaagagaaattcaagaaacttgaaaattccccccttggagaagctttacgatcaggacaagcacgacgatcttcaccacctgggcactattatcaaaagtcaaaatatgactcaagtgtgagtggtcaatcatcttttgtgacatccccagcagcagacaacatagaaatgcttcctcattatgagccaattccattcagttcttctatgaatgaatctgctcccactggtattactgatcatattgtccaaggacctgatcccaaccttgaagaaagtcctaaaagaaaaaatattacatatgaggaattaaggaataagaacagagagtcatatgaagtatctttaacacaaaagactgacccctcagtcaggcctatgcatgaaagagtgccaaaaaaagaagtcaaagtaaacaagtatggagatacttgggatgagtgaaaaattacatcattggacatgaaggagtttcaacatccagcttcatctaggtggtcatgattacctgcatgctttgagctcagcagcagtcttcataaacacatttaaaacaagatcctgggtttttgtggtttgacttctatggtgttttaaaaaaacacagatttttagtgttaatattgtgtaaatgtactcaccttagggattcatttgaatgatggtattataccatgattgtatacagtttgtgaaattgttgcaagggcaaagataactcttaaaaaaccgtcgagattacaatgctctagaatcagcatataagaaaataaatgatatctgcatgttgaattggggtggatggggggagcaagcataatttttaagtgtgaagctttgcatcaagaaattattaaaaagctttttttctccagtattttctgtattatcttaatgtttatggcaaataaaatgtaaaggaacatgccaaaaaaaaaaaaaaaaaaaaaaaaaaaaaaaaaaaaaaaaaaaa

SEQ ID NO: 117496 - DNA, 1000 bp, Homo Sapiens
ctttgaagaagatttagaaaatacagaagagttttaagtagccaagtaaaaataatttacccatcatcccataatccagaagtaaatacatttgacccttgagcaacataggtttgaactgcaagggtccacttatgcatggactattttcaactataaacgagtcaaaaatatatcaatcattaaccaaacacgaaacccacttatagagcaggttcatatactcaggttccaaagggccaactgcaggacttgagttctcacgtatggatttgggtatatgtggaagttcctggaaccaatcccctatgtaaaccaagggataactactacattttaacctacttctgtttgaacatatggtatggttattgcttttgcctcgttttcctaacagtttgaagtttaaaaaaacctaacccacctttcttacccagtcttctataatgtgcctaccaaaaagcctagtcctagcccatctgcctcaactcctctcccttttaggttgtagggaagaggccggagtgtagagtatattatatcttctgtcccccttatgccaacaagatggccttcccctctgaaacaaagtaaaactgcaacactgtgacttcttaaatgagggatatgtgaaaaggctatgaaaaatacaaaggctttcctaggaaatgtgttataatgcagcgggaagctaattcttgaaatatgcacattatagttactcagtctcacatactctagttactggcaaagaagttactgagaatatgtcattcaaaggcataggggcctttgaatggaacaaatgctttcacatcatttaaagtaaaaaaaaaacctccaacaactgtgaatttatagtttaagagtgatttacactgaatttcaaataaaaggactataaaacgtgttatttttctgtaagggctataacatacatgtcaatatcactgtttttaaataaaatatacttttatacagaagaaaaaaaaaaaaaaaa

SEQ ID NO: 117497 - DNA, 1000 bp, Homo Sapiens
aggggaatgttggaaaactgcattcttcttagtctttttgctaaagaacatctgcagcacatgacagaaaagcagctgaacctctatgaccgcctgattaacgagcctagtaatgactgggatatttactactgggccacagaagctaaaccagccccagaaatatttgaaaatgaagtcatggccctgctgagagactttgctaaaaacaaaaacaaagagcagagactgcgtgccccagatcttgagtacctctttgaaaagccacgttgagctgtgctccacggcctggcatgggggttcagtctgtggatggtaactacttatgatggacgttagccttgcttccggcttcttagatgcccagctgccctaccccagaccactggtcctgcctcaagtgatggacataaccctctcctaggacatacatgtaaatgcacaatgtgactcattctcatacttttttgttcagctctgagcctcaaaagtgatttgtcagcagcgctggcatgcaggctttgcctggctgctatctctagaggcaagtctgccacgagagggcactgcaggcgaagcagttgtgcttgctcattgcctcagcccaagtgtactcaaagaaaagaggcagccggctgtgcgtgctgtacggaaagcctcccgccctccctgcagctccccgccctcagtggcccagggctttgttgaagtggaactccccacttccaacctggtatggctccttctgcgaagggaagctaatcccagcctcctgagctgaatccttcaaaggcacagcaggcagaatgagggccacaggcaggagtggtgtgggcacactgcttaggagtcaacatcttcatcattgggctttctttaaaacgtgcactttgtaatttgaaagagaattattaaagcatactgaaaaaaggaaatttacaatttcccagccctcacaaaaaaaaaaaaaaaaaaaaaaaaaaaaaaaaaaaaaaaaaaa

SEQ ID NO: 117498 - DNA, 1000 bp, Homo Sapiens
cgtaaacctctccgacaatgagcttctggatgagggtgctaagttgctgtacacaactttgagacaccccaagtgctttctgcagaggttgtcgttggaaaactgtcaccttacagaagccaattgcaaggaccttgctgctgtgttggttgtcagccgggagctgacacacctgtgcttggccaagaaccccattgggaatacaggggtgaagtttctgtgtgagggcttgaggtaccccgagtgtaaactgcagaccttggtgctttggaactgcgacataactagcgatggctgctgcgatctcacaaagcttctccaagaaaaatcaagcctgttgtgtttggatctggggctgaatcacataggagttaagggaatgaagttcctgtgtgaggctttgaggaaaccactgtgcaacttgagatgtctgtggttgtggggatgttccatccctccgttcagttgtgaagacctctgctctgccctcagctgcaaccagagcctcgtcactctggacctgggtcagaatcccttggggtctagtggagtgaagatgctgtttgaaaccttgacatgttccagtggcaccctccggacactcaggttgaaaatagatgactttaatgatgaactcaataagctgctggaagaaatagaagaaaaaaacccacaactgattattgatactgagaaacatcatccctgggcagaaaggccttcttctcatgacttcatgatctgaatccccccgagtcattcattctccatgaagtcatcgattttccaggtgttggtgaactgcctgtgactcctctcctccccggcccctacccctcagggataatgagttcattgctgggctagatgttttagccatgattctgcctctgttttatacctgcacacatccttatctttgttacatatgaaatatctgtatcacgggtatattgagagaaataaaggtgagagcattcacaaaaaaaaaaaaaaaaaa

SEQ ID NO: 117499 - DNA, 1000 bp, Homo Sapiens
gcagaggtagaatgtgacctgagcaatatggaaatcactgaagagctccgccagtactttgcagagaccgagaggcatagagaagaacgacggcggcagcagcagctggatgcagagcgcctggacagctatgtgaacgctgaccacgacctgtactgcaacacccgccggtcggtagaagccccaactgagaggcctggtgagcggcgccaggccgagatgaagcgtttgtacggggacagtgctgccaagatccaagccatggaggccgcggtgcagctgagctttgacaagcactgtgaccgaaagcagcccaagtactggccggtcatccccctgaagttctgagctcagggcacagggtaccagcctctccttcttccttttgggtacacgctctttatctctccttctgtacacttcttagggaaaggggactttgtactggggtacaggcatgttcaccacagtcccagtgggcctgtcacggggtggatgtactatgccagccacttggaggtctgcaggacatgttctgttgccaacatgataaattttctcctgacataaaataattttgcatatactatactggttttttatgttgttggtaacagttcaattcattaacgttcttgcctagagatactgcctggtgttttgcttttttatcttttcttgtctttaacctgtctgaactacacaaatgcctttaaaaaaccagatatcctctctgactctagctccattagcccccactaaaaatgagccaagtgtgtagtgagacaaataccactacctgtagtggagagggatgcatgttctatagagggccagagagtgaatatctttggcactgcaagccacacggtcagtgttgtgactactcaaccctccctttgtagtgtgaaagcagctgtagacagtaagtaaacaaatgggtgtggctgtgttctaataaaactctatttataaaaacagaaaaaaaaaaaaaaaaaaa

SEQ ID NO: 117500 - DNA, 1000 bp, Homo Sapiens
gttaaatgcttcctagaaacctaaataagatctattaatttctgacgagaggtgttcttctagaattaattacttttatcttttgtcttcatttgtggccaaaattatgtttactagaggaaatttgggatcattctcagctaattccaaaatgtagtgctctattgcatggatccttggtaatcctcaagcatcagatgccataaggggaaacttaattctgctaaattaatgtttattttgtgagaagtgactttatcttcatttggggtagaaaaattatttctttatgtagtagagacaaattattctcattttgcaagtactttcaatttaagctacaaattgagaaaaccgttataaataagaataaaataggccaggcacagtggctcacacctgtaatcccagcactttgggaggccgaggtgggcggatcaccagaggtcaagagtttgagaccagcttggtgaaaccctgtctctactaaaaatacaaaagttagctggggctggtggtgggcatctgtagtcccagctaattggaagggtgaggcgggaggatcgcttgaacctgggaggcggaggttccagagagccaagatcgcaccactgcactacagcctgggcgacagaacgagaccctgtctccaaaggaaaaacaaaaaagaagaataaaataatttggatgaaaatcatgtttatttaaatagtaatgtcatgagactattaaagatgtgccagagtttcaatgaaaatcattaaagtaggacagctaagaaattaatattaatataaaaattattgataatcttaaattattgattattccttaacgcactccattctccttttacattttatcatgtttcttttgaatatatgaattggcaaaggacttgatgaaactgagtactaagatttggtacagagtatgtcaggaagacaactcagattgccattttaaataaagttgtacatgaacaaaaaaaaaaaaaaaa

SEQ ID NO: 117501 - DNA, 1000 bp, Homo Sapiens
agggtgcagccacagctcagcaggacccctcaagcggcccagcagactgaggccctggccagcactgggagtcaggcccagtctgctccaaccccggcctgggatgaggacactgcacaaattggccccaagagaattaggaaagctgccaaaagagagctgatgccttgtgacttccctggctgtggaaggatcttctccaaccggcagtatttgaatcaccacaaaaagtaccagcacatccaccagaagtctttctcctgcccagagccagcctgtgggaagtctttcaactttaagaaacacctgaaggagcacatgaagctgcacagtgacacccgggactacatctgtgagttctgcgcccggtctttccgcactagcagcaaccttgtcatccacagacgtatccacactggagaaaaacccctgcagtgtgagatatgcgggtttacctgccgccagaaggcttccctgaactggcaccagcgcaagcatgcagagacggtggctgccttgcgcttcccctgtgaattctgcggcaagcgctttgagaagccagacagtgttgcagcccaccgtagcaaaagtcacccagccctgcttctagcccctcaagagtcacccagtggtcccctagagccctgtcccagcatctctgcccctgggcctctgggatccagcgaggggtccaggccctctgcatctcctcaggctccaaccctgcttcctcagcaatgagctctcctccagctttggctttgggaagccagactccagggactgaaaaggagcaacaaggagagggtctgcttgagaaatgccagatgcttggtccccaggaactaaggcgacagagtgcagggtgggggcaagactgggctgtaggggagctggactactttagtcttcctaaaggacaaaataaacagtattttatgcaggaaaaaaaaaaaaaaaaaaaaaaaaaaaaaaaaaaaaaaaaaaaaaaaaaaaaaaa

SEQ ID NO: 117502 - DNA, 1000 bp, Homo Sapiens
aggtgagcagaaggtgcctgtctttactaaacagccaggatggaggaatcctgacaagagctgctggtgttctgagccggaccctttcttcctctctgaaaattgttgaggaggccttgcgagcaggagtggtaaagaaaatgatgaaattcctgaagacaggaggtgagactgcatcacgttatgctataaagatactagctatctgcacgaatagttatcatgaagctcgggaagaagtaataagactggataaaaagttgagcgttatgatgaagctgctcagctcggaggatgaggttctggtgggcaacgctgccctctgccttggtaactgcatggaggtgcccaacgttgcgtcttccctgctaaagacggaccttttgcaggtcttgttaaagcttgcaggcagtgacacacagaagacggccgtgcaggtgaacgcaggcattgctctggggaagctgtgcacagctgagcccagagtgcctgccgagagcagtcatctccaatttggaagagagtctgctgcacctgaagctctgtctcctcgcaggtgggaagagatgtttcacatgctagtattctccctctccagtgtggatccacccccgccaccgccccaaacttgttacccctaacacatgctaccatgcagaccttccaggcagcatggaaaataccagcgccatctttcagaaggcctcatctccacttgccaggagccccgacaccacccttggagacacggcttgttccagatgaggaaactgaggtgcaaagcagttaagcaactggtccaagatctagaccaggtactcaaccaccccactccacatgcaactgtccccaacccatgcgattcatcctttccctgaaggcttgtgtggtgctgccttttaaattcataacataatgacttcattgttatgaaaaaaaaaaaaaaaaaaaaaaaaaaaaaaaaaaaaaaaaaaaaaaaaaaaaaaaaaaaaaaaaaaaa

SEQ ID NO: 117503 - DNA, 1000 bp, Homo Sapiens
gaggagcccaaactctcgcccacctgttcttaaccagaaaacccactgactttggaaatctcacctctgccacccatctacttgcattcgtctttggcagacctcaagataaatatgggttaatgcctgcatgatgcctctgaattcaggaattgcagggaaaactcggggctttgtgccagtctctaagttggcaactttggctgaacaaatgagtagtggcttcagtgtccttgcgtacacattctgtggattgatttaatggagttgtcagcatgatcatcatcttctagccaggggcatagttgccaaggccatttacctctttctaagaagaaacatttaccccatgtactcaagacatttcagttttaaaagtcactttcctattagacttcttgaaaaagattctcacatagcctctatgtaatcagacaaatgacatttgatttcaagagcagaggggtaaacatcctctgctaatcgacaggtagcaggtgtcagaggaggcataatattaatagcgccaccttctgttgggtcagtggagatgggtgaggagcagcacagagcagcagggatcatcacatgcagccaaacttggcctctgaagggggaaggtagtgggaataggtggtgagagaactcacatttttctcttgtcctggttttatatttcggagggaaaggattatttggccccattaagaattaagaggctgggtgcggtggctcacgtctgtaatcccagcaccttgggaggcccaggcaggcagatcacctgaggtcgggagttcgagaccagcgtgaccaacgtggagaaacccccgtctctactaaaaatacaaaaaattagctgggcatggtggtgcatgcctgtgattccagctacttgggaggttgaggcaggagaatcatttgaactcaggaggcggaagttgcggtgagccaagattgtgccattgcactccagcctgggcaacgagcgaaactacatctc

SEQ ID NO: 117504 - DNA, 1000 bp, Homo Sapiens
tgcctcgacactcacgaaccgccagcgtggcgcctggatcttgcccagctgccagctccccccaccaggactgtggttcctcagtttctcctgccagccccggctcatctcagggcaaagctatagacatggtagatctcatcggggaggttctcctgcctctcctcggccaggaggctgaggcctgcactgcagatgatcctgcggaccacgtcaaggtcccggcacacgctgctgtccacgtcgtccagaatcacgccctcctgggccatgttgtctttgatgacgatgatgccgttggggcggaggctgcccttgcagcgccgcaggaactcggccaggtgctgatcggtgaggtggcctggggagggcagaggcaaggttaccagggcaccatgcaagcggatgtcggcactggatgggatgtacttctcagccccgctgagcccctcatttgtgcccagcattttgtgtgcacacatggcctcattggctctcagtcccgagagatttactaaaccccaattcatagaataggaaactgtggctcagaggtcatctacctaaagacacattaagccagaatttgacttgacgggatggcttacaagtcctgcctgatacctacacaccatgatgccccacccctgccaggcttggatcggaggagtgaacctgggctaagagtttggcattgcaggagctcccagagagactgccttccctacactagaagtccccacaaaggcttctgagaccacaaaatacaaggccagacctagagtgtccacagcaggcctgtgctgcccgcctcaggaggtggccgactgctgctagcggcctgccgccacgtcagcagcccagggcacagcgctcgaggtgtgctgttaggctaagagggtgcagggctagacacgaagcttaaactattcatcttattaaaaataaaacccttataaaactccaaaaaaaaaaaaaaaaaaaaaaaaaaaaaaaaaaa

SEQ ID NO: 117505 - DNA, 1000 bp, Homo Sapiens
aagtgtgagtactcggcgcacaaagagggcgtcctcaaagaggagatactgctagcctgcgaaggtggcactggcacctgtgtgcgcgtgacggtgcaggcccgcgtcatgggtgggagcgtgaggctcctggttggaggagggatgcacaagctcgactgcgagggtttctgtcctcctcagggaaccaaggctgaacaagggatccttgcccggctcaggggttctcaacctccttggcaggtccctacctccagctgatccctgagggaaggggaggggtccccttagtgggccgcatgggtggggccgggggccagcatggcactgacttgcaccctgccttgcagaccggcaccacggcacgcccatgctgctggatggtgtcaagtgtgtgggcgccgagctggaatacgactcagagcacagcgactggcacggctttgactgaggcccgaggccccgcctgccccgggcccctcagccttaaaccccgccttgtccccccgacatgctgcgtgatggtgtggcttcctcgcccctctctggggtgggtgtgggggtggagtggccttgcccacgcctctcacctctgccttcatttgtgctgccaccctgcccctccctcgtcctcctctcccgcttcctcctctctgtgtgcctcagtctcctgccggaagaaatgggttgagcccgaaaggaggctgtctgaggaagggagagggagggcctggggtgggtcccccactccccaccccaagccacaggggctcccaccagggtctgggagaggacggagctggctctgtggcgtcgtggccccattactgctgccttgcttcagccacctctcctgcccctccctagtccccactgctgtccaccatgagtaggagggaggtgcagtccccagcccccacccctcaggtctgtgttacttggtttttaagcgactggttgggatagaaccctaaagaaataaacttccagtggataccgg

SEQ ID NO: 117506 - DNA, 1000 bp, Homo Sapiens
tcccggcaccggtacggcgcccgacagccccgcgcccgcctcaccacgcggcgggccaccggccggcacgaaggcgtccccacgctggaagggatcatccagcagctcgtcaacggcatcatcacgcccgccaccatccccagcctgggcccctggggagtcctgcactcaaaccctatggactacgcctggggggccaacggcctggatgccatcatcacacagctcctcaatcagtttgaaaacacaggccccccaccggcagataaagagaaaatccaggccctccccaccgtccccgtcactgaggagcacgtaggctccgggctcgagtgccctgtgtgcaaggacgactacgcgctgggtgagcgtgtgcggcagctgccctgcaaccacctgttccacgacggctgcatcgtgccctggctggagcagcacgacagctgccccgtctgccgaaaaagcctcacgggacagaacacggccacgaacccccctggcctcactggggtgagcttctcctcctcgtcgtcatcgtcctcctccagctcgcccagcaacgagaacgccacatggtcccctctggggcgtccccagcctccccgtcctctgtctaacctcaccctctaaacgttcagcggtggaaagatttttataattttaaattattactgctttgaaataaacggacgtttgagctcacgtggcggccatgcatggtttgtggcggaagacggggcccagcggctcccccagcgctgaagcacggggttcagcggctcccccagtgctgcaggtgccgccaggacgggccacgtgggcccccagcctccccctcggccgcctccacgacccggagtaggggggctcgggaccatgaggatgaccagcaaaattcaagaacaaaactgctccaacagacttttttaaaggaaaaaatatgtgtatcttgaaagctatttaaaatacactacttacaaagagaaaaaaaaaaaaaaaa

SEQ ID NO: 117507 - DNA, 785 bp, Homo Sapiens; identical to SEQ ID NO: 57446

SEQ ID NO: 117508 - DNA, 1000 bp, Homo Sapiens
cagactctactatttccgtcaagtttctgtttgatttggatcatctcaggatcggattctgttttagagtgtttctgggccaggatccgggcccctgccctcctctgcacctgaccacactccctactcagggctagtctgttcttcccggacatcttctggtagccgtgcaggagagggctgggtggggcagaggccaggaggggacctggtgtgtcacctgcccaccacctggctcatccctcaggcccaccctgaccctacattacataggttacgtcagcctactgtggctgttgagcaaagcatttctcctttctgggcctcatttgcactagatgggcctgtggtcccaaagtaggtcagtaggttggggttgctgacaccccttgggtgcagctttgggacagatgagtggctctgtcctgtcactgccctctccctgcctgggggctatgtgcactccagacccctgcccaggctcaggcccatgaggtatggagacaccctggcccccaggagctggaggcaccgcccactcccctggcattccagctttgcaggtgaccctcctctacccaaagctctgtccccctgctcccactccagaagaactgcggcacgtgcttcgggcagcctagccacaggctttgagcgcctgcattcctgggggctggagggtggggtgccaaaggccctgagcaaaagccagagctcctctcatcaaagcctttacaaggtactgggcccagaggctttgccttgacagagtggcccagggtttcaagggaggaggaacctccccctacctaggacccttcctgtggggggtctacagagtcagggacagaagggaagggacccacaggaagtcacagtggtgcccagggatgtgtcagcccccagccacggggacgcgggattcaagaatgaagtaaatacagtcacagccccaaaaaaaaaaaaaaaaaaaaaaaaaaaaaaaaaaaaaaaaaaaaaa

SEQ ID NO: 117509 - DNA, 1000 bp, Homo Sapiens
gggtggggcgaacagcacgtgctggcagggctgggcgctcagtctctctggtgggagaagatgagcggaagatgctgaaggagattgtaaaagctgccaaggcccctgtgaaggccaggatacttccccaagatgtcatcctcaaattccgggacaagattgagaaaatggagaaagatgtgtatgcagttctgcagctagaggcggaggaaaaagagatgcagcagtcagaagcccagatcaatacagcaaagcggctcctggagaaggggaaggaggcagtggtccaagagcccgagaggagctggttccagaccaaagaagagaggaagaaggagaaaattgccaaagctctgcaggaatttgacttggccttaagaggaaagaagaaaaggaagaagtttatgaaggatgccaaaaaaaagggggagatgacagcagaggaaaggtctcagtttgaaatcctcaaggcgcagatgtttgctgaacggctagcgaagaggaatcgcagagccaagcgggcccgagcaatgcccgaggaggagccagtgagaggtcctgccaagaagcaaaagcaggggaagaaatctgtatttgatgaagaactcaccaacacaagcaagaaggccctgaaacagtatcgagctagcccttcctttgaagaaaggaaacagttgggcttgccccaccagagacgaggaggaaactttaaatctaaatccagatacaagaggaggaagtagctgtcgtggcctgaagaaattcatgggggcagcccttaaatcccttccctgtgggaagtcatcctggctggtctgtcttttctccatttgtttaaaaaaaaaacaaaaacaaaaaacaacactttggtgtggtggtatggtacgtagctattttcctaagcatgtctgtcaatctcccttcttgctgattagctttcatatgactatattaaatggaagtatttttgggaaaagagaaaccaaaaaaaaaaaaaaaa

SEQ ID NO: 117510 - DNA, 1000 bp, Homo Sapiens
attatactttctgctggagagtgccttgaaataaaatgtgagagtattctggtactctgtgttccagatgcatgaaattgggtgaggaataacccctagtctggaatctttgtgaagcatagggttattgcaaggcaaatgggaactaacacatcttgccatttgaatcagggtctccagtttctagaaaaggcagacactggttgggaccaaagtctccatggcacatgactgaagactggtggtcgtgtgtgtgcggagtccacggaagcctcggggaggtggagctgctccttccattccgtcaggacgtgatctgaaaacatgtagagaagatgagttgaggacagcttttctaaggcaatgtgatgtctttgctttcttatttctctttctctgcgttgttagttttgaagagtggaggagctaggggctccagaaagaatcttacacatgtgttgaagacattgatgtcatagggagcggggagctgcattcccttctgggctgttactgctaaatctcagtatgaacagaccaggcggaaagcttggtggccaagcagtctgtgtgcttccccgctgatggagaacgttgcgttgttcacaatagggcctcatgggtgtagccgcatggcagacccatggctggcgcagctgcctgttgccgtctgtcttcagtaactgctgctctgttaactgttctattctgatactacgcgtgttgttttttacaacaggtatgtttttgtttcagaaatatgtattgcttttctcatattttttgcaaattgtattgtcaacatgggtcatttaaagtcctgtatgaaccataacctgctgtggtacctttgtacatgtttgattctgtattctttattccagtgtggcatatgtgcccctctgtatcttttgagaagtgcggaataggttgcttctaccacctgttcttaatgtaacagtaaaagttttcacatttttctcagaaaaaaaaaaaaaaa

SEQ ID NO: 117511 - DNA, 1000 bp, Homo Sapiens
ggcctgagagggacgcgcgccccggggcccccgccgcgggcaccatgggcgctgcccactccgcgtctgaggaggtgcgggagctcgagggcaagaccggcttctcatcggatcagatcgagcagctccatcggagatttaagcagctgagtggagatcagcctaccattcgcaaggagaacttcaacaatgtcccggacctggagctcaaccccatccgatccaaaattgttcgtgccttcttcgacaacaggaacctgcgcaagggacccagtggcctggctgatgagatcaatttcgaggacttcctgaccatcatgtcctacttccggcccatcgacaccaccatggacgaggaacaggtggagctgtcccggaaggagaagctgagatttctgttccacatgtacgactcggacagcgacggccgcatcactctggaagaatatcgaaatgtaaagtggtcgaggagctgctgtcgggaaaccctcacatctagaaggagtccgctcgctccatcgccgacggggccatgatggaggcggccagcgtgtgcatggggcagatggagcctgatcaggtgtacgaggggatcaccttcgaggacttcctgaagatctggcaggggatcgacattgagaccaagatgcacgtccgcttccttaacatggaaaccatggccctctgccactgacccaccgccacctccgcggagagactgcactttgcaatggggccgcctccccgcgtagctggagcagcccaggcccggcggacagcctcttcctgcagcgccggtacatagccaaggctcgtctgcgcaccttgtgtcttgtagggtatggtatgtgggacttcgctgtttttatctccaataaaaaaaaaaaaaaaaggtttgttaattaaaaaaaaaaaaaaaaagaaaaaaaaaaaaaaaaaaaaaaaaaaaaaagaaaaaaaaaaaaaaaaaaaaaaaaaaaaaaaaaaaaaaaaaaaaaaa

SEQ ID NO: 117512 - DNA, 794 bp, Homo Sapiens; identical to SEQ ID NO: 30315

SEQ ID NO: 117513 - DNA, 1000 bp, Homo Sapiens
cccacgtttgtggcgtacgagctcacggtgctggtgttcctcaccttgtcagtggtggtgatgaagtttctcctggcggcgctggtcctgtctctcattctgccgaggagcagccagtacatcaagtggatcgtctctgcggggcttgcccaggtcagcgagttttcctttgtcctggggagccgggcgcgaagagcgggcgtcatctctcgggaggtgtacctccttatactgagtgtgaccacgctcagcctcttgctcgccccggtgctgtggagagctgcaatcacgaggtgtgtgcccagaccggagagacggtccagcctctgatggctcggagatgatggaccgtggaagggaagcgtctgtggggagtgagcgcttagatggccagcagctgctccttctgggaagctcgcaccttggcaacagaacagccctctagcagagcgtcagtgcagtcgtgttatcccggcttttacagaatattcttgtcctattttagaattttccggagtagtttatttgcagtctgttgattatgtgcagtagacccgggacactgcgttttaccgatcaccttgaatgtggtgcctggatgtgcctttttttttttttccctgaaattattattaattttctattgtgagttcatcagttcatagtttttttagtaaagaagcaaaattaaaaggcttttaaaaatgtacaacttcagaattataatctgttagtcaaatatttgttattaaacatttctgtaatatgaagttgtaatcctggccgtgagcttggaagcttacttttgattcttaaagcctatgttttctaaaatgagacaaatacggatgtctatttgccttttattgtaacttttaaatgaaataatttcatgtcaatttctattagatatatcacttaaaatatttggttttaaatcacaagaatatgtattctttaataaagataatttatgatcatggtaaaaaaaaaaaaaaaa

SEQ ID NO: 117514 - DNA, 1000 bp, Homo Sapiens
aagttttgaggtacgaaaagaccaccatgatctggctaagaagaattacaaacactggcgtgattcatggaaattaagtcatgtagaagagtggccagacaatgtggattttattcataaggacatttcaggagcaaccgaagacataaaatctttaacatttgacgcagtagctttggatatgttaaatcctcatgttactttgcctgttttttacccacatcttaagcatggtggtgtatgtgctgtatatgtagtaaacatcacacaggttattgaacttttagatggaattcgcacctgtgaacttgctctttcatgtgaaaagataagcgaggtcattgtcagagattggttggtttgccttgcaaaacagaaaaatggaattttagctcaaaaagtagaatctaaaatcaacacagatgtacaactagattctcaagagaaaattggagttaaaggtgagctgtttcaagaggatgaccatgaagaatcgcattctgattttccatatggatcatttccctatgttgctagaccagtacactggcaacctggtcatacagcttttcttgtcaagttgaggaaggtcaaaccacaacttaactgagtactccagatgacagtaactgacttgaagatggaaaaatatcaaaatagaactttatattgaaaatcactgcttccatagattggcatttttagctattactatgacttatataacttatacatataattttgaaaataacaactaaaagatgtataacatagcaaaactgcttaaacatcccattttgacacttgtcttgcagttagtttgacattttgtagttaatgattccaaattggtttagttgggccatctcattcttcacttcctgtaaaccactccatagatttgtctttcttcaagaaattagttttctttcctttatttgattgatggtcattgactactgaaataaaatatgcattttaagataaaaaaaaaaaaaaa

SEQ ID NO: 117515 - DNA, 1000 bp, Homo Sapiens
aggacgcctagatctctttcccagggccatggcgaacccgaagctgctgggaatggggctaagcgaggcggaggcgatcggtgctgattcggcgcgatttgaggagctgctgctgcaggcctcgaaggagctccagcaagcccagacaaccagaccagaatcgacacaaatccagcctcagcctggtttctgcataaagaccaactcctcggaagggaaggttttcatcaacatctgccactccccctctatccctcctcccgccgacgtgaccgaggaggagctgcttcagatgctagaggaggaccaagctgggtttcgcatccccatgagtctgggagagcctcatgcagaactggatgcaaaaggccagggatgtaccgcctacgacgtagctgtcaacagcgacttctaccggaggatgcagaacagcgatttcttgcgggagctcgtgatcaccatcgccagggagggccttgaggacaaatacaacttgcagctgaatccggaatggcgcatgatgaagaaccggccattcatgggctccatctcgcagcagaacatccgctcggagcagcgtcctcggatccaggagctgggggacctgtacacgcccgcccccgggagagctgagtcagggcctgaaaagcctcacctgaacctgtggctggaagcccccgacctcctcttggccgaagttgacctccccaaactggatggagccctggggctgtcgctggagatcggggagaaccgcctggtgatggggggcccccagcagctgtatcatctagacgcttatatcccgctgcagatcaactctcatgagagcaaggcagccttccaccggaagagaaagcaattaatggtggccatgccgcttctgccggtgccttcttgatcagggtgtctccttgtgcttctgagatgtggagaagaggctgctggcttccctaaaagttgaaataaaagatttttgcctttaaaaaaaaaaaaaaaa

SEQ ID NO: 117516 - DNA, 1000 bp, Homo Sapiens
gtcatgagaaaagtttggcttcatcaaacaagaataggactcagtttatatgatgtcgctgggcaggggtaccttcgggaatctgatttagaaaactacatattggaacttatccctacgttgccacaattagatggtctggaaaaatctttctactccttttatgtttgtacagcagttaggaagttcttcttctttttagatcctttaagaacaggaaagataaaaattcaagatattttagcatgcagcttcctagatgatttattggagctaagggatgaggaactgtccaaggagagtcaagaaacaaattggttttctgctccttctgccctaagagtttatggccagtacttgaatcttgataaagatcacaatggcatgctcagtaaagaagaactctcacgctatggaacagctaccatgaccaatgtcttcttagaccgtgttttccaggagtgtctcacttatgatggagaaatggactataagacctacttggactttgtccttgcattagaaaacagaaaggaacctgcagctctacaatatattttcaaactgcttgatattgagaacaaaggatacctgaatgtcttttcacttaattatttctttagggccatacaggaactaatgaaaatccatggacaagatcctgtttcatttcaagatgtcaaggatgaaatctttgacatggtaaaaccaaaggatcctttgaaaatctctcttcaggatttaatcaacagtaatcaaggagacacagtaaccaccattctaatcgatttgaatggcttctggacttacgagaacagagaggctcttgttgcaaatgacagtgaaaactctgcagaccttgatgatacatgatctctgaaagactagactgtcttatattatgagatacttgaatgctgcatgtaaagcctttaaagcaaaatcctcagaaatggtctaaataaaacacttgatatgcctagagaacacaaaaaaaaaa

SEQ ID NO: 117517 - DNA, 1000 bp, Homo Sapiens
acatctggcacatcccaggcctgtggcacggagcacctcccatggccgcagtgagcttggcctacagtgaagccatatttgaattgaagagatgcctactcgaaaacatcaggaacggcttgtcgaaccaaaacaaaaacatccagcagctcattgagctggtgagacggctgtgagtgtgcagagaaacccagttcaggtgtaggaggctgctgtgggcagccctgtctgatggggcacccgtgtggggctgtgctctggtgcctgagaatggctggtgcccaatcgacatgagaagacgagcagaagacagagggtttggagtctcctcaacagtgttaaaagaggaagtgacctcacagaccagctcagagatgttaccaagaatatcacagcccccagggtagggagacaagcagcagtttgttctgtctcagctcctgtcaaggatcctgcggggtgggccctctgtatagctgctctctgtcactggcccctggagtgggagcagcgtccttagtcactgcaggcccaggcgggcaggtggtcccaggacagaggtggggaagttgtcctgaggaagcagaagtaggccttgctcccgcccaacccaagggcctccagtggaccagcattcaagatgtgagtgcccgtggtgtgcaaggcactcccatggcaccgtatttattgactgatctgtgaaggcttccctgacccctgcccaggaagagttcactggtcgctctgttgtgccccacagcactttgttatacctctgccacacacttcacgcagcgcgttgtaactcatgtgtttacatgtctgtccccccagactgtgagctccttgagggcagggactgtacattctccagctctgtgtccccagggcctggcacattgtagacgcttaataaatgtctgttaaatgaaaaaaaaaaaaaaaaaaaaaaaaaaaaaaaaaaaaaaaaaaaaaaaaaaaaaaaaaaaaaaaaaaaaaa

SEQ ID NO: 117518 - DNA, 1000 bp, Homo Sapiens
gacacctccaggtccgcctggcatgggacaccaagtggaaggcccaagcagctcatctgctcttgggaccaggggccagttgggttgggtctggtcacggcagagcttttgtggagggtcaggaagggtggagaggagctgggttgaagcggactgctgcggatgcaactcccagcttgcccaccgcgggctgtctgctctccctcctagcagctgtcacactgaagttttgtcctctgctgtctcctctggtcctgagatgagctgtgagcctaggtggccaaggcttcctgcattgcttccctgtgagtccaaggccttcccccaccactgggcagaggctggacagcacggacttctagagagagccgcgttgccagttcctctcccactcgctcgtccttatccaccacgctattatagtttccgttgtcctccaccagcatttcccttactctgaagttccggcattcacatcattcatgttttcttttgtcttttagctaaaggaaaagcattggcgatttgtctgattctggttttgagttactctttgttcagtaatgcactttattttattgtccaaagagagtcagagctaagcatacaggcttgggggtgagccctgctgtgagagttcaggccctgggaggctcagccacctcctcttgtgggaaggaggtctcagccccacctcgcatcttcacctgcccttggtgtggacacaccctctcatgctaccagcaccataatccagtgggggtgactgggtgcacacctgcccaggtgaacacagcggctgccagtctcctggtcccgagaggaggtggggcctggccctggctccctccaaccagctgctcctgggacacaggtgctcctgcttcggctctgtttcggctcacaggtgtgcatcactgggcttggatttgcattacattgaccccagccctgcagtggaacctaataaaagcgcctgaagcaaaaaaaaaaaaaaaaa

SEQ ID NO: 117519 - DNA, 1000 bp, Homo Sapiens
tctgaagtaaccagcaacctaggaacatagaaggtaatatttggcatggaataatgcctagccttagtagataaagcggcattacctttttttttttttttttttggagacaaggtcttggtctgttgcccaggctggagtgcagtggtgtgatcttggctcaccgtaatctccgcctcccaggctcaagcaattctcctgcctcaaccttccgaatagctgggactacaggcgcacgccgcaccaccacgtctggctaaggggctttacccttaaagatagagctcatgaagccccgcctcatccaagcattaagctaaacaggaaatcattaagagggactatcgaaccttaaagtagaaataagatcaagatctaagtcttctagcatcttatattattggaagaagacctaacttggcagcaagggaagtggcttaagggaagagtcagtctatgttctttaggtagctagacacaatccctaacagtgcttaagaaaggaagggggctgggagtggtggcagtggctcccagcactttgggaggcagaggccggtgggttgctttagctcaggagttggagacaagcctgggcaacatggtgaaactgtctctatcaaaaatacaaaaattagctggcatggtggtgtgcacctgtagtcccagctacttgggaggctgaggtgggggaatcacttgagcctagggaggtcgaggccacagtgagctgagatcaccccactgcattccagcctgggtgacagagcgagaccctgtctcaaaaaagaagaagaaaaaggtggggggaggggactaagatccctatgtcctagagatgggggaatgtgttattgtatgggaggagggagtcaggtagtgacgggactggatgatcgtgttagggatctttgttctctgaaacgcaaccctgtctaggacaatatacacgtgagtgagtgcttaataaatttaatttcaaacaaaaaaaaaaaaaaaa

SEQ ID NO: 117520 - DNA, 1000 bp, Homo Sapiens
caattcaatggagcaggaggaggggatatcatatatttaggggaaagacttaagcctttgagctctccagcttggaccacacattgcccttttctcagggaaggaaatggaaacaaaaagccaacagggcaggggttttgtaagtggaactctggattgactggtcagttgctacaatcagaatatgctttcttggaccatgtttgagactcagaagaatgggcctttctgccataattcttcactagtcaagaatgccagcagtttctttgtataaagagacctgcctttaaaatcatacattctgaacattttagtcaagctacaacaggtttggaaaacctctgtgggggaggggcgagtataaagttttcctcttttttaactgttccctttgcccttcaaactgcagatatttttttttttaagtggggacttctccctacttgattaaagattgagtggaattctagatgtggtcatttgtgtcataatttttttgttttattttgtttttgattttttttttcctcccctgagtgtatgcttagttgttgagtatatatatttgggaccattaaaactttttttgatgtaatataacctaacgttgtgctggtacctgttttaccatgtgtaatttttgttctacatcacagttcttaatttgtttagagttttatgaaagatggtatagtttttattgacaaaagcaaagtaatcttacaactatgtgcatacaaaagcaatactattttgtgactaaatattttatattaaaatttacatcagcaactgtcttgagaattcagggaaatagaatggaatttaaaacttcaacagttttgttaaatctagaaacatgaaattagtattccaaagagattctgaaatttcttttcttggggaaatgacggtacattaaatcaaaattgaggatggatgatttaaaaacatttgacttttgaataataaaaagaaaagtgaagagtaagagaaa

SEQ ID NO: 117521 - DNA, 1000 bp, Homo Sapiens
aggagtctcaaggggaaagaccacatttaagtttgttcattccgagggagacgacttaccagtttcattctgtatcgcagtcaagtagtcaaagtcttgcctctctagctacaacatttcttcaagaaaagaaagcagaagcccagaatcataattgtgtccctgatgtaaaggcattaatggagagtcccgagggacagttatctctggagcccaaatctgatagtcagttccaagcatcacacactgggtgccagagccctttatgttcagcccagcgtcacactcctcagagccccttcaccaatcatgctgcagctgctggcaggaagactcttcgcagctgcatggggctggagtggtttccagagctctatcctggttaccttggactaggggtgttgccagggaagcctcagtgttggaatgcaatgacccagaagccacaacttatcagtccccagggggaaagactctcacaagtttctttgttggaacgaagctcaactcatataaggagtttggaaccccctgccggacttacaacctccaacttctctctaatgaggctcttgggagctgtacaaaaaggctggatcaggtgcaacaccaccataaggaagagtggattcggtggcatcactatgctcttcacaggatacttcgtcctgtgttgtagctggagtttcagacgtctgaaaaaattgtgccgacccctgccctggaagagcacagtacctccatgcattggtgtggcgaagacgactggggattgccgctctaaaacatgtttggattaggaagcacgtttaagtaggagaagccttcgtgacttctctctagtgccttcgtgccctgtgttgcccactgaattgccctgtaacacctaagtgtagtggtagcattaagggatagcttttcagccctcaaggttatcaggagcatttgtatcactgctataaataaagtagtatcacttgtcaaaaaaaaaaaaaaaaaa

SEQ ID NO: 117522 - DNA, 1000 bp, Homo Sapiens
gaatctgtacatcatcaggactgcattgctcaggcattttctaaactctaaatttacgagctgtacaaaaaaattggtcttgttgtttatagtggcatctcatgtttgaacccgggtggtatcccacagttggattcagttggctgtgaataactgcctgttttcctaaatcaaacccatcctcaaaggatgaagactcaccaccatccaggacattcagaagagttcactgcagatgctgcaggtagtcctcaaaaatgggttccagaaatgttttgagcactggcaacatatttgaaataagtgaatattgtcctgtgaaaagaatagcaggacttttagatgaaaagtattcttaaaaagaaaagtcaggcaccccaccttagacctcgtatgcttgatcctgtgagattgatgtttgtggctggaggtggatttcatgccctgtggtgtttacagtgtatataatggttgtgttttcatggggctatgaaagtgcacgttaaacctgagcgcctttacctttagatgagtgctttggcccctctgtgaatagcacgattaaaatccagttgtatataatggacagctaacggaacaatataatcaccacaatgcagctaggatagtgttgcggctataattttgtgtttttttttttaattgtctagtcttaaatttgtacatcttgtataaaatatgaatgtttcccaaataaactatgaatgtttcctgtataatatatgaatgtttctgagaagaaactctaaatagttgaaaggctaacctgctcaaaggataccaaataatggtttaactggacaacctgaaaattagcatagaaaacaatcctttgttatattttagtgatccacaagattgagaaaatattatatagttagataataacattcttgtctactttatcctgtctggttacaaaattttttaaaacttaaataaaaacatgcatcttaaatggaaaaaaaaaaaaaaaaaa

SEQ ID NO: 117523 - DNA, 1000 bp, Homo Sapiens
gaaaatatatttcattatagaaaagaaaaaattaaaagcttcttgcttttcagtgcctgatagagtgaaaacacaaagttgcactttaataatttcaataaaagctaatctgtgtcagcctccctctgcttcagagagtcaggtgagcatccataacctaacaggcagagccctagcgatgtggatcaagtttcctgagcccgggggcggtggagcctcatgatctcttatcttttgaggctgaggcaggtcacatgcaacaaattgtgaccctgctccccacaagtcatgcaaaggttttgaagagcttttaccgtggggcagatgaacttgtgtcaaccatgcacaccctgtgagaaccaagtacctgtgtttctaaggcgggcactcaaggtgaggggtgcattctggccaaagaaacaaaagctgtggtttcaggaccatgccgtgtgtagctgatctgtacgggacgtgtatgtaaggaagagcaatcatgatagataagaacagtgtgtgaagcagccttcacactagagtgtttggtcatctcttataatgtaagggaaggtactttaaaattctgggaagatgcgatgaactcatgtcccagtcagaaaataatccaatgaaataagcattggttgccaggccacagttaggaattgtattgtgatacatctagaggccaagagagcaggagagagctaccaacttacactgtggtttaagctaaatgaccgcacagcatcatagcattgcagtgttgttactaaatctggaagtgacctgtgaatgtatggaatacaataaagtcttttattctggttcatttgctagtacttcctttttgattggatactgtagttcttcctctggattttattttgttcagcgtcaaggccctaattttgcaaatgtagtctaaaccacattacgtggactagaggatactctgaattagcaagttttttgtttgctgaataaaactattccatcttaa

SEQ ID NO: 117524 - DNA, 1000 bp, Homo Sapiens
ctgggctctggagcccctacaagccagagacgctatcggaactggaacccaccactgctgggcaaccttccggatgactttctccgcatcctgccccagcagctggacagcatacagggtaacgctgggggccccaagcctgggagtggagagggatgtccacctgccatggctgggccagggcccggagaccaggagagccgctggaagcagtacctggaggacgagaggatcgcgcttttcctgcagaacgaggagttcatgaaggaactgcaacggaaccgcgacttcctcctcgctctggagagagatcgattgaaatacgaatcccagaaatctaaatccagcagcgtggctgtcggaaacgactttggcttttcctctcctgtcccaggaactggcgacgccaaccccgctgtgtctgaagatgccttattcagggacaagctgaaacacatgggaaagtccacccggaggaaactgtttgaacttgcccgagccttctcagagaagaccaaaatgaggaagtcaaagaggaaacacttgttgaagcatcagtcgctgggggctgccgcgtcaacagccaacctcctggatgatgtggagggccacgcgtgtgatgaagacttccggggcaggcgtcaggaggcacccaaggtggaggaaggcctgcgagaaggacagtaagagatgccagcagctcttccttgccagagatgatctgacccggtgggggcagctggaaagcaacactggcccccagctgaagggcccagctgcagccagacagatggtgcttgagaaccgaggcccggtgatcctccagccacagtccagcccaaccactgccactttccatgggacttagaacttcggagttgctgccttgcaattggaggaaggacctggggcccctataggcagcagccaattacagccccttttgtagccgggcgttcctatggtcaaagagtggaaatgcaggaaccaacctcccttt

SEQ ID NO: 117525 - DNA, 1000 bp, Homo Sapiens
ggcccattgcctgccaagtgttaaggcaggatgctggaggcattttgcatatccaccaaaatgtggaatcttccccagggaagaatcttcaggctcttggagtcagcaaagtagagaaagagcattggctgtatcctcagcaaattaccaccaaccaatggaaaaatggagctaccagggattctaggggaaaaatgctgtcaccagccaccaagccagagtggcaaaggtgggcagaatctgcagaaactcgaatcgccactcttcttcagcaggtgcatgggaaaccatggaagacacaaattctgcacatccaaccagtgaaatcctatgctccccatgtggatcacatagtcctggatctggaatgctgcccctgtccttcagttggctagaggaggtagatcctgggacacatgggatccacgtgcgagtggcccttaaatgtatcagttcagtccaggttgtcatcccttttgtcccctggtgatcagtttttttcatattttatagccctgaaagcaggctctagatcgattcaaattatttcatttgtcttccattgataacagaaaatgaaatacctgtttgggagaagcagcatggcccattgaaatgaggctcatctgtgcaattatgaattccaaattctgacctcagttctggaattgaagtttcagtatgttttggcctcgggtttcgttatttgcaaaatgagagtttctttgaactgtctcacgtgactattaagcaactatacacaggacatcggttattttagagtgaaagacacagtgctttttccaaattgctctggctaccatatagaaaattgactgaaggagggccaagatggaaacagagagaccagtgaggaggcttctgtggttgtccaggtctgaggtgatggtaacttggactcggatggtggtaatgggaggtagattgatatgataaataaaattgacagcccaaaaaaaaaaaaaaaaaaaaaaaaaaa

SEQ ID NO: 117526 - DNA, 1000 bp, Homo Sapiens
tattgactccttggcttccaatttatttagtaatccaactttgcattgactgtttaatcatttactctaaatgttagataatagtagtcttgttcacatttcatgaaacctatgaaactatatttttgtaaaatgtatttgtgacagtgaaatcctcgtaaatgttaaaggctttaaataggcttcctttagaaaatgtgtttctttaaatttggattttggtatctttggttttgtagttgactgcagtgtgatgtgaccttacctttataagagccacttgatggagtagatctgtcacattactaagatacgatatttctttttttttccgagacggagtcttgctctgccactgtgcccggccaatacattattattaacttaaggctgtactttattaaggcttccttagtttttgttttgttttgttttttgagatggagtctcactctgtcgcccaggctggaatgcagtggcatgatctcagctcactgcaacctctgcctcctgagttcaaatgattctcctgcctcagcctcccgagtagctgggattacaggcacctgccaccacgcccagctaatttttgtatttttagtaaagacgggggatttcaccatgttggccaggctggtcttgaactcctgacctcatgatccacccaccttagcctcccaaagtgctgggattaggtgtgagccaccgcacctggccgatattttctttaatgaaatttataaatatgcttcttgaataatacacattttgggaaagggaaaaatgtctgttcaaaaagtaaaggtctcttttatagcttttccaaacttaattgctaaatttttctttgaggttctcctgaattatgtcttacaaactaaaagcaaaaatttttagcagaaattttggaatacattctatctagcacaatttgaatttttaattatcaagatttttgttaaagtttctctcctttaaaaattttagtacatttgtaaat

SEQ ID NO: 117527 - DNA, 1000 bp, Homo Sapiens
tgcagtctcactctgtcaccaggctggagtgcagtggcgcgatctcagctcactgcaacctccgcctcccgggttcaagtgattcccctgcctcagcctcctgagtagctgggactacaggcgcgtgccaccacgcccagctaattttttgtattttagtagagatgggtttcaccatgttggccaggatggtctcgatctcctgacctcgtgatctgcccacctcagcctcccaaagtgctgggattacaggcgtaagccagcacgcctggtcctttattttcttttcttttttctttcttttttttgagatagagtcttgctctgtcacccaggctggagtgcagtggcgcggtcttggcttaccgtaacctctgcctcctaagtagcttggattacagatgcccgccaccatgcctggctaattcttgtatttttagtagagacggggattcgccatgttggccaggcttgttttgaactcctgacctcaggtgatctgcctgcctcagcttcccaaagtgctggattacaggcgtgagccaccatgcccagcccagatggccttttctctcagcccactgtgacctatggggccaccccttctccctagcacctaagtgttccctcttgctgctagtgctgcctggaggtttggcggcgggcaggagggcctggggctcaccacagccacagccctcttgcagcttcgcggcagcagctaattcaccccatctgggttttatttatagttcccatccgctcttgtagggtaattaaaaccatggaggcgatcagcgaggttctccaggaccttaggtttgatgcggaatctgccgagtgatggcggctccccagggatgcgccgagggagatgggaaacggggcggatggcgcccagcccagccctaactgccagctggctggggtcgcgccccactgcgctgctgaccttcctgcagttccagacacctcccacaataaagagctcctcctctgt

SEQ ID NO: 117528 - DNA, 1000 bp, Homo Sapiens
catgaagcccgtgtgtaagaggtgctacgagaagttcccgctggagctgaagaagcggctgaagaagctgtcggagctgacctcccgcaaggcccagcccaaggccacagacctcaactctgcctgaaggccctcttgcgcagctgcctctcggcccctccgccttctcccctcctgctgtccatgcttggccccctcgtccccatccacctgtgccctccgcatcttaccctccctttctctttcctcattgccttctcccttcctgttccctcatctctgccttccccatgtctctcctctccttggccgtggcttctgtctgtgaggaggcaggagctggggagtgggagcctatgaccccacgtctgacagccatgtccacctgtgcccacagcttccgcccacagacctccagggacaggagcaaattgcaccacagctccccgcctggcctggccctccccaggcggctcagtggctcatgctgtcctgtgagagcccctgccccagagcggccccactaagcgcatgtggctcctgggctacccacagccagggcagcctgctggagccacagggccagggccatgcagatggaggcctctgggagccacctccaatccctcaccactcactcaaccagtggcacagtgtccttgtgcccacactgagccagcaagtcctgctgtccacacccacaagctacctggagggacaggacccacctccatccttcggaaggccttcctggaatcccaccttggcctccgccctcggttccgccccgcccctctccccccgaccttggggcttgtgtcgagcccttgggtggggccaggaggaggtgatggcgtcagaggaggtgtggtcagaggtgacttgttcccacctccagggaggacgcttcgtcttcggccagcgcagacctggtgtttgtttgttgggctcacgcttgcacaatgaaggcttgttcacacaaaaaaaaaaaaaaaaaaaa

SEQ ID NO: 117529 - DNA, 1000 bp, Homo Sapiens
gtgcttttaaatgagatttgaggattcaccaagacccatggggaaccggggcagcagggaagccctcgcgtggtcttggatgaggggtgttaaatgtgtatcgtgctgtggaacatgggacaattccacgcacatcccaccgaatcatcacgcatcccattgactggcaagtactccccgccccctctgaaagcatgtcacatcatgtaaatttgcttctaacatctgcttcaaactgtctctggactccaaatttggatgggtcagcctctgcagaaagtttgtgttgagatgctggaagaacagcagagcctcctgcaccctcagcaagggaccagctcccaaaggaaaggtccttgtgtgacatttggagaatcttccttcatccagacaactctactcgaagcaagacgaaagcaggatgtggcagttgcagtgagaaaggaaaggaaaggtgggcagactctgctttctggaaatttcttcacaaagtagagctcatgaactctgtgctgtcttctggtaacatatcatcagtgtttgtattcatggtgtggcacatggatccatggcattgggtaaatctggtggtttttacacatggtcagaatgtgttcaaatacatctcatgatggagacagtaaccaaggtaatgttttgtttcagcattttaaaaagactccacttaacatttatctcagaatcatgagcctctctctagttgacaattgtcattgttcccccagccccaaattgaaccatacatttattttccaaaacagaaattgtttctgtaaacatatccgaccttcaaaagaagtgtgaggttggatttttcccccttttatttgtcctaagattccaggaggctggcctcccagcccagatagctcagccacctcacctgcctatcattcctgcattcctactttgagggtctcatcatgcccactgggtgttgttcctaagaaactgattgattaaaaaatttcccaaagtg

SEQ ID NO: 117530 - DNA, 1000 bp, Homo Sapiens
tctataccaggtcacctgtgttcaatctgggagccttcctggccagtctgagtggcagccagaagggagctcatagtgtctaggagtctcaggcaaggtaggtcagggtactgtgggcaggggggatgtgtgtgataggagagggtaccctaaaccccataccttccctccctgacctgaaaagctgatctcaacagggattcacacagaattaggctgtgtttttgcattagctggtaggtgactttctcaaaattcttaaattcagaaagtatttagtaaacttgaggaaggtatgaaatctggaggaggcatccaggacccaggggtttgatagctttacaggtaggatcataccacaccaaaagagcagtggacaataagactatatgagctatatgaagcttttaggaatcatttaggacagacagagccctaaacaacccattcatgacttaagttgttggctcagtgtatgctggggacaaagaaaaactaacaagccgacctgcctttatgataaattctagtgtgcttacaagggatgacttcctgaggtgtgatctgtccaccttgaagaactccacaactgaagaaggggagctgtgagaacgtggattgttctacaacttgcacagggtaacagaggaagtggctgaggcctagagtcacgttttccagttcccttcgcaaactatatttcttggaacgcgaaaggaagctttacctatttcatagaagacctggaatccataacctcagaaggcaatattattgatagaaaatgtggaaggatcaggaagttcttagattcttggatgacagatgcatgttgatgccctatggagatgtccttgtgttttgaggtcactgaggtaggaagacctgtctactcttggtttcaccactagaacagtcttgggctggatgggttatagagctgagcggctgtgatggttctgtttttacattaacaaaaacaattaaaaacaccaaaaac

SEQ ID NO: 117531 - DNA, 1000 bp, Homo Sapiens
catgtgcttcagaagaaagagagcatgggcatgtgtttcatcgggaagaggaattttgaacatttccttcttcagtatctgcagcctcgacctggtcactttatttccatagaagacaataaggttctgggaacacataaaggttggttcctgtataccttgggccagagagcaaacataggtggcctgagagagccctggtacgtggtggagaaggacagcgtcaagggtgacgtgtttgtggccccccggacagaccacccagccctgtacagggacctgctgaggaccagccgcgtgcactggattgcggaggagcctcccgcagcactggtccgggacaagatgatggagtgccacttccgattccgccaccagatggcactagtgccctgtgtgctgaccctcaatcaagatggcaccgtgtgggtgacagctgtgcaggctgtgcgtgcccttgccacaggacagtttgctgtgttctacaagggggacgagtgcctgggcagcgggaagatcctgcggctggggccgtctgcctacacgctccagaagggccagcgcagagctgggatggccactgagagccccagtgacagcccagaagatggtccaggcctgagtcccttgctctgacagagatggatctgctagaaggaacctggagagcaggacccatggctgggcggctggtgagcagtccaggtgcccaagggccagcttgctgctgcccaaagcagaggaagccgggctggctgagggtccgaaaagcctgcaggggcccggcgagccccaggaagagcctcagctccaggctggggctctggctgctggagcatctgctggctggtggggtggcccgagttccccttcaccgcccccagggagggtttcccacctcagagtacaccgaggggacctgcagagggggctgtcgggacagcgtggaataaacattatttcaaggacaaaaaaaaaaaaaaaaaaaaaaaaaaaaaaa

SEQ ID NO: 117532 - DNA, 1000 bp, Homo Sapiens
aggtgatgacacagacccaatccctgagcttcctgctggggtcctcagcctccttggactgtggcttctccatggcaccgggcttggacctcatcagtgtggagtggcgactgcagcacaagggcaggggtcagttggtgtacagctggaccgcagggcaggggcaggctgtgcggaagggcgctaccctggagcctgcacaactgggcatggccagggatgcctccctcaccctgcccggcctcactatacaggacgaggggacctacatttgccagatcaccacctctctgtaccgagctcagcagatcatccagctcaacatccaagcttcccctaaagtacgactgagcttggcaaacgaagctctgctgcccaccctcatctgcgacattgctggctattaccctctggatgtggtggtgacgtggacccgagaggagctgggtggatccccagcccaagtctctggtgcctccttctccagcctcaggcaaagcgtggcaggcacctacagcatctcctcctctctcaccgcagaacctggctctgcaggtgccacttacacctgccaggtcacacacatctctctggaggagccccttggggccagcacccaggttgtcccaccagagcggagaacagccttgggagtcatctttgccagcagtctcttccttcttgcactgatgttcctggggcttcagagacggcaagcacctacaggacttgggctgcttcaggctgaacgctgggagaccacttcctgtgctgacacacagagctcccatctccatgaagaccgcacagcgcgtgtaagccagcccagctgacctaaagcgacatgagactactagaaagaaacgacacccttccccaagcccccacagctactccaacccaaacaacaaccaagccagtttaatggtaggaatttgtattttttgcctttgttcagaatacatgacattggtaaataaaaaaaaaaaaaaaaaaaaaa

SEQ ID NO: 117533 - DNA, 1000 bp, Homo Sapiens
acaatctctctatatgcagagccctttcatgataattagaatggtatggacaaaccaatgaaaacaagagggaaagtgagaaagatcacccatgattctgtttcactgtttgctttctcctgtcatggttaagagaaatgtgcaattcgatcctcaatcagtgggtggaggataacagggtagattcacttgtgtgcacttgtacagttgtagctgcgagtccagaagtcctctagagcatgtgtactggcactgagttggtgagacagttgtggagtatcccattctgatgagtacagaaaaaaaaagaaaaagaaaagaagagaaaaaattaagaaaaaaatcaaaaaaggaagaaaactaaaaaaaaaaaaaatcaaatcaccttgtgattcagtgtatctgtttactaactcaaataaagcaattgttccctctggaggggtccaggtgcccccgccccacaaggccgcggagcctcagcaggaggggtggcgagttgcgggtgggcagggccaggacggtgtggcgccagccttgaagcaccacggcccaaggatgcggtgtacatactgtatttctagattctcctttgtacagagtcacttcacaagtcaagctactgttttacaggtgctccttatttattagagctgtgagagcttgggggacacacctggcgagcaagctcgctttttaaaaatgaaatttgggggcaggggaaggggaggcgggagggaggggaagctcgcaagcccggggagagatttataaaagtaaacaaaagaaaaccttccagcaacaaattaaaaaataataacaaatcaaccccagcaccaaacccacccaggcaggaagaagccgcccctcctctggggccatatttttctgctgggtcacaacattctcctctccctgactggtgtcagattcatcaaacaaaaaataaatctcgaagaaaaaaaatgcacttacatgtgcttatttggcttttctcatt

SEQ ID NO: 117534 - DNA, 1000 bp, Homo Sapiens
ctgcctccagcaggacccaaggccactttcaactcttatggggttctccacctgccccagagcttctcaagggagggtaagggggcaccctgagcccacaggacccctacttcacagctcacaggggcaggaggcagctcccctgcctccaggaccctgttgctatggtgacacagcgtttctaggacagaggggcctcccagtctccccccaccacccgtgcacgacttcctcaccacccccaggttccctgcagatgtcgtgtgtgtcctgagtgtttctttggttctttgcacgccaagtctcttggttgtaccatgtgacacaccctgtgcactggtcgctgtcttcgtggcttccacccttgttaatgatgctcctgcctctgcctcccagcccctcacccagcacagctctgcctggacttggagagatgggaggcagacccccaccaccatacatgctgtctgtggcccctcagacattctgtttcatctcccattcatctccctcctcccaccgtgtcagtttttctgcctttccctgctctgttcttccccctccttaggccccagcctgggcccagacccatcctcccagccaggtttccctccagcaggctccttccctccctgtcacctccctctcaccaacccggggtctgagcccctcattcctgaccgtccgtgttctcaggagtggttgaggacacagggccccagcccagccctctgcaccccccagcccggccatctgcgccccacagcccctttggagcttttctcttgtcctctcactccttcccagaagtttttgcacagaacttcattttgaaagtgtttttctcattctccatacctcccccaagctctcctccagcccttcccagggctcagccctgctgtcctgagcgtctcctgggccagagagaggagatgggggtgggagggactgagttgatgttgggtttttcattcaataaattggtgatttcttaccg

SEQ ID NO: 117535 - DNA, 1000 bp, Homo Sapiens
gcagggcagagaacctgccctccagaatgttattgagaggagctggggagaaggaaggggagcaaggagaggaagctctctctcctctccctgcttccccttcaccattccccacattctgcaaggacaggagccaccttcctctctctcacctcccctggccctgttcaccagaggttctctatgattaatttcttaggcctatttaagatacatatttatatagttcttaacggtttttctctgatcatttcctctcatttttagaatccccaggtctctctcagccaagacagtggcagggagagcctgaactttatgaggggagagggcagagccccctcctccagacccccaagctctaacccattttcctccagccctggctacccggatgaagaggttggaggtgggcagccagggtagccagtgaggtcaggaagtctgttgccttaacgtccccttccccacgaacacacacccttctccgctcccaggtctggttggtgagacttgggagtcaggaataagggaaaggggattgtttggtttttgggtttttccctaagcccctcccttttctttcagcctttttccttcccccattatgtcatgacctcacttaagtggaacactatatcataacccagagattcgtcccagccccagagtccgacagactgtctggtccctattcctaatgaggggttgtgttggggcccaggtggagggaggggatttgggggttcagactgcggggaagccagggtctccctcttcaacgccctcctccccctcaacccaccttcccaactgggacattctcaagcttttcacaccgaaaaggaaaaaaaatgttatttttagatacattttatgaataacttttgttatgaatatggctggtaaccattgtgtatgttattaaagatacaaaatgttgggaaaaaaaaaaaaaaaaaaaaaaaaaaaaaaaaaaaaaaaaaaaaaaaaaaaaaaa

SEQ ID NO: 117536 - DNA, 1000 bp, Homo Sapiens
tggagatgctacagctagaagaggctgtgggagaggctgggctggtaccccagctgcgtgtgctagaggaatactctgtcccctgtgcacatgctgcccatgtgacaggcctcaagatcctaagcccaagcatcatggtctcagcctccattgatcaacggctgaccttctggcgtctggggcatggtgaacccaccttcatgaatagcactgtgttccatgtgcctgatgtggctgacatggactgctggcctgtgagccctgagtttggccaccgttgtgcccttgggggtcaggggcttgaggtttacaactggtatgactgaggtatcctgcggtggctggcgtgctgggcatggggcctgctcacagacagcatggagcagggaagggctgtctgtgcccatgctcagcatgccttgaggggaggaggtggtggccgtgggttcctgatgtcggtgcaggagctgaaggtgagtggagtgctgccaagaatatgcccgactccccatgacaagacagaactttgtaacaaacagtaccaatttattttggccgtgggtttttgctttttttccagttgatgactttgtgaacattcccaggtattggagcctctgtggccttaaatgtggctcagtggagggagacccagcatagccaggccagtatggagcacctcacgcacagctctcagaagctgcaggcggacgaacatctgaccaaagaggtgtggtcgaggctcctgaaagagaaagggcctgctggtctcatcctctgcttcctttgcctttaccctatacctctctgcacgtcccaccccgttttgctgtgtgctcacccccaggatgtgtacccggttgtagtaggagctgaaatccatgctgagctgtaccaggaacttgcatatctagagacagagactgagtcactggcccatctctttgctcttgtgccccaggccagaataaagaatagagtgtagaggtcaaaaaaaaaa

SEQ ID NO: 117537 - DNA, 1000 bp, Homo Sapiens
cgaggttgtgggagtcgactgggctgagggcctgaagtcagggccggaggagcagcctcgggacacagccagccctgtccctgcctagcctttagccctgtccccactcacgtggcttctcagcgggctgcatggaatgtctggtagctcaccacacttctggcttccatttgtcttcactcaacgtcagggtgggggagtggtgctggccaatcacaggagagagcgtgagttcccagtatttattcctggctgcccttggctaaaggtcacagctcctgtcaccctgtcaggcagccctttccatgcccctgttcaggcctggggaggtaaaggctcaggctgttagtagccgcagagagccacactcaccttgtcaggagactcttctcaaactgtccttatgtgagtgcactgccatttcttgcagggaccctgactgacacaggggctactactgacactttacagggatggttctcccccgtgcagggccgctgtgcccactgcaggacatgcagcatccttcgccccactccactcactaaaggccagcgcaccccaggccccatagtattgctggttatggatttattgactttatgttccaaattcagctttttcagttggcagttttttgaaaggggataagctttgtcagtagagggcaccaaacaggcattataggaggaaaggcgcctccttcgtggttcttgttggttgtgcttctgcctctggacgccgcagtgcatgtggcttccccagcacccagctcctgaagcaccaggcggtcagcagctgcccttggcaccctccagccctcagaagttgcgtaggagacacagcgcctccactgaggcacctctctgggaataacgttccccagcaccccaaatggatttccagtcaattcagaagcattttaccagtgaagccctcattattccagttcactgttaaagccagtaattctctatattaaactttccctgttcaagtt

SEQ ID NO: 117538 - DNA, 1000 bp, Homo Sapiens
ctttctgggcacaggtgtcactgctctgccacctatcactattctttttctgttcagtttttctctcaggtgtttgctgggaaattaacactggaactgacccttttctggcagtgaatgtaagctctagctcccccatctactataaagaaatgtcttcgagatgtagaaataaggaatattctgaaaataaaaattatacagtagtaaagataattcagaaagaaaaagctacctgttagaatttccagtctaaatggcacagggtagttacggagaaaaggggatggagaaggagaaactatgactaaagatgagaggtatgaacgagttgtcaggttcctatgggcttaagctaggacaatcaggccctaaactccaaatttggataaaatatctctttgcattcttcttggccacctgcatagtctgacacatacgtatgtacagttagacttgcaggctgcaggagtgccctgcattgttttcttttaattagaaataaaaagtattagtctaaatgtggttctggtgctggtgccctgtatatatgtaacaatataggacccctccaaataggttttgcttctggtgaatcttggtcattgggttagtatatgactgtctataatattttccatttgtattattatattggggaaaacattttttatcattttctattaagaaaatggaaaacttaaatatggtgttaaaaatggaaatatatgtgatatttgcattattaaacccctttgcagatctaaagtctcagggttccactattagtggttaaagtactgaataatgtctgggtctatttccatctgtaaaataagaatatttgtctcacgtgtctgtcatgaatagcaaatgagaaaatgtatataaaagcactttgtaaattgtaaaagtagtacagatgtgagcttctatttgtttagaagcataaatgtgaattatatacagtttgaattttgcataaaaaaaaaaaaaaaaa

SEQ ID NO: 117539 - DNA, 1000 bp, Homo Sapiens
tattattggcacagacatgggtctcataagccatggcacaagacaagatttgagagtggctcccaaactattcaaacctcagcaacatggtataagaccagtgaaagttaatgtcattgatttttcaccatttggagaaccaatatttttggccggctgttcggacggaagcatcaggctgcaccagctgagctccgcgtttccgctcctgcagtgggacagcagcacggacagccatgcggtcaccggcctgcagtggtccccaaccaggcctgccgtgttcctggtgcaggacgacacatccaacatctacatctgggacctcctccagagcgatctgggtcctgtcgccaaacagcaggtctcccccaacaggctggtggccatggctgcggtgggtgagcctgagaaggctggtggcagcttcctggccctggtgctggccagggcgtctggctccatcgacatccagcacctgaagaggcggtgggcggccccggaggtggacgagtgcaacaggctgcgtctgcttttgcaggaagccctgtggccagagggaaaactgcacaagtagcgggtgtggctgagaggaccgcgtttctgtaatgacccagatttaaaagacataaggtggataattctacatttgtgtgcaagtatatttatgtatatagactatgtatattctgtatataatttattttacatgaatatttctttggtattcccagtaaatacatgactacttttgagtggaaacaaagaacattctagcatttacaaaacttccaggggaatgtagagccacgtccagggtgctcttttctgagagtatttcgagttatttttagaacagtttaaatattgtcacattactgctagattttaaacagcctaccatgaaaatgtatcttaatgaactattttcttatgcataaagtatgtgaacacacgtctaaattaaaaggaattactccaccgcaaaaaaaaaaaaaaaaaa

SEQ ID NO: 117540 - DNA, 1000 bp, Homo Sapiens
tgttctgctgcctgtaccgctcctggtgccacaacccagtcaccacggtgtccctctgcttcctcacccagaactaccggcacgcctatgacctcatccagaagtttggggacctggaggtcaccgtggacttcctcgcagaggtggacaagctggtgcagctgattgagtgccccatcttcacatatctgcgcctgcagctgctggacgtgaagaacaacccctacctgatcaaggccctctacggcctgctcatgctcctgccgcagagcagcgccttccagctgctctcgcaccggctccagtgcgtgcccaaccctgagctgctgcagaccgaagacagtctaaaggcagcccccaagtcccagaaagctgactcccctagcatcgactacgcagagctgctgcagcactttgagaaggtccagaacaagcacctggaagtgcggcaccagcggagcgggcgtggggaccacctggaccggagggttgtcctctgacaggcctggcacggaggagggcccaccgagtggtcccatgaaacactaagggtcgtcacgccctcccgaggagctcaaggacctgcctgtcaggaccagggctgggcctgccaacccagggcagtgttggggccggaggctgctgtgtctgcccaagctcctctcagagtccagtccccaggcctccagcgctgtcagctgcaccctggcattctcacagagctggctgcccacccagtggggggctatagcctcagagaccactcatcctctggaatcaacctctttctaataccctcttggaaaaagagcttgcccctcctccagcacactagagctctggccttgtgtgtatatgtatacatacgtgaacacatgcctgtgtgtgtgtgtgtgtgtgtgtacttgtatgcacgtaggcaccagcacaaagatctgaatgatgcaccccacccccaccccaataaagaaataacagaaaaccctcaaaaaaaaaaaaa

SEQ ID NO: 117541 - DNA, 1000 bp, Homo Sapiens
atggtgagccggaacgtggccagcggggagatgaactcagtgctggagatcctctacccccgggatgaggacacacttcaggacccagccccactggagtgtggccaaggattctcccagcaggaaaatggccattgcatggacaccaatgaatgcatccagttcccattcgtgtgccctcgagacaagcccgtatgtgtcaacacctatggaagctacaggtgccggaccaacaagaagtgcagtcggggctacgagcccaacgaggatggcacagcctgcgtggggactctcggccagtcaccgggcccccgccccaccacccccaccgctgctgctgccactgccgctgctgctgccgctgctggagctgccactgctgcaccggtcctcgtagatggagatctcaatctggggtcggtggttaaggagagctgcgagcccagctgctgagcaggggtgggacatgaaccagcggatggagtccagcaggggagtgggaaagtgggcttgtgctgctgcctagacagtagggatgtaaaggcctgggagctagaccctccccaagcccatccatgcacattacttagctaacaattagggagactcgtaaggccaggccctgtgctgggcacatagctgtgatcacagcagacagggtcgctgccctgatggcgcttacattccagtgggtctaatgaccatatcttaggacacagatgtgcccagggaggtggtgtcactgcacaggaagtatgaggactttagtgtcctgagttcaaatcctgattcaggaactcacaaagctatgtgaccttacaccagtcacttaacttgttagccatccattatcgcatctgcaaaatggggattaagaatagaatcttggggttagtgtggagattagattaaatgtatgtaagacacttggcacaaaacctggcacatagtaaaggctcaataaaaacaagtgcctctcactgggctttgtcaacacgtg

SEQ ID NO: 117542 - DNA, 1000 bp, Homo Sapiens
gcattaggtaataatgtttccataaatatagaggtagaccccaggcatcctactatgcttcctgagtgcttctttcttggagctgaccatgtggtaaaacccctgggaattaagctgagcaggaacatacatttgtgggatccagaaaatagtgtgttacaaaatttgaaagatgttttagaaattgattttccagctcgtgctatcctggaaaaatctgattttactatggattgtggaatttgttatgcttatcaacttgacggtaccattcctgatcaagtgtgtgataattctcagtgtggacaacctttccatcaaatatgcttatatgagtggctgagaggactactaactagtagacagagttttaacatcatatttggtgaatgtccatattgtagtaagccaattaccttaaaaatgtctggaaggaaacactgaaataagaatacaacatttcggtgaagagctggaaacttaaaaaattatcaaaaggaattttggtatcatcttcagagaaaaaataaagcaagaaatactaacatcaaaaggacaggtatgatgatgcgataataataaacatctgcgtttgtctcttcactaagagtaaactgggaaattgtaggccaaagtccagttgaactttctaagtctgtgatccccgtgctgactgtggaagtgtatttataccaagatggagatcttgacttcttgaatatatctggactggtaaaatcttgatgaggctcataaaatgagtttgggaattgtgtatagctgattttttgtgggaaactgtttacttcattcaaaggttcttgagactcttgatatttctgtcttctccttgtgctttcctatggaaaaaatacatatatagtttagtttgttagacgtgagttatccaagtatttattttgtgtagtgtgtaagaatgctaaataaaatgttatacaagatcaaaaaaaaaaaaaaaaaaaaaaaaaaaaaaaaaaaa

SEQ ID NO: 117543 - DNA, 1000 bp, Homo Sapiens
tagccttggaataatcagtatttccccaaagcatataattcacattcagtcacataggatttacattcagtctccagtcatgtgtttttattaatcttcagtttttggttctgaggtttgttttttaaaagatggggtcttgctatatggcccaggctggactcaaactcctgggctcatgtgatcttcccgcctcagacgcctgagtaactgggactacaggtgtgagccaccatgtcccacaattttcagttttaacagagcctcaagcttcagctttcacaggcaacacttcctaactagaactttgttaatgttttatattcactgtatttgttttatggttttattctattgttgacaagtgttaactagttttccatttacagtagtggttaaaagtttacttcaaggctgggtgcggtggctcacgcctgtaatcccagcactttgggaggccgaggcaggcggatcccaaggtcaagagatcgagaccatcctggccaacatggtgaaaccccatctctaccaaaaaatttttttaattagctgggcataggtggcgcgtacctgtggttccagctacttgggaggctgaggcgggagaatcatttgaacccgggagtcagaggttgcagtgagctgagattgcaccactgcactccagcctggtgacagagcgagactttgtctcaaaaaaaaaggtgtacttcaaaaatgaaatacaaggctgggcgtgttcactcatgcctgtaattccagctacttaggagactgaggcaggagaatcgcttgaacctgggaggcggaggtttcagtgagcggagatcgcgccattgcactccagcctgggtaacaagatggaaagtacatctcaaaaaaaaaaaaaacgaaaatgagtcacccagaatcccataacggaaactttctatggggtcatctgtttaagagaaaaataaattctatattcaaagtgtaaaaaaaaaaaaaaaaaaaaaaa

SEQ ID NO: 117544 - DNA, 1000 bp, Homo Sapiens
ggaaggtgataccatctatgattactgctggtattctctgatgtcctcagcccagccagacacctcctacgtggccagcagcagccgggagaacccgattcatatctgggacgcattcactggagagctccgggcttcctttcgcgcctacaaccacctggatgagctgacggcagcccattcgctctgcttctccccggatggctcccagctcttctgtggcttcaaccggactgtgcgtgttttttccacggcccggcctggccgagactgcgaggtccgagccacatttgcaaaaaagcagggccagagcggcatcatctcctgcatagccttcagcccagcccagcccctctatgcctgtggctcctacggccgctccctgggtctgtatgcctgggatgatggctcccctctcgccttgctgggagggcaccaagggggcatcacccacctctgctttcatcccgatggcaaccgcttcttctcaggagcccgcaaggatgctgagctcctgtgctgggatctccggcagtctggttatccactgtggtccctgggtcgagaggtgaccaccaatcagcgcatctacttcgatctggacccgaccgggcagttcctagtgagtggcagcacgagcggggctgtctctgtgtgggacacggacgggcctggcaatgatgggaagccggagcccgtgttgagttttctgccccagaaggactgcaccaatggcgtgagcctgcaccctagcctgcctctcctggccactgcctccggtcagcgtgtgtttcctgagcccacagagagtggggacgaaggagaggagctgggccttcccttgctctccacgcgccacgtccaccttgaatgtcggcttcagctctggtggtgtgggggggcgccagactccagcatccctgatgatcaccagggcgagaaagggcagggaggaacggagggaggtgtgggtgagctgatataaaaaggtttttatgat

SEQ ID NO: 117545 - DNA, 1000 bp, Homo Sapiens
gtgtgcgccaagggcttcggccagggctctgcgctgctcaaacacctgcgcacgcacacgggcgagcggccctacccgtgtccgcagtgcggcaaggccttcgggcagagctcggcgctgctgcagcaccagcgcacacacacggccgagcgcccctaccgctgcccccactgcggcaaagccttcgggcagagctccaacttgcaacaccacctgcgcatccacacgggcgagcggccctacgcctgcccgcactgctccaaggccttcggccagagctcagcgctgctccagcacctgcacgtgcattcgggcgagcgtccctatcgctgtcagctctgcgggaaggccttcggccaggcctccagcctcaccaagcacaaacgggtgcatgagggtgcagccgctgctgcagctgccgcggccgctgcagctgcagcagcggccgccggcctgggcctcgggcctggcctaagccctgcatccatgatgaggccggggcaggtctccctcctgggtcctgatgctgtttctgtgctcggctctggcttgggcctcagccctggcaccagctctggccgcaaccctgaccctggctctgggccgggcactctgccggatcccagctccaaacccctccccggctccagatccacccccagccctactcctgtggaatcttctgacccaaaggctgggcacgacgctggtcccgaccttgtgcccagcccagaccttgatcctgtgcccagcccagaccctgatcctgtgcccagccctgatcccaaccctgtgtcctgccctgacccctgttctcccactcgtggcactgtcagcccagccctccctaccggcgagagtccagagtgggtacaggagcaaggggcactgctggggcctgatggctgaaggagacgccggcatcctcgggggcctggggaagttgtgtgttgtgcagtcagtaaaatcctcccactgcctccggaaaaaaaaaaaaaaa

SEQ ID NO: 117546 - DNA, 1000 bp, Homo Sapiens
catgcagaatggcggagagtgcttgcgggcctatgtgtcagtgaccctggaacaagtagcccagtggcatgatgagcagggccacaatggactgtggtatgtgatgcaagtggtgagccagctcctggacccccgcacctcagagttcactgcggcctttgtgggccgccttgtttccaccctcatctccaaggcagggcgggaactcggggagaatctagaccagattcttcgtgccatcctcagtaagatgcagcaggcagagacgctcagtgtcatgcagtccctgatcatggtgttcgctcatctggtgcacactcagctagaacctctcttggagttcctgtgtagcctcccaggacctactggcaaacctgctctagagtttgtgatggctgagtggacaagccgacagcacctgttctatggacagtatgaaggcaaagtcagctctgtggcactctgtaagctgctccagcatggcatcaatgcagatgacaaacggctacaggatatccgtgtgaagggagaggagatctacagcatggatgagggcatccgcacccgctctaagtcagccaaaaacccagaacgctggacaaacattcctttgctggtcaagatcctaaagctgatcatcaacgagctctccaacgtcatggaggctaatgccgctcgccaggccactcctgcagagtggagtcaagatgactccaatgatatgtgggaggaccaggaggaggaagaggaggaggaggaggatggtttagctggccaacttttatctgacattcttgctacaagtaaatatgaggaggattactacgaggatgatgaggaagatgaccctgatgccctgaaggatcctctctatcagattgatctgcaggcatatctcacagatttcctctgccagtttgctcagcagccctgctacataatgttttcaggccaccttaatgacaatgagaggcgagttctacagaccatcggcatctaa

SEQ ID NO: 117547 - DNA, 1000 bp, Homo Sapiens
ctcagccctttaacgacatacgcattggagcgcaagttaggaaaatgagcttttgttttcatggaaatcattctgattacagtgctgatgtttagaaataaatagcagtgtgactgggaaagaggaattgcagttgtgggggtgtgagcctggcagcagccagccagcagcctctcccaggcgggagtctaccatccgagacggcgatgacaaagagcttcattccacattctttgttatctctacttcccaccctcttggcaactacagagcagtgtgggcagccccaagtgtggtccccagagagcgtttggctttcctgtctgtctatcctgagcgggtggagtctcaggttgtgtgcccctaaatcaagatttgcttccacagaagccattacttgcaatttttttttttttttctgagaaagtctcgctgtgtcacccaggctggagtgcagtggcgcaatctcactgcatcctccgcctcccgggttcaagcgattctcccgcctcagcctcctgagtagctgggattacaggcacccgccgctgctaatttttgtatttttagtagagatgggggtttcaccatattggtcaggctggtctcgaactcctgacctcaggtgatcaacccaccttggcctccctaaatgccgggattacaggcatgagccaccgctcccagcctttgattttttaaggtggattttggttgttataaatggagaaaggtaagagttcaagttcaacccgtgtgtgaaagcaaaacaatggaaaacaggattggcttcttcaaaggctcctcttgtagaactgcctctttgaaatttcgaggtaatctactttggagactctgcctggagagggtcagttcctaagttaaaagcatcgcttaaccttggctcctgtggcattttacaaaggtttaaaggaattgattcctctgaaagggcctgaaaataaaaagtctttaacatataaaaaaaaaaaaaaaaaaa

SEQ ID NO: 117548 - DNA, 1000 bp, Homo Sapiens
ggataagtacaaagatatgggcactgtggtcctgggaaagctggaatccgggtccatttttaaaggccagcagctcgtgatgatgccaaacaagcacaatgtagaagttcttggaatactttctgatgatactgaaactgattttgtagccccaggtgaaaacctcaaaatcagactgaagggaattgaagaagaagagattcttccaggattcatactttgtgatcctagtaacctctgccattctggacgcacgtttgatgttcagatagtgattattgagcacaaatccatcatctgcccaggttataatgcggtgctgcacattcatacttgtattgaggaagttgagataacagcgttaatctccttggtagacaaaaaatcaggagaaaaaagtaagacacgaccccgcttcgtgaaacaagatcaagtatgcattgctcgtttaaggacagcaggaaccatctgcctcgagacgttcaaagattttcctcagatgggtcgttttactttaagagatgagggtaagaccattgcaattggaaaagttctgaaattggtcccagagaaggactaagcaattttcttgatgcctctgcaagatactgtgaggagaattgacagcaaaagttcaccacctactcttatttactgcccattgattgacttttcttcatattttgcaaagagaaatttcacagcaaaaattcatgttttgtcagctttctcatgttgagatctgttatgtcactgatgaatttaccctcaagtttccttcctctgtaccactctgcttccttggacaatatcagtaatagctttgtaagtgatgtggacgtaattgcctacagtaatgaaaaattaatgtactttaatttttcattttcttttaggatatttagaccacccttgttccacgcaaaccagagtgtgtcagtgtttgtgtgtgtgttaaaatgataactaacatgtgaataaaatactccatttgaaactc

SEQ ID NO: 117549 - DNA, 1000 bp, Homo Sapiens
cagtggggacctgagaatgcgtgtggcctgctgtcctcgatagaccggaatggggttttcccacagatccccgcctgtggcacaccccagagccagaaatcgaaggtcacaggaagttgtcactgaacttggcccgtgtctgctactctgtaccttgctggtacagacaggggtggtgggcagccaggctctatgagtgggcccctagtgtcagctctgtacagggtcagatcccaggttctatgaccaaataagtaacttaagttttgtgtgttgggttctaattccttgtcctagaatccccatgactcaatcaaggactgtgctaaatgagattgtccagcccccgcccttgcactggactacgccaaaaccacactgaccaggcacttgccttccctctcttcccccgtgttggtaagagagaggccagttgtgatagtggccaaggagaatctagggctgtattgttgtccactgcagtaggcaccggccacatgtgactgctggcatgaaatagaagtgcagttcctccatcgcactgggtaaggcctccagtattggacagcacacagaaaggttttcatcatcaagagagttctgctggtcagccctgctccaggggatgcctctgccttcgcatagcacactgcttgaggccctgccaggcaccaagcactgccctgggcccatgggatagagcggggaaggtgatggctcttccagaggattccctcagatggggaggcagcagtatgagctctgagcagaagtgggtattgttgatacagaggaagttctttgccacgagaactttcaagcagtgaaaggaattcccatcaggactcagaccccaggccgagatcttgccctgaatgtaccctgcctctgctttctcctgcatcccatgctaagcagggtcatggtctgaactactcagattggatttccaaaccatccttgtataaactgctcagaactagaaaaaaaaaaaaaaaaa

SEQ ID NO: 117550 - DNA, 1000 bp, Homo Sapiens
tgaggctggcactctgactgctggcttttcccaaacagcccaagggccggaacagcaggtggcttctcagttcctctgggcctggagtgacacaggaaggatctgcacttcctctgtgctgcttgccagccttgcagttggagttttaagcagaggtgacatctggttgacgcctcaggtgaaaatctggttttaaaatgtaacttctgcacaggctccttcctgctttgtaggctgggaagatgcccctggggtaggggtgctgattacctcagccatgtggaggaaggctggagcttgttcctgccccaggaataggccaggagggaaggccgcagcaggactgccgtggggagcacccctgctgcccccctctcactgaccaggggtggacaatgcccaagcagagggagcccccttgccctgtttggccaccctctggccagccaaaagcactctgaaaccaagaccttcccattcctcctccccacatggtgctgaggctccctgctgcaatgcaattaaagcaattgattttctagtgctggtatttgttgactaccatgcagaagggctatctttctattcacgtcaaacttttggttgtgtggggttttttgttgttttttgggttttgttttttaatactttagggtcctgatttgtgggaacagaccttcttgtaaataaccactatttgagttgtggcaggaggatgataaagcacgcggcccctcccaaaggagcccttgagctagggaggtggtgcagtcagcctcgctctcaacgtgacccggggaatgaccacccagagggatgagctagcctgtagaggggaactggggtccaaaggtctttggggagggaggcagagctggctggctcagctaagtggcacgatgacgcatgaaggagattatgttgtgctctttattgccaaaaataaacacttttaaaaagaaaaaaaaaaaaaaaaaaaaaaaaaaaaaaaaaaaaaaaa

SEQ ID NO: 117551 - DNA, 1000 bp, Homo Sapiens
tcatgcagggtacctccttaggccaggtctccttctccaagctgggctcctttggtgccgtcattcaggttgtactcatcttttacctaatggtgtcctcagttgtgggcttctatagctctccactcttccggagcctgcggcccagatggcacgacactgccatgacgcagataattgggaactgtgtctgtctcctggtcctaagctcagcacttcctgtcttctctcgaaccctggggctcactcgctttgacctgctgggtgactttggacgcttcaactggctgggcaatttctacattgtgttcctctacaacgcagcctttgcaggcctcaccacactctgtctggtgaagaccttcactgcagctgtgcgggcagagctgatccgggcctttgggctggacagactgccgctgcccgtctccggtttcccccaggcatctaggaagacccagcaccagtgacctccagctgggggtgggaaggaaaaaactggacactgccatctgctgcctaggcctggagggaagcccaaggctacttggacctcaggacctggaatctgagagggtgggtggcagaggggagcagagccatctgcactattgcataatctgagccagagtttgggaccaggacctcctgcttttccatacttaactgtggcctcagcatggggtagggctgggtgactgggtctagcccctgatcccaaatctgtttacacatcaatctgcctcactgctgttctgggccatccccatagccatgtttacatgatttgatgtgcaatagggtggggtaggggcagggaaaggactgggccagggcaggctcgggagatagattgtctcccttgcctctggcccagcagagcctaagcactgtgctatcctggaggggctttggaccacctgaaagaccaaggggatagggaggaggaggcttcagccatcagcaataaagttgatcccagggtttgctttgttttttt

SEQ ID NO: 117552 - DNA, 1000 bp, Homo Sapiens
tgcagggtggctcctccttacccccacctcttctcaagctgcagtccaccgggtatggttctggatggttcccccaagggagcagcagtggagagcatcccagtgtttggggcactgtgttcctcttcgtccctgcaccagaccctggaagccttggccagagacctcaccaaactcgacttgcggcgctgggccagcttcatggatgctggagtggagcacgatgacgtagcagagctgctgcaggagctacaaagcctggcccagtgctaccagggtggtgacagcctcgtggactaaagttcccagtgtgggagaaaggagctagtttgcaataaaaacagctggatgcaggagcccagtgtcttcatgcagaggagctcaatgtcgcgggactagctacaccaacatatgcactttttacatttagaaacactgtgattagaccacagaacaataaatatgtgccatcagaccaaaaaaaagtagagaaaggagctgaactccactctcgatgctacttacagaggacatctgtaaagtcttcataaaagaccttgaatgatgcctaggatggcagagcccctgggtcctactccatcctccagcctttgtccttgtcctggcctcctgctctccagatctgtaaactgggctcaaggactgtacaagcagagtacaactacccgcctccccggtgccagggcgcctgttgggtttggtcctgtgtagatgattcccagagtctcattcatccagctcctcttcagacagaaggtccccatggtcagacagctggtctgcattgctggtactggttgcatcatcctcatcctcagagctggcttcacaggcagtgtggaagagctgcatgagttctcgaaaatggtgggaaacctaagaaaggaggagggctgtattcactgatccttagtaacatgttaacatttatgaagcactatatattgatttgcaaaatcttttgtttattccaaaaaaa

SEQ ID NO: 117553 - DNA, 1000 bp, Homo Sapiens
ctggatctccaagcatcagagatgtcatagccttcccaaagtccttccggggacatgacctcatgagcaataccccagattctgtccctcctgaggaactgaagccctatcatatccgagtctccaagccaacagactccaaagcagaaagagctcattgaatcatgcataccatgcagaaagttgagcttttaggttttgtcctctttgcttccccaaggctaaagtcagatctagagttctgccacaggtctaacaatcaagtctttagatggaaggaatccaggcaacattcttcaccacaacgaagaaacagataaaagatacccaattttgacttgatttcatgcatcatttggattttttttggttaggactttttttgaagttcctttttacttaggtgtgaaagatggttctttgttgaaataatatagtggtttagtgttttcaaatcatgtttctcatacccagatagtagattattcacttaggacagaggtaatcaaattatgtgtgaaatgtaggaaaatgcttgcccctgtaaactagtgagttgatggagcatttgcttcatcatcctcatcaagagaatcatataaattaagctttataatgacatttcaaccatcaacataatatagtgaggagtagcataatattttttaataatgcagaaaacatcactgaaatgagagtcacaaatttttcttcagtgtttcagcctgagtaagttacataaacctcgcttagcctcccttcctgctaatgtgtaaaatacatacttgccctggctacctcaccgggctgttattgctggaatcagaggagataacatatatggaagataaagtgaataaaagtactttgaaaaactataaagcattccacaaatatgagatgatggtattatccatccataaataggtagatatatctctattttatagtttcagattaaacaaaactgatatcaatagtaaaagtcattttacttatc

SEQ ID NO: 117554 - DNA, 1000 bp, Homo Sapiens
gcatgcgtttggctgtgcgctggtgcacacctctggctggaaagtggtctattccggggacaccatgccctgcgaggctctggtccggatggggaaagatgccaccctcctgatacatgaagccaccctggaagatggtttggaagaggaagcagtggaaaagacacacagcacaacgtcccaagccatcagcgtggggatgcggatgaacgcggagttcattatgctgaaccacttcagccagcgctatgccaaggtccccctcttcagccccaacttcagcgagaaagtgggagttgcctttgaccacatgaaggtctgctttggagactttccaacaatgcccaagctgattcccccactgaaagccctgtttgctggcgacatcgaggagatggaggagcgcagggagaagcgggagctgcggcaggtgcgggcggccctcctgtccagggagctggcaggcggcctggaggatggggagcctcagcagaagcgggcccacacagaggagccacaggccaagaaggtcagagcccagtgaagatctgggagaccctgaactcagaaggctgtgtgtcttctgccccacgcacgcacccgtatctgccctccttgctggtagaagctgaagagcacggtcccccaggaggcagctcaggataggtggtatggagctgtgccgaggcttgggctcccacataagcactagtctatagatgcctcttaggactggtgcctggcacagccgcgggccaggaggctgccacacggaagcaagcagatgaactaatttcatttcaaggcagtttttaaagaagtcatggaaacagacggcggcacctttcctctaatccagcaaagtgattccctgcacaccagagacaagcagagtaacaggatcagtgggtctaagtgtccgagacttaacgaaaatagtatttcagctgcaataaagattgagtttgcaaaaaaaaaaaaaaaaaaaaaaaaaaaaaaa

SEQ ID NO: 117555 - DNA, 1000 bp, Homo Sapiens
ttgttgagaaatatggtagattgggtttcatttaccgaatgagaattcttcattttcactttgtaatttttcttagtatatagtcagcccactgtatttgtgtgttccacatctgtggattcaaccaactgcagatcaaaaatattgaagaaaaaatcgcatctgtaccaaacatgtacagacttttttcttgttattattctctaaataatacagtatgacaactatttccacagcatttacattgtattgggtaatataagtaatctagtgatgatttaaactgtgcaggaggatgtgggtaggttatatgcaaatactgcaccattttttatcaggggcttgagcatctgaggattttagtatcctcaggagtcctggaaccaaccccccacagatacggggacaactttatgacattgtttttcaaccaatgaatgtttataccttttgttttccttgccgcgactgtgaagataaagttcaaaagtatttttaccaaagtgtagctaatatttcaagctgaaaataatagttctactgcccgtgtctccagaatgtagagcccatcaatatttttattttaggaggtgtacttgacacccaataaactgcacgtatcaaaagtgtacaatgtgttggcgtatgtataccctgcgtaaaactatcaccacaactgaagtgaggaacggacccatcattcccaagtgcccttgtgccctgttattagtttgcatgtcctagaattctatgtaaattgaatcatacaatatgtatcccttttttggtcaggcatattttactcagtatagttattttgagattcatccatgtggtagcatgtgtcacgagtttttgtttttatgtttttcattgctgagtactgcttcattgaatagatttgttcattgacctatcgatggacacctgggttgtttccagtttggggctgttataaataaagctgttatgaacatttgtgtacaaaaaaaaaaaaaaa

SEQ ID NO: 117556 - DNA, 1000 bp, Homo Sapiens
taatgaaataacctgtgatttaaaagaagagctgcagctttgacagtgcttatttaaagaaaaatactgctggaaaatttccaatttctactacgttcaccatctctagtaagatctgacatatgctgaagttatgttttgatttggcacacagcatgttcaatgatggttactcgcctagtacaagacatggagaagaaacctttggacacagagcagatgacacctccttctgttttgtagtgtatcctggtgtcattttctgtgaatgtggtcaggtagagttgtttttgttgttgttgttgggcttttttttctttttttttttttggtctcttttggtggggtgggggtgggctaaagccataggaagaaaaatgtgatgtatgtgtccagtatgtactattttgtttttgttttgcaagaagagttgaactatttttgataacaagagtaaatggtggaaaatgcttcttagttgtcttgtctttatttgctttccaagatttggaattttatttaattcctttaagtgttagcagtgtcttatgaaacatgtatttacctaacgtttgtaacagttttgtgttgaacccagatgccctgctatataaagttgtaaatctgttctttattcactaatgatcactgcaaaaatgattagaaatgagattgtacacatggatgaggatatattttgcaaatcgaccaaactttcctaatattatgatcttaaaattcatagagtactttattgcttcccaagtttgataatcttgtgggtttttttttttttttgatgcatgggaggttggcaatatagacaaagtggaaatcattagtatgtgagggccttgattgttatgtaatattgccaatgatgaattcaggttgtttttagcacaagtttctcttttttatgctggtattctcactgccacatttttggaaacctgtattacaccttaaatctatcaataaatgatagttttctaattct

SEQ ID NO: 117557 - DNA, 1000 bp, Homo Sapiens
ccagagccatattttctcagtccgaattaattccccctccctaggtgcctgtaggctatggtacttcttcctcattgttttctaggtaaacttcactactggtaattaaggggaaggatatgaggaagcagtttaaatagccctgttctcattactctgaccacatacatcatagggtgctaaagttgatgaacacattaatccgttaagtaaaatggactttgtaattgtacagcatacctaagaaactcagaaggtgcatttaagagagagacctgaaagaaatagtatggatttttaaaaattcttgtctctactattataaccaaaaaatatttcttgtatgtcccataaaaatatttgtgtaattcttatgaaacaggctggtagaggaggtttctgagcctagcccaagggcttattcatcaccatgggtaaattatttaaactcacttaattaaggaaaatattttcccagctagaaaagtatactcattctcatttaaactctctcatttggagggatcatgtgagttggcctacttacaagtagtgaaagttcccttttcagttttgttttgttttgttttgtttttctctttcactcagccaaatgtgaaagttgtgaatttaggaaaatcacttgtaatgaagtgtgaatcttgttatcaaatttatttctctgatgtttccttccttatccttgtagccaataaaacattgacattctcacgttttatagatgaggtaaaaagtcttgtgtgctgtgagttataatgcttttgcctttttaatattattagttcttaagtgttacagccccttcagaatataacttcaggacaattcaaactatgcttaatgtatgattttcgagcttctgtatgctaagaaaataggtgtgaaaaactggtgttctgaaatagcctaacatttattgtaattctgaattttctgcccttttattcattgcatattaaagtattagagtataaaaact

SEQ ID NO: 117558 - DNA, 1000 bp, Homo Sapiens
tctgcaattacacaatccgtgcaaatggctgtctcgggttttcatagaacaagacgatgacatgctggaggctgccaaggcatcactgggcatctacttaacactgaccagaggatgtgaagccactgaaagcttgactcagggaaaagaaatgtgggaccatcacacacatgaaaatggctataatcctcactgtattttcttgttcttcttgaaaaatataggatttgattccacagttcttcttgactttttgatttcatcagaaacctgttttcttgaatattttgttagatatttaaaattactgcaaaaggactgggataattttttcaccatttgcaataactttgatgcaactgaatctaaatatgacataagtatttgtggctgtgtcccctcacttgtccaagaccaaagctccaaccaaacaataccccatcgtttgactgctcctcatagtcacagagatgtgtgtgctcggcactcctgggcttccgatgctccctctgaaccactgaaagctgtgatgtccaagggggctcacaccatgtgtgcttctagtctgtcttccccccgggcctctcaaagtctggtagattacgacagctctgacgattctgacgtggaatccacagagcagtgtttagctaacagtaaacagacatctttacaccagcaagcaactaaggagattcaggatgcagctgggacaagcagggataaaaaagaatttagccttgagcctccatcaaggcctctggttctgaaagaatttgatactgccttctcctttgattgtgaagtagccccaaatgatgtcgtctctgaagtgggaatattttacagaatagtaaaatgcttccaggaactacaagatgccatctgccgtttgcaaaagaaaaatcttttcccatataatccaactgcacttttgaagttgttaaaatacatagaggtgataagtaataaaactatgaacactttgtaaaacattgac

SEQ ID NO: 117559 - DNA, 1000 bp, Homo Sapiens
acagcgcccggagacctgcggaggatctacttgtgagctatctgccccaggcaggcctcgcctccagcagccccacctgcccccagcctctgtgacagtgaccgtctccctttgtacatacttgcacacaggttccccatgtacatacatgcacatactcaaacatgcgtacacacacacacatttacacacgcaggactctggagccagagtagaggctgtggcccaggcactacctgctggctcccacctatggtttgggggccatacctgttccagctctgttcccagggtggggcagggaggtgggggttgggggagtagtggggcacggctcctaagatccagcccccatactgacagacggacagacagacatgcaaacaccagactgaagcacatgtaatatagaccgtgtatgtttacaatgttgtgtataaatgggacaactcctcgccctctacctgtcccctccccctttggttgtatgattttcttcttttttaagaacccctggaagcagcgcctccttcagggttggctgggagctcggcccatccacctcttggggtacctgcctctctctctcctgtggtgtcccttccctctcccatgtgctcggtgttcagtggtgtatatttcttctcccagacatggggcacacgccccaagggacatgatcctctccttagtcttagctcatggggctctttataaggagttggggggtagaggcaggaaatgggaaccgagctgaagcagaggctgagttagggggctagaggacagtgctcctggccacccagcctctgctgagaaccattcctgggattagagctgcctttcccagggaaaaagtgtcgtctccccgaccctcccgtgggccctgtggtgtgatgctgtgtctgtatattctatacaaaggtacttgtcctttccctttgtaaactacatttgacatggattaaaccagtataaacagttgaaaaaaaaaaaaaaa

SEQ ID NO: 117560 - DNA, 1000 bp, Homo Sapiens
gcctcctccctgagaactccatggactgcatctaactgcaggaacccagagtgtcccagcacgccgggaggggcaaccaggcctcccagcgagtcctgcagggcccatctagaggactttgggggccatcagctgcaatccaggtctgtcaaactcagcccctaggaaagaacaggccttgggtctcccctagtcctggccagaaggatgatctcgcttttcctctacaggcctataagaagcaggtacttcagttctaaattctgacttgtgttcttttcgtcttcataaattctaactaaggccactgtgccactgtgcacccttgagtaccattgatccaaagctttcccacagacctccctggcccacctagaggctttcttggtcagtgcctgtcaaggctccagtcctgctgagccaaaggctttgtcattcctttctcttcctgtacatctgagcagacccactccagctttctggtgtcacaggcgggaatgttagttagtaggtagacttagatcccatttctgtcctgctcccaggaagattcttaggtcctcttcaatccagcagcccctcccagaggtgtgatcagcaggatgctgaggaaccatgttgcctttcctgtcaatcacagccaccttcctgttatctcctaaatggatctggcttttcctggaggctgccatggttggaagatggtatcagagggcctgcctgggcagtctgtctccgggccagggtcagggaccctctgcctctggcagccttaacctgtcctctgctaggaccagggtgatttcaagccagggaagcaactgggaccctgaaaactgtccctccccagcccgctccccctctctgtgccctggtccccttgctgccatgtggatgctgttgtgattgctgtttgtatattatcaaaatgtttttatattaaaaatgtttggtctgaaaattaaaagcacttcatttagaatgaaaaaaaaaaaaaaaa

SEQ ID NO: 117561 - DNA, 1000 bp, Homo Sapiens
agtgctgggtgttctcagacctgactgaggaagttagctgcgggctgccctgtgggctggtgcttcaggaggaatccagagaagtgttcagatgccccccttgggctcctttctaattttaatcagctctttaaatagctgcccatctcctgtgattgcacaaccaagcactttgacatttgcaccttaggagaggcagatgttaaaatggaatccaaagaccacctagggcggggctgggtgggagatgggagggccaactgcgagctgctccacttctcagctctcccctgccctgcagccctgggccagacaaggccagaaggtttcaggggcatttgacatcccctcctggttctcaccaggaaaacatccaaagctttggaggaaacaggccctgcccctggctccttaaatgccccgtctctttgtaaactgatattcagccagcaatgcctaagactttgttaagatcatttctactgcttttctttctgcttcaaacacacagttcgtctctgaggaaagtaaaataaatggaataagagtaaattgggtaaggagatatccaaagctacccagtcccttgacccagcacagttggccgacccgtgtcactccctggctgtcgctgcttctctgtgctcactgaagggtgagccaggccagtgcttccccagcccctgggcctggtcactacacagtggaaaacagacaagcggccccttccccaaatcccaagagtgtcttgctgcttggtgggtgctcatcgcaatgttctgaaggctccagggccactttgtttgtaagtatgatctgggcctcaaaataccatagtagctgcttgataaaattctaaaaatatctggttctctattatgtaaacactattacagtcaccagtgtgtgaagactcttgagtctggttctcatatcagagtcatcatttttcttcctgtggaataaaatgccttgtggacttcccaaaaaaaaaaaaaaa

SEQ ID NO: 117562 - DNA, 1000 bp, Homo Sapiens
acctgagaacttttgaactgaggaaagaacaacagagacttaaagggttaataaaaattgtaaagccagcagagattccagaactaaaaaagactgaaactcagactacaggtgcagaaaacaaagctaaaaagcttacattgcctctatttggtgccatgaaaggaggaagcaaattcaaattaaaaactggaacagtagggaagttaccccccaagcgtccagaactccctccaactctaatgagaatgaaagatgagcctgaagtagaagaggaggaggaagaggaagaggaagaagagaaagaaaaggaggagcatgaaaagaaaaaactggaggatggaagcctcagtaggccacagccagagatagagccagaagcagcagtgcaggaaatgaggcctcccacagatctcacacattttaaagaaacccaaacccatgaaaacatgtctcaacttagcgaggaagaacagaataaagattatcaagactgtagcaaaaccacttcattgtgcgcaggaccctcagcatcaaagaatgaatatgagaaaagcagaggtgaattgaagaaaaagaaaacacctggtccaggcaaacttccaccaacactttcttccaaatatcctgaagatgacccagactactgtgtgtgggtcccacctgaaggtcaaagtggagatggcagaacccatcttaatgacaagtatggctattgattgcttcagaatcccaaaagaaaaccttgtggaccatgtgacatggaatatttgggataatgtatcaaattgaatggccagagaagtttagatgattatttgtaagatctggtgactggcttttcgttctgtgttcttggcttcctaaatttatctgcccacatgattctcatgcatttgatatttatgtttaaaagtgtttatatatgtatgtaaaaagggaaccatatgttttgagaatttgtaaagtgagagacatgatcctattaaaataagaaggc

SEQ ID NO: 117563 - DNA, 1000 bp, Homo Sapiens
ttttaaaatgatatataagacatttttttgcaatgcctgccctaaccacttcttacatgtcatcttaacatctctttgaggaaacactgtttcctcattttacagatttaacatactgtattatttgatgccagagccaacaggctatatcataggcagtttccaaacttaattatgccatttagtttgtctagatttcttttgcctctctcactgatccatttggctgtagttttcatcccttttccagtacacacagctagctcctcatcctacctggtttctgcatatgagaatgcagagggctgagagagggcaaaattgttgtcatttagaaaaggcatttaggaaagaggctgctattagaggggaacacaaagtgaaggtttttttaaaaaagaggacttgcatcagctgcctccagaacaattttaagaaaataacaaagatgtttagaagaaatcttacggagtttgccatgggatgtgtgatatcagcagtcttcagctccttacaaattaccaaaagtggttctaatatgctagtttgtttgattttttcttttatattataaagcaattgcatcgataaaagcttggactccattttagtgtgacactcttcctcatgataccagtgaaatgtattgattgtgtccccagttgttacataatttgaaataaaaatataacttcttgatttattgttttttaagatgtgatatggtactgtggttatgttgttttaaaaaatgattatcttttagagaagtatactgaaaaatgtacaggtgaaatgatatgttactggtattcgcttcaaaatcatctgagtgtggggtaattgagtacatagatgaaacaagattggccataaattggtaattgctgaagctgtgtgatggatgtttgagagttcattatactattctctatacttttgtatatgtttgaaattttccataataaaaattgaaaaaagtaaaaaaaaaaaaaaaaaa

SEQ ID NO: 117564 - DNA, 1000 bp, Homo Sapiens
ttcttcctaaaaggaagacttcattttctcaagaaatgggattagttgggggtattataataccaaattgtaaatcatgagcgttttctccactgtgcacctgaggcagatcatgcatctttgagtgcagtttggtctgacccctcaagagaaaagcatggtgccgtagggctgctatggtttgaatggatgccatcactcttttctccacatacagtgcagagagctgtctggagtcacaatctgaacagattctcgggcgctccttctctccttccatcactacagtaagtaaaaggaccatagaggggaaccaggaatctgagaatcagctgtgctcaatagccaacctccctgtccagatgcagctattttggtatctcctatcacatgcactctgaatcagggtttttctataagaaatctttcagaatcagcaaaagtggggatgacccaggcatcttgatttgcaaaatcacaaaactaagttgtcagttatcactgtagatgagcaactcatctttttaaagtatagttactgaactgattctgagaaatctttagagagaaaaaactcaacagtacaaattaactaattgggaaagttagaatgtcctttctgaatttttcattaaaaaaattacattatctgaaataacataaagctactaaactgctttgtattctattaagaaatagctcctaaggatgtagtcttgtttcatagttgttgcactatatcaaaacttaaaatgtaagcccagttcttctctgtatagaaaggaaacattgtgttacttaatgaattatttatacagagcatttgttgccaactgttgttccagccatccacacaggagtctgttctgaggtggcaatagcacatgggaagatgaactttccctgtttgtttacccgttcttctttggctgtatctgatgacagtataagatgttcttaataaagttttatgttctttttgaaaaaaaaaaaaaaaaaa

SEQ ID NO: 117565 - DNA, 1000 bp, Homo Sapiens
ctgcgtcccccggcagctcgaatgacagcagtgcccggtcacaggaacgggcaggtgggctgggggccgaggagacgccacccacatcggtcagcgagtccctgcccaccctgtctgactcggatcccgtgcccctggcccccggtgcggcagactcagacgaagacacagagggctttggagtccctcgccacgaccctttgcctgaccccctcaaggtccccccaccactgcctgacccatccagcatctgcatggtggaccccgagatgctgccccccaagacagcacggcaaacggagaacgtcagccgcacccggaagcccctggcccgccccaactcacgcgctgccgcccccaaagccactccagtggctgctgccaaaaccaaggggcttgctggtggggaccgtgccagccgaccactcagtgcccggagtgagcccagtgagaagggaggccgggcacccctgtccagaaagtcctcaacccccaagactgccactcgaggcccgtcggggtcagccagcagccggcccggggtgtcagccaccccacccaagtccccggtctacctggacctggcctacctgcccagcgggagcagcgcccacctggtggatgaggagttcttccagcgcgtgcgcgcgctctgctacgtcatcagtggccaggaccagcgcaaggaggaaggcatgcgggccgtcctggacgcgctactggccagcaagcagcattgggaccgtgacctgcaggtgaccctgatccccactttcgactcggtggccatgcatacgtggtacgcagagacgcacgcccggcaccaggcgctgggcatcacggtgttgggcagcaacagcatggtgtccatgcaggatgacgccttcccggcctgcaaggtggagttctagccccatcgccgacacgccccccactcagcccagcccgcctgtccctagattcagccacatcagaaataaactgtgactacacttggcaa

SEQ ID NO: 117566 - DNA, 1000 bp, Homo Sapiens
ccactgcacccacccctccagactactttaaatgtctctgctctgactgaattgaaggaattgtaagtttcagttgctgaatatatcagtatatctgaactccggatctttttatttcctatttttggcttcctacataaattaataaagtctgtctatatttaaggtttctgggagtagttttgtctatatttaatccatagatgtgctcctagtcatcagtcttatttcagtaaaaccatctttctggccaaatctctaacacgttttttacttcagtagtgagggcaatgagaagctttattaagaaagatcctatttaaagggctaatttggtattgaaagcatgctgatataaagtccagtatttgaggatataaagaggatgtgcactgagctgtgctgatgttcagcatttattatactttaatgggatagtgcttcttgaccattatagaacaacaaactgtcaaagggttaatacagatgacccagacctgacattaaatcctcttgattagaaataattaaatgaattatttattcatttctctcctctgccaaatctacttagccccacaaaaatgccccagctcagttaacatttttttgtttttcactttaggtatctcttaggcaaatagagatataaattgtaataggaaacagtctctaaatgtgaggctgaatacagcttcagtctggctctctaataggacaaaagccagtccatgtgttgtctctaactgatttagctttttcttttctttgaacaattcggcatgaattgaaaccaggttttcctgtggaaagttatagcttgattgggagatagaagttgaattgagttctttcttgcaactcttagtgtttatttttatatctcagtaagacgaggataccttcagtttgaatctgcataatgttcactgccaaactccttctcatttaatgcttatggccttcacatttctgtataataaagatcaattatcagctc

SEQ ID NO: 117567 - DNA, 1000 bp, Homo Sapiens
aagaggctgccttgacttgttggaagacatttttacatcccgaaggagatcactttaccctcatcagcatttacaaggcttaccaagacacaactctgaattctagcagtgagtactgtgtggaaaagtggtgtcgtgattacttcctcaactgttcagcactcagaatggcagatgttattcgagctgaactcttagaaattatcaagcgaatcgagcttccctatgcagaacctgcttttggctccaaggaaaacactctaaacataaagaaagctcttctgtccggttactttatgcagattgctcgggatgttgatggatcaggtaactacttaatgctgacacataagcaggttgctcagctgcatcccctgtctggttactcaatcaccaagaagatgccagagtgggtcctcttccataaattcagcatttctgagaacaactacatcaggattacctcagaaatctctcctgaactatttatgcagctggtaccacaatactatttcagtaatctgcctcctagtgaaagtaaggacattctacagcaagtagtggatcacctatcccctgtgtcaacaatgaataaggaacagcaaatgtgtgagacgtgccctgaaactgaacagagatgcactctccagtgactccccagcaaacacaaggtgcagcagggtcccaaaggtagctggatggctgaactgctggatatgggagatacatgacgcgaagacggatttcacatccacaggacggtcttgaagaaaataacactgtgtatattattttaaaataaaaaatagaagtttttattgagttctttaaattactactccatgcttttcttcttcttggaaaagtttttaaatcaaccactcataatttgaccaaaattttaaaaaactggtattttgtaaatgtgtcagagacacatgggacagaaccctactttttgtagaggaacttaatctgaataaagtctgagtttttcagt

SEQ ID NO: 117568 - DNA, 1000 bp, Homo Sapiens
atgttttgtagtttagcgacttccgtatacataaagggacatattaatactggttcatttgtaaattattattcatatagaccactgtagtagataaaactctatggtacacctgcttatgtgttgcctcacactgtgtgtgattttgtttcttttgttaagcagcacttatgtagactgcatttccaaatgtgttgagcactcagagtgtagtcaacagtaagttcttttaatgaatatcagttttaatttatagactgccatggccttaaaaatattctgtacaatatactgcactgtgttgcacagacactacttgcttttctccattcatatttttatgagtagaatctgggcttttaaatttctcttcttattctttgaagcatgttgcatactaccctggtgggatggatggttctgtaaatgaagggatatttaaacttgctactgttgttcaacaccattaatggtcagtgtgaaccattacaaagaatgtggcaacttgcttgtgcctaaaaggaggaattggaactagaatgtgtgactctgtggggactgcataggtttgttaattgacctatagctaaaccttaatgtgtttgtgtgtctatacattgctttccgcatttcaagacatccagacgctattaccaacattttcctgtgcattaacctctgcatgtgaaaacttttaacagttactgaactatgtaaatatgtgaatttttttatttaggtggatgcattttttgtctgtttactgctcttctcagctttattcaataaacttgcattttaagggttgtattggcaattttaacttaaaatgtgcatcatgatggaaggtgcagacttttttggaagtttccgagaggagggtctatagaccatttgtcagaaatcagatcagccctcaaagaatggggtctgtgggctagttaaaatagaaataaacttttaaaatatccacagaaaaaaaaaaaaaaaaaaaaaaaaa

SEQ ID NO: 117569 - DNA, 1000 bp, Homo Sapiens
aagagcctgaactatacgggagagaaaaaggagaaacctgctgccgttgccacagccatggccagagttcttcgggaaaccaagccaatccctaacctcatctttgccatagaacagtatgaaaaatttctcatccacctttctaagaagtccaaggtgaacctgatgcagcacatgaagctcagcacctcacgagacttcaagatcaaaggaaacatcctagacatggttcttcgagaggatggcgaagatgaaaatgaagagggcactgcatcagagcatgggggacagaacaaagaaccagccaagaagaaaaggaaaaaataaatgaaatgcctgagttaatgtgaactttggggcttctgcttcatttttacccaacaagcaacaatgccccttgtcctgtagtccacaccgatgttggcatcttggttctgaacccactgaattcaactgcaccttcagttagaaggaatcttcttggcaggtcctgctactgaaaaatggctggccttaggcaagcccttttgcaaaaagcacagctgaaagcctgagtttgggagcctgcacccaccccgatgaagctccacgggagcaaatacagagcctccaggcagtgctatggtccaggctggcttcgtttttccaaggagcctttggtgagttcaattatctggtaaatatccagcgcttcacctgaaagatagtgcaaattggttaggatgccacctcaagaactgtaactgagagctcagaagtgagcaaaggagcttaatgctaaggtcaaaaggagagtgaaaggttgagaacaattgccacgaacggtaatgttacatgttaggagggtctgttttctttttatataagtgtgtcttagatatattttaaatagaaaataagctttctgatttacttgtttggtatttaaagcacagtttgtttttctgtcacctatagagtgcaagaatgcactctatagaataaattctctttaaacatt

SEQ ID NO: 117570 - DNA, 1000 bp, Homo Sapiens
taggacaccttaacactcttaaaagttattgaaggccccaaggagttcttgggtgtgggttctatctattgatactaattattttaggtattaagactgagaaatatttaaagctcaagaagaacacagaagcacacatccctcagctatgagagagatgacataaccatatgtcatgtagcctctggaaaagtcctctgtatcctcatgagataacgagagggggaaaaaaagctactactgcctttgtaacttccacttagcctactacagggctatgcacatcttagtttccaaaagtctgcttaatttcaaaagaaaaatgcctaattgaatgtaactcatcttggtgttattatacaaaataatttttaatctgcagacccacgaaaagggtctcagggactcctccaggggtcttcagaccatactttgagaacccatgggctagcgactaccttgagacagtcctttacctaggcctgtggattaaagggtttagctgaaaccctagattcttctctgtagtctaatagaactccaaacattgtaagaattgcttggtagcataagctcagggataaggtgggaattgagttcaaatatagtgttttatcttccacacaaatcatctctataggagttaaattaggaagtcacaacagcgcctgttgaacaaactcatcagtgtggtaatcctatgagggataattgcagaaaggttttagagacttgtgaggttccatatgataattctttacacctcccccccccaagagaaagtacacagggctattctgtaatattgttcagggaaatcagcatgatagatgctgtgcctccagagagttctctggagattactacccaaatgtgtattttggcaatttggtggtatttaggatgtaatatgttttcctccatttctgctaattttctctctctctctctcataacatactatacatgctaattgccaagatttgaatgagtcaaattt

SEQ ID NO: 117571 - DNA, 1000 bp, Homo Sapiens
actctccctcttctgctgtccctgtgcagaggaaaaatgaagaattctcccagaagtgacttgtcaagacttaaaaaaaatgtttttaatgcatttcttccttgtctagtgcctcggtttatctctaacaggggctgtccagtatatcggtcctgttaggaggggagaaaaagttcttccaaaggctggagaagtgaacaaggagtcaaatttattttcccaattcaacttcataattatcatttccttggcttcatgctctcccgtaactcatgtggttgggatccatcccatctgggtcacttcagtctacttcacgtacttgaaaaggctttcctttacacttccaggaccaaacagcaacttcctgccacacacttccaccctatcactgggagaaatccttttctggacatgagcctttgacctgggtggggcagaaagaaccacaaactccatctcccaatagaactttgaaattcactcagcttttcctttcatgctgtttgttgcctgcttgttgcactcctcctgccccagaactgcaagatttttagcttcacccctttctgagagtaatgttatcttttatcagaatcagtatcagttcccctgtattctgtgcttcatcgaatttgcaagactgacctcttttaagcatttaattcactcccagagtcatctggtcaggttgcaatatgaggacttctctgtctcctctgaagcctgggacactgagcttacttaatacattagatgttcaaaagaggagcgttgtttcatctttcaaaatgttaggccattactttgagtataaaatcgacttattaatgattagtaatttttctaaagtattgggaaaactttcttattttataagatcttaacaagcttaaaaaagaattttatgaccagaatccaacaagagctctattttggaattgtgcccaagttggtgatgtttactctaaaattaataataaaactacttgtaagcaac

SEQ ID NO: 117572 - DNA, 1000 bp, Homo Sapiens
tatgaacatatatcaaatatccatgcgctgaaacccacataccatcacttggcaattttttagaataagaccccattattatctattgctataaacctagccagttctcttgctcttctgtattttcctatttccctgccatcatctgctatttctgccacttctcttagactccttgtctgcaaagcccaagctagaactcactgtctatggcagaaggacatccagagcccattctggagttttgttttttccttctgccagatgctttgtgtcctgtcttccttcctcctcatatttctgtttctcatttgtgttcagttttgtgcagcattgctagcactgcttttgtgaccagaaaaggccataacatggtccaggatcatcattcttctgactctagatgggacacttgacagtgacttgaaacatttgcatattcaggaatgcatgagatttcaagagagcctacagtatgaaatcattttcacaaaataagcagcttgcttctgaaatgctgtctttcccagtagctactcacctgcctctggtggctgggattcagatgccacaaaactgtcagtatctatagaccaggtctgtgccacctcctctctcctctgtgctcagtgaggaggcagtaaatgaagttacaggctagcacaatacctaattcatgtttcccagtacacctgtagatattactgtacttttatgttctcaagaaataagttgttgcctattcagtgttacagatttctttgtttctttttaattaaaatacaagaagcagctgaggaaagggagacaaggtattttatttctgactgattttagaaaaaacttgtgtacatgtgtttggaactgttgaaatgccaagttttctgtataagtgtttttgtaattaaactttcagattttctttgttttttaagaagttgatgtgcttgtttgacatttgtctcattaaaacttttctacgttgaaaaaaaaaaaaaaa

SEQ ID NO: 117573 - DNA, 1000 bp, Homo Sapiens
gaacaagttacataatgctgtgcaaatgaagcaaaaagacaagcagaatatcagccagttggagaaaaagctaaaagctgagcaggaagcccgaagttttgtagagaaacagttaatggaagagaaaaagaggaagaagttagaagaagccactgctgcccgggctgttgcgtttgctgctgcatctaggggagaatgcaccgaaaccttacggaatcggatcagagaactagaagcagagggcaagaagctcacgatggacatgaaggtgaaagaagaccaaatcagagaactagaactaaaagtccaggagcttcggaaatataaggaaaatgagaaggacactgaggtgttaatgtcagccctctcagccatgcaagacaaaacacagcacctggagaacagcttaagtgcagagacgagaatcaagctggacctgttctccgcactgggcgatgcaaagcggcagctcgagattgcccaaggacaaatccttcagaaagatcaggaaatcaaggacctaaaacagaagatagccgaagtcatggccgtcatgcccagcataacatacagtgccgccaccagccccctgagccctgtttccccccactactcttccaaatttgtggagaccagcccctctggacttgaccccaatgcctctgtttaccagcccctgaagaaatgaaggccagctgtgtgttgtgcccaaaaatttggttaccggaaggcattgcaaaggagcgtctctggcagtcaagataaaaaaacagtttctattgtattttgtggaactgtatctgttgtcatttttaaaaaggggggaaaagataacatccaagtctgattagaactgcccatcagtttttcttgtaaatttttagaagacctcacagaactttacagtttatttttctcggccaacacattaaaaccattcttggatttcaagtaaaaaaaaaaaaaaaaaaaaaaaaaaaaaaaaaaaaaaaaaaaaaaa

SEQ ID NO: 117574 - DNA, 1000 bp, Homo Sapiens
catgcccacaccccgctgtgcctgctccagcatagtcgtcaagaactgcctcctcgccgtgggaggtgtcaaccagggtctgagtgacgcagtggaggccctgtgtgtctctgactcctagctgtctctgggctcagtacctttgccctggaccatatcacttcactcttaacatgaggaatgatcttgtccaagcagtcggggctacttccaagaatgtcagctcctgttagcaaccagtggagtctggccttggggctctaagttgacctctctatagctccaaatcctaccaatctcagaaaactgtaagaggcacagatgactccaccagctgcagagctgactctgaagagagtcttcacttactgcacaggcaaagaaaggcacaggaatatttcctacctctccctcctgtgagtcccacctccccccacccccatctccaggaggcaggtagagcagttctgaccgagaggatagactgctgttgctgtctttccccagctctgaactagttttaaggtagcttaggatgaaaaatggagaatgattgggggttccaaaccactttcttctcccttggcttatatctcttcaccatttggtggtcaactgtgggcctaccctggacctcatctactcagcgagaattggacatgaagctagaggcagctgccttggaagggaagtcaggctcacttggacagcccaggccatggcaggaagaatcccttcctcttggggtccttgatgggcatgtgtgatggggaaggagcagtctcccagccctgggtctgctccccacatctctcctaattccacttcaccttttgccaccccctccccaccagaggcctagcccttttgtcaccgaaggcccccagagtgtttctgtgtgaaaccctctcatttacactgtggcatcaaaatccacaaaagatggattaattgcactctggttaatagcagcagcacaatgattaaaatctatattcct

SEQ ID NO: 117575 - DNA, 1000 bp, Homo Sapiens
catcctgcttcaggataagaagctcatggccatgttcctagagtataacaaagccatccggaactacacccgcttcgatgactggtacctgtgggttcagatgtacaaggggactgtgtccatgccagtcttccagtccttggaggcctactggcctggtcttcagagcctcattggagacattgacaatgccatgaggaccttcctcaactactacactgtatggaagcagtttggggggctcccggaattctacaacattcctcagggatacacagtggagaagcgagagggctacccacttcggccagaacttattgaaagcgcaatgtacctctaccgtgccacgggggatcccaccctcctagaactcggaagagatgctgtggaatccattgaaaaaatcagcaaggtggagtgcggatttgcaacaatcaaagatctgcgagaccacaagctggacaaccgcatggagtcgttcttcctggccgagactgtgaaatacctctacctcctgtttgacccaaccaacttcatccacaacaatgggtccaccttcgacacggtgatcaccccctatggggagtgcatcctgggggctggggggtacatcttcaacacagaagctcaccccatcgaccctgccgccctgcactgctgccagaggctgaaggaagagcagtgggaggtggaggacttgatgagggaattctactctctcaaacggtgcaggtcgaaatttcagaaaaacactgttagttcggggccatgggaacctccagcaaggccaggaacactcttctcaccagaaaaccatgaccaggcaagggagaggaagcctgccaaacagaaggtcccacttctcagctgccccagtcagcccttcacctccaagttggcattactgggacaggttttcctagactcctcataaccactggataatttttttatttttatttttttgaggctaaactataataaattgcttttggctatc

SEQ ID NO: 117576 - DNA, 1000 bp, Homo Sapiens
aaaggcaatgtactgttttgtgttgatctatgtaaaagaatacaattcttttttacataattagtgaaattttattttttattaggaaacactaaatagtgtaatatttcttttgcttttaaaaaaattcctggtagcaaatcaagataaataattgcttcattttcttgagcaatactgaagcaggatgaagtaagaggaatgcattcatttaaacatgctttgctttatgaattttgtctcttttttggtctctttttcttatattcaagttacaaatgtacaagtatccttactaagagtgctccttttgtattttacatatatacagtatgaaaatacattggaacactaggaaagtttttaaataacagttctaatttatcagaaaattgtgttttgggattgagttctttgtctcagcccagaatcccaggtcctgggcctggttttctaatgctgtcatctcagttcgatattttactttagaatctggaatctcctacttaatatatgaccatgactttgaaaggcaaaagaggaatcaagaataaataaaacaaacttaatcttcatctttaaaaaaaagaaaaaagaaaccaaaatgagaatcaacacttcataggctcactgggttttcttttcttttctgttaatttaaactcagttatttttaatgcttaatacatacatggtgcaaaatttaaaaagcgcaaataggtatctagtggaaaacctaagcctccctctctctccggcacccattacctctccctggaggcaactgttttgatccatttcttacacacactgccagagatactctaggcatgtaaagcacaaacatacatataaaatctgcgggcttcaaaaaatataagtaggatgtcatctatactgtcatacactttgttttttatcacttacttaatgttatatcttggatattgtattaccctgggtattaaaaagaactcctttcacattttaaaataaaaaa

SEQ ID NO: 117577 - DNA, 1000 bp, Homo Sapiens
gccctcctggtgagcgctgggcagggctcgtggtggcatcagcagcagagacgaagcctttctgtaacatgcggccgtcctgccgagaggggcagttttgctcttttgtacattttccgaaactacagttaaagcggaagtctgttttcaggaaaagtttcaagggagaagggcaagtttatcaaaaacattgtttcaggagaagggagcataagtttacagcctacaggacgtacacaatatcctgctgctgggaaaaccacagcattttatctattttttattttaataggtttggtgcttatcttctaataagatttaaatgtcacaaactgtagcacaaataatataatttataatttacaaattgactaaaattgggtatagtatggtatttgaaagaataagcatatgcttctgtttattaaaaaaagaaaccttccaatgtccaaaactgctaaccctcgacgtggccgccaagttagtcgctccttgctaaccggtgagtgaccgcggccccgagcctggggctggacgcaggtcccaggacatgctgctcccttgtgtgagtgaccgcggccccgagcctggggctggacgcaggtcccaggacgtgctgctcccttgtgtgagtgaccacggccccaagcccagggctggaggcaggtcccaggacgcgccgctccctcatgctgcccgggcccttcctccaagaccctacagagcctgaggggcaccttggcttccgcctgtgctagctttgccatgtcatctggaataatacttgaaattttgattcttggaaaaaaaagtttcttatcttttgttgaaatcacctgttatccttgtttgtaaactgataacttttttgcttcttctcaggaatacagttttcaactgttgtcttgctcttgatagaaactgagaagcagcaatctgtatttgtggaggaaagtcctctcttttgcatattctaataaatgagccgcgtttgctcctc

SEQ ID NO: 117578 - DNA, 1000 bp, Homo Sapiens
tattccataaacttagctgtggccagggtttgagaggattgactcctaattttgaagttctactgtgggtaaatgctgtcaaacagcattgcatgccacagaggaatctctcatgaaagagttaataaatgcagcaaacttcactgttgtcttactttaagaaactgccacagtcactgcaggcttcagcaacttatcttttcctaccctcctctcgcatttaaaagtacttttaaattaatgtatgtacattatttttaggcataacactgctgctcatttaaaaaaactacagtatgaaccatgttatatgcagtggaaaggcaaaaaattcatgtgacttacttgcttgtatttggtttattgcagtggtctggaactgaaagtgatgcgtatttctgagttatgcctgtatttaagaagctgagtgaaacccaaagaagtccatgataggacagacttctgaaaactaaagacagaaaaaagcttgaaagcatcaagaaagaagtgaaatcttaactagagggaaaagtaactcagatgacagtggatttctctctggaaaccatggaggccagaaggaagtgagacaagttcttttagtgccagaagaactatcaacttgtggctgggcacggtggctcacacctgtaatcccagcactttgggagaccaaggtgggcagatcacttgaagtcaggagtttgagaccagcctgaccaacatggcaaaaccctgtctctactaaaaatacaaaaattagccaggcatggtggcacatgcctgtaatctcagctacttgggaggctgaggcacgagaattacttgaacccgggaggtggaggttgcagtgagccaagatcctgccactgcactccagcctgggcaacagagcaagactgcctcaaaacaaaactctgtcaactccaaattcctatttggtgaaatgatccttcaggattgatggggtaataaaaacattctcggttgatagaaaact

SEQ ID NO: 117579 - DNA, 1000 bp, Homo Sapiens
ttaaccataggaagtcatttccctctagctccttcccttctactctcctgctcagaccattagtaggtactttgttaaataaaaaactagattaacatcaatattactccaatttggtatcttttacactatgtattatacctactttctttttatttcatttacaaatagtttaaattactttatcaaccagctgtattgtttccctcttgtaaaagtaccatcaagtggggaaaatgtatgtggaagtggagagtgaatttgtatgactaaaggataatctgtacatggggaagtgggcaaaagtgaataggatgaatttaaagaaaatgactacctttggaaaaaagaaattaaattttgttcacatatcctaccctttcccattgtgcatatcccaagtgtcatatttaaaactaaggttacttaaaacagaatccaggaatatcaaggctctgtggcttggaattttagaggataggactaataaaaggacttttgcaaagaaggcttttttccacgttcactttgttttgtgttctttgaaagtaactgatacttttcgggtagttaattcagcagtccataaatatgatccagtaacttgcttatattttattgaagtctcgacagctcttcagaagtaaatttagaacgatgctgtcagttcatatttatagatattagtgttttagcagataaaacaaaatcaacaaaaattaagttcattttgtgattaaacctgcaaccatttttccattactttttttctatagttaatggttattgccatgatttcttctgtttggttctactaagctagaaagccagggtgaagttaatgataattcccattattttatttctgtaccatgagattgctgttgatgactgaaataccaggtgcaaaaattaatgatttgatttttgtacagtttcaatgagtattttttacttattaaaaataaattaagaaatgcaaaaaaaaaaaaaaaaaaaa

SEQ ID NO: 117580 - DNA, 1000 bp, Homo Sapiens
tatgccagtataattcagaacatagaaaagtaatgattcacttgggctcattttagactggtcctgggtcaccctgccacacttgtttcctagtgtttctgtggcagacattgctaatcaattacagcccttttctgtactgagccttggataaagggtcaggctcctttttagttcagagattcaggcagccactcccagtgggttgtagataatgtgcaagataaaaactattttctcttccaaatctaagtactaagctcctagtataaggtgttgttacagaataccagagaccatgttagagacaactacatctcttcaaaaaacagccaacagagacaaaggaaaagtgtttaaatagtaagctgttcttcttaatcagaactatcctattgactaataaataatctgcataattctacttaaggtgtgtaatctctgttctagagttagtttttaagtaagcttgttaatctgccactttgacattttgcttaggatgtcagtagccatattaagatgtgtagaataccttcagaagatgatcatagtgttttgtaatcatttaatgtctgcagccaaatttttaaaggtaatttagacctaatactgctcttgctgtgtcttattaagttaaaattaatgaatgaattctggtaaaaattcaaaaggcactctgtgagtagagagtatcatttaagcttattttagtcacatgtagtatatatctccttaaagctgtcactctcactttcttaccattctcttgatttcttcagaaaccatctagtcatcatctttatactctacctgcttctgcaattatatatcatattatgttttcagagcagttcattgtcaagttggactttaagtgaccattcaagaaaagatgaaatctcacgaacctcaaaacttcattcatgtctttttacaaatgagaaaaaaaaatgcattaaagattaatactcaatttgaaaaaaaaaaaaaaaaaaaa

SEQ ID NO: 117581 - DNA, 1000 bp, Homo Sapiens
catatgtgaggttgtttccctcttcagccacggctacaataccggaaaatgctagtttttatttatttttttaagtagtgcttcctaaatggtttgcatgagagccacctggggtacatgttgaaaacttatttggggtctaccccaaacctaataacccaaatttggggatggggcccaggaatatgcatttttaaaaagtcatctgcccttcccaggtgattctgtaagttgtccctcaactgtacttggagaaatcgtgttttaaagcagtagtccacaaagtattctgctcatgtgcccccaaaagtattttgaaaaatcatgtataccctcacccatctaagttgatatctaaaattttatctaagttggtatctaaaatttttcatgggaagttaaatagttgacaaagtatgtatttgctggtgtcgtgtaaatattggtattttaaaataaaaactgttacatcactattttaaacatatccagtacaatttaaatatcacaacaatttgacacccttcattcatttataaaaataaatgagctagttctttagtagttaaacatttcaaattggcttttctccttctgtatttccataccacttttcagccaagaatcctatcataatgtaatctattatgcccgacatcttttaatcattcaccccattacttcttgtcaacaaaaaatataaatggaaattttttttttagctcttgctttaagtgtttgtttgttatctcagtccagaaccaatattatcgtaattaattattggtatataatgaaaacggtattaattcttggatgattaaaagtttttttattagaatgttctttatcctaattagttcatttatccaagaatacatgaatgtgatttacagctgagatggggttcaacctcagctgtattccttgtttctgtatagatgtaagcacataaattcgatggaatagaattacgttaacaatgaaaaaaaaaaaaaaa

SEQ ID NO: 117582 - DNA, 1000 bp, Homo Sapiens
atccctgctcagaatgctcccagttccctcgtccctgcccaggtctcttgtctcttgggaaggaactgataggtcgggccattgttgggccatcactgagcgctcagtatctcaagagactctgttcattctgctcgtatcccaaggcctggttggtcaaactctgggcaaagggttttcaggatgaggaggtcaagacaggatctccagagctaccgagttcatctgtgggtgttgggggcaagtgggggctgaagtcctgtgcaggctgcgctggccccacctgccttgtgccctggagtggggtttctccttgttgaagaagaggcatccttctctgatgtgcacaaacacaatgtatgaccagagccttgcaactcaaagtgtggtctgtggaccagcagcggcagtgacacctgggagcttgttaggaatgcagagtctaggcctcaccctatacctcccgactcagaccctgcattttagcaagacccccagctgattcctataagcactttagagtttgagaagcaaggacctaggctggggatgtcctccgagcagagggtgaagtttctctcagttctctccctgccacttccagggatctgagcctgtgctcagcctcctccctaacccaccctgggagacacttggcctgttagattgttccagagtctgcatggcactcctgaagaagggagtgtgacctgcagtcaccaggagatgagggttaggtgtgcccagccctccagacccggcctttctggttaacccctgcatgccaagctgcctgctgccccaggtcctcacctcaggcctttgaaggggcagcttctggaagttgttttctcctctgcttggagagtttgcccttgtctgtcttggaaagtgtgggcagccacagatgcccccaaatcagagctcacagtgagtgagcccctaagcttcagtctgcaataaagaatgcattggtttcatcaaaaaaaaaaaaaaaaaa

SEQ ID NO: 117583 - DNA, 1000 bp, Homo Sapiens
gtgcggtggtgcgatcatagctcactgcagcctcgaactcttgggcttcaagcaatcctcctgtgtcagccaccagagtagctgagactacaggggtatgccaccatgcccagctggcatttgttaatcttcatttgaggtctagatctaggcactgtggacactgaaaaacagttgggaaatctttcgagctgtggaaatccaaacaaagactgataattcctggtaggggtgtgtgcgtgacgtactgcagcctcaacctcctgggctcaagtgatcctcccacctcagcctcctgagtagctgagaccacaggcgtgtgccaccacgcctagctaattttttataccagggtctaccctttgtttcccaggctggtcttgaattcctgggatcaagcaatccttccaccttgccctcccaaagtgttgggattataggcatgagccaccacgactggccagaggacaaaattttaataaaggtcttagcttaagcagtaatcctacttcattaagccttcctggggtgcggtacacaccgttaattcagcaaccctcagtacatactaagtatgctcagtgctgtgaaagtggattacaccaaattaagtcattcttatcacacccaatcaaaagtcaagaagccagggataaaagcacctcaggcacataacattaatctagtaatgtaattctctgcacatccagctggtgaaactgcgtgctgtaagctgggaccagctttgtccataactgctgagagaacttgctgaagctctaggaataattttgcctgcccggttgctcaccagttgtagcttgccagctcccaacacccttcctggtgccaataaactttctcaaagagcaatactgacatttcttttgataaaacctccagccttctctgtgttgttccgacataccgaggaccaactggtctacatggatgccctgaacatgcaattctttcttccaaaataaaacattaaatagag

SEQ ID NO: 117584 - DNA, 1000 bp, Homo Sapiens
ccccatatcttttgttcaaacataataccatctttttgcttcttctgaactttagatctccataacacatgtactgtagaatgtgatggaaaagcattgatgagaatttattggcagttcagattgtgttttcccaacttaggctctttattaattggttaaggttttctccaaaaagggcatttcaacaatgggaattatttaatgtaacagtgggcacagattacttatcttccttctctgctttgtgactcaccagcagtaacacacacaatccacatcttgtgcacctcaaatgaacagacttggtttccttgctttcttgacatttccatgactgtttcacatacaaactattgggtgaggtttttcagctgttaccgacccacgtcctgctgtctctgtgtggtcctacaaaaactgtccattcccacccctttgctttgccatttgcaagagtctggaattgtcaggtctcagcttcgaaaagtcctggttccactgacaggacacattctttagtgggaattaagacctacaaagtctagtttgtatgtaggtatgaagggaattttttaaataaattgaaaagctgtgaacagcattagaactttgtctatttcttaattttaaaatatgctgatatgccttaaactgtagttgtagatccttgtcattttgctgtttgaaaataaccaatgtgttttctaaaactgtcgtgtaatctactttcattgttaatgcagaattgtcatatatgtaagctgcatgttagacatttgtcttttttaaactaaagtaattgtattgatgtgaagcatatcattttttcaaatatgaaagtgatcacttagcaacatgcttggtaatttggcatctgttaaggtaggagagtggtgaacagataatctatgcatatatcactagtgccaagacataaagcgggggaaaatatatttttacccaaacattaaaaaaaaaaaaaaaaaaaaaaaaaaaa

SEQ ID NO: 117585 - DNA, 1000 bp, Homo Sapiens
tgcctttcttcctgtttggttcattgtattgtattaggttaagctctactagggtaatgaaggctctacttttcactttttaaaagtggacaaaagagtgtgattttctttttccaaaaattcctgagtatcaagacgtgcaggtcatgctttggagcctatgcactgtacacaatggcaaaaccctatgactttggcatcatctgccattgatgtccagcctctgacatgctctttgatttgttaaatgttaaatgagactttaaggctactagaaactagtaattaagtttcttaatggactgagtagccacctacttgtccggctagaatgtttgttgatgtatgagtttagattaacactcaaaagcactaggacagatgtacatagaaggtgcctactcattgtattttgatgatttcattaacaggtaaataaaagttaatacaaaaggaacgagtgtgacaatatgaatatctgctcaatcatcgggcacaattactttcatttggtgacttccaaggacaaaaaggtagtatgagtctggactcccaagatggatctaactctcaaggtatgttctaactgcttccagggaagggtttgttaggcatggcaactgatggcaggtgtccagaaagagtgacctggtgtccccgaggaagctgggttaactctttactgtgtccacaaaactacccatcatatgaggaaggggtatacgcagtgtgaccctcaaaaagcttttagcctagcctttgacagaaatgagtatgcattaaaaaaaagtctatttttcacattaaggttctaaaaattgtttccagagttttaaattatttatgtgcctgttgcttcaaagaggacttggtagcatttcctaaattttgtaatctggcttccgataatccaaagggaataactcaaatgtatgaataggcattttaaatgggaagaaactgttttttggatgaatgattaaaagtgaactgtataaag

SEQ ID NO: 117586 - DNA, 1000 bp, Homo Sapiens
aggagccactgtccctgcattgggattatcaaataaagctgtctttcagggagatatagcttctcagccttctgatgaagaggagctgttaactagtactggttttgagtatcagcaggtggcctttcagccctccatacttactgagcctcccactgaggatcatcttctgcagaatactttgtggcctgaagttcaaaaactatatgggcacggttatgaaatattttgtgttacttgtaacagttcaaagactctgcttgcctcagcttgtaaggcagctaagaaagagcatgcagctatcattctttggaacactacatcttggaaacaggtgcagaatttagttttccacagtttgacagtcacgcagatggccttctcacctaatgagaagttcttactagctgtttccagagatcgaacctggtcattgtggaaaaagcaggatacaatctcacctgagttcgagccagtttttagtctttttgccttcaccaacaaaattacttctgtgcacagtagaattatttggtcttgtgattggagtcctgacagcaagtatttcttcactgggagtcgagacaaaaaggtggttgtctggggtgagtgcgactccactgatgactgtattgagcacaacattggcccctgctcctcagtcctggacgtgggtggggctgtgacagctgtcagcgtctgcccagtgctccacccttctcaacgatacgtggttgcagtaggattggagtgtggaaagatttgcttatatacctggaaaaagactgatcaagttccagaaataaatgactggacccactgtgtagaaacaagtcaaagccaaagtcatacactggctatcagaaaattatgctggaagaattgcagtggaaaaactgaacagaaggaagcagaaggtgctgagtggttacactttgcaagctgtggtgaagatcacactgtgaagatacacagagtcaataaatgtgcactgtaatgg

SEQ ID NO: 117587 - DNA, 1000 bp, Homo Sapiens
gaatggattacattccaggtcaaacgtgtaaagaaacccaaaggagatcataagaaaactcctgggaaaaaagtagaaacaggtcagatagaaaatggacatcgttaccaagcaaacctagagatcactggccccaaggtggcatctcctgggccacaaggaaaaaaacgtgactaccagcgtctgggatggcccagcccggacgaatgcctcaaactccgctgggtagagctgactgccatcgtgagtacctggcttgcagtttcttcaaaaaacattgacatcacagaacacatagattttgccacccctatacagcagccagcaatggagcctctttgcaatggcaatctccccacgagtatgcataccctggaccacttgcatggggtttccaaccgagccagcctgcactacacaggggagagtcagttaacagaggtattacaaaatctcggcaaagaccaatatccacaacagtcgcttgaacagattggcacccgaattgccaaagttttggaaaagaaccagacgtcctgggtcctctccagcatggcagccctctactggagggtgaaaggccaaggaaagaaggcaatcgactgcctccgccaggctctgcactatgcgccacaccagatgaaggatgtgcccctgattagcctggccaacatcttgcacaatgccaagctctggaatgacgccgtcatagtagccaccatggcagtagagatcgcaccacactttgctgtgaaccacttcactctgggcaatgtctacgtggcaatggaagaatttgaaaaagcactggtgtggtatgaatccacattgaagcttcagcccgagtttgtcccagccaagaaccgaatccagaccatccagtgtcacttaatgctgaagaagggacggcgctctccttagtgcacttcttccttctctctttctctttactcatgctctaaaaaaaaaaaaaaaaaaaaaaaaaaaaaaaaaaaaaaaa

SEQ ID NO: 117588 - DNA, 1000 bp, Homo Sapiens
ttgagattatctgatttcaaggtactgaaggacaaaaacttggatggcctcaaaaggttcttgaacaccactgtgattctccaaggacgaattacgtaaattatactttcatacaaaggagacgataaggcagtaaacatggagacacgggggacagcgtccacactcagagggcctgggccacagccccgatgtttcttttcagaactcagcccctttcctgattttacttctaagaggaaaattattttggggaggaactacacagtcgtgattagaatttatctgatggttttgtattataacttgtaagacctgccagaatgctagtcccgagagtgtcagacaaggaagaagtccctgggcctcttccccttacccggcccttagatttcatggagcagccacttagcattgaattgcactaccctgagctaaacgtgtctgtgctttctaagataagagcttgatccctttcttctatcttaagacagcacctcctgaaaagaatcgaagttgtcacaactctcaattattttttaaatactgcatagattgagttttggtttattaccaacccttcccagaattgcgttggatctaaaactactagatctcatcccattcccatgtaaattaccacagaccgcagtaccggggctggagcggagtgaagctgtctgctgtaagaggagtggccatgtgagggcatggagtcattagtctcacaaacacactttggactgaagaggatcatttctttttgttcgtgaggtcactgtccaggcctctcatatcatgaccagacggcgggtctccatcttctttcactcctgtggccctggctgctttacacaatctgttctataaggttcaggtgttttcaagttggaaagatcataaatactcaaaattgttttcaagttagcaagttcttttaacagtcttttatgcaaaaattgaattaataaaataatcttttgtaaaaaaaaaaaaaaaa

SEQ ID NO: 117589 - DNA, 1000 bp, Homo Sapiens
ccaccgcacctggcccttctaacgttttttcatcatagtcccaaaaaccaatactttacaagtggtttttgaaaggcaccacttttgtggcatgttctggttgggagagggagtcacagttcctactccccccaccagctatgcttctgctctgagaaggtggttatttatacaaacatggacatactcactcccaagggctgatgagatgctgaattttctttgggggcattcattaattgtcccagctgcagcgactggagcaagtctggaagctgcctgtgctaagaccacccagctgtccctgggttctcatcctagggccttctttgcttccaggtcaggggacctgcttcaatgagaaagcaactgaattgaggctaggagaggtagggagagctgagttctgacttcacctgtgcagaactctctgcccccatgttacctggactggaacagactgtgaatatagcagaaggttccaagaactctggtgtctgacctagaagaggcacagttctctctactggaaagaaaacgatgtagccgattgcacaagggtgccaagggaagacccaggatggcccatcaaaggaacctgggggaggatgcaggaggctgaagggatgcacctggcatttctctcactgtgctcttaccgcatcagcaacccccaacttttgggcctactctgccccccatgcgtgaataccctgcttggatgctgtgcttttccggtttgtctctaagcccctttctccagggcatgttggtttccctggcctctcagtgtcctaactggagcccagagtgccttgttctgagccaggagacggctgagcactggccctccacacctaagcgtcctttacattaacttattggtcttgtataacacctggtgccattgccaagtggctgtgtcctcagctacagagctggaattgtgtggggtttagtgctaaatacttcaataaagtctgttttttgtgattggctg

SEQ ID NO: 117590 - DNA, 1000 bp, Homo Sapiens
ggattcatctttcctgtgagtcggaattgaagtcttccccaaaaatatatgtatatattgtatgtcttcatccttggtagcggctggcccattttcccacatggactttattttgtccccagtatttattgaacagctgtctatgccaggctctgtacaaagtgataggagtagagctgtgaatgaggccaaccagatttccactctctcggagctcactttatttttattggttcctgaagacgggacaaggaacaaatacatacgttaatatgagagatcagcttctgttagtacttgtacctctctgctgtgtgtggatgaatgatggaattacttctcccatgttgccatttttgaggtgtacaaaggtcaggccgtacacacctctgttaggaggcaaattattgggcaggttcgagatgttctgctatttactctgtggttttgtcatatgtaaaagtcataacacctgttttaaggattgagattgttcatttactgtgtgccacatattagacaataaatggaaaaaagtaccatgttcaatgggggtatgggtttatccttataggttaaattataggtaaacattaataggactttttaaaaaatgcctcattgttagaactactactcacagttaccacttggggtcagtggaacaaaatgcatatatggttttgacatttgagtctaaaatgggcataatagtttacctcatagagtttggggagaattgagtgaattaatgtgtgtgaggacactaagattcccatatagaaataggctcaatgaatagtagctgtttttatttctatgtaaagtgagtagcggtagttgatgggagctgttgaaacaggtaaacagcattctagcaatccttcgacttttgtgatagcaaaccataaaaacaattttagtggctgttttactaattaaaggacatccacaattcaatgtataacagaaaaagtaatgattaaagcttgtgaatctg

SEQ ID NO: 117591 - DNA, 1000 bp, Homo Sapiens
tgtaatgactgagcagaaaatcaatcactttctctttgcttttagaggatagccttgaggctagattatctttcctttgtaagattatttgatcagaatattttgtaatgaaaggatctagaaagcaacttggaagtgtaaagagtcaccttcattttctgtaactcaatcaagactggtgggtccatggccctgtgttagttcatgcattcagttgagtcccaaatgaaagtttcatctcccgaaatgcagttccttagatgcccatctggacgtgatgccgcgcctgccgtgtaagaaggtgcaatcctagataacacagctagccagatagaagacacttttttctccaaaatgatgccttggggtggggagtggtagtgggaagagctcccaccctaaggggcacacactgagttgcttatgccacttccttgttcaaaataaagtaactgccttaatcttatactcatggcttggagttaccttatattcaggtatatgtgatattttgcctggtttgttaaaattgccccatttagattccttctataattgttcttatagataagtaatttatatatgagctgtgttagtatttttttcagtgtgagatctctggattctttcacaataaagctgttgaattttaacaggagtattagtacataaattttctactcaacaattccgagataggattatgcctagtttgtcatatcacagaaaaactccaagttaacttcatgttttggaagggcaggtcgtttttaaagtatttctttttttaactggatgaaaaatcttcatgttaggattaattttcttaatcacctccacactgtacagaggaaactcaagccttaaatgtttaagtaaactctgtctcagttttaggattaaaatacccaccggtggtgtgatgatgccatataccgcagggcttgcttctgtcaagtgtgactctatctcagtaattaaaataagtgctgatctactg

SEQ ID NO: 117592 - DNA, 1000 bp, Homo Sapiens
atggagcagtttgaaaggacccaaagtgtgaatctgcccaaggaactgcacagcaagtgggagagacaggactacgaaaaaatggctgtaatggagtgtgatgggtgctgtgtggaactgtgccttggaaactgtgggcccagaagagggagcgtgacagatatcccagggacagccatggtcagaggtggtggctgagctggcctccaaccaggaggagcagtttgccagcactccccggtgctgcctcgcccctgcctctgcagccaagttcccggaagctgtcctggctgctggcctgacccctgagactcccgcggagatcgtagccctggagcacaaggagacacgctgcaccctgatgcggagaggtgacaactggatgctgatgcttcgggacaccattgaggaccttagccgacagtggaggagtcatgccctcaacacctcccagtagcctggctggaggtggctttctttaggcttcagatcccaggaagatgcaccttctgagctgccttgtgcaccctccccattaagcgtaggttaggaggtttccgggaggctgctcagctggatctggagccagctggctttgctccgttccctggctagtctgtgcctggtcaccagggaggctgagtgaggggctgtgaacagttgccggaagcaccccctccctccccggcccgtgcagcagtgtctgagctgtagtgaaagtttcagggcctgcaaaagaagaggcttgggcacaggactgaccatggctccaggggtttaggacccccagacctgtgaaggtgggagcagctcaccaccttcacgcaggctttgtatgttctctgagccttagttgattttggcccccaaaccaaatccaaaggttctggcccaccttgtcagaggcttccaccctgctcacatgttgggaatccctggaataaaatgcttgttcagtgaaaaaaaaaaaaaaaaaaaaaaaaaaaaaaaaaaaaaaaaa

SEQ ID NO: 117593 - DNA, 1000 bp, Homo Sapiens
atcctacaaaccaaaagaaagacttgtaacattcagcctggacacctttggccctgttaccttgattcaagatgctcatattaacatgccgtaccagtcatgggaactaagaccacttgatgtaaataaagtacttttaactgtgactacagtatttactgagattcaaatacaaattaaggaaaacctctgcatgttatcttcaatcaaactaaaagacaagaaacacatctctattttggaaggaacctggatgactcctattcctttcattattgctttgaaagaagctggactgaatatctttcctactagacactctcatttttatgttattataaacaataaggttcctttggtagaagtgaaagcttatcgacagatggccctactaagttctgcttttgcatttggttggagcaagtggaacctactatgtaattctacaaaagtcgtatttaaggtgagggaacaccttactgaagaatgtactgagaatcctaattgggcccttttaatgtttagtggtgacagagcacaaagactgaagatcaaggaagagagtgaggcattttctgaagcacttaaagaagaaactgagtttcattctactttatatcacatggtgaaggattttgcttctgaggaagcaatggagaaagtcaggagttccaactgtcagtttgtcaactctgtgtgccacatgctgctctctaccagattgctcagctactcctaacctccacttacaaactgtattgtaagtatgaagaaccaagcatggtgaaagacaggtatttctgcaacacaatgtaatgagtgaatgaatacatttcaaatcaactattaaaaattttctaatctgcattttctactcaagttttattttaaaaacagtatttttttttcctttgaatacttggcctgttaagaatttcagctttcactctatgaagatttaaatgattctttatttcaataaactttaacaaacaataaa

SEQ ID NO: 117594 - DNA, 1000 bp, Homo Sapiens
gggctcttcgagctaagccagcacatgaaactgaagctgcagttcaccgccagcgtgtcccaccctccacccgaggcccggcccctctcccgcaagagcagccccagcagccctgctgtccgggacttggtggagaggcatcaggctagcctgggccgctcccagtccttctcccaccagcagccttcccgaagccacctcatgaggtcgggcagtgtgatggagcgcagagccatcacgccccctgtggcctctcctgttggccgccccctctacctgcccccggacaaggctgtgttgtctctggacaagattgccaagcgcgagtgcaaggtcctggtggtggaacccgtcaagtagcaccgtgccagctctgttccctcttacactccagagacccaacgcccccagaggggatccctgctcctgggctgtgcctcccctgggatgcctcccagacgggggtgaagaggcctggcagagctgcctgtcttgtgtctgctgatgagggatgggggaagaagctgtgaagtgggcgggcatggctgggactaagccaccagtattccccgagttcctgtggggggggctggccccacccctaggccagggcaagggttcccagagctcccttgtccccggccctttaccctggttctgagtttacaaagtctcttcctcattcccgttgagttctttcccacctctgacattccctccctccctcccgcagggctgagattagagggtggtgatggctaagggcccctgacagtgaccttcctgtctcaggggttggggacagggccaggtagcctcctgccccttatgtttacgtttgcagcctgaagcactttaatttttttttttttggtctgttcctgtaacttattttccaactattgcttccaactgaaataagactattaaatgcctgttcaggagggagaaaaaaaaaaaaaaaaaaaaaaaaaaaaaaaaaaaaaaaaaaaaaaaaaaa

SEQ ID NO: 117595 - DNA, 1000 bp, Homo Sapiens
ccgggggctcagagatccaagtgcgcgccctggcgggtccggaccaagggatcactgagattctgatgaacagaccttctgcccgcaatgccttggggaatgtcttcgtcagtgagctgctggaaactctggcccagctgcgggaggaccggcaagtgcgtgtcctgctcttcagaagtggagtgaagggcgcgttctgtgcaggtgcagacctgaaggagcgggaacagatgagtgaagcagaggtgggggtgtttgtccagcgactccggggcctgatgaatgacatcgcttcctcggcagtcatgggactgattgagaccacgcgagggctcctcccgggggcaggagggactcagaggctgccccgttgtctgggggtggccctggcgaaggagctcatcttcacgggccgacgactgagtggaactgaggcccacgtactggggctggtgaatcacgctgtggcccagaacgaggagggggacgccgcctaccagcgggcacgagcactggcccaggagatcctgccccaggcccccattgccgtgcggctgggcaaagtagccattaaccgaggaacggaggtggacattgcatctgggatggccattgaagggatgtgctatgcccagaatattccaacccgggaccggctagagggcatggcagccttcagggagaagcggactcccaaatttgttggcaaatgacccccattttaaccttcagcatgggagatgcatgccctgaagagcaggatccagaaggaagatttgtggccagattgccttcatcatttcacctctccagacttccatttcttcacaaggatgatgatggaaataaaatgactggcgtgatgcctggaaccaaggtgctgatcctaccacctactgctaccttccttagcttcaccctggctagaaataatcacgagggttgggtttgctttggaaaatgcctgtctctctacttgaatgataaagaattaaattag

SEQ ID NO: 117596 - DNA, 1000 bp, Homo Sapiens
attttctcagtttggtccagtagagaaagctgttgtggttgtggatgatcgcggtagagctacaggaaaaggttttgtagagtttgcagcaaaacctcctgcacgaaaggctctggaaagatgtggtgatggggcattcttgctaacaacgacccctcgtccagtcattgtggaacccatggagcagtttgatgatgaagatggcttgccagagaagctgatgcagaaaactcaacaatatcataaggaaagagaacaaccaccacgttttgctcaacctgggacatttgaatttgagtatgcatctcgatggaaggctcttgatgaaatggaaaagcagcagcgtgagcaggttgatagaaacatcagagaagccaaagagaaactggaggcagaaatggaagcagctaggcatgaacaccaattaatgctaatgaggcaagatctaatgaggcgtcaagaagaactcagacgcttggaagaactcagaaaccaagagttgcaaaaacggaagcaaatacaactaagacatgaagaggagcatcggcggcgtgaggaagaaatgatccgacacagagaacaggaggaactgaggcgacagcaagagggctttaagccaaactacatggaaaatggtgataaaagaaaatgtggctgaagttacccgaagttcagcttgcagtgtaattcagaagagttaagaccagaagtactggaatcatacttcctttcaggtcaaaacattttgtgggaaatatcctgttcgtgacctaggagaaacaagacagaaaacaaatctttcttcatttatgaatttcttactccatacaagcagtttatggatgtctgggcaatcatagcacttgccatttaaaaacatgctacaggggcacattttctgtggttaaaaatgatctccagaataagtgtaaactgcagttttcctttgcattgagggttttggctttttatttgtaaattaaatcaagatgttacccac

SEQ ID NO: 117597 - DNA, 1000 bp, Homo Sapiens
tagagacctgaattcaaatattgtagtttaggttcaaacagagtatggctgttgcaaaatttaccaaatttgttgattacctcttttattaaagaaatgttggggagagggtaatatattgtgacaatttttgcaacttacagggaataggacaggtcattagggtgtatttcccaggtttccaattgagaatctaaaccaagagaagtgagacaaaccatctaatatctgtatcatgctattaataggctgtgatgttgagtttctcacttactctttctgaggtccagggtccttatatgaagagattcatatatatgaagagattcgtctagagcagtggttgtcaaagtgtggtctgggggggcctcaagagcctttcaagggtattctaggtcaaagctgtttttataacactaagacattatttcactatttatagcttttccttttttttatttgagaaggagtcttgctctgttgcccacattggagtgcagtggcacgatctcagctcattgcagcctccgccacctgggttcaagcaattctcctacctcagcttcccgagtagctgggattataggcacccaccaccacacctggctaatttttgtatttttagtggagacggggtttcaccatgttggccaggctggtctggaactcctgagctcaagtgatctgcccatctcagcctcccaaagtgctgggattacaggtatgagccacaacgcccagccatcatttatctttttcactcattttttcatgagtatgcagaggagttttcaagaggctatctggtgtgatattgtaataggctgaatgcaaaagcagatacaagattccagctttcgtctgtcatcagacattgaagagatttggagaaatgtaaagcagcagtactcttctcactaatttttattgtggttagttagaaaaatggttatttttagtgggttttaatatgtgaaaaaaataaaattagctatttgcc

SEQ ID NO: 117598 - DNA, 1000 bp, Homo Sapiens
aacaagtgtcactatatttgataataattagatcttgcatcataacactaaaagtttacaagaacatgcagttcaatgatcaaaatcatgttttttccttaaaaagattgtaaattgtgcaacaaagatgcatttacctctgtaccaacagaggagggatcatgagttgccaccactcagaagtttattcttccagacgaccagtggatactgaggaaagtcttaggtaaaaatcttgggacatatttgggcactggtttggccaagtgtacaataggtcccaatatcagaaacaaccatcctagcttcctagggaagacagtgtacagttctccattatatcaaggctacaaggtctatgagcaataatgtgatttctggacattgcccatggataattctcactgatggatctcaagctaaagcaaaccatcttatacagagatctagaatcttatattttccataggaaggtaaagaaatcattagcaagagtaggaattgaatcataaacaaattggctaatgaagaaatcttttctttcttgttcaattcatctagattataaccttaatgtgacacctgagacctttagacagttgaccctgaattaaatagtcacatggtaacaattatgcactgtgtaattttagtaatgtataacatgcaatgatgcactttaactgaagatagagactatgttagaaaattgaactaatttaattatttgattgttttaatcctaaagcataagttagtcttttcctgattcttaaaggtcatacttgaaatcctgccaattttccccaaagggaatatggaattttttttgactttcttttgagcaataaaataattgtcttgccattacttagtatatgtagacttcatcccaattgtcaaacatcctaggtaagtggttgacatttcttacagcaattacagattatttttgaactagaaataaactaaactagaaacaaaaaaaaaaaaaaaaaaa

SEQ ID NO: 117599 - DNA, 1000 bp, Homo Sapiens
agtatattaagaaagctgccaaaaaagcagcagaatttaatagcaacttaaaccgggaacgcatggaagaaagaagagcttattttgacttgcagacacatgttatccaggtacctcaagggaagtacaaagttttgccaacagagcgaacaaaggtcagttcttacccagtggctctcatccccggacagttccaggaatattataagaggtactcaccagatgagctgcggtatctgccattaaacacagccctgtatgagccccctctggatcctgagctccctgctctagacagtgatggtgattcagatgatggcgaagatggtcgaggtgatgagaaacggaaaaataaaggcacttcggacagctcctctggcaatgtatctgaaggggaaagccctcctgacagccaggaggactctttccagggaagacagaaatcaaaagacaaagctgccactccaagaaaagatggtcccaaacgttctgtactgtccaagtcagttcctgggtacaagccaaaggtcattccaaatgctatatgtggaatttgtctgaagggtaaggagtccaacaagaaaggaaaggctgaatcacttatacactgctcccaatgtgagaatagtggccatccttcttgcctggatatgacaatggagcttgtttctatgattaagacctacccatggcagtgtatggaatgtaaaacatgcattatatgtggacaaccccaccatgaagaagaaatgatgttctgtgatatgtgtgacagaggttatcatactttttgtgtgggccttggtgctattccatcaggtcgctggatttgtgactgttgtcagcgggcccccccaacacccaggaaagtgggcagaagggggaaaaacagcaaagagggataaaatagtttttgactctaatactgtatatgcatttaagtggaatatttggtgccatttacaacattattttcatgccaataaaagattttttttgc

SEQ ID NO: 117600 - DNA, 1000 bp, Homo Sapiens
aaagcagcctcgcaaacctcctcagcctccaggaccctgctggttttgccttgctagccctgaagtggaaaaacatttggtggtcaacatcggcacacattgctaccttgccctggccaaaggaggcttatctgatgaccatgtcctcatcctgcctattggacactaccagtcagtggtggagctttcagcagaggtggtagaagaggtggagaagtataaggccactctgagacggttctttaagagtcgagggaaatggtgtgttgtatttgagagaaattataagagccatcacctccagctacaggtcattcctgtcccaatcagctgctctactactgatgacattaaagatgccttcattacccaggcacaggagcagcagatagagctgttggaaatcccagagcactctgacatcaagcagattgcacagccaggagcagcatatttttatgttgaacttgacacaggagaaaagcttttccacagaattaaaaagaattttcctttgcagtttggaagggaggtcctggccagtgaagccatccttaatgttcctgataagtctgactggaggcagtgtcagatcagcaaggaagacgaggagaccctggctcgccgcttccggaaagactttgagccctatgactttactctggatgactaaaacaaagggaagaactttttatgaactccacaggaagtagtaaagctttttttttttttttaattaaaagaattttttttgagacaaagtctcgctctgtcacccaagcaggattgcagtgagccaagatcgctccattgcactccagcctgggtgacagtgaaactccatctcaaaaataaaagaataaaagtatgtctgtcatccagctcctatgtctgttatccagctccaagtacagcttgtgtatatcaacattttcaaaaacctttaaactaccaaatgaaatccagatgtttttccatggaaaaaaaaaaaaaaaaaaaa

SEQ ID NO: 117601 - DNA, 1000 bp, Homo Sapiens
ctctgggcagcgcccaggccttactcatcctcttgcttatagccatggctgtgttccctctgagggctgagagggctgagagcaagcttgagagctgctaaaggcttacgtgattgcaagggttcagttccaaccatagtcagaggtggcacatctgctcagccatctcattttacagctaacgctgatctccagctccagcgatggaacccactacagaggaggtggggcccctgtgtcaaagaggccgaggggcagcaagggcagccagggcacctgtgacttcttagtacaagattgtctgtccttcaggacttccaaggctcccaaagactccctaaaccatgcagctcattgtcacaccaattcctgctttaattaatggatctgagcaaatcttcctctagcttcaggagggtggggagggagtgattgccgtcatggggccagacttccaggctgatttgccaaatgccaaaatgaaacctagcaaagaacttacggcaacaaacgaggacattaaaagagcgagcacctcagtgtctctggggacatggttaaggagcttccactcagcccaccatagtgagtgggccgccataagccatcactggaactccaaccccagaggtccaggagtgatctctgagtgactcaacaaagacaggacacatggggtacaaagacaaggcttgactgcttcaaagcttccctggacctgaagccagacagggcagaggcgtccgctgacaaatcactcccatgatgagaccctggaggactccaaatcctcgctgtgaacaggactggacggttgcgcacaaacaaacgctgccaccctccacttcccaacccagaacttggaaagacattagcacaacttacgcattggggaattgtgtgtattttctagcacttgtgtattggaaaacctgtatggcagtgatttattcatatattcctgtccaaagccacactgaaaacagaggcagagacatgt

SEQ ID NO: 117602 - DNA, 1000 bp, Homo Sapiens
aagatgaggtagttgatgtcacttggcgatattcctgcaaacatgaagaggtgattgccagaagaactaaggttaaagaagcattacttcgagacactattaatgggcttaataagcagaggcaactgtttttgtcagaaaacagaaggaaagaacttctccagaggataattgtggagcttgttgaatttatatctcccaaaacccctaaacctggagaacttgggggaagaatatctgggtcagtggcttggagagtagcccgaggtgaaatgggtctacagagaaaagaaaccttgtttattccctgtgaaaatgagaagatttctaaacagctccacctttgttacaatattgtgaaagatcgttatgttcgagtttcaaataacaatcaaaccatttctggatgggagaatggcgtgtggaaaatggaatctatattcagaaaagttgaaacagactggcacatggtatatttggcccgaaaggaaggatcatcttttgcttatatttcctggaagtttgagtgtgggtcagttggcctaaaagtagatagcatttctattagaacaagtagtcaaacttttcagactggaacagtagaatggaaattgcgatctgatacagcacaagtagaactgacaggcgataacagtcttcactcctatgctgatttttctggtgccactgaagttattttggaagcagaattaagcagaggagatggtgatgtcgcttggcaacacacccagctgtttagacaaagcttaaatgaccatgaagaaaattgtttggagataattataaaattcagtgacctttgagaacctgaacattatagaaaagctggcaataatcaaggacttactgaagtagtctgttggttcagtgcatgcttagttggcagttaccaccctgtgctagcatatttcttttgctagctatccatcatgtaaccctcatgaaaattatctttatacgtggactataataaaatatt

SEQ ID NO: 117603 - DNA, 1000 bp, Homo Sapiens
cagctacatcagtgggtgatagtggcacagctgagagcccatcattactccaggacaagggaaaacaggcagcacagggtaaaggccccagtctccatgtggcaaatgttattgatttttcacctgagcagtgttggactgggcctaagaagctgacgcagccaatagaatttgtcccagaagatgaaatccagagaaatcgtttgtcagaggaagagatccgaaaaattcctatgttttcttcatataatccaggggaaccaaacaaggtattatacctgaagaaccttagccctcgggtgactgaaagagatcttgtgtcattgttcgctcggttccaggagaaaaaaggacctccaattcaattccgaatgatgactggacgaatgaggggccaggcctttatcacctttcccaataaggagatagcatggcaagcattgcatctagtaaatggatacaaactatatgggaaaatattggtgatagagtttggaaagaacaaaaagcaacggtcaaatctccaagcgacttctctcatatcatgtgctacaggtagcactacagaaattagtggtagctagaatatatataaattgtgggtcctggatggtctttcttgaattggaatcttggatctaggatttatgtatagacaccagtttgtttggagttgaagaggaaaaactaactgagggaggggaaaaaagtaatttcagcttttggagagaactggtagaaaacattttctattatataattgaagactatataggacagatgatatgctgagtatgaagggtaaagtgcaaagagtattattttctcaggatgaattacaacggattattcctaaggatttttaaaaatctttataatttttctggggtcctcaatatttgtctctagagataacattctttcttagactgcttcgtatacacagaaataaaaaactaattaaatgttgaaaaaaaaaaaaaaaaaaaaaaaaaaaaaa

SEQ ID NO: 117604 - DNA, 1000 bp, Homo Sapiens
tacatattacaactggggtagattatttgtggtccaggtgtctgtgatttaactttgcgttttgctatctgatttttatttttcacagggctaagcatgagctttcattctcactcactcttaatttgtcgtgcgtcactacacatgcacgtgttgcagtccctgaggccctgtgtgttatctgtgatggagtgtgaatgtgtaacgggcactgtgttacactctgaggtgttggcggggcggtcgcagacttcagggtcccctaacggaaaggccaggctccgcgtggacggccaactccctgcccgctccttcagcaggtgactgtctctgccacttcttacctgctgaaggatcttgctcagtagctggaacaatgctgctgtcacacagtctcttctctgaaacttcaggatgctccttggtcaccaggcaatgggagctgtagaccagccgcatgcacttgccccacattcactgctgactggcttcactggaataggttcaggtcaccgggacttctctcagagtcagcggcccacccaactccctcataccgtcgcatctgaaaattttcagagaggaattctctttgtagtcggcttgtcagggttttcaagtttttctatggttatttttaaatctctttttttaaatgctaaaattaatgtcctcattaatgcaagtaattttagagcacagtgtagccatgtacagtttccattatttaaaataaataaatgtgttggttcatttggtgtatggggggacatcatggtaactggaaatgaaagtttaatctttcacaaatgtgcttgataaagctgttaagaattgtctttcctaagtatgttaactgttgtatctaactcaactgtgagctaagtttaaaaactgcaatcatgaatgtttgtgatattttaaatatctactacagcacattcagccaataaagaatctgcctttaatgtaagttgtaatttaaaaaaaaaaaaaaaaa

SEQ ID NO: 117605 - DNA, 1000 bp, Homo Sapiens
gaattggccgggtgtggtgtcacgcgcctgtggtcccagttacttgaacctgggaggcggaggttgcagtgagccgagattgcaacactgccactccagcctgggtgacagagcaagagaccctgtctcaaaaaaaaaaaaaaaaaaattaaatgggtagtgacgttaagagatatatatcagcttctagtaaaagtttttttttttaaacctgctagctacatttacattatgtaaaaataaatggaataatcactgagaataaagcagttgagtatttataacaataatattttatggggcgcttataatgtttataatattgtaaaccactgtgtactctattcatttaatgctaaatgacttgaccattcttgtgggataagagatcattaaaaaaatgctagggccgggcaccatggctcacgcctgtaatcccaggactttaggaggccaaggcaggtggatgacttgagctcaggagtttgagaccagcctgggcaacatgatgaaaactccgtctctaccaaaaatcaaaaaaattagccaggtgtgatgttgtgcgcctgtagtcccagctacttgtgaggctgaggtgggaggatggtttgggccccggaggtagaggttgcagtgagctgagattgtgccactgtattccatcctgggcaacagagccagaccctgcctcaaaaaaaaaaaaaaaaaaaaaaaggcctggcacagtggctcacgcctgtaatcccagcactttgggaggctgaggcgggcaaaacacttgaggtcagacgtttgagaccagcctggccaacatggtgaaaccccgtctctaccaaaaataaaaataaaaattatccaggcgtggtggcatgtgcctatagccccagctactcaggaagctagagcacgagaattatgtgcatcctggaggtgaaggttgcagtgagccaagatcacaccactccactccagtctggacaacagagtgagaccctgtgtc

SEQ ID NO: 117606 - DNA, 1000 bp, Homo Sapiens
catatcgtctggtgaaagggttaaattacttcacctcttgcacttttagatgcaaatcagtttttcatttctgtaatagaaaattattcacgtatttttacatcatttgtttttcctgaccagtatttaaaaccaaaaggatattctgaaaaatggccaacaatttttttagaagtagcatcccaagcagcgtgcctaaacattacattgcatatggaaataaaagaatcaaacgtctaatgccttattatttctgatttcctttttcattttaagtggtgtggagattccagcactcccaggacagtggagtcagcagtaagccctgggacaggtggcaagggtgggtcccttgacctttgcacgcctcctcaggaaccccctttcccgggtgagcccctctctgaagagactgtccttgggcctcctctggaagcagcacccccagaggacagggctcctcctgcttgcctcagggctgcctgacttgaatggcgttggacctcggggattactggtagataatatgctctggtctcgcctggtggtgagttttgccagccatggccagggtttggctccactggtggcacacgtggcctccgtggtatggacctggtggcttctccatcccactgtggcctctgtggtatggacctggtggcttctccatcctacccaaggtaacagtgtcttgcttcatcccactgactgctgggagagagcctctgggacttttctttggggcatcattttgttttgtctttcgtagcagggaaaggatatgacaatggggaggacagttcttttggaggttggaggggccaagccaaggacaggagcaagtgtgccctcattttgtttctacttttaatttctgtgtgttggccatactgaattatgagactaacagatgtctacaatacaatacctgtattcaaaataacaaaaataaagcctgattctttgtttctagaaaaaaaaaaaaaaaaaaaaaaaa

SEQ ID NO: 117607 - DNA, 1000 bp, Homo Sapiens
acaaacccacactggcattggataaatcatattacaccttcaaaatacacactctgaattataaagatgtgtttgttttctttccaaatcatgtagaattgatttccagttcaaggataaaccaaaacaatatttagaactatcaagtgatctaatttattttcttttggtttcttctttacatttactgttattttattattattagtagtagcagcaacagagtatgatatgacccaaaagccattgtaaagtgccacattaccaaaattaattaagtaaactttatagcctgtgggagtctattatatattattttgcaaaagtagtaaatatattattgtttcatgatgactcttgatgagatgctagaatgtaaccatacatttatcttattttgaggatagaaatagcatggatttcaacatcacttatttatctgtataattggaaataaaacaccgatatgatagagaatcattccggcattacctaacctcttctgcagttggatctatgtattttcattggtctactgaaaacaaacaatacaattaaaagcactaaagattattatattaattcaactttgatctgatatatcacttaaactaaaggggtgtgtgtggtgtatgcttgtttcctatttctgctctttaaagatactttgaatcaataaaaccattagtctacaaatcaaattgtgaacttaatctctagaaagagaatataactcagccatttataggaatttaggttcaagtacaggatatatgaaatcttttcccagtatttcagaatgtacttaattcacaggcaggatgcttcaatgcaaaatcatgaatatttttaattcaaaactaaaatgtcattaatatgtatgtatgcaaatgttttatcttattttctgaaatgcatctactttcatgggctttgtacgtttctgagatttctcagtgtaataaaaagagctcccaaacttaaaaaaaaaaaaaaaaaa

SEQ ID NO: 117608 - DNA, 1000 bp, Homo Sapiens
cattgtcaatgttctctttaagtcttttaacatttatagcaattttttttttcccggagagtttaggttgcaagttttgggtttcttgtttgtttttgttttgcttcctgctttaattctttaattttcagtcattactggtattgaaaaataaaatatctttaaaacatctcctcttcagaaataggtccctcttcattgcccatcaccatcttccactctcctattattttgccactactcagtaaaggaaggtaggaagagacaaacgcctaagtgcaggtgtggggagggatttcacaagtggttattaacggccagttcagcaagaagtgttgagtgtgtacaaaggggagggctggaagtgttaactccagacccgttggctgcttgagttgtttcttatattctaaagcagcagtccctaacctttttggcaccagggaccagttttgtggaacacagtttttccatggacggggtggtggtggaggatgaaacttccacctcagatcatcaggcattagagtctcataaggagcacgcaacctagatccctcgcatgcgcagttcacaatacggttctaagggctttagagtaagcagccttttcacctgtgggcctctggtgagaaattctgtaaattgtgataatcaggctggattttaatgctgcttttccagtacaatgttagagtttgggttcattaaaattaggcaaactcccattgggttagggcttctctcattccattttgtggctaaccttactgtgtttcagcccttgctgaaaattcttctgatacgtgttgcccttcctcacagccctttggccattgggagtttggctgtccctcagagccatccggtcaagcagatggtctgttctatctcacagaaaagtcttttcttccatgagttctgtctgaactgaacatgtaaaaagtatgggaaacagatgaatccctattaaacatgaagttttgattgtatttaagat

SEQ ID NO: 117609 - DNA, 1000 bp, Homo Sapiens
tcttcaaaattattatgattgtactattgtacttgaaattacagatgttattataattacagtcaaatgtagactatcaggccaaattaaaggggagcatggcagataaccataaagtcatttatatttgattttgaaatgtatttttgtactttattttgaatatcatccatatgtctgacattattggaatttgtaacattgttaatgcactaagtgatttaaattcaattgatgaagatgtgattttacagaagcagaagtttcattttcttgaggcttaaaaccaatgtcaccacttgggcttaactgggtaatttgtggtctaggccttttgttttctaagcttactatcttgtgtttgtttatttgcttttaatgaagtattttgtgtagaaggttaaattaggatgcaaaacagatctgccattcctttttcccttatatcttccttttggtcctcatggacgagatgaatgaggattctgctgccctgagggagttcattggaaacctgcgttctcctacctcttccaaccctccattagctcaattttgagataatggaaaattgactggaaattcaaaactcaaactactatctttagatataaacactagtaattaaaatgtgccttttgaagatgttttctaagagaaaggaaatacgttgcagtgatgtgggtactgctttcataaaacagttttttcagtattttgagaattgccatattaatttttataatggaaaacttaataaattgctactgttttatatcataaaattaaaataccatggtaatatttgcaaaaggtctggccataccagaaaagtacagttgagatagttaagatataaccacaagtcagagtacattggttgtattttgtaaactttcatgaactgaattcttatttaaatagtatggttttttttcaataagtatatttatagtgacaaatgtggtagactaaaggtaataaaaatcattgtcttaag

SEQ ID NO: 117610 - DNA, 1000 bp, Homo Sapiens
tggagagtaaggatgggatacttgaattaatcatgacagcgttacagattgcttcctttattttgttacgtctgttcgcggaagattaaacttaatgaaaatctgtttgtattttctgcatattctctggcaaccttgccccatacttacttatttagcatagtcgagtgctctagtttctgtctctcaggcactcgtaactaaggaccaccattggccattggtagatgtttgattgacttaacaagagagggacaaattttcaatttgtgaaactccaaagcagaaagtattggtgcttgctaccttgtgaattcttccttagacatgcagagaaaatgtatgcaagagaccaaaaagatggctccaagctatgtcatgttacctgtaataaaatcttttcttctagattctttctatgttggcagataatctccccttgtagcttccactcacttattcttgcattcagagtcacaatgatcatcttacccatgtggtttttgagaaagaaagatcaattctttgtttgcagtaggtaatcttagagatggagatgattgtagaattattcctagatgagtgtcaatttatttaattccattgtcatataaggagtcaaattgtttcttatcatttgttcattgaagaacagagacctgtctggaaaatcgatctctacaaattcaattaaataatgatccccaaatgctgaaaaagtgaaatacagcaattcaacagataatagagcaatgtttagtatattcagctgtatctgtagaaactctttgacgaacctcaatttaaccaatttgatgaatacccagttctcttcttttctagagaaagatagttgcaacctcacctccctcactcaacactttgaatacttattgtttggcaggtcatccacacacttctgcccccactgcattgaattttttgcttatgttgtttataataaaacttttcaattatctcaaaaaaaaaaaaaaaaaaa

SEQ ID NO: 117611 - DNA, 1000 bp, Homo Sapiens
tcgaatgagggaagtggcagcagagaggccagagctgccccctctctgtctcttcaatggacccttcacaagtgtttctcctgcccttggggctgtcttccttctcctgaaatccagagactttcttgctcatcccttctccctttcacttctgttctctgctgcagaaagcagacttgcatatccctgatgagcagctcggctacttttgtaaacttcagatttggagagaaacacgaaagtctgaatcctgaccccttgagagagagtgatctggcgagggccgatgaaggggctgggcctggtcttgccttctcttctctcggttgctccctctgcctaggcccctggtactcagtcacggcagccaggagaccccaggtgagtttctgagcgcatacgtagttggttcttacccccaggtgtcacacggggccgagagctgagcaagaatttggaatggaagttatgaccaagggaattatgctgttcatttataatagtggacattatggagagctctgattcctacataatatgaataaggatggataggccgggcgtggtggctcatgcctataatcccagcacgttgggaggctgaggcgggcggatcggttgagctcaggcgttcgggaccagcctggccaacatgatgaaaccccgtctctaccaaaaatagaaaaaaatatagccgggcctggtggcgcacgcctgtagtcccagctactcgggaggctgaggtaggaggatcgcttgagcctgggtagaggctgctgtgagctgaaatggcgccactgcactccagcctgggtaacagagcgagaccccgactcaataaataaataaggatggataaattgtagcgtatgcaccattcattatgctaagacattttaaagtaattatgagaaacgctctactaatgatttgtttttatttgtatttttctgcttattagacaaatatatactcattttaaaaaaaaaaaaaaaaaaaa

SEQ ID NO: 117612 - DNA, 1000 bp, Homo Sapiens
cagccccggcagccccgggcccgcgctgcgccctctgcccgcccgtgagaagccccacgcgtgctgcgagtgtggcaagaccttctactggcgcgagcacctggtgcgccaccgcaagacgcactcgggagcgcggccctttgcctgctgggagtgtggcaagggcttcgggcgccgcgagcacgtgctgcgccaccagcgcatccacggccgggcagcggccagcgcgcagggggcggtagctccgggcccggatggtggaggccccttcccgccctggcccttgggttagccgcctcccggccagcgccatctcccgcccttggtgctgcccccgggcggtacctgctctctcccagcgccacttggcctcttcctctcctccttccctcccatcgtcctcctccacctgcgcctcccttgtctgaacttcccaacgccttcctattcctttccaactccttttcccccaaatttcactttccttctcaggtctcacctcagccccccccttctccctgatttctcggcctctctctctgtgtgaaggggcctctccctaatgtctcctccttcccccctcttctctctcctgcggcccagcctccctctccctcctccattcctctctccctgcccttttcctgcctgaagagcagaggtgaggacctgggacccctgaggggcaggccaggaggagctcgggcgcaggccaggcccccttggtgaagcagaggctgaaggaaaggggtctgggtcttgtccctaggaattctcctccctcaggagattgggggttgggggaggcagcgggtgatggctctgaagctgaacccagggcctggctgtggtcttcttggtcttgctgccccctgtgacccaaaggcatgggatggacagagatgcctgcccccgtgaagctggttggggagggcagttcaccagcatccatagagtaataaagtcactgtgtgtagacccggaaaaaaaaaaaaaaaaa

SEQ ID NO: 117613 - DNA, 1000 bp, Homo Sapiens
tcagaatgcccctccactcatgagactctccattttgtccactttgacaggaaaagtgggaatgtatgcagagctctcaaaagaaacaaaaaaggccaaaacggtgccttcagccacatcctctgaattggccctgacttggactaaatgcactaatgcgaaatcccttgacaaaagcgcataggttatttcaaaccagcattgttttttatgtaacctgttttaccgcatcttctcagcagcttctgaccactgctcaattttctcctttacagccattgttctggtggacaaataacctaggtactccaaatcctggcaggaaaaatatacagcattatgaaacagcactcagtaatcctaaaatgatttccaaagctggttacacatgacctgcaaagtctattaaattaaaagactttctcattacagagtttagtcaacgtagcaaaaccatgggaaattaaatggaaagataattaaatatgtaaattcataaggaacaaaagacgagaagttaattatacaataggctggtgacaccagagttcattgttatgtgccacaagaaaattaaattttttaaaaaactagaacgctcttcttttagtgttttgctgaaatcctgttttgtatttgtttctttacaacaggtgtaggtataggaggtcaagaaaaggagttcggtaaagggcatagctaataacaaccacacattgggccaggcgcagtggcttacgcctgtaatcccagcactttgggaggctgagacgggcagatcacctgagatcaggagtttgagaacagcctggccaacatggtgaaactccatctctactaaaaatacaaaaattagccaggcatgctggtgcacacctgtaatcccagctactcgggaggctgaggcaggagatcgctggaactcaggaggcagaggttgcagtgagccaagatcatgccactgcactccagcctgggcaacagagcaagactctgtctc

SEQ ID NO: 117614 - DNA, 1000 bp, Homo Sapiens
cctgaagactgtggtcttccagtccgatgtgtaccccgcactcctcagctccctgctggggctcagcaacggctacctcagcaccctggccctcctctacgggcctaagattgtgcccagggagctggctgaggccacgggagtggtgatgtccttttatgtgtgcttgggcttaacactgggctcagcctgctctaccctcctggtgcacctcatctagaagggaggacacaaggacattggtgcttcagagcctttgaagatgagaagagagtgcaggagggctgggggccatggaggaaaggcctaaagtttcacttggggacagagagcagagcacactcgggcctcatccctcccaagatgccagtgagccacgtccatgcccattccgtgcaaggcagatattccagtcatattaacagaacactcctgagacagttgaagaagaaatagcacaaatcaggggtactcccttcacagctgatggttaacattccaccttctttctagcccttcaaagatgctgccagtgttcgccctagagttattacaaagccagtgccaaaacccagccatgggctctttgcaacctcccagctgcgctcattccagctgacagcgagatgcaagcaaatgctcagctctccttaccctgaaggggtctccctggaatggaagtcccctggcatggtcagtcctcaggcccaagactcaagtgtgcacagacccctgtgttctgcgggtgaacaactgcccactaaccagactggaaaacccagaaagatgggccttccatgaatgcttcattccagagggaccagagggcctccctgtgcaagggatcaagcatgtctggcctgggttttcaaaaaaagagggatcctcatgacctggtggtctatggcctgggtcaagatgagggtctttcagtgttcctgtttacaacatgtcaaagccattggttcaagggcgtaataaatacttgcgtattcaaaaa

SEQ ID NO: 117615 - DNA, 1000 bp, Homo Sapiens
gatgagctggggccctccttcccaatggcatctccccctggtctggaactgaagacactgagcaatggtccccaagccccaaggagatcagctcccctgggcccagtggccccaaccagggagggtgtggagaatgcctgcttctcctcagaggagcatgagacccatttccagaaccctgggaacacgagactgggcagctcacccagtccccctgggggtgtctcctcactgccccgatcccagcgggatgatctgtcccttcattcagaggaggggccagccctggagcccgtgagccgcccggtggattatggctttgtttccgccctcgttttcctggtgagtgggattcttctggtggtgacagcatacgccatcccccgtgaggctcgagtcaatccggacacagtgacagcgcgggagatggaacgactggagatgtactacgcccgcctaggctcccacctggacaggtgcatcatcgcaggcctcgggctgctcacggtgggcggcatgctcttgtcggtgctgctcatggtctccctgtgcaagggcgagctgtaccgccggaggaccttcgtccccggcaagggctccaggaagacctacggctccattaacctgcgcatgagacagctcaatggggatgggggccaggccctggtggagaatgaagttgtccaggtctcagagactagccacaccctccagaggtcttaagaactagcccaccttatctggctgctttagctccagtgctacaaggtccaccccctgctcccgcccacctgacccctgccaaggccctggggttttaaactgagctcacatagggccttgtggaagaagtactgggtgctggagggagagctcggggcccagcccatgccccacacgggcaagcagcccactgatctgttttgtagctgaggttttgcatacggttttgtttggaggatggcttctgctgctaaaaatacaaaagtttggaaaccgc

SEQ ID NO: 117616 - DNA, 1000 bp, Homo Sapiens
atgagtcttctgccaacagctcctctgaccccgagagcaaccccacatcccctatggcgggccgacggcacgcggccaccaacaagctcagcccgtctggccaccagaatctctttctgagtccaaatgcctccccgtgcacaagtccttggagcagccccttggcccaacgcaaaggcgtttccagaaagtccccactggcggaggaaggtagactgaactgcagcaccagccctgagatcttccgcaagtgtatggattattcctctgacagcagcgtcactccctctggcagcccctgggtccggaggcgtcgccaagccgagatggggacccaggagaaaagccccggtacgagtcccctgctctcccggaagatgcagactgcagatgggctacccgtaggggtgctgaggttgcccaggggtcctgacaacaccagaggatttcatggccatgagaggagcagggcctgtgtataaataccttctatttttaatacaagctccactgaaaaccaccttcgttttcaaggttctgacaaacacctggcatgacagaatggaattcgttcccctttgagagattttttattcatgtagacctcttaatttatctatctgtaatatacataaatcggtacgccatggtttgaagaccaccttctagttcaggactcctgttcttcccagcatggccactattttgatgatggctgatgtgtgtgagtgtgatggccctgaagggctgtaggacggaggttccctgggggaagtctgttctttggtatggaatttttctctcttctttggtatggaatttttcccttcagtgactgagctgtcctcgataggccatgcaagggcttcctgagagttcaggaaagttctcttgtgcaacagcaagtagctaagcctatagcatggtgtcttgtaggaccaaatcgatgttacctgtcaagtaaataaataataaaacacccaaaaaaaaaaaaaaaaaa

SEQ ID NO: 117617 - DNA, 1000 bp, Homo Sapiens
gcaattcataatcaactaactgacatggaaaaatgtattttgaaatatatgaaaggaacatctattgtggtccctgaaccactgcactttttattaccagggaaaaaaaatcttgtaacaatttcatatccttcaggaataccagatggccagctgcaggcctataggaaggagttacatggtcttttcaatctgcctcacgacagaccctatttcaaaaggtctaatgcttatcactttccagatgagccatacaaagatggttacattagaaatccacatacttaccttaatccacctaacatggagactggtatgatttatgtggtccagggcatatatggctatcatcattatatgcaggatcgcatagatgacaatggctggggctgtgcttatcgatctctgcagactatctgctcttggttcaaacatcagggatacacagagaggtccattccaacacacagagaaattcagcaggctctagtcgatgccggggacaaaccagcaacatttgtcggatcgcggcaatggattggatctattgaggtgcagctggtactaaaccaattgatcggtataacgtcaaaaatcctgtttgtcagccaaggttcagaaattgcctctcaaggacgggaactggctaatcatttccaaagtgaaggaactccagttatgatcgggggaggagttttggcccacacaatactaggagttgcatggaatgagattacagggcagataaagtttctgattctagatccacattataccggtgctgaagacctgcaagttattttggaaaagggctggtgcggatggaagggcccagatttttggaacaaggatgcatactataacttatgtcttcctcagcgaccaaatatgatttaaaatatcttggagtcaaagactgcagtagagtggtattataaatttgtgaataaagaatcagtttaatttttcacattaaatcctggttctagtttgaccattt

SEQ ID NO: 117618 - DNA, 1000 bp, Homo Sapiens
ggatggaggagcaggtcaccaaggccgaggccgagctgggcaccttccccagggcgttcaagaagctcctgcacacgatgaacgtgccctcgctctttagcaagtctgctccctcgaggccacagcaagccggctacgaagcccccgtcctgtttcggaccgaagactacttcccttgttgcagtgaaaggcctcagctctgacggcctgaccactgcggcaagaggaccccagctggggtgcttacctccagtatgaagtgaattgcaaatcctgcttatggacatatatgatgttggagtgtgggattttaaagtttactttctacaaactctccgtagtatattcatgattcagtgtagaatgtatagactttatgtcttccaagtttaaaaaaagagacagggtcttggtatgttgcccagactgttcggaaactcctgggctcaagtgatccttccacctcagcctccccagtagctgggactacggggtcgccactgcacccagcctgtgtcttccagctctaatcagaaagctgcttgtcgagggcatggggaatcaaactgaatgaacttttctctgcactgtggcaaaactgttatttttatggattttactaaatggcgttaccttttcaagatttatatgtttgtataatcataagaaaattgagccattaaagccttgttattcaatcctaatagtcagttttctagaacctacttttagggtaaatggtacattatttaatattatattaaacctcctatagcgtggattgtagaccaaaggaaatggtacaatttctgagaatatatgttgattttttgtgactaattccaaagttgtatttgaaagtatgacctcacagtcttcatttgtccatagcaaacatatgtgtgtgtgtgtgtatatatatatgtgggttgccaatgtttggtttataatttaaatgttaatagaaattttgagttttattggaaatgatttccttctg

SEQ ID NO: 117619 - DNA, 1000 bp, Homo Sapiens
aaacacttgccaaaacattaagagaactttgattctgccttaagagggtatagaactaaaccatttgaaggcacagcccataagactatacttgattttgccccaagattctgacttctggctacatttcacctgcagttacctgggctatcggccgtgatacattttttaattcatttgttttccaccattatatttttatacttttcagttagatatacttctgcataaagagtatatatacagtgtaggataaaggcatatcgtacatggcaatgctgttaaacatggtaagactgaggttctgcaggattaaagtcagattaagggtacagaaagcacaccttgatactgaggccatttagagcaatttgtttaatgagtggttcagccatcaccaccagtggccacctgttcaataaaattgcctagcaccacagtggagagtcatctacaccccaaggtgagctgtaagactggccaattctttgaagacctttttttctgttgggagaatggaaagcagaaagggaagccaggctctttaatgttccaagtcagctgtgcctcacacaaggctctctttttagctactaagtaacatactcaagactttgtatctgtgcagcattttatggaaatcactggtgacctataggatattactaaattatttcaatagctttatttttttcctacttggattctaggtggacattacagagttgaattcctcactaccccctcccgctgtcatttgttttattggaaaacttcatgttaactagagtgtacaaaaagtctgtttcctgctgagccaatagtgatttgtttgcatatcacctaatgtgaaaagtgctcatctgtgaactctatagcaaattatattttagaaaatactttgtgaggccgggcatggtggcagagcgagactccgtctcaaaaaaaaagaaaagaaaagaaaatataaggatgtaaaagaaaaaaaaaaaaaaaaaaa

SEQ ID NO: 117620 - DNA, 1000 bp, Homo Sapiens
tatgtgtttagcatatgttattagaacatgtccgacacccctaccgctgccatttgggccctttaataaagccaagtagagaaatctggcaataaaaggcaaatgtaagcatgctttctttaagacgcatcataaatggttttctttaagtgaatggaagagtttgacagagatacacctttgtaagaaaacattaagaatgctggctggctgtggtggctcacacctgtattcccagcactttgggaggcctaggcaggaggattgcttgagcctgggacttcgagaccagactgggaaacatggcaaaatcccatctctacaacaaaaatacaaaaattagccaagtgcggtggtgtgcctgtagtcctagttacttgggaggctgaggtgggagaatcacctgagcccaggaggtggaggctgcagtgagccatgccaatgcactccagtctgggcaacagagtgagaccctgtctcaaaaataaataaataaataaatgaataaagagaatgctaatcatttctgggttcactgcgactcactgtagtgctggggatcccccttgtaacactggaactgaaaggcagtgatgaaagctatgtcaagcattcattattctgaagaggaggagaaatgccacatacctttcccatgggacctgtggtggaatgaatccatacttctgcctcacttcgagcagacttttgttctcggcgctcctcacgatggagtttcatgcttcattttcacatctctctgcacaattagattgggagctccttgagggcagagtacgtgccttaatctttatctttgtaatgccacaatgaacagagtgcctcctggtacactgtaggagcttaagaaatactcactgaatgcatgaatgaatgaatgaacaaatgaaggaatgactaaggatgtttgtagtgctataatatagaatgggatttactctgctttaccagttagtttcataataaacaaatagtctgt

SEQ ID NO: 117621 - DNA, 1000 bp, Homo Sapiens
aaatgcactttttttcccttgtgagttatagtctgcttatttaattaccactttgcaagccttacaagagagcacaagttggcctacatttttatattttttaagaagatactttgagatgcattatgagaactttcagttcaaagcatcaaattgatgccatatccaaggacatgccaaatgctgattctgtcaggcactgaatgtcaggcattgagacatagggaaggaatggtttgtactaatacagacgtacagatactttctctgaagagtattttcgaagaggagcaactgaacactggaggaaaagaaaatgacactttctgctttacagaaaaggaaactcattcagactggtgatatcgtgatgtacctaaaagtcagaaaccacattttctcctcagaagtagggaccgctttcttacctgtttaaataaaccaaagtataccgtgtgaaccaaacaatctcttttcaaaacagggtgctcctcctggcttctggcttccataagaagaaatggagaaaaatatatatatatatatatatattgtgaaagatcaatccatctgccagaatctagtgggatggaagtttttgctacatgttatccaccccaggccaggtggaagtaactgaattattttttaaattaagcagttctactcaatcaccaagatgcttctgaaaattgcattttattaccatttcaaactattttttaaaaataaatacagttaacatagagtggtttcttcattcatgtgaaaattattagccagcaccagatgcatgagctaattatctctttgagtccttgcttctgtttgctcacagtaaactcattgtttaaaagcttcaagaacattcaagctgttggtgtgttaaaaaatgcattgtattgatttgtactggtagtttatgaaatttaattaaaacacaggccatgaatggaaggtggtattgcacagctaataaaatatgatttgtggatatgaa

SEQ ID NO: 117622 - DNA, 1000 bp, Homo Sapiens
tttttttttttaattatttctcttagcagatcagcaatccctctagggacctaaatactaggtcagctttggcgacactgtgtcttctcacataaccacctgtagcaagatggatcataaatgagaagtgtttgcctattgatttaaagcttattggaatcatgtctcttgtctcttcgtcttttctttgcttttcttctaacttttccctctagcctctcctcgccacaatttgctgcttactgctggtgttaatatttgtgtgggatgaattcttatcaggacaaccacttctcgaactgtaataatgaagataataatatctttattctttatcccccttcaaagaaattacctttgtgtcaaatgccgctttgttgagcccttaaaataccacctcctcatgtgtaaattgacacaatcactaatctggtaatttaaacaattgagatagcaaaagtgtttaacagactaggataatttttttttcatatttgccaaaatttttgtaaaccctgtcttgtcaaataagtgtataatattgtattattaatttatttttactttctataccatttcaaaacacattacactaagggggaaccaagactagtttcttcagggcagtggacgtagtagtttgtaaaaacgttttctatgacgcataagctagcatgcctatgatttatttccttcatgaatttgtcactggatcagcagctgtggaaataaagcttgtgagccctctgctggccacagtgaggaaagtagcacaaataggatacagttgtatgtagtcattggcaacaattgcatacaattttactaccaagagaaggtatagtatggaaagtccaaatgacttccttgattggatgttaacagctgactggtgtgagacttgaggtttcatctagtccttcaaaactatatggttgcctagattctctctggaaactgactttgtcaaataaatagcagattgtagtgtcaaaaaaaa

SEQ ID NO: 117623 - DNA, 1000 bp, Homo Sapiens
ggttttacatggaagcttttattaaaaggactgtcctatggccaccttaacatttcattacattggcagcttcagttttggcatcagtcaaatttatttggcaaatttagtggtgctggaagtttctttttttcttttccttttttgacagagtcttgctctgtcacccagccaggagtgcagtggtgcaatcacggctcacttcagctttgaccctgcctcagcctccctagtagctaggactacaggcatatgccaccatgcccagctaattttttgtgtgtgtgttttttgtagagatggagtttcaccactttgtctatgctggtttcaaactcctgggctcaagcggtccacctgctgtggcctcccaaagtgctgggattgcagatctgagccacagtacctggccgctggtgctggaagtttcaatggttgcttagaaaaggcatactgatatagtttaacaggatatgaaaatttaactggttctctatgaatgtaaaaaacagcaaaagctaattgatttctgtggagtgagaaaatgtcagccatatacactgcttttcagtgttagaatctagagactattttttttttaactttgaaattacagcttatttaatcagcgctccaccataaacatgctattaggaggctcaagattgctttaggttatgggtatttcttcactcacccccaactggtatagcttaaagagagagaaactgtaatcaaatttcatgaagctaaaaccggatccagagaccaaacccatatcaagattagactttttttccctgagattctagtggaaaaattttcattattttgggctttaactttagaaacatagtatctcagtaagcagataaccagatcacatttaaaaattttcattttaccttgaagctctactggacttgacagatcacattttgagagtgaattcatttaaacaataaacctctacattatacttataaaaaaaaaaaaaaaa

SEQ ID NO: 117624 - DNA, 1000 bp, Homo Sapiens
ctgcagcctgaaagacctggtgcgggagtgtgagagaaggtactgtgccttcaacaactggggctctgtggaggagcagaggcagcagcaggcagagctcctggctgtgattgagaggctggggagggagcgagagggctccttccacagcaatgacctcttcttggatgcccagctgctccaaagaactggagctggggcctgccaggaagactacaggcagtaccaggccaaagtggaatggcaggtggagaagcacaagcaagagctgagggagaacgagagtaactgggcatacaaggcgctcctcagagtcaaacacttgatgcttttgcattatgagatttttgtttttctattgttgtgcagcatactttttttcattatttttctgttcatctttcattacatttaaatctctggaccctggagcacttctaatgtatcaccccatggagtcattgttctaataatcaccaattcagactcagatcctcgtggtctatggagcatgctgcttgctgtctgtgcagctcccatttccccttcttcctgatagacttggagctgtgtgcctccactccaaggctgcctgcctgctgtaaacactattccactctgtctgccaacaactgcttcaggaatgggcctgagatcccatgcaggtccctgagaagtgagtaaaagtccgcagaggtggggatggaagatctctccttagatagaacctgtcttcctccctggcattgtggggtctgggcgtgacactgggactctcagcagctttgtgctgccaacctgagattgaaggcagtgcctcagagcagcacagagagttggggccccctgagccctgagccaccagccctgcagcctgccctatctccgcatttccagttgtattagccaatagatttcctacttatttaagctatttgagctccgggtctcttctacctgcattctaaaacattcaaagtaataaaaatttctccacatt

SEQ ID NO: 117625 - DNA, 1000 bp, Homo Sapiens
aggcgtggtggcgcgcacctgtaatcccagctactcgggaggctgaggcaggagaatcacttgaaccagggaggcagagtttgcagtgaatggagattgcgccgctgcactccagcctgggcgacagagtgagactgcatcacaagaaaaaaaatttgcaagggatggttcacgagacacatttgggacgaaggtgaaagagaaattccccattctgagtgtcctagttgggttcctccgactctaaacaagggacttgggttcagttagtgtacagcgggggctcacgtccactaaggaacatgtagaatgtaaccaccgggtgacagggaagctgcggtatttactacctagcccccatcttcactggttattccacttatttaaaatgtccagaataagcaaatctccatatagaggaagtagattagtggttgcttcgggatgggaggaatgggaagattgaggtctttcttttgcagtgataaaaatgtcctaaaattgactgtagcgatggtcacacaactctgaatatgcttaagaccattgaattacacactttacgttggtgaattgtatggtatgtaaattatagttcaataacatagttacaaaagataatcaaaagcatgaaagcactattgatgtggtttggatctgtgtcctcaccgagtctcatgttgaaatgtaagccccctggtgggaggcgatgggattatggggcagagtcctcacaaacggtttagcaccacccgctcagtgctgttctcctgatattgagtcctcatcacatctggttgcttcaaagtgtgtggtgcctcccctctgtctccctcctgctctggccatataagatgtgcctgcttctccttcgccttctaacatgattgtaagtttcctgaggcctccctagaagcaaaagctgctgtgcttcctgtaccatctactggaccgtgagccaattaaacctcttttctttataaaaaaaaaaaaaaaaagg

SEQ ID NO: 117626 - DNA, 1000 bp, Homo Sapiens
gctcaaacctgaaagacgattacagcactgcacagagagtaacatacaaatactacgttggacgcaaggctatgtttgacagcgattttaagcaagctgaggagtacctgtcatttgcctttgagcattgtcaccgttctagtcagaagaacaaaaggatgattctgatctatttgcttccagtaaaaatgctattgggtcacatgcccactgtggagctcctgaaaaagtatcacctgatgcagtttgcggaagtaaccagagctgtgagcgagggcaacctgctgctgctgcacgaggcgctggcgaagcacgaggccttcttcattcgctgcggaatcttcctcaccctggagaagctgaagatcatcacctacaggaacctctttaagaaagtgtatttgttactgaaaacacaccagctgtctctggatgcttttctggttgccttgaagttcatgcaggtggaggacgtggacattgacgaagttcagtgtattctggctaacttgatatacatgggacacgtcaaaggctacatatcgcatcagcatcagaagctggtggtcagcaagcagaacccatttcctcccctgtccacggtgtgttgaaagtacacggagccccgaggacggactcggctggttctggagtctttgtgagacttctttgaaggaggctttgcgtgaaggctgctcggctcacttttcctaagtgtggttcctgaaggctgtctttgtaactttttgtagttctttgtgtaaaaagcgtattctgaatttatacacatggtatgttcttcattatatcttccaggatacatctatttttatatattaaatttgaatgtgttatcaaaatgcttggttaacttaaggcacctttttaaaagcagaatttaatttgatttaaattttccagattttatagcttgcccgtatggatgctcctcaatttatgatggggttacatcccaataaacttattttatttgcctttg

SEQ ID NO: 117627 - DNA, 1000 bp, Homo Sapiens
ctcagagactggtggaagccatgacaagcgctttgtaatggaggtagaagtagatggacagaaattcagaggcgcaggtccaaataagaaagtggcaaaggcgagtgcagctttagctgccttggagaaactgttttctggacccaatgcggcaaataataagaaaaagaagattatccctcaggcaaagggcgttgtgaatacagctgtgtctgcagcagtccaagctgttcggggcagaggaagaggaactctaacaaggggagcttttgttggggcgacagctgctcctggctacatagctccaggctatggaacaccatatggttacagcacagctgcccctgcctatggtttacccaagagaatggttctgttacccgttatgaaatttccaacatatcctgttccccactactcattcttttagcaaatgacagaagctaattcctattgaacaacaatacagtacaacacagaatgttagagaaaaagcctttttatcctgctttctttgaacacatacttgatcaaaattatttgtaaagaacatctttcctactttttgattttaacaaatgcaaatttagttctctaaaacttgaaaaaaaaaagaaaccagttctgtgaaaacggtacctcatttctggaaaataacttataccagcccttctgttctagggaaataaaagtctagcagttcaaagtttaagttttaagagacgtatcagattatgtaaaattaaatttgtgaaggatgtatagagtctcaaacactgatcacaaataaactgctttgttgtaacacagagtactgcctggttcctgatgcagtcactgattcttagttgattgatatgtatttgccccagggcactttaatttgggctgtagttattttttttaatacaatagagacttttcatttaactttaactttgtaaatattgaagtgtgtaataaagccaataaaatatgggtttgaaaaaaaaaaaaaaaa

SEQ ID NO: 117628 - DNA, 1000 bp, Homo Sapiens
aacatcacattgtcctgcgtggctcctctggccctgagtggcacctgtccctctggtctcccagcacctggcccaggtaacagccttctgaaagcagagccaaggagctgcttctctcttctcccagttctacctccccagaagccttcctccccaggtggggctgatggagcaagggtccagactaggagccttccaccccagctgtgtctggcgcccctagatctctgcaagggaggtgttacagctggttctgagccgcttgccttgtgatggtaagacaccaacctttacattcttccctgaggttgtggctgacagagcctgcttggccccactgttagtccagcgagctcctatatcaaaatgccgtaggccgggtggcttacaaacaacagaaacgtattgctcacagtcctggggggctgggacgcccaagatcaagaggccagcagattcggactccgctgagggctgtttcccgatccatagatggtgccttctcgctgtatcctcaatggtagaagcacaaacaagcaagctccttcctgcctcttttataaggactccaaccctgttcatgagggttccgcccccatgacccaatcagctccaaaggccccacctcctaatactgtcaccttgggggtgagaattccaatgtgaatttgcagggggagtgggggacacacacaaatttcggggccataccacccttcaccacaccctcctgcgctcagggtggcttgcagtccctggcccttctggtgggcatttggtatgtcctttctcttggggtgatttctgatgtttttactctatatagtgaaaagctagggagagcgggtcttctcccccctccctctccagtcccctcacaatcccagatgggttctaatgcagctgctggggcctgatgccctgagttgtttgtgattcaataaagaatccataagaaaaaaaaaaaaaaaaaaaaaaaaaaaaaaaaaaaaaaaaaaaa

SEQ ID NO: 117629 - DNA, 1000 bp, Homo Sapiens
tcactatgaatgtattgcacttgataaatcaaatacccacatttccaattctttgttttacccactgggaaaaaagcatcttatttccaaagacacagaagcacatatatctgaacctgaagatttgggaaagattagaagtccaccccctgaccatgttgaggttgaaactgccagagaaggcaaacaatactggaatcctagaaattcttcagaactttctggattagtaaataccatttctattttaaagtcgctatgtgaacacagtactgctttagacagcttggaaatattgaaaaagaaaaatactgtctttcagcaaggaactcaacagacgtatgagccagatagccctcctgaagtgaggaaaccatttattacagtagtttcaccaaagtctcctcatctgcacaaggattctcaacagatactaaaagaagatgaagttgaactaagtgaaccacttcagtctgtgcagttctcttcctcgggaagtaaagaagagactgcttttcaagctgttattcctaaacaaatagagagaaaaacctgtgaccctaagcctgttgagtttcaaggacatcaagtaaaaggatcagctactagtggtgtaatggtcagaggacacagctcacagctaggatgcggtcagtttccagatagcactgagtatgaaaactttatgacagagacaccagagttacctagcacgtgtatgcagattgacttcttgcaggtgacatcaccagaagaaaacatctctacattgagccctgtttctaccttttctttgaactcaagagatgaagacttcatggtagaattctctgagacgtccctgaaagcaagaactttacctgatgatcttcattttctcaacttggagggtagtcgttaccacattgctctaatatctgtctattcatttaagatgaagttttttatttgagagattattacactaaatatatcttagaaccaaaaaaaaaaaaaaaaa

SEQ ID NO: 117630 - DNA, 861 bp, Homo Sapiens
ccacggcgtccagggcgaccagccgcgggccgcagggcatggaccttcaggccgccggggcccaggcgcagggggccgcggagccgtctcggggcccgccgctgcctagcgcgcggggggcgccccccagcccggaggctggctttgctacagctgaccactccggtcaggagagagagactgagaaggctatggatcgactagcccgtggaacacagagcattcctaatgacagtcctgcccggggtgagggcacccattctgaagaggaaggctttgccatggatgaggaggactctgatggagaactgaatacctgggagctgtcagaagggacaaactgtccacccaaggaacagcctggcgatctttttaatgaggactgggactcggagttgaaagcagatcaagggaatccatatgatgctgacgacatccaggagagcatttctcaagagcttaaaccttgggtgtgctgtgccccacaaggagacatgatctatgaccccagctggcaccatccgcctccactgataccctattattccaagatggtctttgaaacaggacagtttgacgatgctgaagattgagtgtggagctttctgccttgtaggtgggcgggcctccacgtcaagatctcttttcctgtcttggaggtgaaaagtcatatctgagaaaatgtttgcagtgacccctagtctggggtacacagaccagtgttccttattgacagtgttcaataaggccccgtcattctcgccagtctgttgttgttcttaatgggctcctccttgaaatgtgtgtgtgtttgtgtcaagaggagttgtgttctttgtaaataaaggttaaaaaaaaaaa

SEQ ID NO: 117631 - DNA, 1000 bp, Homo Sapiens
atgttagattgaaaactgtagttttcaacatatgctttgctggaacactgtgatagattaactgtagaattcttcctgtacgattggggatataatgggcttcactaaccttccctaggcattgaaacttcccccaaatctgatggacctagaagtctgcttttgtacctgctgggccccaaagttgggcatttttctctctgttccctctcttttgaaaatgtaaaataaaaccaaaaatagacaactttttcttcagccattccagcatagagaacaaaaccttatggaaacaggaatgtcaattgtgtaatcattgttctaattaggtaaatagaagtccttatgtatgtgttacaagaatttcccccacaacatcctttatgactgaagttcaatgacagtttgtgtttggtggtaaaggattttctccatggcctgaattaagaccattagaaagcaccaggccgtgggagcagtgaccatctgctgactgttcttgtggatcttgtgtccagggacatggggtgacatgcctcgtatgtgttagagggtggaatggatgtgtttggcgctgcatgggatctggtgcccctcttctcctggattcacatccccacccagggcccgcttttactaagtgttctgccctagattggttcaaggaggtcatccaactgactttatcaagtggaattgggatatatttgatatacttctgcctaacaacatggaaaagggttttcttttccctgcaagctacatcctactgctttgaacttccaagtatgtctagtcaccttttaaaatgtaaacattttcagaaaaatgaggattgccttccttgtatgcgctttttaccttgactacctgaattgcaagggatttttatatattcatatgttacaaagtcagcaactctcctgttggttcattattgaatgtgctgtaaattaagttgtttgcaattaaaacaaggtttgcccacatccaagaaaaa

SEQ ID NO: 117632 - DNA, 1000 bp, Homo Sapiens
gctccaaatactgtcatgttttcttgcacactgacttctggtttccactgtatcagtatgtacctttgtaattgttatttttatgtcttttatgcccttgattattagttgggctcttcataaacagaggccatctctactactgtttatttttccctgctgtgcccagaacattggcgtagacacagtaagaacctagtaaatattactgtttctagccatcagggagattgtggaactcctcccagtataatttttacaaactccaagcaaatctgacccaaactcccaaattgtcaagtcctgcttaactttctctggaaaatagaccccttctcaacatcagaataggaagagaggaagaacttacaaagacacttaaaagttattcttaaatggtggttgggcatttaaaacagtgaactaacatatatataatttttgattagttggagctttctttgtattatgagagtaatatatctcattacagaaaatttggaaactataaatttagaaacgtatcacccatacgtccaacatcgaaagaaaaccagtgttatgactttgttccatttgaagactaattgggagtccatctctctattggcactgggttcgattgcccctggctaatagagttcaattagttctatacctgggtttcctttcttagctatggggtggaagataggagggggagatctacaatttgaatatgtgttacttaataaggctaggctggccatcagttgcttatttcagatgtgtcactaaattttccttctagatggtccttgagcaaaacttaataattactgttttttatttccactgcctttataaaatcaaaattttctccttttgataaaaactgttgaatactattgatgtagagaatgtgtatatgtgtatatttgcattgattaaattattggaaaacttttcaaaaaaaaaaaaaaaaaaaaaaaaaaaaaaaaaaaagaaaaaaaaaaaaaaa

SEQ ID NO: 117633 - DNA, 1000 bp, Homo Sapiens
ctcatccctcccgtccgaggctagtttcctctggaaccacatttttatctagatgaaaatttggaatgaaatgaaggaatagaaatccaataaaagagttgaagggaaagaaaatttaaggttcttcttgctcaggattacagatatggaccaacacctccttcaagaaaaggtggtaggacacaaagttcttcagtcctgagccctacatgtggggttggaggagaactataacggaaaaacctctgagtttcaccttaggtatagataaaagaaagatggtccccttttatctgattctgagacaggtaaattctgtttgttactacgtttaattagaaggtggaggagtcatttcatgattaagaacattcaacatgtattgttcattaagctagcttcctagttccgattagactaaggagactaagcctagagagtcaatgttagaacagtgaaaagaattctgtgtgtgtgtgtgtgtgtgtgcacaataaataggaaatgtagaaaccaagcaagaaggcttagtagctcagtctttaacaagggctagaaaagaatgtaatctgatatggaaggatagcagcttctaattttcaatcatctgttgatatactgtgaaacttattttattaaattaatatttattaaatggaaatatgcttttctggtttataactactaaaaatatcatagggaggataaaagtaaataagtgaaagttaatgccaatagaaaaattcaagagataatgtacaatgtcagaaaagggattctttatgtgtaaatggggataatacctatttcacaaggttgttctgaggattgatacgttttgagtatgtatttgtacactatctggcacatatgcgctcaataaacgtgtttctccttttaaaaaaaaaaaaaaaaaaaaaaaaaaaaaaaaaaaaaaaaaaaaaaaaaaaaaaaaaaaaaaaaaaaaaaaaaaaaaaaaaaaaaaaaaaaaaaaaaaaaa

SEQ ID NO: 117634 - DNA, 1000 bp, Homo Sapiens
caatcccagccccgacaatcacatgcagctgactcggacactggccttgggaacaatgttcgagagaacacttgccccttgactgtaggagccagaaggggacccaggtgtgcatagctctctgtagacatttttacccaaacctgttggtaaagtgcccatctggtgctcaagagagcctgggggtctaacagggagcccggctgcctcacctggccacagcctccacaccagatctccacattgtcttgatccagaccagctctgtgatcagaaggaaattgggtccagtgtaggagagagctggtcctgggcctggcaggcaagagtgtgggcatcctttcctggcctttctccactctccctcaagcctgtgctcaggttgccttgaatgtggactctggaagagccaggggcccagaatgccgggggaggcttctgagtggcactcatggaacaccgtccctctgccagccataggccctgcctccagtgtcagggaatggaggctgggctgcgagagtgttgctgccccctgtgtcattcttctaatccaatgtagaaattgtacgtaatgtatttaaatcaacgcaaatgtatgaataacaaatacagttctgaccttttttgtccagtttctttgggggaaggaagacaaagaaggtaggaacggaattttgagggcaaagaaacctgtgtttccatggaattgctgagacgtggctcctggggctatttctccctaataaaggatgatccaggtcctcatttccaaagtcccaatgctctgaaaaccaaaagtattttcataacccatttgaaaccaaacctgacctgaacttacactgataggaagctatgggtaattatgatgtgttccttttagtgtgattctttgttgcagaaatgtcaatatattttatgacatggttccctactagggattatacagtatttgctgactacttcctaagagccaaaaataaaaaatctgaattcc

SEQ ID NO: 117635 - DNA, 1000 bp, Homo Sapiens
gtgtaaaacacatgagattggatttgaccccttggctctcaagtgtccccttagatctagaactgctccttggtggccattagatcgagtcagttttgatctgcatcacttagttattgggaatttctttgttggaaacaggaaaatttttttagattatttggtgtacggttttgctcacaacaataggtggaagttgctagtgcagtcttggtctgatggctgtgtgcatcgcacattcggcttggtgaaatccttctctaaagcctctttttgtatttttataactaaacagaggaagtcttcagaagacctcgctttaaaacaaatttgtgcaaacactgctagagtcattttgaagctcaagcattttcactttgtttcttacatgtgtacttttttgtttacttgtgaaaatggccatctttaagcatatttattttctgccactttatttaaaggcaagcaatattttcttgatcataaatattttgtaatgaaatacttcctcttttccagggctttgtatgcacttgtataattacattgatggcaatgtagagtttgaatttcagtctgtaaatacttttttggaaaatagaaatttttattgctttaaagttttggatatgggtggttttcttttccgggtttggtggaaagtaatttgagaactttaaggttgtctttttaactgctggcaaaatgttgattttttaatattagataaaacgagtaaacgaaattccccagaaattagtagtaagtggggtctttgtgggttgggaagtagttttaatgtagaaagacatttacatataagtctgtttaatttcaaaggagtttgtgaaaaaaaatccatggtgaaaatgaaacaatgacatggttaatctggaacttacgttcttataccaataaaaggtacctcaatamawrttctttcaaaaaaaaaaaaaaaaaactgcggccgcaagcttattccctttaggagggttaattt

SEQ ID NO: 117636 - DNA, 1000 bp, Homo Sapiens
agtagtgaacagggtgatgtaggagtatgtatacttcctcatgttcattcaaaggataaaagccatattccttctagcctagataatgtaaatcacaaaattgttcatgaatgtcaggaactttcttcacctgtcattactacatctcctgcatcatttgaagaaaacaagattgtattggaggaacaaagttccagagaagaaataagtttaatggagaaagtaaaggagaatgctacaccaaccaggaatacaatttctaaagtgaccagtaatttgagaataagaagtaggcttgctaagcctaaaccaaatcttgagaagactttagggaccaacaggcttgatgattatcaggaagtttccagtttgtgtgtaaccaaaggggcagaaatggaaactcaaagagaaacagagaaaaatgcttccaaagcaacagaattggaaaataaaaaccttggaccagttacaacagcagagaataaggatcagagcaaattggcatgtgtacatggtatcaaagggaccagtatttcttcagaagtaaacctaactgaaagaaacgaaaatcaagaagagagctctcaggaggttcacatgttgtcagttgctccagttgcttcctctgagacagggccctgcacacttggtttggataggggtcttggtgaaaattctgttgaagagccccagataaaggactctaaaggagacagtgtgcttacacttcctgtgccagaggtaaaagaatgtacagtataataagggatagcaaggtgttttcctccatttaaaaaaaaaaaaggtataatttacatacaataaacttcacctcttttatcttcatttttctttatttcttcttttttttttggagacagtcttgttctgttgcccaggcaagagtgcagtggtatgatctcagctcactgcagcctctgccacccagattcaacagattctcctgcctcggcctgccgggtagctgggactacaggca

SEQ ID NO: 117637 - DNA, 1000 bp, Homo Sapiens
tgctgtcatgataacagaattgaggggtaaggatattttgagttatctggagaaaaacatctctgtacaaatgacaatagctgttggaactcgaatgccaccgaagaacttcagccgtggctctctagtcttcgtgtcaatatcctttattgttttgatgattatttcttcagcatggctcatattctacttcattcagaagatcaggtacacaaatgcacgcgacaggaaccagcgtcgtctcggagatgcagccaagaaagccatcagtaaattgacaaccaggacagtaaagaagggtgacaaggaaactgacccagactttgatcattgtgcagtctgcatagagagctataagcagaatgatgtcgtccgaattctcccctgcaagcatgttttccacaaatcctgcgtggatccctggcttagtgaacattgtacctgtcctatgtgcaaacttaatatattgaaggccctgggaattgtgccgaatttgccatgtactgataacgtagcattcgatatggaaaggctcaccagaacccaagctgttaaccgaagatcagccctcggcgacctcgccggcgacaactcccttggccttgagccacttcgaacttcggggatctcacctcttcctcaggatggggagctcactccgagaacaggagaaatcaacattgcagtaacaaaagaatggtttattattgccagttttggcctcctcagtgccctcacactctgctacatgatcatcagagccacagctagcttgaatgctaatgaggtagaatggttttgaagaagaaaaaacctgctttctgactgattttgccttgaaggaaaaaagaacctatttttgtgcatcatttaccaatcatgccacacaagcatttatttttagtacattttattttttcataaaattgctaatgccaaagctttgtattaaaagaaataaataataaaataaaaagtctgtaaaaaaaaaaaaaaaaaa

SEQ ID NO: 117638 - DNA, 1000 bp, Homo Sapiens
ttattatttagatattttcttctttttaaactcaggaataaacctggtttgtagataatataatatggctactagagctataattgagtaggtgactagaagcattttttcaaatatatttcttgtaaagacatctactttgttttaactaggaaaagaaactcctcatattaaaataaacatttccataagcactttctagaagagtgtagcatccatctaccatccatcccagaatgtttgtatcttgctcatagtatttcaaaaatttttatgggtgaaaaaaatgcacttttttatttattggaaaagtgtagagttattgaattaaattctcaagtgggacaatttagtgtaaagggaaacatgggttttggagacaagagcacagggctgtggtccctgttccagcattgactttactatgtgacctcgagcaaatgatttaacttctctgtgcctcagtttctccatatacaaaatggggataatgatactaaccattgcctacctcatagagatgttatggggacaaacgaaataatagagataagcacgaatgctttcaactcttcggaagaaaggtgctatataaattgaagttgtgtttttaatgatccaattattaattatgtttagggtttaaataacaatactgttagtcatgttaagaataagttttgttttgatgcatatttccacttctcttctgtggccagatcttgatcattcaaccagtaatggtacctgaggaactgaaatgggtatttgttttcgtatgtttctgccagtagtatttcaattgaatatccagaaaagactggagtttaacttgtaatatcttatagtttacatgtaataaaacttattcaagctatatataaaagtatgattacatgtaaatagcaggtatgttgtaattaaaggcacttatcaaattgtctttgttcttttttaattgtaataaaagtcagttttacataaaaaaaaaaaaaaaaaa

SEQ ID NO: 117639 - DNA, 1000 bp, Homo Sapiens
aggtatcgagcaggacctggtgatagacgctctgctgttgcccgtattcaggagttcttcagacggagaaaagaaaggaaagaaatggaagaattggatactttgaacattagaaggccgctagtaaaaatggtttataaaggccatcgcaactccaggacaatgataaaagaagccaatttctggggtgctaactttgtaatgagtggttctgactgtggccacattttcatctgggatcggcacactgctgagcatttgatgcttctggaagctgataatcatgtggtaaactgcctgcagccacatccgtttgacccaattttagcctcatctggcatagattatgacataaagatctggtcaccattagaagagtcaaggatttttaaccgaaaacttgctgatgaagttataactcgaaacgaactcatgctggaagaaactagaaacaccattacagttccagcctctttcatgttgaggatgttggcttcacttaatcatatccgagctgaccggttggagggtgacagatcagaaggctctggtcaagagaatgaaaatgaggatgaggaataataaactctttttggcaagcacttaaatgttctgaaatttgtataagacatttattatatttttttctttacagagctttagtgcaattttaaggttatggtttttggagtttttccctttttttgggataacctaacattggtttggaatgattgtgtgcatgaatttgggagattgtataaaacaaaactagcagaatgtttttaaaactttttgccgtgtatgaggagtgctagaaaatgcaaagtgcaatattttccctaaccttcaaatgtgggagcttggatcaatgttgaagaataattttcatcatagtgaaaatgttggttcaaataaatttctacacttgccatttgcatgtttgttgctttctaattaaagaaactggttgttttaagataccctgaaaaaaaaaaaa

SEQ ID NO: 117640 - DNA, 1000 bp, Homo Sapiens
ccatgaatttctttcttttataaattttctcatttaaaaatcaaaaatcttgcaaaacaaaaaccatgtttctttttcttgtataactttttgttttcagcaacataaattgatttttagctggcagacaagaatatccatataagatttgttaaccatttcagagagtttggcaatttttaaaagataataaggtatcatttttaagtatgaaaattaacaatatccctgttgcgcacactaattttgcatgagtaagtttacaaatatgtatcgtctgtaaagcagcatgtgcagattattcataatatagaagttaaaataagtattagtgcaattttcagatatttatttttgcacagaaaacacattatctggagagaaagaaaggagaatttttgagacttgggttttcttaatgccagtgtgaatttgcagatgttttcagaaaatcaagtcacagtaacaatttgccacttttttctattataaatcttcttacttaaattttgaatatttagtttttctcagttacccatttgtgtgtgtgtgattccacttagaaattcttaaaaccagatttttctttcattccgtttggatgtctacattccttatcaaaggatataaatactgtgtatgcttttgaattttatttttaggaaaattctgaagccagctatcacaggtttgttagctaataatagtattttcttttagttgagttaggtttttccccatctcctgtagagcgaatttacatattgtattgggtaagtgttcactacttttcctgattaagggatctgtgctggggaacaaagcttttgcagtaccttatattgtagttaaaattttatttaacatatccttcagtgagctcatttcacactgtagcctcttccttaaaatttgtggtgctcctgtaacagtaagaactaattctgaaataaaagacatctcctaaaaaaaaaaaaaaaaaaaaaaaaaaaaaaaaaaa

SEQ ID NO: 117641 - DNA, 1000 bp, Homo Sapiens
tttccaacgtgcatgagatggccctcaaaccttgttacaacgatgcactttactcgtttgatgtggggggaaaaagaatgggcactacctaaaactgtttacagctagaatctgggttttatttttcatagatggagaatgcctagtggtttctaaaggcctccactgggtggagaaaggagacttgcccacctgtctggagtgttaaaaggagaaatcattgttaactgattctgttaatggattcctgccttgtaacctcccgaagggcagggacccctctcagggccttgtaaactggtgtcagcaccgctgcaaaggctgctgcacatcaggctgatggcagctaggccctaggaaggagccaggggccatggtgggggctctgctttcccacagggctggcacagaggaggcctagacatatgttgctgaaagagtgtcctaatactagagtggcatgcctcgtgtctacaaaacccttatatgtcacctctgctgtccttgaccgatggcaggggaactcccattagaatgatgatgaatcccctgcagaggggaggctggcagggacaaattccctaaaagagggaccaagcgtcagctccaattgcatcttaaaagcaaaagtgaagtaatgcacagatggaaatttaaaaagaaaacaagcagtatgactcaagtggtgtttttcacagtcagaacttgaatatcagtagatttcgtcatttgtctattccttttgtaccagaggcatattgttaaattggttaatggaaaggaaaaatgttgaacagataatgttattctttatgagacgtaccatctgtgtattgagctctgaatgtccctggatatggaagagaggaaatgtgatggaatttcaagtttgccttctttgctgtctttatcttgggttgagtatgacaaacataatcacatttatctcctggagcataaagagttttaatccccctaaaaaaaaaaaaaaaaaaaaaaa

SEQ ID NO: 117642 - DNA, 1000 bp, Homo Sapiens
ggaactggatcttcctcaggaaatggaaaagttgcaacagctccgacaaggtactacgatgatatatattttgattctgattccgaggatgaagacagagcagtacaggtgaccaagaaaaaaaagaagaaacaacacaagattccaacaaatgacgaattactgtatgatcctgaaaaagataacagagatcaggcctgggttgatgcacagagaaggggttaccatggtttgggaccacagagatcacgtcaacaacagcctgttccaaatagtgatgctggtcttgaattgtcctgcctgcatgaccacactcttgccttgattgccaaaggcatgaatcatacaaaaactcaatatagagcaatgtttgtaatgaattgttctattaacaaagaggaggttctaagatataaagcctcagagaacaaggaagaaaaggcgggtccataagaagatgaggtctaaccgggaagatgctgccgagaaggcagagacagatgtggaagaaatctatcacccagtcatgtgcactgaatgttccactgaagtggcagtctacgacaaggatgaagtctttcattttttcaatgttttagcaagccattcctaaacagcccaactggcatttaattacccaatactgtatataaggcaaatatggacagttactttcctcttgcctgttcatatccttcagtgacattgaggaagcagtgtttctctttttaaaggagaatagttgtcaaccttcattcatctcttacatctctcaccctctccttttttttttctttgattttcccccttattgatgggactgatattcattctgtttttgatgaacatttggaaactgtcgggctttttattaaagctctgtagaattaaaatgttctggaattataagcaatctttgtttctgagtgttatttttattttggatatagctttgatgtaattaaactggaaactctttcctgaattgtctgtaaaaaaa

SEQ ID NO: 117643 - DNA, 1000 bp, Homo Sapiens
caacagcccctgcctcgtatatgtcactttcaaccagaagatctatgtgtactgggaggtgcagctggagcggatggagtctaccaatctggtgaaactgctggagaccaagccggagtaccacagcctgctgcaggagctgggcgtggatcctgacgacctccctgtgactcgtgccctgcttcaccaaacgctctaccatccagaccagccaccacagtgtgctccctcaagcctccaggatcccacctagctgtacttgcctcatagctggtgaaggattcttctgaacccccaccctaccccctaaaggtatctgtggtattggcaggatagggaatatgcattacagaaatgcaggatttgactctgggcatgaaagatggcagcagccctagggtgaccgtgaactatagacctcgcagtcttttcggtgaaagaagagacaagttgaccctctgcccatttccttatggacctcacccatcatgccagcagggtcataggaccctggccttgttccaaatcatctgggacatgacccactccccactgtcactgtgttgaaaacagagacttgtttgtgtggccccaacacccataaggaaaccaggctttaggcccaggggagcagtggaggtaagggctccaccccatcttaagctctgtcttccgtggcacaattccaagttcttgacgttagtaattgttaaaggaatggcaaactgttttgttttgaaggatctttctacagtctggtcttacccatgttcctagcaaccctgagatgattttcttccatttaccaaagcagccgggtcagtgccttctcacgttgccgtattcttcaggtattagtcagcttcagaagccctgctcccatttttccacccacccattcccccataaaacagcttattgtctccaagacaatagacatttaaaatgtgatgcgggtttatgatccagaccacaatcagaattatatcttgggtcattt

SEQ ID NO: 117644 - DNA, 1000 bp, Homo Sapiens
cagctggaactggcaaagcagctacacaaagagggtcatctcttctattgtacctgcagcacgcttcctgggctgttacagtcaatggacttatcaacactgaaatgttatcctcctggccagccagaaaaattttctgcatttttggataaagttgttggattacaaaaataaacactaaactctcaacactttaaaagcaacccccaaattcaacctatgtaatgtgattaaatcaaattaaatacataatatatatttacaaaataatataattaataaacttcctacatctatagaatgtataggaaattttatgttgtgcacatttgcattgggtccaaatcctaattgcagtttagtgaaattactagatttttttctaatcttcagtatgtagtgagcattcacaggttttctcctagaatctcaagtggaattggaatcataaaaatgaatgagatttgaaaactttcacaaagattataaatgtagttagtttgatactccttagaataaaaaaatgaaacagtaacaacttttatgtaaaaaaattttacataagagttagcatctttagctttataatctaaggaaccaaatttaaaaaatgatggattatgctctgtgaaatgaaaagttcaatcattgcctaaaaaagatgatcaagttagttgatctcttgtacttggaaaagctacttttttcctaaagaacagagtggagtggatatattcactttttttttctaaaacatacaaagtgataaaataatcgtgcctaatgtcaaaactttactggtttgagaagaataatcaaaaaggacttataccaataggacttactattgttttttaaggatctcctctcacagtggtaatgaaacattaactgtaacagaaatttacaatttatgtgcttataaaattagttttatgaatgaacaataaactgatgcatataatggctgaaaaaaaaaaaaaaaaaaaaaaaaaaaaaa

SEQ ID NO: 117645 - DNA, 753 bp, Homo Sapiens
gcgcttcgtcacaagggtgcgaggaaagtcagtgagcaaatcgcggaccaccggggctgccagctcgcctgactcccggcctcttgcgctcctaggggcggagaagggtgcgggctcttcgccctttgtgtcctccttctttcactaacttctggactttccagctcttccgaagttcgttcttgcgcaaagcccaaaggctggaaaaccgtccacgatgaccagcatgactcagtctctgcgggaggtgataaaggccatgaccaaggctcgcaattttgagagagttttgggaaagattactcttgtctctgctgctcctgggaaagtgatttgtgaaatgaaagtagaagaagagcataccaatgcaataggcactctccacggcggtttgacagccacgttagtagataacatatcaacaatggctctgctatgcacggaaaggggagcacccggagtcagtgtcgatatgaacataacgtacatgtcacctgcaaaattaggagaagatatagtgattacagcacatgttctgaagcaaggaaaaacacttgcatttacctctgtggatctgaccaacaaggccacaggaaaattaatagcacaaggaagacacacaaaacacctgggaaactgagagaacagcagaatgacctaaagaaacccaacaatgaatatcaagtatagatttgactcaaacaattgtaatttttgaaataaactagcaaaaccagaaaaaaaaaaaaaaaa

SEQ ID NO: 117646 - DNA, 1000 bp, Homo Sapiens
gtcccgaggagcgcagactgtgtccctgacaatgggaacagccgacagtgatgagatggccccggaggccccacagcacacccacatcgatgtgcacatccaccaggagtctgccctggccaagctcctgctcacctgctgctctgcgctgcggccccgggccacccaggccaggggcagcagccggctgctggtggcctcgtgggtgatgcagatcgtgctggggatcttgagtgcagtcctaggaggatttttctacatccgcgactacaccctcctcgtcacctcgggagctgccatctggacaggggctgtggctgtgctggctggagctgctgccttcatttacgagaaacggggtggtacatactgggccctgctgaggactctgctaacgctggcagctttctccacagccatcgctgccctcaaactttggaatgaagatttccgatatggctactcttattacaacagtgcctgccgcatctccagctcgagtgactggaacactccagcccccactcagagtccagaagaagtcagaaggctacacctatgtacctccttcatggacatgctgaaggccttgttcagaacccttcaggccatgctcttgggtgtctggattctgctgcttctggcatctctgacccctctgtggctgtactgctggagaatgttcccaaccaaagggaaaagagaccagaaggaaatgttggaagtgagtggaatctagccatgcctctcctgattattagtgcctggtgcttctgcaccgggcgtccctgcatctgactgctggaagaagaaccagactgaggaaaagaggctcttcaacagccccagttatcctggccccatgaccgtggccacagccctgctccagcagcacttgcccattccttacaccccttccccatcctgctccgcttcatgtcccctcctgagtagtcatgtgataataaactctcatgttattgttcccaggaaaaaaaaa

SEQ ID NO: 117647 - DNA, 1000 bp, Homo Sapiens
tggccttactttgtgggaaatgatgactttatcgattccacacattaatctttcaaatgatgatgatgatgaagataaaacttttgatgaaagtgattttgatgatgaagcatactatgcagcgttgggaactaggccacctattaatatggaagaactggatgaatcataccagaaagtaattgaactcttctctgtatgcactaatgaagaccctaaagatcgtccttctgctgcacacattgttgaagctctggaaacagatgtctagtgatcatctcagctgaagtgtggcttgcgtaaataactgtttattccaaaatatttacatagttactatcagtagttattagactctaaaattggcatatttgaggaccatagtttcttgttaacatatggataactatttctaatatgaaatatgcttatattggctataagcacttggaattgtactgggttttctgtaaagttttagaaactagctacataagtactttgatactgctcatgctgacttaaaacactagcagtaaaacgctgtaaactgtaacattaaattgaatgaccattacttttattaatgatctttcttaaatattctatattttaatggatctactgacattagcactttgtacagtacaaaataaagtctacatttgtttaaaacactgaaccttttgctgatgtgtttatcaaatgataactggaagctgaggagaatatgcctcaaaaagagtagctccttggatacttcagactctggttacagattgtcttgatctcttggatctcctcagatctttggtttttgctttaatttattaaatgtattttccatactgagtttaaaatttattaatttgtaccttaagcatttcccagctgtgtaaaaacaataaaactcaaataggatgataaagaataaaggacactttgggtaccagaaaaaaaaaaaaaaaaaaaaaaaaaaaaaaaaaaaaaaaaaaaaaaa

SEQ ID NO: 117648 - DNA, 1000 bp, Homo Sapiens
ggccaaaggctcactacccctgtgcgttgtccagcacacagacactatgtgcattatttgtacataaggataatcacatctacctgagactgctatcatggaaattaaatgtttggtacatgtaaagtctttgaaagtgtaactggaatattgtgtaattttaataaataataactattgttgtttttatgatcattactaccatttgtgttgccattagtgaatttttacaagaaaactccctgtgggtgcaatgagtctggaaaagaccattgagtcttctagaagaaaacattaagagattattggcacagccgtgggttacgcaatgatttcttagtacacaaaacacagcaaacataaaaagttgttacacttcatcaaaagtacaaagttctgttcatcaaatgatgctgttaagatagggaaaagacaagaaacaggactggaagaagatgtttgctctaaggtacacctgacaaaggaactctcatagaaaatataaagaatccctcaagttgaaaaaaaaatcaatttaaaggggagaaaacttcagcacgtctcaacagaagaccaccaaatggccaataagtaagtgaaaatgtattcaatgtcattgctcctcaaggaactgtagagtaaaaccacaatgtgctgtcactctagacagtcaccaggatgattaaatttaaatcacaataacaaggctgatttcagatgtctcaccacaaagaaggaggataagggagcgaggtgatggatatgttaattagcttgatttaatccttccacattgtatacatgtatcagaacatcacattgtactccatcaatataatacaattattatttgtcaatcaaatattaataaaatcaaagatgagcaggaaaaaaaaaaaaaaaaaaaaaaaaaaaaaaaaaaaaaaaaaaaaaaaaaaaaaaaaaaaaaaaaaaaaaaaaaaaaaaaaaaaaaaaaaaaaaaaaaaaaaaaaaaaaaaaa

SEQ ID NO: 117649 - DNA, 1000 bp, Homo Sapiens
ggtaataataaaaaataatatttaagaagatatatatatatatatatttagttttttccacttcattttacatgccactatattgactttaattgatatacagtattaagtttttaggtgccattatttttaaaaaattctatatttccaatgaacgatgttagattttacacagaacatattctctgcatgatttcagaaaagaaaatctaaaaaggtaatacgggtatttcaaataaaatcctttctggtatgaaaggctccattgattttattaagccttcctttaccttgtagtacaaggtgctttaatgggatagaactaagcatatcaatatctataactgcattttgtgctagacaattactgttcttttctctaaaatgtatatgtcaatttacaaggccagggatagaaaacactccataattgctttccttgattttgctgaggatttggtatgattttagtaagcaaactgttttttggtttttccttaatgtttttaattttttttcctcttgcaacaatgacggtgcatgttcttataaatataggaaggtccagatataaatagtaacctaaagttcttgctgtgcttaaaaaaaaaaatcatgtggctctttcaatatttgaactgctaagcaatgacatctgtagttttatctccttttttatgtcatagaaattaatatgatactttaaatatgtaaatataatacattggtaatgctattatttatatctgtcttaacataatttaagttgtagctgtgtcttggaaatatttttaaggtaatctatattcacattgcctgtgttaatgctttttaaggtttgtatacatcagatgtatatttttggtttggcataagctacgattgtaatttttcttggctttttgttcataaagaattttttgaaggaatggtaacaaatggtaatttacaaatggttgtgaataaacacatttttacacttaaaaaaaaaaaaaaaaaa

SEQ ID NO: 117650 - DNA, 1000 bp, Homo Sapiens
aacttcctgagaacacccgatcgcagagggtaattttctggagtttgttttgcagggatagctgggagtatggccaccctgctccacgatgcggtaatgaatccagcagaagtggtgaagcagcgcttgcagatgtacaactcgcagcaccggtcagcaatcagctgcatccggacggtgtggaggaccgaggggttgggggccttctaccggagctacaccacgcagctgaccatgaacatccccttccagtccatccacttcatcacctatgagttcctgcaggagcaggtcaacccccaccggacctacaacccgcagtcccacatcatctcaggcgggctggccggggccctcgccgcggccgccacgacccccctggacgtctgtaagacccttctgaacactcaggagaacgtggccctctcgctggccaacatcagcggccggctgtcgggtatggccaatgccttccggacggtgtaccagctcaacggcctggccggctacttcaaaggcatccaggcgcgtgtcatctaccagatgccctccaccgccatttcttggtctgtctatgagttcttcaagtactttctcaccaagcgccagctggaaaatcgagctccatactaaaggaagggatcatagaatcttttcttaaagtcattctctgcctgcatccagccccttgccctctcctcacacgtagatcatttttttttttgcagggtgctgcctatgggccctctgctccccaatgccttagagagaggaggggacggcacggccgctcaccggaaggctgtgtgcggggacatccgaggtggtggtggacaggaaggacttgggaaggggagcgagaaattgctttttctcttcctccctgggcagaatgtagcttttctgcttcactgtggcagcctcctccctggatccttagatcccagaggagggaagaaaatttgcagtgactgaaaacagtaaaaaaaaaaaaaaaaaa

SEQ ID NO: 117651 - DNA, 1000 bp, Homo Sapiens
aagaatttaagggctttgggactgaagttactgaaaaggaggtagaaatactcttcattcaagtcaatcagtttgcattggcttctcatttcttttggggattgtgggctttgattcaagccaaatactccactattgagtttgatttccttgggtatgcaattgttcgttttaaccagtactttaaaatgaagcctgaggttactgcattaaaagtgcctgagtaaagaagagatttaattattctccagtagctgagcaatgcttgtgaatcttttcttaagaaatcccaaaaagccaatattagttaaaattctgttgtttaatttggttatcttgctttataaattatgcctctaaacaatcaaatctatttttgaaatagactgaatgatgtcaagaaatatacctactgctatccgtatgtggtggattagaaatgtgttaaatctgcaaaaggtataaagatgtcagtttaatttctttgataatttaacctatgttgtatgtgaattatttattataaacttagcacgattctgtgactgtttttctctgtttcacgttcgttgagtgtaagcaatgaaaatgtcccaaataagttttttaagttttactttaataagattaatttcagtaaacattctagttgttcagtgtaacctttttatcttgatgcattgtaagtaaaatgaatcatttactcttgaaatgccagtcattgactgatgtagataatttaggattttcatataaaaatagctgtttaggaaggtgaaatacattcactgtctctgttggtggtacatcttgttgaattcaatattagaaagtatttctttttggggtaatataacttagaattaaatccctgtttctctatgtagtctggcagtataaatataaatatttaccatataatcttggaataagtattagttaatgttaccaaaatctgtattaaataatgttttcaaatgctaaaaaaaaaaaaaaaaaa

SEQ ID NO: 117652 - DNA, 1000 bp, Homo Sapiens
tgtaccgcctctgccacccgtgccagatcgactacgacttcgtggggaagctggagactctggacgaggacgccgcgcagctgctgcagctactccaggtggaccggcagctccgcttccccccgagctaccggaacaggaccgccagcagctgggaggaggactggttcgccaagatccccctggcctggaggcagcagctgtataaactctacgaggccgactttgttctcttcggctaccccaagcccgaaaacctcctccgagactgaaagctttcgcgttgctttttctcgcgtgcctggaacctgacgcacgcgcactccagtttttttatgacctacgattttgcaatctgggcttcttgttcactccactgcctctatccattgagtactgtatcgatattgttttttaagattaatatatttcaggtatttaatacgaaatgtggaagggaatgctggagtaaaatatcccctctcccctccgcccgcccgcccgcccgcccgctcgcccgcccgcccgctcgcccgctcctgtggtttttctgagcgtgcgggctccgggaggggatgctgaggctgatggagctgcctccagggctagggccactcaccggaggagggcggggcctgcacttgaagtcaggccgcacctgtctgtttttggaagggtagccgacaaatccttccagagggaaagttctttgtttaagtgttgtacttgaaaaggtcaatcttcagggcttcctgtttgaagtcaagtcagaggtaaaccggtcagttacagaagcaggatttctaggatttctaactccagctgttcccatactgtctagtttaaattatggctgttaaggccgggcgggtgactcaggcaggtaatcccagaactttgggaggcccagacagaaggatcgcttgaggtcaggaatttgagacctggccaacatggtgaaaccctgtctctactaaaaaaaaaaaaaaaaaaaaaaaaa

SEQ ID NO: 117653 - DNA, 1000 bp, Homo Sapiens
acagtgtgcctcaaactcctgccctccccaggcctctggggcccgctggaaagggctctgaccccctggcccggccgggctctctagtggtgatccggctcattctcctgcaagttggaagcacaattttccccccaagtggaggaaaaggaaagggccccagcgtactgaagaggtgtttattttttaactaacagcctcccaccccattaagactcaccaggagaggtctgagggccattcagaacccactcctgagtgggtgggtgggtgggactcagtccagagacctaacattcagaatatagcattggttgcctattttgagatggatttaatctcccacagtattcatgagaccatctgatggaatcagatccctgagccaccttgcaggacgttttccccaacctcttacaccctggatgtcactttggaaaccaagcccttggaagcaagtggggtggcatgggagagaagggaggaggtgggcacaggtggtgagcttatgtgtgggcattttactgcctcacagaagccagccaagtgccaaggtcagcttggctggtctgaggccacctttttagccaaaaacctagggttcattttcaggactttgataatgaacaacaaaatggggacttctttgggcagatgctaggtcagttgttttcacctaatatcctcttttagctgcatgtatatttatttataattataaccctggtggactgcagccttcatctttattgggaatgagtttgttataaatcagaaatgggtccatgatgaccactgttttccaaacccagtctgttccctgctccctcgctggcaagccccaccacacaggagtgaggccaggggctaggagttctaagaacagaggctggggtgagggtggcacccaggcagctgcatctggtctgttttaatttaactgtatttaatttgctttcaaaattaaaagtcaaatacagtttttaacagtcaaaaaaaa

SEQ ID NO: 117654 - DNA, 1000 bp, Homo Sapiens
gttcttggaaacggtaaaggagcttcgcaaatcccaaggccctttggaagtcgccgaagccgccgtcagccaatccagtggactcgcagccaaatttgtcatccactgtcacatccctcagtggggctccgacaaatgtgaagaacagcttgaagagaccatcaaaaactgcctgtcagcggcggaggacaagaagctaaagtccgtcgcgttcccgcctttccccagcggcagaaactgctttcccaaacagactgcggcccaggtgaccctcaaagccatctcagcccactttgatgactcgagcgcgtcctcgctgaagaacgtgtacttcctgctcttcgacagcgagagcatcggcatctacgtgcaggagatggccaagctcgacgccaagtagccgccgcactttccagcagggatcggaggacgacccgagtcccaagagtggggttttgctttttaaaaggagagaggaggggtgatggcaggggagtggagggtggccgggcaggtcctgccggcgcagggagccctctgcccttcacactctcctccaaaagagcctccatctgtaaggaagcaggtctccgcgaggggtttctttccatgtgttttcctcctgttgttaaaagaacttttttaaaaaaacagacctcgttttagatttatagcattgacttttacacacattcacacaagaaaaaaatcctttcaaaattcttaaatcttctgttcctcctttttccaagggaagagggcaaaaagtggcctgggctctgttggtgtgcgtgttccgtggcggagagaagaaaatgggaaagacatctcactggtgcttttctcttttgttttagtgccccccgcccccatccctataatatctgtaactactcctaaaaaggttttgattcaggcttttttttggtttcattttgtttttttaagaaaaagaaaatgaaaggaaaaaaaaaaaaaaaaaaaaaattcctgcggccgc

SEQ ID NO: 117655 - DNA, 1000 bp, Homo Sapiens
tctcctacatcagatacattgttgaggtcaactgtgaatgggtattcagaaccacagttgatttttttacaacaattatactgactttgtaaggaatatggaattgctaagatatcattggtagcaaacatctctggtaaggtgcatatattcatattaaattcccattcatttgagttgtgaccattatttttcattcactgaagtaaaagcacctgatgctgcatcacaactgcaatgtttgtttttatttttggctttatgtctatactccacagagagctttttaagtaatgaattatgtagcactattttgggtggatgagttttattttcttttaaagctgccttaattccatttttattttgcattttagaattgcccttcatttactaaatcagccagttaatgtgattcagttgtgacctgtgggattttaaaattttcctgccctcataatttaagcaaaatccacgatagtatcagcccaagagtgtgttgctatttgtaagccccatggatcaatacataaactatgcataaaaataaaatttcatattttcgctcgtaaaaatttaggcgctgaataagaattgtgctatttctctattaatatattgttagaaataacttttctaatgaaacaaaaatgtttctcaaaatctagaaaagtgcatataaatttttgttcatttagaactgagtattctggagaaaaccaatggtcagcacttttggtttgagttatctgagattgtattttcaaaatgaattttaagtagatatttggtgtttttatcttgtcaaagacagtttcaaaatttgattcagtttatgttttattccgttctaaaatattggagatgaggaaaatgtacttgagttttgaaatattttggtaagcctctcttactcctgttatgcactttttaaaataaatactgaattccagaaaaaaaaaaaaaaaaaaaaaaaaaaaaaaaaaaaaaaaaaaaaaaa

SEQ ID NO: 117656 - DNA, 1000 bp, Homo Sapiens
agaacttcgaggcgctcatggccctaacaaacctggctgggatcagcgagaggctccggcagaagatcctgaaggagaaggctgtgcccatgatagaaggctacatgtttgaggagcatgagatgatccgccgggcagccacggagtgcatgtgtaacttggccatgagcaaggaggtgcaggacctcttcgaagcccagggcaatgaccgactgaagctgctggtgctgtacagtggagaggatgatgagctgctacagcgggcagctgccgggggcttggccatgcttacctccatgcggcccacgctctgcagccgcattccccaagtgaccacacactggctggagatcctgcaggccctgcttctgagctccaaccaggagctgcagcaccggggtgctgtggtggtgctgaacatggtggaggcctcgagggagattgccagcaccctgatggagagtgagatgatggagatcttgtcagtgctagctaagggtgaccacagccctgtcacaagggctgctgcagcctgcctggacaaagcagtggaatatgggcttatccaacccaaccaagatggagagtgagggggttgtccctgggcccaaggctcatgcacacgctacctattgtggcacggagagtaaggacggaagcagctttggctggtggtggctggcatgcccaatactcttgcccatcctcgcttgctgccctaggatgtcctctgttctgagtcagcggccacgttcagtcacacagccctgcttggccagcactgcctgcagcctcactcagaggggccctttttctgtactactgtagtcagctgggaatggggaaggtgcatcccaacacagcctgtggatcctggggcatctggaagggcgcacacatcagcagcctcaccagctgtgagcctgctatcaggcctgcccctccaataaaagtgtgtagaactccaaaaaaaaaaaaaaaaaaaaaaaaaaaaaaaaaa

SEQ ID NO: 117657 - DNA, 1000 bp, Homo Sapiens
tgtgatggccacaccttcagccccaagctcaccgaggagctcaagaagcagattagagaaaagattggccccattgccacaccagactacatccagaatgcacctggcttgcctaaaacccgctcagggaaaatcatgaggcgagtgcttcggaagattgctcagaatgaccatgacctcggggacatgtctactgtggctgacccatctgtcatcagtcacctcttcagccaccgctgcctgaccatccagtgaacatgatcctgacctttacctaggattcctcctgctccaaactttgcccatcctctttgccccctcaggagtgctgagggccagtgttgacccacactaccctcccttgaccagctgtctgggaccggaaaccagctttgtctccaggtagagacaacatcctgtgactgccaggcagaaaggacagggcccaggtcagcctcagtctgctgtgcctccagactgcagagctctcagaacccagaacagagacgaaaaggctacctctcctacccaagttaagtgttcaaaggggatgtgagggcctccactgaagcagggaggcagctgtgtaatcctatgtcagctctcttaggaagccccagtacttatattgggcatgcacttgcccttaaaaacaatgatttgtgagtccaggaacaatttactatttttaaaatattttgctgcttctgttctgggtctgaattcccttttgtgccagatgccagtactgtctgcccattggctccaggggctgtatgggcagattcagtctccagagggtattcagatcatctgcttctttgaaggagtaaatgtgttttgttcctagggccagaggagcttgtcttccttgtcctctgttcccaccctcccctgaacagaacccagcccataagagacattctcagatgaaactctgttttcttgccccagtcaggctcaagccctgtggttgtaggaataaagcctgtgatctcaa

SEQ ID NO: 117658 - DNA, 1000 bp, Homo Sapiens
tcttgggtgtctgaacagctattgggtccaccccagtccctttcagctgctgcttaatgccctgctctctccctggcccaccttatagagagcccaaagagctcctgtaagagggagaactctatctgtggtttataatcttgcacgaggcaccagagtctccctgggtcttgtgatgaactacatttatcccctttcctgccccaaccacaaactctttccttcaaagagggcctgcctggctccctccacccaactgcacccatgagactcggtccaagagtccattccccaggtgggagccaactgtcagggaggtctttcccaccaaacatctttcagctgctgggaggtgaccatagggctctgcttttaaagatatggctgcttcaaaggccagagtcacaggaaggacttcttccagggagattagtggtgatggagaggagagttaaaatgacctcatgtccttcttgtccacggttttgttgagttttcactcttctaatgcaagggtctcacactgtgaaccacttaggatgtgatcactttcaggtggccaggaatgttgaatgtctttggctcagttcatttaaaaaagatatctatttgaaagttctcagagttgtacatatgtttcacagtacaggatctgtacataaaagtttctttcctaaaccattcaccaagagccaatatctaggcattttcttggtagcacaaattttcttattgcttagaaaattgtcctccttgttatttctgtttgtaagacttaagtgagttaggtctttaaggaaagcaacgctcctctgaaatgcttgtcttttttctgttgccgaaatagctggtcctttttcgggagttagatgtatagagtgtttgtatgtaaacatttcttgtaggcatcaccatgaacaaagatatattttctatttatttattatatgtgcacttcaagaagtcactgtcagagaaataaagaattgtcttaaatgtc

SEQ ID NO: 117659 - DNA, 1000 bp, Homo Sapiens
gacactcaggcaaaaatgttggtctttctttgacatgttgcaaaatgttatcaattttgtcatggatataatttgcagcccatggatataactggttgataagccagagaaaaataatttagtgttctaaaattcatggcatgtgtggtttattaatgccatgtactttctcctttctggaataaaatctatggctttaagaaaactgagcatatgtaaactctgtcatcattaccctttatcacatgaattcttggaaatagaaagtttcatctgcttttttaaattcttagtagatatttggcattgaggagaaacttgtagactattatagccatgtgaattaactgtagcaaagtgcctttttcttcaaattgctccccctccccaggatgacacacttcatgtcatagctgaaccctactctactggattcaaggccagtaaatgcaatttagagaagcagttttatgtttgcagatattctgagtctcttcaggatgtgtttcgtgtctaccatatatgcaggataaattctttaacagcaaactccaaaggaatgttgaagctgttttagcaatgaggatttttttgtttgagtgttgaagtgggccatagtcctttagaaatgatgttcatttatgataggatttaacttctaaggcatagtttattttttcctctttcctttttgtttgttttaatgtattctttagcatgtttttgatataacttttatcctccagatcttaagctttcttttgctctcttcagcaatttaagagactattaagctgtcgtcttcctaaaagctattttggtatccactctttttaaaaaaattctccaactttgtggttttttaatgattaaggtaatttgttagctctgcccctcatcttctaaaacctttgtaataaaatgtattaatcatgttatttgatcctttcatttacttttgtaaacacgagccctaatatcttacttagaccaaaaaaaa

SEQ ID NO: 117660 - DNA, 1000 bp, Homo Sapiens
taaggggaaattctatatttaatggaaatcaaggaggagtttacatctttggtgatggacgaggccttattgaaggaaatgacatttatggcaatgcattagcaggaattcaaattaggacaaacagttgtccaattgttcggcataacaaaattcatgatggccagcatggtgggatttatgtgcatgaaaagggacaaggagtaatagaagagaatgaagtttatagtaacactctagctggagtctgggtgacaactggcagcactccagtactgagaagaaaccggatacacagtggcaagcaggttggtgtttatttttatgacaatggacatggagtgctagaagacaatgatatctataatcatatgtattcaggggttcagataaggactggaagcaaccccaaaattagacgcaacaaaatctggggaggacagaatggtggaattctagtttataattctggtctaggctgtatagaagacaatgaaatatttgacaatgcaatggctggagtctggattaagacagatagtaatcctacactaagaagaaataaaatccatgatggaagagatggtggcatctgtatatttaatgggggtcgaggtattgttgttaattttgcattagtgaaaaatccagttttccattattcttccatatctttaatgatcaatgacattgctaactaagttataaatgagtgaatctcaagtctttttccttatcaagttgaactggtttaggagattagtgcctagagttaagagacaaatgtttacaatacttttccttttgtagccactttgagtctgcagttgtcagtaagcctttttaaagatagaatttgtttacattctctggaccttttaaaattcagaatagtaatatgattataataaacttcaaagtcaagttatagaaatagatgtgagaaattgatctgtaaatatctgaaaatgtctttagtaaacgggtattgcttttgtaa

SEQ ID NO: 117661 - DNA, 1000 bp, Homo Sapiens
cctccagcagagcgtgatgggctaccaggtctggagcagtgcagttgtgaaagttttgattcatggattcacccagtcattacttctagatgatgctggctcagttctggccacagccaccagctgggatgagctagaaattcaggaggaggcagagtctggcagcagtgtcacatccaagatccgactccctgcacagccgtcctggtatgtacagtccttcctgtttagtttatgccaggaaattaatcgggttggaggccatgccttgccaaaggtgacattacaggagatgctgaaaagctgtatggttcaagtagtagctgcctatgagaaactctccgaagaaaaacagattaagaaagaaggtgcatttccagtcacccagaaccgggcgctgcagctgctttatgatctgcgttacctcaacattgttctgacagccaagggtgacgaggtgaagagtggccggagcaagccagactccagaattgagaaagtgactgaccacctggaagccctcattgatccatttgacctggacgttttcacgccacacctcaacagcaaccttcatcgcctggtgcagcgaacttctgttctgtttggattggtgactggtacagagaatcagctcgccccccggagcagtacgttcaactcccaagaaccccataacatcctgccactggcatccagtcagatcaggtttggacttctcccactgagcatgacaagcactcgaaaggctaaatcaaccagaaacatcgaaacaaaagctcaggttgtccccccggcacgctccacagctggtgacccgacagttcctggctccttgttcagacagcttgtcagtgaagaagacaacacgtctgcaccttcattattcaaacttggctggctctctagtatgactaagtaacatggcaacacatctgtctctccctaaataaatactaccacattatttcttctaaaaaaaaaaaaaaaaaaaaaaaaa

SEQ ID NO: 117662 - DNA, 1000 bp, Homo Sapiens
aaaatattctgaacaaagctatagggttttaagttcagcctcccaacttagtcatcctaacatgattattttgtgatttggggtgcttgccctggtgctgttccagtccatgtgcatcctgagctgtgtgatctgcctcgaggctatgatctgagcaagcaggagataacattttcttctgcatcaagtgaggaaaaatgtgcttttggccatgtctcaaagacaggaccaacttcagattcccaaagaagccagctacagagcctctggaacactatggtcttacaagcagtactaaaatcaaccctcagcctcttcaatgccaaaggtatccctattggttgagaaccacatggtaatttttaatgggacttttatcagcaaatggagttacaggaattctctgtaatgagtgattctgaagaggtactttcctggaataattgtctacctgaagaaaaaaaatttatatatacattgtgtgtgtgtgtaatacacacacacacaaccccctatacctggaagattgtcagcatgtaaatcaggaacaactttctccttattgacaatcccataataaaactcaggaaccaaggcaaaatgaattggcttctaggggtctgaaccttactgcccatacaagtgttgattcattttaatgctgtttatgatttctgcattggcagaaattttcatactttctatgtttttttaattactcagttttttattactaaaaatagcacatttgagtacatttgaaaagtagaaaaattagaaattattaactttattgaataagcaagaagtgcatcctaatcctttgattattaatgaggttgaatatttgtgtgctatcggtagctgtgtttctttgatcaaatgttcctgtccttttgcccttctgttatctgttggagttgctttgtttttcgtatcaagttataggatctctttatataataaatgtaatttaacttgaaaaaaaaaaaaaaaaaaa

SEQ ID NO: 117663 - DNA, 1000 bp, Homo Sapiens; identical to SEQ ID NO: 116133

SEQ ID NO: 117664 - DNA, 1000 bp, Homo Sapiens
tgctgtatgctatgctaagactcctgaaatatacttactctgtgcttgtgtatgtgaatgttaatgcaactattacctagagtgaactttaagctttattgttgaatgtaattccattatatttccttttgtacacctgtgaaaaagtggagtagtgtttttttaaccattgttaatcagcttttgtgtatgaaagacacagtaaaatttctttcttaaatcaagatactggtgattcaaggaattttatttatggtccagccaagagccatctcgtgccaagacttctgctggcaagggaatggataaagctgttttgttctagtaacaattttggaatgaatactgacaatattccatgagggtgtgcaagcacaaattttaccaatctgacctctttgaagttgcagaatgctttgaaattctaatggtatctgaaatatcagctcatagaaagtaacaaaatttgctgtcaccttaaataagacattttaattttgttataatgtacaatttagaagtttgattaattatattatctatttaggcattaatataaaagaggtaggagtctgttatttaaaaaaagcattaaatttaaaaaaaaactgtcttgtctacttttagcttcattctcccatattttgaagggtgtgtaacttcagctctgcaggattgcatggggtaaaacttgttaccaacacatgtgaaccattgctacattgtaggttgtgatcattttgccccactgaagcccatgtatctgaccttacgtgccttttgaactaggagaatcgggctaatttattaatgatgataattataatgtatctgtacagcactttttacatttgcgaagtgctttccaatccatgttagttactagttattacagctgtaaggataaaacacgtcatgtggattcattttgaattggtgctattggtatttcctctgttattgctaataaatgaaaatggtggtatgaaaaaaaaaaaaa

SEQ ID NO: 117665 - DNA, 1000 bp, Homo Sapiens
caacgacaactcgcccttcgtgctgtacccgctgcagaacggctccgcgccctgcaccgagctggtgccccgggcggccgagccgggctacctggtgaccaaggtggtggcggtggacggcgactcgggccagaacgcctggctgtcgtaccagctgctcaaggccacggagcccgggctgttcggcgtgtgggcgcacaatggcgaggtgcgcaccgccaggctgctgagcgagcgcgacgtggccaagcacaggctagtggtgctggtcaaggacaatggcgagcctccgcgctcggccaccgccacgctgcaagtgctcctggtggacggcttctctcagccctacctgccgctcccagaggcggccccggcccaagcccaggccgactcgcttaccgtctacctggtggtggcattggcctcggtgtcttcgctcttcctcttctcggtgttcctgttcgtggcagtgcggctgtgcaggaggagcagggcggcctcagtgggtcgctgctcggtgcccgagggcccctttccagggcatctggtggacgtgagcggcaccgggaccctttcccagagctaccagtacgaggtgtgtctgacgggaggctctgaaagtaatgatttcaagttcttgaagcctatattcccaaatattgtaagccaggactctaggaggaaatcagaatttctagaataatgtaggtatctgtagctttccgaccgtctgttaattttgtcttcctcacttttcaccttagttttttttaaccctttagtaatcttgaattctacttttttttaaatttctactgttgtctttagtaatgttactcatttcctttgtctgattgttagttttcaaattattgtattattataaatattttatatcaggaaagttcatatttctgaataaattaatagtattcattcctgaagggtgatatgaaagttaaccccacctaataaacataactctaattctgaaaaaaaa

SEQ ID NO: 117666 - DNA, 1000 bp, Homo Sapiens
ttgagagttacagcaagtgttaaacgaggtgagttcacataacaggaattctggaactgcttgaaaactaggacgattgggcaatatcggccttaactccacctgatggcaggtgacccggatagaaaatggccctgcgtttagccaggatgtggctctccagcttggcttcagtgtgatcacttgtcagtgcgctttctctttcgatagtgaaatccttctctatacctatgttttgttttgtttcttaagttgggaaacagaatgggccagggaggttgagtgactgaagaccaagggttggtgcagcctcctcgccgcgctgcgggggctgggccgcacaggcttctgcccttctcggtgtccaggctccttgggtgatgctggagttgtcatggccgcagttcagtgtgagattttttaccaggtattgcgcttaagggacatgattttccattttcttcgcccggacaacttgaatgaaatgggcactgttgattccacttctgtcgaggagcttcggggctcagagaggtgatgacgtgcccaaggtgacgcaactcgtgaacagccgtgcctgccttgggcgcagcctccggcgccagagctgggctcttcaacacggcatttagcgcagaaagtcgtggttcaggcagtatgggccgctgtgacaaaacacctaagactgggtagtttataaagaacagacattcaggccaggcacggtgactcacgcctgtaatcccagcactttgggaggccgaggcgggtggatcatttgaggtcaggagtttgaaaccagcctggccaacatggtgaaaccccatctctactaaaaaaacaaaactagctgggggtggtggtgcatgcctgtggtcccagctacttgggaggctaaggtagaagaattgcttgaacctgggaggcagagattgcagtgagccgagatcacgccattgcactccagcctgggtgacacagtgagactccatctcaaaaa

SEQ ID NO: 117667 - DNA, 1000 bp, Homo Sapiens
caatatttcaataggagtccaattactagttaaaacactggcggggtgcggtggctcacgcctgtaatcctagcactttgggaggccaagttgggcagatcacaagttcaagagatcgagaccattctggccaacatggtgaaaccccgtctctactaaaaatacaaaaattagctgggcatggcagtgcgtgcctgcaatcccagctactcaggaagctgaggcaggagaatcgcttgaacctgggaggtggaagttgtagtgaactgagatcgcaccactgcactccagcctggcaacagagctagaatccgtctcaaacaaacaaacaaaaaatcccacagctattggatcatccacagattttttctttacaatcttgttctccttgtccatggaccatcaatagttgacttgccaggtttaattctttcattgcttgagaagaaaggaatcaaaggactgtgtgtagtaagctgacggtaaagttaagattaaattaagacagagagagaatacatatcactgccaggcctgataggaaaaatctgctcttccttttaataacagtgatgaattgtcaggaccttatttaggaaaccctgacctacccataactccctgctaggctaagtagaaaccaggttatttctccctgcttatggctccccgcaaagggacttgcagcgtgtcctgcaactttgtcttcagatagtgcttcctacaaaactaggtcttgttttgtaatcttttctcgtgttgaatcagatctgcttacttatttaggtttggttatgagcttgtatctcactgtatttctcatgctttgttcttttaaacaaatcctttaaactgtgtcattttgtatacacatgtgaggtttgaaaaaaaaaaaaaaaaaaaaaagaactaccttgtgagttttgctcaaaatgtggcctaagtagccattggcatgtctagatgaacaaataaaaataaagataatttctttaaaata

SEQ ID NO: 117668 - DNA, 1000 bp, Homo Sapiens
ttgtgctactgcactccagcctgggcaacagataaaggaaactccatctcttttaaaaaaaaaaaaagtggtctgggtgcagtaggtcatgcctgcaatcccagcactttgggaggccaaggcaggcagatcacctgaggtcaggagcttgagaccagcctggccaacatggtgaaaccccatctctaccaaaaatataaaaactagctgggcgtggtggcggcacctgtaattgcagctatttgagaggctgaggcaggagaatcgcttgaacctgggagatgggggttgcagtgagccaagaccgccccatcgcactccagcctgggcaacaatagtgaaactccgtctcaaaaagaaaaaaagtttccttagaatggaaaatattcattcatgagctcttttggcaatccgtcatcagtatattctgaaaaccaataagatgttgccaagttgggggcgagagctatgtaatgcaaggcatatgcctgatgaagtatacaaatacacctgaccagaaactttgtctcccacataagtctcttctaggcactgtcggggtacatactgagctgctgctttggctgtattttctgtgcctcagaataaccattgtcctggtgttcatatccttagagttcagtacaaaatgttggatatccatttaataggttccaggttatcttagttggagtttggggtatttgaaaacgtcatgccttcaggctatcatttccctcagaaagctaagtaaatttactgcattcatttctcaaagagtaaaagtgcaggttgtatgtgtctatgaacatttaaacatgttaaaatgttaaatttaacattttaaatttaaacatttaaatatgtctgtaacttgaacagtgtagtttcagaaaggaccactgggctagtgtaatgcagaaaatgctgggtctaggattaggagaaaattgtgtttagtgtgtatcaataaacagcccgtggacccaaaaaaaaaaaa

SEQ ID NO: 117669 - DNA, 1000 bp, Homo Sapiens
gccttttctattttgttccatttatttttgcaggcaatcttttccatggagggcagggtatccattctttaccatgggtgtacctgcttaggttaaaaatcataccaaggcctcatacttccaggtttcatgttgcgtcttgttgagggagggagagcaggttacttggcaaccatattgtcacctgtacctgtcacacatcttgaaaaataaaacgataatagaactagtgactaattttcccttacagttcctgcttggtcccacccactgaagtagctcatcgtagtgcgggccgtattagaagcagtggggtacgttagactcagatggaaaagtattctaggtgccagtgttaggatgtcagttttacaaaataatgaagcaattagctatgtgattgagagttattgtttggggatgtgtgttgtggttttgcttttttttttttagactgtattaataaacatacaacacaagctggccttgtgttgctggttcctattcagtatttcctggggattgtttgctttttaagtaaaacacttctgacccatagctcagtatgtctgaattccagaggtcacatcagcatctttctgctttgaaaactctcacagctgtggctgcttcacttagatgcagtgagacacatagttggtgttccgattttcacatccttccatgtatttatcttgaagagataagcacagaagagaaggtgctcactaacagaggtacattactgcaatgttctcttaacagttaaacaagctgtttacagtttaaactgctgaatattatttgagctatttaaagcttattatattttagtatgaactaaatgaaggttaaaacatgcttaagaaaaatgcactgatttctgcattatgtgtacagtattggacaaaggattttattcattttgttgcattattttgaatattgtcttttcattttaataaagttataatacttaaaaaaaaaaaaaaaaaaaaaa

SEQ ID NO: 117670 - DNA, 1000 bp, Homo Sapiens
ttacacagcccaggatggcaccgactggctgcgggcggtctcagccaacatcagggagctgacacttcagaacatgaagatggcgaacaaatgctgctctccttccgaccaggttgtgcatatggggtgggtaaatgagaaactccaaggagctgactcctctcaaaccttcagacccaagttcctagcactgaagggcccgtccttctacgttttcagcactcctccggtgagcacattcgattgggtgcgagcagaaaggacctatcacctctgtgaggtgctatttaaagttcacaagttctggctcacagaggactgctggttgcaagcaaacttgtatctgggtcttcaagattttgactttgaggaccagaggccctattgcttcagcatcgtggccggccatgggaagagccatgttttcaacgtggagcttggcagcgagctggccatgtgggagaagtccttccaaagagccacgttcatggaagttcagagaaccgggtccagaacatacatgtgcagctggcaaggagagatgctgtgtttcacggtggatttcgcgttgggatttacctgttttgagagtaagaccaagaatgtgctctggagatttaaattttcccagcttaagggatcttcagatgatgggaaaactcgagtaaagctgctgtttcagaatctggacaccaaacagattgagatgaaggaactcgagttccaggacctgagggctgtcctgcactgcatccactccttcatagcagccaaggtggcctccgtggaccccggcttcatggacagtcagagtcttgccagaaaatacatgtacagcagctaaaggttgtttctgttgagtgctgaaaaattaaattattttcgtaagaaatgattctttcctgcagaatattgcaactttgtgttgttttatgatgagcctatagttgtgataccaataaaacatgtcactagtttccaaaaaaaaaaaaaaaaaaaa

SEQ ID NO: 117671 - DNA, 1000 bp, Homo Sapiens
ggtggctggcttgaacatgagtctgctgtgctatctacataaatgtctaagttgtataaagtccactttcccttcacgttttttggctgacctgaaaagaggtaacttagtttttggtcacttgttctcctaaaaatgctatccctaaccatatatttatatttcgttttaaaaacacccatgatgtggcacagtaaacaaaccctgttatgctgtattattatgaggagattcttcattgttttctttccttctcaaaggttgaaaaaatgcttttaatttttcacagccgagaaacagtgcagcagtatatgtgcacacagtaagtacacaaatttgagcaacagtaagtgcacaaattctgtagtttgccgtatcatccaggaaaacctgagggaaaaaaattatagcaattaactgggcattgtagagtatcctaaatatgttatcaagtatttagagttctatattttaaagatatatgtgttcatgtattttctgaaattgctttcatagaaattttcccactgatagttgatttttgaggcatctaatatttacatatttgccttctgaactttgttttgacctgtatcctttatttacattgggtttttctttcgtagttttggtttttcactcctgtccagtctatttattattcaaataggaaaaattactttacaggttgttttactgtagcttataatgatactgtagttattccagttactagtttactgtcagagggctgcctttttcagataaatattgacataataactgaagttatttttataagaaaatcaagtatataaatctaggaaagggatcttctagtttctgtgttgtttagactcaaagaatcacaaatttgtcagtaacatgtagttgtttagttataattcagagtgtacagaatggtaaaaattccaatcagtcaaaagaggtcaatgaattaaaaggcttgcaactttttcaaaaacctgttagaatatgc

SEQ ID NO: 117672 - DNA, 1000 bp, Homo Sapiens
ttgccgcgtggagactgatctgttccatccgttagcgcgaggtagcagtgtcgcctcgcccctcccactgcgggctcacggggagctggcgtctgtcagtgccttgtcacgcctggcatagaggttgggctggaggcctgtccactggcttctggagctgaaggtctgcgtcacggtgaaaattcgggatgtttacagagcatcacaaatgcctctctctcgccgctctctcattttctttgtataactatgcagccttccctctctttctgggatgtttgggacttcactcgacctgcacgggctctgcccgacatgccgtgggagctgctgggattcctttagaaaccgctgcccgcatgctttgaaaacagacctttctcagctggctgtggggacctgtcagagtctggggactcggcgtgcagggcgggctccaagcgctttgcttccggaactccggcttcccaaggggtactgtgcagactgaccaccggcctcccgcctgcaggtcagaggctctgacactgtctggtttccaatgcttctggagacttcctgcctaggcctcatcctcctctttgccagtcacctgattaaccaattctccagcattaggacttacctccttctttttgtaaggtctcttgtatgttgttaaatgtttggcttaaacaattataaaagcctttctagaaggcagacttagccccagcagagcctgggaggaaggcggccgctggggctcctgggcatcctctctggggagctgctggccgcttagcgttgtttgatttttgaccttgacatagtagataggcttgtggtttttttaatttaaagatattaagacttaattcactaaaatttattctaaggggatatttatacttttatacttttttaggtatcgtattttatcagcttacagtttaatgcctaagtttcccctggaaatagcaaataaaattgtgtatttatgaaaaaaaaaaaaaaaaaa

SEQ ID NO: 117673 - DNA, 1000 bp, Homo Sapiens
gagcttaattgcttgaagttgtgcctgaaatatcgaattgcctcctattgggtgtggctttgttgaaataaatttgtaattgttgctgtttgaagatatcagtacagctgttcacagaaatatattcccagcatgtcacttttccattaaagcactaagttttctttgaatgttccattgttccgataagtattttacttttttctcagtacatcagagagagcgtgatccccctacagctgtcacttccaaatgttcctgtagcataaatggtgttacagacactgaggtgcactcttggtttctgagcagagttgtcatactggtttcctggctctagggcactggggatgtactttgaaatcaccgaacaggcttgcaattaagatcaataaggctgcagcaccatttcaatttactttccatcttacccagtagtttttgtgtttttaaattcgtttgggtggttatgtttgcatgcttaagcacacatttgaaaattaattatagctgtactacccgatgtttttccttggggatgatggccttgttcctttttaaattctgatgcttgaattctattttctagtgatttttcacatctccctttaagtttttgctgcagcaatttgagagagtacttttgattaaatgattctgatggtgggcaccaatctacaactatgtcattaactgaagatacatgttttaatcttgttgggaataagcttacccactttctccttggtaaagcgtttacttaacaaaataatacccgagaatgtaaggtctctaagtcattactaacaaagagcaaaaataatatctgcagtattgtttttcccattgattttaagtcagtttagagtacaaactgtatattagaatttgcctgtaaaatgaattctaaaaagcagatgtaaagtctctcctgaaaatgttggcatagtaaataaaaataaagttcataattataaagtaaaaaaaaaaaaaaaaaaaa

SEQ ID NO: 117674 - DNA, 1000 bp, Homo Sapiens
gaaaaacatgtataaaatagttttagtagtccaaaatgtcaactatctgtagctgcttttgtgtgtgtgtcagtgaacaaataataatgccttgctcaatcaatgcattcagccatctcaagtgcaatttgtgaaggagactatggtttccaaaagatacatttttttacaaagttaaacctgtaaaaagtctttttttttttccctccagccgtacaccaactgcacttggttgtttcagcagttggtatactattaaattgtccaggccaaataggtttctgtagctgttttagtaatttgaagccaaattctcatgctgtttctcattaaaaagaatgagaatttggtccatagttagctttaagttctctcttcctttctttcccttacagttaagggtttggtgggggatggggaggttgttttcgttttttggatttttttgtcttttggctttaagtatcatattttcttttgcctgtatccaactgcttctttgagtattttcatctagtttaatgtgagtaatagatgctgtgctgtcattgaagtgttcaacattttgttcatttaaacaaaagtgtaattcatacatatatagatacatatcttaattgatttctcaactattttataagtaactggaatttttcattagatcttatacagagaagtattttattaaaaattcaaaagggaagacttttatgtgctcattttgtaatttttgattttaaatatctttacattgtctgccaattaaagtgttttaaacttgcattggaatggactccgaatgtatttttgtggtgttacgttatccgtagatttctagcatgaagttagcctcacgatgctgtgcaaaggattttaaaatatgagagtcactgaaagagtttaaacatctgttcatgttaaatgctctatggattttaattaaagacttgagaatgattttaaaaaaaaaaaaaaaaaaagaaaaaaaaaaaaaaaaaaa

SEQ ID NO: 117675 - DNA, 1000 bp, Homo Sapiens
agagcaaagcaagtctcttgaaaaaccgaaacaaaaaaagaatcgctgtttcatgtgcaggaagaaagtgggacttactgggtttgaatgccggtgtggaaatgtttactgtggtgtacaccgttactcagatgtacacaattgctcttacaattacaaagccgatgctgctgagaaaatcagaaaagaaaatccagtagttgttggtgaaaagatccaaaagatttgaactcctgctggaatacaaaattcttgagcatctgcaaactaaaaattgacttgaggttttttttttcctagtcattgggaatgtagagcagtgtatcttgcatgtcatcggaagaatagatttttgttttggttttgttttgaaaatgactctgaacatttatttccattgcaatttctgtggctgaggagacttaaactttacaagtattatccttttaagatcattttaattttagttgagtgcagagggcttttataacaaacgtgcagaaattttggagggctgtgatttttccagtattaaacatgcatgcattaatcttgcagtttattttctcattgtgtatgtatatatcgcttttctctgcagcacgatttctcttttgataatgccctttagggcacaactagttatcagtaactgaatgtatcttaatcattatggctgcttctgttttttcattaacaaaggttattcatatgttagcatatagtttctttgcacccactatttatgtctgaatcatttgtcacaagagagtgtgtgctgatgagattgtaagtttgtgtgtttaaacttttttttgagcgagggaagaaaaagctgtatgcatttcattgctgtctacaggtttctttcagattatgttcatgggtttgtgtgtatacaatatgaagaatgatctgaagtaattgtgctgtatttatgtttattcaccagtctttgattaaattaaatgaaaaaaaaaaaaaaaaaaaaaaaaaaaaa

SEQ ID NO: 117676 - DNA, 1000 bp, Homo Sapiens
ttagagaggctttgtgtgccccggataacttaaatgcgagtattgaaagtcagggccagattaagatgtacatcaatgaagtgtgtcgggagactgtgtcacgttgctgcaactcatttctgcagcaggccggattaaatttgttaataagcatgacagttattaataacatgcttgccaagtccgcttcagacttgaagtttcctttgatatcagagggaagtggatgtgctaaggttcaggttttgaaaccgctgatgggtttgtctgaaaagccagtcttggcgggggagttagtcggtgcccagatgctcttctcattcatgtccctctttatcagaaatggaaacagagagattctcctggaaacccctgccccataaacggccctctcgaacacaatgggacggaatccacccacaacgcgcttggtttgcagatgtcaaagaatctgcagagggtgctactgaagatccagccttagccaatcaccacctcattgggtgaaagttccagggctcaatccaggaccacactcttattggccaggcaggggctcccacagagctttgagtaacttcttggttgtgcagtctgcaggcaatgttggcattgtaaattcctcccttgcagcctccttcatgtggtgaggggatcacttcagctgcctgctgtggacaaagaacatcaaattacagcatcacgagtgctattgttgcctgtggtggtctccctgtccaagcgggaccgctttgcagagaccagaggcatatcgcggcttgagctgaaaatgcatttgttgcagcttaggttgaattatttttcgtttgctctttcttctacacgcgcctgatggatagtgaacctattcatcaaaaaagtgcactgctcttctgtctattgtaccgacttaacctcttccacccaagtccgcatctgtgtgtatcatcaataaagttgtgtgctttgattggcagaaaagaaaaaaaaaaaaaaaaaa

SEQ ID NO: 117677 - DNA, 1000 bp, Homo Sapiens
ctccatctagagatttttgtgtgtgtgccatcaaggttagcaaactttatacgtagcctaacacttaaaaaatgcactcattatcttaaacctaataaattccagagtttattttggttctcctctgttgcccttcctaaaaaatgagctgaagatgacagtatttttctttacatgcttggttatgacttttaaagttttatttaaataaatgttgaagctcaagtttaaagaagcgttgcagaggcccacggtctcctgggtcccggccacctgtccatattccacatttgctgactgtgctccctgcactccactcaagttgagagttcaaatagtcttgaaggggaatcagcttcaggatggaaggacccaggagaggccccgaggtgggagggttctgtaaatacagactactgcgagtgtccagagctctctgccatgatacttccttgggactgacttggctgagaacgtgttctgtcagaggatttgttagaactctgcccttttgtctgaaactcaaggccaaggagaatgataggagacttaggacagagctgacccttgcaccaggctgggaggctgcagcccttttagatgccacttactgtaagtggccagaataccagagaggtgggttccatggtcaaatgcacagtaggtgtttacctttacatttggatcaccttgtagtctttaaattcttggtccctgaggccaagtccacaacttgccttctagtcacttgcctgcccgcagtggtggtggatgtgttagctggtagatttggaatcagtcaccagtctttctgtactgtcttggttagctctatataagtaggggcagcttagccctgaggcccagagacctgctgtcctttttctccttgagggaggaaataaaactgcggaatacaatgtccttccatagcatgggaagaagaaaataaacatctcctttccaacaaaaaaaaaaaaaaaaaaaaaaaaaaaaaaaa

SEQ ID NO: 117678 - DNA, 1000 bp, Homo Sapiens
accacaagccacactcagaggcctcactgtgctgggggcttcggtgtccaggcgcccaggtgtggccaccagcaccggtttctgccttcgcgttgctggggtgcagtgagactgccacacgcgtgcacatgtggctctgtgggtgtctcctagagaggacgtggcccctgctgccagcccttgagcagcccgtgtgggggcccgagggacccacacagtgggggccagcctcgctggagggagagcaaccctttgccgatgaccacgcttgccgccatctcttagttttctttttcacaagcgctttatttttttaatagacaaatcacattttgcaaggcctttaattaaataagattcttctttccttcattttatgctttatttcctgtttgaaggcttactgtagaagtggcttactgtagaagcagcttgctgagcccctccgagcggtccccagaattagctggttcacaacccccaccctcccccgcccccgcctgtgtcaggtgtggatgaggtcgtcacactcagaaggacaggcttgtctgccagctcacaaggggaggctgcagtgggtttgggagctgggtttaggcccctggtgtctgagggcccaggccttgccagcctctgctgctcctgctcctgggtttgaagatgcaggccgatcgccagctccgtggcagcggtcactaaggacagcctgactgtgccatcttggagcctcaggcggggctccggagatagaagacaggtcgccggaggctccccctcctctcctctcccctctgcagatgctccctgggcgctaccctgcagggtgccaggcaggagtggtctcagaacgtgcgcttctgattattttactggggtccattgtccagatttttctttgattgtaaaatatatttttactttttagtcttctaatttaataaatgatccatataaaaatagagaaataaagtcctttaagggaaggtttaaaaaaaaaaaa

SEQ ID NO: 117679 - DNA, 1000 bp, Homo Sapiens
gattacaggtgtgagccactgtgcctggcctccggtgagtattttatatttagtctacacttccatacttggcttttttctgcttttatattgatctgctttcatagcagtgtgtagagtgccacttatgttttctttcttgtgtacagtattttattgtatggatttaccatcccctgtgtatttaagttgttccattctttggccattataacttttttctgcaaatattctggtgacttatctttggccattataaactgttgataatagatcatcttgtatatacttctgcaattataagatgttttttgatgatgaaagctttcctaaggtaattctttcctgagtttggttcagatggtctgtcactaattataaggcagataggaacagacagaaaaatctatcatttcaagataggcttagcaggatgggcgcagtggctcacgccactaatcccaacattttaggaggcctaggcaggagcaatcacttgtgcctgggagttctagactagcctgggcgagacttcatctctacaaaaaaagcaacaacgacaaaaaaattagccaagcatagtggcacacccctgtagtcccagctacttgggaggctgaggtgggaggattgcttgaacccaagaggtcgaggctgcagtgagccaagattgtgccactgcactccagcctgggtgacagagcaggaccctgtctctattttataaattaaaaagggctgggtgtggtggctcacacccataatcccaacactttggctcagcagattgcttgaacccaggaattcaagtccaatctgggcaacatggggaaaccccagctctacaaaaaaaattagcctggtgtggtggcacatgcctgtagttccagctactcaggaggctgaggtgggagaatctcctgagcctggaaggtccaggcagtgagccaagattgtgccaccacactccagcctgggcgacagaatgagaccctgtctc

SEQ ID NO: 117680 - DNA, 1000 bp, Homo Sapiens
tatgctgttcccttcaatgtgatatcagagattactatgaatgttagtttcattccgtgaaacattacttccatataaagacagatctcttaataagtgaatctagtggaagaacataggtatcattctaattccatggtaaattttgtcatgattctatatgaataatggggtccttcaggaagttggaatttttgccttctcttttaattgcagtgaagttctctttataacttctaaaattcggaattctagatccttgcttttgcagaatttggtgctcagacaatatttaaggacatttcagcgagacaaagtgcatgtttttatcgagtaccctgtgcaccacattatatctggcaattctttttgtttcattatgtgcatcaatatttttctcagctactattacctgaaacttgtttaacatgtattagacctagaattttcattttctttctcacatagttgcttcctggtatctgatttagaaataacatttaaatgccaagtatctgggggattgaaggaagggtctatatgagcaggtgaattagcagtactgtttttgtttagtggatattgttagtgactttttgtgtgtgttttgctttgggacctttttattttggtgttgcaaaaagtaacatattttcatcattgcttcatacgacatggagttaggacagggaaaaatcattcaacactccttatgcattaaatgatcaaataaaccagtgtaggatattaagactatcaattggtgggattaggcttgacattttatttttataaatatatattttttctgaatgtgtctgagtccaagagtgggcaaaaaataattttctactttggactaatctatagaggtttttgaaagtctgcattactaacttgttgaattcatgatattctgcctatggcacaaattgtaaacctttgtttttctaaaataaagtaattgaaaacctgcaaaaaaaaaaaaaaaaaaaaaaaa

SEQ ID NO: 117681 - DNA, 1000 bp, Homo Sapiens
ggttcaagccaaatgttaccagcttctcctctcagtcttccagcattccaatcgtgccctttcaactccttatattcattcattagctccaatagtggttgaaaagctaaaagctgttgaaagaaacagaccagccagtaacatagagcttttagcggttcaagaaggaataaaagttcttgaaacactggttgctcttggtgaagaacaaaacagagtccagctacttgctcttttagttcccactttgatatcttacctgctggatgaaaattcttttgcctcagcaagttcagcttccaaagatcttcatgagtttgcactccagaatttaatgcatattggacctctgtatccacatgctttcaagacagtaatgggggctgctcctgagttgaaagtgcgtctagaaactgccgttcgagcaagccaagcgagcaaagctaaagcggctgccagacaaccagcccccgccatacattctgcaccaacaattaagctaaaaacaagttttttttaatttgtaatttcatttatttgtatttatgttgtcaactagcccctaattagtgatggccactgtatcattccaggctacctatgggttctgttttatttgtatattggtattatagtgcttccaagtaggttaagtgaaataatgctcacaccacttattgatttttaaggagtgattttttttatcatgtggtgaatatgttttcattttcctcctaataatgtttctcttttgttaacttatttatttttcaaacactgagccatagtcttaaatttaaatgctaaaaacaattgtatcatgtagtcgggcagcctattgatactgtcaggggaaaaaaatgggtcagaactcagcatctgtcatgaaaaaaatcaattgaaaaacaagcagattttaaattttgaagtaatcaaaataatggaaagtgtctgttttgtggtgtatatactatgaataaaatcacagcattttctaagc

SEQ ID NO: 117682 - DNA, 1000 bp, Homo Sapiens
gtgttggaaacattatgtttattaaatgggcctctcttcctttgctgtgcacttgatgggtgaactggattggggtgtgcacatccaggaggaggaggagagacctgtagaagtttaaagatagtttgtaaatatcttctaatgcttgtttttagtccttttatgttggagaagttcatggtatgtagtttaatgcaaaatgaaaccattttatttcaatgttattaaaaaggtttgttttattaggaagttaatgtattgttgcagtgttttgtgcctgtttaaaggcttttgtttagcagagtgaatgtaaaatacagtaaaatgttaagattgtcatctactttttaaaaaaaaatatcaacttggaattgttttttaaaggctcaatcaaggaagtgaggtgtgcaataaggtagcaagtaaaacgcagttgcgtttttatgtcatgttagagatccatacaattttccactcacgggatttttgttgatggctgaattcttgtggattcataagaggatcatgcccttagcaagtacttttgttttgttttaaattaagagattcccaaatgcctttttccccctcatcttgaaatgagatgagtttttatgtgtaagcaatatttatttaactattctataaaattattgagtgcctactgaggcctttaagcaccgctaacattcctttccatcattcttttgaatgacataaaataattgtgcaatgttcctgatgatgtaccccacagctgcattcaaactcaaatctgtgggaatgagtgactcgaccaaatgtaattcggatcagatcctcatcccctgactgtgtgaaaaaagtactctccttctagtgaaggattgtcacagagtttcactggatgaaactatgacccagtattcttactgtattttacatgtgcctgtaaattattttgccgaaataagaagaagaagaggaagaaagaacagtagaaaaaaaaaataaaaaaaaa

SEQ ID NO: 117683 - DNA, 948 bp, Homo Sapiens
atggcggacctccggaaaccgtagattccgggcggtcggagccgccgggagctgtagttctcccgcggctcagagaagtaggcagagagcggacctggcggccgggcagcatggcggggctggagctcttgtcggaccagggctaccgggtggacgggcggcgcgccggggagctgcgcaagatccaggcgcggatgggcgtgttcgcgcaggctgacggctcggcctacattgagcagggcaacaccaaggcactggctgtggtctacggcccgcacgagatccggggctcccgggctcgagccctgccggacagggccctagtgaactgtcaatatagttcagcgaccttcagcacaggtgagcgcaagcgacggccacatggggaccgtaagtcctgtgagatgggcctgcagctccgccagactttcgaagcagccatcctcacacagctgcacccacgctcccagattgatatctatgtgcaggtgctacaggcagatggtgggacctatgcagcttgtgtgaatgcagccacgctggcagtgctggatgccgggatacccatgagagactttgtgtgtgcgtgctcagctggcttcgtggacggcacagccctggcggacctcagccatgtggaggaagcagctggtggcccccagctggccctggccctgctgccagcctcaggacagattgcgctgcttgagatggatgcccggctgcacgaggaccacctggagcgggtgttggaggctgctgcccaggctgcccgagatgtgcacaccctcttagatcgagtggtccggcagcatgtgcgtgaggcctctatcttgctgggggactgaccacccagccacccatgtccagaataaaaccctcctctgcccacacaaaaaaaaaaaaaaaaaaaaaaaaaaaaaaaaaaaaaaaaaaaaaaaaaaaaaa

SEQ ID NO: 117684 - DNA, 1000 bp, Homo Sapiens
aggactttggtttaaagtagcaggtttaggttttgctacattctcaaaagacagcaggagtatttgacacatctgtgatggagtatacaacaatgcattttaagagcaaatgcaacaaaacaaatctggactatggataaataatttgagagctgccacccacaaatataaatacagtactcatgctgactgaaataataagacatctacaaatttataaacaaaaagtgattgtcattatcctgcttatgtactagattcaggcaagcattatagactttttggttgcggtggcttttgcatttatattatcaatgccttgcaggaacgttgcattgataggcccattttatttttttattttttttttcgagacaggatctcactctgtagcacaggctggattgcagtgcaatcctgcaattctcaatcttgcactgcagcctcgacctcccaggctccagtgactctcccacctcagcctcctaagtagctgggagtacaggcgcgcaccaccacgcctagctgatttttgtatttttttgtagagacgggggtttggccatgttgccgaggctaactcctgggattacaggcatgagctgtgctggccgggtttttttttcttgatgtaaacgtgtacagctgttttattagttaaggtctaatttttactctaggtgccttttatgttcagaactctttccactggactggtatttgctcaaaaataaataatggtagagaagaaaactataaaaatggacaaggctttcttctatcagtagcgtttaccctttgtcaccagtggctttggtatttccatgtctggcattgcataaacttctctggtgtgaaaggataaatatgcctttctaaagttgtatatcaaaattgtatcaatttttattttctatgatttctagaaacaaatgtaataaatatttttaaaatctcctttctactggttatgtaaataaatcaaataaatatatcaaaa

SEQ ID NO: 117685 - DNA, 1000 bp, Homo Sapiens
cacctccctccccacgggatgagatcttcctgacccccaacctctccctgcccctgtgggagtggaggccagactggttggaagacatggaggtcagccacacccagcggctgggaagggggatgcctccctggccccctgactctcagatctcttcccagagaagtcagctccactgtcgtatgcccaaggctggtgcttctcctgtagattactcctgaaccgtgtccctgagacttcccagacgggaatcagaaccacttctcctgtccacccacaagacctgggctgtggtgtgtgggtcttggcctgtgtttctctgcagctggggtccaccttcccaagcctccagagagttctccctccacgattgtgaaaacaaatgaaaacaaaattagagcaaagctgacctggagccctcagggagcaaaacatcatctccacctgactcctagccactgctttctcctctgtgccatccactcccaccaccaggttgttttggcctgaggagcagccctgcctgctgctcttcccccaccatttggatcacaggaagtggaggagccagaggtgcctttgtggaggacagcagtggctgctgggagagggctgtggaggaaggagcttctcggagccccctctcagccttacctgggcccctcctctagagaagagctcaactctctcccaacctcaccatggaaagaaaataattatgaatgccactgaggcactgaggccctacctcatgccaaacaaagggttcaaggctgggtctagcgaggatgctgaaggaagggaggtatgagaccgtaggtcaaaagcaccatcctcgtactgttgtcactatgagcttaagaaatttgataccataaaatggtaaagacttgaaaaaaaaaaaaaaaaaaaaaaaaaaaaaaaaaaaaaaaaaaaaaaaaaaaaaaaaaaaaaaaaaaaaaaaaaaaaaaaaaaaaaaaaaaaaaaaaaaaaaaaaaaa

SEQ ID NO: 117686 - DNA, 953 bp, Homo Sapiens
cttttttaagatgaaagactagcgggaagctctgcctctttccccagtgggcgagggaactcggggcgattggctgggaactgtatccacccaaatgtcaccgatttcttcctatgcaggaaatgagcagacccatcaataagaaatttctcagcctggccgaaaatggttggccccacgaagccacgacaactggaagcaaagagggttgctcaacgccccgcctcattggaaaactgaaatcagatctgggacctatatagcgtggcggaggcggggcgatgattgtcgcgctcgcacccactgcagctgcgcacagtcgcatttctttccccgcccctgagaccctgcagcaccatctgtcatggcggctgggctgtttggtttgagcgctcgccgtcttttggcggcagcggcgacgcgagggctcccggccgcccgcgtccgctgggaatctagcttctccaggactgtggtcgccccgtccgctgtggcgggaaagcggcccccagaaccgaccacaccgtggcaagaggacccagaacccgaggacgaaaacttgtatgagaagaacccagactcccatggttatgacaaggaccccgttttggacgtctggaacatgcgacttgtcttcttctttggcgtctccatcatcctggtccttggcagcacctttgtggcctatctgcctgactacaggtgcacagggtgtccaagagcgtgggatgggatgaaagagtggtcccgccgcgaagctgagaggcttgtgaaataccgagaggccaatggccttcccatcatggaatccaactgcttcgaccccagcaagatccagctgccagaggatgagtgaccagttgctaagtggggctcaagaagcaccgccttccccaccccctgcctgccattctgacctcttctcagagcacctaattaaaggggctgaaagt

SEQ ID NO: 117687 - DNA, 1000 bp, Homo Sapiens
ggaaactattgactaagagaagtttctaggtttgcactgaattgtcttttgtacatacagtgaattgttttgctgttctccccactccatattaatgcaggagccaggttggtctgttaggatgaacaaaggttgaggggagggcaggattcgtgcatctgggggccaaacacatgttccgtcttgattgccttaagagttactagcgaggtcagtgttaggcttgcaatagggattttaaaatacactaactagttccttagctaccttcacatacattctataggccttcttaaattagcactaacctccacttccttctctgccccattgcctcccaaatatgctatggagctatttttgttaccacgttataacgtgaatatttatacagtagcctcttcaggctttgtaattttcattccaaaaatgcccggtgtgatgctttacactctacaaagtatggtttaaaggcacaaggtcatggcctttgtcatagcagttgaatgtgcattgacatatttttctatgattttttaaaattacaatagaaaaataagctgttgtaacgtgtaaggtcatgacaatttttgtatttatatttgaaatcagatttctataactcgtatttgtgtacagaattctcaatggatttatatattgtgaaatttttatctgagattgggatgtggattatgcttaacagtgagagctgaaatgagaccatttactttgtttaaaatgctgtactgtgcaagtttggaaatgtaaattaatttactgtatataatatcttgagtttgtttatacctccaagtttttacactgaagataaactagctttaattcaaaactttttttttctttataagggaataagctgttgagctaaacctgtatacttgtgctttttattttctggatgcacaatgaaagtttatacttgtatctcactgcatcatatctgattgcagaaattaaagcacaatttacaagcaat

SEQ ID NO: 117688 - DNA, 1000 bp, Homo Sapiens
ctatttttttggtcaaatcatgtttagaaactttggatgagttaagaagtcttaagtatgcaggcgtttacgtgattgtgccattccaaagtgcatcagaactgtcattcccttctaatatcttctcaggagtaatacaaatcaggtatttcatcatcatttggtaatatgaaaactccagtgaactcccaaggacatttacaacatttatattcacacgctgtatggaagggtgtgggtgtgtgtgaaggggcgagtggagacactgtgtgtatctctagataagaagatatgcaccacgttgaaaatactcagtgtagatctctatgtgtataggtatctgtatatctttccttttgtttacaactgttaaaaaacctcaaaatagttctcttcaaaagaagagagattccaagcaacccatctttcttcagtatgtatgttctgtacatacttatcggagcgcgccagtaagtatcaggcatatatatctgtctgttagcaatgattattacatcatcagatcagcatgtgctatactccctgcaagaaatatactgacatgaacaggcagttcttggagaagaaagagcatttctttaagtacctggggaatacagctctcagtgatcagcagggagtttatttgaggacatcagtcacctttggggttgccatgtacaatgagatttataatcatgatactcttcggtggtagtttcaaaagacactactaatacgcaggaagcgttccagctatttaatgctggcaactactgtttaatggtcagttaaatctgtgataatggttggaagtgggtggggttatgaaattgtagatgtttttagaaaaacttgtgaatgaaaatgaatccaagtgtttcatgtgaagatgttgagccattgctatcatgcattcctgtctcatggcagaaaattttgaagattaaaaaataaaataatcaaaatgtttcctctttctaaaaaaaaaaaaaaaaaa

SEQ ID NO: 117689 - DNA, 1000 bp, Homo Sapiens
atgctgcgcaaattcagcttccccaccgtggctctgcactccatgatgaagcagaaagaacgctttgccgccctagccaagttcaagtccagcatctaccggatcctgatcgcaacagacgtggcctcccggggcctggacatccctacggtacaggtggtcatcaaccacaacacccccgggctccccaagatctacatccaccgagtcggccggacggcccgtgcagggcggcagggtcaggccatcacgctggtgacacagtacgacatccacctggtgcacgccatcgaggagcagatcaagaagaagctggaggagttctccgtggaagaggccgaggtgctacagatcctcacacaggtcaacgtggtgcgaagagagtgtgagatcaaactggaggcggcccactttgacgaaaagaaggagatcaacaaacggaagcagctgatcctggaggggaaggaccctgacctggaggccaagcgcaaggctgagctggccaagatcaagcagaagaaccggcgcttcaaggagaaggtggaggagacgctgaagcgacagaaggctggcagggctggccacaaggggcgtccacccaggacaccgtctgggtcccactcaggcccagtcccctcccagggcctggtctgagccccacacggccatctgcccagtccttgactcgtccatggagctgagggtcggaggaaccttccttgggggcagcagcccttcccgggggcctacccagtgccccacagcagaacccgtgggcgctcgtgttgtgcgggccctgctcctctgccccgaaaccactggctggccccttccctgagccctggccaagattcaggctgcaggggaagaaagaacatgaccgggaggttgtgaccccaacccaaggtcaccccccaggggtgccgcatacaggaggtgcttaataaacgggtcttttgacttccaaaaaaaaaaaaaaaaaaaaaaaaaaaaaaaaaaa

SEQ ID NO: 117690 - DNA, 1000 bp, Homo Sapiens
gagcctacctggacatccctgctcagccccgcggctggaccttccttctgcattgtttacattgcatcctggatgggacgtttttcatatgcaacgtgctgctctcaggaggaggagggaatggcaggaaccggacagactgtgaacttgccaagagatgcaatacccttccacacctttgggtgtctgtctggcatcagattggcagctgcaccaaccagaggaacagaagagaagagagatgccactgggcactgccctgccagtagtggccttcagggggctccttccggggctccggcctgttttccagagagagtggcagtagccccatggggcccggagctgctgtggcctccactggcatccgtgtttccaaaagtgcctttggcccaggctccacggcgacagttgggcccaaatcagaaaggagagagggggccaatgagggcagggcctcctgtgggctggaaaaccactgggtgcgtctcttgctggggtttgccctggaggtgaggtgagtgctcgagggaggggagtgctttctgccccatgcctccaactactgtatgcaggcctggctctctggtctaggccctttgggcaagaatgtccgtctacccggcttccaccaccctctggccctgggcttctgtaagcagacaggcagagggcctgcccctcccaccagccaagggtgccaggcctaactggggcactcagggcagtgtgttggaaattccactgagggggaaatcaggtgctgcggccgcctgggccctttcctccctcaagcccatctccacaacctcgagcctgggctctggtccactactgccccagaccaccctcaaagctggtcttcagaaatcaataatatgagtttttattttgtttttttttttttttttgtagtttattttggagtctagtatttcaataatttaagaatcagaagcactgacctttctacattttataacattattttgtatataat

SEQ ID NO: 117691 - DNA, 1000 bp, Homo Sapiens
taaataaccatgcataacttactttctgcaatgttttcttagaaattgtgtccagatagctttcactaattttaaattaagtgaactaaatatatatgtgtatatgtatacacatatatatacacacacacatatatatatttagaaacgtgagtgttaaagatagaatttgttttaggacaaattttaagaaaatgtgggaataccaaatgtcctttataagaaaaataaattttgttttaagggacataccagttttagggattttcagatgggaagctgcatttttaggattgcccatcttaagagatcttgcaggaagagattgtattagatattatatttatttcatttaagataattttcaaagttaattttctaaataagataattctcatttgtgtttgtcttttaaaaggccaataaaatatctttcagtatcattgtaataattttttagagtttaatttgtaaagcttagcaaataaaatcttgtactatgaatagcttcttgctttatgactttaggattaacttgtaaaaaacatatcctgaactgagatatgcaaaatactcattttcaagttatggaaatgtgtttgtggcatataggactgtggggtctgtgtgtgtagtgagagtgtgtagccactattataactggaatttaatttacattcataaactactatatttcccatcttgcaaatcattttatgtctcatctgtttttcctttcggttatatctttggttttgaataccaacatttaaaatgatggtattttatcttttaaacttaaaaattatttaatacagctatatggaccttataaaattgatttcttatttattattagacattactactaaaaggtacatctaactattcagggacatttttccatttccaaaaaataaaatttattatgctttataacctcttctgtattttctaattttttcattgtctttgataaataaaacagttttgttttgct

SEQ ID NO: 117692 - DNA, 1000 bp, Homo Sapiens
gtgtgctcaatggagagcttccactgcgctccaggtgccacatcatctcacagttcaaccaaggcttctacgactgtgtcatagcaactgatgctgaagtcctgggggccccagtcaagggcaagcgtcggggccgagggcccaaaggggacaaggcctctgatccggaagcaggtgtggcccggggcatagacttccaccatgtgtctgctgtgctcaactttgatcttcccccaacccctgaggcctacatccatcgagctggcaggacagcacgcgctaacaacccaggcatagtcttaacctttgtgcttcccacggagcagttccacttaggcaagattgaggagcttctcagtggagagaacaggggccccattctgctcccctaccagttccggatggaggagatcgagggcttccgctatcgctgcagggatgccatgcgctcagtgactaagcaggccattcgggaggcaagattgaaggagatcaaggaagagcttctgcattctgagaagcttaagacatactttgaagacaaccctagggacctccagctgctgcggcatgacctacctttgcaccccgcagtggtgaagccccacctgggccatgttcctgactacctggttcctcctgctctccgtggcctggtgcgccctcacaagaagcggaagaagctgtcttcctcttgtaggaaggccaagagagcaaagtcccagaacccactgcgcagcttcaagcacaaaggaaagaaattcagacccacagccaagccctcctgaggttgttgggcctctctggagctgagcacattgtggagcacaggcttacacccttcgtggacaggcgaggctctggtgcttactgcacagcctgaacagacagttctggggccggcagtgctgggccctttagctccttggcacttccaagctggcatcttgccccttgacaacagaataaaaattttagctgccccaaaaaaaaaaaaaaa

SEQ ID NO: 117693 - DNA, 1000 bp, Homo Sapiens
acttccaaaaagatacttacaaacataattcacaaatttgaaataatttctgaagttgattagctatctcatatcttttatcaggtcattttttatatatgtaggcacaaacaataagtatgttctcttctgtttgggaaaataatttggaataaaatagaaattagataatgaaaccaaaaaccttctcaaatttaggccttatttaactcatgactggtttctatgcacaagaaaatactaaaccaaatatatggtaggactgttattctcttctgcatcttatccctattttgtttctgcctttatttgtaaaaattgtcttaattgatggtacatttgccaagacaaaggttcagaattactaattttagatattatgatattctgaaataactatttttatcctgtagttctatgattatatgatttgtaaataagaagcctaaccaatttaaaattcctgactttagtctcatatatcttgtcagactgtctcggttcaaattccaaacctaccatcttcagttgtgcgaccttgggcatgctacctaatctctttgtgcctcaatttcctccttttaaaatggggatgatgatgataacaataatacctacctcacaaggttgttgtgagcatcaaatgagataacacaagtaaaatgcatagaacagttccaagcacagagtaattcaataaatattaactagtaatagtagtggtagtaactcgtgaatctttttaataacataataggctttgattttattatctctttaagttgttaacttttttcccttgttataagttttatgtcaagtaaggtagtttgtttaagttagttacccatgtccccaatcaagggaacctaaatgaagatatatcattaaataattaacctttttttattgtgtcaagcaatactaatttgtgtcataaaatttgttttgcatcattcaacaatttatgcccagaaataaacaatattctacaacaggc

SEQ ID NO: 117694 - DNA, 1000 bp, Homo Sapiens
gaatgtgcatcttttttttttgaacaaatgatggtgtaacattttgacatccataaggacaaatgtagatatttttcttaaaaactctgaggggactgacagcatggtcagggtgtattgtagcttataaacatgaaatcttataaggtttcagtttgacagaagtgtgatatatgtaacttgtgccatggaccaaatggtcactttaccacagctaaaaatgagttacgatagcagcttgatggtgattgtattgtattcctttaatcaaaaaggaaacacaatattctaagtatctttagcccaaataccatgacatattgagcatctttaaataaccagactgtattgtccttcatatgtgaagttgacactactgatttgtcaataccaaattttgggttaaagtgtttaatttttatgtatttattttcttgttgcctcaaaagatgattgcattctaacttttgtgacctaccaaatttaagatgtgtatacgttgttctttacgttgttctagaaaagagattttaatgctgtagtgactttgctcacttacactagagaaataaacaactttcaatggaagagaattttagtgctttttttttcctaaaatagatattaagctgctgttgtaaagtattgtttgcagctctttccaatatctagagacatttttatttatgaatatttatacaaaaaggaattctgtcaagatgactgctctatatcacttgagaatggcattatttaattaaagaacaaatagcattttttggtagtgcctgtccatacctattgtcattgtttgccttgtaatctgtttttttgaattcattttgggctgatagttttgtttaaggttttggataaggagcactttaaaacaaactggtgtgttgtttttaagttaatcatatgtttaataaatgcgtggtttttgcattcaaaaaaaaaaaaaaaaaaaaaaaaaaaaaaaaaaaaaaaaaaaaaaaaa

SEQ ID NO: 117695 - DNA, 1000 bp, Homo Sapiens
ggctgcgtccggccgctcttggcttgcggctgcccgggatcggccagcggaaccactgttcgggcgcggggaaggcggctcccaggccagcggccggagcgggcgccgctgccgaagccccgggcggccagtggggcccggcgagcacccccagcctgtatgaaaacccatggacaatcccgaatatgttgtcaatgacgagaattggcttggccccagttctgggctatttgattattgaagaagattttaatattgcactaggagtttttgctttagctggactaacagatttgttggatggatttattgctcgaaactgggccaatcaaagatcagctttgggaagtgctcttgatccacttgctgataaaatacttatcagtatcttatatgttagcttgacctatgcagatcttattccagttccacttacttacatgatcatttcgagagatgtaatgttgattgctgctgttttttatgtcagataccgaactcttccaacaccacgaacacttgccaagtatttcaatccttgctatgccactgctaggttaaaaccaacattcatcagcaaggtgaatacagcagtccagttaatcttggtggcagcttctttggcagctccagttttcaactatgctgacagcatttatcttcagatactatggtgttttacagctttcaccacagctgcatcagcttatagttactatcattatggccggaagactgttcaggtgataaaagactgatgaaagtcatccctcactgttagtaaggaagcagtatacatcaatgggaacagggcccatggaaatgtacaggagtttccctattttggtgttcagcttgaaaaaggacttgtcagaatcaactgtgtcatcaaaatttaagtaatgtgcattgaaaataaggttgatcatgggaatatgcagaatttccaatgtatttttaaatacaaataaaattgtaatttagaatttttaaaaaaaaa

SEQ ID NO: 117696 - DNA, 1000 bp, Homo Sapiens
aggtgccaaacttggtgtggccaggaaagggcagtcctgagggagaagacaggattcagggcagtgctccgaagctgtgtgctcacctggttggctcatcaaacctggcaaccctgtggcctgtctgccggagctgactggatccactcatcaattcttcgtccccactactaagactgggcatgttttgctggtgtggtctctgcacttcaggaatggtcacaacagggggtagccctcaaaagcactcctttttctatacctcttctcaaggccatgtaagttgcccatctctacctggctgtggacaaaaggttatctgctcttggccatctggtggtggtggcggcccagagtctgaagaaatggcacagggacagtgaatggtagtgttgccaccctgtgctgaggcctgaggcctcttcctcagctttatctccctttccttcactcaagggccatttccccagtccctatctcccccatcccctcccggcttataggccccacaggtgctatttgttgtgctggcccaggcgtggggctaccaagcaaaggcttggcatataccaaaggccagctgcatgcccatcagtctggtctttttcctctgcggtcatgttggctttcatgctggatcaaatgttttactttcccagactggtggcatctgagttccccatcctaccactctcaccccactttcctgccccacctaaaccctcgttttagtaatttgtagtgactgttcccttccctctgttgcagggaaccaggaggaaagggaaagatgttgccatatttcctactctttaggcatggactctcctttccctttgttagtgtcctgggttcccatggactcagggatttgttggctaaggtttctctgtgcatatatatatatatacatatgtatatatatttaaatacacatatatattgtacagaataaaaatgttttattgaatacactgtgcttaaaaaaaaaaaaaaaaaa

SEQ ID NO: 117697 - DNA, 1000 bp, Homo Sapiens
gaggggcgagtcctagtctcttttctccgcactggaagacttgaacacttccttctctggtctctgtcacccaggctggagtgtagtggcgcaatctcagctggctggagccttgacctccttgggctcaagctatcctcccacctcagcctctcaaatagctgggactacaggcagcaaagcacctgctctgagtggccatggggaagcgatacttctgtgactactgcgaccgctccttccaggacaacctccacaaccgcaagaagcacctgaacgggctgcagcacctcaaggccaagaaggtctggtacgacatgttccgagatgcagctgccatcttgctggatgagcagaacaagcggccctgcaggaagtttctactgacaggccagtgcgactttggctccaactgcagattttcccacatgtcagagcgagacctgcaggagctgagcatccaggtggaggaggagaggcgagccagggagtggctactagatgctcctgagctccccgagggccatctggaggactggctggagaagagagccaagcggctgagctcagccccaagtagcagggctgaacccatcagaaccactgtcttccagtaccccgtgggctggccaccagttcaggagctgcctccatccctgcgggcacccccacctggggggtggcctctgcagcccagagtccagtggggctgagccccttgcccccgactgacccccacgtggtcacttttctcatcagtcacaataggaagccaagcccggttcctgctacgccccatggaggctccgagaccatctgcccagcctcactgaggctcaggacacggccacaccaagtgcagccctcgtcctgggtctgcaccgggcagctctcccctcactctcctccacctgcccccctgcttcttaagaagatgggggagaaaacttccaaatgtttataaagaaagtctgtcaccacaaaaaaaaaaaaaaaaaaa

SEQ ID NO: 117698 - DNA, 929 bp, Homo Sapiens
ccgtggcccacgaagctcatctttgaactgtccccgccttctcccgccttgacttgtgaccctaggccctttggggcgcctctgacccagctagccagatcccggacccaaaccatgttccctgtgaaggtgaaagtggagaaatcagagctggagatggccaaagcccggaaccaactggatgctgtcttgcagtgtctgctggagaagagtcacatggacagggagcgtctggatgaggaagctgggaaaacaccctcagacacccacaataaggactgctccatcgcagccactggcaaaaggccatctgcccgcttcccccaccagcggaggaagaagaggagggagatggatgatgggctggctgagggagggccgcagcgatccaacacatatgtgatcaagctgttcgaccggagcgtggacttggcccagttcagcgagaacacgccactgtacccaatctgccgcgcctggatgcgcaacagcccctctgtgcgcgagcgtgaatgctctcccagctcacccctgcccccgctgcctgaggatgaggagggctcagaggtaaccaacagcaagagtcgtgatgtgtacaagctgccgccacccacacccccggggccacccggagatgcctgcagatcccgcatcccatctccactgcagcctgagatgcagggcacccctgacgatgagccctctgagcccgagccctcaccctccacactcatctatcgcaacatgcagcgctggaaacgcatccgccagaggtggaaggaggcctctcatcggaaccagcttcgttactcagaaagcatgaagatcctacgagagatgtacgaacgacagtgatgttcccaggtccccccacaccagtaaacatcccccagctccacaaaaaaaaaaaaaaaaaaaaaaaaaaaaaa

SEQ ID NO: 117699 - DNA, 1000 bp, Homo Sapiens
tggtgtcctgggcctccaggggacaggcaagtccatggtcatgtcattgttgtcagccaacactccagaggaggaccagaggacttatgttttccgggcccagagcgctgaaatgaaggaacgagggggcaaccagaccagtggcatcgacttctttattacccaagaacggattgttttcctggacacacagcccatcctgagcccttctatcctagaccatctcatcaataatgaccgcaaactgcctccagagtacaaccttccccacacttacgttgaaatgcagtcactccagattgctgccttccttttcacggtctgccatgtggtgattgttgtccaggactggttcacagacctcagtctctacaggctgtgggacctggggtgcaagtgcaagagcaacagccactcaccccaaaccccaaggttcctgcagacagcagagatggtgaagccctccaccccatcccccagccacgagtccagcagctcatcgggctccgatgaaggcaccgagtactacccccacctagtcttcttgcagaacaaagctcgccgagaggacttctgtcctcggaagctgcggcagatgcacctgatgattgaccagctcatggcccactcccacctgcgttacaagggaactctgtccatgttacaatgcaatgtcttcccggggcttccacctgacttcctggactctgaggtcaacttattcctggtacccttcatggacagtgaagcagagagtgaaaacccaccaagagcaggacctggttccagcccactcttctccctgctgcctgggtatcgtggccaccccagtttccagtccttggtgagcaagctccggagccaagtgatgtccatggcccggccacagctgtcacacacgatcctcaccgagaagaactggttccactacgctgcccggatctgggatggggtgagaaagtcctctgctctggcagagtacagccgcctgctggcctga

SEQ ID NO: 117700 - DNA, 940 bp, Homo Sapiens
ctgtcagctgaggatccagccgaaagaggagccaggcactcaggccacctgagtctactcacctggacaactggaatctggcaccaattctaaaccactcagcttctccgagctcacaccccggagatcacctgaggacccgagccattgatggactcggacgagaccgggttcgagcactcaggactgtgggtttctgtgctggctggtcttctgctgggagcctgccaggcacaccccatccctgactccagtcctctcctgcaattcgggggccaagtccggcagcggtacctctacacagatgatgcccagcagacagaagcccacctggagatcagggaggatgggacggtggggggcgctgctgaccagagccccgaaagtctcctgcagctgaaagccttgaagccgggagttattcaaatcttgggagtcaagacatccaggttcctgtgccagcggccagatggggccctgtatggatcgctccactttgaccctgaggcctgcagcttccgggagctgcttcttgaggacggatacaatgtttaccagtccgaagcccacggcctcccgctgcacctgccagggaacaagtccccacaccgggaccctgcaccccgaggaccagctcgcttcctgccactaccaggcctgccccccgcactcccggagccacccggaatcctggccccccagccccccgatgtgggctcctcggaccctctgagcatggtgggaccttcccagggccgaagccccagctacgcttcctgaagccagaggctgtttactatgacatctcctctttatttattaggttatttatcttatttatttttttatttttcttacttgagataataaagagttccagaggagaaaaaaaaaaaaaaaaaaaaaaaaaaaaaaaaaaaaaaaaaaaaaaaaaaaaaaa

SEQ ID NO: 117701 - DNA, 1000 bp, Homo Sapiens
catgacgtgaagttccccctggacagcacaggctccgagctgaaacagaagatccactcgattacaggtctcccgcctgccatgcagaaagtcatgtataagggactcgtccccgaggataaaacattgagagaaataaaagtgaccagtggggccaagatcatggtggttggctccaccatcaatgatgttttagcagtaaacacacccaaagatgctgcgcagcaggatgcaaaggccgaagagaacaagaaggagcctctctgcaggcagaaacaacacaggaaagtgttggataaaggaaaacctgaagatgtgatgccatctgttaagggggcccaggagcgcctgccaacggtaccgctgtccggcatgtacaataaatctggaggaaaagtgagactcacctttaaactagaacaagaccagctgtggattggcactaaagagcggactgagaaattgcccatgggctccataaaaaatgtggtcagtgaacctatcgaaggacatgaagactaccacatgatggcgtttcagttgggccccacggaagcctcttactactgggtgtactgggttccaactcaatatgtggatgcaatcaaagacactgtgctggggaaatggcagtatttttgaaagcactttcacctctggcccaggagactgacccaaagtgaaggacattgccgggagaggcctgcagcatccctggatttcagagttctggaactttgttcataaaaaatctatattcaatctgaggtgatgtggtgactgaagccagaggtgatgtactttcaccattagcttaattttaacttaaaattaccagttccctttcttgcagtcagcttcataccatttttaaagtcaatacaatggaaatcaataaatctgaattccgaacatgttgtgtggaatactcttaagtgtgtttgagagtagatctgccaattatgttgacaagggaatgatcaaaagctttgttttttta

SEQ ID NO: 117702 - DNA, 1000 bp, Homo Sapiens
agaatgaatgaagcaacaaggaagagagaacatgactctatcgatgacactgtttatagaaacacaggagaggaagaatttggaatgaaaagcacttcgtcagaaccttctgtgggagccattgagagaaaagcatggtccagtgccttctgagaaaggccagagctttgggctttcctgctctgcttttgggtcgtcaatttgccatctctggttctgtgctataatcagaattgtaattatgttctccagaggccaatttcattaactctgattaattagaatcagctagccagattagtaacctctttgtccagccttgatttacagtgcagggtaaagtgcagaccttaaaaacagctaagtacctagaagagctccctgcaagtgtaaatattaaggatgacctgtgcaaaattatacccacaccagcactagtggtaattattctaaattattgccaaaaagttttttttaatctgtctttcaagtttacagaaaagaaagcagtaaatgcattgatgtcattttattatgtacatatatcatgtgcattcaagctgtgtgacaagatatatcaatataaaaacaaggtatatactttattattttttgaaaacaaggatattgtgatcaattttaccctgtaaaacatatttctgtatttataggtcttaaacatgatgaattttttctattacaagtttatttaaaactgctttctcaagtcgttattgatacagcaagtgaacctgctgcagacagaagcagaggaaagccaagaacagcctttattggtgaagaaaagaatgaatgattctttgtaggcgccatcagccacttttagaagccatcagccagtgtgttgggaaaagaggtttgtcaagtgttggcctatgggaaggtggtcaatgaatgttttgatgaaatgaatgtttttgtataatggccttaaacttttctggaagtatttcaaataaattacattattaagtcatca

SEQ ID NO: 117703 - DNA, 1000 bp, Homo Sapiens
ggatcatgcttatcctagggtctcacagaagagaggacatatttaattaatcttgtgaattacagaacaggttgtggtccagacaccaagaatcataggggtttttttttaaaaaacctaatagaagtagggtgacctctctctttggtctaagagttctaaaggaaggtaggcatctgtttaattagttggttcaccctggctttacctctggttaatgctttgtgttaataggaaggaaaaatcactttatcttttcttccaagcccctccctgcctgacttacccagactgggattaccagataccaggtgatttatgtggagatgatttttcacctttaaactctaagccaagtgtaagaaactcttgatagctatgtctattttatatcagtcactgagacttttttttaagtttttatttattattaagacaactttgccaaaaaagtcccctaagcacaactatttacatttctttatagcctcttctgatctctaacacatatgcagttttaactgttattttcatagtaactgatcttttgtctaaggatttttacctgaaagcacaatgtattgagtctcttgaaaatcatctttcagatctttttacagaatgaacttatgcactgctactgtagtattctcaaggaatatatgtaaacacaaatgtatgcctgaggttggtttttgcagaaaacagtctctgcttctaaaaacttctatgtctagtcttccataggaaatcctcactgtttaaccatgtgaggagcctaagtcattaaacggatcatgtctgtacattgtgtaatgaatgaaaagcacataaatgtaatctactttgaactttgtaaaaatgatgtgtggaggctattcttgtttctccatctcaagtcctgtgtgtgcacgtgtgtgcaagtgcacatgtgtgtgtgtaataacacattgtaaagaacagaaattactttaaaaaataaacagaaatggagacctga

SEQ ID NO: 117704 - DNA, 1000 bp, Homo Sapiens
aaaacattttgatactatagcattgtacatttgaaagtagtgttctagactataaaaccaatgaacttctacatgagccctacagacaggcatgtgtagaaggcaatttatcaaacctattgcactgccatgaaaagtgtgtataataatttgctagcccaagcaagctagttttctttgcttgcttcttttctttcttttttccttccttttttttttttttttcttttttaacatgttgagattctctagttgttttctttggcgtatctaaccccttcttttgttttctgagacctggtaacccacgctcttgcattgtggattttaaaatgtatactctgtacggttctgtaaaccgaaaaacttttgtaaatatataaatatacatagacataaaaatactgtatgtgacagcacatagagtagttttcccacaccaaagttaatttttatgcatgctttaaaagtatatatcgggaccggcagaaatggaagtatccatacatttttaaaaagcaacaagtttgcacagctagagtgtttttgtaaataaatgtatttgtataacacagtcatgtaatatacagaactataagcagagactttgcaaaactaaataaagggctgcatgcttattattttttgtaccttgtcactataactacttcctagtcaaagaacgaaatgtaactgttaccgagttaaatgtttttccgctttgagggatgtaaccacatccactcagaggacactacttttctgaaagctctggggtgactaatgatgagttcctaataaattaattgcaagtgtggtgccttggatgtggcctgttggctcgctttcttctctgtggcttatcaaggtgtagatgacagaaagcaaacctggatacagagtttccaccctcagttcctggaggggctcttattattttctctctttttaaaaaacttccagtagaagtaaagtggaaataaaatgtctttatcaaaaa

SEQ ID NO: 117705 - DNA, 1000 bp, Homo Sapiens
accgctgttctgggtattcatttttcatcactgagcattgttgatctatgccttttgggcttctcagttcaatgaagcaataatgaagtatttaactctttcactacagttcttgcaagtatgctatttaaattacttggccaggtataattgccagtcagtctctttatagtgagaaaatttattggttagtaatataaatattttaaactaaatatataaatctataatgttaaacatatgttcattaaaagcatagcactttgaaattaactatataaatagctcatatttacacttacagcttttcatttgatcaggtctgaaatctttagcacttaaggaaaatgactatgcataattatacctgaccatgaaaaaaataagtacctcaaatgcatgcatttgcactggtgattccaactgcacaaatctttgtgccatcttgtatataggtattttttacatgggttgacatgcacacaacaccattttcattcagtatgaaccttgaggctgctgccatttttccacttaaccaaaccagcctgaaggtgaacctcgaaacttgtttcataaatctttcaaaagttgttttacatcaatgttaaaatttcaaaatgctgcagggtaatttaatgtataaaatattagtaagaaaaagtatgtattgcatacttagtagaatagatcacaacatacaaattcaattcagtgcatgctttaggtgttaagcatgagattgtacatgtttactgttaggtccttgcatctgtggtgctaggtgagtatgagaagatgtcaaggactggacgtattttgttgcctaaaaaaaaaaggctgtttgtaggcgttttaaatatgcttattttgtgtgtctctcactacctattacacactgttgctttgtgggtttgttttgtatgtgcgtgtgttatacagtagttaaatttccatgcagaaaaataaatgtcctgaattttcaaaaaaaaaaaaaaaa

SEQ ID NO: 117706 - DNA, 1000 bp, Homo Sapiens
ggcaagtggtggcgcttatggtagccaaatgatgggagggatgggcttatccaaccagtctagttatggaggtcctgctagccagcagctgagtggtggttatggaggtggttatggtggtcagagcagtatgagtggatatgaccaagttctgcaggaaaactccagtgactatcagtcaaaccttgcttaggtagagaaggagcactaaatagctactccagatataaaagctgtacatttgtgggagttgaatagaatgggagggatgtttagtatatccagtatgattggtaaatgggaaatataattgattctgatcactcttggtcagcttctctttctttatctttctttctccttttttaagaaaacgagttaagtttaacagttttgcattacaggcttgtgattcatgcttactgtaaagtggaagttgagattattttaaaacttcaagctcagtaattttgaacactgaaacattcatctaggacataataacaaagttcagtattgaccataactgttaaaacaatttttagctttcctcaagttagttatgttgtaggagtgtacctaagcagtaagcgtatttaggttaatgcagtttcacttatgttaaatgttgctcttataccacaaatacattgaaaacttcggatgcatgttgagaaacatgcctttctgtaaaactcaaatataggagctgtgtctacgattcaaagtgaaaacatttggcatgtttgttaattctagctttttggtttaatatcctgtaaggcacgtgagtgtacactttttttttttttaaggatacgggacaattttaagatgtaataccaatactttagaagtttggtcgtgtcgtttgtatgaaaatctgaggctttggtttaaatctttccttgtattgtgatttccatttagatgtattgtactaagtgaaacttgttaaataaatcttccttttaaaaactggaaaaaaaaaaaaaaaaaa

SEQ ID NO: 117707 - DNA, 1000 bp, Homo Sapiens
ggtgctttctgccccacacatttgactcttccagttgaagtgtcattctacagtgtttcagatgacaatgctccctctccttatatgggtgtgattactttagagtcccttggtaaaaggggttatcgagtacctccttcaggaacaatacaagtgaccttatttaatcctaataagactgtggtgaagatgtttgttgtgatatatgatttacgagatatgccagccaatcatcagacattcctacgacaaagaactttttctgtacctgttaaacaagaagtgaagagaagtgttaataaagagaacatccgacacacagaagaacggttattacgctacctcatacatctgaggttccagagttctaaatctggaaagatctacctccatagagacgtacggctcctgttctctagaaagtcaatggaggttgatagcggtgctgcatatgaactcaaatcttacactgaatcaccaacaaaccctcagttttcaccaagatgttgataaggagtgatgatttaaagtatttactcagtacccaagtttgcaagtaaaaattagcatagaatggagtgtaccaaattaacaatcaggagagtggattctctcctgttatcctggaccagtttttatgaaaggattcctgaaatgaaatccatatattccatgtagactggaaaaactcatgtcctaatcctttttgtactgttgaaaccacttcattggacatgttgcaatagcaaaacccccagttagattagtgtttacacattttctcagttatttaatatttaatgttttccttaatactcaagtgatgtttgtctctagtgttctaatgtagcacaaatcctatgtaaaatcatactatgtatttttgacattaatgttgaaatcaaatatatgcacaagtctttaattttgtgtaatgtgttaagtgctgttcatttaagttattgaaaatgagaataaaatgttgagcttctttaaaagt

SEQ ID NO: 117708 - DNA, 1000 bp, Homo Sapiens
cagccagtggtgtcctgtggctggctggccccacctcccaacggacaaaaggagggcaacaggtacctggcgggttccaccatctacttccactgtgacaacggctacagcctggccggggcagagaccagcacctgccaggctgacggcacctggtcctcacccaccccgaagtgccagccaggacgcagctacgcggtgctgttgggcatcatctttgggggcctcgcggtggtggcggcggttgcgctcgtctatgtgctgctgcgccgcaggaagggcaacacgcacgtctggggtgcacagccctgatgggagcagcttggctgtgagcaccaggccaagactcctgagaacaggcagcccagtcctgcgactcccgcatccccaggaccagacacctgggacctggatacttgatacctgggcatttaaccccctactctgtcatctcagaccccaggcaggaggcccagtgttccaacacccaagccccgtgctagcagcgctccgtgctcttccccaaatactcacggctctaattccccaaacctgaaacttcataccctgggattctaatacctatgtcctgagccctgacactcccacacctgagcctcagattccaatagctcactccctagagcctgacgccggggcccctgacccctgagcctcagattccaatacctcactccccagagcctgatgccggggcccctgacccctgatctacggaggcctgctcccggaccgtgcgggcaccagtgcagtgctgccttggttcctggacccctgggcccatcctgggaccccagatggggtaaggagaggccccagaaccccaaagcagacagcgagacccccagcggcagaggcctccctcggcactccaggcttataatttcgaactcttctggaaggtcactcaggaacaccctccctgcctgtgcaaagagaaaacaagcgccttgtttccttcaaaaaaaaaaaaaaaaaa

SEQ ID NO: 117709 - DNA, 1000 bp, Homo Sapiens
gttgtcttcgtcacgggtaattatgtgctggatcgagatgacctggtggaggcccaaacacctgagtatgatgtggtgctctgcctcagcctcaccaagtgggtgcatctgaactggggagacgagggcctgaagcgcatgtttcgccggatctaccggcacctacgccctgggggcatcctggtcctagagccccaaccctggtcgtcgtatggcaagagaaagactcttacagaaacgatctacaagaactactaccgaatccaattgaagccagagcagttcagttcctacctgacatccccagacgtgggcttctccagctatgagcttgtggccacaccccacaacacctctaaaggcttccagcgtcctgtgtacctgttccacaaggcccgatcccccagccactaagtggccccctaaacagaaagtgtgaagaggctgccctcgctgctcataaggacctgggggaagaggaaagtgtcccaaggtctttcctttctgactccaaaaatagtttcctttcttggatctgcaaagaaagcttttcttccgtcgctgcctcagcctcctccctatgcctctggcacctgcgcagcaaggctggctgtgctggagtcaccatcatcttcctctcccccagcctcccaggctggatggcatggactgtttgctgacctctgttctcttagggcatgggaggtgggaggatatcaaattctctagccctttcctcctattctcccaaggagagagattcccatttctcctcggccattgtacctagctcttgtccctagctgcatttcagtggaccatggatagagggactgagggttagacggggaagactggcagggaggcacgcaggtactgtgaaaatccttccctttgccctcccccagtgggagagggggttgggttttcaatgtgagaacagcacaataaacttgatgtctagggcagtggcccccaaaaaaaaaaaaaaaaaaaaaaa

SEQ ID NO: 117710 - DNA, 1000 bp, Homo Sapiens
tttttgcagcagattccgtcgttcttactgagtctgcagcgggggagtgaacaagtgtgcagatgtaagttcttacatgataagcagattgaatacaacaccagcagcttgccttagaaaaggagaaaggaattccttttcccgcccgaacatgaagaaaaacgacctgaccctgtagagagaacacagtgtgaatgtttcccctcgtgtgagcccagcctgtggtcttctccgtacccgcaacgtggtcatctgtgcccgtgacgtcacctgtgcccgtgcgtggcgtccccgtctccgttggggccattagaatgaggcagacaccaggccactctagaagccgagccgtcacacctcaggcgtgtgcggggcggggacggggggtctcctggttacattttggattaaacctgtttcccggttatgtgtagggaacagcagagtgatgcacgaactttgaacattcgttatggggaaaacatcctttaacttcggggtcgtctgccagagcagggtctgggagggtccatgcagttcccgctggtgtggagggaaatgccctggtctggcctccgagcccccaggtccaccgtctcccctcccctcatttgtaagaatagctacacactaacattttgggaaggagaggcacataattttttttaacatttggtaactaggttatgggctctacattgtcagctacttgggatatatatttaattttcttaaattcccgttaaactctattttatggttttgatttcagattgcaaacatgtaaaacctgcatagcagcgagttctcggttttgccggtttctttagttctttactgtcactgtcatgtaatcagctaattctctgtggatgttgctgtaaagtatgcatgttcctttcatgtgtatttaatcatgatgtttaattttgcacacttatttgtaatgtttcttttaaataaaagtgactaattttgttgtaaaaaaaaaaaaaaaaaa

SEQ ID NO: 117711 - DNA, 1000 bp, Homo Sapiens
caggtttggcaaacatcgaaaagatgacaagattgagaaaacgggtaaaataaaaatacaggaatcctttacatcagaagaggagaggatacgaatgaagcaggagcaggagaggattcaagccaaaactcgagaatttagggaacgacaagctcgagagcgtgactatgctgaaattcaagattttcatcggacatttggctgtgatgatgagttaatgtatgggggagtttcttcttatgaaggttccatggctctcaacgctagacctcagagcccacgagaagggcatatgatggatgctttgtatgcccaagtcaagaagccgcggaattccaaaccctcacctgtagacagtaacagatcaactcctagcaatcatgatcggatacagcgtctgaggcaagaatttcagcaagcaaagcaagatgaagatgtagaagatcgtcggcggacctatagttttgagcaaccctggccgaacgcacggccggcgacgcagagcgggcgacactcggtgtccgtggaggtgcagatgcagcggcagcggcaggaggagcgcgagagctcccagcaggcccagcgccagtacagctctctgcctcggcaaagcaggaaaaatgccagctcggtctcccaggactcttgggagcagaactactcccctggggaaggcttccagagtgccaaagagaaccccaggtactccagctaccaaggctccaggaacggctacctgggaggacatggcttcaacgccagggtcatgctggaaactcaggagctccttcgccaggaacagaggcggaaggagcagcagatgaagaagcagcctccttccgaggggcccagcaactatgactcgtataagaaagtccaggaccccagttacgcccctcccaaggggcccttccggcaagatgtgcccccctccccttctcaggttgcgaggctgaacagacttcagactcctgagaaagggaggcccttctattcctga

SEQ ID NO: 117712 - DNA, 1000 bp, Homo Sapiens
tgatttctggcatgagatcagttatggaattttccacttctagcgtcatgttggcattcagaaattttgaaattttggagcattttggattttcagattagggatgctcaacctgtatatatattttttaatcgacgtgaaattcacgtaacatagaattaaccattttgaagtgaacaatttggttgcattcactgatgttgagcaaccaccacctttaactatttccaaaacattttcatcactccaaaataaatgcctgtacacactagcagtcactccctatcttcccctccacctgtccgctggcaaccactgatctcctttttatttctgtggctttttctattctggatatttcatataagtggaattacacaatatatgtggtcttttgtgtctggcttcttctgagacagtaggaagggggcttggctttggctcacccccactagagcattttttcatgcattcccactgatcacaaaacccatactactacctcattgacaccatacctgctaacctcgaggctttagtcatacaaagaaaatggcctttctgtattgttcttctgtgctctcataatgcttaaccatgtcttttacttaaacaattccaggaactggccttaggagatccaaatagggaaccaagattgcagagtgtcccatcttgggagggaatgctgaataattaattgatttacagccttgttgccgctggccagaccaccaggtggcccattactcgagatgatcatcacaaccagatgatgctaacctatatcctctacccttcgcgtgctttgtctgggaagtcttttggccccatgtcagtttctattgcattgagagcccaagagcccctggtcagtcaggcttccatttagcatggcgtttgcaaggtttacccatgttgtagcatgtgtcagaatttcattcctttctatggctgaataaaattccattgtatgaatataccacaaaaaaaaaaaaaa

SEQ ID NO: 117713 - DNA, 1000 bp, Homo Sapiens
aagaaaagtctcataaggtagccaaatgaaaaagaatgaaagggaaagtgaaaaattaaggggacaaaagatgggatgtgaaaagaagaattctagtttgatggtgactcatattcacgataggatacaaagtgtgatttgttggaaacatgtcccaaatttctaaaattctgcttctctgccaaaagcaatgtctttcttggttgatatttgagttttaaaagggtcaaatctttctaattttttgtatctttagagggcagcactagaagaaatcagcaggtctaatcccaccagtaagaaaactaccacttcttgatttttacagatttaaaaaaatcttttcagtgacctttctttttaatgtaaatacaaatttaaacctaggcttaatataggcgtttcccctttcacccaagtgatgtcacagttcgatgcaaaatcaatgatccagaatgatcgtgggtaaaaataactcaaagtgtttcttaagggtgagttggcatgcaaaaaattacattgattacagtgtgttttggagctggctctgtttgtgtgcatatgataatgcagagttgagccagagcctggaaatgtcattctagatctcactaactactggaatcagtgttttaatctcttggtggaaactttcagttgcttaactctctattggaagatttttttaatgttctacatcatttatgttgtattacaatgtatgtagaaatagtaacctgtgaactatgcttttccataactttttaaaaatatatatatctaaatgaatgcaatgtgcataaatattttttaaacataacagtgaactattgcaccttttgctaatgcctctatttacttgctttggcataaagaatgagccaatgaacctctgtgtcctgtggaaaaatgtataaatgttatctgatattgctcttagatgtaatgctaattaatgttaaatcacaaataaacagtattttaaatataaaaaaaaaaa

SEQ ID NO: 117714 - DNA, 1000 bp, Homo Sapiens
cccgcaggaccccatcctgttctcggggaccctgcgcatgaacctggaccccttcggcagctactcagaggaggacatttggtgggctttggagctgtcccacctgcacacgtttgtgagctcccagccggcaggcctggacttccagtgctcagagggcggggagaatctcagcgtgggccagaggcagctcgtgtgcctggcccgagccctgctccgcaagagccgcatcctggttttagacgaggccacagctgccatcgacctggagactgacaacctcatccaggctaccatccgcacccagtttgatacctgcactgtcctgaccatcgcacaccggcttaacactatcatggactacaccagggtcctggtcctggacaaaggagtagtagctgaatttgattctccagccaacctcattgcagctagaggcatcttctacgggatggccagagatgctggacttgcctaaaatatattcctgagatttcctcctggcctttcctggttttcatcaggaaggaaatgacaccaaatatgtccgcagaatggacttgatagcaaacactgggggcaccttaagattttgcacctgtaaagtgccttacagggtaactgtgctgaatgctttagatgaggaaatgatccccaagtggtgaatgacacgcctaaggtcacagctagtttgagccagttagactagtcccccggtctcccgattcccaactgagtgttatttgcacactgcactgttttcaaataacgattttatgaaatgacctctgtcctccctctgatttttcatattttcctaaagtttcgtttctgttttttaataaaaagctttttcctcctggaacagaagacagctgctgggtcaggccacccctaggaactcagtcctgtactctggggtgctgcctgaatccattaaaaatgggagtactgatgaaataaaactacatggtcaacagtaaaaaaaaaaaaaaaaaaa

SEQ ID NO: 117715 - DNA, 1000 bp, Homo Sapiens
ggacagccccaggggctggctttcaccagctgcagggtctgcttttacttggggtgggggggcggggctgaccctgaaccctcccccccgccaggtcggggaggggtcccaccactcaaagtgcctctaaagaaaccagctttttgcactaaagccaaaccacaccgctgtccccttagccccaagggccctgggggcagccaccctcccgcctgtcggcccgtagatttatcaagggtgttatgggcccagctttggggggccagtcccgatgcactttgaggggtgttggagaggggactcccccactcgcacttaactcaacggctctcgggccctggggctgtttttaccatgtttgtttttgaagctcaggtgtctcacgtctgggctgcaccaggcgaagagagaaattaaagatttgaggtttttccagaagctttgtctgcctctcgggaggaaggccgtggggctgggaccctgtggtgggcaagtgggtggagtctggcagctgcccacagagggccgagggtcacccgtcggccgccgccaccccaggcgaggccggaggaaggatcatctgagacgcaggaggcatctgctggagcagcaatttcccaatttattgaaagtgatcgctttgcaaggatgtctaagctaatcccgtcacagaaaggaaacgcacaggcgcctaggcagaaacttggagactcaccgcagaggccacgtgaacccacggccacagagaggcaggacggcagagccatgatttcccaccgagcgattacgagaacctcttcccccaatagtagacacatctccaatacaaacacaggtttataataagtaataggaagtcaatataatatagattatccccagaaaaaaatcaacaatcttcaaacactgccctttttttgtgtgttttgtttttgttgacaggttgaaagcatgttgaaaaaaataaatatttaagaaaagcaaaaaaaaaaaaaaaaaa

SEQ ID NO: 117716 - DNA, 1000 bp, Homo Sapiens
tgtttttagaatagaacctggtgtgtccgtttctctggtgaatccccagccatccaatggccacttctcaaccaaaattgaaatcaagcaaggagataactgtgattccataatcaggcgtttaatgaaaatgaatcgaggaattaaagacctttccaaagtgaaactgatgagatttgatgatccactgttggggcctcgacgagttcctgtcctgggaaaggagtacaccgagaagacccccatttctgagcatgctgttttcaatgtggacctcatgagcaagaaaattcatctgactgagaatgggataagggtggatattggcgatacaataatctatctggttcattaaactcatgcacattggagatttatcctggtttcttaggaatactactactctgattgtgtctactgattggctatcagaaccttaggctggacctaaatagattgatttcatttctaaccatccaattctgcatgtattcataattctatcaagtcatctttgattcctggacctaataaattttttttccctttctttgggtgtccaagagaaatggtttttgccaaactctttttaaaaaacaaattgttgctatttcctagaagtttctggtttttaagatgaacataaaagtgtcagtatgcttccttttatgaggtgtactttatactttgatgaaggctaaggtgtacctaacagctttttatagtatattcatttatggagttagctgtattttttttaaaaaaagaaaagtagtaaattagcagctttttttttttttaaatgaagagaacttcatgatgatttaaaagaactaatgagaatattttgacttgacttcaattactaagtattttgtataaagaacaaataggtcctgcattttataagactttttaaagctttaattattcaactaagaaccaataatggcttcttcaaggctaatatcaatagtttataagcagtatatttcaccta

SEQ ID NO: 117717 - DNA, 1000 bp, Homo Sapiens
tgctgtcatcttagttggaccaacttcccatttatttatcttaaaactatacagttacatcttaattccatccaaagaagatacagtttgaagacagaagtgtactctctacaatgcaatttactgtacagttagaaagcaaagtgttaaatggagaagatacttgtttttattaaacattttgagatttagataaactacattttaactgaatgtctaaagtgattatcttttttccccccaagttagtcttaaatcttttgggtttgaatgaaggttttacataagaaattattaaaaacaaggggggtgggtaataaatgtatataacattaaataatgtaacgtaggtgtagattcccaaatgcatttggatgtacagatcgactacagagtacttttttcttatgatgattggtgtagaaatgtgtgatttgggtgggcttttacatcttgcctaccattgcatgaaacattggggtttcttcaaaatgtgtgtgtcatacttcttttgggaggggggttgttttcttctgtttattttctgagactcctacaggagccaaatttgtaatttagagacacttaattttgttaatcctgtctgggacacttaagtaacatctaaagcattattgctttagaatgttcaaataaaatttcctgaccaaattgttttgtggaaatagatgtgtttgcaatttgaagatatctttctgtccagaaggcaaaattaccgaatgccatttttaaaagtatgctataaactatgctactctcatacaggggacccgtattttaaaatctccagacttgcttacatctagattatccagcacaatcataaagtgaatgacaaaccctttgaatgaaattgtggcacaaaatctgttcaggttggtgtaccgtgtaaagtggggatggggtaaaagtggttaacgtactgttggatcaacaaataaaggttacagttttgtaagagaaaaaaaaaaaaaaaaaa

SEQ ID NO: 117718 - DNA, 1000 bp, Homo Sapiens
aggcgctgacctggtggcagctccgcatgcgcgcttcgacgacggcctggtgcacctgtgctgggtgcgtagcggcatctcgcgggctgcgctgctgcgccttttcttggccatggagcgtggtagccacttcagcctgggctgtccgcagctgggctacgccgcggcccgtgccttccgcctagagccgctcacaccacgcggcgtgctcacagtggacggggagcaggtggagtatgggccgctacaggcacagatgcaccctggcatcggtacactgctcactgggcctcctggctgcccggggcgggagccctgaaactaaacaagcttggtacccgccgggggcggggcctacattccaatggggcggagcctgagctagggggtgtggcctggctgctagagttgtggtggcaggggccctggccccgtctcaggattgcgctcgctttcatgggaccagacgtgatgctggaaggtgggcgtcgtcacggttaaagagaaatgggctcgtcccgagggtagtgcctgatcaatgagggcggggcctggcgtctgatctggggccgcccttacggggcagggctcagtcctgacgcttgccacctgctcctacccggccaggatggctgagggcggagtctattttacgcgtcgcccaatgacaggacctggaatgtactggctggggtaggcctcagtgagtcggccggtcagggcccgcagcctcgccccatccactccggtgcctccatttagctggccaatcagcccaggaggggcaggttccccggggccggcgctaggatttgcactaatgttcctctccccgcgggtgggggcggggaaattcatatcccctgttcgtctcatgcgcgtcctccgtccccaatctaaaaagcaattgaaaaggtctatgcaataaaggcagtcgcttcattcctctcaaaaaaaaaaaaaaaaaaaaaaaaaaaaaaaaaaaaaaaaaaaaaaaaaa

SEQ ID NO: 117719 - DNA, 1000 bp, Homo Sapiens
tggggatctcaatgctttccacatttctttctccattctgttccactgctcttctctggttcatgtccaccactgactgggaccctgaagaggcatttcagagtgttggagaagaatctgtagcttgttgaaaaagctgggggtgaaagggaacaaggaaggtgatgtgtgagtctggcaggcaggagaaggggtgttcatagaagcagtgtgcaggtgaggcaaagtgctgggactttttggtaatagatttaattatgaatgattagtaggaaaggactgagagtattatatttttcctgggatgcctaatagtcctttgatagaaaggaattttaaatagtttgacacttgaaaaaagatactatttataagttgaagaaagtttgctgtaccacaatgcgcatgtagttaacaattttgcactgtagatttaacattttgttaagaagatagatttcatgttatgcattttttaccacaatttttaaaaagtttgaatagaaatttttaatgtctttgagtggattttgttttttgaacagttggatagacttctgcgtaagaaagctggattgactgttgttccttcatataatgccttgagaaattctgaatatcaaaggcagtttgtttggaagacttctaaagaaactgctccagcttttgcagccaatcaggtagcttaatggatgtaatacatttctgagtaccattatcttatctagtaatgtagatttacatagaattaagagttgaaagaaattaagtacttaagtagcctggaggtaggttctagaaaaccaaaatgagagttttgctaaaatcatcctattacttatgatttatggtagtaatattatactgtcctaggcttctgatgatcattgttgccagatgcagcacatatactaaatatgagacagggtaatgaaaacttggggaactggtaagtttttgcatgctacaagatttttttacttattaaaaaattattaaa

SEQ ID NO: 117720 - DNA, 1000 bp, Homo Sapiens
ggggagacagcctgagtaaaaggcttggaagttggaattagcagtggggagcagaagcactcatagctcttttaggcagaagaatccaggcccgagctggcagaagagacttagagatgctaatggaatttaaactgaaaaaaggagcccaatgaagctaagcgccacgccccacaaggggtcatattggctttagttcctcaagcatatgtgcttatatgcacacacacacacatttccatggacccaggtcttgcttgtgtccccaggcaccagtagtttgagcccccctcaaaagacatgaagggggttggggtctgtgtgagtagtggggaggtgcatgtgtatccacatgtgtgcatacactcttaagttgggtgggaagtggattccttgttggtttctggttcagagtgctctcccaccaccagagacaagtgggtaaaaaggtcagtccattgcaggaatatatatccgggagagctaggtcccttggggctctggatgctgggtaacccagaggtaatgtgggtaccctttctgaagctgtcagggctgtgactagcacccttatcacccctcactgccttgtgggaatagtagagggtttttttcctccagagcccctggcctttcagttcttaactatttccctccaggccagaaagttttctttgaggaaggagaggagagggtggcaatgatgcctttgatctggaattggacatttctctgtcagagcacagaggaggctcatatcacctcttccctctcctacttggcccagctgcttggaggaccgaccccatggctgagaatatgacggcaagaggaacagagtttgctccaagtgggaaagggtcccaagcagtccagagaagatgtctgtgtggctttccctccctgcctcccccagctcccacactggcctttgtaaataaatggcgtggtctttgttgtgaaaaaaaaaaaaaaaaaaaaaaaaaaaaaaaaaaaaaaa

SEQ ID NO: 117721 - DNA, 1000 bp, Homo Sapiens
ggtggggcccctggggcaatggcagtggtagaacgctcaacttggttgcggtaccatcagcccacctgcatttggctttcgacttgcttgttctaagtcacagcgccctcatctttttagcaaggtaaaaaaaccaaaatgggtgttatctctgatatcttgaaaccagcgttctgaatagaggtaggttgagttttctaggggaaaacaaatggagaaaagaggcatgaagaaaagtaaaccgagaacataattaggcatcgggcctaagtgtcctggggagattggaggggacggcagcgttctgcatgatggaggcgctgccgggccccgggtctgtgggggccgtgctctcagggcgtgtgcgggacgccacctgtgcacacctgctcagagcacggctcctcgcaggggtgaaggggcagaccaacgaaaccagatgagaccaacgacaccatgcgagacacgcttgcagacactgttgttttggaaatgtgcttccctccatctgaaatctcatccctccacccgcccactcgggcagctgtgccgtgggcagggcatgcgctcccctggctgagcaccccagagattctcctgcaccttcctcatgccgcacgctgctcatccgtctccatgtgtgtttagatccatgccattcactgactcactaacacctgcaaaatctttaaggaaaaaagctgaagggtacgaccatgcacatatgtgacctggaaaatgcaaatttagatcttttatgatttaattattattgtttcccatagaagttccctccctttgaaattaatatataatgtataaattctgcactgagccatggcggagctgggcagcccctaggttagagtggagacggaggcccaggcgcaggggtcacacctcatctggtttccttcccatctcacagcttagcttgtgcttctcaacaccaagtctttaagagcaataaaaactacaccatgaaaaaaaaaaaaaaaaa

SEQ ID NO: 117722 - DNA, 1000 bp, Homo Sapiens
cgggcaggtgaggagcattacaactgcatctccgccctgcacaagtccatgcggggctcagaccagaacgcctccctctactggctggctcgcatgctcgagggaggagaggacccactctacgtggcacggaggcttgtcaggtttgccagcgaggacataggtctggcagacccgtctgcgttaacacaagcggttgctgcctaccaaggctgtcattttataggcatgcctgaatgtgaggtgcttctggcccagtgtgtggtctactttgccagagccccaaagtccattgaggtgtacagcgcctacaacaacgtcaaagcctgcctgaggaaccaccaggggccactgccccccgtgcccctgcacctgaggaacgcgcccactaggctgatgaaggatttgggctatggcaaaggctacaagtacaaccccatgtacagcgagcctgtggatcaggagtacctgcctgaagagttgaggggggtagatttcttcaagcagaggaggtgctgactcctcagggcacgacagcagaaggatgttgcttttttaagggagggccagaaagaaagttagtggattgcaaagttggttgcctggtggaagttagaacagaccaacattttgtgccagaaatttaagagttccataggtggaggcgcagttctttcgaataaatgtgtaactttgaaattgtgttcatttgcactcggtgcagcggttatgcttatgaaaatacctggcagctttgtgcaatgaattaatgttataaggaattatctattttgtcatagtatttaagtcataatgtcatttcagaattcagttctgtaggattttcttttctttaaaaaatgtatattctgggtagttttaattggtaaaaaaatgtaattgtgatttaatactgcatagtgttttgggtattttttttatatgcaaaggtcttacgagccaataaaactatttcaaagtaaaaaaaaaaaaaaaaaaa

SEQ ID NO: 117723 - DNA, 1000 bp, Homo Sapiens
catagacatgggtcttccagttgaattgtccattaccgtaaaacttaatggtggacaagttagctgtggttgattcctgtgtggcagtaaattgtcttctgtctgcttactccaaataataaaagctgctaggaagtttagattttgaaataggcagtttaatgctttgagggtttctagaaatacagaaagtcatcaagtaaacactgcatgtctaatcatctcagagttgtggctgttatctcttcaggaattggtccacagggtaaatttcaacaattcatacgttttccattgtcatttctgaggacctttgagatgagagaaaggaaatctagtggaacaggaaagagagttacaccttgtgggtgtgagtttgggacctgttggcagaagggaatgtcactccctggaaacaggttcagcatgtttgcacttgttattttgtagctttaatgatttttgttttctaatagggcaaatgtctctaagcttggtgtttagagctgcttcatattttaaactagttccattccacagttctagttcaaaccagtttttacagcctcctgggtgggtcgtcttgacccaaactcttgtgttgttacattttgagaggttttcataccagaatgtaccaaaaagtgcacaaggtaaaggtaatttacagccagaaacaaatatacatttgtttcatttcttgactttccctaagcagataagcagaaacttgtttaactcattactttgtttgatgtgtcttacatatttttgactaaaagttatagaatgttattcctctgggggaatcttttacaggtggaggaatggggatagcagtattgcctcagattcaaactggcatcaccataaaccctgtaggccagggtggaatgaagtcagctcctttttatagttgaaatacaattttttattcaccattgtctgcacaaatccttgaaaataaacctttttttccctaaaaaaaaaaaaaaaaaaa

SEQ ID NO: 117724 - DNA, 1000 bp, Homo Sapiens
cacctcacccaccactgctgcggccactatgcctgtggtgccctctgtggccagcctggcccctccaggggaggcctcgctctgcctggaagaggtggccccccctgccagtgggacccgcaaagctcgggtgctctatgactacgaggcagccgacagcagtgagctggccctgctggctgatgagctcatcactgtctacagcctgcctggcatggaccctgactggctcattggcgagagaggcaacaagaagggcaaggtccctgtcacctacttggaactgctcagctaggcaggtgcccccatcccccccgcattctggcctaggcaggagaggatgggcgcagccctgccacttaacttgtttgttggtgacacagttgttcagagtggggagaattcaccccattctgtccctgcccctagtcacctagctgtgagggtgcctgaggctgaatggctccacccctcccccagccctgcttctgacctgtggctctggagcccctgcccctgcctgcatccccgagcaccccaccctccaggctccactaaggagggaggggctgtctgcagcagctgcactcagcacctaggccagggtggggccgccgcagatgggctcaggaagccccaggtgcactcagcgagagccctgcctttcagttgccaaaagctgcatcaggggaatgcggcaaggcacacagggctctggcagcccctggggactgggcgctgcccctgggaggggagagcctggccagggctggtgttgggcccggagcagcatcttccggtgctatcctcccctcccacccctcacagctcaagccaagtccagcggccgcagtcttcacctctccacactcactttttatctggtgtttttacttctgcctgcgtttgctctctagccaataaaccgtccttgtgtgcgagtcaaaaaaaaaaaaaaaaaaaaaaaaaaaaaaaaaaaaaaaaaaaaaaaaaaaaaaaa

SEQ ID NO: 117725 - DNA, 1000 bp, Homo Sapiens
cacagttaaagttgtagaaatcaaattactatcattttttgttgccaaaacaaagtcttacatttaacccccctttctaccaccccccctccacacttcacgtcagctacatagtttccacagggtaattcactaagagcttgtggagcttggttttaaaatccttagcctggtctgactttaggcatagcttccagttcttccttccttgtcctggtttcttgttcagcttttacttctaatccaacaacaaaagaaatgtctggctggtctcagctagagtctgatgtgtcttagagcatgtgtgcgtatctgaaccatcatccctgctctcatctcagctccctccaggcctgagcaccggttccttttgtcccatacgtcatgaagtcacactattgggaaacctgtgcttccctctccatggcttaactccctgtcagtgtcggagtgtataagaatgcttgtaaatactgtaatatatttattaatatttgaaaggcattcattcagtggacagtgggaattaactctcccaaggcaagtgaaaatgaatgattgacgtacgttgatttaacaatcttactagattttaattcttaaggatttcaaatgaaaccagaaggtggttatgtaagaggcttaaaatgatcttatgtttaaagagattctgttattagcaccatgaactcgtactatgaaatttttaagccttttatttttctaactatattactgtaggactggatattaggtgtcatataggaaacacaaaagttattgctgtttgctaaagcaaaatagcagaaaattttgtatatgaaaaactgttgaaggaccatagagaaatgtgtactactgacggggcttttactaggcttcctgcgtgtgtaaaagtcgaggtattgctggcattcagggtgacatgatggtactaaatgttttccattaaagtcttctattttaaaatttagagaaaaataaaatggctttccatcag

SEQ ID NO: 117726 - DNA, 1000 bp, Homo Sapiens
gcgtcggccggagatgagccgaggcttgctcgctgtccgaggggcctttgtgggggcctcgctgctctttctgctggtgaacgtgctgtgtgctgtgctctcccatcggcgccgggcacagccctgggccctgctgcttgtccgcgtcctggtgagcgactccctgttcgtcatctgcgcgctgtctcttgctgcctgcctctgcctcgtcgccaggcgggcgccctccactagcatctacctggaggccaaggggaccagtgtgtgccaggcggccgcgatgggtggcgccatggtcctgctctatgccagccgggcctgctacaacctgacagcactggccttggccccccagagccggctggacaccttcgattacggctggtacaatgtgtctgaccaggcggacctggtgaatgacctggggaacaaaggctacctggtatttggcctcatcctcttcgtgtgggagctactgcccaccaccctgctggtgggcttcttccgggtgcaccggcccccacaggacctgagcaccagccacatcctcaatgggcaggtctttgcctctcggtcctacttctttgaccgggctgggcactgtgaagatgagggctgctcctgggagcacagccggggtgagagcaccaggtgccaggaccaggcggccaccaccacagtctctactccaccccacagacgtgatccccctccctcccccacagaatacccaggccccagtccccctcaccctaggcccctgtgccaagtttgtctgccgcttcttgcccaggatcctgggggtcgtggctaccccctcctctggccggctccttgctgctcctgtcatagtgagcttgtgccgtccccctaggatggggggcatggccctggctgccagatgcccacagcaccctggcatgacctgccacctctgcttccacaccggagccagctacctctcctgtgcctgccactcaataaacagtgtctgcgcccc

SEQ ID NO: 117727 - DNA, 1000 bp, Homo Sapiens
tttgcttctcttgaaactgttgcccagtcacttctgctccaattctcttcctctctaaatagtagtttaattactgccacatctccatgcatcagcaaaatgttggtgacatttttctagcctggcagaacagattacttaaagctatttcacttcaaagcagactgaatgtgacttcatctaaaggcagcattaggtactgcatggaaataggtcattaacttgaaactcttatcaaaatatattttaccagtttccagaatttccagtacaggaccgcctgaagagagagccattgttcaattccaattcagtgtgagtgacaaagtgaaatttagaagtgaagttgtctatttgatatttaacccttattaaatctttctttaaatttctgcctgtcagtctatattgctgtttttattatacatcagtttctttgaataacttgtgagttcccatgtgttttgtttttattatgtaaatatcattataaataaacttatttataaatcaaagatttgttaatttttggaaatcatgcttttcaaagcatcctaacttgctaagatgctaggtagtacgaccctctggatttggaaggcaaataaaactcttacagtgattatttagatattaaagactgagaactcacggcttaaccccagtcttgatggtatattgaacagactgaatatattttaccattacagggctaaaaggagtcttcgtgtgttaatactacctccttgtacatcactatacccaaatcagttattcaaattgttaggaattttaccttttaaaatctcataatggatatctcatgttttctgtattaatgtattttcaatgataggctgtttctttttttgttgttattgttgttgttgttatatccatacttttatctctaatgaaatgtagttgggttcttcctgtaatgcgctattatgtcttgggcttaataaaaatatttgtgatcataaaaaaaaaaaaaaaa

SEQ ID NO: 117728 - DNA, 1000 bp, Homo Sapiens
agggccagatgtccgagtgggccctactcaaacgccaccagtgtgaggacatctttggcgtccagctggagggcgccttccccgacaccatgaccaagtgtgccgagctgctgagccgcaccgtggaggtggactttgtggacatcaacgtcggctgccccatcgacctcgtgtacaagaagggtgggggctgtgccctcatgaatcgctccaccaagttccagcagatcgtccgtggcatgaaccaggtgctggatgtgccgctgactgtgaagatccgcacaggcgtccaggagcgtgtgaacctggcgcaccgcctgctgcccgagctgcgggactggggcgtggcactcgtcacgctccacggccgctctcgggagcagcgctacaccaagctagctgactggcagtacatcgaggagtgcgtgcaggccgccagccccatgcccctgttcggaaatggggacatcttgtcatttgaggatgccaaccgcgccatgcagactggtgtcaccgggatcatgattgcccgtggcgccctgctcaagccgtggctcttcacggagatcaaggagcagcggcactgggacatctcgtcgtccgagcgcctggacatcctgcgggacttcaccaactacggcctggagcactggggctcggacacgcagggcgtggagaagacccggcgctttctgctcgagtggctgtccttcctgtgccggtacgtgcccgtggggctgctggagcggctcccacagaggatcaacgagcggccgccctactacctgggccgcgactacctggagacgctgatggccagccagaaggcagccgactggatccgcatcagcgagatgctccttgggccagtgccccccagcttcgccttcttgccgaagcacaaggccaacgcgtacaagtagcctcaggctttcccaggggcaccctggggcgaggagagtacaataaattttattcttttaaaaaaaaaaaaaaaaaa

SEQ ID NO: 117729 - DNA, 1000 bp, Homo Sapiens
tgggaggttttgaaaaaccagttaatttaatagctcaaaattgtccctgattttattttcttttagggaaaattgtttcataaatgtgacactgataaagcctttgtcagaaagtattctcacaattatgagatggattataataaaatacttaaatttgtgttattttttgaaccacagatgagtaaatttaataatgaaccaattacactcttgagtctaactaaactgtacactgtagcacggtgttattgactggagttaatgtgtaagttattaacatttctatgaaaatgcccttttggggcctcctgaattttagatgttccactgttttgatcatttctataaaagaaatggtcattttacttagatgccagtctactttataaagacaaatggattatagacttaaaaatagtcatttttcttattcataaatctgacaggcataaacccaaatcaaagataatttggtgcccattatgaatttgaagttaagtgatagctcacttgtaaagtgactaccttaatgtgtatagagaccccagtctactattatttgggaaaattgtttaggttatatgggaaaagtagctctttaaaaatcatattgcccaacagaaaccttaggctgaatttacaggtatgataatttttgtaattaattttcttagaattgtgcaggctggatgagataatgacatactcttttacactgtaacagcagcattattgcctagaactttaaccattttagagttagatactaaggaaacaaactaattggtcatcatcattttctttttttctttttcttttttttttttttgcccttatgtgtcactaaacaactagtttctctcccttttgtcagttcccattgtgtattttttcaaaagaagtactgtattcggatgccagctaataaattgtcacacaatggaaaatcatatgccacaacattcattgtaaggtttaataaaattaaatttgcacc

SEQ ID NO: 117730 - DNA, 1000 bp, Homo Sapiens
aaagttttttaaaaacttgtatgtttttgcaaatccctggaagtgttgaattggttaaaattttacattttctcagttcataattagtttataaacacctagaataatactggcattaaagaatccttgttggatggtagaaatcagatccctaaccagtgggaggtactttttgggtggcttgtgcattcttatcagttgtgtgctaatttattgtattgttcctttgtgctctaagcagcacacttgccttctatttatttaagtgtaaacatttcaaagcaggccgtactccttctgacaaatttcttgtaaaccaggattgcctacgctttccactgtcgtcgtctccccactttccctcttcctttaagaaaacttactaaaaaatgtttcattgcgaagcagaggaaaagaaacgttttcagacctaaaggaaatgtttggtcatgttaagaaaacaaattattcattcatatgatgctttcttaacgttgaaattgcacattcacattggactgagactttgaaaataacttttacatacttttgtttaagcccctttgaaatgtataaaaagttcatttacagttctaaatgtaatgtttttaagccttctatctttttaggacacagtttgtttaagcaatatgttttggtcttgtgatcactgtctgtcacaagtagagtgaaaggggtaagggggtgggagggtaagagttttgacaagttgtggcaaaggaaactatacttttcatttttaaaaatgtaaatagaaaagtttttaacggttttatatagatttcactataaataagcattttaagactgacaaatgttgaactgtacatacatttatcagcataactgcccagtttttttggtgctgaagtactgtaagtagaattcatcaacggtctcctaatttttgcatctacatctggggggaaaaagctgtgatactatagttaataaattcccactagagtgacaaaaaaaa

SEQ ID NO: 117731 - DNA, 1000 bp, Homo Sapiens
tgccttctggcctgtggcctccctgcccatgttcacctggctgctgtgggtaccagtgcaggtcccggttttcaggcacctgctcagctgcccgtctctggcctgggcccctgccccttccaccctgtgcttagaaagtcgaagtgcttggttctaaatgtctaaacagagaagagatccttgacttctgttcctctccctcctgcagatgcaagagctcctgggcaggggtgcctgggccccagggtgtggcaggagacccagtggatggggccagctggcctgccctgatcctctgcttcctcctcacaaccccaagagcccccagcccggtccatccacgtctggagtctggggagaggagcagggtcttaggactctcagctctgagcatccctggcagggtcttcaacctctaatctcttcccttaagccctgtggccacacagccaggagagacttgccgctggctcccgcctcatttcagcccagggtgctcatccaggggcccagaacagtcccacctgtgctgctatgcccacagcacaaagccaggcttcactcccaaaagtgcagccaggccctggagggtgatcctgccagcagccctacagctccacaccctacccacccatcggcagcctctctgctgttccccagggacctctcatacactggccaggaggctgcagaacgtgtgtctccccctccctccaagaggtcctgctccctctgccagaaccgtgtgtgggcgggtgggagggcgctcggggcccggcccctccctctccctgctggttttagttggtccctatgttggaagtaaaaagtgaagcactttattttggttgtgtttgctcacgttctgcttggaagtggggacccctcactgcgtccacgtgtctgcgacctgtgtggagtgtcaccgcgtgtacatactgtaaattatttattaatggctaaatgcaagtaaagtttggtttttttgttattttctttt

SEQ ID NO: 117732 - DNA, 1000 bp, Homo Sapiens
ggtggaccccactgatcccaagactctggcctttaaccctaagaagaagaattatgagcggcttcagaaagctctggatagtgtgatgtctattcgggagatgacccagggctcatatttggaaatcaagaaacagatggacaagttggatcccctggcccatcctctcctgcagtggatcatctctagcaacaggtcacacattgtcaaactacctctcagcaggcagctgaagttcatgcacacctcacaccagttcctcctgctgagcagccctcctgccaaggaggctcggttccggaccgccaagaagctctatggcagcacctttgccttccatgggtcccacattgagaactggcattcgatcctgcgcaatgggctggtcaatgcatcctacaccaaactgcaggaatgggaaaaggacagcacaggatgccctccaaggatgagctggtccagagatacaacaggatgaataccatcccccagacccgatccattcagtcacggttcctgcagagtcggaatctaaactgtatagcactttgtgaagtgattacatctaaggacctccagaagcatgggaacatctgggtgtgccctgtgtccgaccatgtctgcacaagattcttctttgtatatgaggatggtcaggtgggcgatgccaacattaatactcaggaccccaagatacagaaggaaatcatgcgtgtgatcggaactcaggtttacacaaactgagggggccccagccctcgtaccacccctgttaccccaggatccatctgccctcataaaagtgttcaggtacagcagctgaggctgccctgaggaatcaaggggccattaccaaggggcaggaaaaggatatgtaagaggtggccttcatggtagagcttgacccaagaactactccacattcggatggcccagactgactccatcccctgactttccctttgacttcaccctgtttgtaaataaaacaataaaatgg

SEQ ID NO: 117733 - DNA, 1000 bp, Homo Sapiens
aagggctgggggccatcagcaatgtctggagacatttttgattctcacagcttggtggggactgctattggtatctcatgggtggaggccagggatgccaccgaacatcctacaatgcacagggcagccccccacaaataagaattatccagccccaaaatgccaatagtgccgaggtcaggggaccctgtgctggccatcctatctctgattctgaaactatgcatgctttccacttttccccatttgtgagtcattgagtaaattaaagctcttctgagcagcagcagtgatcatggtcactgccctgcgttcaaataatgcgagctgaggacagtgatctgcaactcccagcatgtcatgtggtctcttagaaatccatgtgactgtttccaccatcttgggcatttgtggggacccccagactggagggagaaagccctacaaagtggatgggagtgtggggctgaacttttccctacccttaactttgtgtctctgggacctccagggacctggcccctcaccaatgcatatgaagagtatgcttggggaagagcttaggaatggggtgggcatgggagtgctgggtagcagcctttgagcaaatctgcatcttctcttatttctgacctttttccatgtgcccagtcctatttctgccagttgaaggcatactaatattctttatactatttaatcttttgcagaaaccttactattataacttgctactctccagataccaattcttcatgccgagagcatcggaaatgtttttgtgtcttactgatgttttcatgatcaacttgtaaatgtaagcagttgacttcataaaaggtattttaactattcttggagtcctttgctacccaagcacctggtttcaccatgcgatcactgacttctctacagtgaagactctttcttaataaaggatttcgctgtgctcttttgattaaaaatatctaaccttaaaagacgtaaaaaaaaaaaaaaa

SEQ ID NO: 117734 - DNA, 1000 bp, Homo Sapiens
accagatgagaaaaaagatgaaatagaaaaaataaaagcatatccctatatggaaggcgaacctgaggatgatgtctatttaaaacgcttatacccgagacagatatatgaggtggagaaagctgttcacttacttaagaaatttcaaattcttgactttactagtccaaagcaaagtgtttatcttgatttgacactggatatggcactgggaaagaagaaaaacgtggagccatttaccagtgttcttagtttgccatacccatttgcttccgaaatcaataaagttgctgtatttacagagaatgcatcagaggtcaaaatagcggaagaaaatggagctgcatttgcaggaggcactagtctgatacagaagatttgggatgatgaaattgttgcagacttttacgtagctgttccagaaataatgcctgaacttaatcgattaaggaagaaactgaataaaaaatatccaaagctttctcgaaattccattggccgtgacatccccaaaatgcttgaattatttaaaaatggacatgaaattaaggtagatgaagaaagggagaactttctccagaccaaaatagcaacattggatatgtcaagtgaccagatagctgccaatctgcaagcagttattaatgaagtttgtaggcacagaccgctgaatttgggtccctttgtggtacgtgctttccttcgtagttcaacaagtgaaggtttattactgaagattgatccattgttgcctaaagaagtaaaaaatgaagaaagtgaaaaagaagatgcctaaatgtggtgaattgtgaaattactttcagtggtttaagaagcaatggagaaaatgataatacagcataatttttacatttgatgtcttgttattgatcatacttgaaagtgaactttaacattgaaaaatcgtacagtcatttcaagaataagaaaataaaattttctctttgtctgaaaaaaaaaaaaaaaaaaaaaaaaaaaa

SEQ ID NO: 117735 - DNA, 1000 bp, Homo Sapiens
catgtggacgtgtggcccctcaacctgctgcggccccggggtgggcccggctatgtggatgtctgcggcctcttcctgctgcagatggcaaccatcttgggcatggtgcccgcttggcatagcgcccggctccggatcttcctgtgcctggggcctcgggaggcgcctggggcggccgaggggcggctgcgggcactgctgagccaactgaggatccgggctgaggtgcaggaggtggtgtggggcgagggggccggggctggggaacccgaggcggaggaggaaggggactttgtgaacagtgggcggggagacgcagaggcagaggccctggcacgcagcgccaacgccctggttcgggcccagcaggggcgcggcacaggaggagggccgggtgggccggagggtggggatgctgagggccccatcacagccctcaccttcctgtacttgcctcggccgccagccgatcccgcccgatacccccgctacctggcgctactggagactctaacccgagacctgggccccacgctgctggttcatggggtcactccagtcacctgcactgatctgtgatgcccctgcctccagggctaggtagagagggcccaggcaggcggcctatcctgatccttggaggaggaggaagaggaggccactgtggcccgtggccctgcccttgggacgtggagcccaggggaggtttgaaggggatcctgggcttgggcatcacgcccacctcctttggcagagggaccccagcacactaactctgggtggctgtccccaccgtgcaggggagggagtccgcagcctcccttcactggtgccttgatgctaggggccaggcctcctctgtgactctgggctacctcagtttccccattttggccagactcaccggcccactggggtggtgatgttttcgttctgttttatttttctaactctgctgaccatgaataaaagaccaaaacactacaaaaaaaaaaaaaag

SEQ ID NO: 117736 - DNA, 1000 bp, Homo Sapiens
tgctccctcacaacatcccgtccagcctgagcctgctcaccagcatggtggatgacatgtggcattacgctggggaccagtccactgattttaactggtacacccgccgagccatgctggctgccatctacaacacaacagagctggtgatgatgcaggactcctctccagactttgaggacacttggcgcttcctggaaaaccgggttaatgatgcaatgaacatgggccacactgccaagcaggtaaagtccacaggagaggcactggtgcaaggactcatgggtgcagcagtgacgctcaagaacttgacaggtctaaaccagcgtcggtgagaggaaggggtataagctacaatgcctagaagagaatgagcggacagattgaaagagctttgaaaagtataaggtgccatccacataacctggtgttcacgagaacacactaaaggactcctgagtcactaccacagccacctggaaaccacaaggcatttgatgctaccgttctggtcagggattgggctgcttcttcagttcctaataccagaccaagcctcctgatgcctttctgcactgcaactgtgtgattgaaaaatgagatgttcatccaagcagtcaagccacagaaacccagcatgtccctgtcacaatctcatgggcaccttgatcatgtcttaaccttcccttaaccttggggctcccaagccagagtcaaggtctgacgccacctcaaggtgacagctcatctccagcacagcacaggcgtgtgcacacagaggtgttccttgcagccccctccctctcaggtgtcctgagatgctgctcctgggagccccctcagaaaactgcctcacctgagacaagtgcctgctggacagaggtgtgattccaggcctggtgtcacatgacaccagcatgcattgcaggattattagtgtattttgagtctgtaaaaataataaatatgtttgaagtaaaaaaaaaaaaaaaaaaaaaaa

SEQ ID NO: 117737 - DNA, 1000 bp, Homo Sapiens
aggttcctgacatgggacccatctgctcctccagccaactcctgtccctcacatcccaccatggtggctcctcccacctcctctggatttgttcactctgagatctgtttgcagagtgggtgcttagcagacagagtgaagctggctggggggcacagtggtgtgtagtgctgctgtgtatcaaaagaccaaggtattatgggacctggtttcagaatgggatgggtttcttcacctcatgttaagagaagggagtgtgtcctgaagaagcccttcttctgatgttaaaatgctgaccagaacgctcttgagcccaggcatcgttgagcattaacactctgtgacagagctgcagacccctgccttgagtctcatctcagcaatgctgccaccctcttgtctttcagagttgttagtttactccattctttgtgacacgagtcaagtggctcacaacctcctcagggcaccagaggactcactcactggttgctgtgatgatatccagtgtccctctgcccccttccatccccaaccacatttgactgtagcattgcatctgtgtcctgttgtcatttatgttaaccttcaggtattaaacttgctgcatatcttgacatatcttgagattctgcatgtcttgtaaagagaggggatgtgcatttgtgtgtgatgttggatagtcatccacgctcagtttggaccattggaggaacttagtgtcacgcacaaatggggctattcctacgcttagaatagggcttgtctgcccactttagaagagtccaggttggtgagcatttagagggaagcagggcagaactctgaacgacaatacgtctctctgagcagagacccctttgttcttgttatccacccatatggacttggaatcaatcttgccaaatatttggagagattgtgtggatttaagagacctggatttttatattttaccagtaaataaaagttttcattgatatctgtccttgaaacttga

SEQ ID NO: 117738 - DNA, 1000 bp, Homo Sapiens
gactccaagttcctggcagaaaacaacaagctgtgtgagacggtgatggctcagatcctagagcatctgaaaaccctggccaaggacgaggccctgaagcgccagagctcgttgggcctttccttctttaacagcatcttggcccatggggacctacgcaacaacaagctcaaccagctctccgtcaacctgtggcacctggcacagaggcacggctgtgcagacaccaggaccatggtgaaaacgctagaatacatcaagaagcaaagcaaacaaccagacatgactcatctgacggagctggccctcagactccctctgcaaacaaggacctgacccccgggcccatccccaggctcagggactctggtgccaaatccagaaagatctgctctgctgccctgaactcttacggcaatttaggtttctcatttttcttttctttttacatatgtacaaattgttttaagctttggcctctatccaggttattctgacaatgaagaaatgggagttgtcagagcattaaaatgcaatcttcactaagaagcagtctctgtgttgtctttgcacaagtggccttcggtctactcagcccgatctgatgggcctttttagcaagagagaaacaagaatgcaagtaacatctttcttctctggaaggtgtttgttttttcatagtttagaaataaggactttaaaagtggactgcttttcaaagtgccactgttccagacccattccattccagactttgtaccttaaagttagagcacacccaaagtctggaactgtgttacctgaacccctatggaggatttataaaaggcagaaatagcactccattaactctttttcctatcaaaagcagctcttgattggacttagaatctgtgttggtggatcaaaggagaaagcgaggtcaaatttgagattctctgtggcttcagtatacagtaactgaataaatgtcctgaaggagaaaaaaaaaaaaaaaaaa

SEQ ID NO: 117739 - DNA, 1000 bp, Homo Sapiens
ctcgcggtcatactcgcggagccggtcgcgatcccgcagccgccgttaccgagagaggcgctacgggttcaccaggagatactaccggtctccttcgcggtaccggtcccggtcccgtagcaggtcgcgctctcggggaaggtcgtactgcggaagggcgtacgcgatcgcgcggggacagcgctactacggctttggtcgcacagtgtacccggaggagcacagcagatggagggacagatccaggacgaggtcgcggagcagaaccccctttcgcttaagtgaaaaagatcgaatggagctgttagaaatagcaaaaaccaatgcagcgaaagctctaggaacaaccaacattgacttgccagctagtctcagaactgttccttcagccaaagaaacaagccgtggaataggtgtatcaagtaatggtgcaaagcctgaactgtcggaaaaggtaacagaagatggaactcgaaatcccaatgaaaaacctacccagcaaagaagcatagcttttagctctaataattctgtagcaaagccaatacaaaaatcagctaaagctgccacagaagaggcatcttcaagatcaccaaaaatagatcagaaaaaaagtccatatggactgtggatacctatctaaaagaagaaaactgatggctaagtttgcatgaaaactgcactttattgcaagttagtgtttctagcattatcccatccctttgagccattcaggggtacttgtgcatttaaaaaccaacacaaaaagatgtaaatacttaacactcaaatattaacattttaggtttctcttgcagatatgagagatagcacagatggaccaaaggttatgcacaggtgggagtcttttgtatatagttgtaaatattgtcttggttatgtaaaaatgaaattttttagacacagtaattgaactgtattcctgttttgtatatttaataaatttcttgttttcattcttaaaaaaaaaaaaaaaaaa

SEQ ID NO: 117740 - DNA, 1000 bp, Homo Sapiens
cgtgcagcaggaggaatatctacctgtgtggagggacaatgaggagaccccgtttgaggtggggatccgagtgcagatccacagccaggaggagccgcccatcatcgatcagctgggcttgggggtgtccccgggctaccagacctttgtttcttgccagcagcagcagctgagcttcctgccaccgccctggggcgattgcagttcagcatctctgaaccccaactatgagccagagccctctgatcccctaggctcccccagccccagccccagccctccctatacccttatggggtgtcgcctggcctgcgaaacccgctacgtggctcggaagtgcggctgccgaatggtgtacatgccaggcgacgtgccagtgtgcagcccccagcagtacaagaactgtgcccacccggccatagatgccatgcttcgcaaggactcgtgcgcctgccccaacccgtgcgccagcacgcgctacgccaaggagctctccatggtgcggatcccgagccgcgccgccgcgcgcttcctggcccggaagctcaaccgcagcgaggcctacatcgcggagaacgtgctggccctggacatcttctttgaggccctcaactatgagaccgtggagcagaagaaggcctatgagatgtcagagctgcttggtgacattgggggccagatggggctgttcatcggggccagcctgctcaccatcctcgagatcctagactacctctgtgaggtgttccgagacaaggtcctgggatatttctggaaccgacagcactcccaaaggcactccagcaccaatctgacctcccacccctccctgtgccgtcaccaagactctctccgcctcccaccgcacctgctaccttgtcacacagctctagacctgctgtctgtgtcctcggagccccgccctgacatcctggacatgcctagcctgcacgtagcttttccgtcttcaccccaaataaagtcctaatgcatcaaaaaa

SEQ ID NO: 117741 - DNA, 1000 bp, Homo Sapiens
ccatcatgcgctggatctgctcattctcctgctgtgggggtatgcccacctcttacccccttgacaccatagggctgctgtggctgggcctcaccagcactgtcttttgtgtgactcatggcatcctcgttcatccccaccgtgcctagcaggccttccttttcaccacctcggaacgcttgcctttcctccctccacaacaggacgctgtgcctcagtccttcacctacctcgccactctgccactgtccccattggtcctttctcctaaactggtctttgtgctctctttgttttttcttatttccctcttgtctctcattttttcttcccattcccctcccatttcagcccttaacttttctctttcccatctccactcagtattccaatggcaaaccctgatgatgtaacacctgcgatgagacatcggactctccggaactttctcatctgacacgtctttttcccagggttcgtacttctcctccattggtcccaggctaactcccctgttcctctgtggtgtctgtcagtccgtctgtcttctctttcctctgcccttcccacagggcagtatctgctgatggattcagtcctggtgtgtgattgttgtgatttgttcttccgtgcgcaaaaggaagagggctttttgagtcccttccaagtgagattgtaaatgtagaattttccactgttggatctagattttttttccttttttttgggggggtggggttacagagctgagaccttgtgcatgcatgtagaaaattgtaaaatgtaaattttttttaatatataaaaagcttgtttctacagtttgcagtggatctaaacattacggcaattttaggatttttttcttaaacataggaactaaaactgtacaaattttttttatataaaataaagacatttgacttttgtgggaaaaaaaaaaaaaaaaaaaaaaaaaaaaaaaaaaaaaaaaaaaaaaaaaaaaaaaaaaaaaaaaaaa

SEQ ID NO: 117742 - DNA, 1000 bp, Homo Sapiens
attggtaggaagagaacctattggaaaaatacgattttcaaaagtaagtattcctcgggatgtttttatataaattatgttttggaatagaacataaatgactttgagttaggataaggatgataggatgggtgctggagatgccctgccttgcttatttgtttctgtgggggatttaatactataaatgaaaatggcttctgctccattaaaaagtaaaaattgtcctccaaatataaaactccttaatagatatttttgaaattaaaatctttaaattttataaatcagctgttgccactacacaactatgatggcatgtgcttataacatttttataacattccgtctgtgtctattccctaaatatcatgagtttataataaggaaagtgataaaaatacagtaatgaaataaaaatctgaatgtttctaagaaaggttttggaaggaaaaatgacctgaaatcagtgcgtactgcaaagtacagccaataatttttgttctttgttttcacccccaccctcactggaattctcaccaaaaatagtttgatacttaaaaaacagaagtaaatacttttctcaatattgttttggctatgcaaatatttgttttgcttaatgtcctccatttacacttctcagcaaatgtagttgcaaacaaatgctttctttttatttttcccttggtttgaggtatgtaaatagccaaaaatgtacattgaatttcacattgtaaaagttttattttatcccttgtatgatattactcaaaaaatccctgtgtatatgaaagtgcataataaatatatttgctttacagagaagatcttgttttaattttgtccttgaaccagtagaacatgcatgatatgcatatagcataaacaactgttagttgttttaagttattatcttaaataaatcctgagcaaatgaatttggaaacattttgcaaagaagaaagtgaaatataacactgtccaaaggaaggtagaa

SEQ ID NO: 117743 - DNA, 1000 bp, Homo Sapiens
atctgaagaggaaaaggcttcatttccttcccaggatcagatggcatctcctgaggttcccattgaagctggccagtatcgatctaagagaaaacctcctcatgggggagaaagaaaggagaaggagcaccaggttgtgagctactcaagaagaaaacatggcaaaagaataggtgttcaaggaaagaatagaatggagtatcttagccttaacatcttaaatggaaatacaccacagcaggtgaattacactgagtggaagttctcagagactaacagcttcataggtgatggctttaaaaatcagcacgaggaagaggaaatgacattatcccattcagcactgaaacagaaggaacctctacatcctgtaaatgacaaagaatcctctgaacaaggttctgaagtcagtgaagcacaaactaccgacagtgatgatgtcatagtgccacccatgtctcagaaatatcctaaggcagattcagagaagatgtgcattgaaattgtctccctggccttctacccagaggcagaagtgatgtctgatgagaacataaaacaggtgtatgtggagtacaaattctacgacctacccttgtcggagacagagactccagtgtccctaaggaagcctagggcaggagaagaaatccactttcactttagcaaggtaatagacctggacccacaggagcagcaaggccgaaggcggtttctgttcgacatgctgaatggacaagatcctgatcaaggacatttaaagtttacagtggtaagtgatcctctggatgaagaaaagaaagaatgtgaagaagtgggatatgcatatcttcaactgtggcagatcctggagtcaggaagagatattctagagcaagagctagacattgttagccctgaagatctggctaccccaataggaaggctgaaggtttcccttcaagcagctgctgtcctccatgctatttacaaggagatgactgaagatttgttttcatga

SEQ ID NO: 117744 - DNA, 1000 bp, Homo Sapiens
cggcaccgcagccctggcctgtgtcttcctgggggtcaccgtggaccgatttggccgccggggcatccttcttctctccatgacccttaccggcattgcttccctggtcctgctgggcctgtgggattgtgagcatcctatcttccccacagtgtgggctcaacaagggaaccccaacagagatctgaacgaggctgccatcaccactttctctgtccttgggctcttctcctcccaagctgccgccatcctcagcaccctccttgctgctgaggtcatccccaccactgtccggggccgtggcctgggcctgatcatggctctaggggcgcttggaggactgagcggcccggcccagcgcctccacatgggccatggagccttcctgcagcacgtggtgctggcggcctgcgccctcctctgcattctcagcattatgctgctgccggagaccaagcgcaagctcctgcccgaggtgctccgggacggggagctgtgtcgccggccttccctgctgcggcagccaccccctacccgctgtgaccacgtcccgctgcttgccacccccaaccctgccctctgagcggcctctgagtaccctggcgggaggctggcccacacagaaaggtggcaagaagatcgggaagactgagtagggaaggcagggctgcccagaagtctcagaggcacctcacgccagccatcgcggagagctcagagggccgtccccaccctgcctcctccctgctgctttgcattcacttccttggccagagtcaggggacagggagagagctccacactgtaaccactgggtctgggctccatcctgcgcccaaagacatccacccagacctcattatttcttgctctatcattctgtttcaataaagacatttggaataaacgagcaaaaaaaaaaaaaaaaaaaaaaaaaaaaaaaaaaaaaaaaaaaaaaaaaaaaaaaaaaaaaaaaaaaaaaaaaaaaaaaaaaaaaaaa

SEQ ID NO: 117745 - DNA, 1000 bp, Homo Sapiens
caatgaggccctgctggaggcctgcgtggagcccacggacctgctgaccaccctctccaacatgctgcctgtgcgtctggccacggccatgatggtgccctacacgctgccgctggagagcgctctgtccttcaccatccgcttgctggagtggctgcccgacgttcccgaggacatccggtggatgaaggagcagacgggcagcatctgccagtacctggtgatgcgcgccaagaggaagctgggcaggcacctgccctccaggctgccggagcaggtggagctgcgccgcgtccagtcgctgccgtccgtgccgctgtcctgcgccgcctacagagaggcactgcccggctggatgcgcaacaacctctcgctgggggacgcgctggccaagtgggaggagtgccagcgccagctgctgctcggcctcttctgcaccaacgtggccttcccgcccgaagctctgcgcatgcgcgcacccgccgacccggctcccgcccccgcggacccagcatccccgcagcaccagctggccgggcctgcccccttgctgagcacccctgctcccgaggcccggcccgtgatcggggccctggggctgtgagaccccgaccctctcgaggaaccctgcctgagacgcctccattaccactgcgcagtgagatgaggggactcacagttgccaagaggggtctttgccgtgggccccctcgccagccactcaccagctgcatgcactgagaggggaggtttccacacccctcccctgggccgctgaggccccgcgcacctgtgccttaatcttccctcccctgtgctgcccgagcacctcccccgcccctttactcctgagaactttgcagctgcccttccctccccgtttttcatggcctgctgaaatatgtgtgtgaagaattatttattttcgccaaagcacatgtaataaatgctgcagcccaaaaaaaaaaaaaaaaaaaaaaaaaaaaaaaaaaaaaaaaaa

SEQ ID NO: 117746 - DNA, 1000 bp, Homo Sapiens
atggggctcgctgcctccgccgggtggcctggggggcccctgggtggccgtgcggggctccggtgacgtgtgtggggtcctggctctggcccctggcacaaatgcaggggacggggcccgggtcacccgcctgtctgtctctcgctggcaccgccgccggggcgtgggcaggaggctgctggccttcgcggaggcccgggctcgggcctgggctgggggcatgggggagccccgggcccggctcgtggtccccgtggctgtggccgcctggggggtgggagggatgctggagggctgtggctaccaggccgaggggggctggggctgcctgggctacacgctggtgagggaattcagcaaagacctgtgaagctacagactgacagccagggcaggggaggagggaggggcgccagcacctgatgatcgcctactgtctgcgggttcttttacctgctctccctcagtgagtcctcaaccaccctgggcccagaaacagaggcctgccgaggggaggagcctggcctctgtccacccgtcagcagtgtgaagtctgtagtgtttgagcttctcagagtggaatgactccttttccttcctggccctcgggggcctctcgaggtcagcctctccaacccctacctcagctcctgtctgcactgagaaacctccccgggtgatgtctgcaaagtctgtgctgtccgtgccccaggctgggagagctatctggggagggggagaggaggccgagcagaatacaccccagagttagggtttgcgactccgcctccctgggacctggattgggtcagatgcctgtccttggaggggacaaggttgactgcttaggaggcgcgacgcacagggctgccaggcctggcccctctctgggaaggttgagagctgagacgggcagccctgtcccttcctccagatccgtctggttttttacaccgtttgttaataaagcctgaaaccgctgaaaaaaaaaaaaaaaaaa

SEQ ID NO: 117747 - DNA, 1000 bp, Homo Sapiens
acagcctacgagaaggaatgcttcacatatgtcctcaagggccacatagctgtgagtgcagccgttttcccgactggaaccaaaggtcaccttcttgactcctttgcccgttcagctttatgggattcaggcctagattacttgcacgggactggacatggtgttgggtcttttttgaatgtccatgagggtccttgcggcatcagttacaaaacattctctgatgagcccttggaggcaggcatgattgtcactgatgagcccgggtactatgaagatggggcttttggaattcgcattgagaatgttgtccttgtggttcctgtgaagaccaagtataattttaataaccggggaagcctgacctttgaacctctaacattggttccaattcagaccaaaatgatagatgtggattctcttacagacaaagagtgcgactggctcaacaattaccacctgacctgcagggatgtgattgggaaggaattgcagaaacagggccgccaggaagctctcgagtggctcatcagagagacgcaacccatctccaaacagcattaataaatacctccccggttttgtttttgtaaaatgctctggaggaaggaagaaacgtggcagatccctgacatctttcccctttcctttccttcttccctacctcccctttttactttagactttaagaagaacagaaaatcttcttatcctctttgatattttattgcaaacactcagtcttttatgattttttaattgttgagaacaagccaagaataaaattgctgcaccagaaggagggtccctccaaagttgaacacttggtgaaaggaagatgccccgacttctttggccagtgatggggaatcagtgagtgctccatgatggtcatgttccaggtgctagtacatcattcatgatcaccttaatgctcatgagactatatttatgatcagtgaataaaaatgtcagaactgtgaaaaaaaaaaaaaaaaaa

SEQ ID NO: 117748 - DNA, 1000 bp, Homo Sapiens
agcaatgaggctgtacgtcatggtgaagaaggagtgggagagcatggcccgagacaggcgccccctgctgactgctccagaccactgcagtgacgacgcctagcagtcctgccctgctgctgctgccgccccgctacagaggcaatgtgaccagtcacagggacagatcacatctccccagagtggcaactctggtgaaaccttttcagaatcatggcagaggggcgtggcgtggtgctactgagaaggtcctccttcctcttgactttgtggtctgaaacctggtcttactgtccatgtgtgtttgggcccggatggtcagggtggggagcagggacggccatgggcacgcctggccacgctttaccgactgctgaccccctgggccaggtgaggttggggcctgtgggccgccagtccatacggtgctgtcactgcccatcttcggtgacaccctggggtgaggtgctcagcaccttcctctcgaggagccacattttcctcctttgtgttaggggacataacaagctctgctgggcttgagggacccagaccaggtgtctgcagtcagctcctgagacacagctggccggcacaacaggtgttacatcaggggtttcctgtggccgtttgaactttgagcatttatctaaattaaattggcccagggttggctggtgggtcacccagcagaggcttctccccatagcacgaggatgtgttgcctgggcacggtgactgcggttattcctggaggtcggcagacatgccaaccttgggctatttgagctggagaagctatgtgatgctagccggtggctttctgggctaggccccagtttgaggctcccctgggaactagagccaggaacagccagtggcactgacaaggggacggagtccaaggcgttattgggccacctgacagctggacagaaaaggggcagacacaccgaggatgcgatttaaaataaatgcagatgtttacttggaaaaaaaa

SEQ ID NO: 117749 - DNA, 1000 bp, Homo Sapiens
gcatctggcaatcaattagtagaatgtcaggagtgccataatctctaccaccgagattgtcataaaccccaggtgacagacaaggaagcgaatgaccctcgcctggtgtggtattgtgcccgatgtaccagacaaatgaaaagaatggctcaaaaaactcagaaaccaccgcagaaaccagcccctgcagttgtttctgtaactccagctgtcaaagatccattggttaagaaaccagaaactaaactgaaacaagagacaacttttctagcgtttaagagaacagaagtcaagacatccacagttatttcaggaaattcttctagtgccagcgtttcctcgtcagtaactagtggcttaactggatgggcagcttttgcagccaaaacttcctctgctggtccttcaacagcaaaattgagttcaacaacacaaaacaatactgggaaacctgctacttcgtcagctaaccagaaacctgtgggtttgactggtctggcaacatcatccaaaggtggaataggttccaaaataggttccaataacagcactacgcccactgtacctttaaaaccacctccacctctaaccttgggtaaaactggccttagtcgctcagttagttgtgacaatgtcagcaaagtaggtcttcctagtccaagtagtttagttccaggaagcagcagccaactaagtgggaatggaaatagtggaacatcaggacctagtggaagtactaccagcaaaactacttcagaatccagcagctctccctcagcatcccttaaaggcccaacttcacaagaatcacagctcaatgctatgaagcgattacagatggtcaagaagaaagctgcccaaaagaaactcaagaagtaatgtggccaagtaggtttttgtatcatattagcctaaagatgaaaggcttattattatgatataatctgtaatacactgtaatttaataaaagtcttcataatcaaaaaaaaaaaaaaaaaa

SEQ ID NO: 117750 - DNA, 1000 bp, Homo Sapiens
gtggcggccagggaccaccttcagcatccactctctgtttgagatgggggctcccaaaaccagcttacaatagccttttgcgctgcctgtcctgtgggagctgataaaccaagtcacatttgcattctgttgcaggcttagtgaaaaaggactgctgtctttccttggttcaagtgttagaatggagagctggagttcgttcagaatagtgctgtgtgttaccacgtctcccctgcaccccattcctaccttgtagctcatgaccattgtgtatagcatttctacactttgtttcttggtccttggcaataaaaagaatgatctccctgagcctttgaccccagataaacccctcccaattaatgcattttcatttcctactgatacaaggcctggagagggctgttgggggccctcagggagggttcaactctgagacgagaactgccttggtgaaggcaagttcaagcaccacttgagactgggggcagcatggagtagggcagggctacggggatacacggtgcaccctgcaacttatacctgagcccagtacaacaaaggtgacgggtgtgtaggtacacacccagagatggagcactgcagatcagcaacctcagccccacctgggaatttgctggaaatgcaggctcaagcccctccccacacctggtgaatgagagagccccagcctgacccaagcccagggcgactcccataccctgaagcctggggcatgctgggcagcaccggtgcccaaatctggctggtggacagaagcacctggagagttggagagctttttaaaaagacatctctcagcacttccctctctgcagattctgactcagtaagtgaggggtgaggcacagtcatttttctctattctgaagctctcccactgttttcaatgtttaaccaactggggacccctgctctttaagtatattacaggtaataaagatattgtttgtatgcttttaaaaaaaaaaaaaaaaaa

SEQ ID NO: 117751 - DNA, 1000 bp, Homo Sapiens
gaagcagaggctcagaaacctggagcagtttgcccgtctggaagactgtgttctcttggcaacagatgtggcagctcggggtctggatattcctaaagtccagcatgtcatccattaccaggtcccacgtacctcggagatttatgtccaccgaagtggtcgaactgctcgagctaccaatgaaggcctcagtctgatgctcattgggcctgaggatgtgatcaactttaagaagatttacaaaacgctcaagaaagatgaggatatcccactgttccccgtgcagacaaaatacatggatgtggtcaaggagcgaatccgtttagctcgacagattgagaaatctgagtatcggaacttccaggcttgcctgcacaactcttggattgagcaggcagcagctgccctggagattgagctggaagaagacatgtataagggaggaaaagctgaccagcaagaagaacgtcggagacaaaagcagatgaaggttctgaagaaggagctgcgccacctgctgtcccagccactgtttacggagagccagaaaaccaagtatcccactcagtctggcaagccgcccctgcttgtgtctgccccaagtaagagcgagtctgctttgagctgtctctccaagcagaagaagaagaagacaaagaagccgaaggagccacagccggaacagccacagccaagtacaagtgcaaattaactggtcaagtgtgtcagtgactgcacattggtttctgttctctggctatttgcaaaacctctcccacccttgtgtttcactccaccaccaaccccaggtaaaaaagtctccctctcttccactcacacccatagcgggagagacctcatgcagatttgcattgttttggagtaagaattcaatgcagcagcttaatttttctgtattgcagtgtttataggcttcttgtgtgttaaacttgatttcataaattaaaaacaatggtcagaaaaaaaaaaaaaaaaaaaa

SEQ ID NO: 117752 - DNA, 1000 bp, Homo Sapiens
cccttgggattatggcttagaagaagggggctgggtaggcaagcactccttggctgtgtcctctcgctttttcacttacttgtaggatcccgcagcagccaatttagggattgtgttgttcttgtgttggttcccatgtaaagaagcagcagagaaatgcgatggttcaacagctcgccctgccccaagtatgcagacttgaccttggcggggtcctgggcttctagagtctagcccgttgaccccaaagcctcagggcttatgtccaacggtcccattgggagcaacagtgattgtttatagttttttgttttcagaaatgagggcagctgttaattttttcactcatgtgaaacaaaatgaaaaaaaaaatccaaaacagaacaagcccttctgtggtatttgctttttatcagaaagaacagcaacatttggcctctccaagttggaaaatagagtccaaatgtaactttgtggccaagagtattttcaaaaaagtctaaaggtgtagtttccactgtaactgttgagtactgttaagtactgttaatcttttacatatttgcacttggtactgttgtattgttctaaagagcttgtcctttaagtaatttctttctttttttttttttttttttttgtgacggagtttccctcttgttgcccaggctggagtgcaacggtgcagtctcggctcactgcaacctccaactcccaggttcaagtgagtctcgtgcctcagcctcccaagtagctgggattacaggcacccgccaccgtgcccggctagtttttttttgtattttttttagtacagatggggtttcaccatgttggtcaggctagtctcaaactcctgacctcaggtgctccacctgccttggcctcccaaagtgctgggattacaggcgtgagccactgtgcccagcctaagccatttcttaaaataaaaatgctaaaggactagtaagtaaaaataaaacttcctatgggatttccc

SEQ ID NO: 117753 - DNA, 1000 bp, Homo Sapiens
cttaccccactccgaggccggggacttcgaagccaagagaaactgaggaaactttccaaaccagtatatctcagatctcatgatgaagtttcctaatctagaggaaagtttatttctgcaaatgatgagccaactagttattgaatgtaaaccagatggcaaaacacttcttgattaggggcaaaaattcaaatgtcttcttaaaacctccacaattgattctccccctgtgatgtaaacttagatatccctagagtttctcagcatctttcttcctgagtggatggcattatccctagaggtcatggaccttacatcctcactgcagtcacctttggaaacaagaccgaggcctgtagaaggaaagcggaaggatgtaagagctgttcatgggaattccattcaccacacatgccagctgatgcaaagaaatttgccagtcactggaagttactgtggctactataaaactatgtaccactctcagaatattcttaggcttttttttttttcaagttatagatttgcttaaagtgaggttttttggtgtgtgcttttttgttgtcttttgacccttccagtttccagacaaacttgtcttaaaaagtgcatcattggattgaccatggtttttcatgaaattttatgagatttctgccttaacaaaatgcatatattccttatcttaaagcctgtcattacttaggatgcacttataggatctgaaaagctcactttaaactcatactacattcgttacgagtattttacgttaacataattgaaaagtacaaggtccaagctggctttcaaattatgtctaaacagaaatgggacaaatagacttgaaaatagaagggatttattccacccctgcaagggtagagtcaggtgagagtcccttggtgagtcatttgtacatcagtgtcatttcttcttaacctctgaagaagatgggcatcagaaataaagacaaagcactatcaaaaaaaaaaaaaaa

SEQ ID NO: 117754 - DNA, 1000 bp, Homo Sapiens
gcttggagttttcatggctgcccctccagactgcgagaaacaagtaaaaacccattggggcctcttgatgtctgggatggcacgtggcccgacctccacaagctccctcatgcttcctgtcccccgcttacacgacaacgggccagaccacgggaaggacggtgtttgtgtctgagggagctgctggccacagtgaacacccacgtttattcctgcctgctccggccaggactgaaccccttctccacacctgaacagttggctcaagggccaccagaagcatttctttattattattattttttaacctggacatgcattaaagggtctattagctttctttccgtctgtctcaacagctgagatggggccgccaaggagtgccttccttttgctccctcctagctgggagtgacgggtgggagtgtgtgtgcccaggtgggggtgtctcctggctgggaaggagggaaagggagggagagttttgcgggggttggcagtggagagcaggctggagaggagatggctaatagctgtttaatggaaacctgctgggctggagggagttaggctgaatttcccgacttcctctgccagttattgacacagctctctttgtaagagaggaaagaaactaaacccacccaagggatgatttcagggggagaggtggagggcagatgtcctgggcaaaccgggcccctctgcccacacacctcacttgatccttttgccaaacttgtcaaactcaggggaactggcttcccagttgcccctttgccatattccaagtccccctcagacttcatgtctctgctcatcagcactgtcccaggatcctggagagggagaacccctggccccaggggaaagaggggggggtctcccgtttcctgtgcctgcaccagccctgcccccattgcgtctgcacacccctgcgtgtaactgcattccaaccactaataaagtgcctattgtacaggtaaaaaaaaaaaaaaaa

SEQ ID NO: 117755 - DNA, 1000 bp, Homo Sapiens
atgatgtggaagtgctggaacggaacttccagaccatcctgtgtgagtttgagaccctctacaaagctttctcaaactgcagcctcccgcaaggatggaaaatgaacagcacccccagcggggagtggttcaccttttacttggtcaatcagggggtttgtgttcccaggaactgtaggaagtgcccacggacgtaccgcttgctcggaagccttcggacctgtattgggaacaatgtttttgggaacgcgtgcatctctgtgctgagccctgggactgtgataacggagcactatggacccaccaacatccgcatccgatgccatttaggtctgaaaactccaaatggctgtgagctggtggtggggggagagccccagtgctgggcagaagggcgctgccttctctttgatgactctttcctgcatgctgcgttccatgaaggttcagcagaggatggcccacgggtggttttcatggtggatttgtggcatccaaacgtcgcagcggccgaacggcaggctcttgatttcatctttgctccgggacgatgagagtatttcccatgctggagtcggcgagaagggccgaggcggggcctgggcagactgtggtccggtccagtccctaccggtgttgtttccatgctcagaaacctgcctcagcggaaagctcttatttgggattttatatcatgtcgggtccctctttcccttggttattgtaaatggaaacttttcggcttgtatttccttagattttttttttttccttccaatcatttgcttcagagactcctttctggcctaacagcgcattcctttgattggtccttgagtgaccagagacttagtgcccttgtaagtctgtcttctgttgctacttgtttttttcagtgctctgaaatagagtaactaaatggttatttgtctgaatataataatgtaaaacttaaaaaaaaaaaaaaaaaaaaaaaaaaaaaaaaaaaaaaaaaaaaaaa

SEQ ID NO: 117756 - DNA, 1000 bp, Homo Sapiens
agactggagtctgtctcattatgtgattcctggagcctgtgcctatgtcactgcaattttcaggagacatattcaactcctctgctcttccaaacctggtgtctatccggcagagggaggaaggcagagcaagtggagcagggcttagcaggagcagtttctggccagaagcaccagcctgctgccagcggggcagcccctcataggaggcccaggagggagccccaaggcgtagaagccttgttgaagctgtgagcaggagaagcggtgcccaccagcttccaggtctccctgacctgcctgctctatgccccacaccctacgtgccgtggctctgtgcagtgtacgtagatagctctcgcctgggtctgtgctgtttgtcgtgaaaagcttaatgggctggccaggctgtgtcaccttctccaagcaaagccatatggagcatctacccagactcccactctgcacacactcactcccacctctcaagcctccaacctcttggccagattgggctcattaatgtcgttgcctgcccatctgcatgaatgacaggcagctccccatggtggtctgcctgtgagctcttcaagttctaatccttaactccaggattagctcccaagtgcgctgagacccagccagcacacttctggcccttctccctgcctcaatctaaaagcagtgccacaccctccaaagtggaatagaaagaagttcatgagtaagggctgcaaggaattcttatcctggccacatgtcctccgtgcacacacccaatggagttaaccttggaagttgactattttaatgtctgccaggagttctaatcctgcctctgttcccttttctctccttgaaagtccagcacaccattcttgtccttccccagtttcctcgccctccacccctccagcttcatgctcagtgttgtgcttaataaaatggacatatttttctctaaaaaaaaaaaaaaaaaaaaaaaaaaaaaaaaaaaaaa

SEQ ID NO: 117757 - DNA, 1000 bp, Homo Sapiens
gcttcacaacctctgtgacgtctacctggaggctgtgaagcccgtgctgtggcactcgccccgccccctggggccccctcaggtcctgttctcctgcgctgacctcggcctccgcctcctggccccactgatgcccttcctggctgaagagctctggcagaggctgccccccaggcctggttgcccccctgcccccagcatctcggttgccccctaccccagcgcctgcagcttggagcactggcgccagccagagctggagcggcgcttctcccgggtccaagaggtcgtgcaggtgctaagggctctccgagccacgtaccagctcaccaaagcccggccccgagtgctgctgcagagctcagagcctggggaccagggcctcttcgaggccttcttggagcccctgggcaccctgggctactgtggggctgtgggcctgttacccccaggcgcagcagctccctccggctgggcccaggctccactcagtgacacggctcaagtctacatggagctgcagggcctggtggacccgcagatccagctacctctgttagccgcccgaaggtacaagttgcagaagcagcttgatagcctcacagccaggaccccatcagaaggggaggcagggactcagaggcaacaaaagctttcttccctccagctggaattgtcaaaactggacaaggcagcctctcacctccagcagctgatggatgagcctccagccccagggagcccggagctctaactcatcatccccatcagttttcctccctctcagacctgtctttgaggacaaacagatttgtcagctgtcagggtgcagtgggacgtcagagactatgtggtccatcgccttcattgtgtaaatgaggacacagactggcttggtcgcagtgactgtggtgtccttgagatgctcacattactgcccggcctgcctcccacctggaagtctgggaatgaggagattgagataaacttttgaaatccc

SEQ ID NO: 117758 - DNA, 1000 bp, Homo Sapiens
ctgagaaggccatagtaataaaatgatcttatgaacactgttccccaaaggccaaagcctgaagatattgccccttataatccaatcagccttatattttaataagtcctgaatcaacctgactacggatatatggggccaccagggtgcatgggtgcatgtctgctcagcctagccctggaagtgagcactgccggccacagatcctgggaaaggtggtagtaacccagaagatgtagccttgaagggaggatacctatcaaaatgccaaagctgcagggacacgaagacggttgaaaattcaacctatgtatactagatccttccagtttgatggtttggtcattcttcttcatgattataccatggagaattttctgtgacaagggtggtcatggaagtaagtgagtgatcccctggtttctcattccttaaagcagtggttcgcaaagtatggcacaagaccagcagcatcagcagcctttgggaacttgttagaaacgaaaattctcaatcccatcccagatctgctgaatcagaaactctaatgagaggacccggcaatccacgttttaataagccctcctggtgattctgatgcacactaaattcaactgttttaaagggaaagccctttatagtattggagttcccacactgagaggctttggggcccaaaataagaaggttctaggttgtcattcagactttaacattaatttcaaagtcacctttctcatgcttccttgtgtttctgtttttccatttatgattttaacaaagaaaggtatgtgtgcttttgggtggaagttaggagaatgtttgtgtctttcctagttgaatacaaccttcagagaaaaaccttatgccttggaaattactacctggcacacaaaggggcttcaacaaggaaaagcagttggaggtctcttccagattgctcttctgccgaattatttgtatctattccgagctgattatgtaataggatggaaaaagt

SEQ ID NO: 117759 - DNA, 1000 bp, Homo Sapiens
tctgtcacccaggctggagtgctatggctcgatcttggctcactgcaacctccacctcccaggttcaagcaattctcttgcctcagcctcccgagtagctgggattacaggtgcatgccaccatggctggctaatttttgtatttttagtagagatggggtttcaccatattggtcaggctgatctggaacttctgacctcaggtgatccacctgcctcagcctcccaaagtgctgggattacaggcgtgagcaatcgtgcccagccttgttcttaattttgtatcatccagtcatcgctaatattacacgcaccttctcacttaatcctcacgacaagcctgtgaggcagatgctcattgttcccatcttgatgaaacttgagtctcagggaagtgaagtgacttgcccagggtcactcaggtagagttgagattcaaacccacatgtggctccaaagtctgcatctggatttgggggtgttttttggcatggcaccctcacctctctccctgcctgttttccccaaagtggaaaggaaggcctttcaaaccagagtgtctcactcccctctgacctccagaccagatggggcatgagccagccagctcagccaggctccctgtgtcctgggaggaagtgtccccatcccccatgccccttatggggagggagggcgtctgatgctctctctctgcctccccccccatcctgtcaggcacaggtgacgggggcagcccatgcgagcccttctcctgctgctctgggagggccagttccacattgagccagcctggtcccatggaaaatgatggcctgggctttctgaggccttatctgatgcctctgcagttcatgtcccccaccaggcctcgaggctcagggtgggagagggccccgggctgccctgtcactcctctaacacttccctcccctgtccccaacatgccctgtaataaaattagagaagactaacaaaaaaaaaaaaaaaaaaaaaaaaa

SEQ ID NO: 117760 - DNA, 1000 bp, Homo Sapiens
ctcaacctcccaaagtgctgagattacaggcgtgagccaccacacccagctcagggaggcgtagttttctttaattttaaatttaaacccaagtttattggcagactcccttttgacctccctttgcctccccatctggtgctttcttgcatctacaccccagggccctgtggtggggctgcagggggaagctgtgcacctgagatgaggctggaacgggaattggcctctctgctcccttcttcagtaagcaaggagccccgcccctcaggcccagcctctggcaagaggtggtggaatccttgtgccgggtagtagaggaggataagggcaaaaccaggcccaggccagtgcctggcttggtctggatgggacactgtcagagtttggccacagcctgtcctttacttcatccacacctatgaagctattccctaaataaggcatttcccaagttagtcgctacctaatcagccttgagaagaatcctttcctcttctttgatagtgggtcgggggattcttcaggaatggtttggagctgggagtgggtagggggattttaaatgttccatatgggagccccaaaggaactggatgggctgcagtgaggtgggggcgggtgggcagggaatgggagaggggaagtcttggcagggaaatcccttttggccacacagtttacaaacccagtatcatgtctgtctgtgtgtctctcaaggtgagagtctgatttttataccaaagaggaaatgatttttttcatattttgtttgtctatattatataaatatatatatacagttatatatatatatattattttttggttctctctcgttttttagggagggaagaaagtaccaagttgcattgagctgtaattaaggaacattataatttatgacacatttctatacttgcaaaaattatatcattttatggatataagagaaaaatgcctttttataaaatttcaatttctgaaaaaaaaaaaaaaa

SEQ ID NO: 117761 - DNA, 1000 bp, Homo Sapiens
ctgccgagtgccctatgggcccccagttggtggtggtaggggaagagggcttccctgatactggctccgaccattcgtactccttgtcgtcaggcaccacggaggaggagctcctgcgcaagctgaatgagcagcgggacatcctggctctgatggaagtgaagatgaaagagatgaaaggcagcattcgccacctgcgtctcactgaggccaagctgcgcgaagaactgcgtgagaaggatcggctgcttgccatggctgtcatccgcaagaagcacggaatgtgaactggtgccccggcagcctgctggactcccagaccccatccagccaggggaccgcaggccattgttgaactcctctatactcctgggcactggttgacagtactgaggcttaaggcagctggactctcttgctggtgacctggcatcctcaattgtttcctcctgaagtggaagctggggccttagactctgccctggtgacaccagcaattatgactttgtctacccttcctccccagttattgttgcagattctggttaagcagaggcttcagaaccactgaacttgaaacttaccctctagggatgcaggtgggatgtccagggactataggtttgggaaaaccataccttaaggttggtcagcagtcagacaactctaatgtgtgtagtgataagagattcaagtaacatcagttctcctccttttcatgcttttccttcccaggtgcagcctgtgattctgatggggactggtaaatctgtgcctctgcctcctaggacttattttcccaggaggccatttacaaggggatctggatgacctgctgatggagatccagcttgccagggacttaggtttatcctgttttgtttgctactggttacaaattctattttctgtacaattagtcagactaaagttttcactgtgtttgtttggcaaaacaaattaaacaaaaagtaaggtttttaaaaaaaaaaaaaaaaaa

SEQ ID NO: 117762 - DNA, 902 bp, Homo Sapiens
gggggctgaggctccggcggacctctggtggacatggctgcttcccgcttacccccagcgacgctaacgttaaagcagttcgtaagaaggcaacaagttcttctcctctacagaaggattttgcaaacaattcggcaagttccaaatgattctgatcgcaaatacctgaaagattgggcaagagaagaattcagaagaaacaaaagtgccaccgaagaggatacaatccggatgatgattactcaaggcaatatgcagctcaaggagttagaaaaaacacttgctttagcaaaatcttaactatagcattattctgaaggattttcaaagtctccatgtgttttgttgcatttaggattaacaatggacaacacaaagcccagtcttactatttatatgtacagtatttggtgatagagagcaaaggaaaaacacatcagaacagttgccttaacactgaaaaacataccctgcattttgaaaatgtttatggatgtctcagcagttcttaaaagaagaaaaaaaccactaacaaatggccagtagatgctggacacaatcattagggaagtgtaaatcaaaactactatgaggtcgggtgtagtggctcatgcttgtaatcccagtactttaggaggctgtggtaggtggatcacttgaggtcaggagttcaagaccagcctggccaacatggtgaaacctcatctctactaaaaatacaaaaattagcttggtgtggtggtgcattgcctgtagtcccagctacttgggaggctgaggcaggagaatcacttgaacccaggaagtggaggttgcagtgagctgaggtcgtgccactgcacttcagcctgggtgacagagtgagacagtctccaaaaaaaaaaaaaaaaaaaaaaaaaaaa

SEQ ID NO: 117763 - DNA, 1000 bp, Homo Sapiens
gaggggcacagccatagccaccaccaccaccaccggggctgacaccctgccccacagggaatggccttggcctggcccagcccaagatcccagcgttatctaactcctggagggtggactctgtcctggcttgtttggtgtcctcagatatctttcacacagtagagcaaaatcaccagccctgcactgatgtcactttatgtagaaaaaggccttagctggacctgcgttgccgtctatgcaaatgcatgcaaatactccaggccctgggatgtgggcttgtgttttgtcactgtgaagggggagatgggagaggagcctgttttggggtggggtctggggaaggcaatctgattctgaagctaaagagctttcatcctcttgagtgtatgtccccatagtgggccccttgacccacatgctgaccggtgccttgggatttgactagagttgctggctcgaggcccagcacgaggacttaccctggggttttgttaggtttggaagcagctgtccctagggggtgaagtcccccccctttttttttttacccctgcttctcccacggcttcacctccctatgtgaactgtagactcagatcccaataaagtgctgttgcagctatgatgctaggtggtttctaagcacaggggacaccccacaccccctgcctgaatggatgggtccatcccaggcactggtacttgcccccttgttctgtatccccctttgcccttgccttgcccttccaacaaaccctaggcccttgagaagctgatacttctccttttgctcacagctgccttggccccacccctgggagatgtagcaaattgagtgtgggttttggagtctgagcctcaggctcaaatccaggccaagtgatcttgggcaagttaatctctgggaactttgggtttcttatcctcaaaaaaggcgatggaagggctggggaagtgattaaataaaagcaacgcaagaaaaaaaaaaaaaaaaaaa

SEQ ID NO: 117764 - DNA, 1000 bp, Homo Sapiens
gagcagggctgcctggccagcgtgggagtcctgactcagtcctgcaccaccccgcacctccactccatcctgaaggctaccaactacaatggccacacgtgtctacacttagcctctatccatggctacctgggcatcgtggagcttttggtgtccttgggtgctgatgtcaatgctcaggagccctgtaatggccggactgcccttcacctcgcagtggacctgcaaaatcctgacctggtgtcactcctgttgaagtgtggggctgatgtcaacagagttacctaccagggctattctccctaccagctcacctggggccgcccaagcacccggatacagcagcagctgggccagctgacactagaaaaccttcagatgctgccagagagtgaggatgaggagagctatgacacagagtcagagttcacggagttcacagaggacgagctgccctatgatgactgtgtgtttggaggccagcgtctgacgttatgagtgcaaaggggctgaaagaacatggacttgtatatttgtacaaaaaaaaagttttatttttctaaaaaaagaaaaaagaagaaaaaatttaaagggtgtacttatatccacactgcacactgcctagcccaaaacgtcttattgtggtaggatcagccctcattttgttgcttttgtgaactttttgtaggggacgagaaagatcattgaaattctgagaaaacttcttttaaacctcacctttgtggggtttttggagaaggttatcaaaaatttcatggaaggaccacattttatatttattgtgcttcgagtgactgaccccagtggtatcctgtgacatgtaacagccaggagtgttaagcgttcagtgatgtggggtgaaaagttactacctgtcaaggtttgtgttaccctcctgtaaatggtgtacataatgtattgttggtaattattttggtacttttatgatgtatatttattaaagagatttttacaaatg

SEQ ID NO: 117765 - DNA, 1000 bp, Homo Sapiens
ctgccaccatcatgcctgctgccagctactgtgccagggctgcctctgtggctgcccgccatgtggcacgacttggtggcctctaaccaggacctcagaagtcatggccagagaacttccagagttggagcccacagcacagcttttgcccctggaaggtcctaaagaggagaaagtagcaatgcacgctcccctggctgtttcttcctcctcatcctcctcctgtgaacaagatggtgtggagaatgatctggagatgggccctccccagagactgatggtgaacagtgcagtcaacacagatcccatctttcttgagatgcctctgagacagagtggcctctgccagcctgagtggaggtattggaagagaaacgggcctgagccatgccctgggaagccaggaacaagatattccaacatctgcaaagaagaaaaggatcacaaacagcagagagcacaaactgtagtagtggggactaccaaggagctggtctcgaaagcaacccacatgaagccaccgcagaccccgccaggggaagctgaacacagaaagcggagtcagagccttgcaatatgtcagtggaacaagaattcccgttagactaagagccctgaggatctaggtaaagaataaacatggtaaatattcgaggagagttatacagagtggctgacaaggccttcttcaacggaaggaggcagaggacaggccacaggtaacagtcaaataaccaccagtatctccaccccacgaagacctccctgcagataagcagcaggaaggcacctgttgtgagggctataggaatgtgggatcctgccctggggctccctgccagggccctggtgaaactgctttaagatgcctcttccgtggaagagggggtcagcctgctttgggcaaatgtgtccacagccactctgccaccttcccataaagcctagttgtacatgagtgacattttgtttcacctcttaataaaaatgaattctcttc

SEQ ID NO: 117766 - DNA, 1000 bp, Homo Sapiens
gttttttaaaaattatacatgtagctcaacttgaggtactgctatataaatattcactcacattatcacggaatttatgtatagtttctctaatatagaagataaaattggtgtcctcataactttaacaaagaaaaccctcagtcctatttattaatgggtagaattaaatatataattttatagctcagtttacccagtattcatctgcaaagccagattgctctcattgcttttatatttttaaattgtagcttttagagacctatgatcctcatggaacttaattttttattaaatattcaggtaacagttctgaattcatgtgataatggtggcattatatatgattaaacacttcagaactttctaatgttatcaggagtattttgagggagatatgattatattgtattttctcagataagaaaaatgttttttaacaatattattttaatctgttttaagcatctcttagatttacattataactacataaagcagtgaagcaaaggcaaattaagataaagctagaaagtctgaacattttatttcaaaatcatacgaatcggggtcagttaagcctcagtattcttagcttttgttgattttggcactatctttatattattaaatatatttgttgtttggatatttcatataaagatggctataattacatatttcattcccaatttgtgtgtgttggggggtacttttaaaggtgactattgttttgtacatctaattttgggaaaccaagtctataagacatcttgtgatttcttaatgtttttgtttgtatgtttttcaaagatatcactgtcctttatcatgttttgaagattgtttaaaattcattttcctaaattaatgtgcaagtaatgttttgaggatatcggtgttttatattaaacatatttccaattcaaaaaaaaaaaaaaaaaaacttatcgataccgtcgacctcgatgatgatgatgatgatgatgatgtcgac

SEQ ID NO: 117767 - DNA, 1000 bp, Homo Sapiens
tcaaaatatcataggcacctcaaagacatgtacaactcttaatttaacatttttgaaagaaaaaaaaaccggccagagcattaaaacaaataaaataagaaacacagaggccagtgttaggtgaagaactccgctgcttcagaaagagaatagcagcgctcgcttaccgtgggaacacggccagttaacaaaatgggttttggttttttgttttgttttgttttaccattggtaataagatagttaacataagtggtcagaacttcgctgaatttgtaataaagcatttgttaagcgtgtaaaagtccaaattaaaagtcttgaagaaaaacagctatggcaatgagcctagacatttttcaaaaaaaaaagctaagccgtcctaccagcaatctctctttctcctaagaatgtcatgccttctcaagacctgatgaaaggaataagatatttgtgcctttttataaaagcatctattacgaaagtaaaattcagttgcttacagttttggccgctttgtagcactattataaacagcccaaatttatggccttggacttactgcatgacacatggcctggttacctgtcatggaatgctgcagtggtggtttgccaagcttctgtggatgtttgaagactttatttttgcagtcttaaccttgggctggacctaagtgtatgtaaaccatatgatgcctgtattgtttatagatgctgacaaaagaaaactagaccttttgttttttgttgtaagatttttgttttcatgcctatgctcatagtagatagtttgcaaatgaaagttgatttgccatacttttaaataatattgttttagcttgaatattctataatacacttttatagagtataacatgctaaatcactgttttgttgtaagaagggtgtaaacattttgttaataaaatgctatgtttacaaatataaaaaaaaaaaaaaaaaaaaaaaaaaaaaaaaaaaaaaaaaaaaaaaaaaaa

SEQ ID NO: 117768 - DNA, 1000 bp, Homo Sapiens
aacaagcaggccagagtgtcttccgacgtggactcctcaaccggctgcagcaggagtaccaggctcgggagcagctgcgagcacgctccctgcagggctgggtctgctatgtcacctttatctgcaacatctttgactacctgagggtgaacaacatgcccatgatggccctggtgaaccctgtctatgactgcctcttccggctggcccagccagacagtttgagcaaggaggaggaggtggactgtttggtgctgcagctgcaccgggttggggagcagctggagaaaatgaatgggcagcgcatggatgagctctttgtgctgatccgggatggcttcctgctcccaactggcctcagctccctggcccagctgctgctgctggagatcattgagttccgggcggccggctggaagacaacgccagctgcccacaagtattactacagcgaagtctccgactaggcctccagatcagggcttcctcaccagcactggcctttcttctacccacctctaaagctggcagtggagtctctgcctcacccaaagacttttcccttccagactttgagtgtcttcccttctagactttcccatctcctggtgagatgtttcccacttatgccgtggtcctgccctgagcccctttccccaccacaacccaccacggccaggcagagaagggcaactcccaagagccactgcactgtgtaaccattagtgcaactactaccttggtgcctcagtttacccatctgtaaaatgggtaagcatagccactggtgggatattttgggatgtcaaggggtggaggcagagcacaagtcacaccagaaactgctttttatacattttgtataaggacaactctggaaacaagcctatttcctccagccagtttcactgaatgctgcaccacatgctacaccagttcagcgtgagaattttctaataaatcttttctgatactaaaaaaaaaaaaaaaaaaaaaaaaa

SEQ ID NO: 117769 - DNA, 1000 bp, Homo Sapiens
caagtacgtctcagggtcttcagccgagaggagggcagcccagagccggaaactgaacccggtgcctggctcctaccccacacagagctgccaccctcacctgtccccaagccaccctgtgtcccagacgcagcacgccagtggtcagaagctggcctcctggcctcctgcacccccgggcacatgcccaccttgcctccgtaccagcctgcctccggcctgtgctatgtgcagaaccactttggtccaaaccccacctcctccagtgtctacccagcttctgcgggcacctccctgggcatccagccccccacgcctgtgaacagccctggcacggtgtattctggggccttgggacaccaggggctgcaggctccaaggagtcctccagggtccccatgccctgagagaatttctagggaagtcatctcacttggccttctgaaggtcctccctaagagtctcctgacaaaagttacttattgaacacctctatgtgccaggctctgtgttgggtactttgatcaatgcccctgtttcagtctcatctgtactcacggcagccctgtggagtacggtgtactggcccagcttacagatgcagaaagcgagacgttctgccatcagataaagtcacgtggctctttagtaacacggacaaggctcctcgccaaggaactcgtggcagaagagggcagcagttggcagtagctgccgatgtctgtccccagctccaccattcctccctgtggctgtgccatgctcgtggtttcagtgtccgtgtgtccatgtgtctgcccttcaggagctcgcagctggtgtgcttggcggtcccaggcctgtgtagtgtctctcccctgctgcgggcgcccccaccccgattcctctccccagaagcggtgggatgggcccccatgaactgcagcagcatgctgaggtgtccatgttgtctgcctttgtataaagaaacagcctctgaaaagaaaagaaaaagtcgacg

SEQ ID NO: 117770 - DNA, 1000 bp, Homo Sapiens
gaatctggtcatttggtgtcaatgctgtgtcagaaggcttatcaggttggtcgcaatctgtgatggggaaccatccaatgcatcaacaattatcagacccaagcacattctcccaacatcagccaatggagagagatgattctggaatggtagccccctctaacatttttcatcagcctatggcaagtggttttgtggatttttctaaaggtctgccaatttccatgtatggaggcaccataataccctctcatcctcagcttgctgatgttccaggaggccctctgtttaatggacttcacaatccagatcctgcttggaaccctatgataaaagttatccaaaattcaactgaatgcactgatgcccagcaggccagtctgcttccttcagtccctgctctcaaaggggaaatcccatcacctcagctaaccagaccgaagaagagaattggacggccgatggtggcctctcctaaccagaggcaccaggatcatctacgaccgaaagttcctgctggagtgcaagaactcacccattgcccggacacccccctgctgcctccctcagattcccggggtcacaactcctccaacagcccctctctccaagctggaggagctgaaggagcaggagacagaggaagagatacccgatgacgcacaatttgaaatggacatctaatccagtgcagatgacctggcatgtggagttacagagggatccctcatgccactgctgccaccacctcttcctggggcatccaaaggccagctggcctcatctaatctggaagggagtgacttgttagttccaggcctcctttagttctgaggcagctagaccagggataggagtgggcaacttgccaagcccttaactctacttcctcttcagtctgtggtactcctcctaaccctaaaccctctatgctcaggggctggaactggggaatggagtaagtcaccttctgactgcttagtaaacattcaaagaaatg

SEQ ID NO: 117771 - DNA, 1000 bp, Homo Sapiens
gtggatctggaagggagcctgaaggtggtgtacccgtccaaggccgacctggccactgcccctccccacgtgactgtcgtgcgctgacgccagggccgcctgtccgcgtttgtttggccggttttgcggaggtttctatgcggcaatgctgaattatccgttagattttcaccccagtttttttgttggttttttttttgagatggagtctcgctctgtcgccaggctggagtgcagtggcgtgatctcgagtcactgcagcctgtgtctcctgggttcaagcgattctcctgcctcagcctcccaagtagctgggactacaggtgtgtgccactaagctcagctaatttttgtatttttagtagagacggggtttcaccattttgaccaggatggtcttgatctcttgacctcatgatctgtccacctctgcccctcaaagtgctgggattacgtgatccacccgcctcagcctcccaaagtgctgggattacaggcgtgagctgtgcctggcccaccccagcattttttaagatgtatgtattcgttgttctgtttttccagatgattctgtcgtaaagtgatgctatgttgtcgttaaaacatcaaagtgattttacggtttttgatgggattattcaagtgtcagaattaactgttcaaaatgttctgaatcatgtagatacatggcaggtaactgtttatgggagaaaagtacagtgctgttacgtggcactgtacagtcatgtgccacgtaacagcgtctgggtcagtgacggacacttacctgacagcggatccacaatattctcgtgcagtgtgtttggaatcctggtctgggctctcgtcgttggccttgtagatcaagtaggggaagtgagtgatgttcagtcatgctgctgggacacttggttttccagatgaaaacacataaataaaactacatgcaccatcaaaaaaaaaaaaaaaaaaaaaaaaaaaaaaaaaaaaaaaaaaaaaa

SEQ ID NO: 117772 - DNA, 1000 bp, Homo Sapiens
ccccagggccttgagtgcctggaggtgcttggcctccagtagctgcctccattctcttttaaaaaaagggggtgattctgaggcactgaagtgcctcccagatgtggaggagtgaagccaccatcgaggccacactcagcactccaggatcccagcgatgtcagacactcttgagttgtcaaaacgttaattttcagttttaaataatcagtttatctaagaaaagggaattttaacttttctaccttgagccaagccaatgaagggaaaattaattaacttagtaaatttgaagtgcagctctgttagctcgtacatgtgggttcttatcctgatcctgtgccttaaagtaggaaggtgtttccaagttcagattaaaatagaagcagctggccgggtgcggtggctcacgcctgtaatcccagcactttgggaggccgaggcgggcggatgacctgaggtcaggagttcaagaccagcctggccaacatggagaaaccccatctttactaaaaatacaaaaattagccgggcgtggtggtggagcgcacgcctgtagtcccagctactcgggaggctgaggcaggagaattgcttgaacccaggaggcggaggttgcagtgagccaagatcgcaccactgcactccagcctgggcaacagagtgagactccgtctcaaaaaataaataaaatagaagcagccttgtaactgtatttaccatgataatatattctgcacggtaagaattccttttacagacattctttatcaagaggtcggcccttctttttcaggcacataagccaaatgcaggcctgtgtgtagctgtgtgttttttctgtggttgccgcatttattccacctccagctggaccccccactgcaaatagagaacagcggtgggggatgggggttaaaaagtagagaacctcctttctgttcaactaatttcacgtgacagtgcatgtatttattcaataaaacctttatgttagctc

SEQ ID NO: 117773 - DNA, 1000 bp, Homo Sapiens
ggccagggcctacatgacacaaggagacatgggctagggaaggcagaactgggcccaaagacacacacccccttggtgaaagagaagacatggacaattatggctgtgactgcacattagaaattatttcactggccgggtgtggtggttcacacctgtaatccaagcactttgggaggccgaggcaggtagatcatgaggtcagaagatcaaaaccatcctggctaacacggtgaaaccccatctctactaaaaatacaaaaaattagccgggtgtggtggcacacacctgtagtcccagctactcgggaggctgaggcagaagaatcgcttgaacctgggaggtggaggttgcagtgggccaagatcgcaccactgcactccagcctgggtgacagagcgagactctgtctcaaataaataaattatttcacagaggatagcaagctccagaaggttctattacctttaaaaaagagtagttttgcccctcccagcaacctggtatgggtgccctaagaccagtctgaactcacactgtctgaaaggccacccaggatccaaatcgggccatcttcattgccatgagtgttcggacaggctctgcgtgccaggcaacagtgggcagacaaagggctccctggctactgggaagatacagaaccatcctgtgaaaatcatttcagcactggagaccttctttgctattacttctttcattaacaatgacctctaatttaaattgggccctgctggtttgttgatgaattgagcaactgagaacgtggcgggcactaaactgacagttccttccttcatggagcctgcttcatgtggaggaaacaggaaataaagcaaaagaagagggtcaggcttggtggctcatgcctataatcctggcattttaggaggctgaggttggagaatcgcttgaggccagaagtgcaagaccagcctgcgcaaacagcaagaccctgtctacaaaaaaaaaaaaaaaaaa

SEQ ID NO: 117774 - DNA, 1000 bp, Homo Sapiens
gacaaagaagagaataacaagattggacatgtacattgtcatgtgactggatcacatggggaagcgctttatacagacatcagttccatggtgttaatttgaaatgccttaatggcaggcaaaaaccagtcatttcatttttgtaaattacagattttatcacagagtaacaaatgttgctgtaattaaacttctgttttatatatatatacgtatacatatctgtatatatacatatatatatatataaatataaatatattctttactttttgtatcagtaaccaggctcgcacacacagggtctgctgccacgtcgcaaaccactcagtaaaggaaattaaaaatgtatttgtcatgttaaaaagtgttagccacaaaaggctacttactttcttttccttttcctttaaaattgtaaataaataatgttatgtatcagtgtgcctgaaccttgcatatccttcacatatttcccataagcccctcagaaaggctaactgtgatgatgacactttggtacaatttagatgtctatttggtggctcctgttaaagacgcaccagtgtaaaatgttcctgtagtcactgtttgtacttgtgtattgtggaaaaagtacttttggaaggcatggggttgccagtaccacaaaaactgtgttgtatataatgtaaagattaaaatggggaaataatgagcatctgtgaataatgaggtgtcattttttgataatcttgaatggcaaataacccaatagcctgcgtaccagagacatctgtgattgttctattacttgaatagttctacagtctttttttttttttaatgtttacaattatccagttttagaagagagagactttaacgccattgcctggttacttgttttatgctgtaatctagtttattttatgtaaaatgtatattgaatgctttccttttttatacctgccttaaataatttggcaatcagaattaaaaagtttttttttttttaaat

SEQ ID NO: 117775 - DNA, 1000 bp, Homo Sapiens
gtggagtcttcccctgttgcccaggctggagtgcagtgggatgatcttggctcactgcaacttctgccacctgggttcaagggattctcgtgcctcaacctcctgagtagctgggactgcaggcacgcgccacctgtatttttgtatttttagtagagacgggggtttgccatgttgcccagactggttttgaactcctggcctcaggtgatctgcccaccttggcctcccaaagtgctgggattacaggtgtgagccaccgcacctggccagaccgcttcacttgtaaaagaaattaggctaataagaaggtgtagtttttgagaaatgaaatttaactttagccttttcactagtaaatagtcacatctcattttcttcctttgtaaaatggggttactactggccctacctcatattctatgagaatgagtttgtagctgtttcaaatcatgaagtgcatagtatcacatgtgatagaatatttataactttttattagatgcttaatgttcaattaagtaattttgatgtgaaaaataaaagtaataaaagtatcttaaaaatagcataagaattttcatatttttaaacaaggcagttttgtagtcccttaagattaaatacaactgctccttttttttttaaactgaggccttgcgatattttgtgtgaatagatatgccctaggagttcagaaaaagttaaaagtatgttttctaattaaatgcagtgcacattcctggatcaatattcaaagactggtcataacctgctgtgttaaaataatcacatatgctctttttcatcagatttgttgatgatgtaaataaaatgtgtaaatatattagtaaatgttaatattcatgtattttaagttaaggttataaaatttgtcacaatgtgtttttttattcaagtgaaaacagatgtgtgcagctattttgaatattggtttataaacattcatattctttatcaaacaaaaaaaaaaaaaaaa

SEQ ID NO: 117776 - DNA, 1000 bp, Homo Sapiens
ctttgctttgggcaagaatctggtcacctgatgggatccatggtacaggctactgctaaacttggcacagtatcaagtatagtacctccaaggaccagggctgggaagtctttagtgctaacatcccctttagagttcacacatcttgcccttccatgaatgacccctcagtctggcctccccagcctcaaggtccactcaggcacaagagccacagtaccctagatagtgtcacatgacaccgttgtcatccaaggataatacagaccaactaggctacatctgtgatgagcagctagcaaagccgctggtcttctcctaggactaagtccaggtgccttccacaatctcatggtctttcaggtccctggttacttttctcaaaggccatttccaaaagaatacatgccttcacatcacaacctgtactgtgagtccattctagaggtcactgaaaggccctgtaaagagaggacatggatacgggacctggccctgaggttattactggccgtaaggcagagttaatccatacagaaaccagtgtgtccatgtgctctgcacaaaaacagacctgttgtccatccagtccactgacaagagggtttccccgagagccgaagtggactgaagctacagtttttagctggtgcgggccacaggcagggtcagattgagaagaagcaaagctggggaagcagaagttgggagtcttgtgttgctccctcttcctgtgtggtgctctgggtttctgtggatcgtgaaggcgatctcaagagtgtttccctccaaacctgatagctgcctattcctgtctggttggggctgtggaggatgtagttgtatttattgcattgtaatatttttaacatcctgtgacttcatgctagaaattttctattgtttatagaaactttttgtagaaacattaactctaaagcacatctgcatgtcagtaaaaatctcagtttcgtacagaaaaaaaaaaaaaaaaaaaaaa

SEQ ID NO: 117777 - DNA, 1000 bp, Homo Sapiens
ctcgtccctggcagctgcactgagagccgcagagaagagcattggcaccaaggagcaagagggcacccccagcgcctccaccaagcacattctggatgacatcagcaccatgttcgacgccctggctgaccagctggacgccatgctggactgagccctccagcagtgcccactgtgacctgccgaagtccactgcctttgccccagcacagaagaggcccctgccaccctagggacgggccaagggctggtcaggctgaagtgcccctcctagcagggccccttcccactcagcccgcggctgtgggcaccacagctcttgtggggcagcccaccttagaacctgactagcgagggacctccgctgcatctcagcaaagcccctcccagggtttgatcgattgagcaggacagccctgctcctggacagggaccctggtaagagctctctcctcagggaggaagtaggggtggggctttgggggtgctttctctgtaccccccagcccatgtcccaagttgtgccaagggaatgcctcttgccacccaccatcctgcccaggccctgagaggctggaggaggcgtgtgtctggccgggccccctctccgtaggtgtacagaggacatgtaaatacacagcggtggtgcccaggcagctcctgcccccgccttccctcactgaggcagggctagcaggggtgggaggcagtggggttaacagatcccacaagtcctaacttttcaattgtaaatgttattttctaagcagagagaaatgcatatattttaaatggaatttattctatcaactgcctgagaggacacaatgggggaggggcttcggaccacagcaggagccccgactgcccacctgagggcagggagagcctgaccccattggcccaggccctggctctgtaaccattaacctcttcccccaactaacaccaatgaaaacaccattccacgtgaaaaaaaaaaaaaaaaaaaaaaaaaaaa

SEQ ID NO: 117778 - DNA, 1000 bp, Homo Sapiens
gctctttcaaacgtgttcttttagaccagttttctaataagctttgtaaaatgtactatccaaattagaagcggatttggaaatgcaaactaacgtgcacttagatatccaagtgggtgagcttagccactcttacccatgctctttccctggaatccctggagacctgtccaagatgatttccatataccagcatagaaaatcagaatcaagagcaaactctgagactggcacaatccaagaagatttcctggctctggcttttagtaatttgggactccaactgccactgtactggactgtaatttataaatccagtagctacgcagggtggaggctgggctgaggattaccataatgaaatgtactaaatcttcatttaggtatgcaattgtgaagtgaaggcatctgctttctttacagtatcagagtccaagaacaggatgtcaccatagataaaagcctcatacaaaggcagaactacactccaaatttaatgtgtttaaattggtggggcaccagcagaaaatacttctagctcagctttactcttcttccacactaggctgggcccagcaatacaggagaggatgaagggaggagctccaggaggcgagggaagagccctagcagggcggccatcacaaccactcactgagagttgcccttcttaaaaatgtattttattttagccagtgggtcccttcctttctcctttcctctctactgctcaagaacagatttgaggccaggtgcggtgcctcacatctgtaatcccaacactttgggaggctgagatgggtggattgcttgagcccaggagttcaagaccagcctgggcaacacagcgagaccccatctcttaaaaaataacagacttgaggaacccctctcccttccataattcccctcatccaccgcccactccaggcactcactcaaacttgctcttcaactctgtatacaagcagaagcaataaaccaatctgattttcttttc

SEQ ID NO: 117779 - DNA, 1000 bp, Homo Sapiens
tttggcttttctatgttgtcgaatgtaatgtctgagactagctaaattaacacgggcatttgtattttgtaatttttttaaataactggacatatgtcattttaaggacaatagaaacacttagacttacttgaaaatccaatgctgcaccacttgtaatgaaggcaacaccgctctccacattgtacagagcttcaggtttaatgtagcccagctgagtcagaaaggttgtgacctgaaggcagaagaacccgaatgccacacctcattggagtatagccagtgttggtctgtggcacttgggctgaaaggtgataatggcattgcgtggtagctgacaatgagcaccttcggttccatgtggagcggggtttagctcatgcaaaagacttgcaattgtctccatgggacgatcccagtgggactgtcagcccacagctcgagtgggttggatgcttgcctctttcctaacagttatttccccgggtccagcttaaagactcgatggaaggaggtagaacctctgctgttactgcttgaacttaacctgggaaaggagaggaagacaccatctccaaagctattaatgtcactccttttgcgagcatgattaggccccggagatttccaagtccccccatctacacttacaaacgattagaagggtttaattttaaagactttctggttacactactccacgaactcctccaaagatccgttattcaataactgcctagaaaatgtttccatctcctctaaatccctgtgttctcctctgtggaaatgaaggcagcaagaagcacctgaggccttggttcatgcagtgttctcttttgactaaatcacctaggttcctttaaacatgctacaaagcccaggcatggtggtgcacacctgtactcccagctactcgggtgtactaggctttgggcctagtagttcgagtccagcctgggcagcatagtgtgagaccctgtctcttaaaaaaaaaaaaaaa

SEQ ID NO: 117780 - DNA, 1000 bp, Homo Sapiens
ggtcctgggcatttataccttcacgaagcgggtagccttggaggagatggagaataagccccggaaacagcagggctacagcaccgtgtcccacttcaacattgtgcactacgactgccatctggctgccgtcaggttggctcgaggccgggaagagtgggagagtgccgccctgcagaatgccaacaccaagtgcaacgggctccttccggtctggggacctcatgtccctgaatcagcttttgccacttgcttggcaagacacaacacttacctccaggaatgtacaggccagcgggagcccacgtatcagctcaacatccatgacatcaaactgctcttcctgcgcttcgccatggagcagtcgttcagcgcagacactggcgggggcggccgggagagcaacatccacctgatcccgtacatcattcacactgtgctttacgtcctgaacacaacccgagcaacttcccgagaagagaagaacctccaaggctttctggaacagcccaaggagaagtgggtggagagtgcctttgaagtggacgggccctactatttcacagtcttggcccttcacatcctgccccctgagcagtggagagccacacgtgtggaaatcttgcggaggctgttggtgacctcgcaggctcgggcagtggctccaggtggagccaccaggctgacagataaggcagtgaaggactattccgcttaccgttcttcccttctcttttgggccctcgtcgatctcatttacaacatgtttaagaaggtgcctaccagtaacacagagggaggctggtcctgctctctcgctgagtacatccgccacaacgacatgcccatctacgaagctgccgacaaagccctgaaaaccttccaggaggagttcatgccagtggagaccttctcagagttcctcgatgtggccggtcttttatcagaaatcaccgatccagagagcttcctgaaggacctgttgaactcagtcccctga

SEQ ID NO: 117781 - DNA, 1000 bp, Homo Sapiens
cctatgttattgtgctccctggattcctgcaactcattttccttccactctggagcagggtgaggggaatgttatgggtaacagacatgcaggcatggctctacccatttctttgcacaagtatggggcccatgtggtagtccccatacccctccagttcctatatttttgtcttcttcctttcccctctttgccattcctaccttgcatttttcctgtcagtgccttagccaaggcaaggagataaggatgctcttcttgctttttatatctgcacattcatacctctccaaagaccagcttttccccagccagggccctcagccttccctgctgccccagtgattgattgagagagctgttggggtttctctgccaatgacccctgggagagggactttggtagggtcatgataaagtggcgggggtcttggtcctgctcagggttttcatccttcctcctctccctcctctgtgactgtggatatggttataaggtggttgcacctgggagccctgacaactggctgcacaaattccaaaagtaaaggtgtcagtccctgtggccttccttggggcttctctgaccacatgtgcccaacttcaataagagaaccaagggaccttcattttctgaggtgcttggctctgattcagggctttgcaaggggttagaagctgactgtaaaaatgggaagaggcaacggaagacatttatttctcctttggattttggggagaaccaagccctggtagggaagaggtaagggggatgattcacctccatatttcctaagcaggttgtatagggagccggtggcaggaggaaggctgttttcacaaatgacttgtaatgtcgtgattaaaaaaattcctatattcttctgcaaatcaaacgttctttcccaatccaatccagccttggttttattttaaattaaatattaaaattacacatttatattgaaaaaaaaaaaaaaaaaaaaaaaaaaaaaaaaaa

SEQ ID NO: 117782 - DNA, 1000 bp, Homo Sapiens
ctcctctcggaggaggcgtcctgtcttcacgggggggtcccggtggcctccagacgtagccatttcctgacatcaagatgttgaatgtaatctggtctgagctgggcctgtgggaggggccgcctgaggcctgtgcgctgttgtcctcgcagatgtacttatttttgttcatgatacgggcgttccgttccttaaagatgtatatattttcttactgtacataaagatgttccttaagtcgtacagaaggtggcgcggcaaagggcctcgtgcagtgtgttcagattgcccctggggatcttctgtgtcttcagcgcccagccctgcgtgttcctggtgaagcagtttcacatcagtctctccagatagcactacgatgtattccgcttctgaacaggatcccatgccagtgtggaacaccttcccaatcttagttcagaagtggcttgtatgacctgttcaggggtcacatgaggtctcgccagtttcctgggtcctcttcagaggccagaaagttctaagttctgagtccccggccagggtcccttaacacctcggcacagaggctgttggcaagtgtagaggctgcctctgtgtgtggtttaagtaaactggaaatgagacattgacgtgctgctcctccagaggtctgcacactccacttcacatgccgttgactctcacagtctaagacttcagggccgggacctttgtccagcctgcacagtagagtgaggctgcctctcccgccaggcattgggatcccatttagaaacggcattcacttcagaaggtactttttaactgctcagtttttgactattttaaatagtttgctgaaaactcctgataacacttgctacatatcatgttttaattgcttgtacagttaacctttaattttatttagtaaagtgtatcaaagtaggactttttgaattgtaaataggtggttttattaaataaaagtcaatgtaaaattgaaaaaaaaaaaaaaaaa

SEQ ID NO: 117783 - DNA, 1000 bp, Homo Sapiens
cgacttattggggtgacaacagatatgactctggatggaatcacctccccagctgaacttttccacctggagtccttgggaataccggacgtgatcttcttttataggtccaatgatgtgacccagtcctgcagttctgggagatcaaccaccatccgcgtcaggtgcagtccacagaaaactgtccctggaagtttgctgctgccaggaacgtgctcggatgggacctgtgatggctgcaacttccacttcctgtgggagagcgcggctgcttgcccgctctgctcagtggctgactaccatgctatcgtcagcagctgtgtggctgggatccagaagactacttacgtgtggcgagaacccaagctatgctctggtggcatttctctgcctgagcagagagtcaccatctgcaaaaccatagatttctggctgaaagtgggcatctctgcaggcacctgtactgccatcctgctcaccgtcttgacctgctacttttggaaaaagaatcaaaaactagagtacaagtactccaagctggtgatgaatgctactctcaaggactgtgacctgccagcagctgacagctgcgccatcatggaaggcgaggatgtagaggacgacctcatctttaccagcaagaagtcactctttgggaagatcaaatcatttacctccaagaggactcctgatggatttgactcagtgccgctgaagacatcctcaggaggcctagacatggacctgtgagaggcactgcctgcctcacctgcctcctcaccttgcatagcacctttgcaagcctgcggcgatttgggtgccagcatcctgcaacacccactgctggaaatctcttcattgtggccttatcagatgtttgaatttcagatctttttttatagagtacccaaaccctcctttctgcttgcctcaaacctgccaaatatacccacactttgtttgtaaattaaaaaaaaaaaaaaaaaaaaaaaaaaaaaaa

SEQ ID NO: 117784 - DNA, 1000 bp, Homo Sapiens
ctaaagtaggtgagatgtgggactaggtaacactttaaatacttttttactcaaagatttgccaagaacacagcttattagtgaaagagacctgtggattgaaatggctgcagatagatcccgcagtcccttctgaaaggaactgtgtagccagcagggacctaaactttggcaaaaagtgaacacaattcaaatacgaatgaaggaagagccctcagatggaacgaaaggcgatgtgcaaggccatcccagagagacggaagcaggtgcgatactaagcctcagcccaagaataaaagagagttcaactgttactcttttctttcatcaatcccctatcagttagaactgcaggccagttccaaagagtgtttgcttaagattcaaaagtgggtaagtaaaatggatcagtgggaaggataaggtgtccaacagaaagtgtggaggagaaactcttggcctatcaagtgctcctgagagaaaccatgcaatttaacacttcagttaaagaaatacatgagaactgcttgtcatgaccagacaagataggaaaggggaaaccccagaaacgtgctcttcatctgtcagccttttggaccaagaagctgtcactatcacacataagcaccattcccttagagtggatccaggtgttgactataaccagatttactctttgcttactaggttttccattgtcaccattggatgaacctctggtttagccacagttgtgaaaataaatggaagttggttgattgtctagaaagtgcaagaagatggccctgctccttttctgctgaacatttagtattggaaactcctacttcccttttcattaataatgtgtgcaagtttcctattagcggggaaggtgtggggctctgctgggcttctcttgagcatatctgagaaatgatgttcatgtctatctcaaccaggaccagaccctgtgacttactcggtaataacagtccacacaagcctcgttgatattaaa

SEQ ID NO: 117785 - DNA, 1000 bp, Homo Sapiens
caggcagcatatgttgaaataagttattactggtacacacctgcattgcctcaccagtgtatttatttgttattaaattgatctgacttctcagcctcatttggactaaaaaaagaaagcagaaatccatgaacacattgcttctcggccttttggctaagatcaagtgtagaaatccatgaacactaaaggacttcattgattttttcagagagtagaaaacaacttagtttttcttttttcctgaatgcgtcataggcttgtgagtgatttttgtccattcaattgtgccttctttgtattatgataagatgggggtacttaaggagatcacaagttgtgtgaggattgcattaacaaacctatgagccttcaatggggaagaccagaagggtgagaggggccctgaaagttcatatggtgggtatgtcccgcagcagagtgaggagatgaagcttacgtgtcctgacgttttgttgcttatactgtgatatctcatcctagctaagctctataatgcccaagaccccaaacagtacttttactttgtttgtacaaaaacaaagacatatagccaatacaaatcaaatgccggaggtgtttgatgccatatttgcaaattgccatctattgaaattctcgtcacactacatagacataattgttatctccttttggcttatgtgattttctgtttacaagtagaatagccaattatttaaatgtttagttgccacagtgaaccaggagtcactgagccaatgactttaccagctgctgactaatcttcatcaccactgtagattttgctgcatgtgcaggtcctctatttttaattgctgttttcgttgctgcagtactttacaaacttctagttcgttgagacttagtgaccatttggcatcaagttaacatcacacaataggaaacaccacttccacaagtctcaagcctcagtgctaaagtactactgaaaaggaactaggaagtttggccaatt

SEQ ID NO: 117786 - DNA, 1000 bp, Homo Sapiens
atccgtgccaaactgggtaggtggatttgagcggaaagactcccaaaatgtgccaagaatttcccagtcccaggcagggcaggggaaactaagggcaagcaggatacagggcgagggatgtggcaggtgagggggctcccgcctgtgccccttctcctcaccatgtctcccccaccctgcctcagttctccgttccccttcatctccgtccccctctttgaagctgtccccatctcagtgtcagaccagccttctcctcagctgaccaccctcctctgacccacgccccctccttgtctgaaagaaaggagccttgaatggtggagggaggcagtggggagaaaggtctcaccggacaggttgggagaatgaggtcagcggtgctggggaacagatggagggggcagtggggacagggcttgggcagacaccagcaggaataatttgaaatgtgtgaggtgactccccggagggccttgggcttgggcatttgggaaaagaatgatgtctggaagggcttaagggacacagtggacgaggggagagtcctcatctgctggcattttgtggggtgttagtgccaaacttgaataggggctggggtgctgtcttccactgacacccaaatccagaatccctggtcttgagtccccagaactttgcctcttgactgtcccttctcttcctacctccatccatggaaaattagttattttctgatcctttcccctgcctggtctagctcctctccaaacagccatgccctccaaatgctagagacctgggccctgaaccctgtagacagatgccctcagaattggggcatgggaggggggctgggggaccccatgattcagccacggactccaatgcccagctcctctccccaaaacaatcccgacaatcccttatccctaccccaaccctttgcggctctgtacacatttttaaacctggcaaaagatgaagagaatattgtaaatataaaagtttaactgtt

SEQ ID NO: 117787 - DNA, 1000 bp, Homo Sapiens
gatgttgcaacatacgtgtaaaatgggtgttacatctatcctgccatttaaccccacagttaataaagtggctgaaaataatagtagctctggcttggtgcttgacctggttaaatactgtcttaaagctcatacaaaacaaataggcttttccataagtggcctttaagaaaacatggaagacaattcatgtttgacaaatgctgacagggtgaagaaagcccagtgtaaaaatgaatcgcgttttaagtgattcggttaaagagtttgggctcccgtagcaaactaatactagataataaggaaatgggggtgaaatatttttttattgttgaatcattttgtgaatgtccccctcaaaaaaagctaatggaatatttggcataaagggcatttggtggttttatttttgtttgagggggattgtcagaaaatcccttttctctcttacgtctaactgactagggaacaattgttgatatgcatagcattggaatacttgtcattatatactcttacaaataacacatgaagcaagaatgaccaatattctgataattggcactggatcacaaaatgtgataaaactttaaatgtataaaactttatcaaataaagttttattttcccctttaaaatgtatttctttagaggcattacttttttaaaaatattggtcaattcctgacataagatgtgaggttcacagttgtattccagtattcaagatagattcctgatttttcaattaggaaaagtaaaatccaaaatgttagcaaaacaaagtgcaatattaaatgtttgctttatagattatattctatggctgtttgtaatttctctttttttccttttttatttggtgctgaatatgtccttgtaggctctgttttaagaaaacaatatgtgggaaatgatttaatttttcctattgctcttccttgtggaaaataaagtgttttgtttttttctgttttgtataaaaaaaaaaaaaaaaaaa

SEQ ID NO: 117788 - DNA, 1000 bp, Homo Sapiens
ctcccagctactaggaggctgaggcaggagaatcgtttgaacccaggaggtagaggttgcagtgagctgagattgcaccactgcaccagcctggcaacagagcaagactccgtctcacaaaaatgaataaataaaataaaaataaaaatgttactttttaaaaagtaacttttttaataatataagaaagaaaaatgccctttcacactgaatcttcaagttctaaggaagaaaagagtctcctttcgaatgtgaagaagtaaatttagaggaaatcaaacaagcatcactttcctcagtggaaaaacttatgaaacttcttataagagagagtaatctcaggccggacatgctggctcatacctgtaatcccagaactttgggaggccgaggcaggtggatcatttgagctcaggaattcaagaccagcctgggtaatatggcaagagcccaactctactaaaaatacaaaaagaaaagaaaacagccaagcttggtggtatgtgcctgtggtcccagctactggggaggctgaggtgggaggatcgtttgagcctgggaggcagaggttgcagtgatcaggaattgtgccactgcactccaacctgagtgacagagcaacactctgtcttaaaagaaaaaaaaaaaagagagagatagtaatctcttgggcaaaaggtatcaaataattgaaagaaaagtttaaacacatttccgagaggcagggcaactaataactggtcagaaaaatttagacggtcttcattttaaaattggcatcaggaaggattaccatgaacttattttaaatccatattgtaccagaatgactatgtctgtgtttcttaggaatgttgaagctttttgtgaaaactgtactgtatacatatataaatatacacacacttacatgtatgtattttgatagatattacatggactaaattttgtcaatttcatgtaatttaccctttgcaataaaaatgattcattaaatata

SEQ ID NO: 117789 - DNA, 1000 bp, Homo Sapiens
ttgactaatagctcatgcatcttattaaatgggattctggacttctacaatagtgtggaaagccacatcacaaaaaaagccacatcacaaaaaaaagccagtgcctattgagtatatcaaaccaaaaaagaaaaaaaaaagttttaagaggggtcaggctggcagataaaagtctcttatgaagcagatataaatccagtaagctatttttttctacctatgggcaagttcataagtcattgctggatctgaaccagtgttcttttgtgtaagtacaaccatatttcagtcagtccagaggcagttaaccctgtagcacttactagactggtgacaactggctggatgtggagaataagtgtcaaaacctggcttcaatgtctatttcttatgtctaatggagttcttatattacagtgtttgtttagctatggttactaatatgtttgttatatttattttcggggagaggatcttgttattgtttcctgagattatttaaaatgttttttctttgatgtatttctgtctttcttatatgtaaggagttataagggttattatattttcatttctggtttttactatacaatggttatctaacatactaagttggtaccctacctacccgtaaaatatgaaatactcagaagtaaagtgtgtgggcaatcagaagcatagccttgaaggacctgacagcagtatgaaaagataaataggccaggcatggtggctcacgcctgtgatcccagcactttgggaggccgaggtgggtggaccacctgagatcaggtgttcaagaccagcctgaccaacatggtgaaaccctgtctctactaaaagtacaaaaattagccaggcgtggtggcgcatacctgtaattccagctactcaggaggctgaggcaggagaattgcttgaacccaggaggtggaggttgcaatgagccgaggttgagccatcgcactccagcggtgaaacaagagtgaaactccatctc

SEQ ID NO: 117790 - DNA, 1000 bp, Homo Sapiens
tctcacaccggctggaggagttctacacggagagatttggcgacgacgtcgttgagattatcaaagactctaaccctgtggacaagtccaagcttgactcacaaaaggcctacatccagatcacgtatgtggaaccgtactttgatacctacgagctcaaggaccgggtgacctactttgaccgcaactatgggcttcgcacattcctgttctgcacgccgttcacgccggatgggcgcgcacacggggagctgcccgagcaacacaagcgtaagacgctgctcagcaccgaccacgccttcccctacatcaagactcgcatccgtgtgtgccaccgggaggagacggtgctgacgccagtggaggtggccatcgaggacatgcagaagaagacacgggagctggcctttgccaccgagcaggacccaccagatgctaagatgctacagatggtgcttcagggctctgtagggcccaccgtgaaccagggtcccctggaggtggcccaggtgtttttagcagagatcccggaagaccccaagctcttccggcatcacaacaaattgcggctctgcttcaaggacttctgcaagaaatgtgaggatgcgctgcggaaaaataaggccctgattgggccggaccagaaggagtaccaccgtgagctggagcgcaactactgccgcctgcgggaggctctgcagcccctgcttacccagcgcctgccccagctgatggcacccaccccacccggcctcaggaactccttgaacagagcaagtttccgaaaggcagacctctgagcccacaaggaccaaagctgtacctagaggaaccagcacccgggcctcagctgtctgtgctgcgaggggagtctgccctggtgcccactgggctgtggggtgaccacactgtacttggggctgggccctctgcccctgtgtccccatctgtgtgcactgatgcttcctcccttttttaatttaaaatggtttttataagc

SEQ ID NO: 117791 - DNA, 1000 bp, Homo Sapiens
aatttatatcatccatgtttagtgctttttaaacatcaactttactttctaggtaatgtggctgtgcaatatttttttaattttatctttttacttttctattactttttcatatattttgctacctaagtatttcagtgaaactttaagcccatacctgtgtctgattgtttattattggctttccacaattcttacatcagactacattatattagagaccattattgctagaatagcatgggatttaaaattttctaatactgggggtattatttagttaattataaatttttcttttcacattttactgtgttttaactggaaataaaattatggctgctacaatatattttttgaaatcaacttctgtagttctaaaatacaactttatcatacaatcaaaccaggtagttcatataaaacagtgtaatacaagttttctataaagtcattactgttgcttaaacatatttcatgcctattaaaatatattttctactggtgatttcaacattatttctcatactgacttttattactggaaatgttcctgtacatgttggcagcagataaagatttttgaatgtttgaatgccctctgccttgatttggttggaatttttgctaaattggtaatgttgcttgaactttatgactacattttcttttaacttttttcatggacttccttatatgtacataataattaaatgttgaaatttatgaaatacttttatgaatttagataatttttaaatattgttaaaatttattgaactaaaaagtaatgtacataaaataattcatgttaaagatggaacaaaataattaactttacatgtttggtgatacagatgcaaatgtttttgatatatggagatgttgagtcttttgactttactaaaggtgctgaatagcattaaattcactattttccttttctgttttacttgtgaaaataaaaatgcactaaggttaaaaaaaaaaaaaaaaaaaa

SEQ ID NO: 117792 - DNA, 1000 bp, Homo Sapiens
gactttatttatatggcatgaaatctctggtttattttgggattttttgttgttggtgttgtcaaagtttgttttttctaaagttgtgtgattatatatttgacattttacatttcaaagaaaggtatgttgtctaacaggggaccaacagaaggtagtattgacaactgttcccgcttctactaaaaaaaaaagagcacaaaagaaaaactaaattattgaaaaattaaaaaatgtcattgtttcctgtttgttaatattagggttgtaaggtgtcgttttgaggtatcgactgtgattccttcccccaccctccattctccagcggttggccggtgttagaactcgctctctttgagtgactggctacaagggcctgagaggtggccagccagggttggagctggaggggatggagccccacctgaggtgccgtgtcacacgggttagagggtcactgggaaacaccgggcggtggcttctgtgatttattttcttgatggtaacttctcagagcagggcgattgggacatcaccagccagagcacaggaagccaccctgcctgctggggaggagggacccacacaagccccctcggcagtttgtccccccagcttcggtatgccttcagggaaaggtcacagctggggaggaagcggggggacgcctgtcacccctggcaggtggtgagttcaggtgggggctccctgctgcccccaggcctgggagcttgaagccctcccggcatctggcatccgagcctcccgccctccagggtgcgcttccctctcttgccgcagcatacacgagggcaggcagtggccttgtcactgtatcttgcatcagagacaaaggaggacccgctttagccctgctgcgggaaatgggggagggcccagggccagcgcattgtgcactggtttactttaaaatgtacagattcttctcgttaaattcttgatagattttttattattattaaaagtcagtttataatac

SEQ ID NO: 117793 - DNA, 1000 bp, Homo Sapiens
acatgaaaatactgcactttaagtttctcaagactctgaaatatgtaaaattcaatatttttatattcccagaaattgtttcttacaggttgaaagtcttttaagggcatcacaaattaacatttactcctaatgcacgcctagaatgtattttaaatacttactaagaagaatgaaaattctttggttgttttatatataaataaggcatatataatgacactgtgttctgtgagggagcaggccctgtgagaatcaattcaggacagtatttttttttgtcctttctccatccttgatcagagataaactattaaaactttaaaaaatactcaaaaatatgtaagttttttggttgaacctttagatttgctcataatgtttaacataacaacatttatttcaaatcactgaattcatggagatgtggacacgcttggtttgctctatttttgtttatgtgtgatagtggttctgtcatcatcattcatgttttttaaggcctggtcataaaactttaaattttactagtgttacttaatgtatattctaaaaagagaatgcagtaactaatgccctaaatgtttgatctctgtttgtcattactttttcaaaattatttttttctgtaaagtataatatataaaacttcttgcttaaattgaatttctatattagtggttaattgcagtttattaaagggatcattatcagtaatttcatagcaactgttctagtgttttgtgtttttaaaacagaattaggaatttgagatatctgattatatttttcatatgaatcacagctgttgacaatgtcccatatatttaagaaattatatcatactgatactatttgtaacattttgatttgatttaatctccagggacagaaataattcattggtaaagtgtaataatgcgttttttaaaaatgctttgagaggtaattacttgcatatgagagaaataaaacatttggcacattgtttacaggtgtg

SEQ ID NO: 117794 - DNA, 1000 bp, Homo Sapiens
aacacaggcagttcttccagcaccttggcttcaacaaacaggccccttctttccataccaccacagtcacctgaccaaataaacggagaaagcttccagaacgtgagcaaaaatgctagttctgcagcgaatgcccaacctcataaactgtctgaaaccccaggcagtaaagcagagtttcatccctgtctttaaactgggggtatgtccactctagcaagtaaaaaaactactgttacacgttccagtaactctgtcaatattttcttgtatcagaattgttattatgcagccttcatttgggctggtttcatcattttgcactgtgaaatagctttacagtgcattactacagccagaagaacatatatatatatatatatatttaaaaatatatcggatagttgtatacaaatgagcaaggtatttgttgcaacttactacatagcatatacccaaaatcactgaagaaaatcgctggcatcagtgtgcagcaaatttgttcttttggtttcatcactaacaaaagtgcctcatcataaaaatacagttggtttttagggtgccatattgttaaaattagataacttacttacattgaataaacgaatgcgttttattggtaacagatatcattacatttaccagttttaacacaggtggatacagaacttccattctttagtcattccaggtggatctgagttttatattcaaacttttaatacagtttttgagttttgtgtgacttgaatttttaatctttctgtaaaatacgtaacttaaatgaacatattaaatgtgtatcttttcttcagataccagatttgatataatgttgtaacataggtgtgtagatagtggatcctggatggaactggcttctttatcgagaagaatataattctgcatgaggacttaatgaatccaaacctgtgtcatgcctgtgtgcatacccaattaaacactggaaataaaaattgttttggtgaaaaaaaaa

SEQ ID NO: 117795 - DNA, 1000 bp, Homo Sapiens
agtgaattaatgaattaagagtggctggcagagtaggcagaaaaagacactgcaaatggcataaaaattaaagtcctagctgagttctcaatggtaaaggcatcagatgtcttagcagtcaagctagaaattcatgacaatgagtattactatttgcctaatgacaactcattgctctccatgtaaatgtaatcaacagatgaagagaatataattgctctgcttttccactaaaactccatcttagtgaattttaaattatccagagatgtcaaactgccaaataaaaatatttcagtagtctttgcatcagcttaccttgtaccagaaacatttccaatttactatcaaattatagtaactgagcctgtgtgaagtatctcatcattttcgaaaggaacaccttgtgtgatgccagtgagcatttctaaaaagggtgtgaggtagaggtaaaaataaggtgagagaccatttcagaatgcactgttgctcaaaaaggtgatctggttctttcttcagagatttctacggggatagaaaatcgggagtctgccctcattaatctgtgactccacctcttgcatcaaatcaatatctatttgttgagcacttattgattaagaccttgcatatgtctgtccattttgatttgagatacaactttttgtgtgggttgaatgacaaatcactccaaacaaaactgggcacagagaatcagctaggagaccagttattcagggtccatttctcttggatgtaaaggagtcctgggtaaaatgtggctgtaacctaaaccaactagtccttgtgatttgtttctgccctctgtgtttcctgttgtcaaatgctaagtgtgtgttttgcagtcatgaactaaagcacaaaaagatgcatgagacattgtagtcatatgtctggtgtgacactttggagcaaaaaccttgcagtggtaaataaaaaatttccaacagggaaaaaaaaaaaaaaaaaaaaaaaaaaa

SEQ ID NO: 117796 - DNA, 1000 bp, Homo Sapiens
acagataggctgatggttattgccttattttgactgcatttctcttaaatggatcatttaaattagttcttcaagtaacagtttactggttgttccattcctgaatatgcaggctaatttgtacagatagggattaaggaatacagactattagagaagatccttatatttacatctagtatatatgtggtaaggaaatgccgattcttcattataaacaagttttaaaattgttctttcttagttcaaatgatagcaatacccctatagcattaggtagaaacaaattattcattacatcgtaaatctctttactatgtcctagctctgtcctgctacctaaaggatataaagaaatactattgctctagaatgtattactttgttctcccatgaaagaattcagtttgttagtacctatatttttaaactggtgaaactgacccaaatatgtaataaataccatagtagctcagacccaaggagatatttttctaaaatcagttttcgttaaagtacttctacttccgttattggatatggtatctcctaaagtgtaaaaaaaatctgttactatatagtgataaaccatctgctcatcgtaagtgtaaggcttaacaaataagtaatacatgctatatttattcaagtgtctattgcttaattgttaattgtgagcagatttattgaatgcctattctattttctgcagtttacaatacaataactctttgagtaagttgaagtttaattgtgcaacaaatttgtattagagtacaatttaaagtgtttttctctatagccttttttgactggggaagcaaggggtaatgttaattagtacactttgttcttgtactagctatgtttctataagatatggtgccctgtgtatcccagagatgctagaaaactgttctttgctcctatttgtgggttctgtttttgtgggtttttttttttgagaaaatgtacacaataaaacattccttgcttgtta

SEQ ID NO: 117797 - DNA, 1000 bp, Homo Sapiens
tttttcccttccctgggaggctagaacagagaagcccttactcctggttcagtgccacgcagggcagaggagagcagctgtcaagaagcagccctggctctcacgctggggttttggacacacggtcagggtcagggccatttcagcttgacctccttttttgaggtcagggggcactgtctgtctggctacaatttggctaaggtaggtgaagcctggccaggcgggaggcttctcttctgacccagggctgagacaggttaaggggtgaatctccttcctttctctccctgctttgctgtgaagggagaaattagcctgggcctctaccccctattccctgtgtctgccaaccccaggatcccagggctccctgccattttagtgtcttggtgtagtgtaaccatttagtggttggtggcaacaattttatgtacaggtgtatatacctctatattatatatcgacatacatatatatttttgggggggggcggacaggagatgggtgcaactccctcccatcctactctcacagaagggcctggatgcaaggttacccttgagctgtgtgccacagtctggtgcccagtctggcatgcagctacccaggcccacccatcacgtgtgattgacatgtaggtaccctgccacggcctatgccccacctgccctgcttcctggctccttatcagtgccatgagggcagaggtgctacctggccttcctgccaggagctctccacccactcacattccgtccccgccgcctcactgcagccagcgtggccctaggacaggaggagcttcgggcccagcttcaccctgcggtggggctgaggggtggccatctcctgccctggggccactggcttcacattctgggctgactcataggggagtaggggtggagtcaccaaaaccagtgctgggacaaagatggggaaggtgtgtgaactttttaaaataaacacaaaaacacaggaaaaaaaaaaaaaaaaa

SEQ ID NO: 117798 - DNA, 1000 bp, Homo Sapiens
cagtgccctggggctgggggatggggaggaagaggcccctccatcaaggtctgaccccgatggtggagactcacccctgcctgcttctggaggcccactgacctgtaaggtctgtggcaagagctgcgacagccctctaaacctcaagacccacttccgcacgcatggcatggcgttcatcagggctcggcagggggctgttggggacaactagtctccaaggcctgggactgaccagccccttcctcttggagcctggttttccctactgctgcctgatccctcggctggggagttttcattaacattaatattttgttaattcctgtctctccaacctgaagaagaagagcatttgaggattattctagttatttgcaacctccctttgggtttggccctggagtcctagtgtagtggaccctccattcctcctttctgagcccaacactaattaattttatgctcctgctgcagaacccccagtgtgggcctgggggtgggaggatgggacttaggtatgcctgctagacaggttcagggaaggactgatgggggtgtcatggatggacacacctctccacaattccttcaggcatggactggaactttcctcctctaggccgggccctgccctagtgcccacccccgcccccgcccccgcccaaccccaactcactggcactcaagccccctacccctgcagtgcctttcacttctttttttccccagaaatccggggcgggggggtggggggttggtagggatgagtcctgtcaagggggccacaggagaggaggggacaggctctcaggaatcctttattcttgtagtaataataatactaacaaacagttggggaactagggagaaaaccagaccattaaaactgtttgtggtcgaatctccaaaaaaaaaaaaaaaaaaaaaaaaaaaaaaaaaaaaaaaaaaaaaaaaaaaaaaaaaaaaaaaaaaaaaaaaaaaaaaaaaaaaaaaaaaa

SEQ ID NO: 117799 - DNA, 1000 bp, Homo Sapiens
gccggagtttgtgcagcccatgcctagcgatgctgcacctcccatgatgtcctggctttgtggcaaccccagggaggtgcagcagtttcactccttcctccactgtgtccagttttatttacacaaagcgagctgagaccacaggttcttgctctggatgagcagcatgacaccatcaaaatttaagaccatgatgaaatttcagtttcattcaaatgttacctaaaatttatggtgtcagaataaagggagatcatagtgagttaatttgatattcatatcgtggaagtatacatatttgtttttccaaagttttatatgcaggtttttgttgtacctgtatccagatcttcttttcactgttctaacaatctaacactttcatagaatcatttggatcttgtatagagtgtaacttattggggataaacacttcaacttttggcagaaaatactttggattctccccaaggtcatttgtattcagagtaaatcagtggtccacccccataaaactgtaagacaagcctcctgtatgaagccagaagcacaagtgccttcagagggcagttgattccagtccagttgcctccctagcttgtgtgtggcctgcctccaccatagcagggactagggagggaggcagggaacgttttttcttttctacatcttcacaggttcggctgggggcagctgataggcctaaggccataccttactatttaagatactctgatcgcacaactgcagagacagggttccctcactgctagtcagcttcttttggaaactggacaggccattgccacctgcactttgaagaagtgagcaaagacgtggccacatttctaataagttgaaatggtctttctcccttcctcagagagcaaccagcttctttttttttaaaagtcctttctatctgttggatacaacagtgtgcttttggtgcacattttttagcaatagttgtgaattaatggcaaaaaaaaaaaaaaaa

SEQ ID NO: 117800 - DNA, 1000 bp, Homo Sapiens
aacagctttgcagctcttcatctgcctgcttttcagtctattgtaggggcagagggcttgtcccttgcattccggcacatggccagctccctgctgggccactgcagccaagtctcctgtgaaagcctccttcatgaggtcatcgtctgtgtgggctacttcactgtcaaccacccagataaccaggtgatcgtgcagtccggccgccaccccacagtgctgcagaagctctgccagttgcccttccagtatttcagtgacccacggctgatcaaagtactgttcccttcacttatcgctgcttgttacaacaaccatcagaacaagatcattctggagcaagagatgagctgtgttttactggccactttcattcaggatttggcacagactccaggtcaagcggaaaaccagccttaccaacccaaagggaaatgccttggttcccaagactatcttgagctggctaacagatttcctcagcaggcctgggaagaagctcgacagtttttcttgaaaaaagagaaaaaataaatgttttggttgattctgtatttgagtacccttgttaatattttaaattgtccaaacaaacattctaattgttccttaagaactcattttcccatgtttatactcttcccacactgtagatatggcatgtactttacactatttataatgactgtagatacttgaatgttctacttgctaattttgcaagttgagtttatttcatttatgcagagtatcttggagtttggtaatttccatcttatgataatatatactttgcatttgtgatatgggtgaaaggagacataaaattagcaagtctgttttgttcttgtaataaaagtaacttattctgttttcattgttgacttttcatgttaaggaaatacgaatctgaaagaaaaatgttaactccagctcttgaagtatcttaaataaagacttaattaaagtttaaaaaaaaaaaaaaaaaaaaaaaaaaaaa

SEQ ID NO: 117801 - DNA, 1000 bp, Homo Sapiens
attcaaagagagttgctggaaagagtgaaaatgcagttggcttctttcctggaagatcctcagtatcaagaccaacattctttgcatacagagatcataaaaacatttggtagagttggccctaacgcagaacccaggttccgagatgagtttgttataccacatttgcataagttagccttggtgaacaacttacagattgtggattctaaaagactggacattgctacgcatctttttgaagcctacagtgcactttcctgttgtttcatttcagaggatttaatggttaatcactttttacctggtctcagatgtttacggactgacatggaacatctctctccagagcatgaggttattttaagttccatgataaaagaatgtgaacaaaaagttgaaaacaagaccgtccaagagcctcaaggctcaatgtcaattgctgcaagcttagtgagtgaagatacaaagaccaagtttttgaacaaaatgggccagttgacaacatcaggtgccatgttggccaatgtatttcagagaaagaagtagaagcaggaaagaagcccccagtaaacactaagatggacctcaagccgactggttccttgtacttgaagtacttgccttttttgtttcctcagttttatgttcttgcattataattttatcctaacctccaaagatatttgcactgcttttaattactgctgtatatttgttgattttggagttacaactgtggtgatagaaaattgagttgatggtctgtaccaagtcccttgtctatgttcttgtctttcagaataatttttatataaatatatatatagtgaagaagttttttttaatttttggatgggatattcgcaaatatctgtattatacactaagctattacaatggtacttaaaataatgtaaatttgaagtcattgttataaaataataaagtggagattacttaagtatttaaattatgaaagaataaaaaaaaaaaaaaa

SEQ ID NO: 117802 - DNA, 1000 bp, Homo Sapiens
gctatgctctgggcataagctgtgcctatgtatagtgtatatttctttttttcttttttttaaggtctatgggttttgttttttacatgcaaacattgtaaattatacagaagataccacagatagcatttataaagtatacagaaacattatctgaaagcaaagtatgatagtttgttttgctatacagtacatctatattgatagaggttcatgtttaaattatacatatttattagcatcatattgtcatttgttttgagcagtctgaataaacgagaccgggaaagacatccctggcaggcatcagaactattttgcacatgatttttaaaggtatttattagaaatcaaagaacactcaaaataaactcagtgctcaaagggttaagtctatttgaaaaggttaaaaaaaagaacaaaaaaaaaaaaagaacttgtactgtatttcctaaacattgataaagcctttaaaatgtttgtactgtaatactttgcttaaaagtcatgaggcattctgtgatccaacctctttcacttatttataagccctcttggttgctattccatattgtaggatgcctttctatttcaattggtaactttctgttttgttcttcctaattattctcccaagatcccacactgcagctttatctttaggcttatgaaaggtaacccgtggttaccggctctccaagtgattctgttcttctccatttttggcagttaatttgcagaagtaactgacagctgacaccatatgagaacctttgtataaaatattggcatgtaaacagcacagacaccgtaacacactctgtgccctgtttggttgttgacaatgaagcaccattatgtgactcttcatataacccttttttctacggcagcattaaaattgtctttttgctataaaaaaaaaaaaaaaaaaaaaaaaaaaaaaaaaaaaaaaaaaaaaaaaaaaaaaaaaaaaaaaaaaaaaaaaaaaaaaaaaaaa

SEQ ID NO: 117803 - DNA, 1000 bp, Homo Sapiens
gatgtttggatgaacaactgatacattttagttagaatgctttttcagcattatggctaaaatatatgtctaacccagtgctatttaggtgaaaatgctaattgataaaccagaagtttcttttgagatttgctttaaagaaatgctttagtaagaatatgaacaatttcctgatgtctcctataaattgtgattgtttattctattactattgttaaaaacttgaatggtatttatattggctgatatttatatacttaatagattgagttctgtaagggcaaaaacggattgaaatgaacatagcgttttgcactaatgataagataacctgagaggtagggttgaggaacacagggttgaaagctgttggagaggggaaaagttgtgcataaagaactgaaaagggttctggagtgttcattcagagtgaagggaaaactttatccttctatttcttataaccagacaggaggagttcttccctttgaaaattgcaaaaggaatgagaactttgcagttggatgaatagagaagggaaaagttgctggagcacggagtgaagatgggaggagctgttagcaaggcccactgctgctcctgggtgagaagggagctctggagcaggaccagctgggggccggcactgctgcttagagtggaggaggctggccaaagagactgtgggctgttttcagtcagggagcatgtgcattgtttgtgctcaatttcagacactcatttataaacaaattcaaccaagggatatttactgctttatgttgcttatgataattattttgcattaatacagtatacacatttgtaaattcaacaggaaattattgagttttggaaagctacagtaatttctgtattacatcatttatatgtgaaaagttggacatttctgtaagtttttaaaattatccatttgttactttaacattttaaaattatggtgttttcctgattttaaaagcaatattttccttactgt

SEQ ID NO: 117804 - DNA, 1000 bp, Homo Sapiens
tgtgcagtgaatgtgggaaattattttgtcactttttttttttttttgagatggaattttgctcgtcacccaggctggagtgcagttgtgcgatctcggctcgctgcaacctccgcctcctgggatcaagtgattctcctgccacagcctcctgagtacctgagattacaggcacccaccaccatgcccagctaatttttgtatttttaatagaaacagggtttcaccatgttggtcaggctggtgttgaactcctgacctcaggtgatccacctgcttcagcctaccaaagtgctgggattacaggcgtgagccaccatgtccggcttgtgttgtgacatttaacacaagatttcccaaagaagaaaggccttatatatgctgtgaatgtgtttttgcttgttagtttgttttaacttggtatgacggcactggaggctagcctttgagaagagccttctctgatgtgactcatgtatccaaacatccatggatttcccataaatttgaggtatgtgggaagcatgtgtagctatgttgtactctctaaacctgcccagggaccttaccagattcgtgtcactgccagtttctgcggctgaagccttttcatcactacccgctgggagacccacagagtgtgcatcagtcaccaccccaacatgctcagggaggcagagttcttccattagttggaggaaagcacgagtagtctaagctcttaggggggtttctcatttcctcctgtggctacatagtgcatataactaccccagtgttggccccaggacctgatctgagttctgctggcagcttccagaggattgccttttttgaggacattgttgatctcaggcgatgcttgtgatgaagcattttttagcttccaccacttaccaggaactgcctgttaactggcttgtgcaatgataaaggccttttgtttaagtaaaaaaaaaaaaaaaaaaaaaaaaaaaaaaaaagaaaaaaaaaaaaaaaa

SEQ ID NO: 117805 - DNA, 1000 bp, Homo Sapiens
ctagcctcaagcgatcctcctgcttcggtctcccaaagtgttgggattacaggcatgagccaccactcctggccaggagtttatatgtatactgtggatactagatcctcatgtggtttgcaaaaactttatttatttatttatttatttttgaaatggaatcttgctctgtcgccaggctggagtgcaatggcgtgatctcggctcactgcaactaccacctcctgggttcaagcgattcgcctgcgtcagcgtcctgagtagctgggactacaggcgcgcaccaccacgcccagctaatttttgtatttttagtagagacgggatttcactgtgttggctgggatggtcttgatctcttgacctcgtgatccacccacctcggcctcccatagtgctgggattacaggtgtgagccaccgcactcagctgatttgcaaaaactttcttccatactgttgtttcactttctggatagtgtcctctgaagcacaaaagttaattttgatgaagtacagcaatttatctgtttttttcttttgttgcttatgcttttgctgtcacatttcagaagccatcacctaatccaagatcacagagatttacacctagtttctaataagcattttataatttcagctcttatgtgtagatctttgatccattgtgaattaagttttgtgtgtggtgtaagagcccacattcttttgcatgtggatatccagttgtcccagcaccatttgttgaaaacattatttttccccattgaattatcttcgcaccattattgataatcagttgaccaaaaatgtacaggcttatttctgggcacttgactctattccattgacctgtttaaccttatgccagtgccacagtgccttgatcagtgctgctttgttgtgagaagttttactttgttctgcttcaaggctgttttgactcttctgcatctcttgcatttccaaatgaattttaggatccactcatcagtttcttc

SEQ ID NO: 117806 - DNA, 1000 bp, Homo Sapiens
acccccacatggaaggagtgtcctatctgtaaggagcgctttcctgctgagagtgacaaggatgccctggaggaccacatggatggacacttctttttcagcacccaggaccccttcacctttgagtgatcttactccctcgtacatgcacaaatacacactcatgcacacacacactcacacacatgcatacacttaggtttcatgcccattttctatcacactgggctccatgatattctgttccctaagaactgcttctgtgtgccctgttttcatcccaagatttctcacttcatcctctcctacctggctcttttgtcccagggaggggtcctgttcggaagcagtggctgaatttatcccctgaaagtggttttggaggaaccgggatggaggaggccttcccctgtgggaatagaatcgtccactcctagccctggttgcttctgatacacagccactgcacacacacactcacactcacactcccttgtctgatgccccaaagccaattcctggggcaccctaccctctcttatttggagtttccgttggtttacctgagttttctctggggtctgcacagaggcagcagcatggacatcatggcctctcaggtcccttttggttctcagtttcattggttcctctttctgttcccccattgacttctgtgccccaccctagccttttccataaccttaggtattcagtttggaggggttttttgtatttttgaggattcctgtattctgtatcctctcctcgcatctcctcacatggaaagaaataatgtatttgtgccttctgtgaggaatggggggaacaagtggtcccaggtatccccatttccaaggcccccctccctctccaggtccccccacagcaataaaagcttccccctgatatccatccctttgtagtttgaacaaatatatttatatgatatgtaaaaaaaaaaaaaaaaaaaaaaaaaaaaaaaaaaaaaaaaaaaaaa

SEQ ID NO: 117807 - DNA, 1000 bp, Homo Sapiens
ggaggtgagtttagggagggccaggaccatcctcctacccctcataccctcccagcatatacaaaaggggaggttttagacaggctccctgaatgttaaccacagaggagtcactccttcattcctcctctgtctctttgcacttttcttggtcttggccacagcctgagtgacgaatttcctactgaatgtaccaagttccaatttttaagggggggaaaggtttcaaatggggaaaaacacacaaaaaaaatcactaaaaattcccacaaatcttgtttctggcactttagaaaaactgcaaaaaaatacgtaataaagaatacatatatatatatatctacacacaaattatatatctatctatctatacagcggaaccacaagagagactgaggaaggcctggaggcaggggcagaggtgacgacagtgcccctatatccttaacccatactcctctgaggcaaacaggcatgggaaaatggaagggttgaggatggaccggagaattggaacttcagaataggtcaaaattccaaaaccatggacatttttttttgggagaattgagattgtagacattttttttcttaagtatgatcaaggaaaatagcttccagaatgtggtggttctgggcaacaaatgagattgtggcgacgtggagattaaaatatatgtatttgagctggggaatttgaatattgtgagtttcagatgttggaaatttgggattttgcagttttgtcttttgaaaatgatcaagtcttgtcagttcgtgccctctttccccatgttccctgggaagacgggtggtggcagagtgagaaggccactggttctgtgccgcagcacgcaaaatttagaattctacagactagctctatacgtagtgaggacccagatttagagaaactgaccaatatttatctccgcatttgtgtgtgtgtccaactctgtaggccaataaaccaacaagacaaatgaaaaaaaaaaaaaaa

SEQ ID NO: 117808 - DNA, 1000 bp, Homo Sapiens
tcccagacacagacccctctcaggtttacagccccggcctgccgcctgccccggcccagccctcaagcatcccaccctgcgcactggtcagccagcccacggtccagttcatccttcaggggagcctgccgctagtgggctgtggggcagcacagaccctggccccagtgcccgctgccctgaccccagcctcagagccagccagtcaagccactgcagccagcaactcggaggagaagaccccggcccccaggctagctgcggagaaaaccaagaaggaggagtacatgaagaagctgcacatgcaggagcgtgctgtggaggaggtgaagctggccatcaagcccttctaccagaagagggaggtgaccaaggaggagtacaaggacatcctgcgcaaggccgtgcagaagatctgccacagcaagagtggagagatcaaccccgtgaaggtggccaacctggtgaaggcgtacgtggacaagtacaggcacatgcgcaggcacaagaaaccagaggccggggaggagccgcccacgcagggggccgagggctgaggccaggcaatcacgggctatgcccggggagctgtcgggagtggcgggaatcggggccatgcccggggagctgtcgggagtggcgggaatcggggccatgcccggggagctgtcgggagtggcgggaaatggggggcatcaccatgcctgccgtcgggttcctgcgctgacacctggtctgtgcacctgtgttgctcacagttgaaaactggacacttttgtatgtatattatagagacactgtttccattctaatttatcaaaaatggattatctttagaaacctcttgattgacttactacttggaagataaagcacttggtgatcaagaggggctcctggtggggtggcgcgtccttgataaatctctaggtggcctcccgccaacagctgctgtgtacctttggctctgaattaggaatatctttactttctcttttcc

SEQ ID NO: 117809 - DNA, 1000 bp, Homo Sapiens
gaactcttctctctgggggcagagcttctatttatggcacatagacatcagctaggcttttgggaatcgtttgtgttctttgtggaaatgtcctttagaagcacccatgaagtagtgtgttcagactgtgcacacagaaaacaggctctgccttcacatgtgagacggtggacttttcctctggacaaaatgacagcatcctggcgactccacagtggagctgagcgccactccctgtagccgatctgggactgaaacgcttacacctctgcctcagaaggagtcccccatgccctgcctgaaatgacttcactggacacagcggggctgcagctaacggggtacaggtaggagctaactaacttcacccctgagtccacttgcggggtaagagataaacagtaacccttccaggagcccactgacgttggagtgctaaaaatgccccttcagggggaaaactgcattttctcttccaaaaaggaaaggttcttccaggcgagaaacctgtggtctagaaccacagcaagaagaggaggcatgctggcctgcaccggaagactcactttgtctgccctgcgccagcctcacctcaccctgcagttcccgtttccgccatggatgcctcatcaccaaccctgaccttccccctcccaaccctttattcatcctcactcccactcatacccgcctccctggacagttccctgctgcagagttctttctgctttcagccctaccttggtggtgatttacctgaaaatcttcacaactgatcattatctccttctctttgagacctgactgaaaaaattaggtgtgcacacctgtaatcccagctacctgggaggctgaggtatgaggattgcttgagcctgggagtttgaggctgcagtgagctatgattgcaccactgcactccaacctgggtgacagagtgagaccctgtctcaaaaaaaaataaaataacataaggaccttaaaaaaaaaaaaaaaaaaa

SEQ ID NO: 117810 - DNA, 1000 bp, Homo Sapiens
agcatgaaaatacaaggggaagggcaaccattaacagattaaaagagacttaaagagacatatcaactaaattcagtatgttggcattacttggacctggtttgaacaaaacataaaaagccattttggagacagtgagggaagtgtggacatggactaaatattaaatgatatttacatatattaatttggttagggattatgtcagtgtgattataaaaaataaaagatcgtatgatatgagatacatactatgaaatgaagatagacacatttggattaaaatattctagcaaaagaaataattggcaaagagagctggaaactaaattggcaacatgttgataatttaagtggagtgttttgttcatggagacttattgttctaatatttctacttttgtatgtgtttgaaatttcaataataaaatgtttaaaatcaaaaccaaaattatagactatgtagaaatgaatgacagtgagatgcctgcacatctaaccttgtcagatataatcaaagttctgttcagtgacaaattaatgccctgtaatgtggtaaggaaatcttatttgtggatacagtcttcatcttcttcacttacccacagcagcaacaccaggcctgtcacacagatgaatgtgttgagggaatgaataagtatttccgtcaagaaaaaggaaacaacaaaataaaaccaacccaagtaaagaacagccaagtggccaggtgcggtggctcatgcctgtaatcccagcactttgggaggccatggcaggtggatcacctgaggtcgggattttgagaccagcctgaccaacactgagaaaccccatctctattaaagatacaaaattagccaggcatggtggtgcatgcctgtaatcccagctacttgggaggctaaggcaggagaatcacttgaatccaggaggcggagtttgtggtgagttgagatcgcgccactgcactccagcctgggtaacagagcaagagtctgtc

SEQ ID NO: 117811 - DNA, 1000 bp, Homo Sapiens
aaggcctgaacatgtgcaccctcccagggacactggatgcgctgggagccccggggaccccatggggtgctgtaatcatggaccgtaggccatgtgatgggcctgaagtggaggctgctcagcacagagccctttctggtgcctctcgaactcagtacgatgcaagttctagacacacagatggcctgtggaggcctctccctggtgtgggcccacaggtacttccatggttgactcctggcttcaggaatcccttcctccctccagaggcttcccagggccctcggtgcccacgcctctgcccatctggaggcctgagtaaggagtggctcagccccacgttcccacactgctcctgctctttgccctgtatcccatgaggctaggagacaggagtcctgggtttgagccctgcctccccccactgcctaatgtgggaacccaagcaaggcccttctaccttttgggcctcagtttccatgtctgtaccacaagagggttgaccagatggccccaggttttcctttaggtctgacatcctgagggtcattcatcccatgcccagttccccccatcctactcctaacagatgtgaccctacttgaggccgccttggcttttgggtcaccctgtctcatcccatcaccccaaacataccctagtccttcagcctggggctctggcatctgagcccgagctcctgcccctgctgtgggaaaggtggggaagaaggggatctccctcccgggcccacccagctgcccagcctttgcccactcggggagcagatcatgcatgccaatccctgttgccgcatggagctcctcagcccactgacctctccgtgcctggtgcaggccaggcccccgtcttccgcctgcctctgcttccccgtcatgcatggtggtggtgtttctacggtgtctggttctgtgcccgtctctgagacagtctctgtgtggaatttgccttaaactgaagtaaatttggttcttttagt

SEQ ID NO: 117812 - DNA, 1000 bp, Homo Sapiens
aaaatacaacctcttattgtatagtttgccttgattataagccatagtaaatcgagctgttcgcatttttgcaggccttgcattttctactgggaggttcatcaaaccttccacttagcaatagccctgactcaggcagaatgcctcataaattagccttcgaaagaaaagtgcacgctcagacagtgtgtggaggggcaggagcgtgatgcagacaaggacttagtcatgactgattttccttagccagtttgtaatggcttatggggaacattgtgagcttcctacctgacatgttggcagaagtagaatattaggatcctcaagcatctctaccgtaagtccaaagaatttaggtccctattgtcactttgttttgcaatgttttttataaaaatgcaattaaatacctcactattaaactgccatgatgcctcagttaaaaaaaaaattaaatgtccgtcagtgtctgtgccttggtgaccattgattgctgcttctgcccaggccgctgcaaaggttaggactttgtccactcacatgctttccaccctgagcttgttctaaggagagtgcagatcacgaatgcacctgcttccaggcagtgcacttagagaaaggtcactggcccgggcttgggagcctgggggatgcagctctctctgtgggcttctcttggtgcacggttctgcctctggacactcaaacctttttagggcgtgtgcagggctggggccagtggacctgacagtaccttacctggctctgagaaactcgcaatcctagtttgcacaaatgaatagtttgttcttttgtgaaaccagaatgagaattcaggttctaaggactagaggtctccctacaaatgaagacttatcagggccctagaaagtgctaggaggaagaggttaaaaaaaaaatttgtccgcgttgcaaactattataaatgattgccacattgcaagctattattttctcccaccatattttttaattaaaa

SEQ ID NO: 117813 - DNA, 1000 bp, Homo Sapiens
tatttttagtagagacgggatatctccgtgttggtcagtctggtctcaaactcccgacctcaggtgatccacccgcctcagcctcccaaagtgctgggattacaggcatgagccaccgcacccagcctggttattggatttatttatttattttgagatagagccttgctctgtcaccaggccggagtgcagtggtgtcatctcagatcactgcaacctccacctcccaggttcaagcgattcccctgcctcagcctgccaagtagctgggattacaggcatgcgccaccatgcccagctaattgtattttagtagatatggagtttcaccacgttggccaagacagtctcgatttcctgaccttgtgatccccctgcctcggcctcccaaagtgctgggattacaggcatgagccaccacgcctgtccggttatttgatttttataagaaaattttactattattttcagataaatttatgtcactgtcattcattacattttaatttttgaaactgatgtctttcccagaatttatgtactctataacggtgtgaatgattaccagtattaagccattttctcatctgatatattgagctatgttttatgtaagtattgcttattcaagtagttttaaaggatatgtaattggttgttgtttcatgtcctacacagtaagaacaagagtatgttaacctttttgtcaggatatttgctatttcatatctttgaaatagagtagtagctctatttctaactaaattctatttatgtaacaacacagctaatttactcttggatctcattctccctttttatcctgagttaccatcagtgctaatgttcctcttttgggtatagttctccaggagaacttgtcctatatttctttgcgtgtgtttttttccttccagcttaaacaaattaaaactaaatatctaaaccttgtatacagacattaaaattagtgagagaaacaaaaaaaaaaaaaaaaaaa

SEQ ID NO: 117814 - DNA, 1000 bp, Homo Sapiens
ccaagtgctggaattacagctactttttgtttaaagagtcttttaattgtttaaagaacaatgtgccgccacactcggttccttttgtatttttagaagagacagggtttctccatgttggtcaggctggtctcgaactcccgacctcaggtgatccacccaccttggcctcccgaagtgccgagattacaggtgtgagccaccgcgcccggccgagcataatgttttgaaagaccgctcaggctggacacggttgctcacgcctgtaatcacggcactttgggagcccaggagttcaagacaagcctgggtaacagagtaagaccctgtctctataaaaactaaaaaataaacaaaaaaaattagccaggcatggccgggcacacctgtggtcccagctacttgggaggctgaggtgggaggctcccttgggcccagaaggtcaaggcagcagtgagccatgatcacaccactgcacttcaacctgggggacagagcaagaccctgtctcaaaaagcaataacaacaaaagtccatccatattgtagcttgtgtccgtttacgttaagtattccttacccaaaatgcttgagaccagaagtgttttggatttcagatgttttcaaattttggaatatttgcatttacataatgagatgtcttccagatgggacccagagtctaaccacaaaattcacttgtttcatatacatcttatacacatagcctgaaggtaattttatacaatatttttaacaattttgtgcatgagacaaagtttgtattaagtatttgtatgttgaatttttcacttgtggcatcattatactcaaaaagtttggattttgtagtattttggatttggggattaggaatgctcaacctatatttcatttttttccatggccaaatattccccgtttatccatgtgtccattgacggccatctatgttgcttcttcggctattataaatctgctgatacaaaaaaaaaaaaaaa

SEQ ID NO: 117815 - DNA, 1000 bp, Homo Sapiens
tctttttaccctgagtgagcacttttcactttccagctaggtctgtttttcagcttgcagacaagattgagaaatccttgaaaatttggttttggttaaaatttttggtttatttatttgaaatccacactcccttggaaactcttaagtgcatttgtgcacttctgtttgtttgtctcaaagaagggactgtaacaatctgagtaatttccatgtcctcttccttattcctctagtggttgaagctgtgtagcattttaacatatatatattcacaaatatattcatataaacagtatacattttgaatcagtcatttgttaaagaaaagtatattcaatgaagatgaaatttaaataaaaaaggacagagtctatcctccagggattgaacattttccaattatctggtcttttcctgttgtgcaaaaatgactcattgctccgaatgtcaaaaacaaatgcgacaaacaatggcacttcatcatttaaagtaatgttgccaagagaaaaaatttcctgggagggaggtttcccacaagccaaatctcctaagcctcaaatgctagcactttttggcagttggataggaaatgagacattctttggcagccaaaataagagaggccgatggtgaaactttttgagacaccctatggccttcttgtcaaaaccttcactggagctcaagaaaagcatttctgttgtgttatttgcagtgcagatgatgtctgtgtaacaacataatggttattcacctttttttgattttgatttttgctgtgttatcaaaaacttgaatactgtgagaagaagtgaattttcagttgacgaatcagcatcttgttcccatggtgataacactaattgaatatatctatgagggcatgtattagttaatggaaaaaaaaatacaacactaacaatacatagctgcaatgtgtacaatggctgatttaattaaataaaatgtacaagtgttaaaaaaaaaaaaaaaaaaa

SEQ ID NO: 117816 - DNA, 1000 bp, Homo Sapiens
tctcattgacattggtgttgcagggttcagacttgatgcttccaagcacatgtggcctggagacataaaggcaattttggacaaactgcataatctaaacagtaactggttccctgcaggaagtaaacctttcatttaccaggaggtaattgatctgggtggtgagccaattaaaagcagtgactactttggaaatggccgggtgacagaattcaagtatggtgcaaaactcggcacagttattcgcaagtggaatggagagaagatgtcttacctaaagaactggggagaaggttggggtttcatgccttctgacagagcacttgtctttgtggataaccatgacaatcaacgaggacatggggctggaggagcctctattcttaccttctgggatgctaggctgtataaaatggcagttggatttatgcttgctcatccttatggttttacacgagtaatgtcaagctaccgttggccaagacagtttcaaaatggaaacgatgttaatgattgggttgggccaccaaataataatggagtaattaaagaagttactattaatccagacactacttgtggcaatgactgggtctgtgaacatcgatggcgccaaataaggaacatggttaatttccgcaatgtagtggatggccagccttttacaaactggtatgataatgggagcaaccaagtggcttttgggagaggaaacagaggattcattgttttcaacaatgatgactggacattttctttaactttgcaaactggtcttcctgctggcacatactgtgatgtcatttctggagataaaattaatggcaattgcacaggcattaaaatctacgtttctgacgatggcaaagctcatttttctattagtaactctgctgaggatccatttattgcaattcatgctgaatctaaattataaaatttaaaattaaatgcatatcctcaaaaaaaaaaaaaaaaaaaaaaaaaaaaaaaaaaaaaa

SEQ ID NO: 117817 - DNA, 1000 bp, Homo Sapiens
gacggctgtgtatttctgtagaatgctgtagaatccggttttagttgagtcttcacatttagaatttgaaaggaaaaacagaacatttctcatgtgctttgtagcttaaaaaaaggaaaactcaccatttcaaccatatttctttttcttgcaaaacaaacatacccatctgcaccgacgcctgccccgtcccacctcgcgcgagcccctggagctcctgctgggggaggcccatctgccgcctggggctccggtgcggtgcatggtccgaggagtgtgctcaggccgggctttccagaaggcacaggccactgcaaaccctgctgctgccggccgcccagacaccacagacgccactggcggccctaagccactcccgccacacgctcactccaggttcgtatagaaaaagcacagctctcactggccagtagctgccaaaaagaacacccatcgtataaggaaatccagccccatagaaaacaatctgcccaccgaccccctttctaaggatagcctttgtaggggttttttggttcctttttttttttttcagtttgtgtttttacttttgtcccgccgagtactatgtattaccagcccccacccacagatcagtttcctagtctttgggaaacgggttgtgttttttttcctttgccgtgttggatttccggtcgcggctgacacctcccttcgtgtgtgcgcccctccccacccctgcctgtgttctgtgccctgtgtccgctctctcatgtggggatgtttgtgctgcagacaaaaagaacaaaaaaaaatttttaaataccacaagatggaaaaaaaaaacaaaaaaatttaaaaagatggaatgtagtgtttacattaaagccgccgttttcatgaccaatcctatgtcatttctactttgactaatacccaaaccctaaacctcttcacggtttcacttttaagacttaatctgtgctgaagaagaccagtcacagccatttcaaataaa

SEQ ID NO: 117818 - DNA, 1000 bp, Homo Sapiens
atggggatagccatgggccctggtgctacacgatggacccaaggaccccattcgactactgtgccctgcgacgctgcgctgatgaccagccgccatcaatcctggaccccccagaccaggtgcagtttgagaagtgtggcaagagggtggatcggctggatcagcggcgttccaagctgcgcgtggttgggggccatccgggcaactcaccctggacagtcagcttgcggaatcggcagggccagcatttctgcggggggtctctagtgaaggagcagtggatactgactgcccggcagtgcttctcctcctgccatatgcctctcacgggctatgaggtatggttgggcaccctgttccagaacccacagcatggagagccaagcctacagcgggtcccagtagccaagatggtgtgtgggccctcaggctcccagcttgtcctgctcaagctggagagatctgtgaccctgaaccagcgtgtggccctgatctgcctgccccctgaatggtatgtggtgcctccagggaccaagtgtgagattgcaggctggggtgagaccaaaggtacgggtaatgacacagtcctaaatgtggccttgctgaatgtcatctctaaccaggagtgtaacatcaagcaccgaggacgtgtgcgggagagtgagatgtgcactgagggactgttggcccctgtgggggcctgtgagggtgactacgggggcccacttgcctgctttacccacaactgctgggtcctggaaggaattataatccccaaccgagtatgcgcaaggtcccgctggccagctgtcttcacgcgtgtctctgtgtttgtggactggattcacaaggtcatgagactgggttaggcccagccttgatgccatatgccttggggaggacaaaacttcttgtcagacataaagccatgtttcctctttaaaaaaaaaaaaaaaaaaaaaaaaaaaaaaaataaaaaaaaaaaaaaaaaaaaaaaaaa

SEQ ID NO: 117819 - DNA, 1000 bp, Homo Sapiens
tcagaacaacttgctacttatcatttttgtataaaaaggaaattagtctttttctttttttggtaaatttttgaaaaatattgctaaaagtgcatttaaggagattgggagacaattagcagaatggagaaagtaagtcttttttttttccaaattattaattgtcctgtgtctatgtacctctagctgttcttttttgtacttttctggttccaaaccagtttattctgtggttctataataagttttgatataatcttggcttcttaaaaactgtgtatcattaaaatatatgttctgcaagaattaaaactgagtccatgaaaataccataggaagacataaaactttaaaaggcaactcaaagatgatggaaacgcacttacaagtggtgaccaaaatttttaggtgaagtcgagcactctaattagagaactggaggaaccacatataacacttaacttcccctaccctgcccctccccaaaagaaaccatgacaaacctagcttttaaaaaatattttaagaaagagaatgaactgtggaatttattggcagccaaggaatgtgtccaagacacatgctgaggttttgaataaaaagtgaacttttgtaatttgaattgggtcccgcttagttcttgaattgttatgaaaatcctatatctgtttgtatatttgcaaaccctttgtattataattgttgatattttccctttttaaaaaataccattgaaatcagcatgacaaaaataacactgttggcacttataggtaacgtgattgattcagtatcttagagtttacagtttgtgttttaaaaaaactgaaggtttttcttttaagtgcaacatttctgtatactgtaaaagttataataactgaactgtttggtcgagtctttgtgtgttatattccaaggaaaattgaaagtattcagaaattaaaatattatttgatatctgaaaaaaaaaaaaaaaaaaaaaaaaaaaaaaaaaaaa

SEQ ID NO: 117820 - DNA, 1000 bp, Homo Sapiens
tttgaccgagcgtccacggtagaggccactgctgtcatatcagagagtccggcccagggcgacgtcttcgcaggggccacagtccaagaggccagcgtgcagcccccatgcagggccagccaccctgagcctcactaccccggctatcaggacagctgccagatcgcaccgtttccagaagctgcgttgccaacgtcacatcccaaaatagtgttgacatccctgcctgcgctggcggtcccacccccgactcccaccaaagcggcacctcccgcgttggtcaatgggctggagctgtcagagccgcggagctggctgtacctagaagagatggtcaactccttgctcaacacagcgcagcagctgaagacgctgtttgagcaagccaagcatgccagcacctaccgagaagctgccacaaaccaggccaagatccacgctgacgcagagcggaaggagcagtcctgcgttaactgcggccgggaggctatgagcgagtgcaccggctgccacaaggtcaactactgctccaccttctgccaacgcaaggactggaaggatcaccagcacatatgcggccagtcagcagctgtcaccgtccaggcagacgaagtccacgtggctgaaagcgtgatggagaaggtgaccgtgtgaggctccatcggccgccctgggagctggggcccctcgcactcctgtgaggcttttgcaggtcgaaggcccccctgaggactctggggggacgttgagaagaggggtgtgggaaggtaaagaaacttgctggacaagtcattaacacactttaagcgaatggtgccctgggaagcgcactccccctgcccgggccccctgcccgctcgcggacagattttttatccctgggatcatgagcgtccggtcttgcccacagggcctgtgctgcgacgcacatacatacgtgttgtgtctgtcaataaagtgtaaataaggtctccctgccaaaaaaaaaaaaaaaaaaaaa

SEQ ID NO: 117821 - DNA, 1000 bp, Homo Sapiens
atgcagatcttcgtgaagaccctgactggtaagaccatcactctcgaggtggagccgagtgacaccattgagaatgtcaaggcaaagatccaagacaaggaaggcatccctcctgaccagcagaggttgatctttgctgggaaacagctggaagatggacgcaccctgtctgactacaacatccagaaagagtccaccctgcacctggtgctccgtcttagaggtgggatgcagatcttcgtgaagaccctgactggtaagaccatcactctcgaagtggagccgagtgacaccattgagaatgtcaaggcaaagatccaagacaaggaaggcatccctcctgaccagcagaggttgatctttgctgggaaacagctggaagatggacgcaccctgtctgactacaacatccagaaagagtccaccctgcacctggtgctccgtcttagaggtgggatgcagatcttcgtgaagaccctgactggtaagaccatcactctcgaagtggagccgagtgacaccattgagaatgtcaaggcaaagatccaagacaaggaaggcatccctcctgaccagcagaggttgatctttgctgggaaacagctggaagatggacgcaccctgtctgactacaacatccagaaagagtccaccctgcacctggtgctccgtctcagaggtgggatgcaaatcttcgtgaagaccctgactggtaagaccatcaccctcgaggtggagcccagtgacaccatcgagaatgtcaaggcaaagatccaagataaggaaggcatccctcctgatcagcagaggttgatctttgctgggaaacagctggaagatggacgcaccctgtctgactacaacatccagaaagagtccactctgcacttggtcctgcgcttgagggggggtgtctaagtttccccttttaaggtttcaacaaatttcattgcactttcctttcaataaagttgttgcattcccaaaaaaaaaaaaaaaa

SEQ ID NO: 117822 - DNA, 1000 bp, Homo Sapiens
attccctacttcatccttgctgagctaaattttatatttttgtgcatccttctcccagatgacttaggtggtaagtccagattagtcaaagctaatcatggaagttccattttaatgattctgttggggtgaacttgggagcaatgagatgtttgggaagtattgtgtagtacttctgggaaagatctccttgatacaacattgtcatgacatgagaagagactctgctgggctttttcatgtctgtaacatggtattggcttatcgtttttatctctgaagggcagtagcctgaagataacagtgcacaaggtgggaaaagccagctcagaggtgacgttgccgagctactctgctctctatacctgttctctactgggactttttataaccctcaataactgttttttatttggtcttagggctgtctgatacttagagctgaaggcattccagctgacacagaggaatatttttctaagtgttaatgttctatatggtaattagggggaagaattatttcttttcacaagttaatatagggatggctgtttgtatcagccatggttctttctggtggaaaacagaattctccaactaaaaatattttaatggcagactgattacagtggtgtgggccagaaacaagggacagtgaaacacccagagacttgtatcagcaggaagccattgccattctgagccttgaagggcaaggagggaaacagtgttaccagagcccagtaagaactgctgtcatgaaggaggggccaccttgtaagagacatcattactaccagaactgtggtgccaaattgctggtgtctctctttggagaaaccaaccagatacatctgctggagagcccaggtgggcacagagaagggtggagagagaatctgggaagagaaatggagaataagcagcacagtgttattcatttctgtaaattcctatgtagaaggctcagtgttagaaataaagttattctactagttgc

SEQ ID NO: 117823 - DNA, 1000 bp, Homo Sapiens
tgccaaacccccagttatgagttctcattttgcccaagacctttggccagagaacatacaaaattctttccaaatagggatgctgagaagatatgaagaatgcagacatgacaatttacagttaaaaaaaggctgtaaaagcgtgggtgagcataaggtgcacaaaggaggttataatggacttaaccaatgtttgacaactacccagaaagaaatatttcaatgtgataaatatggaaaagtctttcataagttttcaaattcaaacacatataagacaagacatactggaataaatcttttcaaatgtataatatgtggcaaagcttttaaacggtcctcaacccttactacacataagaaaattcatactggagagaaaccttacagatgtgaagaatgtggcaaagcttttaaccaatctgcaaaccttactacacataagagaattcataccggagagaaaccttacaaatgtgaagaatgtggcaaagcttttaactggtcctcagaccttaataaacataagaaaattcatattgaacgaaaaccctacatagtgaagaatgtgacagatcttttaaatgttcctccacttttaattagcataagataattcatactggagagaaaccctatgaatgtgatgaatgtgggaaagcctttaaccagccctcgactcttagtaaatttgagagtttatatggaacacaaaccctacaaatataaagaaatgtgacaaagctttttaaggaagttctcaacccttattacacataattcataccaaacagaagccctacaagtgtgaagaatgtggcaaaacctataaacctataacaagttctcaattcctttttttttgagatggagtttcactcttgtcaccgaggctggagtgcaatgacatgatctccgttcactgcaatctctgcctcctgggtttaagccattcttctgcctcagcctcccaagtagctgggattacaggtgcccaaca

SEQ ID NO: 117824 - DNA, 827 bp, Homo Sapiens
ggaacagtgtggcccgccatgttcttctccgcggcgctccgggcccgggcggctggcctcaccgcccactggggaagacatgtaaggaatttgcataagacagctatgcaaaatggagctggaggagctttatttgtgcacagagatactcctgagaataaccctgatactccatttgatttcacaccagaaaactataagaggatagaggcaattgtaaaaaactatccagaaggccataaagcagcagctgttcttccagtcctggatttagcccaaaggcagaatgggtggttgcccatctctgctatgaacaaggttgcagaagttttacaagtacctccaatgagagtatatgaagtagcaactttttatacaatgtataatcgaaagccagttggaaagtatcacattcaggtctgcactactacaccctgcatgcttcgaaactctgacagcatactggaggccattcagaaaaagcttggaataaaggttggggagactacacctgacaaacttttcactcttatagaagtggaatgtttaggggcctgtgtgaacgcaccaatggttcaaataaatgacaattactatgaggatttgacagctaaggatattgaagaaattattgatgagctcaaggctggcaaaatcccaaaaccagggccaaggagtggacgcttctcttgtgagccagctggaggtcttacctctttgactgaaccacccaagggacctggatttggtgtacaagcaggcctttaatttatattgaactgtaaatatgtcactagagaaataaaatatggacttccaatctacgt

SEQ ID NO: 117825 - DNA, 1000 bp, Homo Sapiens
cgggggtcagggcctccccacaggagccctgcagtgtggtagcgccatggctgtctcaaaccaagcaaaggaaggaccctgaggccttcacgctaaccatcctcgagcaactgctgttggaaggcctccctgggcctggcccccaccctctgccacccagtcctcccagctgccatgtttcaaagacgacctttacctcctgcctttggattgactctgcatttgaccacggactccagtctgtgtgtagggagagagctgagtaggaggcctccactccggatcgaggcctgtatagggctcgtttccccacacatgcctatttctgaagaggcttctgtcttatttgaaggccagcccacacccagctactttaacaccaggtttatggaaaatgtcaggccttccccacaactcctgtctaactgctgtcgcccccctacttgctggctctcagaagcctaggggagtccctgtggtcctgaattctttccccaaagacgaccagcatttaaccaacctaagggcccaaaggccttggacaactgcatggagctgcactctaggagaaggaggggaaccagatgttagatcaggggagggagcaggagtgtccctcccgtcagtgcctacccacctgtgaggcagccttctgatggcctggcccaccttccccagaaccaggggaggcctgaggcttcagttttactctgctgcaaaatgaaggcgggcctgcaagccgactacacctacggaggctgttgaggacaatttcattccattaaattaaaaaatactgactggctggcaggcaggtgccatgtctgggaacagggacgggggagcttcacctttttgtcttggcttttctttgggctgtgggggggcatccatttccagggtcggggaggaaataccaaatgcattgttgttctgctcaatacatctcacttgtttctaataaagaaagcagctgaacaaaaaaaaaaaaaaaaaaaaa

SEQ ID NO: 117826 - DNA, 1000 bp, Homo Sapiens
aacaaaatgtccattgcgtggcagctaccacaatatgccctggttacagctggggaggtcatgttctctgtcacaggtcttgagttttcttattctcaggctccctctggcatgaaatctgtgctccaggcagcttggctattgacaattgcagttgggaatatcatcgtgcttgttgtggcacagttcagtggcctggtacagtgggccgaattcattttgttttcctgcctcctgctggtgatctgcctgatcttctccatcatgggctactactatgttcctgtaaagacagaggatatgcggggtccagcagataagcacattcctcacatccaggggaacatgatcaaactagagaccaagaagacaaaactctgatgactccctagattctgtcctgaccccaattcctggccctgtcttgaagcattttttttcttctactggattagacaagagagatagcagcatatcagagctgatctcctccacctttctccaatgacagaagttccaggactggttttccagtacatctttaaacaaggccccagagactctatgtctgcccgtccatcagtgaactcattaaaacttgtgcagtgttgctggagctggcctggtgtctccaaatgaccatgaaaatacacacgtataatggagatcattctctgtgggtatgcaaagttatgggaattcctttataggtaactgccatttaggactgatggccctaatttttgaggtgctgatttagaggcaaaattgcagaataacaaagaaatggtatttcaagtttttttttttataagcaatgtaattatgctattcacaggggcctcaagaattggtatgtatgatgtgatctggtccagccagggcctggcttgtcagctctctaggtttgatatgactttagtaaatttgtcaatatagatggtaggaagcagaatgccattttattaaaacacaggagaagttaaaaaaaaaaaaaaaa

SEQ ID NO: 117827 - DNA, 1000 bp, Homo Sapiens
tcttgggacaggaataactgctgagcagtccccctttgccactcctggctgtctgagtgggcacttgtctggctgctggccagcagtgaagggccacttggtgacttcgtagggttccttagagaagtgacatggccttgaggagattcagggcacctttcctcagtgagctttgatatggtccaaaaacagccttaaatcaagaatatttgtggaggtaggtgtggggaaggttggagaagagttaggtttgtgctttgtaatcttggcatccatgttttgtgcctgccctccctcttggggaggccatgcttgactctgctgaaagctgctaactggtgacagggtggatcatggtgaggactaggggtaaggtcagggaatgcttaagctctggccctgccctgtattcctcttccccttggtagcagttccctgaccaagggcaaggtgtgtctcaggaaggtggttctgtgcatgcctgggtgtggttaaggcgtggcccagaaggcttccctggtgctctcagtccaggcaaagcccagagcatctgagcacgtctctgacttccagtggcaacacagtttgaacgtggtgaaacagggtgtagttcttttccacattctgtgtcatctagtcgtgcaggtagggaaaaagttggtctaattgaagattgtgcatttcctagtgacaggtgccaagaggttatgatacgggtttcttgggtctgatgtacagtgtgaataaatgcttgcagctcttagctcttttttgatcgatgaagcacttttttattaatattttcctttgttaaaggaggaaccgtaactctccatagctgtacatataacccttttctcctaaagaggagtcagtcagtgctcctatatttttcattttttgtcaaagcaagaagtaaatactttagaattgttaaatatataaataaagcaaataaagttgagtgttccacatggtagcatttgctaacacttcctaa

SEQ ID NO: 117828 - DNA, 1000 bp, Homo Sapiens
aatggaaagggtgttggcattggtgtctggagacctggatttgagtcttggtgctatcaatcaccgtctgtgtttgagcaaggcatttggctgctgtaagcttattgcttcatctgtaagcggtggtttgtaattcctgatcttcccacctcacagtgatgttgtggggatccagtgagatagaatacatgtaagtgtggttttgtaatttaaaaagtgctatactaagggaaagaattgaggaattaactgcatacgttttggtgttgcttttcaaatgtttgaaaacaaaaaaaatgttaagaaatgggtttcttgccttaaccagtctctcaagtgatgagacagtgaagtaaaattgagtgcactaaacaaataagattctgaggaagtcttatcttctgcagtgagtatggcccgatgctttctgtggctaaacagatgtaatgggaagaaataaaagcctacgtgttggtaaatccaacagcaagggagatttttgaatcataataactcataaggtgctatctgttcagtgatgccctcagagctcttgctgttagctggcagctgacgctgctaggatagttagtttggaaatggtacttcataataaactacacaaggaaagtcagccactgtgtcttatgaggaattggacctaataaattttagtgtgccttccaaacctgagaatatatgcttttggaagttaaaatttaaatggcttttgccacatacatagatcttcatgatgtgtgagtgtaattccatgtggatatcagttaccaaacattacaaaaaaattttatggcccaaaatgaccaacgaaattgttacaatagaatttatccaattttgatctttttatattcttctaccacacctggaaacagaccaatagacattttggggttttataataggaatttgtataaagcattactctttttcaataaattgttttttaatttaaaaaaaggaaaaaaaaaaaaaaaaa

SEQ ID NO: 117829 - DNA, 1000 bp, Homo Sapiens
accacttctcacacggagttggtgcggggagccagaatcacctaccagtgtgaccccggctatgacatcgtggggagtgacaccctcacctgccagtgggacctcagctggagcagcgaccccccattttgtgagaaaattatgtactgcaccgaccccggagaggtggatcactcgacccgcttaatttcggatcctgtgctgctggtggggaccaccatccaatacacctgcaaccccggttttgtgcttgaagggagttctcttctgacctgctacagccgtgaaacagggactcccatctggacgtctcgcctgccccactgcgtttcggaggagtccctggcatgtgacaacccagggctgcctgaaaatggataccaaatcctgtacaagcgactctacctgccaggagagtccctcaccttcatgtgctacgaaggctttgagctcatgggtgaagtgaccatccgctgcatcctgggacagccatcccactggaacgggcccctgcccgtgtgtaaagttaatcaagacagttttgaacatgctttagaagtagcagaagcggcagcagagacgtcgctggaaggggggaacatggccctggctatcttcatcccggtcctcatcatctccttactgctgggaggagcctacatttacatcacaagatgtcgctactattccaacctccgcctgcctctgatgtactcccacccctacagccagatcaccgtggaaaccgagtttgacaaccccatttacgagacaggggaaaccagagagtatgaggtttctatctaaagagagctacacttgagaaggggacttgtgaactcaaccacaatctcctcgagacattcatccagagaccatgtggcacttgattgaaaccccagaatgtcgactgtcttttgtttagactctttatcaaaggtttactgttttcttccctgtatttattatatttaaaagtgaaaaaaaaaaaaaaaaaaaa

SEQ ID NO: 117830 - DNA, 1000 bp, Homo Sapiens
agtgtgtgtgtgtgtgtgcgtgtgtggtacgtgtgtgtgtgtgtggctatgaggctgattcctgtttggatttttgtcctcacgtgtatcattaagctggcctttgggccttttcctttctacctcccctgtgacctttcctagcctcagatctgttaattcttttggccccagccctgtccctcactgtcctctgtccttggaccagaaccctggggtcagacccatctcctgtagctgtccatcacactgacaggcttcttcctgagatatcctcaggttttctcagccagagagctgcctttagagtccaactgttgtacgtatgtcaccttcactagaaatgtcccatcatcgtgggaggggagcagggcacaggggatggtgtgcattcagagcattgggttgggggcttccctgttccctcagccccagtcgagaggaaagagaatcgggccactgccagaaagagagtcaagcaaacctggaagggcaaatctgagagtgggaaggccaaaggccgaggcccagatttagtattcactagcagcgccttcgggtagcaggatgattccttttcctgcctgtctgctgctggctctcttccctaaggtacaggttggcaggaccacctccgcctacttctccaccatccctagcatgccagcccgttcccagatcaacctgccagtggagtcaggcagtgcactcctggagccaagagggaagggcagggtagagagggtatgtccagtagcctggagctccatggtggcttcatgcctcccttctcccagctcaggtggccctgagggctccctcggaacagtgcctcaaatcctgacccaagggccagcatggggaagagatggttgcaggcaaaatgcactttatagagattttctattgctgggaaggtgtgtttctcccacaatttgtttgtgaatattcacttgttttataaatgtctgacctgtcttgaggaaaaaaaaaaaaaaaa

SEQ ID NO: 117831 - DNA, 927 bp, Homo Sapiens
agtctgggacgcgccgccgccatgatcatccctgtacgctgcttcacttgtggcaagatcgtcggcaacaagtgggaggcttacctggggctgctgcaggccgagtacaccgagggggacgcgctggatgccctgggcctgaagcgctactgctgccgccggatgctgctggcccacgtggacctgatcgagaagctgctcaattatgcacccctggagaagtgaccacgctgaaacccacccacccgctgtgctgaccatgggccctgagcgtcctaccccgaattcacgaggctgaggcatccgggagctggcgtaatgcctggccgcagtgtgtgtgtatcccataccccactctggaaggaaccatccagtaaaggtctttcagaaccactaaggtcccagccctcactaggatgtcaggagccaggtctaggcccagctttcacactgtggcagcccagtgaagcagactgggccatgaactctcctagccctggggccagcctgttccacaggcacccctgcaggaggcgctgccaggagagccttccatctcggggctctttgaggttccctccttctgggtgttcttcaggctgagcagagaggctcctgtaccctctctctcggaatctgaagagccagatttaggccgggcaaaggggctcacccctataatcccaggactttgggaggccaaggcaggaggatcacttgagtccagaaattcaagacccgcctgggcatcataatgagaccccatctctacaacaaaatttaataaattagctgggcacagtgttcacacctgtagtcccggccactcagggggctgaggcaggaggatcactggaacctgggaggttgccactgcaaaaaaaaaaaaaaaaaaaaaaaaaaaaaaaaaaaaaaaaaaaaaaaaaa

SEQ ID NO: 117832 - DNA, 1000 bp, Homo Sapiens
acaagatgtgaaaaaaggaaaacttcgctatgttgcgaatttgttcccgtataaaggatatatctggaactatggtgccatccctcagacttgggaagacccagggcacaatgataaacatactggctgttgtggtgacaatgacccaattgatgtgtgtgaaattggaagcaaggtatgtgcaagaggtgaaataattggcgtgaaagttctaggcatattggctatgattgacgaaggggaaaccgactggaaagtcattgccattaatgtggatgatcctgatgcagccaattataatgatatcaatgatgtcaaacggctgaaacctggctacttagaagctactgtggactggtttagaaggtataaggttcctgatggaaaaccagaaaatgagtttgcgtttaatgcagaatttaaagataaggactttgccattgatattattaaaagcactcatgaccattggaaagcattagtgactaagaaaacgaatggaaaaggaatcagttgcatgaatacaactttgtctgagagccccttcaagtgtgatcctgatgctgccagagccattgtggatgctttaccaccaccctgtgaatctgcctgcacagtaccaacagacgtggataagtggttccatcaccagaaaaactaatgagatttctctggaatacaagctgatattgctacatcgtgttcatctggatgtattagaagtaaaagtagtagcttttcaaagctttaaatttgtagaactcatctaactaaagtaaattctgctgtgactaatccaatatactcagaatgttatccatctaaagcatttttcatatctcaactaagataacttttagcacatgcttaaatatcaaagcagttgtcatttggaagtcacttgtgaatagatgtgcaaggggagcacatattggatgtatatgttaccatatgttaggaaataaaattattttgctgaaacttggaaaaaaaaaaaaaa

SEQ ID NO: 117833 - DNA, 1000 bp, Homo Sapiens
tgaggctggccgccagctgtgggctggggtggggtgggtggggtcgggtggtggagaggccttagctgtcctggctggtgcccctcccaggctccttttcaccctgccccctgggcctgaggccccctgtgtccaagcctccccctggctcttcagttctctagcccttggctctgctgggtttcctgactgtagccacatctctcccgctccctaagggtaacctagccaatggaagctgccctttgggtaggtgctgggctcctgggagggcccagatgatggggtgaggcatgtctttccagaactttccctggcagggaggggatggcagaaactcagggaggggcttggggcccattgtatctggagagcctggattcctcttggcagtcttaggcccggccacttctgctacctttgcgctgctgtgagcctcaccctgggcccctgggccctgcttctctgctcccctgggtgatgggtgggcccagaaggtggcagtcccacaccttgtcctcccacctccctgaactgtccattgcttttatagggtgaggtaagagacagcctcccaagcccaggctttggcactcagaatgggcccagtgggggctgggcaggcccattgagggccaccgccgaggtttctcctagggctgttcctgggcctggctcttacaggctcgtcccccaggcctgcccttctccactgccccctcctgtgtctgggtccacacacccttcaggaagggggagcactgagaagcacagcacaggggctcagcctgggatccggtgatggtctgggcagaggctgggtcaggagtcccaaaggtcagtgacagtttctcagaagaggcccagcgtccacctctctcccagggccagacagcccttcctggctcccccatccccctatgggctcccagccccttgcaccctcattgctgttcagattaaagcctctgttttgcacctgtaaaaaaaaaaaaaaaaa

SEQ ID NO: 117834 - DNA, 1000 bp, Homo Sapiens
ccattcaaggggagccaaaatctcaagaaattcccagcaggttacctggaggcggatcatctaattctctgtggaatgaatacacacatatatattacaagggataatttagaccccatacaagtttataaagagtcattgttattttctggttggtgtattattttttctgtggtcttactgatctttgtatattacatacatgctttgaagtttctggaaagtagatcttttcttgacctagtatatcagtgacagttgcagcccttgtgatgtgattagtgtctcatgtggaaccatggcatggttattgatgagtttcttaaccctttccagagtcctcctttgcctgatcctccaacagctgtcacaacttgtgttgagcaagcagtagcatttgcttcctcccaacaagcagctgggttaggaaaaccatgggtaaggacggactcacttctctttttagttgaggccttctagttaccacattactctgcctctgtatataggtggttttctttaagtggggtgggaaggggagcacaatttcccttcatactccttttaagcagtgagttatggtggtggtctcatgaagaaaagaccttttggcccaatctctgccatatcagtgaacctttagaaactcaaaaactgagaaatttacttcagtagttagaattatatcacttcactgttctctacttgcaagcctcaaagagagaaagtttcgttatattaaaacacttaggtaacttttcggtctttcccatttctacctaagtcagctttcatctttgtggatggtgtctcctttactaaataagaaaataacaaagcccttattctctttttttcttgtcctcattcttgccttgagttccagttcctctttggtgtacagacttcttggtacccagtcacctctgtcttcagcaccctcataagtcgtcactaatacacagttttgtacatgtaacattaaaggcataaatgactc

SEQ ID NO: 117835 - DNA, 1000 bp, Homo Sapiens
tgtggaaaagtattcaagtatttttcttccttgcgtatacatgaaaggacgcacactggagagaagccccgtgaatgtaagcaatgtggaaaagcattcaggtatttctcttccttgcatatacatgaaaggacacacactggagataagccatatgagtgtaaggtatgtggcaaagccttcacttgttccagttccattcgatatcatgaaaggactcacactggagagaaaccctatgaatgtaagcactgtggtaaggcctttatttccaattacattcgatatcatgaaaggactcacactggagagaaaccctatcaatgcaagcaatgtggcaaagcctttattctgccagttcatgtcgagaacatgaaagaactcataccattaatagatgagaaatccttttagtggaagcaatgggagaagctttctgttgtcccacttcctttgaaacacaagaaaagagagtggtgaaagaacctctggataactgctttttgaattgagaagagagacttgcgataggacaataaaatctagaagaacttggatggtttcgtaatacaattcacctatagccaatcttgcatgagatttcaaaggcacagaaaaggaaggcatcagtcacatattagaggccccacacagggagagaggtgtgtggctacccgcttccagcccattttcctgattctttggcttgttaatcgagaatatcccccaaatcacttgtctctgttcctcagagttgtaggtctccagatatgtccccagtgctccacattaaagatacatgcccactttgctgtttcttcagaaatgttaaaatgtttaccagagaactaataaatgttgttatggctggaaatactcactgatgcccaactcttctatagattgagttggtttaagaggtctactttgtattgcaagcattgttgtttctacggattagcgagcctgttcttgattaaaccaactagatgggagcttg

SEQ ID NO: 117836 - DNA, 1000 bp, Homo Sapiens
agtggaggctgggagttttaagcataaatccctgtttagtgttacatgggaataaggaatttcattcacttcagccactaagaaaagtttagaatcacgaaagcttaactgctgtggtttaaagtacagtttctctaaagatcagacatggcactgtctcctctcaagcctggttgtagttcagatgagtcttttcaacatggtcttcaacatggtctagagcttaccagtgatcttctgatcttcaagaagactaagtttgagacttgaccagcattcaagtatagagacctaggaggtggtcttgtggtggtacatttggttaacccattgctggcagtgggagctgatttaggcagggtaaacaggaaagcattaaaagttaaaattcactacaggttttttgttacttttaaagggaatatggataagcatagtaacaaaacccaccagaatctaagcagttttcaccccctcagaaaccactgtcattagtttacaaagttagcactttgaagtaaaactaaatgaggaaggaagtaatgttacctatccttgataccatgaccatttattagatgttttgctatataaattaccgagagaatagtttgtcatccacttagtgtgttagctggtggggtacaatataacctctcatctcaggctattttaaaaaaacaatatttgcttctataacaaaaggaaacaaatctaagaatcattcctgtactacagaagggttaaggcaaaggtagccttttgggctttttaatgaatatgacccctatagaaaagtcaagaaaaaaaaacccttgtataaattattttatttattattgtaattagatcttcacaaagttgtcttttcactgtgttttgtcaacgtgaaattaaattgtagttataagcaaaagttggttgcctagggaacaattgtatattcagtttaacagaaataaaagaatatttgtcttaagatacaaaaaaaaaaaaaaaa

SEQ ID NO: 117837 - DNA, 893 bp, Homo Sapiens
tggagccgggacccgccctaggggctcggatcgccgcgcgctcgccgctcgcccgccagcccgcccgtggtccgtggcggcgcgctccacccggcacggggaggcgcggggcgcaccatggccgcagacacgccggggaaaccgagcgcctcgccgatggcaggagcgccggccagcgccagccggaccccagacaagccccggagcgcggccgagcaccgcaagtcctccaagccggtcatggagaagcggcgccgagcgcgtattaacgagagcctcgctcagctcaaaaccctcatcctggacgccctcagaaaagagagctcccgccactcgaagctggagaaggcggacatcctggagatgaccgtgagacacctgcggagcctgcgtcgcgtgcaggtgacggccgcgctcagcgccgaccccgccgttctgggcaagtaccgcgccggcttccacgagtgtctggcggaggtgaaccgcttcctggccggctgcgagggcgtcccggccgacgtgcgctcccgcctgctgggccacctggcagcctgcctgcgccagctgggaccctcccgccgcccggcctcgctgtccccggctgcccccgcagaggccccagcgcccgaggtctacgcgggccgcccgctgctgccatcgctcggcggccccttccctctgctcgcgccgccgctgctgccgggtctgacccgggcgctgcccgccgcccccagggcggggccgcagggcccgggtgggccctggaggccgtggctgcgctgaggctgtggccctgagactgcatcggaggcggcgccccgttctagggccgtggcctttgccgagactgtagcagagaaaacgtatttattattccaaaaaaaaaaaaaaaa

SEQ ID NO: 117838 - DNA, 946 bp, Homo Sapiens
ctctctcggtttgtctgggtcatcttgtctgcccgccgctggcctggccccgtctgtctctctcagcagctgtctttctcgcgcccactggccggtctctcctcttccccgcagttgcctccttctctgcctgcctgggtggccgccatgggccggaagcggctcatcactgattcctacccggttgtgaagaggagggaggggcccgctgggcacagcaagggggagctggcacccgagctaggggaggagccccagccccgcgacgaggaggaagcggagctggagctgctgaggcagtttgacctggcctggcagtacgggccctgcaccgggatcacacggctgcagcgctggtgtcgggccaagcatatgggcttggagcctcccccagaggtgtggcaggtgctgaagacccaccccggagacccccgcttccagtgcagtctctggcatctctatcccctatgaggcaccacgtaagacctcctgcccttagctctcttgctcaccacccaagaacctcaggacagaagcgagagcccattgctcctgctcagctcagcccggctgcggaggaacccttggcaggcagaacctggaggtgtcagaggctcaactcctccatctaaccagcaggctcccagagtccccggaagagcctgcgcagctgaagcagagtgcttctagatggagagtggtcactggggaaaaggacctggccatcaccttccaatacctgctgcctgtctccctgacccatgatctggcaagttaggcacagtcagacatggacagttgatccatgaggaaaagatgctctcccacctaaggccaggaatctgagagcaggactggctgagctcccagggcaaggggttcactaatgcttatcaataaagaatattgagcctggaaaaaaaaaaaaaaaaaaaaaaaaaaaaaa

SEQ ID NO: 117839 - DNA, 1000 bp, Homo Sapiens
cccttcatctgtcctgggaatgtcctcccaagactggagtcctcagctcagaacaaagggaaaggggtgcagcttccaccctggcaggctctcagaaatttttagttcctttttccaccaacttcccacccctgtttctccccctcccagtgcgttctctctgtgactctcttcccttactttcagaggcataggatctggagccagactgcttgggctcaagtcctggctctgctgcgtgacttgagcaagttaattcctctctctgtgcctcggttccctcaaccatataatggagacaacagcattacctatatcagggttttcctgaggtctcaatataagggactcagagctgtgcctggcacacaatgaatgctaaatatatggagccattattatttcctgtctcagaaagtctggctgttaaagaatgttgtctttcaagatcgttatttctaccacgactttaaaggctgtgttttggaactcaaaggcaaaaattctaatatctgtgctccttgaacaacctcttctcctagagggctgtgcatataagatatgtatatatatatatatattatatatatatatatatacacacacacacacacacacacacacatatatacatatacacacacacacacacacacacacacacacacacacatatatatatatatatatttttttttttttcctgaggatggtgaaggtacctgactgtgtgaggtggtaggagaatgagagaaacctcagtcagtgtctcaaaataaaatcctgctacaaacattgatctcttttcatagcctaagggatgttgcatcgctaaaccctgttgacttctctaatctcttctgtagctgatctccttcccttgctacactcggttactctggccttgattctgatctccaaatacattatattttttatttgggaccatcgtattgcctttgcacctttatcaaatataagttgcctatatttatttgga

SEQ ID NO: 117840 - DNA, 1000 bp, Homo Sapiens
agtctgtgggaagaccttctctcagagtggaagcaggaatgtgcatatgagaaagcatcacctgcagctgggagcagctgggagtcaagagcaggagcaaactgctgagccactaatgggcagtagtttgcttgaagaggcttcagtacccagtaaaaacctggtgtctatgaattcccagcccagccttggtggagagtccttgaacctaccaaataccaattctatcctgggagttgatgatgaggtgcttgctgaaggatccccacgttccctgtcttcagtgcctgatgtgacacatcacctggtgaccatgcagtcagggaggcaatcatatgaagtttctgtcttaactgcagtaaatccacaagagttactaaaccaaggagatttaactgaaagacggacatgagcgtgggtgctgactcctggaagagcaactctatctgatctcaaaatgcgtatactgggaacaggatgccttagcccacaacagaaccagaatgaatctttgaaggcacaagactctgcttttgccactcttcctctttcctggtatagaagatggatgtaggagagcttcttttctaactaccatctgatcagacaaggaatgaagcaatgactgtgggctgggaaactgtacctacctctcttcccactgcaaatttctgggatagaccaaaagtgaatttgattatgtgttggctgaagttcttcattctgactgttgaggggaggttttcctttgaagagttttcatcccagactcagctgtcttttcacatggatgaaataattcctgctaccaacaacagagcttcaccaggaagttgagttttcaagatgccttgttgctttgaagaagggagtgatgtcaattctcttgttacattctccctttagcaacctgagtaagagactctctgccactgggctgcaaaaaaataaattacttgaatctccccttgaaaaaaaaaaaaaaaaaaaaaaaaaaaaa

SEQ ID NO: 117841 - DNA, 1000 bp, Homo Sapiens
ggtgtgtaaaaaggttaagtttttgtttctcctggcttggaacttattttgaattactggcttgtcacctttttttctatttaatcaaataagatacatgatattgaaagaataaagcagcatttttagtttttactaccttaggctttattgctttgaaaacaacattggccttttgtatctcacaattctggtctagattcagttatgaatgtaggcattagttaaaattaacaagatgcagagtattaatttcttaagacaacaaagtgatttctgtaagtttgagccctatgtggaaagcattgtggaatcttaaccttttcgtacacactcttgtgggacgtatcatataaatgtcagcactaagtaatgtcttgtttgtggctgaatatttttcgtagatgtttttgaagttgacatgacttacgtgcatttaaatatatattgccatcccttagtttgtaattaagatttggaatatggttgtggatttctgagcatgtgcagactggtctagctagttccaggaactggtgcatgtatttttcaaagataaagaaagtgtactgcgaaaatatgcaggaagattaattttgtggcagttttctaaaactgacaaccaggtgggaccaaagtttatgtgcctttagtcttaatttaccttgcattgtaatattcagttttaataaatcttcaaaatattttgtatttaggaatagatctgactttaataaaaacatggctcagaatctacaggtcaaattaatttgaacagttcttgtcaatccgaattgttgattctgtttaaatgaccaatactttttgaaattgatgtacttagtttcaagattcatagattctgttatctatgtagacagaatggtcatgtatattttctattagttgagtttttacatctttagaaatgtaaaattcagtatagtttgaaagcggcacaattaaaaattaattttctaacaaaaaaaaaaaaaaaaaa

SEQ ID NO: 117842 - DNA, 1000 bp, Homo Sapiens
agtcttaacaagttacagataatctctgactggcatgttttctgcttctagcttggagctaaatgctgctcatgctgaaaagaataatgtctatttctttgtttgggtattagctctattttgatctatagcacagttttgtaattcagatcatcacccctgcactttgtaccacatgggcgtattctttcttcccagtcattgctgcaattatcttgtctgttctttgtgtaatatgttctgtgtgagcctctgcattaaactcgatttcttgggcaattatggaaattccagtgtggctgcagtttaactttgcactctctatgcatatgaggtttcctaaataaatgaggagtagcatagtttaaaatatatatatcttataactttctacaacaaagaattattgagtccaaatgtcatcagtgctcattttgagataccctgctatcgatggtcgctacaaaccaggaaatactcaagttattatgtgtatacattggttttagttttatgaaacaatttaccttcatgatctcatagttaaaattgtaataaatttaggaatataaaggatcaatatgggaagcaaaatttctaaaggcagtttctgttgttttaattagtatttgtgtagttcaaaccaggaaggatttgactatcattagattttgcttaactttatgaaagctaaaatattctctgttataaaggggcaactccatctggtcctatagcatctttactactgatttttttttgtttaatttgaaaatgcaaagaattgttaaatgttcttaaatgttctcactacaaaaaaagaaaaaagataactacgtgaggtgatggatatgttaattagctggattgtggtaatcattttggaatgtatatgtatatcaaaacatgtagtacaccctaaatatatataatttttatttgtcaaatatacctcaataaagatggaaaaaaatcgaaattcaaaaaaaaaaaaaaaaaa

SEQ ID NO: 117843 - DNA, 1000 bp, Homo Sapiens
attctagaacccaatctctcacctgcttggttgcaaggctcatatttttttgtacctttcctatagattctgtagcatttgagtgtggcaatattttaattgtgtatagatttctaagaaccaacactactcagtctcctgctagtctgactcctgaagcatcagcccttgtcatactgtattgactgtgtacgtgcctttcaccttgagcatgcttcaggatttttttttaaaccacagaacttgaatacatgagggaaccagagttcaaagtcctatgcaaccttaggagggggttagagagtctgttttgattgatgttttctgaggccctagaggagtttgtatcaatttgtgagtattaatgtcagtactaccagcactttgccaaaactgtcagagggacccgtttctagagtgagtcccagttacatcaaacagtgacttccagttattccccagtaagtctgagtggttccttcaagctgggtgtctttccagcctttgccagtctagccccagcagggcaccgtgtatgaatgcagtttggtgctgttttagagtatgcctgctccccagccccctgcctggaaccctctgagcaacttgctctgacctataatgtcttaggtgcaacacggaccccaccagagctcttggatacccccctagatccatgtggctttatgtgaggggactgaatgcagacacaccatagcccccttctactactttccctctcgccctgccacctagttccacatggaaccaacaagttgagtgcatccctgttgggtgttttgtgttgagactggctgaaatgaggagactttgaccatgtgacgtgtcaacagactcaaggagacaaccacctcaactgggtcatgtggcatgcctgtgtatgtgtgtaacagaattctgattgttagactgtaatgctattcctctatgggagaaaaaaattaatataaagaaaaacaaataaaaatatatttaaagc

SEQ ID NO: 117844 - DNA, 1000 bp, Homo Sapiens
ccttcctcaacctagagaagggttgttaaggcagaccgccctgttccccagagttgtccctgtagtgtctaggtttattctaatggtaaaagtaacttacttaaaaaacatatgtacacatatgtatgcaagtatgtatatatgtgtatgctcagattaacttccataggtacataagtgaaagagtctcagttcagtgaacacaaaacttatttaaagatgctttatatgtagaaattgtttcaaatcatactctacccttagtgagggcaaagtgtagttggtagaagaaattgctaaatacctatctaatgtgctatgtttatcaaatcgtgtactaaaatggaaagctagttttgagaaattattcagaagccttgttattttaaaaatgaaatatttcaaagactgaatattttcaaagaaaatgaataattcattgcccttgtgatttagaagattataacagctgtatttcatatttgcctccttatatatatcaaagaccaaggtatttccttctgcttcaaaagaacaaaattgggaaagaaaactcacttgagtcttgatcaaacaagtgtcttttacttaagaagaaacttggtaatcattgtggcacccacagcaagcagttgccttaccagtgaaaaaggtgcactgaggtaacatctaaaacagagatgtggttcttaatgtttaacagaacagttctaatcctgccacgtgttatcattatagattttatagttgcctttctaactacttagcacagtttgagaatacgttaattgctatttactatttaaaaagttttactgaaatcagtccataacattaagatgagccctaatatgtaagattttcctctggaatggatgtgagaaatgtaaattttataacagcagtatttatcctggtttaattctaatacgatgtcatgttaatttcatgttgtgattaataaaagcattttttcttcaaaaaaaaaaaaaaaaaaaaa

SEQ ID NO: 117845 - DNA, 1000 bp, Homo Sapiens
cctcagcacctgtaagaacatttattctctcatggtggaagccagtcccctcaccatagaagatgagaggcacatcacatctgtaacaaacctgaaaaccttgagtattcatgacctacagaatcaacggctgccgggtggtctgactgacagcttgggtaacttgaagaaccttacaaagctcataatggataacataaagatgaatgaagaagatgctataaaactagctgaaggcctgaaaaacctgaagaagatgtgtttatttcatttgacccacttgtctgacattggagagggaatggattacatagtcaagtctctgtcaagtgaaccctgtgaccttgaagaaattcaattagtctcctgctgcttgtctgcaaatgcagtgaaaatcctagctcagaatcttcacaatttggtcaaactgagcattcttgatttatcagaaaattacctggaaaaagatggaaatgaagctcttcatgaactgatcgacaggatgaacgtgctagaacagctcaccgcactgatgctgccctggggctgtgacgtgcaaggcagcctgagcagcctgttgaaacatttggaggaggtcccacaactcgtcaagcttgggttgaaaaactggagactcacagatacagagattagaattttaggtgcattttttggaaagaaccctctgaaaaacttccagcagttgaatttggcgggaaatcgtgtgagcagtgatggatggcttgccttcatgggtgtatttgagaatcttaagcaattagtgttttttgactttagtactaaagaatttctacctgatccagcattagtcagaaaacttagccaagtgttatccaagttaacttttctgcaagaagctaggcttgttgggtggcaatttgatgatgatgatctcagtgttattacaggtgcttttaaactagtaactgcttaaataaagtgtactcgaagccagtaaaaaaaaaaaaaaaaaaaaaaa

SEQ ID NO: 117846 - DNA, 1000 bp, Homo Sapiens
aacctgcttatacctaagggcaggagcaagcccctcacaatgcagctgcatgggtttttagtgcctactgaattatatatatatatacatatatatatatatatataaaccaaaagtagttggaaagattatttgaaatgactaactttgtgctatctttatgaaatatgttaaatgtagcttttttgaaacagaagccttgaattgaaatttaactaatacttgaacattttgtatatatttctttgtatataattttgtgcagtaccaatgacaaaaatatggtgtcataataaaaccaggtttgttgatcttttagttatgggctcaaagaatttattcatctctaacatgatattggaaaataatggatgaaaataggaaaaatgattgttaatgctgactgtgggtcttaaaaggttctggaaagcagtaagttcatttttctaaaaactataacattctgttggagtattttcttccttacgtcaatacttttcctgcattatttgaaattgtgggctggggagaaacagtagtcaaagctttctgaattgagatactttgaaattccaagtgtagatttttagaatgtcattttataaatggccgtttttggaattacttgataagaacttttgaaaatggaaggattagtatggcctatttttaaagctgctttgttaggttccttatgttttattaactgtcttttctcagtttccatttcatttttttttttctagttttggtgacttagtgattttgtcattttttacatcaacttcatggtcttgtttttacatggtaattgcatgtacttaggatctatctaataggggctttaaataaatttggtcatatttatgtgtaagcacattttactgtaaatgtttgggtttctgaatttaaacagatctgtttatttcagtatgtagtaaacaatatcttaaagtgtccgattcactacttgttaattaaaaaagttatgattaatgtg

SEQ ID NO: 117847 - DNA, 1000 bp, Homo Sapiens
atggggcagactagggaaacctttgcttgcttactattaggaggggaagtcttcagtagggaacacgatcattccattgtgcaattttacggggatgggtgggcggagggacacaacaaaatttaagaatgactatttgggcgggctggctcttttgcagcttgtgatttcttccagcttgggaggggctgctggaagtggcatttcgttcagagctgactttcagtgcacccaaactggatgacgtgccaatgtccatttgccttatgctttgtggagctgattaggctgggatttgaggtgataatccagtaagtctttcctcgttcctacttgtggaggatcagtagctgttatgatgccagaccatttggagaagtatcagaggcctgaccggacacataatacgacaaccacatttttcctcatcatccatgaggaaatggatgatttctcttttccatatgtcactgggggaaaggctgcctgtacctctcaagctttgcattttactggaaactgaggcgtcaagatggctgtggcagctagcaaaagcaaagatgctttgtgcatagccttgtgaaaaagtatctttctatgcaataagatgaattttcctcccagaatatttagaaatgtagaagggataacagttcacagccaggtaaaatttaactggtggcttaatgactctgcacctttttctcaggaattctgcctaagttgtctgccttttctaccaccaaaaagacttttagttttctatgctttctcctgaattttggtagggtaagtatttctatgtcaaaggcacagccttgatgatctcagggaaaaattttaatcactgtgtataatgatactgaaccttgattaataacagaaattcaggatgtaaagccacagaatgggatttattaatgtgggatacctcagactgtttgttttctttctgggaagaaaagtgtgttctataatgaataaatatagagtggttttt

SEQ ID NO: 117848 - DNA, 1000 bp, Homo Sapiens
ctgcattttctccgtgggttgggagcgtgagggccttcctatccctccacccaccgtttccctgcagtgcacgctggcagccaccaagctaggaagtggcaggagtttgccggttgtttgtgaggggaaaaatttttttttcagagttagcaaataacagtaactactgctttgaatgccaaagtttcttagagtggtctgttacgttttttaaaaataaaacttttaattaagggagactatgttattttaaacagtcttctgttttggccagttgtctggtcaaaatcggcttcagtgattgtgggaggggcaagaaggaaaagaaacagcagcaggtttgatattcagaaagaaatatgcatggattcaataagtatatacatctgagcacagattatttttatagtgatttttgcagctaaatgtgaaggcaactgtcttaagtcccttcctgctgctgtaacaaaagaccttagactgggtaatttataaacaatagaaatttgtcactcatggttctggatgctgggaagtccaagatcaaggctctggcagatttggtgtctgatggggtatgttcttcataggtagtgcttgtgtcttgatgtgtgtcttcacgtggttgtaaacagcagacttcctcaggccccttataagggtgctaatcccagtcacaagggccctgacctcatgacctcccaaaggtcctccctcttcatactgttacattggggatcaagtttccaatatgtgaatacagggaagcaccaacagaccatatcagtaacttcgagtgagtttcctaaggccgactgaagctctgtttacacataagagtgttccccaaagtgcactttctctggggccttttaggccatacttttaattttgttatttgatactactggttgctaatgttctggcatttccagttgttccacactccctgacactggtgtacacaaataaataatacagaaaaaaaaaaaaaaaaaaa

SEQ ID NO: 117849 - DNA, 1000 bp, Homo Sapiens
cagattatcagctcggtgacttttctttctgccaccatttaggtgatggtgtttgattcagagatggctgaatttctattcttagcttattgtgactgtttcagatctagtttgggaacagattagaggccattgtcttctgtcctgatcaggtggcctggctgtttctttggatccctctgtcccagagccacccagaaccctgactcttgagaatcaagaaaacacccagaaaggccttaatgacctcataggcactcttccaaaaagacaacagaactggaatgagaggcctgggtctgtctcctgccttagcaggcctatcaatttcttgtcaatctctttttttccttgctcacattaaaaggaagcatggagttctaatgctcccataaactatgtattttggcaagacacttcactactccaggtctcactttccccatctgtaaaacagggtttggactaggtgttccctggtattctgtgatctgcctcttgctgccattctttctctcctctgcttctctgtatttttcttctgttatccctgggggtgctcaggttcacttgattgtctgtatttctgtgtggttgtagcaaggactcagcctcatgtagcacgaataggggtgtggttcatggcgtgttgacccagcagagcactccctcccactaacttgttctgcatgtgtagagtctccccattttttttaacgcaaccctttcccctttttcctaccccacagctctgttccatgtaagttgccaacagtttcactgaacagtggggtatgtgatggttttggcatgacatcttcagtatgagggggacagtttgacttcactttgagggtgtgatgtctgtagctatgtggaaggtaaaaatagtggtgtgatcatgaaccaaaggaatttatgttttgtaacttgggtactttattttgcattttgttatactattaaataattttttcctgttaaaaaaaaaaaaaaaaaa

SEQ ID NO: 117850 - DNA, 1000 bp, Homo Sapiens
gtgactcgggggcggaggacgggccagcttcccgtgtctcccagctgcccacgctgcccccgcccatgccctggaatctgccagctggtgtggactgcaccaccagcggcgtcctggccttgactgcacttctcttcaagatggaagaagccaacctggcgagccgagcgaaggcccaggagctgatccaggccaccaaccagatcctcagccacagaaagccaccctcaagtctggggatgaccccagctcctgtgcccacctctttgggtctgccccctggcccctccagctacctgcttcctggcagcctccctctggggggctgcggttcgaccccccccacccccaccgggctggctgccacgtctgacaagagagagggcagcagcagctctgagggccgtggggacacagataagtatctgaagaagctgcacacgcaggagcgggcggtggaggaggtgaagctggccatcaagccatactatcagaagaaggacatcaccaaggaggagtacaaggacatcctgaggaaggccgtccacaagatctgccacagcaaaagtggggaaatcaacccagtgaaggtgagcaacctggtgcgggcctacgtccagcgctaccgctacttccgcaagcacggtcgcaagccaggggaccccccagggcccccacggccgcccaaggagccagggcccccagacaagggtggcccgggcctgcccctgccccctctctgagagccctggccagctcttcgcccctcacctctttgaaactctggacgtatttatggctccacctccccacctccctcccccgtcagtgggatgactgggggagggttgctgcagggaagaggagagccccctgccctgccctgccccgtgtccacctcccttgcccccaagcctgtccccagtgcccctcccttctgtttgtgcccctctccccaatttcattaaagatttcatgaaacattaaaaaaaaaaaaaaa

SEQ ID NO: 117851 - DNA, 1000 bp, Homo Sapiens
taaaaggagaggatctgtttggcctgaccgtctctgcagtggcacgcatagcggaatcacttcctggggttgaggcatgtgaaaattataccttccgatacggccgaaatcctctcatggaacttcctcttgccgttaaccccacaggttgtgcccgttctgaacctaaaatgagtgcccatgtcaagaggcctcacaccttaaacagcaccagcacctcaaagtcatttcagagcacagtcactggagaactgaacgcaccttatagtaaacagtttgttcactccaagtcatcgcagtaccggaagatgaaaactgaatggaaatccaatgtgtatctggcacggtctcggattcaggggctgggcctgtatgctgctcgagacattgagaaacacaccatggtcattgagtacatcgggactatcattcgaaacgaagtagccaacaggaaagagaagctttatgagtctcagaaccgtggtgtgtacatgttccgcatggataacgaccatgtgattgacgcgacgctcacaggagggcccgcaaggtatatcaaccattcgtgtgcacctaattgtgtggctgaagtggtgacttttgagagaggacacaaaattatcatcagctccagtcggagaatccagaaaggagaagagctctgctatgactataagtttgactttgaagatgaccagcacaagattccgtgtcactgtggagctgtgaactgccggaagtggatgaactgaaatgcattccttgctagctcagcgggcggcttgtccctaggaagaggcgattcaacacaccattggaattttgcagacagaaagagatttttgttttctgttttatgactttttgaaaaagcttctgggagttctgatttcctcagtcctttaggttaaagcagcgccaggaggaagctgacagaagcagcgttcctgaagtggccgaggttaaacggaatcacagaatggtccagcacttttgcttt

SEQ ID NO: 117852 - DNA, 1000 bp, Homo Sapiens
agaggggcagttttggagccatggatgatcctttcaaaaataaagccttgttatttagcaacaacacgcaagagttgcatccggatcctttccagacagaagaccccttcaaatctgacccatttaaaggagctgaccccttcaaaggcgacccgttccagaatgacccctttgcagaacagcagacaacttcaacagatccatttggaggggaccctttcaaagaaagtgacccattccgtggctctgccactgacgacttcttcaagaaacagacaaagaatgacccatttacctcggatccattcacgaaaaacccttccttaccttcgaagctcgacccctttgaatccagtgatcccttttcatcctccagtgtctcctcaaaaggatcagatccctttggaaccttagatcccttcggaagtgggtccttcaatagtgctgaaggctttgccgacttcagccagatgtccaagcccccaccttctgggcctttcacctcctccttgggaggggcaggattctcagatgacccctttaaaagtaaacaggacactcctgctctgcctccgaagaaacctgctcctccacggcctaaaccgcccagcggtaaaagtacacctgtaagccagcttggttccgcagactttcccgaggcccccgatccattccagccactcggggctgacagcggcgacccgttccaaagtaaaaaggggtttggggacccgtttagtggaaaagacccatttgtcccctcctctgcagctaaaccttctaaggcctctgcctcgggctttgcagacttcacctctgtaagttgagtcctccgcctccgggccaccccactcccttccgcttgcagcttccctgggatttttgtctccttttaaaggcaaacctcccagcttctttagcctcttggtacctcacactctctgtccctcgcgttatttattctacactgccacttctgtaagaaaaacagtttctcaat

SEQ ID NO: 117853 - DNA, 1000 bp, Homo Sapiens
ttcaggtgatccacccatctcagcctcccaaagtgctgggattacaggcgtgagccaccatgcccggcccataagtaccgtttttgaggttcagtcttaaacatttgctttaagaaaacagtcttgaatttcacatgctgctatttttatattttgccattttacagtactgttttgttttgaattcatgcatatcattgaaaatttctcgttttcattttcttagatgacttcttgtctgagacagaaaaatttcctactacagcagtgcagtccagaggttaagatgtattagaattatacaatatcagtttaaaaatctgtatgcataaagaatgcaccactcaacttttttattcataagctaatatttttttaaagttacattaagattttttctcttttgcagctacatttgaaagtgatagaataaagagattttaatgagttatcactttttcagctgatatattcattttaatggcttttttgaaagttcctttttcatgaacacacccgagaaatcttaaatagacactttgcaatatttaagaacctaatgctgtttaattttggtacagcttccacattgcatgttcactttagtatttgcaatttgatatatttcatggtggcaaaatattagctctgttttgggacattttaaaatagaactatccttgttcgatagcataggaaaatgttctggtgattgtcagggtctcctaatatttatctcaattcttttataagtctatggaaattatttaattattttaaaacgtacacacttttcttgtaaatatgtcacatctgagttcaaaaaaattactttgaataccttaatatttgctgcatttttttccgtatatataacatgtcttctttcagaatgggaatatatgtgtgcctcccaacatttactgttaaagtgtgttatctttatatgtcaaactggttgaacactgtaatgagaataaactgcacagagtttattctg

SEQ ID NO: 117854 - DNA, 1000 bp, Homo Sapiens
taagagattcttttccctatgaatgtgggaaatgcaggatttattctgtgaattgtttgtttctgtgtgtttgttcagcgtattcattcactcactcgtttgcaaacataatgggcagtggtcatttactgctgctcttttacagttagctctaaattacttgtttgaactatttatttctgaaaggaatgttactcaagctgccactccctgctgaagagcaggagggaactctcactgggggcggaaggaagtggagctggagcagtaactgccaacatgaagctggagggtttgggattttttttgtttttgtttttttgaggctcaaaaaatgctgggagaaatgaaaatgctgtgggatagggctcctgttgcctttcagaggaagtctgacactacagcgttggcacagtgccgtgaacagtggaactgtgcccaagggactctgattatccaagcatcttccgaagagtgttgtggtcaccttaaagagacttccccttctggaaatgtggtgacttggcttagtcttcaaactggattcatggatttgaagtaactgtaaaccctaaatcttcattttcatcccagatctggttgagtataaacctcagaattgtaggggctggcctgagctgtttatttcaaaagatactattcaatttaaagctatttttcctcagagtttttgttttctatatattaagtctaaattaagttttctactcattaagactaacatctccccactccatccccactgaaatttgtggaagaaaatttagtacttggctctgaggttgccagttatacaataatctattttgcatatgaaagtttgtatttaacttttttgttcattaaaaaccttactgatatggttataacttcagacagtttagagttggtcagaacatattttgcaagatctagtgcctagtgttgcttttctgatgtaataaaaggtggtctggcagaacctaaaaaaaaaaaaaaa

SEQ ID NO: 117855 - DNA, 1000 bp, Homo Sapiens
gcagcttccagagtctggcatgttccccgggcctccccgctgctgaccgcctgtcctactcaggccgccctggaagccgacaggccggcctcggccgcgctggcgactcggcggtgctggtgctgccgccttccccgggccctcgttcctccaggcccagcatggactcggaagggggaagcctcctcctggacgaggactcggaagtcttcaagatgctgcaggaaaatcgcgagggacgggcggccccccgacagtccagctcctttcggctcttgcaggaagccctggaggctgaggagagaggtggcacgccagccttcttgcccagctcactgagcccccagtcctccctgcccgcctccagggccctggccacccctcccaagctccacacttgtgagaagtgcagtaccagcatcgcgaaccaggctgtgcgcatccaggagggccggtaccgccaccccggctgctacacctgtgccgactgtgggctgaacctgaagatgcgcgggcacttctgggtgggtgacgagctgtactgtgagaagcatgcccgccagcgctactccgcacctgccaccctcagctctcgggcctgagcccgccatgccctcagcctgcctcactgctgggccagggtcatgcctatataagttggcatggcagggacaatggtgggcagttgctcttacatgagctaagtttggagacctgaggcccctttgtcctcgctgggtgggccaaggtctgggacctgtcttggactgtgggagactcaccctcaccttgccaggcctctcccctgcaggactggcattgcactagtctgaggtggccactgcctttgatcaacctttgtgtgcgagggtctaagtagggtcgaacacagaagtgggaaggagaggggtgggccaggggctaatggtgtcactgtgtaaagtttttgacatactagctctataaatatatgaatatggacaaaataaaaaaaaaaaaa

SEQ ID NO: 117856 - DNA, 1000 bp, Homo Sapiens
aagtggtataattccattggcaagctgctgaaagaagaagaggatgagaaggagagaggaggaggaaaatggcaaatgcacgacagcggcctcctgaacatcaccaaggtatccttctcagaccgaggtaaatacacgtgtgtggcttctaacatctacggcaccgtgaacaacacggtgaccttgcgcgtcatcttcacttctggagacatgggtgtctactacatggtcgtgtgcctggtggccttcaccatcgtcatggtcctcaatatcacccgcctgtgcatgatgagcagccatctaaagaagactgagaaggccatcaatgagttctttaggaccgaaggtgcagagaagctgcagaaggcatttgagatcgccaagcgcatccccatcatcacctccgccaaaactctagagcttgccaaagtcacccagttcaaaaccatggagttcgcccgctacatcgaagagcttgccaggagcgtgcctctgccgcctctcattatgaactgcaggactatcatggaggagattatggaggtggttgggctggaggagcaggggcagaattttgtgaggcatactccagagggccaggaggccgcagacagggatgaggtctacacaatccccaactctctgaagcggagcgactcccctgccgctgactcggacgcctcatcgctgcacgagcaacctcagcaaattgccatcaaggtgtcagttcacccgcagtccaaaaaagagcatgcagatgaccaagagggtggacagtttgaagtcaaagatgtagaggagacagaactgtcggcggaacattcccccgaaactgcagaaccttctaccaatgtcacgtccaccgagctaacatctgaagagccaacacctgttgaggtaccagataaggtactgccgccagcttacctggaagccacagagccagcagtgacacatgacaaaaacacctgcattatttacgaaagccatgtctaatacc

SEQ ID NO: 117857 - DNA, 1000 bp, Homo Sapiens
cagcatctgtgtggattttcacggacaagttccagtaggtgggacagtgatgccgtcaaggcttagttatgatcatgtgtggtgataaagaccatccaccatcacccttttcccctttggttttgaaggccttgccctaagctacctgagggtttaggaggtctgaacacacacagtggagaggttaatctaggttgggaaactgagtaaaagtccagagcaggaatgagcctgctgtggcgtgggtttggaaaggctcacaggaaagaacctgcaggatcaggggtgggaggggaggcccctgaggtgctctccagggaagaggggctggggtttaaatagcatgcttggaggaagattttccttcaatttttcctaagtccttgaattcaccagtagatttttgtaaacaaaatgtaagtcgatgttttctctcaattatcctaggagtgacctttatatgtgtggaagattaatggtatatgctccttatgtcactgtttttgagtaaaatccatttcctttctctgtttcagcctatgacaaaattgatgtttacaggcctgctttttgcttataattgacaacatgtgcaaaaataccaaatttgtgtcctgtgcagtatgaagaattcagtgaatattcattaatgtattagcttgttttgctctctgttcatatatggctctattcttagaaatataatttgaatgtgatctttcaatagtctgaatattttacaaattatagctatgtcttgtgaaaataacctcaaaaagaaaaatacgactctgttgtcttacttgatatttcttgccctagtaatgtacttgacatttatgttcctaagcagtgtaagtaccagtagaatttctctgtcaaactcaatgatcatttagtacttttgtcttctcccatgtgcttgaaggaaaaataaagtgtcactaccgtatttcttgttttcatcaaaaaataaaaataatttaaaaaaaaaaaaaaa

SEQ ID NO: 117858 - DNA, 1000 bp, Homo Sapiens
ccaacagcaacgggcaccgtctatgccccacccacgtgtatgcagccccagaaggcaaggcacctgccaacagtccccggcagggcaactcaaagaatgttctgctggcatgtcctatgaacatgtacccgcatggacgcagtgggcgaacggtgcaggagatctgggaggatttctccatgagcttcacgcccgctgtgcgggaggtggtagagtttgccaaacacatcccgggcttccgtgacctttctcagcatgaccaagtcaccctgcttaaggctggcacctttgaggtgctgatggtgcgctttgcttcgttgttcaacgtgaaggaccagacagtgatgttcctaagccgcaccacctacagcctgcaggagcttggtgccatgggcatgggagacctgctcagtgccatgttcgacttcagcgagaagctcaactccctggcgcttaccgaggaggagctgggcctcttcaccgcggtggtgcttgtctctgcagaccgctcgggcatggagaattccgcttcggtggagcagctccaggagacgctgctgcgggctcttcgggctctggtgctgaagaaccggcccttggagacttcccgcttcaccaagctgctgctcaagctgccggacctgcggaccctgaacaacatgcattccgagaagctgctgtccttccgggtggacgcccagtgacccgcccggccggccttctgccgctgcccccttgtacagaatcgaactctgcacttctctctcctttacgagacgaaaaggaaaagcaaaccagaatcttatttatattgttataaaatattccaagatgagcctctggccccctgagccttcttgtaaatacctgcctccctcccccatcaccgaacttcccctcctcccctatttaaaccactctgtctcccccacaaccctcccctggccctctgatttgttctgttcctgtctcaaatccaatagttcacagctgagctggg

SEQ ID NO: 117859 - DNA, 1000 bp, Homo Sapiens
gaacaagaacctcatgccacctcttctagtggtgcagaccctggcccacaactccacagccacactctccgtcatcagggactacctggtccaaaaactacagaaacagagccagcagattgcacaggatgagctgcgggtgcggcggtaccgagaggagaccacccgtatccgccaggagatccaagagctcaaggccagtcctaagattttccaaaagaccaagtgcagcatctgtaacagtgccttggagttgccctcagtccacttcctgtgtggccactccttccaccaacactgctttgagagttactcggaaagtgatgctgactgccccacctgcctccctgaaaaccggaaggtcatggatatgatccgggcccaggaacagaaacgagatctccatgatcaattccagcatcagctcaagtgctccaatgacagcttttctgtgattgctgactactttggcagaggtgttttcaacaaattgactctgctgaccgaccctcccacagccagactgacctccagcctggaggctgggctgcaacgcgacctactcatgcactccaggaggggcacttaagcagcctggaggaagatgtgggcaacagtggaggaccaagagaacagacacaatgggacctgggcgggcgttacacagaaggctggctgacatgcccagggctccactctcatctaatgtcacagccctcagaactaaagcggactttctttccctgccttcttatttagtcagcttgccatccctcctcttcactagcagtgtagatcattccagatcagtgggggagggcacctcagcaacctctgagtgtggacaatagctgctttcttctctatccaagagcaccaggctgtgcttgggtccttgctctcagagtctataaataaaagaatataatgatttgggagcttaaaaaaaaaaaaaaaaaaaaaaaaaaaaaaaaaaaaaaaaaaaaaaaaaaaaaaaaaa

SEQ ID NO: 117860 - DNA, 1000 bp, Homo Sapiens
aagaggttggagtgggcgcatcttagcttgccccatccccatttgaggtctgtcggagctgcccttcagtgtgagcatccacaatgggtaccccagcctcggtggtcagtgagccacccccttggcaggccccgattgaggcccggggccgcaagcaggcctcggccaacatcttccaggacgccgagctgctgcagatccaaggcctgtttcaacgcagcggggaccagctggccgaggaacgggcacagatcatctgggaatgtgcaggggaccaccgtgtggctgaggccctcaagaggctgcgcaggaagaggcccccaaggcagaaacccctgggccactcgctacaccactgcagccgcctcagaatcctggagccccactctgcactggccaacccacagagtgccacagagacagcctccagtgagcagtatctgcactctaggaagaaaagtgccaggatccgccggaactggaggaagtcaggccccacaagctacctccaccagatcagacactgatccagggaaagagccaggaatggcagtgtcttccctcttgccaaaaggcctggggaggtgaaggaagagagactttaggcaagcagcccaaaggggtaaatgaaagcaagaggctgctgccactgacctgctccattcagaacaagactggatgcttctgttgagctctccattatgtgggacccattcctcaccaaaatgaggagagacagtgactgttcctgccacagtccttcccagtctaacactattcctgggctgcatgatattcccctgggagcaaagtgacaggcacttagatgcagcatttcaccactcatgctactaatcatctacctgctactactgtaaaccatggttccagcagcctgttccacacccccacaccatcaggatagcacagggaaactgtagtttaagtggcaaataaaaacatttgcatcaaaaaaaaaaaaaaaaaaaaaaaaaaaaaa

SEQ ID NO: 117861 - DNA, 1000 bp, Homo Sapiens
atgaagtcagtgccctggctcaaggctggtgaagtcagtcccccaatcttccaggaagatgcagccctagacctgtcagtggcagcccaccggaaatccgagcctccccctgagacactgtatgacagtggtgcatcagtggacagctcaggtcacacagtgatggagaaacttcccagtggcatggaaatttcttttgcccctgccacgtcccatgaggccccagccatgatggatagtcacatcagcagcagtgatgctgctaccgagatgctcagccagcccaaccaccccagcggcgaagtcaaggctgaaaataacattgagatggtgggcgagtcccaggcggccaaggtcattgtctctgtcgaagatgctgtgcctaccatattctgtggcaagatcaaaggcctctcaggggtgtccaccaaaaacttctccttcaaaagagaagactccgtgcttcagggctatgacatcaacagccaaggggaagagtccatgggaaatgcagagccccttaggaaacccatcaaaaaccggagcataaagttaaagaaagtgaactcccaggaaatacacatgctcccaatcaaaaaacaacggctggccaccttttttccaagaaagtaaataacggctttttaaaatttgtatgattataatatggggaaaggtgcattggttttataaaaaggcatttaaaacaaattatctttgttaattattttggggagtagttgggaaatggaaaggtgaattggctctagaggccctgtatgctagtatcattttcttttttaatttttgacttttcacaaatgagtaaataagagcaacctatttttcaagcagattgcacattttttgcagctttaatggaatattgggtgaattagaggggtaaaaaaagctattttcattgccacaaagtgctttgatgatgtaatacctaataaagggtaggatgaatatttcacaataaatgtttgtttgcact

SEQ ID NO: 117862 - DNA, 1000 bp, Homo Sapiens
tggagataaacgacgggaagctctacgacgcctacgtctcctacagcgactgccccgaggaccgcaagttcgtgaacttcatcctaaagccgcagctggagcggcgtcggggctacaagctcttcctggacgaccgcgacctcctgccgcgcgctgagccctccgccgacctcttggtgaacctgagccgctgccgacgcctcatcgtggtgctttcggacgccttcctgagccgggcctggtgcagccacagcttccgggagggcctgtgccggctgctggagctcacccgcagacccatcttcatcaccttcgagggccagaggcgcgaccccgcgcacccggcgctccgcctgctgcgccagcaccgccacctggtgaccttgctgctctggaggcccggctccgtgactccttcctccgatttttggaaagaagtgcagctggcgctgccgcggaaggtgcggtacaggccggtggaaggagacccccagacgcagctgcaggacgacaaggaccccatgctgattcttcgaggccgagtccctgagggccgggccctggactcagaggtggacccggaccctgagggcgacctgggtgtccgggggcctgtttttggagagccatcagctccaccgcacaccagtggggtctcgctgggagagagccggagcagcgaagtggacgtctcggatctcggctcgcgaaactacagtgcccgcacagacttctactgcctggtgtccaaggatgatatgtagctcccaccccagagtgcaggatcatagggacagcgggggccagggcagcggcgtcgctcctctgctcaacaggaccacaacccctgccagcagccctgggaccctgccagcagccctgggaaaaggctgtggcctcagggcgcctcccagtgccagaaaataaagtccttttggattctgaaaaaaaaaaaaaaaaaaaaaaaaaaaaaaaaaaaaaaaaaaaaaaaaaaaaaaaa

SEQ ID NO: 117863 - DNA, 1000 bp, Homo Sapiens
tcaaattgttggactctgaaaaacaagtggatggattactaatatttgatttattactcaatatatatataattccagccttggaaagtaggaaagtaggctgctacctaacttttagtcccttccaaaaccatttagtagggttctattacataaacagtagggtttttcctctcctgaccttatccgtttacagttcaatgaaataagtgtatgtgcattgctgtctgtctctattgccaaaatcaaataaatggcttctcagctgctgtttacaacaaacttccctaaccaaaacagaacctctaatttagggctaggaatagaagtcttttgatcccagtccctgggacagttttgtatgctgtatcttgtacacaggttgtaggttggtttattgccattttgttttatttctgctgtataaaaaccaagagccagacaattagacaactatggaggaatgaaaggcaattcaaacatctgcttgattcccgccccgccacccctaatttctgagagaataatggttagagaacattgcatctcacttgaaacatcctttgggggtaaatgattcttaggtgctcacttggtctgagctcagctgaatgcagggaagatgggacagagtgacatttctcctctgtgcggcctccagctgagcctgtctctgaattgttccctcccccgcaatgtgggcacttaccatgttcctggcacactggacctcaccatgtcccccggtcaccagtcctcttgctgcccatggttcataggtcatagaaggcagcaatgcactgactgggccacatcttgaaaactcgtggaaagggaaaggggaggagatgggactttgaccacacacagtgatgcctcacaccctgaaggtgggggattttgtacctgtttgtacaactttggtcttgatgggaaaaatggagaattaaaaagtgttttgagaagcttaaaaaaaaaaaaaaaaaaaaaaaaaaaaaaa

SEQ ID NO: 117864 - DNA, 1000 bp, Homo Sapiens
aacactggcccttcttagaagcagaagtgtgcaccaagaccattcatttcaggtagactcacattcagtgccaagtgctcccatgggaataatcagacgcatatgttgcgaaagagtgaagggacttggacaaagaggggttttcctacagatggatgctcagtcttctaccaaaacatgtttggaggcagaactatgacctccccttaagtcctaacaatgtattttgtgtgtgcaaatcctgggatgcccgtttcacgctctgacataaagacatggcacctctagtgagtgatcaggaagattccatatgcatttgggagcttcaggtgcttgttagacacagtgagccattcaaggcaagcaccacctttgctagtgaggccaagagagcctgtgacaatttgacaatttgttccagaaccagtctgatgcaagtgcacctctaatatatgccttacaaactccagaggccatattcaaaacagggtcttctcagtgtatgcaaggggctgcagcccctcttctcttcctccccaggttgaacaatacggacagttttcacacatatctacctgtataaccctctgtacctctcataactggtcaacgactgtaacaggttacatcaggtgtttttctacatactttttacacagattctatgcgattaatgtaatttaattcaatgcatcattttattgtactagttcttaggcttgtccttatttttttctaagtgattgtggtttttctcgtggtttttattgtaaaaaatgaaaggctgttgatgcttattctctgtaactaagaattttaccttttgggggaaaaaagcattgctatgaactaatggaattggaacttcatttactcattgtaaatacactattgtgcaaaaaaagttttcactcaattgaattgctagtgttaactgaattttgtctagacaccatttctgttgatgaaataaagacatatcattatgcattgtaaactg

SEQ ID NO: 117865 - DNA, 1000 bp, Homo Sapiens
ggtgtagggtgagtaggccatttttaatttctgaagtgctaagtgtttttatacagcaaacaaaaagtcaattttgctttccaccagtgcgagagaggatgtatacttttcaagagagatgattgcctatttaccgtttgacagagtcccgtagatgagcaatggggaactggttgccagggtctaaatttggattgatttatgcactgttatctgttttgacacagatttccttgtaaaatgtgcctagtttaccaaaattaacaaagggggggaaaggaccttagaactttttaaggtaaaatcaaatatagctacagcataagagaatcgagaaatttgatagaggtaacttgtttaatgtaaatctaatagtacttgtaatttctttctgcttagaatctaaagatgtgtttagaacctcttgtttaaaaataatagactgcttatcataaaatcacatctcacacatttgaggcagtggtcaaacaggtaaagcctatgatgtgtgtcattttaaagtgtcggaatttagcctctgaataccttctccattgggggaaagatattcttggaaccactcatgacatatcttagaaggtcattgacaatgtataaactaattgttggtttgatatttatgtaaatatcagtttaccatgctttaattttgcacattcgtactatagggagcctattggttctctattagtcttgtgggttttctgtttgaaaaggagtcatggcatctgtttacatttaccttatcaaacctagaatgtgtatatttataaatgtatgtcttcattgctaggtactaatttgcagatgtctttacatatttcaatacagaaactataacattcaatagtgtgctgtcaaagtgtgcttagctcacctggatatacctacattgttaaatgtctaaacagtaatcattaaaacatttttgattacctgtgaaaaaaaaaaaaaaaaaaaaaaaaaaaaaaaaaaaaaa

SEQ ID NO: 117866 - DNA, 1000 bp, Homo Sapiens
tggtggctcactcctgtaatcccagcattttgggaggccgaggtgggtggaccgcttgagtccacgagtttaagaccagcctgggcaacatggtgaagccccatctctacaaaaaatacaaaaaaattagccgggtatgatggtgtgtgcctctagtcccagctacttgggaggctgaggtcagaggatggcttgagcccaagaggcagaggttgcagggtcaagatcgcaccacttgcactgcagcctgagagagagagagccagaccttgtctcaaaaaataaaaaataaaaaaataaaaacaaaataaggaatccttttaaagcatgttgagaaagtattttttggtatgaatgggtgacgggccttttaatctttcaggaatacatataagcaggaatacttagcctgtattgggaaggtgcgtgaaactcaaagttgctaacatcatcttccttattttcagccagtgctgttactgcatttagcatggctctgacgaggcagtggagagttcctgacagcatagcatactgccttctgacagactgggttaagctaccaaaaatgacaaccagggattcaaaaaaaatttttggtcattaaatcgaatgtatattattactttttaattttctaagtatttatcacaggactttaacaccatatatttccctcccagtttttctccccttttggtttaatagttaaaacatttttcataattagtgctgtacatttgattgcaaacaaattggtgatacttctaaactataactataaatctctagaattctgtgaatttcaacattatttgaagtagttcttcagttatatttacatgtgttgtaaatatgtaaatatacttttagcttaggaagtcttccagaatacaaactactcccagttagatatcagtgagtttgaataactgaagaaatgttgacaatgttaagtgtttgattttatataacaagcttattaaatatatttttgtgg

SEQ ID NO: 117867 - DNA, 1000 bp, Homo Sapiens
aataaataaagaagagctccttggtactaaagaaattgaagagtacaaaaagtctgttgttagtcttaaaaatgaggaggaaaatgaaaattccatttctcagtacaaagaatccgtgaagagactattaaatgtgacatgaattatggagtagaaaaatctgcttgatttattaattttatgatatatgtgatcagtatctaatttgatataaaattgaaaatgttaaaaaatcattttttttcctcagagttaaaattatttccctcatactaatgcttaatggcaatgattactccagagttttttaatttttacactggggcaatagactaggaggtctctgatttcttcttggtctaaagtgttttgattttatttctacataatagctttggtattcatgtatatacatgcatttaattgtgattttatcacctttcccatttctttccccacaagctggcatttcagtagttgcttttgaataatggttttggttacctgggaaggcaggcccagaacccatttccttgacttgcagttccgggctgtgttcacatgactgctgtctagctgatgcatttttcacatttgtcaactctggttagaaacaggtcctcaggagtattctctaacctgatattttctaaaaagatatgttgattcaactttgtttagcatcctactttctagattgtggggctcattttgccagggccaagctaccagaaaagtagaagtggagattacctggtatgtatctctctgggtgccccagttagagctgccacagctcaggaaaaagatgaggcataacgaccttgaatgtaattggagtaagtgacaaaataagaactaccctgggaaaccctgcattcaatgtagctgtcaattcagtatttttaagtacacctgtcagctgtttcttaccacttcgatggttgtgattaatttaaaatcaaaataaaggaattactgagtttaaaaaaaaaaaaaa

SEQ ID NO: 117868 - DNA, 1000 bp, Homo Sapiens
aagttcgtgtacagccaaagagagctatttgagccttggaataatctgcctaaatattatatattactgcacatcatgctgggggagattctcagacactcgatggatccacccacattcactttcaactttaacaatgaaccttgggtcagaggacggcatgagacttacctgtgttatgaggtggagcgcatgcacaatgacacctgggtcctgctgaaccagcgcaggggctttctatgcaaccaggctccacataaacacggtttccttgaaggccgccatgcagagctgtgcttcctggacgtgattcccttttggaagctggacctggaccaggactacagggttacctgcttcacctcctggagcccctgcttcagctgtgcccaggaaatggctaaattcatttcaaaaaacaaacacgtgagcctgtgcatcttcactgcccgcatctatgatgatcaaggaagatgtcaggaggggctgcgcaccctggccgaggctggggccaaaatttcaataatgacatacagtgaatttaagcactgctgggacacctttgtggaccaccagggatgtcccttccagccctgggatggactagatgagcacagccaagacctgagtgggaggctgcgggccattctccagaatcaggaaaactgaaggatgggcctcagtctctaaggaaggcagagacctgggttgagcctcagaataaaagatcttcttccaagaaatgcaaacaggctgttcaccaccatctccagctgatcacagacaccagcaaagcaatgcactcctgaccaagtagattcttttaaaaattagagtgcattactttgaatcaaaaatttatttatatttcaagaataaagtactaagattgtgctcaatacacagaaaagtttcaaacctactaatccagcgacaatttgaatcggttttgtaggtagaggaataaaatgaaatactaaatctttctgtaaaaaaaaaa

SEQ ID NO: 117869 - DNA, 1000 bp, Homo Sapiens
ggtcccagagatcagggggtgttgccaggtgtggctggggaagggtctgggttcacaactcaccggcactctttagtccccgtataacatggtggttaaggataaagatctgaagccagacagcccctagttccaatcccagctctgccgcttactagcagtggcagtttggttcaggacttagccttcctgaccttcacttacctcagctatcttgttatcctaccctcagggagttgttgagaggattcagtgaaattttgtgtgcagaatacccatgccactgagtgcctggaacgtagtaaatgtcaaatcaatggaagttaaaactaggcatgcatatatgccagagagctttcctagcatttactgcaatgccctgtctcattttgggaaaaaggaaatcctggatgctaagttgacacatccctttatgcaagtgacaggtaagcagccaggagggttgaccctgccctgggtcccaggcctcttgcctgcttcttggtttcctctgttctcatcctttcagctttgctggacctgaggcaggggcctgggtgtctgtgcctccctaccccccagtacacatgaccaagggaagtagatccagagacaccatgcactctggcccagaaaccctctgctacccagcttttgacttaattgccatttggtgtggctgcagcggggagggcttgtctgcgtatttggagctgaggctgaggctggcttcctgccctctggcttccaggccaggtgtgagggacatcccatgtgggctctgagagcactgagagtagaggtgccttgaggggaccaggaagcctactggctggaatcagtgctccagcagcctccacagcctttatctcaacagcacttgacttcaccaggtgaccctttgggataaaattgccttagggtatgaaataaactataactaaaatggtaaaaaaaaaaaaaaaaaaaaaaaaaaaaaaaaaaaaaaaaaaaaaaaaaa

SEQ ID NO: 117870 - DNA, 1000 bp, Homo Sapiens
gttgatggaccgcctggaacaagtgcaactcacagaggaacttgctgcgcaaagagcgaaatttttaaaagataagatggaagaaacacagtgttacaagagagctttggatgcacagataaagaacaaaccctctcggctgcccccctttgagccagactcctctgagcccatctttggtaagaatgagggtgaactgatggtggaaaagcaaaagcgagaacaaaattacatgaaacaccagctggaggcagctgctaaccacaagaggaaagccatcctgcatcaactagtggaccagaggcgggatttgcaaatgcttcagaggacacaaagagagcacttggcagacagaaccgctgagctggagcgagtaaatagagtcaaccaatgcttacaggaggactgggaaaggagtgctgcgatgaagaagcagcgagacctggaggacaaggcttttgaacgggcttcagacaagctgtttctcctagaccagtgtgagaagtatcggcgctgcaagcaatgccagaggcgcacctccaacgtgggcgagagcaacctgtggcccctgaacaagttcctgcctggctcccggttgcttgtgtaaaactcaaagtttggctcttcgtttcccggggaaagtttttatcttttacatgtttgggggtgattgtgaaactgcgtatttttacctcagagaaaaaaatcattgtttaggtttggtgctttcattagattgcttgttaagcccttattgaattcactcctgctttcctcccacccccaattatttcctatactagtttctgatggcagtgaaggtgtctgaatggtcctgagggctagaacctgctgcacaggggctgggaatgggatccagcttcattatggctgctggggtgctgctgacccagccctgctgctgctccatgactttgtgtacaaaacttttttcatctgtaatgaatagtggcaataataaatattttttaagcgcctg

SEQ ID NO: 117871 - DNA, 1000 bp, Homo Sapiens
gctacgacacagaactctgagatttgctcaggccaggcccccactcccgaccagccagacacctccaagcgttcaaagtgaaggccgtgcagagctggtcactgaaatgagcctgataggataggctggagcataaaactctgcaagggctcctctatcctgtggtcctgagctgtgtgcccttctcagtctgaggggcctaacctagagcaggtttccatagtgagaaaattcaatgtagcagactactgagaaactactgtgttgctcaggctttgtttgaggtcctgtatatacagcactgaaaagagagataaagtccctgcctgcatgcattctggcggaagagacaagcaagcaatgaacaaattagcagaaaacctagttttagtgaaaaatgctgtaaagaaaatagaaatgcgatagagtgctggcaggctagtgtagataagtggtctgaaaaggtgtctctgagccgagggcatgtgagctggggcctaaacaactagaaggagagagccacgtgaacatccggcgaaggggacccaggcagagagaaaaggaaatccaagccctgaggtaggaatgagcaggtcagattcaaggcagtgaggtcaggccgcatgaacctggaggggaatcggggacttcatgcgaaactccagcctaggctttcaaagtcaaagggtgatacagtgggtaccaagctcctctgctccccactttgtagagcctagcatgaggtggcatgtactagaattggatcctaggtgcttagccctgcaatatcagggcctcactggtgggagctgcctcgggctgggttgcttggtcatagagccatagaaggaagctgtcagcccggagtgcctgccacctagacactgatgccattgtgtgctgcctcaagactgctggagtcaggacattttatagagccttttccagttttactaaaaaatttttccattgaaaaaaaaaaaaaaaaaaaaaaaaaaaa

SEQ ID NO: 117872 - DNA, 1000 bp, Homo Sapiens
cagagagccccgaagccaggacaggagacggcagcagcagcccctgaaccatcgtcctgcaggcagcctcgctccatccccagctcctactagttctggcccagcctcctcacacaagctgggctcctgtctactgcctgattcattcaacataccagggagcagttgctcactcttgtcctctggagacaaaccagaggctgtcatggtaatcgggaaaggtctgctagggactggagctcggatgccctgcatcaagactcgattgcagacctgtccgaggagagtttccgccaggaggggtcccggattccccaggctaggcccaggttgggccggggctcaccgccgactcgcagagggatgaaaggctcttcaggccccacatcccctaccccccggaccagggagagcagtgagctggagctgggatcctgctctgctacaccagggctgcctcaggccaggcccccacggccccgctctgcccctgccttttctcctatatcctgtagtctatctgactccccatcctggaattgttacagcaggggtcccttgggccaacctgaggtttgttttgtccctaaatctcccccactgactgtttctccccgggtctgataatgcctttatgttcaatcccaggatatagccccaagatggggtaacagtgggaaatatgctagttcccctccaggccgctgattccatgtgacagccgttaagtccttggaatgccagccacgctgtccaaggcattacagagtatcaccttgagacagaacaaaacagggacctgccaccccttccctccctccgcagcacaagattttgggaccacaaaaaaaagtctatatttttatattggggggagggagtagaaaagcaagcccctatactgggccctattcagtggcagcttcttgttccataggattaaggaagactctgaggaaataaaagttgtttggaaaaatccaaaaaaaaaaaaaaaaaa

SEQ ID NO: 117873 - DNA, 1000 bp, Homo Sapiens
caggaggcacagaccccgaggtccatcctggctcaacagagcaagctgtccaagcccagggtgaccttctctgaggagtctgcagttcctaagaggagctggcgcctcaggccatacctgggctatgactggattgcagggtctctggacaccagctcttccatcaccagccagcctgaggccttcttctccaagctgcaggagtttcgggaaaccaacaaggaggagtgtatctgcagccatcctgaaccccagttgccaggcctgcgtgagagcagtggcagcggcgtggaggaagaccatgaatgcgtgtactgttaccgtgtcaaccggcgcctgttcccggtgcctgtggatcccggtaccccctgccgcctgtgcaggacaccgcgagaccagcagggccctgggaccctggcgcagccagcgcacgtcagggtgagcatcccgctgtcgatcctggagcccccgcaccggtaccacatccaccggcgaaagagctttgacgcctctgacacactggccctgccccggcactgcctgctgggctgggacatttttcctccgaagtctgagaaaagctcagcccccaggaacctggacctctggtcctctgtctccgctgaggcccagcaccagaagctgtccggcaccagcagcccttttcacccggcctcaccaatgcagatgctgcccccgaccccgacctggtcagtgccccaggtccctcggccccacgtcccacggcagaagccctgaggactgactcctgggggagaacagcattcccgccgcctccagcctctcccctctggcaggcgcacccaggagatggaatcccctgcccgcccagctcaggcccagctgtcctaggttgggcaggtgggtggacccaagcttgtctgctgcctgagttccagagagggaggaccctggggtggagggtgagggattctgtggaagtttgtaaataaagctcagtgctctgcagctcaagtcc

SEQ ID NO: 117874 - DNA, 1000 bp, Homo Sapiens
gcggcaggtggaggaggccatgctggctgtgctgcacacggtgcttctgcaccgcagcacaggcaagttccactacaagaaggagggcacctactccattggcaccgtgggcacccaggatgttgactgtgacttcatcgacttcacttatgtgcgtgtctcttctgaggaactggatcgtgccctgcgcaaggttgttggggagttcaaggatgcactgcgcaactctggtggcgatgggctggggcagatgtccttggagttctaccagaagaagaagtctcgctggccattctcagacgagtgcatcccatgggaagtgtggacggtcaaggtgcatgtggtagccctggccacggagcaggagcggcagatctgccgggagaaggtgggtgagaaactctgcgagaagatcatcaacatcgtggaggtgatgaatcggcatgagtacttgcccaagatgcccacacagtcggaggtggataacgtgtttgacacaggcttgcgggacgtgcagccctacctgtacaagatctccttccagatcactgatgccctgggcacctcagtcaccaccaccatgcgcaggctcatcaaagacacccttgccctctgagcgtcgctggatctctgggagctccttgatggctcccagaccttggcttttgggaattgcacttttgggcctttgggctctggaacctgctctgggtcattggtgagacttggaaggggcagcccccgctggcttcttggttttgtggttgccagcctcaggtcatccttttaatctttgctgacggttcagtcctgcctctactgtctctccatagccctggtggggtcccccttctttctccactgtacagaagagccaccactgggatggggaataaagttgagaacatgagtttgggctgaaaaaaaaaaaaaaaaaaaaaaaaaaaaaaaaaaaaaaaaaaaaaaaaaaaaaaaaaaaaaaaaaaaaaaaaaaaaaaaa

SEQ ID NO: 117875 - DNA, 1000 bp, Homo Sapiens
cggaggagttctccaccttcatcaaggctcaagtgagtgagggcaaaggacgcctcatgcctgggcaggaccctgagaaaaccataggagacatgttccagaaccaggaccgcaaccaggacggcaagatcacagtcgacgagctcaagctgaagtcagatgaggacgaggagcgggtccacgaggagctctgaggggcagggagcctggccaggcctgagacacagaggcccactgcgagggggacagtggcggtgggactgacctgctgacagtcaccctccctctgctgggatgaggtccaggagccaactaaaacaatggcagaggagacatctctggtgttcccaccaccctagatgaaaatccacagcacagacctctaccgtgtttctcttccatccctaaaccacttccttaaaatgtttggatttgcaaagccaatttggggcctgtggagcctggggttggatagggccatggctggtcccccaccatacctcccctccacatcactgacacagctgagcttgttatccatctccccaaactttctctttctttgtacttcttgtcatccccactcccagcccctattcctctatgtgacagctggctaggacccctctgccttcctccccaatcctgactggctcctagggaaggggaaggctcctggagggcagccctacctctcccatgccctttgccctcctccctcgcctccagtggaggctgagctgaccctgggctgctggaggccagactgggctgtagttagcttttcatccctaaagaaggctttccctaaggaaccatagaagagaggaagaaaacaaagggcatgtgtgagggaagctgcatgggtgggtgttagggctatgaaatcttggatttggggctgaggggtgggagggagggcagagctctgcacactcaaaggctaaactggtgtcagtccttttttcctttgttccaaataaaagattaaaccaatggc

SEQ ID NO: 117876 - DNA, 1000 bp, Homo Sapiens
ctcatgttcacagaggatttcagcagctgcaactgcgcacgccaggtggggaagggtgggggtgggcctggttgccccatgttaggaaatcactaccagtcaggtggggctggggctgggtggacaggatcaggattcccttgaaagcccaggcagggtgagcagtcccagtggtcctagtgccgcatcagatccaggtgggtgagggcaggaggcccctgcgaaggcagcgtggatctgcccacacataggctactggaatagtttaacccagcaactttcctttttataaaacaacaaatggttcaactctgtctgcaaattaacagctgaacacctgcaactgcaaatgttttttgatccgacgtactgaaataggaagtcatgctcttcccaccctccacccaccagagtggaacccgctgcaaaatccccagccttaattcttgcttcaggacccagaccggtgtcttgctctagggcaacccagggcagaggggccaggtctgcccagcgtttaccactgctgtcaagccacagcccttggccaccatacgggccatcctcagtgaggcagccccccataggcttccgccaagctctggtcccgaagaggctgtgcgagcccttcccggccctccccagggccccccgccccctcctctgcctgctgcgtggaggcagccatgggaaggagcccaggggagctggcctgggggagcgaagcccatgttcgcttcctgacttagagctggggggggtggggggtggggcttgttcccctgcagtatctgttctgtgaagtttgttaaatgtaaggaaagcttaaattcttgtatctttaaaagagaaaatcttatttaacccttttgtgttctagatttacttacacacatagcctagagctcagttttagttttaacattgtgaaaatattaaaagaatcttgtaactttattcttttttctcctgctgaaaaaaaaattaaaccaatcgtatg

SEQ ID NO: 117877 - DNA, 1000 bp, Homo Sapiens
gtatcactgtgacgatttgagacaacttgttgtattgagggactttctgtacctccttttctttttctttgttgatgagctctgacaaagctattccctggtgtttttttcccccactggggagggggtgaggtggaatggggtgggggaacatggacttgtgactaacgaagctggttgctgctggcccagggctgggggcttgggggtaaatcctgaggctttggtgctcccccacccacccattcccgccctttgcagcagccccgctatcttgagattagtgttgacagggaggggaggattgtgaggtgaggggttaataagttactctaataaaggagcgtggagaagggatctgaggggtgagggtggcccccctcctcacgccttcttcactgcccccctcagagtgcacaatacgagtttgttcctgcctccactctcccaccccgttctggcctccctgtctcaagatactgagcctctcacctcccagccctcagccacccccatccctgccccttctgagactcacagcacccctttccttcctctcctcccacctcctccctcagcccctcattctccttgggaatctgcagagggctctgggactcactgccggatgtgaaatccaggcgtcagctgtttcctaggcaagggcaggaaagtggtctccagcccttgctccactcatgcctgggggcctggggctgagtggtatccctacctggcctccccctggcctctgggcctccagcgctgggtttgtcgagtgagagagagagaggagcttgggttgcttccctgtccccgccccctctgtggcattgtccctcccactcttatttttctaccaattgctatttttccgaacaatccttgtagagtatgtaccatccaaaggcaggagggcctcgccgtggccggctctggttggagatggtacagttttattgtacaggtgctaaaacaacaacaacaaaaaagaaaatgg

SEQ ID NO: 117878 - DNA, 1000 bp, Homo Sapiens
ggtacatatggatcataagtccatttggggaagactcgtttatacaggttcatcagtactgtgtcttgagattttagcttcccatcaaagctgcatttcatgtggccatgggtacctagaaagacatcagaacaagtcggtcaaattaaaagtagaaaattttaaagcaatgacttccaacccaacagtcatttagcaacactgcagaaatgcagacatggtctcaaatcccgtgtttccttacctaaaggttccttgatatgtcctctccggccccacttcgttctcagttccactggtttaaaccacagcacatcctcttagaatcaaacacattaaagaccaagatgaaacatttacccacaaaatgtaaacccaacctttataccacaaaggcaatcagatcccatcctcctccttcatacccacctctgttgaagaacatgtaacgtactactgccatcttagtaaaaattttgaaaggatgaccactcagaacaactctcttgatgaccattctgtctggatctactgacataagatggcctgtagcaatgaggctgtgcattcctaaaggacaaaagcaaagaagctatttaggaatttacaggccaaagtcttcatttattgcccagtccatttaaagacccatgcaagagcctggtttgtcatccctgccctagcccaatctgaggctaagattggtaaactgtaagcccacacttaaccttgtcaataggttcttgaaaacttgtacttcaagagaaatgatgtataacaaaaccatactttttctcatcagttgttacaaggaaaggatgttgaacaaaaggcagttatttgaggactggctatacactgtttcacgtaaaagttggagttttcattgttctattaacaatgttaaatgaagacttactgtattttgaaaaccatcattaccttctccataccatttggctcccaaatttaaataaacaagagaaaacggtgttcatct

SEQ ID NO: 117879 - DNA, 1000 bp, Homo Sapiens
tggtcccagtttattcctgagctacagtagagccctgcccttgcccctgtgctcaagctgtccaccatcccgggcactccaaggctcagtgcaccccaagcctctgagtgaggacagcaggcagggactgttctgctcctcatagctccctgctgcctgattatgcaaaagtagcagtcacaccctagccactgctgggaccttgtgttccccaagagtatctgattcctctgctgtccctgccaggagctgaagggtgggaacaacaaaggcaatggtgaaaagagattaggaaccccccagcctgtttccattctctgcccagcagtctcttaccttccctgatctttgcagggtggtccgtgtaaatagtataaattctccaaattatcctctaattataaatgtaagcttatttccttagatcattatccagagactgccagaaggtgggtaggatgacctggggtttcaattgacttctgttccttgcttttagttttgatagaagggaagacctgcagtgcacggtttcttccaggctgaggtacctggatcttgggttcttcactgcagggacccagacaagtggatctgcttgccagagtcctttttgcccctccctgccacctccccgtgtttccaagtcagctttcctgcaagaagaaatcctggttaaaaaagtcttttgtattgggtcaggagttgaatttggggtgggaggatggatgcaactgaagcagagtgtgggtgcccagatgtgcgctattagatgtttctctgataatgtccccaatcataccagggagactggcattgacgagaactcaggtggaggcttgagaaggccgaaagggcccctgacctgcctggcttccttagcttgcccctcagctttgcaaagagccaccctaggccccagctgaccgcatgggtgtgagccagcttgagaacactaactactcaataaaagcgaaggtggacaaaaaaaaaaaaaaaa

SEQ ID NO: 117880 - DNA, 628 bp, Homo Sapiens
aatcatattagtgaagattaggaagaagctttaaaatcccaaggctagtgtgcattgctagaattgttaagagagagagctcatatgaaattggttatcgtgggatatttaaaataaaacaaagaacagtttactttcaggcaaaaagatgccagtaatcaatattgaggacctgacagaaaaggacaaattgaagatggaagttgaccagctcaagaaagaagtgacactggaaagaatgctagtttccaaatgttgtgaagaagtaagagattacgttgaagaacgatctggcgaggatccactggtaaagggcatcccagaggacaaaaatcccttcaaggagctcaaaggaggctgtgtgatttcataatacaaacaaaaagaaaaaaaattaaacaaattcttggaaatatctcaaatgttaataacaatatgaatttttctcatgcatactattactactaagcatgtacgtgaatttttaaatttatagatgtaaacttttaataaaaattggggtgtggtaacccatcattctatgtttttcttaacatagctggcacagggtttaacacataattgccaataaatattgcttaaagttctttaaaaagaactatgtttt

SEQ ID NO: 117881 - DNA, 1000 bp, Homo Sapiens
aaatgtatccatgtggctacttctccagccccctccttccctctcttctgcctgatagagggaagaggaagaggaggacgaacagagatcctgaaattctgacttgctgctattccagaacccagcctcctgggtttccccagtcctcatttttcctcccaatacccacccttctctctcgagggatctaggcaccttggtcccagtgtcttccttttgttctcactgccaaactgcctgtcctgggatctagttatcttggccctgcactctcaacatgagtagcgaacacttaaattgggttttcaacagtcccagctttcactgccagggtcccagtcagattccaggaatttgcgccctaactttgcttgctaatcctggtttagagctatcccactaaaatatttaatcctaattcttagtccttgcctgtgagatatgaggtcttacaggagacctcagagctcccagcccttctcctcctgctaacccttctcacaccctcaagaggagttagaaaagaggtccttgtcattctcacctcttatggaaaatggaataagaaataatcatatcctttcttcccacccttctcctgttatttaggatttctgacaaagctggcttgagattggtcacttagagccgactgtctcctctgccttttgtttttcagcttcagagacagatccaatatagtcccagggacctgggtctctgggagaggaaggaagagggagggagcaaagagattggggtatgtcccctgtagtacactcttacctcttacttcctagactttgatttctccggcagcccagatgttcagttctcttggcccctctctaccccttactgggatctggttttcattttccggtccttttgccatacacagttacagagatcagtcaaatccataccaccactgagatctcatttattgccacagatgcacaaaataaataacccaaaatcacaaaaaaaaaaaaaaaaa

SEQ ID NO: 117882 - DNA, 1000 bp, Homo Sapiens
ttagtgtaccacatcaagattgacggcgtggaggacatgcttctcgagctgctgccagatgactgatgtatggtcttggcagcacctgtctcctttcaccccagggcctgagcctggccagcctacaatggggatgttgtgtttctgttcaccttcgtttactatgcctgtgtcttctccaccacgctggggtctgggaggaatggacagacagaggatgagctctacccagggcctgcaggacctgcctgtagcccactctgctcgccttagcactaccactcctgccaaggaggattccatttggcagagcttcttccaggtgcccagctatacctgtgcctcggcttttctcagctggatgatggtcttcagcctctttctgtcccttctgtccctcacagcactagtatttcatgttgcacacccactcagctccgtgaacttgtgagaacacagccgattcacctgagcaggacctctgaaaccctggaccagtggtctcacatggtgctacgcctgcatgtaaacacgcctgcaaacgctgcctgccggtaaacacgcctgcaaacgctgcctgcccgtaaacacgcctgcaaacgctgcctgcccacacaggttcacgtgcagctcaaggaaaggcctgaaaggagcccttatctgtgctcaggactcagaagcctctgggtcagtggtccacatcccgggacgcagcaggaggccaggccggcgagccctgtggatgagccctcagaacccttggcttgcccacgtggaaaagggatagaggttgggtttcccccctttatagatggtcacgcacctgggtgttacaaagttgtatgtggcatgaatactttttgtaatgattgattaaatgcaagatagtttatctaacttcgtgcgcaatcagcttctatccttgacttagattctggtggagagaagtgagaataggcagcccccaaataaaaaatattcatggaaaaaaaaaaaaaaa

SEQ ID NO: 117883 - DNA, 1000 bp, Homo Sapiens
gaccaggctgggaggcccgaggctccttttcgcaagctgatgtgcaccgacaagtggccattgtgttccggacccctccctacgcagaccccagcctgcaggctcctgtgcgtgtctccatgcagctgcggcggccttccgaccgggagctcagtgagcccatggaattccagtacctgccagatacagacgatcgtcaccggattgaggagaaacgtaaaaggacatatgagaccttcaagagcatcatgaagaagagtcctttcagcggacccaccgacccccggcctccacctcgacgcattgctgtgccttcccgcagctcagcttctgtccccaagccagcaccccagccctatccctttacgtcatccctgagcaccatcaactatgatgagtttcccaccatggtgtttccttctgggcagatcagccaggcctcggccttggccccggcccctccccaagtcctgccccaggctccagcccctgcccctgctccagccatggtatcagctctggcccaggccccagcccctgtcccagtcctagccccaggccctcctcaggctgtggccccacctgcccccaagcccacccaggctggggaaggaacgctgtcagaggccctgctgcagctgcagtttgatgatgaagacctgggggccttgcttggcaacagcacagacccagctgtgttcacagacctggcatccgtcgacaactccgagtttcagcagctgctgaaccagggcatacctgtggccccccacacaactgagcccatgctgatggagtaccctgaggctataactcgcctagtgacaggggcccagaggccccccgacccagctcctgctccactgggggccccggggctccccaatggcctcctttcaggagatgaagacttctcctccattgcggacatggacttctcagccctgctgagtcagatcagctcctaagggggtgacgcctgccctccccagagcactgg

SEQ ID NO: 117884 - DNA, 1000 bp, Homo Sapiens
attatccctttaggaagaggggggggcagcaagagagcctatttgggacagcattcctctctctctgctgctgtgacatctccctctccttgctggctccatctttcgtctgcactaccaattcaatgcccttcatccaatgggtatctatttttgtgtgtgattatagtaactactccctgctttatatgccaccctcttccttctctttgacccctgtgactctttctgtaactttcccagtgacttcccctagccctgacccaggcactaggccttggtgacttcctggggccaagaaactaaggaaactcggctttgcaacaggcattactcgccattgattggtgcccacccagggcacactgtcggagttctatcacttgcttgacccctggacccataaaccagtccactgttatacccggggcactctaaccatcacaatcaatcaatcaaattcccttaaatttgtatggcactggaactttggcaaagcacttttgacaagttgtgtctgattggagcttcatgatagccttgtgacatctttagggcaggattcttatccccattttgcagatgaaaaccctgagtcacagatttctgtgggactgtggatctcactggaagctatccaagagcccactgtcaccttctagaccacatgatagggctagacagctcagttcaccatgattctcttctgtcacctctgctggcacaccagtggcaaggcccagaatggcgacctctctttagctcaatttctgggcctgaggtgctcagactgcccccaagatcaaatctctcctggctgtagtaacccagtggaatgaatttggacatgccccaatgcttctatatgctaagtgaaatctgtgtctgtaatttgttggggggtggatagggtggggtctccatctactttttgtcaccatcatctgaaatggggaaatatgtaaataaatatatcagcaaagcaaaaaaaaaaaaaaaa

SEQ ID NO: 117885 - DNA, 1000 bp, Homo Sapiens
tgaactgtggactcgctttcccaggcaggggctgagccacatggccatctgctcctccctgcccccgtggccctccatcaccttctgctcctaggaggctgcttgttgcccgagaccagccccctcccctgatttagggatgcgtagggtaagagcacgggcagtggtcttcagtcgtcttgggacctgggaaggtttgcagcactttgtcatcattcttcatggactcctttcactcctttaacaaaaaccttgcttccttatcccacctgatcccagtctgaaggtctcttagcaactggagatacaaagcaaggagctggtgagcccagcgtttgacgtcaggcaggctatgcccttccgtggttaatttcttcccaggggcttccacgaggagtccccatctgccccgccccttcacagagcgcccggggattccaggcccagggcttctactctgcccctggggaatgtgtcccctgcatatcttctcagcaataactccatgggctctgggaccctaccccttccaaccttccctgcttctgagacttcaatctacagcccagctcatccagatgcagactacagtccctgcaattgggtctctggcaggcaatagttgaaggactcctgttccgttggggccagcacaccgggatggatggagggagagcagaggcctttgcttctctgcctacgtccccttagatgggcagcagaggcaactcccgcatcctttgctctgcctgtcggtggtcagagcggtgagcgaggtgggttggagactcagcaggctccgtgcagcccttgggaacagtgagaggttgaaggtcataacgagagtgggaactcaacccagatcccgcccctcctgtcctctgtgttcccgcggaaaccaaccaaaccgtgcgctgtgacccattgctgttctctgtatcgtgatctatcctcaacaacaacagaaaaaaggaataaaatatcctttgtttcctagtga

SEQ ID NO: 117886 - DNA, 1000 bp, Homo Sapiens
agtgtagtaaagccgttgtttacttaaagatttatcaaatcagtcagtgcaaatgtcagatacaatgtattcatttaaaagattcatttttaatcatgaaattacttatcatccacattgttttaaaaagaaacaagatgctggatgtctgccaatttttgccttcattaccttttttgataaagtttctcagatccttgtttcaaacacaaatgcagggattgctgccactttttaactattaagaggcagaaaattgcacaatattgaacttttttccactgaagtagtgtgcagttctagtttgcattcctgatatgatttaaaacatgtaatataaagatgttaaaaaaaaaaaccaaaactgtgcagagtctagaagttgtttgtcatcttcagcttgtgcacaattctgttttaggttaaaaaaaggcattgtttgagctgtcccatctccactgttatccctttgggttttttaatataaattattagtttacatcatttttgtatctacatcttttttcacaaatttgtcttgccttattaaagttctgtaaaatatacttaaatggaaaaaatgatgttcatttagattgaaaacttttctcagatggattgataattgcattcatcttgtgttttatatgagaaggtgcctcaagaatttcctgttggatttgtttaaaaggatttttatctttcgtgataaactttgctgtgtaccaggaactataaaaacaaaaacttgttactaaagaaaatatctgaaatgtgataagttcttatgccatgttaatttcatgtgtcaacttcaacatttacatgtattatttcattatgtaaaatgttttagcaatttaatattttgcacagttagcaaactttgtatgtcatttccttcaaggcatcatgcagagttgacatgagatttataaggttttaagttgtttgcatgtgaaaatcaaatacatactttggtagtctttgaaaaaaaaaa

SEQ ID NO: 117887 - DNA, 1000 bp, Homo Sapiens
tttcacttccataaagacccagcccaagctgctgggaaccatgtgttcctgagtattctcagaggttaaacaagtgacaagtgagcttctgaaattagtgtctcagcaagctggctttaggaatgagccccattttatcaagcagagaaaaaaaataacagcagaaaagataaagataaaccaaaaatatataccccccaatggaaaataatgttgattcagcaattcccataggatgtattacatgctctaatttattatattattatttatctgtctttgatctttgcccattgtactcttaaaaagatgttgggatgttgattgcgatttttaaacaactagataatgtataaatcagcagtggaaatcagttttaatgtgtggatgtgtctgattattgttaaatgcctctttttttactttttttttttttagatgtataatgtttcataaaccctggcactggtcacaaagctcagctgtgaaaatgaaatttgtagtatttttaaacatgaatgtcaatttcaagtgtatttgaaatggttcctccaggagagatatttgtgcaccattaggaaaatcttctctgcagaggaagtagccttctttggagaaaatggaaaatgggttctgatatgtgatctcagagtagcccatttcctagggcaccatggaaaacacaaatgtgatctttaagtatacctcttccccagtttggggaggaaaggactcagtttgcaccctttttgtatgtaaaataaaatgtcttacctttcttggctacttctgcttgtttggttggttgattggtttgtctgtttttaatctccctcggctcatttgtaattaacaatctagctaggactaactttgatgcgattcaagactcctgtgaacaaaaataatttggcattcttgtttcattccttggattaaatattgtcttctcctgtgagtcacttcaaaaataaatactgctgtctctcttcgagtgctg

SEQ ID NO: 117888 - DNA, 1000 bp, Homo Sapiens
caaggtaagtggaggtatacttcgaatttttccagaaggcaaagcccagtttgctgacattgaacccaaatttgatagactgctgtttttctggtctgaccgtcgcaaccctcatgaagtacaaccagcatatgctacaaggtacgcaataactgtttggtattttgatgcagatgagagagcacgagctaaagtaaaatatctaacaggtgaaaaaggtgtgagggttgaactcaataaaccttcagattcggtcggtaaagacgtcttctagagcctttgatccagcaataccccacttcacctacaatattgttaactatttgttaacttgtgaatacgaataaatgggataaagaaaaatagacaaccagttcgcattttaataaggaaacagaaacaactttttgtgttgcatcaaacagaagattttgactgctgtgactttgtactgcatgatcaacttcaaatctgtgattgcttacaggaggaagataagctactaattgaaaatggtttttacatctggatatgaaataagtgccctgtgtagaatttttttcattcttatattttgccagatctgttatctagctgagttcatttcatctctcccttttttatatcaagtttgaatttgggataatttttctatattaggtacaatttatctaaactgaattgagaaaaaattacagtattattcctcaaaataacatcaatctatttttgtaaacctgttcatactattaaattttgccctaaaagacctcttaataatgattgttgccagtgactgatgattaattttattttacttaaaataagaaaaggagcactttaattacaactgaaaaatcagattgttttgcagtccttccttacactaatttgaactcttaaagattgctgctttttttttgacattgtcaataacgaaacctaattgtaaaacagtcaccatttactaccaataacttttagttaatgttttacaagg

SEQ ID NO: 117889 - DNA, 1000 bp, Homo Sapiens
acagctctgagacaatgaaaccctgcaaggaaaactttactggatctgagaccctaaagcatttagtcctgcaattcctgcagcagtattactcgatctatgactctggagatcgacagggtctcctcggtgcttaccacgatgaggcctgcttctccttggctattcccttcgaccccaaggactcagccccgagcagcttgtgcaagtactttgaggatagcaggaatatgaaaacactcaaggacccctacctgaagggggaactgctgaggcgcacaaaacgtgacattgtggactccctcagtgcgttgcccaaaactcagcatgacctcagctccatcctggtggacgtgtggtgccagacggaaaggatgctctgcttttctgtcaatggggttttcaaggaagtggaaggacagtctcagggttctgttctcgccttcacccggaccttcattgctacccctggcagcagttccagtctgtgcatcgtgaatgacgagctgtttgtgagggatgccagcccccaagagactcagagtgccttctccatcccagtgtccacactctcctccagctctgagccctccctctcccaggagcagcaggaaatggtgcaggctttctctgcccagtctgggatgaaactggagtggtctcagaagtgccttcaggacaatgagtggaactacactagagctggccaggccttcactatgctccagaccgagggcaagatccccgcagaggccttcaagcaaatctcctaaaaggagccctccgatgtcttctttgtcttcgttcacatcctctttgtttcctcttttcaccagcctaaggcctggctgaccaggaagccaacgttaacttgcaggccacgtgacataaccacccaaagagccagttgctctgtgtattcgccccactcatgatcaccattttattttcataataaagagtgacgttacacgttaaaaaaaaaaaaaaaaaaaaaaaa

SEQ ID NO: 117890 - DNA, 1000 bp, Homo Sapiens
accttaatgttataaaagtagttactgttttttttttaattggaggcagacttgatatttcagagttgcatagtaaaagcaatttgttaatttttgtgtattttcagataaactattacaataaagaaaggagcagaatgtagtatttggaagatgatttaaattcagcaacgcctaaaaatgtcttcctaagtatttttctcagccatgtcattctttaaattatgagatggttcttagaagagaaaatggtgtaattgtattaaacagacaattataactcaagataatataactttgaaccttctaagaactgatttgtttggttttcctcccattccccattcctccttaaaagattgaatgaattaatgagcagaaagagaggattggtaacatgggaaatcgttttcattagatgtacatttcctggttctgacaggaaaggggctccggaaaatcataaaacaagcaggtgaacaagaccaggtgtgtcggcacctccctgctcagtgcccagcggaggtaaagaaccactcagcatggtttttgtcagttcacctcttctgtcgttgtcagaggtttcctacctgtctgatataaactttctctgggttgataatataaattcagaaacatgtaaaatgaatcatgattatattactgttatttttagacttaaaatagtaacaaaattttatttatggtggcacatttaatggctttttttttctgtgttctggaataagagaatacctagctactatttaagcatccaaaaatcatatcttgctttcatttagttgagaaaagccagcatagagaaagcaaagttttagaatattatgtgtcatactaattcagtatccagaccaaatgttggaaagtcttattttatgatttaatatcccttgttccattttacagatatgatcatgtaaaacttacctacaatattcatttcaaactgctaaattaggtaaatacagacttttagtat

SEQ ID NO: 117891 - DNA, 1000 bp, Homo Sapiens
aggtgagtttgatgctgaagtgcaagaagtgtgttgagatgctgccgtttctattttgaagcgagctttcaacaggcgggtcccctgtggcaaagaaaatcggaaccctgttgccgattttccatttgtcaccccagcagaatgtccggcacttgctcccttgctgccccttctcaggtcagaggcgggtgttccagggcctgccgcggggctctctgggccggttccctgcagacccgcaggagagcacatgtgccttgcatgaagtgtgggttgcgccaacaattcccctggtccctttcaacctgtttagttcaactcaagcctccctgtgtcccagaccctcctgctgccaccaccacccaggtcctccctagtcctccagcgtcaacactatcccttgggagttgtagctgctgtcactgactcccggctatacatggcctgtcgaccacgttatagccctcaggcctgttgaacttgctctctaagagaggttgggaccaggctaggttccgggtgacgcccaggagaggtggtggccttcacacatgcacatggagttgaggaccagggagctgcagggaaagcaacagctataggtgccttgctcttctgtcggaggctgctgggggcaagagcagctgcacaaggccagggcaagtgctagggcccctcccccatcacatggtcacactgggacaggcgtgcagctcactgaactccaagcgagccagccctctcttggactagaaggcctactgtcagcccttcgcttacaaactgcaggctcaatccgaaggggacggccggcgggggctctcctagtgcccagagacaggcccagaggtttacaagttttctaagcttttgataatgtgaagctccaggccgagaggatgctgttgagcacattgcagctatgtaatttttggtgtatgtatgtaatatttaaggttggaaaaaaaaactcaaaagcaaagatattaactcttattag

SEQ ID NO: 117892 - DNA, 1000 bp, Homo Sapiens
aatgtcaagagaaaatgacctctgctcaaaagggagaagagtctcaatttcagcaagtacctgtcatgaagggtatgaccttaatgatgtacataaaataaaacaaatgaagaaatggaaaacttttagaaattaaggtgtacttgaaaacgaatatctatcatatgacccctgcactccctctgtatcatctcaggaggtttcaggggcctgttgacatgaagtttcgaagtttcatgttggctttggaatggtagcaaaagcctttcctggctgagatgatgcttaaaacacacctcacttattgtacatgttggaaccaggacatgagagacatagaaaaacagaagtcatgaatgtaaattgaatgagaggcttaacatgcatgaaaatacagatggacctgcaggaaagtgagcaaacatcgctgagtttgttttcttgttcgggagaatggggccggggctggcctggcctcccctggatatactctatagtgcaccaaaaggataaagcatctgtacatgtatttttttattttttatcagaagtgcttagacaagaacagaataagcaggctgtttggatgctacttgtggttgaattgtgttcccccaaaatatatggtgaagtcttaacccccatccccgtgaatgggaccttgtttggaaatagggtctttgcagatatagtcaagatgaggtcacattggattagggtgggccccaaatccaatgactggcatccttaggagaagagagagttttggtaatagacacaaatgcagtgggaagaagaccaggggacaagaggcaagttggagtgatgcagccggaagggaagggacaccaaggatctccggccaccagcagaagccagcagagaggcatgggacaggttccccacaagccttagaaggaagcatggccctgacttcagaattccagactccagaactggaagaataaatgtctgttgttttaaaaaaaaaaaaaaaaaa

SEQ ID NO: 117893 - DNA, 1000 bp, Homo Sapiens
atcgtaagaatgactgaaccattattccagctgcctcccagattaatgcataaagccaaggaactaccccgctccctgcgctatagggtcactttaagctctggggaaaaaggagaaagtgagaggagagttctctgcatcctccctccttgcttgtcacccagttgcctttaaaccaaattctaaccagcctatccccaggtagggggacgttggttatattctgttagagggggacggtcgtattttcctccctacccgccaagtcatcctttctactgcttttgaggccctccctcagctctctgtgggtaggggttacaattcacattccttattctgagaatttggccccagctgtttgcctttgactccctgacctccagagccagggttgtgccttattgtcccatctgtgggcctcattctgccaaagctggaccaaggctaacctttctaagctccctaacttgggccagaaaccaaagctgagcttttaactttctccctctatgacacaaatgaattgagggtaggaggagggtgcacataacccttaccctacctctgccaaaaagtgggggctgtactggggactgctcggatgatctttcttagtgctacttctttcagctgtccctgtagcgacaggtctaagatctgactgcctcctcctttctctggcctcttcccccttccctcttctcttcagctaggctagctggtttggagtagaatggcaactaattctaatttttatttattaaatatttggggttttggttttaaagccagaattacggctagcacctagcatttcagcagagggaccattttagaccaaaatgtactgttaatgggtttttttttaaaattaaaagattaaataaaaaatattaaataaaacatggcaataagtgtcagactattaggaattgagaagggggatcaactaaataaacgaagagagtctttcttaaaaaaaaaaaaaaaaaaaaaa

SEQ ID NO: 117894 - DNA, 1000 bp, Homo Sapiens
ccacctaatatatcctacaaccagccaaatgcacttttgtgaaaatggggtgtgaggagtggttctgcagcttgagtcctctggttttaagtagtttgtttctacttgtttaaagaatcttctggtctgaccacttaaagtaaaaactacatgatttattttcgggcaattatgtttagctttcatcattatactccaacagacccgtctgaaggggtattttttttttaacaataatgtttgtaacattttgttgtgtcaattagagggtcacttgtttgtattgcaataaacactgggaccagttccggggttaagaattaatttttgtttttaatatttcacatgaaaagaatcaaagtaattgtaatggctagaagagacctgccagaagattaaaaaaaagaatgagagaaaagcccagttagtggtgtgcaaacttacttcctttaaatgtcccatggatgtaggacagtgccatgtttcaagatgcctgtgagctaggtcttcaagatttatagaatgttacttatgaacaaaatataattatttatggtacaattcttgtactttagcaaatctggagttagttcatagtcaaagtcagttaatatttcttagaggaaagttttgctttttgtggcaacatttttatagcttgtgtgagttcttttttatttaatgatttgaaagcatttttgcacagtcgtgaccgtgtgtggtggcgtcactgtaaccaaagtatatgcaccagcccttgtgcatttattgtttctcctgattttgtggatttaaatgtccaaatgcaaacctttgtgacttcctttggaggacttggcagcacagcatgcccccgtgacctgcctgctgtggtatgagctatgaccaagagcaggcttcctgctccatggagtcctgagttgctctggggcaggggattacgttatgaaaactaaccatgtgtaacaataaatctaccttagcaaaaaaaaaaaaaaaa

SEQ ID NO: 117895 - DNA, 1000 bp, Homo Sapiens
gggaggtctcgtggtgcttaaggcctgtgactacagtgacccaaatcagatctggatctataatgaagagcatgaattggttttaaatagtctcctttgtctagatatgtcagagactcgctcatcagacccgccacggctcgtgaaatgccacgggtcaggaggatcccagcagtggacctttgggaaaaacaatcggctataccaggtgtcggttggactgtgcctgagagcagtggatcccctgggtcagaagggctctgtcgccatggcgatctgcgatggctcctcttcacagcagtggcatttggaaggttaaggtggatgctgtggcgggaacgttgcttcatcaggcgttgcctccggtgtggagtttggggctttaggaaagcctgggttgggtggagcagaaccatcttggagaagatgacagttccctgtcctcccggagatgcctgggtgtgttagcagaggtgacacgtgtctgacagagacgggagctctgagtgtccacgggtgaagaagtgagtgtccacgggtgaagaagtgagtatgtttcacctggacattaaggtgatgtttgagctgctgttaaggaatttcttgcttatagaggcaaaccacagtatcattttaactctagaattgggcttgtacagaaggataaaacccaggaaaatggatatttctattcagatttatttatgcctctttttaatcccctttaatgatgcagtggtttttatctgatcaggaacttgtcatgatttcctttcttagacttcataggagatagtgctttaaaaaaaaaaaaaaacttctattatttgtttagtatgttgtaagtagatcattttaaaaaactgaatctatattatgtttaacttcagaaggcatcatttataagacagtatggcagttaattataaaattattttgatgaattatgatacaatctacataataaagaatccttttgattaaaaaaaaaaaaaaaaaa

SEQ ID NO: 117896 - DNA, 700 bp, Homo Sapiens
gtcctcacacgcggttccctgtgactgggcgcgaccccggcaagcgcggcttggagggcggacggggcgcggcgatacagctgcccgctcgcatctttggccctgcgctcagctcctcacccggcgtgggaagttaaagtaaaaccgaaagggaagaaggcgcggtggcaggagctgacagagtgatgggaaacgcgtgagccaggccgagagtttcaggtttcttgctgtatggatcactgattgaataatagatggctttacctcgtctcacaggagccttgcgttccttttcaaatgtcaccaagcaagataattataatgaagaagtggctgacttaaagataaagcgatctaaacttcatgaacaagttttagatttgggcctgacatggaagaagataataaaatttttgaatgaaaaactggagaagagtaaaatgcaaagtataaatgaagacttaaaagatatattacatgctgcaaagcagatagaagtgaattgtccattccagaagaggaggctggatggaaaagaggaggatgagaagatgagcagagcttctgacagattcagaggactaagatgacaaaaatgactaaaatggacaaaagaagaaatagaaaatctgaatatttgactattaaaggaatttaatctgtaattaaaaaccttaagtacaaagaaaaaaaaaaaaaa

SEQ ID NO: 117897 - DNA, 1000 bp, Homo Sapiens
cgtagctggcaaggtcttcattcacttgccactgctagtcttccaacccttctggactttctttgctcttgtcttgttttgggtgtactggatcatgacacttctttttcttggcactaccggcagtcctgttcagaatgagcaaggctttgtggagttcaaaatttctgggcctctgcagtacatgtggtggtaccatgtggtgggcctgatttggatcagtgaatttattctagcatgtcagcagatgacagtggcaggagctgtggtaacatactattttactagggataaaaggaatttgccatttacacctattttggcatcagtaaatcgccttattcgttaccacctaggtacggtggcaaaaggatctttcattatcacattagtcaaaattccgcgaatgatccttatgtatattcacagtcagctcaaaggaaaggaaaatgcttgtgcacgatgtgtgctgaaatcttgcatttgttgcctttggtgtcttgaaaagtgcctaaattatttaaatcagaatgcatacacagccacagctatcaacagcaccaacttctgcacctcagcaaaggatgcctttgtcattctggtggagaatgctttgcgagtggctaccatcaacacagtaggagattttatgttattccttggcaaggtgctgatagtctgcagcacaggtttagctgggattatgctgctcaactaccagcaggactacacagtatgggtgctgcctctgatcatcgtctgcctctttgctttcctagtcgctcattgcttcctgtctatttatgaaatggtagtggatgtattattcttgtgttttgccattgatacaaaatacaatgatgggagccctggcagagaattctatatggataaagtgctgatggagtttgtggaaaacagtaggaaagcaatgaaagaagctggtaagggaggcgtcgctgattccagagagctaaagccgatgctgaagaaaaggtga

SEQ ID NO: 117898 - DNA, 1000 bp, Homo Sapiens
gtgcgacaagaagtacgtgaccgagtacatgctgcagaagcacgttcagctcacacacgacaaggtggaggcgcagagctgccagctgtgcgggaccaaggtgtccaccagggcctccatgagccgacacatgcggcgcaagcaccccgaggtgctcgcggtgaggatcgatgacctggaccacctcccggagaccaccaccatcgacgcctcctccattggcatcgtccagcctgagctgactctggagcaggaggatttggccgaagggaagcacgggaaagctgccaagcgaagtcacaagagaaagcagaagccagaagaggaggcgggtgctccggtgcccgaggacgccaccttcagcgaatactcagagaaagagacggagttcacaggcagtgtaggcgacgagaccaattccgcagtacagagcattcagcaggtagtggtgaccctgggtgacccaaatgtgaccacaccatcgagctcagtcggcttaaccaacatcaccgtgacccccatcaccactgcggccgcgactcagtttaccaatctccagccggtggccgtggggcaccttaccacccctgaacgccagttacagctggacaactcaatcctgaccgtgacctttgataccgtcagcggctctgccatgttgcacaaccgccaaaatgacgtccagatccacccccagccggaagcctcgaacccacagtctgtggcccatttcatcaacctgacgaccctggtcaactccatcacgcccctggggagccagcttagtgaccagcacccgctcacgtggcgggcagtgccccagactgacgtcttgccaccctcgcagccgcaggcacccccacagcaggcggcccagccccaggtgcaggcggagcagcagcagcagcagatgtacagctactgagctgcgttccgggagactcggggcaagaactgcagagggatgtttgggatttgtttagatgtgtttgctggatac

SEQ ID NO: 117899 - DNA, 1000 bp, Homo Sapiens
tttacggagagcgatagagaagatcttcttcctcattttgcgcaatatggtgaaattgaagattgtcagattgatgattcctcacttcatgcagtaattacattcaagacaagagcagaagctgaagcagctgcagttcatggagctcgtttcaaagggcaagatctaaaactggcatggaataaaccagtaactaatatttcagctgttgaaacagaagaagttgagcctgatgaagaagaatttcaggaagagtctttggtggatgactcattacttcaagatgatgatgaagaagaagaggacaatgaatctcgttcttggagaagatgatttgactgatcattgatctgcatatgctagaactctacctgtgtttcattagtattatctaatgtacttttacatatttgtaaaaacaatttttggtaaaatgtgatgaagatggatttcacaaatagacaaaaaagaagaaaactaccttctgatcttgtattttgaaagattgatgtttgcattttacttcagtaaacaattgctaaagacatcacactagaaacatatgcaatgtttttattacatacttctactggacatcacagaattctttgggttctttgtaatttaatgaataggtctgaaaacttatgaccaatacttgttataacttagaggactttgttttattccaaataaggaatgaatttgcatttaaaatcttaatgaatgttttcaaaactgaatagataacatagtactctaactaaagtctccaagttatgtattataatattacatagtagtatgcttaggctttactatgtattagccttttgttggactgtgtatgtattttaccatatgggttttaatgataatggtgtatgactgctttacatgagtccttatgcatccagatgttataataaagtggaatggtctctttaaaaaaaaaaaaggaaagaaaagagaaaagcaatgacaaaaaaaaaaaaaaaaa

SEQ ID NO: 117900 - DNA, 1000 bp, Homo Sapiens
ggcagctggggaaccctggctctcggtcccagaaggtgggtgttgcctgggtggagccccaccctgtgtattcctggaaggaaggtgcctgtgcagacattgccctggtgcgtctcgagcgctccatacagttctcagagcgggtcctgcccatctgcctacctgatgcctctatccacctccctccaaacacccactgctggatctcaggctgggggagcatccaagatggagttcccttgccccaccctcagaccctgcagaagctgaaggttcctatcatcgactcggaagtctgcagccatctgtactggcggggagcaggacagggacccatcactgaggacatgctgtgtgccggctacttggagggggagcgggatgcttgtctgggcgactccgggggccccctcatgtgccaggtggacggcgcctggctgctggccggcatcatcagctggggcgagggctgtgccgagcgcaacaggcccggggtctacatcagcctctctgcgcaccgctcctgggtggagaagatcgtgcaaggggtgcagctccgcgggcgcgctcaggggggtggggccctcagggcaccgagccagggctctggggccgccgcgcgctcctagggcgcagcgggacgcggggctcggatctgaaaggcggccagatccacatctggatctggatctgcggcggcctcgggcggtttcccccgccgtaaataggctcatctacctctacctctgggggcccggacggctgctgcggaaaggaaaccccctccccgacccgcccgacggcctcaggccccgcctccaaggcatcaggccccgcccaacggcctcatgtccccgcccccacgacttccggccccgccccgggccccagcgcttttgtgtatataaatgttaatgatttttataggtatttgtaaccctgcccacatatcttatttattcctccaatttcaataaattatttattctccagtgaaaaa

SEQ ID NO: 117901 - DNA, 1000 bp, Homo Sapiens
gcacggccgcgcagagggtctacaccacgggcaccatccgctacgcgcccgccgaggtgaccctggccatgcagagcaacctgctgcccaacgcgcacgctgttaacttcgtggacgttaacagccccggctttggcctcgaccccaagacgcccatggagatgctctaccaccacgtgcaccggctcaacatgtcaggaccgttcggcggcgcagtgagcgcagctagcctgacgcagatgcccgccggcaacgtgttcaccacggccgagggactcttctccacgctgcccttccccgtctacagcaacggcatccacgcggcacagactctggagcgcaaggaggactgaggcgccgcccgtcctgggcccggccaggccccgcttggaggaggcatcgtcggcattttcgtttagacctttaattctagcactttgaattcgagcaggtcagcgtcttctctcgccacgacggtccccattccaccccctctttctttcacctgacttattctttcgtgtaaagatatgtttattttttgccttcagagggtcagacgaccagttgcctgccgttttgtcttcttctaaggtgtgtgttgggttgttttgctttcctttgcatctttattaagatgtctttcatgtgtatatgcctctgccatagaatactcagtcttgtggtcaagagagttctcaagtgacaaccattggggtttcttcataaagatcttgatatgatcaagatggaaagagacaagcataaacaatgtgccctgtttgactaagtcaaatgaaatagggtggtttttgtttctgttcctaattcctttaaaaaatagggggaatagtattttagaattttatgcagaatttaattctctttttacggttaagattttaagattttcttacttgcacataaaaataatttgggttcttaaacttaatttctggcctgtgactagaatgtttaaaaaaaaaaaaaaccctcgtgc

SEQ ID NO: 117902 - DNA, 1000 bp, Homo Sapiens
cctgcaagcgataggagtggaagcccaccaggccgtcatgattggggacgatatcgtgggcgacgtcggcggtgcccagcggtgtggaatgagagcgctgcaggtgcgcaccgggaagttcaggcccagtgacgagcaccatccggaagtgaaggctgatgggtacgtggacaacctcgcagaggcagtggacctgctgctgcagcacgccgacaagtgatggcctcctgggagagccccgcctcctccacccctgcctctcctccacccctgcctcccctccacccctgcctctcctccacccgcccaggagagccccacctcctccacccctgcctctcctccacccctgcctcccctccacctgccccagtgcccagaccaaccaaggccctgacagccctgccttctgccctctgccctgcatgggcaggcatttgttccctacctgggtggcctgctcccctgcctgggccctgacttcagctccctgtagtgaagtccaggagggtgggacaggcctgtcaggcctctgggaatctcccaaatcccagaactcaccactcaccatgggcctttaaatgcagtaaactccacctaaccagattcaggggcactatgcccactgcctcctcttcagactctttgcatttcagtgaagagcctggaagaaacccaggggcctcctatgcacagatcttgcagcccagaaccaagtcagcctccctgcgactgcccaggcacactgcccaccaccccacccccgaaacaatgccagcccgctgctttttctatcctcccagtcacctttgcagacaaagaccaggggcagctcccgagggcactgtgaaggctcccatgccacacagtgagaactgtagcctctgcgtccaaggcacacagggtactttctggacccactgctggacagacttgaaggtgtcatgcccggtgtgtgcaggaggaaactaacagttcagtaaactctgccttgaccagc

SEQ ID NO: 117903 - DNA, 1000 bp, Homo Sapiens
taagcgaatagcacaaacacagccagctgaatcaaacaccatcagtaggataactgcaaacatggaaaatggagaaaatgaaggaacaattaaaattattgcaccttcaccagtaaaaagctttaagaaagcaaagaatgaaaatagccctgatacccaaagaagcaaatctcatgcaccgtgggaagaaaatggcccccagagtggactctacaattctcccagtgatcgcactaagtcgccaaagttcccttacacgcgtcgccgaaacccctcctgtggaagtgacaatgattctgtacagcctgtgaggaggaggaaagcccataacagtggtgaagattcagatcttaagcaaaggaggaggtcacgttcacgctgtaacaccagcagtggtagtgaatcagaaaattctaatagagaacaccggaaaaagagaaacagaatacggcaggagaatgatatggttgattcagcgcctcagtgggaagctgtattaaggagacaaaaggaaaaaaaccaagccgaccccaacagcaggcgatccagacacagatctcgttcgagaagccccgatatccaagcaaaagaagagttatggaagcacattcaaaaagaacttgtggatccatccggattgtccgaagaacaattaaaagagattccatacactaaaatagaggacacaaggtgacccaatccgcatcaggcattctcattcgccacgaagttaccgccagtatcgcaggtcccagtgttcagatggggagcgatcagttctctcggaagtgaattcaaaaacagatcttgtaccaccacttccggtgacccattcttcggatgctcagggttctggggatgctacagttcatcagagaagaaatgggtctaaagatagcctgatggaagaaaaacctcagacatctacaaacaacctggctggaaaacacacagcaaaaacaataaaaactatacaagcttcccgcctcaagaaaaaaaa

SEQ ID NO: 117904 - DNA, 1000 bp, Homo Sapiens
ggggccaaagccattcaaccaatccccagataatccagagctcttgggagcagaaccttaaagagagatcgtggagagagccagggcccagaagaactctctcaaagagaagagggcagccaagatgacccgatggtccagttacctgttgggatggacaaccttccttctctattcctatgagtcaagtggagggatgcatgaggaatgtgtctttcctttcacctacaagggatctgtttacttcacttgcacccatattcatagcttatccccttggtgtgccaccagagccgtgtacaacggccagtggaagtactgccagagtgaagattacccacgctgtatcttccctttcatctatcgaggaaaggcttataacagctgcatctcccagggcagcttcttaggcagtctgtggtgctcagtcacctctgtcttcgatgagaaacagcagtggaaattctgtgaaacgaatgagtatgggggaaattctctcaggaagccctgcatcttcccctccatctacagaaataatgtggtctctgattgcatggaggatgaaagcaacaagctctggtgcccaaccacagagaacatggataaggatggaaagtggagtttctgtgccgacaccagaatttccgcgttggtccctggctttccttgtcactttccgttcaactataaaaacaagaattattttaactgcactaacaaaggatcaaaggagaaccttgtgtggtgtgcaacttcttacaactacgaccaagaccacacctgggtgtattgctgatgctgaggaaaggagaaatatcttcagaggaagactgccgccatactgaggctgagcacagatttgtctttttcattgcatctgtcaagcttaaataaccacctttagaaataccctctgcaccacctgcttcaatcagctggtcctttgtgaagaacgtagagagaatgcggcataaccaccaataaaggagtcttgatttaa

SEQ ID NO: 117905 - DNA, 1000 bp, Homo Sapiens
aaaggggctgagtctttgtccatgtgcacaagtcttgggggtctgtgcactggacacacatgtgccttgcctgacagaattgcttagaaaggagcagagaaggacgggagctggcgtagctctcagtctaatgctttcacattgcaccagattcctgcagttgggcttaacccactctgcaaggcatgtgtctattcagggtttcccaggaggaggaggcccctgaaggggtgcggcagcaggggggtggtaagggagggtaaagcagagagaatgtattcacaggaggccataaattagcattgtgccatgtccacctgttgttcctggactctgacacatgattgtagacaatgatggcattttatgatttttaaaaaagattttgtttgttttaaggtggagagggaggagaagcctgaattggggagcttgggagtggaagcttttctcatgcttgtgatttggtgactcttctaaatgctgattcattagggattattacagcggatgtcaactggttgtggtgatggggtgggggcagaacatgagtagcaaagaaaagggagagacgaaaagggtacaggctcacgtaaagtaatgaagcctttcccaaccaggatggttcacaaaaaagctgtgagatccacagttacaagtgacacgcatgcacacatggagttccacatggggtactgttgaatggagcacactgatgggaagcttccctctcccaggccccctcaggagaaggtggaagagaaagggtgggcgtgggtggggaaggcagagatctctgttattctggtccatctaatgatgtaacttctttcagttattattttagctttaaaaggaaataaggggttcagatttgaaagggggtggtatgggtgggggaggggaattgccaacaaaagaacactgattgtaatgtgagaaaagtgtatttttgtattttaataaatattgttgaatttttaaaaaaaaaaaaaaaaaa

SEQ ID NO: 117906 - DNA, 1000 bp, Homo Sapiens
gagtaccttgggcgagtttctagaagaccattttcctctgcctgatagaagtgttaaaaagaaaaagaaaaacattcaagaatcatctgtaaacctgataacactgcatgaaatgttagagattcttataaatagattatttgatgttccacatgatccatatgtcaaaattagtgattccttttggccaccttatgttgagctgctgctgcgtaatggaattgccttgagacatccagaagatccaacccgaataagattagaagctttccatcagtaaaaggatgttttcttttttcacacagtaaaaattcttatcattcaaggatattggaaccacaggactatttggataaaaaacattatttgcaaattaatgcgcatagtacttttattgcaaaatggcatgtgctgccatctattattcatttttaaatggtcatttcttattcagtgagtgctttagtgttttaaactatatggataagaatgcaggtagataatattctaggcataaaacatttaatgtaccttacctcatgcaatattctttggattctttgttgatttatgatattgctaatataatattttcttaaaatatataacaatatcttttatgcatttgagttccagctggtgcttctttatatttagaaattataatgggaaggtcatttaatttacagatggttttaaaattgaggtaatatctgaggtggcataatttaaaaatatttagcaaatttgtttcatatatactgtcttatttctagatttgtttaaaattggaatatgaaaaactaatggataaagctagcataaaattgatattttagtttgtattattaatatatcatgttaccttatatattaatctactcttgattctgctaattattaccaacaaaattgtattcatgacattttattaatcctctgtgaattttctgtaaataaaattatttctgaaaatctctaaaaaaaaaaaaaaaaaaaa

SEQ ID NO: 117907 - DNA, 1000 bp, Homo Sapiens
aggttttatttcaattaatttgttctagtgctttcaagagcaagtacatcaaaatgtagaaggtaaaatgtatgcaacactaatataaattattccaagtctttaaggagccaaagaaaaaaaagatttctcacagctttttgttctgttttgtatttcaattaggaacttgcagtattattttgaaaaccattctaaaataataggagttaggaaataaataaagttttgctagccctgctaagttcaggcttagaggcttatcgctaagtataaacttcaccagattccacgaaaagctggatagctttttttctgacttatgttgtggttgcacccctcacaaatggcagaacagtatgtaaagctggtaacacctcggtttcagtgcaccatgtgtttgctttgtgaaggtgaagaatatgttggtttagagaaagaaattggatgtaattttatgcaatttacttttaaagacaaacataactatttagcagagaatattttaataaatgcaaaacaacagctggactgctgtacatcaaggacagattaactggaaaacatatgttccttatgtgtgatcgagagccattcagaaaagacttcctttgtgttcagcctatacttttccatatggtataccttgaaaaaaattagcacaccatggttatttttctaccttttataaaagacagagcctgtttactcatttagaagatagagaaaattggtctaaaattgaacatcctagattcacactcccaagtcacttaaggtgatttgatggtgaggaaaatgattgacaaagcccaacaatgatctcaggaattacattttccaacagaccaaaaaatgttttcatgtagcagcaatgcagatttggtgaatatttaatatatattttagtatgtatttcactttatgactgacaattaaaaaatattgtttggccaaatagtaaacacccttttgaaaccatgaaaaaaaaaaaaaaaaa

SEQ ID NO: 117908 - DNA, 1000 bp, Homo Sapiens
cccgcaggtgaatgagtggcaggatgactggccgacctttttcgcccggcaccggctccaggcgcagctggacctcattgagaaggactatgctgaccgagaggcacgagaactctggtcccggctacaggtgaagatcccggatctgttttgtggcctagagattgtccccgcgttgctccacggggatctctggtcgggaaacgtggctgaggacgacgtggggcccattatttacgacccggcttccttctatggccattccgagtttgaactggcaatcgccttgatgtttggggggttccccagatccttcttcaccgcctaccaccggaagatccccaaggctccgggcttcgaccagcggctgctgctctaccagctgtttaactacctgaaccactggaaccacttcgggcgggagtacaggagcccttcgttgggcaccatgcgaaggctgctcaagtagcggcccctgccctcccttcccctgtccccgtccccgtctccgtctccccgtccctgtccccccgtcccccgtccctgtgcccccgtccctgtccccctgttcccgtctccccgtccctccgtctccatccccccgtccccccatcctcctgtccccgtccccccgtccccgtccctccatccctgtcccccgtccccctgtccctgtccccctgtccacataccaatccccctgtccccgacccccatccccgtcccccatctccgtccccgtcccccctgccccgtccccgtctccgttcccccgtccccatcctccatccccgtctcccatcgccgtccccccgtccccgtcccccgtccccccgtgcccccgtccccgtcccccctgtccctgtcccccttcccccgacccctcccagatcctggggaccaataaagcccgcagcgggcctcggctggcgaaaaaaaaaaaaaaaaaaaaaaaaaaaaaaaaaaaaaaaaaaaaaaaaaaaaaaaaaaaaaaaaaaaa

SEQ ID NO: 117909 - DNA, 1000 bp, Homo Sapiens
gacagcccctcctccatagtatgggactggcctctgctgatcctcccaggcttccgtgtgggtcagtggggcccatggatgtgcttgttaactgagtgccttttggtggagaggcccggcctctcacaaaagaccccttaccactgctctgatgaagaggagtacacagaacacataattcaggaagcagctttccccatgtctcgactcatccatccaggccattccccgtctctggttcctcccctcctcctggactcctgcacacgctccttcctctgaggctgaaattcagaatattagtgacctcagctttgatatttcacttacagcacccccaaccctggcacccagggtgggaagggctacaccttagcctgccctcctttccggtgtttaagacatttttggaaggggacacgtgacagccgtttgttccccaagacattctaggtttgcaagaaaaatatgaccacactccagctgggatcacatgtggacttttatttccagtgaaatcagttactcttcagttaagcctttggaaacagctcgactttaaaaagctccaaatgcagctttaaaaaattaatctgggccagaatttcaaacggcctcactaggcttctggttgatgcctgtgaactgaactctgacaacagacttctgaaatagacccacaagaggcagttccatttcatttgtgccagaatgctttaggatgtacagttatggattgaaagtttacaggaaaaaaaattaggccgttccttcaaagcaaatgtcttcctggattattcaaaatgatgtatgttgaagcctttgtaaattgtcagatgctgtgcaaatgttattattttaaacattatgatgtgtgaaaactggttaatatttataggtcactttgttttactgtcttaagtttatactcttatagacaacatggccgtgaactttatgctgtaaataatcagaggggaataaactgttgagtcaaaac

SEQ ID NO: 117910 - DNA, 1000 bp, Homo Sapiens
gtccgtggctggactgtgtgccataggcccctctccctgcccctccctggagccctgcagactgaccagctggagctctctgtcccccgaccccaaatcagagctggggcctgtcaaagcagacgggcgactcaggtagcagggccccagccagtacccgtggaggacccgggaaattgcaccttacagacagtggaggggtgtcccctcccacaggcaagaaccagaggcccaggctgcacacccatttcagccatcaagaacccacacagacggcagggaaggtggacacagtatgaactactgctgatgtctctgttggggatcagagggctggcgggaacgcgagaagggcaccagcagcattccacacccagctcttcctcaccttcctgtctagtttgaatttcttttttttctttcttttttttttttttttaatttaaaaaggaaaatgggtggttgggagagaaactagaacagaagatgtgcaatagggctcagagcagccccaggaagtgggccatgtctgtggggagcagtggcttgctgagcccacctgctattgttctgcacgaggctgggcctgcctcactctccagggcctcatgccccattctgggcctgtggtgctcgtggctgaggctccacagggctgcaagtgccctgccaggctctaaggcccgaagaacaggtgatatcgggggcgctgcagagctgggctctagcaggacagttcttttgtagccaggggaccctagaagtggggtggggcggctccagggctttccagcataccctgcccctggatgggaaaggcagggtcagggcccactgagacccatgcagagtttccaggtgtgcactggaagtgaggtcacatgagcagcgtgggaagaagactctgtcaagactctcagaagaacctggagtaattgtgcctgaagctcagcgtgaagtctgaaatatgcaacagaagaaatatatctctatctctcta

SEQ ID NO: 117911 - DNA, 1000 bp, Homo Sapiens
gtgcgtggtggaggctggcctctctggctgggtgcagtgaatggccagcgggtttcttttctgctgggccaaggcgctttgggggtggagggggtggtgctggtgctgcactgggctgactgcggcgctgacgcagcgtttccccccatccctgttgcctgtgtgttgtgtggatctgttcctagtataggcaacataatgagatactgtgcttcccacctccccttcagttcagagccaaaatgggtctagaatctggcactttactcatttcctttgataaattgtactatgcagagctgtcaggaaccttcagatagcagtagaggactgcagctgtctaggtctgcggccacatcttggggacacactggactgttcccatgtgcagggttcagcagttatgtgggagtgctaggggttaggcttttgagcttgaacgcctgcgtgtgaacagatgaaaaatccttcagtacccaagtcccagtctgtcctatggggagcagtttgggggcggccggcagcaggagcctgggaaagaggccctcgccaggtgatggcagggccagggtggcctggggcacccagcggaatgtgcttagtatttggtcaccagccgtcatcctgggcttttcctactgtgtcttgttacaaggcctcagcaatccacagaactctctctccttccttccacctgtcagcttctctgcttctgagataagaaccatttgtgtaacaccaacacttaacttcagaaagacatgcattatgtggtgtaatcaaacccgatgctttcagatgacctacttacatcttcaatgtggataagataaagaacaaaacacatgcatctaaactgctgggcaatccagttgacttttaaatgtaagaatggaattccaaacacttaacacattcagctatatgacagaaagtaaatctatggatatggtattttgtgaatgatcttttaaataaaagaaaaccttacgtaatattt

SEQ ID NO: 117912 - DNA, 1000 bp, Homo Sapiens
gttgtactccagcctgggcaacagagcaagacccatctcaaaaaaaaaatttttttcctgagaggaagcctgaggttgaccagctctggggtttgtaaggcaggtctgttttctcctaggccctgagttttctgaatctctggttttgctttgttggcaaggagccagggaatcctgacctgagccagaccttaagctctatggttatttagctggccattcaggtataaggcagggtggtgtacctgctggcactatccagatggaggcaccaaacacccacatacctggcccaaccagacttctcccgtgagccaggcaaaggaaattgtcatctgccaactgtcctactcatattcctctcagtccttcttgggggtaagctgattacctgaaggacagctgaacccctggggtagcctcctatccaccactgcttaagtgcctatgggaatgtgggtctgcaccttgtcccctcataggatggtaccaagcatttagtgcacagtggccccatcatagcctgcagcctcatcatttcccatctggacctggtacaaatgcacgtcacaggctcagctcctccccactagcatcttctctaccttcaagaaccaggcagccctgccatgtcacaataggccaggggagtttccaaagatgtgggtggcaaatgcccctatagaaacaccagtacctgaaagcactgtagccctggacctgcctccttccctcggggccatacttctgtttccatctgctgggccaccagccactttagtgacccctgcctacttccttcctgttggatatcatacttccatctggctgcctttgcttaagccatctttgtggtagaggggccctggaattgcagctgtactgaggatgatgttattcacagcccctggcccacccactaatactactgcacagagtcaggatctcacatttcaccccaggctcaactgaggatgtggcttattaaacacggaagtgc

SEQ ID NO: 117913 - DNA, 1000 bp, Homo Sapiens
ctgggacaggatgctccgctcggctctcttgaagctggcctgtgacctgaaccatgctccttgcatccagaaagctgctgaactcttctcccagtggatggaatccagtggaaaattaaatataccaacagatgttttaaagattgtgtattctgtgggtgctcagacaacagcaggatggaattaccttttagagcaatatgaactgtcaatgtcaagtgctgaacaaaacaaaattctgtatgctttgtcaacgagcaagcatcaggaaaagttactgaagttaattgaactaggaatggaaggaaaggttatcaagacacagaacttggcagctctccttcatgcgattgccagacgtccaaaggggcagcaactagcatgggattttgtaagagaaaattggacccatcttctgaaaaaatttgacttgggctcatatgacataaggatgatcatctctggcacaacagctcacttttcttccaaggataagttgcaagaggtgaaactattttttgaatctcttgaggctcaaggatcacatctggatatttttcaaactgttctggaaacgataaccaaaaatataaaatggctggagaagaatcttccgactctgaggacttggctaatggttaatacttaaatggtcaatagaaaaagtaggctgggcgcggtggctcacgcctgtaatcccagcactttgggaggctgagaagggcggatcacgaggtcaggagatggagaccatcctggctaacacggtgagaccccgtctccgctaaaaatacaaaaaattagccgggcatggtggcaggtgcctgtagtcccagctactcggcaggctgcagcaggaaaatggcataaacccgggaggtggagcttgcagtgagccgagattgcgccactgcattccagcctgggtgactgagcgagactctgtctcaaaaaaaaaaaaaaaaaaaaaaaaaaaaaaaagaaaaaaaaaaaaaaaaaa

SEQ ID NO: 117914 - DNA, 1000 bp, Homo Sapiens
tatgaatttaagaccatattattatcaaaaacctagagaccaatcatatatctgaaaagaaatacccattaaaaattctgcctcctgtttattgagaactatgcattgaacattctgaatcattctaagcctctggagagactgtaatgatccattcatgagctggtatgaaatcagtgggaagcagaacaacagaaggaactttaaaagcaacaagcaattatgtaccatatatacactgtagcaaatattttatatttgagagtctttacagcttacatttccattccattattacaagtgatgaaaaacaaaaaattgcaagtagtatgcaaattataaatatacagtcttcccacttcactaaccaaattcctactttccagtgttacttcccaatttatgcaggaaacctcctgcaaagctgaaactgattagaaaattctttatattttaaaatagctctttctcatttttagagaagtcaaatagccaaccatcaaaattaagaataaattgaattgtcacagtccattacagttattgttgctagatccacctcatttgcagatgtccaaacttaaattcatctgttcttaaaatgctacttaaaactttggttgttttcctgtaatataaaagaaaaagttaatttatcaattgattgaatacagtttttactaattagtttatcaaaccaaatactgtgaacgtaccaggtgtttacagatttaaatgcatgttaccatagaaactattaaagtaactagaactgtcaaataacaaaacggctcatgtttttaaaatatatgtaactcattttaaaatatattaaattgtattccaaacctgttcttctgtttctgtggcacctaggtttaaaatatgtattaatgtgtaaatcacaagtaaaatgaattctaatgtacaagtttgttttaaaaagtgtatgtcaagcttttatttacacaataaaatgttattaaagatggaaagtcta

SEQ ID NO: 117915 - DNA, 1000 bp, Homo Sapiens
ctggacaatagcctctccatcttacgtaccttctacatgctgggagtgcgctacctgacgctcacccacacctgcaacacaccctgggcagagagctccgctaagggcgtccactccttctacaacaacatcagcgggctgactgactttggtgagaaggtggtggcagaaatgaaccgcctgggcatgatggtagacttatcccatgtctcagatgctgtggcacggcgggccctggaagtgtcacaggcacctgtgatcttctcccactcggctgcccggggtgtgtgcaacagtgctcggaatgttcctgatgacatcctgcagcttctgaagaagaacggtggcgtcgtgatggtgtctttgtccatgggagtaatacagtgcaacccatcagccaatgtgtccactgtggcagatcacttcgaccacatcaaggctgtcattggatccaagttcatcgggattggtggagattatgatggggccggcaaattccctcaggggctggaagacgtgtccacatacccggtcctgatagaggagttgctgagtcgtggctggagtgaggaagagcttcagggtgtccttcgtggaaacctgctgcgggtcttcagacaagtggaaaaggtacaggaagaaaacaaatggcaaagccccttggaggacaagttcccggatgagcagctgagcagttcctgccactccgacctctcacgtctgcgtcagagacagagtctgacttcaggccaggaactcactgagattcccatacactggacagccaagttaccagccaagtggtcagtctcagagtcctccccccacatggccccagtccttgcagttgtggccaccttcccagtccttattctgtggctctgatgacccagttagtcctgccagatgtcactgtagcaagccacagacaccccacaaagttcccctgttgtgcaggcacaaatatttcttgaaataaatgttttggacatagaaaaaa

SEQ ID NO: 117916 - DNA, 1000 bp, Homo Sapiens
tgtttattggtgaaaaagaattccagaaactaatggcagatcccggaaatccagacttgtatcatgtattaagtgttatctggcaattagcttgtgagattaaggttctgcacatggagccttggtcatcatttgatatatacacccggaaagggccgctggaaaacccaaagcgtagggaattattagaccaattacaacaaaagctgtatcttattcaaatgattcctcgtcaaaatttatttaccaagaacttaacacctatgaactataatatattttttcacttgttaaagcactgttttgggaggcgcagcgccactgtaatagaccacttacgttcattgactccacttgatgcgagagatatattgatgcaaataggaaaacaggaggatgagaaagtagttaacatgcaccctcaagacttcaaaacactttttgaaactatagagcgttccaaagattgtgcttataaatggctgtatgatgaaaccctggaagataggtagcaactagactgtcgtttttggtggagcggttcatttatttggaaactatgacatgaaaaccaaatttgaaaactcacatcctttcagcagaaggtaactgttcttgtcttgcacaagccaggcagatcatttctcctaagctgatatcattggcttattggatgaaacagtgtctgctattttattcacaattgaataaaatgaaaacttcaattaattgtggatttgatcagattgaattcgttttgtttcagattcctatttaaatatttcacttgtactgttgctgatttttgcatcttcttgaagagcaagagtctgtacattattaagcttagaaagtaagcaaaactgatttactggtttgcctttcagtttgttgaaatgtattgtcaagtactgtacaatgaaattgtttaaattttaatatgatttaagctttttagaaattaaaatattttaaataaaaaaaaaaaaaaaaaaaaaaa

SEQ ID NO: 117917 - DNA, 1000 bp, Homo Sapiens
acgggatgccttcctgagccaggagctcctgtataaagaagagacactggatgaaatagcccagatgatggtgtatgtccccaaggaggaacaactcttttcttcccagggctgcaagtctatttcccagaggattaactacttcctgtcatgaaggctagaggaagacttcctggaactgcctttcttccactaacaggaccctgggacctgtaggagcaccccgtttgggactgtgaggtgtttgagggtgtggactggcatccagcagccactaacaaacacacaactggtgtgtaaaaggcaggccttacattagaagccaagccaatcctttttcttttttttggaggtcccaccgagatagatagataggaacttggattgctgaattcaaaaacagagcccattcttaagatcacttggtgccttaaagacacgcattccaaagtggaatgtggttgaagaaagtgggccaggtggttgaagaaagccatgtgggagctcagcaaatcccaagggcttattatgacactccagatggtctccttagcatctcagctcttctgcaaggaagagcttgggtgttaggcctcagaggctgtagggtccttgggttacagagccggggagaacgaagttctgtgacccaggggtggagaatacactctaggtttgcgggctggtgggctttcaaattggtacttccagaggaaagccaagctgcttctgttgtgagcgaatcagccaagagcctgaggctgaagggaaaagtacacagaggaagatattttacaaaccaggtcagtgtaggccaagacttatggtctacagattttggcgggggaggggggaccttttcaaagacaatagggggtcttgacatgtttgttgtatgtaaagatgataagattaaaatttttgattttcctaaaaaaaaaaaaaaaaaaaaaaaaaaaaaaaaaaaaaaaaaaaaaaaaaaaaaaaaaaaaacctcggg

SEQ ID NO: 117918 - DNA, 1000 bp, Homo Sapiens
gaagtggcgataaaacaatttcgttcagtaaaaaagatgggtggagatgagttctgccgtcgttatcaggaccagcttgaagctgaaattgaagaaacctatgcaaattttataaagcacaatgatggcaaaaatatcttctatgctgctcgtacccctgccacactgtttgcggtcatgtttgctatgtatataatctcaggactgactggcttcattggcctaaactctatagctgtcttgtgtaaccttgtcatggagttagcactgatatttctttgtacttgggcatatgttaaatactctggggagttcagagaaattggaacagtgattgatcagattgctgaaacactatgggaacaggtgttttccaaactgtttgaagttactagacgtcgaatggttcaccgtgctctttcatcagcacagcgacagagactgtcatccaacaataacaagaagaaaaattagacagtatttttaacctttttctctatctgaagtgttcacacttacacatgtaggacaataagcaggaccgtctgggccggtctgcataaatgctgtatacataccagatttgatgctgcatatagggtatggaattgcacatccatctcataggaattgtaaatggtttgaataagaggaaagtaatttttgttgcattataaaatgtctagtagcatcataagtttttttgagagaagcatctttttatttcccgtattcctggttattttcatcattgctttgaattgaatttttatatctatttttatatgtaactctttttttacctcatgtttttgtttgttttgcacatttctcataccacaggtattgaagcccctgggtgataatttgatggaggaaaacataaggcagtctgtaacaaactctatcaaagcaggcctgactgaccaggtgtctcatcatgccagattaaagacagactgacagttcatctccaaaaaaaaaaaaaaaaaaaaaaaaa

SEQ ID NO: 117919 - DNA, 762 bp, Homo Sapiens
gtctgcgcggagtctgagcggcgctcgtcccgtcccaaggccgacgccagcacgccgtcatggcccccgcagcggcgacggggggcagcaccctgcccagtggcttctcggtcttcaccaccttgcccgacttgctcttcatctttgagtttgtgttctcctacatagccactctgctctacgtggtccatgcggtgttctctttaatcagatggaagtcttcataaagccgcagtagaacttgagctgaaaacccagatggtgttaactggccgccccactttccggcataactttttagaaaacagaaatgcccttgatggtggaaaaaagaaaacaaccacccccccactgcccaaaaaaaaaagccctgccctgttgctcgtgggtgctgtgtttactctcccgtgtgccttcgcgtccgggttgggagcttgctgtgtctaacctccaactgctgtgctgtctgctagggtcacctcctgtttgtgaaaggggaccttcttgttcgggggtgggaagtggccaccgtgacctgagaaggaaagaaagatcctctgctgacccctggagcagctctcgagaactacctgttggtattgtccacaagctctcccgagcgccccatcttgtgccatgttttaagtcttcatggatgttctgcatgtcatgcggactaaaactcacccaacagatctttccagaggtccatggtggaagacgataaccctgtgaaatactttataaaatgtcttaatgttc

SEQ ID NO: 117920 - DNA, 1000 bp, Homo Sapiens
tttgaggatgaccccttcttctctgagtccattcttgcacaccgagaaaatatgcgacagatgataagaagtttttctgaaccctttggaagagacttgctcagtatctctgatggtagagggagagctcataatcgtagaggacataatgatggtgaagattctttgactcatacagatgtcagctctttccagacaatggaccaaatggtgtcaaatatgagaaactatatgcagaaattagaaagaaacttcggtcaactttcagtggatccaaatggacattcattttgttcttcctcagttatgacttattccaaaataggagatgaaccgccaaaggtttttcaggcctcaactcaaactcgtcgagctccaggaggaataaaggaaaccaggaaagcaatgagagattctgacagtggactagaaaaaatggctattggtcatcatatccatgaccgagctcatgtcattaaaaagtcaaagaacaagaagactggagatgaagaggtcaaccaggagttcatcaatatgaatgaaagtgatgctcatgcttttgatgaggagtggcaaagtgaggttttgaagtacaaaccaggacgacacaatctaggaaacactagaatgagaagtgttggccatgagaatcctggctcccgagaacttaaaagaagggagaaacctcaacaaagtccagccattgaacatggaaggagatcaaatgttttgggggacaaactccacatcaaaggctcatctgtgaaaagcaacaaaaaataaatagccatgcatttgatttgtttagttttgattgttttaacagttagtaatggtgctgggtaataagcataagaccaatctcttgctgttaaatcagttctgtccttggcaactttcttctgatatctgaatgttcatgaaggtcctagctttatattgtccctcttttaggaataaaattttgattttcaaaaaaaaaaaaaaaaaaaaaaaaaaa

SEQ ID NO: 117921 - DNA, 1000 bp, Homo Sapiens
ggtgcctgaccagttctaccgcctgtggctatccctcttcctgcacgccgggatcttgcactgcctggtgtccatctgcttccagatgactgtcctgcgggacctggagaagctggcaggctggcaccgcatagccatcatctacctgctgagtggtgtcaccggcaacctggccagtgccatcttcctgccataccgagcagaggtgggtcctgctggctcccagttcggcatcctggcctgcctcttcgtggagctcttccagagctggcagatcctggcgcggccctggcgtgccttcttcaagctgctggctgtggtgctcttcctcttcacctttgggctgctgccgtggattgacaactttgcccacatctcggggttcatcagtggcctcttcctctccttcgccttcttgccctacatcagctttggcaagttcgacctgtaccggaaacgctgccagatcatcatctttcaggtggtcttcctgggcctcctggctggcctggtggtcctcttctacgtctatcctgtccgctgtgagtggtgtgagttcctcacctgcatccccttcactgacaagttctgtgagaagtacgaactggacgctcagctccactgagctggctgcgggctccagcggccgtgtgctccagcaggccagagccagacacgacctccctgagcctcacaggcttacaggagtcacctgctccatgtggggactggcctgtttcctgaacacagacctctttcttgtgccttgttcacttctgttgaacccctcgtactgccgggcatttattatactacttcctgtcataaccttctaacttgtttcttgacgaccacctcatgtggccaataaatggactgggagcgttttagctgccattaacttgaaaaaaaaaaaaaaaaaaaaaaaaaaaaaaaaaaaaaaaaaaaaaaaaaaaaaaaaaaaaaaaaaaaaaaaaaaaaaaaaaaaaaaaaaaaaaaa

SEQ ID NO: 117922 - DNA, 1000 bp, Homo Sapiens
ttataatgcgtaaagatattgaaaatataatgaaataaaagcatcttaggttataccatctttatatgctattgcgtttcaatatttaagatttaaagtgattttttggtcacagtgttttgttgataaaatttttttagaattgaagtttgaattctaagacttgaaacaacctgatcactgaagccaactttgtcccagcacattccttaagtcctaattgggaaaaaaaaaaaaaaaaatgaaatagttgaaaaactctggggtgtaaacaaatgattgtaaccctacacactattcaataagtagtagaaggagcatcacacagatttcagtctaatctgcccttctgtgggccataatataaacataaatgtgtgtaatgataaaaagtcattttcttcaaagagactacagctagctgcacattgtgtagagcagcttctaaattgttagactttgtgttgaaatgtaatattctatttattgagaaagtgatttaaaattattatttttaatcatagaaatcagggtttgggctgtattgatattgtcgatcatgaaatgtccacactttctaagtggccaattatttggaaataaagaaggaaataaagatggcttcacatggaaatttaagttctttcagggtggagatttacttggttcatacaccttttgcctgaattaaagtatttcatgtaggaggacttttatcctttttgatagacagtttcatatatcttgaactcaatatctcagatctcttctactgtattactgaatagcatacatacatagacaatgttcgccattcactagatatttttttctattatcttacacttattcaagcttgtctgtgattaatggaattggtgtcagatgctggaatttattctgaccaatgaacacagctgactcaggggagtacaatctcctgccaagtaatagaaccaaacccaatatgcataaaagaaatacaatactccaggcttta

SEQ ID NO: 117923 - DNA, 1000 bp, Homo Sapiens
atggttcatatcatacaaacagctcccacgatcctgaaattctgttaacgaatccttctctttggacatcttcccaagaaacttagccctgagtcctaggaggagcacctctgcaccagcacggacctctcgctccacccagctctgtgcccaaggcccctgatctctgctgaggtgcccacacccacgttcgatcacccctgccattcccttttattttcttttttttgagatggagtcttgctctgtcgcccaggctggagtgcagtggcaccatcttggctcacttcaacctccgcccccaaggttcaagtgattctcctgcctcagcctcccgagtagctgggattacaggcacccgccaccgtacctggctaatttttgtatttttagtagagatggggtttcaccatgttggccaggctggtctcgaactcctgacctcaggtgatccacccgcctcggcctcccaaagtgctgggattacaggcgtgagccgccgtgcccggcccccttttcttttcaaagcagaactacaaagatgagaaattaccagaagcctcgccttttcctaagcaccagcggaaggagctgtgccccgggatggagtgagggtggagggcgcgtcagccacgggtgggccttgtgtcgccttgtatcggcccaggtaggttgttggcctcttacttgggctgacctgacccccgaaagagaaacagacaactctgttctcaggattggggatggacggcttcggccaagcgttttagcctcattcactcaggccccactcagcactctgccagccaagaccattgatttggaaaatccggtccccacccgctaatgagctgttgacactgttgttccttgctgaattggattgttgacttgtagttcagaggcgtacaactagttggcgattagacttgttatgtgatgttaccagcctgaaatgcgatcaccccgtaggaaataaagcaggcatctctggacctca

SEQ ID NO: 117924 - DNA, 1000 bp, Homo Sapiens
taatgactgtcatacatccagaggagaccgaacctgcccagctgatgtactgttttatggaataaagtcacttgatcagaaggaattgaaacaatagatcattttgttacctactggagggatttttgtcttgaatttgtttccttagaaattctacaaaaaaatgttgttaataaatgtctgctttgtaaaagcagttttgcaattttttaaagatctatttctgttataatttaggttctgcagaaatatgattcttaattgaaacatataatttgcttaattacgtgaataatgaaatgtaaaatccgggtccataagcctttatttcatacagtcctaggattaagctgtttaactgcttggatcccagttggtctctggcagtgggatcctggagaggagaaatcctggcctctgctcatgcgcaggccacaaccgggctggaagtgcggttgagctctctgccactttcttcaatgtaaaaagtaggcatcaaagatacgacttctactatatacatttctctgtccctgagaacagagaaacgtaaccctgtaggggactggttacagaggacctcctggagcatctgccccattcctccaagtccaagcacagccatgctgagtggaagcgaggccaccatctgagtggattggtcccaagtgtgtaatgaggaaagtggccaggtgccggcacagtgcctctcccagagcctcaagaagggccatttaggagcttgcttcaaccattttccaaccattttctgtgaaatgctgtcagcccaaactccaaagggatgtgcagcctttcgttttaccaaattctttgctgtcgtttggaaaaaatgggccatgtggtggagacctttatttaaggtgatttttacagaaatgtgattttgctgtaggtgattatccaaacaagtaaatttgagtgtataatttaatttttaacctgttaaataaaccttgtccctccaaggaaaaaaaaaaaa

SEQ ID NO: 117925 - DNA, 1000 bp, Homo Sapiens
tggaatattcagatgaattggaagctatcattgaagaagatgatggtgatggcggatgggtagatacatatcacaacacaggtattacaggaataacggaagccgttaaagagatcacactggaaaataaggacaatataaggcttcaagattgctcagcactatgtgaagaggaagaagatgaagatgaaggagaagctgcagatatggaagaatatgaagagagtggattgttggaaacagatgaggctaccctagatacaaggaaaatagtagaagcttgtaaagccaaaactgatgctggcggtgaagatgctattttgcaaaccagaacttatgacctttacatcacttatgataaatattaccagactccacgattatggttgtttggctatgatgagcaacggcagcctttaacagttgagcacatgtatgaagacatcagtcaggatcatgtgaagaaaacagtgaccattgaaaatcaccctcatctgccaccacctcccatgtgttcagttcacccatgcaggcatgctgaggtgatgaagaaaatcattgagactgttgcagaaggagggggagaacttggagttcatatgtatcttcttattttcttgaaatttgtacaagctgtcattccaacaatagaatatgactacacaagacacttcacaatgtaatgaagagagcataaaatctatcctaattattggttctgatttttaaagaattaacccatagatgtgaccattgaccatattcatcaatatatacagtttctctaataagggacttatatgtttatgcattaaataaaaatatgttccactaccagccttacttgtttaataaaaatcagtgcaaagaaaaaaaaaaaaaaaaaaaaaaaaaaaaaaaaaaaaaaaaaaaaaaaaaaaaaaaaaaaaaaaaaaaaaaaaaaaaaaaaaaaaaaaaaaaaaaaaaaaaaaaaaaaaaaaaaaaaaaaaaaaaaaaaaaa

SEQ ID NO: 117926 - DNA, 1000 bp, Homo Sapiens
cggggtcacagtgctgagggggcttgagtcccacctttcagcttgatggatgctcacctcttctcagccccagctcgtgccctgtttttctagccatagcccccagattactcacagctcctcatgccatttcctgtccagattgctatgtatgactctgacctctcttgtccagtggtctggtgctcacctcctctcactgctagaatattcaccaagggtttgcatttgggaagtcccttaccagctcctgcttagagctggtagggccatacatgtccacactcccaactggtggctctcccgctgaatggggcctcagcaggtgcccaagctgctacaaccttggccactctgtttctctcccccagcactgggcatggtaattagcctttccccatgttaatttattcagttttttcaagggtcaactgaattccccacttcctgggtaagaagcatgatctccttttaatttcacgtctaagatcctggcagcttcccctagctggttcctctgtagtcctgctgggactgtcagctcatttaaatgtgggtctgcagaaggctttaggtctcccccaacccccttacctttcacagaggaacctttcatcaggataaatgattattgctgccctgtgggtcttgctcaatactgttcatacctggagagagaaggtattgaaacatctcctttatgtgtgactttcccaaatttttaaaaattgtttatggtttaggccccttaaatactgtgtagcaggatgaagtctaccattaccagctgggtcaccttggatgggtctgtcaacatctaagcctcagttccctcacctgtaaaaatgagggtagtccctacctcataagggatattgtgaggatggaaagcgaaagtgtgagaaaatacctcccaagtgcctggtacatagtgggtgctaaataaaccactttttgtctgcaaaaaaaaaaaaaaaaaaaagaaaaaaaaaaaaaaaaa

SEQ ID NO: 117927 - DNA, 1000 bp, Homo Sapiens
gtgagcgccctggtaggcttcgccaccgagccgcagttcctgggtcgcgcggcagctgtgagcgccgagggcaaggcggtgcagaccgccatcctgggcggcgccatgagcgtggtgtcggcctgcgtgctcctgacccagtgcctcagggatctggcgcagcaccccgacgggggcgccaagatgtcggaccacagggagaggctgaggaactcggcctgcgccgtgtctgaaggctgcaccctgctatctcaggctttaagggagaggtcttcgcccaggactttaccgccagtgaattccaattctgtgaattagcaccccacccccataccccttcttccacccccagactaaaggaagatacttactctctgcccctctccatttataccaaagaaatcataggtgaaaccccctaccctccccaacgttaaatgctcgagaggaatcttccacaaggcagggccatgcacgcaacctgcacacgcacttggagggcccaggtgtctctccaccagcccccatgcagtagggactggaagatatgtcatctgctggttgtgttatcactcccaccccctaccccagcccgtcttccggaatttctcaactaaatttcattattgggcaggaaggaggtcatgggttcatttcatttttgttttttgtgtttttaattaaaagaaaggttacctcagttttcactccttagacatggatgtagctacctttttttgtatgtctttttttttttaagcaatcgtgttgaattaggagtatacttggtgaggaaagagtatgaatttgccatgtgatttgcaaatggggggaagctactgtgagcgtgtgtttttttaatttacactatagagtgattttttttcccccaacgtcaagtttttaccttgcatgtactggagtatttatttcatctattaaaatgttatgtttctcagaaaaaaacctcgtggcgaattcttggcctcgagggccaaat

SEQ ID NO: 117928 - DNA, 1000 bp, Homo Sapiens
tcacagtttcaggaatctgatgatgcagatgaagattatggaagagattcgggccctcccactaagaaaattcgatcatctccccgagaagctaaaaataagaggcgatctggaaagaattcacaggaagatagtgaggactcagaagacaaagatgtgaagaccaagaaggatgattctcactcagcagaggatagtgaagatgaaaaagaagatcataaaaatgtgcgccaacaacggcaggcggcatctaaagcagcttctaaacagagagagatgctcatggaagatgtgggcagtgaggaagaacaagaagaggaggatgaggcaccattccaggagaaagattccggcagcgatgaagatttcctaatggaagatgatgacgatagtgactatggcagttcgaaaaagaaaaacaaaaagatggttaagaagtccaaacctgaaagaaaagaaaagaaaatgcccaaacccagactaaaggctacagtgacgccaagtccagtgaaaggcaaagggaaagtgggtcgccccacagcttcaaaggcatcaaaggaaaagactccttctcccaaagaagaagatgaggaaccggaaagcccgccagaaaagaaaacatctacaagccccccacccgagaaatctggggatgaagggtctgaagatgaagccccttctggggaggattaaaagtgatgatggtctggggagagattttattaaaaaaaaaaagaaaaaagagggaggaaaaaaaagaacctacttaagatagaacatggttttggctatggcttgactcatgggctttcagtgcttttttccatttgttgaaagtaacatttctctctctctctctttttttttttttttttttaaagcaaaccattgtatgtgtaagtgtttaagttacctttttgtctattggtctctttgccagccctcccctttcccaatgaaagccatgtcaaattaatcactgaaaaaaaaaaaaaaaaaa

SEQ ID NO: 117929 - DNA, 1000 bp, Homo Sapiens
ttttcttttaatttgttactacttagtcacaaaccccacattattccagtttggaattacttattaaggagaattggaaatacatatgcccatgcttaaattttatagctttaatttgtgttatttctttattgacgggaagaggtacatctttttttccttactgaaaacaaatatggattaattgcctcaaatttgtataagtgattggctagtgattcttgttttcagaagggagagtggtatagatagaaaatgacaaagatggcaatatacacttaatgttgttattgtatgttgttactgaagtacttagatttttaaaatttcaaatcctaaatcacttcttgtaggagggttttcattaactgcagtatatacagttcactacatatgggttgtttgagttttttgtgtgctgtatttctttctgttttttaatacctggttttgtacatatctaactctgttctcttttggttgttcagaaactggattttttttttcttaagcagtgcttaatttgtgttttttaattttgattcagaagtagtcccagctcataggtgttcatactgttacatccagaacatttgtcaggctctctgtcagctttcatgtacatatggtatagaaaccatggagttaggcacttcctggattttttttttatgagaaaaatactgtatttaaaatgtaaaataaacttttaaaaagcaggcactaatatatatttcttccagcctttgattacaaatttgtccttgcacatgttaagatgaattatctcctaaaaatatcattgttcttgggagcagtgtatgttactttacatagcagcggttcctgtcatgtgttcatgtcagaatatttttggttttaaactttcttattgcctttggctgttgattagtacagtacaagtgcgatttcaaaaagatcttgaaagtaatatatttaatcaattaaaatgtttatctgtaaaaaaaaaaaaaaaaaa

SEQ ID NO: 117930 - DNA, 1000 bp, Homo Sapiens
gcatttgtagttcctgaacatcagctgggaactgcatatggcttcatgcagtccattcagaatcttgggttggccatcatttccatcattgctggtatgatactggattctcgggggtatttgtttttggaagtgttcttcattgcctgtgtttctttgtcacttttatctgtggtcttactctatttggtgaatcgtgcccagggtgggaacctaaattattctgcaagacaaagggaagaaataaaattttcccatactgaatgagaagttaaaatgaatgtgtcatgagaatgggcttaacacatcgttggtttgaaaacttccatttttaaaaatttagagtttagtcattagaaaaaataatggactggaaagttatatttatatccaaatatacctatttcaaagtgtatttgtgaggcctgttttagcctgtgtcttttgtattgtgtgttgctaaagaattctacttttagtaggctaatcaacaatgaaagggttagaaaattgctgtggaacatccaggtgaacttcaggaaagacagtgaaaaatggaaaacgttggagcttctgttgagataatcttcattaggtatatatcttagggatacagccttttctttatcttatagcaggaaaaaaaaacttttgagggaaatagaagggctgcgttacacaaaataaacaatggcattgtcataggccttccttttactagtagggcataatgctagggaatatgtgaagatgtttttatgaagtctctttctgatcacgaacaatagcttgcgctctactctgtagttatgtggattgccgagcaatgacccttttcaatttcttatttctgtgttactgaggaccctaatcacttagggatgtaattttatagtataaactttctgtacagtttttcttatagtctaataagtaaaaagtgtccttcaaattatgataattgcctatgtacatggataaattaaaacactgcacacgg

SEQ ID NO: 117931 - DNA, 1000 bp, Homo Sapiens
accacccacccagaatctgcccagtccccacttcttccctgccacgcgtgtgtgtgcgtgtgccacgtgagtgccaaagtcccctgccccccaagccagccagacccagacattagaagatggctagaaggacatttaggagacatctgcctctctggccctctgagatatcccgatgggcacaaatggaaggtgcgcacttgcccctactattgcccttttaagggccaaagcttgaccccattggccattgcctggctaatgagaacccctggttctcagaattttaaccaaaaggagttggctccaaccaatgggagccttcccctcacttcttggaatcctcctgcaagagggcaactccagccagtgttcagcgactgaacagccaataggagcccttggtttccagaatttctagagtgggtgggcatgattccagtcaatgggggaccgcccgtgtctaagcatgtgcaaaggagaggagggagatgaggtcattgtttgtcattgagtcttctctcagaatcagcgagcccagctgtagggtggggggcaggctcccccatggcagggtccttggggtaccccttttcctctcagcccctccctgtgtgcggcctctccacctctcacccactctctcctaatcccctacttaagtagggcttgccccacttcagaggttttggggttcagggtgctgtgtctccccttgcctgtgcccaggtcatcccaaacccttctgttatttattagggctgtgggaagggtttttcttctttttcttggaacctgcccctgttcttcacactgccccccatgcctcagcctcatacagatgtgccatcatggggggcatgggtggagcagaggggctccctcaccccgggcaggcaaaggcagtgggtagaggaggcactgcccccctttcctgccccctcctcatctttaataaagacctggcttctcatctttaacaaagacctgtttgtaacag

SEQ ID NO: 117932 - DNA, 1000 bp, Homo Sapiens
aaaagtgatctgcaactctttcaccatctgtaatgcggagatgcaggaagttggtgttggcctatatcccagtatctctttgctcaatcacagctgtgaccccaactgttcgattgtgttcaatgggccccacctcttactgcgagcagtccgagacatcgaggtgggagaggagctcaccatctgctacctggatatgctgatgaccagtgaggagcgccggaagcagctgagggaccagtactgctttgaatgtgactgtttccgttgccaaacccaggacaaggatgctgatatgctaactggtgatgagcaagtatggaaggaagttcaagaatccctgaaaaaaattgaagaactgaaggcacactggaagtgggagcaggttctggccatgtgccaggcgatcataagcagcaattctgaacggcttcccgatatcaacatctaccagctgaaggtgctcgactgcgccatggatgcctgcatcaacctcggcctgttggaggaagccttgttctatggtactcggaccatggagccatacaggatttttttcccaggaagccatcccgtcagaggggttcaagtgatgaaagttggcaaactgcagctacatcaaggcatgtttccccaagcaatgaagaatctgagactggcttttgatattatgagagtgacacatggcagagaacacagcctgattgaagatttgattctacttttagaagaatgcgacgccaacatcagagcatcctaagggaacgcagtcagagggaaatacggcgtgtgtctttgttgaatgccttattgaggtcacacactctatgctttgttagctgtgtgaacctctcttattggaaattctgttccgtgtttgtgtaggtaaataaaggcagacatggtttgcaaaccacaagaatcattagttgtagagaagcacgattataataaattcaaaacatttggttgaggatgccaaaaaaaaaaaaaaaaaaaa

SEQ ID NO: 117933 - DNA, 1000 bp, Homo Sapiens
gagcagggcattgaggttgaccacacgggcccagctcgggtcctcgctgatgtcctccagccgcctggctgctgccgctgcctcctcctgggtaaggggcggaggactgcccaccccacctctgctcattccacaaaaccagagcaggcactggcggaagaggcttggtgccggggcctggggctctgagggaaattgaggccctgcagttagtttgcgggaactcagctcctccagccccacctcccagcatggtgccctaccattcatctccatggcactctctgggcacccattctgtacagggagtgaggagccttgctgctcatcagcatccaggtcctcccgttcctccttgctatgccggagactgaagaccaggcggtggagctggggagggtgggagcacgaacgaggtgggagttctgtccccccatgcctggccctaaagtctcttgcacaccagctcgtcactgcctgccctacccacctctgtccagtctacacacccagcccaggcttaactcatgccaactccaccctacatggctgccctgtgccctcgggataaaccccaagcccctgagcttgtgtttaaagccgttggccttgctcccccagctttgtcagctcaggtctgtctacacccagatggtagcgcttgtgacactggcctggcagtcctgctcacagtgttctgtgcctgtgtgctcccaccctttcctcctgctgctgcagaaacccggccatccttccacacccagatctcttgtcctgtcctcaccccaccctgccaccatcagccctgcctggagccacctgccctttggcaacaaaaccaaacctttttgtgggcgttcaagatggtattgtgcccaccagtcagatcctgtgttttgagtcccaaaggccatgccaaggattggctttgggaggctttaatcaccaacccatcaacatcaagcctcccccaggccggttcaaataaatgtatttaaat

SEQ ID NO: 117934 - DNA, 1000 bp, Homo Sapiens
caacgccttctatgatagctgcgtgaacagtgtgtccgacccctccatctttgtgatctttgagaaacaccaggtctacccagagtatgtcatccagtacaccacctcctccaagccctcggtcacaccctccatcctgctggccttgggctccctgttcagcagccgacagtgagcgcacaggagtgttccaggcctttcacctgctctgccttgaaatggctatttgggcctttccttttctttttaaacagaaacttttaatgaactgttctcttaacattgacctctcaatgaagttatgttcttaatctcttgctaataatgatttttacttttaagtcacttttgggttcactagtggattaaccagaagtgattgtagttgagtccagttttgctttttaataatgtgttgaagttttagtttttactctttgttgactttgctgcttattggcaccagggacagagtttctagatacaattttatggattggttttaatttttatgagtttgtctctgcagtgattcggtttctcagagtctcatggcatcatagtttttccagaatgacacagtagccaccggtggatgacagcccacgggcggcacagtcacttctgcctgttgttctgacaccaacccaggcagctctgctgtggcttctcctgggctctggcattagttggtctgtgtcacattgtcagaacaggtggctgctgtgtggtgccatcgagtccctgctggttccccttgtcctgggagggtcacccattgcccaaggaagtgcatccacctggcaggtgacctggaggagtagcttccccgaggacccccaggcttggcctgtgattgcgcaaacccacatttcctaagcacactggacacccttcgagtgtgggttttaacatccctgtgagattgaatacttgtgccacacatgtcacaaaagagtatggaaataaaagaaaatttatccgaaaaaaaaaaaaaaaa

SEQ ID NO: 117935 - DNA, 1000 bp, Homo Sapiens
cttttgattttgatggctgtgagctcctggccagccccactagcccagtcactgcagaattcagtagcagcgtctctggttgtcccaagtcagccagctactctctggagagcacagatgtgaaatctcttgcagctggtgtgacaaagcagagtacgtcatgccctgccttaccccccagggctccaaaactagtggaagagaaggtcgcctccgaaacatctcctttgcctctgaaaattgatggtgctgaggaagaccccaagtctgggtcaccagatctctcggaggaccagtattttgttaaaaagggcatgcaggacatcttctctgcctcctaccctttctcatctccgctccatctccagctggcccccagatcctgtggcgacggttccccatggcagccacctgctgacctatcaggactctctatagaggaagtgtccaagtcactacggttcattggtttgtccgaagatgtcatatcattctttgttactgaaaagattgatgggaacctgcttgttcagctaacggaagaaatcctctcagaggatttcaaattgagcaaattgcaggtgaagaagataatgcaattcattaatggctggaggcccaaaatatagccaaataacccccggccagcatggaacaaaactgatcaatgcgtgtgctagaaggggtgggctgggacacaatttcatgtttttgcactaaaaaccttctctgtaaatagggataagagaaactcttactatgcagattacgtttttgaatggtgaacaggctattttgtacatcaataaaaatgctgtacagaacacttggaggtgtgccttgtacgtcactcaacaaacactcagcagctgctaaaagaaaaaaaggcatgtgcagagaaatcattcttacccaagtaggtttatgtgagaaggtatgatatttattacaaaatagccaaagctgaaagacataaaaatctttaaaaaaaaaaaaaaaa

SEQ ID NO: 117936 - DNA, 1000 bp, Homo Sapiens
tccgggagcaccgctgtgcagccgctgctgcccaggccccacggcgctttgagtgtggcacctgtggcaagaaagtgggctcagctgctcgactgcaggcacacgaggcggcccatgcagctgctgggcctggagaggtcctggctaaggagccccctgcccctcgagccccacgggccactcgtgcaccagttgcctctccagcagcccttggaagcactgctacagcatcccctgcggcccctgcccgccgccggggtctagagtgcagcgagtgcaagaagctgttcagcacagagacgtcactgcaggtgcaccggcgcatccacacaggtgagcggccatacccatgtccagactgtggcaaagcgttccgtcagagtacccacctgaaagaccaccggcgcctgcacacaggtgagcggccctttgcctgtgaagtgtgtggcaaggcctttgccatctccatgcgcctggcagaacatcgccgcatccacacaggcgaacgaccctactcctgccctgactgtggcaagagctaccgctccttctccaacctctggaagcaccgcaagacccatcagcagcagcatcaggcagctgtgcggcagcagctggcagaggcggaggctgccgttggcctggccgtcatggagactgctgtggaggcgctacccctggtggaagccattgagatctaccctctggccgaggctgagggggtccagatcagtggctgactctgcccgacttcctctttggcacctccattccctgttgctgaaggccctccagcatccccttaagcatctgtacatactgtgtcccttcctcttcccatccccaccaccttgtaagttctaaattggatttattctctcgtgaggggggtgctctggggtccttgacacacataaaggtgcccccccaccttccacctcttagcactggtgaccccaaaaatgaaaccatcaataaagactgagttgccaaaaaaaac

SEQ ID NO: 117937 - DNA, 1000 bp, Homo Sapiens
tgtatgaatcagtcacaatgaattttacttgaatattgtatgttgcattccacttcatttgaaaataatgaaaccatgtaccactgtttacatcatctgtagtgatttcatagataatatatttaatatgacagattatgtttcaactctgtagatgtttaacgtcatagacagttggccctctgtatccgtgagctctatatctgtgaattcaaccaagtttggatggaaaatttttttttttttttttttttttttgagacggagtctcgctctgtcacccaggctggagtgcagtggcgtagtctcggctcactgcaagctccgcctcctgggttcacgccgttctcctgcctcagcctctctgagaagctgggactacaggcgcccgccaccacgcccggctaatttttttgtatttttagtagagacggggtttcactgtggtctcgatctcctgacctcgtgatccgcccgccttggcctcccaaggtgctgggattacaagcgtgagccaccgcacccggcctgaaaatattttctaaaaagataaaaaatatacataacgatgaaaaataatacaaatttaaaaaccaatacagtataacaactatttacatagtgcttacattgtattaggtgttataagcaatctagagatgatttagcaagtatacaggaggatgtgcctaggttatatgcaaatactgtgccattttatatcaggaacttgagcatctgcagatattggtatcggagggcggtcctggaaccaagcatccacggatactgaggggtgacatttcatgaagtgtagatcattgtattcagagattgtaaatgaaaaaaatatagaaactatttagttttggtagattttttttctgacaatgtgaccagactgaatttcctcataaagaaaaaatggcgaaaaaaaaaaaaaaaaaaaaaaaaaaaaaaaaaaaaaaaaaaaaaaaaaaaaaaaaaaaaaaaaaaaaaa

SEQ ID NO: 117938 - DNA, 1000 bp, Homo Sapiens
tgaaatgatgttttatgttattatgtgtgaagtaatatattgtacaagtaataaatgtattgttgagatatattgacactgaggagcttataaaaacaagtcatcttaagttcacaattgctacaagaagaaagttgtggataactaggaaattattgtaagtaatgttttatttcagtacttagcaattagagttcttttattaagatgtatctgctggattaagggtacaggttgaaatagttctgtggctgtcctaagaaataatgggaaaagaatctctggatgtaagtttttctgttgaaactagagggttttttttctgtttacatatacttttttttaatagcaatgtgtttttattaaacatgctgtgtgccacaggccagtgttgttggtgaaatatataaacatttatttaaagagaaaagttaccagtatctacacctcttaaaaaacattgattggtctaaaaaatatatagataacatcctaagttaacatatggcttcttaaaacttgggcacttttatttgtttttatcccaaattcatgttttaaggcctttaaagaatagtcagactgataaagaagtgctaacagataagctatagttggggaaatttgtgggttttttttaaataagaaatgtttatttttgtccttatatttaaacatgatggaatttgtaaatcttggcattgattgtaattctgcctttttggaagaattttttctcccagcatgttagctgagaatattctctattttataaataatatgaagtaggttggtctctctgcttctctataccaggacttcttagctcagtatcatctcccttcatgtaagcagcacgttttaactcttaggaagctgaatgttgtgttatcactaatactttgtacaggtcacctgcctactctaattgtccttagtacttggacaggctttatcattaaagagtgttctcctaatcccaaaaaaaaaaaaaaaaaaa

SEQ ID NO: 117939 - DNA, 1000 bp, Homo Sapiens
tggaccaagtattgccagactcctgcctgctggtgtggaacatggcgatgcccctcggggaacgtatcactgggggtttcctcctgccagagctccagcccctggcaggctccctgcggcgggatgtggttgaagggaacttctacagtgctacgctggccggggaccactgctttgatgtcctagacctccactttcacttccggcatgcagtacagcaccgtcatcgggatggtgtccactgggaccagcatgcacaccgccacctctcacacctgcttctgacccatgtggctgacgcctggggcgtggagctgcccaagcgtggctatccccctgacccgtggattgaggactgggcagagatgaatcatccattccagggaagccataggcagaccccagacttcggggagcacctggccttgctcccacccccaccttcttctttgcctcctcccatgccttttccctacccgcttcctcagccctcgccacctcccctcttcccacccctgccccaggataccccttttttcccaggccagcccttcccaccccatgaattcttcaactataatccagtggaggacttctcgatgccaccccacttaggatgtggccctggagtgaactttgtgcctggccctctgccacctccaatccctggccctaatccccatggtcagcactggggcccagtggtccaccgggggatgccacgctatgttcctaacagcccctaccatgtgcggagaatgggggggccctgcaggcagcggctcagacactcagagagactgatccacacatacaaactggacagacggcctcctgcccattcggggacatggcctgggtagactggatcttgggctgggactggatgtgccaatggcccttcagggcctgcctggcacctcaggtactgggctagggtgtctgctatgcctggtattgttcttgtccattgctgtcaccaataaaggcatggaagaac

SEQ ID NO: 117940 - DNA, 1000 bp, Homo Sapiens
ctcagctatgctcggcacttccagccctttgctcggctgcaccagcgggagatccaggtgatgatgggcagcctggtgtacctgcggctgggcttggagaagtcaccctactgccacctgctggacagcagccactgggcagagatctgtgagacctttacccgggacgcctgttccctgctggggctttctgtggagtccccccttagcgtcagctttgcctctggctgtgtggcgctgcctgtgttgatgaacatcaaggctgtgattgagcagcggcagtgcactggggtctggaatcacaaggacgagttaccgattgagattgaactaggcatgaagtgctggtaccactccgtgttcgcttgccccatcctccgccagcagacgtcagattccaaccctcccatcaagctcatctgtggccatgttatctcccgagatgcactcaataagctcattaatggaggaaagctgaagtgtccctactgtcccatggagcagaacccggcagatgggaaacgcatcatattctgattcctacctggaaggaattttgttgaaaggggttttcacctgtgagccttggtctgtctcggtagggtggtcaacttcagtggactgtggttggtttcagagcgcctggctgaggagttccactgaggggagcactggagcagccctttggcagaggctgaggagggagatggaccagcccacgcctggcacctggctccatggcataaggaaagggagatgctggcctctgtgctcctgctgtcttttcctgtttctgtttgcgtttgacttagtagcaaccgacagagtggcaagggatttggtcttcagcagtagacatccttccacccctgccctcagccaagtctcttgctgccatgccaatgctatgtccacccttgcccctcggcccaagagtgtccagcggtggcccacctcttcctcccactacagcctcaacagtaaaaaaaaaaaaaaaaaa

SEQ ID NO: 117941 - DNA, 1000 bp, Homo Sapiens
ccagatcccagccagcccacccgtcggcagatccgcctctccagcccggagcgccagcggttgtcctcccttaaccttacccctgacccggaaatggagcctccacccaagcctccccgcagctgctccgccttggcccgccacgccctggagagcagctttgtgggctggggcctgccagtccagagccctcaagctcttgtggccatggagaaggaggaaaaagagagtcccttctccagtgaagaggaagaagaagatgtgcctttggactcagatgtggaacaggccctgcagacctttgccaagacctcaggcaccatgaataactacccaacatggcgtcggactctgctgcgccgtgcgaaggaggaggagatgaagaggttctgcaaggcccagaccatccaacggcgactaaatgagattgaggctgccttgagggagctagaggccgagggcgtgaagctggagctggccttgaggcgccagagcagttccccagaacagcaaaagaaactatgggtaggacagctgctacagctcgttgacaagaaaaacagcttggtggctgaggaggccgagctcatgatcacggtgcaggaattgaatctggaggagaaacagtggcagctggaccaggagctacgaggctacatgaaccgggaagaaaacctaaagacagctgctgatcggcaggctgaggaccaggtcctgaggaagctggtggatttggtcaaccagagagatgccctcatccgcttccaggaggagcgcaggctcagcgagctggccttggggacaggggcccagggctagacgagggtgggccgtctgctttcgttcccacaaagaaagcacctcaccccagcacagtgccacccctgttcatctgggctgcctggcagagagccttgctgtttacaattaaaatgtttctgccccaaaaaaaaaaaaaaaaaaaaaaaaaaaaaaaaaaaaaaaaaaaaaaaaaaaaaaa

SEQ ID NO: 117942 - DNA, 1000 bp, Homo Sapiens
gtgcccccgaacctggtctgatgccccctcagctctttgacaatcactgtggctgttgggttttctcctatttctaaaaatgttctcttctttcctaagtgacagttttgaagtattggataaccaagagctcaggtcacacagaccttggagccccatctttgcttgcagcttagctttgagatactaagcaagcgagggacttcactcttgagcctgttttttcctcatctgtaaagtggggatagtggtacggcctacctcatagggttgtaatgagcactaaatgtgaagtgcttggcacagtgcctggcacatggtgagccacagctactgtgagtttctgtttatccccctttttttttttttaagcccattgtttattctttgagaatttgttgtaacttcttcaggataacacctgagtccacaggctgagcagctgtggcccagacagaactgctccggcttggctgttccagcaggtggggcgctggcctcggtgagggcacagcagcaaggttcacggatatccgtgtgtcttgtctgtggccaccaggcacaggtttggcttccggtcagtgtcccgacactgtgcgggaggtgacaacagagcaaagcagcgcaggggtcagggaggtggagacactgctgaaatcacactaccccaccctcagctgaagccccacgttccacaaacttggggtcatagattgtccagtcactggctccctccctgtcagcacagcacagaggaaggggctaactgaatcttttaccacttctggcctggctccagaactttgttctagattccttaaaagtcggtagctgatgtcaaactcaattgagcagtagctttgatcccttggtctgggggtcgaaggaagatggcgctgttatcagcggggaaatgtactatttaagatcagctttgttgtaaaaccatttgttctagaataaaactcaattggaaacgtgaaaaaaaaaaaaaaaaaaa

SEQ ID NO: 117943 - DNA, 1000 bp, Homo Sapiens
cttacattaaagctttacaaagatttaaactaattatttttgtagttacttctaccaaatagcctttccttttcgataacattcctcagtatttttatagccaagtacattttattttcttgctgatgaactggaattggataaatattgcaagtggatgagttggaaattatgcactttgaaaaacattcactttgtttaagcttattgggtttcagatttgattaaattaaatgtggaggctttctatagcattctaagctgagaagtagattgttacccagtaatgaaataaaaaataaaaataaaaggatttttttctctattgtttacgacagtactcagcttaaatatttatgctggtcaaatgtgatttaaattggacattttcatcaatgcagtctaatgtgtagataaatatttcaaccataataagtggattggcagtatattttttacattgaacttttcttcacttgtatataaagattatatataagtacttatttatgagtataagaaaggttaggcatattttcattaactgaataaacgacttgatttatataacctggtttatcaaaatttaacatggcttcagtatgagatctttttcaaaactattttcttaaacatttatttcatgagattatgttcaaccctgtacctggtgtaattttaaaattaattgcttgtaacctcactttactaataatgtttattatctttcctaataatgcattaactgattaatcaggtgtttaaatttttataaaatactcttgcaaaaagtttatttgaaaaatttctagatggtctcatgagtttcaaaataataatttttgtgtatgaacaaagctgttgtttttaccatgcagtattgcatgattttaagttatgtggaattaacataactgattttgttttaattgtaagttgttaactcctgtatatatcattaaaataaatctgaagttgaagtggaaaaaaaaaaaaaaaa

SEQ ID NO: 117944 - DNA, 1000 bp, Homo Sapiens
tggaagccaaggccttcagcccgcggatcgtggagaacctgggcatcctgaccgggccgcagctcttctccctcaacaaggaggagctgaagaaagtgtgcggcgaggagggcgtccgcgtgtacagccagctcaccatgcagaaggccttcctggagaagcagcaaagtgggtcggagctggaagaactcatgaacaagtttcattccatgaatcagaggaggggggaggacagctaggcccagctgccttgggctggggcctgcggaggggaagcccacccacaatgcatggagtattatttttatatgtgtatgtattttgtatcaaggacacggagggggtgtggtgctggctagaggtccctgcccctgtctggaggcacaacgcccatccttaggccaaacagtacccaaggcctcagcccacaccaagactaatctcagccaaacctgctgcttggtggtgccagccccttgtccaccttctcttgaggccacagaactccctggggctggggcctctttctctggcctcccctgtgcacctggggggtcctggcccctgtgatgctcccccatccccacccacttctacatccatccacaccccagggtgagctggagctccaggctggccaggctgaacctcgcacacacgcagagttctgctccctgaggggggcccgggaggggctccagcaggaggccgtgggtgccattcgggggaaagtgggggaacgacacacacttcacctgcaagggccgacaacgcaggggacaccgtgccggcttcagacactcccagcgcccactcttacaggcccaggactggagctttctctggccaagtttcaggccaatgatccccgcatggtgttgggggtgctggtgtgtcttggtgcctggacttgagtctcaccctacagatgagaggtggctgaggcaccagggctaagcaattaaaccagttaagtctcccaggaaaaaaaaaaaaaaaa

SEQ ID NO: 117945 - DNA, 1000 bp, Homo Sapiens
aggaggcttggaagtgccggacgtgtacctatgcagacatttgtgagtggagaaagggcagtggagtgctcagctctacactggcgccccaagtcaaaaaagccaaatgaatagaaggtatgctttcaagaatgttgatccttcctgctcctgttgtacctaagcaaaagaggaccagtctctgagcttggcttttatggagagtgttcttattttggttcttttttttatttccacaacctctaaccacattcagtccaggaccaaggctcagggatgagtgggagagatgggttatactgtccctggagcttcatcatgattgcctgagaagacagatgctcatcatggctggaatgaaggtatccttcagtaaactttgctttcctaagaaaattcttcagtttctgataagtcatccctatttttatcttgatcaaggctttctacagttacataataaaatgaaatgctgtccaggacagttgaactgatggttttttcataactgcagtccttcaaagatgaccaccatatatagttgtgtacgtgttattccaagcctttaaatatatacataaacatattttggaatcagaatgagcagaccaaaacataaacaataaatattctcaaagagacaagggaagatgaagtagaaacaggaagtcataaatattagatacgaaaaacataatacatggctgggtgcggtggcacatgcctgtaatcccagcactttgggaagctgagatgggtggatcacctgagctcaggagttcaagagcaacctgaccaatacggtgaaagcccgtctctactaaaaatacaaaaattagcctggggtggtggcgtgcgcctgtagtcccagctacttgggaggctgagagaggagaatagcttgaacctgagaggcagaggttacagtgagctgagatcatgccactgcactccagcctgggcaacagagtgagactctgtcttaaaaaaaaaaaaaaaa

SEQ ID NO: 117946 - DNA, 1000 bp, Homo Sapiens
ctcaaaaggaaacttgaataatttataattttgatcgagtttcttaaaagaccctggagaaagagtggcatttcttctgtttcaggttttgtctgagttcaaactagtgcctgtgttgttacggaaagcagcagtgtaccagtgtcactctggagtacagcgggagaaacacaaaatagtataactgaaaacattaacattcagacacactcccttctgccttccggcttaaagctgtggatgatccacgtttttgtttttttaatgttaaatgtgtaactcagtattactgaaaaggtacccacattttgaatagtagttatcactcttaggtcagacagccatcagaattctcccacaccaagtgcatgtcagttgtggagaaaacatagcaaaaagagccgtacgctctttacagatactaatgtcaagagttaaacctcctcaggttcaacctgtgataaaagactagtgcttcccagtacttgcatggggttcactatttatagttttcttgggagtatcacaggaaaatcacaattacaccactttagaccctatgtgtagcaggtcacaacttacccttgtgtgtttagatgtgtatgaaatacctgtatacgttagtgaaagctgtttactgtaacggggaaaaccagattctttgcatctgggccctctactgattgttaaaggagttcctgtcacctgctccccccacccccgcatgcgtctgtccacttggctaacttttaatatgtgtatttttacattatgtatattcttaactggactgtctcgtttagactgtatacatcatatctgacattattgtaactaccgtgtgatcagtaagattcctgtaagaaatactgctttttaagaaaaaaaataacatgctgaggggtgacctatatcccatgtgagtggtcactttatttataggatctttaaaacatttttaatgaactaagttgaataaaggcacaattaaaaactgtca

SEQ ID NO: 117947 - DNA, 1000 bp, Homo Sapiens
gaagctccctggtgggctaatgctgaaggggcagccagtcaccagagcgcccacctggcacacccccctcaccccagccctgcgcatgggcctgctgcttgtcccgcctgtctctcccacagcccctgtcttttctgttcaatctcagggtaaccttctcccttgtcatctcagcctgagccctggaggctgggcctgcccactccagctccatcccttatttattccttccagcagggccctcttccctaggttcgggccagcaggaggtgccggctggagtctccaccatagactcagtggcctggcctccccagaccccagagccaagaacactaagcactcgccggcccttcggcaccctcgccctccctcccgactcaacccggccgttgcttctgtatatagagaaataagttattggccgcgcgcctcccttcagtccacggtactacccgggcctcccctcgtccctcttctagtggtaccgcccaggccttaatcacccccattccgtgcggtggtatctcccaggctctacattctcgggagcggcgcctcccaagggggtcctgggaccttctcgcgctcctcctggcctctgagggatgcgtcctacccgcgccatcgccccgtggcccaggacggggacctccccttagtccgtcctcccaccgccgggccctgccccgcatcccggccttatgcactgcccctcccacccggccccgcccaggcacggccgaccccgccccgggcaccgcccaccgagccatcctgcctcgcctccccccacgcctgcagcttctcgcgaggggcggcgacggtcccctggtggcaggaggggctccccctgttgcgggtgaggcggctgctctctattttcagatgttgctgtagaaataaagacggtttaaatctgaaaaaaaaaaaaaaaaaaaaaaaaaaaaaaaaaaaaaaaaaaaaaaaaaaaaaaaaaaaaaaaaaaaaaaaaaaaaaa

SEQ ID NO: 117948 - DNA, 1000 bp, Homo Sapiens
atcaactatgccaccaatggtgccaagttcctgaagcggcacatgtttgatgtggccagtggccgcctgatgcggacctgctacaccggccctggggggactgtggagcacagcaacccaccctgctggggcttcctggaggactacgccttcgtggtgcggggcctgctggacctgtatgaggcctcacaggagagtgcgtggctcgagtgggctctgcggctgcaggacacacaggacaagctcttttgggactcccagggtggcggctacttctgcagtgaggctgagctgggggctggcctgcccctgcgtctgaaggacgaccaggatggagcagagcccagcgccaattccgtgtcagcccacaacctgctccggctgcatggcttcacgggccacaaggactggatggacaagtgtgtgtgcctattgaccgccttttccgagcgcatgcgtcgtgtcccggtggcgttgcccgagatggtccgcgccctctcagcccagcagcagaccctcaagcagatcgtgatctgtggagaccgtcaggccaaggacaccaaggccctggtgcagtgcgtccactctgtctacattcctaacaaggtgctgattctggctgatggggacccctcgagcttcctgtcccgccagctgcctttcctgagtaccctccgacggttggaagaccaggccactgcatatgtgtgtgagaatcaagcctgctcagtgcccatcactgatccctgcgaattacgaaaactactacatccatgactgccccaacccccttggggtggggcagaaggtgaagcatcccaactgactagagactcaggccctgcagggccctatagaacctgtggccatccctgagcaccctgccaccaggtgacctcggccatactcactgccccccttgggcacccactcaccctagaataaacttaacagtgtcccgtggtaaaaaaaaaaaaaaaaaaaaaaaaaaaaaaaaaaa

SEQ ID NO: 117949 - DNA, 1000 bp, Homo Sapiens
acagaactgctgccgagcagcagccaattactgccgaagcctccagtaccagcgccgttcctcccggggtcgggactgggggctgctccctcttctgcagcccagctcccccagctccctgctctctgctacgccgatccctttaccccttgcacccttcacccagctcactgctgccctggtgcaggtattcagggaagcactggggtgccatatagaacaggcaaccaagagaacgcggtcagaaggaggtggaactggggagtcctctcagggagggacaagcaaaagactcaaagtagatggacagaaaaactgctgtgaggaggggaaagaggagcagcagggatgtgcaggggacggtggggaagacagggtagaagagatggttatagaggttggagagatggtgcaggactgggccatgcagagccctgggcagccaggggacctgcccctgaccactggaaagcatggagcccctggagaagaggggcagcccagccacgcagccctggcagagcgggggcccaagggacatgaggcagcccaagaatggtctcagggtgaggcagggaagggggcatccctgccctcctcagcgagctggcgctgtgccttgtggcaccgagtgtggcaagggcggcggcgagcccgtagacgcttgcagcagcaaaccaaggagggagctggaggtggcgctggcacaagagcagggtggctggcgactgaggctcaggtcacccaggagctgaaaggactgagtggtggcgaagagaggccagaaactgagcccctgctgagctttgtggcgtctgtctccccggctgaccgaatgctcactgtgaccccgctccaggatccccaaggcctgttccctgatctccatcatttcttacaggttttcctccctcaagcaattcgacatctcaagtgaagacatggcccctgaagggcaataaagctgctagtttattaatacaaaaaaaaaaaaaaaaaa

SEQ ID NO: 117950 - DNA, 1000 bp, Homo Sapiens
atgagatttagggggtgcctcatggggtgggcaggcctggggtgaaatgagaaaggcccagaacgtgcaggtctgcggaggggaagtgtcctgagtgaaggaggggacccccatcctgggggatgctgggagtgagtgagtgagatggctgagtgagggttatggggagcctgaggttttatgggcctgtgtatccccttctcccggccccagcctgcctccctcctgcccgcctggcccacaggtctccctctggtccctgtccctctggtggttggggatggagcggcagcaaggggtgtaatggggctgggttctgtcttctacaggccaccccgaggtcctcagtggttgcctggggagccggacggggctcctgaggggtacaggttgggtgggccctccctgagggtctggggtcaggctttggcctctgctgcctctcagtcaccaagtcacctccctctgaaaatccagtcccttctttggatgtccttgtgagtcactctgggcctggctgtcgtccctcctcagcttcttgttcctgggacaagggtcaagccaggatgggcccaggcctgggatcccccaccccaggacccccaggccccctcccctgctgctttgcggggggcagggcagaaatggactccttttgggtccccgaggtggggtcccctcccagccctgcatcctccgtgccctagacctgctccccagaggaggggccttgacccacaggacgtgtggtggcgcctggcactcagggacccccagctgccgcagccctggtctctggcgcatctcttccctcttgtcccgaagatctgcgcctctagtgccttttgaggggttcccatcatccctccctgatattgtattgaaaatattatgcacactgttcatgcttctactaatcaataaacgctttatttaaagccaaaaaaaaaaaaaaaaaaaaaaaaaaaaaaaaaaaaaaaaaaaaaaaaaaaaaaaaaaa

SEQ ID NO: 117951 - DNA, 1000 bp, Homo Sapiens
gccccactgtctttgtcccaggagctcccagacactcaggttccagctaccacacctttgcccctgccacaagtcctcacagacatctgggtccaagccctcccaacttcacccaagcagggaagcctcccagacatccagggtccagcggctgcacctccacttccggagccaagccttacagatacacaggtccaaaaactcacaccttcgttggagcagaagagcctcatagatgcccatgttccagctgccacacctttacctgagagaggaggctctctagacattcagggcctctcacccaccccagttcagaccaccatggttttgtccaaaccaggaggctccttagcctctcacgttgccaggttggagtcttcagacttgacgccacctcatagtcccccaccttccagccgtcagctcctgggccccaatgcagctgccctctccagatacctggcagcctcatatatcagccaaagcctggctcggcggcaggggcctgggggaggggcccccgcagcctcccggggctcctggtcctctgctcccacgtcacgggcatcttcgccgcccccccagccccagccaccacctcccgcagccaggcggctcagctatgccacgacggttaacatccacgtgggcgggggtgggcggctgcggccagccaaggcccaggtccggttgaaccaccctgctctcttggcctccacacaggaatctatgggccttcacagggcccagggggctcctgatgcccccttccacatgtgagccaggacatgaggcttccctgaagcaaggatttcagccagatgccatagaccctcagaacttgacctggaagtccagacactgaacgcaggcctcaaaactgctgcggccttccaactcctggtatctgcatcggcgaatggcccttcttgccttgatccacagggatggggaagggaatgtcattaatgttttgttaatactgattctttcatgc

SEQ ID NO: 117952 - DNA, 1000 bp, Homo Sapiens
ttcagtggacctaatgaagagtagatgactttcccttctgtcccctccccgacaggcactcatggtaccggcgccggcgcagctgtgactgtcgctgcagacggaaactgactggggtcaattcaagtcatgcaggctgtgagaaacgcggggtcgcggttcctgcggtcctggacttggccccagacagccggcagggtcgtggccagaacgccggccgggaccatctgcacaggcgctcgacagctccaagacgctgcggccaagcagaaagttgaacagaacgcggctcccagccacaccaagttcagcatttaccctcccattccaggagaggagagctctctgaggtgggcaggaaagaaatttgaggagatcccaattgcacacattaaagcatcccacaacaacacacagatccaggtagtctctgctagtaatgagccccttgcctttgcttcctgtggcacagagggatttcggaatgccaagaagggcacaggcatcgcagcacagacagcaggcatagccgcagcggcgagagctaaacaaaagggcgtgatccacatccgagttgtggtgaaaggcctggggccaggacgcttgtctgccatgcacggactgatcatgggcggcctggaagtgatctcaatcacagacaacaccccaatcccacacaacggctgccgccccaggaaggctcggaagctgtgatgggaaggaggcctgcacttggacctgacctcaagcctcagctccagtgggaccttgtaaaatgctccctgtcagagctctccagaatatgcttgttggagatccttcaggcagtaagggagagttttgcctccttacacagtggcctttgcttgcacctccagctggagatgggtgtgccccagaagtaagctttgcatctcttacaagaggggagctacaggggcagccgtggcctaggcccaaactctgctctgagaaaataaatatctgtaccacctgtcaa

SEQ ID NO: 117953 - DNA, 1000 bp, Homo Sapiens
tctgtatttctagaatggtatttgaattaaatgttcatctagtgttaggcactatagtatttatattgaagcttgtatttttaactgttgcttgttctcttaaaaggtatcaatgtaccttttttggtagtggaaaaaaaaaagacaggctgccacagtatatttttttaatttggcaggataatatagtgcaaattatttgtatgcttcaaaaaaaaaaaaaagagagaaacaaaaaagtgtgacattacagatgagaagccatataatggcggtttgggggagcctgctagaatgtcacatggatggctgtcataggggttgtacatatccttttttgttcctttttcctgctgccatactgtatgcagtactgcaagctaataacgttggtttgttatgtagtgtgctttttgtccctttccttctatcaccctacattccagcatcttaccttcatatgcagtaaaagaaagaaagaaaaaaaaaggaaaaaaaaaaaaaaaccaatgttttgcagtttttttcattgccaaaaactaaatggtgctttatatttagattggaaagaatttcatatgcaaagcatattaaagagaaagcccgctttagtcaatacttttttgtaaatggcaatgcagaatattttgttattggccttttctattcctgtaatgaaagctgtttgtcgtaacttgaaattttatcttttactatgggagtcactatttattattgcttatgtgccctgttcaaaacagaggcacttaatttgatcttttatttttctttgtttttatttttttttttatttagatgaccaaaggtcattacaacctggctttttattgtatttgtttctggtctttgttaagttctattggaaaaaccactgtctgtgtttttttggcagttgtctgcattaacctgttcatacacccattttgtccctttattgaaaaaataaaaaaaattaaaagtacaaaaaaaaaaaaaaaaa

SEQ ID NO: 117954 - DNA, 1000 bp, Homo Sapiens
ccctggcatctcagcacatgacacacacccacacctgcaggctgtggttccggcttggcctgctccccgtccggctgctgccgctgcctctctccagacctcgcttaaggacagtcccaaactcagctggggcaggtgttggcctgaaagtcctcccccagcctctgctggccagcttggtgctcacagctgctgggtaagctcttgcctaaggagctgtgggaagcagggctgatgccccagcaacctctcctcccactgtctttgaagaaagtagctttagaccggctaaaagctttaatccagagcctgccctactctgatagtaccagagtggagggcagaataccaaatgtccaggaaccaaaggcagggctgtggggacctgaagagcggcacagtggggcccgtgctgctgtgggggaaactgaggctgggagcctcagcagagaccggtgtcaagagtctctgggaactgcataggcctgaggaacatgcattttcaagttgtccattgatggtttcgtacctgaatttctcaccttttgtgaacatcttgggagggtgggggttttgcaggggtgttaaaagcaaggcttggagcccctttcctccagctggtggctccttctcagggcctggcctcattcaggccactttgtagagaaatgccctgacctcgcaggaaggatttccccacccccaagtggaaggaagaggacagtgtgggcaccagagggccctggaaacatcttaggggaaggaaaggaaaaggataaatttggagtggggggtctctaaacagattgcctggattccgttctttcctggggttctacagctgcctaagccctcaccttgggggaggatcaaagggaataaagagaactcttggctgaaaaaaaaaaaaaaaaaaaaaaaaaaaaaaaaaaaaaaaaaaaaaaaaaaaaaaaaaaaaaaaaaaaaaaaaaaaaaaaaaaaaaaaaaaaaaaaaaaaaaa

SEQ ID NO: 117955 - DNA, 1000 bp, Homo Sapiens
taacagtaccagtgtaaattcagtcttttctctgaaaagcaaaggatgtgttttcagtctttctatcaaatattatctttgttctcctaatgctctgaaaggatgtagaaacaatatttaaccaaagaacgtaataaaccaggtttgcacctaagtgtgtactagtttatggttctgcagtcaaggttgtcaatttgttggagatgcagccttcaccatggatcctggattgagacgaatgccattggaacctgttaaatgagtagtttgttatgtgtctggaagaagcagcgttagggactttgggctgtgagcatttagaacgagcctggaagcactacagagcatcccacaggaccacacgcaggcctccctgcctcagctgcatctgataaagttgagagacagtaacacaattaaatgacttagaaacaatgtttgcttttcactggcataaatctgaagtggttcagtctagaagaattaagctgtgcaattactgcctgcagagatatttcttcaggaggagtcatgtagccccagtcagaagttctgggtggtgccagcacccagtcctctgcctccatttaatttttaagagaaggtgaaggtaactattagaatataatatttgaagcagctctgccttcttagggctacccaaaacagttctaggtgctaaaattcagattttcagaggatgagaaatagctggtttccaactctccacaaaaactcttattactgttgggacttgggattctgacttaccccaaacccagaacatgaagaagacctttacagtttgtgctctactgttactaggctattaatttgagatcgtccactgtcaagtgttttactatctcactgctgtttttatgattcaggcttataacaaatattgtatcctttatttctgataagacatgaaaggttggccttactgttgaacaataagtaaatccacaggctcctgttgtaatctcaaaaaaaaaaa

SEQ ID NO: 117956 - DNA, 1000 bp, Homo Sapiens
aagtgattttaagttaacatatgaaggcagggaaatgattacctttccagtaaaaagtatagataatttaattaacttagtgacaccaccaagtgttttgatataactaaatttgtggtaataagactgtctgcacctgtattcattgtggaacttcctctttcattggaaactttcttactcaagaatgacggcagtattgttttcttatatgtgcaatgaagtggaatgataaacagtatgcctttaatttatatgtgttcttgttctgatgttgtttcctgaaatgatttttcttcctaactgtggttttcgggtatgcaagcctaaatctttgtacactttgtctcacagaatagttctgaggctccatgacagggttttgtcattgttgatgttattgttgcttcgttttataaaaaagccaaaatttttttttccaatccaaacgttcacctgtttcctttcctcaagctataccagtgtaataccagttaccctgtggatccatttaatatgttatccccactaattaattttcgtatattatttccaatatttggaaagctctttatagccatttggtatttcctattacccacctcctattttaaatatttatcagtctaaacttgtgcagtgtagtaaacatgcaagttgttatgattgagctgtattaccataagtagaattttaagtaaactggtgaatttgggccatagatgtttttgctttttgtttgatttttttttacaagctaactgttagaggtatacatttatttatctgttgtacagatttgattatgattttaatgtttgaaagattgcacttgtttgcttttactatatgtggggtaaaatatattttctgttcacagtatatgaaaatatggagtaatttaaacagtaaataaacattctgtggatgcttaaaaaaaaaaaaaaaaaaaaaaaaaaaaaaaaaaaaaaaaaaaaaaaaagaaaaaaaaaaaaaaaaa

SEQ ID NO: 117957 - DNA, 1000 bp, Homo Sapiens
catgaatgctaacatgaggggtgtatttctacatgttttggcagatactcttggcagcattggtgtgatcgtatccacagttcttatagagcagtttggatggttcatcgctgacccactctgttctctttttattgctatattaatatttctcagtgttgttccactgattaaagatgcctgccaggttctactcctgagattgccaccagaatatgaaaaagaactacatattgctttagaaaagatacagaaaattgaaggattaatatcataccgagaccctcatttttggcgtcattctgctagtattgtggcaggaacaattcatatacaggtgacatctgatgtgctagaacaaagaatagtacagcaggttacaggaatacttaaagatgctggagtaaacaatttaacaattcaagtggaaaaggaggcatactttcaacatatgtctggcctaagtactggatttcatgatgttctggctatgacaaaacaaatggaatccatgaaatactgcaaagatggtacttacatcatgtgagataactcaagaattacccctggagaataaacaatgaagattaaatgactcagtatttgtaatattgccagaaggataaaaattacacattaactgtacagaaacagagttccctactactggatcaaggaatctttcttgaaggaaatttaaatacagaatgaaacattaatggtaaaagtggagtaattatttaaattatgtgtataaaaggaatcaaattttgagtaaacatgatgtattacatcatcttcgaaaatagatatgatggattctagtgaagaccaaaattacttctgtttactttctatcaggaagcatctccattgtaaatatgtatttacatgtttattacaaagacccaaatgaaaaatttttagtccattttttgcatagcctaaagataaaataggaataaaagttctatatttatggaaaaaaaaaaaaaaaaaa

SEQ ID NO: 117958 - DNA, 1000 bp, Homo Sapiens
tctacagtcccacaccccatagccgcctgggctggggcttactgggggctgaaggttctggacatgaacaagggtcaggtagaagagaaaggcttcccctacaccccagcctcctgctgtcccctgaagcccaggactgcgttgtatgctttccatccactcaccttaccccatagcatcttgcggcccagaaaccagagccatttgtctcagaccctaaatcaataatcacaaaccccaaaacgggagagagcagtgaaaacatgcagggctgtggacgggggaagggttgtggcgggtgttctgaagctgagaggacacctatatgcgtatttcctctacacacatcaccccccttctataatcttaagccatgactagcctggtggcgtgttagtttctgcccagttctaccccctcatgtgcttcttctgaatactgaatgtgactgtttgaaagctggtagaattcatccctcttactgtagataacactgcaaatcttggaattttgttttttgctgtttccagatgtatctataaatatctatacattatatgtgtgtgtgtgtgtgtgtgtacatcgggtcctcccatgtgtggtgttcttctggaggttgtctctttggtcaaggtgaacttttaatgtttattattttcttctccgcacaaagtaaagagcctaattttgtgtattctggtggctgctgtcatgagatgataaaatgtaaaacaaaactctagtcaacgtagaaagagttaactgtgctgaaaaactaataaagaacctaagaagaattccagtgtggtgatgccatgcccatcatgggaggcttttggagaaacagaatgtttgggcaggggctgctggtgctgcttgggttttgggttgagggtgctaggagaggatggtctccacccatctttctatttccagtacacgtcacattattttaccggtgagatgagaatgtcacaaacattaaaagccttatgtgctc

SEQ ID NO: 117959 - DNA, 1000 bp, Homo Sapiens
tttaaatcaactgccaagaactttagtccatctacaaattcagtgaaagagtgtaatcgctcaaattcctcttctcctgttgacaaacttaatcagcagcctcgtctaaccaaactgacacgaatgcgcactgataagaagagtgaatttttgaaagcattgaaaagagacagagtagaagaggaacatgaagatgaaagccgtgctggctcagagaaggatgacgactcatttaatttacataacagcaatagtactcaccaagaaagggatataaaccgaaacttcgatgaaaatgaaattcctcaagagaatggcaatgcctcagtgatttcccagcagatcattcggtcttcaaccttcccacaaactgatgttctttcaagttcacttgaggcagaacacagattgttaaaggaaatgggctggcaggaagacagtgaaaatgatgaaacatgtgctcccttaactgaggatgaaatgagagaattccaagttattagtgaacagttacagaagaatggtctgagaaaaaatggtattttgaaaaatggcttgatctgtgacttcaagtttggaccgtggaagaacagcactttcaaacccacaactgagaatgatgacacagagacaagtagcagtgatacatcagatgacgacgatgtgtgaaggatttcctaacagctttagaaatcttagtgtgatacatctctcatacagtttggggtgaattgtaaaaatgaagaactataatttatgtagtgaaataccccattagaagaggattttttgggggacttcaatatgaagaaaaccaagaatgttttgttgggctgtgttgaacattatttctttgtaaatgaatgttgtaggaatgaggacttgggttggtccaacattgactttcttcatcactgcaacatttctctgactagcaatgtgacgatgtaacaaatgagattttctcatttaataataaaaaagttgtgtaatgttttgc

SEQ ID NO: 117960 - DNA, 1000 bp, Homo Sapiens
tacacataatttcttaattttcaccgagcagaggtggaaaaatacttttgctttcagggaaaatggtataacgttaatttattaataaattggtaatatacaaaacaattaatcatttatagttttttttgtaatttaagtggcatttctatgcaggcagcacagcagactagttaatctattgcttggacttaactagttatcagatcctttgaaaagagaatatttacaatatatgactaatttggggaaaatgaagttttgatttatttgtgtttaaatgctgctgtcagacgattgttcttagacctcctaaatgccccatattaaaagaactcattcataggaaggtgtttcattttggtgtgcaaccctgtcattacgtcaacgcaacgtctaactggacttcccaagataaatggtaccagcgtcctcttaaaagatgccttaatccattccttgaggacagaccttagttgaaatgatagcagaatgtgcttctctctggcagctggccttctgcttctgagttgcacattaatcagattagcctgtattctcttcagtgaattttgataatggcttccagactctttggcgttggagacgcctgttaggatcttcaagtcccatcatagaaaattgaaacacagagttgttctgctgatagttttggggatacgtccatctttttaagggattgctttcatctaattctggcaggacctcaccaaaagatccagcctcatacctacatcagacaaaatatcgccgttgttccttctgtactaaagtattgtgttttgctttggaaacacccactcactttgcaatagccgtgcaagatgaatgcagattacactgatcttatgtgttacaaaattggagaaagtatttaataaaacctgttaatttttatactgacaataaaaatgtttctacagatattaatgttaacaagacaaaataaatgtcacgcaacttaaaaaaaaaaaaaaaa

SEQ ID NO: 117961 - DNA, 1000 bp, Homo Sapiens
atagcatgggaggaaacttatagaaccattggcctatattgggttggatctattattatgagtgttgttgtttttgtgccaggaaacattgtagggaagtatggaacacgaatttgccctgcttttttcttaagcataccatatacttgtcttcctgtctgggctggtttcagaatctataatcagccatcagaaaattataattacccctcaaaggttattcaagaagcccaagcgaaagacctgctgagaagaccatttgatttaatgttggttgtgtgtctcctcctggcaactggattttgcctgttcagaggtttgattgctttggattgcccatctgagctctgccgattatatacgcaatttcaagagccctatctaaaggatcctgctgcttatcctaaaattcagatgctggcatatatgttctattctgttccttactttgtgactgcactgtatggcttagtggttcctggatgttcctggatgcctgacatcacattgatacatgctggaggtctggctcaggctcagttttctcacattggtgcatctcttcatgctagaactgcttatgtctacagagtccctgaagaagcaaaaatcctttttttagcattaaacatagtatatggagttcttcctcagctcttggcctatcgttgtatctacaaaccagagttcttcataaaaacaaaggcagaagaaaaagtggaataaaaatattacttcatgttcctcctttctaaattactaacttttgttatactggtactgatattttgtcccatttcactctcttctcatacgtgagtacttaagaatatgtacattcttgctctgcactgtatgtgtgagctatatggtattgtgtaaattttttttgaaggaaaatggaaattcttgagaaacagtttgtttaaagaaatatattcaaaatcatttgtgaataaacttgatcatccatctcaaaaaaaaaaaaaaaaaaaaaaaa

SEQ ID NO: 117962 - DNA, 1000 bp, Homo Sapiens
tggccagaggggtgttggagcccagcccacccacataccagtcaagctcttaggggagcagaagaaaagcaggaagaatttaaatgtttaattttttttttaaattgacttttctagttattaaaagttgcttgtttcagcagtgatattgtataaagaacatcttgtaagatactcctgacatcttgctttagcacatgtacagtacagtttctatgataatgtgtttgctctaacttccctggcttctccttcagcccatccactctcctctagagcagttgggttggaggctcattgaggcaagcagcaacattggagggggagcagggcagtgctgtgtctgctgcctcccatgcccgttctgacctcagccttggaactcctcaagaacctgaagattgagagcggcagagaagctctgagagccccttcccccacaacaaatctagctctagttgttatatttaggcaaaactttgtagtcttctttcccttttatgatggattttgataaaagtacaaaacagggtttttcttttttatcacctttgaatttggaaattttgagcacccaagctcttctgtacctatttaaagtccaccaaggggactgcagctcctagaacatgagaatcaagcctcttaattttaaactgcggaatgtggcctctgcttcctccgtcctcctgcccaaggacgacgaggattgctccagggctgctgggtagtttaccgtcccttctataggcatggagttggcactgacatcacagcttcataaccccaccaccgccagcttcccctgcctcctacatccagtctgttcttgttcatagtgagaatcctgtgttcccacttcagtgacacctgaattgtttgttgttgttttttttttttattgtcttcaaagaggaagggccccattaaagggtgaacttgtaataaattggaatttcaaataaacctcatgtacttgtgtttataaagaagaaaccaa

SEQ ID NO: 117963 - DNA, 1000 bp, Homo Sapiens
ggatgcgagttcagccgccagagactgcaggcctttggcctcaaccccaaacggctgcacttccgccagctgggccggcagcggaggaaacaacaggggcccaagaacagctcctgagcaccagggagcaggcaggggcctcaggctcctctcctcaaatcaagccctggacaggtctcgcacccacaagtactatctgctgcagagatcctctcatctgtggccaggcacgcctgtaatcccagcactttgggaggccgaggtgaaaggatcacttgagcccaggaattggagaccagcgtgggcaacttagcgagactccatctctacaaaatgtggtgacacatgcctgtagtcccagctactcaggaggctggggaaggaagatcacttaaggccatgagtttgaggctacagagagctatgattgcaccactgcactccagcctgggcaacaaagcaagaccctgtctcttgaaaaaaaaaaaaaaattaaaaaacacgtgtagctgtgggtaaggaagtcgtcccattttatggatgtggaaactgaggctgacttaaacttcccgtgacttggagctctcacctcgagacacctcccagaccccacatcccctcagaacgctgcgcccagccacacccacgatcaagttacacagctttattggcccccagcagccacagttcccccaagggggctttgggacagggagggcccgggcgtccagtgcaaactacagtacgtgagtcaggccctgaggggggtgcccggggtcctccttccctaccctgccaggagggccccgctggtgggagacaggtgtatgggctctgtgggctctgtccctggctgaatggccccagactggttgcagctgggcttgaggggctgacaacaggaagtaccatcatcactgccagagctcaagatcccacacccgacatgacataaataaaaaaataaatagtgttgtatctttaaaaaaaaaaaaaaaaa

SEQ ID NO: 117964 - DNA, 1000 bp, Homo Sapiens
cgagcgcgagagtgtggcggaaacaggaggatctgcaaggcagaaggttcggggactggtcctgagaagagggaagaggcagagtgagtcactgcacgcacctggcctccatggacgagcaagggcatcccagaaacgtgtaaatgaccccgagtgtgactgggaaggagaacttattccttaccaggaaactggaagctaaaaatacagagggtgacgtagaaacacgcagaaaccattctaaagaaagtagtgatcttgtattaaattgagcagaattctcacagattttaccattcctgttataaactagtatttgttgtttagccaaaacagaaaatgatttccactggacagtagaaaaatatgtgtaaaatagggaagaaagttagtattggatcagtgtgagtcctgaagcactttcagtgctgtgagaacgacatccactttgggtttcattcgtttgtaagcagaggagctgtcagtcactcgtgcttctcggtggcctctgagccatggtgtcgagtgaagagtagttcttgtttgttacaacctttgtgagtcagccatgcccgcaaagcgtgctgtgttttagtcctggtaggaatatttatcagagttcacactatataaaacccaacagcttcaactattgccctttcaacagttttgccactgaccggatagaaacggtttcagtctctggatggatgtgtttgtggtttgtaaccattacggtttaaaccatggtttaagaatttgcccaaataacagaaattttgttcgggaagggataaactagatatagcatacagagcctgtttttgagttttagatactttatttgtaaataacttaaaatagctttctgaaaccgtgcattctgtagtttcttcctttcagtgaaattgctaaatgtcaatgtatttttggcactgcgattttaaccatttattaaataaaaattttgttaaagaaaaaaaaaaaaaaaaaaaaaaaa

SEQ ID NO: 117965 - DNA, 1000 bp, Homo Sapiens
ggtgaagaacagcagcgaggagccatccctgggcaggctccagggtctgtgccaggcccagggctggtgaaggactcaccactgctgcttcagcagatctctgccatgaggctgcacatctcccagctccagcatgagaacagcatcctcaagggagcccagatgaaggcatccttggcatccctgccccctctgcatgttgcaaagctatcccatgagggccctggcagtgagttaccagctggagcgctgtatcgtaagaccagccagctgctggagacattgaatcaattgagcacacacacgcacgtagtagacatcactcgcaccagccctgctgccaagagcccgtcggcccaacttatggagcaagtggctcagcttaagtccctgagtgacaccgtcgagaagctcaaggatgaggtcctcaaggagacagtatctcagcgccctggagccacagtacccactgactttgccaccttcccttcatcagccttcctcagggccaaggaggagcagcaggatgacacagtctacatgggcaaagtgaccttctcatgtgcggctggttttggacagcgacaccggctggtgctgacccaggagcagctgcaccagcttcacagtcgcctcatctcctaagcactcctttcccctgctgtccccttcgaccctcagccctctggtgccgctctgcccgatgcacagccacctcagccagcccccaggtagaaacgtgggttaagctcttcctgccccgttcagcttcactcccaccctttcagcgtcctgccccttcaccttgacccgggttcccccactcccattccctggcctctgccataatttgttgttcaactgctccctccttcctgaggggcctcagggcttgtggggggtaggctgagaccccaccaccaaaggttaagtgaggtccccttgattgaggacttcaccccttgattaaagcaacttctgcttcagtgaaaaaaaaaaa

SEQ ID NO: 117966 - DNA, 1000 bp, Homo Sapiens
tcgtccatcatgtggaccaagtaccacatggcttacctcactgatgctgcctggagccccgtgaggccgaccgttttctttaccaccaggatggacggaaccctggatatctgggacttcatgttcgagcagtgcgatcccaccctcagcttgaaggtgtgtgacgaggccctcttctgcctccgggtgcaggacaatgggtgtctcatcgcctgcggctcccagctggggacaaccaccctgctggaggtctcgcctgggctctctaccctccagaggaatgagaagaacgtagcctcttccatgtttgagcgtgagacccggcgagagaagatcctggaggccaggcaccgggagatgcggctgaaggagaagggtaaggcggagggcagggatgaggagcagaccgatgaggagctggccgtagacctggaggcgctggtcagcaaggccgaggaggagttcttcgacatcatcttcacagagctgaagaagaaggaggcagacgccataaagctgacgccagtgcctcagcaaccaagtccagaagaagaccaggtggtggaggagggagaggaagcagcggaggaagaaggggatgaagaagtggaagaagacttagcctagaagtcagccttcgactgcggcgctatccctgtgtgccttcctttcccacctcttgaccctcaaccagacttgcatggccatggcagggcctcgggaagaccttcaggagtggggaagggtttctcctccatgatcgaccctcctcgtccacctacaaatcaggaacagaaagtctgtccactttgaaaatacctttccaggcagctccctgaccatttggacacattgccacgacaggagcctccaagtatgtgggaggggacgggcgggacgagcttggctgttctgctgcacctgaatgctttctgttatcctaattcttgtaaaattaaatgaatcgtaacaatgccaaaaaaaaaaaaaaaaaaaaaaa

SEQ ID NO: 117967 - DNA, 1000 bp, Homo Sapiens
gaaccaaggtagcttagaacgtcctggacagactccactcatcatgctgtgtggcacaaatgtgttacatttgaccgagcatatgcaactcgctactgaagaagtgacttccgttgcataccaaagccgactacactgaacagtaccttcctttctagaaacaattttagattggcaaaagtgcaatgttttcttcactcaaaaaattttatattctcaaacatgtatattctttccctgtcttgttccattttcttttcttttttcttttttctttttcctttctttcgtgggctgagaaaggggcaggcaaaatgaagctggccactgaaaactgtaagatggtcaaaagctgacagcctgtgtatgtgaaaagggaattgtaaatggactgcaatgtaatgtacactgtaatttgaatacaattactgtatctaaaaggagctgctatgaagtacctttcttatgttgctaggctactgtttctgaaagccctggatctctttgcaccaaaaatggtccagatagactctttttaaggatcttggctgctttttactagaaggttgcttttatgagcatatttatactgctgaaggatgagtgttaattttaattaactttgccgttttgtagagaaaactattcacaagataaattccaagtcttttcacctgtcaggcatgcatattttaatatctgtttggatagtcagaagtagaatcataaaggtaaaatatgagttgttactttgtttcttcgatgtcatattttatgtgtaatatatatgtaaagggccattcttaagttctctccttaaacttaatgctgtcaagtgttagatgtgtgcatgtgaacttgttgcactgcagaaacatattcagagtttatctatgtaacttattcactctgtaaatacatttaaagtttttgtgatgtaagcttaattgatattctgttcagaactttctttagactaaaaaaaaaaaaaaaagacaaa

SEQ ID NO: 117968 - DNA, 1000 bp, Homo Sapiens
caaacacagaggaaatgaggtctctaccacacctctgttagcaaattctttgtctgttcaccagttggctgctcagggagagatgctctatctggctactcgtatcgaacaagaaaatgttatcaatcacacggatgaagaaggatttactcctctgatgtgggctgcagcacacgggcaaatagctgtggtagagttcctacttcagaatggtgctgatccccaacttttaggaaaaggtcgagaaagtgcactgtcgttggcctgtagtaaaggctacacagatattgtcaaaatgctgcttgattgtggagttgatgtaaatgaatatgattggaatggaggaacacctctgctttatgctgtacatggaaatcatgtgaaatgtgtaaagatgctcttagaaagtggggctgatccaacaattgaaactgactctggatataattctatggatctagctgtagccctaggctatagaagtgttcaacaggttattgagtcacatttgttgaagctgcttcaaaatatcaaggagtagacacagtcatcagaaaatgtctgcccttttgtttacttcttggtccttataaatgatagttttgtttacttataaatttttacctcagttgcaatatttactggtttttagtaggttttaataaatatttctctgagtaattcactggtttataataaatgtaatactctttttataactatgttttactgtatatttaaaattataaattaatgttttcgtggcatgtaaatttttatggtacagatagttatcatcagtctttgtatcaagtgctgtaatttgacattttcagaaattattctaccctagtcatcttcactcgtgtattaagtcattcactttatatagggtttgctataaatccctagaaaaaaattgttcttattgttgaattaaaaagtgcacagtgtgattgtttacaaaatgatattataaataaataaaatacttcttctg

SEQ ID NO: 117969 - DNA, 1000 bp, Homo Sapiens
tcctcctcacttcaaccccagggatttgtggggagcaagggtagccaatggcagagggggttggggctgggactctggaggctcctccccttctttctcttccttctgcctcccccgtgcccccagctgctcttgtcactgtctctgatgggtatttgcctggctttgttgcttctctatctgtatttagctgcagtgatcctttagctggttggctcagaaaaaaaaaaatgtgctttaggtgccctgtaatcctgggcatcaagggaatccatccttcccctttttgatatgttctccccgtacttccagatttattgttatggctcccagtgggtattggcgattcttgtgatgcagggcctcagtcagtgtccagccatgcataagggagaggatagtgtgtacctgccctgccctctgctatgaaggtctctgccttgtggatcatgggactccccttggaggatctgtgcaaaggggggctgggcacaaaggagaatgtcctatttgggagggcaggaagcaaaggaactggacagggattggtgggcttggggaacggaagtttatcttggatacccttgaagaggctgggtctcttcacatgaagatcgaaaagggaccctgcttccaatttccctcttccattcctcgagctactccagggcttagaagaatgctcttggtctgtgggtccagtgttgtctgtcatccatttaagtgttcccactttcaagtgacaatcctctccttggccctgccatagggcagagcatgtctggcatagcagcctgacttttatgccctaatcttgagttgaggaaatatatgcacaggagtcaaagagatgtctttatatctgactgtatataaatgaagtttttttgttttttttgttttcctttttggtgcaataaagtttgttttggcagaaaaaaaaaaaaaaaaaaaaaaaaaaaaaaaaaaaaaaaaaaaaaaaaaaaaaaaaaaaaaaaaa

SEQ ID NO: 117970 - DNA, 1000 bp, Homo Sapiens
ggtgctttatctcattatatttgtggcaagcatcttgctgaatggtttagcagtgtggatcttcttccacattaggaataaaaccagcttcatattctatctcaaaaacatagtggttgcagacctcataatgacgctgacatttccatttcgaatagtccatgatgcaggatttggaccttggtacttcaagtttattctctgcagatacacttcagttttgttttatgcaaacatgtatacttccatcgtgttccttgggctgataagcattgatcgctatctgaaggtggtcaagccatttggggactctcggatgtacaacataaccttcacgaaggttttatctgtttgtgtttgggtgatcatggctgttttgtctttgccaaacatcatcctgacaaatggtcagccaacagaggacaatatccatgactgctcaaaacttaaaagtcctttgggggtcaaatggcatacggcagtcacctatgtgaacagctgcttgtttgtggccgtgctggtgattctgatcggatgttacatagccatatccaggtacatccacaaatccagcaggcaattcataagtcagtcaagccgaaagcgaaaacataaccagagcatcagggttgttgtggctgtgttttttacctgctttctaccatatcacttgtgcagaattccttttacttttagtcacttagacaggcttttagatgaatctgcacaaaaaatcctatattactgcaaagaaattacacttttcttgtctgcgtgtaatgtttgcctggatccaataatttactttttcatgtgtaggtcattttcaagaaggctgttcaaaaaatcaaatatcagaaccaggagtgaaagcatcagatcactgcaaagtgtgagaagatcggaagttcgcatatattatgattatactgatgtgtaggccttttattgtttgttggaatcgatatgtacaaagtgtaaataaatgtttcttttcatt

SEQ ID NO: 117971 - DNA, 1000 bp, Homo Sapiens
cctactatactcctcaaggatgctgcatttggacctaatatgaatcgacaatttggattgttgaacttgaaggcttgcaaaatatggtacatgctggatagtagttatgttgctgtgaaaactgtagggtcaaagccttatagcaaaaaaaatttttttttatatttgcacaggactatacagcaaacaaccatgtggttggattacatggagtccccacatactcagtcagttatcaaagtaaaatattttttatttataggatatacagtaactatttgggtcctatgaaaatagtccttaaagagcttacattcatgtgctactttaacatgaatggagaaaatccgtttatggaagtacagtgacaattgacccaatcactctgtccatcaaaccactcaggctagtttgtactagtagagttttgtttctatttttatttttattaattttattttttttaatacagattttcagtgaggggctttttcaatcccattggttctattttcttgtatttttccatttaatttgcttcataacttaaaccaagtctcttctagtcttaggtattatttctcgattttgtgctgatgggcatgtttataagaactggagaggtaatttattggaatgaactaactgacttcctccattcccctcttcctttttgacatgaattttactacttcacaaatgaagaatgatgttatgaagttagcttggcggagttgacaaataccactaaaatgattatgatttagaagtaactttcttctgctgctctaatctgataaatggttactatatgatattttctgacatggtatttggttttgggtatctgttactttggcactattcttgtttgcctctttatttttgccagtgtactatacctcagtcctatttgaaagacctaattgaaagaaaaatcatagaaataagtaaaatgatttgttttataatttatccaccatgtccagtttggttagct

SEQ ID NO: 117972 - DNA, 1000 bp, Homo Sapiens
aacccgtcttgagaatgatgtattgaatttgaaaatcaaaactaccagtggatgtgtggaactttacagaaaccacctatttgcgtttttctccttacatttaaggaaacataagccattttgcttgcaatatgtatgaatcatctcaaaaccataatggtatgagcctctttgctgcatattttgctataagaacttattttttttcactttttattatggacgctttcaggaatatataaaagtagagaatatagtacaataatccccctgtgtatctatcactcactcacaacaatcatcaaattatagctctgctggtttttaccagttattgtgaaacaaatatcaaaatgtcattttatcatatttcagtatgtatctctaaaaggtaagaattatttctaaaaatcataaatacctcatcatatcagacattaacagtaattacataatatccaaaatctgatcagtgttcaaaatttcctcaagtgttttatatttagtttgtttgaatcaaaattcatgcaaggttcacatcgtatttgcatgatttggataagtctcttaaccttatagatcctcctctatttttttttttttgcttgctatatatttatatctctatatatattgatatagacatatgtagtgacactgagtcatctgtttcctgcttccccacactctgcctctcctgacatctgggtctctgggttatgccatatatggtgatagtggctgcagccactttacctgtgtgacttacccacagcaatgggatggtaacagcaaagctaaccaaagtgctctgtgcccctttgggttgcatgtggggagactggccacccaatgcctctccagtggggtaggggttgtcttttggtgcatctgtttttcctgtgattattggtgagggcagcaaagattagcaggtggttgtaaactaccttgagtaggttgtaataaatagtctggcctcaaaaaaaaaaaaaaaaaa

SEQ ID NO: 117973 - DNA, 1000 bp, Homo Sapiens
atggcgcggaagaaggtgcgtccgcggctgatcgcggagctggcccgccgcgtgcgcgccctgcgggagcaactgaacaggccgcgcgactcccagctctacgcggtggactacgagaccttgacgcggccgttctctggacgccggctgccggtccgggcctgggccgacgtgcgccgcgagagccgcctcttgcagctgctcggccgcctcccgctcttcggcctgggccgcctggtcacgcgcaagtcctggctgtggcagcacgacgagccgtgctactggcgcctcacgcgggtgcggcccgactacacggcgcagaacttggaccacgggaaggcctggggcatcctgaccttcaaagggaagactgagagcgaggcgcgggagatcgaacacgtcatgtaccatgactggcggctggtgcccaagcacgaggaggaggccttcaccgcgttcacgccggcgccggaagacagcctggcctccgtgccgtacccgcctctcctccgggccatgattatcgcagaacgacagaaaaatggagacacaagcaccgaggagcccatgctgaatgtgcagaggatacgcatggaaccctgggattaccctgcaaaacaggaagacaaaggaagggccaagggcacccccgtctagaatgccagaaccagcgggtggccttaggggctgtgaggcagtggggaccttattgatgaaagaaaccgtctttgcgttacacccgagtctgcctctcggagcagggagctcaccttccgcgacgtgttctgagggtctgcatcttaggggggagggctggggcaaatcgccacctgtgcctttcctctggccctgctgcccccacacccaactccgagggcccacgctggggaaagcgggaagcgctcgctccctttcccccattagtgctctctctgcctggatcccggcagaagctatgaaagggaataaagagaaaagaagtaaaaaaaaaaaaaaaaaa

SEQ ID NO: 117974 - DNA, 1000 bp, Homo Sapiens
aggatttctcttaattcagcttgaattgatggggagggaggtaagagtagggtcagagttactcatcccttttcaaagaattgtgggtggaagtttgtaaaggccattcatttgattttcaaaatcaaagcgacagctctacttccacttggccttagatctctgctataccctgccatagccttgatgccactgggcacaagccacctgccaaatacaggagtggcctctcccagcctggcatgataggggggtctgtgccctcagatgtgttgacagctgctcttctgaattgccacacctgtgctacacttggaattctgtgctctgactctgcagggtaggaccacgtgccatctcacacagaggtcaaccgatgagcccactcactcgtacatgccttcttccacagtgggaagcatgatctggcaggggccgccctgtaggctggggatgggctgctgtgtgaatgttgacgttcgtttcatggagaaaggggaggtgaaagattgaagagcaggttcctgtcaatgttctgagttcgagctggaggtgtagattgaatagtctacatggtctgtgagtgtgtgagatgaacccttccatcctttgacacctggttgtatgtgtaggctaagaaggaaggaccctcctgtcagtgtgcaaagctgtaatctcatggactagaggagagggggccaaggggatggacaggagaagtcatgcagaatctaagcaggaatgcagatagaacacatctaggctcttttccccaggagagtgatgatggagcatatagatctggctcaaattcagcctccatcacttaccagtcaggaaccctggcgatatcactttaactttctgaacctcagagtcttcacctataagacggggaaaataataccaccctttcaagattgttgagataaataagtgatataaaacatgtaaagcttagttctggccacagtgtagctactcaataaatgataatact

SEQ ID NO: 117975 - DNA, 1000 bp, Homo Sapiens
tgccgcaggcaacctactggccaccccgggccagctgcagtgtctggctgggctaccgtgcctggagtacctgcggctccgagaccctttggcccggctcagcaacccgctctgtgccaacccctcctactgggctgcagtccgggagctgctgcctggcctgaaagtcatcgacggtgagcgtgtgattgggcgtggtagtgagttctaccagctgtgccgagacctggacagctccttgcgtcccagctccagtccaggccccagagccaccgaggcccagccctgggtggagccaggctactgggagtcctggcccagccggagcagctccatcctggaggaggcctgccggcagttccaggacacactgcaggagtgctgggacctggaccgccaggccagcgacagcctggcccaggcggagcaggtactcagctctgcgggccccacctcttccttcgtcttctgaacgtggcctatggcccaggacagcctggcaggtggcctcgctgcccccagttcccctctctgcccccacactcgtcttagttgcttcacactggtcactggccctgcacactgggctattgctttatccctatcctgagagcagcccctccccaccatccctccacatgctgcaaggacagactgaagggctgtgagcaggtgtaagggctcccacatccgtgagcctgtgtccgcagctgctgccactctgggctgctccagcctgcaacttagtggaaggaattacttcctcctgaggctacaggcgagaaaggtagggatgggccagcctcccgtctcagctgttgggagacagtaggcaggctgagtggcccagagcactcctggaagtgggactcccctgccttgcaaatgtgcctctccagactgctcctgcacttaccccctccccgcagcaccttctctgcccgttcttgtccacacatctattaaatgcttctgttttcaaaaaaaaaaaaaaaaaaaa

SEQ ID NO: 117976 - DNA, 1000 bp, Homo Sapiens
tgccaagtgatattgaagaatatgtacatcgtattggtcgtacgggacgtgtaggaaaccttggcctggcaacctcattctttaacgagaggaacataaatattactaaggatttgttggatcttcttgttgaagctaaacaagaagtgccgtcttggttagaaaacatggcttatgaacaccactacaagggtagcagtcgtggacgttctaagagtagcagatttagtggagggtttggtgccagagactaccgacaaagtagcggtgccagcagttccagcttcagcagcagccgcgcaagcagcagccgcagtggcggaggtggccacggtagcagcagaggatttggtggaggtggctatggaggcttttacaacagtgatggatatggaggaaattataactcccagggggttgactggtggggtaactgagcctgctttgcagtaggtcaccctgccaaacaagctaatatggaaaccacatgtaacttagccagactataccttgtgtagtttcaagaactcgcagtacattaccagctgtgattctccactgaaattttttttttaagggagctcaaggtcacaagaagaaatgaaaggaacaatcagcagccctgttcagaaggatcatgctcatctgtggagcaagtgcccccatgaaatgccatattttgtgaagaaagtgcatgcaggaatattcagggagtccagcatgtagtcatggcagccttaggtatttgagaccgaccaaccctcctgatgaagacaaccataactcatgcagaacttggagcgtgatgcccagaagtgtgtgaactggtctgtgaccacaaagatgagaaccgcatgctgagattggtggaatggagatttcagtgagcctacatgcagatgacatggtgacacccgtgcccagcctgagctgttttcttctggccctcttattacatgagaaaaataaacacctatgcaccttggcctcaaaaaaaaaa

SEQ ID NO: 117977 - DNA, 1000 bp, Homo Sapiens
gagggctctagggagagcctgggaactttcatcccccactgaagatggatcatcccacagcagcccaggactgaataagccatgctcgcccaccaggcttctttctgacccctcatgtatcaagcatctccaggtgacctactgtctgcctatattaagggtccacacggcggctgctgcttttttttaagggggaaagtaagaaaagagaaggaaatccaagccagtatatttgttttatttattttttttaagaagaaaaaagttcatcttcacaaggtgcttcagacttggtttcttagctagaaaccagaagactacgggagggaatataaggcagagaactatgagtcttattttattactgtttttcactacctactcccacaatggacaatcaattgaggcaacctacaagaaaacatttacaaccagatggttacaaataaagtagaagggaagatcagaaaacctaagaaatgatcatagctcctggttactgtggacttgatagatttgaggtacctagttcagaactccctagtcaccatctccaagcctgtcaacatcactgcatattggaggagatgactgtggtaggacccaaggaagagatgtgtgcctgaatagtcgtcaccatatctccaagcttcctggcaaccagtgggaaaagaaacatgcgaggctgtaggaagagggaagctcttccttggcacctagaggaattagccattctcttccttatgcaaagattgaggaatgcaacaatataaagaagagaagtccccagatggtagagagcagtcatatcttacccctagatgttcatcccagcagaagaaagaagaaggtgttggggtaggattcttcagaggttagcctggtactttctcatcggacactagcttgaagtaagaggagaattatgcttttctttgctttttctacaaacccttaaaaatcacttgttttaaaaagaaagtaaaagcccttttcattc

SEQ ID NO: 117978 - DNA, 1000 bp, Homo Sapiens
gcagcagtgaggaagaggacagtgggaaacaggcactggctccaggcctcagcccttcccagaggccggggggttccagctctgcctgtagcaggagccctgaggaggaggaggaagaggatgtgctgaaatacgtccgggagatctttttcagctagggcataaactgtgcactgaactgtctgccgagagcagctggaggacagctgagcttccactggtgctgctgggccgcccgcctgtgggaatggggctctctgtgctcctacctttgtgccttcttgggcctggcagattcacctcaggccagaagcccctggacactccgggccttggggctgccgttctgagtgtgcggaaggcaggactcaaaatgagatcccatttgactccctctgtatgtactgtgccctctcctggctcttgaggctctggagtcccaattgtctgtgttagtcagtgaccaggttccagggaaaatgatgtcatgtggtggtccaacttactggaaccaaagagacagtactttgcaaagaaaaggatcactgccaggtgcactggaattgctacagtttagtccgcatgatctctcctgaaggaggaagcctgtttcaaaaatagtttccatcatgagtctatcaatgagctcccacctctccagccagcctagaaagcaaacgagctgcccacagttctctgccctgtctgggaggttgaggccacagtgtatagactggtaagccagacaggcctcctcccgcaagctgctaccttgctttcacctgtaccttggtccccgggcagctagctataaagcaagagggacaggagcccagaagagacactgaggacaagagatcacaccagagtacatgtctctgcctctgttttcagtgtggctttggacaggaatatatgaataaatcactgccatacaggttttccaatacacaagtgctagaaaatacacacaattccccaatgaaaaaaaaaaaaaaaa

SEQ ID NO: 117979 - DNA, 1000 bp, Homo Sapiens
ccgtggtctgccgcagccatctgcagcaggcccctcccagcaacagccttctcataaggcccctgccagccacgtgaaacctcctggctagggcctgtcttccactcctggccttttgagacagggcctcactctgttccccaggccggagtgcagtggtacgatcacagctcactgcagcctccacctcctgggctcatgtgatcctcccacctcagcctcctgaatagctgggactacaggcttgcaccaccacacccggctaatttttgtatattttgtagagacagggtttcgccacattgcccaggcccaggctggtctcaaacttctgggctcaagcaattcatctgcctcaacctcccaaaagtgctggattacagggatgagccaccatacccggcttttttttttctttctcctggccttttggggcccttgaagtgtctgctccctgggagcccttcagcttgtcgtccacttggtgggttcccacccgtccttctcacttctgcctgaatcacacaggctacatgagaccttcacccacccccttcgccagcagctctgtggttcaagtttcctcaagggcaggggctcctggccatcttacctgtgggcctgagcatgggccgatgcttccaaagttcacactgggtgcacttgtgtggggacttccatgtgagtcatctccttgcaggctgccaaggtcctgtacagcagagacccaaaccctcttagcagtcttcagagtcagctatgtgtacaggaggcattaccatatcagtgactgtcagcaagcatgtgtgactgaaatggtatccagttcttacgtatttgttttgcaggcttcttggttcagcagacagaggccattgggaagttaagagaggctctcaaactttgagggtcataagacttcccctccctgcagggtgctgtttcctgaaggaaaatattcaattactattttctttatttaaaaaaaaaaaaaaaaaaa

SEQ ID NO: 117980 - DNA, 945 bp, Homo Sapiens
ccaagcgcggggccggagcggccttcccggagtcctttgcgcggcacctggcgacaaaatggctgcccgagggagacgggcggagcctcagggccgggaggctccgggccccgcgggcggtggcggtggcgggagccgttgggctgagtcgggatcggggacgtcgcccgagagcggggacgaggaggtgtcgggcgcgggttcgagcccggtgtcgggcggcgtgaacttgttcgccaacgacggcagcttcctggagctgttcaagcggaagatggaggaggagcagcggcagcggcaggaggagccgcccccgggtccgcagcgacccgaccagtcggccgccgccgctggccccggggatccgaagaggaagggcggtccgggctccacacttagcttcgtgggcaaacgcagaggcgggaacaaactagccctcaagacgggaatagtagccaagaagcagaagacggaggatgaggtattaacaagtaaaggtgacgcgtgggccaagtacatggcagaagtgaaaaagtacaaagctcaccagtgcggtgacgatgataaaactcggcccctggtgaaatgacgcccctcccccacctgcccatggcctgggactctctgcgatgtacataactatttaatgcagcggcagcggcgacagccttccctgagaggacttaaaagcagaaggaaaccgagatgcttcccgcagccgtggacgattctccaggactctttttttaccttgagcacttgcctcgtgagacttcatagaacagtggtttactgtcccccccttctcacctcctcattctctctggctctttctgtcttcctcttctcaccctcctccctccccttagccatcacttctgggaagtaaagaacttgacttagtgccggaaaaaaaaaaaaaaaaaaaaaaaaaaaaaaaaaaaa

SEQ ID NO: 117981 - DNA, 1000 bp, Homo Sapiens
cctggaccctaggtcacggcaatcaaccccctgctgtggttcccgaaccccaaggcccgatgggtcccgcgggggtcgcggcgaggccagggcgctttttcggcgtctacctgctctactgcctgaacccccggtaccggggccgcgtctacgtggggttcactgtcaacactgctcgtcgggtccagcagcacaatgggggccgcaaaaaaggcggggcctggcggaccagcgggcgagggccctgggagatggtgctcgtcgtgcacggcttcccgtcctccgtggccgcccttcggtttgagtgggcttggcagcacccgcacgcctcgcgccgcctggcgcacgtggggcctcgcctgcgaggagagacagccttcgctttccacctgcgcgtgctggcgcacatgctgcgcgcaccgccctgggctcgcctcccgctcacgctgcgctgggtgcgcccagacctccgccaggacctctgcctcccgccgccgccgcacgtgcctctggccttcgggcctccaccgccccaggccccggccccaaggcgccgcgcaggtccctttgatgacgcggagcctgagccagaccagggggatccaggggcctgctgctccctgtgcgcccagaccatccaggatgaagaggggcccttgtgttgcccccaccctggctgcctgctaagggcccatgtgatctgcctggcagaggagtttcttcaggaagaaccagggcagcttctgcccctagagggccaatgcccttgctgtgagaagtcactgctttggggagacctgatctggctgtgccagatggacactgagaaagaagtagaagactcagaattagaagaggcacactggacagacctgctggagacctgatcctcagtgtccttaccccctcctacctcttttctgtgccacctgctgtgggtccagcaggtttttacttgagtacaataaaaagtctgagtcaaaaaaaaaaaaaaaaaaaa

SEQ ID NO: 117982 - DNA, 1000 bp, Homo Sapiens
tctcagagctgcgcagcatggcagggctgcaggcgggcttgctgctccacgtggtggaagagccctgcacaatgcacaaggcccacggtgatgagtgccacatttgagactgctcaggagcctggacccagctgatgcagctccttgtccttcctgagcgtcttcactgacagtggcctgagagacggcaggagcagaaagacttggagatggaccccaccgactgcacaccacccaagtacatcctgctagggaccctggaacagccactgtgtcccctgcaaccccagaacggtgactaaaagcccctgaaagtgctcaccgtgagcggctggtacctgtcccctgggaactgcaagatgcacaggaccttgtgtacctgtttgtgatcacagccgaggaccagcgaggtagcattaccacatccacacagggcttttaccataaccgccccagtactggaacgaggagctgcagatgatgagggacctacccaacaagaaccaacctgagcagctgcttcaagaaaaagccatgttcaaggtgcctgaatcccctggtaagtgagtgacagcctcacagcctcaggcccacctggctcctgctggaaggttttcttgtgctcgggagagaagtgagggaagccggcagtcccagccctgtcaggtgccctgaaggcccgtcaggtttgccctgcaaggccttctagcattctgcttcctgggagaccatcccccacctttctccggcctctgagactttgagtccttgggaggagaaggccctccttgctatctgggctgagtggccagggccatccagcttcccaccctccactgactgccatggggccctcccctgagcacatggtgcccaactgtagcccttctagggcaggggctcattggcagcacttgcagcttgctggcacttaaaagtcattagtgcggttactgagagaaatgaggaaaaaataattgttaaaaaaaaaaaaaaaaaa

SEQ ID NO: 117983 - DNA, 1000 bp, Homo Sapiens
aaatcaggaactccaacttctacacggtggcagtgaccagcctgtccagccagattcagtacatgaacacagtggtcagtacatatgtgactactaacgtctcccttattccacctcggagtgagcaactggtgaattttaccgggaaggccgagatgggaggaccgttttcctatgtgtacttcttctgcacggtacctgagatcctggtgcacaacatagtgatcttcatgcgaacttcagtgaagatttcatacattggcctcatgacccagagctccttggagacacatcactatgtggattgtggaggaaattccacagctatttaacaactgctattggttcttccacacagcgcctgtagaagagagcacagcatatgttcccaaggcctgagttctggacctacccccacgtggtgtaagcagaggaggaattggttcacttaactcccagcaaacatcctcctgccacttaggaggaaacacctccctatggtaccatttatgtttctcagaaccagcagaatcagtgcctagcctgtgcccagcaaatagttggcactcaataaagatttgcagaatttaatacagatcttttcagctgttcttagggcattataaatggaaatcataacgtggttctaggttatcaaaccatggagtgatgtggagctaggattgtgagtgacctgcaggccattatcagtgcctcatctgtgcagaagtggcagcagagagggaccatccaaatacctaagagaaaacagacctagtcaggatatgaatttgtttcagctgttcccaaaggcctgggagctttttgaaaagaaagaaaaaagtgtgttggcttttttttttttttagaaagttagaattgtttttaccaagagtctatgtggggcttgattcacccttcatccattggctggaacatggattggggatttgatagaaaaataaaccctgcttttgattcaaaaaaaaaaaaaaaaaaa

SEQ ID NO: 117984 - DNA, 1000 bp, Homo Sapiens
gtttgagcaactgaactggaaacaagatgcaggaccccaacgcagacactgaatggaatgacatcttacgcaaaaagggtatcttaccccccaaggaaagtctgaaagaattggaagaggaggcagaagaggagcagcgcatcctccagcagtcagtggtgaaaacatatgaagatatgactttggaagagctggaggatcatgaagacgagtttaatgaggaggatgaacgtgctattgaaatgtacagacggcggagactggctgagtggaaagcaactaaactgaagaataaattcggagaagttttggagatctcagggaaggattatgttcaagaagttaccaaagctggcgagggcttgtgggtcatcttgcacctttacaaacaaggaattcccctctgtgccctgataaatcagcacctcagtggacttgccaggaagtttcctgatgtcaaatttatcaaagccatttcaacaacctgcatacccaattatcctgataggaatctgcccacgatatttgtttacctggaaggagatatcaaggctcagtttattggtcctctggtgtttggcggcatgaacctgacaagagatgagttggaatggaaactgtctgaatctggagcaattatgacagacctggaggaaaaccctaagaagccgattgaagacgtgttgctgtcctcagtgcggcgctctgtcctcatgaagagggacagcgattccgagggtgactgaggctacagcttctatcacatgccgaactttcttgtgacaaattgtctggattttttaaaaaaggaaaaagcaagaatgaatccttgtggtttttagttttgtataaattatgtttcaaatctttacattttggaaataatcattgctggagattctgttaaatattttggaactctttttttttttaaattatagtatttcctctaaaaaaaattaaaaccagccatttgtatggcaaatgtcaaaaaaaaaaa

SEQ ID NO: 117985 - DNA, 1000 bp, Homo Sapiens
cttcagccatatcccagaggcatccttcctggaggaagaggatgaagaccccatcccacccagcaccacgaccaccattgccacctcagaacagagcacgggctcatgtgacaccagccccgacaccgtctcgccctccctgagccccggcttcgaggacctgtcccatgtccaggctggctccccagccatcaacggccgcagccagacagatgacgaggagatgacgggcgaatagccctgctgcccggtgccttgagggggtctcagggcagcagcatacaaggtggcagcgggtaaccctgccttgttctgtcatccagggctcctttgctgccccgttctgtcacccagggctcctagggggacaaggctctctcccgaggggtgtggaattcctgggggggtctttaattctggctccttccttcctcagaacatctctattctgcaagacccctctgccatgccagggcacgcccattccagctggagtcgtggggctgggcacaggggaatttttccagagctgagcctgacgtctgctctgaagaatgcttagaaggttcccagacaccagagccagatgtcccccaccaccggtcaggacctccttgaggtgcacaagcacggtctcctctgagttcaccccagcccacccccgcacccactaattctgcttttcctgccccttgctccgtaaaagtatcaaatactttctccttggtatctcaaggaggtttctgagataggtagaagtcttgagacggaggctggccatccattcagccctgagcgtgctgagttctgtgtttctctgaatagaggtgtggaacctgaggggccagcaggcctctctgaaggcctccatggagcaaacggagccacctcgggaaagagtttaatggaatatttttgtacccgatgtttacagatgctgttgggaagttatcaataaaaagacaccattactaaaaagggaaaaaaaaaaaaaaaaaaa

SEQ ID NO: 117986 - DNA, 1000 bp, Homo Sapiens
tttggaaactcagagaaacctgaaactatgacttgtcgtctttccaataaccagagatacttgtttctggatggagacagccactatgaaatcgaaattgtacacatttccaccgtgcagatcctcacagaaggcttccctcctggaggaggcaacgcacgggccacaggcatgttcctgcagtatacagtgccggggacggagggtgtgacccagctgaagctgacagtggtggaggacgtgactgtgggcaggaggcaggcggtggcgtggctagtggccatgcacaaggctgccaagctcctctatgaatctcgggaccagtaactctacgtggggctgagcttggagtacgtgtggtcaccaggactgagtcgcttggaacagcagagcctgctccttgcgtaccacagggattaatcctgcttgtgctgggaaatgcaactcactcatgtatttggagaaacaggagtgttcacttatctagtgcaatatgttcacagtttattaatgctttaaacagcttcatgttttagaatttgtgtattgtcaatacttaattgggggtgggagagactgagctacactactgctaaactatttttagcataatatataccatttttatgagttcgcaggtctactagaaggttctggcccatcaatattcatttcatttaattcttccacagaaccagtttgggcagtaggaactcaggcttctggtctgcagtggagcctgttcgcctctaatagccagtttacagcacttgccttagcctgtttcacagacttgtccacttaccttgtcactaatttggggcttctgggctgtgagtgatcctttgatacttcaccaaggggaacgtgggggctttgtgttttgtacttttcactcactatttcactttattaagatgactgtacagcaatttgtatataaagcttatgattaaaaactattttgaacaaaaaaaaaaaaaaaaaaaaaaaaaaaaaa

SEQ ID NO: 117987 - DNA, 1000 bp, Homo Sapiens
tcttcttgccacccaccccctgtttgaggttctgagaaggtcaagggcagccccagcagctggattctcaggctgggcccctcacctggcagagtccatagtggagggggccttggtgatctctcatctagcatggaccctgttctgagacctgacaaagagttttttttcatgccccaaccaccctggcagggagggcctggtctgatctcattttagaggcagttgccccacacatagccccttgaccttcccatcacctcctcatcagggcctgcatttatggagtgcttgctatgtgcccctcatggcaggcccacagcactctgaacaggcacagccctcccatcttcccaatgaggaaacggattcaggaagagccactcagtccacaccccattggaaatgtgggccctcctatctcagggtctctcaggggttccctctcccgctgctcacctgtgtcagggctaggaggcaggggctgcaggctcagcctgacccaggccggccagcatggcagagaggtcctgcatgaacagcttcacctgggggggcccagcacgaagtcacatcccagccccagagtcactgtccagcccccacccctcaacacgcgggggaggccgaaaggtagggcggggactggagatcccctcattaaaagaacagtgatgatggtggttcccagaggtggtgactgagatcctaaaccgttctgggttttgaaagcctcaggccaaccttcccaactgctgcgtgagcagacaccttcacagcttcctcgctgctgtcacctgcactatccaattagtattttcatttacatcaatcagctttattttcttgtaactggatcagtcatattcattggtttgtgacctactcttatctccgtgggtggctctccttttgttttaattaacttctttatgaatatgaacttaataaataccatggatccattgtaaaaactaaaaaaaaaaaaaaaaaaaaaaaa

SEQ ID NO: 117988 - DNA, 1000 bp, Homo Sapiens
cccagctgccctgcagaagatggccccccagccctgaaagaaaaagaagagccacactacattgaaatctggaaaaaacatctggaagcatacagtggatgtaccctggagctagaagaatccttggaggcttcaacctctcaaatgatgaatttgaatttatgagagttcttgcctgtgtgtctgtattttgggtaaggaggggaggtctgaaaaagactttggggctttttcttctgtttttcatgacaatgtaatttgtgtaactgttgaatctggaaattgatcagcattaaagggcacatgaagcagtgtctgcaggcgttcagtgctgcggagcctgttaaaggtcactcagatgtgcaggtgttaatcttctctaaaagcctggtgatacagctctggctttctgagcacactacggatctggaaaatactggaaaatgtgatacttagaatactttggctgctaaggaaacttcctctccattgcagaatagctgagccaagtgagtgagtttgcagaaagcaggtggtgagctcctgcctgctggaggttgccatggagggccattcctgcccggcaacagcaccgtcctgcagggagccacttggcagaagggtgcagggctgctggtgtcagagcaagagggctacagggaaagggccctttctcaggggatgtagcttttttaaaagatttgggaacacttggaggatttgctaaaatgagcctcagaaggaaaattggttttctaacctgtgactttttgaaatgaattattcctttcagtctttatttttcaaagaaacaatgtgtattgaagtacctagatttgtttgataatcaacaaatctttcctttttcaatgaacatattctgaatgtggtttctgtcttagaccaggaggacagagtttgctttcatattttccctgtaagtaagagggcttatttattttaaataaagagtaattattaaaaaaaaaaaaaaaaaaaa

SEQ ID NO: 117989 - DNA, 1000 bp, Homo Sapiens
ccctcctgggcccacgaggcctctgacatcatcttcagctaagttgccgaagtccctctccagccctggaggcccctccaagccaaagaagtccaagtcgggccaggatccccagcaggagcaggagcaggagcgggagcgggatccccagcaggagcaggagcgggagcggcccgtggaccgggagcccgtggaccgggagccggtggtgtgccaccccgacctggaggagcggctgcaggcctggccagcggagctgcctgatgagttctttgagctgacggtggacgacgtgagaagacgcttggcccagctcaagagtgagcggaagcgcctggaagaagcccccttggtgaccaaggccttcagggaggcgcagataaaggagaagctggagcgctacccaaaggtggctctgagggtcctgttccccgaccgctacgtcctacagggcttcttccgccccagcgagacagtgggggacttgcgagacttcgtgaggagccacctggggaaccccgagctgtcattttacctgttcatcacccctccaaaaacagtcctggacgaccacacgcagaccctctttcaggcgaacctcttcccggccgctctggtgcacttgggagccgaggagccggcaggtgtctacctggagcctggcctgctggagcatgccatctccccatctgcggccgacgtgctggtggccaggtacatgtccagggccgccgggtccccttccccattgccagcccctgaccctgcacctaagtctgagccagctgctgaggagggggcgctggtcccccctgagcccatcccagggacggcccagcccgtgaagaggagcctgggcaaggtgcccaagtggctgaagctgccggccagcaagaggtgagagctgccagcctgaggtgcccactccgccagccacaggaccacctcctctgccagcaggaataaagacttgtgcatccctcaaaaaaaaaaaaaaaaa

SEQ ID NO: 117990 - DNA, 1000 bp, Homo Sapiens
ggaaccgagggcacacgggactctagcctcatccccaggacccccttggctcagagtgtggtgctagaaactggtccccagcccagccccagtactgccacctttacacctacccctgcaagtccccagagggctgcccacgatagaagctgccaagcagggagaacctgtgccaactgtggagtggggaggttgggcctggaccctcaacccctgcaaccttccctagccccctcaatagatgagcaggtcaggctgtggcccttacctcacccgcagttctcgcccagtgctgcagccggctcacctctctccgcttcttgcacatcactggcctgtgtgtgctgcttgctcctgttctgttcgcttgctcccgttccgttcggcttttgctttgcgttagggtgaagaccctagcgtccagctcccctcaacgctatattttgacactaaaaaagaaggtttctaaattgtaggagcaggatggaaatactttgctgcccttgccatcttttaggatgggcccccaggagactgaggtcttcctgggccctcattgctgcttatcgtaccccccatcacctgcacatgggacagaccgggctggagggtgaccttggctgtgtacgtcccagcaaaagagctctggcccgcatctcgctgtgccctgaagggggatgaagggcgatgcctcgcccgaggctttgggctgctgcactgcatgctgggactgctcctactctctgtcccacccctcacccagctgtggtccggctttgggagagtggtgaattgcgctgcccgaactcggagcggagcagggtagggaccgtgtacagcttgataacccttaataaaaagggagtttgaccagaaaaaaaaaaaaaaaaaaaaaaaaaaaaaaaaaaaaaaaaaaaaaaaaaaaaaaaaaaaaaaaaaagaaaaaaaaaaaaaaaaaaagaaaaaaaaaaaaaaaaagaaaaaaaaaaaaaaaaaacct

SEQ ID NO: 117991 - DNA, 1000 bp, Homo Sapiens
cacctggaggaggagaaggagaggcgccgccaggagaagaaacagcgccgggctgagaacctgaaacgccgcctggagaatgagcggaaggcagaggtcgtccaagtgatccgaaaccccgccaagctcaagcgggcaaagaagaagcagctgcgctccattgagaagcgggacaccctggccctgctgcagaagcagccgccccagcagccggcagccaagatctgagctcaggacggcccgaggccttccatggccaacgaccatgtcagacacagcacctcaggccgctgctcagatgcctctgctggagctggcactccaaacccatggctccagaacggggacccccaccccgaccggggctcctcggcctttgaaggcttccaggcaggtctgtgtgggacagaagcccagagggggcctgggacctggcagagatgggggcgggaagagattcagctcccatccctccttcctctccttctccaagtgccttcaaaccaagaactgtacattcttctggttcctcagtgagctggtgactggcaggtgactccctcagcagtgtatgccctttctcagcatcctaggtccatcccaggcctggaggctgacagttgggaatccagcttcccccacaccttcccaaaggctgctctgagcacctccacaccccactgcctctgtccccagcaaactgaatccggttcctctccacttttcaatactgaaagattaaaatggggaggttgcagggagcagagcttttccctagcacccactttcccaaaccagtctctgcagaagccccagagaatctaactcatgcctgtccagtctacagcaaaaatatttattgagtgcctgttgcatacaggcacaatcctaggcaccggcaaatacagacaatagaccaaagtccctgccctcgaggagctttcattctgatggagagaaaacataataaacaagcaaaatgcaaaaaaaaaaaaaaaaa

SEQ ID NO: 117992 - DNA, 1000 bp, Homo Sapiens
gatttctctcaaaagtcccatctgccgtctattgtggtggaatccagtgaggtgaatgaagagagtggggatctccatttgccccatgaggagctgctgctgctcactgatggtgaggaagaggatgctgaggccttcttccaagaccaaagtgaagagccaggctgggcttggagcccacaggaccctagaagtcctttaagaacatttaacgctggactcagctgggggcaggaccaggatgaagaagatgcttgttggattcttgaggacacagcatgtctggaagccaccaaccactgtcccttctgggactcaacaggctcccgtgtttgtagaagtggctttgtggaatattcccatctcctgcctcctaatagctttgagggagctgaagaagaagctgttcaaacgccggcgggtgttgaatcgggagcggcgtctgaggcaccgggtggtcggggctgtgatagaccaagggctgatcacgcggcaccacctcaagaagcgggcgtccagtgcacgtgccaacattacactgtcagggaagaagcgcagaaaactcctccagcagatccggcttgcccagaaagagaagacagccatggaagtggaagccccttcaaagccagccaggactagtgaaccacagctcaaaaggcaaaagaagacaaaagccccccaggatgtagaaatgaaggaccttgaagatgagagctaaacctcttccactagaagattctcaactggagccagccttcagactcagtggttgtttcagaggactttgacaaaagcaaggccccttttcactctccagatttcctcctacctaatggcctactgacctcccctagagggatgtctttgggagggaagaaggtacagaagaaagattggagaagggcctctctagcagtcaactccatttgtaataaagccctagcactctgaaaaaaaaaaaaaaaaaaaaaaaaaaaaaaaaaaaaaaacaaaagag

SEQ ID NO: 117993 - DNA, 1000 bp, Homo Sapiens
acggacctgcactgcggctttgggggccccctggcccgggtggccacctcctcactggaccagacggtgaagctatgggaggtctcctcgggggagctgctgctctccgtcctctttgacgtgtccatcatggcagtgaccatggacctggctgagcaccatatgttctgcgggggcagtgagggctccatcttccaggtcgacctcttcacctggcccggacagagggagaggagcttccacccagagcaggacgccgggaaggtcttcaaagggcacaggaaccaggtgacttgcctgtcagtgtccactgacggcagcgtgctgctctcaggctcccacgacgagaccgtgcgcctctgggacgtgcagagcaagcagtgcatccggacggtggccctcaaaggcccagtcaccaatgccgccatcctgctggcgcccgtcagcatgctgagctcagacttcaggcccagcctgccgctgccccacttcaacaagcacctgctgggcgccgagcacggggacgagccgcgccacgggggcctcactctgcgcctgggcctccaccagcagggctcggagcccagctacctggaccgcacggagcagctgcaggccgtcctgtgcagcaccatggagaagagcgtgctcggcggccaggaccagctgcgcgtccgtgtgacggagctggaggacgaggtgcgcaacctgcgcaagatcaatcgggacctgttcgacttctccacgcgcttcatcacgcggccggccaagtgaggcccggagaccccggcccgaggcgcccaggcctgagccccatgcctcccagcaaccagggcccgcgggtgtggcccccaccagcccaggcctggactctcctcagttctgtgtcgtgttcgggtttttcctctgtgactgggccgtcttggtgtctcgtggcacgcgtcacagtggtgctagtctgtttttaacaaaagaggatgaaaagcccctcctctccggc

SEQ ID NO: 117994 - DNA, 1000 bp, Homo Sapiens
acgaaaaggcagagcccaacagggacaaatcagttgggcctctcccccaggcggacccggaggtgggcacggctgcccatcaaaccaacagacaggaaaaaagcccccaggaccctggggaccccgtccagtacaacaggaccacagatgaggagctgtcagagctggaggacagagtggcagtgacggcctcagaagtccagcaggcagagagcgaggtttcagacattgaatccaggattgcagccctgagggccgcagggctcacggtgaagccctcgggaaagccccggaggaagtcaaacctcccgatatttctccctcgagtggctgggaaacttggcaagagaccagaggacccaaatgcagacccttcaagtgaggccaaggcaatggctgtgccctatcttctgagaagaaagttcagtaattccctgaaaagtcaaggtaaagatgatgattcttttgatcggaaatcagtgtaccgaggctcgctgacacagagaaaccccaacgcgaggaaaggaatggccagccacaccttcgcgaaacctgtggtggcccaccagtcctaacgggacaggacagagagacagagcagccctgcactgttttccctccaccacagccatcctgtccctcattggctctgtgctttccactatacacagtcaccgtcccaatgagaaacaagaaggagcaccctccacatggactcccacctgcaagtggacagcgacattcagtcctgcactgctcacctgggtttactgatgactcctggctgccccaccatcctctctgatctgtgagaaacagctaagctgctgtgacttccctttaggacaatgttgtgtaaatctttgaaggacacaccgaagacctttatactgtgatcttttacccctttcactcttggctttcttatgttgctttcatgaatggaatggaaaaaagatgactcagttaaggcaccaaaaaaaaaaaaaaaaaaaaaaaa

SEQ ID NO: 117995 - DNA, 1000 bp, Homo Sapiens
gccgtgtctgggtgggttatgggatgtgggcatccctgggttcttggaagcagctcttatgctactcatagagatgggattgactttatttttttatagtgcttaattcaccattatgagaaatgcttccagtcacaaaaatgcagcccagctcactctgaggaagaagcaggacttggtacggttttacacaactccttaccattaaactgaatcagaaatccattttctggctgaataaaaagtttggcttgcctgtgtaatgcccactcccttccccctggctccctagtgatgggacatatatgagagagaagtgtttttctatcatagacaccataggggaaagtttggggatgaaggagagcttaaaggtgtttcaattaagttagaaaactgacacaggctgttgagaattctttgccacttttcccaccccaaaacagcatggggcctgacatcttctgccctggtcccctttctcttgatgtggaaagtctgaatgcagtatttatagacttctaaggttttaaaatccagtatcaagaagaaaatcagaaatactggttggtgaaataaagagtttaggcattgttggcctgtcttttttgaagcatgtgtgttatgtgtagttagatatatttcacttatgtgagtcatcatggtgttggtcttgtagcccattatttttcctgtgcttccccagcttcccaaagtagctagttagaacttaaggtaaatatttattcttgggttggtggagtggatattgccagttaggagtcatggatcaattactgattatattgaaagtaaatataatcaattatgtacttttgagctttgcaggttcaatttaggtaaaaatcacattatgaaactgggaaagtctgaaggaatatgggcaaaatatttctcagtaaagcttccatgcttcacccttgacatgattacccttgagtaaaacatgggaatttgtaaaaaaaaaaaaaaaaaaaaa

SEQ ID NO: 117996 - DNA, 822 bp, Homo Sapiens
ggagggggcatggcggatactgtgttgtttgagtttcttcacacggagatggtggctgagctgtgggctcacgaccccgaccccggcccgggggtgagcgccgggctccgtggggaggaagcgggggccaccaagggacagaagatgagcctgtcggtcctggagggtatggggttccgtgtgggccaggctctaggcgagaggctgccccgggagacgctggccttcagggaggagctggatgtcctcaagttcttgtgcaaagacctgtgggtggcggtgttccagaagcagatggacagcctgcgcaccaatcaccaggggacctacgtcctgcaagacaacagcttccccctcctcctcccgatggcctctggcctgcagtatctggaggaagcacccaagttcctggccttcacctgcggcctcctgcgcggcgccctctataccctgggcattgagagcgtggtcaccgcctccgtggcagccctgcccgtctgtaagttccaggtggtgattccgaaatcctaagcctgcctcgcacctgctgagccgcactgctgcccctggcctcaccggcctcaggagacggtggggccgctgcatttcggggtggtcttgggaatcccaggccctaggggtcacatttgctcaggaagtgggtatcaaattgaggtgggggtgtcagaggaggcaaaggggtcccagctgcggtcaggactgtggtgggattcccgcctcggcagcgtcactgcccagtagctgctcaataaaggctgtgtgtgtggaatctgaaaaaaaaaaaaaaaaaaaaaaaaaaaa

SEQ ID NO: 117997 - DNA, 632 bp, Homo Sapiens
gacggtcgccgcgttccatcgtcgcgcggcccttcgggcgcccgagcccgcaatgtcgggccccaacggagacctggggatgccggtggaggcgggagcggaaggcgaggaggacggcttcggggaagcagaatacgctgccatcaactccatgctggaccagatcaactcctgtctggaccacctggaggagaagaatgaccacctccacgcccgcctccaggagctgctggagtccaaccggcagacacgcctggagttccagcagcagctcggggaggcccccagtgatgccagcccctaggctccaagagcccccaaccgggacccaaccctgcctccctgggctaggctctggcctgggcactcaccccctggcttagacaccttctcaagggctggccttcagggacccctggtgggtctgcctgcctgggccacccttcctgcctgggcctccccttggcctacctgggccagcccccaccacctggcatgccctcctggggccaagagtgggcctgcaacccacccacttgcctgcccacccaactcctgggcgctccccactctgcccaggccttgagtgtccacattaaatgggtctcccacaaaaaaaaaaaaaaaaaaaa

SEQ ID NO: 117998 - DNA, 1000 bp, Homo Sapiens
taattatggcaagtaatggtttttatcttaactataagttatttgctcaagggtgtaatggtcattaccaaggcttttagaatgcagtttctcatttgctgtggacatgaccataaaaaaaaatttcccagtaggttttctatctgctacgttgctagcaatcagcttattgggaacagttgattaactgtaatagaaatgcaatacaaataaaatgtgaaccacatgtgatttttctttaaaatcagtgagatttgaaaattctcctagatctcttgaatcatgcaaatttgctttgcctttatattgtaacccttgtgggttgctaataaccaagcagtttgtagtagagttaactcaggctcgttctagggactcattcatgttcactcactgtacactcatctctggaaatgtaaaatttacttttatactattgttatgtagggctgacaggacaactggatcagtttcattaaaaaggtatgtatgcattagaaaagacatttgtatgggtcatttcaaagagggcttatgaggctgtgaaacccagagctcttaacgctgtgaccaaagatggaagttctctataggaagccatagcactcctaatgtttggtgctatgttttcctgaggagatataaaacgtaataatccatgattgttgccatgtgagagttttaaaggttaatcaaaatttctcttcttcagggcaaacttgaagataaatcttttgactccagctctttagaggatctaaagtgaccttgatggacagtggaagaaatcacaacatggaattcctcgaataacaatttattgactttaaataattttgtctaatgctacatatacacaattaaaaaacctttacactatttctagaaagtcagcatgtatttttggctcgaagtttctctagtgttttctgtggaaggaataaaaatttgagtttcaaaaaaaaaaaaaaaaaaaaaaaaaaaaaaaaaaaaaaaaaaa

SEQ ID NO: 117999 - DNA, 1000 bp, Homo Sapiens
tgagagtccgcgaccgatactggatgcacttctgcgggggctccctcatccacccccagtgggtgctgaccgcagcgcactgcgtgggaccggacgtcaaggatctggccgccctcagggtgcaactgcgggagcagcacctctactaccaggaccagctgctgccggtcagcaggatcatcgtgcacccacagttctacaccgcccagatcggagcggacatcgccctgctggagctggaggagccggtgaacgtctccagccacgtccacacggtcaccctgccccctgcctcagagaccttccccccggggatgccgtgctgggtcactggctggggcgatgtggacaatgatgagcgcctcccaccgccatttcctctgaagcaggtgaaggtccccataatggaaaaccacatttgtgacgcaaaataccaccttggcgcctacacgggagacgacgtccgcatcgtccgtgacgacatgctgtgtgccgggaacacccggagggactcatgccagggcgactccggagggcccctggtgtgcaaggtgaatggcacctggctgcaggcgggcgtggtcagctggggcgagggctgtgcccagcccaaccggcctggcatctacacccgtgtcacctactacttggactggatccaccactatgtccccaaaaagccgtgagtcaggcctggggtgtccacctgggtcactggagagccagcccctcctgtccaaaacaccactgcttcctacccaggtggcgactgccccccacaccttccctgccccgtcctgagtgccccttcctgtcctaagccccctgctctcttctgagccccttcccctgtcctgaggacccttccccatcctgagcccccttccctgtcctaagcctgacgcctgcaccgggccctccggccctcccctgcccaggcagctggtggtgggcgctaatcctcctgagtgctggacctcattaaagtgcatggaaatca

SEQ ID NO: 118000 - DNA, 1000 bp, Homo Sapiens
gcaaccacacttggcaagttaaatgtcccaagcaccttgtctcccttcccaagaacaaaccatttctgtgcacatccttggaggcgagatgagctccttgcagagggccagagtaagtgcaagtcatggagtgcaggcagaggggtccatggcttccccagcccagggagggtatcagtatcattcattctctctcccctcactggtatgggttcagagcaatgcctagggcccctctctgctcccctgcctagtggggtggtagtggctacctctcagccccaatagtccctgctcctcttagaatcttcaccaagtggcaggccacctctgggcaggaccacctgcgtctggcacccaggaggtgaggcagacaccatggttaggtgatagggtctgaacccagttggggagacagaggggttcagacttgggaagaatctgtcagtgtgcatggagtgaggtgtgtgtgtgtggatggatgtgcacgtgtgcatgctttttttctttttgccgtgaggacagttgaatttggggcatttttctacaagaagcagtcagccttctctcccccataaggactggctgtaaccttaagcccatcaaagttacttccagcctggagagaacctcaccaaacagctggtgtggcctgagggtggccatggtgggaaatgggcatgagaataaatacctccccaaattcaatctgagcccagcaggagaggatggtagggttgccagggctcagaagtgcaagctgattactcaccccaccctgcctcgccgcacctttcctttgtttccttgggtgaatgcaggagcagcagtggctgcccttcccacctggacagtggtgtgtgtagaaagccagctggatgtttgtggtggggcctcatggtgcctaggaggagataaagatgaggaggtttttccttattgtataaatgaatatttgtatgattaaattaacacacacaccaaaaaaaaaaaaaaaaaa

SEQ ID NO: 118001 - DNA, 1000 bp, Homo Sapiens
ctgaggctcctaggccccctgccacagtgcaccctgaaggagtccctcctgctgacagtgaaagcaaggaggtgggcagcactgaaacaagccaagatggagatgccagctccagtgaaggcgagatgcgggtcatggacgaggacatcatggtagaatcaggtgatgactcatgggatctgatcacatgttactgtcgaaagccctttgcagggcggcccatgattgagtgcagcctgtgtgggacgtggatccacctctcctgtgctaagattaagaagaccaacgtccccgacttcttttattgccagaaatgcaaggaactgaggccagatgcccggcggttaggggggccccccaaatctggagagccctgatggcaccaactttagcctggaacttccaaatgacaacatgatttgggaactgagcctcagggtcctcagcctatcccctggagcttggatactgtctgcacttcaaggcaggaattctcaagggagacttgtttgaaaatgagtgtctcactttcccaccctatccttcctccccactctgtggacttgaaattgaatccattacggttggggatgggaggctgtctgtgtcccgacacataatctctgtctcttggacctgccaccatcactttctgggtcaggattggaattgggatggaatgggacagttgtctataaaactctagtgtaaatattagcactcccctccctcatcttttcttctatttcactccccatttattttcttctacaccggttgtatttttaattttggacttcccctattgggcatggcagctcaaaggtggagtactagagcctggccaagtgaggaaggaaagcagaaaggtgacgattctcactcacctcttttgtttttaataatatcggccgctgtttgtacagacagcctgcgtgttgtaaataaagcagggtgggctctttaaaaaaaaaaaaaaaaaaaaaaaaaaaaaaaaaaa

SEQ ID NO: 118002 - DNA, 794 bp, Homo Sapiens; identical to SEQ ID NO: 25295

SEQ ID NO: 118003 - DNA, 1000 bp, Homo Sapiens
tggtggcccactgtggctgcccgggcgacagtacgcccagggcctgtgttccatagccatctactctcttgagcctttggacttctctccaagcccctgtgggaggcggacagcagtgaccacctccccttcttttggactgcgacctccttccctcctgggagagccctgtgacctgcatgctactcttaactgttctattcaagactgaatagaagtatttcagtcttgcagaggaggaaatgctcagagctccgaggtgcggctgtggtcgagaaccgggtgctgggccgggcgcgggggctcacgcctgtaatcccagcactttgggaggccgaggtgggaggatcgcttgagcccaggagtctgagaccagcctcggcaacatgccaagaccccgtctctatttttaaaaaagaaaaagaaccgacttctgaatcgcagctccactcatgactaatacctcattatttcagctgtctgcacctaattccccacttgcacggcagtgtagacaataaccatagctcacactcactgagcacctactgggtaccaggcaccattctcagtgtttcacctggatcaactaatgcgtccctcacctcagccctctgaagtgacagctgctattattttcattacacagatgaaaaagctgaggccagaatcgtgaagtcacttgctcaaggtcaggcagcttaggaaggggcagatcgggggcttgaacccaggtggtcaggctctggagcccacaattgtcttacccactatgcccctctctagtcatggtccccaagaggggcttggagacccacttagcaggtgaaagcaatggcagccttccttatttgattatgcacctaagaataaatggtatttgggcatgtattcccaatatgtgtatatttatttataaatatatacagatactattatctgtatgttagtaataaagcttaaattattccattttaaaattaaaaaaaaaaaaaaaaaa

SEQ ID NO: 118004 - DNA, 1000 bp, Homo Sapiens
ttcacgtgcaggtctaatttcaaagggctagagttagtactacttaccagatgtaattatgttttggaaatgtacatattcaaacagaagtgcctcattttagaaatgagtagtgctgatggcactggcacattacagtggtgtcttgtttaatactcattggtatattccagtagctatctctctcagttggtttttgatagaacagaggccagcaaactttctttgtaaaaggctggttagtaaattattgcaggccacctgtgtctttgtcatacattcttcttgctgttgtttagtttgttttttttcaaacaaccctctaaaaatgtaaaaaccatgtttagcttgcagctgtacaaaaactgcccaccagccagatgtgaccctcaggccatcatttgccaatcactgagaattagtttttgttgttgttgttgttgttgtttttgagacagagtctctctctgttgcccaggctggagtgcagtggcgcaatctcagctcactgcaacctccgcctcccgggttcaagcagttctgtctcagccttctgagtagctgggactacaggtgcatgccaccacaccctgctaatttttgtatttttagtagagacgggggttccaccatattggtcaggcttatcttgaactcctgacctcaggtgatccacctgcctctgcctcccaaagtgctgagattacaggcataagccagtgcacccagccgagaattagtatttttatgtatggttaaaccttggcgtctagccatattttatgtcataatacaatggatttgtgaagagcagattccatgagtaactctgacaggtattttagatcatgatctcaacaatattcttccaaaatggcatacatcttttgtacaaagaacttgaaatgtaaatactgtgtttgtgctgtaagagttgtgtatttcaaaaactgaaatctcataaaaagttaaatttttgtctgaaaaaaaaaaaaaaaaa

SEQ ID NO: 118005 - DNA, 1000 bp, Homo Sapiens
gaggcggagcgcgaggcgctgctggccgcccttggctacaagaacgtgaagaagcagcccacgggcctgagcaaggaggacttcgcggaggtctgcaagcgggaaggaggcgaccccgaggagaagggcgtggaccggctgctggggctggggagcgcaagtggctccgtgggccgcgtggcgatgtcccgagaggacaaggaggccgccaaactggggctgtctgtgttcacgcatcaccgcgtagagagcggcgggcccgggacctcggcagcctcggccaggaggaagccgcgggcggaggatcagacggaaagcagttgtgagagccacaggaaaagcaagaaggagaagaagaaaaagaaaaagaggaaacacaagaaagagaagaagaagaaagacaaagagcacaggcggccagctgaggccacctcctctcccacatctcctgagaggcccaggcaccaccaccatgactccgactccaactccccctgctgtaagaggaggaagcggggacacagtggggacaggaggagcccgtctcgcaggtggcatgacagaggctctgaggcctgatggctggaccctgctcactgctgttgtgggaccctgaaccctcccttcaccttgcttgcctcctgcctcggaagctccttgggtgtgggtgaagcccgaggctgctcctgtggaagtggctctgggcaccagcctgtggggctaaagacttgacagctagctctggagcagccggcttcctggaaaacctccaggtttcgcataccagggatggcccctggcttggcctgcgaaggtgaacctgcccagatttatcagtagaggctggactccctctgtgtcctgcccatggttgcagcagccatgggcctatgagcggtctaactgtggccaagtatggtgacctctatttttctttatattgactctttgtatttcaataaatatattttaaaaggaaggtaaaaaaaaaaaaaaaaaa

SEQ ID NO: 118006 - DNA, 1000 bp, Homo Sapiens
agtctctgcgagtacctgaatgcttactctgggaggaagtaccaggcagaccggcttcagagtgactttgcagccctcctgactgggcccttgcagagaaacccactgtgtaacttgctgtcatttacttacaaactggatccagggggtcagtccttcccgttctgtgctagattgctgtataaggacctcacagcaactcttcccactgacgtcaccgtgacatgtcaaggagtggaagtattatccacttcatgggaggagcaacgagcatctcatgaaactctgttctgtacgaagcccttgcatcaagtgtttgcctcatttacaagaaaaggagaaaagttggatatgagtctggtctcctaatagattgttttcactgcactgggagcacatcagagaaataaatcccccctcccctgccaggtgaaaggaaatattgcactttctgttctcatgactaaggggacaggagttccagaagaacctttcaagatgatcaggaacaccaggacgagggccgtctcacctcactcggaccacatggagacctcccttcaaaatgggagccatgtcctgccccaccaagccctgtctgaagtggagcttccccgcctgtgctccctccacagtcccggaaagcccagcggcaaaggcagctttgtcccagctctgccaccctcctgctcacagtggtcagggcccctcaggggcaaggacggcagggattggaacgagggctctggaaggactgttcagccctatgcctaagacccctatgctggggacactacaggcacacagaggaatagcagggccaccctcagagctcacacatccacgaacaaatgaaggctgaggaggtttctaaacctaaagtccatgagtgtgcacttcaatccaggaaggtcgggacttccttcagtttcaaaaaataaattctcccttccggtttggactgttaaaaaaaaaaaaaaaaaaaaaaaaaaaaaaaaaa

SEQ ID NO: 118007 - DNA, 1000 bp, Homo Sapiens
gctgacttggagaaccccagatctctggggcccagccaggcagggtgtgggggcagctgtgccaatctacctcacaggcccaccccctgccgggcatgccgtgggatcatgggcagggaaggctctgggggtcggagacaccgctgcttagcacccccagccagaacaccctgagggtctcggggctctggagagagtggggcgggaggaagaattggcaccttcctagggaaggagacgagcgcttcgccttgattctccgagaagcctccgagaagtgctttaagtgtgtttgcatgcgccaggcggtgggcagcgggggcctgtccagccctctcccgccatccttccccaagtgacgtccactgccttgtcaccagcgacctgcctgtcatgcccaccccctgaggaagcatggggaccctaacaccctggtgccctgcaccagacaggccgtggtcaggcccaggccaccggccgggttctgccacagcttcccacgtgcttgctgacatgcgtgtgcctgtgtgtggtgtctgttgctgtgtcgtgaaactgtgaccatcactcagtccaaacaagtgagtggccctcgaggccacagttatgcaactttcagtgtgtgtcataacgacgtcactgctttttaaactcgataactctttattttagtaaaatgcccaggagtcctggaagctacgcggacttgcagaggttttattttttggccttagaatctgcagaaattaggaggcaccgagcccagcgcagcagcctcggacccggattgcgtttgccttagcggatatgtttatacagatgaatataaaatgtttttttctttgggctttttgcttcttttttcccccccttctcaccttcccttctccccgaccccaccccccaaaaaagctacttcttcattccgtggtacgattattttttttaactaaaggaagataaaattctatattcttaaaaaaaaaaaaaaaaaaaaaaa

SEQ ID NO: 118008 - DNA, 1000 bp, Homo Sapiens
tgtcactgagaagctttacaatggatgcttttgaaacaagtatcagcaaaaggatttgttttcactctgggaggagagggtggagaaagcacttgctttcatcctctggcatcggaaactcccctatgcacttgaagatggtttaaaagattaaagaaacgattaagagaaaaggttggaagctttatactaaatgggctccttcatggtgacgccccgtcaaccacaatcaagaactgaggcctgaggctggttgtacaatgcccacgcctgcctggctgctttcacctgggagtgctttcgatgtgggcacctgggcttcctagggctgcttctgagtggttctttcacgtgttgtgtccatagctttagtcttcctaaataagatccacccacacctaagtcacagaatttctaagttccccaactactctcacacccttttaaagataaagtatgttgtaaccaggatgtcttaaatgattctttgtgtaccttttctgtcatattcagaaaccgttttgtgcctgctgggagtaattcctttagcaattaagtatttggtagctgaataaggggtcagaacttctgaaaccagagatctgtaatcatctctattggcctggggtgcctgtgctataaatgagtttcttcacatgaaaaacacagccagcccaagatgacttatctgggtttaggattcaatagtattcactaactgcttattacatgagcaatttcatcaaatctccaaactcttaaaggatgctttcggaaaacacgctgtatacctagatgatgactaaatgcaaaatccttgggctttggtttttttctagtaaggattttaaataactgccgacttcaaaagtgttcttaaaacgaaagataatgttaagaaaaatttgaaagctttggaaaaccaaatttgtaatatcattgtattttttattaaaagttttgtaataaatttctaaattataaaaaaaaaaaaaaaaaa

SEQ ID NO: 118009 - DNA, 1000 bp, Homo Sapiens
gctgaagacgaggaggtagtggccacagctggggacaggctgacggagttccgaaagggcgcgcagtcactgcctgggccgtgcgctgcagctcgagagggccgattggagcgcagggagtgcggcctggctgcgccccgcttctccttcaatgacccttccggatcggaagaagctgacttcctctcggcggagacaggcagccctaggttgaccatgcactacccatgcttggagaaaccgcgcatctggtctctggcgcacaccgcgacagccagcgctgttgaaggtgcacccccagcccggcctaggccacgaagtcctgagtgccgtatgattcctggacagcctcctgcctctgcccggcgactctcagtccccagagactccgcgtgcgacgagtcttcctgcatacccaaagcctttggaaaccccaagtttgccctgcagggactaccgctgaactgtgcgccgtgcccgcggaggagcgagcctgtagtgcagtgccagtacccgtctggagcagaagcaggttagcgcaatggctgcgatttgcgaaagaatcttggaaatgggccccacgtttcgaattcatctccaggttaagaagctgccagaccttgccagggaccaggagctctcactttgcctaagagacagacacacagaaaccctcctagcagctgtccttgcacgcagagctggggtggtgggccgacttgaaccttagcagtccccacgggagatggcagggcaccttggggaaggccaagtgggaggctgggaggctgccccacccaccgactctaccaagtctctcttcctcctgtggattcagcaaggcttcctctcctgctcacccctgtctctcacctccaccaaccccactcactttgtaacttcatcactgacccggccaataaggaccctgtgcgtcttctccccctcctaagcccttgtgtccttaaaaataatcagtccgaacccatgtaaaaaaaaa

SEQ ID NO: 118010 - DNA, 787 bp, Homo Sapiens
gtctgaaggccgaggccaagatggcggtgctgtcagctcctggcctgcgcggcttccggatccttggtctgcgctccagcgtgggcctggctgtgcaggcacgaggtgtccatcagagcgtggccaccgatggcccaagcagcacccagcctgccctgccaaaggccagagccgtggctcccaaacccagcagccggggcgagtatgtggtggccaagctggatgacctcgtcaactgggcccgccggagttctctgtggcccatgaccttcggcctggcctgctgcgccgtggagatgatgcacatggcagcaccccgctacgacatggaccgctttggcgtggtcttccgcgccagcccgcgccagtccgacgtcatgatcgtggccggcacactcaccaacaagatggccccagcgcttcgcaaggtctacgaccagatgccggagccgcgctacgtggtctccatggggagctgcgccaacggaggaggctactaccactattcctactcggtggtgaggggctgcgaccgcatcgtgcccgtggacatctacatcccaggctgcccacctacggccgaggccctgctctacggcatcctgcagctgcagaggaagatcaagcgggagcggaggctgcagatctggtaccgcaggtagcgccgccgccgccgccgccggagcctgtcgccgtcctgtccccagcctgcttgtgtcccgtgaggttgtcaataaacctgccctcgggctgccgcaaaaaaaaaaaaaaaaaaagaaaaaaaaaa

SEQ ID NO: 118011 - DNA, 983 bp, Homo Sapiens
atttttaaaagcaacttctgagaagggcttagaacaaattttttcccggagtgccatttcccaaaggtactcacagaacaatcaggtgtgaccataatggctgcactgagttgtctcttggacagtgtcagaagggacataaagaaggtggacagagaactaaggcaactgagatgcatcgacgaatttagcacacggtgcctgtgcgacttgtatatgcacccctattgctgctgtgacttgcacccatatccgtactgcttgtgctattccaagcgatcacgctcttgcggcctgtgtgatctctacccatgttgcctgtgtgattataagctttactgtctgcgaccatctctcagaagtttggagaggaaagccatcagagccatagaagatgagaagcgagagcttgccaaactgagaagaacaacaaatagaattctggcttcctcctgctgtagcagtaacattttaggatcggtgaatgtatgcggttttgaacccgatcaagtcaaagttcgagtgaaggatggaaaggtatgtgtgtcggctgagcgggagaacaggtacgactgccttggatcgaaaaagtacagctacatgaacatctgcaaagagttcagcttgccgccctgtgtggatgagaaggatgtaacatactcctatgggctcggcagctgtgtcaagatcgagtctccttgctacccttgcacttctccttgcagcccgtgcagcccgtgcaacccctgcaacccctgcagcccctgcaacccgtgcagcccatatgatccttgcaacccgtgttatccctgtggaagccgattttcctgtaggaagatgattttgtaaagtgcgcataggaacccattacttaatagaagtcagttactccagccaggcagctctcccaatgtttctcctctccttcccatggcccctgttgttgaagtacgtaggaaactgaatacataactgcaatctgc

SEQ ID NO: 118012 - DNA, 1000 bp, Homo Sapiens
gacaagatcaaggaggtcccccgcccgaggaagcggctgacggaactgctgcttcgaacggccacagagaagccagggccggcggaagctgcccgccaggcatcggcctcccgtgcctggggcctccgctttttccgaagcccccagcaggtgctgccctcaccagatgggcggcgggcagcaggtgtccgcctagcagtcactagactggagggtgtcgatgaggccacccgtgcagtgcccacgggagacatggaagacctcccttgtgggctggtgctcagcagcattgggtataagagccgccctgtcgacccaagcgtgccctttgactccaagcttggggtcatccccaatgtggagggccgggttatggatgtgccaggcctctactgcagcggctgggtgaagagaggacctacaggtgtcatagccacaaccatgactgacagcttcctcaccggccagatgctgctgcaggacctgaaggctgggttgctcccctctggccccaggcctggctacgcagccatccaggccctgctcagcagccgaggggtccggccagtctctttctcagactgggagaagctggatgccgaggaggtggcccggggccagggcacggggaagcccagggagaagctggtggatcctcaggagatgctgcgcctcctgggccactgagcccagccccagccccggcccccagcagggaagggatgagtgttgggaggggaagggctgggtccgtctgagtgggactttgcacctctgctgatcccggccggccctggcttggaggcttggctgctcttccagcgtctctcctccctcctggggaaggtcgcccttgcgcgcaaggttttagctttcagcaactgaggtaaccttagggacaggtggaggtgtgggccgatctaaccccttacccatctctctactgctggactgtggagggtcaccaggttgggaacatgctggaaataaaacagctgca

SEQ ID NO: 118013 - DNA, 1000 bp, Homo Sapiens
ccaagtgactctagtcctccgttcaaggaacttctacttgcagaaaagtgggctaaaatgaacaagctcccctttccaaagattgatccttatgtgtttgatcgggaagggctgaaggagtgctatgtctttaaacccaagaatcctgatatggagaaagattgcccaaccatcatccactttgttctggccaacatcaacttcagaaagtacaaggctccaggtgttccaagggaaactgaggaagagaaagaaatcgctgactttgatatttttgatgacccagaatcaccattttcaaccttcaattttcaatatccaaatcaagcattcaaaagactacatgatcttatgcacttcaatactctgaacaacattgatgtgataaaagaagccatggttgaaagcattgaatatagaagacagaatccatctcgttgctctgtttcccttagtaatgttgaggcaagaagatttttcaacaaggagtttctaagtaaacccaaagcatagttcatgtactggaaatggcagcagtttctgatgctgaggcagtttgcaatcccatgacaactggatttaaaagtacagtacagatagtcgtactgatcatgagagactggctgatactcaaagttgcagttacttagctgcatgagaataatactattataagttaggtgacaaatgatgttgattatgtaaggatatacttagctacattttcagtcagtatgaacttcctgatacaaatgtagggatatatactgtatttttaaacatttctcaccaactttcttatgtgtgttctttttaaaaattttttttcttttaaaatatttaacagttcaatctcaataagacctcgcattatgtatgaatgttattcactgactagatttattcataccatgagacaacactatttttatttatatatgcatatatatacatacatgaaataaatacatcaatataaaaataaaaaaaaacggaattc

SEQ ID NO: 118014 - DNA, 1000 bp, Homo Sapiens
aaaaggttattattgacatcccaatattttgtcttggtgggcttactcataagtccaaacattttattctcaacaggtgtaaaacaggcagagcattctaaaaccacatggtagtgctttggtggaggactgcttccacttagaaacaaactctgagaagtaggctaagagaagacaagagggccgggcgcggtgactcacgcctataatcccagcactttgggaggccgagatgggtgaatcatgaggtcaggagttcgagaccagcctaaacaacatagtgaaaccctgtctctattaaaaatgcaaaaaattagccgggcgtggtgggcacccgtaatcccagctactcaggaggctgaggcaggagaattgcttgaacccaggaagcagaggttgcagtaagctgagatcccaccattgcactccagcctgggcaacagagtgagactccatctcaaaaaaaaaaagagagagagatgaaaagagtaggaaaatgagaaatcaccttcgttgaatcttaaatagttacatttttttctttttaacactaaaaatacaattcaaatttattagctctactacttgaatgattttggaattttatgtcatgctaaggtatgtgttacatatggccaagtggaaaatatatctgaagaggggctttcatacaaatagactgttcataatttatgtaaattttattttaataaaatcagttttttgtttaaaaaccttgtttcactgtcacatatgaaaaaaatactgcattgatatataattatttcatgttacataataacccaaaacaaataattacttgaatatgtttgtagagatactatttaatttattcatataaatgtgcagaaagattccaaaggagaatatatatcttgtgaaaatatggagatttgaaaatttgacatgatgcaaatagactgatacataatttggaaaggttctttacatggcagaatacatgtatgaatattaaagt

SEQ ID NO: 118015 - DNA, 1000 bp, Homo Sapiens
tgggctccctgtggccggcgcatcctcagtggtggctttgacttcgcgctgcacctaacagaccttgaaacaggaacccagctatttagtggtcgaagtgactttagaatcactaccttgaaattccatccaaaagaccacaacatctttttatgtggaggcttcagctctgaaatgaaagcttgggatataaggactggcaaggtgatgagaagctacaaggcgaccatccagcagaccttggacatcctgttcctccgggaaggctccgagttcctgagcagcacagacgcttccacccgggactcagctgaccgcaccattattgcctgggatttccggacctctgccaaaatctccaaccagattttccacgagaggttcacctgccccagcctcgccttgcacccgagagagcccgtgttcctggcacagaccaatggcaactacctggcccttttctccactgtgtggccctaccggatgatcagacggcggcgctatgaagggcacaaggtggagggctactcagtgggctgcgagtgctccccaggcggtgacttgctggtgacgggcagcgccgatggccgggtcctgatgtacagcttccgcacagccagccgagcatgcacactgcaggggcacacacaggcctgtgtcggcaccacctatcaccccgtgctgccctccgtcctcgccacctgctcctggggaggggacatgaagatctggcactgagctttttgtcactgaaccttcccgatgccagctgggctcttggactcccctcttcctcaagggtagatgagaggaacgagcacagaggttggctgtgggtcctgggtaccaccttctgagcctcagtttcctcatctgtaaagtggggagaaaagtctgtttgcctcaggagtgtgaggactacactagtgaaagcgcctggcgggcagccggcgatgcccaataaatgtgtgttttgctgtttgttaagtgatttcagcaa

SEQ ID NO: 118016 - DNA, 1000 bp, Homo Sapiens
gagcccagcttctgctcaatcttcaacatgcccacctgcgtcctgcactgcttgtcgccctgcctggcctggagcttcctcaaggccggcttcgcccgccaaggagccaaggagaagcagctgttaaaggagggcaacgctttcaacgtgtcatccttcgtactccgggccatgatgagcggccagtactggcccgagggcgacgaggtctaccacgccgagctcaccgtgcccgtcctgcttgtccacggcatgcacgataagtttgtgccggtggaggaagaccagcgcatggccgagatcctgctcctggcattcctgaagctcatcgacgagggcagccacatggtgatgctggaatgccctgagacggtcaacacgctgctccacgaattcctgctctgggagcccgagccctcgcccaaggctctaccggagccactgccggcgcctccagaagacaagaagtagccgctgggccggcggggcatcgcttggtgagcacagccgcagcaggaggaggcccgagcctgcgccaggtctgcagcgcagaccacctgggcgggccgttcgctccggtgggcggggccaggtcagggagacgcccccaggctgcctgggcggggcgtggcatccgagggagcccagcggacattccgctctccgcttccgtcccgcggggcccatcggcgttttggggccgcagccgggaccctcacggaagatgaccttgtacagaagctctccctcaccttccccccaacgccacggccaaggcaggccccccaccccgctgtcttccgtgtcagccgtgcttgatcctgggacccacgagccccacagggaccctcgaggccccatcccgttatccgagacccttcctaccccccattcctcggcgctgggagctatttttgcccaagggggggggatgggggggctggcgccaccgaacctgcacatctcaacttgtaactcaataaacagaagtgacaatcgg

SEQ ID NO: 118017 - DNA, 1000 bp, Homo Sapiens
cctagtctcctgtggcgaggaccgactctggaaggtgttgggccttccaaaatgcaatgtgcttctcacgggatttggccacactgactggctttcagactgctgcttccatcccagtggcgacaaattggctacttcaagtggtgacactacagttaaattatgggatctatgtaaaggcgattgcattttgacctttgaaggacacagccgcgcagtgtggtcctgcacatggcactcctgcggcaattttgtggcttcctcctcactggataaaactagcaaaatttgggatgttaatagtgaaagatgcagatgtactttgtatggacatacagattctgtgaacagcattgagttttttcctttctccaatactcttctcacaagctctgcagacaagaccctgtctatatgggatgcaagaacaggtatatgtgagcagtcactttatggtcacatgcattctatcaatgatgccatttttgatcccaggggtcacatgatagcatcctgtgatgcctgtggggttacaaagctgtgggactttcggaagctgttaccaattgtgtccatcgatataggtccaagtcctggcaatgaggtgaattttgattcatcaggtcgagttttagctcaggcaagtggcaatggtgttatccatttgctagatcttaaatctggggagattcacaaattgatgggccacgaaaacgaggcacacacggttgtgttttctcacgacggggagattctcttttctggaggctctgacggcacagttcgaacgtggtcttgaccgtcagcacatcccgctgcagagggcattccctttaaggcttgaaaatgcctcctgtagtcccaaaccagcaaagaactggttaaatgtgccagcaggtaacatttacagtctgctttaaaacatgctttggacatatattttagtgctcatactgttactaataaaaaaataactttatgctcaaaaaaaaaaaaaaaa

SEQ ID NO: 118018 - DNA, 1000 bp, Homo Sapiens
gtgggatagatttagcttttccacatcatgagaacgaaattgcacagtgcgaagtctttcatcagtgcgagcagtggggaaattattttctgcattctgggcatttgcacgccaaaggcaaagaagaaaaaatgtccaaatcattaaagaactacattactattaaggactttctgaagaccttttcccccgatgtcttccggttcttctgcctgcggagcagctaccgctcagccatcgactacagtgacagcgccatgctccaagctcagcagctgctcctggggctgggctctttcctggaggacgcacgtgcctacatgaaggggcagctggcctgcggctccgtcagggaagcgatgctgtgggagaggctctccagcaccaagagggccgtgaaggcggccttggcagatgattttgacacacccagggtggttgatgccatcctgggccttgcacaccacgggaatggacagctcagggcgtccctgaaggaacctgaagggccgagaagtcctgctgtgtttggtgccatcatctcttactttgaacagttttttgaaactgttggaatttctctggcaaatcaacagtacgtttcaggagacggcagcgaggctaccttgcatggtgtggtggacgagctggtgcggttccggcagaaggtccggcagtttgcgctggccatgcccgaggccacgggggacgcccggcggcagcagctcctagaaaggcagcccctgctggaagcatgcgacaccctgcgccggggcctgactgcccacggcatcaacatcaaggacagaagcagtacaacatccacgtgggaactgctggatcaaaggacaaaagaccaaaaatcagcgggctgaggatggagcacagccatgaacctgctcacgacaagacgcacccatgcttctcagggtcaaggctttatgttaaagcttcctgtcggggctgctaggtcagcattaaagtaaggcaaccaacagtg

SEQ ID NO: 118019 - DNA, 1000 bp, Homo Sapiens
tttgatatgtatctcggttggatatacattgtttttttaaaaaatgttatttaactgttagatacagtggcctgttgataagccccacttgtcttcagaacttggatttcttaaataaaacttttagtgttgtctatacactgctcaataagacacttgagtttaagcttttcccagggtggaaattattttacctgtccctttttatttatgtttagtgatggcctagtttttctgcagggccatgatggagaaatagcactctagccttagtccaatattgatttactttctttttttaggttttatgtatatgtttgcattttttagcattgtgttttgtccagttttgtgaaaatgttctgctagtatgaaagaaaacattttctatatgaagacatttgttttatgttaggtagcttacattttctcctctgcgtgtgtgtgtatgtgtgtaaaatcagaaatttagcatactatggaaagaaggcatggagcacttgggtttagaggaacctaaaacatcatagcttcattgttccagatgtaacaggtttgaaagagctcatcgccaagttcttgatccacttgcattccaggggagttttcttttgagtagtatgtttcttgtttgcatgttcctgttcttcgtggaaactatgcatggtagcatttttgcttgctgtgttttccatacttaagaaaaagaggtttcagttggctgatagaatatcttttatgtaggacaaaacttttctgtgaagagtgttgagggggtgaagataggtaagaggtaagcacaatttttaatttaggctctgaaaaagtgtattgttctaaacgtatttggtatgcctatataggtctttaaaaatgggtttgtatgctgtttaatgtgcactgaacattttacattaatattgtactgttttacattaatactgcatgcttttctatgtgaattgaataaagaatgtcataagcaaaaaaaaaaaaaaaa

SEQ ID NO: 118020 - DNA, 1000 bp, Homo Sapiens
ggaagctttagatagagactttagaccctgccctgcagagtcaagacttgaggccattgaagctgcaggaagccctgcccagggatggtcctgccatgaggaggctgcaacgctataagagggctcaagattgtgaattctgctcctgccatgaggagctcagaaggccaggaagccagcaataggggagagaatctgtgtgcttatggacagtccttacctaaagctgtttctgaatgttgcaccctttgagaaatttcttctcagaaccataaattgaaacaaatgaggactgatcttgtatacaaagtgccaactcaagagggaagttggagtatgtctgttgcagagaaccgatatagcagtgcccaggggtagagaccatgtgttccatactcggatatttgggtctttttgagagagctggggaaagtagcagcaactagattaagactgggaggattttgaccaaactaaaggccttttctccttactgcatctgacgtgtgtcttcttgagacaagatagcacccatgaattacatcatgaggtatgtgtgaattcagtttacatgtaagacctgagagttcgaagagggcacattcccaaagacattcccagtcatgaaatgtagaagactggaaaattaagacattatgtaaaggtagatatggcttttagagttacattatgcttggcatgaataaggtgccaggaaaacagtttaaaattatacatcagcatacagactgctgttagaaggtatgggatcatattaagataatctgtcagctactactaggcatttattgttaattgagttacagaaagtcattcaagactgagtttatagaaagcatattgcatctatctctgtgtagaacatttgattcacattgtgaagaatgcagtttaaaatatactgaatgcaatctagatgtattgtacacgaaaggtgaaaaataacaggtgctctttactgtttaaaaaaaaaaaaaaa

SEQ ID NO: 118021 - DNA, 1000 bp, Homo Sapiens
ccaagaaggagctgctgagcacagagctgctgctcctggaggccttcagctggaacctctgcctgcccacgcctgcccacttcctggactactacctcttggcctccgtcagccagaaggaccaccactgccacacctggcccaccacctgcccccgcaagaccaaagagtgcctcaaggagtatgcccattacttcctagaggtcaccctgcaagatcacatattctacaaattccagccttctgtggtcgctgcggcctgtgttggggcctccaggatttgcctgcagctttctccctactggaccagagacctgcagaggatctcaagctattccctggagcacctcagcacgtgtattgaaatcctgctggtagtgtatgacaacgtcctcaaggatgccgtagccgtcaagagccaggccttggcaatggtgcccggcacaccccccacccccactcaagtgctgttccagccaccagcctacccggccctcggccagccagcgaccaccctggcacagttccagacccccgtgcaggacctatgcttggcctatcgggactccttgcaggcccaccgttcagggagcctgctctcggggagtacaggctcatccctccacaccccgtaccaaccgctgcagcccttggatatgtgtcccgtgcccgtccctgcatcccttagcatgcatatggccattgcagctgagcccaggcactgcctcgccaccacctatggaagcagctacttcagtgggagccacatgttccccaccggctgctttgacagataggccacctccagacctcacgaggaagccttggagatgtgggcagaggaagaggacactgaagaggagagctcagccaagtgaggcagcaggaggccatccctgaagagccttggaacgtggcgggtctgtgctccttttaaataaaactgacccagagcaaaacattcaaaaaaaaaaaaaaaaaaaaaaaaaaaaaaaaaaaa

SEQ ID NO: 118022 - DNA, 1000 bp, Homo Sapiens
catttccacaaagtggtcaactctgccttgcatcctaaaactttttgggcatctattttgaaaactataggagcctttggaaggcctcttatgtttggaggggaagggtgttgagattgtcaccatccttcaagctgagactcctggtgagcctttgccaccatgaaaaccacatagctgaccagggctgtgcttgaggtacagaggacacacattgtagacaggcctgtgtcatgtttccttacagtcgttttttacagagaaaaggggcattgttttttcactgctttctcaacagttcctgtgaataaatgaaacatttcggagctccctgagagcaagagccttcacttcttcttgcggtgccgggaccatgtgttggtgaagctggtgctgtgggggccactcactcgaatgacacctggaggcctgttcctcccttaccactcccttccccagcccgacttcttggcctcctgcccaaccagacacctcaaactctgtcagtgccctggcattctggcagagaatcctcaccagttctcaccaaccttccccccaggcaagggcagctgccagcatggtgctctgccaggacaggtttccctgaaggaagctgctcacactgagatgagcctctcagggcaggacctcttcccaagccctgcacacccacccctgcagcccttttggctccccttttccctgtgcctcagcactcctttcctggttgcagataacgaactaaggttgcctaaagggcagatctgccctctccatgtcttcgtcctggcaaacagggtcgtcttaaaattatgcgctaattctgtatgggagcactcaaaaggcattacttagagattgaaatttcaaactatctctagtttttcaatggaaatatatcagctagggaaaaaccatcaagctcattattattttttgatcttcagttgtatttttgtgaatattttaatacatctttttcaatttctgaaaaaaa

SEQ ID NO: 118023 - DNA, 1000 bp, Homo Sapiens
acgcccatcagcccggaaacccctgagctgcttctcccggaggccgatgcccacccgggagcccccaaagactcgcggctcccgggggcacctgcatactcacccgcctgggcctgggcccccgctgcagggactggcgccccgaggcctcaaaaccagcgccccccgccctccgtgccagccccagccgggaccccacaaggcaaagaccaagaagattgtgtttgaggatgagttgctctcccaggccctcctgggcgccaagaagcctattggagccatccctaaggggcataagcctaggccccacccagtgcccgactatgagcttaagtacccgccagtgagcagtgagagggaacggagccgctatgtcgcagtgttccaggaccagtacggagagttcttggagctccagcacgaggtggggtgtgcacaggcaaagctcaggcagctggaggccctgctgagctccctgcccccaccccaaagccagaaggaggcccaagttgcagcccgggtttggagggagtttgagatgaagcgaatggatcctggcttcctggacaagcaggctcgctgccactacctgaagggtaaactgaggcatctcaagactcagatccagaaattcgatgaccaaggagacagcgagggctccgtgtacttctaagtgcccctgcagatgggcagagggatgcatggggatgcaggtcccttgcatttcttggtatctctcagcttttcctcttgcagctccccctaccaggggtcgctttctcctggattgcaaatgcctcttcagtttggactcagctctgacagcccctcctccaggaaggccttccaggacttcctcctctgggtcctctagctctgaccctacagggactccagatctcaacctgttccctggaagtagggcctgctctccatcccagtgaaataaacatgtattagacacctaaaaaaaaaaaaaaaaaaaaaaaaaaaaaaaaaa

SEQ ID NO: 118024 - DNA, 1000 bp, Homo Sapiens
ttttcagaactcagtatggacaggtccagctgacaaagcttcaaaagaagccagtagataccgagatttgggtctatagcattgtgagtggcttccaactagcaaccctctctggccccatgtgtgaggagcctctcatgggtgtctgttttgttctggaaaaatgggacctaagtaaatttgaggaacaaggagcaagtgatctggcaaaagagggacaggaggaaaatgaaacctgttctggtggaaatgaaaaccaagagctacaagatggctgctctgaggcctttgagaagaggacatcacagaaaggagaatctccactcactgattgctatggacctttctcaggacagctaattgccaccatgaaagaagcatgtcgctatgcactgcaagtgaaacctcagcgcctgatggcagctatgtacacatgtgacatcatggccactggtgatgttctcggtcgagtctatgctgtcttgtcaaagagagaaggtcgggtacttcaagaagaaatgaaagaagggacagacatgttcatcatcaaggctgtgctgcctgttgctgaaagctttggttttgctgatgaaatcaggaagaggacaagtggcctggccagcccacaactagtattcagccattgggagatcattcccagtgaccccttctgggtgccaactactgaggaggaatacttgcactttggggagaaggctgactctgagaaccaagcccggaagtacatgaacgcagtacgaaagcggaaggggctttatgtggaagaaaagattgtggagcatgcagaaaagcagaggacactcagcaaaaataagtagctacctactactggtggattcttttccttatagtgaatttaaaagtatcatcaagggtttaatattgggaaaatttctttttgccacattatctctgtttattcactttcaataaagttgatccatataaatattttaaagagaaaaaaaaaaaaaaaaaa

SEQ ID NO: 118025 - DNA, 1000 bp, Homo Sapiens
gcccagacagaaaaagctcgaaacttcctatacaagccagagctctggagaggaacagaccgcacatgtcagagcccattaagcatttccatccagcctgaaaaggccaggagagtcaggccaccagggggcgccagagaaccacaggagatccaggaagcgcttgctaggaccaagctcccagctcccaggacccccaggccggcagcggagtccaggagctggtgtggcccacaaagggtcggagagcctcccagtgagaacagtaggggcaggaaaatgatcaggtcaagggtctcccagctggcagagagggctcccagcagagtgaggacttcattctctagggcagaccacgcccactggaggaaggaatgtacatcctgggaggcctctaagctccccagactcaaatgccagcagctcacatactggagaagaggaagcctggaatctacagggtgcagaggggctgggcagcagccttcctgccattctgcagaacctgtcagcttcaaagggaggctccactctgcggtggcaaagctgggcctgacccttctggccaagatgtcctggtccccacagctcgccaagcgcaagcacttggcccctaacctgagcctgagggaacctgattctactctgcctcccaaagtgggtgatcctcgtgcaggggaggacagcatcggagatcacactgcttcacagagggatcttcagctgcaaggtcactgctgtactggggccacccttcctaagacagagagtccccagggccaggaggcacctgggaacccaaatggggctccacagaatacacgagcctccaaaaagtttagtattatgaagcatctgaattttttttctcttccagaatggctttaaaaagtagactcaggcccagagtcctcaggacatatcagaaaagctttgagagtgtcctgatccctgcaaagcctctaataaattggtcatttgggcaaaaaaaaaaaaaaaa

SEQ ID NO: 118026 - DNA, 1000 bp, Homo Sapiens
tacctgcttaccagccgggaccagagctaccagttcaagacgggcgctgaggtcctcaagctgatggacgcagtgatgctgcagctgaccagagcccgaaaccggctcaccacccccgccaccctcaccctccccgagatcgccgccagcggcctcacgcggatgttcgcccctgccctgccgtccgacctgctggtcaacgtctacatcaacctcaacaagctctgcctcacggtgtaccagctgcatgccctgcagcccaactccaccaagaacttccgcccagctgggggcgcggtgctgcatagccctggggccatgttcgagtggggctctcagcgcctggaggtgagccacgtgcacaaagtggagtgcgtgatcccctggctcaacgacgccctggtctacttcaccgtctccctgcagctctgccagcagctcaaggacaagatctccgtgttctccagctactggagctacagacccttctgatcacagcacccaggagcttgtctccaggaaggcggccccgtcccctactcatacccaccacagagcaccagccagtgccaacgccaggctgctatttatctccctatcccaccccctaccccacctaacacatttgcactgccaggaatggacactggaagtgccaggaggaaggaaggctggtttggtggggtagtggggaggtcagggaggcggggccaagggtgtcccacattcccaacaccgccctctgatcaccatgggaatctttggactcaggacagggccaggtgcagggctctccctcctctccccttcgctgtcccctccccctggagggcatggtgtcggggggtggcactgagctatgagtcccggggatggtgaggaacgccacagacagagccaccctaggagtgagtatagtgctggtgactgtgtttcatagccccagtccagggctgtctaagaaataaagatcatcagactccaaaaaaaaaaaaaaaaa

SEQ ID NO: 118027 - DNA, 1000 bp, Homo Sapiens
atttctgggtccactttctgagatgctttctaaaaccaaccaactgataaaaagtagatgagacttctccaagctgcttcacaagcaaactaaccgaaaaactgaaaatatacaaacagcttcacacacacacacacacacacacacacacacacacacacaaaggaagatcatcaatggctgcggtagcctagtaggaatggactatataataatatagcaggtgctcaataactgtttgttgcatttcagtaaaagcagaataacctttcaaaataataacaggctgggtgcaatggctcacacctgttaatcccagcacttcgggaggccaaggtgggcagttcgcttgggcccaagagttcgagaccagcctgggcaacatggtgaaaccctatctccgtgaaaaaatatgaaaattagccaagagtggtggcacatgcctgtagtcccagatacttgggagtgggctgggatgggagaatcgcttgagcccaggaggtcaagggtacagtgagccgaggtcatgccactgcactccagcctggcctgggcaacagagcaagaccctgtctcaaaataataataatatataattttacaccaaaagtttcaggaaaaaacgagtttgttggagttagtttatactttcacatatcaccacaaagatctccagttaaataactatcaatatccatttccattcatctccccctcaaatcatagcctaacagaacactttgaaagctcttttatttaatatttttttacatcctttgaagggagtgcttcaaaaatgaaagcatcagaagataaaatatttttatatttatgcatagcaagccttcatgaacggaagtgacacactctggattgaataatactgtagcctcattcatatgtagttattcaaattggattaatgtctgtgtgagtttatttgaactagcagaaagtatctgaagatattcaggaatagagtttatacttaaaatagctt

SEQ ID NO: 118028 - DNA, 1000 bp, Homo Sapiens
caactgcgtggccatcgacactgacatgagcccttgggaggagtgaggcgtgccgccggctgtgggaccagcaagactgcacgtgtccctcttggccttgcccagggcgaagacaccttccctgccctggtttggctgacgtgctcagcaaaaccccatgtgccctgctcctgtgtgcagttggggtaggggcagctggcatggtcaggtaacactagtggcccagccccgcagacccacaagccctacccgtgctggggcttgcttcccgaggtatttcacctcttaagagggaatcttccacaagcccagcacaagctgccaggcctgagctacttgaagggggccatctaggtccccaacccatggactttgcctccattttcagctccgccttttttctcctattttctctctggctttcttcagccatgactcacaactaaaaacataaaacactggaggttagtggaggcccctccccaagcagggagcctgggatgggcagggagtgatagccaaactccttggtcacctgctccaagaaggaagcagtagctgagcacctgccctcacatactgctcttttcccctctccctccataccagagatgtggtgagctctgttcttctaccaacccagtctcaacacacaaagtgccaccaccttccctgactcagaacccacatccactcaatgtgaactctactaccacgacctccccatattcctcacttctccatcacctccagcctgactccctgtctgccctttcacccccaagattttgcacaggttaaggccagttatggcctttttgaaatctgtaatagctcccctttccccaactctaaagcctagaccttaaacctgttcctagagctatgcacacccctgccccagtttaccgttcctccctcagggcctccgtgacactccatgaaaagaagttcttgcataccggaaagttgaataaatggatgaattcattccttaaaa

SEQ ID NO: 118029 - DNA, 1000 bp, Homo Sapiens
gccctgtgtcttgcaggagtaccagcagttcagggagagtgtgctacgaaacctagcggataaggcctttgaccggcccatctgcgaggccctcctggaccagaggttcttcaatggcattggcaactatctgcgggcagagatcctgtaccggctgaagatccccccctttgagaaggcccgctcggtcctggaggccctgcagcagcacaggccgagcccggagctgaccctgagccagaagataaggaccaagctgcagaatccagacctgctggagctatgtcactcagtgcccaaggaagtggtccagttggggggcaggggctacgggtcagagagcggggaggaggactttgctgcctttcgagcctggctgcgctgctatggcatgccaggcatgagctccctgcaggaccggcatggccgtaccatctggttccagggggatcctggaccgttggcacccaaagggcgcaagtcccgcaaaaagaaatccaaggccacacagctgagtcctgaggacagagtggaggacgctttgcctccaagcaaggccccttccaggacacgaagggcaaagagagaccttcctaagaggactgcaacccagcggcctgaggggaccagcctccagcaggacccagaagctcccacagtgcccaagaaggggaggaggaaggggcgacaggcagcctctggccactgcagaccccggaaggtcaaggctgacatcccatccttggaaccagaggggacctcagcctcttagcaggaggctctccttgcttgcactcaccctttcttattgtcttgccctgcatctgggggtctgaatttttgggagcaggcaatatctgaaggtgcaaacaggccctacggctgttccctgcacaactctcatggttttaattgtaccccatcttccacatctttaaagctcatgtgaaaaatgctgcatttttaataaactgatacatttgaaaaaaaaaaaaaaaaa

SEQ ID NO: 118030 - DNA, 1000 bp, Homo Sapiens
gctatgaacatgggagatgagagagaaaactgcaggatagggacagaaacactgtgctaagacatttgaactttgtcctgtgcaatgtgggaaccagtagtgaaggttaattaactgacatgatcagatatgtatttgaaaagggctcttgttggcattagtctagagaatgcgatggagctgggaagcgaaagaagaaatgttgggagcctgtgttgtagtaactgaaaaatggcaatggcccagaattaaagcagcaagaataggagtgggctcaagtgatgtataaggaaaaaaaaaaaaatgacaactcagttttgttgttggtaaggagagtaaagtatggcttctgggtttctcatttgagatactgagtaaatgatggtgttaacccattgagaaaatagtgtggttagagtgggaagaaagttaatttaaaatgttcatttttttttttagtcatttctacttttggattctaggtttgtgtgctatattggttataaccaatttgctgaataataaattatcccaaaacttagctacttaaaacaacaaacattatctcacagtttctgtaagtcaaaagtccaggtctctcatgaagttgcagtcaggctcttggctagggctgcagtcatctgaaggattagtaagtcgctaagcccacacttaagctccacccttgaagggagaagtttggaaagaatttgtgaacatatttttaaatcacatatgctatgaacaggtttaggggagggagaggaaagaaaactttaacttttcattagcatactgcatctgtagttcctaatgggcatgttgtaaagatgttaagacgttttctatgcattataggtatatagtagtattttgttttgttctgtttttttgtttggtatgtagtagtttttaatcaaaccttaacgtatttgatattaagatttattgagtttcttgttgagatgtagaaataaaggggatccatttcatttatcca

SEQ ID NO: 118031 - DNA, 1000 bp, Homo Sapiens
caagcaccatatctggaaatcaagaagcaaatggataaacaggacccccttgctcatcccttactgcaatgggttatatcaagtaatagatcacatattgtgaaactgccagttaacaggcaattgaagtttatgcatactccacatcagttccttcttctcagcagtccaccagccaaagaatccaattttagagctgctaaaaaactctttggaagcacctttgcatttcatggctcacacattgaaaactggcactccatcctgaggaatggtctggttgttgcttctaatacacgattgcagctccatggtgcaatgtatggaagtggaatctatcttagtccaatgtcaagcatatcatttggttactcagggatgaacaagaaacagaaggtgtcagccaaggacgagccagcttcaagcagtaaaagcagcaatacatcacagtcacagaaaaaaggacagcaatcccaattcctgcaaagccgtaacttaaaatgcatagccttatgtgaagtgatcacctcatctgacctgcacaaacatggagagatatgggttgtccccaatactgaccatgtctgcacacgattctttttcgtctatgaagacggccaagtgggagatgcaaatattaatacacaagaaggaggcattcacaaagagatcctccgagtaattggtaatcaaactgctactggttaaaggaccaccatttaattaacatgattcgaaagccttcctcgggttcaaagctggattttgaactgaagaagattataaaattatttattgttattataaacaaaattaaccctttgaatactgattttttttcttagtatttctaagtatctcattaaatacctaaaatggtataagatttatcaattgtagggttatggaatctagtaataaaatttcaacagcacttaaactgaagtttgggttgctcatacaataaacagattgaaaaaacaaaaaaaaaaaaaaaaag

SEQ ID NO: 118032 - DNA, 1000 bp, Homo Sapiens
tgggggctttagcagctccttttactccgcctaccacggcaaaatccccaaggccccaggattcgagaagcgccttcagttgtatcagctctttcactacttgaaccactggaatcattttggatcggggtacagaggatcctccctgaacatcatgaggaatctggtcaagtgagcgggccttactctggaaggaggcctcagaggtttctccacagtcctcttctgggcaaattcttgtttcttcacatgccggactagcttaagaccaatgcagtagcttatttccaagccttgcaaagtatataatatctaagaggaaaggttttgtcatcccagcgttgtccactttgtggggctttgtaggtagacggagccacactacaggcagggtatgagcagagggatgtatggagtgtgggtgactctgagcctcactgctgctgcaaggtggggaaactgtaagtgaacccctgtgggtgcgggggagggtatccggtgcacagggaggtggccagcgcccccgggcactgctgctcataggtacctttccgctgcctcctccctgctctcctgtgcaggaatgtctctgagctgttcacgttgatgcttcttggttggcaagacttgggtgtagatatgaaaccatcttactaaaagcgtcttaaaatgaccaattccagaatcaagcgtattccgttttcttcctgcatgatcctgggccctcccgcaggctgagcaagtctgtaaactgattctgggagaaaccaagctgctggccgtagggtgtccttgggtacatccaggagtcttcattgcttctgttattaccccgtctcctctgccattttctacagcttgctgagttgtcattcctttgcaacattaaaatacatgctgaactcatatttttccttccttcactgttgtagtaaagagacatatttcatgaatggcattgatgctaataaatcctttgcacaaaaaaaaaaaaaaaaaa

SEQ ID NO: 118033 - DNA, 1000 bp, Homo Sapiens
tgcagaaccaggctgggagaagggctgggaaaactgggagtggagggtggatcctcatggagcaggagagtagctcatggctccaggagcctgaggccatgcagttgatggtgagctgacatcaattctaagactcatcctaattgaggggtgttaaaaagtgtgctgcttagaatgaccaaatatagttattgtaaaaaatgatatttatgaactttttattttagaaaacatgaattttattgctccctgtattatttgtttgatactaggattcatgctaaactttttaagaatgtattggatatcaagaagcattccttacattagtagcaataaatattagaataaatatgaaattgaactattttcagaaaaagggcagtatattaagagcagggactgttctctagttattgaggaaaactggactttgtttgtgtttttggtggaggaagaagtttaagatactttagtcttaaattgaggtttgccaaatgagaagttcaaaaacttgggctttctaatcagaatttccaggaggaggaaagtgtgtgctgaatattttaaacatttcccactgatcatacaaagtctgatttttaaatttacacttataatgcctttgtattaaaattatttttaacatgtgcttttccaaattaaaaatgaagtagagtataccaaatgcataaactttcattagctaaggaactcatgtctgaattttgttgtagttttgaatgttgtgctctttcatacagaacgggaaacataatcctcaggtatcccagcatctcttgttgaattgaagattattcattgctttggcctcacaaagttttgatgtcaactatcataagtgaaaatatcttcctttaatgttctaagtagtgataatattactagaatgaaagaataaaaagaaattgttcttttaaaatatgtgtaacttctaaaaataaaacttaaaatttatatgcaaaaaaaaaaaaaaaaa

SEQ ID NO: 118034 - DNA, 1000 bp, Homo Sapiens
aagtaatgtgtgtcaccccacttccatttctgtggccaaaggaagccacagagccacacctgagttccataggacggcagcagctgatcatcctatgggctggggtgctcagtatggagaagtacaagcagccacccagcgtggggctggttggtgctgctgaggatgggaggatgggaggggcctgcatccatcccagggcaacatacctgtttgtctgctggggctgcctgacaaaggaccgcaggctaggggacttaaacaacagacatttcctcatgattctggagctagaagcctgagatcaaggtgtgggcagggttggtttctcctgaggcctcgctccttggcctgcagatagccatcttcttgccgtgtccctgtctgtgtctgtgtcctaatctctcataagctcactagtctattggatcagggcccaccctcatgacctcatttaaccctgaattacctctttaaagaccctgtcttcaaatgtaagtactaggggttaggacttgaacataaaaatattgaagggacatagttctgcccacagcggtgcccgcgataggcttctctggttttgtctttgctgttcctggcagcgctatattgggcaggcttctgtggtctccacatgcctgtgtgcagagtcccccaggccctgggttctggggcccatactgaggagtggggatggccaagccttggctgttgagtaggcagtgcccagttgtgctgtatgggatgctgtttctcacttaagaaatctttccctacctggggggtacaaaggcattatcctgtattcccaggttgtaactttctgcctttgacattcaaccttgagtccacctgtaagtgtaactgcggcagaagggaggggtctgctgtcatccttgatagcctgtgatgagcagagcccctctgccgaccgcgatgcacatgtaatatgagcaagaaataaatttttgatgtgcgaaaaaaaaaaaaaaaaaaa

SEQ ID NO: 118035 - DNA, 1000 bp, Homo Sapiens
gtaattttaaaatgttgacaccttaatcggtcccaggtatgagctataataaacttgtaaaattaagttgatgtgaacataattttgattaattaataaggcgatttctcctgaatttacaccaaagctaatttttaatgaaattggtttacagaagtaaaaaacaaaaattggaaagcaaagtaataaaacttagtttatataaacaggttgaatgatatatttatcaaatctcacagacatcaggcaaattatagcctggtgacaaaagtgttcatagtgaattagttactcttgtaatacttctataattagttcatcaggaatttcatccacttcactgttataactgagaagactgttctctgcagcttcagctaattcagcatcttcagtagcttctaaaaaataagcatcatcaatgccattatcccagacagcatcagcagatgcacctgttgacagcctgctaggtgatggtttatgaggattctgggtttcattgctcctagtttcatctgcttcatctgttgtaaactcttcttcctttatttcagtggtgaagggatagagagtgggataggaaaatatttactcaggatatgtgatttaaccttatactctatgttgaagtaaggtattaagtgacagatactaaagtgaatatgcaggaggaatgctgtctccgatatctcaccgtgggaatgagtgcactgattcaaacgttgctgcactgaagctcagacacacttgaaactccaaatttgaaattacctacagttctgtgcacatacttttcaatactccccgacggaagagcaagggtggatttaattttttaacaagtggacagtccagctgaagacaaatcagaagataaatttgctatcttgacaatggacttagtacccatgctttaaattttaaagtatttagcaaatcgtaaacatggattgaaaaaagattaaaaacagttgccaaaatataaaaaaaaaaaaaa

SEQ ID NO: 118036 - DNA, 1000 bp, Homo Sapiens
cgggcctctcggacgcggggcagggcagcgcccgggctggagacggactctgggaccctcggctgcgggggtctcagcgacctgccccgcggcaagcgcggccgcggagtggcctaccggggaccctcccccagagggaccggcccggggcggggagatgaacggcttcagcacggaggaggacagccgcgaagggccccccgccgccccagctgccgccgccccgggctacggccagagctgctgcctcatcgaggacggcgagcgctgcgtccggcccgcgggcaacgcctccttcagcaagagggtccagaagagcatctcgcagaagaaactcaagctggacatcgacaagagcgtaaggcacctatatatctgtgattttcacaaaaatttcatccagagtgtccgaaataaaaggaagaggaagacaagtgacgatggcggagattctcccgagcacgacactgacattcctgaggttgatctgttccagctgcaggtgaacaccctacgacgttataaacgacactacaagttgcagaccagaccaggcttcaataaggcccagttagcagaaactgtgagtcgacacttcaggaacatacctgtgaatgaaaaagagacccttgcctacttcatctacatggtgaagagtaacaagagtagactggaccagaaatcggagggtggcaagcagcttgagtgaggatgaagcacatcttaaaggaatgaagtgtaatgcttgatgcacaggtgatatctactacatttaagcccataaagactgttaaatattattgtaaataaaaaagtttgaatgatgaatactgtaaatctttttggtcaggaggattatattctcatgattcagcatgtgtatagaaagactttcttttcgataactctggactaaaaaaatcaggatcattaaaagaattaaaactatgtatttcagcattcaacaaagcattaatcaattctctggaaaaaaaaaaaa

SEQ ID NO: 118037 - DNA, 1000 bp, Homo Sapiens
gggaaaggaactcaaaacactagaaaaagcattgaatggaaaatcaatatttaaaacaaagttcaatttagctggatttctgaactatggttttgaatgtttaaagaagaatgatgggtacagttaggaaagtttttttcttacaccgtgactgagggaaacattgcttgtctttgagaaattgactgacatactggaagagaacaccattttatctcaggttagtgaagaatcagtgcaggtccctgactcttattttcccagaggccatggagctgagattgagactagccttgtggtttcacactaaagagtttccttgttatgggcaacatgcatgacctaatgtcttgcaaaatccaatagaagtattgcagcttccttctctggctcaagggctgagttaagtgaaaggaaaaacagcacaatggtgaccactgataaaggctttattaggtatatctgaggaagtgggtcacatgaaatgtaaaaagggaatgaggtttttgttgttttttggaagtaaaggcaaacataaatattaccatgatgaattctagtgaaatgaccccttgactttgcttttcttaatacagatatttactgagaggaactatttttataacacaagaaaaatttacaattgattaaaagtatccatgtcttggatacatacgtatctatagagctggcatgtaattcttcctctataaagaataggtataggaaagactgaataaaaatggagggatatccccttggatttcacttgcattgtgcaataagcaaagaagggttgataaaagttcttgatcaaaaagttcaaagaaaccagaattttagacagcaagctaaataaatattgtaaaattgcactatattaggttaagtattatttaggtattataatatgctttgtaaattttatattccaaatattgctcaatatttttcatctattaaattaatttctagtgtaaaaaaaaaaaaaaaaaaaaaa

SEQ ID NO: 118038 - DNA, 1000 bp, Homo Sapiens
ttctcaaggttaagccaagtcctccttgcaagttgccaaataatagcttaggaaaagaattagtctgcctgcatgatgatcttcttaggcaaaaacgtcttcacagcccttgaccttggtgaatttttttccccaaaagcatccaaaagaagaattataaaccccagaacgagatggaaataaacaagtattttttttttatgatgtttggcctgaactgtgggctttaattgggggatactgatcgtttggaaagaagtgagaaaattctgaagaaatggcggccttgggctaggcggggtcccctatttcttctgtttctcactgaagtcctactgctgagccaagactcagtcactctggaaagagcatgaccgataaagaaaacagttcctttctgatggggagcgtctgagtgcagatcatgaggctctttctctaggtttaattcttttccatggtgaccggacttggtgtcttgtagcctggttacgaagtgggacgttgagcttctactgacgatgccctgcatggaccagctgggatctggctggggctgccctgtgtccctaacgaccataggcaatccatcttcttgtgtcagcaatttctggacacccactgttttccaccaagagctgaggtggcaacaactcagtgagcaataaacaaaatgacacagaaatgcacagtgttgttatgaaggagcctgtttacctgtgttcaaaatctggcaccattcccttgagcagggcccgctcaggagggaccaggtctgccagtttctgtgcctgcagagagacgaagccccacgagccacaccctactctacaagaggaaagggggttggatgggaagaatctattttgctgttttggaaagcacacagccgacctacaaacctcctgtgatggtgtttcttcggatgtgtaaaataaggctttatttgtcaattccgctgtaaaataagcattgtccgagtaaaaacagcagcaacaac

SEQ ID NO: 118039 - DNA, 1000 bp, Homo Sapiens
ataataatttattacatcccaaatatataaaaatttgagtgcctttgcagttgggatggttcctaaaattgcgtatagaattaaggcacagaattgtgtgtaaggtcctgaatctggctaaaatacagtggatgtatgtattggaattatgaggcataagtagccagtatctatagttagaatctacaaggcctcctttttgcacctgtagactagaatataactgttattggtgcctttgagtgttatctctcagtggctagaggtgctgtttcaagcacaatttagactagggttgaaccactcattgttcaaatcattggtgggctccaatgtaaaatatcactacatcagtccacaagcaacattaaggaaatctaaaggaaatggaatttgactttttagagtataatgatgttctagggcataatgaggaaaatttttaaaaaatagattataatgatacatattggtatcattaagacaacagatttgagcaaatacaattaaggtgtcttattttttgcatcaagtaattattgctgtggtctttctactccacaaaataattttttctttttgcagttgaaaattaactgcattattaactaattaataaaataaatcaagtggtataagggattagtttaccctcaagccgatgactccatggctactgatattagttagtttaggatttttaaaaagcatatcagacccccagtttcaggaattgagtataaatattgcttcttgtcaccctgggacagtaatgccttatagtggcactagtcaccttaagtagattacacatggttgaggtgaataaagctgcatgggaatttgctttcgtgatatatttcatttgcaaacttctacataatcaagttttatgtttaaaaccatcggttctatatatctagctttaggaagttgcccttacaggtgggaccttttgtgttaatctgttttctccccagtcatcttatttggctatgtt

SEQ ID NO: 118040 - DNA, 1000 bp, Homo Sapiens
acttctctgaaatcttagacttagccagtcttaggcctacgatgccacacaaaggttgttcagggagaagggggtgcaggaggcagagggtgccccgcagggagctggtggctccagccccactagagctcctaaagatcacacagcagctgctcctgacagggatgctcatgcccagaaagcaagcccaggagaggaaggcagagtgtgacagagcagagccagggccaggcgcaccaggagaggcgtttctggggctccagagaagtgccacgggaggcagaagtccagaactgcccatatagatgcccttctacatcctggagcccaaatcagtcatgtgggtgggaagttcccagggcagtggtcacatcgtgagaattagcaggaaaggcggggcctttcttgtcatagctatttctgaggatgaaatgggagacatatgcccagcacctgatgtaagtttatataatgtaatattatgtacctaccactaagaaatacatgaaccgtgccatgaggacagtaagtgttcataaagcaacatgaagcaagaaacagtgcagggtgcccagtgcacacactagagagaaattgtgaacattaaggacaaggagaattggtgtctttctaaaacatacttatttaaaaacacatacccacttactaatgtggaattacacagtttgtaacaagaaaacagtctctcccattctctagtactgctcccctacccagcagtcacttccagttcattcagctatttttaaaatgtgcttatatgactcttgcttgatatatcaatcttagacattacctgttgactccctgttgtcatacatgaggctttagctctcttttgtcagcaaccctcccccatccctagttattaggttaaaaaatactcagattactatttctattactatgtgaaagttaactgcggagccaagagttggactataattaaattaccttccttgtactttctttttaatgg

SEQ ID NO: 118041 - DNA, 1000 bp, Homo Sapiens
gaaggcctgggtgtgtgcacaaggaggcccgggccagggacttcaccaggggctgggtcacaagggcacagggtgtgtggaaagcgctgtgggggaagagccggtcaccggagagtgagcaggcggagactccaagctgggctgagccagagcagaaggcgagggattcccagccggacgggggttctctcaccaacagctgtgatttcatcccgaagtggaagggggtctaaacagaacaggctgagagaggcgggactgggtcaagtgggtggagctcctccttgcatgactgcaactgtcggggctttccgccggctcacagcagttggggccagcggggagaagagaggcggaactgctgtgtcctcacgtggcgcagcctcaaactggcatccaggcactgggcccgtgcagagaaggcacctgcagagagcagggcagcccggcgcaggggcatgcgcctagaatcccagctactcggaaggccaaggcaggaggaccgcttgagtccagggattcaaggccaacctgggcaatagagcgagaccctgtctcttaaaaaacgatgatgatgaacacagaggacggggcactgtgctgggagccagggggcctgggaggagccgagaccagccttttacctcggggttttgaggccaacagggacgacagagacagtttctagttagagccttggctccatttttggatgatttagccccgagttcctgagtctattttatgccccttacgtactttgatagaactaaggaaatagtggttttgagtgaagggaaaggaaacccagaaacattttacgttgcttttacttctgtagtgtagattgccccggcccctctctgagccctgtagcatctgtgatagcttctgtcccttcatcggttcatgtcacagggattttctttcccaggaagcggacacggagagtcagccctaataaatgagcacatgccctggctgtacattttgaaacctg

SEQ ID NO: 118042 - DNA, 1000 bp, Homo Sapiens
cagctgcctgcaacgcttcgggccgcccccctgcccggactatgagttccgggaaaactgcggactcaatgaccacggcgatttcgtaacgcccccgttccgaaagtgttcttctgggcagtgcaaccccgacggcgcggagctatgtagcccctgcggcggcggagccgtgacccctactcccgccgcgggcgggggcagaaccccgtggcgctgcagagagaggccggtccctgccaaggggcactgccccctcacacctggaaacccaggcgcccctagctcccaggagcgcagctcaccagcaagttccattgcctggaggacccctgagcctgtccctcagcaggcctggccgaatttccttccgctcgtggtgctggtcctgctcctgaccttggcggtgatagcgatcctcctgtttattctgctctggcatctctgctggcccaaggagaaagccgacccctatccctatcctggcttggtctgcggagtccccaacacccacaccccttcctcctcgcatctgtcctccccaggcgccctggagacaggggacacatggaaggaggcctcactacttccactcctgagcagggaactgtccagtctggcgtcacaacccctgtctcgcctcctggatgagctggaggtgctggaagagctgattgtactgctggaccctgagcctgggccaggtgggggtatggcccatggcactactcgacacctggccgcaagatatgggctgcctgctgcctggtccacctttgcctattcgctgaggccgagtcgctcgccgctgcgggctctgattgagatggtggtggcaagggagccctctgcctccctgggccagcttggcacacacctcgcccagctagggcgggcagatgcattgcgggtgctgtccaagcttggctcatctggggtttgctgggcttaacacccaataaagaactttgctgactactaaaaaaaaaaaaaaaaaaaaaaa

SEQ ID NO: 118043 - DNA, 1000 bp, Homo Sapiens
ctcagtgacgacctagatgaagcagcaaaggaatttcaggagaaacacaagaaggaagtagggaagctgaagagcatggacctctctgaatacataatccgtggggacgatgaagagtggaatgaagttttgaacaaagctgggccgaacgcctcgatcatcagcctgaaaagtgacaagaaaaggaagttagaggccaaacaagaacccaaacagagcaagaagttgaagaacagagagacaaagaacaaaaaagatatgaaactgaagcggaagaaatagtgaagagaaactcgggcatctgtgtttgatcatgggaagatactctcactaactgaaccctctctggctggactgttaaaagcaacgagaggccccggcacacctggaagctggccgcgaattcggcctctgggcctgtgtgtctgtgagctcaacctggctaaaggcagagtcactcccaaatgggtctctttagaacttgatggctgggcactgccatctctagaattgccacgagtctctctcttcctgcccagtccagggccctcctttcctataagttcatattttgctttgagccagctttttagtctcattcccacacatgtggaagccacgttgcctctcgaccgcctgaggcccttaagtacatcgctttctggtggtgcccaggaggctgctgctgggccgctgggtctctctttgtggacttgtacctggagcaggaggaactccagtccgtcccggcatccatggcagcccgcggttaggtgcgccagggtttgctgatgttgtcttgtgctgttccactcttggctccagcagacccactgtcccagaaaagcctgatcctgtagtttatgtagaatgccacatctgcgtcctcaagacctgtttcatccatttgggaaaagatgttgggaaaggccactttgctcgcaggggtgaggggaaggatagagaatctatttttaataaataacattctagaaagatc

SEQ ID NO: 118044 - DNA, 1000 bp, Homo Sapiens
tgagatgccagagctgtgttgttgcacacctgcaaaacaaggcacatttccccctttctctttaaagccaaagagagatcactgccaaagtgggagcactaaggggtgggtggggaagtgaaatgttaggcgatgaattcctgagcaccttgtttttcttccaaggttcgtagctcctctctgcccttccaagcctgtaacctcggaggactatcttttgttctctatcctttgtcttgttagagtgggtcagccccagaggaactgataagcaaatggcaagtttttaaaggaagagtggaaagtactgcaaataaaaatccttatttgtttttgtagactttgtaatgcatatcattagccctcactgtgatcattactgctgtggctctgaactggcacatagtacagtggatggaaggtgcccgcacaccagctgagaactggttctggcctaggtgggctctagaaccatttacacagcatgaaagaaacaggttgggttaggagcagaaagaaataaggctcacacccctccagacactaccttataagcactgcagaacctgaaacagatggcagaaggaatggaatgctacaggggccagcaggagtgaccacagggaggggacagctcagtgactggagcattcaggaagaggctttccagggaacactggacattgcttagtgaccttttgttcctttttttttttttttcttttactgttctgaaagactttgagtctgtggttcaccaccagcccatcagtgtttctttgaggtgattgcattagggaagttggctctgggattgcaaaaaaaaaaaaaaggtggaacatgttttccttaaaagatggaaggttttagaaaatatactaggccatctggttagaaaaaacagaccagactagaaaaagctgtgaatttgattttgtagattaaacaaagccagatgattaaaatgtgatttatttataaaaaaaaaaaaaaaaaaaaa

SEQ ID NO: 118045 - DNA, 1000 bp, Homo Sapiens
attgaaaaaacttttttgacactcccaagaccattcagggaaattttataaaaaatgcagatactgtcttgagcagatcgaaatgccgatgaagtggatgcaatttccttttgtgcaagcagtgcacggtgcccccccctcgggtgtccgtgctgtgccttagcttccccaggtgccgggactcacacctgctaggggctgggcaaggccccggctctgctttctctgaagggcttgtccaagttcattgccctgttacaggtggtcaagacgtccggccgccttgacccaggctacccttagccaatatcctctgcccctgggtggctggtggctgggcctcagggtgggcaacgttaggggtttggcgaaagcccgccccatgggattgagggacggggctgcactccaaccgtctgcacctgctcttcccccacccctgtgggacctcatcttcacgtgccatgtgtgctgaaggcccagggcccagcagggggcagtggcacctgttgacggaaaaggccgaggtgcttaccagtggaccttctggcccgcccctcccctgtcacttgtcgggcatccagggccccgacctgtgcctagccgccagggtgacagaaggcagaactgaagcggggtctgggccacgggccaggccactgccttttgtcctcagtgaccatacattcctgctctcggacttgaactctactgtaactgttttcttgaaatgaagctgtacaggacgattcactgccatgccagtcaggcgggcttgccatgttctgtgaatctcgagtgagcggtgccacccgcccccatacctccgccaccggccgctgtcggggatgccacagcctgccacggtcgcagccagacgtgagcttggcattgaagttgcaaagcggcccctggccgggctcgccgtcgctgtccagggccgtgtccggtgctgtggctgtaaagctgtaggaccctttttaataaatagagaattatt

SEQ ID NO: 118046 - DNA, 1000 bp, Homo Sapiens
ttagtaacatgaattggaaatctgtgtcgagtacctctgatctaaacggtaaaacaagctgcctggagagcagctgtacctaacaatactgtaatgtacattaacattacagcctctcaatttcaggcaggtgtaacagttcctttccaccagatttaatatttttatacttcctgcaggttcttcttaaaaagtaatctatatttttgaactgatacttgttttatacataaattttttttagatgtgataaagctaaacttggccaaagtgtgtgcctgaattattagacctttttattagtcaacctacgaagactaaaatagaatatattagttttcaagggagtgggaggcttccaacatagtattgaatctcaggaaaaactattctttcatgtctgattctgagatttctaattgtgttgtgaaaatgataaatgcagcaaatctagctttcagtattcctaatttttacctaagctcattgctccaggctttgattacctaaaataagcttggataaaattgaaccaacttcaagaatgcagcacttcttaatctttagctctttcttgggagaagctagactttattcattatattgctatgacaacttcactctttcataatatataggataaattgtttacatgattggaccctcagattctgttaaccaaaattgcagaatggggggccaggcctgtgtggtggctcacacctgtgatcccagcactttgggaggctgaggtaggaggatcacgtgaggtcgggagttcaagaccagcctggccatcatggtgaaaccctgtctctactgaaaatacaaaaattagccgggcgtggtggcacacgcctgtagtcccagctactcaggaggctgaggcaggagaatcacttgaattcaggaggcggaggttgcagtgagccaagatcataccactgcactgcagcctgagtgacacagtaagactgtctccaaaaaaaaaaaaaaaaaa

SEQ ID NO: 118047 - DNA, 1000 bp, Homo Sapiens
ccagaactcgtccctgcgcagccatcagagggtgcacaccggtcagaggcccttcagctgtggcatctgcggcaagagcttctcccagcggtcggcccttatcccccatgcccgcagccacgcccgggagaagcccttcaagtgccctgagtgcggcaagcgctttggccagagctcggtgctggccatccacgcccgcacccacctgccaggccgcacctacagctgccccgactgcggcaagaccttcaatcgctcctccactctcatccagcaccagcgctcccacacgggcgagcggccctacaggtgcgccgtgtgcggcaagggcttctgccgctcctccacgcttctgcagcatcaccgggtccacagtggcgagcggccttacaagtgcgatgactgcggaaaggccttctcccagagctccgacctcatccgccaccagcggacccacgcggcgggccggcgctgacctggggccccagcaggggtgggaggtgtgggcagaagataaggggccagggagctagaggaacctttagggaggatagtggagaagccgcaggagaatggaggagctgaggatgctggaagaagagaaccagggtggaggaagtgacatgccctggagacttgtgggaagtgggttggagggaggccaggccggcagcgggaggccctgggagaaatggagagaggtcagcggagggctggcctcagccgcggctccttggtgggtgcctggcttggcaactgctagagcagggaggggggagggcaggggattacctaattagagtgggttagcttagattggtagctgctgaaactctcgttgagtcaggagcgggtaaaaggtaggtggggtggggagtggggccccggggtggggcctgggcctctgcgtgcaaaccccagcctccctcttcttcctcaggctttggagcccctgagtttgagttcaataaaaactttatgtggtaaaaaaaaaaaaaaa

SEQ ID NO: 118048 - DNA, 1000 bp, Homo Sapiens
agcggagaaactcacttctgcatggataccgcagcctcatcgaaagggatgtgagccgcactgacaggaccaacaagttctacgagggtcccgagaacccggggctgggcctgctgaacgatatcctcctcacctactgcatgtatcacttcgacctcggctacgtccagggcatgagtgatcttctctccccgatcctctacgtcattcagaacgaggtggatgctttctggtgtttctgtggcttcatggagctcgtgcaagggaactttgaagagagccaggagaccatgaagcggcaactcgggcgactgctgctgctcctgagggtgctggaccccctgctctgcgacttcctggattcccaggactccggctctctctgcttctgtttccggtggctgctcatctggttcaagagggaattccccttcccggatgtccttcggctgtgggaggtgctgtggacagggctccctggccccaatctgcacctgctggtggcctgcgccatcctggacatggagagggacaccctcatgctgtccggcttcggctccaatgagatcctcaagcacatcaacgagctgactatgaagctgagcgtggaggacgtgctgacccgcgccgaggccctgcaccgccagctaaccgcctgccccgagctgccccacaacgtgcaggagatcctggggctggccccgcccgcagagccccacagcccctcgcccaccgcctccccgctgcctctgtcgcccacccgggccccgcccaccccgccgccctccacggacacagccccgcagcccgacagcagcctggagatcctgcccgaggaggaggacgagggcgccgactcctaaccccgccaggcagcctcgttctgcacaggcactttagcccgagccaggcacacctgcgagggggcaggtgtgctccgccgccctgctgataagctggcttcattaaactgacacttctcaaaaaaaaaaaaaaaaaa

SEQ ID NO: 118049 - DNA, 1000 bp, Homo Sapiens
cccagagactgataaggaattcttggcagatgctattggaagaggtataataatagggccaatcactacacaactgaagagtcaccgagagactgataaagaactcttaaaagatgctattggaagagatataataaagggaccaatcagtgcacaattaaagagtcaccaggagactgatgtagaacccttgacaaatgccattggttcaagtaaaacaattggtgagataaagacacaactaaggactcactatgatgtgaacttatttaaaaacaaagatatgtccgtacaacgtcaagaaggtatctttactaggagcattacaccaagtaaattcccaacaaaagtgatcaatttatcaccctttgaaaataaagaggaaacttatgagtactcttcaccctatgtgactgcaccttcaaaagcaatttatagaacatatagggctggtccaagcttttctaaagacatccaccttcctttactgaatcaactcccttcagggcattcgaaagttgttaccttaagccaaaaaactattgaatttactctgcctactgtgaccaatacaattggaaaacctacctataaagtgttacatgctgctgcccgaaaatctgtaccacacccatacttttgagaatgaaggaaattctgagcaagataagcaacatgacaaattcagaaatgcaggaaaggaaatcgcaagtatagaagccttttgaaaataatactgactcgtgtggatggtgcttattgaaaaacagctggaaatacagtggatcaacagggtaggcccagatcacagaaggcctgaccaggcagtgaatgtgtctttaccatatggaacaattttgaacttctaagatcaagcctttttgttgctgagggtaagaaaggagctctgtgatgaggttccagcttacttctattcgccagtgtccctgtaatgctttctggtgtgatgtaaaatcaattaaacaaaacttgtgctctg

SEQ ID NO: 118050 - DNA, 1000 bp, Homo Sapiens
ctgccggctgtcaactggttgccagctgcgacattgccgtggcgagcgacaagtcctcttttgccactcctggggtgaacgtcgggctcttctgttctacccctggggttgccttggcaagagcagtgcctagaaaggtggccttggagatgctctttactggtgagcccatttctgcccaggaggccctgctccacgggctgcttagcaaggtggtgccagaggcggagctgcaggaggagaccatgcggatcgctaggaagatcgcatcgctgagccgtccggtggtatccctgggcaaagccaccttctacaagcagctgccccaggacctggggacagcttactacctcacctcccaggccatggtggacaacctggccctgcgggacgggcaggagggcatcacggccttcctccagaagagaaaacctgtctggtcacacgagccagtgtgagtggaggcagaggagtgaggcccacgggcagcgcccaggagcccaccttcccctctggcccagccaccactgcctctcagcttaaacaggtgacaggctgctttcgtgacttgatattggtgtcatagcatttggcctacattaaaagccacaatttcatggggaaaggacaaaatggagggtgactgaggtgctgacctcaatgcaaggctggtgaaccctgcagcgggccagctatggtgggaagcctggcatttggggtgctccttgcaacgtcttaagcaagcgacccccctgacatagcaaaaggtggcaacccatggaggcagaaagaaggacgccagcctgacccttatctgaaacgtcctaagcagagttaatcctggctgctcaggagaggcgacacatttcaaatctccacgagatattctccacacagaaaatcttcttgattctatagagacttaatcatgcctatggctttgaataatcttatgtgatttaaataaattaaatctttataaaaaaaaaaaaaaaaaaaa

SEQ ID NO: 118051 - DNA, 1000 bp, Homo Sapiens
ttagtagaagtgttgtggttttagttggtgctttcagaactgctgcctaggaaactataaacccttggttaaggggaaatcatggcttgttctctttgtacagttactttatttatataggtgttaagctttgtggaccaggtgtttttcttttggggcgaacccctgagcagagaatcttactaggctttggttatcaccaaaacaacctccagtatataccaaagctttgacttgtttgagctcttgagcttagaagttgattttgcacttatttttttggggggtgggaatgtactgcagtcagtaaacattattgactgtttaacttaaacagatgctttatggcacctgctcaagcccgtgactgtacagaaggatcctggttgctaccagtgggtgctgattcagcatcacaagtgactgaaattggctgtggatctgttctttgtgaaagaattcctgatttctccatggagcatgtacacaacaattttgatcatattaactgtacttcagttttgcatttttattcaaatgttatctctttttttctttgagaaataaactgtcactgatgtgacagcgttctttctttattctaataacatgtatagatctaaagcaggttgtgttgtttacatgtttctacacatttcatcctttaaaaagttgttgagagaggttgtatttaccttcccaaggttggaaagcaggggaatttcccagtgtcctagttttccaccagaggaatatgtgtaagtagcaaagtatttgctgcttacatatagtgtgtatgtatgtatatatgtaaattgtgtgttaaagagctgatactgattttcatatgacaatgttaggcaaaggcctccctgcatttgaagagcaggttttcatttatatgtatttttgggataaaaaaataaaatttgtaaatataaaaaaaaaaaaaaaaaaaaaaaaaaaaaaaaaaaaaaaaaaaaaaaaaaaaaaaaaaaaa

SEQ ID NO: 118052 - DNA, 1000 bp, Homo Sapiens
ctgtttctatggttgtcaaatgaattcttcacccaccctacagtttgctaactccttgaagctatcaaattagtaagagaggctgcccgcacccagggggcaccatcgcccacttattatttagttttgcggatactcatggaccatctatcacatccagcattgtcccagtgctttgagttggacgggaatgggactctgcagccaaggcaggataagaaaatcttgcaatcccgtcctgcagtgatagaaacaggtcgttctgcattataagccataggtggagcattcggtagcgtattcagactgcatgggccggcctaggagtctttgccttcataaattttaagaaccccgcccacaacagggagttaaactggaggactttgcatgattagttcagggatgagtggtttctggggcatctgaggtcaggagttcgaaaccagcctggccaacttgatgaaaccccatctctacccgttctggagaacaggtcacgcctgtcctggagacagtgtgccgggaaaagggaacgtggtactcactggatgcacccaggccggcccgagcctcccaccgcagacagtgtggaacagagtgagcctgagctgcccaaggcgatgccctttgtgctgtatgactggaggcctctccgcgtgggtacttgggggtggggccacaaatctggcgaaaaacttcatgctggccgccgtgaggttttactccagcgttcccgccattgtcatggcgggtcttcgtcctaaactgagaagaaaagcattcctgtttgatcaccgccttagttaccagttctggatcagtcagtgtttctgcatggaataacaaccattaaaaaaagcactgggttctgccctttcatctttgtaagagattcttgcctctagcaatgacaacctgtgatgtctcacagtagagcacttagcgcagaatcaggtccccacggctgttgctcaataaaagtggcggaataaagtgc

SEQ ID NO: 118053 - DNA, 1000 bp, Homo Sapiens
ttttgggaagcgcttcactccaggttggtagcttctttggagacttgtgataaccctgtcatcaaggtcctgtgagaacgggagaggcagttcctaccttgggaatggaagattttctctgcagtttgctgaggcccaggaggggcgctattcaaagctgcactgcaaagggagtaacggactctgcttctctgcagtgcaaagggtgtaagggactctgcttctctatttttggaagcagtgatctgttcacgtctctccccagtgggctcctaagggggcaggcgtgtgagtggacgccatccgaagacagcacttgacctcgggtggaagccaggctctttgcttggcttctctttcctctgttcttgatgagaaccacccttgcttgaggaattctgaagcgctggtgacccctggggtatccgggaggatggccgcaccccttcctgctgatcacccaaacgtggtctcccgtccagccctggctgcagcctcccagttcccaaactgcactttacatatcaatccatgctgcctgatccctgtgggacctttgacagcagggatgggggtctaacagctgtagggtgctgccactccagcaggcgtcggttcaaggcctgagcagcacagggacatggacccagccacgctgcagcagctcacacctctctgcggttccctctcacttttagatcggaagccagtttctacacacttgcctctcgctacagcgtcctcctcaccggccgaagaggagaaactcattgaaatcctggaacagctggctcagacatttaaataggccaacccagacacagtgcggtaccagaattgccttagaagataccagaaggtgcggtctagggaccagtgaataagaagaccccacttcaacttcccctcgaagacgttgtgcctcacagcgaggcctacaagggatgggaacttttatttcaaaataaatactaccgaggctgtgatcaggctcaccttg

SEQ ID NO: 118054 - DNA, 1000 bp, Homo Sapiens
caggacaagagcaggaacatgtggagtagtgatggtctgaaagaagttggaaagaggaacttcaatccttcgtttcagaaattagtgctacagtttcatacattttctccagtgacgtgttgacttgaaacttcaggcagattaaaagaatcatttgttgaacaactgaatgtataaaaaaaattataaactggtgttttaactagtattgcaataagcaaatgcaaaaatattcaatagatgcactattcttgtttttactgcatgaacgtaatccagtatttggaaagtaatccagtttgaaatgtgaagatgtattccggcagaatagtgagtagaatgacatgcttactatacagaaggcaaaaataggactctcaggtaatagtttaaggaaacccttgattccttatatatgtttaagaaggttagctttctgtttctttgcagtttttcttctagagtccatagcaggaaagtatgtaaccagaattggttagtgtgaccccctcaagtagcaagtgatggaaaataagagtcaaataccttgatgtttgtgatctctaactcaaaaaatttgaagtgttttaagttgtttctgggtaagggagatgttaggagaaaggaaatgctgtaactaaagctcaattattatcagttctatgctaacgtatacattttaatcatagttacctaagcagcatgcattaattgaaccttaaaatgttcccagcaggctggtctcaaactgctgacttcaggtgatccacccgcctcggcctcccaaggtgttgggattgcaggtgtgagccactgcgcctggcctaaacaaactttttgaaaagctgtttctaaaagattccttaaattcagatatgacagctaattacctcatcataaattacttttatactaattgtttccagggttttagagtagttgaatgtttatttcacaaggcaccctaaattctatagaaataaaacctcagatgagtctc

SEQ ID NO: 118055 - DNA, 1000 bp, Homo Sapiens
cggacctcttcgggctggggctggaggaggccggacccaaggagagcagtgaggaaggtaaggagggcaaaaccccctctaaggagaagaagaagaagaagaaaaaaggcaaagaggaagaagaaaaagctgccaagaagaagagcaaacacaagaagagcaaggacaaggaggagggcaaggaggagcggcgacggcggcagcagcggcccccgcgcagcagggagaggacggctgccgatgagctggaggctttcctggggggcggggccccgggcggccgccaccctgggggtggcgactacgaggagctctaggccggcgtgggcagtggccgccctggggcggggggcgtgcctgtcactgcctggggaggcatttgcctctgtaccatcgcctttgccgctgccccgtggctgccgtgtgcgcttctgagctggaagaggccgggcattggtggtccccaggctgggccctgcaggtgctgggccttcaggcccagtgtgagcctgctctgcaagaagggaggggacagctggcttcagccaggctcggtggacaccctggccctctcggggcagagccgccagtgtttctcagggatgtgactgaggcccaggagggacctgtgagggtctgtttacagaggctgggcaggggccgcttggctgtggggtgtgcgctgccccggcacctgcttgccctccgcgctcatctggggccgcagcatgcctatggttccgcttccggccgggagccctgaacacgggtgtgcagactcaccctaaagggcggcccaggccccacgctagaaggctggcgagaccgaaggcagcatgtgaggcctctcctgggagtgggggttgtgtttcccacagtggcctcagctgcgcccccgctcaggtgagcccgaaggcaggagccgggaggcactcctcccaaacactccactcagaccataaagcactcctgtttcactctgaaaaaaaaaaaaaaaaaa

SEQ ID NO: 118056 - DNA, 1000 bp, Homo Sapiens
cctggactccgaggttttctgtgattccctggagcagctggagcctgagctggtttggacagagcagcgggcagcatctggaggaaagcgtgatcccaggaacagccccgtgccccccacaaagaaagaggggttgcggggcagcccgccggggccccaggagttggacgtgtggctgctggggacagttcgagcactacaggagagcatgcaggaggtgcaggcgagggtgcagagcctggagagcatgccccggccccctgagcagaggccgcagcccaggcccagtgctcggccatggccccttgggctcccggggcccgcgctgctcttcttcctcctgtggcccttcgtcgtccagtggctcttccgaatgtttcggacccaaaagaggtgactgtcagtggaggggtctctgcagccaactgagactatcttgctgtgccctgagccttcctagggtttagaagaacagcattcaaaattccccgtcctgtcagtgtttgccttcgcacctcctcccctaaagcagcgcggggggcaaataagaccccacccctccctgcagcttcacagggacgcttccttccctccccgcaaccaccccaggctcccctgggaggctgcagttgtggtacacgtccccggtgctgggttggccgtgactcgggggcggggcgatcgggtctcagcccctgccttccccagtctctgggtcacccgaattttcccacccctgcttctccccgaggaggttgagctcttgagcaagttgggacttgggctggggcctggaagaatgattggctgggaggccgcgggagggaggccaggaggcccggaccagttgggaggagtgagcaggccccgggggagggggatgagcgcagtttgctcgctttcctcccctgccggccccctccgcccccacacacactcgggacgtcttcattgaagattcacttacaaaggaatgtttcactaaataaaagaaaaccag

SEQ ID NO: 118057 - DNA, 1000 bp, Homo Sapiens
agaattttcaggcggtcaaaagaaaatggctggattaaggagaaatatggtcaacttgaagaatatctcaattttgcggattactttcaagaagagaagtttgagttgtaacacatttccatcagagaagattttttaaattcctgtaaatgtgaagatcatgattcttgtttttctgtatcatgtgacatgtttgtacattttatctatatcttcatggcaaaatattttgtttaaaacatgattatcttaattcctgtgaagtggcactctacactctaattaaacttttatctgatgtacataaaagcattatcttaatttttaagtctgtaaatatattttaaagttatataataatggctttataacagatgactgtcaagtgaatgagctgttgatatcctgtcagtttagtcaaaatatattgtatcttaaaaatgtatttagactaacgtctacatgtatttttacggaattcctggccagatctgtttattcttttacagtattaaatgattttcactaatatattttttactgctatcatctaaatcagtgggccatggaagaaacctcatatatcattcagttcaatcccattgcttcagaatcagatcatagcatatctattctaagtagaggaatgcttttttccttttcttgaaagtttctctttcaaatagatttcaggcctctagagtctttcaaccctcacattcaggaataattttatgtaaattttcatgctttataatgttcttacttttttctattcaattttgtctatatattgatgattaagatgtattttatttatttttatccatagctttttccatataagtatgtatcttagggtcagaactgctgaaagagacaaactcagccaaaaacacttggaaagcatattttggtatctgcattgctttgcatatctaaattttcccataaagtaataaagtaaaatggttgcagaggaaaaaaaaagaaaaaaaaa

SEQ ID NO: 118058 - DNA, 1000 bp, Homo Sapiens
caggctggccgccggaggctgcagcgtgagctggaagatgtcacagagtcggccgagtccatgaaccgtgaagtgaccacactgaggaaccggcttcgacgcggccccctcaccttcaccacccgcacggtgcgccaggtcttccgactagaggagggcgtggcatccgacgaggaggcagaggaagcacagcctgggtctgggccatccccggagcctgaggggtccccaccagcccacccccagtgaccctaccctgtccccagatgcactaacagatggggcccagcccccttcctccctggaccccacgggcccctgtcccaggaaccccgccctctgacttcttgccctttggaaatggtgcagcactctggcatttatcacccccacctgggtcccctgcaacctcccatcaaaggatgacccctaaacacagaggagcggggcaggcagggaggcaaggactggagctaccttgcttgttgggggactgggtacagttggcaagctgtgtttccatcagctccctgtcctcctttcttccctcgttattgatctatagacattaggaagggagtgagacggctcctccaccatcctcagccagtgcaacccattccctctgcttctctctctctctctctctctccctccctctccttccctaccctctcaccatctttcttggcctctctgagggtctctctgtgcatctttttaggaatctcgctctcactctctacgtagccactctccttcccccatttctgcgtccacccctgaactcctgagcgacagaagccccaggcctccaccagccttgaacccttgcaaaggggcaggacaaggggacccctctcactcctgctgctgcccatgctctgccctcccttctggttgctctgagggttcggagcttccctctgggactaaaggagtgtcctttaccctcccagcctccaggctctggcagaaataaactccaacccgactggac

SEQ ID NO: 118059 - DNA, 1000 bp, Homo Sapiens
cctatgatttatagagaagaagaagaaacccagctttctatcagagcactgcaagagaagagtcttacacctgccctcagtgggagatgagaatggtcattatgacttagagaatgctacacgtgtaggttgctggtgtgtcctgaatccacaggcataaagcactccccatttttcctactgtaatgcagattctccggctcaaggtctagaatatttgatcctaagatcaagacatcatgcccttcgaatagtactgctctttgttttcaggagtcacgtgaacacacaactctcctatattcctcacaaacctcaggattgagcaaggtctttgtaatttttttggttcactttattgacctgggagcaaggtgctaattctgtggtcagtattcaatgtttttttcagtggagctttttctttgggccatatttgccttctaatacattcctgcaatatgtagtggtgatttcccttagcttcctcctactacctcttatactcatctccccaaattatttgcctcccttaaataagttttcctagaaggtaagctggtcaggcaatttgaaaaatattagatcccaagaaatctattccgtttgcattggacttctcggattccatgtgtttgcagcaggactacatcgaactctgatgtgccggattgtggcatgtctgcatgtctcatccatctattgtttttggtaactcagtttggaatttcagtgtctgtcttccctgggttgacattggaatcagcctctcctttgagcttattttaactcttgagcaacataacatagatttaatgtgaacagtttataccaaagggcagcctgtgcctgtttatggatcctctctgcctttgtacttgaagagcgcattttacatttccagtcctttcacagacaggagctccaaccttacgatggagaattaaacttgcttgtatttccactttgtggatgagaaaaaaaaaaaaaaaaaaaaaaa

SEQ ID NO: 118060 - DNA, 1000 bp, Homo Sapiens
ctcttcctcttctttgccgcggactccctttcctgcctccaagacctggtgtctcccactgtgagcccagctgtcccacaggcagtccccatggacctagactcaccttccccttgcctctatgaacctctgctgggcccagcccctgtcccagctcccgacctgcacttcctgctggactcaggcctccagctccctgcccagcgagcggcctcagccaccgcctcccctttcttccgggccctgctgtcaggcagctttgcagaagcccagatggacctggtgcccctgcgaggtctgtcgcctggtgcagcctggcctgtcctgcatcatttgcatggttgtcgggggtgtggggctgccctggggcccgtgcccccaccaggccagcccctgctgggttcagaggccgaggaggcactggaggctgctggccgtttcctactgcctgggctggaggaggagctggaagaggccgtgggccgcatccacctgggaccccagggtggcccggagtcagtgggtgaggtgttccgcctgggccggccccggctggctgcccactgtgcccgctggacactggggtcagagcagtgcccgaggaagcggggtctggccctggtggggcttgtggaggcagcaggtgaagaggcagggcccctgacggaggctttgctggctgtggtgatggggattgagttgggggcaagggtccctgcctagactgttgacgtcccctgggaaggggacccaaggatgaattggctgtgaaggatcctccctgagactggcaagggaggaggctgagcagaaggagtcatcatggaggagcggtgagaacatggaaccggactccaagatgacgatctaaagacccgggagcgagaagccaaggccaggttctgggtgtagggcccagagaagcagaacagcccagagccccaggtgcctggcctggcctagacctctggaattgagattaaacaatttggagttggat

SEQ ID NO: 118061 - DNA, 1000 bp, Homo Sapiens
aatgcatataaaatagaaaatatttggagattgcttatctgaaagtcttgctttcttatacacatggttctctcatattaagcctggtggtaactttttagtgtaattacctttagcacttcaaagacgaggaagtaaggaagggaatgcaagactagtgcataaaaatgcaataggtgtcatatgtacagcattcttcttagagttgccttttcatcccaattacagtgagtctgatttccatcctgtatttgcataatacttgtcttaaaataaaagcttttatgattgggaatttatctgcctaatcagacttattattgagacgtcaatgggacgcatttttctgttgagctatgcagtcgtcaaaacagcgatagacagcataggaggtttgaagcagaaatgaaatgtgttattcagagccaatgttgtacatagagcattttcactattgctgaatgggaatgattaaaaacaaggtatttttcgggccaggcggtggctcacgcttgtaatcgcagcactttgggaggctgaggcaggaggatcacttgagcccaggagttcaagactagcctaggcaacatagtgagaccctgtctctactaaaaataaatttaaaaaaaattagctgagtgtggtggtgcatgcatgtagttccagctactcaggaggctgaggctagaggatccttgagcccaggaggttgaggctgcagtgaggtgtgattgcgccactgcattccagcttgggcgacagagcgagacccagtctcaaaaaaaaaaaaagtatttttctcttaccgttacagtattctgattatattactgacacagtcaaaatgattaactgtacaacctgtatctgctgggtgttcttgttatcatattgtaaaacagctttaaaaatatttatattttaaaaactgtatgtgacattaatatgcctaatgattaaaattatagtgatgaaataacaaagaaaaaaaaaaaaaaaa

SEQ ID NO: 118062 - DNA, 1000 bp, Homo Sapiens
tgggaatggcaagctgaggtcccaagcaccccctgatgtgtggaagaaagtgttagggggaataaccgctggaaaggaaccccccaatggaatactgcccccctttgaactcctgtgccagtgtctgtgccagctggagcctcgatggctgccaccctttgtggagctggcacagcagcagggcgggccgggctggggggcagggggcccaggactgcccctgtatcgccgagctctggcagtgctaggtgaggaggggaccaggcctgaggctctggagctagagctgctcttgagcagtgggcggcctaaagctgtgctccaagctgtcgggcagctggtgcaaaaggaacaatgggatcgggctctggatgctggcctggccctcggcccctccagtcccctgcttcgaagtgaaatcttcaaactgctgctggccgagtttgcccagcaccgccggcttgatgctcacctccccctcctttgccgcctgtgcccaccagaactggctccagctgagctcctgcttctactgaggacatacctcccagatgaggtggggcccccaaccccattccctgagcctggagcagagccccctctcactgtgggcttgctcaaagccctgctggagcagactggggctcaaggatggctgtcgggcccagttctaagcccatatgaggacatcctatgggaccccagcactccacccccgactccacctcgggacctatgactacccttcaggcatcagaacactcagggcctggaggcttgcttgggactggaggcttgcttggacagttcctctgtgtcactgacacaggaaatcatttctaggacacagtgatcagggaagggtgcctgggacttggagggtcccatgtatggacctgtgtatgcaatactgttctgtcatctggagctatttttaagatgtgtgtgttaaatatatacatagtttaatataaaaaaaaaaaaaaaaaaaaaaaaaaaa

SEQ ID NO: 118063 - DNA, 1000 bp, Homo Sapiens
catttgctttatcttagcaacaatgccaactcaggagagcagacggccgatttcagtgaagtctggtagtcaacagatgttatttcagtctcagtgcatctcctctggctttctttgactgaaggtgtttataggaaggaagttaaaaaaaaaaaagctcattgagattctttaccaattctttacaagatttctgggggtgacagggaaagcaaaaggacttcaaagcaaaagggtgcacaagagcttacttcaccctgaaaatcagtattattaatgaaaagtactgttttcttaaagaagtcgaatgtcctttagatgaacaagaccaagtatacatctccattagattaaaatgtagcacagggttaaaaattatcagtttaatctctttaagaacagtattatcagagtttaaaatgagttagctctgtttatctacacacagcaaacccattcgcagcctcttggccacatgtattcagatgtttgaaatagtgaatcatttcattttcattctaaaacaatactgacttagccatataccttctgtttgtcaatctgaaacttgcttacatctaataagtagacctcttataacactgcaaccattctaagagttggaatttatttttgccaagtattaagtactgttacatctaaaatacagaatgtcaaatggttgcatagcttgtttcccacaacaaggaggaaaagaacaggaatacaaactctgtaatatgctgataaagaagccttagaactgccaactggcttgatggttcaattagtaagctaatttctcccacacccgctccttgatttttagactaattttcccaaagcaaggtttagtcacacaaacttgaaagtacatttaaaatgttcttagttgtcatcctacttttattgcctatggaatatgctaatttctaaaaaaaatacgggagaggcaccaaacccctaaattctagtgcaataatttaaaaaaaaaaaaaaa

SEQ ID NO: 118064 - DNA, 1000 bp, Homo Sapiens
acctgcggcctcaccgcgggcccagtgcccaggctggagcgcacactttggtccgcgcgccagagacgctgggagtccgcactggcatcaccttctgagtttctgatgctgatttgtcgttgcgaagtttctcgtttcttcctctgacctccgaggtccccgctgcaccacggggttgctctgttctcctgtccggcccagactcttctgtgtggcgccgccgaagccaccgttagcgcgagctgctccgttcgccctgcccacggcctgcgtggctggggccgagtcccaggggccgcacggagggcacagtctcctgtcaggctcggagaggtcaggagaccgaccccaccactaactttggagaaaatgtgggtttgctttttaaaggaatcctatatctagtcctatatatcaaacctctaactgacgtttcttttcgaggaagtggcttggtgggtgcagcccccgccggttccgttgacgctggcaccttctgttgattttttaagccacatgctatgatgaataaactgatttattttctaccattactgaacattaggacaaacacaaaataaaaaacaaaacacagacaacggtgctgattctggtgtggtttctactcaccacgtgaaataaactatcaactgtataaagagaacaaagtgattttagaataaaatgcaggaaaaacttttttaaagatgttagtcttgtagcgtgaataaatttgccatcaccttttgtgtggtggcctggcaggtcatatacttttttttggcatatacctttttaaagactgtaattagtgcagtaacagtggggttttttttgtgcaactcttctaaaaacattcataatgcagtcatgtttatttttttctgttaaaatgtttttgacagttttaagagcagtcttttggctctgaccatttcttgttctgtttccaatgaaatcaataaaaaaaaagaagtactttaaaaaaaaaaaaaaaaaa

SEQ ID NO: 118065 - DNA, 1000 bp, Homo Sapiens
gcccaactctggcagtctctcctggcagatctccccagagtggtccttgcttctcacctggattcctgcttgtgcaggagcctgtgtacacagggcctccctcacccagcctggcccctctgctgagcactttgcgctgctcttgatgggcagcagtgggactgggaactccttagagagggccttgcagctttacactggaataagtctgcctctgcctctgcctcaccctgctggctcctggtgggtttcatcccaggcagagttgacattgctggaggggtttggtggactcctaagaatcatgaaaccacaggagcatgtttaggaagagatttgtctctggtccctgtctctgaaaggacacagatgctaaatatttattgtcttagatcatggattcctgatacctctcactcaaggggaccaaaagggacccccccgtgttcatcccttgtaaggtgagttcagtctacgttgtctctttccagtcactggatgcgtggcaccaactggtcaatgggtgcttggtgccataccctgctcaccctagtctctgcaggccatgtcctgaagggttcctcaggaggtcgggactagggtgggagaggcactatctgagacctgcaatcactcttgttggtcttgagcccattcatttccaaaacatccatctttctccacttcccccaggtcttggttttgagaaacagcaggcatggctgagtgcggtggcttacacctgtaatcccagcactttgggaggctgaggcaggcgggtcacctgaggtcaggagttcaagaccagcctggtcaacatggcaaaagcccatctctactaaaaaatacaaaaattagccaggcgtggttgtggcctgtaatcccagctactcgggaggctgaggcaggagactcgcttgaacccaggaggtggaggttgtggtgagctgagatcacgccattgcactccagcctaggcgacagagtgagactccatctc

SEQ ID NO: 118066 - DNA, 1000 bp, Homo Sapiens
ttatcccagaacttagattttatcgacattatgcaaagcttaactttgtcatagatgatagttgcataaacttcgtcagtctcggctgtttgtttattcagcatggtcttcacagtaatattccttgtctctcaaagctattatatattgctttgtcttggccaattacttcagcaagtactgagaactcattttctaccctgcctcgtcttaagacatatttatgtaataccatgggacaagagaagcttactggcccagccctaatggctgttgagcaggagttggtaaataaactaatggagcctgaaagactcaatgaaattgtggaaaagtttatcagtcagatgaaagaaatataatacatgctcatttgaacttacctaaaagacttgtatttccattgggatgttttcatttcaaaattgttcaaaattcaaaagacacagaacgataaacagtgaagtctccttccctcctttagaactcattttctcttcccaaaaagtgttatcttttccttaaatatccctctagaggtatttttcctaagtggtattgtacggtgtatactgttcttcagcttgtcttctctgtgtaacatatttttgagattgtcccatgtcgttacatgaagagtttcttgattcttggtctataattgcagatgttattgtatgaatgtaccataatatatttgagcagtccctgctgacatttttttcctaaccttttgctattataaataatgattcattttataaccttttatataggtcacattgcacatgagtgagtttactgtaagctggaaatctaaagttagaattactaggttaagatatgtgcatttttacttttgatagatattggcaagttgccatctataaggattgtgccagtttacagtcccacccacaatgcatgagagtgcctattaaatctttgtaagtgttaaaaaaaaaaaaaaaaaaaaaaaaaaaaataaaaaaaaaaaaaa

SEQ ID NO: 118067 - DNA, 705 bp, Homo Sapiens
ggcgcaaagcatgctggtctcaggcggtctccgctcaacgatccttcctcaaagcatggttgctgagtacccagagttgcgaggagttttttaactgatttagccaggtggcaatcatgagtgaatggatgaagaaaggccccttagaatggcaagattacatttacaaagaggtccgagtgacagccagtgagaagaatgagtataaaggatgggttttaactacagacccagtctctgccaatattgtccttgtgaacttccttgaagatggcagcatgtctgtgaccggaattatgggacatgctgtgcagactgttgaaactatgaatgaaggggaccatagagtgagggagaagctgatgcatttgttcacgtctggagactgcaaagcatacagcccagaggatctggaagagagaaagaacagcctaaagaaatggcttgagaagaaccacatccccatcactgaacagggagacgctccaaggactctctgtgtggctggggtcctgactatagacccaccatatggtccagaaaattgcagcagctctaatgagattattctgtcgcgtgttcaggatcttattgaaggacatcttacagcttcccaatgagaggccaggaagtgtgaacatactgatagaaaaagactatattttatccctcataaaatgttttaaatgtaaaaaaaaaaaaaaa

SEQ ID NO: 118068 - DNA, 1000 bp, Homo Sapiens
ggagaaaggaggaaaaagaactaggagtaaaacgtgataaaaatgggaagatcattgatacaaaaaaacctctatttactagctttcaagaagagcaaaaaatcatcccactgcctgctaactgcccatctattgcggttatggatgtttctgagaatattagagcaaaaatttatgctatattgggcaaactagattttgaaaatttacctggcctatctgctgaagattttgtcaccctttgtatcatacatagatatcttgattttaaaattggagaaatatggaatgaaatatatgaagaaataaaattagaaaaattaagaccagtcactacagataaaaaagctttggaagctattacaacagcatcagaaaatattggaaagatggttgcttctctgcaaagtgatataattgaaagccaagcatgccaagacatgcaaaatgaacaaaaagtatatgcaaaaatacaggccacgcacaagcaaagagagctggctaataaatcatgggaagatttcttggctagaacatcaaacgctaaaacgttaaagaaagcaaaaaggcttcaagaaaaagctatagaagcctccagataccataaacgaccacaaaatgcaatatttcaccaaacacatattaaaggccttaacacaacggtgccctctggtggagtagtaacagtggaaagcactcctgcccgattagtaggaggacctctggttgatacggatattgctcttaaaaaactgcccattcgaggaggagccttgcagagggtgaaagcagttaaaattgtggatgcaccaaaaaagagtattcctacgtaatatactatagagactttttgaaataaagtcagcttataattttttagctgaatatatctttatacatatgtaaagccaatattttagaataagtattttagtataaatattttagtaaaatactataaaaataaaaggacatataatttaaaaaaaaaaaaaaaaaa

SEQ ID NO: 118069 - DNA, 1000 bp, Homo Sapiens
ttcaggtttgatgtaagcatgggcttacatcccccaggtacatacttttacttattgtgggataacctggcactagtaggcaggtaaagtcacaaatttggtgtcttttcaccttttgactgttgacttaatagctcctctcactctgcctggagatacttcctgcctcagatgaggagccagaagaaacagagcccgacttgaatgaactcagctcagagttctaaggaccagcattctgggggccattttctctacaggcaaatggaattgcttttccataacatccaaattgtaatgtggttgctgctgaaggaggaggcagcagcgaggtcctgcggtacccatggggtgatgctacttctgcatgcatctacagggcatctgacacctaacatgagacgtggcatgtgagatgagacttggcatgtgagacatagggtcactagagacccttctgggtcagaggagagagactgaattggactaaacccgtcctctgttcccagcacgtttctcatatagccctcagtcactgagggagtcccccgcaggattggagaggcacattcccttgggacagaggctacaggttggagctttttttcccctgtcccccaaccccatccccacctccacttcagaacatggcaccccacccaactggccaagtgttaagtgatgtgcttattgagagcaactccgggtgtcttttaaaatgtagagaaaaggtgacagtttaaggaaaaatatatatagaataccagaaatgccgtttacccggagaatttttttctccccatttgttttgtttttactcaatgacaccatttttagttttatttcctgatagcaaaaggaaaaaaaacacccatccctcaaaaaggccaaggtcccgtccccctgttgtcggtgatttgtttgtctttctgataggttgaaaattgtgtaataaacttgatgacgctgtcaaaaaaaaaaaaaaaaaaaaaaaaaaaaa

SEQ ID NO: 118070 - DNA, 1000 bp, Homo Sapiens
ttttggccttttggagtgggggaaggacaaatctgatcctgtaatctttttctttccagtaatcccttgtgtctgttgcatgaggacatggacaataaagtagtatatgatcctcagatacagggagaaggacaaggcatacagcttattgattagagctggcaagcatctgctcattatgtttggaattgctttctataagaaaattgcccactactactaacttgatcaacaatgaattcaaaatagttaacctatgaaataacatcctctcaaatgtttgctgatgaagtacaagttgaaatgtagttattggaaaagtctgtaacctgtggatcatatatattcaaagtgagacaaaggcaaataaaaagcagctattttcatgaatagacaaagttgatttcaggaagtataaattatattctgcaccgaacaaggaacagaaattattgcatctgtggaacatatatctggagttactatactttactgaagagcaaggcataaatttagactaaaatccatccagattacactcattctttaggctactcctggatacttcatttaaatttgattttcgaggtagtgagatgtcggcaaggtttgtcctgtatattaggaataaaggaaaagttctaaactgcctctgcaatgacttgtagtcagtggaagagtatcactttcccctgatcatgaccactaaactgtaaattgatataaattagttttctctcgagttacacccaagtaatgaagacttaagagaaccttggttgaaataaatttccaatagtttggagactcataaataccatgcaggtgtaaccactgccaataggctgtttctatgcttatttcctattttgatttttactttgaagataggaatatctaaattatatctctagggagaaaatgttgtaaaaaattaaaagtacatccctgattgtaaaataaagttcaaaaaactgatttcaaaaaaaaaaaaaaaaaa

SEQ ID NO: 118071 - DNA, 1000 bp, Homo Sapiens
cacacacggactctccgaatcagggctgggcctctgtgccaggccatcccgtctttggagtgtatcctatttgaggtcaagaaatagcctgctgtccttcccaccttccctgagcagcacctacagaacagcaaccgtgatggtgtgtgaaagcaacagtcagagactgctatacatttctgtgggtgggggtagggaatactggctctgtggccctcctcagagctgggaggccaagggttcactgggcttgaatcctctctaagcacctaccccattatggcctaaacctcctcagtggaccacgggaaatcatgttggaccaagggtttccatgttcaaacagtcaacaaggccctcccctaggttgagatatttttgatactgaaggcccaggccccccagtatggcttgctgccagcaagcagcaaggattctctcgtgggtaacgctgtagccaggcaggaccagcctcttctgggagacccctctccccacgtagggtttgtgtagtgctcccacatcctgcttattgcctgccacccctgcttctcgcctggacctcttggtattccgtgtacaccatccttgctgtttcttgcctctgtgccttcaacctgctgctcctggcctgggataccttttattttcttttatttcttcttccttttttttttttttttttttttttaacctacaactagctctcagttcaggcactgtctaaagccccaggctgggttaggtggtctaggataccaactccccctcaacattttaccttaatccaacagtacagtaattagccgaaacttgcctggtttttcctactagactgtaagccctctagggacagggacagtgtcttattcatctctgtgttcttagtgcagagcctggcccgctgttggtgtttaataaagtgtgttgatctgaaatgccccagaccaaaaaaaaaaaaaaaaaaaaaaaaaaaaaaaaaaaaaaaaaaaaaaaaaaa

SEQ ID NO: 118072 - DNA, 1000 bp, Homo Sapiens
cgcgcagtgcgcggagaagttcgcggtggagcggccgcaggcgcaccggctgttcgtgctggtggacgggcgctgcttccagctggcggacgacgcgctgccgcactgcatcaagggctacctgctgcgcagcgagcccaagcgcgacttccactttgtctaccggcccctggacggtggtggcggcggcggcggcgggagcccgccctgcctggtggtgcgggagcccaacttcctgtgaggccctcccggggcgcctcccctcacccccaggcgcacgtctggccccgcctctggctgcgcactcccgaccgcgacgtccacgcagcagagggacatgggccattccatgacgtgcccaggccaacgtcgcaggacagttgtgaaaataacatgacgctcgtccaaggccacttcctgagggcaagtcctaatagccctgagacaccgagacggcatgttcttcattagacggaaagggaaactgaggctcaggagagaggcgctccaggccgctgcagccaacaaaccggcgccctcttcacacgtagctcctcaggccattccccatgagtcccccacacccaccccatcctcggtctttgcaaagaagggcccgagcttagtttccccaggactggcctaggaaggagcaccggccacagctgctccccgtgccactcagggtggacccagcatctcaggagcacctcagggtgtcggttaagagacaggcctccacccctgcaccagagcctgctcttagctcccggtgcccccagaccccgcagctctgtgcccggcaagaagcagctagacacacgccagggcgccaagcacggccagctccgcggacccatggacaagcccagccccgcctcagggaaaacagggcctttccctacaggacacgccccagagctgtggcagattgcaggagccatcgtgtggggagaatttaataaaagcccttttgaaaaaaaaaaaaaaaaaaaaaaaa

SEQ ID NO: 118073 - DNA, 1000 bp, Homo Sapiens
gcccgcaccgctgccgccgttgccatccagtccgcagtgggcactgccctcgtctttgaggggccggctgaacaggaaaagccagggttctctgtgtcctagttgagggaggcttgctgaggcttctctaaaggtggttgggcaagcacctatatagtatcacggggacagttgaggcaactcgtagatggagatttgggaaaagacgatgtggcctcctacctttccagtttctgttggcagcccttcacgtagcctcctgcctcgcctctacacctactaccctgtcggcccttttgccatgctgtcctcgtataactcggattctctcctcaggtgtaggtgcagggagtcagggaacccttagactcccctgtgtgcaagagcccaggtgttggtgtgtccctttaatgctactgtgctctctggtgtttctgattttcctgcctttattctgtcttctcttgtcctatctcattccagcccacatcttctcctttcctgattacttttgttgtcctgcctcttcaggtaatggtcacagatttggctgtaggcacgttaccagccctgtggcttcttgactcttggttccctgttaactctgtttctgagaaatgtgggtatggaggtgggtgggaaagctcacttccatgaaggatgtctccatgctaggagctgcctgcaccctggcagaggtggccagtcacgtgaaggtgggcagggcccttagcatggccacacatgtccccagggcagatcaaggggcctctcagaaccatgttccccagccaggtgaggaccattttcactgggacccaggccaaaaccatgtgggtgcacaaagccaggcactgccaagtggaacatgaggttatttccaaatcatgggagccaccagcagggagagggcaggatggaaaatcccctggagccggtcaactttttgctcatggctagtgaaataaagttgtttgagtactaaaaaaaaaaaaaaaaa

SEQ ID NO: 118074 - DNA, 1000 bp, Homo Sapiens
cagtgattgtggaaaaggcttcatcaagaagtctcggctcattaatcatcagagagttcatacaggagagaaaccacatggatgcagcctgtgtgggaaggccttctccaaaaggtccaggctcactgaacaccagagaactcatacaggagagaaaccctatgaatgcactgaatgtgacaaagcattccgctggaaatcacagctcaatgcacatcagaaagctcacacaggagagaagtcatatatatgccgtgattgtggaaaaggcttcattcagaagggaaatctcattgtacatcagcgaattcatactggagaaaaaccctatatatgcaatgaatgtggaaaaggcttcatccaaaagggcaacctccttattcatcgacgtactcacactggagagaaaccctatgtatgcaatgaatgtgggaaaggcttcagccagaagacatgtttaatatcccatcagagatttcacacaggaaagacaccctttgtatgtactgagtgtggaaaatcctgctcacacaagtcaggtctcattaaccaccagagaattcacacaggagagaaaccctatacatgcagtgactgtgggaaagctttcagagataaatcatgtctcaacagacatcggagaactcatacaggggagagaccgtatggatgctctgattgtgggaaagctttctcccacttgtcatgccttgtttatcataagggaatgctgcatgcaagagagaaatgtgtaggttcagtcaaattggaaaatccttgctcagagagtcatagcttatcacatacacgtgatctcatacaggataaagactctgttaacatggtgactctgcagatgccttctgtggcagctcagacctcattaactaacagtgcgttccaagcagagagcaaagtagccattgtgagccagcctgttgccagaagttcagtctcagcagatagtagaatttgcacagaataaaaaccatatgaatgc

SEQ ID NO: 118075 - DNA, 1000 bp, Homo Sapiens
ctgggaggtcacactgcccgtcggaccttggcatgctccattcagctgacctgctgaggacaggcatcgccgagactccttgggtcctccccgccctccctcatgctgccacaagctgctgctccaaggcctggccacatgcagacaggaggaagctgagctcgacattaggcctcaaggctgccatctgtcttgtagggcctggccttgtgggcagggggcagtcctgtgccttgtgggccctcagcctctgagggcagagatgctgtcagtgccgcaggtgcatcacatacttctagcatcctctccaccctgcattccaaatgctgcttgctgcctgccctgccctccgatgcaggggtggggtggggggcggagtcccgcccagcatagctgcagtgtcacaaagccatggcagagggtcctagcggcgccaccctgccccagcctgaggaggagggagagggaggaacaaccctgggcagacggggtctcagggacctgtgtccttccgcctccagagctgcccagccacgggctctcagggtgctggggcagccccaggtcccctcttgaactcagctggggccaggggccctcagaatgaaggcaggcaccaggcaggagcagcatccccctccttgacggtgctggcaggagggccgcgccatgctgactgcttgaacctctgctgacctgacagtgctggcgggagggccgcaccatgctgactgcctgaatctctgctgaggctgcctgcctgccgggcccagctcagcgccctctccactgcgaatcagtggcgatcatgtgatttctatttctgccccacagggtaagggacgagtcttctggaaggctctgccatggacatttgtcctcgggctcagaggccccaccctgccccacacctgcccctaatcactgcagtgtccagcccagtgttgaacagattgtagcgttctgtctcattacgagcaaataaatagactttcattgg

SEQ ID NO: 118076 - DNA, 1000 bp, Homo Sapiens
tggccacccagcagaacaagctacgaggatcgtgatcttgggtccggaggtgatggaagtggcccaagggtctcccttctcggtgaacgttcagctgctgcaggaccacggggaaattgccaagagcgagagcggccgggtcctgcagatctcagcgggcgtcagatacgtgcagctgtcagcctactctgaggtcaactttttcaaagtggacagagacaaccaagagacactcatccagaccccatttgggttcgaatgcatcccttatcctgtgtccagccccgcagctggggtgccggggcccagagctgccaagggaggggcagaagccgacgtgcccctgcccaggggagacctggagctgcatttgggtgccctccatggccaggaggacacccctggtggcctgcttgccaggggacatgcgccccattgtcccggggcctgtcagcgagtggagcagggctgtgccgagttcacagatgtcctcctggggccgcccccgcctgggtaccaccccttcctgttcctggacagcctccacaagaaggcaggcggcagatccagaggcggcctgcaccccagggggacaccacccacggcacaggagcctcctggaggcagcaggcctgaggggagagccacggaggagcaggctgcggcagcacacctaggggagtacgtgctcatgatccgcgacgtgaccaccccgccgttcctggggcgcaggctgcccccggccttcaaacacctgcgggtcgtagcgaagagggctggccagccaccccatgtcctggaagaaggccctgaagcctcaagcagctggcaggccgcccacagctgcaccccagagccgccagcgcctcggtgaggccccgtgtccacaggaggccacctcggtgtgaatggaaggaaacgctgcctctgcttgcgtgactctgctccccgattctccagagccccgtggttgctggcttgaataaaatgctcagtggcg

SEQ ID NO: 118077 - DNA, 1000 bp, Homo Sapiens
ttgcaattttttttttttttaagctcatcagctatcgtcagtgttagcatattttatgtgcggcccaagacaattcttcttccaatgtggctcagggaagccaaaagattggacatccctgatctacatatttaacttaaagtatcactcagtgaacctctgtcagtataatattgctttcaaaaagatggttatgtcaaaagaaaaaatatagctaagtatataaaggcataaaaaacttaagacaattacatgaacttattctcaaatattttacattttttgtaaactttcttaaaacatgagatttttcttgcaattttttttttaagctcatcagctatcatcagtgttagcatattttatgtgcggcccaagacaattcttcttccaatgtggctcagggaagccaaaagattggacatccttgatctacatatttaacttaaagtatcactcagtgagcctctgtcagtataatattgctttcaaaaagatagttatgtcaaaagaaaaaatatagctaagtatataaaggcataaaaaacttaagacgattgtatgaacttattctcaaatattttacatttaaagggttttacataaaaatttttcccttgttttatactggaaaattatataattcatgatctctaattttcaaacattctcaaaagtttagatcttcagagataagctctgaaaatatagatccatacatataaaatatctatgaaattcttttaaaaactattgtctaactacaaaaataatggcatatacatgcataaaccatctttaattagaaaatttagtaacagtcatatcaggcatcatcgatttttcttttcttagctcctgtattcttagaaccagattgctgaagcatgtttgcagccttcttctggaagttgcctgaatttttttcctccatctttttatcaccttgttcagaatgacaagtttgagacgattcagcctacaaaaaaaaaaaaaaaaa

SEQ ID NO: 118078 - DNA, 1000 bp, Homo Sapiens
gcctttgtgatagggagggaggaggtgctgactgaagaggagctgaccaccacactaaaggtactgtgcatgcctgctgaggagttcagagagcttaaagaccaggatggagggggagatgataaaagggaagagggcagcctgacgatcacaaatattcccaagctcaaagcatcgtggagacagctgcttcaaaacagtgttctactgactttgcagacctatgccacagacttaaaaactgaccaaggtttactcagtaataaggaagtctatgcgaaactcagctggagggaacagcaagccttacaggttcgctatggtcagaagatgatcttacatcagttgttggaactgacaagttagcagtttccctgttccctgaaggaacagcaataagaactttattctaagctaatactcattgatgtttgaaaaagaggaaaatttggatctttcttttgcttactaaacaccaagaggaaaagtagcaaagttggtgtgctaggattaactcaggtaagggtgatgtgttttaggattgagaacagcagacttgggaatcactgctaattgttacttaaagcatgttacagctgttttgttctcagttttaaccaaagccagtggacatacggtagtaataactaagtcttgttgtgtttcagcatttaataatagactttggaggtagacccctggtttaaatctaagtctagtttgaggaagtcacttaacctttattgaaaagactctggatttaataagctgtgtaactggtactcgatagttacccaaagttcagtctagatggcacaaaccacctctcagggaataaaccctaagacatcactcaaggaggacttcaattatttaattttgaactgttttgtcctctctggccataaaacttgacagtcatgaaaggtaaggcaaattttaagtgggttaagtttttaaatacgtatctactcattttctttaaaaaaaaaaaaaaaaa

SEQ ID NO: 118079 - DNA, 1000 bp, Homo Sapiens
caacagactctgcactgcaccatgggaggctcctgggatgtttggaagaagaaacgggcttctccttgagggggtagtggagggattttgtccccagcagtggcctctgagagtctttcagtgcctggtggggcagggcaggcctcttggagcacctcctccctgggtcagggcctggatgcaggtgccaagctctccatgtggtgcatgttgacccagccacgtggtgttgtcaagcaaacagcatcggcaggagacctggagctgaggacttggccctgcctgcactgtatgccattccttggtgatgaaatgctgtatatttggttttgaaaaaatgaatgtgctgggtatacacagcagaaagggtactgtccactttttgtatatcagtgtgaaaaatatttcccctagaagtagaaaaggctcatgtgctgatggataattttgagtcttctccattctctgtgaatgacccccttccccaggcatccccacctcctacctcgttcttagagcaaactaaagccaactgagggtgcacacacagccatgagcccacctgcccaggactactcccatctgcttcttcccgtccccgtggaagtggcccctgatatggattgtatctgtatccccacccaaatctcaggtagaattggatctgtgtccccacccaagtctcaggtagacttgtaatccccagtgttggaggaggggcccagtgggaggtgattggatcatgggggtggatttctcccttactgttctcatgatagtgagtgagttctcatgagatctggttttttgagtgtgtggcccctccccctctccttttgctctcttcctctttctccggccatgtaagatatgcctccttctccttcaccttccaccatgattgtcagtttcctgaggcctcccagccatgcttcctgtatagcctgcgggactgtgagtcaattaaacctctttattcattaaaaaaaaaaaaaaaaaa

SEQ ID NO: 118080 - DNA, 1000 bp, Homo Sapiens
ccaacctgaattacaggaattaacatctttattaacagtcaactccgagttcgtggactggcggaagttcctgttagtaacctcaatgccttggcccattcccttggaggaggagctccttgagacccttcagaagttcaaggctgtggataaggagcagttgggcaccatcacttttgagcagtatatgcaggctggtctgtggtttacaggagatgaagatataaaaattccagaaaatcctcttgaaccccttccatttaataggcaggagcatcttatagagtttttctttaggctatttgctgactatgagaaggatccaccccagcttgactacacacagatgctgctttactttgcttgccacccagacaccgtggaaggagtctacagggccctcagtgtggctgttggaactcatgtcttccaacaagtcaaagcttccattccaagtgcagaaaagacctcctcaactgatgcaggtccagctgaggaatttcctgaacctgaggaaaatgctgcaagagaagaaaggaaattaaaagacgacacggagaaaagggaacagaaggatgaagaaatccctgaaaatgcaaacaatgaaaagatgtccatggaaacactactcaaagtgttcaaagggggaagtgaagcacaggactccaatagatttgccagccacctaaagatagagaacatttatgcagagggcttcataaaaacatttcaagacctaggtgccaagaacctggagccaattgaagtcgctgttctcttgaagcatccttttattcaagacctgatttcaaattattcagactataagtttcctgatattaaaataattctccaaaggagtgaacatgtacaaggaagtgatggagagagatcaccttcaagacatacagaggaaaagaaatgaagacaaaagagtgtgatttttttaattctgcaataaatcttccaaaaattaaatgtgaaaaaaaaaaaaaaaaaa

SEQ ID NO: 118081 - DNA, 1000 bp, Homo Sapiens
ctgggtgccccgcgggacgctgccccgagcagcccggcctccacagagcgacctgcggcttcagggggttgggctgcgccccaggatgccccggaagcggcgggaaagcgggcgctgtgtcccacgtgctcgctgcccctgtcggagaaggagcgcttcttcaactactgcggcctggagcgcgcgctggtggaggtgctgggcgcagagcgcttctccccgcagagctggggagccgacgccagcccgcaggccggaacttcgccgccgcccggctccggggacgccagcgactggacatccagcgacaggggcgtggacagcccgggcggcgcgggcggcggcggcggctcggaggcagcgggctcggcgcgggaccggcgccccccggtgtcggtggtggagcgcaacgcgcgcgtcatccagtggctgtacggctgccagcgcgcccgcggaccgccgcgcgagtccgaggtgtgaccgccgcggctccggactggccccgggactggccccgggcacggaaaaggacacccctcttctggcgcgctgggtgcctttgcgtaagcccttccttctggaactcagtttagcgtctgaaccttggggaggtggaacaagttgctgccgaaggcccttccctgctcccgcggcgaagggggagggagaggcctcttggtccctgtggagacccggtctggggagtcacgattggggtgggagatgagcaaacctgctgaataaagttaaaacgttatttaaatggggagctgaggaaggagcaaacgggttttcgcggttaaacccgtgggttttggaatgtgtgttcccggctgtgtgatcctgggcaagaacttgacctccctggacgcagcggcacccctcggttattaaggagggaggagtaggggatagaagtatttcaaaatagttgtaatgcgcatggcaaagtgcccagcatatagaaagtgctcaataaacgataactgctgtgacttct

SEQ ID NO: 118082 - DNA, 1000 bp, Homo Sapiens
tacgccctctcgctgggcaaagaggaagtggcacccctcccctcaccacagatgctgagatggtagcatagaaatgatggccgggcgcggtggctcacgcctgtaatcccagcactttgggaggccgaggcgggcggatcatgaggtcaggagatcaagaccaccctggctaacacggtgaaaccccatctctactaaaaataaaaaaaaaaattagccgggtttggtggcgtatgcctgtaatcccagctactcgggaggctgaggcaggagaattgcttaaacctgggaggtggaggctgcagtgagccaagatcgtgccactgcactccagcctgagtgacagagcaagactccgtcaaaaaaaaaaaaaaaaaaaaagaaatgatatctggcccccccttaacactggagccccactcccttctcccatccggcccgagattagggaggattgactgtgtcagggatggcgggtggcctctctcgctgccagggcccttgtcagagcagccaggctggacagacggcctccctcctctccatctgaccggcacctgctgcttcggggcttaggccaccgctccctgtccccagaggagatagccccagatggactggaatgttgtggcatgagagcgcatgtgtgcgatggccccgctgtggtcccctctctgtccctccatctgtatgtgttctgtgtcccttgcatgtgtgcgtgttagagtgagcgcgtatgcatcaactcattgggctcttggctgctcacaaggcaaatttgacttggaaagactttcatctccttggaaccaagacttcctgagtccccctcaccctggccctgttccaccatggttatctgggtattggggaatggaaactttgggggagtgactttttaaagagacacttataatttctactactgcactactgtccattgtgggatgattaaacatggtatttaactgtgcaaaaaaaaaaaaaaaaaaaaaaaaaa

SEQ ID NO: 118083 - DNA, 1000 bp, Homo Sapiens
actttggtgcaagccgggagtttgggacagagttcacagaccattacatcgaggtggtgaaggctgcagctgatggagacagagactgtgtcctgcagaagtccagggacctcaaattcctcacaggctttgaaaccaaggcattctccgacgcccacgtggaggcagtgatgatcctgggggagcctttcgccacccagggcccttacgactttgggtcgggggaaacggcccgccgcatacaggacctcatcccggtgctgctgcggcaccggctgtgtcccccacccgaggagacctatgccctgcaccgcaagctggcaggggctttcctggcctgtgcccacctccgagcccacatcgcctgcagggacctcttccaggacacctaccaccgctactgggccagtcgccagccagacgcagccactgccggcagcctccccaccaaaggggactcctgggtggatccctcatgacagcctccatgggggattcagtccccagagcaggccgtaccctgctgtagtgcctcttatcccttccccgtctgccctgggtcagaggagcccccttgggcttcccagtcttgcctggctctcctccttggcccagaagctcaggatccctggggctggggaactcccaacttcgtgccctagatcctgcacctccccactcgaaagtgggtatccgaaaactaagccagggaagcggttaacttatctttgccaacatttgagggagccttgggccgctgcatgtcgttatgcagatcagactcatcagggggagccctcacctctgcctcaagcctcccgtggaaggcgagatggtcctggaggcagtcctcacctctgcctccctcgctcctccaacagctgccttctcccgggttccagcctctcagtgtgttggagaggtaggggtgcggggtgggggggagctgaatcttcaatcggaataaaagcagccctccccttccaaaaaaaaaaaaaaa

SEQ ID NO: 118084 - DNA, 1000 bp, Homo Sapiens
atattttgtagttgtgtgtgtgtgtttttgccttggtccccattatgggatgcattaggactggcctatgcatcgaaaatctttttgtttgtaaacgttttaaaaacaaagttccccggccaggcacggtggctcacacctgtggtcccggcactttgggaggccaagatgggcggatcacgaggtcaggagttcgagaccagcctggccaacatagtgaaaccccatctctactaaaaatacagaaattagccgggcatggtgtcgcgtgcctgtagtcccagctcctcaggctgctgaggcaggcgaattgcttgaacctgggaggcagaagttgtggtgagccgagattgtgcactccagcctgggtaacagagcgagactccatctcaaaaaaaaaaacaaaacaaaaccaagttcccactggtgatgcctgtctgacacgttttggtatttagtaggaaatgaagtgtttcgaagcttcgagagaagcttcaaaattgtcacaattgctgaaaacagaatgaatcgtgaacattatctcaatattttgtataatagacaagaccacagtgttttggttccctgacctgtttttgtgtttatgttaggatctgaatcatgttctgggtaaggggacgaggagcgaacactgcactaagatttggtttgccaaatcagattctttggtcaagagtcagtttggggccaggcgtggtggctcatgcctgtaatctcagcactttgggaggctgaggtgggtggatcactggagtttgagaccaccctggccaacatggtgaaaccccatctctactaaaacaaaaattagccaggcatggtggcacctgcctgtaatcccagctacttgggaggctgaggcaggagaatcacttgagcccaggaggtggaggtttcagcgagctgagatcacaccactgcactccagccttggtgacagagtgagactctgtctcaaaaaaaaaaaaaaaaaaaaaaa

SEQ ID NO: 118085 - DNA, 1000 bp, Homo Sapiens
ggactgagttttaagacagctgctaaggagctgtgtgagccaaaccaggttactttacctctctggatctatatttgctgatctgttaagtggagacaattgggtcagataatcttggtggtctttgcttattctgaggttcttgtacaacttggcctagttcacgtgggatgggattgaagatcttactgagttcttggatggaaatgtcagtaatgggcacttagtgccttcaggacttgttctatactatcccagaaatttctgatgctaaacttggcaatttttaaatgtcatattccttttctccaaactctttaaccacaagaattcagggaaggttatggggggtgacttagttatctggataatacatattgtggacaatatagcattatccttgggaatgatttcatattgttgaataaataggatcaacttcttgataaaccttagtcccaagcatttcatcttcattggatagtgttacatagtaatatatttatgttttcttttaatcatttcataacttggaatactaacatagtcaaaactctagggtaggtgatacatgagtttctgtagtaatctggttggagacatgttgtaattctgtatatatatgtacatttatcccatgcatgttatgcctaaactaagacggatacccctgaattaagaggtgctgttatacattgaccaggcttaagaatatctctttaaagtgtgtcgacatttaattgacctttggaagttcattctgttaatcatactcaaagtgctaaagctatggttgactgctctggtgtttttatattcattcgtgctttagcatataaattcttcagcataattgctacttatttagcaagagtttcctttatttgaaaatgtgagttgtgcttgtatttttgtgtctttctttctttctttctttttttaaactttgcttcaggctgggtagtggtagaggtttgaattaaaatgttttcctgtcagt

SEQ ID NO: 118086 - DNA, 1000 bp, Homo Sapiens
ccggccctgcgccgccgccggcatctcgggactgtcgctgcaggcgcccgcggcggtggccgagagctgggcgccgtggccggagggcgggagcctgcaaaccgagctgcgctggggccgcgtggagcgcgcgcggggcccccctctgcagctaccggacttcgtgcgccgggagctgcggcgcgcgtacggcacctacccccgcgccgacgtgcgcgtcacccagcgccgcggccagttcctgctgcaggcgacgccgcgcgtgctcgagcccgaccaccgcgtggagtggcgcgtgcggcgccggcccgacagcggcgacagcagcccagcccgggaagccgcggagcgcggccgccccaggaagagcaagggcctgagctgaagccgccgcaaggcctaggggcgggcccgcgtgcacgcgcttggctctttcctgtgtgtgccgccgccgacaggcagaagtgagccctcacctgtgcgcgggaggcggacgcgctgctcacctgtctttttggcttctcccatgactgccggccagtttcctgcacttgtttctctcgctttattgctggacggtgggagaagggcaagtgcaagacggaatcgagggcacctctgggtgttctgtacctcttttcttcttgcaccttgggaagtggaggacgtgggatggaagaagggcctggacctccctccttcctcctccccaccttctcctaaggagcttgccctgcagtaagccccaactttcccttcctcttttccctctatcagagtcgtcgcccacccccctttcccaccgctcccctacccccgccttcctgccaagccgagggcgacggagatccccagcttagtaagaaaagtaaataggccgggcgcggtagctcacgcctggaatcccagcactgtgggaggccgaggcgggcggatcgcttgagcccaggagaccaggttggagaccagcctaggcaacatggcgaaaccctgtctctac

SEQ ID NO: 118087 - DNA, 1000 bp, Homo Sapiens
ccccaacacctccttcccaacacctccttcccccttccccaacacctccttccccaacacctccttcccaacacctccttcccaaacccctccttccccaacatccttcccaacacctccttcccaacacctccttcccaaacacctccttcccaaacacctccttcccaacacctccttccccaacacctccttcccaaacacctctttcccaaacacctccttcccagacacctccttcccaacaccgccttcccaacacctccttcccaaacccctctttcccaaacacctccttccccaacacctccttccccaacacctccttcccaacacctccttcccccttccccaacaactccttccccaacacctccttcccaaacatccccttcccaaacacctgcctctcttcaaccccacaggccagagtgctgagacagagtggccttttggattcaataagtatcttgttctcttaaagactcagcaacgattttagaagtcgcagcagttttacatcacatgcagccaagatcagcttgctctacaagcaataacagaactacttagcacttcaaggttgaaagttcttcactaatggatccattgactaattgatcctggaaggccaaaggaataaaattcttttatataaataggaaaacaaaggcagagagctaaagcactaatcaaatcggggggtgttagagcaaaaacaggcttcagaaagagtattttaccatgcttcacatggaaaaaatcgagccccggagcgatgaaaggcatattttctttgtttctccaagtttcataaccgttcagttgcagaaccaagaatctaaaaccagctctgggaaacaaatgtccagatgccagcctcatagttgaacttggatttgaaaataccttcagcacttagaagagacattcaaatacatttcatttcctgttacccagattgttcggaaagtattaaaaatttttcatttacatgctg

SEQ ID NO: 118088 - DNA, 1000 bp, Homo Sapiens
cggggccaggtctgtgtggacgtggaggaagcaggcataccgcatgatgctgtacagtacaaatgattgccaaatgatgccacgaagccctgggatttcctacccatggatttattttgtttttatcctttaatttcatgttcacagcactgtgtagagcaccagacagacgggcactgctaatccttccaaaggaaagctccaaagatcccagcccgcaaggctgtctctggatggattctggtggatgaatggcaacgcggctctctgcagcctgccagtgcccagagtgccaccgcattagcaatatacaaacagtccaaaaaagtgtttattttttatggaatacggtgcaataggcagaggacaagggacacatcactcttctgtctgtggccctgctggagtcctttgtgccccccggagtccacacgccttccctgcaagacgagaatggggctgggaagaaagaggcaacaccacggctggcaggagccccgctgcactgctctgcagacccattggcctgaccctgagaagcagagccagcaaagcccgggacctgcccctctttctttcccttcacaccaccccagcctcaggatgtcaagccacctccggaacgtgtctacactccacagctaccccgcagcaatacgcactcttgggacctcgctgatctaggatggggaggcaggccaccgcccctcccaagactcctcaagaaagagccccgcggttgctccggaaactcgaggcactgcagctatgggcactgcctcagcctaaagacacaggggcgcctcccaatcaccgcgctggcggatgctcaccccgtcataagcagaaactagtgatcctggaaatgagatgggccttactctgtcgactaaatgaatagctattttcttgtcattttttaaagtgcaactcttgcttcatgctgcttaagttaccagatgaatgctgagaaataagtaatcacagacattttaatacc

SEQ ID NO: 118089 - DNA, 1000 bp, Homo Sapiens
acagagcccataggattccctcttctactttcttagacagcagggatgtcagggtctcaaactgcctaacactttgtagcttttcttaacacaaaagcaccccttctctcctaacttgggctctgaatactttcccaacaggaagtctgatctgttgccagacttcttggttagatggctcatacatttatctagagaagcacactcttgcttgctgtcaaactttagaacaccatggaaggtctaagggcatcctgtgccagggaaactttttaaggaattttatctatgggataaaccccatattccctctagtgtctactggtggctctaatactgctttgtgctgcctgccacacttgccctttgagcctgcgaatggccgctagtgagcaagctctgcttcagagcagtctagttaggtagaacagggacttaccagcttcccaaagggatctactcaccattgccaaactcttcatttccacattttgtgtaggtgtcagggaaccccaaactggtgttgctttggggtctctaaaggagattggctgacaccaccatttcccccagatcctgattctctgggggaggttgtttcttgagagtagatccagagtgtcaaggatctgttagatcctggaatcccttcttgcatccatccctccctggtagctaggtcccgatatactcctgtcttgtgagattgtcgagatgagatgggggaccactcttcctctgtccttcctctctcctttcctccatagcaaggacgaccttccctgctccatgcccagagtatagctagatcccttcccctccctaccctctgaatgtgtgctagatcaggtgccccactgtgtttcctgaaatccttgggagccggatctccccatctcccctactcactcttcccttttcttctctcagtgttgtctgaataaagtgtgaaatcttttgtgttttctaaattgacattttcaatgaaaaaaagaatcac

SEQ ID NO: 118090 - DNA, 1000 bp, Homo Sapiens
atcagtttgctatttagttttatgaattactatacatatacatgcatagaaatgaaatgctatactgataaattttaaagaaaatatgaggaagtggctataaatattaaactaaaagggtcttcaacagtaaagtgcagttatgtcatttaaaattccaatactttaaaggccaccaaattttgatgtatatgtccttgaagggctgctaaaatttatgaagaggactcacattttcccccatagaaatttgcagtttcttggtgatcatttaagcaggatccaaagaagttcctttacaaataagtaataagaaaaatgagtactaaaatacagctttgtgccttttaaccctatgccaactcctaaacatataagtagattacagtatacttatctgatcagagcatgatctgtttggccacatgcaagtgtgagcagaaatagagcagcacgtagaatagtaacttaaagcaagtcatcctttaaaaattctgagctaaaatctatttaccattgagtaattgaattaatcccataggaataagctccttgtaagtaaatccatgatatgaattagaaaaaaaaacagctggaaattgaagtttttgatgcctgtatactgggtatgaaactatttgatttctagtcttctgtgtttagcagttgtaatattttaatgattttgcttcatactcggttaatggaacataaacatatctttgatacttctttgtgagtgagagaatgctagatagggtggctttgttctttgtttaagttttttttcctgaatgtagttaatttatggcatctgttgaataaaactgctaaaatgacctcttaaaaatgttctgttgtatccccttttccaggtgaatcaatagaaatgcctgattgaattagtaggttaaactaaacaacatactgtcataggaaaactggagagcttaaccaacttgctcttagaaatgttaccttaaaaaaaaaaaaaaaaaaa

SEQ ID NO: 118091 - DNA, 1000 bp, Homo Sapiens
aagaagcagttggactcgggaagctgaggcaggagaatcacttgaaccggggaggcagaggttgcagttaagccgagatcatgctactgcactctagcctgagcgacagagtgagactctgtctcaaaaaaaaaagaggcagctgggcagatttggcctgcagggtatagttggctgacctcaatctagaagatagagttgtttcttagaactttgtaatattttggttagaaatatttcagttaactccagttttttcctagctattcggtcagcagaaaaagtttgcttagaacaaagggggtagtcctcttataacctgatatttgtcaacacagtataagctttctagttgttttcaaaattactgtaatggtttgtgtctgtatttgtatattatacctacaaacatacatatctttcagctactgaacacatcagaattggttttactttttaggttgttgattttttttaattaactattaactaagaataatacttattttctaattataagccaaaaacccctgggtttttttctcattgattaagccacttatttttataaggtatatttaaataattcccatcttctgatatgattttaaactctaaatcatgtgttactgttacaaaactttctctctccatgtaatcacacttagttatgagcaaagcagtgagaaagttgaggtgataaacaactttgcagcattaatgtaacaaaaagtttcagtatttgtcaggaaaacaaaagcttaggctgttaaataaaagctattctattttggtaagttgaaattcaagaatgtatatataatttcttaaatgtaagagtgcattaaatcaaatacaaaaattggtttttcaatgcatcattatttattgccataacaaattgtttggtccaaaatgaaagctatattcagaaggtttgcacctcaaaattgagtaataattaatgaaatgtctgtacaaaataaagtgcaagcagtgt

SEQ ID NO: 118092 - DNA, 1000 bp, Homo Sapiens
cctgcatcctgtgtacaacatgacatttttaaccaatccaatctaaaaatgtgccagaatccacctgtggcccgaatcgtgtttggttcctctttctactccactgcagatgaccaaacctgtcccgctgccactttcctcactgatattgggaggagggcaaggcccagccgaagttccactaaaaatgccccaggagaataggcaccggctggcttgccaaagggtttgggttttattgctttctgtttttttcttttcccgacagcacaaagaagtaagggcagttattggacaggtgttatttaaacattctattgtaaatgaatgtgttgtttggttctactgcattgtggagcatgcgggggaagagaactgacccaggtaatgaaatggagcccttccctggaactaaccagtccttgatgttgtgtgactaagtaaagatgataaaccccatctgctgggggtgtcacttcacactcggcatgcattgtgatgccggcaggcagagcagctactgactttgaacatgggcagagaggcccctggatctcatccagcccactccttttccccttccagtacagtgacactctggtgcccattggcagatggcgacttccctgcacccataactgatgctctgtgaattcttcctccttttcagaactactctgtgctaattgttctgccagtatgggcgcatcagctccatcctgacaaacaagacatttaggtaaaactttgtaggcaccttctgcttctctgcttcattgttcctgtgatagtcctgttgttattacagcatgtgcccaaaacagcctcacattgttacaggaggcaggccaggacatcaaagtcatcatctttatgtggcatgactcttaagaggccattactgtatctcatggcctcttgatgtggaaagaagttgacagagggttgcagggtttaaaaacatccattaacatgaaagctaataaacctgtcagagaac

SEQ ID NO: 118093 - DNA, 1000 bp, Homo Sapiens
gatctttttcttgctgcgaagaagattcctggaatctcatcaactggagtcggtgatggaggcaacgagcttgggatgggtaaagtcaaggaggctgtgaggaggcacatacggcacggggatgtcatcgcctgcgacgtggaggctgactttgccgtcattgctggtgtttctaactggggaggctatgccctggcctgcgcactctacatcctgtactcatgtgctgtccacagtcagtacctgaggaaagcagtcggaccctccagggcacctggagatcaggcctggactcaggccctcccgtcggtcattaaggaagaaaaaatgctgggcatcttggtgcagcacaaagtccggagtggcgtctcgggcatcgtgggcatggaggtggatgggctgcccttccacaacacccacgccgagatgatccagaagctggtggacgtcaccacggcacaggtgtaaccgtccatgttccgtgtgagcagagtccctaccaacgggcaggtctgcatccggggagaatgcagctgcttctggcgacaatcctgctagtaaacactggtcttcggtgagcaacgaacactcgcctggcctgggaaactgcatgcccactttctgggaggggttagtgcaggtgccgtggacaaaggacaacatttctctggggctttttaacttttattcctaagactctaaaggcgttgatttcaaccctccttcactctggcttcttcaggcaaccacgtggtctcctgtgagaatcttctcgacagttacttatggggacacttgtgaacaattaactgcaggcagagcatgagaacaacattccaggccatgtaggataggatactccagactccaagtcatcctcccccatcatgggttcggttactcatgggttcaagtactcatagccaactgcacagaccgaaatatctaagtgaaaaatttcagaattaacaactcctaagtttttaaaaaaaaaaaaaaa

SEQ ID NO: 118094 - DNA, 1000 bp, Homo Sapiens
ttcctttgggatatttgttaatggacatttcctacaaggcagcataacatttataattggaattctccagctggcgttttttaacatccccttgatggcttacatgtgttggagcttgctgcagcggtgctttggtcacaacttcaggtctcatctccatcaaagaaaatacttgaaaattatgcctgttcacctacttatgctactgctgtacatctggcaggtttattcctgctactttctttatgcaacatacggcaccctagcttttttattctcccctttgcggacctggttgacactgctgacacctgttctcattcgttatgtgtggacactgaactccaccaagtttggaatcttcatggtgcagttaaaaagccacctgagctcctgaaggccatgtctcaccactggcagctgggcagaagcccagcctctgtgtctgtagcccaggcctctaccccagtagcaggtggagggccaggattggtgggtgagctttagggagcagctgctcgtttggagtcctggacgttggagggattacccactactgatacctgcagaatggactgcagaaaagtctcaaaaataatgcctttattccttccctccctaaggaggcaaagagttgatttacctttgtgaagagaaaacccttatctaggacatccacagggtagaggttgggtgtgtgtacgggagtgtctgaggcccagtgtgttttttagggttaccccatgtaaagcacttaccgctgtgcttggaattcagcagctgtcaaaggtgcaatttcaggggcagggaacctttgaggatctgggcccgaccctcactacccctgagatattagttcccaggcctgttttcccacaggattgtgggctctctgcttccttagtcggaagtgttttcaactaatcaaataaatgaatgaatgatgaataagaaaaaaaaaaaaaaaaaaaaaaaaaaaaaaaaaaaaaaaaaaaaaaaa

SEQ ID NO: 118095 - DNA, 1000 bp, Homo Sapiens
gccctttcaagccatcagctcctgcctctctgccatgagggctttggatcagattcctcttctcgccaggatgaggacacgcactgccctccatagacacagatgaaggggtgggggtcattcagctcgaatgggtcccagatgctcacttggcctttccctgcaggatgagtgaagacgtttgcctctcacagtgtgtcttctacctgcattttggcatcagagccccccagcccacccaccacaggcaattactagccctagttgataggtgaggtgggtgaagaaggctggaggtgacatgtccgaggtcacacaacaaagcagcatgcaggaactagaaacacatcttcagcctcctcctgggccagctcttgtgctacaggtggggcggagccagcccctcaccttcctggttccctgagggtcctcagggtggaggacaggtttggcccagaaagactagccagaggcctgatggtcccaggtggctctggatatactttggatatggatttaaatggtctctaagagccgggggtagggggcaggaaaagtgggttgtctttgcccctcaaagtccacctacctagaaaccaagcccacggtcttggccgtgaccctgataataaatgggctctctcagaggcgccagcccctccctccccagccggaggcgtcatctctcttctgtaccactagagggagctctgatgcagctggagagcagcgctcaaggctctcgcccctcccctccctaacccttaccttcagtctccaccagcctgaagggcctcctaggggatcctcaggcggcccccaccagggcacaccctactgtccttgtgcctcacgccccctcctcatcctgcaccccttccatcccaccttccctttcaataaacagctgggatggaaaaaaaaaaaaagaaaaaaaaaaaaaaaaaaaaaaaaaaaaaaaaaaaaaaaaaaaaaaaaaaaaaaaaaaaaaaaaaaaaaa

SEQ ID NO: 118096 - DNA, 1000 bp, Homo Sapiens
tgcaggcaggagccccgcccctcctgccgggggaggcccagggaccggagcatttctgcaaggcccttgtgggcacgagagtgcggcccttgctgctggagatctgaggtcactgctgtgagctgggagaactgctgtgtacctcttgctgccagcacccaacagccttgccgtggggaccttggaaacctggctttgctctggacaaagggttccagagagaagctagaagtcccccttgaatgacccccagagcccctctgagaagggctggagtttgggggaaggggatggctggatgtgctccaggccatgctggaggtacccccgaggcacaggcactgcccgttccccttgcctgggcttcaggccttctggcaccttctcaggacacaagtggctgcccaaccctgactcagagaatgagggtggcttggacccctgggaatcaggccgccgagggctgagctccagagccgcaccatctgccacaaacagaattcgagacatacttaattttgaatttctccttgccacgttaataaagccaaaagcagcgggtgctattcgtggcaacacacttcactgaacccacttgcttccaaaacgatgccagcccgaggcactgctacgccagcagctgccacatgggatggtggctcaggcgctccctccaggattctgcccctgcctgtccacagactcctttgtgctggaacctgggctcctccagctgccaggcaggagtcggtaggactgtgcctgtgcctccctcagcggggccctgggcggggttccaaggcctgcgagctgggaaaggacagatgaggggacctcgtgccttcttgctgtcatgcaatgaccccgccttatgttgccgaaataagcaactcttaggtttgcctgactgccttatgctggtaaagaaaagggattcaactgtctcttttccaaataaaaaaaaagtcaaaatttcaagtgtaaaaaaaaaaaaaaaaaa

SEQ ID NO: 118097 - DNA, 1000 bp, Homo Sapiens
cttcctggaacacctcgagctgattgggtccaacttctcctccgccatgccccgcaacgagcccgccatccgcaactcgctcccaccctgcagccgcgcacagagtgtcggggactcggaggtggccgccatcggccagctggccttcctgcggcacctgacgctcgcacagctgcccagcgtccttacgggctccgggctggtcaatatcggcctgcagtgccagcagttgcggtccctgtcgctggccaacctgggcatgatggggaaggtggtgtacatgcccgcgctctcagacatgttgaagcactgcaagcggctgagggacctcaggctggagcagccctacttcagcgccaacgcccagttcttccaggcgctgagccagtgcccctcgctgcagcgcctgtgcctggtctctcgcagcggcaccctccagcccgatgccgtgctggcctttatggctcgctgcctgcaggttgtcatgtgccacctgttcaccggggagtccctcgccacctgcaagagcctgcagcagtcgcttctccgcagccgctgaggagcccccggcagagctggggttgaagaggcagcttgtcccccgaccttcaggaatggcagcctgcagcaactggaacaaggccccaccgtaaagctctgtgtgtcccagggtcttcctgtcacccaggctggagtacagtggcgtgatcacagctcactgcagccttgacctcccgggctcaagacatcctcctgcctcggcctcctgagtagctgggactgcagttgtaagccaccgtgtccagccagtttctgttgtttgaagcccccaacttctagattgggaaacgaagctctgctgggcgtggtggctcacacctgtgagtggctcccagcactttgagaggccgaggagggaggactgcttgaagccagaagttcaagaccagcctgcacatcacgagacccgccctccccccaccaatctctataaaacatt

SEQ ID NO: 118098 - DNA, 1000 bp, Homo Sapiens
tgggaggttgaggtaggaggatcgcttgaacccaggagttcaagtctgcagtgagctatgattgcaccactgcactccagcctgggtgatagagcaagaccccaactcaaaaaaaaaaaaaaggatcccacggttcaccttgtgctgccacgatcggttggcagctctgctctgtgccgtcctgtgcctgtcactgagtaagatgcaggagaagttgggcaaaagccctcaggataaacgaataagtcattcagagtaggtgctggtgggaaatgggcttgagtcactcacctggggccagaagaggcccccagggagttgtgagcagattagaccctccaagaccgccccaggggttggcccatgctttccctaactgtgcaaaaatggtttgggataggctgggtgccgtgggtcacgcctgtaatcccagcactttgggaggctgaggcaggtggatcacctcaagtcaggagttcgagaccagcctggccaacatggtgaaaccccatctctactaaaaatacagaaattagctgggtgtggttgcacacgcctgtaatcccagctactcaggaggctgagggaggagaatcccttgaacccgggaggcggaggttcatggggaacccagcaggaaattagaatagaaccaaaaacgccagtcatgggaggcagagctgggggagcgaggctgacaatgactcctgttttcacgctgagagaccccactcccctgctgagatcgcgccactgcactccagcctgggcgacagagcaagactccatctcaaaaaaaaagttaattaattaattagattaaagtacaacaattagcagggcatggtggtgcacgtctgtagtcccagctactcaggaggctgaggcagaagaatcgcttgaaccctggaggcggaggttgccgtgagccaagatcgcaccactgcactccagcctgggcgacaaagtgagactctgtctccaaaaaaaaaaaaaaaaa

SEQ ID NO: 118099 - DNA, 1000 bp, Homo Sapiens
gcccattatttgtaactgtgtaactgctccaagtgccagaatgcttacacgttaaagcagcacctttccatttgcccacatattcttcttgcacaccccttccattactgctgaataggacattgcatgggaagagtacagaggtggcagaatgaagctagagtgggaaggactaaagactgagccccagagtgctcccagcaaccgccacgtacaaggtctgaaatgacaagggcaagagtgagataggaaactgtgtgtgaaaggaaagcccttgcagtatttctgcctccctttctttctgcctttcaccccactaaatgtatgttattgaatgccagtacttctctagtggatgcacacttgttaaatagtgttaagagatgtggagatgagatatacccctttgatgtagaattattcatttggtttgtttcatacttcattataggaatcaagtaatttgatgactaatgtggattatatttcagtcaaagctctgctttcaatttctctgatttgctcactaatgccttgtgtgtgttttactaaccttttatatcttgccttcaagtgagaaggaacaaacaactctcagtggttactacttgcttttatatgctggctgtgaaggttaaaagaaagaatggtctgtaccattctgctttgctgcccttttattgtaccccaggcctcctagaggactcctgcagattctattgttgggtgggaaatagtgttggaatgtgtttgcacagtcttatgatattcagtctcagtctgctataggtatttgttattcttggatactacacacctgctcagactgagtaaacatttgtggtgctgtcaacctgatttcttgactctcaaatgatttttgtatttccaatatgaatttgtgtgttatgaatttctgatttctccaatagtatatgccactatataaatttgtattaataaatgacagtcttgttggttaaaaaaaaaaaaaaaaaaa

SEQ ID NO: 118100 - DNA, 1000 bp, Homo Sapiens
tatcatggatggaaaagacctgtctgcaggagcagtgtccgcagtccagtgtatagcaaatcccattaaacttgctcggcttgtcatggaaaagacacctcattgctttctgactgaccaaggcgcagcgcagtttgcagcagctatgggggttccagagattcctggagaaaaactggtgacagagagaaacaaaaagcgcctggaaaaagagaagcatgaaaaaggtgctcagaaaacagattgtcaaaaaaacttgggaaccgtgggtgctgttgccttggactgcaaagggaatgtaacctacgcaacctccacaggcggtatcgttaataaaatggtcggccgcgttggggactcaccgtgtctaggagctggaggttatgccgacaatgacatcggagccgtctcaaccacagggcatggggaaagcatcctgaaggtgaacctggctagactcaccctgttccacatagaacaaggaaagacggtagaagaggctgcggacctatcgttgggttatatgaagtcaagggttaaaggtttaggtggcctcatcgtggttagcaaaacaggagactgggtggcaaagtggacctccacctccatgccctgggcagccgccaaggacggcaagctgcactttggaattgatcctgacgatactactatcaccgaccttccctaagccgctggaagattgtattccagatgctagcttagaggtcaagtacagtctcctcatgagacatagcctaatcaattagatctagaattggaaaaattgtcccgtctgtcacttgttttgttgccttaataagcatctgaatgtttggttgtggggcgggttttgaagcgatgagagaaatgcccgtattaggaggattacttgagccctggaggtcaaagctgaggtgagccatgattactccactgcactccagcctgggcaacagagccaggccctgtatcaaaaaaaaaaaaaaaaaaaaaaaaaaaa

SEQ ID NO: 118101 - DNA, 1000 bp, Homo Sapiens
atttgtccagtctagatgagtaggcttggggccagcaccctgtctcaaagatggcaaaatgaggctagttctggatgagctagctggtgtgggttccaaccataggaacacactgatgctcaaatcctaaggtgccaagctctaggccctggaggctggtagaacaggatctatgcctggaatcctggcagggattcctgtcaaggacttgtgtttaagcctgcttcagggcttcaggctgcttctgctctgtgtctgcccaggctggctgagcgggtggatgggtggacagaagggctcaccaaggattgtggacatagggtaggccctggtaccacgggtttcaggctgttatcacttcccttgtaggaacatagccagaagcagatgagccagggtagagggctggcccctcctctcatcttcccttcagtcttaaattgtctccagcgatgggaagaggccagggactgtaacccttgtgctgtgtattctctgagcctctgctcactctcagggccaagcagctcccaagccggggccctctcttggccaaaatctgaggagcagtctaggttacaggctttttggtaggtaggttctggctgcctgttaatgcagttaggccccctgattaggtacagtgagaaacaagctagaacaaccctggcccagaagactgtccactccagcaagatccagggatgatagccttgcagggccactgggagtttgtgcccaagcttctccctcttctctccccagggggcactgggactggtccctgccctcatccttagcctgggccttccccagaggtattaaagagaagtatgattcctctgtcttcagttcttttcaggggcatcctgcccatagtacccagttcccaaggggcccccagtcacgtggtgaagcctagcactcatgcagctcttagggaaccaaaaaccagcactgaaataaagctgaatgactgactgaaaaaaaaaaaaaaaaa

SEQ ID NO: 118102 - DNA, 1000 bp, Homo Sapiens
tggggtagaattctccatttattttactacttaatacaaaacatttatttttgaccagtcctgtggcttccattagcaatatgtttcctttcccaaatatgcaaatagtggctttgtttgctcaattttgtgagtgctttggaatttaaatgattgtataactcaagaagattacttttctatgttgctcaagctgtgcctgccaacttgtaacttaataaatacaggaaatcctcagagaaggtgatattttcaggaaaaagacaaatgccctcatagtagtgggaagtgtgaaggtgaccgtgaacatccttcctcatcgggtctgtccccgtcatttcctcccggagtcgtcgcaggtggagatggacaacgtggtgttggacttagacctccttcagtgtggctctgctgggccagaggcatcctgctgtcccgggtggctgcctcgctgtctgcaccccctctccctggggcagctttgcttcctgcccctgtgctcggggcctgggtggttactggcgtgtagatggaattgcttttttaatatgggaagatacatttatttttttccatgtgggtgggtgtctctttttggattttcttctgtttttacgtttctcttcttagaagggtgggagagaatcaagctcctgtggccacctgtgtcccagcagcagtgagtggagctgctcagggtgccctctcctgcggaccagtctctgaatgttcaaagatgagggcctggcttccgtgctctggctttgtaacttatctggaagggaaagcacatgccttcacgggcaggatgatcaagcggtgctgattcacgagagtggaagcctccagagcttggggctttctggctgctcttcattgacctgtgtgttcccagcacacgaacagcgcccctaacggagatttgttcagcgactgaatatacacctgtaaacgagtagcatgtatacattgattttgattacaaatggttctgtattat

SEQ ID NO: 118103 - DNA, 948 bp, Homo Sapiens
cccagagaactgccactccatagcctgtgggcatccaggggtgagcggcagcgatggcgtcccatggaggaaacacactggaaatcgtgcagaagatgggaagatgcaggctggagtgcggagaaggactgagaccctgcctggtagacggcaccgtcacagcagccgtctgcctgccaggaggagcgtctccaccagcagcaggccggcccctgagggagacagcagagagctggagtcctggccagccaggcggggatccttcagcaggacacaggggacacagcaggcagcaggagctcagaacgctctcggcgaccttgctgagtaacttgtggactttgtcgtctggccagtcatgcaggatccggcacaggatgtacagctcagcgctggggagggggtccctgaaaaagtcacctggtttaaagacaaaacgagatacgcccgtcaggtatggaagaagcagtcctccccggacagatcctgggacggccacccgcatcctaaatcagggacagagaagaggggtgtgggcgggaatgggtcttcctgaagtacatccccgtggggacttgaacagagctccatgaggagctggttagtgatgtcacgcccgtgcggtttgactcgggctgagaaaacgctggggacagtggctcacacctgtaatctcagcctcccagacggctgggattccaggcgtgagcctgggcacgtggcccaggcgtctcctgtcaatccgtcctggcctcagcagctgccacctggaagttctccttcaagtctaacctaaggccgccctgtgacggctctcgggtcagttccttctgtgacctcggcaccgtggatgcccatgaatgctgatctcggctgttccccatctccactcccctcccgtctcggctatttgcactgatgataacttcaaaaaaaaaaaaaaaaaaa

SEQ ID NO: 118104 - DNA, 1000 bp, Homo Sapiens
cagtggctggcggtggctgacaagatcaaggtaccctttgacgtggagcagaacttccacccgaagttccagctccgagttccctgggaggactttttcagatgttagggacccgctccagagccccctctgggtcaccctgggttcctccagccaggctctcagggaaggtccatgctgcttggcctgagttcaaggctttctgcctgtagcctggactcccgtggacccccgtgggcaggtggcttccccgtggcatctccacaccgcctctgcctgcccctgtggactgatgctatcgcgcacggtcccacgaccccaccccgagctcctgaagccggggtctgagcctgcatcacctctggcctctcatcccccactctcctgagagcagtggtcacagcggccggccgctctgctgagaaggcagagaggcaggctcaggcctcagcgtggacagcagggataaggggcacgaaggacggggactcggccccttcagaattcctcaggactctcaggtgcagctttgccaaaaaggaacttttcatgtcatgcagttgaggggacttagtctcaatcccaggctcctcttgactctgggcagctttaatcaggttgggcagcctctgctacagcgtggagtgggatggctctcttccctcagccacgccgcttgtgaggacagaggtgggggagtgggaagtgggaagtcaccagagaacaggagagggatttgagggcgagaccccagcgctctccacggaccagccagagggactggagccaggtgtgcatgggtccaaggccctggccctgcccagcctctgtcttgggagctcagccccagggttcggtcgtcagcagtttcccaagaacaagatgtgatggcatctgctgctgaaaccctgatgaggaccaggccccctgcaccgctgtcagcctgaggaattaaagctttggtgctgggaagagcaaaaaaaaaaaaaaaaaaaaaaaa

SEQ ID NO: 118105 - DNA, 1000 bp, Homo Sapiens
gttcccctgccccacatctacctggctgaacttctgcagggtggtcagtccccattccaggccactgcctcttgccatatcgtctctgtcttcagccttcagctcttctgggtgtgtgcttattgtaccagcatctgccggcagggaaagtgcactcgcctgggctccacttgccctacgcagacagctataagccaggccatcatcaggctcctggtggaggatgggactgccgaagccgtggtgacctgtaggaatcaccatgtggcagcagcactagggctgtgtcctagagagtgggcctccctcctagatttcgtccaagtgccaggcagagtggtcttgcagtttgcagggcctggagcccaacttgagtcttcagccagggttgacgagcccatgaccatgttcctctggacactttgtactagcccctctgtcctccgtcctattgtgctttcttttgagctggaaaggaaaccgtcgaagatcgtcccattagaacctcctcggctacagcgattccagtgtggagagctccctttcctgactcacgtgaaccccaggctccgattgtcctgcctttctatccgagagtcagagtactccagctctctggggatccttgcttcctcctgttaactgaactgcaaggatggcctgagagtccttccttgctgaaaacctgaaggcctaggtcctggctcctctccctacttgttctgtgattgaaccaaggactccagattcacaaactgctactccactataatttcccttctttggtgttctggtgccagcctgccttggcaaaattgtggcaacaggaaatcatggccctattaatatgtcctctgattgggacaaggcacctgcattcacaggcggccctgagcacctgggttctgactttgtcacaggagctgagggaacaaaagacttgctcgctgtggggtgatggtgacaggcctattgacctgcaatgaagccctctggtgtc

SEQ ID NO: 118106 - DNA, 1000 bp, Homo Sapiens
tgattgcagaagacaaaagcataggatctccaatggaagagagagagaaattacttaagcagattaaagatgataatcaggaaatagccagcatggaaagacagttaacagatacaaaagaaaagataaatcagtttattgaagaaattagacaacttgacatggatttagaggaacaccaaggtgaaatgaaccagaaatacaaggagctaaagaaaagggaggaacatatggacacttttattgagacttttgaggaaacaaagaatcaggaactgaaacgaaaggcacagatagaagccaacattgttgcactcttggagcactgcagtcgaaatataaatcgtatagaacagatatcctctatcaccaatcaagagctaaagatgatgcaggatgacctcaattttaaatctactgaagtgcagaaatcacaaagtacagctcagaatttgacttcagacattcaacgtctgcagttggatctgcagaaaatggagcttctagaaagtaagatgactgaagaacagcattctctaaaaagcaaaattaagcaaatgacaactgatctggagatatataatgatttgccagctttaaaatcatcaggtgaagaaaagataaagaaattacatcaggagagaatgatattatcaacccacagaaatgcctttaagaaaataatggagaagcaaaacatagagtatgaggcactaaaaacacaattgcaagaaaatgagacacattctcagcttacaaatttggagagaaagtggcaacaccttgagcaaaataattttgcgatgaaagaattcatagcaaccaagagtcaagagagtgattaccagccaattaagaaaaatgtgaccaagcagattgcagagtacaataaaaccatcgtggatgctttacatagcaccagcggaaactgagtttaagtccactgaaagtctctaaggaagtatcctcttgctgctaaacttggtacaagttgactacc

SEQ ID NO: 118107 - DNA, 1000 bp, Homo Sapiens
ggttgcatttctttagtcttctgtgggtcttttgatgtgggtttgattttgcttttgcttttctagctgagatttcccaagtgcatcctcagaagctctgggtgtgccagaggacccccagaactaagaagggagggcgagtgggtctccattccccgagaagccaggggcagggtgggatggggaagaccaggagcagagtcgagcctcacagaagccagcgcgggtctctgctcagcaccccagccggggctctggacccagggtaacagccccagttcatcccaacccctctcagagcctcaagaggggtagctcggctgccggaagagaggggtgccctatccctggcaacccctccacgtagcgtaccccagcacctgccaccgcctttgccatttctttgagcttgaagttaactctcttagagtctaactttggttcatttctgcacaggtacaatagatgactttatttgtttaaaatgtttaatatatatacatacatatatatatatttgtctgtaagaattatgttttaaacagctgctgtagagtacctttttttaagtaaatcttacagtggagtatattttttaaagcacaaaattggtgccaagactgggtgagaaatgtacattacccccttattattttgacggttttttttttcggggcaggggaccttacctgtaagacttttaaagattttcctccctcctgtttcaggtgggtcacattctgatgaatgtttcccttgtacagatcccagcttatggccttgacccagccgtcctcacagatgccgggtgaccctctagctctctctgcatctcccaccccccgacaccctgggaccctcgaccccacccttctttcctaccagcccagagccttgtggcttgtacagttttgaaactcccgttctattttatgatggttgataatagtcagtaacctaataaaggaacgtttgttaaaatatcaaaaaaaaaaaaaaa

SEQ ID NO: 118108 - DNA, 1000 bp, Homo Sapiens
ggagaaggggcacctgctgcggctgcctgcggcattcaggaaagcagcttcccagaactcgagcctgtgggcccagctcagttccacacagaccagtgattccacggatgccgccgctgccaaaacccagttcctccagaacatgcagacagcttcaggcgggccccagcccaggctcagtgctgtggaggtggaggcggaggcggggcgcctgcggaaggcctgctcgctgctgagactgcgcatgagggaggagctctcagcagcccccatggactggatgcaggagtaccgctgcctgctcacgctggaggggctgcaggccatggtgggccagtgtctgcacaggctgcaggagctgcgtgcagcggtggcggaacagccaccaagaccatgtcctgtggggaggccccccggagcctcgccgtcctgtgggggtagagcggagcctgcatggagcccccagctgcttgtctactccagcacccaggagctgcagaccctggcggccctcaagctgcgagtggctgtgctggaccagcagatccacttggaaaaggtcctgatggctgaactcctccccctggtaagcgctgcacagccgcaggggccgccctggctggccctgtgccgggctgtgcacagcctgctctgcgagggaggagcacgtgtccttaccatcctgcgggatgaacctgcagtctgagcctttcccatgctgccctcggcctgttcagatggggattgggggtgtcttccctggcactgtgctcggggacccagagatgcctgtgcttccctgggaaacctggtgaactggaccaggtggcctcactggctcttctcaggacaactaagcctgctggtcagggctggctttcagccttcctaaggctcctggactccagaggccagcggggagcctttcctggctccctctgttttctctcactgtagaccaaagagccgcttgtgtgatattaaagccactttagaaagc

SEQ ID NO: 118109 - DNA, 1000 bp, Homo Sapiens
agtgcggggcgcagggcgtccaggtccagctggtgcaggatgacccctccggcgaaggtgtcctgccctcggcccgcggcccagccaccttcctccccttcctcactgtggacctgcccgtctacgtcctccaggaggtgctcccctcatctggaggccctgctggaccggaggccacccagttcccaggaagcactatcaacctgcaggatctgcagtgacggcagcctcggcctgggcaggcccaaggccacggtctaggacacaccttccctgagactcatgacatgagcctggggagacctcatttggtttccgttcagaagaccagcgtagcccttttgagacttttgggtacatttatcaaaaatgttttccttttgttttaccaggaatgagttcgggctatactctttgaaactgcctttgtgagcaaagtgctttggcaaggcaagggtctccctcagcagggctaggtgcactacagcctctttccccgtgtcccgttggatctgagctgtgtagcacttgttgcattacaaagaaaaagacttctgcaggaaatagggtagagaacaggctgtctagtcagatgcagcttgatctgtggcaaaaccaagtgtggtctttcagcttcagtgtgttagcatcccagcacctgggatggggtttgtgggcaagttgattttgccacactgtagggcccaggtggtcccattgccaccgtgaagccaaattctagcccaagtctggtagagcagtcgggcagctagttttcgggggaggatgatgtggtgggacagaggacctcagtggcctattacggagccctcttcccagactaaattcatagccgagagctcggggggatggtagagttaaaatttaaaataattttctaaattctgtatttggatattagtgtttaagtggtaatttggcaacagtttataaagtgatgttctgaataccataaattatgtgtaggactgtgaaaaaa

SEQ ID NO: 118110 - DNA, 1000 bp, Homo Sapiens
gcagtgtgcagggcctgatggcactgctagattgctccttcagctcagggccacagcttaaacagctttacctttcccctcagcacctgtcccactatcttgcacacaggtgctctaaccatgtttattgaacaaaggagggaaactgatttcactttcacttgttcattatcattccaatttttatgtgaaaatggcacaacccatttggggtaccctcaccccaaaataaaagcccaagtctacctttgactggtaccaccttttttgtggtttcgttggtgagaaacctttatctttttcatacctttctattctcaatcacttctccaaaagtgtgtctttccagctctgatttattcaaaacacaagcatttctgtttagagattctagcccatgggttatctggctagttattacctctcctgttcacttagttatactttattattgctcacaggctggggaggcagaatgactctgtcaccactaggagccattagggcttcttccctggaggactgcctgcttgctttctggggacactagccctcatttcccttctgtggtacagtggggcaaattatttgtattaagcaaacatttatgggaaacaacccgctcccgaaaacggagcccccaagtaaagcacaaccctgaaagattatgaactatgaattgtctctagtagagataaatttctgcaaacatatctcagtcttccctctgtttctctggtgattaagaagttcctttttggtaaggaaaaggatttttaaccatagagttaggcatcatggaaattcaaaccagatttcttaatacctggtcttcctcaaagagaaataataacagtaatagtggtgctgggaacaatatggcagattattgaatgaaattgattaacttgaataaaatgctgtgaattttctctaaaaaaaaaaaaaaaaaaaaaaaaaaaaaaaaagtaaaaaaaaaaaaaaaaaaaaaaaaaaaaaa

SEQ ID NO: 118111 - DNA, 1000 bp, Homo Sapiens
gtctggtggtgtccggccgggtggtggcagcaacagagggttggtggcggctggggacgcccgaggccgtgctgctcccctggctggtggggtccctgccgccgcagaccgctcgcgactacccggtgtacctgccgcacgggagccccacggtcccacaccggctcctgaccctgactctgctgccgagcctggagctgtgtctactctgcgggccgagcccacccctcagccagttgtatccacagcttctggagcgctggtggcagccactgctggacccgttgcgggcctgtctgccgttgggaccccgggcgctgcccagtggcttcccccttcacacagacatcctcgggctgctgctcctccacctggaactgaagcgctgcctcttcaccgtggagcccttgggggataaagagccttcaccagaacagcgccggcgcctcctccgaaacttctataccctggtcacctccacgcacttcccaccagagccagggccaccagagaagacagaagatgaggtctaccaggcccagctgcccagagcttgctacctggtgttggggactgaggaaccaggcacaggagtgcgtctggtggccttgcagctggggcttcggcggctgctgctgctgctgtctccccagagtcccacccatgggctgcgaagcctggccacccacactctgcatgccctcaccccacttctttgactacctagcagtgggtgatggacacagacatggggctgttagcgtctctctgtttattcgctcacaataatacacagcccctggatggggagggggtaggaggggctacaacagggtggggtgggaggggaggagacatccacttccctggcccctctcccctctgtgcttgggggggaaagggagggagggggactccccctaaccccccagaatgtaaacagcagcagatgaacaaaaataaaaatacaaaaggccgaaaaaaaaaaaaaaaaaaaaaa

SEQ ID NO: 118112 - DNA, 1000 bp, Homo Sapiens
tgtgtaaagacttgaagggacagaagtgaagaaaataagctgcaattttgtacagataccaacttctgaaaagctggtgtttttacaactagcattgaatgcagtccaatttgcagtagtaatcttcaatagacaagcagctttgttgctgcctttatggacatgggtaccaattgcttttgtaatatggtaaaaatgtgagctagcacttctgcgttccttttgattttttttttttaacatgtattcagattgagaaatatgattttaatgctttaatctcatgtagtttgtttttaatttcaagcaaaatcttactgtacttgaatgtgccctgttttgttagcacacctagacttgctgtaactgtactcatgtcccagtatgtacgttctttctatgaaagagaaaacactaatcttaaattatatccagcaatgtttctggtatcctttaagaaaagttaagactattatttccttcccttccctgtgcagcattcaaaatcacccctagaaaaagtgagtgttttaatgagacttcctaggaagggatgcactgtaaaacaaaagtattcttgtaactcagttttgtgaaaggtaaaaaactactatgttttaagtacactttagaaagtctcttcaaaacaaacagtcctgtatttgaactctgttcatagtttttttttgaacagtttagacaaaactgctggaaattaaaccaatttcctgcattaagctgagacaagtatatatacagccctatacagtttcatagcttttcctcccccatttatgtgtattggtgacagtgggtataaaacagcctgaaagtgtatgcatgtaccataacatctagacttaatatattgtggagtattcaataaccattatgtagaaggtagataagaattaaaagggtttaatttcctagaaagaaaatggaaaaatggtcatttttaaaaaataaagtttattagatcataaaaaaaaaaaaaaaa

SEQ ID NO: 118113 - DNA, 1000 bp, Homo Sapiens
atgtcatggaaatattccagaattaacagataatagtggtaaagtaatatgcagatagtctaaattcattttgagtttctaggtgtaagcagactaaatgttgcccagaatcagtgttgggttatcagtttatattaaatatactgagttgcccgttttgaaaatgcactttgaataatctcaaaaagatgtacaagttatacctgtaaaccacaaaagtgaagcctgaggcttctgttcaatttcatagactcctttaccatgtaaaatttgtctgatatttgatttgtgatacaatttctcctgctaaagctgctattattctgacaaggtagaggtccaggttcacctttatatatatttaaaacaattagtactgaattggacataaaaatattgacattctaaggagagatatatgttagcatttttctggtactcaaataagttagtagtaaagtctgcaagggcataaatttagggggaaaaagtgtcccagttctctcctacagaaaaaatactttcagtatgttttgataaaactgttgctttgtcatgagttagtcaattgtatcaggttttccaagacctttaccagtaaattatgtttctgtatgtaaaataaccccttattagagagacagtgttatatgtatttacaaaattatataagttccattgggattgtattgattttgtattttcccaaaatagtactttgaattgatagtcctttatgcaatgtcttagcaatagtctctataatgcccatccaggagaagtgggtagtaattcttcatcatgaaaatgatatattacatatttagtatcttccctttgcagtattgcacttttgtttaactagaatacacctatgagatagccaaagtttcaaacacagttatcttagtttaccggtggagtatttcaacaccaaccacatttcccttcctccctctaattctacccacatgatctttattccttcctttcgccaatt

SEQ ID NO: 118114 - DNA, 1000 bp, Homo Sapiens
gggaggacagcctcaaggatgggcaccagctgaaacaactgctgctgaaggccctgactctgatgttggatgcagcagagagttatgccaaggactcctgtgtgcgacaggcccagcactgtcagcggctcaccaagttgataactctgcagattcactttctgaacactggccagaacacaatgctcatcaacttgggccgccacaagctgatggactgtattctggccctacctcggttctaccaggcttctattgtggctgaggcctacgattttgttccagattgggctgaaattttataccagcaagtgattcttaaaggagactttaattacttggaagaatttaagcagcaaaggttattaaagtccagtatatttgaagagatttccaaaaaatataaacaacatcagcctactgacatggtcatggaaaacctgaagaaattactcacatattgtgaagatgtttacctgtattacaagttggcatacgaacacaagttttatgaaattgtaaatgtgcttctgaaggaccctcagacaggttgctgtctaaaggacatgctagcaggttagatgatttcataggtgtctgttttcttgtactgttagcagattctgacagatgtgatgagaagaagaatgcattggagatctttgctaaagttgaacaatcccggtactgtaccatatcagtcctttgtgggtagtaggtagcaagtaagaaacttttcaggaggaaattcctatttaaaatagattgattttagatgattgttcatccacaccattttatatagatactagtattaagatcaaaagcttcctcttcctcaggacagcttctactttagatgatccaataatgattaaagaatacctgtacctgcagattccagtttcaaagaaatttaattattatttacacagttaaggaacaggtgatacattttcatttgttagaaactgatctttctgtaataaaatagattttc

SEQ ID NO: 118115 - DNA, 1000 bp, Homo Sapiens
gattcggggcagagagcaggaaactccttttgcgggaaccagtggatgctatgcccgaccccaccccatttctgctggctagggagtccgccgaggtccacctcatcaaagagaggcccctcgtcatcccccccatcgcctccgaccgaagcggcgagcagcacagcccggcccgcgaaaagccgcacaaggcccacgtcggggtggcacatcggatccaccacgccaccccgccgcaggcccagcccgaggtgaagaccctggcggtcgaccaggtgaacggaggcaaggtggtgaggaagcactcagggacggacagaactgtgtgaagcccgccgtgccccaccccgcgctgtccatgcactgtgagcaccactgggaaatctcagccacaccttttctgtttaatcccatgcatgccaaacacttttcacacctaccgacccattctccttctgcttctcttgccctcttcttcacaccaaaatatgatcgtgtccctgccgcagaatatgtatttcctaattgctgtggccaagcgcctgtgtgccgaatcgcttgcttctgatcccgctccgtgtaacctaagtgcgctgcaggcaaagcccaggccacggctgcgtcactactgatgttcacgatgccacacagtcacacacctaattcattctcaagtcggagcaacacataccaaccttgaccttatcctcaagctccagggcagcctggccgagcagcccctgctccctcctggagacccttgtcacctcccgagctcctcctggagacccctgtcacctcctgaccaacctttcccagggcggcaccgatcaccgagcagccgtgcgtgtatctcaaggaactaaataagatgacgctactcctcatagcaccacaacctgaatgtgtgttcatatttttttgttagttttatccaaaatgtttaagatcccaacaaactttattttctaaacctgccaaaaaaaaaaaaaaaaaaaaa

SEQ ID NO: 118116 - DNA, 1000 bp, Homo Sapiens
tagcgttaagcacctttatcttcatgaataagcttcagcttgctcttggcaagagaagagtgcttgagttacagaaggcataagtagtttgaagaatgcagcagcctttttgtaaacttcccagatatcaaaatagactttgatatataaatggttttctgagatgacactgcctctatttctataaccatttcacctggactatctaaccagtcctatgaatgtatccctaaatgtggttattgaaaacctaatagctgcctcatgacaagtacatgttatttaaggaggaaaaaatattaaattttgaattgagtgtgtaggctccctatcattatatatagagtttctttttccacggtagtcagtgacttaacctgaattgtaaatgtttgtaaagggttaattgtcctacatcaaacttagttaaataattccatccacttatggaggaggaggagaatgtggaagaggtaaaaagctgggcacaagttcatatgcctatgagtcagtaaagactgaagtaatgtcctatgttgagctggttattttgatatatgataataattatctttgaagtagaacaattctgttaactggaaaatcacaggatatatccatcatatttttcaggacagatagtttttactgtggggcaaataggttaaaattacactatgttagttgcatttaggttttaaagcaaagaatctgtagagaaatctatgcaatatatagtttgtccagattagctttcatttggggaatgaagttctgaaatatctaaagcagtttactcatcaattgaaaagtcctccaaaaagagaactattgggaaaccatggtgtggtggtggaaaagaaaagctccctcagttttttggagggaataacttaaaaaaatacttaaatggctaagtttacttggtgcagttaagaattaaacttgtcaattttaacattgctgttacatctgaaataaacttatgtgatgttctggt

SEQ ID NO: 118117 - DNA, 1000 bp, Homo Sapiens
cgttgatcgggggaggaatgtggtgtctgcttctcgagatgggacagcacgactttgggattgtgggcgctcagcctgcttgggagtccttgcagattgtggttcttctatcaatggagtggcggtgggtgctgctgacaactccataaaccttggctcccctgagcagatgcccagtgaacgggaggttggaacagaggccaaaatgctgctcttggcccgggaagataagaaacttcagtgcttgggactacagagcaggcagctggtgttcctctttattggctcagacgctttcaactgctgtacttttctctctggcttcttgctattggctgggactcaagatggaaacatttatcagctggatgtgaggagtccaagggctccggtacaagtcatccacagatcaggagcaccagttctatccctgctaagtgtcagagatggattcattgctagccaaggtgatggaagctgttttattgtccagcaagacttagactatgtcactgagctcactggggctgactgtgaccctgtgtacaaggtagccacatgggagaagcagatctacacatgctgtcgagacggtcttgtacgacgctaccagctttctgacctctgacttcttggaaagagcagtcccggttagtgaaaaggtttgaccctgatcaacaatgagcagaaacatcatcagtccttcccaaggaccatggcgtttaatgtcttgggcaccccttggaaatcacagaaagtcagctgtactggccgtgtggaactctcatcccaagacctactttgaactgagtaagaaggtcattgtgcccactgcatttgttccaacttctccttgtataaactcaccccagcaacacagggcaaggatatagatgcttttagtttgttcttaaaccagttttgttaaatgtttacaaggacctcagtactaaagcctgttctctggaggaaataaagaaaatatgtttggaggtgcctg

SEQ ID NO: 118118 - DNA, 1000 bp, Homo Sapiens
ctggagaaagaattgaaatcagaaaaagagcaaagacaggctcttcagcgcgaattacagcacgagaaagacacttcctctctactcagaatggagctgcaacaagtggaaggactgaaaaaggagttgcgggagcttcaggacgagaaggcagagctgcagaagatctgcgaggagcaggaacaagccctccaggaaatgggcctgcacctcagccagtccaagctgaagatggaagatataaaagaagtgaaccaggcactgaagggccacgcctggctgaaagatgacgaagcgacacactgtaggcagtgtgagaaggagttctccatttcccggagaaagcaccactgccggaactgtggccacatcttctgcaacacctgctccagcaacgagctggccctgccctcctaccccaagccggtgcgagtgtgcgacagctgccacaccctgctcctgcagcgctgctcctccacggcctcctgaacgtccgtcctcaggagcacagcctcacggacagtgccaaaccctgtgggtctccaggggcttgggaaatgtgttctttcccaagagaatcaaaggaaagaatcaaatttcttgcccggtcactggcattccagaagacagcgtgccggaaccggcagctctcacctttctgtgacttgttcggaattaactcctctggatggaaacttccatcttacttggttacatcacggctctggttcagatacaacttcatgattttgctactatcatttttcacttttcaaagaatttaacctattttacagcagttcagttctgctagtgagtagttttcctctcctaccttccttctaaaaacctgattcatgcacagcgtttgacacacatggagtctgccagtgtgccttctctgcttcagacaagagatctgccatttcatgcccttgtgactacctatcattggccctgcaataaaatcatttatttttcaaaaaaaaaaaaaaaaaaa

SEQ ID NO: 118119 - DNA, 1000 bp, Homo Sapiens
accctatcacctctgcctcacagtgggtaaatatatcatacatctcttgaaagggaaaatatccatgtcagtttctttcacagtagaagaatggctgcttttgaatggggaggaaagaagacatttttcttaatatcctttttgtcccatctctaaaatgtataaatattttgatttggttttactttaatttctcattcataatttcgcaactgtccttttgggttgccctccaacacattacttccatttcagaaaccatatctgatttaatataaactgctaacttaagaagaggtgaatttgcatttacacttagacactttctaaaaacagggtgaacttaattgaaatttttcagtgttgttaagctattgttatagtagctgccctatagttacaaaaataaaaactataaaaacccatcccctatctacttaatccagatagcctggatttaacaaaaccaatagtataaaaatgtgtgtgtgtgttctgtgtgtgtgtgagagagagagtacttgattcattaaaaagtcctggaaacagctgttctaggatcttgtcatttttactgaaagtctcgtgcacatgtgaagtgccctctgagtttaaggtttggttaatactggtatatttttataagattgaaattgtgtccccatctttaacttaaacattttcattatcagggtcaatgtgctagaactgaattgtaacatttttaggcacagatggaaaaaaatgttattggctccttgaaaatgtgtgtgtgtggcgaggggaatagatccacaaaagcatgtatgtacttacaaaccaagctgtagagatcaagaaaagaacttaagtgttgatctcaagatttctaaattgtcaagatttacatggcattgtggtggaactagttaacacttagagcttttggtatgtaataactatttgctatggactgattaaatgtttcaaaagattgtgttcttcaaaaaaaaaaaaaaaa

SEQ ID NO: 118120 - DNA, 1000 bp, Homo Sapiens
caggtgtaccggcagctgcgccaccccagcctcatcctgctgtgaccaggcgggcctgcccctgggctctggccacgcttccagcctctgtcacagcccccccaggcctcatgggttagagggaaaccgagctggcctggccagagccgtcagggaaggtaggacctggccacgtaggagcagaacgctcatgaaagtgcttggaggccgtggagcacaaagcagattctgattgggagcaaccgaggcgggctctgaacctggccggtccagcttcgcgtcctctgctggtgtctctccttctctgaccgcggccgcagcccctgcactcgccttcctcactgctgggcagccttcccaccaccgcagcagcccctgaggccaggaggcagtgcagggcattctggacccggagggccagagaaacaggatttctggggtttggacttggggtgagtttgtaactgttgctgccacaccaccaggagcaccggctgcccctctgggtggcactaccaggtgccccacggtacccttgtcacactgttcacacctgcccggctgcccactctgggaccccgaggtaggagggtgctccctgagaccaaagcacaaaacagcatgcagggagctcctgcaagtgcccgtggtctcgtgccacaccaaggaagggccagcgggtggcctgtggccggaatgctcaacaactaggtgcctccggccggggcagtacccagcactgtgcactattttcagggccactcagggtggcgctgtggcccgggggggggccctgagccccagcccccagcctcctccctcagcctgggctacggcccacctcctggtgctggtgttttcatctggggagggtgctcgcgccgctcccgctgcaggcactgtccgcgatgagtgcgggtaggagccgtgaggtgcttctctgctgtgacaaacgaccctgtctgtccgtgaaccttcaaaaaaaaaaaaaaaaaaaaaa

SEQ ID NO: 118121 - DNA, 1000 bp, Homo Sapiens
aagagaaaaggaatttttgtttaaatgagaaatgtttaaccagattctgttctatttgaattgtgacttgcaccttttgttcaaagtatttcctttaggcattgtaattgtgaacagctcttacttgtgccagtgacagatgcagtggtctcctttccccagttgaagcagtgcatacgcagtagctattatttgtgttatctttatttctcttcattgttagaaaccaaagtcttctctgctggctggggctgagagagggtctgggttatctccttctgatcttcaaaacaagagagagaccttgaatacactgactcttccaccctttttttttctgggaaaggagagcaagaggtcccgagtcccctcctagtctttcatcctgaatttgcacagaggaaagcgggtgcccggcatggccatcctgatgttgctggcgggatccccatgcaccttgtccttctccactgatactggcagctcggctcctggacccaagatcccttgagtggaattctgcagtgcaagagcccttcgtgggagctgtcccatgtttccatggtccccagtctcccctccacttggtggggtcaccaactactcaccagaagggggcttaccaagaaagccctaaaaagctgttgacttatctgcgcttgttccaactcttatgcccccaacctgccctaccaccaccacgcgctcagcctgatgtgtttacatggtactgtatgtatgggagagcagactgcaccctccagcaacaacagatgaaagccagtgagcctactaaccgtgccatcttgcaaactacactttaaaaaaaactcattgctttgtattgtagtaaccaatatgtgcagtatacgttgaatgtatatgaacatactttcctatttctgttctttgaaaatgtcagaaatatttttttctttctcattttatgttgaactaaaaaggattaaaaaaaaaatctccagactcaagttgctaaaaa

SEQ ID NO: 118122 - DNA, 1000 bp, Homo Sapiens
gggcaccctgcagaagtttgtggacgacttgtttgagaccttgttcagcactgtgcaccggggcagcgctctccccctggccatcaagtacatgtttgatttcctagatgagcaggcagacaggcacagcatccatgacacagatgtgcggcacacctggaaaagcaactgcctccctctgcgcttctgggtgaacgtgattaagaacccccagttcgtgtttgacatccacaagggcagcatcacggacgcctgcctctctgtggtggcccagaccttcatggactcttgttcaacgtcagagcaccggctgggcaaggactccccctccaacaagctgctctatgccaaggacatccccagctacaagagctgggtggagagatactacgcagacatcgccaagctcccagccatcagtgaccaggacatgaatgcctacctcgccgagcagtcccgcctgcacgccgtggagttcaacatgctgagtgccctcaatgagatctactcctatgtcagcaagtatagtgaggagctcatcggggccctagagcaggatgagcaggcacggcggcagcggctggcttataaggtggagcagctcattaatgccatgtccattgagagctgagaggaggagcctcgcattcctgggaagagggacctgtccaagctgtcacactgggagtctcagatggaaggacaagtgatggggatcaggccccagagcttgctgtcccctgagaccccatcctggggagaggggaggactcctctccctacgccagccaagtttcgtcatagccagttccagctgggagagacagtgggcgtcgtccatcctcagtgagaacaccagagaacccggggccgggagaaggtggttcttcaagccgagaggcacgagctggggacagttctgcctctgtgactgctgctttgcatgaaaactcatttgatgtatattggggaaataatgagaactttatttaattttttt

SEQ ID NO: 118123 - DNA, 1000 bp, Homo Sapiens
tgactggggcgactttggggtagaggcagtgtctgaggggactgactctggcatctctgccgaggctgctggaatcgactggggcatcttcccggaatcagattcaaaggatcctggaggtgatgggatagactggggagacgatgctgttgctttgcagatcacagtgctggaagcaggaacccaggctccagaaggtgttgccaggggcccagatgccctgacactgcttgaatacactgagacccggaatcagttccttgatgagctcatggagcttgagatcttcttagcccagagagcagtggagttgagtgaggaggcagatgtcctgtctgtgagccagttccagctggctccagccatcctgcagggccagaccaaagagaagatggttaccatggtgtcagtgctggaggatctgattggcaagcttaccagtcttcagctgcaacacctgtttatgatcctggcctcaccaaggtatgtggaccgagtgactgaattcctccagcaaaagctgaagcagtcccagctgctggctttgaagaaagagctgatggtgcagaagcagcaggaggcacttgaggagcaggcggctctggagcctaagctggacctgctactggagaagaccaaggagctgcagaagctgattgaagctgacatctccaagaggtacagcgggcgccctgtgaacctgatgggaacctctctgtgacaccctccgtgttcttgcctgcccatcttctccgcttttgggatgaagatgatagccagggctgttgttttggggcccttcaaggcaaaagaccaggctgactggaagatggaaagccacaggaaggaagcggcacctgatggtgatcttggcactctccatgttctctacaagaagctgtggtgattggccctgtggtctaccaggcgaaaaccacagattctccttctagttagtatagcggacttaataaaagaggaaaaaactcttgcttcagta

SEQ ID NO: 118124 - DNA, 1000 bp, Homo Sapiens
gctgtcggtcccctccctgagccagcatctccatccaccaccccgtgccagctcccgtgccagccttcattcctcccagtgtccaagcccctccaggagggtcctggggtgggccagatgcctgcccacctctgtctcctgcctctgctcctctgcccttcttatagccagaacttgtatcttctcagcaaccttcactttgtccttgtccctttaccattccccatcaaagagtagtctgctatatcaatttgtgtagatatgtctgtctttttgggtcctcagagaaaatgcccattttctcggagaattctctgcactcctctctgcttcacattcaacttccctgttctcatctttggtaggattctgccagttgcttttgcatcttctgttcctgggtaatggtgggtcttaatggaggctgggtggaccactgcccgtccactcttcaacaggaggaacagcatgccaccacagtaacacacattagagaaaggacagaggtctgctccttcctgccacctttctcctggccccttagcattcccccagtccctccctcttcaccttgctccgtctatgtcttcccagctcagccttttccccactcttaaatactgtactacttcactgtaagaacgaaagaatagttaggataccaatgagtaaaagggttcctgttcactctgactctgtgcaaattgtattacagtagaccgctgacgttcccaagtgacagatccagggcctttcaaacatccccaaagtcatggccatactcaccattagccagtttctaacatctgtttcagggtatccagctgtagatgttcttatcccccatacttgtgagttattggggttgctcacaaatactaggggtttttgttgtatttttaacaaatatatcctaatgtcatatttattctcttttgtaactgctgtctttacaataaagaaatcatctgcctttctaaaaaaaaaaaaaaaaaaaaaa

SEQ ID NO: 118125 - DNA, 1000 bp, Homo Sapiens
cgcccgaggcccctgccaccccccatgggggtctgggcccggcctcgcctgccctcctgggccagtcacccctcccccagcccacccaaataaaggattatttaactgtctgagctcaggcctcccggcagcccctcccctcccacactgcaggggccgttccccagcttctggacaagacacccagctccgagggggcaggggcttataggaggggccgaggcgtgcgctgccctctcagccctggtggcaggcgggggacaatggccactgtccctacctcactgtgccttcctgtgctccggccacaggagcgtcggcccaggggcggctcctgggggctccagggcaggcgagactgggaaaggcccagccctggagctccagccgaccccaccgtgcccctggcatcctggccctggccgccacctccctggcaccgtctgcctgcagggattctgtgtttttggcttttttaatgtcttaaaatcttttactcaggtaattttaatttcagagagaaaaactgaagtaaatgtcaaaaaacaccagccttaaatccaaagggagagaattcgtgttcttgggtctgtcccgagtgggctcgcgtgcagccaaacatcagctctgggtccaggcgtggcctcagctgggagcctgtgtcctgagcccccggagcgaaggggtgcctggggcatcttggccctctctgggcagacaatgtgtgcacctatgtggaaggccaaggacatgggctgtggccaggcctgtcccgctcaggccccctgcccggcggccgtctgtgtgcggggcctccctcctggctgtccaggacacagcccgtgcagccccagcctggacccaggccatctctggttgtgtctgtgccgactcggtgttgaatcaaatcaggtgtgcgtcaggagccggctgtgtccttcctgccacactcggggattcattccttagaaactgaaataaattctaattttggaaactc

SEQ ID NO: 118126 - DNA, 1000 bp, Homo Sapiens
ctaaggaatgaattacagcggaaagatgcactagtccagaagcacttgacaaagctgaggcattggcagcaggtgctggaggacatcaacgtgcagcacaaaaagcccgccgacatccctcagggctccttggcctacctggagcaggcatctgccaacatccctgcacctctgaagccaacgtgagcaaagggcagaggcagttggcctatgagtgggctgatgcgtgaggttggccacacattccttcctgtggacttgacattttggaagaactctttgccagataatgagttcattttagttttatgctcccattgaaaaattttccactatttttataagctgttaatttcttgagtactttataacatgtctgtagcttggataaaccaagtaagtattttttttttgtctttagcaaagtttagactgtgaatatgatgacacagattcttttttatggtggctttgcttgttttaaatttttgcatgacttttcatctttttatgtgtgtttcctgtagtttgatccgaaggaaaagagtatagtagcctgagaatcaggagatgggagttttagtcgtaggccttatgataattaccccgcggtggtgtgtagaaaagtatgtaaatttgctctgttttaagactttgaactacctcaagaagaggaatctaatacaatatttgtaatgtttccagagctctcagaatgaggatttttttgtaaataggtcagaagacgatggaactgtcctgggttagtatagtaatcttacagtaggatccttaggttgatgctgacttctgtttggggtatgtttatattttatgtggtgtttactttttttttttgacataaaaggatatagtgggagcagtgatacgctaacattcattacattctgcagtaatgaatctgaaaaaaaaaaaaaaaaaaaaaaaaaaaaaaaaaaaaaaaaaaaaaaaaaaaaaaaaaaaaaaaaaaaaaaaaaaa

SEQ ID NO: 118127 - DNA, 1000 bp, Homo Sapiens
attatataggagtataaaccgaacaggaacagcacaacctgggacccagacatgcagtacctctacgcaaagtaaaagtagcagtggttcagcacactttgcatttacagccgaacaataccagcaacatcaacagcaactggcactcatgcagaaacagcagcttgcacaaattcagcaacagcaagcaaatagtaattcctccaccaacacatcacagaaccttgcatctaaccagcagaaaagtggctttcgcctgaatatacagggtttagaaagaacactacagggttttgtttctaagactttggattctgctagtgcacagtttgctgcttctgctttggtgacatcagaacaactgatgggattcaagatgaaggatgatgtggtgcttggaatcggggtgaatggcgtccttccagcctcaggagtatacaagggcttacacctcagtagtactacaccaacagcacttgtacatacaagtccatcaacggcaggttcagctttgttacagccttcaaatattacacagacttcaagttcccacagtgcactgagtcatcaagtaactgctgccaattctgcaacaactcaggttctgattgggaacaacattcgattaactgtaccttcatcagttgccactgtaaactctattgccccaataaatgcacgacatatacctaggactttaagtgctgttccatcatctgccttaaagctggccgctgcagcaaactgtcaagtttccaaggtcccatcttcatcctctgtagattcagttccaagggaaaatcatgaatcagaaaagccagcactgaacaacatagcagacaacacagtagcgatggaggtgacgtagcttcctccgagtggaactgcagcctggggacttgattaggtgctatgcatcagtagcattttgaatgcaagggatgatggaaagcagcacatgcgtttctgtggcagctgtggggacttgacagcaatgctc

SEQ ID NO: 118128 - DNA, 1000 bp, Homo Sapiens
aattggccaacaaacatgaaaaaatgctcagtatcactaatcatcagataagtgcaaatcaaaactgcaatgagttaccatctcttaccagtcacaaagtcagagatggtggtgaggctgcagagcaaaagaaacagacactgttggtgggaaagcaaacttgttcagccactatggaaagcagtttggagatttctccaagaacttaaaatagaactaccattcaatcccgcaatcccactactcgggatatacccacaggaaaagaattcattttatcaaaaagacacctgcaccaatatgttcattacagtgctattctcaccagcaaggacagagaatcaatctaagtgcccaacaacagtaaattcaatgaaaaaaaatgtggtacatagatacgatggaaaactatgcagccatgaaacacaagaaaatcatgtccttttcagcaacatggatgcaactagaggctattatcctaagcaacctaatgcaagaacagaaaaccacatactgcatcttcccattggaaagtggcagctaaacattaaattcgcatgaaccacagatgctggagatcaccagaccggggagagaagaggggcacctgggctgaaaaacacacctgttgggtatcatgcttactgtctgggcgatgggatcattgggacaccaagcctcagcttctcaaattctacccatgtaacaaacctgtatatgtaccttgtattatataggttgaaattaaagatgaataaataaaataaaatgacacaaggccaaaaacaaatgggtttaactgaccagagcgagagaactctgcactatgaacccaaacccagctcaaaaagataaaatctagtcatttaagataatcataagttgtatgatgataattgtataaaaatttgtatgatgataattgtataataattatacatgaaagtgccaaaaccctacaattaaacactgtataatggaaaaaaaaaaaaaaaaaaaa

SEQ ID NO: 118129 - DNA, 1000 bp, Homo Sapiens
cgtggaaagagtttttactctctttttctagcctgtataccaggcttttccccacattgtcaggtagagcaccagcttccctgaccgctgctgctcggggagggctggggctggccgggggtcctgtggaggagtacatggaggactccaggtacagcgcaggagtcacggcttttgttttttgacattggcccccggttctaccaatgacagggtgccctggctggagctgtcatcacacacacccctcagctcggaggctgtgggctcctcaaagctggagaaagaggccaagatttttctgcacacggagtgtggggataggagccgggccaagcgctggcccctcagcggtgagccctgcccactcttaccgagcaaggtgggtggctctggcacgagtcccccagggggagagcatggctaccagggagctgcagcggagccctccagccctcaccccaggccagccccaccccggcctctttgagaattctcagaactttgtacctttcccctgatttttaaaccctttttctaaacagactgactttcttacaaaatgcatttggaaaccagacctttgctacccaccaatgtctctgggttttgtaccagtccctgctctcaggccaccctgcccaggacccaggcccgcctccccctccacactcaggatgtcctgctccatctggccggctcactccgtgtggcctgcctttgctgaccgttttggggttccccgccggagctacaggggcattttcttccctaaaaccaacagtgtcccactgacctccccaagtgtttgctgcgtggcagatttcctgttcttgttcgcagtttgccgactgaagagtgtgggatttccgaggcccaggtgagcacgtccatctcaggaggcgtggagggaaaagacatgtcatgaagggttttttttatgtgactgatttttttttaaatcgatgttcaaactaataaatatttttttatgaagagg

SEQ ID NO: 118130 - DNA, 1000 bp, Homo Sapiens
agagagcacactttccattagagcctggtaatacccatatcacctctgctctgaggctgggcctgcagctgtgtagtctttggaagaggtagcccctgaacgcagagcctaagagaagcaagtcggccctgacgccaggccccagtgggcgcctcacactcagaacctcataccccagagcaaaccgatggtcagggagagggctagagctcacacccagctcggaatagatcttccctgatgacatttcatgccctctaaggcagtttttaaatgaaggtacacacatccaggggtgttcacaggctttcacagcaagggtacctatttcatggcaaaataggcagttttaaaagaataaacaagctaggtgtggtggctcatgcctgtaatcctagcactttgggaagccaaagctgatggatcgcttgagcccaggagtttgagaccagcctgggcaacatggcaaaaccccatctctacaaaaaatacaaaaagtaggccgggcacggtggttcacacctgtaatcccggcattttgggaggccgagataggtggatcacctgaagtcaggtgtttgagaccagcctggccaacatggtggaacccaatctctactaaaaatacaaaaaaactagccggatatggtggcgggtgcctgtaatctcagctacttgagaggctgaggcaggagaatcgcttgaacttgggagcagaggtgagctgagtgcagtgagccaagaccatgccattacactcaagcttgggcaacgagagcaaaactctgtctcaaaaaaaaaattagccagatgtggtgacgcatgcctgtagtcctagctactcaggaggctgaggtgggaggatcacctaaggccaggaggtcaaggctgcggtgagccgtgattgtgccaatgtactccagcctaggtgacagagtgagaccctgtctcaaaaataaataataaataaataaatgttcagaaaaaaaaaaaaaaaaaa

SEQ ID NO: 118131 - DNA, 1000 bp, Homo Sapiens
cccgtccctgtcccgccatgagaaggagatcgacgcgtacatcgtgcaggccaaggagcgcagctacgagaccgtgctcagcttcgggaagcggggcctcaacattgccgcctccgctgctgtgcaggctgccaccaagagtcagggggcgctggccggcaggctgcggagcttctccatgcaggacctgcgctccatctctgacgcacctgcccctgcctaccatgaccccctctacctggaggaccaggtgtcccaccggaggccacccattgggtaccgggccgggggcctgcaggacagcgacaccgaggatgagtgttggtcagatactgaggcagtcccccgggcgccagcccggccccgagagaagcccctaatccgcagccagagcctgcgtgtggtcaagaggaagccaccggtgcgggagggcacctcgcgctccctgaaggttcggacgaggaaaaagactgtgccctcagacgtggacagctagggtctgctgcatctgcccccttcttacctcgtgccctgcagggctccagggctatttggagggaccttgggctgcacatctggcctgcctgcaccagctgcctgggccccaccctcctgactcctgctgatggttaagggccgggagcagatgctgccaaggccacatgcagggatgcacccacaatgtaccaaagcaggctgggcccagggttctatttattgccttgctctgccctctcccttccccggttgtgggacaagagccctccctgaacccctgcaaccctccctgaacccctgcaaatgaaaccaaacgtccacctgggtgtgttcattccttcctgtccttcaaagtacttgatagcctttcataaggcctggcacatgtgtcctggttgtgtgtgtgtgtgttggtgagtgaggtcaggtttgcgagtgttttgataaataaatacataaaggggcaaaaaaaaaaaaaaaaaaaaaaaaaaaaaaaaaaaaa

SEQ ID NO: 118132 - DNA, 1000 bp, Homo Sapiens
atgccatccctatttctaatataacactcttttccaggaagcatgcttaagcatcttgttacagagacatacatccattatggcttggcaatctcttttatttgttgactctagctcccttcaaagtcgaggaaagatctttactcacttaatgaggacattccccatcactgtctgtaccagttcacctttattttacgttttattcagtctgtaaattaactggccctttgcagtaacttgtacataaagtgctagaaaatcatgttccttgtcctgagtaagagttaatcagagtaagtgcatttctggagttgtttctgtgatgtaaattatgatcattatttaagaagtcaaatcctgatcttgaagtgctttttatacagctctctaataattacaaatatccgaaagtcatttcttggaacacaagtggagtatgccaaattttatatgaatttttcagattatctaagcttccaggttttataattagaagataatgagagaattaatggggtttatatttacattatctctcaactatgtagcccatattactcaccctatgagtgaatctggaattgcttttcatgtgaaatcattgtggtctatgagtttacaatactgcaaactgtgttattttatctaaaccattgcttaatgagtgtgtttttccatgaatgaatataccgtggttcatatgttagcatggcagcattttcagatagctttttgtttgttgggaagttggggttttggggggagggggagtattagtacgttgcatggaatagcctactttataatgatgggaatgctttttcttttgttttgggatttttttttttgaagtgaaatttaactttttgtgccagtagtactattatacccatcttcagtgtcttacttgtactgtatcaaattccataccctcatttaattcttaataaaactgttcacttgtaaaaaaaaaaaaaaaaaaaaaaaaaaaaaaaaa

SEQ ID NO: 118133 - DNA, 1000 bp, Homo Sapiens
ttttgtgtaaattcacaaaaatgtgatataaacaggatctaagactggattccctgtcactaaactgcaccactatacctgtctctctgtgtgggggacactgctgatgattcccaagattgagatgatgacggtgatgacgactgggtgaacagccatcacttcaacattgtgataatccttcacagcaagaaaccgaataaaatactaacatttctaacaactgctctgacattgtaaagagatccaacagaatcactcctgctgaaaaatacgctttctgccacctacacatttctatttaggaagtaaaatttgcttcatggtcatgaccccattagtcagtgttacagctgtgttggggataggaagtatatctggcagattgatatttatacacttttttataaagcagattttaaaatatagtaacatccatttttttcccttgaaagtgattctcttataaaaaatgaaagtggagtttaaggtatatcaaatcgttgtggaaggtgattaaaaatcaaaattcttttaaatatcaacttaattttttctaagtaagatacaaaaaattttcatctaaagtaatatttcactttatattgtaaagaaggtaggtatattggtggctgaggtctcttgaaattgctaaagggaaatttttctatggtaatgctcttacggatataaacctcagttaaatggaattatctatgggatgtgtggttctggttaactaaaaattaaccagtaaacactctgtagtaaccattacagaaaatacttctgccttaaaaaatatgatatgccagagatgagttagtgtttcttgacgttggagaccttttaaatgcctcatctgttgtactgaacaattgaaactgcatgcagccataaaagggacaagaaacagaactgtttactaactttgggacatcccctggagtttttaaaaataaataaatatatatatatataaaaaaaaaaaaaaaaaaaa

SEQ ID NO: 118134 - DNA, 1000 bp, Homo Sapiens
gcaccccgaggaggagaagtaccggaagatcaagctgcagaacaaggtgtttcaggagcgcattaactgcctggaagggacccacgagttttttgaggccattgggttccagaaggtgttgcttcccgcccaggatcaggaggaccccgaggagttctacgtgctgagcgagaccaccttggcccagccccagagcctggagaggcacaaggaacagctgctggctgcggagcccgtgcgcgccaagctggacaggcagcgccgcgtcttccagccctcgcccctggcctcgcagttcgaactgcctggggacttcttcaacctcacagcagaggagatcaagcgggagcagaggctcaggtccgaggcggtggagcggctgagcgtgctgcggaccaaggccatgcgggagaaggaggagcagcgggggctgcgcaagtacaactacacgctgctgcgcgtgcgcctccccgatggctgcctcctgcagggcactttctacgctcgggagcggctgggggcggtgtacgggttcgtccgggaggccctgcagagcgactggctgccttttgagctgctggcctcgggagggcagaagctgtccgaggacgagaacctggccttgaacgagtgcgggctggtgccctctgccctcctgaccttctcgtgggacatggctgtgctggaggacatcaaggccgcgggggccgagccggactccatcctgaaacccgagctcctgtcagccatcgagaagctcttgtgaaataaaagcagggttggcctcagccctgtgggtctgtctcatgctctccctgttcctctccccgccaccccagggcctccaagccacctctggaaatacttggctctgccccatgggcacgggaggggcgccagccgtggagctgtggaattgggccccgtggcagagcccccatcccttgggggctgtggggatgcgcccaagcccccgagggagaggcctggggacaccaac

SEQ ID NO: 118135 - DNA, 1000 bp, Homo Sapiens
gtggttggtggccaatcgtggaaccgcgcatgggagccagccaggggtgctgcgtcctgggacacctggcgcaacaaggcggtggtgcctcccaggcggtccggggagccaatggtgtccatgcaggctgcagaggagatccgcatcctcgcagtgatcactatccaggcgggcgtccgtggctacctggcgcgtcgcaggatccggctgtggcaccggggggccatggtcatccaagctacttggcgcggctaccgtgtgcggcggaacctggcacacctctgcagagccaccacgaccatccagtctgcctggcgcggctacagcacccgccgggaccaagcccggcactggcagatgctccaccccgtcacgtgggtggagctgggcagccgggccggggtcatgtctgaccgaagctggttccaggatggcagagccaggacagtatctgaccatcgctgcttccagtcctgccaggcacacgcttgcagcgtctgccactccctgagctccaggatcgggagcccgcccagcgtggtgatgctagtgggctccagccctcgcacctgtcatacctgtggacgcacacagcccacccgtgtggtgcagggcatgggccagggcactgagggccccggggcagtgtcttgggcctccgcctaccagctggctgccctgagtcccaggcagccgcatcgccaggacaaagcggccacagccatccagtccgcctggaggggctttaagatccgccagcagatgaggcagcagcaaatggcagcgaagatagttcaagccacctggcgaggccaccatacccggagctgtctgaagaacacagaggcgctcttgggaccagcagacccctcggccagctcacggcacatgcattggcctggcatctaggaccctggctccctgcagtggggacttcgtgggaggcactcatggctctctgggtctaatgaataaagtcctccacagcctaaaaaaaaaa

SEQ ID NO: 118136 - DNA, 1000 bp, Homo Sapiens; identical to SEQ ID NO: 116679

SEQ ID NO: 118137 - DNA, 880 bp, Homo Sapiens
tgaaaatctactctatcagctgctgtggttgccaccattctcaggaccctcgccatgaaagcccttatgctgctcaccctgtctgttctgctctgctgggtctcagctgacattcgctgtcactcctgctacaaggtccctgtgctgggctgtgtggaccggcagtcctgccgcctggagccaggacagcaatgcctgacaacacatgcataccttggtaagatgtgggttttctccaatctgcgctgtggcacaccagaagagccctgtcaggaggccttcaaccaaaccaaccgtaagctgggtctgacatataacaccacctgctgcaacaaggacaactgcaacagcgcaggaccccggcccactccagccctgggccttgtcttccttacctccttggctggccttggcctctggctgctgcactgagactcattccattggctgcccctcctcccacctgccttggcctgagcctctctccctgtgtctctgtatcccctggctttacagaatcgtctctccctagctcccatttctttaattaaacactgttccgagtggtctcctcatccgtccttcccacctcacacccttcactctcctttttctgggtcccttcccacttccttccaggacctccattggctcctagaagggctccccactttgcttcctatactctgctgtcccctacttgaggagggattgggatctgggcctgaaatggggcttctgtgttgtccccagtgaaggctcccacaaggacctgatgacctcactgtacagagctgactccccaaatccaggctcccatatgtaccccatcccccatactcacctctttccattttgagtaataaatgtctgagtctga

SEQ ID NO: 118138 - DNA, 1000 bp, Homo Sapiens
ggtcgcggaagtatcgcggcttacatatctcgcagccaggcgggtcctgggagaggcgcgagccaggcctggtcggcgcccgcggagaaaagaagcagtcaagcccatgaactacaaccccggttgccgctttctcctctcctaaccgttaagtgcgctaagggccatggctgaggtgcacgtgatcgggcagatcatgggggccagcggtttctcggaaagtagcctcttctgcaagtggggcattcacacaggggcggcatggaagctcctgtcaggcgtgcgggagggccaaacgcaagtggacaccccgcagataggggacatggcttactggtcccaccccatcgacctgcacttcgccaccaaaggtcttcaaggctggccccggctccatttccaggtgtggtcccaggacagctttggccgctgccagcttgcaggctatggattttgccatgtgcccagtagcccgggcacccaccagctggcctgccccacgtggcggcccctgggcagttggcgagaacagttggcacgggctttcgtgggtggtgggccgcagctgctgcatggggacaccatctacagtggggccgaccgctatcgcctgcacacagctgctggtggcaccgtgcacctggagatcggcctgctgctccgcaacttcgaccgctacggcgtggagtgctgagggactctgcctccaacgtcaccaccatccacaccccggacacccagtgatgggggaggatggcacagtggtcaagagcacagactctagagactgtcagagctgaccccagctaaggcatggcaccgcttctgtcctttctaggacctcggggtccctctgggcccagtttccctatctgtaaattggggacagtaaatgtatggggtcgcagggtgttgagtgacaggaggctgcttagccacatgggaggtgctcagtaaaggagagcaattcttaaaaaaaaaaaaaaaaaaaaaaaaaaaa

SEQ ID NO: 118139 - DNA, 1000 bp, Homo Sapiens
actttgattgcatattagacattcttaacagggcggcagtctagtgttgaaagttttatttttccatttttcttttaagtaaattttttttaaaaaattctgatttagggctaggtgtggtggctcaggcctgtaatcctggcactttgggaggccaaggtgggaacatcgcttgaggccaagagttcaagaccagcctgggcaacatagcgagacccctatctgtattaaaaaaaaatctgatttaattcttttatttatcataaggggtttaattcctgaagtaaaggtttgcacctattaaacttaaaactgccaaatgatttttgttcttttatgtgcgtgataaaaatacaaagaatggtgtggccacctcctccctttcaagctagggcagcaggtagctcttcccagcccctgagcccagccccttcccaagtggtgccggacaaaaaactacatggccctttcgtgtcttgggggtggaaagggagggatgaattggggtgatagaaccctggtgaattcagagtaatctttctttagaaaactggtgttttctaaagaaacaggataggagtttagagaaggcaccaaagctttcactttggtttggcaccagtttctaaccatctgttttttctaccctagctatcttttattggtaaaatataaatgtataattatgtttgtagagctttaccaaggagtttccctcctttttttgtttgttgattagcaaatttttgattctccattttccaaaagtaagagactccagcatggccttctgtttgccccgcagtaaagtaacttccatataaaatggtatttgaaagtgagagttcatgacaacagaccgttttccatttcatctgtattttatctccgtgactccaacttgtgggtttgttctgtttttccatgagaataaaatactggcggttttttttcaaaaaaaaaaaaaaaaaaaaaaaaaaaaaaaaaaaaaaaaaaaaaa

SEQ ID NO: 118140 - DNA, 1000 bp, Homo Sapiens
tgatgactttaagaaatgctatggggaaatcctctaccgttggggtctgagagagaagcgagctgaagtgttgaagtttgtctcctgtcctcctgaccctcacaaagggatcgagttcggcgtgtactgcagccactgccggagtgaggtccgtggcacgcagtgtgccatctgcaaaggcttcacgttccagtgtgccatctgtcacgtggctgtgcggggatcgtccaatttctgcctgacctgtgggcacggtggccacaccagccacatgatggagtggtttcggacccaggaggtgtgtcccaccgggtgtgggtgccactgcctgcttgaaagcactttctgaacctacagaagttgggtattgtctgaaatcccagaggacccataagtgccggtgacaagctgtctgtcaggggagaggctccagaacctgggttcgtccccagtgagaccggaggatgatcccccaaggactgcgcagcatcagctcttggtgggcctctgccttctcttctgtttggccacctggtgtggatgtcactgtgtgaagataaggacagaagtgcagagctgcgctttgtgtgttgtctatgtcggctgagctaccaaggtggaagttttcatggagaaaagcacctggctccagggccagtgttacagtgttaccctgtaaggtgttagccttaaaccaccgagcagcgttctcttgatgccagtgcagagaccagagtcagatgcccgaggacagtgggtaggaatttcatcaacaaatggacctatggcatcatggctttagaagctggtacatttactgagctgatggacagtggccttctaaaatatgacacttaaattgtaaatatgcactgtacttaaggattcttaagatgtatttttttgttatttctcctccagctgctatcccttggctaataaaattctagtaatttgaaaaaaaaaaaaaagagagaaagttaaaaaaaaaaaaaaaaaa

SEQ ID NO: 118141 - DNA, 1000 bp, Homo Sapiens
tttgtatttggtgaaaagattcgaactcgagccatctctgctaaaggcatgactttagtcacccccctgcagttgcttctctttgcctccaagaaagtccaatctgatgggcagattgtgcttgtagatgactggattaaactgcaaatatctcatgaagctgctgcctgtatcactggtctccgggcagccatggaggctttggttgttgaagtaaccaaacaacctgctatcatcagccagttggaccccgtaaatgaacgtatgctgaacatgatccgtcagatctctagaccctcagctgctggtatcaaccttatgattggcagtacacggtatggagatggtccacgtcctcccaagatggcccgatacgacaatggaagcggatatagaaggggaggttctagttacagtggtggaggctatggcggtggctatagcagtggaggctatggtagcggaggctatggtggcagcgccaactcctttcgggcaggatatggtgcaggtgttggtggaggctatagaggagtttcccgaggtggctttagaggcaactctggaggagactacagagggcctagtggaggctacagaggatctgggggattccagcgaggaggtggtaggggggcctatggaactggctactttggacagggaagaggaggtggcggctattaaaacttggttatgtcagttcctgtgtgtagacagtaaggaaaaaaaggcatgctatgtgttacgtgttttttccagtatgtttatttgccaccaaaaagtaaatgcattttcacccattctgtggttcattgtagtttaaggaaaccaagcatatagatgcattagtgattttgtttatattatgtaaaatataacgatctcttaaaaataccacagtttgtattttttctttaaggagtaaagatttgcctttaaataacttggtattttcctggctttcgtttaatacaatagaaaataaagtattacaccg

SEQ ID NO: 118142 - DNA, 1000 bp, Homo Sapiens
cctgctcctctccagagtttccggtcacctccgtgttctcagggagtgcgtggtcttggatgccatcctgctcatctccagcatttcctctcacctccgtgttctcggggagtgcgtggtgtcagatcccatcctgctcatctccagcatttcctctcacctctgtgttctcggggagtgcgtggtgtcagatcccatcctgctcctctccagcatttcctctcacctccgtgttctcggggagtgcgtggtgtcagatcccatcctgctcctctccagagtttcctctcacctccgtgttctcggggagtgcgtggtctcagatcccatcctgctcctctccagagtttcctctcacctccgtgttctcagggagtgcgtggtcttggatgccatcctgctcatctccagcatttcctctcacctccgtgttctcggggagtgcgtggtgtcagatcccatcctgctcctctccagcatttcctctcacctccgagctctcggggagtgcgtggtctcagatcccatcctgctcctctccagagtttcctctcacctccgtgttctcgttctcatctctgccggaattccacatctgctcgtgcatgccatccaccttttccactagatccttttacatcatcattataatgatttttttttaataagtgttttctttcagttttaaatttcagatgttgtgtttttcaggtctaaggtgtctggtaattttttgtggatgccgattctctgttgaaattctccatcttttcatttcctttatatctcttttcttcttttttctataatatattacatttttctaataagtttttagtgagtgtccagcattgtataagttgacccttgaacaagagtttgaattataagggtccacttataagtggatttttaaaaaaatatatattgcaaaaatttttggaaatttgcaacaatttgaaaaactttgcagatgagccacatagcctagaaatatctg

SEQ ID NO: 118143 - DNA, 1000 bp, Homo Sapiens
tggtataatatatatacttctccatacacagacctctgcagaatgcaaaataaaacttgcagtgaatgaatttagcattttatgagagtgctgttggaaagacttgataattcaccccttttgttttgaagagttgaatcttctgttaaaaggtgatttaaaacttgaatgtgatgaattgtggcaagttaacttcaagttatgtgcaatacttatttcaaacttttgaaagatctttgcagtgtaattctttgtttttaattgcagacatttaaaaatgtcattttctactgttaagagtaatcctctttcttgctggtgtttctaaagaaaagaatcagaaatcaatctttctactaatgtaaatttgagattatttttaaaaatggaataaaagaggttttggtcatttgctttattttattattttaaagctactgtgattgatagcattgtaagaatcgggacaatattgtattcaactgttttattttttatatttttaaaatttaaagtataattagtttttataattttcatcagatttttgttatattttttggaagtgaaacttttagcaagtgggtgtctagtttttactaatccctaattttttttccagtgtattgctcatattatcagaaggaaaagttatttaagtatgtcagttaattgtactacttggctgaatttccatatagtttttactgtgtatggggaggttgtagtatttattatagcattttaaataagggtaattcattttttattaaagtcattttcacgttaagttcctatttttgtatgttctactcttaagttatataacacagttccttttttaaaagagttcatttgttgaagtgctagtgaaaaattaatgttattaaatagtttgcaaatgactatttataccagtatgcatataatttttaaatatttgtaatgtgagatgttgaatgaataaaacttttaactcaaaaaaaaaaaaaaaaaaaaa

SEQ ID NO: 118144 - DNA, 1000 bp, Homo Sapiens
gctggggaaagtgggcagtcagtctagcttttcgggcagcatggaaatcattgaggtctcctgagaagaaagacacttgtgacttctatagacaatttttttttcttgttcacaaaaaaattccctgtaaatctgaaatatatatatgtacatacatatatatttttggaaaatggagctatggtgtaaaagcaacaggtggatcaacccagttgttactctcttaacatctgcatttgagagatcagctaatacttctctcaacaaaaatggaagggcagatgctagaatcccccctagacggaggaaaaccattttattcagtgaattacacatcctcttgttcttaaaaaagcaagtgtctttggtgttggaggacaaaatcccctaccattttcacgttgtgctactaagagatctcaaatattagtctttgtccggacccttccatagtacaccttagcgctgagactgagccagcttgggggtcaggtaggtagaccctgttagggacagagcctagtggtaaatccaagagaaatgatcctatccaaagctgattcacaaacccacgctcacctgacagccgagggacacgagcatcactctgctggacggaccattaggggccttgccaaggtctaccttagagcaaacccagtacctcagacaggaaagtcggggctttgaccactaccatatctggtagcccattttctaggcattgtgaataggtaggtagctagtcacacttttcagaccaattcaaactgtctatgcacaaaattcccgtgggcctagatggagataatttttttttcttctcagctttatgaagagaagggaaactgtctaggattcagctgaaccaccaggaacctggcaacatcacgatttaagctaaggttgggaggctaacgagtctacctccctctttgtaaatcaaagaattgtttaaaatgggattgtcaatcctttaaataaagatgaacttggtttc

SEQ ID NO: 118145 - DNA, 1000 bp, Homo Sapiens
ccagccccgccccccttcccaaggcaactctggagggtaccctaggtatgctgctgagccctgccccccgtcctgctccagcctgcccgtgtgtaacctgtaagatgtactgtgtgcctccggaagacaccacctttcccttcagcattccctttcatgacctgaggcactctgcgatgtgtgccccaaagcagaacttacagggcctgcaggaagctggtgtcagggagagaaacccaaccccactgtcaacatagggagcatcaccaactccagactggctcctgtgggtatggtgtttccgctgggctgggtcctcaacattgccaaggtgctagtgggtccctaagagggcccatgttgggggtgaagtcatgaggtcctgaaggcttaggcccctgtcattcccaccctcactcttgctgcacagttgtgtttactttttctgggtagaggatgctgaactgactcagcaccctcctgcaggacggggttagggaatttggtgctcaattgctctcccttgctcttccccaaactgaaaatacctactgcaggatccctcggggcacactgaagcttggctgccaaccctcttacttcctttgttacagggaggggttggcttggggtgaaaagttctgccctccgcagggagcagctccagctgcctggcagtgctcccagtttgtagggaagccacaccagatctgggtgccttgggagaaccagtccttccttttgacccaccccaggaagatggagtgctcttttctaggcccatgttctgccagcaaccgggatgcgtgggcaactggactctgcacgggggtctacaggttgagggaggttggtcacaatgagaacctcggggtttgaggtggccatgggcagacagccgaaagggagggagggtgtgggtgtgcgtgtgtgcatgtgctggtgtgtaagggggaaagggtctttcctggttttatttaaataaagtagtttatgtaac

SEQ ID NO: 118146 - DNA, 1000 bp, Homo Sapiens
gctgatgtgtgagcttggaaacagcgctgtgaatcagatctatgaggcccagtgtgagggtgcaggcagcaggaaacccacagccagcagctcccggcaggacaaggaggcctggatcaaggacaaatacgtggaaaagaagtttctgcggaaggcgcccatggcaccagccctggaggccccaagacgctggagggtgcagaagtgcctgcggccccacagctctccccgcgctcccactgcccgccgcaaggtccggcttgagcccgttctgccctgtgtggccgctctgtcctcagtgggcaccctggatcgtaagttccgccgagactccctcttctgtcccgacgagctggactcgctcttctcctacttcgacgcaggggccgcaggggctggccctcgcaagggtgcagagtcggaggagtccagcggtgaggcagacggggacactgaggccgaggcctggggcctggcggacgtgcgcgagctgcacccggggctcttggcgcaccgcgcagcgcgtgcccgcgaccttcctgcgctggcggcggcgctggcccacggggccgaggtcaactgggcggacgcggaggatgagggcaagacgccgctggtgcaggccgtgctagggggctccttgatcgtctgtgagttcctgctgcaaaacggagcggacgtgaaccaaagagacagccggggccgggcgcccctgcaccacgccacgctgctgggccgcaccggccaggtttgcctgttcctgaagcggggcgcggaccagcacgccctggaccaagagcagcgggacccgttggccatcgcagtgcaggcggccaacgctgacatcgtgacactgctccgtctggcgcgcatggcggaggaaatgcgcgaggccgaggctgcccctggtcccccgggcgccctggcgggcagccccacggagctccagttccgcaggtgtatccaggagttcatcagcctccacctggaagagagctag

SEQ ID NO: 118147 - DNA, 1000 bp, Homo Sapiens
caacacatgaatcatcgctactcctactgtaagagagaagcggaagaacgtgacagcacagagcaggaagaggcagggcctgaaatcctctcgaatgagcacgtgggtgccagggcgtctccctcacagggcgactcggacgagagagagagtttgacaagggaagaggatgaagacagtgaaaaagaggaagaggaggaggataaagagatggaagaattgcaggaagaaaaagaatgtgaaaaaccacaaggggatgaggaagaggaggaggaggaggaagaagtggaagaagaagaggtagaagaggcagagaatgagggagaagaagcaaaaactgaaggtctgatgaaggatgacagggctgaaagtcaagcaagcagcttaggacaaaaagtaggcgagagtagtgagcaagtgtctgaagaaaagacaaatgaagcctaatcgtttttctagaaggaaaataaattctaattgataatgaatttcgttcaatattatccttgcttttcatggaaacacagtaacctgtatgctgtgattcctgttcactactgtgtaaagtaaaaactaaaaaaatacaaaatacaaaacacacacacacacacacacacacacacacacacacacacacacaaaataaatccgggtgtgcctgaacctcagacctagtaatttttcatgcagttttcaaagttaggaacaagtttgtaacatgcagcagattagaaaaccttaatgactcagagagcaacaatacaagaggttaaaggaagctgattaattagatatgcatctggcattgttttatcttatcagtattatcactcttatgttggtttattcttaagctgtacaattgggagaaattttataattttttattggtaaacatatgctaaatccgcttcagtattttattatgttttttaaaatgtgagaacttctgcactacaaaattcccttcacagagaagtataatgtagttccggaattc

SEQ ID NO: 118148 - DNA, 1000 bp, Homo Sapiens
tacagttttctacacatggtaatacaggatatgctactgatttaggaagtttttaagttcatggtattctcttgattccaacaaagtttgattttctcttgtatttttcttacttactatgggttacattttttatttttcaaattggatgataatttcttggaaacattttttatgttttagtaaacagtatttttttgttgtttcaaactgaagtttactgagagatccatcaaattgaacaatctgttgtaatttaaaattttggccacttttttcagattttacatcattcttgctgaacttcaacttgaaattgttttttttttttttctttttggatgtgaaggtgaacattcctgatttttgtctgatgtgaaaaagccttggtattttacattttgaaaattcaaagaagcttaatataaaagtttgcattctactcaggaaaaagcatcttcttgtatatgtcttaaatgtatttttgtcctcatatacagaaagttcttaattgattttacagtctgtaatgcttgatgttttaaaataataacatttttatattttttaaaagacaaacttcatattatcctgtgttctttcctgactggtaatattgtgtgggatttcacaggtaaaagtcagtaggatggaacattttagtgtatttttactccttaaagagctagaatacatagttttcaccttaaaagaagggggaaaatcataaatacaatgaatcaactgaccattacgtagtagacaatttctgtaatgtccccttctttctaggctctgttgctgtgtgaatccattagatttacagtatcgtaatatacaagttttctttaaagccctctcctttagaatttaaaatattgtaccattgaagagtttggatgtgtaacttgtgatgccttagaaaaatatcctaagcacaaaataaacctttctaaccacttcattaaaaaaaaaaaaaaaaaagaaaaaaaaaaaaaaa

SEQ ID NO: 118149 - DNA, 1000 bp, Homo Sapiens
ttatttttaagacatcaggaagccagaccgctttgagttgggagaattttgtagctcaacatatcaagtcctcgatggtatctgagctgcccacacccccacctgccaaggccccacagagcccaaaacagaagggggctgccccagcccagcagagcacagagtttctggagctcccatccacagatgcaggagggggtactgatggtaacccccatgtggatttgagggcagcagtccctggcctcaccctagccagcctgggtggctccctagccccaagaggccaggaagggctggaaggcagggcctgcaggtgctccccgccctgagacccaggccccaaatcagcaataatgaacaaacccttggcccagcctgggctggtgacctgggcaccagagaccttgcatccctcctcatcctaggaggcccctaggggtgccccatctcagtgtcccctgaactctttatttgcctaatttatatatatatatatgagatatataaatatatataaaatagctattttgcttaaatttctacagtatgtaaaagtgaaaaaatgatgaagacgggtgcacctgtctgagtttggccctcatgtgagctgtgcccttccctctcctcatgcccccttccagcggcttctgccaaccatggggggctggaccaccatggccactgacccagcccctcagaatcccacactccaatcctttccatttcagtttagtcctaaaagttcatcacagggtctttctttctactccaggactggttttgtttttatatatataaaaaaaaaaagtgaaaacaccaatgtgtgaaatgccttacaatgcccactggagaggcggggcggggtggggcaggatggccccactggggctcctacagagctgtggaatgtacctctccccaacactgttttgttagcgagcaccttttgaccagtaataaaaaaccttggctttggagttttccactgaaaaaaaaa

SEQ ID NO: 118150 - DNA, 1000 bp, Homo Sapiens
tcaaaagtgaacgaaagcatttaactggccagttttgattgcaaatgctgtaaagatatagaatgaagtcctgtgaggccttcctatctccaagtctatgtattttctggagaccaaaccagataccagataatcacaaagaaagcttttttaataaggcttaaaccaagaccttgtctagatatttttagtttgttgccaaggtagcactgtgagaaatctcacttggatgttatgtaaggggtgagacacaacagtctgactatgagtgaggaaaatatctgggtcttttcgtcagtttggtgcatttgctgctgctgttgctactgtttgcctcaaacgctgtgtttaaacaacgttaaactcttagcctacaaggtggctcttatgtacatagttgttaatacatccaattaatgatgtctgacatgctatttttgtagggagaaaatatgtgctaatgatattttgagttaaaatatcttttggggaggatttgctgaaaagttgcacttttgttacaatgcttatgcttggtacaagcttatgctgtcttaaattattttaaaaaaattaaatactgtctgtgagaaaccagctggtttagaaaagtttagtatgtgacgataaactagaaattacctttatattctagtattttcagcactccataaattctattacctaaatattgccacactattttgtgatttaaaaattcttactaaggaataaaaactttaatatacgatatgatattgtctaataattaaaaaagacataatggatgctcaattagttttaagatatctataactatagggatacaaatcactacagttctcagatttacaccttttttttgtcattggcttgatgtcacacatttccaatctcttgcaagcctccaggctctggctttgtctacctgctcgttcccaatgtatcttaatgaaaagtgcaaaagaaaaacctaccaattaaaaaaaaaaaaaaaaaa

SEQ ID NO: 118151 - DNA, 1000 bp, Homo Sapiens
ggaggtgtggtttattggcaaagaaaaagaagaacgtgaccggctgcaactgaaagctctagaggaattaaatcaacaactagaaaaaagaaaagaaatggaagaacgtgaaaaaagaaagataattgctgaagaaaagcacaaggaatgggttcagaaaaagaatgagcaaaaaagaaaagaaagagaacaaaaaattaataaagaaatggaggaaaaagcagcaaaggaactggagaaagaatacttgcaagaaaaagcaaaagaaaaatatcaagaatggttaaagaaaaaaaatgctgaagaatgtgagaggaagaagaaagaaaaggaaaaagaaaaacaacagcaagctgaaatacaggagaaaaaggaaatagcagaaaaaaagtttcaagaatggttggaaaatgcgaaacataaacctcgtccagctgcaaagagctatggttatgccaatggaaaacttacaggtttttacagtggaaattcctatccagaaccagccttttataatccaattccgtggaaaccaattcatatgccacctcccaaagaagctaaggatctatcaggaaggaagagtaaaagacctgtgataagtcagccacacaagtcatcatctctggtaattcataaagccaggagcaatctttgccttggaactctgtgcagaatacaaagatagcgtatgtggaaaataacatgcttttatctggagctatttaatttaaaaatcagaaattgttttttactgctcagtcaataactcaacacttaatgtgattattgacaaatagcaatttttgcatttgtatatggagtccttagagttgaggaagatattttctggattttggtttttataaacttttcaaggttgatcttggcatgttgttttgcagaataagtggctgaatatgtaagaattgtgtttgtatttagcttgtattaaaagtacactgtaataccaataaaactaacaatttttcttgaaaaa

SEQ ID NO: 118152 - DNA, 1000 bp, Homo Sapiens
atccatctctgcatctgggtgctgtttgcagctgtagattatctgctgtatcggctcattttctcagtgagcaagcagtttcaaagcttgccagggtttgaggttcacttgaaactgcacggagagaaacaaggaactcaagatattatccatgattcttcctttaatatatctgtgtttgaacccaactgtatcccaaaaccaaaattccttctatctgagacctgggttcctctcagtgttattcttttgatattagtgatgctgggactgttgtcctctatccttatgcaacttaaaatcctggtgtcagcatctttctaccccagcgtggagaggaagcgcatccaatatctgcatgcaaagctgcttaaaaaaagatcaaagcagccgctgggagaagtcaaaagacggctgagtctctatcttacaaagattcatttctggcttccagtcctgaaaatgattaggaagaagcaaatggacatggcaagtgcagacaagtcatgagagaccccgactactcctcagccacatcgcaccaacaattctcttcaggtctaggatggcagtcactattcatgccggataatagagaactatgtgacgcagtcctctcaggagtctgagtttacagagccaacttgcagcacctggttatgcctcctttcatctcaaagccaaagagctgccaggtaaatggttatgtggtctatgttccaaacaaaccacatgatcttgcctgtgtcacaatgtaacaagactctagctgggtcccctggtgatgagtttcagcatagaataatgttcaaggaaaagaaaacgaaaacagtttaaatctctaccacagcctcacaagcaaatgctaaggggaacatacatgtaaaaagccagcaaactatcttcaaactcttccgtccttaatgtcttccatggctattgcccccacaatggtctcttttctccctgctcccttattaaagaactctttctgaaaccc

SEQ ID NO: 118153 - DNA, 1000 bp, Homo Sapiens
aaaaggtccctcctttgcagaggcaaaagaaaatccacttcctcaaggatctgtagattataataatcaaaaacgtggaaaaagagaaagccaaacatctattcctgactatttttatgacaggaaatcacaaacaataaataatgaagctttcagtggtataaaaattgaaaaacattttaatgtaaatactgattatcagaatccagttcgaagtaatagtttcattggtgttccaaatggagaagtagaaatgccactgaaaggaagacgaataggacctattaagccagcaggacctgtcacagctgtaccctgtgatgataaaatattttacaatagtgggcccaaacgaagatctgggccaattaagccagaaaaaatactagaatcatctattcctatggagtatgcaaaaatgtggaaacctggagatgaatgttttgcactttattgggaagacaacaagttttaccgggcagaagttgaagccctccattcttcgggtatgacagcagttgttaaattcattgactacggaaactatgaagaggtgctactgagcaatatcaagcccattcaaacagaggcatgggaggaagaaggcacctacgatcaaactctggagttccgtaggggaggtgatggccagccaagacgatccactcggccaacccaacagttttaccaaccaccccgggctcggaactaataggaaaagactctttgtgaagaaacgagccagtgactgaaacaccctggtggaaacctgttgacagaccttccactttctcttcagaataagtagctgtggtggatattattatttgaagaaagaaaaaacagattttagggtggaaaaaacagtcaactcacacaaagaatggaaaaaaatactgagttaaattaagcaaataccttttacaagtgaaaggaagaatttttcttctgccgtcaataaaaccattgtgctattattgtttaaaaaaaaaaaaaaaaa

SEQ ID NO: 118154 - DNA, 1000 bp, Homo Sapiens
ccatcagaagagcctgtgcttttccagagctccctgatggtctgagggtcccacccctgccccactttaccatagagaccagtgccttggtggcaggtccctccccaggtcccctgagatggggtatggaggggcccttccctctcggccttcgagcactttctttcacttactgtgtcaaagccctgggtcctctttttgatgggcaccggcccctctgaacgtgatgggacctgccttctccactagtagctgggcagctcacaattcacacctgtgtacctgccacatccctcacttggtggaaaacacccagaaggtcttgagtcccccacccctgggtgtcagtccaaatgactgtataggaggcccttatttttgtcacagagcaagctggccatgaacgaaggagagaagacgccacagatttccttccctctcctccaggagaccataagatagatcccccatcctctcagccctattcccatgcctccctctcattggaggagctgaccaaagcagccctaacgggccataacacttgaccaattcagctgctggcagagggaggaaacaagtgttttcccaagtggcattttcatctcgctttcaccctgactaaagattgtcttaagtagcagcccagcccgcccagccccaggtgggtagtggggaggagagctggcattcctccaggtggcaaatggcgactctatactctccgcccgccccagggctggatggattagaaaaatgcctatttttcttgtatcgatgtagagactctattttctcccaaagacactatttttgcagctgtttgaagtttgtatattttccgtactgcagagcttacacaaaattgaagaatgttaatgttcgagttttcttatcttgtgtttagaggttgttttttgcagatcttggtgttaatagaccaaataaataaataaatattcccagcagcttgaaaaaaaaaaaaaaaaaaaaaaaaaaa

SEQ ID NO: 118155 - DNA, 1000 bp, Homo Sapiens
attcaaggaaaatctagcatcaagattacgaggcatcacctctcaatcaggtctgggaggtatcttggggcattgctcttctgaacacctgcagaggcttcctcaggtgagtgtgggagcccggaagggtggcctccctaaccactctgcctgcacatgaattctccaaagcagtgggcccccatctgtttcaattacacatgcctgtcagcaaaaacttcgtgagatgcactctctctgtgtgtttattaatttatttaaagcatatatccctttacttttgtactactatattaggcacattataaaaagtatacagcatagaaactttaaatgaataagacacaaaatattataaacagaggttctggcattttctctctgaactcctgagggggaccttgggcacctcctggtatgtgcacaccccactttgaacacccttgctttagtgcaaatcagcacgcctaaatagcatcccaaaccactgtgcgacatttggcctgcagaataagaaagtcctaaggcagaatccccaggaacttcaaatctgggagatgaggaaagaaaactcactcacaaacaacataaatgtaaataattcaaaaccctaaaggagagctgtccctagacagtagtggctacaggtgctaagcaaaagtcaggtacactggacagagccatgcgattgattgttcatcttccctctctgggtctccagaaaaggacactggcaatatccccagctctctcctgattggaattctttgaaccctcgaagtgctccagcagtactaccccccacgtagcagtgggcccatgtcgcttgaatattatttttgatttgaccaccaagatgtaatgatgattctattccattttgaaaagggtctgagaaagtgtacaggtctaattatatatacatatttatacatgtgtatttttgtttattgttacattttgacattggactttctattaaataatttttaagagttgg

SEQ ID NO: 118156 - DNA, 1000 bp, Homo Sapiens
tgccatggagctctgcgggaatgactcggtgtacgcctacgcctcctccgtgttccggaaggcaggagtgccggaagcgaagatccagtacgcgatcatcgggactgggagctgcgagctgctcacggcggttgttagttgtgtggtaatcgagagggtgggtcggcgcgtgctgctcatcggtgggtacagcctgatgacctgctgggggagcatcttcactgtggccctgtgcctgcagagctccttcccctggacactctacctggccatggcctgcatctttgccttcatcctcagctttggcattggccctgccggagtgacggggatcctggccacagagctgtttgaccagatggccaggcctgctgcctgcatggtctgcggggcgctcatgtggatcatgctcatcctggtcggcctgggatttccctttatcatggaggccttgtcccacttcctctatgtccctttccttggtgtctgtgtctgtggggccatctacactggcctgttccttcctgagaccaaaggcaagaccttccaagagatctccaaggaattacacagactcaacttccccaggcgggcccagggccccacgtggaggagcctggaggttatccagtcaacagaactctagtcccaaaggggtggccagagccaaagccagctactgtcctgtcctctgcttcctgccagggccctggtcctcactccctcctgcattcctcatttaaggagtgtttattgagcaccctttgtgtgcagacatggctccaggtgcttagcaatcaatggtcagcgtggtattccaggctaaaggtaattaactgacagaaaatcagtaacaacataattacaggctggttgtggcagctcatgactgtaatcccagcactttgggaggccaaggtgggaggatcaattgaggccagagtttgaaaccagcctaggtaacatagtgagaccccctatctctacaaaaaattttaaa

SEQ ID NO: 118157 - DNA, 1000 bp, Homo Sapiens
gaccgcagcacactcaagaaggcgctgcccacactgagccacatccaggaggcccagagcgcctggaaggacgacttcgccctcaacagcatgctgcggagaaggttccgggaaaagaaaaaagccatccaggaggaggaggagagagaccaggccttgcaggccaaggcgagcctgaccatcccgctggtgcccgagacggaagatgaccgcaagctggcggctctgctgaagttccacaccctggactcctacgaggacaagcagaaactcaagcggaccgagatcatcagccgctcctggttcccctctgcccccggatccgcctccagcagcaaggtcagcggcgtcctgaagaagctggcacagagccgcagaaccgcgcttgccacctcccccatcaccgtcggggacctgggcatcgtgcggcggaggtctcgggacgtcccggagagcccccagcatgcggccgacacccccaagtctggggaaccgcgggtaccagaggaggctgcccaggaccggcccatgtcccccggagactgtcctccggaaacaactgagacccccaagtgcagcagcccgagggggcaggaagggagccgtcaggacaagcccctgtcgccagcaggctcctcccaggaggcagctgacacccccgacacgcggcacccctgcagtctcggctcctccctcgtggcggactactccgactcggagagtgagtgagcgatccccatcctggagactggacccgctctagaggcccggacacacccaggaggcccctcacagactgcagacccccggctcgcccaccagccctgggagagctcagatgccgcatcctccccagaccgcgccttcctgcaaccgtggagttatttatttggtcctggtgagggtgtttgtgccttgtgagactccgtacattaaagacctgtctcttcttcaaaaaaaaaaaaaaaaaaaaaaaaaaaaaaaaaaaaaaaaaaaaaaa

SEQ ID NO: 118158 - DNA, 1000 bp, Homo Sapiens; identical to SEQ ID NO: 116611

SEQ ID NO: 118159 - DNA, 1000 bp, Homo Sapiens
gagtagctgggactacaggcacctgccaccacgcccggctaatttttttgtattttcactggagacggggtttcactgtgttagccacgatggtctccatctcctgacctcgtgatctgcccacctcggcctcccaaagtgctgggattacaggcgtgagccaccgcgcctggccaaaatgcagacattttattagggggataaggagggcaaggtaaagcttatggaactgagtgttagtgactttggcatttgtgtagctgagcacagcaagggaggggttaatgcagatggcaagtgcaccaaggagaaggcaggaacactggagcctgcaataagggaggagagaggactggagagtgtggggaatgggaagaagtagtttactttggactaaagaatatattgggcgaagaatagagggggagcttgcaggaaccagcaatgagaaggccaggaaaagaaagagctgaaaatggagaaaaccagagttagaactgttggatacaggagaagaaacagcagctccactaccgacccccccccaggtttgatgtccttccaagaataaagtctttccctggtgatggtctctcgctctgtctttccagcatccactctcccttgtccttctgggggtgtatcacagtcagccagtggcttcttcatgatggtggttggggtggttgtcatgtgacgggtcccctccaggttactaaagggtgcatgtcccctgcttgaaccctgagaggcaggtggtaggccatggccacaatccccagctgaggagcaggtgtccctgagaacccaaacttcccagagagtatctgagaaccaaccaatgaaaacagtcccatcgctcttagccggtaagtaaacagtcagaagattagcatgaaagcagtttagcattgggaggaagcacagatctctagagctgtcctgtcgctgcccaggattgacctgtgtgtaagtcccaataaactcacctactcaccaa

SEQ ID NO: 118160 - DNA, 1000 bp, Homo Sapiens
taaactgaatccttgcagcgacttccggaatttaggaagcattccctcttctacaggggtctggtcacaagggctggattctctgacaaaaatttcttctatggattctggacagaagacacttgagggtgatatgttttaaaggaaagaggttatgcttatcttcttagcagttgataaaatattaaaactctcttgccatagagaatacaccatcaaagaaaacacaaccctttccctttggtgtacagttatttattaagttgattttggggtttctttcgccagggatcttttcaaaactggtagtagttatttttaaaaatcatgtttgacatctttctattgctcgtaaccagtccctgtagctgtctaagttatgggtggagaagcctgggtatgactttccgttgtgtacactcacacttcatgattgacatttatttattcttttatttccatttggttatgcttatttttgtttgaaatttgtttttttcaaatatgtttcctttttgaacttacagaattgttgaaattttctactaacagccagctaaaatttggtatatgttagctctatctgtttcacttggacgtttcattttgaaagaaagaaattttatgtttcacatatagttttatacaaagtagccagtcccataatgaaatgctgtattgccatagtggtcacacccaagtggtccagtatctcaatggtgaggcagccagactggtcagggctgctttgttgaaatgtgatgattttcatatgccttctttctctttctctctctctttttttttccttttttggcccaatgttgaagatgtagaactttgtttttaaataatgtttttataatttcattcgtatacctaagtttgtattttttgtgactttggacttcaacagtttgtatattgggacttctaatgtgattactgtactaaataaattccactaataaacatcttacattaacaccttaaaaaaaaa

SEQ ID NO: 118161 - DNA, 972 bp, Homo Sapiens
atgctgctcctgttcctcctcttcgagggtctctgctgtcctggggaaaatacagcagcagcagaggagcagctgtccttccgcatgctccaaacttcctcctttgccaaccacagctgggcacacagtgagggctcaggatggctgggtgacctgcagactcatggctgggacactgtcttgggcaccatccgctttctgaagccctggtcccatggaaacttcagcaagcaggagctgaaaaacttacagtcactgttccagttatacttccatagttttatccagatagtgcaagcttctgctggtcaatttcagcttgaataccccttcgagatccagatattagctggctgtagaatgaatgccccacaaatcttcttaaatatggcatatcaagggtcagatttcctgagtttccaaggaatttcctgggagccatctccaggagcagggatccgggcccagaacatctgtaaagtgctcaatcgctacctagatattaaggaaatactgcaaagccttcttggtcacacctgccctcgatttctagcggggctcatggaagcaggggagtcagaactgaaacggaaagtgaagccagaggcctggctgtcctgtggccccagtcctggccctggccgtctgcagcttgtgtgccatgtctcaggattctacccaaagcccgtgtgggtgatgtggatgcggggtgagcaggagcagcggggcactcagcgaggggacgtcctgcctaatgctgacgagacatggtatctccgagcaaccctggatgtggcggctggggaggcagctggcctgtcctgtcgggtgaaacacagcagtctagggggccatgatctaatcatccattggggtggatattccatctttctcatcctgatctgtttgactgtgatagttaccctggtcatattggttgtagttgactcacggttaaaaaaacagaggtga

SEQ ID NO: 118162 - DNA, 1000 bp, Homo Sapiens
agagatgatgaaggaatggaaaaataacccagaaagtgttgaggaaaacacaacagaagagaagaataagccgtccactgaagaaaagttgaaaagttaccaaccctggggaaatgtccctgatgccaattacacttcagatgaagaggaggaaaaacagtctactgcttatgaaaagcaatttcctgcaaccagtaaggacaactttgatatgtgcagttcaagtttcacatctagcaaactccttccagctgaaatcaagggagaaatggagaaaacccctgtgactccaagccaaggaacagcaaccaagtaccctgctaaatccggcgccctgtccagaaccaaaaagaaactctaaggttccctccagtgttggacagtacaaaaacaaagctgctcttgttagcactttgatgagggggtaggaggggaagaagacagccctatgctgagcttgtagccttttagctccacagagccccgccatgtgtttgcaccagcttaaaattgaagctgcttatctccaaagcagcataagctgcacatggcattaaaggacagccaccagtaggcttggcagtgggctgcagtggaaatcaactcaagatgtacacgaaggttttttaggggggcagataccttcaatttaaggctgtgggcacacttgctcatttttacttcaaattcttatgtttaggcacagctatttataggggaaaacaagaggccaaatatagtaatggaggtgccaaataattatgtgcactttgcactagaagactttgttagaaaattactaataaacttgccatacgtattacagcagaagtgcttcagtcattcacatgtgttcgtgagattttaggttgctatagattgtttaagacagcttattttaaatgtagaaaaataggagattttgtaactgcttgccattaacttgctgctaaattcccaatgtattgattaaatcaataaaaaacagatgttactcagc

SEQ ID NO: 118163 - DNA, 1000 bp, Homo Sapiens
agtccgccgagagcagtaccgtgtggccaagaggtggactcagagccttccttgagctaaactcggccaaccaaggcacgcagcatgtcccctcaggtctccagtcagtccaggttgaccctcagttctggacgtgtgtatatagctgtatttaatacctcaaggtcattgtggctctggggatgccagggcaggaggacgagggtgcgctgtggacacagcagtccgcggaattccgttctgggaagccaatggtcgccggcaccccttgcttcctccctctgttgtctgcctgtgtgacacacatcaatggcaataacttcttccaactcctcgcagaagtgggagaggccggcagcctgcaccgagaggggctttcctctctcttgctccccgcttcgttctgttttggctgcagagagtggttcatccatactctcattccctcgcctccccttgtggacgggggtcttgccttttcaattcctgtgttttggtgtcttcccttatctgctaccctgaatcacctgtcctggtcttgctgtgtgatgggaacatgcttgtaaactgcgtaacaaatctactttgtgtatgtgtctgtttatgggggtggtttattatttttgctggtccctagaccactttgtatgaccgtttgcagtctgagcaggccaggggctgacagctaatgtcaggaccctcagcggtggagcctgctggggggacccagctgctcttggacaagtggctgagctcctatctggcctcctcttttttttttttttcaagtaatttgtgtgtatttctaactgattgtattgaaaaaattcctagtatttcagtaaaaatgcctgttgtgagatgaacctcctgtaacttctatctgttcttttttgaggctcagggagaaactagcatttttttttttccaaactactttttgtcactgtgacagttgtaaataaagtttgaaaatgctcaaaaaaaaaaaaaaaaaaac

SEQ ID NO: 118164 - DNA, 1000 bp, Homo Sapiens
aaaccacgatttggtccagatcgaccactactcagactgacatggatgagaacattctctttcctcgaggaactcaatctacagaagggtcaccagtctcaaaaatgtctgtatcgagatcttccagtttgaagtcttcctcctctgtgtcttcccaaggctctgtggcaagctccactggttctcccgcttccatcagaaccactgacttccacaatcctggctatcccaagtacctgggcaccccccacctggaactgtacttgagtgactcacttagaaacttgaacaaagagcggcaattccacttcgctggtatcaggtcccggctcaaccacatgctggctatgctgtcaaggagaacactctttactgaaaaccaccttggccttcattctggcaatttcagcagagttaatttgcttgctgttagagatgtagcactttatccttcctatcagtaactgctccgtgttcagactcctggtttcttccaggcttacagtggacatcatcagcttcctgctttaaaaaatatcttatgtccctaattgcctttcttttacctgactttgtcacctttgttgtctttgaattctttaggctgcatattattttacatgctttgttttgtcatgtatataccaggtattggttttatggtttaaacactatggatacaggggtttgttttgcacaattttaatagtcatgcactacataatgatgttttggtcaatgacagaccacgtatatgttggcagtctcataagattataatactgtatttttactataccttttctgtgtttagatacaaataccattatgttacagttgcctacagtattcagtgcagtaacatgatgtacaggtttgtagcctgttttgcatttttcttaggttgtatgctcttctgttttaaaggtttgaatcaccagcatttttgtgatcaaaatcctatttagaaaaaataaaactactttctgtttatctcttt

SEQ ID NO: 118165 - DNA, 1000 bp, Homo Sapiens
acctgggtgtggcggagggagaggcgatgctgcaaagtgttttctgtgtcccactgtcttgaagctgggcctgccaaagcctgggcccacagctgcaccggcagcccaaggggaaggaccggttgggggagccgggcatgtgaggccctgggcaaggggatggggctgtgggggcggggcggcatgggcttcagaagtatctgcacaattagaaaagtcctcagaagctttttcttggagggtacactttcttcactgtccctattcctagacctggggcttgagctgaggatgggacgatgtgcccagggagggacccaccagagcacaagagaaggtggctacctgggggtgtcccagggactctgtcagtgccttcagcccaccagcaggagcttggagtttggggagtggggatgagtccgtcaagcacaactgttctctgagtggaaccaaagaagcaaggagctaggacccccagtcctgccccccaggagcacaagcagggtcccctcagtcaaggcagtgggatgggcggctgaggaacggggcaggcaaggtcactgctcagtcacgtccacgggggacgagccgtgggttctgctgagtaggtggagctcattgctttctccaagcttggaactgttttgaaagataacacagagggaaagggagagccacctggtacttgtccaccctgcctcctctgttctgaaattccatccccctcagcttaggggaatgcacctttttccctttccttctcacttttgcatgtttttactgatcattcgatatgctaaccgttctcagccctgagccttggagaggagggctgtaacgccttcagtcagtctctggggatgaaactcttaaatgctttgtatattttctcaattagatctcttttcagaagtgtctatagaacaataaaaatcttttacttctgaaaaaaaaaaaaaaaaaaaaaaaaaaaaaaaaaaaaaaaaaaaaaaaaaaa

SEQ ID NO: 118166 - DNA, 1000 bp, Homo Sapiens
tctcctggcgccggaactgcctctggtcttgatagcattaagccctgatggcgccggtggcgcggtgggcatggttcttcactgagagccggctctccttttcttaaagtgtgtaaatagtttatttataggggtaagaatgttctcacaccatttcacttcctcttcctctcctccagcattctcctctgagcagccttagatagtgtccatggctggagccgaccctttgagtccccttgagtgtcttaagaaccagcccacaacagcctctctttctcctccacatactgcagcctccctccatgcatcccacatacaagcactcccccactccccagcgtggcctcactgtcttctggtcttggtgctactgaaattgtcacccagaatttgaatcctgaccctccccactgcaagcccagggagccccagcccaagatggccagcctgaaactgttggccagggctcctcttgtggccatgtacccagggctggctggcctgccatttgcctctccccggagacagccgttcttctgcaaccacaccccgtgcctagccacaaccccaggctgcagctgctcagaagctccaggcattttgtttctggtgaccgcccctaatgggatatcggtgatcactggtccacccttcctgtcagggcttttctggggctgctcttggaaatgaagtcttaagtactgaataactcccctggggatagctggggcatttgtctagctgggctaccttctaacactttgccatagctcagaccacttctcatcgttcagggatggactgcaaccttaatttacttgccggagtgtacattctagtgtggtgtatactggtggctgttgatgacgattttttttttttttttacacaattctctgtagactaggagaagaatgcttgtgtttttcggaagtgtgatgcttctctttgactgccaaactcttttatggaatatatctttatattaaaaaaaaaa

SEQ ID NO: 118167 - DNA, 1000 bp, Homo Sapiens
ctctttttctgggcccctgtgcctcgggtcctgcaacacagctggatcctctatgtggcagctgccctttggggtgtgggcagtgccctgaacaagactggactcagcacactcctgggaatcttgtacgaagacaaggagagacaggacttcatcttcaccatctaccactggtggcaggctgtggccatcttcaccgtgtacctgggctcgagcctgcacatgaaggctaagctggcggtgctgctggtgacgctggtggcggccgcggtctcctacctgcggatggagcagaagctgcgccggggcgtggccccgcgccagccccgcatcccgcggccccagcacaaggtgcgcggttaccgctacttggaggaggacaactcggacgagagcgacgcggagggcgagcatggggacggcgcggaggaggaggcgccgcccgcagggcccaggcctggccccgagcccgctggactcggccgccggccctgcccgtacgaacaggcgcaggggggagacgggccggaggagcagtgaggggccgcctggtccccggactcagcctccctcctcgccggcctcagtttaccacgtctgaggtcggggggaccccctccgagtcccgcgctgtcttcaaaggcccctgtctcccctcccccacgttggggacgcccctcccagagcccaggtcacctccgggcttccgcagccccctccaaggcggagtggagccttgggaacccctcggccaagcacaggggttcgaaaatacagctgaaaccccgcgggcccttagcacgcgccccagcgccggagcacggtcagggtcttcttgcgacccggcccgctccagatccccacagctctcggccgcggacccgggccgcgtgtgagcgcactttgcacctcctatccccagggtccgccgagagccacgattttttacagaaaatgagcaataaagagattttgtactgtcaaaaaaaaaaaaaaaaaa

SEQ ID NO: 118168 - DNA, 1000 bp, Homo Sapiens
ccctacaaaggctctgagattcggggctcccggaagtccaaggactgcaagtacccccagaagccacacaagtctcggagccggagttcttcccgttctcgaagcaggtcacgggagcgggcggataatccgggaaaatacaagaagaaaagtcattactacagagatcagcgacgagagcgctcgaggtcgtatgaacgcacaggccgtcgctatgagcgggaccaccctgggcacagcaggcatcggaggtgaggcggggttgcagtgactggtggccgcaagcccttccctggggagtacctgatggctgccctttgacccccggtggctgccctttgacccccgggtgtgctctcagcgcaagtggtcctagaacaggattctttttggaaatgtctgtcgactggaccttggtggatttggaaatggaactgagggaccggtgacacgtgcttcagaccggtctggggtgcggcgcacacctgggcccgtgcagggctcagctcggcagcagctctgagggcagctcaatgaaaaagtgaatgcacacgcccttgttggcgtggcctggcatggcctggtgctatcggcagccgctctccactccccgactgatactcaattacgtgaagccaagaaagatgatttttagaacctttgcctatattaggttgtacttatgtacatattttgcagtgtttcacaggagaaagtggccttaactgccccttattctctctccacgttgtaaataaacatgtgtttaatacaagttaaagctatgtatgaaaactcagaacttgaatcccgtcagcttaaaacttgtgtagggaatcctgacttttaaaatgtgagggtatttggatctgtgttgaaagtcgtatatttttatctgtgcggtgctgagtgcaggccaccagctcctaaatagaggttccctatatgcgcgtatgacatggtgaataaacacaactctctccaccaaaaaaaaaaaaaa

SEQ ID NO: 118169 - DNA, 1000 bp, Homo Sapiens
tgcaatccaccttgtgttttcttagggtggaatgtgatgttcagcagcaaacttgcaacagactggccttctgtttgttactttcaaaaggcccacatgatacaattagagaattcccaccgcacaaaaaaagttcctaagtatgttaaatatgtcaagctttttaggcttgtcacaaatgattgctttgttttcctaagtcatcaaaatgtatataaattatctagattggataacagtcttgcatgtttatcatgttacaatttaatattccatcctgcccaacccttcctctcccatcctcaaaaaagggccattttatgatgcattgcacaccctctggggaaattgatctttaaattttgagacagtataaggaaaatctggttggtgtcttacaagtgagctgacaccattttttattctgtgtatttagaatgaagtcttgaaaaaaactttataaagacatctttaatcattccaaaattgtgtccgttttcttgagcgttttgattttttacttttagcttataccagctgaatggcagccttgcctaatccacctacaacaagaatttcttaagctttcttttatttgcatgagagagccactaccaaggcatgttttgttatgctgaaactgggctgctgcatactgctaaatggcacctctgggattggcctacctggggatttcttggtttgtgaaaacaggagaggagaaatatctcatacaagtgaaaggatactggagagagaaattacccatttctaaaaaaaaaccacactctgtcgtatctgtgttaatgttttctagcatgtactctggtttcaacagacacaaatttatatgttaacccagttttcttgccgttctgtaagtgttttattcttagtgtgatttttttccattgggatgtttttgattgaacttgttcattttgttttgcttgggaggaaaataaacaattttacttttttccttaaaaaaaaaaaaaaa

SEQ ID NO: 118170 - DNA, 1000 bp, Homo Sapiens
tgctttgcatatttgctgcactgcatcagtatcttactaaaaatgtgaaatgaaaggactattgtacactgaaatgcttaaatgtatctgaaagcacaaggtgatactcatttttatggtcttcccatttgtgctggtttttgcctctttgacatctgtcatcagtatttagagggtgagaagtgaatgtaacaggtataaataacatttttaaaaacaataactttgctataatcacagttgttccagagcactgtcagatacattctaatgaccagaactggtttaaaaaaagaaaatacaaccatgggaaagaaatcttaaatgaaaaacgcatctcattgtaggcatttttgcctcatattttactgggccatgtttgtttcctggtactcatgtattttttttttttccagatctctttccccaagttgctattgtaagagtattctgctgcgtgtggatgcagttatacacattaaagcagatctggagtctgaagtagctataaagcagctataaaacagaaatacatgcatagctgcagaaaccatgataggtagaggacttttcttttggttttgttttgttttgttttgttttgtttttggttttacagagaagagatttttattacaaagaaaaaaattccagtgaattgtgcagaaatgctggtttttacaccatcctaaagaaaaactttacaagggtgttttggagtagaaaaaaggttataaagttggaatcttaaattgtaaaattaaccattgagtgtcaaagttctaaaagcagaactcatttcgtgcaatgaacataaggaaagactactgtataggtttttttttttctccttttaaatgaagaaaagctttgcttaagggttgcatacttttattggagtaaatctgaatgatcctactcctttggagtaagactagtgcttaccagtttccaattgtatttagcttctgttggaatttgaaaaaaaaaaaaaaaaaaa

SEQ ID NO: 118171 - DNA, 1000 bp, Homo Sapiens
ccatgaccatgcagaggctggaaagctctgagcagcgggtcccctgttccacttcttaccacagctctgggttgcactcgggtgatggggtcaccaaagcaggacctatgggccttccagaaataagacaagtgccaactgttgtgattgaatgtgatgacaataaagaaaatgtgcctcatgagtcagactacgaagactcttcttgcctgtatacaagagaagaggaggaagaggaggaggacgaagacgacgacagctcattatacaccagctccctggccatgaaggtctgcaggaaggactccttagccatcaaactcagcaacaggccctccaagcgagagctggaagaaaagaacatccttcccaggcagacggatgaggagcggctggagctgaggcaacagattggcaccaagctcaccaggcggctgagccagaggccaactgcagaggaactggaacagaggaacattttgaaacctcggaatgaacaagaggaacaggaggagaagagagagatcaagaggaggctaacccgaaagctcagtcaaaggcccacggtggaagagcttcgggaaagaaagatcctcatccgcttcagtgactacgtggaggtggctgacgctcaggactatgaccgcagggcagataagccgtggacccgcctcaccgctgcagacaaagctgccatccgaaaggagctcaatgaattcaaaagcactgagatggaagttcatgaattgagtagacacttaacaaggtttcaccgaccttaacagtcgaattcctcttgagtgctatgctgtcttcaaaacataaatttataagaaccataagtgctggtatttattcacttccccattacgatgtaaatcttctgaactgccttttttttaaaaagaagaaaaatcaaggaaacacaatcaggattttatgtgtgaaaacgcaaaagtgatggctcggcggtccgagctgctggtcccacttctgacac

SEQ ID NO: 118172 - DNA, 1000 bp, Homo Sapiens
ggaggcagagctgtccgtgggaggtggaggccgaggacattttcctgaagggcaggggttggcaacttttcaacatggagtgccaaactgctaacccgtcttctagtgtgtgagaatagggaccaaggtggtggcgtgaccttaactctcagaagcagaggaggcaggtgggtggagggggatgctgggaattcacctgcctcttgctttttgtgggtggctgctgccaccaccgccgctgctatatagtttaggtttctgaggtttgtgagcctgtcctgctttgcattcttcaaaaccattcctgatagagtagccgagggagagtcttggggccaagaagggcccagggtgggtcaggcgtgtgcactgtggaacagagctgagaccccggccccccttggactggcacagggtcctacagagtcagaggaggcctgagatttcgaatgggcagtgaatggcctcttctgccagccacaggcaggatgctccttgatcacggcatcccccggcggtagtacagggtgagcttgcaggagggtctgcaagtgcagacagcagctggggccaaagaggtgttaggttcaaaggctgcgaagagaataggctactggaaaaccaaacccaacagaattcacgtccaaaaatccacattctccatcgcttctcagccttttggctaagattaagtattaaaaaaaaaccaggctctgccaggcgcagtggctcatgcctataatcccggcactttgggagtctgtggcaggaggattgcttgaggccaggagtttgagaccagcctgggcaacatagcgagaccccatctctacaaaagattaaaaattagctgcgtgtagtagcatatgcctttcaacgtagctactcaggaggctgaggtgggaggatcccttgagccgaggagtttgagtctgcagtgagctatgatcgcaccactgcattccagaccccatctcgaaaaaaaaaaaaaaaaaaaaaa

SEQ ID NO: 118173 - DNA, 1000 bp, Homo Sapiens
ttctttttcaaaataacatgcaaaaaaagctgaatgcactaactcacaaaacaaacacttgcactgaattcccaatgaagtgaagatgttggaaagacagaggccagctatttaggaccatacgcacctgtgacaagggctgtgttgaccacagtcacactgtggcatgactggatacccaaactacacttctacacatgaaaagtaagaactgtctttagattttctttactttgataacttgtgattgtttagcttaagacccaagaaatgctgtttgctcatggtaaacagaaacagcatcttcgctacaaccactgacaccagctggcgtcataggtagctagatcattgcatttgttttgaaatgttaatatgttaaatactaaactaatatttcaaaaatgtgtatatatgatttctatatccttgtttttcagatagcctgcttataatttaatataaattaactgatgcattcataagatttcaataatgaaatggttcccttttaaaaaataaaaatactttgtagattaaaaataaatcagaatttcaaatttaaaattgtccacacactaggaaatagaactgtgttaatatataagaaatctggggataattaagaatgaaggacttttctatcatttccattttataaattgccacctgtgaaaatggtttttgcacattatttgtatttttctttgtatatgaaataattttttgtactttgtaaaatatggagcccattgtaccttcagctatttgagactatacacagtgcttcttttgtaactggattactttaactttcgtgaaggcattacattgcctcacattcactaaccaccttgaattaaatttatttcttaagaaaaagcatccctcatttactgtgaactaaagttcattctgtagtgcacagcattcaggagggtaacactcaggattcatacatgggactaaaggttcaagaataaaacaaagcatgacccac

SEQ ID NO: 118174 - DNA, 1000 bp, Homo Sapiens
ctgtcaccaatggcctgtttggctggacgatgcctcggcttgaccttttttgaaaagtgctggttagttcccgccccctggtaaacctggggtaggtgggggttctgtcttaactcgaggggcacctgggatccaggacgcttctagggggctctggctgcccgtgttaatgaaggacagcgcttccgcgagcaccctgggaactgggtcttgggtagcaaagccctcccagagaaaagatgggcacaactaaggctttcctgagcaggaagggggtgaagaccaatcccttcctttggtcctttggtacgcaccccctcagagctgagatggaagacatggctagttcttttcagccttgtggagcctgtcagtcgccatcatacctcgagtgaggcccagctagataatgacttgtccaagatggcacacgtggaaagttgatctgcaccagaacccggatgactgtcaccttgaagcgtcctgttctccttctgtgctgtcccaggaagtgtctggcgggcgtgggcagcacagctctacactgtacgattcactagggcatcctgcgagcctcactagccttctggttcatgcctttgacaagcatttttgtgccccctctgcttactgtgacagtcgatgatgaatcttgcgttgccattttctgctgtgggtaactgcgtgcagtgtcttgccttgctttctcttcttactgtcccacagcttggtttcatgttacaaacagaaaagctcgaggctcccaccccgccacatcccaacttcatttccccctcactgtagcccatttccaccccaccacaaagttgccacaggttttctttgtatagaatatttattttgaagctctattttaatagtatttattttagaaagtctactattgtaagagttcttctgtttgtgaagaaaaaaacaagttaaaaactgaatgtactgatttagaaaatatatataaatatatattgttaaatataaa

SEQ ID NO: 118175 - DNA, 1000 bp, Homo Sapiens
ctcctgacagtggccagggacccctgggtcccccaggcctgcagatgtttctatgaggggcagagctcctggtacatccatgtgtggctctgctccacccctgtgccaccccagagccctggggggtggtctccatgcctgccaccctggcatcggctttctgtgccgcctcccacacaaatcagccccagaaggccccggggccttggcttctgttttttataaaacacctcaagcagcactgcagtctcccatctcctcgtgggctaagcatcaccgcttccacgtgtgttgtgttggttggcagcaaggctgatccagaccccttctgcccccactgccctcatccaggcctctgaccagtagcctgagaggggctttttctaggcttcagagcaggggagagctggaaggggctagaaagctcccgcttgtctgtttctcaggctcctgtgagcctcagtcctgagaccagagtcaagaggaagtacacgtcccaatcacccgtgtcaggattcactctcaggagctgggtggcaggagaggcaatagcccctgtggcaattgcaggaccagctggagcagggttgcggtgtctccacggtgctctcgccctgcccatggccaccccagactctgatctccaggaaccccatagcccctctccacctcaccccatgttgatgcccagggtcactcttgctacccgctgggcccccaaacccccgctgcctctcttccttccccccatcccccacctggttttgactaatcctgcttccctctctgggcctggctgccgggatctggggtccctaagtccctctctttaaagaacttctgcgggtcagactctgaagccgagttgctgtgggcgtgcccggaagcagagcgccacactcgctgcttaagctcccccagctctttccagaaaacattaaactcagaattgtgttttcagcaaaaaaaaaaaaaaaaaaaaaaaaaaaaaaaaaaaaaa

SEQ ID NO: 118176 - DNA, 1000 bp, Homo Sapiens
ttcggccttgagcgcatggccgctcccatcgaccgtgtgggccagaccattgagcgcatgggctctggcgtggagcgcatgggccctgccatcgagcgcatgggcccgagcatggagcgcatggtgcccgcaggtatgggagctggcctggagcgcatgggccccgtgatggatcgcatggccaccggcctggagcgcatgggcgccaacaatctggagcggatgggcctggagcgcatgggcgccaacagcctcgagcgcatgggcctggagcgcatgggtgccaacagcctcgagcgcatgggccccgccatgggcccggccctgggcgctggcattgagcgcatgggcctggccatgggtggcggtggcggtgccagctttgaccgtgccatcgagatggagcgtggcaacttcggaggaagcttcgcaggttcctttggtggagctggaggccatgctcctggggtggccaggaaggcctgccagatatttgtgagaaatctgccattcgatttcacatggaagatgctaaaggacaaattcaacgagtgcggccacgtgctgtacgccgacatcaagatggagaatgggaagtccaaggggtgtggtgtggttaagttcgagtcgccagaggtggccgagagagcctgccggatgatgaatggcatgaagctgagtggccgagagattgacgttcgaattgatagaaacgcttaagcagttgccttttttaaacatcgatacgagacctctgaatttgtattttttcttgttaaccattttaatttgttggctggatgtataaagatgtttaaaaaattcagttgctttttggggtaatttgaattacttttttaatgactggggttccatttgactgtttgcattgagattgcaatgtgcgcaattttttttgtagttgtggcatcttgttgacatcgaatatgactttgataataaataccggttcctgaaaaaaaaaaaaaaaaaaaaaaaa

SEQ ID NO: 118177 - DNA, 1000 bp, Homo Sapiens
gccagcccccaactccttcggatcatcttcaaagccatggggcagggcctgccagacgaggagcaggagaagctgctgcgcatctgttccatttatacccagagtggagaaaacagcctggtgcaggagggctctgaggcctcccccattgggaagtctccatatacactagacagcctgtattggagcgtcaagccagccagctccagcttcgggtctgaagcaaaggcccagcaacaggaggagcagggcagtgttaatgatgtcaaggaagaggagaaggaggagaaagaggtcttgccagaccaggtagaggaggaggaagaaaatgatgaccaagaggaggaagaggaggatgaagatgatgaagatgatgaagaggaagacagaatggaggtggggcctttctctacagggcaagagtcccccactgccgagaatgctaggcttctggcccagaaaagaggagctttgcagggctctgcatggcaggttagctcagaagacgtgcgatgggacacatttcccctaggccgaatgccaggtcagaccgaggacccagcagagctcatgctggagaattatgacaccatgtatcttttggaccagcctgtgctagagcagcggctggaaccctcaacatgcaagactgacaccttgggcctgagctgtggtgtcggcagtggcaactgcagcaacagcagcagcagcaacttcgagggccttctctggagccaggggcagctgcatgggctcaaaactggcctgcagctcttctgatggccatccctggtgcaagtgttcatccagccgtgccagggcaacagcccaccccctagtacaactgatgctccctgagacaacctgggagacagcctggatcagccacatcaactcagttgtccaccacaggggaattttgaatgtcttttgtttttgttttgttttgaaaaataataaacaggcacccaaaaaaaaaaaaaaaaaaaaaaaaaaaaaa

SEQ ID NO: 118178 - DNA, 1000 bp, Homo Sapiens
tatgtggacttcacaggggcccagagccattgtctgcagtccgcccagaagatgctggacggtgcctccttcaccctgtatgagttctggcaggatgaggcctcctggagaaggcaccagcagtcgcctggcagcaaggccttccagcgcatcctcatcgaccacctgcgggccccggacaccctcaccactgtgttcttcccagcctcctggtggataatgaataacaactgagccagacctgcacacgccgagggccccgggaccctgcctgcctccctctggagccttctggactggccagcccagcgcaaagaccagggcttgtctcctcctggacttgggcctggtggaagggctctcagcccagggatcagggactgggctgcttgctttctatttattattgatttatttatccctgtattttattgtttgtcacttcagcctccaagctactttggcttctgcctggctcaggagacctggattctggtccctgctgtccctgcctggctgagcgacccagggcaggtcccgtccctgtctgggtgggcctcaggccatctggccgcctagcgagggtcctgctttcttcctgctgtcttgggaccaggcttctgctcctcctcagccagcggcagaagcagggctgatgctcagggaccccccaaccctcaaaccttgcctccgaggctgggcctgagctgggtgccccgtcgccctcccaggccactaggctctgactcttccagcacccatggatgtgccagaggcctctgggttggtttgcatgtcatttgcatatcgtttgcatgccctcatcccacccattctcagggcagtatgggaagccccaaggtgacctggccaagtagcaataatttgggtccagggtcacctattgcccccagaggcctctgaaccccaggctgggaccccagcacagaggcaataaaggcagtggtcccttccaaaaaaaaaaaaaaaaaaaaaaaaa

SEQ ID NO: 118179 - DNA, 1000 bp, Homo Sapiens
gggcgtgcaaaaactaacattgaaattttgaaacagcagcagagtgagtggattttatttttcgttattgttggtggtttaaaaaattccccccatgtaattattgtgaacaccttgctttgtggtcactgtaacatttggggggtgggacagggaggaaaagtaacaatagtccacatgtccctggcatctgttcagagcagtgtgcagaatgtaatgctcttttgtaagaaacgttttatgatttttaaaataaatttagtgaacctatttttggtggtcattttttttttaagacagtcattttaaaatggtggctgaatttcccaacccacccccaaactaaacactaagtttaattttcagctcctctgttggacatataagtgcatctcttgttggacataggcaaaataacttggcaaacttagttctggtgatttcttgatggtttggaagtctattgctgggaagaaattccatcatacatattcatgcttataataagctggggattttttgtttgtttttgcaaatgcttgcccctacttttcaacaattttctatgttagttgtgaagaactaaggtggggagcagtactacaagttgagtaatggtatgagtatataccagaattctgattggcagcaagtttattaatcagaataacacttggttatggaagtgactaatgctgaaaaaattgattatttttattagataatttctcacctatagacttaaactgtcaatttgctctagtgtcttattagttaaactttgtaaaatatatatatacttgtttttccattgtatgcaaattgaaagaaaaagatgtaccatttctctgttgtatgttggattatgtaggaatgtttgtgtacaattcaaaaaaaaaaaagatgaaaaaagttcctgtggatgttttgtgtagtatcttggcatttgtattgatagttaaaattcacttccaaataaataaaacacccatgatgctag

SEQ ID NO: 118180 - DNA, 1000 bp, Homo Sapiens
gggggtcccttcttacgcagcacacgtggcaagtgcctgaatcggggctggaggcacttcagagcctctgaggggccaccacttctggcccaaaattgcagggttgtagatgaggctgcctgtggagaactggtgtgaggaggaagctgtttccaacaaagagcactttcatctgttgagatggctgtggtgagcaactgaacgagcctacgtgtgtacctgaattttccccgtaactcatttcttccatatgaagaaacaccaaactatgtacagagaactttttacaaaaggcagaccttttttaagctgtgtaacccacatagcctaaccacctggcagaatgactacgaataggggtcattgtgctggtaaaagcctctattacgactgtaagtaagttggatgttggcaaaattaaattgttacagtatttagagctgctgtagctgttccttcacaacataaaataggataaatgactagtacgtctttcaggtgggtggcaagcagaacatgcgtaatattctctacctggtctgtagctgtaactgtgatgtacagacaaagcaaaaattaaaagaacttatgaaaacaaatgcaatgatactaggatatacacttttgtatttttattcttatataaggttatttgctggctattgttggcctctagttcagtctgtgttatttaaattctaatatatgaattatttgaattgaattcatgttcggggccacgttgttgtatgtattgatgtacagccttgaatgtgaataattattgtaaactatattttacaactttttttctggctttattatataaattttctattgggtcagtgatttaatcatataatttaatgaatctgtttatcctttttttttttccaaatacttgtgctttaggtgtagttaccagatgatgaattttcctcgtatggtcagtagtcttgtaataaaaagcatgtagagtgtaaaaaaaaaaaaaaaaaaa

SEQ ID NO: 118181 - DNA, 1000 bp, Homo Sapiens
ccgccgcacaacaagcatctggctcgagtggcggacccccgttcacctagtgctggcatcctgcgcactcccatccaggtggagagctctccacagccaggcctaccagcaggggagcaactggagggtcttaaacatgcccaggactcagatccccgctctcctactcttggtattgcacggacacctatgaagaccagcagtggagaccccccaagcccactggtgaaacagctgagtgaagtatttgaaactgaagactctaaatcaaatcttcccccagagcctgttctgcccccagaggcacctttatcttctgaattggacttgcctctgggtacccagttatctgttgaggaacagatgccaccttggaaccagactgagttcccctccaaacaggtgttttccaaggaggaagcaagacagcccacagaaacccctgtggccagccagagctccgacaagccctcaagggaccctgagactcccagatcttcaggttctatgcgcaatagatggaaaccaaacagcagcaaggtactagggagatcccccctcaccatcctgcaggatgacaactcccctggcaccctgacactacgacagggtaagcggccttcacccctaagtgaaaatgttagtgaactaaaggaaggagccattcttggaactggacgacttctgaaaactggaggacgagcatgggagcaaggccaggaccatgacaaggaaaatcagcactttcccttggtggagagctaggccctgcatggccccagcaatgcagtcacccagggcctggtgatatctgtgtcctctcaccccttctttcccagggatactgaggaatggcttgttttcttagactcctcctcagctaccaaactgggactcacagctttattgggctttctttgtgtcttgtgtgtttcttttatattaaaggaagtaattttaaatgttactttaaaaaggtaaaaaaaaaaaaaaaaaaaaa

SEQ ID NO: 118182 - DNA, 1000 bp, Homo Sapiens
atgtcttattgtcccaaggtactatagcggatatagagctagctaatctctacaaaccctctgtaggccagtagttctcaaagtgtggtctctggaagagcagtatcagcatcatctgggaacttgtcacagatgcagattctagggaccactccagacctacagaatcagaaactcttgggggagggcccgaaatatctatgttttaccaagcccaccacatgattctgatgtactctaaatactgagaaaacctgttctatcaatccaagcacactccgcaggcagttaccagtacggctggctacaactgctccatccgtgcctctttttaaagttcaaactcacaggtgactctaaggttatctacttttactcataagtaaaagccctagactggtgctaatgtcaaaccactggcctccactcaggcctccatcttctcatgccctcttaccagtatttaacttctgaggaagacaagtgatgctaaaacctgaattccaatgaagccatatgaaccagctgtcagttgcacttctaagactttacttagcagtaaattatagctcatgtgcattatttcagatacttagcttatgagtagcttatacaattagtgaagattaatattacagattaaatgtaactgttcttaaattgggctcacttgattcacagcgtgcatacacagattgtgagaagtcttcagcaagataaacattattaactaacttatttatgaagtattaaaatgcttacatttgaacttgatggctaacttactaagattctctatgtatcaaatgtaacttactgcgactaaacttaatttaatatttactctataaccaaatgaaatatatttaaaatatattgaatattttatattgttatatcctgacaagattgttaatattttaatgtactaatatttctgtcaattatatctaaatattattttattatattgcctaagaataaacatttgttaaattgg

SEQ ID NO: 118183 - DNA, 1000 bp, Homo Sapiens
gtactttgccatttttctataaatcagtatttttttttaattttgatatacattgtgtgaaaaaagaaaatggctaataaactgtattaaatcttaaacaatgtataaagattgtacttagccagttcaaagtgtatatttattcataatgaattataacagttatatttttgtgttttcttgtaaatgtttcttttcccttaaatacagataattcatttgtattgcttattttattatgagctacaacaaaaggacttcaggaacaagtaatgtattagtatggttcaagattgttgataggaactgtctcaaaaggatggtggttattttaaatataaatagctaatgggggtggtaggcctataaaattaaatgccttgtataaaatccaaaatgaatgcaaaattgttttcacttgtattgactttatgttgtatgattccaatctctgttctgtttggcacttgtatttaattcttcacctttgtaagacatttgtatattgtggatgtgttcattcaagctatttaatatctggcactgttaatacacagtactttattgtacagactgttttactgttttaattgtagttctgtgtactttttttggatggggctggcatgttttctttgtttcctggcaatacgacgtgggaatttcaatgcgttttgttgtagatgctaacgtgtcagaatcctttacattcaacttttctaagaaaagcattttcagtcttgtagtgtgtgcttacagtaactaattttgttgaaaatggtttcaagttattcaaatttgtacaggactgtaaagatttgttgacagcaaaatgttgaagaaaaaagcttatagaataaaagctataaagtatatattaggatctgcaaacaatgaagaattatgtaatatattgtacaaatgtaagcaaaggctctgaaataaaatgccatagtttgtgaatccttaaaaaaaaaaaaaaaaaaaaaaaaaaaaaaaa

SEQ ID NO: 118184 - DNA, 1000 bp, Homo Sapiens
cccagggcagactctcattggcccaaatgggccatgtgattttctctaaaccaatcactgtgactctagagtggccagactcagagctgcacttagtaggggttcctcaaaggaaggtcaagtgtcatgagcaggagaaaaggcatgggagctggacagattatagtggttgaagtctgtgcagtacagaagggcggagcttattcacacagcacctttggggccaaaatgaataagctggactttctccccatggcactggggaaccatggaagttcagggaacttcagggaagaggcttggtcaattcctgagagcatcctctgtgctggggacacagtggtaatcaagacagccccaacactgccctcatagagctcacagtccaatggaggaggcagatgtgtcctcaggcagcgactgggcagggctggtataggggagtccagaggtgatgcctgcctcagccagggagggcttcctggaggagaaggagccagctagacatggataggagtgcgttttaggcacagcaaatggcacatacaagggccagggagcaagagagaggacaggtcctcaacaaatggcatgtgactttgtaagtgtagaattgctgtgaggtatggggctaggggcgtcagtagggccttgaaggttatggacaggggcctgggctttcttccaagggcactgggggagccatggcaaggttgtaggtagggtagagatgggcgggtttgtgctatgtgcagggtggaagggagggaagttgacaggtcagaagatcaggaaagaggtcggggctggacagatggggagagcgcagatagatttaagagagtcctgtgaggcaaagtgggcaggacctggtaacaggtgtctggactgtggctttggctggctcagaaggtccccactggcgtgtgtggtctatgtagcctctgggtgtggagctgggatcttcaactggggacagtacagtaaagaacatcacagc

SEQ ID NO: 118185 - DNA, 1000 bp, Homo Sapiens
ttgtgtaatcactaagtctttgtagataaagcagatggggagttacggagttgttcctttactggctgaaagatatattcgaattgtaaagatgctttttctcatgcattgaaattatacattatttgtagggaattgcatgcttttttttttttttctcccgagacagggtcttgctctggcgcccaggctggagtacagtggcatgatcttggctcacttcagccttgacttgggctcaagtgatcctcctacctgagccttctgagtaactggaactacaggtgtgcactcctcgcctggctaattttttattttttgtacaggcaggatcttgccaccttgcccaggctggtcttgaactcctgagctcatgccatctgcctgccttagtctcccaaaatgctgggattacaggagtgagccaccatgcccggctggcagttgcatggaagagaacacctctttatggcttaccctctagaatttctaatttatgtgttctgttgaaatttttgtttttttacctttattgaaacaacaaaaagtcagtattgaaacatatcttcctgttttctgttgtcaaatgatgataatgtgccatgatgttttatatatatcattcagaaaaagttttattttttaataacattctattaacattattttgcttgccgctggcatgcctgaggaatgtatttggctttgattacacactaagtttttgtaataaatttgactcattaaaaaccttttttttttaaaaaaaaaaaaaaagaaaatctcattagtgaacttatctttgcagctgagtacttaaattctttttaaaaagataccctttggattgatcacattgtttgacccagtatgtcttgtagacacgttagttataatcaccttgtatctctaaatatggtgtgatatgaaccagtccattcacattggaaaaactgatggttttaaataaactaattcactaataaaaaaaaaaaaaaaa

SEQ ID NO: 118186 - DNA, 1000 bp, Homo Sapiens
gagaagctttcactgtctacaaactgcattgaaaaaattgccaacctgaatggcttaaaaaacttgaggatattatctttaggaagaaacaacataaagaacttaaatggactggaggcagtaggggacacattagaagaactgtggatctcctacaattttattgagaagttgaaagggatccacataatgaagaaattgaagattctctacatgtctaataacctggtaaaagactgggctgagtttgtgaagctggcagaactgccatgcctcgaagacctggtgtttgtaggcaatcccttggaagagaaacattctgctgagaataactggattgaagaagcaaccaagagagtgcccaaactgaaaaagctggatggtactccagtaattaaaggggatgaggaagaagacaactaatgccacgctttccactgtgtgttaacttatttaaatgtcataagaacaatagataaattttatataattgtctattttaaagattctgtatgggacaaaagtttcttaagataaaacagatcactcattctcatctttttttttcctttaacttattcagtgtttctccccaaaactggtaatgccaaccttatatatcgtatttctctttttagaaaccacaaattttcgatttttgtcttcagtctcagttacgtactgtgtagccccatctactaaaacaaaacctttgtagaccagtcatttttaataacaaaggaacaaatgtttttttcagtttgttcatttttttttaggttagacattttaaaagatgtacatttgaaaattcagaacatttttcctgaaggtctgtctctgtacaattcagaagcacatgcctttagctcagaaggcagcatggtgatgggaagagttcctcttagaaatacagcaggtccggaaccaagactccaaagttccattggaaaagatatggtgaaaaaaggaaaaaaaaaaaaaaaaaaaaaaaaaaaaa

SEQ ID NO: 118187 - DNA, 1000 bp, Homo Sapiens
aagatccctctaggtcactgagaaatgccacagaatgtgcaggaagcctgggaggcttctgtgaggaatgtgaggcacattattggggaaattgaggagacagcctagacactggctggcctgatgttttgttgacagtgaacccacagtgggagagagttttttccagtctgatctggttcttacacacacacataactcaaaagttttgtgaacaagtactttccttttttacatgttacatgtcctcatgttttctgttttctgtttcataacacaaggctggttgtggcctacaaacctaatttcatgacccagtggtttgcagtccagcgtggcctacacggatatggggagccactgagggatgttttccccccttgcttgtgccttaaaggcagagaagcgaggcggatgccctggaagcacccagcatcacacccaggcttgtgcggggccaggctgggagcccatgcagtagggcagaaggcagcggaggccaggtctgtcccggctggagaacagcgtccacgcagtcctgcctggggtcaggccctcactgaccctcaggggagcccccaaggtgctgtctgtctagacaggctgtcccaccccagggtggctagtggccatatgcagggaatggtgcttctggctgtggcacgcactggatcacccaggtcccagcagacatggccgcccaaagtcagcaagcctcctttgtgctatgtggagctcacagcctcacatgtgaacacccgtgtctgggttgcctggggtgatcctccctcctgcgtggtggctgtctctggaaagcatcccttgccgctgccacgggcagccccagcccccgtccgtccaggctcacccacagtagtgatgcagacgtgacgtgggggaagggggctgagccctgtggctgggttctgacaactgtaacggttttgtcgagcttaggcccctttggagggagaatcaataaataacaaacaccaactac

SEQ ID NO: 118188 - DNA, 1000 bp, Homo Sapiens
acagaggtcaagctgcacagccagagcccagcacggggttcacagcaacaccgccagccccggactccccgcaggagcccctcgtgctacggctgaaattcctcaatgattcagagcaggtggccagggcctggccccacgacaccattggctccttgaaaaggacccagtttcccggccgggaacagcaggtgcgactcatctaccaagggcagctgctaggcgacgacacccagaccctgggcagccttcacctccctcccaactgcgttctccactgccacgtgtccacgagagtcggtcccccaaatcccccctgcccgccggggtccgagcccggcccctccgggctggaaatcggcagcctgctgctgcccctgctgctcctgctgttgctgctgctctggtactgccagatccagtaccggcccttctttcccctgaccgccactctgggcctggccggcttcaccctgctcctcagtctcctggcctttgccatgtaccgcccgtagtgcctccgcgggcgcttggcagcgtcgccggcccctccggaccttgctccccgcgccgcggcgggagctgctgcctgcccaggcccgcctctccggcctgcctcttcccgctgccctggagcccagccctgcgccgcagaggactcccgggactggcggaggccccgccctgcgaccgccggggctcggggccacctcccggggctgctgaccctcagcccgcactgggagtgggctcctcggggtcgggcatctgctgtcgctgcctcggccccgggcagagccgggccgccccgggggcccgtcttagtgttctgccggaggacccagccgcctccaatccctgacagctccttgggctgagttggggacgccaggtcggtgggaggctggtgaaggggagcggggaggggcagaggagttccccggaacccgtgcagattaaagtaactgtgaagttttcaaaaaaaaaaaaaaaaaaaaaa

SEQ ID NO: 118189 - DNA, 1000 bp, Homo Sapiens
tgcaacaagagtgaaactccatttcaagaaaaaaaaaaaaaaaagaatatgcacagtctgaatgtataccaggagtgtgagagacacatgcccacttcatgcaactcctaaactcaaagtctaaatcagatatttttattaacaatgacaacttgttgccaactccctgtttctaatgaccaaagacccagggtacctaaaaggactttgcaaccaagcaaagtcactgtcttcaaatctggatacacactttcccctctgtagattcaaaaggtgcttccttcccggctgtctccagcttccttactctcttttctgggatttctttttctcttctttctgctcttcctccactgctgaactggtccctaactgaaacagcccctgacttatcccaagcatgcttcctttagctgctgtgagaatttgtcttcctcaccagccaggtcctcaggcaaagtcctcagccagtgctttagagcaacttcccgcaaatcagaaactcactgtgattccaaaaatgtttctgagccctggacccctgcccccaaaatattttcatctttcccccaaacctcctttaaaggagcatgcataacagtgtgctgaaagacagttgttggttttttgattttagcatattatttcctgtatgaaatatgttttatataatctcctattatttttatcttatgttttgtattgttgataaatcctttttgtccttctaagatgtcctattgtaaaatcacttataaggtatgattactctttatgctattactttatatgccatttggtaataaatagtaaattgttgatgatatgattgactgatgcgcagtccagagcatgtatgaataatctcataaaacagtatcacagacattaagctaaactgtttcgtttttttgaaagaacaactcatactttggaacagttgtcaatattaatttgttgcaaatatttaatttaaataaacatttttgtaccatgaaaa

SEQ ID NO: 118190 - DNA, 1000 bp, Homo Sapiens
gaacccctgagctcaggtgatccacctgcctcggcctcccaaagtgggaaatgggtcattttcaaaggggcaacagtgataccatccctgcactcctgggtcctgctcttccaatgcccaaggcatggcatggtggcagctgtgcccccgcccattgctttggagcacagatgactctgggggcagaggtgggctctgtttaggagggcagtgagaccacccagccaaattgcttctcaaccctagacaaagcctttggccaagagggaggtgctgttagttgggcagcccttctgggtttcagagaccggtgttggctctagactggtctcatctccattgccttaatgccaggtggcccaggagtacccatgcacagcagctgtggggtgtgggcatcttcaggtggtgttctggtaaaattgttagaatagctgtatgaaggaaaccagtgggaggaaatgaagttttcaggatggtgggatgtgatttagacagtgcacatgctgttagggctgtcactagggagtggccttcatggagggtggtaacagcacctcagtccagccaaaatgtttagaaacactcagtctctggtcccagaggatggcttctcagggcatgccacaagttaaaggtcaccttcctgaaagatgaatgagaaagctgcccattctcaagactcatctgcctagggagggtcacagaggcaggatgtaagacacactgtgttgcattcttgcacaagtcatgaaaatggagccagagagcctggacatcagggacttttgcccacagcacatgacaccgacagctgcccagcctgttcacatgctggggaccagcacagcacctgaagccatgtgggacagttgggctttgttcattctagccacggggatgaaagggatcttttgcattgcagagattttatatatattttgtttgtaatgagccattctcaataaacattattctcactgcaaaaaaaaaaaaaaaa

SEQ ID NO: 118191 - DNA, 1000 bp, Homo Sapiens
ccacaaataccgagtggacttgaccccggcccccactaggctgcacacctagactcgccctgccagggcctcgctcttcccatctgaaaagtcctggtagttcttgaggtttacttctcaaatgaaatatttttagtaaaaagtacaggtatatctcggagatattgtgggttcagttccagaccacctcggtaaagccaacatcacaataaagcaaggaagcgcattgttttagtttcccagtgcatctaagtcatgtttactgcatattgcagtccactaaatgtgcaatagcattatgtctaacaaatgtacaaaccttaatttaaaaatatttactgttcaaaatgctgacacagaaacgcaaagtgagcacatgctgttggaaaatggtgccaaatagacttgcctgatgccaggctgctacaaaccttcaatttaaaaaaaaaacacagtattcacaaagcatagtagaatgaggtatgcctgtattgctctttctgaagtggtgtgatataaaccatctctaagaaatgtttctaccctaaagatttccccagtacagtcagctctccgtaactgtggtctccacatttagatccaaccagccttggataggaaatatttgaaaaaagaaattgcattggtactgaacacgtacagacctttttttcttgccattattccctaaacaatatggtgtagcatatttacatagcatttatattgtatttggtattataagaaatctagagatgatttaaattatacaggaaggtgtgcgtaggttacgtgcaaacgctatgccattgcccatcagggacttgagcatcctcagatgtcggtgtctgagggttgaggttgcagtcctggaacccatcccccatggatactgaggcatagctgtactgtgtgttttcactttgctttcagaactacgacttgaatgtgatcgattacaataaatgtttttctaaaaaaaaaaaaaaaaaaaaaaaaa

SEQ ID NO: 118192 - DNA, 1000 bp, Homo Sapiens
agagatgtttgctagtagattcacagaaaatgacaaggagtatcaggaatacctgaaacgccctcctgagtctcctccaattgttgaggaatggaatagcagagctggtgggaaccaaagaaacagaggcaatcggttgcaagacaacagacagttcagaggcagggacaacagatgggggtggccaagtgacaatcgatccaatcagtggcatggacgatcctggggtaacaactacccgcaacacagacaagaaccttactatccccagcaatatggacattatggttacaaccagcggcctccttacggttactactgatagaaatgttggcagcttttagtaaaagcatttactctgttaccatgagaaaagtttgggtgtcttctgttggtcatagttttacatctgattttacagaatggattattgattttttggaagttgagactttaaaaaaaatagatcttacttgcgaaatgcgatggttgctgggaatacctgaaactgtggattatattgcttgacttctacctcagaatcttctttgtttcatgacttaatagtgctttaagtttggtatattatttgacctctaggaattctttgttttacacagaaataaaaattttaaaatagaaaatgcttttactttgtaaggtaagagagtatccatatgcttagatgtgctcgtttctaaaattctagaggttgatataatcagctcatgaatgcacagctatgctttttgtgatagattgtacataacatcagcagttgaaaggtaaaacaattgcttttttttttttttgcatttgttaagtgactatggtactttgtgattccttaatctatagatgagtcagctccacacttgagtctctttttagagggaaatcagtaataaagctgtaaaataaggaagaaaaaaaaaaaaaaaaaaaaaaaaaaaaaaaaaaaaaaaaaaaaaaaaaaaaaaaaaaaaaaaaaaaaaaaaaa

SEQ ID NO: 118193 - DNA, 1000 bp, Homo Sapiens
tcatcagcaagtattatttgaataaaatgagaaatgcttaagaaaaattgttgctctacagtaatttggtttcgaagaatggaatggtaactattttttcccatcgttcttttgagagaaggaagtgtgatgactgatgatcttgaaaagcccatttctgattgcacgttgactggaattctttctttgtgtctgtggactagcgatgctgtttgtaaaatgaagattcgggactggctcatatctttttatctaactagatgtcagatcttgaaatctgtattctcgaagcaattctgccacttgatcgtattcacaggggccctggtaggctcctttagaaggaccatttctgttcctagagcttaactagaattcattcttcactgaaaaaaaaaaaagttacttaagaaagcatttctttcctaatctcactcaaatctgcagaattatttgtaattagtaatacaaaatctggccaaaaggagacttgtaaatagcgtaaagtggtgtcttatgctaaacggtggaatgtataggcagagaagctctttgaagttgtcagatgagctgggctcacaagcctgattcaaacaggctgtcggtctcctctcaccccttaatactgtgcagcccaaactcctaggactcttgaacatctgagcagttttgtgctttgagccactttttgacaaaaatggctccatttttccacagcgtggttttcttaaaatagtttaatgttttatagtctcatagtagtagtgttgctttctaagctataacagtcgaccttattcttctactctgaaaaatcttgacttgtttgagtgtatataatatatataaagggagccttaatggattggttttcataatttaatattttttgtatttgctcttgtataattgtttttaacggaaagtattaaagaattgagggtggaattcttagaaccaaagttattcttaataaaaatcaccacatgcttggaccatg

SEQ ID NO: 118194 - DNA, 1000 bp, Homo Sapiens
aggaagctgggcctcgtgcaggtggagctggaggaagacggggcgctggtgtccaagctcctggagaccatgcatctgaccggtgccgacttcacaaacaccttctacttgctgagctccttcccagtggagctagagtcgccaggcctggcggaattcctggccaggctgatggagcagtgtgcctccctggaggagctgaggctggccttccggccccagatggatccccggcagctatccatgatgctgatgctggcgcagtcaaacccgcagctgttcgcgcttatgggcacccgggcaggcatcgccagggagctggagcgtgtggagcagcagtctcggctggagcagctgagtgcggcagagctgcagagcaggaaccagggccactgggctgactggctacaggcgtacagagcccggctggacaaggacctggaaggcgctggggacgctgccgcctggcaggctgagcacgtgcgcgtgatgcacgccaacaacccgaagtacgtgctgaggaactacatcgcgcagaatgccatcgaggctgccgagcgcggggacttctcagaggtgcggcgggtgctgaaactactggagaccccttaccactgcgaggcgggggccgccacagacgccgaggccacggaagccgacggggcggacggcaggcagcgctcctacagcagtaagcccccgctctgggcagcagaactgtgcgtgacatgatcttcgtaacggcctcggcacgctccacacccctggagtctcccgaggcccccatgtgctgctgagtggccaagatgatgccaggctgccctatacactgggggattctgccctggcccatgcacacccgtctttccatgatggcagagacatccagtcaggacctgacccgtctctgtctgaggccggctcagcagtgcagcctggtccctgggggctggacccaggctcctaaataaaccagcaactccctcgaaaaaaaaaaaaa

SEQ ID NO: 118195 - DNA, 1000 bp, Homo Sapiens
gtttgctgagtaattgtttctaatgtctctgaactcaaagtgaggtgctccaagacgctgtgaacttctgcaaagacacctccttacctactgggatcacgtgacctgacctcactcccagccaggctcccaaagggctcattccagccattccaatctcttcttctttatgcaaacacttttcccccacaacaagccttgtttgttccgataggaatacgtgtacgtcagtgcacttgtccttacgtcagttccttacaccaccaaagcacttcacctttctggaaataaaacttttaagacactactataagtaaaaatgagagtattcactagacttattgctcaggcacatttgagtgggtcccagctgtgtgattaagaagtcaactgggtggccttttctgggttatcttctgatcatggcctttcaacccaacaagggcccttccctgctcttccaccagtaaaggctcctggcctctcatcaggatctgccccccagagacccccccagacactgcagggcctggtgatgctgtcctctgtaccggaaatggcaggcactgtcagatttccactcttctgcctttaggaaggctgggtgcttcttgctctgacagccagtctggggagatgactcttacgttgcttgagtcttggtggcaggctgctgtccacgggggagaagtctctgctctggactggacagaagagagacttttaccctggggcactcacacggccaagcttctgccaccacttcattagctgtattctccatagtatggtgaaatagcaggtgcgtcttctagtttattcctcctggggacatttcctcaaagcagttttgcgcccccgcaagggaatggtcagcctaagggtaatgtacagcccgtgcttggagaaccatggaagctacacccctacaggtgcatactgttctgcttttccaataaatacgagcggcgatttcaaccacaaaaaaaaaaaaaaaaaa

SEQ ID NO: 118196 - DNA, 1000 bp, Homo Sapiens
atgtgaatgggcagcctgtgcagaaagctctgaaagaaggcaaaaccttgggggccatccagatcatcattggcctggctcacatcggcctcggctccatcatggcgacggttctcgtaggggaatacctgtctatttcattctacggaggctttcccttctggggaggcttgtggtttatcatttcaggatctctctccgtggcagcagaaaatcagccatattcttattgcctgctgtctggcagtttgggcttgaacatcgtcagtgcaatctgctctgcagttggagtcatactcttcatcacagatctaagtattccccacccatatgcctaccccgactattatccttacgcctggggtgtgaaccctggaatggcgatttctggcgtgctgctggtcttctgcctcctggagtttggcatcgcatgcgcatcttcccactttggctgccagttggtctgctgtcaatcaagcaatgtgagtgtcatctatccaaacatctatgcagcaaacccagtgatcaccccagaaccggtgacctcaccaccaagttattccagtgagatccaagcaaataagtaaggctacagattctggaagcatctttcactgggaccaaaagaagtcctcctccctttctgggcttccataacccaggtcgttcctgttctgacagctgaggaaacgtctctcccactgtttgtactctcaccttcattcttcaattcagtctaggaaaccatgctgtttctctatcaagaagaagacagagattttaaacagatgttaaccaagagggactccctagggcacatgcatcagcacatatgtgggcatccagcctctggggccttggcacacacacattcgtgtgctctgctgcatgtgagcttgtgggttagaggaacaaatatctagacattcaatcttcactctttcaattgtgcattcatttaataaatagatactgagcattcaaaaaaaaaaaaaaaaaa

SEQ ID NO: 118197 - DNA, 1000 bp, Homo Sapiens
tttttcgtgacgtgataatctatcataagcagacctaagcacagttttatgaacacaattttgcccatgacattgcctacaggatttccagatgtgacttgcactcagaagatcagtggtcaacttcagaagctcttccacgcttagatcatgtcttcagaacttagatgtgaaaatctacacactgggagatgctgtgagccccaaggttttgatggagtttgcttggaatcctcttgacttcatgccacattgacgtgaactttgatgtataataagcagcagcaacttcatgtgaaaatatggtcaggtagttatatgtaaggttacgtggtccagtaatgtcttagattgataaattaggtatggaatccatcagtgttacgtgatgagaataggtgaacacaccttgtcagtgatgatgtaaacttctctccttggcagggcatgggcaaacatgctgattggtgcaaatgtggtgccgagctgtccatagctgcagtgaaaggtgaagagcaagaccttctctaggttttctagctttcattaaatgtatttttttccccagagctaatttgaaagttgattggaccactgtggatggggtctcattaagaatgtgggaaataggggccgagtgcggtggctcacacctgtaatcccagcagtttggaaggccagggcaggtggatcgcttgatcccaggaggtcgagaccagcctggggaacacatcctgtctctacaaaaaatacaaaaattagccaggcagggtggtgcatgcctgtagtcccagctacttgggaggctgaggcaggagaattttttgagcccaggatgcagaggttgaagtgagccaagatcgtgccactgcactccagccttgagacagagcgagaccctgtctcaaaaaaaaaaaaagaacgtgggaaatatgaacctttgaaagttaatctgtgaattgaaagtttaacaataaaagtagttgtttgtttcctttgg

SEQ ID NO: 118198 - DNA, 1000 bp, Homo Sapiens
gcgccccagaggtgggtgggatttccgagctgacggaagcctgtgactggtggagctttgggtctctactgtatgaactgctgacgggaatggcactgtcccagagccacccttcaggaatccaggcccacacccagctccagctgcccgagtggctcagtcgcccagcggcctctctgctgactgagctgctgcagttcgagcctacccggcgcctgggcatgggagaaggtggtgtcagcaaactcaagtcccatccctttttcagtaccatccaatggagcaagctggtggggacatctctggagactcatctcaggacactgatccactggctcagtggacccaaaccagactgtcctggctagtcctctcagtcacacagcgagtaggcctcttccaccagaagctgttcgtgcagctggggaggcccagaagcagggatgccatctgttgtgcagggagggatgaggactccctctcaggccctggctgtttaccatgtcactgcctactgtgacttcatgcccttttgggataagaaaccacaaaacgcatggaacaactatccatggctcttagccagaaatgtcttgcctctggtctctgaaaagctggggtgagtggttacctcaaagacaattgcctccagtttgggggctcctctcagggttcaccctgtcaccggggcgtgggaccgacctgggaaatttccactagagttttgccctcagctcctccctgccagcatcccagtcaccaccaggtggcgcttctgacacggtccacgtgcctggctctgaaggcccaactgtcagaccagacccctcactcatggtggggagacttgacttcctcgggctcttcaggagactgagacagagaagacaagtgaaagcgcagcctgtacatgactctctgtggtccacgtcctgcctctccctggggtttacacggccccaataaagcctgctctggcctaaaaaaaaaaaaaaaaaaa

SEQ ID NO: 118199 - DNA, 1000 bp, Homo Sapiens
gaggtcctgcacgagggtgttgggaggacaccacagattcatctcagacagtgatcaggactgaggatggagttaaatcactcagcccctgggtggggtggggtggttcaaatggatgactgatctcctgagtacactgaagccacaggctggtggccatgttctctgaattgggtgcagaagacaagggcagagtggctgcggcccctattacctttgtagcagccacatcagaaagcagaagaaaacagtatttctgaaggcattgtttgaggttgatctcagcactgaacgatttcaagccctacgcaccagaacagaaggagggtggaggaagtgatcagagggaacgagctgtaggtttgcagaaatgtgtgaaaccaaaatgatcactgcctacttgtgattcaaatcttcagagttttcctagttcttctagaaatacatgtcaggtttgtttgttcatcctttctgtcagcatggatcaagcccctaaaatgtggtaagtgttgtcagagcagggcaatatctctactctcaagtatgaggggaatagaaacaaagcagcagttttagccagggttcaatgatagagtggaggtaaattaagagcctccaggctgtgattcaccatttgagacattatacataatttgtttttgttataagccatttgaatttttaaaaaatttcatacatgcaatggaatatagatatgtatatacacatataatatatatgctaaagtataaagagtaataataatgacaataaacaaacccctgtgtgcctaccacccaccttattgcctttcctttgaggtaccgtgtgcggtttcctgaacctatctctatccctgtctgatagagggaacccctgtactgaactttgtgttgaccatagccttcttgtctttcatcactttatctccatgtatgtatccttaaagaataataaatggaattaaactcaaaaaaaaaaaaaaaaaaaaaaaaaaaaa

SEQ ID NO: 118200 - DNA, 1000 bp, Homo Sapiens
agaggctgctggctctgggaaaggagagagcagcccagtgtgacagagcgagtccccacggctctgggagtgcctcgcatgtgtgtggcccaggtcctgacagcccacctactccctccccggcaggcactgggctccctctgctccccgtgggccgctccccgcgtggggccactgcccccggcccccgccatggtgcggatttcaaagcccaagacgtttcaggcctacttggatgattgtcaccggaggtatagctgtgcccactgccgcgctcacctggccaaccacgacgacctcatctccaagtccttccagggcagtcaggggcgtgcctacctcttcaactcagtggtgaacgtgggctgcgggccagccgaggagcgggtgctgctgaccggcctccatgctgtcgccgacatccactgcgagaactgcaagaccactttgggctggaaatatgaacaggcctttgagagcagccagaagtacaaagaggggaagtacatcattgaactcaaccacatgatcaaagacaacggctgggactgacccccgctcccccgacgcatgtggctccagcccggcctggccgccagggagcgccactggcttcccgccacccgaagggagctctggaccctcagagcccctgcagaggacggatctagctcctgtatatatattttattgcatgcactgtgaccttggggggagaacagaagggggacgacgcccccgcacctcctgcgatctggctggcttggatctcgtttttaacccgttcctgccccacctgccctatagttatggcctgtgttctgctctcctggtcccagtgcaccgtctgctctgtgaactcctcccaccaggcccttcttaccccacgcgtgtctgtccccctcgttctgtagcgtttgtacataataaaacaatggagtggagacaaaaaaaaaaaaaaaaaaaaaaaaaaaaaaaaaaaaaaaaaaaaaaaaaaaaa

SEQ ID NO: 118201 - DNA, 1000 bp, Homo Sapiens
agagggatatggacataattatgaaattgaaggaagaggacatggccatgaatgcccaacaagataatattctataccagactgttacaggattgaagaaagatttgtcaggagttcagaaggtccctgcactcctagaaaatcaagtggaggaaaggacttgttctgattcagaagatattggaagctctgagtgctctgacacagactctgaagagcagggagaccatgcccgccccaagaaacacaccacggaccctgacattgataaaaaagaaagaaaaaagatggtcaaggaagcccagagagagaaaagaaaaaacaaaattcctaaacatgtgaaaaaaagaaaggagaagacagccaagacgaaaaaaggcaaatagaatgagaaccatattatgtacagtcattttcctcagttccttttctcgcctgaactcttaagctgcatctggaagatggcttattggttttaaccagattgtcatcgtggcactgtctgtgaagacggattcaaatgttttcatgtaactatgtaaaaagctctaagctctagagtctagatccagtcactgactctgtctggtgttgacagaggatttatttaagctattattttaataaagaactttgtacatttttatttttatatttttttctcttacaaatatgtttttggaagcatgataaatgtttaaatgtagtcaacatctgtaactcttacatgagtgtccagaggcactcatgggaaaattggttttgctttctttgtacacaccagagacccatctgaggtcatctgattataaggccatgtttatataaagggaatttcacccacagttcagctggctgttgattttcactgcaactctgcctttgtgtgtattggcgatcatttgtaatgctcttacacttcgtctttaatgttctttttggagttaggacctctcagttcataaagttttttacaattcaaaaaaaaaaaaaaaaaaaa

SEQ ID NO: 118202 - DNA, 1000 bp, Homo Sapiens
catctacttcccactgtttgccaaccttaacaacctggggttcaacgagctcgccggtaaggcgtcctttgcacattccttcgtgtcaggctgtgtggcaggttccatagctgcggtcgcagtgacgcctctagatgttctgaaaactcgaatccaaaccctcaagaaaggcctgggcgaggacatgtacagtgggatcaccgactgtgccaggaaactctggattcaggagggaccatctgccttcatgaaaggcgctggctgccgggcactggtcatagcacctctctttgggattgctcaaggggtctattttattgggattggagagcgcatcttaaagtgttttgactagacagagctggaggtcaagtccctgcgcttgccgccctctctctagctgtttcacttagcctagagggggcaagggcaggtggggccactctggcctgcctggtcctctgcgttgtagtgctacctcaatctcgggagaaacagccctatattctaacaagttgagcacagccttcttccccttcgtgtctacactcgttttcctttgtgggcacagctaccaggggcttttggaagcccctaaccacctacttttcaacaaaaatggtactttcgttgtattaattgcaggaccttaacaggtagtcacaatagaagggttgtttctgtattttaacatttctatttcacagtcaaactcggcattcttcagtcagcttgaggatttagcattgttaatcttggactccataacttatgagtcctagcactgattttgaggaaaaggaggatcagaagttcaagggaccgtgaaagccctcagagtcagcacctagtttgagaccaagcaccctttcgaatccctggatggctgagggggctgaggccggctctgactgggcagcccagcccctcccccagagcccaggctcttgcacacccctccctgtaaccaaggaacactctgaaataaaggtgaatggct

SEQ ID NO: 118203 - DNA, 1000 bp, Homo Sapiens
ttagaagtctttttctttgtaagcattgtaaatgctaataaatcctgttaatttttttttttttttttttttttttttactgcatgttacattgaaataaaaacaaagtaaaatgagcaattgccttattgttctgctcttttgcagggggtgggggttggggaagacagcattccacagcctggtcaggagggaaggacctcacttgtttcatcaaatggagtggtttaaaactgatcaagcagctcataataatgaattcctgctctgtcttttattatcttatgtcagagtgcagcaaaatctcatttcataagacttacaataactctatttaaaattcaggtattgtactcgggaggctgaggtgggaggatcccaggagttcaaatcctgcctgggcaacatagcaagaccctgtctcttaaaaaaacaaaaagacatattcaggtactgatttttcatcaagagattgacataccaatgatcagaaattttagtgaaacttgactcaactatacacaaagttctcatcctaaatgaactatttcagtcaagcccactctaccactttttacttatctggttaataatccgaaatgttaccggggttgactcacggaattaaatttttcctctatttttatatcctttcctgttgtggatgtaacttacctttctaaactcctttagagttaacgacttctatttagtattgttggtatctccagcccccctcctttttttgtttttcttttagttatttactttgtttgtataatttgctttcattaactaaaaatggaattggcagcactggattgtatattactgtattaagagtacctttgttttcttgatctgttacttttaatactcaggtaatgctacaaatattacagggagtcaaatgcttttataaagttccttcagtggttgcctcacttgcgttttcctacaagatgtaagactgtttataattaaacttttttggtccttc

SEQ ID NO: 118204 - DNA, 1000 bp, Homo Sapiens
tgctggctgggcctgtaaggtttccatgttgctgaggccatggagattcccagagctggtcacaccgaccgctctcagggcccgctgccctgggctggcaacaccattctggccttggcctgcagaagctttcagagtcttcactggcagtagggggagatggggagaggaatgatctctgcccagccccttcctttccaaaccatgcaatggaagagcccagatgggtgaagattgattttgccttaactcaagagaattcctgttctccttgtgctatgatttggacacaagattctggatacctggaacttagctgtgtactcctgtaccctaaacagtggatttgagttccagcgtttattcttttttccttttttcagatcaccatctaagttacatctttagctcaggtccatccttctcaagatctccttcttagccccccagcccctggtgctgtctgtggtcaggtgaccttactcaggagcagatatctccttggccgccatggagcctcatccatccacacgtgcctgtagcattccagagctcactgcccttctagatgtgccttcccgcttggcttccagcggcttgtgctcactctgtctgccaggtatgagaagaacacgtaagaccgccaccacactcaccctccctcaaggccctgtgccataggggtggccacccgacctgcccccagaacttttggatactggaggcagttgcataggtctccctctctgggcaccaggactcagtccagcccaagactactctgggcagctcccatcccagtctggggccatttgcagactcaggaaaggatttctacagtgttctataaaagccaaaagagagagtgggtttgggaagagtgagggtggttggggagaggggaccgatgtgcctcattgtttagtggtgattacaaatatgcttttctggataaagtttggttgtttgctcttaaaaaaaaaaaaaaaaaaaaactcga

SEQ ID NO: 118205 - DNA, 1000 bp, Homo Sapiens
ggggatccaatgggcaacacaaagcatcttggttaaggaggttaggggccggtctaggacttgcctcaggaggaaggacagcctcagagcatgctcagaggtgggaagggaaggaggagaaagcaggcgaagcggggccatctgctttatctgaagattttcagctgatgaagaactaggaggctcaaacactacttacctgagtccaggacaagtgacttggagagtgtgctcttctgtggcaggatcaggtctgtctagggcaggatggcccaggatctcagcgagaaggacctgttgaagatggaggtggagcagctgaagaaagaagtgaaaaacacaagaattccgatttccaaagcgggaaaggaaatcaaggagtacgtggaggcccaagcaggaaacgatccttttctcaaaggcatccctgaggacaagaatcccttcaaggagaaaggtggctgtctgataagctgatggcatggagccctgccctgagtgtctgtccctcttcagccaagcccaagtctcctagacccccagggagccagtgaactgtcaccttctcttcatcacagaatgagtaaagatccctgaacaaatgcattgtgaacccattccccactcccaccttcaactcttttctcccattatttcctccacctgctgggtctctgctgaccttgctgggaacactctgaggacagtgtggctggccgagcggttggccccatgggtggtggggtgtgagaagcctgcaataccccaagaccccagagggcagtccttaggaagcacttacaccacctgggaacccctccgtcttttccctctactctcatcctaggaataaagcatttccacgccagagtagtttgggctgggggccagggttgggtgggtcctgtccctccatatcatgtcctaccctatggtcctgttcctagtcatttagatcaccccagatggcctgatgacaacaagagtttgtgaagttatg

SEQ ID NO: 118206 - DNA, 1000 bp, Homo Sapiens
ttcaagggaatctccgcatttcaatgaaaggaggaagagtgtgctgataaacctaccagcacctattgagcaatgtctattatagtaattttgcatacatttttatttaagggaaaaaatataggtattgtgaaatattttgctaatcttatagaaaaggaaaaaatcccgttatttaaagggaaaagtaaatttaacagttgccttttttcttaatgtcagggcagatcttattttacagtacagtgggggaaatagaaaacatgtgaaaggcaaaaggcaggctcctaaattaatgtcagtgaagttcagggtgggcaaatgagtgtgtgtgaggtataggaaatgctgatgacttctttaatgcttgaagtccgttcacaggtatctagccctagaatgcctagaacaggaagaggcagctggtgttctgcaaaacttggacaggggcaaagttgctgaaaaagttttggtttaacccgaagataagtggaaaagagcttgtccatgaacccaggttctcactctgtttacagaagtgtgttgagtacagttggtgaaggaagaggtaacaaaaaatgctaaatattttatccatgaaaatgacttccagaaaaggaagaatatgaaccccagaccgaaggggaaaagatagttaatagtattatctaacctggttggtatttgtaatgaatggtgattttaattagtcattagccataatgatgtttatttacagtataactcctgaatgctacttaaataaaccaggattcaaactgcaagccagccaggccgttcattatttaaaacgttttaatcggggcttccgggtagaaggtggagcggcagggtgtaattgggttgatgggtgggacctgtcttgaccatcggagttttataatcgagggccaggagggcccgggttgctctcctggttatgtatgtacttgtacataaccaccttaagaatggtgaaataaatgttcttggaaattcc

SEQ ID NO: 118207 - DNA, 1000 bp, Homo Sapiens
ttaccagaagacactcacattcagaatgctccatttcaagtgtgtttcacatctttacggaatggcggccacctgcatataaaaataaaacttagtggagagatcactataaatactgatgatattgatttggctggtgatatcatccagtcaatggcatcattttttgctattgaagaccttcaagtagaagcggattttcctgtctattttgaggaattacgaaaggtgctagttaaggtggatgaatatcattcagtgcatcagaagctcagtgctgatatggctgatcattctaatttgatccgaagtttgctggtcggagctgaggatgctcgtctgatgagggacatgaaaacaatgaagagtcgttatatggaactctatgaccttaatagagacttgctaaatggatataaaattcgctgtaacaatcacacagagctgttgggaaacctcaaagcagtaaatcaagcaattcaaagagcaggtcgtctgcgggttggaaaaccaaagaaccaggtgatcactgcttgtcgggatgcaattcgaagcaataacatcaacacactgttcaaaatcatgcgagtggggacagcttcttcctaggtgaggaaaatacaggtcatgaagttcctggcaaagattttctgttaaaaacctatgctggtttgctttggatcacaccctggtgaaccccgggtgctaagaatgaaaataaccttggtgagttgtacaaattaaagacaaagaactacatgtgaagatagacttgctttctatttttaaatcagtagtagtactgttgctgaataatactaggtttttatggaataggatgaatgcttttgaagtattagggcttcagagtccaattttgcttatttatggtatataaatacatatttttttcttgaaattgcaattgagtttgtacttttcaaatagattatctactttttcattaaaatgtaaagatgttaaaaaaaaaaaaaaaaaa

SEQ ID NO: 118208 - DNA, 1000 bp, Homo Sapiens
cccagccaaaataatcttgtgccaaaagattaaaggtttgcctcaaaatgtccctgtttgaaagattagcacaaaagtcttgatagcacaacacaaattccatccaagaggagaatcttccccagggtttagtcctggggctggcactcgttgtgacttacacagagcaaaattgtgctaaaggcttttctactctgagatctcaatgcgaaatgaaaactcaggcagtttagtccatagtggtactattttgatgatattttccattaataaaatgtaatttcagattattcgtttacaagctttataattttatgattttttaatcgtgttttgtcacagacttccctagtgtttgtactacacgtagtcagaagcgagtgtccttttcttttgcttcaggctaagagctgcctcgctctttgtccccccattaggattctattacatatgcaattgtaggttcaacctgtccctttccctgccagcaaaccccaccaccctaagagaaattttagcttatatatgacggtatatttacaaaaagagaaagagaaaatctggtatttgcaatgatctgtgccttctttttaccaccctcttgattggagcttttgtgatgcagctaccatgattcaaaaaaattaaaaattaaaaaaaaaaaatctgccacttatccaagtccactagaggccactgtcttcaaagcttctctcaccctagccaaaggtcctaagaggagacagctgtgaagttgggcgtgctctgtggtaccagctgtgacttttctatttctcctagttttaggttgttcatgaaactagaaatgtcatcctgcttgatttttcatcagccaagttaaacccctgctttctgtcctttgcaccttttgcgtgaacagaatatgcattattaaagcaaaaataaataaaagtaaaatgcaaatgaaaacaaggaaaaaaaaaaaaaaaaaaaaaaaaaaaaaaaaaaaaaaaaaaaa

SEQ ID NO: 118209 - DNA, 1000 bp, Homo Sapiens
cctgagcagttcgactgtgccatcaacagccgcattgacgtgatggtccacttcgacctgccgcagcaggaggagcgggagcgcctggtgagactgcattttgacaactgtgttcttaagccggccacagaaggaaaacggcgcctgaagctggcccagtttgactacgggaggaagtgctcggaggtcgctcggctgacggagggcatgtcgggccgggagatcgctcagctggccgtgtcctggcaggccacggcatatgcctccaaggacggggtcctcactgaggccatgatggacgcctgtgtgcaagatgctgtccagcagtaccgacagaagatgcgctggctgaaggcggaggggcctgggcgcggggtcgagcaccccctatccggagtccaaggcgagaccctcacctcatggagcctggccacggacccctcctacccctgccttgccggcccctgcacatttaggatatgctcctggatggggactgggctgtgcccagggcctctgtcccccaggatgtcttgtggtggcggtcggccgttctgccccccagggcaccccctgttgtaggcactggctagggaggggcaggcctccttcctgcccctcgagacactcttgggagatgcattttccgtctggctcacagggggagggtgaggctttgtaccccagcccctgcccaggccactgtgagggtgggtgctggctgagcccctggggcagaaggagtggggcaggcggggtctttgttctcggctcccacagcagagccaggtgagggggggcctgccaggactagacagaagtggggcggcctgaaccctgcttccagccatggccaggggccacggaacccggcaggggtgtctgaggccgccctgtcagctggccggtccaagcctgtggctggagctggtgtgtgtttatctaataaagtcccacaggtgcctcaaaaaaaaaaaaaaaaaaaaaaaaaaaaaaaaaa

SEQ ID NO: 118210 - DNA, 1000 bp, Homo Sapiens
cctgcaagttctcttcgagttgccaaaacagatagtaaaactgaagaaaagacagctgctagtgctcctgccaatgtgagcaaaggcacaacaccacttgctccaccacctaaacctgttcgaagaagattaaaatcagaagatgaattaaggccagaagttgatgaacatacacaaaagacgggtgtcttagctgctgttcttgcatcacaaccttctattcccagatctgttgggaaagataagaaagctattcaggcatcaattagacgtaataaggaaaccaacaccgttttggccagattgaatagcgaattgcagcaacaattaaaggatgttcttgaggagagaatttccctggaagttcaactggaacaacttcgaccattctctcacctataagccaattgccgttaactgtgaacatacttgtttttaagtggttttgggttcaaagccaatttggagacctagacattcagctcactgcttaactcaacattaaattttatgattctgttttgccctatatgttcaccgttgtatttaagtatcttttattttttaatttcgacaataaaaaggtcaggatggcgttttctggagggtagattgtgtttgttggcacacccaccttttctgttccctagcatctgggatatgcaatgcttctatggctaataccacacaccaatttaatttatagaatgggctcctcatttacatctcagtcacagactcagaaataaattgtcagtttgtccttttatgtttaatattttacataaagcatctattctataaaaatctttagaaagagtttcccatttaattttgattttaaagaattatattggataaggtggttttcaccataagctaatttactctctgcagccgtctacattcttcacaaatcatgtggtacattgaagcctcttttacatgtcaacttgtgacaaatacaaacatgtgagattttaaaaaaaaaaaaaaaaaa

SEQ ID NO: 118211 - DNA, 1000 bp, Homo Sapiens
accagatgaaagagcgccaaggcctcttctttgacatggaggcctatttgcctaagaagaatggattgtacctgagcctggttctggggaacgtcaacgtcacgctcctgagcaagcaggctaagtttgcctacaaggacgagtatgagaagttcaagctctacctcaccatcatcctcatcctcatctccttcacttgccgcttcctgctcaactccagggtgacagatgctgccttcaacttcctgctggtctggtactactgcaccctgaccatccgggagagcatcctcatcaacaacggctcccggatcaaaggctggtgggtgttccatcactacgtgtccaccttcctgtcgggagtcatgctgacgtggcccgacggtctcatgtaccagaaattccggaaccaattcctctccttttccatgtaccagagcttcgtgcagtttctccagtactactaccagagcggctgcctctaccgcctgcgggcgctgggcgagcggcacaccatggacctcactgtggagggcttccagtcctggatgtggcggggcctcaccttcctgctgccttttcttttctttggacacttctggcagctttttaacgcgctgacgttgttcaacctggcccaggaccctcagtgcaaggagtggcaggtgcttatgtgcggctttcccttcctcctccttttcctcggcaatttcttcaccaccctgagggttgtgcaccacaagtttcacagtcagcggcacgggagcaagaaggattgaggctgggccttcccctgccggcccagaggggcttctgtcctgtgtgttgtgggaggggatgggaggcgcccctcgagtgtgcgtgtatcagggggtctcttctattctcccttgggttttatgggcgctgtgggccctgaaggaagacctgggcccagtgccctcaataaagagaggcccagaaaaaaaaaaaaaaaaaaaaaaaaaaaaaaaaaaaaaaa

SEQ ID NO: 118212 - DNA, 1000 bp, Homo Sapiens
agatactacagcaaaccttttgttacatttcatcaaatcaatgcctttgaggaccagggctgtgttataattgatttgtgctgtcaagataatggaagaaccctagaagtttaccagttacagaatctcaggaaggctggggaagggcttgatcaggtccataattcagcagccaaatctttccctcgaaggtttgttttgcctttaaatgtcagtttgaatgcccctgagggagacaacctgagtccattgtcctatacttcagccagtgctgtgaaacaggctgatggaacgatctggtgctctcatgaaaatctacatcaggaggacctagaaaaggaaggaggcattgaatttcctcagatctactatgatcgattcagtggcaaaaagtatcatttcttttatggctgtggctttcggcatttagtgggggattctctgatcaaggttgatgtggtgaataagacactgaaggtttggagagaagatggcttttatccctcagaacctgtttttgttccagcaccaggaaccaatgaagaagatggtggggttattctttctgtggtgatcactcccaaccagaatgaaagcaattttatcctagttttggatgccaagaactttgaagagctgggccgagcagaggtacctgtgcagatgccttatgggttccatggtaccttcatacccatctgatgggacaaccacaaggtctggaaactaggtttaaaataagtgtgcacttggacataaagactggagaaataaacactgaggactccaaaaggggggcaaggaggaagaggggcaggggttaaaaagctacctattgaatactatgttccctatttgggtgatgggttcgttagaagtccaaacctcagcagcacacaatatactcatgtaacaagcctgcacatgtaccccagaatctaaaataaaaataaaaagaaaaacaaagaaaaaaaaaaaaaaaaaaaaaaaaaaaaaaaaa

SEQ ID NO: 118213 - DNA, 1000 bp, Homo Sapiens
ggcctgatgcctgcagagaggagaaggaacgctggatacgggccaagtatgaacagaagctcttcctggccccactgccaagctcagatgtgccactggggcagcagctgctccgggccgtggtggaagatgacctgcggctgttggtgatgctcctggcacatggctccaaagaggaggtgaatgagacctatggggacggggacgggcggacggctctacatctctccagtgccatggccaacgttgtcttcacgcagctgctcatctggtacggggtggacgtgaggagccgggacgcccggggcctgactccactggcatatgctcgccgggccggcagccaggagtgtgcagacatcttgatccagcatggctgccctggggagggctgtggcttagcgcctacccccaacagagagcctgccaatggcaccaacccctctgctgagctgcaccgtagtcctagcctcctataaggcccaggaagagggcagaggggccagaaggactccatggcccaaagaccctcctccctgcaggcactgtgggaacagacacagagatggagaagcagggacatgctgagaggacgaagccaaggaaattagggaggagagtcaaagggatcaaggagagttggggatttgagctgcagcagagagggatgagggatttagccctctgccctaaggtgccattgaaaagggacaggacccttcggaggtgcctgtgaggagaggggagcaggacctctccctcctccagatccctgcctcctagtgccagcccctcacacgccttcatcctgaaacaggaagaggacggcaccaagttgggggtgctggatgaaagagacgaggggtgatctgtgagtcccatgtaaactttgtacattggaatatttatgtttgtgtacatatttgatgtgtgtgtgtatgatgagccaataaaccagactgtgtgcgtggcaaaaaaaaaaaaaaaaaaaaaaaaaaaa

SEQ ID NO: 118214 - DNA, 1000 bp, Homo Sapiens
accatgtttcatgttgattggggagatttttgaacttcgaggaatgtttaaatgggtgagaagaacattaattgccctcgttcaggtcacttttggaagaaccatcaacaaacaaatccgggacacagtcagctggattttcagtgagcaaatgttggtttactacatcaatattttccgggatgctttttggccaaatgggaagttggcaccaccgaccacaatcagaagcaaagagcaaagtcaggaaacaaaacagagagcacagcaaaagctgcttgaaaacattccagatatgcttcagagccttgttggacagcaaaatgcccgccacggtataataaaaatattcaatgcactgcaagaaacaagagccaacaagcatctgttatatgcgctgatggaactgctgctaattgaactgtgtcctgagctgagagttcatttagatcaacttaaagctggccaagtttgagactacacaaataaaccaccagaaaaatgtctgtgtaataatagacatgaaacattttcctcttttccacagagggcttaactgagaaccgtattgatttttattttagttacctccctctagttttatgtgaaattagtagaatcagggaggacgggacttatgctgtggtaggcaacagaaaaaaacttctattgattttaatttaatatgaatactttaaagatcaacataccgattgaaatacaaatgttaatatgtgagaacctaggaagtattttaaatatttatgaaaatattttgttttaaaatgaactatgaatattgtacagttaatttcctcactgaggactgtgaacattcttatattatttcatgtatattgaagaacattgttatgcaatgctttgtgtaaagttattgtgaagattttattgtctttatttttaccaaagatttcccatagtttgagcattcaaagcaataaaatataaaaatgaaaaaaaaaaaaaaaaaaaaaaaaaa

SEQ ID NO: 118215 - DNA, 1000 bp, Homo Sapiens
cctggcccgggaggaggccctcactgcacttgggaagctcctgtacctcttagatgggatgctggatgggcaggtgaacagtggtatagcagccactccagcctctgctgcagcagccaccctggatgtggctgttcggagaggcctgtcccacggagcccagaggctgctgtgcgtggccctgggacagctggaccggcctccagacctcgcccatgacgggaggagtctgtggctgaacatcaggggcaaggaggcggctgccctatccatgttccatgtctccacgccactgccagtgatgaccggtggtttcctgagctgcatcttgggcttggtgctgcccctggcctatggcttccagcctgacctggtgctggtggcgctggggcctggccatggcctgcagggcccccacgctgcactcctggctgcaatgcttcgggggctggcagggggccgagtcctggccctcctggaggagaactccacaccccagctagcagggatcctggcccgggtgctgaatggagaggcacctcctagcctaggcccttcctctgtggcctccccagaggacgtccaggccctgatgtacctgagagggcagctggagcctcagtggaagatgttgcagtgccatcctcacctggtggcttgaaatcggccaaggtgggagcatttacaccgcagaaatgacaccgcacgccagcgccccgcggccgcgatccggaccccaagcccacggctccctcgactctggggcacggaaccccgcccactcccaatccccgcgccccgccctctcccacccgtgcttcccccgctccacccctcacctcacctcgcccccgccccacccatcgcgccccggcccgtcccatcgaggcccatgcaacccacgctcggtcccgttccggcccctgcgccccgctgcgcttcgctccccgcccttgcgccgttagtaaacatcgctcaaacgaaaaaaaaaaaaaaaaaa

SEQ ID NO: 118216 - DNA, 1000 bp, Homo Sapiens
gtgagcatattttaacagctacatgtgctcccaggttacgggttaataatggatacaaaatttggcattatactggctctatcttgcacaagtatgatgtgccatcaaatgcagaattatggcaggtttcttggcagccatttttggatggaatatttccagcaaaaacaataacttaccaagcagttccaagtgaagtacccaatgaggaacctaaagttgcaacagcttatagacccccagctttaagaaataaaccaatcaccaattccaaattgcatgaagaggaaccacctcagaatatgaaaccacaatcaggaaacgataagccattatcaaaaacagctcttaaaaatcaaaggaagcatgaagctaagaaagctgcaaagcaggaagcaagaagtgacaagagtccagatttggcacctactcctgccccacagagcacaccacgaaacactgtctctcagtcaatttctggggaccctgagatagacaaaaaaatcaagaacctaaagaagaaactgaaagcaatcgaacaactgaaagaacaagcagcaactggaaaacagctagaaaaaaatcagttggagaaaattcagaaagaaacagcccttctccaggagctggaagatttggaattgggtatttaaagattcacggaaagcaagttgatgaccagaaatcagtgcaaacacatcttctgttaaacccattggtatacacagaatattcctgtgcccacacttaatgtcaatctataattttaaccatttatccaagattctactaagtgtaaaattatttaataatgtctattaaattgatatttatatcttgcatcctatatcatgtcaatatgtgatatagaaaagagatacgtgaattttttagctaagcttgacagattgaaagacaagtgtcatttttttttgtagagggtgatatataccatgtaaatgaataaagacattttaaatttaaaaaaaaaaaaaaaaaa

SEQ ID NO: 118217 - DNA, 1000 bp, Homo Sapiens
gtttatcgatattggtatcaacttgactgaccctatgttcagaggaatttataggggggttcaaaagcatcaagatgacttacaggatgtaatagggagagctgtcgagattggtgttaaaaagtttatgattacaggtggaaatctacaagacagtaaagatgcactgcatttggcacaaacaaatggtatgtttttcagtacagttggatgtcatcctacaagatgtggtgaatttgaaaagaataaccctgatctttacttaaaggagttgctaaatcttgctgaaaacaataaagggaaagttgtggcaataggagaatgcggacttgattttgaccgactgcagttttgtcccaaagatactcaactcaaatattttgaaaaacagtttgaactgtcagaacaaacaaaattaccaatgtttcttcattgtcgaaactcacatgctgaatttttggacataatgaaaagaaatagagatcggtgtgtagggggagtggtgcattcatttgatggtaccaaggaagcagcagctgctttgattgacttggatctttatataggatttaatggttgctcactgaaaactgaagctaatttggaagttttgaagtcaattcctagtgaaaaattaatgattgagacagatgcaccttggtgtggagtcaaaagtacacatgctggatcaaaatatataagaactgcatttcctaccaaaaagaagtgggaaagtgggcactgcttaaaagacagaaatgaaccctgccatataattcaaatattggagataatgtcagcagtgagagatgaggatccactggaattagccaatacactatataacaatactattaaagtattttttcctggaatataattggtatatgtcttccactttccatcatgtatgtaaaatttcatagtaaaacttcctgatagtttcaataaagaaattatctgcaaaaaaaaaaaaaaaaaaaaaaaaaaaaaaaaaaaa

SEQ ID NO: 118218 - DNA, 1000 bp, Homo Sapiens
cgctcctgggcggaggcggaagcggaagtggcgagaaagtgtcggtctccaagatggcggccgcctggccgtctggtccgtctgctccggaggccgtgacggccagactcgttggtgtcctgtggttcgtctcagtcactacaggaccctggggggctgttgccacctccgccgggggcgaggagtcgcttaagtgcgaggacctcaaagtgggacaatatatttgtaaagatccaaaaataaatgacgctacgcaagaaccagttaactgtacaaactacacagctcatgtttcctgttttccagcacccaacataacttgtaaggattccagtggcaatgaaacacattttactgggaacgaagttggttttttcaagcccatatcttgccgaaatgtaaatggctattcctacaaagtggcagtcgcattgtctctttttcttggatggttgggagcagatcgattttaccttggataccctgctttgggtttgttaaagttttgcactgtagggttttgtggaattgggagcctaattgatttcattcttatttcaatgcagattgttggaccttcagatggaagtagttacattatagattactatggaaccagacttacaagactgagtattactaatgaaacatttagaaaaacgcaattatatccataaatattttttaaaagaaacagatttgagcctccttgattttaatagagaacttctagtgtatggatttaaagatttctctttttcattcatataccattttatgagttctgtataattttttgtggtttttgttttgttgagttaaagtatattattgtgagatttatttaataggacttcctttgaaagctgtataatagtgtttctcgggcttctgtctctatgagagatagcttattactctgatactctttaatcttttacaaaggcaagttgccacttgtcatttttgtttctgaaaaataaaagtataacttattcac

SEQ ID NO: 118219 - DNA, 469 bp, Homo Sapiens
acaccccaagaacgctgtcatttcctgggccaagttgggacccggacggcctcaccatgatgaaacgggcagctgctgctgcagtgggaggagccctggcagtgggggctgtgcccgtggtgctcagtgccatgggcttcactggggcaggaatcgccgcgtcctccatagcagccaagatgatgtccgcagcagccattgccaacgggggtggtgtttctgcggggagcctggtggctactctgcagtccgtgggggcagctggactctccacatcatccaacatcctcctggcctctgttgggtcagtgttgggggcctgcttggggaattcaccttcttcttctctcccagctgaacccgaggctaaagaagatgaggcaagagaaaatgtaccccaaggtgaacctccaaaacccccactcaagtcagagaaacatgaggaataaaggtcacatgcagatgcaaa

SEQ ID NO: 118220 - DNA, 1000 bp, Homo Sapiens
ctgctgtggcctttgtcacgggctccctggctctgtgggctccggcattcctgctgcgttcccgcgtggtccttggggagaccccaccctgccttcccggagactcctgctcttcctctgacagtctcatctttggactcatcacctgcctgaccggagtcctgggtgtgggcctgggtgtggagatcagccgccggctccgccactccaacccccgggctgatcccctggtctgtgccactggcctcctgggctctgcacccttcctcttcctgtcccttgcctgcgcccgtggtagcatcgtggccacttatattttcatcttcattggagagaccctcctgtccatgaactgggccatcgtggccgacattctgctgtacgtggtgatccctacccgacgctccaccgccgaggccttccagatcgtgctgtcccacctgctgggtgatgctgggagcccctacctcattggcctgatctctgaccgcctgcgccggaactggcccccctccttcttgtccgagttccgggctctgcagttctcgctcatgctctgcgcgtttgttggggcactgggcggcgcagccttcctgggcaccgccatcttcattgaggccgaccgccggcgggcacagctgcacgtgcagggcctgctgcacgaagcagggtccacagacgaccggattgtggtgccccagcggggccgctccacccgcgtgcccgtggccagtgtgctcatctgagaggctgccgctcacctacctgcacatctgccacagctggccctgggcccaccccacgaagggcctgggcctaaccccttggcctggcccagcttccagagggaccctgggccgtgtgccagctcccagacactacatgggtagctcaggggaggaggtgggggtccaggagggggatccctctccacaggggcagccccaagggctcggtgctatttgtaacggaataaaatttgtgccagaaaaaaaaaaaa

SEQ ID NO: 118221 - DNA, 1000 bp, Homo Sapiens
tcgccactgggcagcagcagccttaccagtcctccatgatcacacccagggacctgcatgggtgaggggacaccctgggcctctctcccgcccagcatcctccctgagtccccacacagggcctcactctgcaccccaccagggtcccgctcacaccaggcagccttcatagtggtctccctggccaccttgggcagagctgggtcatgcagcaccccatccttacccggtgccctctccttgccagcttctccccaggccagagcggccatcgcgtagaaagaaccagggtgtccccgggacaggccgtcccccaccccatcctgtagagtccattccccttttccctcctgtgctctgtcccccaaggagtcatggaactcagggtactgggcctcaacgggaacctgagacagcttccagcttcgcagcccttcccggagctacagggggatcctctagcatggggggtgtgacttggttcctttgaccaggtcctgtgaggaagcctggagcaagggtctcccccagcaggatgggtggggcctgctctggagctgagcccgtggccgctcacaggtgtccttagtggtgttgcagctgtctactggctgcatgtgctgtgaatatcccaaggaactggctgtggaatgcgtgtttgggtcagtctgtgccctctcagtagacactggagctgctctgtccctgaagaggccccgtgccccaggcatggcaagcgcctgcctctccccttccggtgctcacacgcccacgccgtgccacccgatgcaggactcacctctgtgccttgctgctcctgaggcccaagggcagccatggtgctctgtactgctcgggccgcccaggtcacagagcctgagcttcgtagccaaagcagcctgatgacccacccaccaaggaagaaagcagaataaacatttttgcactgcctgaaaaaccccggtggtcaggcgtgagcctaaaaaaaaaaaaaaaaaaa

SEQ ID NO: 118222 - DNA, 1000 bp, Homo Sapiens
tactcagtctatggaagcaacgtccctggaagaagaggctgcctattgaaaaggttgtatcacacttttctacctttttgccagtttgaagctttgcatcaggtggcaaaattcattctatgtgccgttttgttgttattcacattttattgtaacttaggaggtgaacgacctaagattacgttattgggtttggatatttgaggcaaaaatttatttttatttctatagtgatgactgttttggtttgaaatgaacagattggtaacctaatttgtggcctcctgacttttaaggaaacgtgtgcagccattacacacagcctaacgctgtcaagacattgcttcaacattgccttcattccttaaaaacctacaaaaggtggtgtaaattaatatggataattttatttacctccaggtctaaaaggtagtgtgacccaaatttgtataaagatttttcatgtgaaaggactggggttttagcaaacacaggtctaatctcttttgtgtttttgtgcaccaggcccggctgcgtagcagttgagtgatgctggttagctattaaggtggcctgttgcagtgcagagtgctgagctgcttcctgttttcttctgattgctcctggggaaaacacgccttgtcctgaagaacaaatggctgtccagtttattaaaatgcctgtcaactgcacttccagtcacccaggccttgcagataaataatggagcatgcagtgagcacatctagctgacgataatcacaccttttcccccgtcttttctgaaaaattgtaaatctgatcatatcaacatgtatgaacttaaaatatggagaatgttatggaagaaatagtttataagtttgttaagtacttataacatggtttatctttttgattattaattttttacgctaaccattgtttctgtagttaaaattgttttcttggtgttatcttttctcagaataaaattagaaacttttgatggaaaaaaaaa

SEQ ID NO: 118223 - DNA, 791 bp, Homo Sapiens
gcgtccgccgggctgggcctggcgcgcaggcgctaggaagaggccgcgtggggcgaaggcggcgcttggctggtggggcccgcggcgggattttcccgggcggcgagagcggatctatcttgggatcccatggctttctttactgggctctggggccccttcacctgtgtaagcagagtgctgagccatcactgtttcagcaccactgggagtctgagtgcgattcagaagatgacgcgggtacgagtggtggacaacagtgccctggggaacagcccataccatcgggctcctcgctgcatccatgtctataagaagaatggagtgggcaaggtgggcgaccagatactactggccatcaagggacagaagaaaaaggcgctcattgtggggcactgcatgcctggcccccgaatgacccccagattcgactccaacaacgtggtcctcattgaggacaacgggaaccctgtggggacacgaattaagacacccatccccaccagcctgcgcaagcgggaaggcgagtattccaaggtgctggccattgctcagaactttgtgtgagttgagcccaggcctctggttgcaggactcgtgaatggagcagttctgagaaccacccttttgctaagggagcttgggagccacatggctgctcccttcacactgggtaacagtgtagtatcctgtgagagaataaatgtattcatttatgtgtttttccagagctttctgggatgtgggaaaataaattacactgaagcagttgaaaaaaaaaaaaaaaaaaa

SEQ ID NO: 118224 - DNA, 1000 bp, Homo Sapiens
tgcctaccaggtgaagccacagtggaaagcatatgatgatgtcttcagaggaaggacaaatgctgcagaaattccactgattttatatctctttgctctgatttccgtgacatggctttggggaggactacacatggcctacagacacttctggatgttggttctctttgtcattttcaacagtctgcagggactttatgttttcatggtttatttcattttacacaaccaaatgtgttgccctatgaaggccagttacactgtggaaatgaatgggcatcctggacccagcacagcctttttcacgcccgggagtggaatgcctcctgctggaggggaaatcagcaagtccacccagaatctcatcggtgctatggaggaggtgccacctgactgggagagagcatccttccaacagggcagtcaggccagccctgatttaaagccaagtccacaaaatggagccacgttcccgtcctctggaggatatggccaggggtcactgatagccgatgaggagtcccaggagtttgatgatttaatatttgcattaaaaactggtgctggtctcagtgtcagtgataatgaatctggtcaaggcagccaggaggggggcaccttgactgactcccagatcgtggagctcaggaggatacccatcgccgacactcacctgtagcacctcactaaccattcgactgagcacactttcatatttgtatcagcttttgtgctaaaactctctaagtacatccacctgtgtaataggaacctgtgaattgtactggatgattaatacaaacgtgattgttgtatttggagtataaattactgattgtatgtgacctgaaaattcactgctataagaaaggtggagtcagtttgtatcagttaataggatgttcatattccaaggatattagttgtttttttaatcatcctatatggctaacattgtttaatgaaagtaataatcaataaagcaatagaatctaaaaaa

SEQ ID NO: 118225 - DNA, 1000 bp, Homo Sapiens
tgttctatgttttgctgttattttagtctttattctcttcctttaggtggagaaacaaagtaccaatttgaagggattttttttattttgtcttttggtttctgtcagtagaaataaccatatgtgctaaccaaatttctgtgaagaatgttttcatggttatcattatatctaactataacctcccccatagttatgaagagtaacctgaaatgccactattgtggaaataggataattgtaattgtgaaaaaataattttaaggaaatcttacaagtattacattaaaaagatactatgactgccacctgccatttaccttctaataaccctgccatgtggtttgcagaaagagatggatatagtagcctcagaagaaatattttatgtgggttttttgtttttcgttactagatttcatggatgaggggatatggttgaccttttactttttaatggagcagccagtttttgttaattactcacttgtaaattgtgagattctgaattccttacctgctattcttgtacttgtctcaggccaaatctatgctgtggttcttatgagacttgtatgaagatgccctgatttgtacagattgaccacgggaatactactgccatgtaatctgtatagttccagataatttgtcatgaacattgacagaatgacaattttttgtatttgctttttctccctttaagagcacattcttctgtaaggagaaaggcagcattctggctaaaatgtgtagaaggtaatttactacacttataaaatagtgtgacttttgtgaaaattttgaattagctttcatatgaagtgccttaagtagactcttcatttacttttctggtaatggtttaaatatcatttgttatgcatttttaagatacagttcagaatgacacattgtagtggcaaagataaccaaatgtctggctgtttgctttttgaccatatcaataaacttttacaatctaaaaaaaaaaaaaaaa

SEQ ID NO: 118226 - DNA, 1000 bp, Homo Sapiens
agtggagtttacctacagaccacggacccgccgagttcccacaaagcccaagaaatctgcctcctttcctgtcactgggacatccatccgaaggctgacctggccctctttgcagatatcccctgcaaatattaagaagaaggtgtaccacatggacatggaggcccagaggaagaacctgcagctcctgagtgaggagtctgagttgaggctgccccactacctgcgcagcaaagcactggagctcaccaccaccaccatggagctgggcgcgctcaggctgcagtacctgtgccataagtacatcttctatagacgcctccagagcctccggcaagaagcgatcaaccatgtacaaatcatgaaagaaacggaggcttcctacaaggcccagaacctctacatcttcctggaaaacattgaccgcctgcagagtctcaggctgcaggcctggacggacaagcagaaggggctggaggagaagcaccgagagtgcctgagcagcatggtgaccatgttccccaagctccagctggagtggaacgttcacctgaacatccctgaggtcacctcgccaaagccaaagaaatgcaagttgcctgcagcctcaccccggcacatccgccccagtggccccacctacaagcagccctttctgtctaggcaccgggcatgtgtgcccctgcagatggcccgccaacaggggaagcagatggaggctgtctggaagaccgaggtggcctcctccagttacgcaatagaaaaaaagacccctgccagccttccccgggaccagctgaggggacacccagatattccccggctgttgacactggacgtgtagtcctcctgccacaaaagcctgaacttcctgaaggcccagtaaggtgcgaggctgatggtcaatgtggattctccccaataaatctctctccaggctttaaaaaaaaaaaaaaaaaaaaaaaaaaaaaaaaaaaaaaaaaaaaaaaaaaaaaaaaaa

SEQ ID NO: 118227 - DNA, 1000 bp, Homo Sapiens
tacagtgactactgtgttgcactggcacatttatggtctctgttctggaatcttggaggacacacagcagtggagaacagaaggagtgagttttataatgaacagattccagacacggtaggtttagctgagttcatacagaggagatataactcatttagatcttctgacaaatcctagtgttagttttatctgtggaggaaagacatttaataataaactgtttgggaatcttggtgaataaagattcattttcaagctgaataaccatacttattttattttaagttgccatttggggaataattgcagtatgtgtagagactctcttgggatgcacttatatttttatttaatgactacttgttttctagttttgcccacaacgtctgaaaccactaagacattcaggagcatgttgagcttctggtttggaaacagcaagacccaccatttatgacaaggacagccatgaggttaatacttggagtttaactgccttccctttgaactagttaaaatctgtaagaataaggaagttgttgaaggcttaaaatctgggttctgaaaaagtagtttcagtttataggatacacatttactcactgagctccagttccaatactaaattagacagtatcatatagacggaaaatgaaatgctagaactgccgttctttggatcgccactctatgggggtctgtcttttaactactctcctggttatgttggccttacaccactgccatttgatttaaaacgctgcagacactttatctgcaaatgtgttccagttgttatcagctacctactacgcagcttcagcgccagtgtgaatttatttttttttaagtgccattaccgtctcctctgttcagattttgacattcaggaaaatatttttattttgatgccatactgaaatctacaatgtatatctgacaaagcagttaaatgtgacaataaaaaacttatttaatcatgaaaaaaaaaaaaaaa

SEQ ID NO: 118228 - DNA, 1000 bp, Homo Sapiens
aggagcatgaggcgatcaccaaggtgaagtatgtggacaagatccacatcgggaactacgaaattgatgcctggtatttctcaccattccccgaagactatgggaaacagcccaagctctggctctgcgagtactgcctcaagtacatgaaatatgagaagagctaccgcttccacttgggtcagtgccagtggcggcagccccccgggaaagagatctaccgcaagagcaacatctccgtgcacgaagttgatggcaaagaccataagatttactgtcagaacctgtgtctgctggccaagcttttcctggaccataagacactgtactttgacgtggagccgttcgtcttttacatcctgactgaggtggaccggcagggggcccacattgttggctacttctccaaggagaaggagtccccggatggaaacaatgtggcctgcatcctgaccttgcccccctaccaacgccgcggctacgggaagttcctcatcgctttcagttatgagctctccaagctggagagcacagtcggctccccggagaagccgctgtctgacctgggcaagctcagctaccgcagctactggtcctgggtgctgctggagaacctgcgggacttccggggcacactgtccatcaaggacctcagccagatgaccagtatcacccaaaatgacatcatcagtaccctgcaatccctcaatatggtcaagtactggaagggccagcacgtgatctgtgtcacacccaagctggtggaggagcacctcaaaagtgcccagtataagaaaccacccatcacagtggactccgtctgcctcaagtgggcaccccccaagcacaagcaagtcaagctctccaagaagtgagcagcctggcccctgctgccggacctgagcctcctggctcccagcctgtaaatatgtatagacctgttttgtcatttttttaataaagtcagttctggtggccctggactttggaggggaagggg

SEQ ID NO: 118229 - DNA, 1000 bp, Homo Sapiens
cgaacaagcaggccacaccgtctcgagggaggaggccagatgcggccagcgtctccaacagggtgaccatccgctcggcttgctgagcgtttaaacaaatgtttagacaggctgtggggactcccctgagttgagccttggccaggggtccggtgctgtcgcgggaaacctccagccttgttcttcaaaccactcagctcatgtgttttgcactgactagtactgaataatacaaccactcttatttaatgttagtattatttatttgacaactcagtgtctaacagcttgatatgcaggtccttgcatcctacatttctttaggaagttacccatttgtaactttaaaaacaggaaaaatatcagttggcaaatgcaatcttttttttttttaagctaaaggtgggtgaactggaatgaaaatctttctgatgttgtgtctataagcagccttgatgggatatgttagaagtgtcatgaaagtgtgattctacttttgcagaaaaatctaaagatcaatttatatagctttattttttactttatcaaagtatacagaattttaatatgcatatattgtgtctgacttaaaattataatgtctgcgtcaccatttaaaatgtctgttcattatgtaatgtaataaaagaaggtcttcaaaaatgtatttaacatgaatggtatccatagttgtcatcatcataaatactggagtttatttttaaattattaaacatagtaggtgcattaacataaatcagtctccacacagtaacatttaactgataattcattaatcagctttgaaaaattaaattgttaattaaaccaatctaacatttcagtaaagtttattttgtatgcttctgtttttaacttttatttctgtagataaactgactggataatattatattggacttttctctagattatctaagcaggagacctgaatctgcttgcaataaagaataaaagtctgcttcagtttctttataaa

SEQ ID NO: 118230 - DNA, 1000 bp, Homo Sapiens
ggaaggacaggcaggtggatggtgtgagcacttttatcatctgtgtctcatcaggagcatctggggtgcctgtaggaggaaggccacagggcatggatcagccccactgcatctcaagtgaactgtatagccaagtcttaaacctctcacggggcaagcctgacacagaccccctttagatgctcaggcatactgtttccatcccgattccactcttcggctctgacacgtcccttgcaaagtctccgcaggtgctgtgaagagccttccatggtagagatttctcttaagagtgtgatttctcatagggctagtaagggagattgtatacctgttgtccacagtcttcaggcagctccccaggtctctgaaccccagagtgtcatcattggagagagcagtgactgcgagagatggtggaggccgctaagcatggtagaggctagaggaagtctatccacaggcagttgtgttcccagcaattcctcccatcctgcatggttcacaccaagagaaccttcagatcctaccagcaaccgtagcaccttccacccaggggactcccagaagccagtaaagagaccaggagccacctcaatcagcagtgtttgcatgggaggtgtttctgcctgtccctgcctgatgtccctggtggagcaggtacctccgggcgggcaagcctctgatttgcacacctgaaaatcgcggaattgagtttcgatagattgatttttaaaacttttttggagtagggggtataggggaatcatttaatttaaatcattaagattcccctgctcaaacccagattcctgtgtacagatgctatttagagggaatcagaaaaatgccaagccttttctctttgaatgtgctatttttataactgaacttgtacatatgtataaagagagacacatcttccttttactaactggataaaaaaatcttaaataaaatggagtgagataattttatgtaaaaaaaaaaaaaaaaaaaa

SEQ ID NO: 118231 - DNA, 1000 bp, Homo Sapiens
ctgtgatttattggagatttggagattctaaataatatttttaaaaaacttccatgcaacttctggtttaatgtttggcaactccacatgataaaaaaataaaaacagcccaaccgagtttcggaattaagtattcttctagtaagtgattcaaacttgtaatatttgccacaggactgacttatttatttactagctagaagctcttaagttcacttgtttatcagggcatatacagaagggtttgttaaaactcgatgttaactttacaactttctgacctggtgcatgaattctcaagtactgtatttcactgtgttggtgtgtctgatggaaatttcgaggtggtcccacaaaaatattttatgtagtgtgccttcaaagagaaccatttatttctcttcacttatcgtcccacaaagtcacatttggtggtggtcagccaagtcgcatctggtctagttttactcttgtcccaattttaaagagaaatgggaatgagtttgccctggtgagacccataccattgcaatgattatcttgagcacttaaagtccagtgttggctgttagtgtatttgatattctgcctgtctcctcatggttgaaatatgtctgaagaatagcagcataatctcttggctgtttatacttttttaaactttcctgtgttgtaaatattgtatacttttggtgattccagctatgtaacctctatgctctgtaaggtgattatttgtatatagcaacatggcccagtgatattatatagtttcccaatggagaggttattgagtaacctttgcattagtttaaacactaccagaagaatgctgagccaactataaacactcaattttgtatgttttccaaattgtacttattactgcttttgatactgtattacgtgccaatagtttcccaatcacatagcaggcaagagatattttgtactttttgatccactgtaatatttaataaaaaatgttactatctgtttc

SEQ ID NO: 118232 - DNA, 1000 bp, Homo Sapiens
gaaggaggaaaacacgcggagtttgctgaacgacaagcgtgcagtggcggcacagcggcagcgctacgagcagtacagcgtggtggtggaggaggtgccactgcagccaggcgagagcctgccctaccacagtgtctactacgaggatgagtacgatgacacatacgatggcaaccaggtgggcgccaatgatgcagactctgatgacgagctcatcagccgcaggccattcaccatccctcaggtgctgagaaccaaagtgcctagagaagggcaggaggaggatgacgacgatgaggaagacgatgctgacgaggaggctcccaagcccgaccattttgttcaggaccctgcagtgctgagagagaaggcagaagccaggcgcatggcctttctcgccaagaaagggtaccggcatgacagctcaacagcagtggccggcagcccccgaggccatgggcagagccgcgagacaacccaggaacgcaggaagaaggaagccaacaaggcgacaagagccaaccacaaccggagaaccatggccgaccgcaagaggagcaaaggcatgatcccatcctgagacctggtgcagggccagtggggaggcagcggcaccagactcaccaggccgtgctcccatcgcctggggcctcctcactaggggccccaagttcaactcaacccctcaacagcctcagctttgcagcccctgagaaggccgcctctcatctaccagccagccatgagcgccttcctgcagaacacacagtgccttatgccacagccgaagaatccgtggggccggcaagcaggcaccttcccccagctgcgctagcgggaaagagatggggatggagtcccaaggcaagcgccccaaacctcgggccacaagacaccacttcccctttaccctggacagcaggaaacctgtatattcaaaaacacaaaaagtcctgctaataaaatttttgaccctttcaaaaaaaaaaaaaaaaaaaaa

SEQ ID NO: 118233 - DNA, 1000 bp, Homo Sapiens
gaaaaaaaatgaagctgacattagcagttctgccaacactcagaaacctgcactgttatcctcaactttgtcttcagggaaggctcgcagcaagaaatgcaaacatgaatctggagattcttctgggtgtataaaaccccctaaatcaccactttccccagaattaatacaagtcgaggatttgacgcttgtatctcagctttcttcttcagtgataaataaaactagtcctccacagcctgtgaatccccctagacctttcaagcatagtgagcggagaagaagatctcagcgtttagccaccttacccatgcctgatgattctgtagaaaaggtttcttctccctctccagccactgatgggaaagtattctccatcagttctcaaaatcagcaagaatcttcagtaccagaggtgcctgatgttgcacatttgccacttgagaagctgggaccctgtctccctcttgacttaagtcgtggttcagaagttacagcaccggtagcctcagattcctcttaccgtaatgaatgtcccagggcagaaaaagaggatacacagatgcttccaaatccttcttccaaagcaatagctgatggaagaggagctccagcagcagcaggaatatcgaaaacagaaaaaaaagtgaaattggaagacaaaagctcaacagcatttggtatcaggagttgggatttctcagcactgctaatgaagatcccctcttatagtccaataagcttatcaggacttccagagtcatgacatgaacagtttaattgaacccatccactctgggcaggtgactggaatagctgattaaaacataaatgctgcttttaggttaaccacaaaggaacaactcaggatcagtcgtgattgctaaagtattcacttttatcttttaggtaagagaaaagaaaaagataaggaaagaagagagaagagagacaaagatcactacagaccaaaacagaagaagaagaaaaaaaaaaaaaa

SEQ ID NO: 118234 - DNA, 1000 bp, Homo Sapiens
tgatgaggagggcaccaaggcgctgatgagggcccttgaggggaaatggatgctaaagaggctggacctcagtcaccttctgctgaacagctccaccttggccttgcttactcacagactaagccagatgacctgcctgcagagcctcagactgaacaggaacagtatcggtgatgtcggttgctgccacctttctgaggctctcagggctgccaccagcctagaggagctggacttgagccacaaccagattggagacgctggtgtccagcacttagctaccatcctgcctgggctgccagagctcaggaagatagacctctcagggaatagcatcagctcagccgggggagtgcagttggcagagtctctcgttctttgcaggcgcctggaggagttgatgcttggctgcaatgccctgggggatcccacagccctggggctggctcaggagctgccccagcacctgagggtcctacacctaccattcagccatctgggcccaggtggggccctgagcctggcccaggccctggatggatccccccatttggaagagatcagcttggcggaaaacaacctggctggaggggtcctgcgtttctgtatggagctcccgctgctcagacagatagacctggtttcctgtaagattgacaaccagactgccaagctcctcacctccagcttcacgagctgccctgccctggaagtaatcttgctgtcctggaatctcctcggggatgaggcagctgccgagctggcccaggtgctgccgaagatgggccggctgaagagagtggacctggagaagaatcagatcacagctttgggggcctggctcctggctgaaggactggcccaggggtctagcatccaagtcatccgcctctggaataaccccattccctgcgacatggcccagcacctgaagagccaggagcccaggctggactttgccttctttgacaaccagccccaggccccttggggtacttga

SEQ ID NO: 118235 - DNA, 1000 bp, Homo Sapiens
tttgctcagctgagctcctcttctgtaaggaaacccagtcatccctgaatcttgccacagagatccgggattcaggagctctcagtttcttagggatggactatggcccagtcccccatctaagtggtgctttgcaaatgtcttggaggagtataggacagaggaccaaaatacacagcaggtagtgttagctctctgctaggagctcaaagcaacacaacttgtatcaaaatcacaactggcagagaagctggtggatccaatcctttcttcatctgttgttatttagaactcacctctcacactctgttctttagtgtccttacctttatcttaccacacacatgggtgtttctattatccttggaagcacagacctcgggcatccccttattgcctgatgggccaacaccaacagttacggagtgcttgagaaggggcaagtttcacagaaatggccagatagggccttcctacagagcagcaagagtaggccaagcagaaagactgctgaggtaacacggaccccagcccctgtcagggcctctgccaaggaaataatatggaccatttacctggcaggcagtctgctctctctcaggatcaccacgcatctcaggattggtctaaacttcaagtctcaaccaagtgtctgaagtgaactttgcattgaataaatttttgccatggaaagaacatcaaacaagccactcatctctacagagataagaaaacaagtttggcagagcaagagacagaagaccgtggagaaatcagaagggggaacagtcagtttagttaaggatggaacctgggaaaggccaccattcctgcttgatggggctctgatttgctcttgctcaagtggaataaaaccccatggtcttcttgacatgattcttgatcttttctccactgagacacacttaagtgatgatccttacaggactgacaccctaatgccaataaaagttgctcattatggactgctacaaagacc

SEQ ID NO: 118236 - DNA, 1000 bp, Homo Sapiens
aaggaaggcaagaggggcaagcagaagaaaaaggagaggtgctgggaagatgatgacaatgataacttatttcttattaagcagagaaaaaaaaagtcttaagccgtcaggcagcctctgatgtggcttttcattgttcatttggcctttgtgtctataaccttctggcactgtgtttattatctatgattaaataaagtgagtttttggttttgtttttttaatttcagccattcctagagttactgaatatccatggagatctcaattctctgtgtccaacaggatattaggtaagaaagtacaaagataaacctggacttctcctattccaatatgtcatctttactcagaatcctagggataggtagaagaattcatcttttcaagaaagtgttttaaaaatactttggaaaaaaaactgcatcaaaggtaatttatcctcaaattaaatccttgcaggaagagaaattaacactaagaaaaagtcatcaatatttttcaactttttttttttttttttttactttggaaaggacaataactataaacctatatccagattttctttctgctgaagctgttgtcagaatcttcctttggacaaaacatcactagctgactataaaaacaaaagtgtcatcattgaagccctgaagaggcagggaattgagcttcagcaaaatacaggaaaagaactatccagtataaatgtcagaagacagatttcctaaacaagtaaaagagacatcaaaaattttaacataatcacaatgaaatcattttttaccacttttacagcggtgtttcaagcggactgtcactcagatctgcagagatgaatattactcaaaaaatttttttgttctcttgcatttttttcaactaccgcaaagctatacagatttttttgtacttgtggatcttttgtacttctcataacctaatgtcagactaagaaaaataaaatatctgagagtaaaaaaaaaaaaaaaaaaaa

SEQ ID NO: 118237 - DNA, 1000 bp, Homo Sapiens
gaattaacttgggattgttttgtgggtttttgtttgttttaaatgtaaattgagaatcttttataagaaataaaagcattattgggtgcctttgtttgtaaaccaaaaagtaataaatgaatccctatatttccattatagtatttattgtatttttatgttctgaaaattacccatggaacaatatgcttaggattacaggaagcagtccttacttacacttcttgtctgttttaggtgtacttgttaattcttatgtcctaattttatttaattctgagttccttacacagcattttagggaaagaatacaggcaggatgacactttgtgttaaagtgttatttttatgtattacctggaatgaggcaggtttttttctgttttctaaaaagagtaaccaagatacctccagggtgtcattgggttccagctgctctcctccacattgaatgatatcttgttaatttataggcacatttgtggtaatttatatgtctatagagtaagtataagagataattcattagtaataggaattaactgaccccttttggatgggggagagcatcaggctggggtcaggtaagtgtaaatggccttctgagcatgctcttctaggctgactcccagccctgacttgaaaccattagcgctaacttgctctgttttgagaaaaactttccaaacttttgcatgagaaactagaaaaaggaatgtatgccacgtaactggattacagaaatgagttaattgtctctgtgataaaaaaaaaaatgaaatattttcttattgaattaatatttttgtcttgaagcattttctagtgatagaatgtatttgtcttttttcctggtggtaccctcttagcatatatctttgctatccttaagatcctaaacaaatcatctttgtcagttaagtatagttgcgcaaaaattgttaaatcctttgtctttattaaagaaaaatttgagtaacattaaaaaaaaaaaaaaaaa

SEQ ID NO: 118238 - DNA, 1000 bp, Homo Sapiens
atattcacctttaacctcttttatcactgctgattcagaactccatgacattattaaagatttggaggattgtttgatggtgggtctccacacttgtggtgatctggctccaaatactttgcgaatatttacctccaactctgaaatcaagggagtttgcagtgtgggttgttgctaccacctcttatctgaagaatttgaaaaccagcataaagaacgtactcaggaaaagtggggatttccaatgtgccactatttaaaggaagagagatggtgctgtggtcgtaatgccagaatgtcagcatgtttggcattggagcgggttgcagctggccaagggctgcctactgaatcactcttctatcgtgctgttcttcaggatattattaaagattgttatggcatcaccaaatgtgatcggcatgttggtaaaatttattccaaatgttcttcttttctggattatgtcagacggtctctaaagaagcttggattagatgagtccaagctgccagaaaaaattataatgaactactacgagaagtataagcctcgaatgaatgagctggaagcttttaatatgttgaaagttgtactggctccctgtatagagactttgattcttctggatcgactttgttacctgaaagagcaggaagatattgcatggtctgctcttgtgaagttgtttgatcccgtgaaatctcccagatgttatgctgttattgccctgaagaagcagcagtgatttccattgaagcaaattattagatgtatttctctatgagacctgttgctgagattgcttttctaaacatatatgtcctgttatacaaaaatttttaaatgactgttatgtattttaaataataaaataatggctaacaacaaaaaaaaaaaaaaaaaaaaaaaaaaaaaaaaaaaaaaaaaaaaaaaaaaaaaaaaaaaaaaaaaaaaaaaaaaaaaaaaaaaaaaaaaaaaaaaaaaaaaaaaaaaaaaa

SEQ ID NO: 118239 - DNA, 1000 bp, Homo Sapiens
gccttttctctgctctcctgaacctttaggcttgtctcggcccatttgaagaccaggaagttgatcaatcccgaggctgctgagagacggtggcgcgattgggacagtcgccagggatggctgagcgtgaagatgcagcgggtgtccgggctgctctcctggacgctgagcagagtcctgtggctctccggcctctctgagccgggagctgcccggcagccccggatcatggaagagaaagcgctagaagtttatgatttgattagaactatccgggacccagaaaagcccaatactttagaagaactggaagtggtctcggaaagttgtgtggaagttcaggagataaatgaagaagaatatctggttattatcaggttcacgccaacagtacctcattgctctttggcgactcttattgggctgtgcttaagagtaaaacttcagcgatgtttaccatttaaacataagttggaaatctacatttctgaaggaacccactcaacagaagaagacatcaataagcagataaatgacaaagagcgagtggcagctgcaatggaaaaccccaacttacgggaaattgtggaacagtgtgtccttgaacctgactgatagctgttttaagagccactggcctgtaattgtttgatatatttgtttaaactctttgtataatgtcagagactcatgtttaatacataggtgatttgtacctcagagtattttttaaaggattctttccaagcgagatttaattataaggtagtacctaatttgttcaatgtataacattctcaggatttgtaacacttaaatgatcagacagaataatattttctagttattatgtgtaagatgagttgctatttttctgatgctcattctgatacaactatttttcgtgtcaaatatctactgtgcccaaatgtactcaatttaaatcattactctgtaaaataaataagcagatgattcttataaaaaaaaaaaaaaaaaa

SEQ ID NO: 118240 - DNA, 1000 bp, Homo Sapiens
tgtcatttgatcggaatatgcagtggaataggtgactcactgaaatgcctttataaatactggaacaaatcctgctgcaaaaatgaaagcgatcagactgtcttctgttcaagaatgtctattcccacctcttggtggaggaagttgggccaacactgcagtggagataaccacctttgcgataatgagagacagaccagaggactgctactctttttataggagctgcctatttctgtgtaattggcctgggctgcatgggctgcttttattcatggtgggaaagttaattattattattctggaaataccgcaagattatgttttctgtttccagggttatgtacttgtgtccagatgaataaagcagaaaaagaggggattgagtagcatttcccagattcttaagtactttgctattcgatttgcctttcagtgtagtgtacattgtaaaactcagatattgtcatgatgtttcacttggacataagacttattaatgtggtcacttaaggggtaaggaatttaagaactggatgaggttatttcttcctttactcttcaaaatgtatttttgatacatcagtatgagaggacgtcccatcaacaaagcatcgatgatggacagtctcacactatttttatcatatgtttctttgtcagccttctgcttctaatcccagtaagcaacttggacaggcattttaaaagctgaagaaaagtgacattattttagctagtggtttttaatttattttttgttaagatataatgggtgattatataagttagatttatttatgatatcaacttgggtccaagatgatagttttagctagcttatgaacattgggttcacaaggcattgggtaagttagataaaatagcatatactttctctgcagggtaggtaagataggtcagtcaagttggtaatgcctgtccattaaccatttatgcatactaataaaattataagaataaaatcaaaaaaaaaaaa

SEQ ID NO: 118241 - DNA, 1000 bp, Homo Sapiens
acagtgtgggcaagggtggctcctgtggcctcccgctcatgaacagtttcaacctgaaggatatggccccagggttgggcagtgagacgcggctggaccgcagcaaaggagatgcacggagcgacacagttctgctcgactcctcggccacactcatcaccaatgaggataacgaggaaaccgagggcagcgacgtacctgccgactacctgctgggtgacgtggaaggtgaggaggacgagctgtacctgctggatccggaacacgcgcaccccgaggaccctgagtgcgtgctgccgcaggaggcctttccgctgcgccacgagatcgtggacacgcctcccggacccgagcacctgcaggacaaggccgactccccgcacgtgagcggcagcgaggcggatgtggcctccctggcccccgtggactcctccttctcgctcctgtctgtctcacacgcgctctacgacagccgcctgccgcccgacttcttcggcgtgctggtgcgcgacatgctgcacttctacgctgagcagggcgacgtgcagatggctgtgtctgtgctcatcgtcctgggtgaacgggtgcgcaaggacatcgacgagcagacccaggagcactggtacacttcctacatcgacctgctgcagcgcttccgcctctggaacgtgtccaacgaggtggtcaagctgagcaccagccgcgccgtcagctgcctcaaccaggcctccaccaccctgcacgtcaactgcagccactgcaagcggcccatgagcagccggggctgggtctgcgacaggtgccaccgctgcgccagcatgtgtgccgtctgccaccacgtagtcaagggtctcttcgtgtggtgccagggctgcagccacggcggccacctgcagcacatcatgaagtggctggaaggcagctcccactgtcccgcaggctgcggccacctctgcgagtactcctgacggggcatctgctgggcttgcccgggcggccg

SEQ ID NO: 118242 - DNA, 1000 bp, Homo Sapiens
attgagaaactcaggatgaaaaccgaagaagaggcccggactcatacagagattgaaatgttccttagaaaggagcagcagaaacttgaggagaggctggagttctggatggagaaatacgataaggacacagaaatgaaacagaatgaactaaatgctctcaaagccacaaaggccagtgacttagcacaccttcaagacctggcaaagatgataagagagtatgaacaggtcatcattgaagatcgtatagaaaaggagaggagcaagaagaaggtaaaacaggatctcttggaattaaagagcgttataaagctccaggcctggtggcgaggcactatgatacggagagaaattggtggtttcaagatgcctaaagacaaagttgatagcaaggattcaaaaggcaaaggtaaaggcaaggataagaggagaggcaagaagaagtgaccaagttctcttttgtgttttctgctggtattctggaggtgggaaggacttggagagttaagaaacacctggtacctcaaagatgactcatctacaggttgtttcctattgagactttcccagggaagcctgatttcactttgcctgttaatttcactctgcctgttaggtgggttttcaaaccctgatttaggattacaccattgacttagggcttcctcataccttgctgggaagaagtttctagtagtcctgtgaagattcattcttcttgctctttctcagcagaacaaaggagttcactggcttagctacagtgacgcattgaaacttgagtaattcctgtaatgtcagattttgattttacccaatttgtctgtagtgaaaaaactcttatgagcaaaagtattcagtaggaattacaatatgatgttattagctgtccagcataatatatacacagcaaagttttaataaatgttggttcctgcctgccttttaaaaaaaaaaaaaaaaaaaaaaaaaaaaaaaaaaaaaaaaaaaaaaaaaa

SEQ ID NO: 118243 - DNA, 1000 bp, Homo Sapiens
tgagtagagaagccatagtccttcagcctccaattgatatcaatacttaggaagaccacagctagacggacaaacagcattgggaggccttagtcctgctcctttcaattccatcctgtaaagaacaggagtcaggagccgctggcaagagacagcatgtcacctgggactctgccagtgcagaatatgaacaatgccatgttcttgcagaaaatgcttagcctgagtttcataggaggtaatcaccagacaactgcagaatgtagaacactgagcaggacaactgacctgtctccttcacacagtccacgtcaccacgaatcacacaacaaaaaggaggagagatattttgggttcagaagaagtaaatgataatgtagctacatttctttagttattttgaaccccaaatatttcctcatctttttgttgttgtcattgattttggtgacatggacttgtttgtagaggacaggtcagctgtctggctcaatggtctacattctgaagttgtctgaaaatgtcttcatgattaaattcagcctaaacgtttcatcaagaacactacagagtcgatactgtgagtttccaacctcagcccatctgtgggcagagaaggtctagtttgtccatcagcattatcatgatatcaggactggttacttggttaaggaggggtctaggagatctgtcccttttagagacaccttacttatgatgaagtatttgggagagtggtttttcaaagtagaaatgtcctgtattccagtgatcatcctctaaacgttttatcatttattaatcatccctgcctgtgtctattattatattcatatctctacgctggaaatttgctgcctcaatgtttactgtgcctttgtttttgctagtgtgtgttgttgaaaaaaaaacattctctgcctgagttttaatttttgtccaaagttattttaatctatacaattaaaaacttttgcctatcaaaaaaaaaaaaaaaaaa

SEQ ID NO: 118244 - DNA, 1000 bp, Homo Sapiens
cagcttctccagggagacgggactgccctgatgcctcctgtgcccccacatccaccccggggtgtttttgtccctgagctcaacatccaaaacaaacagtcactgaagatccacgtggtggaggccgggaaggagtttgaccttgtcatggtgttttgggagcttttggtcctgctcccccatgtggccctggagctgcagtttgtaggtgatggcctgccccccgaaagcgacgagcagcattttaccctgcagagggacagcctggaggtgtctgtccggcctggttccggcatatcagcacggcccagctctggcactaaggagaaagggggccgcagggacctgcagatcaaggtgtcagcaaggccctaccacctgttccaggggcccaagcctgacctggttattggatttaactccgggtttgctctcaaggatacgtggctgaggtctctgccccggttacagtccctccgagtgccagccttcttcaccgagagcagcgagtacagctgtgtgatggacggccagaccatggcggtggccactggagggggcaccagccctccccagcccaaccccttccgctccccctttcgcctcagagcggccgacaactgcatgtcctggtactgcaatgccttcatcttccacctggtttacaagcctgctcaagggagcggggcccgcccggcgcccgggcccccacccccatccccaactccctctgctcctcctgcccccacccgaaggcgccgaggagaaaagaaacctgggcggggggcccgccggcggaaatgaatgctgataccctagtagtccccagctcccaaacactgaaaggaaaacgtgaaaacactcaaggcctagggggaggacaggttggtaaaacatgaaaaggtaaataaaattacttgtttgaaaaaaaaaaaaaaaaaaaaaaaaaaaaaaaaaaaaaaaaaaaaaaaaaaaaaaaaaaaaaaaaaaaaaaaaaaaa

SEQ ID NO: 118245 - DNA, 1000 bp, Homo Sapiens
cttctacctgattgccacgctcaatgagtccttcaggcctgactatgacttcagcacagcccgcagccatgagttcagccgggagcccagccttagctgggtggtgaatgcagtcaactgcagtctgttctcagctgtgcgggaggacttcaaggatctgaaaccacagctgtggaacgcggtggacgaggagatctgcctggctgaatgtgacatctacagctataacccagacttggactcagatcccttcggggaggatggtagcctctggtccttcaactacttcttctacaacaagcggctcaagcgaatcgtcttctttagctgccgttccatcagtggctccacctacacaccctcagaggcaggcaacgagctggacatggagctgggggaggaggaggtggaggaagaaagcagaagcaggggcagtggggccgaggagaccagcaccatggaggaggacagggtcccagtgatctgtatttgatgaggaggagccgaggccccagcttcatccagcttcaaccaatgcctggacctgtccacctgagaggcccctggggcctccccagctgctggccagaccctggcgctgccacagtcctggcactgcccaaggccatacctgcctagccctttggctccatcctgtggatgcccactcacccctcagactcctgctgcccatgctgtggccggacttgtcagcagggggcctggtgggaggagcgactgccctgcccaaatgaactgccacagcagggacagctggaccgcagagtttatttttgtatttctactgggcctgcacactccagcccaaagggtctgtggccggaggccccacgagcaggccccagcagtcaccggctctggtcttgggccggccccggtgcccacctgtacccccacctcgcccatttggccgcgtgcactgagtgtcactttgctgcagctcgtttctttccaataaaagtttctgtgacttagaaaa

SEQ ID NO: 118246 - DNA, 1000 bp, Homo Sapiens
ggtccacagagcacgaaataaccaagtgtaaggctaaagtagacccggctcttggcgaatttccttttgcaaaatgttttgtttgtggagaaatggggcacctgtctagatcttgtcctgataatcccaaaggactctatgctgatggtggcggttgcaaactttgtggctctgtggaacatttaaagaaagattgccctgaaagtcagaattcagagcgaatggtcacagttggtcgctgggcaaagggaatgagtgcagactatgaagaaattttggatgtacctaaaccgcaaaaacccaaaacaaaaatacctaaagttgttaatttttgataacagctagcactatcatgagttactacctcattgttactttctaaaccaggcccgcttcacgagttagagttgagctcccctgtagccaggactatgctgtagatatcagtatgatctgggtgtggccaaaaacaattttctttattctgtctatcaaatagtacttctaccactgtttggagaaaattgaagaaaagaataagatgattaaatgaattctctaaaagaacatattttaagagacagaacttagacataaccaagtagttgtatacctgattgtaacaatcatcttttataaaagcaaaattatgcataaatgtaaaacacccctaaacaaagggaacaaatgaatttttggttatattgttttcttggctcaaagtatcaatttattattataatagaaatttataagttgctagaaagtctatatttttaaagtacggaataaaaatatgttttctattaagcaatagaaatatttttgtgtataatttttctgaatacttgattctcgattgaaatatccattgttcgttaatatccatgtaacaatcccattggaaacaagatttttttgaatcctagatgagaataaacagggatttggtttttgttttagttttgaaaaaaaaaaaaaaaaaaaaaaaaaaaaaaaa

SEQ ID NO: 118247 - DNA, 1000 bp, Homo Sapiens
tactgtctgtgtagtgccaggtgaagggttatcagaaggctggttggttttaataagtttattccaagagaccttctggctggaatgagtgagagtgtgtgtgcatgtgtgtgtgtgttcatgtgtgccctgtatgaatgtggctggctcccatatcccctgggctgccccctgccccatcccctttgagtatcagaagcactctgagccaaggggacagggggcacgtgcactggtcacgagaaaaccctgggctcccactggggctcagcccagcctcctatctttccttcttctatggacttcagacagccagtgtctggggactctgccactctacccccagccctacccaccagcccccaggtgaggcttccagctgggacctgcccagacaggctgagcctgggcgtggtgggtggggtgatggctctggggagcggctgccatcctacaagccacaccccctcctctgagctctgaatatgggacccagtgccaggagctggaagacaaggtgtttctgccaaacggggacctccatccagagaaaaggaagaaggtgcagggtgggccaagaggcaagtgaaggttggcctgagtctgggccggaaactcagaggatgtttctcctctgctgggagctgtagtttcttatcaaaatagatattgttccaccatccccctccttggcccttcaagtgggctgaagcccttggaaagtgacataggaagtccccagatcttgcccttctcactccagaggctagtggtcacagacagctgggaatggcagccacagagggtcccctctgggagaaacagcttcaccccagcctcagggccctgggccatcactgcagtggccctgggaggtgaggaagaagctggctagaggagggggctcccacctaccttttatttaagccagtattctttgttcctgcttgtaataaaacttcagtttataagaaaaaaaaaaagaaaaaaaaaaaaaaaa

SEQ ID NO: 118248 - DNA, 1000 bp, Homo Sapiens
tgcctgaccttacagcagtattttttaaaaatcaaaattaatgcaaaaatccatgatgaggccaggcttggtggctcatgcctgtaattccagcactttgggaggatcccttgagcccaggtgtttgagaccagtttgggtaacataggaagagcttgtctctacaaacaaaaatttaaaaacaatgagctgggcatggaactcacacctctagccccagctactcaggctggggtgggaggatggcttgagcccaggagttcaaggatgcagtgtgctttgattgcactactgcgcttcaccctgggcaacagagtgagaccccatctctttaaaaaaaaaaaaaaatccatgatgaacaaaacaagtatttgtttgagacggggtctcgctctgtcgcccaggctggagtgcagtggtgccgtctcagctcactgcaacctccgccttctgggttcaggcgactctcctgcctcagcctcccgagtagctgggattgcaggagcctggcactatgcctggctaatttttgtatttttattggagacaccatgttagtcgtggctggtctccaactcctgacctcgggtgatccgcgccccgcggcctccggaagtgctgggattacaggcgtgagccaccgtgcccggcctaaataaaattttgaagaggctagaaccccgcacttgtgccttgagcttactgacctcaacaccctggttccactaaaactttatttacaaaattatgctgccggtctgcaggatgtagtttaacaatttgattattttggatattaaaatattttttaagtcttgaaaatattgtttactattaccaaagtttttgaaccttcttaaattctgtaccagaggtgagtgccacaccctaacctagtctgagtttttatgtgtaaagatcataaaacgttgtaagttttctaaaacacataagctctcaataaacgttagcttatcattgtcaaaaaaaaaaaaaaaaa

SEQ ID NO: 118249 - DNA, 1000 bp, Homo Sapiens
ctgatggggaaaatgcctttcagggcctagaacccaaattagagccccaggaactatctcctctctctgctactgttttcccgaaagtggaacatagcccagggcctccactagcagatgcagagtgccaagaaggattgtcagagaatagtgcctgtcgctggaccgttgtgaaaacagaggaggggaggcaagctctggagccgctccctcagggcatccaggagtctctaaacaaccctacccctggggatttagaggaaattgtcaagatggaacctgaagaagctagagaggaaatcagtggatcccctgagcgtgatatttgtgatgacatcaaagtggaacatgctgtggaattggacactggtgccccaagcgaggagttgagcagtgctggagaagtaacgaaacagacagtcttacagaaggaagaggggaggagtcagccaactaaaaccccttcatcttctcaagagccccctgatgaaggaacctcagggacagatgtgaacaaaggatcatcaaagaatgctttgtcctcaatggatcctgaagtgaggcttagtagccccccagggaagccagaagattcatccagtgttgatggtcagtcagtggggactccagttgggccagaaactggaggagagaagaatgggccagaagaagaggaagaagaggactttgatgacctcacccaagatgaggaagatgaaatgtcatcagcttctgaggaatctgtgctttctgtcccagaactccaggtgagagctggagaatattctcaagtatttcgtggactcagtaatatgtatcacttattgatatgccacctgcttgcttgctgcactatggatagtcctaaaatcatttgtatttgatttgtgaatgcattatgggacatgattgtggagttgaggtgaaatgagatggaaaggatgaaattttacttattatattaaactcgtttacacattaaaaaaaaaaaaaaaaaaaa

SEQ ID NO: 118250 - DNA, 1000 bp, Homo Sapiens
cagtggctgcgctttgggcactgttctcggccctgaagcatcctgccccgaggctgacctaactgcccccagctggactcatggccaaggctacagacccagtactccaatcccgactcccactgtgtggtccaaatgtgtacgcccacaggaggcagccatgcccgaggaaggtacttgctgaaagatggtccagttcatgccgccaccagctggacctctgatcaggccccctgcagaaggggaagctctccacatgcccaagatacgagagaaacgcccgggtcacagcagcctgagtcactgcagcctctgctacctgccaagcctgcgccctccacctgtgggctccttgcctctgtgatggggcctccacggccagcatcttcccgccatggtcacatgatgccatgccctgctctgggcacccctaagcgggtatgaggcgaatcagaggaagaatatcggcttctcttcccttttggatatttgcgtcattgaccgggactggcccactcttcctctgcctcacgcctgctttgaccttagaagacagacggcagctcgcgttgctgggctgagattctccaatggacgtgaatttagatgatgctgttgccttgggtggcttcatggccaccaacccgcaccctggtggccactcagccatgacaagggcctgacagccactaagtgagcttcagagccttccccttgcaaagttccagggccaccagatgtcgcctgcccagtcactgtcacagagttaaagcgtgcgggtgaacgctggccgcggagcgtgcagcccggcagcagctcagcggggcagctcctgcttccagccctgcctctgctggtgcttcgcccacaaaccctgctgtatgacatttgcaccacatggtgtgtgtccgtgccctttgacatgacagtgccaacaacatctcatgaaatttaaaataaatccccaaggcatcagaaacgtaaaaaaaaaaaaaaaaaa

SEQ ID NO: 118251 - DNA, 1000 bp, Homo Sapiens
aagaagaagagaaaatcccctggggtggcagcagcagtagcggaagacggaggcctcaaaaagtgtaaaatctccagctattgcagatcccaaccccctgctagactaataagtggagaggaacatttttcaagcaagaagtgcctggcttggttttatgaatatgcaggtcctgatgaagttgtagggccagaaggaatggaaaaattttgtgaagacattggtgttgaacctgaaaatattattatgttagttttagcgtggaaattggaggctgaaagcatgggattttttaccaaggaagaatggttaaagggaatgacttcattacagtgtgactgcacagaaaagttacaaaacaaatttgactttttgcgctcacagttgaatgatatttcgtcatttaagaatatctacagatatgcctttgattttgcaagggataaagatcagagaagccttgatattgatactgctaaatctatgttagctcttctgcttgggaggacatggccactgttttcagtattttaccagtacctggagcaatcaaagtatcgtgttatgaacaaagatcaatggtacaatgtattagaattcagcagaacagtccatgctgatcttagtaactatgatgaagatggtgcttggcctgttcttcttgatgaatttgttgagtggcaaaaagtccgtcagacatcatagcaagaactatgtgaagaaaatgcaaacctttcaattcccacgtgtatacaagctaatgtgatgagggggaaaaaaatccaacgggtgcattttcattcatatgaaagacttctcatagtacttttttttcctttttttaaaggaggtttttcttgttacatgtgatgggcattgagccacacctcttcttagactgaatattgaagtttttgttttgagttatgtttataacatttatttcagaacaataaagattcagatttgtgaaaaaaaaaaaaaaaaaaaaaaaaaaaaa

SEQ ID NO: 118252 - DNA, 1000 bp, Homo Sapiens
gctttgcccccacccaccctgcagccttctccactcttccctcccttggagttccgcccagtacctttgccctcaggcgaggaaggggaatatgtcctggcactgaagcaagagctacgaggagccatgaggcagctcccctacttcatccggccagctgtccccaagagagatgtggagcgttattcagacaaatatcagatgtcaggtccgattgacaatgccatcgattggaaccctgattggcggcgtctaccccgggagctaaagatccgagtgcggaagctacagaaggaacggattacaattctgctccccaagaggccccctaagaccacagaagataaggaggaaacaatacagaaactagagaccctggagaagaaggaagaagaagtaacttcagaggaggatgaggagaaagaagaagaagaagagaaggaagaggaggaagaagaagagtatgatgaagaagaacatgaagaggaaactgattacatcatgtcatattttgacaatggagaggactttggtggtgacagtgatgacaatatggacgaggctatatactgaagaaggactctggaccctcgtgtctttctttaggatacagagagtaactgtacctattatttgtttcttcagacaagcaaatcatttggtcagagttcatataatctgtctgttccctggagatgggaatagaggatgatgacagtttattttctacacttcccctccttccacatttgtatcacctttgctatcttggggaaagtgcaaaggacaaacatctcaattgtatgaagggagaaaggagaattgaaagaagaactggggttgttagagctgagatgactgtacacatacccctgcccaatttatatagctctttgtggagataattaggggtgggagcagtttgaaggagtaagcctggttttatacttttaaataaagtgtttttatctgtcaaaaaaaaaaaaaaaaaaaaaaaaaa

SEQ ID NO: 118253 - DNA, 698 bp, Homo Sapiens
gccatgacgagccggtccggaagaagaggtagggcgccgccgtgacagattagtcctaaagggaacggggttgttagttcaattggctaccggaaaaaaccaggctgggctgggcgccgccatgacaaccgataccggaaaaggcgggtcgttccccccggacagccctacgccggcaaaggtctcgagatgcaggcggccctagaggtcaccgctcgctactgtggccgggagctggagcagtatggccagtgtgtggcggccaagccggaatcctggcagcgggactgtcactaccttaagatgagcattgcccagtgcacatcctcccacccaatcatccgccagatccgccaggcctgtgctcagccttttgaggccttcgaggagtgtcttcgacagaacgaggcagctgtgggcaactgtgcagagcatatgcgccgcttcctgcagtgcgctgagcaggtgcagccgccacgctcacctgcaactgtggaggcacagccacttcctgcctcctgaggactcctctgacggcaggaaaactggacatgaatgactgcccccccgcccctcccctgcagagtggccagatggagtcctgagccctggacatgggcccggctttcctggatatcaggacttccaataaataaagactctgtatactgggaaaaaaaaaaaaaaaaaaaaaaaaa

SEQ ID NO: 118254 - DNA, 1000 bp, Homo Sapiens
tatacatttattttttgtcgttatatactggtgtgtgatccaagttatacatgaatagaaaaagatggtgttaaatttgtgtgtaggctgggaattcttgctgaaggaattggagaaaacctgttgctgcaaaattttacatgttccagatggaaagggaagtctaagcgctttttaaaacaatttttttttgtatttaattaagcaattgcagttatctgggatttttgggtcagaattttaaattctgtttgattctccatattccagtgaataaaatacaaaagcattgtgtttttaagattgtgtcgatattcacctaaaaacttgtgccaaaagcacctggattggtaattatatttcacttaaagggtaaatttgacaatatcttgataatcaaaagtgcaatttttttcttcaaaatgttttctccagcatcacagatcctgcagatatatatttatatttatacatatatatttatgaaataattcttactcacaaaatatatttctgataaacattaagatattaaatctgatgcacaaactttaatttggccattaatcttttttatttaaaaatttaaatttgtttttaaaattgtatatagtttttaaaatctcacacatgcttcgatacttccttgttaagaattcttaataactactaaaactgatttttaatagttgctgatatatatttggtttgtttgggtatacttttcaaaaccatttttgaatgtccaaacatctgatttaaagtttctgtttatctttctgaccaaaggagcaagaggtataatggatatggcattcattaaaatctttactatgtacaaaaacagtaatatttacagcatcagtaaatatttttaagtggtacttctaaatcataaaagttggggaaagagacctttaaaatcttgtggtgttgaacaatgttatatgaagtagaaaaaataaaatacttcccagttgtgaaaaaaaaaaaaaaaaaa

SEQ ID NO: 118255 - DNA, 1000 bp, Homo Sapiens
agtttgatatttacaccattgcctttgggatccggaatgtcacacacattgatcaggcactccaggaagctcatcgggtgctgaaaccaggaggacggtttctctgtctggaatttagccaagtgaacaatcccctcatatccaggctttatgatctatatagcttccaggtcatccctgtcctgggagaggtcatcgctggagactggaagtcctatcagtaccttgtagagagtatccgaaggtttccgtctcaggaagagttcaaggacatgatagaagatgcaggctttcacaaggtgacttacgaaagtctaacatcaggcattgtggccattcattctggcttcaaactttaattcctttcctatcatggagcatgaaccagtcatatcctgttgaaagcctggaactgaaggataatctggcaaatgagacagcagcagagcatctcctcttaaggatacgtgccttggactcatgtttgaatcgaacagtctcaaagtggaagaacaaattcttgtcacttttttacagctttctttggagctgcttcagtccatctcccagaggcatttggtctgtatctttgctcaactgctaatttctcttggctgtagggtgtgtggttaaggtacaaccacccctaaagctcagttttgaagtgagtgtatttatagcttctctgctggtgctgccttctagagggatgatagatcatttgaacccaatgacaatttttaaccagaaaatttaattgtacctgaatcaacctttcagcctaggacgaagtctaggcccaagtcagagtattaatgatcatgagaattgtgtgctgaaccagtaaacgagtttaccttttaaaaaaaaaaaaaaaaaaaaaaaaaaaaaaaaaaaaaaaaaaaaaaaaaaaaaaaaaaaaaaaaaaaaaaaaaaaaaaaaaaaaaaaaaaaaaaaaaaaagaaaaaaaagaaaaaaaataaaaaaaaaaaaaaaaaaa

SEQ ID NO: 118256 - DNA, 1000 bp, Homo Sapiens
cagtggtgcgatcttagctcactgcaacctccacctcccgggttcaagcgattctcctgcctcagcctcctgtgtaactgggattacaggctcccaccacacctggctagtgttttgtatttttagtagatacggggtttcaccatgctggccagactgaggtctcgaactgccgacctcaggctgtctgcccgtccagcctcccaaagtgctgggattgcaggcatgagccactgctcccggccctattatccatagttctaatccacagggattacagcataatgctagcagggccaggttcatccttgagacagtgtggctggctgtcacctggtcctccctttaccagccagccccattgcacactgtgcagcccatcccctcccagaaatagagtgacaaactctgcacttaagtcccctgtttctgtttaacttgcagtgcttatcacaggcccttccttaattttttaaacaaggctgcttgaggctggggtaaattttggggctttgggagtacacaggactactgagggacggggagttggtggcttggtgttcatggtggagacttggttctttacgcagagcaggctaaaggcgtgttttttctgctctgtttctaattcatgttaagtagttggtcatcactttggtcagagctgctgctgaagctctcttaactgtgagtcactggacgttggcagggagttggctgtgagattgtaggtgctcaagtgtttctgttcgggactgagtgtgaatctgtaaaaggggaaaatcctcgcaagaggtctacgagaaggatgagggcccaagtctagggtctaaacaaagccaggagtggtttggtatattactgagtgcaatcattgcgtgccattcctgcactcaatgtattgtgtaaaatccttaggtaaaatgggataaacccacagctggtcctacttggcctcttgaaaaccattccatcattgtgccaatctagcctgaaaagg

SEQ ID NO: 118257 - DNA, 1000 bp, Homo Sapiens
tctggctccccgcgtgcgtcgcggcccacggcttccgtatccatgattatttgtactttcaagtgctgagtcctggggacattcgatacatcttcacagccacacctgccaaggactttggtggtatctttcacacaaggtatgagcagattcaccttgtccccgctgaacctccagaggcctgcggggaactcagcaacggtttcttcatccaggaccagattgctctggtggagagggggggctgctccttcctctccaagactcgggtggtccaggagcacggcgggcgggcggtgatcatctctgacaacgcagttgacaatgacagcttctacgtggagatgatccaggacagtacccagcgcacagctgacatccccgccctcttcctgctcggccgagacggctacatgatccgccgctctctggaacagcatgggctgccatgggccatcatttccatcccagtcaatgtcaccagcatccccacctttgagctgctgcaaccgccctggaccttctggtagaagagtttgtcccacattccagccataagtgactctgagctgggaaggggaaacccaggaattttgctacttggaatttggagatagcatctggggacaagtggagccaggtagaggaaaagggtttgggcgttgctaggctgaaagggaagccacaccactggccttcccttccccagggcccccaagggtgtctcatgctacaagaagaggcaagagacaggccccagggcttctggctagaacccgaaacaaaaggagctgaaggcaggtggcctgagagccatctgtgacctgtcacactcacctggctccagcctcccctacccagggtctctgcacagtgaccttcacagcagttgttggagtggtttaaagagctggtgtttggggactcaataaaccctcactgactttttagcaataaagcttctcatcagggttgcaaaaaaaaaaaaaaaaaaaaaaaa

SEQ ID NO: 118258 - DNA, 926 bp, Homo Sapiens
gtcgcgaccctggtccggacctgacctgaattgcgaccccaacctggactgctcccctgaccgcaacccctacccccgcccaccagtatggcccggcacgtgttcctaacggggcccccaggagttggaaaaacaacattgatccataaagccagtgaggttttaaaatcctctggtgtgcctgttgatggattttataccgaagaagtcagacagggagggagaagaataggattcgatgtcgtcacgttgtccggcacccgggggcctttatcgagagttgggttagagcctccacctggaaaacgtgaatgccgagttgggcagtatgtggtcgacctgacttcttttgagcagttggcactacccgtcttgaggaatgccgactgcagcagtggcccagggcaaagagtgtgcgtcatcgatgagattgggaagatggagctcttcagtcagcttttcattcaagctgttcgtcagacgctgtctaccccagggactataatccttggcacaatcccagttcctaaaggaaagccactggctcttgtagaagaaatcagaaacagaaaggatgtgaaggtgtttaatgtcaccaaggaaaacagaaaccaccttctgccagatatcgtgacgtgcgtgcagagcagcaggaagtgaagacacgtgcattcctgccttccgtgaaggagtgcccagttcaagaggagcctgatggagccctgcctgtcgaggctgtatgcctatggggttatggaaccttgtgggcttttctagagaaaactcaacagctgtttcccataaaatgtttaaaagatcaaattagccttaatgctggattgtctgtacaagattaactatccattgtggcttatctatgcttaaagatttcttgtttatttaaaaaaaaaaaaaaaaaaaaaaaa

SEQ ID NO: 118259 - DNA, 1000 bp, Homo Sapiens
gatgtctgtttcaaaacttctgtcttatctatcaattcccccttgtggtagttaccacaacacatgcctcattaagaaacagcaaccatcagagggaatgcctgcctccctgttaccagctctgcagatgtgcacatatcttcctgtcgtaagccaatgggacttaaaccttacctcttgtgttttggagactatctttttttttttttttttttttttgagagagtgtctccctgtgttgctcaggctggagtgcagtggtgtgatctcggctcactgtaaccttcacctactgggttcaagtaactctcctgcctcagcctcccgagtagcttggactacaggcgtgcaccaccacacctggctaactttttgtatttttagtagagacggggttttgccatgttgcccgggctggtctcgaactcctgaccttaaatgagcctcctgcctcagcctcccaaactgctgggattacaggcgtgtgccaccatgcctggctaatttttatattttcagtagagacgaggttttgccatgttggccaggctggtctcgaactcctgacctcaagtggtccacccaccttggcctcctagagtgctgggattacaggtgtgagccactgtgcccagcctcttttgctttcttaaagactttggtcgggtatttgtgttgttgagtattgtgtctgggtgtgggtatttgattctttttttgttttgtgtttttggctgtcctgtctattggatgtgatatgttatggatgtgatgtgttagtgtcgagcgtgctgtagaatctcccatctctgaaacaggcgtgaaaacctgtactgattcccacgtcctccagctaccacttcatttgtctgtttctcatttacttcctcttatagcgtggctttaaacatatatacatttgtatatatgtatatatgaatataatgtataaaatgtatgtagatgtatatacaaaaaataaacgagatgggttaaagat

SEQ ID NO: 118260 - DNA, 1000 bp, Homo Sapiens
agggagccctcggctcacccagtggaagtcttctcgtttgacctccacgagccactcagcaaggagcgcgtggaagccttcagcgacggagtctacgccatcgtggccacgcttctcatcctggacatctgcgaagacaacgtcccggaccccaaggatgtgaaggagaggttcagcggcagcctcgtggccgccctgagtgcgaccgggccgcgcttcctggcgtacttcggctccttcgccacagtgggactgctgtggttcgcccaccactcactcttcctgcatgtgcgcaaggccacgcgggccatggggctgctgaacacgctctcgctggccttcgtgggtggcctcccactagcctaccagcagacctcggccttcgcccggcagccccgcgatgagctggagcgcgtgcgtgtcagctgcaccatcatcttcctggccagcatcttccagctggccatgtggaccacggcgctgctgcaccaggcggagacgctgcagccctcggtgtggtttggcggccgggagcatgtgctcatgttcgccaagctggcgctgtacccctgtgccagcctgctggccttcgcctccacctgcctgctgagcaggttcagtgtgggcatcttccacctcatgcagatcgccgtgccctgcgccttcctgttgctgcgcctgctcgtgggcctggccctggccaccctgcgggtcctgcggggcctcgcccggcccgaacaccccccgccagcccccacgggccaggacgacccacagtcccagctcctccctgccccctgctagcagccacagagcccactcccagccgtcctcaccagagatggaccagggaggacaggatgctgggcaggggaagccaagtcacgggcaggccgcagtggttcttgcgtggcctggttttattttcattgtgaaatatcatgctcttatttcagtcctcaaaaaaaaaaaaaaaaaaaaaaaaaaaaaaaaaaaaaaa

SEQ ID NO: 118261 - DNA, 1000 bp, Homo Sapiens
aagatggcggacgagaaggacagggaagagataatagtagcagaatttcacaaaaaaatcaaagaggcatttgaagtctttgaccatgagtcgaataatacagtggatgtgagagagattggaacaattatcaggtcattaggatgctgtcctacggaaggagagctgcatgatctgattgcagaggtagaggaagaagaacctactggatacattcgattcgaaaaatttcttccggtgatgacagaaatactactagaaagaaaatacagaccaattccagaagatgtccttcttcgagcttttgaggttttagattcagctaaacgtgggtttcttactaaggacgagctgatcaagtatatgactgaagaaggtgagcctttttctcaagaggaaatggaagaaatgttgtctgctgcaattgatccagaatcaaattcaattaattacaaggactatataacaatgatggtgatagatgaaaattaaatgttctaaagataatttctgattgaaagaacaattttagaaattgcttgttcttgttaatttcacatcttatcttaggattcctatatgtgatattttataccttgtgacataactattttaagacactttgtttttaaagatgatcgtaacactttaaaccaaatttagtatgtctagccttacagaatgataaattactatttatttaaaaactattcttaaaacattttaacattagaatggattgttgtttattttctacaataaaactcaggtcaccttcgaattaattaagctgacaaaatgaaaatgacttaattacccaaggtttggcatgtaaagatcttaagagggtgcagaacgaaccactcgaaaacgagtagcagtgtaatgaaggcttcttttttaaacaataacaaatgcttcatcaatctgagtgtggaaggtgatttatcaaaataaatattactaatcgaaaaaaaaaaaaaaaaaaaaaaaaaaaaaa

SEQ ID NO: 118262 - DNA, 1000 bp, Homo Sapiens
gtgatctgaggaaatcctgtaggggaaggcaggctgcagtgaaaacaggagctggtgaaaccgagccctctgcatctgcgaatgtgccctaggtgctgctgctggggacatggatgccaagcggaggcctgcgtggcctcctgagcagcagctgaccgcccgtctcatgctggacgggacccctgggcgggtggacatgagaccactgttggccagggacgccgtgcggaggcctacgtggctgcctgagcagcagctgaccgcccgtctcactgttggccagggctttgtggcgtgggtgttttccagtctgcctggagcagcgagaagcagctgtgcagactggtggcggtgggagggtttgctgggactgatggggacaccggccagcttgtctggtgtccagcagccctgccggacttggcctcctgtcctgtcgttgggagccctggctggggctgctttgagcaatgacgctggcccagagcagcttcccacatgaccccagagccgagggtctgccctgtcctaggttaggtcttcatggtttagagtaaaaccgtgagggatgttaattatgggcattgaagacttaaggttttcttaaatttttagtgagcagtgattggccttcaatacttgtgctgagaggaattttaagccaggggaagtgtaagaaaatgttcccattcaggagagattgtgttggagtttctttcttcctctgtatgtattttgtggtgtccacctttaaccacgtttcatccaaaacgatgatgcagctttaacatgaatgttacatttttattttcaaggaattattatctatgttccctttgtaaaggaaagataatgttgtaaatctttttattagataatgtaaagatgtatatcagtatttttggatcatgttatagattatggatatattgtttaataaataaagtattttttggaacaaacaaaaaaaaaaaaaaaaaaaaaaaaaaaaaaaaaaaaa

SEQ ID NO: 118263 - DNA, 536 bp, Homo Sapiens
gccgactcctcccgctaaggcgggaacacgcggggcccaagatggcggccagccggtaccggcgttttcttaagctctgtgaggaatggccagtggacgagaccaaacggggccgggacttgggcgcttacctgcgacagcgggtagcacaggcctttcgggagggagagaatacccaggttgcagagcctgaggcctgtgatcagatgtacgagagcttagcgcgactccattcaaactactacaaacacaagtaccctcgccccagagacaccagcttcagtggcctgtcgttggaagagtacaagctgatcctgtccacagacaccttggaagagcttaaggaaatagataaaggcatgtggaagaaactgcaggagaagtttgcccccaagggtcctgaggaggatcataaggcctgagctcaggccttacctcgtgcacatacctaggtgtggagtcttgtacattgccatcgtcaataaaactgccccagtttccccttgcaaaaaaaaaaaaaaaaaaaaaaaaaaaaa

SEQ ID NO: 118264 - DNA, 1000 bp, Homo Sapiens
ggaatgggttggtgtaggcatgttgctggggcccttactaacctggatatacatgaggtttgccagccgcccagggtttagctggcctgtaatgctcttcttctccctgtatagcatgggtctggtggagctggtgggtcggcactatttcctggaactgcggcggctgagtccttccctgtacagtgtggttcctgcctctcagtgttgcaccccagccatgctcttcccggcacctgcggcccgccggaccctcacctacctgtcccaagtgtactgccacaagggctttggcaaggacatggcactgtactcgctgttgagggccaagggagagagggcctatgtagtggagccgaacctcgtgaaacacatcgggctcttctccagtctccggtacaactttcatcccagtctcctctagggtgccaagagatgcctttctgaagttggccacttcttgaagattcaaatatttatctctttatttagacatggttgcctgcaggtatttcactgtttactgttgttagagatataggcactggggcagctgaggaacctcaatatgttaagagccttggctttggtagcctcctggcaggagcagcagtttgccacaggtccggacctctccctccacacagccacactgcctcatgcagtctgacccacccagtgagggtgcatttgaacactgattatattctccatttgtttttaagctctgctttgtgttagagcttgtgactgccaaaaattttgtgcacagtgatatgactgttttaggatcttaagggtagaattttgtgaaaggtgagatcctttggaattgagttctttctcattgggtatgaaaatggatgtatgtttagaatatatgcccaacgaggcaggaccatgtggatagattccatttgtttccttgacctgatgtaataaaaactgataaaagccgtgcagtgcccggcatcttggaaaaaaaaaaaaaaaaaaaaaa

SEQ ID NO: 118265 - DNA, 1000 bp, Homo Sapiens
ggcccacagccccctgcctgccaagtacatcgacctagacaaagggttccggaaggagaactgcaaatagggaggccctgggctcctggctgggccagcagctgcacctctcctgtctgtgctcctcggggcatctcctgatgctccggggctcaccccccttccagcggctggtcccgctttcctggaatttggcctgggcgtatgcagaggccgcctccacacccctcccccaggggcttggtggcagcatagcccccacccctgcggcctttgctcacgggtggccctgcccacccctggcacaaccaaaatcccactgatgcccatcatgccctcagacccttctgggctctgcccgctgggggcctgaagacattcctggaggacactcccatcagaacctggcagccccaaaactggggtcagcctcagggcaggagtcccactcctccagggctctgctcgtccggggctgggagatgttcctggaggaggacactcccatcagaacttggcagccttgaagttggggtcagcctcggcaggagtcccactcctcctggggtgctgcctgccaccaagagctcccccacctgtaccaccatgtgggactccaggcaccatctgttctccccagggacctgctgacttgaatgccagcccttgctcctctgtgttgctttgggccacctggggctgcaccccctgccctttctctgccccatccctaccctagccttgctctcagccaccttgatagtcactgggctccctgtgacttctgaccctgacacccctcccttggactctgcctgggctggagtctagggctggggctacatttggcttctgtactggctgaggacaggggagggagtgaagttggtttggggtggcctgtgttgccactctcagcaccccacatttgcatctgctggtggacctgccaccatcacaataaagtccccatctgatttttaaaaaaaaaaaaaaaaaa

SEQ ID NO: 118266 - DNA, 1000 bp, Homo Sapiens
tctttagagccctctcatgttgttcaagttcgctgttcaagtatgatgaaccagggcaacgtgtacggccagatcaccgtacgcatgcacacccggcagactctggccatctatgaccggtttggccggttgatgtatggacaggaagatgtacccaaggatgtcctggagtatgttgtattcgaaaagcagttgacaaacccctatggaagctggagaatgcataccaagatcgttcccccatgggcaccccctaagcagcccatccttaagacggtgatgatccctggccctcagctgaaaccagaagaagaatatgaagaggcacaaggagaggcccagaagcctcagctagcctgatgacaaaaatgacttctagggtgaagcctgggtgatgaggctgctggaagctttgaagtctcccattcccctcatgctataaaaagaactacctttgttctctcccatcctgctcaggtcttttcagcagtctcatcatcagcaaccatgactgatgactgggccctagcaggtggcaggtataacatggccatggacactcttcttttttaaattttatgtctagcttctgagtctagatgaaagacagtatgtttcagagaacattggatatcagtttttcccacagcagggactgtgagagacaaccagcagcatcctctttgtaatcacagggcagggatcagagtttgaaatgaaatgttgtcagggtgttggaaaaattttggtgagttctgcacatttcccctggttcaggctgggcatggaccagccttcagatggcagaagtggaagatgagcctacttgtgagcgatgtgactttaaggaaatgaagactggggaagaataattagtgtttataagacatttaagaggccctttttcatatactgactcactgatgaatcagcatttgcattttatggaaaaatataaatccaaagaaataatttatcccttaaaaaaaaaaaaaaaaaa

SEQ ID NO: 118267 - DNA, 1000 bp, Homo Sapiens
agcagctggccgcctggtgctcgctggtcctgtccttctgccgcctgcacaaacagtccagcatgacggtgatggaagctcaggagagcccgctcttcaacaacgtcaagctacagcgaaagcttcctgtggagtcgatccagattgtattagaggaactgaggaagaaagggaacctcgagtggttggataagagcaagtccagcttcctgatcatgtggcggaggccagaagaatgggggaaactcatctatcagtgggtttccaggagtggccagaacaactccgtctttaccctgtatgaactgactaatggggaagacacagaggatgaggagttccacgggctggatgaagccactctactgcgggctctgcaggccctacagcaggagcacaaggccgagatcatcactgtcagcgatggccgaggcgtcaagttcttctagcagggacctgtctccctttacttcttacctcccacctttccagggctttcaaaaggagacagacccagtgtcccccaaagactggatctgtgactccaccagactcaaaaggactccagtcctgaaggctgggacctggggatgggtttctcacaccccatatgtctgtcccttggatagggtgaggctgaagcaccagggagaaaatatgtgcttcttctcgccctacctcctttcccatcctagactgtccttgagccagggtctgtaaacctgacactttatatgtgttcacacatgtaagtacatacacacatgcgcctgcagcacatgcttctgtctcctcctcctcccacccctttagctgctgttgcctcccttctcaggctggtgctggatccttcctaggggatgggggaagccctggctgcaggcagccttccaggcaatatgaagataggaggcccacgggcctggcagtgagaggtgtggccccacaccgatttatgatattaaaatctcaactcccaaaaaaaaaaaaaaaaaaaaaa

SEQ ID NO: 118268 - DNA, 1000 bp, Homo Sapiens
gacaacctgctgcagctcatggcacgagaccccagcttcctgatgggggcggcacggtgcctgcccctggcggcggccgtgcgcgacactgtgagcgccagcctgcagcaggcgcgtgcgcgcagcctggtcttctccatcctgctggcccgcaaccagctcgtggcactcgtgcgccgaaaggaccaatttctgcaccccatcgacctgcacctgctcttcaacctcattagttcctcctcgtcctttcgcgagggcgaggcctggacgcccgtgtgcctgcccaaattcaacgcagccggcttcttccacgcacacatctcttacctagagcctgacactgacctctgcctgctgcttgtctccactgaccgtgaggacttctttgcagtctctgactgccgccgccgcttccaggagcgccttcgcaagcgcggagcccacctggccctgcgagaggcactgcgcacaccctactacagcgttgcccaagtgggcatccctgacctgcgtcacttcctctataagtcaaagagctcgggactcttcaccagccctgagattgaggccccatacaccagtgaagaggagcaggagcggctgctgggcctctaccagtacttgcacagtcgtgcccacaatgcctctcgcccactcaagaccatttactacacgggccccaacgagaacctcctggcctgggtgacaggcgcctttgagctctacatgtgttacagccccctggggaccaaggcgtcagccgtcagtgccatccataagctgatgcgctggatccgcaaagaggaagaccgcctcttcattctcacgcccctcacctattgatgggaatgtgtgcgggctcagccttcctggacacactaggtgtgggaagccataggagcctccagatgggggctggcctctcttgcccagccagcgggcagggactgtgggttggtgaatgcattaaagtgctttggggaaaaaaaaaaaaaaaaaa

SEQ ID NO: 118269 - DNA, 1000 bp, Homo Sapiens
ccactgggccacctgccgtctgtgcggggagcaggtgggccgcggcccgggcttccacgcggggacctcggcgttgtggaggcacctgaggagcgcgcaccggcgggagctggagagcagcggcgccgggagctccccacctgccgcgccctgcccgccgccgcccggccccgctgcggcccccgagggcgactgggcgcgcctgctggaacagatgggcgcgctggccgtgcgcggcagccggcgggagcgggagctggagcggcgcgagctggccgtggagcagggcgagcgcgccctggagcggaggcggagggcgctgcaggaggaagagcgcgccgcggcccaggcgcgccgggaactgcaggccgagcgggaggcgctgcaggcgcggctgcgggatgtgagccgccgtgagggcgccctgggctgggcccccgctgcgccgccgccgctcaaggacgaccccgagggtgacagggacggctgcgtcatcacaaaggtcctcctgtaggggtgtggccacttccccaccccaggacagcgcttctccgtccaatgccaatgccttcagaccccgctgggaccgaagccgtaaccgaagccaggcccgcagccgctactcactcggaagctccagctaactgtaggatcttccacaccctaaggcttcagcttgagaagcacttcgaagccagagcagaaccaaaactcacttccatggggtcaccgggggtgcctgggcggcctttcgtgggcatgcacgcaaggaattggggtggcacacgggacacccgagagctccaggagccccgtgaacccagaccacccagtgccatggccacttagggctgggaacccgaacctggtgactttgaaaggatagagcttcattccataccaaagacttatcacaccatgtgcctatacacccagcagcccaaggtggagggtgcgtggaaatgagaaagctttttaccccaaaaaaaaaaaaaaaaaa

SEQ ID NO: 118270 - DNA, 1000 bp, Homo Sapiens
cagagatggatagagatctgatggtaggaaagctggaaagagacctgtacactcaacagaaagtggagatactaacagctcttaggaaacttggagagaagctgactgcagatgatgaggccttcttgtcagcaaatgcaggtgctatactcagccagtttgagaaagtctctacagaccttggctctggagacaaaattcttgctctggcaagttttgaggttgaaaaaacaaaaaaatgacatggtgcagaagcttgtaacattgatcacattcttaatgtaaatggtgtctttcttctggggttttcagttattgcaaagaaatgaagagattctggaaatgcatcaataacctaagaaaaagcgacataaaaatatacttatggcttgtgtttatgctcttcatcattgtgcgttgtgtgcggttacctgcttgagtgatcctgaacttgttgcgacagagggactcactggactctgttcgttatgatttgtctgtttaagagagaaaacaaagtggacttgatttttattaaggctgtttgtttttaagtgttgatagtgaacgaaaagatgtgaagtaatgatatttttctgcttacaacttatccccactcattggagtgaacagtgacgcaagctcaatagacttcataagtgttcatagaattttacaattctgagtgatcttagaaatcatttctgtttttacaaacaaggaaactgaggtccagaaagagcaagcgactttgcttaaagtcgcatcagagagctgagggtaagactcaggtgtcctgactcccagtttagtatcttttgaattttatttctgtaccatttaaaaaaaataattaacactatttgtgcaagtcagtgtttttgaaaattcagtgtcccaataaaaagtggactgcacactaaaaaaaaaaaaaaaaaaaaaaaaaaaaaaaaaaaaaaaaaaaaaaaaaaaaaaaaaaaaaaaaaaaaaaaaaaaaaaa

SEQ ID NO: 118271 - DNA, 1000 bp, Homo Sapiens
cgcgcgctggtgctgcgagaggccgaggacacccaggtcttcggggacctgccacggccgcggcttaacaccagcgacttccagaagctgaagcggaaatattgaagtccagggagggagcgccccgggccgcgtccgccccgtcccacactacgcccccgccccactcccggggcctgctaatctgaggccgatccgggaccggcctccttgcgtctcccattcccaagattgtcccgcctctgccaatccccgccgtccttccagcccacgacctgccgcgccgaggagcggcatctgtcccgtttcccgattgggtctgtcgtctctctccgcctagcgacagattccttctattaagggattggctcgctgagttctaagctctaaatgggtcaactcctttgttttccgcctagcgacaagggatttgctcgcacggcattggctccatcccctagtcgctggacagctctttttttgattggctcaaatcctgtaaagggcttgaccagtctctacatagtcaccgtccgcttttcctgagttctccctcccaattggctccagcttcctgggggcgtggccaagccctcctcttcccagaattggcccggggccttcaatttacgttctttacactacggggactggggtcgtctttgcccacgtcccgacaacttgttccctgaccccctcagggatggccccaaactgtccctgcctctggcaccccctttcattggttccatccatccccacaacagcctgccaatcgaagcccgtccctgcatccaggatggtaccagctcccgcccctcgccccccacctccacaggtgccttaaagggccctcgtccacccaaggtggggggcaggggccctcactctccggccctggtgtgggggagagagtgaggggttgggggatcggcagttgggaggggcgctctgagattaaagagttttacctctgagataaaaaaaaaaaaaaaaaaaa

SEQ ID NO: 118272 - DNA, 1000 bp, Homo Sapiens
aatcctggccttccatcgcgctgaagaggctgccttcagcagcggggagcaagagctctttgtccagttctgcactgtcttcctggaagaccttgttccgtatttaaatcgctgtctccaagtcctttttccaccagctcagatagcacagactttaggcattcctcccactcagctctccaagtacggtaacctagggcatgtgaacatcggcgccattcaggagcccctcgcctttatcctgccaaagagagagacgcttttcaccctggatgaccaggcgctggggcccgagctcacagctccagcaccagagcctcccgccgaggagccacgcctggagcccgcgggcccagcctgcccggagggagggcgagcggagacgcaggccgaaccgcccagcgtggggccctagccggcgtcccctgcctccagaacgcgggctggaccccaatggagaacaggtggtgtggcaggcgagcgggtgggcagcccgcatcatccagcacgagatggaccacctgcagggctgcctgtttattgacaaaatggacagcaggacgttcacaaacgtctattggatgaaggtgaatgactaaagctttgctactggggctgaggattccggataccaagacgcaaacactttcactttgagctgggcaaatcttacttggcatcaacttggatggctcgcatatgacaggaaactggattgccaaggcatggcagactgagctggaggaagatgtcagaaatgtttgccctgaaatcagttacggacaaaatgttggctacaacttgaggagaaaaatcacccccaaaggagtggacatttcctaacaattctgtatggaggaaggtggggtaattgcattcgtctgcagtagacacgagttcctcggacctgtataatctcccaaagccaaggtttggtaataatgtagtccccaaatacctgaaagctgtctttaaaaatgcaggtaagcatgtgactggc

SEQ ID NO: 118273 - DNA, 1000 bp, Homo Sapiens
cttttattccaaggaacaacatcagttcactgttgttggagacatgacaatcattttcatcccaagaacactttaaggaaacattttacaagtatgcttgaaagaatgtcactaactggtccagaattttatcttcttgatttttccagatttctctatgtttttgagaaagatgttaatgttttgccatggtaaaagatttcaaacctcattttttttgttccttttcttgttacttttaagaaaactcatgctctgtttctctgaatcaaatgaagtagaagtttacaaagctaactttcttcttgtctagctattaacatgatttgtcaaatgcatgtttttttcagccaaagccttgtttccatttttgttgatgtgtactcttgctcttttagctagagtgtatgtgaaaataaagaaatacatcattgtattcacaaccatgtgtcttcatttataactttttgtttaaaaaatttttagttcaagtttagttcattgatattatcctctgaatgcagttaaggctgggcagaaattctactcatgtgacatctgccacaggtctattttgaagcttttcttctaatggcaatgtttgtccttaccaggatttaatctatagaattgtctctcaactctgcttttctccagttccagataacgtccttaagaccatctgttcaggggttcacaaaactcaaatttgtgtcattctattttatttattttattttttatttccttccctcataccttgcccattccctctgaatattaggtgtgatgtcaacagcatgttagaaggatcaatgggaaggcaatgattgaaaacatttcaatgaaccttaatagtgttcctttgaggagcacccaggagaatatctggtcatagatctttttttaaatgcagttttataaaaccctaacagcggtgatatcattagactgtatgaatcagttttattacctagtgtacaagtgtcagtcatgtatc

SEQ ID NO: 118274 - DNA, 1000 bp, Homo Sapiens
caccctccgtgtgttagactcttgtccttctgtcctgcccccacagctgctgctcacttatcctgccatactgggaaagggggttcccccacgatggcttattctgggtccagactttccccaggtagggaaagcggaaggtagaaggctttttttgctggctctagggttcttctagttcgaggccttgggtccccatcctctggaaccagggggaggcctggaaggagttcactgtagacccgtcccatggggaaagaggctgcggacttgctgctgctgctgctgccagtggcctcttctgggtgccaggagaggggaaggacctttgtctgggcgttaccaagggctggaaactttacctggtacctaaaggtttcatttgggatcagaccggagacccttgggttctcccgtctcaccacccctttctacagtaagcacttggaagattgtttcagggtgtctcagggtccctctgtaccatctgctgtggaatgcaggaccctctgtgacattctttatcccttcttccccgggttggtggccatggagggtcttgtctgctgtgattcgactctggatgctgtgagcttgatgctggccagggaagcagaggatgtgagaggcagaggcaggctcctggggctgagctccttcctctgcatcattctgggcttggcctggacagcacccgccagtgagagctgtgggcctcaccctctggcagctgagccaagcactgtcattcttggtgccatcttcccctgccgcaccggcagtctcagcccagcccccacctttgggttgtaggttgggctcccaagcaacacagaccactcttccccttgcccctcccccagagggacttgactttctttctggactgtttgtattgaaacaaagtggtgtcaaaataaagcccctgcagggcctggctccctgttggtctgagtgaaaaaaaaaaaaaaaaaaaaaaaaaaaaaaaaaaaaaaaaaaa

SEQ ID NO: 118275 - DNA, 1000 bp, Homo Sapiens
ccgccactttgttggccaacaggctcacagagaagtgttgtgtggaaacaaaaatgaagatgctctttctggctaacctggagtgtgaaacgctctgccaggcagccctcctcctctgctcatggagggcagccctgtgatgtccctgcatggagctggtgaattactaaaagaacttggcatcctctgtgtcgtgatggtctgtgaatggtgagggtgggagtcaggagacaagacagcgcagagagggctggttagccggaaaaggcctcgggcttggcaaatggaagaacttgagtgagagttcagtctgcagtcctgtgctcacagacatctgaaaagtgaatggccaagctggtctagtagatgaggctggactgaggaggggtaggcctgcatccacagagaggatccaggccaaggcactggctgtcagtggcagagtttggctgtgacctttgcccctaacacgaggaactcgtttgaagggggcagcgtagcatgtctgatttgccacctggatgaaggcagacatcaacatgggtcagcacgttcagttacgggagtgggaaattacatgaggcctgggcctctgcgttcccaagctgtgcgttctggaccagctactgaattattaatctcacttagcgaaagtgacggatgagcagtaagtaagtaagtgtggggatttaaacttgagggtttccctcctgactagcctctcttacaggaattgtgaaatattaaatgcaaatttacaactgcagatgacgtatgtgccttgaactgaatatttggctttaagaatgattcttatactctgaaggtgagaatattttgtgggcaggtatcaacattggggaagagatttcatgtctaactaactaactttatacatgatttttaggaagctatgcctaaatcagcgtcaacatgcagtaaaggttgtcttcaactgaaaaaaaaaaaaaaaaaaaaaaaaaaaaaaaaaaaaaaaaaa

SEQ ID NO: 118276 - DNA, 860 bp, Homo Sapiens
gccgtgacgtcaggcgcccggctgctcctcacttgctctgagacaggtgcggcaagtctactgcgggctggtccgggctcctcaggttcagacccgaccgttatccagtcggttcgtggagaggagaggtgcactttacaggtccccgatgaaccaagagaaccctccaccatatccaggccctggtccaacggccccatacccaccttatccaccacaaccaatgggtccaggacctatggggggaccctacccacctcctcaagggtacccctaccaaggatacccacagtacggctggcagggtggacctcaggagcctcctaaaaccacagtgtatgtggtagaagaccaaagaagagatgagctaggaccatccacctgcctcacagcctgctggacggctctctgttgctgctgtctctgggacatgctcacctgaccagaccagcccagccgtcctgtcctgccagctctgctgccacctctgacaggtgtgcctgcccccatctcttctgattgctgttaacaaatgactagctttgcacagacacctctaccttcagcactatgggattctagattaatgggggttgctactgtttaattcagtgacttgatctttttaatgtccaaaatccatttcttattgatctttaaagatgtgctaaatgacttttttggccaaaggcttagttgtgaaaaatataatttttaaattatacattcaaggtagtggccaaatgtaacacatcaatcatggaatgatttctctgctaacagccgcctgtatgtttcaataaatttgtccaaagctccaaaaaaaaaaaaaaaaaaaaaaaaaaaaaaaaaaaaaaaag

SEQ ID NO: 118277 - DNA, 929 bp, Homo Sapiens
cggttgtggtcgctatatataaggtggggaggccgccggcccgttcggttccgggcgttaccatcgtccgtgcgcaccgcccggcgtccaggtgagtctcccatctgcagagacgcggacgcgccggcccgcagttggcctgcggagcgcggtggacggtttggcgcccaccaggcgatcaatactttggatttttaatttctagatttggcaattcttcgctgaagtcatcatgagctttttccaactcctgatgaaaaggaaggaactcattcccttggtggtgttcatgactgtggcggcgggtggagcctcatctttcgctgtgtattctctttggaaaaccgatgtgatccttgatcgaaaaaaaaatccagaaccttgggaaactgtggaccctactgtacctcaaaagcttataacaatcaaccaacaatggaaacccattgaagagttgcaaaatgtccaaagggtgaccaaatgacgagccctcgcctctttcttctgaagagtactctataaatctagtggaaacatttctgcacaaactagattctggacaccagtgtgcggaaatgcttctgctacatttttagggtttgtctacattttttgggctctggataaggaattaaaggagtgcagcaataactgcactgtctaaaagtttgtgcttattttcttgtaaatttgaatattgcatattgaaatttttgtttatgatctatgaatgtttttcttaaaatttacaaagctttgtaaattagattttctttaataaaatgccatttgtgcaagatttctcaaagattaggtatatatttaaatggaagagaaaatatttttatgggagaaaaatacatttgaaccatgaaatttcatcttttaaataacatccagtacagatttctgtgtaaaaaaaaaaaaaa

SEQ ID NO: 118278 - DNA, 1000 bp, Homo Sapiens
cttgcctggtctcaggatacccaccatccttttcctgagcacagcctggatttttatttctgccatgaaacccagctcccatgactctcccagtccctacactgactaccctgatctctcttgtctagtacgcacatatgcacacaggcagacatacctcccatcatgacatggtccccaggctggcctgaggatgtcacagcttgaggctgtggtgtgaaaggtggccagcctggttctcttccctgctcaggctgccagagaggtggtaaatggcagaaaggacattccccctcccctccccaggtgacctgctctctttcctgggccctgcccctctccccacatgtatccctcggtctgaattagacattcctgggcacaggctcttgggtgcattgctcagagtcccaggtcctggcctgaccctcaggcccttcacgtgaggtctgtgaggaccaatttgtgggtagttcatcttccctcgattggttaactccttagtttcagaccacagactcaagattggctcttcccagagggcagcagacagtcaccccaaggcaggtgtagggagcccagggaggccaatcagccccctgaagactctggtcccagtcagcctgtggcttgtggcctgtgacctgtgaccttctgccagaattgtcatgcctctgaggccccctcttaccacactttaccagttaaccactgaagcccccaattcccacagcttttccattaaaatgcaaatggtggtggttcaatctaatctgatattgacatattagaaggcaattagggtgtttccttaaacaactcctttccaaggatcagccctgagagcaggttggtgactttgaggagggcagtcctctgtccagattggggtgggagcaagggacagggagcagggcaggggctgaaaggggcactgattcagaccagggaggcaactacacaccaacctgctggctttagaataaaagcaccaactgaa

SEQ ID NO: 118279 - DNA, 1000 bp, Homo Sapiens
agcagccggggttgggggcagcttgcgggcccaggtggagcgattgcgggtggagctgcagcgggagcggcggcggggtgaggagcagcgggacagctttgagggggagcggctggcctggcaggcagagaaggagcaggtgatccgctaccagaagcagctgcagcacaactacatccagatgtaccggcgcaaccggcagctagagcaggagctgcagcagctcagcctggagctggaggcccgggagctcgctgacctgggcctggccgagcaggccccctgcatctgcctggaggagatcactgctactgagatctagggccctcagcaaccagctctgtagggagctctgccagaggggcagcagctgcagatccacttaggccccagggtccacggatggccccaaaggctgagggccccaaagccacttgtctcctaggatccaggcctctgggcttctgccaagaactcagggtggccctatgacttggaggagcaagatcagaccgctcaaaggtccccgtgttcactgttacccagaggctcttgttactacccacttcattccccaccgctgccagtgccactgccaaccctgttcacaggcgcttccagcccactccagccaggggagcagggaagaagaaggggctccctcctcttcacattccccccgaccccaaagccagagaaagccagatggcaccagctgctccggatgtgcctgcccacattgggggacagggccgggcctgggctcggttcccaggtttgagctctgcagcctctctcctggagtgagggggctgaagtcagaccaaaggaagaactcagaaatgtcttgtttatttgtgtttgtgaccaagcagcctctcccttcacccaggtttatggcctcgttttcacttgtatatttttcacactgtaaatttcttgtacaaacccaaagaaaaaattaaaaaaaatttttttgtttaaaaaaaaaaaaaaaaaa

SEQ ID NO: 118280 - DNA, 1000 bp, Homo Sapiens
ggatcacctgaggtcaggagttcgagatcagcctggccaacatggtgaaatcccctctctactaaaaatataaaaattagccaagtttggtggcatgcacctgtaatcccagctacttgggaggctgaggcaggagaattctttgaacccaggaggcagaggttgcagtgagccgagattgcgccactgcactccagcctgggcaacagagtgaaactctgtctcaaaaataataataataaaaaaaagcttccatctcccagcccttcttgcaagcaagggcaggccatttcctccggtcctggctagtatgaatatgagaagtcactggatgtgactctggggaagatattgtgttcagggatggtttcatgtagccacatctctccacttcttgccttttggacaagtagacatgatttctagacctagaggagccctcctgtgaccataagggtaaaagccgcaagctaagaagagggtggccggaagtcataaccatcttgcttctgtaatctaaaaaatatttaggatagatttaatagaattggcatatttatgtgattgcagcagccctggactatttatttctggatgtcccatacatgaaaaatatgcacttcttactggtacagttttcttttgtttgtttttgtttttggtgggaggtttatttcacctgaatataattcctaactgatgcacttagtatatgtcagtttttataaatgcttcatggatggttgaaatcaatgtattgtattctacaaatgtctgctagatcaagcaaatgtgtttaaaaaccatctacacatttataaatgttgatctgtgatctagcatttattgagagaggtatgttaaactctcccaccatgattatgtattgctgaaaaatctttgtcattctgtcagtttttaaatttatgtatatacatacatatatatgttttgaagcaatgaaattaaatatagatactgacattttttacatttccaa

SEQ ID NO: 118281 - DNA, 1000 bp, Homo Sapiens
cttaggagtaaagtgacccaaacattaaaatgacaggaaagagaaagtagaagcagcaataaatactgccccaactttcctggagcccgaggcctcatccatagctatgatcacttgccctctgaagcttatttttgcttctttggttttaagaattgagaaatatcacattgcccctgatgttttgacagtctcctagtgctcctggtagtgccactaagggaaaaccaaggtgcgcattccttctccctggactttaccttacttgttagtctacgccccactgtttccacccatccccttagccaacctctgtctttttgaattttctgagaatattgtcctatcctcttttatatatggagttctctcctctttatatcctgagactttgacaccagatgtagatatttatctggagctggaaagaaaaattctttttctgtacctcatgcctatctggtaatgtttaatgggttatttctctttgagggtggctttctctggaacattggttagagcagctttgttgtcgtgtttctggattctcttccccattttgcgtaaatattggtcttatatattcttgcctattttgtggcatatgccacataaaaaatgaacctgatatagacaagtactaccttttcaaattctgaaaggctattaccactttaactctttgtgctcctccaaatagctttaaaatgtgggcttttgtgaagaccactttcaaacaagggagcactgaaacctgaattggatactgccagaataggtagttttgaaacaagttaaggacatggtatatgcactctgcattttcattggcagtgtgcccttaaagccctttcagtagatgagggttgtcagggaggagaaatgaagaagctatgttaatttctggtgagtaagacctggggaatgtttggcaatgacaaaagaaataaatgactctcagaaagaaaaaaaaaaaaaaaaaaaaaaaaaaaaaaaaaaa

SEQ ID NO: 118282 - DNA, 1000 bp, Homo Sapiens
aaattgaaaaataaaatatataaacataaataaattaggtagtgtattttgagtggcatcagtctcactcatcttggtgccccggtgtttacaagagccagatggtgtcagaggagtacgcagttgtatgcagttatggttggggggaatgtttgtgagggtcttgaactatttatgagatgatcttgagcttctaattttcattgatgaaattgtggtggtttacagagactaagagctcattctgtcaacagaaacactaatctgtacagagcgctgtctcaggtcatgcattgtcctccaaacccaaaggtttttttcagggttggctagagagcgagtattgtgattttgctgaaaagacaaggtgtgaaggagcaacttcagttgacacaaaatttgaaatgctcacagatcagggaggtgatttcccaaagtaattgcccaagaacctccgttttggaaggattcctttttctgtagaatactttgcctcgatatataagcatacagatgcactttaaatgaaaacccttgattataaattgatagctggtagtgtttcttttgcaagaatgcatttctaaggcaaaaggtaaattattttgtccgtcttttgatgtactttctgattccaggattggatatttattcaaggactattttaaaaatagaaagtaagtttgtagcatgctgtctgaattctggggtaagttccacctcttctttagttgctttcgttttttatgatgtaggacttcctttgatatccctgttggaagtccattagcagtcctttgcatttgccaattcaaggtaaaacagggtcagtgacatctgcagtgtcccagtcatttatttgcatgaatctgcttaaataagttttttgttgctgttttttcttttttatgttttgttcagaatttgtacattcaagttgtacttgttatatctgacatgaatgaaataaaatcttaattacagaaaaaaaaaaaaaaaa

SEQ ID NO: 118283 - DNA, 1000 bp, Homo Sapiens
tatgattctacaatattttgtcacctagctggaagttgcaataaaaattccttatgaaatatatggttttcatctgtgattgaaggaaatcatagaaagtttgctgaaagcaaagggctaagcttatgaaggaatgcctcctttgttacacactcaagaatttgtcagcacacaattaattgcagccatagtacctttttgcgtaacgtttgggatattcagtagcccaggattgctacaaaaaggtcctttgagaaaattaatttgtgcttgcttttatcccctctcagaaagacatcactaaaggcccattaaaaatctggccctaaaagttcaacttttgtagagtttattgttcagagaggtttaatcctatgtggtagtctatataagtgatgtatgagttgagttatgtaaattttgtcattgtagtgtacatggagtgatcattttactaacataaatattttctatgtgtgtttcagtggatgacaatcgagcagcagaagaatggtgtgcctaccctttaatgctgcagtttaagagaacttgtattgtgtcatttcagattgtaggctgagagttgtaaatagtgaaaatttgagtacttctattatttgttttggttagaaagtgaatttaaaaaacaaaccaaactctaaactttctcagattaaaagtcctgagacctgaagattgtaatattcatgtctgtgaagcttttaaacattacacttgagatcagtcatgacttgatattcaggtaaattttcttttccaagaagcttttgaataagcatatttcctccaaaggtctctctctttctctctctttttttgagtgtagattattttaaagcactaattgcattacattggtaactgcaatataaaatagccattattgttttgtgaagcatggttgaaattagctagtggtcccttttgaatttcatgagcctctcaaaaaagaaaaacttaagaaaaaaaaaaaaaaaaa

SEQ ID NO: 118284 - DNA, 1000 bp, Homo Sapiens
atcgtgctgaggagccaggtgtacagccttgtgcctgacaggaccgtggccgaccggcagctgaaggagcttcaagagcagggggagatcagaatcgtccagctgggcttcgacttggatgcccatggaattatcttcactgaggactacaggaccagagtatgtgactgtgtcctcaaggcctgtgatggccgaccgtatgctggggcagtgcagaaatttctagcttcagtacttccagcctgtggggaccttagtttccagcaggaccaaatgacacagacctttggcttcagggactcagaaatcacgcatctggtgaatgctggagtcctcaccgtccgagatgctgggagctggtggctagctgtgcctggagctgggagattcatcaagtactttgttaaagggcgccaggctgtccttagcatggtccggaaggcaaagtaccgggaactgctcctatcagagctcctgggccggcgggcgcctgtcgtggtgcggcttggcctcacctaccatgtgcacgacctcattggggcccagctagtggactgcatctctaccacttcaggaaccctcctccgcctgccagagacatgaagattctgctcatcattgctcagctcctcagagtgggccgggaggggactagaagagctgcatgatggtggctgagacagggtcaccttgggaaggcttgggagccaggatgagtgtcgggctctcgtgtgtgcaaaaggtcagatgtgactgctgctgtttgcctggtttctgacccagtggtggggtttgagcaatgcttctctgcccttccatggaaagtggaaccagaaatggtgccaaggctgtggctgttccctttcgtgtaaaatggtgctgttattactctgtcttgaaataggaaggtgggatttctggggaggctggtgaaggagggcagggttcttttctctacgtgtcatgttaaaattgccaaataaagtacctctgcctgtga

SEQ ID NO: 118285 - DNA, 1000 bp, Homo Sapiens
atgccaagctggccgctcaccccaggaaaggctttcccggctccctgtcgggggctgacggactcagcccgggcaccaaccctgccaacggctgcaccttcggcgggggcctggccgcggacctgagtttacacagcttcagtgatggtgcttctcttccccacaagggccccgaggcggccggcctgagctccccgctgagcttcccctcgcagcgcggcaaggagggctcggacgccaaccctttcctgagcaagaggcagctggacggcctggctgggctgaagggcgagggcagccgcggcaaggaggcaggggagggcggcctaccgctgtgcgggcccacggacaagaccccactgctgagcggcaaggccgccaaggcccgggaccgcgaggtcgacctcaagaatggccacaacctcttcatctctgcggcggccgtgcctcccggaagcctcctcagcggccccggcctggccccggcggcgtcctccgcaggcggcgcggcgtcctccgcccagacgcaccggtccttcctgggccccttcccgccgggaccgcagttcgcgctcggccccatgtccctgcaggccaacctcggctccgtggccggctcctccgtgctgcagtcgctgttcagctctgtgccggccgccgcaggcctggtgcacgtgtcgtccgctgccaccagactgaccaactcgcacgccatgggcagcttttccggggtggcaggcggcacagttggaggtaactaggatttctacctcaaccgcgagacctatgcaaggacggtgtggaccaactcgcgcccgcggcatggtgcccgccggcctgccgggctcccacccctggacggcagaggcaaggacggacgggagctccactgtgaatcggcggcacgcgccgcaggaggctgggactggtccagtttgtactgtcgatagttttagataaagtatttatcattttttaaaaagtaaaaaaaaaaaaaaaa

SEQ ID NO: 118286 - DNA, 1000 bp, Homo Sapiens
tgaggccctgggccgggcagtggggcagtgggcgggggccaagctgctggaccatggctgtgtggagagcagcattctggattcctctgcgggctctgctccccactacgaggtgtttgtggcgctgagggggctgaggaatctgtcagaggaaaatcgagacaagctggaccactgccttcaggaagcctctccccgctacaagtccctgcggttctggggcagcgtgggccctgccagagtccacctggtggggcagggagccttccgagcactccgggcagccctcgctgcctgcccctcctcccccttcccccctgcgatgccccgggtccttcggcacaggcacctggcccagtgtctgcaggagagggtggtgtcctgagtcaagtcctgccccaccgcccagctccccccagaggccacctcgcccctccctctgggacctctccggatggggagtccttggccagggtctctgactctgtgtcacctgacatttgcccatgagagccgctgggccttagagaggccttggcccagctgaccggttctgaagtatgggcctccggggttagcagatgccagcagtgcctgcccgtgtccccatgtcccggcatgaaggacactgctagagagttaccatgcacaccgatggtttcctgtatcacagcccaaagaggttctctggtggccacagctgtgtgctcagtcagtgcactgggcaagctagaagtgttggggggttaatgtccccaggagcagcaaccctgagtcaataaggagcaggacctcagcttcattgtccttgagcaggacaattctgaagtgtattctacataaactctcagaggatgcccagcaggatggagtcccagttgcccgcagcagtaacccactcattcatgtacttcctgcgggggctctcccttccctctcttccccactcccccgccttgggcttcctgggatggctcccaaataaacctcttgcacccag

SEQ ID NO: 118287 - DNA, 1000 bp, Homo Sapiens
tgattaatccagtctgggtcatgaccttttcttcatccaaaacaaggtgatgggaagacaaaaacaatagctactacaaacaataggagtttataattatgtgctgatgtattcgaagatgtgttgacagtcgtgagtgtgtatcctaggaaaggcgagctggactctgtctccatggtggctctcaccccagggacctaggaacagcctgtcaccacacaattacttttataaccctggagatgaaaatctccttgtcctcaaaatacttccagaagaacaaccagatgggaaggaccttggttgggactctttccagttcacttggggcagagggaatttaatggctcacgtagctgaaaaggatgggctagattgggcttcaggctgcatcccaggactccaaacagggatctgtctctttggctctcagctctgctttcatttgagttggctttattcttgggcttcacagtgtggccccacagcaccagttattgataaaaagagctcccctttgctgacagaactgctggatttggttctcattggtccagacgaggaaggtatccagcctcaagtcatcattgtggccaggaagatggaatacaccaaatggacaggcctggcatgtacccacagagactgagagttggtgctggtggttgtggtggcagatgatattacctgaagaagggacgaatgggtgctgggcaggacaaagcatcagctgtccagttcaggcctctcctctttccctggtgtcttcattttcctccgtctccctgctgtcccttaccctctgcccaatctctcattactcctggtcttgggagttgccttctgaggatactccactgggggtacctgagcctggattagagggcagggggaggatattgcctagccaaagtgggtgttcaataaagaaccatttggagatggtaaaaaaaaaaaaaaaaaaaaaaaaaaaaaaaaaaaaaaaaaaaaaaaaaaaaaa

SEQ ID NO: 118288 - DNA, 1000 bp, Homo Sapiens
caccagcacacaggagaagaagcataaatgaagcctctttggggtgaagcctggacatcccatcgaatgaaaggacactagtacagcggttccaaaatcccttctggtgattttagcagctgtaatgttggtacctggtgcagaccaggccaaagttctggaaagctccttttgccatctgctgaggtggcaaaactataatttattcctggttggccagaactgggtgaccaacagctatgaaacaaatttcagctgtttgaagttgaactttgaggttttttctttaagaatgagcttcgtccttgcctctactcggtcattctccccatttccatccattaccccttagccattgagactaaaggaaatagggaataaatcaaattacttcatctctaggtcacgggtcaggaaacatttgggcagctgctcccttggcaggctgtggtctcctctgcaaagcattttaattaaaaacctcaataaagatggccctgcccacactgtgccttgtgtttggggcttgatagagtgtgaaaggtgtgttgcttgaaaggtgtggccttagacactaggagatgatgggtagaagctccttgagaaacctagcagtggccatagagaagtagactgggtatggggaacctaagtcatagttgtaacctacagctgattggtaagaactatgggccagacatttaatctctccatctatgaaatagtccattctcatttatctagcttaggttatgggctcttcttttagttggatattcacatttatctttcagtgttaactgggtatcagttatgagtctactactgtataatggcatccaaaagaattttaaagtacctcggtttatagggatttacaattcagtagaaacttgttattcatgtgaaacagtgaacataatatctaatgatgtggagcaagtacattaaaaacaggaaggaagagatctgtgattaaactaaaggccctttcacacct

SEQ ID NO: 118289 - DNA, 1000 bp, Homo Sapiens
gcgtgcgcaacaaactaaagcggctcatcgcgaagagaccgcccttacaaagcctgcaggagcggggtctgctccgagaccaggtgttcggctgccagttggaatcactctgccagcgggaaggagacacggtgcccagctttttgcggctctgcattgctgctgtggataaaagaggtctagatgtggatggcatttatcgggtgagcgggaacttggcagtggtccagaagcttcgctttctggtggacagagagcgtgcggtcacctccgatgggaggtatgtgttcccagaacagccaggacaagaaggtcggttagatttggacagtactgagtgggatgacattcatgtggtcaccggagccctgaagctttttctccgggagctgccccagcctctggtgccaccactgctgctgccccatttccgtgctgcccttgcactctccgaatcagagcagtgcctctctcagatacaagaattaataggctcaatgccaaagcccaaccatgacactctacggtacctcctggagcatttatgcagggtgatagcacactcagataagaatcgcatgacaccccacaacctgggaattgtgtttggaccaaccctgtttcggccagagcaggagacatctgacccagcagcccatgctctctacccagggcagctggtccagctgatgctcaccaacttcaccagcctcttcccctgatgcagggaaggaagaagagaaaacatatttccggtcatctctggtggtgagaggctggtgttctgttttgaggatatccctttaaatctcccaaatgactgtctctatcttcatgagtgtgacttgaggtgttgggatgggtgagggagcttctctaaagaggaaagtgagtggattaacccctgcttctcttcttgttccctgttatcattcctccccaacataataatacataaagtggcatggtatttttaaaaaaaaaaaaaaaaaaaaaaaaa

SEQ ID NO: 118290 - DNA, 1000 bp, Homo Sapiens
ggaattacataaggataatgaggcccaactgaaaccaagtttcagtctgccttacctttacccgtccttgagaacagcggtccaggagaatcaggcagtctgtggcctcctgtagcagggcgctcttaacagactcaggtgtaaggtttggatcccttgctacatcacaaatcagtttcaagagggccttcagtaagaccacaagtctgcaggaaactctggaatcaggaagaaaagctatgttcatactctaaatctggatattaaaattggaagagacttcaaagactgtcaagtggaaagctatcatttcctaaattaaggaacttaggtcaaagttaaatgaaaaagacctaaaaacagaaccaaagacagcctctagatttcttaccctcaagtctcctgttagcatactgcctatacacacagacacaccctctgccacactgctctcttccttccagaagcttggttctactgtaagcaacagctccttcatgggctgagaaggggaaaccaggatctccccaaccaagggcctatacttttatttttcaactctattaactgaactatgcttggagagagccctgaatcctttaactttaatgccatcttaggcctggaagttagagtgagggaaatgagcttggcttctgggactgtgtcaagttgaattttctgtcatttaatttcagatcctagctcatcatcagtgaagtccagcctacttacttgtaactattaacctttctaaaagttttcatcgccttggtaaagctccagaaatggacaatgctagtgactgcacaatattgtgactgtacttaatgccactgaactgtacactttaaaatggaaaatttatatgtatttttaccacaataaacaaaaaaccctaaaaaaactttaatgaaaggtggaaaataatttaacttacaatgtgaaaatacaatgtgaaatgtacaataaatcatatttatggaaaaaaaaaaaaaaa

SEQ ID NO: 118291 - DNA, 1000 bp, Homo Sapiens
aaaaaattggtgtcacatttgtaaaagtaattttaatagttaatcatctctgagagtaacctgtattttaattgttgaaacttaaccaaaataagatactgtctcagctagggcttgtcatttgtgtatttagtgttaagataggaatgctagtgtctctttaattaattggaaatagatggaggctaaaaatgaaggtttttctttgaaactgaattaacttgggaatatttgttgttaaaaacttctttttgcccaaaataactcattttgtattatctgaaaatatataatttctggtcatgtgtatgttaaaatagaaaattttgaggaaaaatggaaatagggtggaaaagtactcggtaaacagtagtaaccaaatattttcactccagatttgtgttttctctggcacagagtagatcttttgggaaatatatatgaaagtggattaagtttgactacccttatgttagccacatctggatgagaacagttacaaagagtttggtctctaagttgatttgtacccagtgggtcaacttctgcaaaattccgtaatggtgtattagtattagaatagtgaataaaatgggaaagttatacatgtatacttattatcttgctcagtattttatctcacttgttctagaattttctgtaaaccctgctactgggtttgaagagttttagtcatcctttaacaatttttaaaaatttagcttctagattccatttggtaaggaaatcaatattggaagtattgctaaaatcttataatatgaaaagagatccactaatgtagcttaaggttattagatttgggcttttaatcatggaataatcttatgtattggtgtaagagttgatgaatgactttagctgtgtgaatatataatagtcaaactgcaaacattttgcatcccttttgtgacctaatttacagacatttaaattgtgttgcagttctgctttgccgtttaataaaaagctatttcag

SEQ ID NO: 118292 - DNA, 1000 bp, Homo Sapiens
agcgaggagccagcgacctcagggggccccccagccgtcaccctgcatggcatctcacccgacgtcttcactcacgtgctctactacatgtacagcgaccacactgagctgtcccccgaggcagcctatgatgtgctgagcgtcgccgacatgtacctgctgccaggcctgaagaggctgtgcggccgcagcctggctcagatgctagacgaggacactgtggtgggtgtgtggcgcgtggccaagctcttccgcctggcgcggcttgaggaccagtgcactgagtacatggccaaggtcattgagaagctggtggagcgggaggacttcgtggaggcggtgaaggaggaggcagcggctgtggcagcccggcaggagacggactctatcccgctggtggacgacatccgcttccacgtggccagcacggtgcagacctacagcgccatagaggaggcgcagcagcgtctgcgggcactcgaggacctgctcgtgtccatcggtctggactgttgagcccctggctgggcagccccaggggccaggagctctcttggagacaagcatgtgtatgcgtttgtgtgcagctcttcttcctgctccctgcacattgagggcttcatggggggtgcgaggggctcagtggggcttctcttccctccatgagcctggagaccccaggggaggatccatttgggatgagccccctccccccaatgcacaagccagcccccaagaccctgggggtggacaccactcagggaaacctggggtgggggtgggctttggtcttagcactttccttctccagatcccccctacccaccccagtcccaaatccagtcctctggcccttgcctagccctgaattgcttctctaagctggtgttcccatgcacagggccattcaggaagggctgggggagtgtgtgtggcaataaagcttgaaggcaccgtgggaaaaaaaaaaaaaaaaaaaaaaaaaaaaaaaaaaaaaaaa

SEQ ID NO: 118293 - DNA, 1000 bp, Homo Sapiens
tcgcctgtgtggcaagagtagaaggagcatcgatgcagccttctttgaatcctggggggagccagtcatctgatgtggtgcttttgaaccactggaaagtgaggaattttgaagtacaccgtggtgacattgtatcattggtgtctcctaaaaacccagaacagaagatcattaagagagtgattgctcttgaaggagatattgtcagaaccataggacacaaaaaccggtatgtcaaagtcccccgtggtcacatctgggttgaaggtgatcatcatggacacagttttgacagtaattcttttgggccggtttccctaggacttctgcatgcccatgccacacatatcctgtggcccccagagcgctggcagaaattggaatctgttcttcctccagagcgcttaccagtacagagagaagaggaatgactgcatgaatctacctgagttgctggcattgggaggccagttactggaaaggaatggaaaaaagaagcctccaaaagggaaaaacttctgacaatatgatgctgtgcgagaaatatttacagcacattaaaacgatctgtattattaaataaataattttcaaatgttaaacagtattaaatggcacctgattttgtgttaaattttagttccctgttgtttaatgcccccaaaatatgcagacctttgggaatataaaaatattgcacccacatgtcttaatggggctgaatttcagattatttgttacatatacttattatattgattgttgggttttgattttggtgcttgctgctgaaataaattgaaaattaatattcaataaaaatgatgtatttgtcacttgctgttaaggtagaacaagaaggaacacatattatacacataatgatgggaattacattgtgatttgtactatctacaaaggagtaactgccagttaggaagaacagtaaacagtgatgttaaaataaaacaatgatttgtaaaaaaaaaaaaaaaaaaaa

SEQ ID NO: 118294 - DNA, 1000 bp, Homo Sapiens
tcccaaatgtgtacctggacccctcgaaacagaggactctacgaaatgacaggctgcccctgccctgaattagggggaaacattccaggccaactctagctcctttctcaagctacaaagtggtgaacatggttctcaactccttaatttatactctctcaaatgcccaggatactctacccacttaagaaccttgccaacttctgggggttgggcatggtggctcgcgcttgtgatcccagcactttgggagactgaggcggatcacctgaggtcaggagttctagaccagcctgaccgacatggagaaacctcgtctctactgaaaattcaaaattagcctggtgtggtggcgcatgcctatagtctcagcctccagagtagctgggactgcgggcgccccaccaccacgcccggctaattttttgtatttttagtacagacggggtttcattgtgttagccgggatggtcttgatctcctgacttgtgatccgcctgcctcggcctcccaaagtgcttggattacaggtgtaagccaccgcaccccgcccagcctggcagattttatttaatcatttgtagcttcattttcctcgtctgtcaaacagggatactgtaatacaacctcagtgtgtcattgggcagtttaaatgaatgtacattcctgaggcatcagaactttgttcactgttatatacccaatgcctagaagaggacctgcacatagcaggtgctcagtaaatgtttgttgaatgaatgattaagtgcatgtaaagcattaagcatagcgcctggcagtaagtgctcaatattatgacttcttatattaacacgttttacatataaagaaatggaggcaagaaagcatttcctttggggtttagagcgcttaagttgttcctctgttatcatgcctgaattcccccgcccctcagttacctggggaagagtaaaggcaagaattcttaccagcattagtcatacatcctcctgatagg

SEQ ID NO: 118295 - DNA, 1000 bp, Homo Sapiens
cagtatcagggatctactgtctttgttcaaaggtcaaataaaaacctagtctccttttattctactttctattcttagctagaatgaaactcagcatatatacacttctggacataataatattgaatagtaattacctttactagatgaaagaaattttcattacaaacttaaatcatgtaaaactcaacaactcagattcctggacctggtgtcctggttgggtccaaggtgattttacagaagaaaaaaacaactcaagcattctggtggcaacatagagattgtaggctgcttctaagaaagttattaacaatttggaaattcctaagtaggatgagagttagtaactggatacgagtgaagtttatatccaagttcagactcaaaggcattattatgatttgcttcttcccatgtcttccatgtcctgcttctcaaagtttttctcatccatcacactcctgccttaactgctctgagtatgcatttgttttcaattcatctttatttcaatctgtttaacttttgaatcgcatgggaatacgcacattaagttcctttctaaaataaggttttatgaagctgagtttcacgataagtgtcttgctattttttgagatgttttatggacaaagaaaactttacagatttatatgtattttgctgcaccagtaaatggaccattaactagggcccacctttaacagagcacccctttgaaagttttataggtatgaaatatatgtagatatttgtaaagggttttaattttttttttgatggggtgctgtgtaaatcttgtatttataaatgtaatgaaggtattgacagaaaaaaatatatacaacttttataaaggattgtgtactgactgaatacatttaaaagaaaatatattttgaaacctgttctgctatgaacagagataacatatctttttactatgctattggtttttaggttaagcttcctaatgcataataaatttacagtggtt

SEQ ID NO: 118296 - DNA, 1000 bp, Homo Sapiens
tcacttttttgctctgtaaatttggaagtgtcatgggtgtctgtgggttatttaaaagaaattataacaattttgctaaaccattacaatgttaggtcttttttaagaaggaaaaagtcagtatttcaagttctttcacttccagcttgccctgttctaggtggtggctaaatctgggcctaatctgggtggctcagctaacctctcttcttcccttcctgaagtgacaaaggaaactcagtcttcttggggaagaaggattgccattagtgacttggaccagttagatgattcactttttgcccctagggatgagaggcgaaagccacttctcatacaagcccctttattgccactaccccacgctcgtctagtcctgaaactgcaggaccagtttctctgccaaggggaggagttggagagcacagttgccccgttgtgtgagggcagtagtaggcatctggaatgctccagtttgatctcccttctgccacccctacctcacccctagtcactcatatcggagcctggactggcctccaggatgaggatgggggtggcaatgacaccctgcaggggaaaggactgccccccatgcaccattgcagggaggatgccgccaccatgagctaggtggagtaactggtttttcttgggtggctgatgacatggatgcagcacagactcagccttggcctggagcacatgcttactggtggcctcagtttaccttccccagatcctagattctggatgtgaggaagagatccctcttcagaaggggcctggccttctgagcagcagattagttccaaagcaggtggcccccgaacccaagcctcacttttctgtgccttcctgagggggttgggccggggaggaaacccaaccctctcctgtgtgttctgttatctcttgatgagatcattgcaccatgtcagacttttgtatatgccttgaaaataaatgaaagtgagaatccaaaaaaaaaaaaaaaaaa

SEQ ID NO: 118297 - DNA, 1000 bp, Homo Sapiens
gacagtatttctttctgtctgtccctttggcccagacccagcctgaccaacgatgagcatttcttaggctcagctcttgatacggaaacgagtgtcttcactccagccagcatcatggtcttcggtgcttcccgggcccggggtctgtcgggagggaagagaactgggcctgacctacctgaactgactggccctccgaggtgggtctgggacatcctagaggccctacatttgtccttggataggggaccggggggggcttggaatgttgcaaaaaaaaagttacccaagggatgtcagttttttatccctctgcatgggttggattttccaaaatcataatttgcagaaggaaggccagcatttacgatgcaatatgtaattatatatagggtggccacactagggcggggtccttcccccctacacagctttggcccctttcagagattagaaactgggttagaggattgcagaagacgagtggggggagggcagggaagatgcctgtcgggtttttagcacagttcatttcactgggattttgaagcatttctgtctgaacacaagcctgttctagtcctggcggaacacactgggggtgggggcgggggaagatgcggtaatgaaaccggttagtcaattttgtcttaatattgttgacaattctgtaaagttcctttttatgaatatttctgtttaagctatttcacctttcttttgaaatccttcccttttaaggagaaaatgtgacacttgtgaaaaagcttgtaagaaagcccctccctttttttctttaaacctttaaatgacaaatctaggtaattaaggttgtgaatttttatttttgctttgtttttaatgaacatttgtctttcagaataggattgtgtgataatgtttaaatggcaaaaacaaaacatgattttgtgcaattaacaaagctactgcaagaaaaataaaacacttcttggtaacacaaaaaaaaaaaaaaaaaaaa

SEQ ID NO: 118298 - DNA, 652 bp, Homo Sapiens
cccacccacggccggccgcggagccgagtgctgacccgggtgagaggttcccgcggctcagggaagatggcggcagccgtggtgctggctgctgggttgcgcgcggcgcgcagagccgtggcggccacgggggtgcgcggggggcaggtccgaggagctgcaggtgtgactgatgggaatgaagtggccaaggcccagcaggcaactcctgggggagcagccccaaccatcttctcccggatcctggacaagagcctcccagctgacattctctatgaggaccagcagtgtcttgtgttccgtgatgtggcccctcaggctcctgtgcacttcctggtcattcctaagaagcccattcctcggattagccaggctgaagaagaagaccagcagcttctaggacacctactccttgtggccaagcagacagcaaaggctgagggcctgggagatggataccgacttgtgatcaacgatgggaagctgggtgcacaatctgtgtatcatctgcacattcatgtacttgggggccggcagctccagtggcctccaggttgaacctgccaactgattaaaggacaccagactctggatgcttggatggaaagggaaaaatggaccctgtgatgctaataaaactgttctcccttaa

SEQ ID NO: 118299 - DNA, 1000 bp, Homo Sapiens
ctgtcgtccggtgcctggaaaccattgtattttttggtctgattttgtagttgtttgagaacttaagtctggtccctcacactccatgcccagaagcagaaatgagtaaagtttgttttatcttttcttaatatgacaattattgtgttggttcaacttatgttgtactttaattagaagaaatttggccgaaaatacaaggaaaatatacaaatgcaagtaattttttttaaacttccctgaaagcagggtctaaagaaattaccaaccaacttagactggatctagaagaaaaggaagggtctttgcagtcttaggactcttccgttccgcgacgtaggtgttaggataacagccataaatggttgtaagactttgggctcagataagtagacttaagttcaaattttgacttattttacaagtgtgtgatttttggcaagctcatcttcctaaaccatgagctccttatttgtaaaggggacattagccactctccagcaacagccctggtacttcttcagtcctgggatgggacgtatgattagcctaagcgaaccagaaaatccaggcccgtgaccagtgacttgatcagggctggcgatatatctaggtaggccaaccaggtggactcagtatttttgtgggtgctactggaaaatttatttaattctaactgaatgtagaaccagcaacagacatgaaatggcagttgtattgctgtcttatcatgaggtgagggcctgaagctatggtagccaccctgtgaaccttggaaggagggttctacaggaactggcagagctgagactgggacgcaacccatgtcctggtgacgtatttgagtcctgaggctggccctcctgttagtcttttctcttactggcttcagccagatggggtctggttttctgttacttgcaacaggaaaaattggaatgatatctatgcatgctattaccgccttatggctgtggtgagattaaaacatgatactgtg

SEQ ID NO: 118300 - DNA, 1000 bp, Homo Sapiens
tttaaatgtgggcaaaaaggcattttctccaagattttaaaactaattcttatttttaaatggtttaccaaaatttgtcagtacattttacgtgtagaagcattttaaaaatcatttctagcaagcacttgacatctagtcagctctctactcctttattttgttttatcaaaagattaagagctcctttctttgaataaaataatttctcataattaagcagtagaagatctatcttcacaaagtatgagggatgccagatgttgataaacttactctttctgaatctggacaaagtcgacttaacagatttttctgatgagcatgttttatgaatcctccattgtgctccattctatcacatgtgcatttttcatgttaaactgcaattacttaatctcttcccctatccttctaaattaattttctgaagttggagtgtagtcttttcccccttaggctatgcattaatcgaagctttcttttcaccatgactttataatgtctagtaaacaatatttctacttcccacatctttgctttacacagtcaccttgcccttccttccaccaccgaagaaaaaagatggtcatactaacaggtgaaatgtacaaggtgtctgtgtgttttgtgtagcttcagagttagattgaaattaccaggcacagatttagtcttgtcattttgtttacacattggggaaaacaattcagtttattaaacgtttcatgtaactgcacccaagttttgccaagctggaaacttggaccttttctgtgtagtgactttttaattatagttttcataacctggagatcagactgttgctttcgcatgatgtatgtagtgtctcatgactggagtttgctttgttttatagtatctgtactccttgtatttttcaagagctattttgtaaacagatgatgtatttctccattgaaaacacaataaaaaaaaaacagcacaaaaaaaaaaaaaaaaaaaaaaaaaaaaaaaa

SEQ ID NO: 118301 - DNA, 869 bp, Homo Sapiens
gccctggccgtggcgaaagagccggcggagccggagacccgctcccggagacgccgcctcgcgatccccgcgcgggcgggaccgggcggccggcatcatgaccctgtttcacttcgggaactgcttcgctcttgcctacttcccctacttcatcacctacaagtgcagcggcctgtccgagtacaacgccttctggaaatgcgtccaggctggagtcacctacctctttgtccaactctgcaagatgctgttcttggccactttctttcccacctgggaaggcggcatctatgacttcattggggagttcatgaaggccagcgtggatgtggcagacctgataggtctaaaccttgtcatgtcccggaatgccggcaagggagagtacaagatcatggttgctgccctgggctgggccactgctgagcttattatgtcccgctgcattcccctatgggtcggagcccggggcattgagtttgactggaagtacatccagatgagcatagactccaacatcagtctggtccattacatcgtcgcgtctgctcaggtctggatgataacacgctatgatctgtaccacaccttccggccagctgtcctcctgctgatgttcctcagtgtctacaaggcctttgttatggagaccttcgtccacctctgctcgctgggcagttgggcagctctactggcccgagcagtggtaacggggctgctggccctcagcactttggccctgtatgtcgccgttgtcaatgtgcactcctaggcttggtgtctcagacattgatgtaccttttccctgcctcgctccaggttttagtgaagtaaacagtatttggaaagttaaaaaaaaaaaaaaaaaa

SEQ ID NO: 118302 - DNA, 1000 bp, Homo Sapiens
ccgccttcagtgaaaagacagtgacatcttggggcttagaaagggccacttgtaagccaggcgtggtggctcacgcctgtcatcccagcactttgggaggccaagacaggcggatcacgaggtcaggagatcaagaccatcctggctaacatggtgaaacaccatctccactaaaaatacaaaaaattagccgggcgtggtggcgggcgcctgtagtctcagctacttgggaagctgaggcaggagaatggcgtgaacccaggaggcagagcttgcagtgagccgagatcgtgccactgcacttccagcctgggcgacaaagccagctgtgtctgggcgcggtggctcatgtctgtaatcccagcactttgggaggctgaggtgggtggatcacttgaggtcaggagtttgagaccaccctggccaacatggtgaaaccccatctctattaaaaatacaaaaaattagctgggcatggtagcggttgcctgtaatcccagctacttgggaggctgaggcaggagaattgcttgaacctgggagctggaggttgcagtgagctgagatcgcaccactgcactccagcttgggcaacagagtgagactctgtctcaaaaaaaaaaagaaaggaaaagaaaggaccacttgttatagaaagcctgtcttttaaggtagctctggaccttttcagaggcagccaaattgcccctcatggttcgtcccccacatccccgcctgcctggcctaagtcctccttccccctccccaacagttaaataagtctttgtctccattacaaaacaaatctcagagctaccttcaaagaagagccagccctcagttggtgaatgaagatactttgacattttcctatgagcatggtgaaacaggtttaatttgtattaaatagcttgaagcaatccttattgggaattacaaggtggaattttagtcacaggaaaataaagcatttcacaagctacttactttcatgaacaaa

SEQ ID NO: 118303 - DNA, 904 bp, Homo Sapiens
cctcaggggggccagattgcgatcgcgatgaggcttcggaaccagctccagtcagtgtacaagatggacccgctacggaacgaggaggaggttcgagtgaagatcaaagacttgaatgaacacattgtttgctgcctatgcgccggctacttcgtggatgccaccaccatcacagagtgtcttcatactttctgcaagagttgtattgtgaagtacctccaaactagcaagtactgccccatgtgcaacattaagatccacgagacacagccactgctcaacctcaaactggaccgggtcatgcaggacatcgtgtataagctggtgcctggcttgcaagacagtgaagagaaacggattcgggaattctaccagtcccgaggtttggaccgggtcacccagcccactggggaagagccagcactgagcaacctcggcctccccttcagcagctttgaccactctaaagcccactactatcgctatgatgagcagttgaacctgtgcctggagcggctgagttctggcaaagacaagaataaaagcgtcctgcagaacaagtatgtccgatgttctgttagagctgaggtacgccatctccggagggtcctgtgtcaccgcttgatgctaaaccctcagcatgtgcagctcctttttgacaatgaagttctccctgatcacatgacaatgaagcagatatggctctcccgctggttcggcaagccatcccctttgcttttacaatacagtgtgaaagagaagaggaggtaggggccaagcccccaccccatcccactccccttccctccccagatatttatgtgaaatgaactgcagctttattttttgaaataaaaacttttaaaaagcaaaaaaaaaaaaaaaaaaaaaaaaaaaaaaaaaa

SEQ ID NO: 118304 - DNA, 1000 bp, Homo Sapiens
caaagttgagtatctcctatctgtgtcctcatacatactgccgcctgaggtgccatggcccccaagccgggggccgagtggagcacagccctgtcccatctggtgctgggagtggtgtctctgcacgcagccgtgagcacagccgaggcaagtcgaggggctgctgctggcttcctgctccaggtcttggctgccaccaccacgctggccccagggctgagcacacatgaagactgccttgctggagcctgggtggccaccgtcatcggccttccccttctggccttcgatttccactgggtgaatggggaccgctcctctgccaacctgctcctgggaggaggcatggtgctggcagtggctggcggccacctcggccctgagggccgctctgtggctggtcaggcaatgctgttggtggtcgcagtgaccatcctcattgtagctgtcttcacggccaacacttatgggatgtgggggggggcgatgctgggtgtggcaggcctcctgagccggctggaggaggacaggctgctgctgctaccgaaggaggatgtctgtcgctgggccttggctgtaggcagctgggcttactgccgggccctgcatacacagcgcctccagtgggagtgacagttggatacagccaggcagggtttctgccctgccgaacactttccctcccacctgcctgctcctggcgccttctccctaggggtagactcttctgcctactgaagtgggtttgctgcacattgactggtcaggggcagagtctgggtgctgtcctttggccacgtgtggggacttgtctagaccagaatgaaagggacagggtcccagacacgtttgggggtcctgattctgggctggacacggttgtggatccagagaagaggcctagtctccaataaatcttaggaattttgcaggaaaaaaaaaaaaaaaaaaaaaaaaaaaaaaaaaaaaaaaaaaaaaaaaaaaaaaaaaaaaaaaaaaa

SEQ ID NO: 118305 - DNA, 1000 bp, Homo Sapiens
tggcaagaagtccaagctggagttctccatttacccggcgccccaggtttccacagctgtagttgagccctacaactccatcctcaccacccacaccaccctggagcactctgattgtgccttcatggtagacaatgaggccatctatgacatctgtcgtagaaacctcgatatcgagcgcccaacctacactaaccttaaccgccttattagccagattgtgtcctccatcactgcttccctgagatttgatggagccctgaatgttgacctgacagaattccagaccaacctggtgccctacccccgcatccacttccctctggccacatatgcccctgtcatctctgctgagaaagcctaccatgaacagcttactgtagcagagatcaccaatgcttgctttgagccagccaaccagatggtgaaatgtgaccctcgccatggtaaatacatggcttgctgcctgttataccgtggtgacgtggttcccaaagatgtcaatgctgccattgccaccatcaaaaccaagcgtaccatccagtttgtggattggtgccccactggcttcaaggttggcattaattaccagcctcccactgtggtgcctggcggagacctggccaaggtacagagagctgtgtgcatgctgagcaataccacagctgttgccgaggcctgggctcgcctggaccacaagtttgacctgatgtatgccaagcgtgcctttgttcactggtacgtgggtgaggggatggaggaaggcgagttttcagaggcccgtgaggacatggctgcccttgagaaggattatgaggaggttggagcagatagtgctgacggagaggatgagggtgaagagtattaacctgtgtgctgtacttttacactcctttgtcttggaactgtcttatttttgttctgtaaatgtctattgccgtaaattgttaataaaattgatgtttccatttcaaaaaaaaaaaaaaaaaaaaaaaaaaaa

SEQ ID NO: 118306 - DNA, 1000 bp, Homo Sapiens
caaagcgcccatccacatctggaaagtcggagccgcagcctgctgcaccgtttccgctctgggatcttgtgagttacttttttaggctgtggtttggtgaaaggaaccaacacattaacgatttttcccccagaagccactgaataattctttttggtgtatttttgccttcctgttggctgtctggccttggagcaggtcgggagagtagagtacataatcagtgccacacagaggcagggcgtgtctgagagactaatgcctgtcctgcctctggcctgtgtcctgggtgtgtaccatacctgctgggccagtcccacacatttccaccctgcccctggagcagcagctttgataccatgggtgtcccttgagtctgagctagagtgtgtccccgataaactgtgagacctccctgttcttggtgaccccagttgggctttggcccctccagcaaccttgtgtcccagccctgcccttcttcccaccccctcaatctgctagtccctgaagcctttaaccaaacgggagtgggcacagaaagccttctcctggcaacaggacaagggctgcccgcgtgtccagccctgttgctctcctggcgctgagaggtgggtccaagcagagttgatcagtccctgcctgccctgcctaggtctagccaggggaggttgtgtgtgtgggagaagaccccgggatctgctggggtgggatggaggttattaaagatctaagtgaggaggggctggggtttggatgcggggtgaggcccgagcgctcacacttcgtgtagggcgggcaggggcctgacctcttgcagggcagtggccttggtgccctacccctgccctgcgcagtatttattgctaaattattgtccaggaggggcagcactgggcctggccccccgggtatttattgctgtacatagtgtatgtttgtgatatataaggttttctttattttgtatatgatcaataaaccttttaaagagaaaaaa

SEQ ID NO: 118307 - DNA, 1000 bp, Homo Sapiens
ggaccaaatcttctgattctgacctgtccccgcctcgaaggagtcagcctcctggaaagaaggctgcacacatgtattctggggctaaaactgggttggtgttaactgacatacagcgagaacagcaggagctcaaggaacaggatcaagaaaccatggcatttgaagctgaatttcaatatgctgaaaccgtatttcgagataagtctggtcgtaagaggaatttgaaactcgaacgtttagagcaaaggaggaaagcagaaaaggactcagagagagatgagctgtatgcccagtggggaaaagggcttgcccagagccggcaacagcaacaaaatgtggaggatgcaatgaaagagatgcaaaagcctctggcccgctatattgatgacgaagatctggataggatgctaagagaacaggaaagagagggggaccctatggccaacttcatcaagaagaataaggccaaggagaacaagaataaaaaagtgagacctcgctacagtggtccagcacctcctcccaacagatttaatatctggcctggatatcgctgggacggagtggacagatccaatggatttgaacagaagcgctttgccaggcttgccagcaagaaggcagtggaggaacttgcctacaaatggagtgttgaggatatgtaactttcctgaggctgtgggggtggctgggctgtggtagtgggcataggcagcgagatatccagtggtaacagttgtctgtgctaataattggagcccacacagaccagcaacttgttgaatgccagttttgaccacagaagaatattcgagacctgatgtttggactgaggtacctgtacttcttgggtgtgacagcaccggctgttgctggctttcagaggaagcattgatttctcattgaccagggtttgttcttggtagggtttttctttttcttttttaaataaacatgtatttatttttttaaaaaaaaaaaaaaaaaaaaaaaaaaa

SEQ ID NO: 118308 - DNA, 1000 bp, Homo Sapiens
aactccccaaagtggacaagaccaaagaggggtccattgtggatccactggtgaaagtgcagatctttggcgttcgtctagacacagcacggcaggagaccaactatgtggagaacaatggttttaatccatactgggggcagacactatgtttccgggtgctggtgcctgaacttgccatgctgcgttttgtggtaatggattatgactggaaatcccgaaatgactttattggtcagtacaccctgccttggacctgcatgcaacaaggttaccgccacattcacctgctgtccaaagatggcatcagcctccgcccagcttccatctttgtgtatatctgcatccaggaaggcctggagggggatgagtcctgaggtgggcatttcacgggaagggttggtatgctggctttagacggggagaaacatctggaaggatgctcgagagaacaaatggaggtggtgaaaatcaagctttggattgtgcattcctaggcacaaaattacctcattcttcctaacaagcaatctgggacctgattttccaccttttttctcttttcttcccttcctttgttttcataagcctttggtatctttcctgcccttttcctttgtgtactctatactggagttcccttcttcctcttgctgtaggctcaatcccataccgacatctacaactaatctttcccatcaactctgtgtgaaggcaggttgcaactagaaattcagaggggcttggaatagagaaacctaaagaagcatcatcccctccatccccaacttcctcaaagcccaaagccaagggaaggataaatcaaggctcaaggcttccccagcaaagattagggaaagagacttgaccccaggactgtactacgactcttaagagaacactgcacagcactcaaagtcccccactggactgcttcctccttagccccactggtataaatacatctctctccaatttggcaaaaaaaaaaaaaaaaaaa

SEQ ID NO: 118309 - DNA, 1000 bp, Homo Sapiens
ctcccctctccccacttattctcctatttggaatcttcaacttctgaagtgaatgtggatacagcgccactcctgccccctcttggccccatccatggactcttgcctcggtgcagtctccactcttgacccccacctcctactgtcttgtctgtgggacagttgcctccccctcatctccagtgactcagcctacacaagggaggggaacattccatccccagtggagtctcttcctatgtggtcttctctacccctctaccccacattggccagtggactcatccattctttggaacaaatcccccccactccaaagtccatggattcaatggactcatccatttgtgaggaggacttctcgccctctggctggaagctgatacctgaagcactcccaggctcatcctgggagctttcctcagcaccttcaccttccctcccagtgtagcctcctgtcagtgggggctggacccttctaattcagaggtctcatgcctgcccttgcccagatgcccagggtcgtgcactctctgggataccagttcagtctccacatttctggttttctgtccccatagtacagttcttcagtggacatgaccccacccagccccctgcagccctgctgcaccatctcaccagacacaaggggaagaagcagacatcaggtgctgcactcacttctgccccctggggagttggggaaaggaacgaaccctggctggaggggataggagggcttttaatttatttctttttctgttgaggcttccccctctctgagccagttttcatttcttcctggtggcattagccactccctgcctctcactccagacctgttcccacaactggggaggtaggctgggagcaaaaggagagggtgggacccagttttgcgtggttggtttttattaattatctggataacagcaaaaaaactgaaaataaagagagagagagaaaaaaaaaaaaaaaaaaaaaaaaaaaaaaaaaa

SEQ ID NO: 118310 - DNA, 1000 bp, Homo Sapiens
ctcaaaacacctacccagctggcggcaacccgcgatctctagagaacagcctggatgaagaagtgaccatcgagatcgttctctccagctctggggacgaggactcccagcatggcccgtactgcacagaagagctggggagccccacagagaagcagcgcagcctccccgcctcccaccggagcagcaccgaggccggaggcgaggtgcagacctccaagaagtcctacgtgtgtccgaactgtgggaaaatcttccgctggagggtcaacttcatccggcatctgcggagccgcagggagcaggagaagccgcacgagtgctcggtgtgcggggagctgttcagcgacagcgaggacctggatgggcacctagagagccacgaggcccagaagccttaccggtgtggtgcctgcgggaagagcttccgcctgaactcccacctgctctcccaccggcggatacacctgcagccggacagactccagccggtggagaagagagagcaggcggcatccgaggacgcggacaagggtcccaaagagccgctggaaaacggcaaggccaaactgagcttccagtgctgtgagtgtgggaaggccttccagcggcacgaccacctggctcggcaccgcagccactttcacctgaaggacaaagcccggcccttccagtgccggtactgcgtcaagagcttcacgcagaactatgacctcctccgccacgagcgcctgcacatgaagcgccgttccaagcaggctctgaactcctactgagcctctccgcctggggcggcctcaccctggctggtgctgccccctcaccttggtactgatcagcgcccccacccaggacataccttccccaggatagagagcacacctccctcctgtccttgctctcaggtagtgagcgttcgggtggtgccatgggagcactctccctcccccaggtaatgaaagagtggccaagtgaaaaaaaaaaaaaaaaaaaaaaaaaa

SEQ ID NO: 118311 - DNA, 1000 bp, Homo Sapiens
ctgggtgtcggccaacgggccgtgcgacaagcgcttcgccacgtccgaagagctgctgagccacttgcggacccatacggcatttcccgggacagacaaactgctgtcgggctaccccagctcgtcgtctctggccagcgctgccgcggccgccatggcttgccacatgcacatccccacctcgggcgcaccgggcagccctgggacgctggcgctgcgcagcccccaccacgcgctgggactcagcagccgctaccacccctactccaagagcccgcttcccacgcctggcgcccccgtgccggtgcccgccgccaccggaccgtactactccccctacgccctctacggacagagactgaccaccgcctcggcgctggggtatcagtgagggcggccgggagggcgagcgagggagaggagggagagggggaggggaggagtccagggagaggcgggatcacggcccaggctgctgacacccgcgcgtggggaggactcgggccacgaaaggaaagaaatgtataccgtatctatctacccgacagcagcgaccgagacccggtgggacactccccttctccccactttcacctccccacccaaactttataaaagttgaaaaaatatcatttgactttttatagaaaaaaaaaggaaaaaataattgagaaagtgttcatctgaggactgcatcggtggacactggtatttatttatgttagctccaagcggaccggtggttcaaaagtgcattatttagtttgagctctgtaggtaaaaaggaggtgggaaaaattttaaaacttgagggtaaaaatgtggaaaacaaaccctcccatcccttgtagattataaataaaagcaaaaccgccacagaactagaggtcttctctttaatgttactttaaaattgctatgattgtattgtacgttatttaatgtctgattgaaacacaaatttacatgcatgtttgttacaaaaaaaaaaaaaaaaaaa

SEQ ID NO: 118312 - DNA, 1000 bp, Homo Sapiens
tgctgtataccccaccccagtactccacagcaccttgtacagtaggcatgggggcgtgcctgtgtgggggacagggagggccctgcatggattttcctccttcctatgctatgtagccttgttccctcaggtaaaatttaggaccctgctagctgtgcagaacccaattgccctttgcacagaaaccaacccctgacccagcggtaccggccaagcacaaacgtcctttttgctgcacacgtctctgcccttcacttcttctcttctgtccccacctcctcttgggaattctaggttacacgttggaccttctctactacttcactgggcactagacttttctattggcctgtgccatcgcccagtattagcacaagttagggaggaagaggcaggcgatgagtctagtagcacccaggacggcttgtagctatgcatcattttcctacggcgttagcactttaagcacatcccctaggggagggggtgagtgaggggcccagagccctctttgtggcttccccacgtttggccttctgggattcactgtgagtgtcctgagctctcggggttgatggtttttctctcagcatgtctcctccaccacgggaccccagccctgaccaacccatggttgcctcatcagcaggaaggtgcccttcctggaggatggtcgccacaggcacataattcaacagctttaggggaacatggagaaagaaggagaccacataccccaaagtgacctaagaacactttaaaaagcaacatgtaaatgattggaaattaatatagtacagaatatatttttcccttgttgagatcttcttttgtaatgtttttcatgttactgcctagggcggtgctgagcacacagcaagtttaataaacttgactgaattcatttacaaaaaaaaaaaaaaaaaaaaaaaaaaaaaaaaaaaaaaaaaaaaaaaaaaaaaaaaaaaaaaaaaaaaaaaaaaaaaaaaaaaaaaaaaaa

SEQ ID NO: 118313 - DNA, 1000 bp, Homo Sapiens
tctctggagctccaggaaattcgggcacatcatatgtccatgaaacttcagataaactagggaaaactgggtgctgaggtgaaagcataacttttttggcacagaaagtctaaaggggccactgattttcaaagagatctgtgatccctttttgttttttgtttttgagatggagtcttgctctgttgcccaggctggagtgcaatggcacaatctcggctcactgcaagctccgcctcctgggttcaagcgattctcctgcctcagcctcctgagtggctgggattacaggcatgcaccaccatgcccagctaatttgttgtatttttagtagagacagggtttcaccatgttggccagtgtggtctcaaactcctgacctcatgatttgcctgcctcggcctcccaaagcactgggattacaggcgtgagccaccacatccagccagtgatccttaaaagattaagagatgactggactaggtctaccttgatcttgaagattcccttggaatgttgagatttaggcttatttgagcactacctgcccaactgtcagtgccagtgcatagcccttcttttgtctcccttatgaagactgccctgcagggctgagatgtggcaggagctcccagggaaaaaggaagtgcatttgattggtgtgtattggccaagttttgcttgttgtgtgcttgaaagaaaatatctctgaccaacttctgtattcgtggaccaaactgaagctatatttttcacagaagaagaagcagtgacggggacacaaattctgttgcctggtggaaagaaggcaaaggccttcagcaatctatattaccagcgctggatcctttgacagagagtggtccctaaacttaaatttcaagacggtataggcttgatctgtcttgcttattgttgccccctgcgcctagcacaattctgacacacaattggaacttactaaaaatttttttttactgttaaaaaaaaaaaaaaaaaa

SEQ ID NO: 118314 - DNA, 1000 bp, Homo Sapiens
tagctggaaactctggtgacgtgatgaatgtgggaagggctttggtggatgttccaccaaaacacgttagagaatttgtacattagagaatttgtgctagagcaactcttcaaatttagtgaaactgggaaaacccattagtagagttcaagcttcagtattcatctcaaagagaaaccttgggaacatgatgaatgtgaggaaagttcctttccaacttgagatgtataaaactagagctgaaaagaagctgagaaatcaccttgtctggtgattttctgcctggtggggccatttgtataacgacacttgtgcattgcctcctcatgctgttactgacggggcagggtgtcatgcatgggtgcagaggatggaggctgagaaaggtagacagctacccatgatctagcccagtcgtattttagagctaataaaactgatgttcagaaagtgacatgccttggcctatagtcctaactgggctgggcctctttcctgtggttcacagctgtagtatggagattaatagacaggatctttgcagtacaacacctctatgcacttctttctctgtagcacatgttacctttctttgtgaggcaatggagtggtctaggattgagcaaaaagcaatttttgttacatctttatgctaatagatttggaatttttgaaatgaaatgaaaccttgtttaaacattaaaattactaaaataggctgggcgcggtggctcacgcctgtaacctcagcactttgggaggccgaggcggacagatcacgaggtcaggagttcgagaccatcctggctaacacagtgaaaccctgtctctcctaaaaatacaaaaaaattagccaggcatggtggcgggcgcctgtagtcccagctacttggaaggctgagacaggagaatggcgtgaatcggggaggcagagcttgcagtcagccgagatcacgccactgcactccagcctgggagacagagtgagactccgtctcag

SEQ ID NO: 118315 - DNA, 1000 bp, Homo Sapiens
ggcagcttcaggccctaccttggcggggcagacgctgaaggggccctggaacaacctggagcgtctggcagagaacaccggggagttccaggaggtggtgcgggccttctacgacaccctggacgctgcccgcagcagcatccgcgtcgttcgtgtggagcgcgtgtcgcacccgctgctgcagcagcagtatgagctgtaccgggagcgcctgctgcagcgatgcgagcggcgcccggtggagcaggtgctgtaccacggcacgacggcaccggcagtgcctgacatctgcgcccacggcttcaaccgcagcttctgcggccgcaacgccacggtctacgggaagggcgtgtatttcgccaagcgcgcctccctgtcggtgcaggaccgctactcgccccccaacgccgatggccataaggcggtgttcgtggcacgggtgctgactggcgactacgggcagggccgccgcggtctgcgggcgccccctctgcggggtcctggccacgtgctcctgcgctacgacagcgccgtggactgcatctgccagcccagcatcttcgtcatcttccacgacacccaggcgctgcccacccacctcatcacctgcgagcacgtgccccgcgcttcccccgacgacccctctgggctcccgggccgctccccagacacttaaccgaaggggccaccctctggcctcctgcttcccaggctcccagctccgcacaggctgatgctccccgcccccaactgtggccgcctgagctgtccccggggacgcccctgcctccctctgcgggctccagaaggcggtgtgggggatggcggtcagcagcggccgagaggggctgggctaggtcccagcctgggccgaccccaccaccaggggtcagcagagcccaggaggcgacactgcccgcccgccgctcccagacctcgcccgagtcggctctgttgtttgaataaacgtgaacgtgaacccaggcggaagggacccggg

SEQ ID NO: 118316 - DNA, 1000 bp, Homo Sapiens
cggccactttaaccattcccatctggcagtggttcttgacccggtttggcaagaagacagctgtatatgttgggatctcatcagcagtgccatttctcatcttggtggccctcatggagagtaacctcatcattacatatgcggtagctgtggcagctggcatcagtgtggcagctgccttcttactaccctggtccatgctgcctgatgtcattgacgacttccatctgaagcagccccacttccatggaaccgagcccatcttcttctccttctatgtcttcttcaccaagtttgcctctggagtgtcactgggcatttctaccctcagtctggactttgcagggtaccagacccgtggctgctcgcagccggaacgtgtcaagtttacactgaacatgctcgtgaccatggctcccatagttctcatcctgctgggcctgctgctcttcaaaatgtaccccattgatgaggagaggcggcggcagaataagaaggccctgcaggcactgagggacgaggccagcagctctggctgctcagaaacagactccacagagctggctagcatcctctagggcccgccacgttgcccgaagccaccatgcagaaggccacagaagggatcaggacctgtctgccggcttgctgagcagctggactgcaggtgctaggaagggaactgaagactcaaggaggtggcccaggacacttgctgtgctcactgtggggccggctgctctgtggcctcctgcctcccctctgcctgcctgtggggccaagccctggggctgccactgtgaatatgccaaggactgatcgggcctagcccggaacactaatgtagaaaccttttttttacagagcctaattaataacttaatgactgtgtacatagcaatgtgtgtgtatgtatatgtctgtgagctattaatgttattaattttcataaaagctggaaagcaaaaaaaaaaaaaaaaaaaaaaaaaaaaaaaaaaaa

SEQ ID NO: 118317 - DNA, 1000 bp, Homo Sapiens
ctgcagattgggaaaaagaactgcagcaggaacttcaagaatatgaagtggtgacagaatctgaaaaacgagatgaaaactgggataaggaaatagagaaaatgcttcaagaggaaaattagctgttcctgaaatagaagaataatccttaacagtctgcaaactgacattaaattctagatgttgacaattactgaatcagaaggcatgaaagagtataattttatgaaattcaaaattattcttttttcaagttgaaacttgcctcttctactttaaaaaagtatatagaacagttacttctaataatcagaaagagatgttttatagaacatttctttaatataaagttagagatgtcttcataggcagtatggctatctttgccacagaaacataagtaaaattttagagttctgttttccatgaggtcaaaaatataatttattcctcagtcatggttttctaaatatctgtactccacattccattttaattgatatgagggtgttaaagtacctacttaatgggttgattattatcaaaatgaccaaattataccaaagaacttaagaggaagcactttcagaactattcacttgccaggtattttctaaaattccacctgaaagccaaaagataaaataaataacttgattttaatgatataagcatcacacaattttacattaagaaatactgtgcaggccatgcgtggtggctcaggcctgtaatcccagcactttgggaggccgaggtgggcagatcaccggaggtcaggagttcgagaccagccttgccaacatagtgaaaccctgtctttactaaaaatacaaaaattagccgggcatggtggcaggcacctgtaatcccaggtactagggaggcttttgaacccaggaggcagaggttgcagcgagctgagatcgcgccactgcactccagcctgggtgatagagtgagattcagtctcaaaaaaaaaaaaaaaaaaaaaaaaaaa

SEQ ID NO: 118318 - DNA, 1000 bp, Homo Sapiens
ttttctctctggactgtgcatagcagtagctgttgtttgggctgtgtttcgaaatgaagacaggtgggcttggattttacaggatatcttggggattgctttctgtctgaatttaattaaaacactgaagttgcccaacttcaagtcatgtgtgatacttctaggccttctcctcctctatgatgtattttttgttttcataacaccattcatcacaaagaatggtgagagtatcatggttgaactcgcagctggaccttttggaaataatgaaaagttgccagtagtcatcagagtaccaaaactgatctatttctcagtaatgagtgtgtgcctcatgcctgtttcaatattgggttttggagacattattgtaccaggcctgttgattgcatactgtagaagatttgatgttcagactggttcttcttacatatactatgtttcgtctacagttgcctatgctattggcatgatacttacatttgttgttctggtgctgatgaaaaaggggcaacctgctctcctctatttagtaccttgcacacttattactgcctcagttgttgcctggagacgtaaggaaatgaaaaagttctggaaaggtaacagctatcagatgatggaccatttggattgtgcaacaaatgaagaaaaccctgtgatatctggtgaacagattgtccagcaataatattatgtggaactgctataatgtgtcattgattttctacaaatagacttcgactttttaaattgacttttgaattgacaatctgaaagagtcttcaatgatatgcttgcaaaaatatatttttatgagctggtactgacagttacatcataaataactaaaacgctttgcttttaatgttaaagttgtgccttcacattaaataaaacatatggtctgtgtaaaaaaaaaaaaaaaaaaaaaaaaaaaaaaaaaaaaaaaaaaaaaaaaaaaaaaaaaaaaaaaaaaaaaaaaaaaaaaaaaaaa

SEQ ID NO: 118319 - DNA, 1000 bp, Homo Sapiens
gagagttccggaataccaaagccgctgcagagggagcgtcgcgccggggcggagtgcgggcttgcgcggcaagtgcgcgccgaggtcacgaaatggattggagtgaaccggagaccccgaaaacggaagcgcagggagaaggaagaggtgtttgaaaagcttcttccagaccagctggtcttgcttctggagcatctcttggagcagaagactctgagcccccgaactctgcaaagcctccagaggacataccacctccaggatcaggatgcagaggttcgccatcggtggtgtgaactcattgttaagcacaagttcacgaaagcctacaaaagtgtggagaggttccttcaggaggatcaggccatgggtgtgtacctctacggggagctgatggtgagtgaggacgccagacagcagcagctcgcccgtaggtgcttcgagcggaccaaggagcagatggataggtcctcagcccaggtggtggccgaaatgttattttaacgaggaaagaccacagcaagattctttcattcgtctcctcctagcctgggggaccaggctcgaactgaccctggacatcaaaggagggattatgtggctgctaaagccatcggcccacagccctgttcacgtcttggtgcttctctttcccagaggctggtcccagccaggcacacacaaaaggcagattctcgtaaacgcagcctccctccctggaggctgcctcctgccctggatctggagtggagctgctctgagattttgagttcttctgcagagatgattaaatatatccaagagacattggaaaacctgctgaacattttacattggtctgctcagcacatggctggatgcggatatttctataattccagaaagtcacacagctcctctgtatgagaccagtgggcgccatttaaaagaacaggatgagaatctaagatatattattaataaatgtaatggattttttttttgtaaaaaaaaaaaaaaa

SEQ ID NO: 118320 - DNA, 1000 bp, Homo Sapiens
tactgcacctaaagacaaagggtcctgagaacattatctgtagctgtatctccccatgtggaagttggatagcctattctacagtttctcggttttttctctatcggctgaattatgaacatgacaacataagcctcaaaagggtttccaaaatgccagcattccttcgctctgcccttcagattttgttttctgaagattcaacaaagctctttgtagcatcaaatcaaggagctctgcatattgttcagctgtcaggaggaagcttcaagcacctgcatgctttccagcctcagtcaggaacagtggaggccatgtgtcttttggcagtcagtccagatgggaattggctagctgcatcaggtaccagtgctggagtccatgtctacaacgtaaaacagctaaagcttcactgcacggtgcctgcttacaatttcccagtgactgctatggctattgcccccaataccaacaaccttgtcatcgctcattcggaccagcaggtatttgagtacagcatcccagacaaacagtatacagattggagccggactgtccagaagcagggctttcaccacctttggctccaaagggatactcctatcacacacatcagttttcatcccaagagaccgatgcacatccttctccatgatgcctacatgttctgcatcattgacaagtcattgccccttccaaatgacaaaaccttactctacaatccatttcctcccacgaatgaatcagatgtcatccggaggcgcacagctcatgcttttaaaatttctaagatatataagcctctactcttcatggatcttttggatgaaagaacactcgtggcagtagaacggcctctggatgacatcattgctcagctcccaccacccattaaaaagaagaaatttggaacctaaaacagggcactgtctgtgtccttccttgaactgtctaccctgttgcttttcacaaatcatggtaataaaacaagttattcttg

SEQ ID NO: 118321 - DNA, 1000 bp, Homo Sapiens
aggagccaggaactgtcgggtcaccagctgtggagcgtgccggggggacaacctgccattggatgtagagaaaagtgccttagagttggcctgagccctcctgcccactcgccctccgcgcgacgccactcggagtccacacggcacacacaagcggagctgagaagcacgatggctctagtcagaggactttgctgtcggtccagatttgaagaggacacggaacagcatgagcctttgtgacaaaactagaatttggaaatgaggactgtcttgggaaaagggtagacacaggcacttctctccacagcctgctaacctaatgtgggcagaactgaaagatcactgcagtggaaactgttctggaagaggctgcaacatagcccatgcttagggactggatggtttttgcaagagctttttttttttttaaactaccatctcccaacttttaaagccagattcttgacaaggattttagatcttaatgggttcgatggtagggaatacggaaaggatacactgctaatattgtgtctaacaataaagcaaacaactcgatgctgtaagaagacaagctgtttgagctttcaaacacacatgcacacagcacaattcagaaatacccaggaggattcctgcaggcttaacagttggcatcgtactgaaatgaaacgtgtattaacaagaaaatgtcaaacttttggggaaacaaattttctgttacttcccacccaactaaaagggaagataaaaccatcatcaccagaacaaaacagattttctccaaacaagtacaatgatagtgccgggttggcagttaactctttcaccctactaaattcaagagctcatctccaccctgtcctgtatattttctacatttctattaagaggctacttggtagtgtcagcgggcaccttttacaccttctagtagctcaagctagtaaaaccttgtacttctctattgcgccgccattaaaagcagcattagtgc

SEQ ID NO: 118322 - DNA, 1000 bp, Homo Sapiens
gacaggaatggacccaaagaatggtgttggtatgtgggtggtcccactcgctttggtcagtgggcttctgggtccccctttccctcaccggccctgtgtgggtggagaggcgtgagcaccctatctcagctgctattcgggcatgatgctttgtagagggtagagtagacagccccctcccctactcaccatggtatttctccttgaattcctctttcttgttttctttcctggttgtgtgaaccagttgctgctgtcatacccctggcagggccaggggacctctctttggtcatctctgtcctttcactggctgctgccccaggaagactcctctaggctctccatctttcccttgagagctggctccccaccccaacctgctcaggcaccacagaggatctaggtctctggctccccatacctggacccacatgggtgggtgcctgttgcatgtttaagagagaggggctgtgaggtgacagggcactagggccttcactcctttctccccttccatcctttctttaccagtgccacccatgtccctagctcccgggtattggggctgaggctctggggcctgtctccctgccagcgtgagggcaagaccccagagccttagctgagcaagcccagaggggcagcgtggcccctccctccccttttcctgccccgtcccatgcctcagcttgctgcttgtgccagttgcctgtttcgcttcagtgtttgattctagcacttacatgtgtcctccccaccaagccctctatctccttctaatccttcaacccctggccccctccccgtaacagtgacttttccagggaggaagaggcagcaggagctgttggccttggtttgcacagagcgggtagggctgtagggaaagcgggtgagctgttgtgctgctgggcctccctttggccctcgcttcccaccctacgatgtatgaaatgtatgtacagaccagagatgtttatacagccgataaagatgg

SEQ ID NO: 118323 - DNA, 1000 bp, Homo Sapiens
cccagagctgctgcgagtgacttgggccccaggcctgaagaattgcttggccatctcaggttttgatggtacagtccaggtctatgatgccacatcttgggatggaacacggagccaagatggaacacggagccaagtagaacctctcttcactcacagaggtcacatcttcctagatggaaatgggatggaccctgctcctttggtcaccacccacacctggcatccctgcagaccaaggactttgttatcagcaacaaatgatgcctctctgcatgtgtgggactgggtggacctttgtgccccccgctgacaccagcatctttccatctaggcctctagaaaggggaggagctgctgtagtagcaagggtgctcatgtaggactcaagtgactaccagtccctgttaccagctgtgtggccttgggcaagtctgccagcgtcacttagcctcagtttccttatctgtaaaatgaggatagtaagaactacctcgtagtgatattgcgaaggttagaagaaacgcatggcataattacttggtagctattgttagatctgggagtgtgaaatggtagcgttttgtccctgtcttcacactatcatagggagaatcaaaagagctaacaaatataaacatgctttgtgaatttttttaaagaaaaaaatgtagaggggccaataaacatgaaaaaatcccagccctagtagcaattaaggaaatagcaaaacaggatttctgctcctcttgagtgggtctcatgggaacacaggtgcactttcccacacttgtccccccaggtgactaggttcaagagacatttgcttttggtggccccacaaacatttccttttgagggcccatagtgaatattaaagtgtgctggacatggtggctcatgcctgtaatcccagcactttcagaggctggggtgggcagattgcttgagctgaggagtttgagaccagcctgggcaacatagcaagatcccttccctt

SEQ ID NO: 118324 - DNA, 1000 bp, Homo Sapiens
tttagagtaacagcattattgagatataatttacataccataagattcacccttttaaattatacaattcatttttgttttgttttgtttgtttagagacagggtctgactctgttgcccaagctggagtgcagtggcatgatcatagctcattgtaacctcaaactcctgggctcaagagatccttttgcttcagcctcccaagcagctaggactacaggcacatgccaccacacttgggtaattaaaaaataaataaatacttttttgtagagacagggtctcactgtgttgcccaggtctcaaactcccgatctcaagccaccctcccaaaatgctgtgattataggccagagccattgttcccaggctcaattcattggtttttagtatagttcactgagttgtgcaacatcattgctatttaatttcaggctatttcatcatccccaaaagaaccccatacccatgagcagtcagttcccacctctgctttcccaagcctgcggtaaacactaatctgttttctgtctctatggatttgggaattttatgtaaatggaatcatacaatatgtggccctctctgccttcttccttctattagcatgttttcaaggttcattcatgatatagcatgtatcagtactacttcatttctttttatggccgaaattactccattgtatgatatgccatgtttctttatccattcatcagctgatggacatctaggttctgttcatttttgtctatgataaataatgctaccatgatcatttgtgtacaaatttatgtgtggatagatgtttttgattctcttgggtggaattgctggtcaaatggtaagtctatgtttaaattttgaagatggtgaacttttgtagaatgagatagtcgaagctaaaactggagtatggcatctgaaggtaaatggctcatcaataaactcgatatcaacaattaaaaaaaaaaaaaaaaaaaaaaaaaaaaaaaaaaaa

SEQ ID NO: 118325 - DNA, 1000 bp, Homo Sapiens
ataaacctcaagttggattttatattttaataaggaagttaagaccttcatttaagaggcagaagattaagataagaaatataagatagaaaagctttgttcctaacatatcttttgcctgtctgggcaagtatttgactcaactaaattttaatgaacgaatgaatgacagacagagaggaggaaaaaagatgaggattgcatacatgttctaaaccctttgtcagaatgcagtttcctagagagtattgaggtgctaggtagaaagttaggaaaggtcctgaggactggtattgacaattggagtcctaatagtactctattcgtattaggaaagagagactagataccaaacatcacgagatcatagagatggaaaactgtatagtaaccaaaaaccaaaacagtgatatttccagaactttttagtattgttgtaaaacttcatgaaacaaaagaccatttaaatagtgaattattaaaaatctttatgatgggaaagtagatctaaattttctctaaaattttccccaaagataatatcctcttagggaacataagaaaaatgtataataaaaatgtggtgcttaattaaccatgactatgtatatattgccaattttagtaatcaatattctttgtgcatgtgatttttttgcatgattaatgttgaattgaaagctctcaggataattaatcctaaatattgtcgcatgttgacctacgttaaaagatgaataggtctagagccgtgatttcaagctattttcctgaaatgcttcagggattccataaacatttaaacaatgttctaaggtacatatacttagaacattgagatatatactacaagtgctaagaatatagtaccttgtatttttgttgatttttatcatgttttaaataggaatttataaaatatttatgatagtaataaagtagtattttatgtgttttgcaaaaaaaaaaaaaaaaaaaaaaaaaaaaaaaaaaaaaaaaa

SEQ ID NO: 118326 - DNA, 1000 bp, Homo Sapiens
cctgtcaggcgacgcggaggcggtgcaggtccgcggctccgtgcacttcgcgctgcactacgagccgggcgccgccgagctgcgcgtgcacgtgatccagtgccagggcctggccgccgcccggcgccgccgctcggacccctacgtcaaaagctacctcctcccggataagcagagcaagcgcaagacggcggtgaagaaacggaatctgaatccggttttcaacgagactctccggtactccgtcccgcaggccgagcttcagggccgcgtgctgagcctgtctgtgtggcaccgcgaaagcctgggtcgcaacatctttctgggcgaagttgaagtgcccctggacacgtgggactggggctctgagcccacctggctccccctgcagccccgggtcccaccctctcccgacgaccttccgagccgcgggttactcgccctgtccctcaagtacgtccccgccggctccgagggcgcaggactgcccccgagcggggagctgcacttctgggtgaaggaggctcgggacctcctgccgctgcgggcaggatccctggacacttacgtacaatgcttcgtgctgcctgatgacagccaggccagccgccagcgtacaagggttgtgcgacgcagcctcagccctgtgttcaatcacaccatggtgtacgatggctttgggcctgctgacctgcgccaggcttgtgccgagctctccctctgggaccatggggccctggccaaccgccagctggggggcacacgcctcagcctgggcaccggcagcagctatgggctgcaggtgccctggatggattccacacctgaggagaagcagctgtggcaagccctcctggagcagccgtgcgaatgggtggatggccttctacccctcagaaccaacctggcccccaggacgtagccccaccaagcctctctctctggacccccatctcagggcctgcccttggctaaagtcaataaagtctattctaagagc

SEQ ID NO: 118327 - DNA, 1000 bp, Homo Sapiens
gacccatttacccaatattaaagtccacgcctacttcgcacctgtcactccacccccatcagtagggggcagcagacagcgcttctgcagatgctgcatcatcctatgacaatggaggtggtcaaccttggcgaactgagtatttaatgacacttctagagctaccgtggagtctctccagtggaagcaaccccagtgttctgagcaagggttacaaagtgagggagggcagtgtccagatccccagagccacacatacatacacatacacacccttacccccatccactctagctttgtgaccatgggactgaagtttgtgatggcttttttatcaagtagattggtaaaatttaaccattcctgttgaggtgcccataagaaaatcataggccaagatagggaggggcattccagcaaaccccgtgttaatgctactgtggtttttaaatttttgtctaggggtttctttggggattttagaacagcatctgctgtcctccggggtcaagaaaagcatggaaagacaatatatgatgtacccagggaccagaaagaaaatttctttgcatcttagaaatggtagacattcattgtgactaaagagcttctatgcttccttgtttccatgccaacatgctgagcatgctcacaaagaaggctcgtccattcctcctgtgttttagtatttggcccagaggtttcctaaatggttgccttgaaatcactgtggtccaaatgtaattcttacacactcaaattatcactgtctgtagcacacttgtgcacctgtcttacattctctgttgctcccccccacactcttgctcagtctgtcacctgttcagtctgcttactcactcaattgttacccttttgctgttgtcgtgtttacagtttgcattttgaatgattagttgggattaccaaacattttttaaaaagatattatcaataaatatttttttaattctaaattttaaaaaaaaaaaaaaaaaaa

SEQ ID NO: 118328 - DNA, 1000 bp, Homo Sapiens
gatgttgaatttggaaattggaggggacgctggtggacggattgggtgcaaggagttggtgttgatggaggagcaggacgccagagtcccagccctggaaccgttcagagtggagcaggcaccacctgtaatctactatgtccctgacttcatctccaaagaagaggaggagtatttgcttcgacaggtttttaatgccccaaagccaaagtggacccagctctctgggagaaagttacagaactggggggggccctcaggaccccattgccttccccaggtgggcttcctcatccccgagggatggttcctgagcggctgcccccatggctccagcgctacgtggacaaagtgtcaaacctcagcctctttggaggcctcccagctaaccatgtcctcgtgaaccagtatctgcctggggagggcatcatgccccacgaggacggaccactgtactacccgactgtcagcaccatcagcctgggctcccacaccgtgctggacttctacgagccgcggcggccagaggacgatgaccctacagaacagcctcggcctccgccccggcccaccacctcgctactgctggaaccgcgcagcctgctggtgctccgcggccccgcctacacgcgtcttctccacggcatcgccgccgcccgcgtagacgcgctggacgccgcctcctcgccgcccaatgcggcagcctgcccgtcggcgcggccgggagcctgcctggtgcgcggcacccgggtctcgctgaccatccgccgcgtgccccgcgtgctgcgcgccggcctcctgctgggcaagtgaccgccagggccgggacccctcggattcccaggttcctgcccctttggggctgctgtgactccgcgacctaggaaccgtgggcaaagggggctcccctgggttatttattttcccaataattttgtgtgagctacagaagaccccataccaaataaacaaaaaaatctttaaaaaaaaaaaaaaaaaa

SEQ ID NO: 118329 - DNA, 1000 bp, Homo Sapiens
ggaaccaatcgacgcagtgcccctatcagagccaccagctgcgagctccggccccctacaggacagcaggcccttccgcagccttctgcaccgtgacctggatgacaccaagatgcagaagtcactgtccctcctggacgccgagaaccggggtgggcgaccctacacggagcgcccctcccgtggcctgaccccagatcccaacatcctcctccagccaaccacagagaacataccagagacggtcgtgagccgtgagtttccccgctgggtccacagcgccgagcccacctacttcctgcgccacagccgcaccccgagcagtgacggcactgtggaagtacgtgccctgctcacctggaccctcaacccacagatcgacaacgaggccctcttcagctgcgaggtcaagcacccagctctgtcgatgcccatgcaggcagaggtcacgctggttgcccccaaaggacccaaaattgtgatgacgcccagcagagcccgggtaggggacacagtgaggattctggtccatgggtttcagaacggagtcttcccggagcccatgttcacgtggacgcgggttgggagccgcctcctggacggcagcgctgagttcgacgggaaggagctggtgctggagcgggttcccgccgagctcaatggctccatgtatcgctgcaccgcccagaacccactgggctccaccgacacgcacacccggctcatcgtgtttgaaaacccaaatatcccaagaggaacggaggactctaatggttccattggccccactggtgcccggctcaccttggtgctcgccctgacagtgattctggagctgacgtgaaggcacccgccccggccactccatcaggcactgacatctccgcgaccggttttcatttcttttctaaactatttccagtcttgttcttagtctctttccatctgtgtcttggcttcttcagtcggtttaattaaaacaaacagaacaattttcccc

SEQ ID NO: 118330 - DNA, 1000 bp, Homo Sapiens
ggggctcgttcgggagtctgaggcatgggaggccagtctagccaggagcgtgagagcccagacacaggaaggggccggtgcccgggctggtgcccaggctgttgccagagccagcactaaagtagaggcggtcccaggaggtcctggtcgggagccagagggcctcctccaggcaggaggccaggaggctgaggagctcctccaggaggggctcaagcccgtcctggaggaatgtgataactaggttggggctggggaggcagcccagcgcgagtcctccccgggcaaataggctccgagggccccggggcctcctctcctcctctcaggcagcagggccctggagacaggcggaggcggggccagggccggtccctcaccccacatcgggatcggggccccccacttccccccaaggggccctgcccaccaccaccttcccggtgacccagatgaccacatttaataccaaatggggtggggggaggcgcccctccagtgccaggggcacgtgctgtgagcttcctgggagcccaggttgtgctcactgctctcccgtatcgtgagcaccacctctgctttccctgcgtagatctaggccaggggctgcttgtttttgtggagccgtgtgtgttcttctctgagcagctcctccccggaggaccccagcgcagtcccgggagatggcggaaagaaggcaccagggcacagtggacactcatcccgtgacagcgatggtgaccatgactgtgggagagagaacaggacccgggatggagtggggctgtctgagtttccccagtgaactttgtgctttggcgttccacccctgttgttacttgttactgagtttcctagacctggggtgggtgttcccccaggaggaggggggtcccgacctgtgtcctgtggtggccatttgcagcttctgtgttgtgattcccttctcttcaacggtttcagtacatatctctcttcaataaatttcattcagtgttcc

SEQ ID NO: 118331 - DNA, 1000 bp, Homo Sapiens
ggtgtacgtttctcaggactgcacagtgtacaaggcggatgtggcacgcctggtggccaggccagaccccacagccgagtggaagtctgtggtcatcctggtgcccgtgcgactgggtggcgagactctcaaccccgtgtatgtgccctgcgtgaaggaactcctgcgttgcgagctgtgcctgggcatcatgggtgggaaaccgcgacactcactgtacttcattggctaccaagatgacttcctgctgtacctggaccctcactactgccagcccactgtggatgtcagccaggccgacttccccctggagtccttccactgcacctcgccccgcaagatggcctttgccaagatggacccaagctgtaccgtgggcttctatgctggagacaggaaggagtttgagacactctgctcagagctgaccagggtcctcagctcctcctcagccacagagcggtaccccatgttcaccctggccgagggccatgctcaggaccacagcctggacgacctctgctcccagctcgcccagcccacactccggctccctcgcacagggcggctcctcagggccaaacgccccagctctgaggactttgtgtttttataaagggaggggatgaggggaaagatacaacactatttatttttttatttatgtcatgtcgggtgtgggatcttgagctctggcagtgatgatggtacttcctgttgtcagcccctcaagcccagctgcaaccagtctggggccattcagccagggacagagcccacagagcccatacacctgtctcccaccagcggggccctcctggcagggtagggaaggaggaccccgggcacccccctcagggcctgactcacgtactgtagtttgcactggacgcccgggccctccctgtcccaaagcccccttgggggaactgtggctgctgggggccaataaagctgtgtaacttgaaaaaaaaaaaaaaaaaaaaaaaaaaaaaaaaaa

SEQ ID NO: 118332 - DNA, 1000 bp, Homo Sapiens
gggcgactctggcgagatgggcttcccaggaatggcaggtctcttcggacccaagggcccgcctggagacattggcttcaaaggcatccagggccctcgggggccacctggcttgatgggaaaggaaggcatcgtcgggcccctcggaatcctgggaccttcgggactcccgggtccgaagggtgacaaaggcagccgtggggactggggattgcaaggtccgaggggtcctcccggccccagagggcggcccggccccccgggtcctccagggggtcctatccaattgcaacaagatgatcttggggcagctttccagacgtggatggacaccagtggagcactcaggccagagagttacagctatccagaccggctggtgctggaccagggaggagagatctttaaaaccttacactacctcagcaacctcatccagagcattaagacgcccctgggcaccaaagagaaccccgcccgggtctgcagggacctcatggactgtgagcagaagatggtggatggtacctactgggtggatccaaaccttggctgctcctctgacaccatcgaggtctcctgcaacttcactcatggtggacagacgtgtctcaagcccatcacggcctccaaggtcgagtttgccatcagccgggtccagatgaatttcctgcacctgctaagctccgaggtgacccagcacatcaccatccactgccttaacatgaccgtgtggcaggagggcactgggcagaccccagccaagcaggccgtacgcttccgggcctggaatggacagatttttgaagctgggggtcagttccggcccgaggtgtccatggatggctgcaaggtccaagatggccgctggcatcagacactcttcaccttccggacccaagacccccaacagctgcccatcatcagtgtggacaacctccctcctgcctcatcagggaagcagtaccgcctggaagttggacctgcgtgcttcctctga

SEQ ID NO: 118333 - DNA, 1000 bp, Homo Sapiens
ggggctttaatattaatggcccccaaaactccgtaagaagcaggaaatgcagcccaagttttacaaatgggtaaacagaggcactgagagatagatggtagtttggtacttctggttcccagtgcccaggaatggtccactcccaagaaattcaggaaagaaagactgaggagaaggtgtgggaacattctggatgtttcgggagagttggggaaactcctcctcttaggaaaggctaatactagggtatccttgggcccaatgaattaggggtgaggccccagaacccgttatctatgagttgtatgggggagccatctgaagctgtagccaccagggatgcagctagctgaggagtttggggtgttgggttggacaaggcaggttagtagactcagattcttgcttcaaagagccttgggctggcctggaggtccctggagtctagactggacctaggagcttgagttgtcaggggccaggactggccccactgcagtgcccaggccagtcttgagcagcagggagggctcagctgtccccagatccaggtgcctctgaccagcctggtcacctcctgaggaataaatgctgaacctcacaagccccatcattcatttcttctcaattcacagtgcccctctttgtttctggggtggaactaggtcctgagggcacagcctagctgagtgcaaagaaatataggatgcttagaaagcatacaggaggggccaggcgtggtggctcatgcctgtaatcccagaactttgggatgccaaggtggttggattacctgagatcaggtggattacctggtctcgagaccagcctgaccaatatggtgaaaccccgtctctactaaaaatacaaaaattaggctgagacaggagaattgcttgaacccaggaagcagaggttgcaatgagctgagattgcatcactgcactccagcatgggcaacaaagcaagactccgtcacagaaaaaaaaaaaaaaaaaaa

SEQ ID NO: 118334 - DNA, 643 bp, Homo Sapiens
ggagggagaaagttgctttctgcaccaatagctgaggcgttcagggttgtccagggacgctaccctcacgtgtctggttccgagtgctgcgttcggctgtgctgggaagttgcgtagacagtggcctcgagaccctgcctgcctgaggaggcctcggttggatgcgaaggagctgcagcatccaggggacaagatgccaactggcaagcagctagctgacattggctataagaccttctctacctccatgatgcttctcactgtgtatggggggtacctctgcagtgtccgagtctaccactatttccagtggcgcagggcccagcgccaggccgcagaagaacagaagacctcaggaatcatgtagaactggggggctttttctcctgagcagagaggcccaaggcatgctgtggagagacttcacctgccaccatttccaggtcaacaggactagagcgttgatggttttcaaaccctgttggaagaaagtgcccatggtttctctggttctgccagtttgacagtttatggaggcttttgaatcgtaatagcaatgtgagggtgaggtacacctacagacattaaataatttgctgtgaaaaaaaaaaaaaaaaaaaaaaaaaaaaaaaaaaaaaaaaaa

SEQ ID NO: 118335 - DNA, 1000 bp, Homo Sapiens
aaactagaaagttttgggacatggggttatattaaattattctttgtttttctttttcttttaataaagcctgcaagttactaaattgtagtttcataaattctgtagtaaagtatcatcttggcagtgtgccaaaggtgaaaatgatgctttctctaacagagaaattcttagtgactccagtcgtagaaaaacgtctttacaacctgaataagattgaagaattgtgaacataccatggcctattggatgaatcatttgccgtaggctaaatcagactgtagggtttgtgatggatttatggagtatgtgggtatagaaatcatgaatctagcatttgttttcagagattcaagcatagtcttaagggtagatcagaaatgacaaatgaattcaaaacctagcaggtgcattgtaaatgtgtgcccagttatgttttggaaatggcagttccttggggtcatgtttctactggcaaaatttgcaatagtgttctattgtatgtaattttaaaatttataagattatccacgttggccaagtaaactgtactgccaatagaattctggaattgtgagaaattgtatcattgaagttcagtaggatgtgtggcttaaaaatttatcaggaccacaaaaaagaaaacaaaaatatttggtactgaggttcattgccagggcaggaggtatttccagaaaatactcatgcctgtgttctgttccttgctttcccaaatactgcatgtgactttcctaagcggcagctgaaagactcgagcccgtgctgtctcctttggttattatgacatgaaagtgtatcaagaactcagcatttctttgcatccatggacttggtttggagacataaggaatattctgaccctttttaaaaaaggattttctcatgtttttatttaacataaataaaagaataacattttatcttttgtggtattattttattgaataaaattgagttttatgataaaaaaaaaaaaaaa

SEQ ID NO: 118336 - DNA, 1000 bp, Homo Sapiens
ggaatagcttatccaatcattgatgggatccctaatatgataccacaggcagctaggatgacacgtcaaagtaagaagcaagaagaagtggagcagcgctagttcataatttaaaaaaattaaaaaaacgcaacagccaacttttcttaataccatataccttttaaaacacagtggcaggtaataagtggaagagaagaatgtttctgtctcttcctacgttgactgttcttattccactggtttctttagcaggactgttctactcagcctctgtggaagaaaacttcccacagggctgcactagcacagccagcctttgcttttacagcctgctcttgcctattaccataccagtgtatgtattcttccacctttggacttggatgggtattaaactcttcaggcataattgatgcaactagagtcaatatgctgtatatattaatgatagctcttgggcatcgatctctgaaagctcaaatggatggaatttagtttgcgggaaagaggctttgctttgcgcatatcaggcttaggactgtgggaggcttaagttgcagatgcttcttttattgtactcttgttctgcccttgttttttgaaggctctgacttataactgctgtatcagaagaaacattttgacagtgtcttggttggagatgaacatccctaattgacatgtgatgactatttcttattccattcatctaagagtcattgaaattttgttttgcttgtttgtttagcttcaaggtctttggtaaagtcacatgttaaggatgactgaaataattccaaaggagtgatgttggaatagtccctctaagggagagaaatgcatttgaacgaatgtgatataaaaccacataatcaaatagaaacttcatgtacttacaaaaactgagtttgtaaaattaccttcatttctttgacattaaatgcttatattagcaataaacatgttgacactttcctataaaaaaaaaaaaaaaaaa

SEQ ID NO: 118337 - DNA, 1000 bp, Homo Sapiens
ccacgtgaaagagccacacacccattttcctcactttccctgagtctcaagagctcttgccttaccctataaatctcaacagcttaggatgtgtccctttcaactcagacttttcattttagagaatggggcagatggggcaaatcgttgaattttcccagaaatcacaccagccttagaaagcgtcaaggcaagtggatggcgtgctgggaatagaaagcagctctgggaccagttaccccatttaggaaaggagtttgcactaaactgtttttctcacagcagaggaacctttccaaggtggggatggaagcacagtcgggacagaattcgatggattcctttagttggagtccgcgtagtcagcacagacagcagtggaaaggacgctctgggtcctgttatttgctagggagggtaaagggagactatttcaaagctactgttcctagtccagctttaagtttcggtaagaaacatgctgttttgtttcatgatttcgttaattatggaaatttggcattgagggattattttattgagggtagaagagattccagaatcatcatctgtgatgatggtgtcctttagggctcttggagcagccagaccatgtttccaagagaaacctggtgatattgccagcagaccccctgccatcccccccagttgtcctggggctgaatgggcaaatctgtccaaacagctagtaaccggctgtgagggagagggtcagaagcacttagcgttggcctctgattgctgtcctctcttgtcctcttcccactccaatgatgaaaatgattttctctaaatgcctgggtaaggatgctttcaaggagctcacttggcctgcttgccctgccctctcacctctgacacccagccccaggagccagaccactcctgcctccacctctgactcttcagcagctgaagattaatgcagagaaagagcaaagcccaaaagggagaaaaaaaaaacaaaaaaaaaaaaaaa

SEQ ID NO: 118338 - DNA, 1000 bp, Homo Sapiens
tggtttctctgtggcagtgccttgttgcttgtcagtttatcaattgcattttactgcatagtctacctggaatggtattgtggaattggagaatatgatgtcaagtatccagccttgatacccattaccactgcctcctttattgcagcaggaatttgcttcaacattgctttatggcatgtgtggtcgtttttcactccattgttgttgtttacccagtttatgggggttgtcatgtttatcacactccttggatgatttccgaagagacagggtcttctatgttgcccaggctgtctttgaactcctgggatcaagtgatcctcctgcctcagccttcgaagtagttgggactacaggcccacgccaccgtgcctggctggacatgtaaatttgaagtgaatggttaaacatccagctagctgaaagcatggcagaccctaacagaaaagctacagtgtgtttttgcagctatgaagtgaatggtttcctggggaaaattgtgactttgtataactgttgttgaaaccagaataaattatatttcacttgcatatgcataaattattaaaattttcagaagtcagtgatacagaagtactattttgcaatgttaatctgtttgagtctttggagaaagtggtttcattgtaggtacatagtgcactgttaatattttaaacaagtagttcactcttccatttaagggatagcagttccttgtataaaatgactggatgtgtataaaggaattatgttgtcatgtgcctttaaccagctttagtaattactataatctcatatttatgatagttttgttaggtgacaggaccaaatgaaaatattttatgttttctcatcactttagattttatcattatgtacattactgggtttttagcatttcctaatgtgaagttttaatcacttttaagtatacatttttttctgtatcatttaaataaaatatttttataactttaaaaaaaaaaaaaaaaaa

SEQ ID NO: 118339 - DNA, 1000 bp, Homo Sapiens
ggtgggatcggttatcggtgcgctctgagagggtgccagcccccagatgatttctttttcctcctctgccccaggtccatgctgggcagaatcaaggcgcaggcgttcggctttgaccagacctttcagtcctatcggaaggatgatttcgttatggcttttttcaaagacccaaatgttattcccaatttgaagttactttcagattcttctggacaatggatcatattaggaactgaagtgaaaaaaattgaagctataaatgttccttgcacacagctttcaatgtcattttttcatcggttatatgatgaagatattgtacgagacagtggacatattgttaaatgtttagattctttttgtgatccatttctcatttctgatgagttacgaagagttttgctagtggaagactcagaaaaatatgaaatattcagccaaccagatagagaagagttcctgttttgtcttttcaaacatctttgccttggtggagccctttgtcaatatgaggatgtgattagcccatatctggaaacaacaaagcttatctataaggatctggtgagtgttcgaaagaatcctcaaaccaagaaaatacagattacctcttctgtctttaaagtttcagcttatgattctgctggtatgtgctatccttcagcaaagaatcatgaacagacattttcttactttattgtggatcctatcaggcgtcaccttcatgttttataccactgttatggtgtgggagacatgtcttaatgttctttcagattatgtacctctactattttgtatttatcatttttctatcttaatactaacttatagataaacatatactttgcaaattaattcaagaaaaatgtaaggagcctacttagagcagaagaaagcaaacaccaagatgcctttttaaaaatttgtgtggaatactaaccggggatcaaatttcatccataataaaatctataccaaaaaaaaaaaaaaaaaa

SEQ ID NO: 118340 - DNA, 1000 bp, Homo Sapiens
tgcctcccccaggtgaggccagctctcccgggcacattcgtccacaaggatcaggccccacttacccttggctcgctcagcctgtagacttggtaactttgtacagaatctttcattattgtcttaagcatggggggctaggacccacttagtccctcctccagcctgcagctaatttaggagccttgcattccagaaaagggcaactttgtgtaaagcagcttctcccacagagctttccctgcattgttagtgatgtcgggcaaagcatcactctttaacctggggcattggccccagcagggatatcatgggaccgcagccgctccgtgcactgtctctgcccccagaggaagccctgtccatggttcctggtgcacggccacaggcctgccttgaggccaccacatctggtgtctagaacagctgcgggccccacttgggcagaaggaagaggtgctagctgctgcccctgcctgctgtgaacacctgcccagcccttccttgtctgctgaggtgctcagaccagagtgccattaaataccaactgatgtcacggagcggacggtgcattgccaaggactcacagctgtgggctcccttccagctcctcccactttcttggctgggtcttctgaggcctacgtggaatgaactacacatgtggcctcatgcccaagggtttgttagatggcctctgactctgtgggattcaacttgacttttttgccccaggaggctctgtctggaaacaggcttagctttagtgctggggtgggacctgccctgtgggccccagggaggggacagtgggggtgaggccctgaggctgtccagggtctgagctctttgcctccaacctgcttctgccccaaaaggaacaggctgttggtggcaggctcctcccggggagctgtactgtacagaccaaggtgtaaataaacagtttgctcttctcgcaaaaaaaaaaaaaaaaaaaaaaaaaaaaaaaaaaaaaaaa

SEQ ID NO: 118341 - DNA, 1000 bp, Homo Sapiens
ggcccaccgccacctgcgtacgagcattttaaactctagagtgagtgacagcctttttatggttggtgttactatttatttcctgcctctaaacttctcgtggtccttataaacttgtcaggatgtgtgttgcgttgaattctgcatgtcctttttttgcccaccctcaggttaagctggtactaacttatccccagaggaaacagggtttatgagcactgacagatgtcttccctgggcaaaaaaaaaaaaaatagtatatgtatacacacacacatacacatttatatttatatttcttaaagcttttaatccctttcattccctgatatctcagagatttcaaatcattgaacactgaagtatatttttcaggccagatgaaaaattgtattaaaaccctattcctggtcgggcgcagtggctcacgcctgtaatcccagcactttggggggccgaagtaagcagatcgcctggggtcgggagttcaggacaaacctggccaacatggtgaaaccctgtctctactaaaactacaaaaaaattagcctgatgtggtgttgtgtgcctgtagtcccagctacttgggaggctgaggtaggagaattgcttgaacctgggaggcggaggttgcggtgagccaaaattacgccactgcgctccagcctgggcaacagagcgagacagtctcaaaaacaacaacaacaacaaaaaccctattccttgcctttgtaggagtcaaaataaatgaacttcttttttcttttttttattattatactttaagttctggggtacacgtgcagaatgtgcaggtttgttacataggtatgcacgtgccatggtggtttgctgcacccatcaacctgtcacctacattaggtatttcccctaatgttatccctcccctagccctccatcccctgacaggccctggtgtgtgatgttcccctccctatgtccatgtgttctcattgctccaaaataaatgaatttacac

SEQ ID NO: 118342 - DNA, 1000 bp, Homo Sapiens
aaccattgtcctgtcagccctctcaggattgaagaagaaactgagtgatttacaaactcaattaagccacgagatccagagtgatgtgctaaccataaattaactgcagcttgcctgcttcagcaaaaacggagattcaggccagcagctggatatgggggtctctcttcagactcttctcgtttctgagaatctagtctactgttggttgagcttcttggcaggacatcagtaccaactagaagtgggtcatagatagattaccagggatgcagtggtgtttaggcaggataggtctttactggccctgactgctgttaataattggcagcagtgctccccagatcccagaaggtccctgctggagtgtttccagtgcacctgtaggaacaactagacttctctcctggttagtccagctctttactctaaaccctttctgtccaaaatgagtcattttcagttgtaccttagatgtctggtgttgaggatcaagtgccatagcctttattcagggggcctataaacccttccagttcttgccccagggctggcctgctagcgcttcaaattcccaggtgtccctaatttgagaagtaaccttttggaatagcattagaccctggctgtcccctccccaccaaataaacatgatatttcattctctgtccagcagtcatgaaccccttcacctccaatgacctgatcatttagtttggtgggggtgggggtgggggtgggggtgggggtggaagcagccgcaggagcaagggcccctcccacatacacaggaggagtatttcatttctccttaatgaaggctctggccctaacccctcagcactgtctccagataggaacatgcacaaagcagttaattaggcagcctggagaaaaccagagatccagtacagaaaggaaaggatatttattgattaacagaagttgtctttttaaaagtgtttatttttgcaataaagagcacaacataaaaaaaaaa

SEQ ID NO: 118343 - DNA, 503 bp, Homo Sapiens
cacctagcagttggttggcaaccccttcctcagtcccctgctgaaaaccctccagtcagcgcttatcccttctgctctctcccctcacccagagaaatacatggagtttgaccttaatggaaatggcgatattgatatcatgtccctgaaacgaatgctggagaaacttggagtccccaagactcacctagagctaaagaaattaattggagaggtgtccagtggctccggggagacgttcagctaccctgactttctcaggatgatgctgggcaagagatctgccatcctaaaaatgatcctgatgtatgaggaaaaagcgagagaaaaggaaaagccaacaggccccccagccaagaaagctatctctgagttgccctgatttgaagggaaaagggatgatgggattgaaggggcttctaatgacccagatatggaaacagaagacaaaattgtaagccagagtcaacaaattaaataaattaccccctcctccagatcaa

SEQ ID NO: 118344 - DNA, 1000 bp, Homo Sapiens
tctgacctctgccctgggacttcctggatcctcctcttcttataaatacaagggcagagctggtatcccggggagccaggaagcagtgagcccaggagtcctcggccagccctgcctgcccaccaggaggatgaaggtctccgtggctgccctctcctgcctcatgcttgttgctgtccttggatcccaggcccagttcataaatgatgcagagacagagttaatgatgtcaaagcttccactggaaaatccagtagttctgaacagctttcactttgctgctgactgctgcacctcctacatctcacaaagcatcccgtgttcactcatgaaaagttattttgaaacgagcagcgagtgctccaagccaggtgtcatattcctcaccaagaaggggcggcaagtctgtgccaaacccagtggtccgggagttcaggattgcatgaaaaagctgaagccctactcaatataataataaagagacaaaagaggccagccacccacctccaacacctcctgagcctctgaagctcccaccaggccagctctcctcccacaacagcttcccacagcatgaagatctccgtggctgccattcccttcttcctcctcatcaccatcgccctagggaccaagactgaatcctcctcacggggaccttaccacccctcagagtgctgcttcacctacactacctacaagatcccgcgtcagcggattatggattactatgagaccaacagccagtgctccaagcccggaattgtcttcatcaccaaaaggggccattccgtctgtaccaaccccagtgacaagtgggtccaggactatatcaaggacatgaaggagaactgagtgacccagaaggggtggcgaaggcacagctcagagacataaagagaagatgccaaggccccctcctccacccaccgctaactctcagccccagtcaccctcttggagcttccctgctttgaattaaagaccactcatgctcttc

SEQ ID NO: 118345 - DNA, 1000 bp, Homo Sapiens
ggtgagaccatagcccagtggcgtaaagctggctaccaggacatgcccgagtatgaaaacttcaagcaccttctgcaggcaccactggatgatgctcaagaaattctgcaagcacgcttcccgatgccacgttacatcaacacggagcatggaggcagtcaggctcgattccttttgtccaaagtgaacccatctcagacacacaataacctgtatgcttggggacaggaaactggagcacccatcctaactgatgatgttagcctgcaggtgttcatggaccatttgaagaagctggctgtctccagtgcctgttaagctgaggatacaaccaggaaatgcaacggtgtcagattgtgttcaaaatgtctagaaaggcttgataacattcctgttacttttctagcagattttaacaaataatcaaggacattttatatgtaactctttagattataatttatttgtattcctgtctttgtcctttttcttgcactataaaattataaggtcataaatgttttggtacttgtagatgtttatgtgctttttgtatcctaacttttagaatctaaataaaatcagaggtaatgtattttggcagcttgtttaggtgagaatcttaatgatcataaaggaaataaatctagatgcagaaagtactggctaaaatattgctaatacaaatgtgatttcctgaggtctctgtgtgagtgtgtatgtgttttaagtgacttccttaagaggtgtttcctgaacctaattctcataattaaagtaatgtatatgcaggatcaaaatgaaacaaatataccttatcctaaagagctcataacaaataagttacctccactctataaactcagacctactttttgaagataactgcttttaacctctccttacaagatttttgttgttgatgtatttaattttagcccatgtctcaattctcattttcaaagaatcaatatattaatatacaaaaaaaaaaaaaaaa

SEQ ID NO: 118346 - DNA, 956 bp, Homo Sapiens
gagcccggggtgctggagggaggcggcaggcccgggtcaggtgcctcgagatcgggcttgggcccagagcatgttccagatcccagagtttgagccgagtgagcaggaagactccagctctgcagagaggggcctgggccccagccccgcaggggacgggccctcaggctccggcaagcatcatcgccaggccccaggcctcctgtgggacgccagtcaccagcaggagcagccaaccagcagcagccatcatggaggcgctggggctgtggagatccggagtcgccacagctcctaccccgcggggacggaggacgacgaagggatgggggaggagcccagcccctttcggggccgctcgcgctcggcgccccccaacctctgggcagcacagcgctatggccgcgagctccggaggatgagtgacgagtttgtggactcctttaagaagggacttcctcgcccgaagagcgcgggcacagcaacgcagatgcggcaaagctccagctggacgcgagtcttccagtcctggtgggatcggaacttgggcaggggaagctccgccccctcccagtgaccttcgctccacatcccgaaactccacccgttcccactgccctgggcagccatcttgaatatgggcggaagtacttccctcaggcctatgcaaaaagaggatccgtgctgtctcctttggagggagggctgacccagattcccttccggtgcgtgtgaagccacggaaggcttggtcccatcggaagttttgggttttccgcccacagccgccggaagtggctccgtggccccgccctcaggctccgggctttcccccaggcgcctgcgctaagtcgcgagccaggtttaaccgttgcgtcaccgggacccgagcccccgcgatgccctgggggccgtgctcactaccaaatgttaataaagcccgcgtctgtgccgcc

SEQ ID NO: 118347 - DNA, 1000 bp, Homo Sapiens
ccagatgccaccccgttccaggaaggtttgaggaccttcgaccagctggacgccatatctagtttgcccacacccagtgacatctttgtgtcctactctactttcccaggttttgtttcctggagggaccccaagagtggctcctggtacgttgagaccctggacgacatctttgagcagtgggctcactctgaagacctgcagtccctcctgcttagggtcgctaatgctgtttcggtgaaagggatttataaacagatgcctggttgctttaatttcctccggaaaaaacttttctttaaaacatcataaggccagggcccctcaccctgccttatcttgcaccccaaagctttcctgccccaggcctgaaagaggctgaggcctggactttcctgcaactcaaggactttgcagccggcacagggtctgctctttctctgccagtgacagacaggctcttagcagcttccagattgacgacaagtgctgaacagtggaggaagagggacagatgaatgccgtggattgcacgtggcctcttgagcagtggctggtccagggctagtgacttgtgtcccatgatccctgtgttgtctctagagcagggattaacctctgcactactgacatgtggggccaggtcaccctttgctgtgaggctgtcctgtacattgtgggatgttcagcactgtcccttgcctcaatgccagtaacgcgtcttcctgagtggtgccaaacaaaaaggttctcaggtgttgccaaatatgtcctggggtataaaactttcctcgcctgacaaccactggtctgtagggatttttggctacacacaaaccagtatcgctcatagatcagcaaaccggggcctactagagtctgaacagctgtaatctatgaattctaagtgaaattttaaaaattgttaatttttcctatattgcattaattttaaaaaaaaaaaaaaaaaaaaaaaaaaaaaaaaaaaaaaaaaaaaaaa

SEQ ID NO: 118348 - DNA, 1000 bp, Homo Sapiens
gcttgttaaataccttttgctagcctcttcatatgctgttgcatatgactctcatcacaactcagtgagatggaaagacaaatcctatttgtacaaatgagaaaactgaactctttagagtaactagctcagtattggccagctggtaaatggcagtgttgggattaaaatccagttcttatctactctccctttattcagaagcatttattggatgttgatctttgtttcaggttttgattttgttacttttttatactgtgtatattttcctcagtctacccttctgctctagattgtctggactcaggagattgtggcagttactggatagttatttttaagataatgattgcttttctctgtttatataagtcatgtgtacttattgtagaaagtttgtaagatgcaaaaagtataaaaattaaagttatgcactactaacatttcaatatattttctcccagattttcaataaagactttcaggcagtgatttaacgaggattttattttaacttatattttagtttaaggggaacacgtgcaggtttgttctatagatcaattacatgtcacaggggtttggtgtacatattatttcattacccaggtaataagcatagtacccaatagatacttttttgataccccaccctcctccaccctctaccctcaagtagtccctggtgtctgttgttcccttttttgtgtccatgggtactcaatgtttagctctcccttatacgtgagaacatgtgatgtttggttttctgttcatgtgttggtttgcttagggtaatggcctccagctccatccatgttgctgcaaagacatgatctcattctttttttatggctgcatagtattccatggtgtatatgtactatgttttctttatccagtctactgttgatgggcatttaggttgattccatgtctttgctattgtgaatagtgctgcaatgaatatatacatgcaaaaaaaaaaaaaaaaaaa

SEQ ID NO: 118349 - DNA, 1000 bp, Homo Sapiens
ccggccccccacacccacagcttgctcttctatctccacaacgtgagcctggaagaggagaaaatgtggctcctctggagcttggcagaccacttttcggtctttgcgtgatgttccttagcccaaagacggtgagacagggctgaaatcaggtggcttctgccaccctgagccctagacccatgggtggctaaatccactggactgtgaagactataatttatttccataatttatttggagattgaggaggctttggttgcacttctttggctggtgggtaatgccaggggtggggtgggcacaggccctcaagagccccttttgccttgtagtcctacaccttgccctgcctgggctttggtgcagactaggtgtggatttgagctctgtgatctatgtctgctgcctggctcctagatggctctgcgggcaggtgctggccaaggacatcatctaggcagggggagagcctgggctgaacagctgtgaccaaaactcccttctgccccaccctgccccctccacttcctgccctctgttccatcttcccccttcccaaaggccacagcctttattccaggcccagggatgtaggagggggaaggaggaaacaggaagcccagagagggcaaagggcctacctcggggcgcgaaccatgccccagactattatctcagggctttctgggcactgcacttcagcgtggcccacctgcccatgccctgaggccagttggcgaggggtggctcctgagggtttttataccctttgtttgctaatgtttaattttgcatcataatttctacattgtccctgagtgtcagaactataatttattccatttctctctgtgtctgtgccaagaaacgcaggctctgggcctgccccttgcccaggaggccttgccagcctgtgtgcttgtgggaacaccttgtacctgagcttacaggtaccaataaagaggctttatttttaaaaaaaaaaaaaaaaaaaaaa

SEQ ID NO: 118350 - DNA, 1000 bp, Homo Sapiens
aggtgctggaggaacatcccagttcacaaagcccccatctcttcctctggagccagagcctgcggtggaatcaagtccaactgaaacatcagaacaaataagagagaaataagaatagaatgaatgaccccaaaatagggttttcttgggcgaggatgtgctggattaggaaaggtgacatgacacaggcagagcagagtggcacccaccacagaatacagtgtgtgttattacgaggagccagcagttgagcctaaggtccttctacctacctggtattggcatttgaggtcggaaaccctctactgccccataagccaggaaaagtgaaaagagaacacagttcctttaagaactggcagcaaggcttgaggccttatgtatgtagctgagtcagcaaggtacatgatgctgtctgctttcaaaaggacttttctctcctagctgactgactccttccttagttcaaggaacagctgagacagacctctgctgagtagctctgtgatgacaaagccttggtttaactgaggtgatcctcaggttgtgaggtttattagtccccaaggcaaacacaaatattagattaataatccaactttaatagtatacatttaaaagaaaaaaaacaaaagccctggaagttgaggccaagcctgctgagtattgcagctgcatttgcccaaagggaatccagaacaagtccctccctgtattttgttcttgagaggggtcagtctagaagctagatcctatcaggatgaggagcagcagcccagggcttgtctggatcagcaccaacgattttaaagaaaaaaggaagagtttcttagatgagtaattgttattgaagatagtcagtgataaccactgaccagatgctatcaatacactatgtgtcctttttagaataaagattacatatcatcattcctttggggaaaattgttattcaggtataaaaacaagagatcataataaaaacctaaaagaacctatg

SEQ ID NO: 118351 - DNA, 1000 bp, Homo Sapiens
taaacctgctttatcttttaggattattcctaaatgcatcttctttataaacttgacttgctatctcagcaagataaattatattaaaaaaataagaatcctgcagtgtttaaggaactctttttttgtaaatcacggacacctcaattagcaagaactgaggggagggctttttccattgtttaatgttttgtgatttttagctaaagagagggaacctcatctaagtaacatttgcacatgatacagcaaaaggagttcattgcaatactgtctttggatattgtttcagtactgggtgtttaaaggacaaatagctgctagaattcaggggtaaatgtaagtgttcagaaaacgtcagaacatttggggttttaaactgatttgttgctccctatccagcctagacaccagtaactcttgtgttcaccaggacccagacccttggcaagggataggctcgttggtgacattgtgaatttcagatttgttttatccactttttttgctatttatttaaatggtcgatcaacttcccacaaactgaggaatgaattccacgagcctgttctgaaaatgtggacgtaagacaaacacgtgctcgtcctttaatggagttcaccagcacacttgttaaccagtcctgtttgctttcgtctttttttgtgcgtaataaagtcaactgaccaagtgaccatgaaaaggggctgtctggggctcctgttttttagctgctgttcttcagctccgaccatgttgctgtgtgattatctcaattggttttaattgaggcagaaactgaagctctaccaatgaactgtttagaaacaagacacacttttgtattaaaattgcttgcagtaacaaatattttgtatttcctgattttcttttcaactattaccttatctataaatgttaccctggggtataatcatgttgtaggtacttaaatgcattccgcaaatcaaaatatcttgatggataaattatagagctt

SEQ ID NO: 118352 - DNA, 1000 bp, Homo Sapiens
taaaattggaattacaattttcaactgggaaacagaaacacatttcttagcgtgctcagattttatatatcaccttatcaattttttccaaaacatgatttaaagcaacatctgtcctagtataattgttgcattttaaataacaatttattgaaaaatgttaagttttaccagcctaaaaaaagtaacaaaccaattaagtgtactttgggggcagggaggagtccttgatttgaataatcaggagttttgttggtccagtttcgccttctgagcagttcttctgtatcccgggaaaagtacgctcggccccaaactggtatttgtcagacgatacatgtaaaagtttgtccttgaacgtggaacaagacttgtgtaaagtctgagacgggaactagtgatcactagctcaagaactgcaaatgagacaggaagctgttcactgtgaaacagtctcttgcttgtcgtgtatttttcgagtacttctgaagtgtgaagtaaaaaaatctggctaatttatttgtacaaatacactttgataattttttatattttcataaacttttacagatgtaaaattaaagaacttcacttgttctttggagtctgttattccattgtacgtcactacagatttttcactttatagcacagattttttaagttaagaaaacattgagaatgtatcagtttgagatgtttggtgttgaaagccaagtgtccataggttaaattacattaaagtaggtgtcacgttccaacatctagtacgatgagaaggttttgtttgtttaacatataaagcaaatttttctaatttaaatacacaaatgtaaaaatcaagtgtgtttctttagtttacttgatagagattcctgtacattgtattttatattgcggaggcttatatcactgtacatgagaacatggaacgacctaggttttgttactcgcagtagaataaacagctacaggaagtttcaaaaaaaaaaaaaaaaaa

SEQ ID NO: 118353 - DNA, 1000 bp, Homo Sapiens
tgcggccccctgcggctgtcagagagcggtgagacctggagcgaggtgtgggccgccatccccatgtcagatccccaggtgctgcacctgcagggaggcagccaggacggccggctgccccgcaccatccctctccccagctgcaaactgagtgtgccggaccctgaggagaggctggactcggggcatgtgtggaagctgcagtgggccaagcagtcctggtacctgagcgcctcctccgcagagctgcagcagcagtggctggaaaccctaagcactgctgcccatggggacacggcccaggacagcccgggggccctgcagcttcaggtccctatgggcgcagctgctccgtgagctgagtctcccactgccctgcacaccaccacattggacctgtgctgtcctgggaggtggtgttggaggccccatgaagagcgccctggactgctgagggtgggccaacagcccagagctcaggacacttggctttggggggaaggaaactgaggcccagagaggggcaaccactggccaagggtcacccagcaagttttggctaagagcctggcctccagccccagcagtgtggcccagagcaggggccgactgccaaagtaaccatcatccatatgggccgtgtggtgatgctggcccggaaggcagaaagaggcagcatgggcactgccagggacagccacatcctgctggtctgcagcgtggtccaccccgcctctgcccagcctgtctacaccgtgtgagctgaatcgtgacttgcttcccacctcctttctctgtcctctcctgaggttctgcctgcagcccccaggaggtgggcctgccccatcctagctggactcatggttcctaaataaccacgctcagaagctctgctaggacttaccccagccactgagtggcaggcgcatgagatttgtggctgttcctgatgctagtggcacacagtgcttatctgcataaataaacactggccaccagc

SEQ ID NO: 118354 - DNA, 1000 bp, Homo Sapiens
aagataatttgtatttttgcacactgagatataataaaaggtgtttatcataaaaaagaaacagtattagattttggtctccataatctattttggtattgttacgaacatggatatgacaaccaaactggaaatcagaacactagggtaaagtggatattgaaatgaagcaagaatattgtcacacatgtgttgtgcatcttgtttagggtatatttcttaatgtcatctaggtcattagttttgttaatatttgtgttgtcttgaccaagctcctactaagtataggacacaaatgttttttatcttccaaggcctggctcaaatgccactgctgcaaagctttctttgaccctctggccacctcccaagccagaagttatcttccccctccatgtactctagccttttcatgacactgatattttcgtgacactgacttatagttcactgtttacctgttggtctaacagcaaatcataaacagtagttttcaacatacttctaaggctaaattcatttccagaagtagcaaagcttactagccaaaggctccacatttatcaactcttaagagctagacttgagagcctaacagcctatatgattttgtgtaaattgatctctatacctcagcttcttcatctgcaaagtgagataattgtactattctactttcctcatagtgcggttataacagattatgataatattacaaagtacttaatacttggcatatagtatatatattagctattagtattttgcaatttggggatattgaaaattagaaattgcatgttagttcatgctgcactaccatattgttcttttggggctcttcaatgggtgaaattccattttacagtttatcatgtgcatctgtatcacaggagtattttggcaaaatgattctgtaccaaaaaggagtactataaaatgagggtgccaaatatattgagtcttttatgggattaaaagttctgttgcattccaaaaa

SEQ ID NO: 118355 - DNA, 1000 bp, Homo Sapiens
gtctgagaatttgtgaaaccagtgttgttagaagtgtatataatctgaatcaataagctctgaatggtggccaagggcctctcttatggcacaaagatgcatggacttcatgacagctcttttggtggctcagaagccattttttatagaatcatggaatctagaatattcctgctggaaagaacctgagagttggtttggaccaattccctggttttccagcagatgaaacaggcccaaagaggttaaatgactgggtgaaaatcacatagctgtctggtgccagagccagcctatagtagagtcccctgaccccaagcccggtgctcattccactacctctcacacttcacaacaatttcctcaacacttgagggcccagaaagtctgatctctccagaatgatcagcccagaggaatgctgagaaatcacctggaggagggagcagaaagagaaggtttttaaggaggggcttctgaatacttgggagatacggaacggaccaaggaccacactccagggtgcattcgttgctccctggggcaccacttctggattacagtgtgccaggtcctttggaggccctaccccttccccattcattgccaccagtgagaaatgggggtgcccctgtgtaaagaaacctaccaaaggtttacatttgcaccttagcctcaatagctacgaaccctagagaagcagctagctggagctcatgtgcaactcctgattctcaggagaaagatggattttaacccaaaattatgagtgagctgttaactctaaaatgtacttgggagataggccaagcgagaggtcatgggccaactaagtgttatccagtagaaaagacagtacactgcttttcttttagtgtttgcttttcctttgctatatgttttgctatttccttgtggcttagaatgtaaaattgattgttaaaagttttgttctgaataaatatttatcttttgtattgctaaaaaaaaaaaaaaaaaa

SEQ ID NO: 118356 - DNA, 1000 bp, Homo Sapiens
cgtggtcagaactttgaatgacagaagtagtattgtaatgggagaacctatttcacagtcatcatctaattctcagtgattttttttttttaaagagaattctagaattctattttgtctagggtgatgtgctgtagagcaacattttagtagtatcttccattgtgtagatttctatataatataaatacattttaattatttgtactaaaatgctcatttacatgtgccatttttttaattcgagtaacccatatttgtttaattgtatttacattataaatcaagaaatatttattattaaaagtaagtcatttatacatcttagaaaaaattacatagttttgtttttacaattctgaaatatatgaaaaacttagatagaatatgtcatatgttattataacagatctcttcctacatcttatttttcttctttgtatacagtagtgacagtttaccttcagtcatcctacaggtcacctctgtgcccaacaactttacttgcctacaacggttcacaaactggaacaggccatattcaaagccagtgcctatttcttcagaactgttaacagatatagtgagttgagggagctaatctgatacacttttgataatataatgcctttcaaattagttaccaaatcataaacagagtggaataaatataaattagattctaactaggatgaatgtggtagtaatgatgtatatttttcaaatttacctaaacagaaagattattggctaaggcaggcggatcatgagatcaggagatcgagaccatcctggctaacacggtgaaaccccgtctctactaaaagtgcaaaaattagccgggcgtggtggcgcatgcctgtaatcctagctactcaggaggctgaggcagaagaatcacttcaacccaggaggtggaggttgtagtgagccgagattgcgccattgcactccagctcaggcaacaagagcaaaactccgtctcaaaaaaaaaaaaaaa

SEQ ID NO: 118357 - DNA, 1000 bp, Homo Sapiens
agagccaagtggggactaagacgtacaaacaattggtagctggaaatagtcctaagaaacaagcttctagaccacctatccaaaatgcatgtgttgcagataagcacaggcctctggaaatgtcagccaagatccgagtaccatttttacgtcaggttgttcccattagtaaaaaggtagcccgggaccctcgctttgatgatctgtcaggggaatataatcctgaggtgtttgacaaaacataccaattcttgaatgacatccgagcgaaagagaaagagcttgtgaaaaaacagttgaagaagcacctttcaggagaggagcatgagaaactgcagcaactgcttcagcgaatggagcagcaagaaatggcacagcaggaacgaaagcaacagcaggagctgcacctggccctgaagcaagaacgtcgggctcaggcccagcagggccatcggccatacttcctgaaaaaatctgagcagcgccagttggcactagctgagaagttcaaggagctgaaacgcagcaagaaattggagaacttcttgagtcgaaagaggcgacgaaatgcaggcaaggacaggagacatctccctttgagcaaagagtaataaggaactatcctctgctctgccactgccccagggagacatggatctgtgaggacagatttggccacggctggtttccgttcaagggcaaggatcacagctgcccttgaatctcattgcctcagagaagactagagggctcttggactatccctagggctacacaagaatagttcagccttctgccatgccacacagcctcagcttgaatctggttcattgcgtcctcgtgttcttctctcatccttgccttaaaccagggattctgataccgaagaagaggggccaatgaaaaccatggagtctgttcgtgactcccagggctgggacattatgtaggagccacttcataaacattctctttactcatcaaaaaaaaaaaaaaaaaa

SEQ ID NO: 118358 - DNA, 1000 bp, Homo Sapiens
ctacacctgcatgagtgaaggatttccacgtagacacctaggaagagcccgcatgccctagactcactccagaggaaggattgatttgcaaccagaaagggagctgaaaaccacggagctccatggctcttcattcaaaagggaaaataatgattccacgttgctttttagagttcaaatcaacatctttctggataaatctattttttaacaatctttttattatttgtaaaagatataaaaacaactcccatcagtagcaatacaaggttatacattttaaccagattttctcaggccttttttggatacctttagtagttaactctcttttgtcaaaccctcttgtatataaccatcgcacaacatacagaaccctggggaatacagccaagggcactgctcactgtggcccgtgtattcattcccacaggctgcactgaaataacctggtaaacaacaccctcctccattttgcgtctatttcttctattgtgcttctttggggataggaagagaaacataactactgttccaggtaacgtctgtatcatacagttagtgttgccagtgaaacgttcccagatacaaagaattgtgcttttaattccatttcacaatctgttttgttttttttttttgtcattgtctgaccaaaattccttctgcacatgaggccagtataggcaacgtcacatttgtttgtttcaaatatgcagtgtggtattttgtttactttgcatttaccgtgagcaaagatacttcttggaatggctgcagtgaggccgtgtcattggctcacaaaagtgactcataggtaatttctgtgtttgcattccactgctctgctccctaaggtccttgactttctccccaggaattcacttaaaaagggactgagcattgtgtcaacctgttgcagtgtttttcatatatgtgttcactctaaaaatgcaaataaagactgcttccttagagggtgctcatacaaaaaaaaaaa

SEQ ID NO: 118359 - DNA, 1000 bp, Homo Sapiens
ccaaattgaaaaaagaaattccctggaccagatgctgaaagagaaaagaggggttggtagttggctatggattttctaaggaagatcactttgctctgattatggaaaagtcttcaagggctgcttcaaactcaaacacagagagaaactctatgggtatcaaacagctcaggctgtttttgggtgcaagagggagcacgtgactgtattatacatgggtagcttctgacctcagcattatctatatagtacctttgctcttgcagagaagccttggtactaggcagttagagatgcctccctgaccctgcagagatgcggtggctaaaggtcccaaggcaaggggtgcctgggaaccttcctgtcttcatccttagcaacagccgagtggatagatgccctgctagatgagaattcagctgcccccgctcatgggcccctctgactcccaaagagctgcctaagaggcaatgagtgtgttggcttgtgatctgggaactcccaagaacagcaggcccacctaccttcaaagctgaagccgccaggaccgccaaagaatgccttgaagatattgtttggatcaaaatctgtagagcagggcaagtaacatggaagggaagaaaaggtgaaaaattagaaatgttcgaagagaactgatgacactgagaacagatctccaaagctttcctggagagtctcactcccctcctttcccaacacttcagactgcaagtgagcaaacctgccccatcccgtgcaaaacatgctacctgatcccactcctaggacatgttcccttctccttccaactgctgccccaaaggaagctttctctgcttcagcttgcttcattgggctgttttctcaacaaatggaatgccatttgcacttacacaagactttccccatactctgtctccctataatgctggagcggctactaaaaaggataaaatgtatcacttaaatgttaccaaaaataaatataagagcaagatct

SEQ ID NO: 118360 - DNA, 1000 bp, Homo Sapiens
gaagggagggaataaatcatgacttatcccattttcaataacaaaacgaaactatggcactaaccaaaaacttgcattctggcataatttttacagttgcagagaattgtttctgggctcattaaaaaaagtagtattgcagacattgctgcaatgggaagcagacaataacttcttaaaggaattctacacctcctttaagatttacttaattgctacatctaaattctgataatttaaaatccattttaggtgataaaattttttaaaagttttgaaggaaacctctggataaatggacaaggcctaatttttttttgtagtcaatccaactgtactggccaatttttgaaataagattatatgattaggtattagcagagacaaagagttacctcctccatcttactctgccctatttgaaagtctcaggggagaaaagggaacaagatgctgatccaacctgagtggagtcaggtgaggcatctttacatctaagaatttttttttaaattttattattattatacttcaagttctagggtacatgtccacaatgcacatgtctgtcacacatgcacacatgtgccatgctggtgtgctgcacccaccaacctgtcatccagcattaggtatatctcctaatgctatccctcccctctccacccaccccacagcaggccccggtatgtgatgttccccttcgtgtgtccatgtgttcttattgttcaattcccacctatgagtgagaatatgtggtgtttggtttttggtccttgcaatagtttgctgagaatgatggtttccagcttcatccatgtccctacaaagaacatgaactcatcattttttatggctgcatagtattccatggtgtatatgtgccacattttcttaatccagtctatcattgttggacatttgggttggttccaagtctttgctattgtgaatagtgctgcaataaacatatgtgtgcatgtgtctttaaaaaaaaaaa

SEQ ID NO: 118361 - DNA, 1000 bp, Homo Sapiens
cacaggggagaaatcctatgaatgtaatgattgtgggaaaacgttctcccagaaatcacaccttagtgcacaccagagaattcacacaggggagaaaccctatgagtgtaatgaatgcggaaaagcttttgcccaaaattcaactctcagagtacaccagagaattcacacaggggagaaaccctatgaatgtgatgaatgtgggaaaacttttgtccgtaaggcagctcttagggtacatcacaccagaatgcataccagagagaaaaccctagcatgtaatggatttgggaagtcctgagggaatgcataccttaccacataacacatagtgcagaaactcatgtgacataggctgggaacttgtttcccttatccatttcctttttcattaggctcatagtttgtggaaaaatcccaatatgccgtttattcaggtggggctgaccatgggatgtggtgctaatgataaatattacatttacccttggcccttaaaaaaaaaaaagaaaaaccctcacagtcttcctggttcataagatggatttggaggttatttctgcagcaaacttgggtcctgtgtgttcaaaaccatagagcacaaggtcaaggaagctagagtctgaaaaacgaacaattcacttccaggtcttcatcagggttttgtttttgttgctttaaagcaagagttaagtttatagtctgttaagctcttacaaatttggcttattagttaaatggacgtagtttagcttaaactttatgttagagtgagatgaaaccctatgaatataatcagttttagaaaaactaatcagtttattgtgcatcagagacgtcacatgaagaagaaaacttgtcgacatccaggatgatcaggagccttcattaaaacagaaattttagggaaaaccacaaaaaccttcgtaaagtgaattgcattaaacatcaattataataaaatttcatattttgaataaatgaaaaaaaaaaaaaaaaa

SEQ ID NO: 118362 - DNA, 1000 bp, Homo Sapiens
ttaggtggtcctgcctggacctgcagatggtacaatggcatggcttctgtctaaggtacagaggggttggcatttcaggaaccaggccatcacagaaacaggttcatgggcagacccctcagtgagctgcaggtatctcacctggcagccgtccagtactgctggcttcctctggaggcccagccacaggctggggttggggtgtgtggacatctctgggcagctcttgagtccaccttgtgccagatcagcagtgccacccaggctctgcctcctggtgttactctttgccaacagctttacggacattggatgaagccgaagcatttagaatggtgcctggcacacagttggtgcgtgatatggttaagctttgtgtccccacccacatctcatcttgaatggtaatcctgggtgtttagggagagacctggtgggaagtgattggattatgggagcggttttcccccatgctgttctcatgatagtgagtgagttctcacgagatctgatggttttacaagtgacggtttccccggctccctcctgccgccatgtgaagaaggtcgttgcttccccttcaccttccaccaccatgattgtaagttccttttttcttttcttttcttttttttttttttttttttgagatggagtctcgctctgtcgcccaggctggagtgcagtggcgcaatctcagctcactgcaagctctgcctcccaggttcgcgccattcacctgcctcagcctctggagtagctgagactacaggcgcccaccaccatgcccggctaattttgtttgtatttttagtagagatggagtttcaccatgttggccagggtggtctcaatctcctgacctcgtgatccacccacctcgacctcccaaagtgctgagattacaggcgtgagccaccgcgcccagcgattgtttcttgaggcttccccagccatatggaactataagtcaattaaacctctttccttttataaatca

SEQ ID NO: 118363 - DNA, 1000 bp, Homo Sapiens
gctgcagggcaaggagccagtgatccgccttgtccagagccaagtggccaggtatcccttccacaagcagccgcccacctacgtccgagcccagcgctacaagtactggttctcccagcctggggagcagggccagtggtggcggcgccagtgggtggaggagttcttcccatccgtgtccctgggggaccccacgctggagacgctgctcaggcagtttggactacaggagaaaagcccacctcgcacccgcagcgccaacagcaccctggcccaggccctccactggactcgctctcagctgtctcccctggaggcccccgccctgctctgggggctcctcatggccgtgggggctgtcagatttgtgcaggccctgctagcaccctgttctctccggtcctccccgctggcaccagtcagcggggagaagcgcaggccagcctcccagaaagactccggagctgcctccgaacaggccaccgcagcccccaacccctgctccagtagttcgaggaccacccggcgaaagaagtagctgtgttctcccagctgcacgtcctgagagggccaggtcgccgggagtgctctggcctccggcaggacaggacccagccactgtgccttagctgaccctgcagggccaggcacaggttggggggctgcccctggggtttgcagggtgctgcattgagggctccaggccccacccccacgccagccatgcccctccccaggactcccactattgcctctgtgattggcccaggaggaaaacacgaccaagctcaagacccttcccctgccctgggctgtgggggtctgagtctagagcccccaaccctaggccccgtgccagaggggaagaggctgactcccaggggaagaggggaagcactgtcatcttccacgtcatcttcacaccagcccatcctgccctttagatctgggcaccaataaaggcgtcttttgtgcttgaaaaaaaaaaaaaaaaaaaaaa

SEQ ID NO: 118364 - DNA, 1000 bp, Homo Sapiens
tgagaaagggatgggcaaggacaccagctctttgcacatgaatagggtgatagctggggtgactgagtccctgggggaggccgggacagaagcccagatagaggtcaccagtgagtgggcaggcagcttggatcccatatctggcaaggagccagcctctcccgtccttctgcaggggcaaaatcccaccctcctcagtcccttgggggccgaagtctgtctctctagtgtagccaggcctcatgtgagctcccaggatgaaaaggatgcaggcccaagccttgaacccccaaagaagtctcccaccctagcagtccctgcagaatgtgtgtgtgcactgcctcctcagctccgggggcccttgacccagactctgggggtcctggccgggctagtggtggtccctgtggctctgaacagcggtgtgtccctcctggtgcttgcgctgtgcctctctctggcttggttctcataggctctgcttgtgggatcagcagaggcttaagatgggatacatggcctgtgcagtgaggggacctgggtcctttgcttctgagaatgctcaactgaaagagaggccttctcatccccaagctctccagtcaacacagggctccctgtggtgacaccagtggagatgagggaacgggtagatggtgtgagtgaggggaacttttagagtggaactgggcatgtcctccgcctaccccccgagcctgtatttatttttgtataattctctggatgagggagagtggtcgtgagctggtcttggggcacaattacccagagatatatttattaacagccaacctgtgcaacctgctggagctttatttttaatttaatttatatagagtacctattattatatgccacaatagagctctatgagaaacagtgtcttgcggtgtagtgttctcctgtttgggcatgagtgtgcagggtggtcactttctgtgggaggatcacagtggggagttgggggtgggacgtggtc

SEQ ID NO: 118365 - DNA, 1000 bp, Homo Sapiens
ctgagaagccttttgcctggataggagggggctctcccaggcataggcttgtggccacttgcccagcacaactgtgttttgtggggcgtcttttaggacttagcagagctgagagccctttgttgctcaatgctgtgagccttaagcatgtgaatccccccacatgacaagtggggagacccagggtaggctttcctttggatcatctccaaatgggagtgccatgtggcaggaaagaagcaccgatttcaagaattacttcctagagaaagtcaggaactagagaccagagtctgcaggaactttgccactgcccttcactggctaatcctgtacttctctctgtgttccttgagtgacaggtggtaaaacccttaaaaagggaggtgtgggaggcccaggactttggtaacaggtgatgaatgtgttgtcttggccatcacaggtggagcttcagttagtacccgagggattcccctggcacaagcattataggaattagtccaccactggcgtgggtgagcagccaggtaatgggaattgatcagtgccaccacccttgaccccaactaccatcccagatgcccagattccagtcctggagttttattctctcagcttgatcctttgaccaagaagatccagtcccaatatgtcacctgtgcttcatctttggactatatctcaggtgtttacgtgtcaactaatgggagcttactgggttagaagtcaggacactgagtttcaatcctcacttagtagtctgtggccctctttggcacattaacctccctccttgatcctcaggctgcacctctggcaaatgggagaatgcggctccttttgacttcaagggatctttgtgggaaccaatgagaaaatgtgtgtgaagatagctttttggtatattttaaaagtgcacaaatttaagatcttactgctttataaagtgctttatgaattataggaaaataaacacattttagatcttagaaaaaaa

SEQ ID NO: 118366 - DNA, 1000 bp, Homo Sapiens
ccgtccaccgtgggatccgctacctgttgtacagagcacagagagccatccgccttcgccatgccctccgcttgcaccctcaattgcatcgggcccctattcggacttggtctccccatgtggtccaagccagcactcctgccatcacagggcccctcaaccatcctgccaatgcccaggaacatcctgcccagctgcaaaggggcatcagcccaccccaccggatacgaggggctgtgcgatcccgcagccgctccctccggggctcctcccatttatcccagtggctcaacaacttttttgccctccccttctcctccatggcttcccagcttgacatgtcttccgtggtgggggcaggggaaagcagagcccagactcttggagcaggtgttccccctggggactctgtcagaggctccatggaggcctctcaagtccaagtgcctctggaagcctctccaattacattcccaccaccctgtgccccagaaaggccccccatcagcccagtcccaggcgcccgtcaagcaggcctctgagagtgctacccttctcttgtaaccttgcagccaacacccctgcccggcccctgagctgcctcctccagcccatgctcttacaggccctgcacagagtagcactcattaattcttggttaaggaatgaatcaacgaatgaatggctatgcatggacctctgggcagggagacctgggtcttctctggctgagaggggaaggctaaggcatggctgagattcaagccaccattccaggcctctttgcccaagaaagaaacttctgtcacccttgcactctcctgtattctgagtccctggccaatagcacagccttccatgccccgacccccaccccaagcctctccactaggcctctgccaggatctaagcccatgagcacagggactggctatcccaagacctggcagatgtggctgctcaataaacacttgttgaaccatcaaaaaaaaaaaaaaaa

SEQ ID NO: 118367 - DNA, 723 bp, Homo Sapiens
gcctcaagccgacgcagcggcctactctcgcactgcagacggggaaactgaggcctgaggcggccggggtggggcagacctcccggcgagcccgagcccccgcccccggctagccccgccctggcccgtaagaagcacccggggcgcgaggcgaaggcgcacagcgcggggccaggctgggtccagcagcgcgatggcagctcagcggctgggcaagcgcgtgctgagcaagctgcagtctccatcgcgggcccgcgggccagggggcagtcccggggggctgcagaagcggcacgcgcgcgtcaccgtcaagtatgaccggcgggagctgcagcggcggctggacgtggagaagtggatcgacgggcgcctggaggagctgtaccgcggcatggaggcagacatgcccgatgagatcaacattgatgaattgttggagttagagagtgaagaggagagaagccggaaaatccagggactcctgaagtcatgtgggaaacctgtcgaggacttcatccaggagctgctggcaaagcttcaaggcctccacaggcagcccggcctccgccagccaagcccctcccacgacggcagcctcagccccctccaggaccgggcccggactgctcacccctgaccctcttgcactctccctgccccccggacgccgcccagcttgcttgtgtataagttgtatttaatggttctgtaacaataaaaaaa

SEQ ID NO: 118368 - DNA, 1000 bp, Homo Sapiens
agagcctggtgaaggagttgcccagctctttccagcagcgcctgtcctacaccacgctcagcgacctggccctggcgcttctcgacggcaccgtgttcgaaatcgtgcaggggctactggagatccagcacctcaccgaaaagagcctgtacaaccagcgcctgcgcctacagaacgagcaccgagtgctcaggcaggcgctgcggcagaagcaccaggaagcccagcaggcctgccggccccacaacctgcctgtggttcaggcggctcagcagcgagaactagaggccgtggaacaccggatccgtgaggagcagcgggcgatggaccagaagatcatcctggagctggaccggaaggtggctgaccagcagagcacactggagaaggcgggggtggctggcttctacgtgaccaccaacccacaggagctgatgctgcagatgaacctgctggaactcatccgaaagctgcagcagaggggctgccgggcagggaatgcagccctgggactgggaggtccctggcagtcgcctgctgcccagtgtgaccagaaaggcagccctgtcccaccatagccacaggcagcagaagtctgggcagagttcatcttcttgacctttggccactgccttcccagctgcccgcagggggttccccctgctgaggagagaccaggtggaccctagctgcctgtcacccttcatctgggacttgctgtcaaaccctaggatagtctcataaaggggaggctgggccagcctgctgctgtctgcttcaggaccaggcagagagtgaggctgggggttctcacaccttactccaccgggcacatcccaacctgcactggggcccacccgagcgcttgttctggtctcagccgctcccttggcagctgcagcccccatgcagaagaggctcccaggcccaagctctgtgtgacccagagaaataaagatgcctcagtgtggcccaaaaaaaaaaaaaaaaaaaaaaaaaa

SEQ ID NO: 118369 - DNA, 1000 bp, Homo Sapiens
tcccggcggcggcccccgccaagccactccgaggcccggcggccggcggcgcgcacctgtactgccccctgcggctgcccgcagccctgcaggcggcctcagtccgccgccctggcccgcacctgccgtacccggtggagacgctcctagcctgagtagcgccgcggggcccgggaacgccgagtgcgcgccgtcggggaggcgggaacgcgggcccgcgcgcggactttgcactttgaatccagaggaagatgaatttttaaaatctccatcaaacgtgccttaaagctaaagcattttgacaggagtatttaaacttagtccaggatattttcctttgtgttttataactttacagaggaccaaagcaattcttgttttagtttctttgcgaagcctgctcctccttcccttcataaggactttttttgtctttctttaacgcccaggcttcgtcttatttctactgtttttgtcgcaacttccattgatttatgtcccttccctcccccctaagtacatcagggaacctttccacactataaatgatatgactactgtttggggtttctgggcccccatccgtgtacgtatgtggcatttccaggtatgactgagtgtgagagacatgtcagaggctcttcagtgatttcttgctattgaccgatgcttcactgtgccaaaagagaaaaaaaatgttgggttttgtaattaaattatttatatatttttgaaacccgaattgaaaatgttgcaggcaacgggctacagctttattagtggttctctaactgtggtctccttgggccaagcaatttctttaaaggaaaagttgattatgtatgtggggtgccaggaccactgccttgaaagcaagtgtgatttttatttttaatattattttatttgtgtctgtgtacatattcatgtataaattttatgaaacccaagcatagtgcttattttttaataaaacaactgacttaaaaaaaaaaaaaaa

SEQ ID NO: 118370 - DNA, 1000 bp, Homo Sapiens
ccagggtctcctgcggtacaactctgcggccgcggcccccggcgaggccctgcacaccgcgccaaaggcggccagcgacgcgggcaaggcgggcgcgcacccgctcgagtcccactaccggtccccgggcggcggctacgagcccaagaaagatgccagcgagggctgcaccgtggttggcgggggcgtccagccctacctatagaagggccgagcacagcaatgcaagtaagtgggcaccctggtgcttcccagaccctgtggagcctcccagcaccaacttgcttaatgtgtttttcttgcttctggtcatggggttagaagacagagcatttcaatcttgtccagcttttctttccttaagggggaaactatattttctgttttatagattccctctttttggcacaagttctatcactcctttacctagggaaggaaaaaaatatatatatatatgtgtgtgtgtgtgtgtgtaatatatatatgtatatatatagtacatgtatatatatagtacatgtgtatatatatattacacactactgttgttttcttttgaaacaatagattattaaaatctgggcatttatatgcaatttagagccatttttactatgctagacacataatagacacatgctttgatgagcttgggctaccaaaacttggagtagcaaaaacctttatagatgatgtttgcaaaataagactgaagagacacgaggcgtactagtcttttatcagccctgcccaacctcccctccacccatgtccaagtggacaggactctgacattctcccggggctcacaacagtatctcaaaaaatatgttgctttgcaacgagtcagaattactaatcatagatcttgaagataagaaagatttggaaccacttcagatcaactcgtttttataatggtgttgttgtggaactgaaagattggggatgatttggttttttccttggtccacaggtaggtgtcacaattgctttg

SEQ ID NO: 118371 - DNA, 1000 bp, Homo Sapiens
cctgactctggaggagacccacagcatcttcctgtggtacacggccaccaacaagccccgcctggactttcccctgaccaagaggaagggcctcgccccgcagaggtgccaccgattccagtcttctgcctaccgcagcaaccagtggcggtaccgcgggcgctgcgacagcatccagtttgcagtggacagaagggtatttattgcagggctgggcctgtatggctccagctctgggaaggctgagtacagcgtgaagattgagctcaagcggctcggggtggttctggctcagaacttgaccaagttcatgtcagacggatccagtaacaccttcccggtctggtttgaacacccggtccaggttgaacaagacaccttctacacggccagtgccgtcctggacggcagcgaactcagctactttgggcaggaggggatgacggaagtgcagtgtggaaaggtggccttccagttccagtgctcctcggacagcaccaacgggactggggtccagggtgggcagatccctgagctcattttctatgcctgaggtgcccggggaggctgcagcaggtcagcgagtgagtggaggggaagtcaaggtgctaactgcttcttgacaccatgaaaggctgctcttaactttgtctctctttgacatgtagtcagctgaagcttgactgtgtagagacattttccacacagccagaacccagggattggagtcttaggcatctctggtacagtggggtgcacgtctcaggtggaggaagatttacggctcaagacaggccccagatcccctcccagtggcacccacgccacctgctttgaggggttggatcttcctgctaccctcttggattctaagtggttccaagcttaacttgagaccttcccttcaaatctaaaattggcaaaaagtcacttaaaatagtggacttctgtaataaaggttgcctaaaataacaaaaaaaaaagaaaaaaaaaaaaaaaa

SEQ ID NO: 118372 - DNA, 1000 bp, Homo Sapiens
tttttttttttttgtctccaggggaggggctgtttgctggctcaggctgaggatggcccaaagtccagggtctggtggggaggagggaagcttaactcaagtttgggttagtgagttagcaagctctttgtgcagatggggatgtaggtaaatctttttaaaagtgaaattaacctcctgccaattttacaacccaagaatttttttttaagggccttggagccatctctaaaacaaacctcaagggatttagtgccctgtctccctgtctctagaagccttagcctgggcacctggctcaatcttgtaactgcctgctagccatagattcctttcagccttgctgacttctccctataaaagtaaagcctttttctgccccagctctgagacacttgcagatcttaaggtctgagacttgctgattttctggttggagtgtttttttgtattgccatagtcccttccccctgaagcaatagcccctccccacctcctgcaatacgcctttccaatctttattggaagtctctccctgcctacttcctaatttattcttatttgacagagggtatggaagacttgcaatttgaaaactggggaccagttccaaagtcagtaattgtgttaaccacgtgtataacagctctgctggacacccaagaaagccatgggaacgccaactggaaaggtccccttccccaggggagcctgcgaaggagaggttctgtagaatccaagcccacatttccaaagtcacccccaacgcgtcctctcacaccgtccactgtgcgtttgtatgtgtctgggatccagggcaatgtgaattttctttttatttgggagattgttcacggaaaacagatcttcttctctcttgtccacctattaattgtttacaatatttgtacatctatgcaaaatacttgaatgggccatggtgccttttttccttgttagtatttaattaaaaatgaattgtttgtcatttgcaatgtta

SEQ ID NO: 118373 - DNA, 794 bp, Homo Sapiens
ggcagccgtctgtgccacccagagccggcgggccgctaggtccccggagaccctgctatggtgcgtgcgggcgccgtgggggctcatctccccgcgtccggcttggatatcttcggggacctgaagaagatgaacaagcgccagctctattaccaggttttaaacttcgccatgatcgtgtcttctgcactcatgatatggaaaggcttgatcgtgctcacaggcagtgagagccccatcgtggtggtgctgagtggcagtatggagccggcctttcacagaggagacctcctgttcctcacaaatttccgggaagacccaatcagagctggtgaaatagttgtttttaaagttgaaggacgagacattccaatagttcacagagtaatcaaagttcatgaaaaagataatggagacatcaaatttctgactaaaggagataataatgaagttgatgatagaggcttgtacaaagaaggccagaactggctggaaaagaaggacgtggtgggaagagcaagagggtttttaccatatgttggtatggtcaccataataatgaatgactatccaaaattcaagtatgctcttttggctgtaatgggtgcatatgtgttactaaaacgtgaatcctaaaatgagaagcagttcctgggaccagattgaaatgaattctgttgaaaaagagaaaaactaatatatttgagatgttccattttctgtataaaagggaacagtgtggagatgtttttgtcttgtccaaataaaagattcaccagtaaaaaaaaaaaaaa

SEQ ID NO: 118374 - DNA, 1000 bp, Homo Sapiens
agtgcaggacaacccagctatgcccacatcctcaggctcagaagggaatgtcaagctttgctccctagaagaagctcaaaggatatggaaacaaaagtcggcagagatttatccaataatggacaagtcaagccgcacacgtcttgctctcattatctgcaatgaagaatttgacagtattcctagaagaactggagctgaggttgacatcacaggcatgacaatgctgctacaaaatctggggtacagcgtagatgtgaaaaaaaatctcactgcttcggacatgactacagagctggaggcatttgcacaccgcccagagcacaagacctctgacagcacgttcctggtgttcatgtctcatggtattcgggaaggcatttgtgggaagaaacactctgagcaagtcccagatatactacaactcaatgcaatctttaacatgttgaataccaagaactgcccaagtttgaaggacaaaccgaaggtgatcatcatccaggcctgccgtggtgacagccctggtgtggtgtggtttaaagattcagtaggagtttctggaaacctatctttaccaactacagaagagtttgaggatgatgctattaagaaagcccacatagagaaggattttatcgctttctgctcttccacaccagataatgtttcttggagacatcccacaatgggctctgtttttattggaagactcattgaacatatgcaagaatatgcctgttcctgtgatgtggaggaaattttccgcaaggttcgattttcatttgagcagccagatggtagagcgcagatgcccaccactgaaagagtgactttgacaagatgtttctacctcttcccaggacattaaaataaggaaactgtatgaatgtctgtgggcaggaagtgaagagatccttctgtaaaggtttttggaattatgtctgctgaataataaacttttttgaaataataaatctggtagaaaaatgaaaaaaaaaaa

SEQ ID NO: 118375 - DNA, 1000 bp, Homo Sapiens
gtcggcggtttccagccaatggattctggtcaactggtggagattggctgacaccctggagaagccgaaaccagagagccttttgttttctcttttttcctgtctatgctctgtctcacttaacactacgttttctgctatggtctgtggttgatgacctcaatatgagtttcgattgttaacgtgtttttgtttgggaagtaattttgtttgaaaatgctctcacatacaggaattagggcctagattgtaagctcttgcagcagtcacatttgttcccgggctttggtggttatttctaaatttttgaggtgctttgctatttcttgtgtgacctgatagctccctggaactttgggtctgtgtgtgacacatgagactcacagttggagttctccagctctggaggtgctgaaggagctgcattaattctggaagacgactccatgcagcaactactgaagaaaggaccagacttcaacggggagtgtggatgggccgacctggctgggactcgtgaatctggagaagagctggagaatggatagtattgtctgtatttggagactttaatttctgtgtgagaccaaaggaggagagatgtgttttgttcaaaatttaaatttgttgtggtacactatcttatgtaacctgtctggtgagtttgtttggacaacctaactcagctttatttgacatggaacctaaaatagaagataagatcttgatattctgtacaagttgatgtaataccctgatgcgttttagaggacttggcataaaatgaaagattggcaaaggcccttgaggggcttggggatgacagtatggaactgtctgcattggaccctaaactggactagaagaggcatcttcaaggttcatacgttgtccagctgtaagttcatttgagtagcagacctaacaaatatttgaggtcagaaccctaccatgttaaaacaaacaaaaacttaccatgttaataaaagtattcatttgc

SEQ ID NO: 118376 - DNA, 1000 bp, Homo Sapiens
ctgcaatatcctgcagctcatccgaatatggaggctggaccacctgagtcaggagaatctacagatgccctcaagctttgtcctcatgaagaattcctgagactatgtaaagaaagagctgaagagatctatccaataaaggagagaaacaaccgcacacgcctggctctcatcatatgcaatacagagtttgaccatctgcctccgaggaatggagctgactttgacatcacagggatgaaggagctacttgagggtctggactatagtgtagatgtagaagagaatctgacagccagggatatggagtcagcgctgagggcatttgctaccagaccagagcacaagtcctctgacagcacattcttggtactcatgtctcatggcatcctggagggaatctgcggaactgtgcatgatgagaaaaaaccagatgtgctgctttatgacaccatcttccagatattcaacaaccgcaactgcctcagtctgaaggacaaacccaaggtcatcattgtccaggcctgcagaggtgcaaaccgtggggaactgtgggtcagagactctccagcatccttggaagtggcctcttcacagtcatctgagaacctagaggaagatgctgtttacaagacccacgtggagaaggacttcattgctttctgctcttcaacgccacacaacgtgtcctggagagacagcacaatgggctctatcttcatcacacaactcatcacatgcttccagaaatattcttggtgctgccacctagaggaagtatttcggaaggtacagcaatcatttgaaactccaagggccaaagctcaaatgcccaccatagaacgactgtccatgacaagatatttctacctctttcctggcaattgaaaatggaagccacaagcagcccagccctccttaatcaacttcaaggagcaccttcattagtacagcttgcatatttaacattttgtatttcaataaaagtgaagacaaacga

SEQ ID NO: 118377 - DNA, 1000 bp, Homo Sapiens
tgctgcgcacctcagcatgggatactgccctcaatccgatgccatctttgagctgctgacgggccgcgagcacctggagctgcttgcgcgcctgcgcggtgtcccggaggcccaggttgcccagaccgctggctcgggcctggcgcgtctgggactctcatggtacgcagaccggcctgcaggcacctacagcggagggaacaaacgcaagctggcgacggccctggcgctggttggggacccagccgtggtgtttctggacgagccgaccacaggcatggaccccagcgcgcggcgcttcctttggaacagccttttggccgtggtgcgggagggccgttcagtgatgctcacctcccatagcatggaggagtgtgaagcgctctgctcgcgcctagccatcatggtgaatgggcggttccgctgcctgggcagcccgcaacatctcaagggcagattcgcggcgggtcacacactgaccctgcgggtgcccgccgcaaggtcccagccggcagcggccttcgtggcggccgagttccctgggtcggagctgcgcgaggcacatggaggccgcctgcgcttccagctgccgccgggagggcgctgcgccctggcgcgcgtctttggagagctggcggtgcacggcgcagagcacggcgtggaggacttttccgtgagccagacgatgctggaggaggtattcttgtacttctccaaggaccaggggaaggacgaggacaccgaagagcagaaggaggcaggagtgggagtggaccccgcgccaggcctgcagcaccccaaacgcgtcagccagttcctcgatgaccctagcactgccgagactgtgctctgagcctccctcccctgcggggccgcggggaggccctgggaatggcaagggcaaggtagagtgcctaggagccctggactcaggctggcagaggggctggtgccctggagaaaataaagagaaggctggagagaagccgtggtggtgaaa

SEQ ID NO: 118378 - DNA, 1000 bp, Homo Sapiens
caaagcttatgttagagaatatcttactgtaagaaacaaggaaaattgcagaaacatttgctgagtgtttttaataggagtcaaaaagaaagggtcttttcagaaactgaagtaggaaataataacagacaaggtcaaaaaatagatgcaggctgaaaagaaaaggaagtgggctaagatgggaaaaatataaaaagatttaaaatccagcaacaaaatttacacattcatttggatgcagtgaaaagggcagaaataccacagcagagaataaaattgataatgttggcaacacatttattaagtgatccaacatgggatgggaaggaatgggcaaagagattaaaatgacagaagttagctgtagatgacctatcccacagcaatcggagttcttgaagaagaaaccagaacaaataaaatagaaacaataatcagagtttaataattaattttctgagtttttttttaaaaaaactaattatacaaacttgaaagggttcaccttgccctagcaaaactaggattgggacacctttttttccccctgaggatcactgacaaaaaacactgcaccagtaaggaagcaactaaattttgttttgttctttgaaaaaggctaacctgagctaggtaaaggttatatcattcacttttgaaataaaccatcgagaacacaaaatgacaagtgagttaggttgggctgatgggatagaaggtgggaggggaatgctatacagctgggaacagcagactttctctgaagggccagatggtaactacattagggtttgcgggtctgatggtcgccatcataactgcatactcaactctgccgttgtagggtaagagcagcactcgatgacacagaaatgaatgcacatgactgtgttccagtaaaattttattttaattaaaatcaattcatgtttgaaaaaggatttaaagtagcttctaataaaggacatgtgtaatgaaacttaaaaaaaaaaaaaaaaaa

SEQ ID NO: 118379 - DNA, 1000 bp, Homo Sapiens
tgacttcacacccggctcggagctgctcatcaccaaggccaagaacgggcacctggctgtggtcgccccacggctgaattctcggtgataaaggcgcccactggaccctcccaacgcccaatgctttgcttttctcctcctccccttcccagttaccaaagactcgaacttccagacagggacccagggacaccccgaagcccacctgcaatctcccacctcctgcccatccctctcttgagggagcagcaggggccaggagctaccccaggagtgggccaggccgggccacagcaataggaaagccagggccagagcgagccatgccagccctactgccgatgccaaatatttgagagaagggaacttttgctgaggttttctctgaggtttttttgatgctttataggaaactattttttaaaaaaagccatttcccacccaaggacacagtggatgtgttttccctgactccagcagggcaaggaatgtagccgagaggttgtgtgggctgggctctggtgccctcttccctggccaggacacctctcctcctgattcccttggcaccttgtctttctgtctgtttacctgtctccctgcctgcccatctgcatcttttgcagcccactctgacttccatctgggggctgagaccacccttgcctgcccccttctttctgccttaagaatgtccttttaggctgggcatggtggctcacgcctgtaaccccagcactttgggaggcggagacgggcagataacctgaggtcaggatttcgagaccaacctgacctacatggagaaactccgcctctagtaaaaatacaaaattagccgggcatggtggtgcacgcctctaatcccagctactcgggaggctgaggcaggagaatcacttgaacccgggaagtggaggttgcagtgagccaagagtacaccactgcactccagcctgggcaacagagcgagactccgtcttaaaaaaaaaaaaaaaaa

SEQ ID NO: 118380 - DNA, 1000 bp, Homo Sapiens
ggtgaatggctagtgtcattttgtttaattttgttttgctttttgatggtggataagatgaaattttagctgtttcagcatcaatccaacttaaaagcatcttggactttgttttcccttccaaactaaaagatcaaggcatgtattagacacaagcatatttgctgcctcaactcctctgacacccatattaggaaaaggcctgccaccaaagcaggaagctgcacactcctaacccttctcccagggtgtggggtcccttgacgtcatgaagagctattgcaaggtgcttctgtacttttccagcctggaaatggagggtgactggccctggctcctgctatgagaagataaccagcctcattttctcagtgccccagaggtctaggataggatttctaaactggaatcatccttaatcaccttgaagatcccttaagaggcatttgactggtgctgccgtctgtgtcctcaaagcaatgctggtggcagcgtcctgtgtacacatgcagagctaatacccaaactaaaaactgggtaactggccctgaagtgcttcccaatcagtaagcccacagggaaatgtttgatttttatgttctgttggattttggtttgcttggcatatctaaaggtgcctttacttttctttttttttttttttctttctgctttgttttgtaggacttgttctaacatggaaaacaagtccagaagactctcctctgactgttacctttgccccaagccaccccaaacttttatgctcatgttttattaaagcaggtgctccctggaatctctgggacatttttgaggcatttgaagcagaatatagagtggtctcatctccttccttaatcttcctggtggttgggatgttccacttgtatcatagatttttttattacagatatgctccactgtttttaaatgtgaacttgtgcgcaaatgtgcagattcaatgttcttgttacagattgaataaatttttattttg

SEQ ID NO: 118381 - DNA, 1000 bp, Homo Sapiens
caccccagccggccttctctggggcctccccgtcgtcaagcctctatcctgtctgtccccaccccagctgtcccctgcccagggaactggcataaaagcacgaggcccggctccctggggcagctgcttgagaacagagactgctaccccatcctgcccatgcaggcaggctcttgccagccccgttctgacccgtgtccccccaggctctgcctgggcagaagactcaccttggaggagtgggccctggagtcctgtccctcccagaagcccccagggtgggatttctcaggctgccagggcaggcccaggcctcaggaagaaggggaggcccctggcctctccgggatcagtcctaggacacaggctcagcctcaggttgatgggggatgatgtgctcccggggcctgcctcctgcacggggctccacggagcccagctcccagacacgctactaagtgcctagggttgcccgctgtggcctgctcccagggagcaacagagaggccaccaagcagaggcccgtggggctgaggatggagccgcccccagccgactccaagcccgcagagggcagacgccaccctggactgctctccctgcccagctgggcctctctggcctattcctaccttccaggcccactgcactcctgtctgggaggcccttatgagggcagcccagcccccgcacccacccccaaccagagaagcacagatcttggggagctgccccacaagccccgctggccaccgagggctgcagccgctgcgctgccggcttctccccaccaccctgccacctccactgtgatgtatgtccgctccctcgtctgttcccccaggatctcgaagtgactccgggctgagcagtggggcggctgggggaggggtgacgattctcctcaggctttggccctgcaagcaaacccacatatctgctctgtatgtaataaatgtcttaacgtcgtaaaaaaaaaaaaaaaaaaaaaaaaaaaaaa

SEQ ID NO: 118382 - DNA, 1000 bp, Homo Sapiens
ccctcctgccagatcccccagtcaggacttctccttcattgaggacaccgagatcctcgacagtgccatgtatcggagccgtgccaacttggggcgcaagcgtgggcaccgggccccggtcattcggcctgggggtaccttgggcctgtcggaggcagcagactcggatgcacacctgttccaggactctacagagccacgggcatctcgggtgccatcttcagatgaagaggtagtggaggaacctcagagccgccggacacggatgtcgttgggcaccaaggggctgaaagtcaacctctttcctggcctgagcccctcagccctgaaggccaagctgcgcccccggaatcgctcagctgaggagggagagctggctgagagcaagtcgagccagaaggagtccgcggtccagcgttcgaaatcctgcaaggtcccaggactgggaaagcccctcacgttacctcccaagccagagaaatcctcagggtcagaaggatcgtcgcccaactggcttcaagccctgaaactgaagaagaagaaggtctgagaagtcactgaggttcttcccacctggcagtctcaggcagtgcccattcctgtggggtccctgggtgaggagacggctggagccccaccatgccccaggctgcagcctctgtcccctccacctctgaggagcgtctggggaggcacatttatgcactttgtatcaccctccgaactccccccacaccttcccttccctggatttcatcactagtggttgaaggttttgtcccttcctctcctccttccctctccctctctgcttcctcctccagcctcccttgggttttcttttgataccaatttatagcattttttataaaagcctttgatttttataatgggtgggactgtatccctgcctcaccccaggtctccgtctgccccgccaggtaccccacagagaccaatgacattttgccacttgaaacaataaataaagttttttggg

SEQ ID NO: 118383 - DNA, 1000 bp, Homo Sapiens
tgacaagcagaagagtattcaaatagaacttctcaagcacgaaaaagtccagcttatttctgagctagcagccaaggaatcactaatatttggtttaaggacagaaagaaaagtatggggacatgagctggcacaacaaggatcttctctagcccaaaatcgtggaaaattggaggctcaaattgagagtttatctagagagaatgaatgtctgcgaaagacaaatgaaagtgatagtgatgcattaagaataaagtgcaaaatcatagacgaccaaactgaaactattagaaaattaaaagattgtttacaagaaaaagatgaacacatcaaaagattacaagaaaagatcacagaaatagaaaaatgcactcaagaacaacttgatgaaaaatcttcacaactggatgaggtacttgagaagttggaaaggcacatgaaagaaaagaaaaactaaaacaacagttgaaaggaaaggaagtagaacttgaagaaatcagaaaagcttacagtacactgaatcggaagtggcatgataaaggagaacttctatgtcatcttgaaacacaagtaaaagaagtgaaagaaaaatttgaaaacaaggaaaagaaacttaaagcggaaagagacaaaagtattgaactacaaaagaatgcaatggaaaaacttcatagtatggatgatgcctttaaaagacaagttgatgcaattgttgaagctcatcaagctgaaatagcacagctggccaatgaaaagcagaagtgtattgattctgcaaatttaaaggtccatcaaattgaaaaagaaatgcgtgaacttttggaagaaacatgcaagaacaaaaaaacaatggaagcaaaaattaagcaacttgcttttgctttaaatgaaattcagcaagatatgtgatggttctgagaatgaatttaattgaaatagaccagcagacctattgtaaaaatgattaaatattgtaatagtagcaaaaaaaaaaaaaaaa

SEQ ID NO: 118384 - DNA, 1000 bp, Homo Sapiens
caagggccggtccccacactcttgctcctcctgggcatctggggacaggaacacctctcagggtggccaagaggggcttccttgggaccagtgcaaggaagttctgctgtccctgggaagtctcagaaccaggaaggaaaccctgtggaggctgccctttgacctttggacgccacctgtaatcactctggatggtgtctgtggagttcaggtttattttctatttaaatgaactaaaagccagcatcctgccgggcgtggtggctcacgcccataatccagcactttgggaagccgaggcgggcagatcacctgaggtcaggagttcgagaccatcctggccaacatggtgaaaccccgtctccactaaaaatacaaaattagctgggcgtggtggcgggcgcctgtaatcccagctacttgggaggctgaggcaggagaatcgcttgactccaggaggcgcaggctgcagtgagctctgatggtaccactgcactccagcctgggtgacagagcgagaccctgtcttaaaaaaaaaaacaaaacaaaaccagcatctgttactggaacagagacctcagcccaagctcaggacaaggaggcctccctgggagagggggcctttctcccaccatcaccgcctgtgtccttcaggggctgctggagggcagcccaaagccaggggcccaccccgccccaccccaccccaccccaccctctgaaatgtgaaaagcctgcactcttcctgtgggctgcgcagtgggctcgggggttggggggtgccggggcgatgcttccaccctggactgagtgttcggggcagcctgctcggctgtatgtttctcgcacgctcacccgcttcagtgcggctctgtccctgctgccgcctccagtcctgagggaggggcttgccccaccttctacattccaatttttatatctttgaattatgtgattagatattaatttaatgataaaaccactctgaaagctcttctca

SEQ ID NO: 118385 - DNA, 1000 bp, Homo Sapiens
aggcctccagaatcttcacagtctctatctgcaagggaataagatccagcaaattgagaacctggcttgcatcccctccttgcgcttcctgtctctggcaggaaaccaaatcaggcaggtggaaaacctcctcgacctcccatgcctccagtttctggacctttctgagaacctgatagaaacattgaagctggatgagttcccccagagccttctcatcctcaacctgtctggaaacagctgcaccaaccaggatggctaccgcgagctggtgacagaagccctgccacttctcctggacctggacgggcagcctgtggtggagcgctggatttcggatgaggaggatgaagcctcaagcgatgaggagttcccagagctgagtggcccattctgctcagaacgaggcttcctcaaggagctggagcaggagctgagcaggcacagggagcaccggcaacagacggccctgacagagcacctgctgaggatggagatgcagcccaccctcaccgacctgcccctgctacctggggtgcccatggctggggacagcagcccttctgccactcctgcgcaaggggaggagacagtccctgaggccgtctcctcaccccaggcctcctctcccaccaagaaaccatgcagtctgattcccaggggccaccaaagctctttctggggaaggaagggggcacgagcagccacagcccccaaggcctctgtggctgaggcccccagcacaaccaaaactacggccaagagaagcaagaaatgattctctgtcaacctttctctactagtggagaggagtggggcctgcccctcttctcagacctctgacctgtgacagaagcccatccccagtaaagtgtctctaggccctgagtatgcttttcatgtcacttggggtatctcaggggaagaaaccagtgaaagctccaggaaacaaaatacagagctcagtgagccacctgattctaaaaaaaaaaaaaaaaaa

SEQ ID NO: 118386 - DNA, 1000 bp, Homo Sapiens
cagcgaggaggaggaagaggacctggatggagacgattgggaagatattgattctgatgaagaattggaatgtgaggatactgaagcaatggacgatgtggtggagcaggatgcagaggaggaagaggctgaggaaggcccaccccttggtgccatccctatcacggactgcttattttgttcccatcattccagctcgctgatgaagaatgtggctcacatgaccaaagaccacagtttctttattcctgatatagaatatctttcagatattaagggactgattaaatacttgggagagaaagttggtgttggcaagatttgcttgtggtgcaacgagaaagggaagtccttctactccacagaagctgtacaggcacatatgaatgacaaaagccactgtaagctcttcacagatggcgatgctgctttggaatttgcagacttctatgattttaggagtagctatccagatcacaaggaaggggaggaccccaataaggctgaggagttgccctcagaaaagaacttggaatatgatgatgaaaccatggaattgattctgccttctggtgccagagtgggtcatcgctccttgatgagatactacaaacagcgatttggcttgtcaagagctgtggcagttgccaaaaatcggaaggccgtgggccgagtacttcagcagtacagagccctgggatggactggcagcacaggagcggctcttatgcgagagcgagacatgcagtatgtccaaaggatgaaatcaaaatggatgctgaagacaggaatgaagaacaatgccaccaagcagatgcactttcgggtccaagtgagattctgagagtctgctgggattgagcaatcatctcctgcccaagtttcctccttgccctgaggaccagtgaaagacagatcataggagagacccttttgctgctacttcattcgttctgacctaataataaaagttagaaccataaaaaaaaaaaaaaaaaaa

SEQ ID NO: 118387 - DNA, 1000 bp, Homo Sapiens
gaaagatgctattgtccgtgctggtgggacggagtccatcgtggctgctatgacccagcatctgaccagcccccaggtgtgtgagcagagctgcgcggccctgtgcttcctggccctgcgtaagcccgacaacagccgcatcatcgtggagggtggcggggctgtggcagcactgcaggccatgaaggcacacccgcagaaggccggcgtgcagaaacaggcttgcatgctgatccgaaacctggtggcccacggccaggccttctcgaagcccatcctggacctgggggctgaggcactcatcatgcaggcccgatctgcccaccgtgactgtgaggacgtggccaaggccgccctgcgggacctgggttgtcatgtcgagctccgagagctgtggacaggccagaggggcaacctggcgccatgaccccaggcccagtctgggccgtgactctgggtgagtcgtgtgactcaggaatgggggtagatccatgtcctccactgtcccccattagttctgtccccttcacaatgagaagtgttttctggcaggccctaggtaaagggtcgggggaggggggagccttgtagggaggcctctacacagaagaaagcagcccccatgtcccagccacttctgggtcccagccagcagcacggatgttactgtcctgctccttcccccagccccacgccctaccagagggggcaaagggcacgtcccatcactcactgccctgtctgaaatgtggcagccactgtgggccaggctcagggcagggcaggcgattccagtggggttgggccccctggcgcctgctgcttactgcagtttcatgcaggcctctgctccttgtctttcttacctgtaaaatgggtctcagatgctccgccctgcttggccccagcttgtctgtctctgggtcctgggccagccaggatacctgataataaaagatcattgggtgaaaaaaaaaaaaaaaaaaaaaaaaaaaaaaaa

SEQ ID NO: 118388 - DNA, 1000 bp, Homo Sapiens
aagaagcagcagcagcagtaatacaaggcaaatagaaatcaacaacaactcaaaagaagtgaattggaacttacacaaaaatgaacacctagaaaaacctaacaaataggcctgcctacaatattctcattattaacttcctctatttcacacagaaaccaaggacaacaagatacaaatacctttaaattgataaaatgttttcactgtaatataaattatgagtgcgggaccactattcaatttttttttgtaaagaatgtatttataaccaacattttgttgcttttttttttaattctgtaggattgaacttcaataccaggaagttatgccaacttttcaagtagttttataatagaaaaattgtaatagttttaatcaagatgttcaggggtattaaaacagaactgtgtactgtatatctgtatatatgtatatatgtatgtatatttaaggaagtccagaaatcatactgcatacatgctacaaaaaagtagcaaaaaagtacaaagttggcttagataacttgtaccattttaaatggagatcataattttatgttcacttgatggggaatgactagaatggggcaataacaaatcatttctaaacagttattttccattaaaagccatattaagtattttgcttgttaaattctagttttatgttttaaatctcttagtggttacattgccatttggtagcatcatgtatatatttatgcttataagtttgcattatgactcctgtaaaatatgaaattataatgcaataaaagtgttatctttcttacaaaagttttgtacctaagtggatatagataactgcataaatgaataaattcagaattaactccttcaatatttctagtagcacaactgataatattgatattttctacaaatgttacttctaaaattacagacaaaattacttacacaattcagttaagatgctttgacactgaataaaatattgatttcatgaaaaaaaa

SEQ ID NO: 118389 - DNA, 1000 bp, Homo Sapiens
agtcaaaataaggtggcacaatttaattgttttgtatcagaaatacactgacccaccttttattgagtcctgccacatgttaggtaccgtgctctgctgtggagacagagcagtgaccccaaggagctcacggtccctgaaggaggtgctagagaagagacttagcttctgatactgccaatttaatgtgagaacatggggtatactgcatcatttccattttcatcaataacatatgttttatgcaccttctttacctgaaacttactaagaatctaccagtaaacaaacatcctgtctttttgcaagtatgaatcacttaacctgctgatagttgaagaacactttaggagttttgtattcttgtatatagtttattttttccatgtgctagccaggtaaagattacacagttcttctggactgttaaattgtgcatggttttggaccccttctgctctactacagagagtgaagaagaaagtattaaagctcactttaccattccatatacttactaaaagcctgtgtaaacatgtcttaatgaatgttgttgaaagcaatgtaaatagttgaaaatataaatttatattacagtttaagaaaaccttatgaggcatcactagccactgttaatatctatttgtattcttataccttttcaatatatttgaacaaatatagtttctggcactatttttatactaggaaaaggagttactatgtatattatgcttagcttttaaggcattttaaataaccatgaatgttgatttcattactttcctttcctccatcacgagagtcatttcagatgactctttcatgacaaaatcactttaaaggaacacttacctccgattcctgtataaagtcatgagatggtcaaggtggttttccattgtgcaaattcttcacctgtcagtggtttcctcattttgccatgctttgtaaaaataaaaagaatgatcaagtaggtatgaaaaaaaaaaaaaaaaaa

SEQ ID NO: 118390 - DNA, 1000 bp, Homo Sapiens
ggagagtgaagctcccagggactatttcctcaagtttgcctatattgtggatttggacagcgacacagcagacaagttcctgcagctgtttggaaccaaaggtgtcaagagggtgctgtgtcctatcaactaccccttgtcgcccacccgcttcacccattgtgagcaggtgctgggcgagggtgccctggaccgaggcacctactactgggaggtggagattatcgagggctgggtcagcatgggggtcatggccgaagacttctccccacaagagccctacgaccgcggccggctgggccgcaacgcccactcctgctgcctgcagtggaatggacgcagcttctccgtctggtttcatgggctggaggctcccctgccccaccccttctcgcccacggttggggtctgcctggaatacgctgaccgtgccttggccttctatgctgtacgggacggcaagatgagcctcctgcggaggctgaaggcctcccggccccgccggggtggcatcccggcctcccccattgaccccttccagagccgcctggacagtcactttgcggggctcttcacccacagactcaagcctgccttcttcctggagagtgtggacgcccacttgcagatcgggcccctcaagaagtcctgcatatccgtgctgaagaggaggtgatgccgggcacgggcgctcctgctgccgtctctgctccaggaagctgcctcctctgggccctctccttcgtctgggaaggcaccagcatgagtcccacacacccagccttctcatttctagaggcttccacctttttatacactcagccttccctctcccaggcaggaggacccccagaccctgttcccctgcagacctcacttctgggagacagagctacagctgggacagctccaagctaccctaacccctcctttcccaggtttctagaatagtgtctggcatgtagtagatgctcaataaacacttgttgaatgaaaaaaa

SEQ ID NO: 118391 - DNA, 1000 bp, Homo Sapiens
aggtcgttcagattctaggagataagtttccatgcactttggtggcacagaaaattgacctgccggagtaccagggggagccggatgagatttccatacagaaatgtcaggaggcagttcgccaggtacaggggcccgtgctggttgaggacacttgtctgtgcttcaatgcccttggagggctccccggcccctacataaagtggtttctggagaagttaaagcctgaaggtctccaccagctcctggccgggttcgaggacaagtcagcctatgcgctctgcacgtttgcactcagcaccggggacccaagccagcccgtgcgcctgttcaggggccggacctcgggccggatcgtggcacccagaggctgccaggactttggctgggacccctgctttcagcctgatggatatgagcagacgtacgcagagatgcctaaggcggagaagaacgctgtctcccatcgcttccgggccctgctggagctgcaggagtactttggcagtttggcagcttgacttctgcagctggaggaggcccctcaggccggggatctggggagggctagcccaaaacctcccgcatcgggcaggcaccccctgaagtacttccttcagggtttcccctttgtgagggtgtcgagtagcctcaccggcctgtctggaggagcagctggctctgctctgagaaactctggcaagtggacgccattctcttgcccttaggattcactgctctctcctacagccgccaggcctggggtcctgaaaggaccttgggtggtaaagctgtacttggtgggagtgagggcgtggggaggaaccatgcaaatcgccttccatggtttttaaatgcagtaaataacatttctggatgagacttgtttccaaaataaaccagctatatctgttttgaaaaaaaaaaaaaaaaaaaaaaaaaaaaaaaaaaaaaaaaaaaaaaaaaaaaaaaaaaaaaaaaaaaaaaaaaaaaaaaaaaa

SEQ ID NO: 118392 - DNA, 1000 bp, Homo Sapiens
aaaataattcctcatttcatcattggtctttatatgtagccacaaacactgacctcatgtaggcaccttaccaatatatgacattaagtgagagtgaatcccttaggactggaacacttcaagctcaaccaactgactcagttgtcattcttcacaaaagaatagtagaggatcatgtaaacctgagcctaactcttgttccagtatgaaagttgggggagagcaccagccacctaggaaaactgtatgttacctttttactcaaaggagtcccccctgcccagtaacagtcctattagtgtttaatttcagagtttgtgtctggtagacctctacctgattcagatttggttttgttgtttcaaccatagttagagacaaattctcatgtactttcagaaatcaatatctgcagccactgttacttttaattgacattaagagacacttcataggttcccacaattcagtatgggataggctttttaaaaagcacatacagaccaggcgtggtggctcatgcctataatcccagcactttgggaggctaagacaggcagatcacctgagctcaggagtccaagaccagcctgggcaacatggcaaaacaccgtctctacaaaaaaaaaaaaaaaaaaaattagccaagtacagtggggcacacctatagtcgcagctacttgggaggctggggcaggagaattgcctgagcctgggaagtggaagttgcagtgagccaagatcgtgccattccactccagcctgagcaacacagtgagaccctatctcaaaaaaataatgatgatagtacacgttatgttaaaggtgaaatgtgcatacagaaggaagagagttggccaggtgtggtgactcacacctataatcccaatactttgggaggccaaggcaggaggattgcttgaggtcaggagttttagaccagcctggacaacatagcaagacctcatctcttctaaaaattaaaaaaaaaaaaaatagg

SEQ ID NO: 118393 - DNA, 1000 bp, Homo Sapiens
ggtttagaaagggattaggtcttttcaaaagggtgagaacagtcttacatttttcttttaaatgaaatgctttaaagaatgttggtaatgccatgtcatttaaagtatttcatagataattttgagttttaaagtccatggaggtgattggttctctttacacattaacactgtaccaagctttgcagatcttttccgacacacatgtctgaagacttattttcaaagacagcacatttttggaaactaatctcttttccgtaatatttcctttatttcaatgattctcagaaggccaattcaaacaaacccacatttaaggttctttaggattatagaataaattggcttctgagtgttagctcagtgagctaggaaagcaccaatcgatatttgtttcctttagggatactttgttctcaccactgtccctatgtcatcaaatttgggagagattttttaaaataccacaatcatttgaagaaatgtataaataaaatctactttgaggactttaccaagtaatactgttgtgttgtgatttttattataaatctcaatccaggtttactttagtatagaataggactacatactttgtctttggacctcccatgaacttattaccctgacaaatagttttagacagatactgaattttattgagctgaattttctttttgaaatgagttattcagtagtcaaaatttgaatccgtaagtatatctactttgctttgttaaaacatcatgagagtggaggcctgccacccagaaaggcacatactagtgccttttagtacaattttatgtcatgtagaagaaaatggcaatgttcctcctattgatacagatacaggcatatgtcatcttattgcgttttgctttattgcactttgcaaataatgcattttttacaaatggaaggtttatggcaactctgcgttgagccagtctattggtgccatgtttccaataaaacttctcctttcatgtctcgt

SEQ ID NO: 118394 - DNA, 1000 bp, Homo Sapiens
ctccctttcctggaccccagagtcattcctccatttggttaaaatactcagtgcagggaactcttacatcctgtctccttcacttgcagcgtcccctgctatgcctcaggtgaaccacataattcttgggtttccgttcctacttgctagtgatttctgaacatgttcaatggagcggcacacagtctagacccacttccgcattgaaaccttcactgttcctctttggtttcttcagagctttcccaagagagctgtcagttttcagctgtcagtaacacaaatgagtttatggtaacacaaatgagttttgctatctctctgagaagctcatctgacctcctgactctcagccctacagagtagggagttgatgctgacaggatgaagatttaggaataaatatgcctgggaagagactgggaaggttctagggtgaggcacctcagtaactcatggtaccttggccaagttggaaggaagcagtttgttaatgaggcacagtaatcctggctgcagggtctaggaggtaagaccagctgggatgaccttccctgggttaatcaatttccctctagacaacacaaactgcaggcatgtgactaactttgaaagaacacccatcatgtggctgctgtcacccttgaccagccgtggtggtggttactccatctgtggttggagcgcctctttgggattcacttcaaggtcttgtgcctatttttctgcatatcttctgtgatgacaaatctctgtcccctgagtgttaatttgatttttagaaatggccaaaagtcacgtgatccaaactttttttcagtaatatggagactgagctgcatggtagttggggatcaaaaatatgtgaccttaatgagatttttatgatttctaaagtaacaataaaagcagtttttagagttgagttccagagagggcagggcaatggcagtgacatgtttgtcattttaataataaataacatctattgagtgcttaa

SEQ ID NO: 118395 - DNA, 1000 bp, Homo Sapiens
atgccagaagtggcaggggccatcagggctaaccacttcacacctaccatcgtcccatggggatccaagacctgagataaagcaacagcctgcccagatccctctgttcatcctatcccttccaaggttggtccatgccaacataacctctgggcatcagacatcagcaggtctgtgtgcctcagccctgttaaggggcaggtttctctttagccctcttcctgcacttgggagcaaaggcactaccagtagagaagggccatccagccgtgccccagcctggacccctggggctcagatagaggtgctgagcccctgtgtcaaagttgttaaatgtttttgttttgttccattgtagctctttttttttttttttcccctttcctggtgattgattttacaaaagaaagtaagctgcttagaaggccctggaagggaagtgaggaggagggacaaggaagatgactagttacggagggtgagggttgttttttgccaaaaagcctgggtagagtgatctgaattatctggcaccctcctgaatggaaccccagagtacctcctgtgtggaagggtccctggattttccctaacacccaccctctcccccttcagccatgctgatggcagagaagataagaacttggagcccatttctcactggagaggaaaacttgtcatctggctttgcggagaaggttccaccttacgctcgtagtacattatctttactatgtgctaggatatcatatttaaaaggacaaaaaaatgtaaaatacttgaatgagcttgtattataacattaatattattgagagtatctgctttccaggctgaagtgattcattcattattctagtcctgctttagtcctttgtaatttgtggtaattatgcttttctttttaatacaaaaaaatgtataaaaataaacacttgaaaaggcaaaaaaaaaaaaaaaaaaaaaaaaaaaaaaaaaaaaaaaaaaaaaaaaaaaaaaa

SEQ ID NO: 118396 - DNA, 1000 bp, Homo Sapiens
gcctggccgcgcagggcaaggagctggtggataagaacatcgaccgcttcatccccatcaccaagctcaagtattactttgctgtggacaccatgtatgtgggcagaaagctgggcctgctgttcttcccctacctacaccaggactgggaagtgcagtaccaacaggacaccccggtggccccccgctttgacgtcaatgccccggacctctacattccagcaatggctttcatcacctacgttttggtggctggtcttgcgctggggacccaggataggttctccccagacctcctggggctgcaagcgagctcagccctggcctggctgaccctggaggtgctggccatcctgctcagcctctatctggtcactgtcaacaccgacctcaccaccatcgacctggtggccttcttgggctacaaatatgtcgggatgattggcggggtcctcatgggcctgctcttcgggaagattggctactacctggtgctgggctggtgctgcgtagccatctttgtgttcatgatccggacgctgcggctgaagatcttggcagacgcagcagctgagggggtcccggtgcgtggggcccggaaccagctgcgcatgtacctgaccatggcggtggcggcggcgcagcctatgctcatgtactggctcaccttccacctggtgcggtgagcgcgcccgctgaacctcccgctgctgctgctgctgctgggggccactgtggccgccgaactcatctcctgcctgcaggccccaaggtccaccctgtctggccacaggcaccgcctccatcccatgtcccgcccagccccgcccccaacccaaggtgctgagagatctccagctgcacaggccaccgccccagggcgtggccgctgttacagaaacaataaaccctgatgggcatggaaaaaaaaaaaaaaaaaaaaaaaaaaaaaaaaaaaaaaaaaaaaaaaaaaaaaaaaaaaaaaaaaaaaaaaaaaaaa

SEQ ID NO: 118397 - DNA, 1000 bp, Homo Sapiens
ggggacctggcaatagagctgcttggttggaggaagtgaagctggcttagtaccagcagctgatctcttccacgtgctgctgctttttttgccactctgatactaaaccagagaaagctgcaggtggataaagaagctgtggctgttttttgcttttgggtggcaatgagaaagagtcacagtgtgggttaaagggatctgcagtggggccaaggatgccaccccaccctcagctgtaggcaagcttgcacataaataacccccgtcagtggagtgttcgggatgcagggggcactatagtgttcttggacttgtcgtcctggggcagttttagttctttatatttagtgggtcagtgccaagtgctaccacttcccaataaaggaatggggacccagaggctgggtccctggctaccttgttatgaggttttgttatttctctgacaagattgctttggaaagagctgcttttagggattattttttgaataccccgagtggggagcagggttctcctcaaagcctcacaaccataggatcataggaaaggggccctattttcctgctgcttcccagctcagaacatatactgaatggaatgtatttttaagagaataaagtctatttttttgtattttaaagattgagagggctaagaaagtagccctcaaataaactgttattgcattataggcccctttgttgggggcagcctgttggtccacacctacttgctcaggcaggtgctctggtctctctcacccctgccccttagagtctaggtgcagcagctccaagcatgggaccaaggaggccagaacctgtcgctggaaaccagggcaaagcagtggctcagggctccttgggtgcatgtgtatcattggagctgcctgtctgcatgtatcctctggcgcgaatgctctctgttggctctgcagtacaatatgtaaccaataaagctccctcgtttccgtatactctgaaaaaaaaaaaaaaaa

SEQ ID NO: 118398 - DNA, 1000 bp, Homo Sapiens
gggtgaaaaattgtcgggatcttctgcagtccagctacaacaaacagcgctttgatcaacctttagaggcttcaacctggctgaagaatttcaaaactacaaatgagcgcttcctgaaccagataaaagttcaagagaagtatgtctggaataagagagaaagcactgagaaagggagtcctctgggagaagtggttgaacagggcataacacgggtgaggaacgccacagatgcagttggaattgtgctgaaagagctaaagaggcaaagttctttgggtatgtttcacctcctagtggccgtggatggaatcaatgctctttggggaagaaccactctgaaaagagaagataaaagcccgattgcccccgaggaattagcacttgttcacaacttgaggaaaatgatgaaaaatgattggcatggaggcgccattgtgtcggctttgagccagactgggtctctctttaagccccggaaagcctatctgccccaggagttgctgggaaaggaaggatttgatgccctggatccctttattcccatcctggtttccaactataacccaaaggaatttgaaagttgtattcagtattatttggaaaacaattggcttcaacatgagaaagctcctacagaagaagggaaaaaagagctgctgttcctaagtaacgcgaacccctcgctgctggagcggcactgtgcctacctctaagccaagatcacagcatgtgaggaagacagtggacatctgctttatgctggacccagtaagatgaggaagtcgggcagtacacaggaagaggagccaggcccttgtacctatgggattggacaggactgcagttggctctggacctgcattaaaatgggtttcactgtgaatgcgtgacaataagatattcccttgttcctaaaactttatatcagtttattggatgtggtttttcacatttaagataattatggctcttttcctaaaaaataaaatatctttct

SEQ ID NO: 118399 - DNA, 1000 bp, Homo Sapiens
aggaggcctgaggagcaggaggaggagccccagccccggaagccagggacccgcagggagcggacgctcggggcacctgcgtccagcgagaggagcgcggcagggggccgggggcccagaggccacaagaggaagctgaatgaagaggacgccgccagcgagtccagcagggagtccagcaacgaggatgagggcagcagctccgaggccgacgagatggccaaggcgctggaggcggagctcaacgacctcatgtgagcgcgggcagcgggcagggactgaagcctgaccgacctccagcagcactcggacgtccccggaccagccctcagtctcggtccacgctgctttcttcccaaaggacatgtatatttgcagagctccacatacagaaacacattattttgcagaaataggtgtttttaagaagttttactacaggaatgtctacttttgtaagtgacaggtgttaaaggcccaggtgtgctgtgccaaagagctcagcagaggctcacgtggcccaggctggtgcgcccgctgtctcggtaaggggcgggttggtgtgttttccccttgtgtaccagagcacattccttaggggacggctttgggggtcccacgagacatggactaggagtttaagcaggacagtgtgcgtgcacgagctccgagcccagcacagacatgcctggaacccccgccgcctgctgctccctcctagggaacccatttccggggaacgccgtgactgtcgggcagcctggagcttcctgcagcctcctacgcagggtccacgccacgtggcctgggctgccatcctgccgtcctcccactggcatcctggcaagggggcgttgcttttcctgggcggccttttatgtcttggagacacctgatgtaaagtttctgtaaatctatttcatatctgacccaccaaacagatttctctttaataaaaatcctttttgtaagttcaaaaaaaaaaaaaaaaaaaaaaaaa

SEQ ID NO: 118400 - DNA, 1000 bp, Homo Sapiens
cacccaagaatatatttacataggttcatagatgaaataaagtgtttatattatatataagcttcagtaccatttgctctgaagtgatctatttattttttcaggaaattcatctccatcggtaaagttgggaaggtggagagaagtggtgggggggcattgctacttatcaaagtgccattgctactttgataatctatgtatctaaaaatgtgagatgtgcgactcttatgatactgattttcctttaatgttaatatgccagaaagcatacatctaagggaacattgtccttcaaagtagacactttgggaagttatttctttattttaatgatgtatcattgttaaaaatgctgtcaaatccttaatagctacaggagctactgagggaaatcagtgtcattatttaaagtcacgccttgtgtttttactactttattcagcaggattaaacctgaataacttttggctgttgtgctaatagtgtaaataaaataagcctgccttcataaaacactaacttttaaaaggaataaacgacttctaaaattatgcctattaacatgtgtaattagtcggcagctcaaatgtttgggagtgcaagaaattaggcaccccaggatataggtcatacagggatatataaaagccatgctcattacaaaatgagcagttgatgttttatgtggcattaagacaatcaagtcctcacaactctggaatgtcttcttatactgatgctgaatttatgaatccaaattaatttccaacaggttggaatcagatttaatgtgagatcatgatagacaagaccacagaggacgtatgctctatttcttgttggccaacagcttctttctaatgttctgtgaaaaattattttaagtgtcttatataatggtgcttttatggttattaaaaattgtaaatggtatcacatttatatggatttgtcattggatctttttttggttcaacaataaaaaaatttaattacc

SEQ ID NO: 118401 - DNA, 1000 bp, Homo Sapiens
attcaaggagaaaaaggtctaaatctcaaaacatcctcagcacagaggaggaacgaactactctcttgcctaatgaaacctagtccgatggatcctggattgatacaaggttgagaaatgaatgctcctggccttaaacatcaccgtaggaagggtttttaaaattttacgcgcaaaactccgtggaccccgtgccagtgtcttggaagtgtcaacgtgtttttggatgatcctgtattgggctgtacttactgtgatactgaaaagctgtcctgctgaagcagctatatttgaaatattaagtatgaaaggagtaattaaaaacaagcaaaacaaaacaagacttagtttttaaatgaccaaacttgtccttaaagatgttgttattaactcgagttagttcttatttcctctgtttattttttattctaagtacactgattctgtgaatgtaccttttttattaacagggaaagaaatgaattaatttgatatgctctaaatacataaaggtgcttcaaaatatgtagaaacattactatgaaatcagtttttaaaagatatactttctctttgtcctgaggtttttcggtcttgttcaaaaggaagaattcttgcctgccatacagaaactctctagcactccctgaccttaagcttttctaaaaattctgtttgtgtgaaaagtacaagaataacaatacttacaacttccatttttgtaacctacgttcacttatgatctggatttataaacattacttggtataacgtttttcatttcctttaatgtctctgttttttggctctaccatctgttttgtttttgtttttatctatatcttggtagatgtatttcatccctagagcaggtcagcctccttcccctaatgcgaatgcttgttttgttagggaagggcttcctccaacttcgtgtgaaattgtgatgttgaagtgaataaatgtctattgtgtaactctcatgaaaaaaaaaaaaaaa

SEQ ID NO: 118402 - DNA, 1000 bp, Homo Sapiens
ttcaatgtaaaggaagaccaaaccatgtaccttatgaagacctttgttttaagacttccacacaccaaggctacaatgactgttaacctggaggaagtctctggtatggagttctgagagcttaagagctaaacatgagtttagacacacaagattctaaaatgcaaatgtttattttgaagcaggcattgacaacacaaaaactgtgtagtggtcttgatgctggattgtttctagagtcacaatgaattatttttatgagattaccttatttttatatatgacaaactacttctataatgcttattatggtaaaataaaattggaaaaaattaaaactgacctataagagtgttaaggacctaatagagtgacatatataaattaagcataaaatatgtaaccaggaaaagactgttaacattacatttatgcaaattaaatgcccttaaatttcaccatttgtctttcattttaaaggttatttgctcccgattatatgattcaagtgttataagttttagcttgaactactttgcagtaatttatttgacagatctctattctataaatgtgtaatgtgatgaagaaagagatctttcttttttaatgaaaacattaatgtgttaataccctgtatggataatgcttgacatttagtggtttccaaaatatattagtatattgttgaacatacattatgccttagaaatgcacattctgtattttgtgggatgataatctaattcagtatagaatatgctgtttggcaatgagtttgtggccagatttcaaatagggagttaagtggtactttcacaatccaaagatttttagttaaaaatcatgtagtctaatatgctgcagttatttttttatatttttcaatgcatttaattatcttttttataattctttgtactaactcagcatgtaacaaccaatttacatggaaataaatcgaaatatgataactattatgcaaaaaaaaaaaaaaaaa

SEQ ID NO: 118403 - DNA, 1000 bp, Homo Sapiens
acgtcgcaggagggctgtacagtggtgaggtgttggtgtgggacctgagccgtcttgaggacccgctgctgtggcgcacaggcctgacggatgacacccacacagaccctgtgtcccaggtggtgtggctgcccgagcctgggcacagccaccgcttccaggtgctgagtgtggccaccgacgggaaggtgctactctggcagggcatcggggtaggccagctgcagctcacagagggcttcgccctggtcatgcagcagctgccacggagcaccaagctcaagaagcatccccgcggggagaccgaggtgggcgccacggcagtggccttctccagctttgaccctaggctgttcattctgggcacggaaggcggcttcccgctcaagtgttccctggcagctggagaggcagccctcacgcggatgcccagctccgtgcccctgcgggccccagcacagtttaccttctccccccacggcggtcccatctactctgtgagctgttcccccttccacaggaatctcttcctgagcgctgggactgacgggcatgtccacctgtactccatgctgcaggcccctcccttgacttcgctgcagctctccctcaagtatctgtttgctgtgcgctggtccccagtgcggcccttggtttttgcagctgcctctgggaaaggtgacgtgcagctgtttgatctccagaaaagctcccagaaacccacagttttgatcaagcaaacccaggatgaaagccctgtctactgtctggagttcaacagccagcagactcagctcttggctgcgggcgatgcccagggcacagtgaaggtgtggcagctgagcacagagttcacggaacaagggccccgggaagctgaggacctggactgcctggcagcagaggtggcggcctgaggggtcccgggaggcgggtgcaagccttcgctgtgccgagccttgtgtttctgacgcaagccaaatgaagaaaagcaaagctt

SEQ ID NO: 118404 - DNA, 1000 bp, Homo Sapiens
cagacggggagctggcgggcgggggtggcagcagcagctctagccttggggggacaagcctctctcagctacgccaggggaaaagagagttaaggacactcacccccacccacgcacacacacaaggcagcgtcgggtgggagagagaaggccgtttctccttctgtagcctgggtctcccacgggccttccccgctgctgagcgagacaccagtagccaggtgaagggccacagcgggccaggccccgaccctgttgtgacccacctgggcaccttcccggaccagctccgcctcccctgccctcctctctccaggaaggagccagaaccctcacccctctcccaccctccccaggggtaaccccaggccaagcacagatagctcagctgcgacctctggcctctggggacataaacggggcggctgggccagggcggaaggtgctcctgtttccctccttctgcgtggtccctttgacgggccggccaccgtgtccgaggcgcaacgctaggcctccaggccacgcatccatctccaagttaacagcccgtcctgcccaagttctggggcaggtaggagagggccgtcacacacctgtccgcccgtgagtgacccgggggggcttccgggtggaggtggagccaccacgcccttcctcaaggggtcacttattaaaaagtccacggcctgaggccaggccctctgcacagaagccatatgccggccagccgcgcctcctcctctgtccacggaaccgctgcccatctaaccttcgtaaagacctgtctcctgtttccagccgccgcctgtggttctagcaggttctatgccatctgcattgggatgtctggttgtttttatttctgacttttttaaaattccaggtgtgccgcacccactttctcgcagtgttttaatattgtgtggagttgtcgataccacgtgaattcatacacaataaaaagcctcactctccctttaaaaaaaaaaaaaaaaaa

SEQ ID NO: 118405 - DNA, 1000 bp, Homo Sapiens
tcccccagcagacacacacaggagggcctggccactgttgagggggcacacagggcaagggtcaccaagtcggggcctagggactcctcatgcctctgagatggaatggtggtatcctgccgtggccaagcctgaaggaccctcaaaactgcctcctggagtccacggttcctgacctccgagcctcagctatgccctctgggtcaaccagaattagagccagacagggaaagtgagagctggatggaggcagacaagatgctcagagcgactattaaagaacgaaagcctctgctacggagcgcttctgtcctctgtcaggcccgagcgaagtgcctgacaccgggttggatcctcagatggccccatgaactagtgaagtgggtcaaaggaggcctggaaagatgttgcttcctcaaggccactcggccatcagaggcagaaatgaaacaggaacccaggcctagaatcacaaaggtcctagaaaccacttggctgtctggcctctcaggtgtcagggccatccagagtgagacagcattggagggacaagtgtgcatgcagatgtcctcagacgggaaggtttgagaagggtcagatggtaggcgggcctaacaagggctccgtgctagccactgtcccgcacacagacaggatcaggtcatcttgatatggagatcagtccccaaatcactgaattgtcccagcagtgctatgccctaggtactaccaatatcactcctctatttcccagaggaggaagcagcagctagactccaggaccttggggtcatatctctcagaaagccaagagtgcaggatgagagctgtctgtctcttacctgcctgtatttgtgccccatttttaaagagcagagggcctgggccacaggaaaggtatcagcccttggtgataggcacattttttaccagtctatcatttggtcattaaatttgtttacaatatactttgctataaaaaaaaaaaaaaaaaaaaaaa

SEQ ID NO: 118406 - DNA, 1000 bp, Homo Sapiens
aatcctcccaaggcccccataattcctcattcagggtcaattgagaaagcagaaatacatgaaaaagtggtggaaaggagagaaaacaccgcggaagcgttaccggaaggtttttttgacgaccctgaggtagatgcaagagtacgaaaggttgatgctccaaaagatcagatggacaaagagtgggacgaattccaaaaagccatgaggcaggtcaacactatttccgaagccatagttgccgaagaggatgaggagggacggttggaccgccagattggggagatcgatgagcagatagagtgttaccgacgggtggaaaagctacggaatcgccaggatgaaataaaaaataaacttaaagaaatcctgaccataaaagaactgcagaaaaaggaagaagagaatgctgacagcgatgatgagggggaactacaggatttgttgtctcaggattggagggtgaaaggggcattgttatagggttttaaagacccaaggtttctaacagcctctgctgttgtataaaaagtgctgtctctcagtagtatagcggttacttcatgcctcaagatttgggtacctggattgctaaactggattgttgagataaaatgagccagtgagctacagcactttggaaaatttgtgtaacatgtttttgaggtaaagttgtttttgaaatttctgaagtgttatataccaaaatgccaacatttccacgacagacttaactgtataatttcgttgtaaaatctgtaagttgtaaatattgtacatagttaaatctgtattctgttttgaatttttttaattaatagaaagaccaaccggcaaactttcagatgaatgcttactgtggtatttggaatgtatgtatcttctgaaccctacatcaagttgaaaaggtttgttttcttgtttctttggtttttgtatggttttttagaacacttcataaacacataagtcattgtaggttaaaaaaaaaaaaaaaaaa

SEQ ID NO: 118407 - DNA, 1000 bp, Homo Sapiens
gtgctgacggggagaaggcccagcaactggatgtccagttctaccagctaaagctgcccatggtcactgtggcaatggcctgtagtggagccctcacagccctctgctgcctcttcgttgccatgggtgtcctgcgggtcccgtggcattgtccactgttgctggtgaccgaaggcttgttggacatgctcatcgcgggggggtacatcccggccttgtacttctacttccactacctctctgctgcctatggctctcctgtgtgtaaagagaggcaggcgctgtaccaaagcaaaggctacagcggtttcggctgcagtttccacggagcagatataggagctggaatctttgctgccctgggcattgtggtctttgccctgggggctgtcctggccataaagggctaccgaaaagttaggaagctaaaagagaagccagcagaaatgtttgaattttaagggtttctaaaacgctctgacagatgcaagtggtggtggaaggtagtctgagccactgcctttcccaagaatcccttgttgtggaagtttccagtgctggaaaagcagcgagccagcgttggtgtggtgggcggagctcccagtcgcatggagcggtgttcatggatgcaacagaccctggcttctggagtcctctgtgagtgagggaccaatcaaaattatttttcaaaaagcaaaaaaatggccggcctcggcggctcacacctgtaaccccagcactttgggaggctgaggtgggtggatcacttgaggtcaggagctcgagaccagcttggccaacatggtgagcccccgtctctactaaaatacaaaaaaattagccaggcgtggtggcgggcgcctgtaatcccagctacttgggaggctgaggcaggagaatcgcttgaatctgggaggcggagattgcagtgagccgagatcccgccactgcactccagcccaggtgacagagcgagactccatctcaaaaaaaaaaaaaa

SEQ ID NO: 118408 - DNA, 1000 bp, Homo Sapiens
cactgcatccggttcctcctctttctgccgactctcccgggcaaccgttctgattcctggcatggagttgggggcgagctcatcagtacccagagcgcctggtgtgcagccaaaggcccccattttattagtcggtgtgttcagtatcacgctcaagacaagggccaacctattacttcacacacctcaaatacaaaaagtgcctgggaacgtcgatgaggtattaaaggaaaccactggtcttgtcagtcatgtacacacagaaaaaaaaaccagtcatttttatttttattttttgagacagagtttcgctcttgttgcccaggctggagtgcaatggtgcaatttcagctcactgcaatctctgccacccggattcaagcaattctcctgtctcagcctcccgagtagctggaattgcagacacccatcaccacgcccagctaattttatgtatttttagtagagatggggtttcaccatgttggtcaggctggtcttgaactcctgacctcaggtgatccacccacgtcaggctcccaaagtgctgagattacaggcatgaaccactgtgcccagccgaaaacaaccaagaattttttaacaataaaatgaccagcaagtaaacttgaaacaaaaatggacaaatatctaaaatatttttaaatgtatgtattttaattggcaaataatacttgtatatattgtttacaacttgttttaaagtatgaatacattgtggaatggctaaatcaagttaattaacatgcattaactcacatactttttgttttttggtgtggtgaggacacttaacatctactctcttagcaattttccagtcaccatgtcctactatagatccctagaacatattcctccaatgtaactgaaatgtatcccttgaccaacatcactgcccggccccagccccaggtaaacaccattctaccctctgcttctgtgagttcagcttttctagatttcacctgtgagtgag

SEQ ID NO: 118409 - DNA, 1000 bp, Homo Sapiens
ggacaattctagtgtggacttccagaaatttccagacaaagagatactgagaatggctggaccactcacagcagatttcattgtcaagattcgtaactcgggctccgctgacagtacagtccagttcatcttctatcaacccatcatccaccgatggagggagacggatttctttccttgctcagcaacctgtggaggaggttatcagctgacatcggctgagtgctacgatctgaggagcaaccgtgtggttgctgaccaatactgtcactattacccagagaacatcaaacccaaacccaagcttcaggagtgcaacttggatccttgtccagccagtgacggatacaagcagatcatgccttatgacctctaccatccccttcctcggtgggaggccaccccatggaccgcgtgctcctcctcgtgtggggggggcatccagagccgggcagtttcctgtgtggaggaggacatccaggggcatgtcacttcagtggaagagtggaaatgcatgtacacccctaagatgcccatcgcgcagccctgcaacatttttgactgccctaaatggctggcacaggagtggtctccgtgcacagtgacatgtggccagggcctcagataccgtgtggtcctctgcatcgaccatcgaggaatgcacacaggaggctgtagcccaaaaacaaagccccacataaaagaggaatgcatcgtacccactccctgctataaacccaaagagaaacttccagtcgaggccaagttgccatggttcaaacaagctcaagagctagaagaaggagctgctgtgtcagaggagccctcgtaagttgtaaaagcacagactgttctatatttgaaactgttttgtttaaagaaagcagtgtctcactggttgtagctttcatgggttctgaactaagtgtaatcatctcaccaaagctttttggctctcaaattaaagattgattagtttcaaaaaaaaaaaaaaaaaaaa

SEQ ID NO: 118410 - DNA, 1000 bp, Homo Sapiens
atggagaaggtggcatccagaacataccggctacggctagaggctgccaggcctggtgatgcgggcacctaccgctgcctcgccaaagcctatgttcgagggtctgggacccggcttcgtgaagcagccagtgcccgttcccggcctctccctgtacatgtgcgggaggaaggtgtggtgctggaggctgtggcatggctagcaggaggcacagtgtaccgcggggagactgcctccctgctgtgcaacatctctgtgcggggtggccccccaggactgcggctggccgccagctggtgggtggagcgaccagaggacggagagctcagctctgtccctgcccagctggtgggtggcgtaggccaggatggtgtggcagagctgggagtccggcctggaggaggccctgtcagcgtagagctggtggggccccgaagccatcggctgagactacacagcttggggcccgaggatgaaggcgtgtaccactgtgcccccagcgcctgggtgcagcatgccgactacagctggtaccaggcgggcagtgcccgctcagggcctgttacagtctacccctacatgcatgccctggacaccctatttgtgcctctgctggtgggtacaggggtggccctagtcactggtgccactgtccttggtaccatcacttgctgcttcatgaagaggcttcgaaaacggtgatcccttactcctcaggtcttgcaggtgtcgactgtcttccggcccagctccaagccctcctctggttgcctggacaccctctccctctgtccactcttcctttaatttatttgacctcccactacccagaatgggagacgtgcctccccttccccactccttccctcccaagcccctccctctggccttctgttcttgatctcttagggatcctatagggaggccatttcctgtcctggaattagtttttctaaaatgtgaataaacttgttttataaaaagcaaaaaaaaaaaaaaa

SEQ ID NO: 118411 - DNA, 1000 bp, Homo Sapiens
gtttgtacagaagtcagaactttgggttgggaatgagatctaggttgtggctgctggtatgcttcagcttgctggcaatgatgtgccttgacaaccgtgggccaggcctgggcccagggactcttcctgtttcataaggaaaggaagaattgcactgagcattccacttaggaagaggatagagaaggatctgctccgcctttggccacaggagcagaggcagacctgggatgccccagtttctcttcagggatggatagtgacctgtcttcattttgcacaggtaagagagtagttagctaacctatgggaattatactgtggggccttgtgagctgcttctaagaggctaacctggaaactaagctcagaggcaaggtaataaagcacttcagggcttgctccccaagtgggcctgatttagcaggtggtcctgcgggcgtccaggtcagcaccttcctgtagggcactggggctagggtcacagcccctaactcataaagcaatcaaagaaccattagaaagggctcattaagccttttggacacaggaccccagagaggaaaaagtgacttgcccaaggtcgtaagcaagctactggcatggcaagagcccagcttcctgacggagcgcaacatttctccactgcactgtgctagcagctcagcagggcctctaacctgtgatgtcacactcaagaggccttggcagctcctagccatagagcttcctttccagaacccttccactgcccaatgtggagacgggttagtggggctttctatggagccatctgctttggggacctagacctcaggtggtctcttggtgttagtgatgctggagaagagaatattactggtttctacttttctataaaggcatttctctatatacatgttttatatacctcattctgacacctgcatatagtgtgggaaattgctctgcatttgacttaattaaaaaaaaaaaagactccaaaaaaaaaaaaaaaaaa

SEQ ID NO: 118412 - DNA, 1000 bp, Homo Sapiens
accctgcctgtggcctacatcatcacagaccagctcccagggatgcagtgccagcagcagagcgtttgcagccagatgctgcgggggttgcagtcccattccgtctacaccataggctggtgcgacgtggcgtacaacttcctggttggggatgatggcagggtgtatgaaggtgttggctggaacatccaaggcttgcacacccagggctacaacaacatttccctgggcatcgccttctttggcaataagataggcagcagtcccagccctgctgccttatcagctgcagagggtctgatctcctatgccatccagaagggtcacctgtcgcccaggtatattcagccacttcttctgaaagaagagacctgcctggaccctcaacatccagtgatgcccaggaaggtttgccccaacatcatcaaacgatctgcttgggaagccagagagacacactgccctaaaatgaacctcccagccaaatatgtcatcatcatccacaccgctggcacaagctgcactgtatccacagactgccagactgtcgtccgaaacatacagtcctttcacatggacacacggaacttttgtgacattggatatcacttcctggtgggccaggatggtggcgtgtatgaaggggttggatggcacatccaaggctctcacacttatggattcaacgatattgccctaggaattgccttcatcggctactttgtagaaaagcctccaaatgctgcagcgctggaggcggcccaggacctgatccagtgtgccgtggttgaggggtacctgactccaaactacctgctgatgggccacagtgacgtggtcaacatcctgtcccctgggcaggctttgtataacatcatcagcacctggcctcatttcaagcactgaaggaggccccactccctttgagactgccctccctcccctgctgggtctctccaaccctcaccagccaagctggctcagcaccttgtgtccccct

SEQ ID NO: 118413 - DNA, 1000 bp, Homo Sapiens
gctagctggctgcagctgaccctggctgttcccctgcaggatctgagtggcatagagctgggcctggcaggccagagcctgcggctagagtgggcagctggggcgggccgctgtgtgctgctgccccgagatgccaggcattgccgggccttcctagaggagctccttgatgtcttgcagtctctgccccctgcctggaggaactgtgtcagtgccacagaggaggaggtcaccccccagcaccggctctggccattgctggaaaaagactcatccttggaggctcgccagttcttctaccttcgggcgttcctggttgaaggcccttccacctgcctcgtatccctgttgctgactccgtccaccctgttcctgttagatgaggatgctgcagggtccccggcagagccctctcctccagcagcatctggcgaagcctctgagaaggtgcctccctcggggccgggccctgctgtgcgtgtcagggagcagcagccactcagcagcctgagctccgtgctgctctaccgctcagcccctgaggacttgcggctgctcttctacgatgaggtgtcccggctggagagcttttgggcactccgtgtggtgtgtcaggagcagctgacagccctgcttgcctggatccgggaaccatgggaggagctgttttccgtcggactccggacagtgatccaagaggcgctggcccttgaccgatgagggtcccacgctgaccttggccctgacctcaggagccacgctgtagacattccctctcctggtctctgggtctggcttccaggctctggctgtggatgtcttcagcctctgggtgctggccagtgaggtcccaaatgacccagggcttaagggagaggcgagagaatgatctggcctcaggggacaggccacctggtcaggaggaatatttttcctgcactttttctcaggtatcaataaagttgtttccaactcataaaaaagaaaaaaaaaaaaaaaa

SEQ ID NO: 118414 - DNA, 1000 bp, Homo Sapiens
aaccatccatgaccggtgtctgctgagagaaaaggtcagctttgtgaaagaagctatcatgaaggtgttgaacttggctctcatgtttgcagacggttggcaggcaggcctgggcacttggcgaatggaatctatagagaaaatggaatctgattttaaaaactgccatatgtttcttgtaaccattttaaacaaagccgtctgtagaggatcctttccccatttggaatctctagcgttgtcactcatggctggcatggaacaaagttaaatgtcttcagcgtaataaatatctccgactttgtcatcatacatgtacatttccaccatgtgcagctgaaaagtgaaaatatttttattttggtttatttgtaaaacttgtccacagtcagcctggcacagtcgctcatgcctctaatcccagcacgatgggaggccaagacaggcagatcacttgagcccaggagtttgaggccagcctgggcaacatggtgaaacccggtgtctaccaaaaatacaaaatgtatccagacatggtggtgtgtacctgtagtccaagctactcaggaggcaaagatgggaggattacttgagcccaggaggtcaaggctacagtgagccatgattgcactactgcagtgcaacctgggtgacagagtgagaccctgactcagaaagaaccacttgcccacagtccagacagatggattgtaggtgggttttctggagattagtagatactgtatagagttgtatacataaaattgtgtcagtagtacaaagtgtatataggctgtttactcttacatttcctactgtaagatacagatttatggtactgatacctttaaattatatcatattttgaaaatgtaattactgatattcaaaataaattaaaggacttaaaatcaaaaaaaaaaaaaaaaaaaaaaaaaaaaaaaaaaaaaaaaaaaaaaaaaaaaaaaaaaaaaaaaaaaaaaaaaaaaaaaaaaaaaaa

SEQ ID NO: 118415 - DNA, 1000 bp, Homo Sapiens
tcctgtgtgggatggggggacagggagccaagctgtgaatgacaagaggagccagaagggtgggtgggtgggtgggtgtgaagacgagactagagggagtggggttgcagtggctgcctgtcccccaagcaccgcctctgtcccctactaccctgcccctgcccattcctggcccagcagagccccctttccatgagtgtggatgggcggggcaagccgtcggggagcctggggaagctcagccctgaggggcttactttgcccgtggaagccagtgtgaaggttagggcagccttgcctggctggccccattgccacctctcctgtctgacaaggtggctgctccagaggtggctgagccccaggagaggggacctcctctaactctcatgctcagattccatcctgacacactccttccctgaccctgggtgccccttctaagacaaaaccagggtccatactgcttgcctccagaggcggcttcaggcctcactaaaggtcaggcagtcctgctgagcaggagggagaggaagggggtcctgtaggacgggcaggatggtctgggcctgctcctccttcctctgcccctctgccactccacactccagcacagggctgggacaggggcttggagttcctgcagtggcggccacacttccctccctccctcccttcctcaggagccgccagtccccaagttggctgtggttgggcacctggtttgggtcctgcagagctgggctcaggccctgggctctgaacctgtgaacccttgctgtgttacgaaactttccttcctctgagggccttgaaccctctccttttcttcttttgggggtgggggttaactttattttctcttccctgtatctgcctctcccttccctcaatttcctgttttaaaactgaatggcacgaaattgttttcctcaactcggagattcctgtatggagagaatcaatttctatatttgcaataaatttcttatttaaagct

SEQ ID NO: 118416 - DNA, 1000 bp, Homo Sapiens
gaatggattggttgctgactttaaccaggaactagggccatttttattacaatgaactcaggactggcaacaaccatatggttgttccattttcataaaattggaaacaatgcagtaatagcttattgttttgttttttaaagaagatattttattatcttttacagaaatttatgattgatgtattttatctatagttatttagacatgtttacatgcagcagataattgttcatagtggactgaaaactaatgcaaggactatggtctcagtgataagtatattttgaagttcttaatatggaaatataccagtgtagcttggtactgtatttttttatattgatctgctgataccagtgataggcttaaagattgtattttcacagagtggaaaccaatttttttagttattgttcaaggagggtgcaatattaagtgttttggaatttgaagctaatttttaaaaggcctgaactatactttgaagaaacccctatagaaaaggaaagctccagctaaataggaagaattagaatattgagcttttttttcctgatttttctctttcctatctttgatggaaggaggaagtagaaagtggtaaagaattgaggctttccttcttggagagctgtaaatgacaagcattaggaaaggtaccctcctagattcattattctttcattctggtttcacttttaaaataaatggcaacttggcacacctaggctgttaacaaatctcaaagaggtttataaaaacgtatagaatacttggaagcaaagtatggatgactcggtatctgctttgttattcctcagaaatactgcactgagtatatgccctcattactggacttcattttgatacttgtctatccttcatagtgccctctacttttaaagggtttatatgttgaaaaactgctgtggccttttatgacctgtatataatgtagaataaaaataataaaatacttgatagctttttctaagtg

SEQ ID NO: 118417 - DNA, 1000 bp, Homo Sapiens
ggtcaaaaactgaaagttgcttttgactcctctatttctgtttcaactctcgtctaatccaacagcaaatccccttgatgctacctttgaaatataactagaaaagaatgacttgccaccatatccactaggtgtcactacctctaacctttttaatcgcaatatgcttattatttagttccctaatttcccagtccttgtcttgaacaatcttttctcagtacaacagccatagtgattctgttaaccatgaatttgattgtgtcacttccctgctcacaatcttccaatgacttctccctccggtggccttcaaggtcctttatgagtgttacccctctacacgtccacaccactcaccacacatacatacacatgcacacacacacacatgcaattctacctttttctaacaccatctcttatctctcattattctgcctcttacttaccctattatggctcccaagaaagttcctgctttagtgttttgttccctctgccccagagagctccccttagtgatctcagttcaaatattatcttatcagtaagacaaacccttctcccatctgccttccctatcccctgtacctgacaatctatgagtttgcttctttatttctgtctatacttccccctccccagccccaaacatgcccatcacatgccctagaaggtaagtcccatgaaggcaggggctttgtcagttttgttcatttggtatttctggcatatatattctctaaatatttcttgaattaatgaactgaaaaatgtgtgttaaagttgctaagtgtaactgtatcatactttttttgtattttaaattttaaaataaaggctaatatatttagacaggatttccaaaaactttgtcttcaaattttaattttcttcctaatattcttcacattaaactatggactctaattttctggataaaatatcctgccttatggaaatgaaatatgaaattttattaaaatgctgctatatt

SEQ ID NO: 118418 - DNA, 1000 bp, Homo Sapiens
cttcaccactattacccaattgagatcgacccacaccggaccgtcaaggagaagctacctcatatggtggaatggtggaccaaagcgcacaatctcctatgtcagcagaagattcagaagtttcagatagcccaggtggttagagagtccaatgcaatgctcagggagggatataagaccttcttcaacacactctaccataacaacattccccttttcatcttttctgcgggcattggtgatatcctggaagaaattatccgacagatgaaagtgttccaccccaacatccacatcgtgtctaactacatggattttaatgaagatggttttctccagggatttaagggccagctgatacacacatacaacaagaacagctctgtgtgtgagaactgtggttacttccagcaacttgagggcaaaaccaatgtcatcctgctgggagactctatcggggacctcaccatggccgatggggttcctggtgtgcagaacattctcaaaattggcttcctgaatgacaaggtggaggagcggcgggagcgctacatggactcctatgacatcgtgctggagaaggacgagactctggatgtggtcaacgggctactgcagcacatcctgtgccagggggtccagctggagatgcaaggcccctgaaggcgcaggctccagcccggcctgcaggccgtggtgaggaggggcgcctccccagagtctgctcccccgtgaacacagagcagaggccagggtggccagcagtggctgggtccttccgcgcccctccgtcctcctttccctgagcaccttcatcaccagaggcttgaaggaaccccgccatgtggcagggcacaggcactgttcctggtgaaccttggaccacagcatgtcagtgctctagggattgtctactccagggattttcttcaaaatttttaaacatgggaagttcaaacaaatataatgtgtgaaacagaaaaaaaaaaaaaaaaaaaaa

SEQ ID NO: 118419 - DNA, 1000 bp, Homo Sapiens
cattttattttgaattaaatgtggcttttgaagtacctagttaccttgaattcctggtgaccacatgtttttatctggaaaacctggagaaagttatctgtcccatctcccctgcttgttttttttttttttttttttggttggagctgctgtttagatgatgcttttactatgcaggagagagtttttgttaaggatatatttgaagattggcttttccatattgtccttcattctttgaccgtggcaaagtgtacagtagattttcatgatcattgcatatttcttgtcattgaaatgtatcttttatgtttttaaatgcattcattttacacttgtgagtttatcattgactttaagaggtagaaatgaaaaatgaaaattaaagctaaagcctttttatctattaatgcagatatattagaataagaatattttgggtttgtgtttattttttaatgaatttatgtttacttgatatggaaaattacgctttataggtggaaaagtagcaaataaagattaagtaaaagtaagtgaaaatgatggggaatatagtattggaattttatagctagttaaaacaataagtatcatctaatttgggtgtttattttgcagatgagaaaacagacctagaaccgtggcatgttttgcctgaaacatacagtgagttagagacagggcctaagatagcttctagcatcagatcaatcccaagaatccatcagcaacctcagaccaacccaagaagataatttaaatctatactgcttattggtcaatatatttggttctagtattaataaagaaaaatgttattaaaatagcatacatagtagtaaaataaaatacaaaaagtgtgttgatttatagctgtttgagatgataaaagtgaagcaaagcctgttaaatcattggaagacttggaaaattattttaaataaacaattacatgtaaaaaaaaaaaaaaaaaaaaaaaaaaaaaaaaaaaaaaaaa

SEQ ID NO: 118420 - DNA, 1000 bp, Homo Sapiens
gcctccagtggagtaggacactcactgaaaaactacatggaagaagatgaatccttaaagcaattgcaggtagttcatcaaccatggatcttgccaagtgacacagaaagtgaaggagtggaagcagaacaagagaaacgttccgctgatcttcttctttgcgttccatgctcttcttgtcctacgctggtctactctggtttgtgaaacagagagaagaagttgcaagtggtccttaaagaaatgcagttattcaaatccttatgtatagttctaattttatttactatgtgtaatcatttagagaatggttatttttataatctcaataataaacaagtactatcgtagccagggggtgcccaagtatgtaatcagagaacactaatcctggcaaaggattgtggggtggtcaggaggccggctgccttttgacatggttagagtcctgggtttagattactttataaatagttattaagattaatatttgatatattaaatattgcctgattcaaataactttgcttaaaatttttctgtattttaacttgtctagggttttctacttcttctatttttataatattttctcattttttagattactaaacattctacttatccacatgtgccaagatgtgccatttaggtctctgcagaaattagctgtttggtatcatcacctgccatacatgttgtgtgcagcagtgagaagtatattctctaccactgctctttctcatgattattttctctattcctattaaaatgaataattgatatgttaattaagtaaagcaaatcaataaggaatgaaatgcatggcccaaaacatagaaaatgaaaatcgtttgaccatttatccaattattgaacccaattaagatgatccattttaaatttaatatatgctcgcttttggaatgtgttatgcattgatgttaagtgaatggatctaagtaaatctattgatatctctaaaaaaaaaaaaaaaaaa

SEQ ID NO: 118421 - DNA, 1000 bp, Homo Sapiens
cctttccagaagtccagggaatgcccagtcagataagcttaagggacttaagtgaggtccttgaagcagaaaaagttcctcataaccagaggaagcctgaatcaactcatctgttagaaaaccaaaatactcaagagattccacttgccattagcagttcttcattcacgacaagcaaccacagtgtgcaaaacagagatcatagaggaggcatgcagccctgttctcctcagagatgccagcctccagccagctgcagccctcacgaaaatatactgccctataaatacacaagctggagaccacctttccccaaaaggtctgatagaaaggatgtccagcacaatgaatggtacattggagaatacagccgccaggcagtggaagaggcattcatgaaggagaacaaggatggtagtttcttggtccgagattgttccacaaaatccaaggaagagccctatgttttggctgtgttttatgagaacaaagtctacaatgtaaaaatccgcttcctggagaggaatcagcagtttgccctggggacaggactcagaggagatgagaagtttgattcagtagaagacatcatcgaacactacaagaattttcccattatactaattgatgggaaagataaaactggggtccacaggaaacagtgtcacctcactcagccactccctctcaccagacacctcttgcctctgtagcctggtctttgtgttatctttggtttactggattcagcgcttccattgttttcattgatttcaaaagtttattttctgtgccttcaagggacaacttttttaactttggagaaaagaaaaacactctataacagagagtggaaaatcactcacggttttgaaagttcaaaccacagagaaaatatttataacatgcaaaaaataaaaacatttctagtaactggccactggaaaataaataaaaataaaaactaaaaaaaaagaaaaaaaaaaaaaaaaaaaaaaaa

SEQ ID NO: 118422 - DNA, 1000 bp, Homo Sapiens
ttggcagagctgtaccatggttaccatgccatccatcgccacacggaagatccgttcagtgtccatcgtcctgaaactcttttcaacatctccaggttcctgctgcacagcctgcccaaggacaccccctcgggcatctctaaagtgaaaatactcttcaccttggccaagcagagcaaggccctcggtgcctacaggctggcccggcacgcctatgacaagctgcgtggcctgtacatccctgccagattccaaaagtccattgagctgggtaccctgaccatccgcgccaagcccttccacgacagtgaggagttggtgcccttgtgctaccgctgctccaccaacaacccgctgctcaacaacctgggcaacgtctgcatcaactgccgccagcccttcatcttctccgcctcttcctacgacgtgctacacctggttgagttctacctggaggaagggatcactgatgaagaagccatctccctcatcgacctggaggtgctgagacccaagcgggatgacagacagctagagattgcaaacaacagctcccagattctgcggctagtggagaccaaggactccatcggagatgaggacccgttcacagctaagctgagctttgagcaaggtggctcagagttcgtgccagtggtggtgagccggctggtgctgcgctccatgagccgccgggatgtcctcatcaagcgatggcccccacccctgaggtggcaatacttccgctcactgctgcctgacgcctccattaccatgtgcccctcctgcttccagatgttccattctgaggactatgagttgctggtgcttcagcatggctgctgcccctactgccgcaggtgcaaggatgaccctggcccatgaccagcatcctggggacggcctgcaccctctgcccgccttggggtctgctgggctgtgaaggagaataaagagttaaactgtcaaaaaaaaaaaaaaaaaaaaaaaaaaaaaaaaa

SEQ ID NO: 118423 - DNA, 1000 bp, Homo Sapiens
tacaaatgtgaatcatgcaggcaggcctactcccggaagagtgtgctagcagaccttttgaaattggtgctttttttgaatctcacatttctagaaagaatggattatgatggatctaaggtatttatgtatttcattcattaatgatgacgttgttgttttttttttaattttattttccaaactgtgctggaccaaactactgatttgaaaggcatgtcagatcttgacagaaacatggcctgtttattctgcattcacctgtgatggtgaaacggacatttatttgcatcgctctaatttgaaatgtttgtaatctcataagcactttataaactttgttcttatttatgtaggactcttctttgcttttgttgtggtcaaaaggtgctgaaacagattgttgcttagtacttaaacttcttaaaccaagaacctaaaccaaggtttctttgagagccgccctaagatgtgcggaaacctgttagaagtagctgtactcaaatttgttttgaggcaagatcattgatgagagtcattgtgaaggtacaacatgtaaatcctaaaggcctgaaagaactgcagtggaatcgtccaactatttattgccagttttggttctcctgaaccttatgccaccttaaggggaaaaaaaaatccagtagctggcttgagattccagtgctcacacttgacatggtttccagagaatctggccccaaagtccagaaggctctggttttcataaaaggtgtatttgctgtttattttgtatggtaagtatttgctcttttgaatttaattattactgtcagtgtcagtcttggttgtgtattgcatatactgtatttataaattggtgcaaaaagcacaagtaaattatacatcaaatttattataaagaaatagtaactattttaactttgttcaagtatgtggtaatttgctcctattagagtaaaaaagaaaccagtaaattatcagtttgtgtaacttaaga

SEQ ID NO: 118424 - DNA, 1000 bp, Homo Sapiens
acatctactgggcccacttcaaggagacgctggccctggagctgcacggacacttgaacacgctctacgtccacttcatcctctttgctcgggagttcaacctgctggaccccaaagagaccgccatcatggacgacctcaccgaggtgctatgcagcggggccggcggggtccacagtgggggcagtggggatggggccggcagcgggggcccgggagcacagaaccacgtgaaggagagatgagccccccgggccggacaggggcacacgtgtgcaaagagacggtggtgtgtgttctctcctgcatctgcgtgtgcacacatgtgctgggcacgcgtgtggtgaggtctgagagggccccgggctgcactggtgtgggctgcacaggcacagacgcagacggccccggccgtgtcctgtggccccctgtcggatggatgcgtgccgtttgtagagaagagcctttgggcccattcactcgttcagcagacacgcatgggactgatgctttgagttttcttctgtggggttttcctttctctggtctccgtgcagcccctgccctccctcgggtgctgctggcctcaaaggaggaactcgtggggggagggtgtgatttgcagacctgggtctctgctctgctctgggggtggggcttgctttcacagagaccctccttccctctcacccctcctctcccggcctcgccaggagtcttggctgttggcagctcagaggtgggggaggcctgtggtgtgaggtgccctgcacctgctcctgctcctgtcaccccttcctgctgcctcctccatgcccaaggaacacccatggtgcagtcctcaggcaaggccaggacggggctgaggccctgcgtggagatgctgcaccagcggaaggctgagacccgcttaccttagttcatctgttcactcgtaataaaaagaattctctctaaaaaaaaaaaaaaaaaaaaaaaaaaaaaaaaaaaaaaaaaaaaa

SEQ ID NO: 118425 - DNA, 1000 bp, Homo Sapiens
tgggatattgattactaaaataagttaatattaagcaaggtgccggttgtacaatctctgatcagtgtcttttcagcactttgagcatttacttggctcatttagtcttccttttgtagcgcatggttgggaggaaaaagtgcatgcatcattccttcactcttctctttttcccgccccccctcccttcgcacataggcatttggtttgcttccatctttttttatgcagtgcctgtttttttttaaccaattaaaatcccttttgttgatgagctattgagagctgcagtagtttgcttttagtattgttgttgcacttgagcagagacaaacctttattcatagtgtctacaggacatatgaagagtgcaatggcaaaacaagagcaaaaagcacttcctcccatgaccttacagtaaccatactgattgaatccccagggacattccatcattgcaatagctcagatttttcttcctttttctttgcacaccagctctactctttagtaaaattgtaaaaggctgccattatggacattaggtatcccaacataaccatctggagtgtgtccagtttgttcttcataggaccaatttttatttgcagcttgagtttttatatgaagttgcattattgtggacttggctgtcttgtgatgaatttttttcatatgtattctgtgccatactattgttaaaatgaactgttgctattgtgagatggattttaactgacctattaagggtttctttcgaatggcactactttagggacattctagtatttgcttctattgtttgggccttgtggataatgtacagatttaaaaacaaatcttgttgctgatttgtccatttctttccctgcactttgttacatctgggatacagtctaactcatctgatttaatatgcatttaaaaaaatgccataactattaaacaccttgtttacagacagatgaaataaatttattccaaccaaaaaaaaaaaaaa

SEQ ID NO: 118426 - DNA, 1000 bp, Homo Sapiens
ctatgcctcccatggccgtggccctgaagcctgtattgcagcagagccgggaagcaagggacgagctacctggagcgcctcctgttctttgcagttcctcctcagatcttagcctcctgttgggcccctcttttcagagccagcattctttccagcccctggagcccaaaccagacctcacttcatccacagctggggccttctctgcacttggggccttccatcccgatcatagggcagaaaggccattccctgaggaagatcctggacctgacggggagggcctcctaaagcaagggctgccgcctgctcagctggagggcctcaagaattttttgcaccagttgctggagacagtgccccagaacaatgagaacccttctgtcgacctgttgccccctaagtctggtcctctgactgtcccatcttgggaggaagcccctcaagtgccacgtattccaccgcctgtccacaaaaccaaagttcccttagccatggcatccagtcttttccgggtccctgagcctccctcctcccattcacaaggcagtggtcccagcagtggttccccagagagaggtggagatgggcttacattcccaaggcagctgatggaggtgtctcaactgttgcgactctaccaggctcggggctggggggctctgcctgctgaggatctcctgctctacctgaagaggctggaacacagcgggactgatggccgaggggataatgtccccagaaggaacacagactcccgcttgggtgagatcccccggaaagagattccctcccaggctgtccctcgccgccttgctacagcccccaagactgaaaaacctcccgcacggaagaaaagtgggcaccctgccccgagtagcatgaggagccgggggggagtctggagatgagcccccctaccctctctcctctttgttctctcattgttgttattttaataaatgctcagtagtctgtaaaaaaaaaaaaaaaaaaaaaa

SEQ ID NO: 118427 - DNA, 1000 bp, Homo Sapiens
catcgccctgggcctctcgtacttctttgacttctggaacaatttggacttcttcattatggccatggccgtgctggacttcttgctgatgcagacccactccttcgccatctaccaccaaagcctcttccggatcctcaaggtcttcaagagcttgcgggccctgagggcaatccgggtcctgcggaggctcagcttcctgaccagcgtccaggaagtgacagggaccctgggccagtccttgccgtccatcgcagccatcctcatcctcatgtttacctgcctcttcctcttctccgcggtcctccgggcactgttccgcaaatctgaccccaagcgcttccagaacatcttcaccaccatcttcaccctcttcaccttgctcacgctggatgactggtccctcatctacatggacagccgtgcccagggcgcctggtacatcattcccatcctcataatttacatcatcatccagtacttcatcttcctcaacctggtgattactgtcctggtggatagcttccagacggcgctgttcaaaggccttgagaaagcgaagcaggagagggccgcccggatccaagagaagctgctggaagactcactgacggagctcagagctgcagagcccaaagaggtggcgagtgaaggcaccatgctgaagcggctcatcgagaaaaagtttgggaccatgactgagaagcagcaggagctcctgttccattacctgcagctggtggcaagcgtggagcaggagcagcagaagttccgctcccaggcagccgtcatcgatgagattgtggacaccacatttgaggctggagaagaggacttcaggaattgaccccaggaggacaccagatacagacttcagcccctggcagtctgcccacctgggtgcactgggacgggtccccagatctgctggaatgattgtccgggccctgcagagcaggggccccaacagagtttttaaaccccaaaaaaaaaaaaaaaa

SEQ ID NO: 118428 - DNA, 1000 bp, Homo Sapiens
tcacaatacctcatgcttcacttagccatggtggacccagcgggcaggttctgcctgctttggcgggcagacacgcgggcgcgatcccacacaggctggcgggggccggccccgaggccgcgtgcgtgagaaccgcgccggtgtccccagagaccaggctgtgtccctcttctcttccctgcgcctgtgatgctgggcacttcatctgatcgggggcgtagcatcatagtagtttttacagctgtgttattctttgcgtgtagctatggaagttgcataattattattattattattataacaagtgtgtcttacgtgccaccacggcgttgtacctgtaggactctcattcgggatgattggaatagcttctggaatttgttcaagttttgggtatgtttaatctgttatgtactagtgttctgtttgttattgttttgttaattacaccataatgctaatttaaagagactccaaatctcaatgaagccagctcacagtgctgtgtgccccggtcacctagcaagctgccgaaccaaaagaatttgcaccccgctgcgggcccacgtggttggggccctgccctggcagggtcatcctgtgctcggaggccatctcgggcacaggcccaccccgccccacccctccagaacacggctcacgcttacctcaaccatcctggctgcggcgtctgtctgaaccacgcgggggccttgagggacgctttgtctgtcgtgatggggcaagggcacaagtcctggatgttgtgtgtatcgagaggccaaaggctggtggcaagtgcacggggcacagcggagtctgtcctgtgacgcgcaagtctgagggtctgggcggcgggcggctgggtctgtgcatttctggttgcaccgcggcgcttcccagcaccaacatgtaaccggcatgtttccagcagaagacaaaaagacaaacatgaaagtctagaaataaaactggtaaaaccccaaaaaaaaaaaaaaaa

SEQ ID NO: 118429 - DNA, 1000 bp, Homo Sapiens
gaagaagaaaataaacagttagcagactcaatggcttctctggcatatctagtatttgtacagggcatccatattgatcagcttccaatggtcttaagcccattgtaccttttgcagtttaatatggggcacattgaagtctttttgcaaagaacagaagagtctgttatctccaaaggattggagctgctggagaatagtttattgagaatagaagacaatagtctactttaccagtacttagaaatcaagagttttcttactgtacctcagggcttagtgaaagtaatgacactttgccccattgagacactgaggaaaaagagtttagctatgcttcagctgtatattaacaagttggattcacaaggcaaatatacattatttaggtgcttattgaatacaagtaatcactcaggtgtggaggcttttattattcaaaatatcaaaaatcaaattgacatgtcattaaagagaacacgtaacaacaaatggtttacaggaccacagttgatttcccttcttgatttggtactttttctcccagagggtgcagaaacagatttactgcaaaactcagataggattatggcttcattaaatttattgaggtatttggttatcaaagataatgaaaatgacaatcaaactggattatggacagaacttggaaatattgagaataatttcttaaagccacttcatataggacttaatatgtcaaaagcacattatgaagcagaaattaaaaatagccaagaggcccagaaatctaaagatctttgttctataactgtaagtggagaagagatccctaatatgcctcctgaaatgcagcttaaggtcctgcattcagctcttttcacatttgatttgattgaaagtgttctagctcgagtggaagaactcattgaaataaaaacaaagtctacctctgaagaaaatattgggataaagtgaaagttccatttcctaaataaaaactaataaaatatagtac

SEQ ID NO: 118430 - DNA, 1000 bp, Homo Sapiens
ctttgcatatgccaaggaagataaaattatgttagatgacaggaaaaatgaagaagatggtggggcagatgaacatgaacatcctctaacaagtgaattagaccctgaaaaagaacaagaaatagaaacgataaaaattatagaaacagaagatcaaatagacaagaaaccagtctcagaaaaaacagacgaatctgatactataccatatttgaaaaagttcttgtataattttgacaacccttggaacttccagaacattccaaaggaaacagaattgccatttcccaaacagatactggatcaaaataatgtaattgaaaatgaagaaactggagaattttccattgataattatcccacagataatacaaaagttatgatattcaaaagttcatacagtctgtcagatatggtctctaacatagagttacctacgagaattcacgaagaagtatattttgaaccctcatcttctaaagatagtgatgaaaattcgaaaccatcagtagacaccgaagggcctgctctggtggagatagacagatctgtggaaaataccctgctaaatagtcagatggtttcaactgataactctttgtcttctcaaaattatatttctcagaaagaagatgcttctgagtttcagattctgaaatacttattccaaattgatgtttatgatttcatgaattctgcattttcaccaattgtaattcttacagaaagggtaagtttgccttttaaaccttttgcaataattttacctattttgctaaatataagagtggctacaaaatatgtttgaatgaatcctccctgtttaatgtttatataatgtttctctttccatgacatcttacctgtaagatttctctttatatgaatgttttgtcaaatggatattgatttttaaaaacatttccctaaaaaaaaaaaaaaaaaaaaaaaaaaaaaaaaaaaaaaaaaaaaaaaaaaaaaaaaaaaaaaaaaaaaaaaa

SEQ ID NO: 118431 - DNA, 972 bp, Homo Sapiens; identical to SEQ ID NO: 25299

SEQ ID NO: 118432 - DNA, 714 bp, Homo Sapiens
gggtgagcaaaggggcgggtccctggctgctgtggcctcccctgaccccctccccccgctgctggggtcctcggccaagcccccttctcactggactgagacatgaggctgagctggttccgggtcctgacagtactgtccatctgcctgagcgccgtggccacggccacgggggccgagggcaaaaggaagctgcagatcggggtcaagaagcgggtggaccactgtcccatcaaatcgcgcaaaggggatgtcctgcacatgcactacacggggaagctggaagatgggacagagtttgacagcagcctgccccagaaccagccctttgtcttctcccttggcacaggccaggtcatcaagggctgggaccaggggctgctggggatgtgtgagggggaaaagcgcaagctggtgatcccatccgagctagggtatggagagcggggagctcccccaaagattccaggcggtgcaaccctggtgttcgaggtggagctgctcaaaatagagcgacgaactgagctgtaaccagactggggaggggcagggggagaggcccccatcagggaccagactgttccaaaaaaaaaacaaaaaacaaaaacaaacaaaaaaacacttaaaagcccaaggagtaagcctgtgtgtttgtgggccctgagagactcagagacctcagctccagcataccccaccaccttctcctttccc

SEQ ID NO: 118433 - DNA, 1000 bp, Homo Sapiens
gcgtgcactcggcccccagcagcctgccctacctgcacagccccatcaccacctctcccagctgttagagccgccctgggggccccagaaccagagctggctcccagcaagggtaggacgggccgcatgcgggcagaaagttgggactgagcagctgggagcaggcgaccgagctccttccccatcatttctccttggccaacgacgaggccagccagaatggcaataaggactccgaatacataataaaagcaaacagaacactccaacttagagcaataacggctgccgcagcagccagggaagaccttggtttggtttatgtgtcagtttcacttttccgatagaaatttcttacctcatttttttaagcagtaaggcttgaagtgatgaaacccacagatcctagcaaatgtgcccaaccagctttactaaagggggaggaagggagggcaaagggatgagaagacaagtttcccagaagtgcctggttctgtgtacttgtccctttgttgtcgttgttgtagttaaaggaatttcattttttaaaagaaatcttcgaaggtgtggttttcatttctcagtcaccaacagatgaataattatgcttaataataaagtatttattaagactttcttcagagtatgaaagtacaaaaagtctagttacagtggatttagaatatatttatgttgatgtcaaacagctgagcaccgtagcatgcagatgtcaaggcagttaggaagtaaatggtgtcttgtagatatgtgcaaggtagcatgatgagcaacttgagtttgttgccactgagaagcaggcgggttgggtgggaggaggaagaaagggaagaattaggtttgaattgctttttaaaaaaaaaagaaaagaaaaagacagcatctcactatgttgccaaggctcatcttgagaagcaggcgggttgggtgggaggaggaagaaagggaagaattaggtttgaattgcttttttaaaaaaaaa

SEQ ID NO: 118434 - DNA, 1000 bp, Homo Sapiens
agcatgtgccagtgctaccccaagatcaccttcgtccctgctgactctgactttcaaggcatcctctccccaaaggccatgggcctgctggagaatgggcttgctgccgagatgaagagccccagtccccagccgccctatgtaaggctgtgggaggaagccgcctatgaccagagcctgcctgacttcagccacatccagatgaaagtcatgagctacagtgaggaccaccgctccttgctggcccctgagatggggcagccgaagctgggaaccagtgatggaggagaaggtggccctggcgacgttcaggcctggatggaggctgccgtggtcatccacaagggctcagacgagagtgaaggggaaagacgcctaactcagagctggcccggccccctggcctgtccccagggccctgcccccttggcttccttccaagatgacctggacatggactccagtgaaggcagcagccccaatgcatctccacatgacagggaggaagcttgttccccacaacaggaacctcagggctgcaggtgcccgctggaccgcttccaagactttgccctgattgatgccccaacgttggaggatgagccccaagaggggcagcagtgggaaatagccctgcccaacaactggcagcggtacccaaggacaaaggtggaggagaaggaggcttcggacacaggtggggaggaacctgagaaggaagaggaagacctgtactatgggctgccagatggagccggggacctcctcccggacaaggagctgggttttgagcctgacacccaaggctgagatgtttgtgctccgtagcttctagtctggaactgctgctgacccctgtgtgacatcacagggcctcagtttccctatctgcaaaatgggatgatatggaggttcaatgagatggtggcattttgagaatggtaaagaaatacacagggaggggatgatgactaaaaaaaaaaaaaaaaaaaaaaaaaaa

SEQ ID NO: 118435 - DNA, 1000 bp, Homo Sapiens
tgcggggtgatcgagtgcatccccgactgcacctcccgggaccagctgggccgccagacagacttcggcatgtacgactacttcacacgccagtacggggatgagtccaccctggccttccagcaggcccgctacaacttcatccgaagcatggccgcctacagcctcctgctgttcctgctgcagatcaaggacagacacaacggcaacattatgctggacaagaagggccatatcatccacatcgactttggcttcatgtttgaaagctcgccgggcggcaatctcggctgggaacccgacatcaagctgacggatgagatggtgatgatcatggggggcaagatggaggccacacccttcaagtggttcatggagatgtgtgtccgaggctacctggctgtgcggccctacatggacgcggtcgtctccctggtcactctcatgttggacacgggcctgccctgttttcgcggccagacaatcaagctcttgaagcacaggtttagccccaacatgactgagcgcgaggctgcaaatttcatcatgaaggtcatccagagctgcttcctcagcaacaggagccggacctacgacatgatccagtactatcagaatgacatcccctactgaggaggggaccttcgagggcctctgccccatgtgccctcaaagctgtcccacaatcatggagccctgcgacctccctgccctgccgccacatgcagtggaggagaggcctgtggcccaaagaacctggtagcgcctcctggggcagcacgtgggtggcgcagccttggtaacgccatggactgcagcgacaatcaatggatggtgctgtctatgcacaggtgtgagtcctctgtttgcactggacatattccctacctgtcttatttcataggtacatgaagtattgtgtataaaaaaagagataagatttaaccaacatcaacaaaataaaaacccaaaatagtaaaaacccaaaaaaaaaaaaaaa

SEQ ID NO: 118436 - DNA, 1000 bp, Homo Sapiens
accacttccgctcgcgctctgtgctggtgcagaggagcctcccgggcgccggttacaacaacaccttcccctactcctggggcggcttctccgacatggacttcatggtggacgagagcgggctctgggctgtgtacaccaccaaccagaacgcgggcaacatcgtggtcagccggctggacccgcacaccctcgaggtcatgcggtcctgggacaccggctaccccaagcgcagcgctggcgaggccttcatgatctgcggtgtgctctacgtgaccaactcccacctggctggggccaaggtctacttcgcctattttaccaacacgtccagttacgagtacacggacgtgcccttccacaaccagtattcccacatctcgatgctggattacaacccccgggagcgcgccctctatacctggaacaacggccaccaggtgctctacaatgtcaccctgtttcacgtcatcagcacctctggggacccctgagccaatgctgtggctcgggctgctgcctggggggcctccgggggctgggggcccttttcattctgcctgtgtccctcaagggtgatctctctgtctctgtcacgccctttctccccgcctttttgctgggcttttgttctctgcctatgtatttctgtctattttttcaatttcccctcttctcctttattgatctctgcttttaatacaccacttctttctttctgcctttttatggatgtctttttctttttatggctctggttctccagttctttccgtctctgcctctctctgtctctctctctctgtccttccacccctccctccttgcttcccacccattcctcatccctcactcccacccccacccccacccccaggagttgagtgcatggatctgtttctttttttatttacactttttctttccggtttgccggaataaacaggacctttgacatttgaaaaaaaaaaaaaaaaaaaaaaaaaaaaaaaaaaaaaaa

SEQ ID NO: 118437 - DNA, 677 bp, Homo Sapiens
gtgggatagtagcgtgtccacattgtcctttgagaatgagaagtcatcctggagcacagctcttcccacgctccgggcccacacacccagcctcactccatcaaaggagccccgctgcctgcccacccaccctgggtgctttctggcttgcagtgctcttggcagacatgaggcaacgattgctcccgtccgtcaccagccttctccttgtggccctgctgtttccaggatcgtctcaagccagacatgtgaaccactcagccactgaggctctcggagaactcagggaaagagcccctgggcaaggcacaaacgggtttcagctgctacgccacgcagtgaaacgggacctcttaccaccgcgcaccccaccttaccaagggacaggccagcagcacagacaacgctgtggataaggagagtagagacttcctcttcctgcctcctgtcttctggagttgtgaccgcagggtggcccaggtggatcggcttcagaggccaggaggcagctctctgcagccgaagagcaggagcctcacccagggtctgtggctctgactaagcctggactgcctctcggctgtgctccgtggactggctcctcagggatccatgtgagagaccggagtatgatcctcagtgcgaggacaaataaaagtagtgattatgtccacccc

SEQ ID NO: 118438 - DNA, 1000 bp, Homo Sapiens
acagagagctgggcggaggccgtacgcctgggcctcgagggctgccagcgcctctaccccgtgctgcagcagagcctggtgcgggccgcccgccgcaggggcgccgccgcccagccctgaaccagaagcctgagcaactacggacgcaagccgaggaccgtgctgccgccgtccacgaaaagacccgcgccatcggcctccagtttgcgtcgagaattcctggaagggccctgatatgactgtggttggactgacctgactgccagatggtgggacttggtctggagcagggactacttggaatgataaaggcaaaactcaacagcccctggagctgcgcttgtggtggagctggaccctgaaattacctggaccttttttttagagacagggtttctttctgcagtctcaaactcctagccttgattgatcctcctgccttggcctcccaaagtgctgggactacaggtgcatgcaaccacacctggctaattttcttttcttctttctttcttttttttttttttttttttttgatggagtcttgttctgttgcccaggctggagtgcaatggtgcaatcttggctcactgcaacctctgcctcctgggttcaatccattctcctgcctcagcctcccaagtagctgggattacaggcacatgcctccataccgggctaatttttgtatttttagtagagatggggtttcgccatgtgggccaggctgttctcgaatgcctgacctcaggtgatccacccgccttggcctcccaaagtgctggaattacaggtgtgagccactgtgcccagctgagtaaatttcttgattgcacagaatgtacggtgatattggcggacttaaggacatcgaattgtttatcaggaataaagtattatgtgtgttttctgcggccctggataatgctgtagcattcagggtcgattgagtaaaaaaaatgtagagatggaaaaaaaaaaaaaaaaaaaaaaaaaaaaa

SEQ ID NO: 118439 - DNA, 1000 bp, Homo Sapiens
agttggcccggaagcgggagcaggagcgaagacgccgggaagccatggcagctaccattgacatgaatttccagagtgatctattgtcaatatttgaagaaaatcttttctgagcgcacctaggtggcttctgactttgattttctggcaaaacattgactttccatagtgttaggggcggtggtggaggtgggatcagcggccaggggatgcctcagggcctggccctcctgcatgctatgcccggggcaggcctgacgggcagctgaggattgcagagcctgtctgccttacggccagtcggacagacgtcccgccacccaccacccctcacaggacgtccgctcagcacacgccttgttacgagcaagtgccggctggacccaagccctgcatccccacatgcggggcagaggcccttctctccgccaaatgtctacacagtatacacaggacatcgttgctgccgccgtgactggttttctgtccccaagaacgtgacgttcgtgatgtcctgcccgccgggagtctttccccacaccccagccatcgccgcccgctcccaggaggccagggcaggcctgcgtgggctggaggcgggcgaggccggcccaccccctcgctggcactgactttgccttgaacagaccccccgaccctcccccacaagcctttaattgagagccgctctctgtaagtgtttgcttgtgcaaaagggaatagtgccgtggaggtgtgtgtgtccatggcatccggagcgaggcgactgtcctgcgtgggtagccctcggccggggagtgaggccaccaaccaaagtcagttccttcccacctgtgtttctgtttcgtttttttttttcttttttttctatatatattttttgttgaattctattttatttttaattctctcttctcctccagacacaatggcactgcttatctccgaaatggtgtgatcgtctcctcattgagcagcggctgccaccgcgctgtgggta

SEQ ID NO: 118440 - DNA, 1000 bp, Homo Sapiens
cctgaagtgagcacagcctagggctgagctggggacctggtaccctcctggctcttgatacccccctctgtcttgtgaaggcagggggaaggtggggtcctggagcagaccaccccgcctgccctcatggcccctctgacctgcactggggagcccgtctcagtgttgagccttttccctctttggctcccctgtaccttttgaggagccccagctacccttcttctccagctgggctctgcaattcccctctgctgctgtccctcccccttgtcctttcccttcagtaccctctcagctccaggtggctctgaggtgcctgtcccacccccacccccagctcaatggactggaaggggaagggacacacaagaagaagggcaccctagttctacctcaggcagctcaagcagcgaccgccccctcctctagctgtgggggtgagggtcccatgtggtggcacaggcccccttgagtggggttatctctgtgttaggggtatatgatgggggagtagatctttctaggagggagacactggcccctcaaatcgtccagcgaccttcctcatccaccccatccctccccagttcattgcactttgattagcagcggaacaaggagtcagacattttaagatggtggcagtagaggctatggacagggcatgccacgtgggctcatatggggctgggagtagttgtctttcctggcactaacgttgagcccctggaggcactgaagtgcttagtgtacttggagtattggggtctgaccccaaacaccttccagctcctgtaacatactggcctggactgttttctctcggctccccatgtgtcctggttcccgtttctccacctagactgtaaacctctcgagggcagggaccacaccctgtactgttctgtgtctttcacagctcctcccacaatgctgaatatacagcaggtgctcaataaatgattcttagtgactttaaaaaaaaaaaaaaaaaaaa

SEQ ID NO: 118441 - DNA, 1000 bp, Homo Sapiens
acaagagaacatcttccagctgcctctttcacacccactacagacctcagccccagttttctcctcctcactaggctgtgtttttagtagttcctttgcttgtaactatgggatgggatccaggcatagggaactagttgttacacagctcccagccaagaagaaagtgtgagaagttgatgggcagcaaacctgctgtttaacatcagggtgaccacattaagcccagtattccagttggcaccagaagatatggacttggaatgaggcctacagggttcaccaggatgtaagaggagagaggaatccacaggaccaccagagaggagagggaaccagatatgcagatcagagatagaggaagtggaaccagagagctgggagggaccaaggttgtaagggtggctaagtcccaccataacagctaaggggacctgggagatgatggctcatttccacccagccccaggatttccagagcgcacatccacaggcctggacctgggatgaagatgaatgaagaacatggatgcacgtggatgtagtttggctcaggtgtccctgcagttggcaaggagtcagtactcagtccctgagtgtggctgaaatttgaggtcctggctgagccaaggagtaatggaccagatctacctcagtattcaagttcagtggggacaccagtggcttcaaacttcctggtttcatgatatcttgagacgccttacaaatgatggaggattccaaagagtttttgtttatttgggttaatatttgttggtatttatggcatttgagattgaaactaagaaatgttttaatttattacctttacaacatttatttacattacatacatacatttacaacatttattaatttatattaaaatagcatgaataagccaattataggttaatataagtagaatgtttgtgaaaaataagtatggtatccaaagcaaaataaattttattgtgaagtgtgaaaaaaaaaaaaaaaa

SEQ ID NO: 118442 - DNA, 1000 bp, Homo Sapiens
cagtacttgcgggtgggcaaggctgtcacaccgcccatgcccctactcacaccagccacgcctggaggcctcccacctgccgctgctgtggcagctgctgcagccactgccaagatcacagctcaggaagcagtggccggagcagcggtgctgggtaccctgggcacacctggactggtgtccccagcactgaccctggcccagcccctgggcactttgccccaggctgtcatggctgcccaggcacctggagtcatcacaggtgtgaccccagcccgtcctcctatcccggtcaccatcccctcggtgggagtggtgaaccccatcctggccagccctccaacgctgggtctcctggagcccaagaaggagaaggaagaagaggagctgtttcccgagtcagagcggccagagatgctgagcgagcaggagcacatgagcatctcgggcagtagcgcccgacacatggtgatgcagaagctgctccgcaagcaggagtctacagtgatggttctgcgcaacatggtggaccccaaggacatcgatgatgacctggaaggggaggtgacagaggagtgtggcaagttcggggccgtgaaccgcgtcatcatctaccaagagaaacaaggcgaggaggaggatgcagaaatcattgtcaagatctttgtggagttttccatagcctctgagactcataaggccatccaggccctcaatggccgctggtttgctggccgcaaggtggtggctgaagtgtacgaccaggagcgttttgataacagtgacctctctgcgtgacagtggtccctctccccggacttgcacttgttccttgtttcctctgggttttatagtgatacagtggtgtccccggggccaggcgcgctctgcccagcccagcctacagtgcggataaaggtgcggatgctgctggccctgaaaaaaaaaaaaaaaaaaaaaaaaaaaaaaaaaaaaaaaaaaaaaaaaaaaaaaaaaaaaa

SEQ ID NO: 118443 - DNA, 1000 bp, Homo Sapiens
aaaaaagcagaaatacacaatgatctcccttgtaagctcctaaggtggcttttctttctctaacttctagtaaatataaacggtttgtttgaaaactattttaaaatgtcaacaatatggagaataaccccccccaacacacctataaaaacccaaatttttggaacaaagataatggaacctccattttcaaactgaagcacagggacagaaaatatatttctagttatcacttaagcactcaatcattagaggctacaagaataatatttttaaagttacagtattttacaattattagaaaacattctatataaaagaagtcagttgatactttaaaatctcccatttggtttataaaatcccttaatttgacctctatatcttaaattccaagatgtttaaatttgctagttgcattatactgggtcatgaaaaattatcccttgaaatagatatgaaacatgttacttcatttctggtttaaataacttgtggaatctttcctaatgacaacctgatattaagggaaactaaagaaaatgttattgtggatcccacagtactatattacactgttttttttgtttgttttgttagttttttttatttaaagcaaacctcaaacattattgggtatcaattaccacctggttgtattgaaatagtaacttatcaatgccatgtaaaaattaattccattttcgaagccacctggcagacaggtttagctgtttcatcagcagcctaatatatactgttaaatttgttaaggatttcactttgaaggatacatgcaaaacatatagttactattttcatgagtcctgcttctagctccattgtggaatacagaaaattaaatatacctgttaagttcgtatctaaacctaagacattaccaaggtttgtacaaattctactacctgacatttattccaagaagatctggaaagttaaataaatttataaatttaataacaaaaaaaaaaaaaaaaaa

SEQ ID NO: 118444 - DNA, 1000 bp, Homo Sapiens
gtttgctggctttgaagggagaagaactaatgaaataaacgaggtcctctcctggaagcttgtgcctgacaattaccccccaggtgaccagccgcctccaccctcttacatttatggggcacaacatttgctgcgattgtttgtgaaacttccagaaatccttggaaagatgtccttttctgagaagaatctgaaggctttattgaagcactttgatctctttttgaggtttttagcagaataccacgatgacttcttcccagagtcggcttatgtcgctgcctgtgaggcacattacagcaccaagaacccccgggcaatttattaaaatgttgttggttctgtaagagcaactgctctgtctagtttggcgctctgggttccaggtgaataactaacaaggtggtgggtctttacccacagcgcaaacacaatgcccaccttggggctctgttgtttgagttgcccacatactgcagttattctgttaggaatgattccctgggtgcctgaaagtgctctgacacgacacttgttactttgcaggccatctgtgatggcaaggaaaaagcaactatgttcacagtgaaatattcgtggaataggttaggccatttcagtagacattgcagttagttagcaagaaccacattgtctctttatttgttagcattaaacaaatttttttttgcaaattggttttatttttttgatgaagccgagcaactctgtccaaaaaggtttagtttgtactcggaaaccacaaagtagtctcaaagtattttagagggaatcgatattgatggcaaaagaaaatttgcagctatgcatttgcttctaacggttccctctctgtgaaacattatttttggtgatctaaagaaagcattgcctttcttatttgagattttacagctatactttgttgtgtaatgttatggttccctttctgtaaaatgttatttttggtgatctaaataaagcctgtcttgtttgaaag

SEQ ID NO: 118445 - DNA, 1000 bp, Homo Sapiens
gcagagagccggtttcccagcagccggagccctgcaggagaggcctttgtgttttgttttgttttgttttttctcttttgagacaagagtttcactctgtcgcccaggctggagtgcagtggtgtgatctcggctcactgcaacctctgcctcccgtgttcaagcagttctcctgcctcagcctcccaaatagctgggattacagttgcctgccaccacgcccagctaatttttatatttttagtacagatggggtttcaccatgttggccaggctggtctcgaactcctgacctcaagtgatccacccgccttggcctcccaaagtgctgggataataggtgtcagccaccgcgcccagcctggagtggccttttatgagaggggacccgtcaaatctgtgccttatggaggggtccggcagcggccacaattgtcttgtcccctcaccccccaactccccctggaacacctctcccaggcaagacattttcacagcaccattcacaacggttgggccaaaaagaaacttttccttcatcatttcctgcactcgctgaccacaactttggacaccccaggctgccacccctccccacccgttcacccccaggatgctgttgctgtaggacgcctgctgccctggagccctccccaggatgtgagccagtcccctcgctggtacggaatgccgctgggtgcccggaggcggccatggtgtctcgatggacggcagccaggatggagcacccatgggtctcacggccatgcttcagggtcttcaggtcctgcccccggccagtctgccaagaggcacccccttccccagcctctcgcctgcactgatgcagacaaaatctcacctggcaggcccaacccccccccacccctcccccgccgtgtgtggcccctcgccgcatcgttggggttttgttatgtgaaaatatcctggaaataaatacatgtttctgcacttagaaaaaaaaaaaaaaaaaaaaaaa

SEQ ID NO: 118446 - DNA, 1000 bp, Homo Sapiens
agcgagctcccgcagccacagccgcagccgcaggccctgcactacgcgctggccaacgcacagcaggtgcagatccaccagatcggagaagacggacaggtgcaagtaggacacctccacatcgcccaggtgccgcagggggagcaagtccagatcacgcaggacagcgagggcaacctccagatccatcacgtggggcaggacggtcaggtgctgcagggtgcacagctgatcgccgtggcctcctcggaccccgcggcggcgggcgtggatgggtcgccactccagggcagcgacatccaggttcagtacgtgcagctggcgccagtgagtgaccacacggccggggcacagacggccgaagccctgcagcccacgctacagccggagatgcagctcgagcacggggccatccagattcagtgagcggtgcccatggcaccaggagcccctcgccggctccgcctacggcccggcccccacgcgccctgctctcacggcctcggcacaggcagcggctgcacgtgttctgctgaagtgcgtctgaaggccgctgcctccgcggggaacagcatcctatgaactgaaagagcagccgccgccgcccccagccggagacccctttcgtttgagtcctgctgttggtgtcggagcacgaggggaggcacggtgcggagagcgtcgcatatgcgcgggaaatcaagaactatgatatttttctgtttaaacagctttttttaatttgctatggtgtttataacaaaaaagaaaatttgaaaaaaaaaatcccaggggagtagcaggagccctttgctgtgtgctctgtccagtgtcatgagacgggagccctttgctgtgtgctctgtccagtgtcatgaggcaggtgtttgcaaagccagctctcggttccgatggggtattgctgacctacttttctaggggaaatgctcttaaacactgtaattatgcatttctaatgaaataaaatgtatttatgacc

SEQ ID NO: 118447 - DNA, 1000 bp, Homo Sapiens
tgggctccggccattggatgttgaattcatgaaggccctgcatcagcgggtcaacatcgtgcctatcctggctaaggcagacacactgacacctcccgaagtggaccacaagaaacgcaaaatccgggaggagattgagcattttggaatcaagatctatcaattcccagactgtgactctgatgaggatgaggacttcaaattgcaggaccaagccctaaaggaaagcatcccatttgcagtaattggcagcaacactgtagtagaggccagagggcggcgagttcggggtcgactctacccctggggcatcgtggaagtggaaaacccagggcactgcgactttgtgaagctgaggacaatgctggtacgtacccacatgcaggacctgaaggatgtgacacgggagacacattatgagaactaccgggcacagtgcatccagagcatgacccgcctggtggtgaaggaacggaatcgcaagtatgaccagaagccaggacaaagctggcagggggagatcccaagcctagccttgggtgagaccaagccctacttttgttcttctataggccctgggctcaatctaagcgggtgctggggtcctcctcgccttatcaacccttttctccctttagcaaactgactcgggaaagtggtaccgacttccccatccctgctgtcccaccagggacagatccagaaactgagaagcttatccgagagaaagatgaggagctgcggcggatgcaggagatgctacacaaaatacaaaaacagatgaaggagaactattaactggctttcagccctggatatttaaatctcctcctcttcttcctgtccatgccggcccctcccagcaccagctctgctcaggccccttcagctactgccacttcgccttacatccctgctgactgcccagagactcagaggaaataaagtttaataaatctgtaggtggctaaaaaaaaaaaaaaaaaaaaaaaaaaaaaaa

SEQ ID NO: 118448 - DNA, 1000 bp, Homo Sapiens
tacatacctgtgaaaatgaagagcaaagccttctggatcttttcttgggagtatgccatgatgtatgtgggaagcctagtggtaatcatttgcctctccttcttccttctcagctcttgggatttcatccccgcagtctatggctttatactttctgttccagatctcactccaaacattggtcttttctggtacttctttgcagagatgtttgagcacttcagcctcttctttgtatgtgtgtttcagatcaacgtcttcttctacaccatccccttagccataaagctaaaggagcaccccatcttcttcatgtttatccagatcgctgtcatcgccatctttaagtcctacccgacagtgggggacgtggcgctctacatggccttcttccccgtgtggaaccatctctacagattcctgagaaacatctttgtcctcacctgcatcatcatcgtctgttccctgctcttccctgtcctgtggcacctctggatttatgcaggaagtgccaactctaatttcttttatgccatcacactgaccttcaacgttgggcagatcctgctcatctctgattacttctatgccttcctgcggcgggagtactacctcacacatggcctctacttgaccgccaaggatggcacagaggccatgctcgtgctcaagtaggcctggctggcacagggctgcatggacctcagggggctgtggggccagaagctgggccaagccctccagccagagttgccagcaggcgagtgcttgggcagaagaggttcgagtccagggtcacaagtctctggtaccaaaagggacccatggctgactgacagcaaggcctatggggaagaactgggagctccccaacttggacccccaccttgtggctctgcacaccaaggagccccctcccagacaggaaggagaagaggcaggtgagcagggcttgttagattgtggctacttaataaatgttttttgttatgaagtctaa

SEQ ID NO: 118449 - DNA, 820 bp, Homo Sapiens
ctcgatctgctgctcgtctcaggctcgtagttcgccttcaacatgccggaaccagcgaagtccgctcccgcgcccaagaagggctcgaagaaagccgtgactaaggcgcagaagaaggacggcaagaagcgcaagcgcagccgcaaggagagctactccgtatacgtgtacaaggtgctgaagcaggtccaccccgacaccggcatctcctctaaggccatgggaatcatgaactccttcgtcaacgacatcttcgaacgcatcgcgggtgaggcttcccgcctggcgcattacaacaagcgctcgaccatcacctccagggagatccagacggccgtgcgcctgctgctgcccggggagttggccaagcacgccgtgtccgagggcaccaaggccgtcaccaagtacaccagcgctaagtaaacttgccaaggagggactttctctggaatttcctgatatgaccaagaaagcttcttatcaaaagaagcacaattgccttcggttacctcattatctactgcagaaaagaagacgagaatgcaaccatacctagatggacttttccacaagctaaagctggcctcttgatctcattcagattccaaagagaatcatttacaagttaatttctgtctccttggtccattccttctctctaataatcatttactgttcctcaaagaattgtctacattacccatctcctcttttgcctctgagaaagagtatataagcttctgtaccccactggggggttggggtaatattctgtggtcctcagccctgtaccttaataaatttgtatgccttttctctt

SEQ ID NO: 118450 - DNA, 1000 bp, Homo Sapiens
acacggtgcagtgcctgtgcgtggtgaagtccaacccggagccgtccgtggcctttgagctgccatcgcgcaatgtgaccgtgaacgagagcgagcgggagttcgtgtactcggagcgcagcggcctcgtgctcaccagcatcctcacgctgcgggggcaggcccaggccccgccccgcgtcatctgcaccgcgaggaacctctatggcgccaagagcctggagctgcccttccagggagcccatcgactgatgtgggccaagatcgggcctgtgggcgccgtggtcgcctttgccatcctgattgccatcgtctgctacattacccagacacgcaggaaaaagaacgtgacagagagccccagcttctcggcaggggacaaccctcccgtcctgttcagcagcgacttccgcatctctggggcaccagagaagtacgagtccaaagaggtttctaccctggaatctcactgagtgccccaggagagcgagaggcgcctgggatctgagaggaggctgctgggccttcggggtgagcccccagagctggacctgagctattctcactcggacctggggaaacggcccaccaaggacagctacacgctgacggaggagctagctgagtatgctgaaatccgggtcaagtgaaggagctgggggcagcctgcgtggctgacccccctcaggaccctcgctggcccccactggctgtgggctcccttcctcccaaaagtatcgggggctggggcaggaggggagtgaggcaggtgacagtgaggtcctgggggcctgacctccccctccttcccagctgcccctccctgccagcacccccacgccctcattacggctcctctctaacctcctttaccctcatctgtctggaggggagctctgtctgtccgtgttatttattgctacttcctgcctggtctcctgcccccacacctggccctggggcctgtacaaaagggacatgaaataaatgccccaaagcc

SEQ ID NO: 118451 - DNA, 1000 bp, Homo Sapiens
aggcaccttctgcccgacccgaagagagtgagcttttgctacccacagaacctgactctggctttcccagggaggaagaagagctgaacctgcctatcagtcctgaggaagagcgccagagcctgctgcccattaacaggggcacagaggaggggccaggcacttcccacaccgagggcagggcctggccactccccagctccagtcgcccccagcgcagccccaagaggatgggggttcaccacctgcaccgcaaggacagcctgacccaggcccaggagcagggcaacctgctcaactagggcccctgctggccttcctgccattgctgcaccaggactgcaaggagtccccacaccttggcagctcagggtccccagtccaagcccttgacctctcctctatccagacccgcacagctgtttcctgtgtggatggggtcaggttgtgggccatgccaggcctgtcagctgcgttgactgactgcagcagcttgcctcatggttttccctttttcttagaatatttattcttcagaggtaacatgcagttgggtctcaagacctttcctccaatcagcccaacccagcccagactgggcttttctggggagctgaggagtttatcagtattcatcttccatcctttcatagtcacaagttttgttattttgtttttttttgggggtgatggtgtaattgttaacctcatttccgtttcctacctgtttgcttccccccccagtcctccgcatgagctgttgccctccaggggcctggcacagctggccttggggacgagggagaggactgattcagggccccctcagctgtctcctccctccctctggaaaggagggtggggctcaggggcctcaagctgggctctgtgtgaggcctggcccccactcccaaccttggctctagactgttactcttaagctttgagaaattttcacattgatgactattttaaaatcaaataaaactattttactggt

SEQ ID NO: 118452 - DNA, 1000 bp, Homo Sapiens
gaaaacaggaccagccggcaccaggcccgtctctcacgtactttaacacatccttgaaagcccctcgtttaatgagaaaagcgaacactgcggtccttgccaaagtaaaatgaagctgccccaggacaaggggttaccatgagctccctggagtccgacgcgggttttctctctgggggacctgggtggtccccgctgtggtctttgttgtcccactttgggaccgggtccagtctggggtctagtctcgagcatcagggtcaggctcggggcagggctgggttaggctccgggtcagtcttgccatgggtttgggagcaggtttgggttacttgcgtttgaaggcagcagtggtctcaggaggaagaaacgggggcgggagagagtggtgatctgtggtcagtgggtcagtgacctgcacggtgattctcccacctccaaaaggtaggggtgggactggaggcgtccctaggtcaggccgttgagttcgagctccgatgggccaccttgaatccaggactgaccgcccgtgtgtgcacagtttgttcttggacgaggactcgtgaggatcgagggctggggaccccggtgtgagcaggatggggccctgccctcccgtgggagttgtggactcgagcccaggggctgcccgtcacagcggtgtcccaggtccctgccatccgattttacctgggatgtcttctctggagtttggaattgcttgaggaaccctgcgtgtgcttggagaggccagagggcttgctgagaaccccatggacagtggagagcgggattcgaaccaagggctggactcccacacctctggcctgcgtcgcccagttctttgtggctctgaagaattggccgctgtggaaaagagcaaatgtccgagacccccaacaggaagagtctaaaaatccagtttgcaaccacttctgacctacaaaaaaatggaaatttagtgtttttcagcctaagacattaaatttcatatcagaac

SEQ ID NO: 118453 - DNA, 902 bp, Homo Sapiens
ctagagagtatagggcagaaggatggcagatgagtgactccacatccagagctgcctccctttaatccaggatcctgtccttcctgtcctgtaggagtgcctgttgccagtgtggggtgagacaagtttgtcccacagggctgtctgagcagataagattaagggctgggtctgtgctcaattaactcctgtgggcacgggggctgggaagagcaaagtcagcggtgcctacagtcagcaccatgctgggcctgccgtggaagggaggtctgtcctgggcgctgctgctgcttctcttaggctcccagatcctgctgatctatgcctggcatttccacgagcaaagggactgtgatgaacacaatgtcatggctcgttacctccctgccacagtggagtttgctgtccacacattcaaccaacagagcaaggactactatgcctacagactggggcacatcttgaattcctggaaggagcaggtggagtccaagactgtattctcaatggagctactgctggggagaactaggtgtgggaaatttgaagacgacattgacaactgccatttccaagaaagcacagagctgaacaatactttcacctgcttcttcaccatcagcaccaggccctggatgactcagttcagcctcctgaacaagacctgcttggagggattccactgagtgaaacccactcacaggcttgtccatgtgctgctcccacattccgtggacatcagcactactctcctgaggactcttcagtggctgagcagctttggacttgtttgttatcctattttgcatgtgtttgagatctcagatcagtgttttagaaaatccacacatcttgagcctaatcatgtagtgtagatcattaaacatcagcattttaagaaa

SEQ ID NO: 118454 - DNA, 1000 bp, Homo Sapiens
ccaggaagttggtttagtgaatttaagaggggaaaactgctttcatacttagatgttgaaggaaattccatcaatatggtgcaaatgacattcctgaaacttctgactgcctctgctcggcaaaatttcacctaccactgtcatcagtcagcagcctggtatgatgtgtcatcaggaagttatgacaaagcacttcgcttcctgggatcaaatgatgaggagatgtcctatgacaataatccttttatcaaaacactgtatgatggttgtacgtccagaaaaggctatgaaaagactgtcattgaaatcaatacaccaaaaattgatcaagtacctattgttgatgtcatgatcaatgactttggtgatcagaatcagaagttcggatttgaagttggtcctgtttgttttcttggctaagattaagacaaagaacatatcaaatcaacagaaaatataccttggtgccaccaacccattttgtgccacatgcaagttttgaataaggatggtatagaaaacaacgctgcatatacaggtaccatttaggaaataccgatgcctttgtgggggcagaatcacatggcaaaagctttgaaaatcataaagatataagttggtgtggctaagatggaaacagggctgattcttgattcccaattctcaactctccttttcctatttgaatttctttggtgctgtagaaaacaaaaaaagaaaaatatatattcataaaaaatatggtgctcattctcatccatccaggatgtactaaaacagtgtgtttaataaattgtaattattttgtgtacagttctatactgttatctgtgtccatttccaaaacttgcacgtgtccctgaattccatctgactctaattttatgagaattgcagaactctgatggcaataaatatatgtattatgaaaaaataaagttgtaatttctgatgactctaagtccctttctttggttaataataaaatgcctttgtatat

SEQ ID NO: 118455 - DNA, 1000 bp, Homo Sapiens
tgccggtggagcccgagcggacagcggaatacgaggactacggcgcagacgagcctgcagaggagcctcctgagccccaccggcgctggcggcgcgccctgccccacggacccgggcagtgaaccagagatcacgcgccgcgccgcgaggcttgggggaggtgttgaaattctcatttacaggtcagatagagcagtgtacgtcttttctgaggtgtttcttccagcgttgctcatccaggagtaccctttctgattgtagagaaccttgtttctgcaggaagcctagctccaagcacgcagtctgtagacatttttgcctttgcccttgaaatgcttgcaaaatactttgttaacaaaagctgcaaagagagaacatgccgtgtgcctttagttagcacagcgggcagcctcagtgaaactcttaggttaagcagttaagtcctggaacccagagctgctgtgtatttcgagcgggcagtttatcttttgctatacttattttcaattcaattacaccacgattcaaataattcccctcctaaaaccaaaaaggagggaaacgtcaactccattgcaattacttatcttcctcttctatctctgttatacgccggggcatagaatgctcgtatacatctctttaacaaccacaaaccttaagccatgtagatgaagttagtgcatcaacgggatacagttccatattgccttaaacctccttgttttagacacactaacatttataccaaattgcagattattctgcagagagggaattgcatgtttgtgttgtatatttagtatgaacttttttcagaatataatatttcttagttatcaaaagtagttggaaaacatttgcaagactatgaacatagaattgctgcttttatattttaactgcagattgtgaatttcactgccttatattatttatttctgaaacaaaagaggcatttttcaataaaactactgaaaatttgaaaaaaaaaaaaaaa

SEQ ID NO: 118456 - DNA, 923 bp, Homo Sapiens
cgctgaggccccacagcctcccaattccgggcagacccctgacacctgctgtctggccccttccggcctgaagctgcagccgcgccatgtccacccctccgttggccgcgtcggggatggcgcccgggcccttcgccgggccccaggctcagcaggccgcccgggaagtcaacacggcgtcgctgtgccgcatcgggcaggagacagtgcaggacatcgtgtaccgcaccatggagatcttccagctcctgaggaacatgcagctgccaaatggtgtcacttaccacactggaacatatcaagaccggttaacaaagctacaggataatcttcgccaactttcagttctcttcaggaagctgagattggtatatgacaaatgcaatgaaaactgtggtgggatggatcccattccagtcgagcaacttattccatatgtggaagaagatggctcaaagaatgatgatcgggctggcccacctcgttttgctagtgaagagaggcgagaaattgctgaagtaaataaaaaactcaaacagaagaatcaacagctgaaacaaattatggatcaattacgaaatctcatctgggatataaatgccatgttggcaatgaggaactaagctgatatttaaatttcctgctttacacatgttataccattgtttttttccctcaagtattttttccctgtgaagaagattatttatctgcttttattttagtcactaaaactaaagtttttatttttacattgtgatttttacattaaaatattaactttttttaatgctattttatgaaagattattgtaataaactttgatggggtttgtattttggttaatcttcatgaattgaataattgtttttttaaagcaaaataaagttttttaaataaatgttaaaaaaaaaaaaaaaaa

SEQ ID NO: 118457 - DNA, 1000 bp, Homo Sapiens
ctgctgttgagatgtttggtaaatgccaggttgatagggcgctggctgcttggagcaaagggtgcatttcagggtgtggccaccaggtgctgtgagtttctgtggctcatggcctctgggctggtcccttgcacagggcccacgctggagtcttaccactctgctgcaggggtggaaggtggcccctcttgtcacccatacccatttcttacaaaataagttacaccgagtctacttggccctagaagagaaagttgaagagtcccagacctactagcattttgcaactatgcttgtaaagtcctcggaaagtttcctcgcgtaccagacagcggcgggggctgatagcaattttagtttttggcctccctatcctctcacatgagaacactgcctggatgcatctcatgatctctggagaatttccccatctttctcttctttccatcgtgtggattcaatagtttggatttgaaggctgccctgcccccgactctcctgccgcacccctggccattgtaccttttgatgtttagaagttcgtggaagtagacgctgaggtgtgcagaggagctggtggataacagagaatgccagggaagatgagtgctgggtcagggtacttggatgaaacggtgcaggccaggcgggccctaataaaaccctctgccaggtctgggagtcccaggccatctgctcaacgctctgtggtttgtcagacctgcaagcaagccccctgctggggaagcctaggtgtccttgagctgaaccgcactgaagaactcttgtcctcactggctgatgcagcagaactcttgggaaatgtcttagtcctgcagaatcaggagtcaccagatgatgcagagttgagatcatcattgcaaagttctctgttcctgaggaactaaatttaaggaaaaaatgggattttgttttagagttggaaaaaaagcctgattaaagagtttctgcctgttaaaaaaaaaaaaaaaaaaaaaaa

SEQ ID NO: 118458 - DNA, 1000 bp, Homo Sapiens
atgcgcctgtactatggcagccgctagtccctgacaacttccaccctgattccggaccctgtagattgggcgccaccaccagatccccctcccaggccttcctccctctcccatcagcagccctgtaacaagtgccttgtgagaaaagctggagaagtgagggcagccaggttattctctggaggttggtggatgaaggggtacccctaggagatgtgaagtgtgggtttggttaaggaaatgcttaccatcccccacccccaaccaagttcttccagactaaagaattaaggtaacatcaatacctaggcctgagaaataaccccatccttgttgggcagctccctgctttgtcctgcatgaacagagttgatgaaagtggggtgtgggcaacaagtggctttccttgcctactttagtcacccagcagagccactggagctggctagtccagcccagccatggtgcatgactcttccataagggatcctcacccttccactttcatgcaagaaggcccagttgccacagattatacaaccattacccaaaccactctgacagtctcctccagttccagcaatgcctagagacatgctccctgccctctccacagtgctgctccccacacctagcctttgttctggaaaccccagagagggctgggcttgactcatctcagggaatgtagcccctgggccctggcttaagccgacactcctgacctctctgttcaccctgagggctgtcttgaagcccgctacccactctgaggctcctaggaggtaccatgcttcccactctggggcctgcccctgcctagcagtctcccagctcccaacagcctggggaagctctgcacagagtgacctgagaccaggtacaggaaacctgtagctcaatcagtgtctctttaactgcataagcaataagatcttaataaagtcttctaggctgtagggtggttcctacaaccacagcaaaaaaaaaaaaaaaaaaa

SEQ ID NO: 118459 - DNA, 1000 bp, Homo Sapiens
ttgcttggttctcctccatgtggcctctccagcaggctagctcaggcttattcacatgatggcttcaggattccaaagagagtgagagtagaagctgaaagacttcttgagttcttggcctggaactgggactaggacagtgtcacttctgctaagttcttttggtcagagcaaatcacaaggctttacccagattcaagggatgagaaacagactacatgtcttgatgaggggaaccacaaagagcttgtggccatttttcacctatcacaaataattttggatgggtatttatttggataaaggtatttccctcttccccctttctctctgtctcatggggcctcactctgccaagttggaaggcactaagacattgtcctggccctcagggtctaggggaagaggtgttggggcaggaagtgagtctctccatgggctggacccactgtagtaggagtgcctccttgtctgcactgctggtatggggttaggccaggtaggacattccagaggggcttctgaaaaccaagagtccctggggaaagggaacagagtaaggcaggccttgttctcactgccctctaagggaacttggtcactcggcacttttaagcctcagtttctccagttcaataataaggacaagagcttttcccatgcattctctttccccgggaaagttgactgaggtgaccagtaatagaattgaaaagggagagtgtcttcagtgcaatgtggcatcctggattgggtcttggaacaaaaacaggacattagtgggaaaattggaaatctgaaaaaagtctgaattttagttaatataccaatttcagtctcttggttttgacagatgtaccatggtgatgtaagatgttgaccttggggtaggctgggtgaagggtatacaggaactctttgtactatctctgcaacttctctgtaaatctagtatcattccaaaataaaagtttatttaatttaaaaaaaaaaaaaaaaa

SEQ ID NO: 118460 - DNA, 1000 bp, Homo Sapiens
tgagatagagacctgcctcccccttgcacccgaggccctcgcagcagggagctcagcgaggcagagggtggggctgcacagaggggaacatcagctgcagctctgcaccaggccggtccctggggactggggcgctcctccctcaggctttctccctcagtcttggcttctccagggctctggggtgtctggagctaggcttggccctaccattctggggccatttccaccacagttggggctctcctgccttcacgcgtgggtgtctgctacttccccatctttaaaatgctgccagagcgattgcggcccctcaccttgtccacgtatcaggaatgtgaatgtgggacctttcctccatccctgttgtccggagccagctcactgtcttccacactggtgctaactggcccaggcactggagtggaatagaatgcagctggaggctacgcatggcctctgcagcacacgcagctggagagggcttctgtccctgtcagcggcagagggcgttggggctggccggggcaccttgtccctgctatggtccacatgctcacgctgtccacctgccaggtggagtgtatgtggctgtggccctccctcgtggaggtgccgtgctttaaagaggccttagtgcccgggatgggcacagtgttttgaagggaggtgggagctcttgctctcctggtcactgcagaatgacagagaaggtgaagctccatgcatgtgtgcgcgggtgtatgtgcgctcagggtctctgtttaagtatcagctaaagatgtgcttcctccgtgtctgtcatacactgagaccaacaggctacagtgtccctgattcttggaaaagcctggagaagctggggagatgcggttcacaatgcctcggtataggaggctgtgttgagctgacattcaaatggattctttaataataatgaaactggcgagtaaaaaaaaaaaaaaaaaaaaaaaaaaaaaaaaaaaaaaaaaaaaaaaaa

SEQ ID NO: 118461 - DNA, 602 bp, Homo Sapiens; identical to SEQ ID NO: 31093

SEQ ID NO: 118462 - DNA, 1000 bp, Homo Sapiens
tagtcaggagcaggcgattgaagtaattctgtcctgcggggttcagcatcatgcacgttccccctgggccattctctgatgcagggcacttgctccacactctgggaacccagattcaccagtctgccctgtcacgtagttgaaggagttgcatttatctttctggctcctaattcctttaaaattacatttgttgcagaacctccacaaggctaaataaaattacatttgtgaccatcagagaactgaataaaccattaactggccatcctggttttgcagagatcaggttgttgacagttcctggttgacccacagctacccatgtcagttatctccactaacatatccaagaatctttgtaggacaatttctccacctgcaaggtctttcaggtagaactcttcttttaaggcaattagcccattgccaaaaggttttactgtcttaaagctgtctttctgagatctaattccaaggacttctccacagctaagtgagatgcctcacaccattaggtgatgctttggacagaacagagtattttcatcttgtgtttaaagcaattccttggcttcggctcctcaccactttctatgccagtctcccatttatgtccctagtaatgcctatgcaaaaaaaaaaaaaaaaaaaaagaaaaactgatggtgaaacctacaggtttaagggcttaaatctcaaactttgttaggagtaacaggagcgtgctgagcgggcaagcaataaaacaaatcataccaaaaagccacattgctctctcctaagccccaaccccactccactcctgtggccaggggtccaaacagaaaataaccggagaagacaaggaggtcaaaggatcagggaactaagcattatgtgaattcaccagcaagatgtacagaacgcctgtgtttacattgtttttatggaactagcagaataaaacatctattttaaaaatgaaaaaaaaaaaaaaaaaaaaaaaaaaaaaaaaaaa

SEQ ID NO: 118463 - DNA, 1000 bp, Homo Sapiens
ccagatcctcatccgggagggccgctgtgacgtgaacgtgcgcaaccggaagctgcagtccccgctgcatctcgccgtgcaacaggcccacgtggggctggtgccgctactggtggacgctgggtgcagtgtcaacgccgaggacgaggagggggacacagccctgcacgtggcgctgcagcgtcatcagctgctgcccctggtggctgatggggccgggggggacccagggcccttgcagctgctgtccaggctacaggcctcgggcctccccggcagcgcggagctgacggtgggcgcggcggtcgcctgcttcctggcgctggagggcgccgacgtgagctacaccaaccaccgcggtcggagcccgctggacctggccgccgagggtcgcgtgctcaaggcccttcagggctgcgcccagcgcttccgggagcggcaggcgggcgggggcgcggccccgggccccaggcaaacgctcgggacccccaacaccgtgacgaacctgcacgtgggcgccgcgccggggcccgaggccgctgagtgcctggtgtgctccgagctggcgctgctggtgctgttctcgccgtgccagcaccgcaccgtgtgtgaggagtgcgcgcgcaggatgaagaagtgcatcaggtgccaggtggtcgtcagcaagaaactgcgcccagacggctctgaggtggcgagcgccgcccccgcccccggcccgccgcgccagctggtggaggagctgcagagccgctaccggcagatggaggaacgcatcacctgccccatctgcatcgacagccacatccgcctcgtgttccagtgcggccacggcgcatgcgccccctgcggctccgcgctcagcgcctgccccatctgccgccagcccatccgcgaccgcatccagatcttcgtgtgagccgcgccgtccgccgcgcccgagctgccttcgcgtgcccccgccctgtgttttataaaaagaaagattctcggaaaaaaa

SEQ ID NO: 118464 - DNA, 1000 bp, Homo Sapiens
tccctattgaaccttgattaaaatgtatgaatacaatacttggatttttttttcagcttagactctgataatttcagtggtagtggggaaacctgaatttgtcagcatgattatttgtaactcagattgttcaaatgtatatagaaggtccccttcaagtgttgtttctccaagtagtcataaatgtagcaagtataaatcagaatatcatcttataatcttacagagttaacctaatgagtcaatacctttataagcaaaaccatgataaatttaaaaacaacagaaatgtggcatgattacttatttatttgttccaggtgactctaaatagttgatttttctgcctgaaggatcctgaacatatttagttaccctgtagttatttaggaatttaaaccagaagactttgaagttgtatattcttgcaatgcataaaatgacattataatcaacaaacttatggtttgtttcaattgatgcacacaaaaaataacttatagttagacttttctatttcaagtaaagctttgagttacttatttttatacatattcatcatgtaccctttattgtttctaggtgttgatatactttaataaaaatgatatgtttaatattttcccattaatatatttctttgaagctatttgttttaaaagatgtaacacttatttgctgtcaaattctgaattaaaaaatctgttggtggccgggcgcagtggctcatgcctgtggtcccaacattttgggaggccaaggagatggatcacttgaggccaggagttcgagaccagcctggccaacatggcaaaaccccatcactaaaaatacaaaaattacccgggcatggtggtgggtgcctgtaatcccagcttcttaggaggctgaggtaggagaattgcttgaccctgggaggtggaggtggcagtgagccgagatagcaccactgcacttctagttgacagagtgagactctgactcaaaaaaaaaaaaaaaa

SEQ ID NO: 118465 - DNA, 1000 bp, Homo Sapiens
tatttgccagttacgaagttccactgaaaattttcctattaattcttaagtactctgcataagggggaaaagcttccagaaagcagccatgaaccaggctgtccaggaatggcagctgtatccaaccacaaacaacaaaggctaccctttgaccaaatgtctttctctgcaacatggcttcggcctaaaatatgcagaagacagatgaggtcaaatactcagttggctctctttatctcccttgcctttatggtgaaacaggggagatgtgcacctttcaggcacagccctagtttggcgcctgctgctccttggttttgcctggttagactttcagtgacagatgttggggtgtttttgcttagaaaggtccccttgtctcagccttgcagggcaggcatgccagtctctgccagttccactgcccccttgatctttgaaggagtcctcaggcccctcgcagcataaggatgttttgcaactttccagaatctggcccagaaattagggctcaatttcctgattgtagtagaggttaagattgctgtgagctttatcagataagagaccgagagaagtaagctgggtcttgttattccttgggtgttggtggaataagcagtggaatttgaacaaggaagaggagaaaagggaattttgtctttatggggtggggtgattttctcctagggttatgtccagttggggtttttaaggcagcacagactgccaagtactgttttttttaaccgactgaaatcactttgggatattttttcctgcaacactggaaagttttagttttttaagaagtactcatgcagatatatatatatatatttttcccagtcctttttttaagagacggtctttattgggtctgcacctccatccttgatcttgttagcaatgctgtttttgctgttagtcgggttagagttggctctacgcgaggtttgttaataaaagtttgttaaaagtttaaaaaaaaaaaaaaaaa

SEQ ID NO: 118466 - DNA, 1000 bp, Homo Sapiens
gtaaccatatctgacaaaattcccttgaatttttatcctttgcttgcaacatttaagactcaaagtcactggtatattggattaagttttttcctgttaatgcaattatagaaatacatcggagacacaacaaatgtggccattacaggtttcataaaattacactgacttggctgttacttgatcttaggaaacagcacagtttaagatattgtgaattctgacttatactttattaaatgctgtaaatctaaatagatcctgttggatgtgatgggtctagtccagtttatttaagttcatgtttcactgtttgcactttgcattgaacaatgggtttattcgctgatgtaaacggttcgagtgaagaattaatgcagtaagtatgacaacacatacacacttgcctctccccatctccagaagaggggagcagagtccgagcttatctaaatatgaatgtggccacaaagctgtggaaggtgacaaagcttaaacacctttgccctggctctgcattgtcacctagagagcaagaggtctatagaaacatcatgtcacatgaaacgattctctgctttttggttctgaacttgaagtccctaaactgcaaaatctaagagttgggtggttattaaaatgcttttaaagtcaactgtggcaccaattctaatgtaatccaacttgtgactgtttttttttgttttgttttgtttttgtgtgtgtgtgtgtggcactgggaaaagtggaaacaaacatgtattgaaatacatattggaaataaaaatggtttgagcgtcagtgatattctcccagaatgtacttatcttacctcggcatgtactgtagtcactcagtatttgtatatgttgctagaatttagattgtaaaatagtgaaattttaatgtgttcatttgtttttaatgtatatatgtcttgctcagattatttggtttaaataaaacaaccttgaggtttgtagcttttccttatactata

SEQ ID NO: 118467 - DNA, 1000 bp, Homo Sapiens
caccaacaggtccagagtatgagtgcaagcaaagcagaactctcatgcgtgacctgagcagacaggctggtatttaacaggtgcctcgtgttgagattacgctgccttaatgtaacacagtctggcagttgctaaatttgtgttcccattttaaattgaccaattttggggtgtgacacttttgagcggttgaattgggagaatgaagataagtaatttacctgtccaggatcaaaagaagcctagaaaagaagcagtaatctacctctgccgataacctgtttaagatgactcagcagaacaccgcgtttcattctattggtcaattccatgtggctgactaggtcaattttttttctgaacaaaagcaggtttttatatgtaaacagtgagaaaagaaaggctaaacactatgtaaatgtgaatggaaacttggaaatactcgtttttataaactacaaaaactttttgttgtttatcaggaaatccatatttattttgtaattaactgtcaagcctgtggatgatttttttgaacttggtagttcataaaggtttacagtgaataaaaggatatcatcttgagtatagcaatatcaaaaggaattcagtagttactgctgtttaggaatataaggttaagatatcatatgggtcaggtcattttttttttctgtgctggttgccacatcttagcaagcaccaaaaaactaaagcagtttttaaaccgatatttacgtaaagaaaatcataaaatccaatgcttctgcatactgtgttatgttacagtccagttttgtgtgctttactacacagtttggttacaggacttctgtgcattgtaaacataaacagcatggaaaaggttaaatacctgtgttcagattgtaagatctagtccggacttgctgtgtatattgtaacgttaaatgaaaaaagaacccccctttgtattatagtcatgcggtcttatgtatgataaacagttgaataatttgtc

SEQ ID NO: 118468 - DNA, 1000 bp, Homo Sapiens
cctctgtctgaccctgcatggtgtgcggtgccctcctgcctcaggccgcgaagaaggatctaagggcttggcttgtttgaaagaaccacaccccgaaagtaacatctttggagaaagtgatacaagagcttctgcacccacctgatagaggaagtccaaagggtgtgcgcacacacaatggtgcctgaagaagagcctcaagaccgagagaaaggactctggtggttccagttgaaggtctggtccatggcagtcgtatccatcttgctcctcagtgtctgtttcactgtgagttctgtggtgcctcacaattttatgtatagcaaaactgtcaagaggctgtccaagttacgagagtatcaacagtatcatccaagcctgacctgcgtcatggaaggaaaggacatagaagattggagctgctgcccaaccccttggacttcatttcagtctagttgctactttatttctactgggatgcaatcttggactaagagtcaaaagaactgttctgtgatgggggctgatctggtggtgatcaacaccagggaagaacaggatttcatcattcagaatctgaaaagaaattcttcttattttctggggctgtcagatccagggggtcggcgacattggcaatgggttgaccagacaccatacaatgaaaatgtcacattctggcactcaggtgaacccaataaccttgatgagcgttgtgcgataataaatttccgttcttcagaagaatggggctggaatgacattcactgtcatgtacctcagaagtcaatttgcaagatgaagaagatctacatataaatgaaatattctccctggaaatgtgtttgggttggcatccaccgttgtagaaagctaaattgattttttaatttatgtgtaagttttgtacaaggaatgcccctaaaatgtttcagcaggctgtcacctattacacttatgatataatccattcacacattcatttattcatttattcatt

SEQ ID NO: 118469 - DNA, 1000 bp, Homo Sapiens
ctatgccgcgggtgtttactccaacatgggcaactacaagtcctttggtgacaccaagtttgttcccaacttgcccaaggaaaagctggaacgggtgatcctagggagtgaggctgctcagcagcacccagaagaagtcaggggcctctggcagacctgcggggagcttatgttctctctggagccaaggcttcgacacctcggactggggaaggagggaatcaccacctatttctctgggaattgtaccatggaagatgcccgggtccgcctcgaccgcagcaagatccggtctgtgggcaagcctgctctagagcgcttcctgcggagacttcaggtgctgaagtccacaggggatgtggccggagggcgggccctgtacgaggggtatgcaacagtcactgatgcgccccccgagtgcttcctcaccctcagggacacggtgctgctgcgtaaggaatctcggaagctcattgttcagcccaacactcgccttgaaggctcagacgtgcagcttctggaatacgaggcgtcagctgctggcctcatccgatccttctctgagcgtttcccagaggatggacccgagttggaggagatcctcacacagctggccacagccgatgcccgattctggaagggccccagtgaggccccatctggccaagcttgaggaagatgtgtggccttgcccccaattccatcagaccaaggctgcaagtggccctccattcgtcactttccagcctgccaattgcttcccctctgtgatctcatttcatctgcactgccatacgtggagtgagcaagacagggcttaccatcctgtctaccagatgaggaaatggcagttctgagaagtcactggtctagatcccgcaggtggcacgtgacagctagggttcaaaacgttctcaccaaatccaatgctcctcacatattaattttataaccagacaaataaatattagagacaaccaaaaaaaaaaaaaaaaaaaaa

SEQ ID NO: 118470 - DNA, 1000 bp, Homo Sapiens
gacagccgcctcctgtccacggatgcctcccacagtcggggtagcagctcctcctcacacagctcatctgtcaggcggggcagctcctacagctcttccatgagcacaggaggaggtggtgcaggctccctgggtgcaggcggtgcctttggtgaagctgcaggagacaggggtccctatggcactgacatcggcccaggcggaggctatggggcagcagcagaaggcggcatgtatgctggcaatggcggactattgggagctgactttgctggagatctggattacaatgagctggctgtgagggtgtcagagagcatgcagcgtcagggcctactgcaagggatggcctacactgtccagggcccaccaggccagcctgggccacaggggccacccggcatcagcaaggtcttctctgcctacagcaacgtgactgcggacctcatggacttcttccaaacttatggagccattcaaggaccccctgggcaaaaaggagagatgggcactccaggacccaaaggtgacaggggccctgctgggccaccaggtcatcctgggccacctggccctcgaggacacaagggagaaaaaggagacaaaggtgaccaagtctatgctgggcggagaaggagaagaagtattgctgtcaagccgtgagctagccatggcaggacagctcctggaccaggcccatactagagttcatggatatgttatactgaaccaggccagagcaaacagaaaaagaaggttgagggcaatggacaaggaaggaataaagggagaagagggaaaacagaaaacctgatgctggggacacagcatcagctcaagacgtcaccctccattctgcactcagaaaatggcacttgggggactgggcgcagttggtctttaaccacttttcaatgtctaaaaacatttgtttgtggtctataagatgaaacatcatttcaatcgtaaaatttcccattaaagaagtttttttttctaa

SEQ ID NO: 118471 - DNA, 1000 bp, Homo Sapiens
ttttagtagagacagggtttcaccgtgttagccaggatggtcttgatctcctgaccttgtgatccaccagcctcagcctcccaaagtgctgggattacaggcgtgagccactgtgcccggccaagaatttttttatcgataacatagtgagctctctgcctcttcggaacgatgtccactttgcttatgatcaacccaagcaggactcttctctccctggacgcctctcccctggtctggaatcttccagttctgccagaattggcctttcccagatgctgcaaacttccagttgaacccctttttctgtgtggcccctggggctgcgagaccaaaatccatgagttctgtgtaccctagacctttggaaggtgagagcagggccctgagaaaaggcagccacctcctctccctggctgaacccctgccaccctactcctcaccagaattgtcagtggcctttcaccacagtggtccttcctgcctgagccctgcactgtcccagaccacacagaagtctggtcacctctgggcgcctgggatggtcaccgaagagaagcacgctgtccccgtctctcctggcttctgccagaaaatcgaacaagtgcaattaacacactgttactgccgaagcctgaaactcccaggacttgtccttgatccttccagaaaccaccaggtccggcacttggagccccccggagagggacctcccagccgagccctcaaagaactccatgaaatcaggaactgcttgatgaaatgtatctccttgtacctggaagatgaagcccaaacacccacacctctgtctcccccagggctcgggatgtctccagcagcccggccacgcagcttcccaggtgggctcggggaggtgggagcagggaccatctctgtcccctccaccctcactccatccacctcggagaccaccctcccccagccagatacggaataaaactacagacgcagacgtcggaaaaaaaaaaaaaaaaaa

SEQ ID NO: 118472 - DNA, 1000 bp, Homo Sapiens
tgtcttctacgggctgttagcccagaccatggcccagtttggaggcctgcccgtgcccctggaccagaccctgcccttgaatgtgaatccagccctgcccttgagtcccacaggtcttgcaggaagcttgacaaatgccctcagcaatggcctgctgtctgggggcctgttgggcattctggaaaaccttccgctcctggacatcctgaagcctggaggaggtacttctggtggcctccttgggggactgcttggaaaagtgacgtcagtgattcctggcctgaacaacatcattgacataaaggtcactgacccccagctgctggaacttggccttgtgcagagccctgatggccaccgtctctatgtcaccatccctctcggcataaagctccaagtgaatacgcccctggtcggtgcaagtctgttgaggctggctgtgaagctggacatcactgcagaaatcttagctgtgagagataagcaggagaggatccacctggtccttggtgactgcacccattcccctggaagcctgcaaatttctctgcttgatggacttggccccctccccattcaaggtcttctggacagcctcacagggatcttgaataaagtcctgcctgagttggttcagggcaacgtgtgccctctggtcaatgaggttctcagaggcttggacatcaccctggtgcatgacattgttaacatgctgatccacggactacagtttgtcatcaaggtctaagccttccaggaaggggctggcctctgctgagctgggtcttcccccaacagaactatttcttgctgctcaatccattccctctggcccagcttcccagtgctcacagatggctggcccatgtgctggaagatgacacagttgccttctctccgaggaacctgccccctctcctttcccaccaggcgtgtgtaacatcccatgtgcctcacctaataaaatggctcttcttatgcaaaaaaaaaaaaaaaaaaa

SEQ ID NO: 118473 - DNA, 1000 bp, Homo Sapiens
tgatgctcatgcccacatcctgcccagagcaggcaccgtagccccagtgccctgtacaaccctgctgccctgtcaaaccctgttcctgaccgatgaggagaagcgtctgctggggcaggaaggggtttccctgccctctcacctgcccctcaccaaggcagaggagagggtcctcaagaaggtcaggaggaaaatccgtaacaagcagtcagctcaggacagtcggcggcggaagaaggagtacattgatgggctggagagcagggtggcagcctgttctgcacagaaccaagaattacagaaaaaagtccaggagctggagaggcacaacatctccttggtagctcagctccgccagctgcagacgctaattgctcaaacttccaacaaagctgcccagaccagcacttgtgttttgattcttcttttttccctggctctcatcatcctgcccagcttcagtccattccagagtcgaccagaagctgggtctgaggattaccagcctcacggagtgacttccagaaatatcctgacccacaaggacgtaacagaaaatctggagacccaagtggtagagtccagactgagggagccacctggagccaaggatgcaaatggctcaacaaggacactgcttgagaagatgggagggaagccaagacccagtgggcgcatccggtccgtgctgcatgcagatgagatgtgagctggaacagaccttcctggcccacttcctgatcacaaggaatcctgggcttccttatggctttgcttcccactgggattcctacttaggtgtctgccctcaggggtccaaatcacttcaggacaccccaagagatgtcctttagtctctgcctgaggcctagtctgcatttgtttgcatatatgagagggtacctcaaatacttctgttatgtatctgtgattttatttcttctttgggtatagggttgaggggaaataagttttgagtgagaaataaacgttttagctg

SEQ ID NO: 118474 - DNA, 1000 bp, Homo Sapiens
ttttgagctcgctgtaagactgagaaatcacgtagtccttcctgaaaccactaagaggaaaaatgtctgtgacactgcatacagatgtaggtgatattaaaattgaagtcttctgtgagaggacacccaaaacatgtgagaatttcttggctctttgtgccagtaattactacaatggctgtatatttcataggaatatcaagggtttcatggttcaaacaggagatccaacaggaactggaagaggaggcaacagtatttggggcaagaagtttgaggatgaatacagtgaatatcttaagcacaatgttagaggtgttgtatctatggctaataatggcccgaacaccaatggatctcagttcttcatcacctatggcaaacagccacatttggacatgaaatacaccgtatttggaaaggtaatagatggtctggaaactctagatgagttggagaagttgccagtaaatgagaagacataccgacctcttaatgatgtacacattaaggacataactattcatgccaacccatttgctcagtagctatgatagacctggacaaataacttgacaaattgctggaacacacttattgtggtttacccggttttaattatgtcagagattgcatcatccttctgcttgtttacaactatgatcttctatgaaatggtggtaccaaggggcgcccaacagcttttatccccattcttagagcatattctttattataatgattatccaacatatttctttaattttaatacaaaaaatacatcatttaatttttgttacatatgaacattcatttttaaatgctcagcctcaagtgcaggcatttttgagtggcctgattacatattcctcccacagcaagtccgtatcctggaagtgttattttataataaaatttaaaaagttttaaagaattaaatcgtaggacaaattaattaaaatattgtgtaaaattaccttcaggctaaaaaaaaaaaaaa

SEQ ID NO: 118475 - DNA, 1000 bp, Homo Sapiens
agggcctttcgcttgtcccatgggcgggtggtgggccaaggaggagcttagcaagtctgcagcccagccccacctccatagggtcctgcaggcctgtgctgagaggcctggtgctgcctggcagagtgacaaaggctcaggacggctggctctgggggactcaggccaagccccttggcaccatcctggcttttggcagggatgagtgaggccctgcagagagcatcccaggccaaggttcccactcagcctgccccctctgcatgtgggtagaggatgtactgggacttggcatttaggattccatctggcccagcccctgaaggtcctggggaagcaggtctcaattctgaatagccagtggggcacactgactgtcctccccaggggaactgcagcgccctcctccccactgccccctgcagcccctgagatattttgctcactatccctccccacttgcttccctgatatgtgctctgagcttccctgaaccaggatctgcctattactgctgtgccccatggggggctccttccctgcctgacccactgttgcagaatgaagtcacctcgcccccctcttcctttaatcttcaggcctcactggcctgtcctgctcagcttgggccagtgacaatctgcaaggctgaacaacagcccctggggttgaggcccctgtggctcctggtcaggctgcccgttgtggggaggggcagtgttagagcagggctggtcataccctctggagttcagaggaagaggtaggaccagtgcttttttgtttcttttgttatttttggttgggtgggtgggaaggtctctttaaaatggggcaggccacacccccattccgtgcctcaatttccccatctgtaaactgtagatatgactactgacctacctcgcagggggctgtggggaggcataagctgatgtttgtaaagcgctttgtaaataaacgtgctctctgaatgccaaaaaaaaaaaaaaaaaaaaaa

SEQ ID NO: 118476 - DNA, 1000 bp, Homo Sapiens
aaagaatacaaaattggatgatctgtttctaaagcgttacgcatctttgctgaagtatgctggagagcctgtccctttcattgaaccccctgaaagctttgaattttatgcacagcagctaagaaaattgagggaaaactcttcttgaaataaccaggcgatactttgttttgtatatatttgtgattctgtgtctacatgttattttgaagtatatctgagggaaaaataaatgaaaattttctttatgtacttatgtatgtgtgatgcatgttcaaagtcttattgaccataactctgtgcacttggttattggacatttttggagtttttttctctgggaaaaatcgatagtgttttcttcaatgctgctgctgtgtgaagccatactttttcaggattcttcccctaattggctctttggtttccctgctctgtttcatttatttcattaaaatgttattcctttatttaagattcacttattagtctgctgtttctctgaaaaattttagagctaggtatagtgaccgtgaactttctaacgcataatattctgtgatacagccattccgtacatgtgtgaagtcctgcataactttcgaactttgttaaatgttggcactaggagtcatcagatctaggcttcatcattttccagtgagaagcagagacccaaagggcctgttacttgtgcttggtcaggggactgtctgtcatgcctggaggctcttcggcacacttccccatctttcccttctgccactgtggcttcaagcacctctgttcatagagcgtctctgaaattgagtctcggtcatgacttatcccgaagtagagcaatgtgtttcctctcattgtagtttcaggactttgtcagtacaagctctgccctaggcttgttactttatactcatatcctgaaaagatgtgatttcatctatgaaggggtaaaatattggtttgtatttaattgtttgaaataaaagtgatccctata

SEQ ID NO: 118477 - DNA, 1000 bp, Homo Sapiens
tgctggtcagtgtggatgaggctgactatgaggctggccggcgccgcctgttgctgatggaggaggaaggggggcggcgcccgacagaggcctcctgatccaggactggcaggattgatcccacctccaagtctccgggccaccttctcctgggaggacgaccatctctacccctagaggactgtcactctagcatctttgaggactgcgacaggaccgggacagcaggccccttgacagcccctcccacaggatgtgggctctgaggcctaaaccatttccagctgagtttccttcccagactcctcctacccccaggtgtgcccccttagcctccggaggcgggggctgggcctgtatctcagaagggaggggcacagctacacactcaccaaaggcccccctgcacattgtatctctgatcttgggctgtctgcactgtcacaggtgcacacactcgctcatgctcacactgcccctgctgagatcttccctgggcctctgccctggcctgcttcccagcacacacttctttggcctaagggcttctctctcaggacctctaatttgaccacaaccaacctgggcttcagccacatcagtgggcactggagctggggtgcacatggggcctgctcaccttgcccacacatctccagccagccagggccctgcccagcttcaatttacagacctgactctcctcaccttcccccctgctgtccagagctgaacatagacttgcacttggatgtcacctggagtgtcacatgggagtgttatggcagcatcataccaaggcctactgttgcacatggggccaaaaccagtaaacagccaccttcttggaaagggaatgcaaaggctttgggggtgatggaaaagaccttttacaaatgataccaattaaactgccctggaaagggcataggtgggaaaaaaaaaaaaaaaaaaaaaaaaaaaaaaaaaaaaaaaaaaaaaaaaaaaaaaaaaaaaaaaa

SEQ ID NO: 118478 - DNA, 1000 bp, Homo Sapiens
agcaccaagactgagaagccccccccagagccagggaagccgaaggggaagaggcggcggcggaggggctggcggagagtcacagagggcaaatagcgccaggcggccgcttggccggatccaggggcggtgcagggcggccggccctgcctgcgggagagggcgagcatgaactggcccggaggacccagctcgagccgccaggacacagacgtacaggcctcctcgggagggagcgcctccccaccactgagccatcctcagcagcgtccgctgcgtctgcactgatgaccgtctgagcccagctcagcgttcctggacaaacagcctcactcctcagcgttaccgccacacttgaatttctccgaatgtcaaggttccctcccactctatttttttaggttaaagttaattggcatatggaatgttttaatctcctctgaaatgtgtagcgtaggcttttcccaagggtcgctagaaactcgtcttcgcgttgccccctttctggctctcagcgccgtcgccactcgggagaggctgggtgaggcccgtgtgaggactgaccctggattcctcgaaactgccattgtgatcattactctgctctttggaaatggctgtatcatttttttgtactaatgtgaattgttcctcagaaacgcttcttttccatcctagtgagaagctggccctgcaggtggtggcagcaatggtgttgtaagatttcctcccgtagttttttctcctcatggatttgaatgaaatgccaataacacgtccactttcaacgtgtagtttacgcggagcactttcgaggcctggccgggttgggcctacttctcacctgggcctatcttctgaactcgctaggttcttatcaacatttgggggataactttgtatatttttttcatttggcttttctttaccagtttctgatttttattctcaatatatttttgctaaacctatttcacaaatcaaaaaaaaaaaaaaaaaa

SEQ ID NO: 118479 - DNA, 1000 bp, Homo Sapiens
caccagctttggcacccaccaaggacaggcagaagccggacaggggcccttccccacaccggggagagctgctcggacaggccccctcccggccgaagctgtcccttaatgctggtccttcagaccctgcccgaactcccacctctccatggcctgcctagccaggctggcactgccactcacactcggccccagggcccaggagggacagtgcctggagcctgggccaggcccagcccatctgtgtgtgtgtatgtgcgtgtgatgctacctctcctcccgtccctctccaggggccccgcatacacacggccatgcacgcacacactgggcctgggccagggccccagagctcctgcctgagctggaccttatgcaaacatttctgtgcctgctgggtaggggcacgtctgaggggccctgctccaagcctgcaggaccgagggccacagccggacagggggtagcccctggattcaggcacacgaccaccacacgagcacgtgccacgcatgcctcgtgtgctcatctcacacacacccccctcccgggtcacgcagacaccccccaaccacacacatctcatgctgtacacctgaggctgctcacgtctcacgcccagtgttggtgcacatttgcctctcacatgctgccctctccacccacccagggacaccccacggctcctccctgcccctgcccctcccccagccttgaggtgccctgcccggcggggcctgtgaatatgcaatgggagtcccaggctgtacagtggtgagtgtgtgtgtggcgtggcgtgcccgtccccagggctggctggtgccccacgcggggcctgtcatgtgaagctcgtgtcctgactttgtcttaagtgcattcacgcacttactcttggccttatgtacacagccttgcccggccgccggggcacataggggttttatcgggcgtgaatgtaaataaattatatatatatattgctaaaaaaaaaaaaaaaaaa

SEQ ID NO: 118480 - DNA, 1000 bp, Homo Sapiens
ttatgatatgagggtggatgatttccttcgtcgcacacaagctgttgtcagtggccggagaagtagaccccgtgaaagagaccgggaacgagagcgagaccgccctagagataacagacgagacagagagcgagatagaggacgtgatagagaaagagaaagagagcgattatgtgatcgagacagagaccgaggggagagaggtcgatatagaagataatgggcttttggaagcactgattgtttaaagatacaaaaaatcttgtatttttttttttgtgtgtgtttacaagtagtaaatttattttcagctgtctgcctatgaagttcattgtgtagaaggatttattatgaccccctttgttccaagcatgcagtatcataagaactggaaaaactcaaatccgccaaaaatccacagctgacagttgaattgacacttttattggggcagaatggaacagtccaagaatgtagatactgattctttctccataaatgttcttatagtgtgttcatcctagagttatttttttgtttgtttttttcctttttggatcttgattgataactgccatgatattttgctttgatgtgtttctacatgtagttgcacacggttcagtaaaaataatgctgctatcgagtatgcaaatattgaagtatgatggtttgactgtatggcagtgttgtagcagcctcttgtttttttccccattgcctctttttttaaaaaacttataaagtcactttttatttttcctcagtcttcaatgacgagagcaatattaagaagacattgctatctaatttttaatctttttaaatgaaaaattcctatgttcagtagcgtggttgatgctattgtttagccttcccctccaaattgtatacattggcttggaatgttcacaacttgcgtgcgtggcagcggaagacgattcccatattctacattgctactgttttgtataaaataaattggtaaagattgacggtt

SEQ ID NO: 118481 - DNA, 1000 bp, Homo Sapiens
acactcattcttaacttttcgcaaacgtttcacacggactaatctttctgaactgtaaatatttaaagaaaaaaaagtagttttgtatcaacctaaatgagtcaaagttcaaaaatattcatttcaatcttttcataattgttgacctaagaatataatacatttgctagtgacatgtacatactgtatatagccggattaacggttataaagttttgtaccatttattttatgacattttacaatgtaagttttgaaactaactgttggtaggagaaagtttcttatggaacgaataccctgctcaacatttaatcaatctttgtgcctcaacatactgttgatgtctaagtatgcctcagtgggttgagaaaatccccattgaagatgtcctgtccacctaaaagagaatgatgctgtgcatatcacttgatatgtgcaccaatacctactgaatcagaaatgtaaggcattggtgatgtttgcatttaccctcctgtaagcaacactttaacgtcttacattttctctgatgatgtcacacaaaattatcatgacaaatattaccagagcaaagtgtaacggccaacactttgttcgctcattttacgctgtctctgacataaggagtgcctgaatagcttggaaaagtaacatctcctggccatcccttcatttaaccaagctattcaagtattcctatgccagagcagtgccaactcttggaggtcccagagtgcagccaatgcctttgtgtggtagttctaaattttaattgcacctgaaaaacctgggcacctaagcaatgagccacagcaaaaagtaaagaacaacaacaaaataaagctgttgttaaattttaaacaatattactaattgcccaaaatgtcaatttgatgtagttcttttcatgcaagtataaattcaattgttagttataattgttggacctccttgagatagtaacaacaaaataaagcaagctatctgcacctcaaaa

SEQ ID NO: 118482 - DNA, 1000 bp, Homo Sapiens
ggggaagccagcttccaggtcatgaaaatactcaagcagccttatggagtgctccacatgacaagggatggaggcctcccaccaatagccatgggagtgtgcaatcttgaaagctggtccttcaattccagccaagcattcacatgaccgcaatcctagctgatctcgcttgtgacctctatgggagaccctaagccagaaccactcagagaagctgctctggaacgtcagacacacatgaactgtgagatagtaaacgtttattgtttaaagctacttggtttggggataatttgcgtttcagcagtagacaatatatttattttgtccaggggagtggaaaggcgattacagagtttgttgagccccatagagtcctagtctttgcttaaagaaatataccagttctttctaatacagaatccattaagttcgttggttgcaaacaatagaaaccaactctgcctcacttatgtttattggaggccataagagagccacagcatctaccaaaaagccaaaaaaaaaacaggttttggaaaagacaggaactagctacaggagctaatggccaatcttgtctgagttctttgatggcgacacatgaactacagccgttttgttgttgttaatttctccgtgttttcccctcagttttggatgactctgctcaaggttcagattctgaggagcaagtatctgttgggctatctgaggtcctgctaccattccttggccagtaataggtagtttcacagggattatatgcaatggaggaaaagttgttctcaaggaaaactagggagctttctccagaagatgatgtaatggcagaaacaacaggtggttgaccacagaaggggacaataataatacttgtaatttattgtgcgcttatatgagcctcaccctctcccaggtgtcagataatgctcgtaaatgccttagtccatcatctcagtaaattttttttataacactaaaaaaaaaaaaaaaaaaa

SEQ ID NO: 118483 - DNA, 1000 bp, Homo Sapiens
tataatgcttttctattagtaaagcatcagctaagcttcagtggcctgctccatcccctaatgactcccatgggctatcctaaaggaacttccagaacctttgttggtgtgttgacattgaccatgcagaccaatttgggcacaactggacattgattccttttacacaagagctgcctcccaaagatagataaattttcccagccctaaatatgaatcatggggcaagatattggtcgtattgatggtgaacctttcctactggattctttgcatgccacatagcaggattcattgcctttctctcatcatggatggcatgcagcagcacccaagtattcttcattctttgcagggaaaaaattgtgcatgggggctgaaatgtagtatgtgtagctcaattagtctctcctctgtgatgcaaaatggaatattcaatggcagatctgcccttctgagatgctgaccatccaaaacaccttgtttatggtgcaccatgattagctcacacacaatgccaaggctgtgcttctattatctgatacatagtttgacaatgggtaattctactcagaccctccctactgattggctaggatgcctgtcaggaactcattatgctactggttgtttggggatccccatagtggactactttcaggaatggcatgaattgtaaccaactgagtgctgcccccactgttacggaagtttataaaaccttagttccagaagacccaaaggagagtactggtttgtgtttggtgcttggcctagatccagccaccactctgaaactcatcacatcttcattgacagggagggagcccaggacatatgtgtggctcattgaccagaaggctttcttagtcccaacagccatgaaccatgcacttatggatacccagccttttagggctacgtgaaatgcatccttgtaacatcattgtattctttcaataaatagccttctgagttgaatgcgaaaaaaaaaaaaaaa

SEQ ID NO: 118484 - DNA, 1000 bp, Homo Sapiens
ctgccgccgtacgcgggcccgggcctggacagtgggctgaggccgcggggggctccgctggggccgccgccgccccgccaacccggggccctggcgtacggggccttcgggccgccgtcctccttccagccctttccggccgtgcctccgccggccgcgggcatcgcgcacctgcagcctgtggcgacgccgtaccccggccgcgcggccgcgccccccaacgctccgggaggccccccgggcccgcagccggcgccaagcgccgcagccccgccgccgcccgcgcacgccctgggcggcatggacgccgaactcatcgacgaggaggcgctgacgtcgctggagctggagctcgggctgcaccgcgtgcgcgagctgcccgagctcttcctgggccagagcgagttcgactgcttctcggacttggggtccgcgccgcccgccggctccgtgagctgctgagggcggccggcgcccgcccggcgtgccggagaggagaaagggcccgactgcccgccggaccctgcacccagcgactgggccccgcgcgcgccctccgcgagggtggaggcggcggctgtgtgcgcagggcccggcaccggactgggaccctggcgtccctccaggccttgcctcctgcgggaggacagtttggcttcacttctctgaccccagcctcggccgtaaagtgaaagagaccggaccagcttcagctttcggactctggttcttggatcgtgtcctctccccctcgccgccctcttcccccaatctgagccattgcaggcctctgcctgctgccccctctctcctcgggatcgggtccccagagccaccatctcctgagcctcccaccccgctgcctgggccctgtggttgctgggcctcccacctcaaggaggggaaggttgtacagcccgaacccgtggagcaatgccctgtctggcctccaaaaccaaaataaaactgggtcactttaaaaaaaaaaaaaaaaaaaaaa

SEQ ID NO: 118485 - DNA, 1000 bp, Homo Sapiens
ggaggagcagaaggatggggcccgggcagcggctgtggctgacaagaagaaaggcctcatggggccactgaccgaactggacactaaagatgtggatgccctgctgaagaagtctgaggcccagcatgaacagccggaagatggatgcccctttggtgccctgacgcagcgcctcctgcaggccctggtggaggaaaatattatttcccctatggaggattctcctattcctgacatgtctgggaaagaatcaggggctgacggggcaagcacctcccctcgcaatcagaacaagcccttcagtgtgccgcatactaagtccctggagagccgcatcaaggaggagctaattgcccagggccttttggagtctgaggaccgccccgcagaggactccgaggatgaggtccttgctgagcttcgcaaacggcaggctgagctgaaggcacttagtgcccacaaccgcaccaagaagcacgacctgctgaggtgagcgttagcaggatgcacagtcccgggggtggccttggaggctgtggccacggctagtcacctttcaggggttttacaacaggctttccaatcctggctggcctctaaatcacctggagagcctcgaaaaaaacagcagtggccagtccaccgggtatgtcccaaacaaattctgattccacagagtggggctcaggcatctgtgactgaccgattgatttgatttgtttttgttttgtttttttttgagagggagtctcgcctgggcaacaagagtgaaactgcatctcaaaaaaaaaaagaaaaaaaatttacgcttcttaaccatttttaagtgtacagtttagtagtgttacccatattcacattgttgtgtgatttattttttgtcttttcatgcttcttttctttttatccccaaagttttgttattaaaaatttgatacacacagaaaatctgaaagaatcatacaataaacatcagtatattctccacctaaaaaaaaaa

SEQ ID NO: 118486 - DNA, 1000 bp, Homo Sapiens
tcccacctccaacctagccctactgcccaccccaccccaacccaccccatgcccagtggtctcagtagatacttcttaactggaaattctttcttttcagaatctaggtggtgaattttttttaagtggcacggtctttttctgcttgaaatctgatcacaccccccagccattgccctccctctctttttcctctgtagagaaatgtgaggggcagtacatttactgtgcttttcacaccatctcagaggttgaggagcatactgaaaattgccctggggggtgctgggtgtgctgtctccttcccacatcctcagccccacaccagctctatttcaggggtgagagtcagagagcactgcaatatgtgcttcatgggatttcgattcgaagatcctagaccagggagacactgtgagccagggatacaacaaaatactaggtaagtcactgcagaccgacctccctgcagtttgggaaagaagctgggtttgtggagaatcagagcatcttgacatgactgctgacctaaagatccctggcattggccagggatcctgtggaacctcttctagttcaggggtgtgagcattagactgccagttgtctagtgacatctgatgcttgctgtgaacttttaagatccccgaatcctgagcacctcaatctttaattgccctgtattccgaagggtaatataatttatctggatggaaattttaaagatgaatcccccttttttcttttcttctctcttttctttccttctccctttcttctttgccttctaaatatactgaaatgatttagatatgtgtcaacaattaatgatcttttattcaatctaagaaatggtttagtttttctctttagctctatggcatttcactcaagtggacaggggaaaaagtaattgccatgggctccaaagaatttgctttatgtttttagctatttaaaaataaatccatcaaaaataaagtatgcaaatgtatctttt

SEQ ID NO: 118487 - DNA, 1000 bp, Homo Sapiens
gaattttacatctaagcaaggactggctttagaagcagtgtagttctacctctcattttacagatgagaaaaccgaagcccagaaaaactctcatttgctcaaagtcacagagaaaattagtggcaaagccaaaaagattcagatcttctgactcgaagttgagagttctttatactctattatgctgcctctccagtgtaatatttgcctttctgtaaatgggattaaatatgatttgtaaataaaggacatctgacctccttttttggtacattaaggcactttataaatggacttttattgtctcatttttcgtatataattatttccatcatattctttatggaagatgcaattaattttaacttttttactcttataaaaccagttcctgacattttaaaaaacaatatctgtaaaatggatccttttatgagtgaatttttctgctaattgcccaaggctaaatccaatttaaggattgcttagtttctttattttgtttatggtctctgaactggtatttttttataaaccaggctaattcacaggtcataccatttcattcttgtcgtgttggcttccagtcactggaaaagcttttgcattttaaagatttttagagccatgcaaaactgggcattaaatgttgcataaagcaaatcttttaagtaaggtaaaatgttgaagtcttaaccagaattcctacaactaattactaaaactgctatttctaactcttcatgaaagcattacctttggaaagttaaactttttttttcctttcatcaccgtctttgaaacaaattattttccaattcataagaactttggtaaaaaaaaaaataaaaggaaattatatgtttttctttggacattcattggaaggcttgttgaagacatgatcccccagaagccttagtgacccagatctcaaccagagactcaagatagcctcaaatacagtgaaagattatgtatccaaaaaaaaaaaaaaaa

SEQ ID NO: 118488 - DNA, 1000 bp, Homo Sapiens
aaacataattcacgtgtaaaaattcatcagaagagctgtgaaaggcaaaaggccaaggaaggcaatggttgtaggaaaaccttcagtcggagtactaaacagattacgtttataagaattcacaaggggagccaagtttgccgatgcagtgaatgtggtaaaatattccggaacccaagatacttttctgtgcataagaaaatccataccggagagaggccctatgtgtgtcaagactgtgggaaaggatttgttcagagctcttccctcacacagcatcagagagttcattctggagagagaccatttgaatgtcaggagtgtgggaggaccttcaatgatcgctcagccatctcccagcacctgaggactcacactggcgctaagccctacaagtgtcaggactgtggaaaagccttccgccagagctcccacctcatcagacatcagaggactcacaccggggagcgcccatatgcatgcaacaaatgtggaaaggccttcacccagagctcacaccttattgggcaccagagaacccacaataggacaaagcgaaagaagaaacagcctacctcatagctctcaagccagttgaagaaaccttgccttttcagcttgaccctgcaatataacatgcacaggcctgcttgtgaatcaggactgaatgtgaaagggaagtattgagtgaggacattcccaaaaccaaaggacaactgaggagactgcccagcacataatgaataaataagaaaatgagtgaggagttattaacatcatttggaaaaaagatttcccattcacttgatattgtttgttcactcatttagtcattaaaagtgagattaataaaatctgaaaatgttatataataactttaaaaagccaggtaattaataatctgcactgatattacatccacagtaccacagtatttatgtgtatgaattaaggattaaaagataatgtggataaataaactattgatctatgtctgtgt

SEQ ID NO: 118489 - DNA, 1000 bp, Homo Sapiens
gccaaggaagtccggggggtgaaggtcttccgctcctcggccaccgtgtactttgccaatgctgagttctacagtgatgcgctgaagcagaggtgtggtgtggatgtcgacttcctcatctcccagaagaagaaactgctcaagaagcaggagcagctgaagctgaagcaactgcagaaagaggagaagcttcggaaacaggctgcctcccccaagggcgcctcagtttccattaatgtcaacaccagccttgaagacatgaggagcaacaacgttgaggactgcaagatgatggtgagctcaggagataagatggaagatgcaacagccaatggtcaagaagactccaaggccccagatgggtccacactgaaggccctgggcctgcctcagccagacttccacagcctcatcctggacctgggtgccctctcctttgtggacactgtgtgcctcaagagcctgaagaatattttccatgacttccgggagattgaggtggaggtgtacatggcggcctgccacagccctgtggtcagccagcttgaggctgggcacttcttcgatgcatccatcaccaagaagcatctctttgcctctgtccatgatgctgtcacctttgccctccaacacccgaggcctgtccccgacagccctgtttcggtcaccagactctgaacatgctacatcctgcccaagactgcacctctggaggtgcagggcacccttgagaagcccctcacccctaggccgcctccaggtgctacccaggagtcccctccatgtacacacacacaactcagggaaggaggtcctgggactccaagttcagcgctccaggtctgggacagggcctgcatgcagtcaggctggcagtggcgcggtacagggagggaactggtgcatattttagcctcaggaataaagatttgtctgctcaaaaaaaaaaaaaaaaaaaaaaaaaaaaaaaaaaaaaaaaaaaaaaaaaaaaaaaaaaaaa

SEQ ID NO: 118490 - DNA, 1000 bp, Homo Sapiens
gttgaatggacccttttgcttttctgatttttagttctgacatgtatatattgcttcagtagagccacaatatgtatctttgctgtaaagtgcaaggaaattttaaattctgggacactgagttagatggtaaatactgacttacgaaagttgaattgggtgaggcgggcaaatcacctgaggtcagcagtttgagactagcctggcaaacatgatgaaaccctgtctctactaaaaatacaaaaaaaaaaaaaattagccaggcgtggtggtgcacacctgtagtcctagctacttgggaggctgaggcaggagaattgcttgaacccaggaggtggaggttgcagtaagccaagatcacaccactgcactccaacctggacaacagagcgagactccatctcaaaaaaaaaaaaaaattgtgttgcctcatacgaaatgtatttggttttgttggagagtgtcagactgatctggaagtgaaacacagtttatgtacagggaaaaggattttattatccttaggaatgtcatccaagacgtagagcttgaatgtgacgttatttaaaaacaacaacaaagaaggcagagccaggatataactagaaaaaggatgtctttttttttttttttactccccctctaaacactgctgctgccttaattttagaaagcagcttactagtttacccttgtggtataaagtattataaattgttgtgaatttgaagaatccgtctactgtattattgctaaatattttgtttatactaagggacaattattttaagaccatggatttaaaaaaaaaaaaaaaaactctgtttctgcaggggatgatattggtgagttgccaaagaagcaatacagcatatctgcttttgccttctgttgtttatcttacctgcagatattaagaatgtatgcattatgtaaaatgctcaattatatatttttgttgagttttttaattaaagacttgttaaaaaaaaaaaaaaaa

SEQ ID NO: 118491 - DNA, 1000 bp, Homo Sapiens
cagccccgcctcgcagtgtggaagcctgatcattcttccatcagctctgcaccaaaaagcttttcctgagctttgaatattagatctgaccaatatgggtaaccaatgcccttaggtaaggtaaaataggaataaaatagctgtttgcaatgttatttcaccacacagtgtggtagggagggaactgatatgttgcaatgcaaagtaatctagtagtactgtttgtagaacagacaagtgtgtccaatttaaagaatatcaacatcatttttctatatcatactcttgtgaggttggatttaaccacagaggcagaaagttggtctactttgctcgttcctggcaactagcatggtgcctgcccctaatacattttcactgaatgaatgaatcagtgagttaatgaataaataaacaaatgggaggtgttctcctttatattgtgttagaggctgaggatatagaaatatgtaactcagagtcccattccacaagcccatgctagtgagccaacacaaacaaaaaacaactcaaattcaatgtgattaattcctaaaatcatagcactaacattcagtagtcatgtccagctcttcctttatgtcaggtacctagacatagcggaacagaaaacccttcaaaagttcagtctagtctggaaaacaaacatgaagcaaagaaggcacaacaccatatggaaaagcaagacagaaatatgtacagggcagagaggctgcacggtgtcatttaatcacgaagactctgttattagactgctcgaatacacaaagctgtgttaccttggacatgttacttcacctctctgggcttcagttgtctcattctgtaaaatggtgatattactggaactcatctcatagggttgttagtgagtgaatgtttgtaaaacaggatagtgcccagcacatactagtaacaaatgtaaaatacatgaaacaaataaatatttcctgtgtcctctgaactttaaactctcatc

SEQ ID NO: 118492 - DNA, 1000 bp, Homo Sapiens
gagtgcaacagcatgatctcggttcactgcaacctccatctcctgggatcaagtgattctcctgcctcagcctcctgaatagctgggattacaggcacctgccaccatgcctggctaattttttgtatctgtagtagagacggggtttcactgtgttggccaggatggtctcaaactcctgacctcctgatccacctgcctcggcctcccaaagtgctgggtttacaggcgtgagccaccgcgcccggccaaaattgaggtattttttgccctacgttttaaggactagacttttgaagtattttatagtctagaggtctcaagtaatatatatgtgtttaatatttttagagccaattgataccacaattagataggagtagtgagaataatatggaattacttggtttgaagtagttaaaaattggatatggttatatctgagctgtagtcatattatctcaagaaaaataatacgaggatttaacataagatttgttctattaatgcccaaatttggctttcctctactatcccccatagagaaccactaacaagtggatgtctaatattcctctggtgagttgaaggcaggagaagttgagaatcattagtttcaatgagtatccaggtgacctatcctggccctctactcagaaaccggcaatttgtcttcactctgagattcattaaattgctgttgtataactgatggttattatgaacactgacctgtgagacatatggaagataaagtttggtcttacaggaaatcttgaggagagtcaaaagagaaatgggagatgtctcttgagaggtgatcagagaagtttatgctcactgtctgatgcaaatgtctggtctatttgttagtaaataacagggaaatcattttcactttttgttaaaaataaggtatttacaagcataccttgtagttattgtgggttcagtttcagaccactgcaataaagtgaatatctcaaaaaaaaaaaaaaaa

SEQ ID NO: 118493 - DNA, 1000 bp, Homo Sapiens
ttttcatgacgtttcatgatttgctgttggtttcaaatgaaactacaaatctggcatgttttactgtgaacacttttgttatttgttttgtacccttttttgtcttgtttttctgttttagttgtcttctgaaaaaagagtcgttccctctgtttctgtcctcagatgatgtccctccccctacctgtaacctttctttgacataattgttcatatcaatgaaggtgctgaccagctcaatacaaagttaagcacaagatctaaagctcttgaaaatgcccgtgaagagaagactgaatgtgttaatgaatttaatgagtctggcaaaagttgcaaattatatgcaagtttgtcctatcgcttataaatgtagtgtttcattggatttattttatgctaggttatattaagttgaaatagtctgtgattaaatgtcctcatccatgcacagaatatgaatggcagcaaatctttgtgcaagaaatttgaaacttattgggaaaagcctcccagtagattaattgttcatatcaggagatttagggtaagtcatgggttgaggtgtcagatagtaatatctatttgttttgtacatgtatatatctaggaactttgtaacaacacatctttaataatgttaaaggttttttcatttttaatattttaaactaaaaactgtacttcaatctcagtttctaaaattaaaaataatttatactgatctatatattttttctttttgaaagatttcattaagactgatgggtaactttcaaatgagggtcatgtacaaatattgggatgcatgagatcccatgatcttgtgtattgagcttattgttgaaagggatttttgaaggacagaacaattactccatgatgaatcttcctttctctgccttctgagcaccgtctttaatttccatatcttcaagtcttgaagaagttgatgttaattgaagaattcacttgtctggttgaaataaagcctgtttctgtt

SEQ ID NO: 118494 - DNA, 1000 bp, Homo Sapiens
ctgagtaatagtgttcatgtgctcccattctcgaccctgttgttgaaattcaaacttaaatagcctgacttcttgttgggtaacttgccctgcctccagaggtatttgaacttcattatcttcagcacaggaattgttaatcttctcacttcacctgttcttgcattagctcaattgatgtcatcactgatttcctaaactagaaactatggaagcatctttgacttttccttttctctgttggattagcttaatcaccaagtcctgtcaacttctgaaatgaatctcaaatttcttcccttctctatctgttgcccctgattttgccttaagttcttgcctgagtgatctcccagcctgtcttctgtctccttttggttcagtctttatactgcctcttgagtaatctttctgaaatttaaacttgatatttttcgccctcttgcttgaaaacttcacttgcttccccatttcctactctttaaggaatgatttctttagcctcagatagaaggacctttatgatctggccatattctgaaatagcttcaatcctctcctcatctctgttccagtatacatctttccttcttattctgcaaacattagaccacttgatattctttaaatatgtcatgtacttttcttgtgtctgttctttgggataattcctatccttttcagggaggcaaattgcacgtgagtttaagtatgaaggcaatgtatacctgctgattgtaaaatatttaaacattgtacatatctgtgtggttttaaaagtctgcttttaattatgtaaaattcatcttccctttccacagataacttctgttaacaacttgatatctattgtacaagatgtgttactggcatttccatgtatatatgtatataaatgcaggaaaccaacatgtcattgacacctctcttctttacttttccccatatctaatcattcctcaagtcttactgatttttatcagctagaatctatctcctt

SEQ ID NO: 118495 - DNA, 1000 bp, Homo Sapiens
gataccaaacaattgatgattattatactgatgccagtccgagtcctagactgaagtcagtaggaattccagtattgtgtctaaattctgtggatgatgttttctcacccagtcatgctattccaatagaaactgctaagcaaaatcctaatgttgctttggtccttacttcttatggaggccatattggttttctggagggaatctggccaagacagtccacttacatggatcgtgtcttcaagcaatttgtgcaagccatggttgagcatggacatgaactctcttaacatgtagttctttgggtgcattttgtctgaaccacaattgtgaaggcagctcagcttagtgcacaaattttaactgttgtatataaagcaaataagccagcagatgggtgaagaggtccagaatgatatgcaaaaactactttttagagaaacaaaacaactttgtagcaacaaattaaatatagtattagattgttacttacgtagattttatttttactatgccttaccaagtacatccttaaacaaagtagtatgtacatgaaattgcacttaaccaaaactattgtgtaaaacaaattttaattcctcagggttttaatttaaactagtatttttttagattatttgttttaggtgatttaatggtactttaataactactaagaaatattggctatttcaatgtaagttataaggtggtacattcctaagggtatttatagttgatgataacatgaaaactgaaataagataaaatacaacgtgctaaatcttttatgtattctaactttaaaagacaagtgcaacaaagttagactgacttctatatgtgctcttttactctgataatattaaattaggactaacttatgttttataatgattataatttacatgcttatttttaaaatagtatatgtggacacatatatatcattatattaaaataaattctaccattttaaattggaaaaaaaaaaaaaaaa

SEQ ID NO: 118496 - DNA, 1000 bp, Homo Sapiens
gtttgtcaaatggcctttgttttctcaagcctgatacctctgctattgatgacacctgtattctgtctgggaaatactagtgaatgtttccaaaacttcagtcagagccacaagtgtatcttgatgcactcaccaccatcagccatggctgaacttccaccttctgccaacacatctgtctgtagcacactttatttttatggtatcgccattttcctgggcagctttgtactcagcctccttaccattatggtcttacttatccgagcccagacattgtataagaagtttgtgaagtcaactggctttctggggagtgaacagtgggcagtgattcacattgtggaccaacgggtgcgcttctacccagtggccttcttttgctgctggggcccagctgtcattctaatgatcataaagctgactaagccacaggacaccaagcttcacatggccctttatgttctccaggctctaacggcaacatctcagggtctactcaactgtggagtatatggctggacgcagcacaaattccaccaactaaagcaggaggctcggcgtgatgcagatacccagacaccattattatgctcacagaagagattctatagcaggggcttaaattcactggaatccaccctgacttttcctgccagtacttctaccattttttgaagctacaatactggaacatccaggaactggagttattctacgctaatggattggaaagaatgttgggaaaggacatcttaaatcttttctaactatgccctaaactgcagaactcaaaggaaatatagtgccattgttagtagtcattctagatgaattgggagtatctctccagttattcccagattcactagtgatccttaaagtctctattcagggagaggaagacactttccatctcagagatagactcgtgttaccttgatggatattggatttgtctaagtctcttctagaaaaaataaattctagattattattt

SEQ ID NO: 118497 - DNA, 1000 bp, Homo Sapiens
tggagtcgacgctcaactatgaagatcactgcttcagcgggcacgccaccatgcacgccgagaacctgtggccggggcggctgtcctccgtccagcagatcctgcagctctctgacctgtggaggctgaccctccagaagcgtggctgcaaggggctggtgaaggtgggtgccccaggcatcctgcaggggatggtgctcagctttggggggctgcagttcacagagaaccacctccagttccaggccgaccccgacgtgctgcacaacagctatgcattgcatggcatccgctacaagaacgaccatatcaacctggccgtgctggcggatgccgagggcaagccctacctacacgtgtccgtggagtcccgtggccagcctgtcaagatctatgcctgcaaggcaggctgcctggacgagccagtggagctgacctcggcgcccacgggccacaccttctcggtcatggtgacacagcccatcacgccactgctctacatctccaccgacctcacacacctgcaggacctgcggcacacgctgcacctcaaggccatcctggcccatgatgagcacatggcccagcaggaccccgggctgcccttcctcttctggttcagcgtggcctccctaatcaccctcttccacctcttcctcttcaagctcatctacaacgagtactgtgggcctggagccaagcccctcttcaggagtaaggaagatcccagtgtctgagtgaactaacagtcctgctttcagccaccatttgcacaagacacccagcactgaaagtcccgctgccaggagcaagggatcctttggaagcacccgccctttgtgccttgttgggggaaaccggtgacgcagaagtgagtgtggatacaccagagtttgcattggaaggaatgagtgtcacgtggggagggaaggggccagtggaccttttgtaagctttccactcaataaaatgaacctgtatggcaaaaaaaaaaaaaaaa

SEQ ID NO: 118498 - DNA, 1000 bp, Homo Sapiens
ttctgttctagttgtgtggcctggcccccttaacctctctaggcctcagtttccttactaatgaaatggatgggggataatatagggaaggattaggtgaaataatgcatgggaagtgcttagcatagtgctaagggctcaataaattatcactgtcattattaatggaagcccaagatgttctagaagcataggcaaggagataggagctttgcgtgagggagtctgtagggtgttggcgggggctggttcctggaaggagggcagggcagtggacacaaagtatttctgtttactctgaggaagagtgtgtgtgtctgtgtgtgtgttcggggatggggggtgtctgagcttttgggtcctggaagacgtagaggaggcaaggccctccctccccatcaggctttcctcccaggagcagcagatcagcctcccagactccctggtagcatggccagccctgccctgggcaaccaggagttctgcctggtagaccctgcaccccgttaggaagccagtggggtggtatgttcatttgccccccaccatcactagtaggacacctgcaccactttctaccacattctctgggaccatcagagtacagatataccctcccattcagacaaatccaatctatgggaacttggggctgctaaacaagacatatttgggggataattattcaacttccctcaaagataatagaaaaagtggtgggtgtgttggctcacatctgtaatcccagcactttcaaaggccgtggcaggtggatcacctgaagtcaggagttcgagaccaacctgaccaacatggtgaaaccccgtctctactaaaaatacaaaaattagttgggtgtgatggtgagcactggtaatgccagctactcgggaggctgaggcaggaaaatcgcttgaacccaggaggcggaggttgcagtgagccgatattgcgccattgcactccagcccaggccaacaacagcaagactctgtctcag

SEQ ID NO: 118499 - DNA, 1000 bp, Homo Sapiens
ccaaagccaaataaagcagttccaatgaaagtaagtgaacacagtctcctgccccttatgctggagcagtttccgtttctttatgtttctggcccaacactaagcaaaatgtggaaacagcaaattgcacaggttgaacagcttaagaaagaagcatgtagagaaaatcgatcaaagaagaaactccaagatgaaatagaagaagccctaagaaggcatgacctccttactacccttgtcaagaaagaatatgaacataacaagagactgcaagacttcaaggactgcattcgtaggcaaaggttgacccaatcaaagataaaagaaaatcgacagcaaatcgttcgtgctcgaaaatattatgatgattatagagttcagttgtgtgcaaaaatgatgagaatgaggacccgggaagaaatgatatttaagaaactgtttgaagaaggtttaaacattcaaaagcaaagattacgagacctaagaaactatgccaaagaaaagcgagatgaacaaaggagacgccaccaggatgaactggactccatggagaactactataaggaccagttttcattgctggcagaagccatatcacaggaacatcaagaacttaaagccagagagaaatctcaggcccagacattacataaggtgaagagggagctgagatctaagatggagaaggaaattcagcagctgcaggacatgataacacagaatgatgatgatgttttcttccgggaactggaagctgagcgcttcagatctcggcttcagctggcttcctttcagtacagtaaaagtccctccctatgaggccagacttgataatagtaggtgaaggttctggaggcctttaccaggacagagctagaatcgagccagtaaacagtctaagccagaaaaataattttcaaatgctttacctgtattttcattccagtactttttatgattttttaaataaaaattgttttctaaaaaaaaaaaaaaaaaa

SEQ ID NO: 118500 - DNA, 1000 bp, Homo Sapiens
tggaactggacagagtaatactgtacagaacatccttgaacctttctacgtgttagatgtgtccgaaggcttctctgttctgcctgttattgctggcacacttgggcaggttaaaccatacagttctgtggagaaagaccagcatcgtattgctctggacctcatatctgaagccaatcactttcctaaagaaacacttgagttttggctgagacatgtggaggatgaatctgctatgttacaaaggccaaaatcagacaagttatggagcataattatattggatgtcattgagccatctgggctcattcagcaggaaataatggaaaaagctgcaatatccaggtgtttactacaatctggaggcaagatctttcctcagtatgtgctgatgtttgggttgcttgtggaatcacagacactcctagaggagaatgctgttcaaggaacagaacgtactcttggattaaatatagcaccttttattaaccagtttcaggtacctatacgtgtatttttggacctatcctcattgccctgtatacctttaagcaagccagtggaactcttaagactagatttaatgactccgtatttgaacacctctaacagagaagtaaaggtatacgtttgtaaatctggaagactgactgctattccattttggtatcatatgtaccttgatgaagagattaggttggatacttcaagtgaagcctcccactggaaacaagctgcagttgttttagataatcccatccaggttgaaatgggagaggaacttgtactcagcattcagcatcacaaaagcaatgtcagcatcacagtaaagcaatgaagagcagttttccaatgaaaactgtgtaaatagagcatcaacaagtacaaaattcttgtcttaattagtgggggtatataaaaattccttgtaatggtcaaatattttttaaaattgacattaataaagcatattttaaaagattctaaaaaaaaaaaaaaa

SEQ ID NO: 118501 - DNA, 1000 bp, Homo Sapiens
aacctggctgaggctgtggatgtctgtgagagccatgcccagtgtcgggcctttgtggtcaccaaccagaccacctggacaggtcggcagctggtctttttcaagactggatggagccaagtggtccctgatcccaacaagaccacatatgtgaaggcctctggctgacctatctgagggctcggctgaccagctgactatcctcagcagctgggcttgcctgtggagggagtgacttgcactggcagcactgcatgtcacctgggaacccctgcagacaaagctaacatcccagacagacagatgtgaccaggacaaacgtgcaataatgccaaatgttaaaatgtgagtttaccagcctagctatgggactgctggctcctagtccaggaatcatgggggtatgactgcctctccaaccctgtgggctgtaagcaagctcaggctagtctccccactgggggctgtgcccctccctgggacggttccgtgggcagccccatcactgtgttcaatagtgtgagaatgtagctaaagcccctgctgctgctgctgcacatgccacagcaggcggtgggggctgcgtggggacaatccatcgtggagtgttctctcagcttaggtctggacaggagacttggcgggagatgctccaggatgtgggtgattctgtacctggggaggctatctctgacctcccgacaggggacactcccaggccagcccaggggtcaggggcagaggtgcacacctcagcatgagccaagactggggtcagggagcaggtgtggtttgagccaggacctggggcgggggtggggccggggcctttctgcctcatttgctttcaatgaaagcctcaaagcagccaaaaccaggctttcccccttcctcgagtttgaatatccagaatcttttgtacttcttgttggttaaattgtttatttttgtaaaaaataaaataaaattagttaataaaaaaaaaaaaaaaaaaaaaaaa

SEQ ID NO: 118502 - DNA, 1000 bp, Homo Sapiens
tatagacttcaggggactatcccgagaggtgatgtctccttgaccatcttaaaccccagtgaaagtgacagcggtgtgtactgctgccgcatagaagtgcctggctggttcaacgatgtaaagataaacgtgcgcctgaatctacagagagcctcaacaaccacgcacagaacagcaaccaccaccacacgcagaacaacaacaacaagccccaccaccacccgacaaatgacaacaaccccagctgcacttccaacaacagtcgtgaccacacccgatctcacaaccggaacaccactccagatgacaaccattgccgtcttcacaacagcaaacacgtgcctttcactaaccccaagcacccttccggaggaagccacaggtcttctgactcccgagccttctaaggaagggcccatcctcactgcagaatcagaaactgtcctccccagtgattcctggagtagtgctgagtctacttctgctgacactgtcctgctgacatccaaagagtccaaagtttgggatctcccatcaacatcccacgtgtcaatgtggaaaacgagtgattctgtgtcttctcctcagcctggagcatctgatacagcagttcctgagcagaacaaaacaacaaaaacaggacagatggatggaatacccatgtcaatgaagaatgaaatgcccatctcccaactactgatgatcatcgccccctccttgggatttgtgctcttcgcattgtttgtggcgtttctcctgagagggaaactcatggaaacctattgttcgcagaaacacacaaggctagactacattggagatagtaaaaatgtcctcaatgacgtgcagcatggaagggaagacgaagacggcctttttaccctctaacaacgcagtagcatgttagattgaggatgggggcatgacactccagtgtcaaaataagtcttagtagatttccttgtttcataaaaaagactcacttaaaaaaaaaaaaaaa

SEQ ID NO: 118503 - DNA, 1000 bp, Homo Sapiens
caggagcagggatcttgagtcaatgcatcagtcagagaagaactctcatggctgctggaggtaccagctggacaaggtgtttggggcatgctgcccccgtcaccgaggatctgtgtgggtagcctcaagctggagacattgtctggcctcactgcccactgggtagagacacctggatgacatttcagtacccgctggcagctcctcccactcatccagagacggccggtgggcaggcggggagagcagctttccttccctggagagaaccgtctttacctcagctcctagggcctccagccccccagctccaccacggtgacttggtgaagggggaccaatgccagaagaaaggggctgtagacccctattccccaccccatggccacagggcatctggcaataagactagtatacattgacctcccgttccctgcatgagggcggggagttccccctgctccatcccccattgcatgggggaagggcataaagaatcatttatatgcacgtggagactcctttctcatctggggcttttctggagggttgggagatgtggggaggtttctctgcacaggttgcaaatcccaaatgcagcagtgggttctgagttgtaggtgtgactcccacttgctggtgaataattcatgttggctgctaggtggcagcactccgaggtatctaaagggtagacctggacctgccacctatgagttgtgtgatatagaaaaaaatctcttagctctggttttcctgtctacttcatagggttggaataaggataaatgagggacaggttggatgccgttgcagagaaaatcagcaatgacataaagagatttctagaatagttgatggtccatttatttcaaatagtagctggtgtaacaaattctaaaatgtgtttttcatctggagttgcacagaatcatggaattttgtgttgagtgacataataggtatggaaatatgaggggaaatagacattgcaaatgtg

SEQ ID NO: 118504 - DNA, 1000 bp, Homo Sapiens
ccaagacaactcttcttccagtgtggcacagggaagctaaaagattggacacctctgatttatactagctcgttttgcttgttgaaaaatttggccaaatacctattgtcagcattcttgggtgaggattagcctaccatgttctaatctggccctgccactactatgctctacctttggtgagttgctttacctctctgggctgccccatttttaactgtaggttgacaggtctagagtgatccatcccacctctaatattttgtgaatttatgactttgccttcagatgaggctgagctatacataaaacagtataaactagggtactgcctcgtatctcttgtaggctctctcaaatctctgtaccttccacttaaccctaattgagccaagctttagtcaggggatctggttgtctaccagaatgtcaggagactcatcttacacagtcatggtggccaatgtttctggtgggttgtgctgaaacagctcttctgagaacttccaaccacccatgctctaacctggagacagccatcccctgcctcagaataagtaccaattcgtagtacatgtatggtactcttgtccccaagaaatgttaggaagcttgtcagctgaatgagaggaggtgccttctgggtatctctgtgttggtgtatctgtgccattggctacagaacaagaaaaatactatttgccatgctattaccttggcagatgtgtaggtgatagtcatctggctttgagctgagatggtcagtgggttgtaaattccccactagcagatattcagggtggcctgagttatgtaaacaagtgagcaacacagctttaatttcatggaggaatcaaagctgcacactggtattaaaacaacttgattttgcgcacacagttgcatgcatggcaagctgttaacctctgggtggcattttcattatgaatttgttcaccacctgtcttgcttaagctacaaaataaatgcatttgactgc

SEQ ID NO: 118505 - DNA, 574 bp, Homo Sapiens
cgttgggaacggttgtaggacgtggctctttattcgtgagttttccatttacctccgctgaacctagagcttcagacgccctatggcgtccgcctcgacccaaccggcggccttgagcgctgagcaagcaaaggtggtcctcgcggaggtgatccaggcgttctccgccccggagaatgcagtgcgcatggacgaggctcgggataacgcctgcaacgacatgggtaagatgctgcaattcgtgctgcccgtggccacgcagatccagcaggaggttatcaaagcctatggcttcagctgcgacggggaaggtgtccttaagtttgctcgcttggtcaagtcctacgaagcccaggatcctgagatcgccagcctgtcaggcaagctgaaggcgctgtttctgccgcccatgaccctgccaccccatgggcctgctgctggtggcagcgtggccgcctcctgagagttggccctcccttgtgccactgccaggggaggaaaggccttgatgttccagacaataataaatgcgcctgtgacttaaaaaaaaaaaaaaaaaaaaaaaaaaaaaaaa

SEQ ID NO: 118506 - DNA, 1000 bp, Homo Sapiens
ttttagaaggtgaaatattatcagcttctaagatgctgtcaaagtttaggaaaatcattaaggaagaaattaacgacattaaagatacagatgtcatcatgaagaggaaaagaggagggagccctgctgtaacacttcttattagtgaaaaaatatctgtggatataaccctggctttggaatcaaaaagtagctggcctgctagcacccaagaaggcctgcgcattcaaaactggctttcagcaaaagttaggaagcaactacgactaaagccattttaccttgtacccaagcatgcaaaggaaggaaatggtttccaagaagaaacatggcggctatccttctctcacatcgaaaaggaaattttgaacaatcatggaaaatctaaaacgtgctgtgaaaacaaagaagagaaatgttgcaggaaagattgtttaaaactaatgaaataccttttagaacagctgaaagaaaggtttaaagacaaaaaacatctggataaattctcttcttatcatgtgaaaactgccttctttcacgtatgtacccagaaccctcaagacagtcagtgggaccgcaaagacctgggcctctgctttgataactgcgtgacatactttcttcagtgcctcaggacagaaaaacttgagaattattttattcctgaattcaatctattctctagcaacttaattgacaaaagaagtaaggaatttctgacaaagcaaattgaatatgaaagaaacaatgagtttccagtttttgatgaattttgagattgtatttttagaaagatctaagaactagagtcaccctaaatcctggagaatacaagaaaaatttgaaaaggggccagacgctgtggctcacgcctgtggtcccagctactcgggaggcttagacatgagaatcacttgggcccgggaggtggaggttgcagtgagtcaagatggcaccactgcactccatcctgggtgacagagcaagacttcctctcaat

SEQ ID NO: 118507 - DNA, 774 bp, Homo Sapiens; identical to SEQ ID NO: 31141

SEQ ID NO: 118508 - DNA, 1000 bp, Homo Sapiens
agatcgagaccatcctggctaacatggtgaaaccccgtctctactaaaaatataaaaaaaaatttgctgggtgtcatggcgggcatctgtagtcctagctacttgggaggctgaggcaggagaatggcgtgaacccgggaggcggaggttgcagtgagccgagattgtgccactgcactccagcctgggcaactgagcaagactgtctcaaaaaaaaaaaaaaaaaaaaaaaagactttggacttgaaaccttccagaggaacactcacacaatttaagataggttctggagtcctctgaccctcattgaacaaagctggatttggctgatgataaaagaccccagccacaagcctctgggccagcctccagcctctctcggggcttgtttgctgacttgctgctgcacgtgggtatcagaagcaccaagtaaactatctccagggccagttcttttctctcccttccatttctaagtcaatagttgtctataattaaacatatttcagatttgttctgtgtccctgaagttccatattttatctttatgcttgtgttatgttttagtgtctataatgttgtggtgggaatcatttcatttggtttaaaagagtttgccttggaaaaactgaattaaccttcataaatacattttgagagatttcagtgtgagtaattttctggacataatattattgtataaaatatcaaaatggtgggccaggcgtggtagctcacgcctgtaattccagcactttgggaggctgaggcgggtgaatcacgaggtcaggaattcgagaccagcctggccaacatggtcaaaacccgtctctactaaaaatacaaaaaattagctgggcttagtggcgggcgcctgtaatcacagctacttgggaggctgaggcaggagaatcacttgaacccaggaggtggagattgcagtgagctgagattgcgccactgcactccagccctggcgacagagtgagactccgtctct

SEQ ID NO: 118509 - DNA, 1000 bp, Homo Sapiens
agggagggccagcatgccccgactgctgcaccccgccctgccgctgctcctgggcgccacgctgaccttccgggcgctccggcgcgcgctctgtcgcctgcccctacccgtgcacgtgcgcgccgaccccctgcgcacctggcgctggcacaacctgctcgtctccttcgctcactccattgtgtcggggatctgggcactgctgtgtgtatggcagactcctgacatgttagtggagattgagacggcgtggtcactttctggctatttgctcgtttgcttctctgcggggtatttcatccacgatacggtggacatcgtggctagcggacagacgcgagcctcttgggaataccttgtccatcacgtcatggccatgggtgccttcttctccggcatcttttggagcagctttgtcggtgggggtgtcttaacactactggtggaagtcagcaacatcttcctcaccattcgcatgatgatgaaaatcagtaatgcccaggatcatctcctctaccgggttaacaagtatgtgaacctggtcatgtactttctcttccgcctggcccctcaggcctacctcacccatttcttcttgcgttatgtgaaccagaggaccctgggcaccttcctgctgggtatcctgctcatgctggacgtgatgatcataatctacttttcccgcctcctccgctctgacttctgccctgagcatgtccccaagaagcaacacaaagacaagttcttgactgagtgaggggcacagagcctgggacaacaaaaacggacaaggccagaaacagcttcatatggacactgggacttagccccaagcctgggtgtcctctgaggccagcctctccaccttctgagcctgcgcccacactattgaaaacactaatgaaagtaaaaaaaaaaaaaaaaaaaaaaaaaaaaaaaaaaaaaaaaaaaaaaaaaaaaaaaaaaaaaaaaaaaaaaaaaaaaaaaaaaaaaaaaaaaa

SEQ ID NO: 118510 - DNA, 1000 bp, Homo Sapiens
ctccgactacgtcgttcttgtctatttcaaaactctcccctttctctgaatttttcaaactgagatttaatcgtaagaagaaggggatgtatcggaaagctataaccgaggctgcaaatgccgcaagacacgtggccccggaaatcagggagctcttaacccagtttgaaacgtaactggttccctgaccaggtcaccgacgatgagggcgcacctgctgtcctggagcttccgatctctgttcggggaccctgtgagccttctggccggctgcgtgcagagcccactgggcacggtggtcggcctggtgtgaggccccccggggaccggcagtgtgtccagggaggggatggccctgagcccagcggctcctcccgctgagtgtatttcttcccaccactcagcgcatggctgccctggctcacgaggcagtcgggactcgtgacttgctggctgctggctgctgctgcctcgcgcgctggggttccatggaggaactgggcctgccgccccggcctcacctgctgcccgcatgctggggtcccatggaggaaccaggcctggcgccccggcctcgcccagcggctggtgtgggcagctgttccctgcctcgcagtgtcctggaggcagctgtctcgcagactcagcttggtctcccgcaggcttcagaaaaacccaattgcacgtgtgggattcttccccagcccttgggtgcggggtctctgtgcacttgagagctgggggacccacccaccgtctcccactccaagttcatcccagagcgtggggcccgctgggcacctggcacctggcctgcagatgctgctacgagtgaccagtgctgtgtggaggaggccaagggcggcccctgggaaaccgggcttcaacagtacaaggaaaagaaacttgctctgttttgtaagagcgtgttccttttcctcttttttgtcactttaaagaccaaaaagaataaagaaagaaaagaaaaaaaaaaaaaaaa

SEQ ID NO: 118511 - DNA, 1000 bp, Homo Sapiens
tgctcggaaagcgtaagacaagatgaagagcaggcgccattataaatatcaaagcccaagaaatggaactttgggcagagatcatgttagaatcaagtggatgatgagaccaattacaggccgtctctctgcacagcacagaaattctcaatcactgaaatgagtaactgcaaaataaatagttgattgtactgttctcatgctataaaagtggacaggtactctacaacaaatctgttttctcatttttatcaaatatatgtatcatcaaaggttgcatctgtacagtatgtaaatgctattaatgtcgtcactcacatgcacgacagtccttgttcccccaggaagggcctggtggccccagcacacacttgggattatgtgtatacataaataaatattgggctgtttccctcttcctgtgaagtggttctcaaattcctatgtactgtaaagctgtacccttaaaagtacagatgtggccgggcacagtggctcacacctgtaatcccagcactttgggaggctgaggcgggtggatcacttgaggtcaggagttcaagaccagcctggccaacatggtgaaacctcgtctccgctagaaatacaaaaattagccaagcatggtagcaagtgcctataataccagctgaggctgaggcaggagaatcccttgagcccgggaggcggaggttgcagtgagccaagatcatgccactgcactccagcctgggcaacagagtgagactccgtctcaaaaaatatatttaaaaaaaaaaaagtacagatgtgatgtgcagaacatattgttttcgtagatttttatacttgatcaattaatggaatcagatttttagataagtgtaattttctctataggagaccacgttgctacatctgttaatgcctgtcagtgatcaaaagaaacttaaaaagtggaatgggatatggcttttggtacctgaaaataaatgctttaataattgtaagccagataaaa

SEQ ID NO: 118512 - DNA, 1000 bp, Homo Sapiens
tccgttgcctgcacccactactggtggtcgtttcctgcctcacccgggaccccttcagcagcagcctacagaaccgggcagaggtggacaaggtgaaagcactgttgagccatgacagcggcagtgaccacctggcctttgtgcgggctgtcgccggctgggaggaggtgctgcgttggcaggaccgcagctcccgggagaattacctggaggaaaacctgctgtacgcacccagcctgcgcttcatccacggactcatcaagcagttctcagagaacatttatgaggccttcctggtggggaagccctcggactgcaccctggcctccgcccagtgcaacgagtacagtgaggaggaggagctggtgaagggcgtgctgatggccggcctctaccccaacctcatccaggtgaggcagggcaaggtcacccggcaggggaagttcaagcccaacagcgtcacatataggaccaaatcaggcaacatcctgctgcacaagtcgaccattaacagggaggccacacggttacggagccgatggctgacgtatttcatggcagtcaagtccaatggcagcgtcttcgtccgggactcctctcaggtgcacccgctagctgtgctgctgctgaccgacggggacgtgcacatccgtgatgacgggcgccgggccaccatctcactgagcgacagtgacctgctgcggctggagggtgactcgcgtaccgtgcggctgctgaaggagctgcggcgggccctgggccgcatggtggagcggagcctgcgcagcgagctggctgcacttccccccagcgtacaggaggagcacgggcagctgcttgcgctactggcagagctgctgcgaggaccctgtggcagctttgatgtgcgcaagacagctgacgactgagccctgcttctgctggggctgtgtacagagtgcaaatgtttatttaaaataaagttctatttatcccttgtgaaaaaaaaaaaaaaaaaaaa

SEQ ID NO: 118513 - DNA, 1000 bp, Homo Sapiens
ttactctacaaattttggtgctggcaaatacataggcaaactgttgggagctgctctagttacattcctcccttcttattccctttttctcttcctcactttattgcataacatattcctgtacccaaagcattctaccacagttctatttgactcccacttgtaataactcctttaaaaaattccatgtttaaccatatgaccctgcttgcttactcatattctccctccctctccccttcctttctctctcttccagaagtcatttgcctggtttgaaatattttgtagggattgcttattatattattttagctgatgaacctcaggacaacgtctacacacacacacatacatacacgcacacaaaatctcagctgttgaagagtgggcttggaatcagacttctgtgtccagtaaaaaactcctgcactgaagtcattgtgacttgagtagttacagactgattccagtgaacttgatctaatttcttttgatctaatgaatgtgtctgcttaccttgtttccttttaattgataagctccaagtagttgctaattttttgacaactttaaatgagtttcattcacttcttttacttaatgttttaagtatagtaccaataatttcattaacctgttctcaagtggtttagctaccattctgccatttttaatttttatttaattttatttgcttgagcacactgatcaaccactgaactgccttcttccattgtcctgcaatgatataagggttacatttttgtgtatatggctttcatagttgggatttcagagcactgataccagatattttcagtttgttctctgggggaatttcatttgcatctatgtttttagctatctgtgataacttgttaaatattaaaaagatattttgcttctattggaacatttgtatactcgcaactatatttctgtaaacagctgcagtcaaaaataaaacactgaaagttaaaaaaaaaaaaaaaaaaaa

SEQ ID NO: 118514 - DNA, 829 bp, Homo Sapiens
gattattttctcaggtgtttgcaacagtgttctaactattaacgctacgatgcctgaacctaccaagtctgctcctgccccaaagaagggctccaagaaggcggtgactaaggctcagaagaaggacgggaagaagcgcaagcgcagccgcaaggagagctattcagtgtatgtgtacaaggtgctgaagcaggtccatcccgacaccggcatctcttccaaggcaatggggatcatgaattccttcgtcaacgacatcttcgagcgcatcgcaggcgaggcttcccgcctggcgcattacaacaagcgctcgaccatcacctccagggagatccagacggccgtgcgcctgctgcttccgggggagctggccaagcacgccgtgtcggagggcaccaaggccgtcaccaagtacaccagttccaagtaactttgccaagggagagacatgaagacagaggagaaatgaatgcataaaataactgataatatgaatctatacatagaacttaggaagtctcatctgcctgaaaatgactgtgtggatcccacccaaatccaactcatcctggtttgctgcacactggttcatcaaaagaaggttaccgaggggaaggaactaaaggtgtttgcacttcatgttactttttgagtttataaacataaaaacagaatttacttctgttacagacctagttactgggaattcattacttgccatggactacctttgctaagaaaagtctgaatgagaagatggcaggacgtctgaaaaaaaaagttataattaataaaatctgcggagaattgtaaaaaaaaaaaaaaaaaa

SEQ ID NO: 118515 - DNA, 1000 bp, Homo Sapiens
cagcatgaagctcaactgaggagagataccaatgtactggtatatattaaaagaagattggcaatgtgtgcaagaaaattaggaagaataagagaagcagtaaaaataatgagagatttgatgaaagaatttcctcctcttaccatgttgaacatccatgaaaatctcttagaatcacttttagaattacaggcctatccagatgttcaggcagtcctagcaaaatatgatgatataagccttccaaagtcagcagcaatctgttacacagcagcactgttgaagacaaggactgtttcagaaaaattctctccagaaacagcctccagaagaggattaagcacagcagaaattaatgccgtggaagcaattcatagagctgtggaatttaatcctcatgttccaaaatatttattagagatgaaaagtttaattttacctccagaacacattctgaaacggggtgatagtgaagcaattgcctatgctttctttcatcttcagcactggaaacgaatagaaggtgctcttaatctgttacagtgtacatgggaaggcacttttagaatgattccatacccgttagagaaaggacatctattttacccttatcccagctgcacagagacggctgatagagagctattacctacctttcatcatgtttctgtttacccaaaaaaggagcttcctttgttcatccatttcacagcaggattttgctcttctacagcaatgatagccattctcactcaccagtttcctgaaatcatgggtatttttgctaaagctgtaagtatgatctcaaggacttgtgtagattatttgtaaaacacacaagaaaccatctctgatctgcctgtgctaacccagctgaacaatggaagatatttgttgtaaattaaaggaattgatttgtatatagttgctgccataaatacatcaaacataaaaaaaaaaaaaaaaaaaaaaaaaaaaaaaaaaaaaaaaaaaaaaaaaa

SEQ ID NO: 118516 - DNA, 899 bp, Homo Sapiens
ggagcagcagggaggcgagcagagggcccccagagggagccgcggaggtgcaggtcgaagaggccgggctacgtcgtgccctgcgcgtgagcagctgcagcggcagaggcagcatccagcggcggcgccagcagttccagtccgttgctttactttttgcttcaccgacatagtcattatgccgaagagaaagtctccagagaatacagagggcaaagatggatccaaagtaactaaacaggagcccacaagacggtctgccagattgtcagcgaaacctgctccaccaaaacctgaacccaaaccaagaaaaacatctgctaagaaagaacctggagcaaagattagcagaggtgctaaagggaagaaggaggaaaagcaggaagctggaaaggaaggcacagaaaactgaatctgtagataacgagggagaatgaattgtcatgaaaaattggggttgattttatgtatctcttgggacaacttttaaaagctatttttaccaagtattttgtaaatgctaattttttaggactctactagttggcatacgaaaatatataaggatggacattttatcgtctcatagtcatgctttttggaaatttacatcatcctcaagtaaaataaatatcagttaaatattggaagctgtgtgtaagattgattcagcattccatgcacttgctttaaaatttagtcctgtgcatactgtggtgtttttactgtgcatatttgaatttttcatgcagtttttctagagcaataatcagtggtgcttttgtacctaggttttatgtgattttaatgaaacatggatagttgtggccacctgctgactatttgtggtttaaaataaaaggtttacttgtctgcagaaaaaaaaaaaaaaaaaaaaa

SEQ ID NO: 118517 - DNA, 1000 bp, Homo Sapiens
gtagcaaatcttgattaattgaagaaataaaatatttcggataaggtttcataatttacaaatgggaatttcatttataataataaatatgagtgtcctttatttgcctagtagaagtgataaattgtgttatatatgataatttatataaaaccactaattgttccgttaagcttcacagaaaataaaacctctattactagacatttatgtaacatcttgctgtactaaatacagcagaaaatctactctttagcaatatataacacagtatatgcttttttatatattcaatgttagcccaagtctgaatttacatttgactaaagcagcacataagataatttgctaaaatgctaatctttactaaatagtgagctaaattagaatttctaactcttatattgtgctcttttaaatgccaattacagtcccttactggaattctaactgtaatttgctttgcaatcaaactgcttttagggcagccaatattttattattggaattcagacactgttcttaccgtgtttgtttttaatcaagtattacctaaaaatgtacaaattagtgaaatggttaaacttctgcactttcttagttaccacagtcttcataccaagtattgggtacaggttacaattttgaagccatatgagtttatattgattttttttttccatttaaaaatccactaatggtgtaaaagagaccagtagattttcaatgggaaatgtacctagcaagctggttcttgcttatatatagtgataaactttgtagctgcctctttaaccaagaatttgtaaacacaactctaataaatgtgagttttaaaggattgttatttactactttggattgtaattagaacaatgcacatctgtcttccaagattttgtaaatatttttgatttttttcattaaatgtaaattttacataaaagttgtgctcttaataaacatgtaatatataatttaaaaaaaaaaaaaaaaaaaa

SEQ ID NO: 118518 - DNA, 1000 bp, Homo Sapiens
tccgcttgcactttggagtataatcgtgaacatattattgtatttcccgaatgggcaaacttcctatgcatccagcaataaactcaccaactacgtgtggtattttgaaggaatctgtttctcaggcatcatgatgcttatagtaacaacagttcttctggtactggagaataataacaactataaatgttgccagagtgaaaactgcagcaaaaaatatgtgacactgctgtcaattatcttttcttccctcggaattgctttttctggatactgcctggtcatctctgccttgggtcttgtccaagggccatattgccgcacccttgatggctgggagtatgcttttgaaggcactgctggacgtttccttacagattctagcatatggattcagtgcctggaacctgcacatgttgtggagtggaacatcattttattttccattctcataaccctcagtgggcttcaagtgatcatctgcctcatcagagtagtcatgcaactatccaagatactgtgtggaagctattcagtgatcttccagcctggaatcatttgaataaggacaaaatgttttccattatcaagacatggccatctatctaaatattatatcaactgtgtagacttgagggcaatattgaaatgatggtgctttctgcatttggtgtttatttgtaaaaaatttgcagtcctcactgcacatgcaagtataccacccttccatttagtatgttttttaagtaatatgcatcagaaacttcagaaatacttctgccctttgatcaaacaaatccatttccaagaatctgtactagggaagtaaataagaatatgagagaaacctttatgcaaatatgtatattgcaacattatttaatattctggaaaattggaaacaccccaaaattctaaactcagaggaaggattaagtaaagagtggtacatactgtaaatgttttctgataaaaaaaaaaaaaaaaaaaaaaaaaaaaa

SEQ ID NO: 118519 - DNA, 1000 bp, Homo Sapiens
cacaggctggcaggggcctctgggggcccctcccctcgacccccagcctgggtagagccaccaggtacgacgaccaggtaccagaaaccaccaggcacacggggcagaaagccagcgtccatgccccagcagccccctcctgcctgttcctggctcccagctcccgcccctccccagggcccccacctccacggcccacttcattttctgttctcattttgcagagttgcacaaggagagaactcagcatggggggttggttctttgggttctgtttgtttatttgtttaatttaatgatttgtaaagtgatgttcctcttccttttttacacttttcagctcatatttaacctctgtttggaaaatgattcttgtaactgtacatttttttgcttcctaataacaatgacaacaaaaaaaataaatgaccagttttgtgttggggggggtgtatggtgctggttacttttccgcagttggcatgggttgccctacaggcccacagggccaccagcacacccccgcacgctgggcaccaacagagccacggagcgcgagcacatgcccgcccggggagcacaatggcgctgcacaaaacggcctcccacacgtgcgtccaggctcttgcgccacctccttctcattctcttttcagactttcatgtagtcccagctttgagccagcagctgccacttggggctgcagagctctgttgagggaactgcccagggctgggtagaggcagcaaggggacagggctgggtgctgttgtgtgcgaactgagctgcactctccttaggcccagttcaggcctcagcccctctttcccaggccctggatctcaccagcagccaaggttgagccagaaccagaaccctgtccctccggcccccagttcctaccccagaaccagttaactgtgcttcaggggtagggctgggcccacagagcctgggggagtgtcaccgcctttgctgcctctcagttagtgtcaatgc

SEQ ID NO: 118520 - DNA, 1000 bp, Homo Sapiens
caactaactgtgcaggtagcatattatactatgatgatgaatctctacaatgcaatggctgtcaggattcagagacgatggcgaggctatagggttcggaagtacctctttaattattattatttgaaagagtacctgaaagtcgtttcagagaccaatgatgcaattaggaaggcactggaggagtttgcagaaatgaaagaaagagaagagaagaaggctaacctcgaaagggaagagaagaaaagagattaccaagcccgaaagatgcattacctcctcagcacaaagcagattccaggaatatacaattcacccttcagaaaagagcctgatccatgggagctgcaattacaaaaggcaaagcctttaacacaccgaagacctaaagttaagcagaaggactccaccagccttactgattggctagcttgtacaagcgcccgttcttttcctcggtctgaaattctaccacctattaatagaaagcaatgtcaggggcccttccgagatatcaccgaagtattagaacaacgctacaggcctttggagccaacgttgcgggtggcagaaccaatcgatgagttaaagttggccagagaggagctcagaagagaggaatggctgcaaaatgtaaatgacaatatgtttttgccattttcttcataccataaaaatgaaaagtacatcccatcaatgcatttatcaagcaagtatggtcctatttcttacaaagaacaattccgaagtgaaaatcctaagaaatggatctgtgacaaggatttccagactgtattaccatcatttgagctcttctcaaagtatggaaaattatattcaaaagctggacagattgtataaaggcgtcagaagaagaaactgaagccatctgcattttaaaacttaacagttctgaaaggaaaacacagatgaagatcctgtaggaaatatacttgctatgattcaataaactataaaattttgaaaaaaaaaaaaaaaa

SEQ ID NO: 118521 - DNA, 963 bp, Homo Sapiens
cccgctcaacttcatcctgggttgaggcggaggagaacttccagaattatggcgaagtccgggctgaggcaggacccgcagagcacagctgcagccactgtgctaaagcgggcagtagaactagattcggagtcgcggtatccgcaggctctggtgtgttaccaagaggggattgatctgctcctgcaggttctgaaaggtaccaaagataatactaagagatgtaatctcagagaaaaaatttccaaatacatggacagagcggaaaacataaagaagtacttggaccaagaaaaagaagatggaaaatatcacaagcaaattaaaatagaagagaatgcaacaggtttcagttatgagtcactttttcgcgaataccttaatgagacagttacagaagtttggatagaagatccttatattagacatactcatcagctgtataactttcttcgattttgtgagatgcttattaagagaccatgtaaagtaaaaactattcaccttctcacctctctggatgaaggcattgagcaagtgcagcaaagtagaggcctgcaagaaatagaagagtcactcaggagtcacggagtgctgttggaagttcaatactcttcttcaatacatgaccgagaaattaggttcaacaatggatggatgattaagattggaaggggacttgattattttaagaaaccacagagtcgtttttcccttggatattgtgattttgatttaagaccatgtcatgaaacaacagtagacatttttcataagaagcatacaaaaaatatatgatgggtggtagcctaatttgtattatgtctactttaagtgaatattggattttttttaaaagatcacttttataatgtatgaatttaacaataaacttttatatttctactaaaaaaaaaaaaaaaaaaaaaaaaaaaaaaaaaaaaaaaaaaaaaaaaaaaaaaa

SEQ ID NO: 118522 - DNA, 1000 bp, Homo Sapiens
gtcactgagtctgggtgacattttttaagaataatataaattcagtttcaaactcttctcacattaaaattttgctgtgaactcttactaaaatgagttttaggttctgtaagtggaaaaatgtgcttttattttatgggccatttttaccacaactaatcttgccttggattactaagcatctcctgcgatcccacagaggactgtggtggccacaggagctgaaagcagaagagtgggatttgatgccaggcagtggagtggcctcagccccagattgtacctcctgccctgtaggaggggagggggcaaagccttctgacttcacctttgtttgacctatgtatggaacttacttttactttttgccttaaatttttaatgaaatgcaaattttctgtgatggggttctctctctctttttttcggggggtggagtcactaataaatttgcaaatgaagttaaagacaaggcaaccatctggcttatgctatataatacttcatttaaagaagaaaggaaaagcaaatgcacttgcagcttttgaggtctcagcaaaaatgggcatgtgtcttttttgaagtttagaaatatcctaatctatttttatttatctaaaagtaagtgttttccggctgataaggctaaccctacccaggaaaggattgataactaaataaatttcctctgttttcccatgcattgaaattatgttggctgagcatggtggctcacacctgtaatcctagcactttgggaggccgaggtgggcggatcacttgaggtcaggagttggagaccagcctggccaacgtggtgaatccccgtctctactgaaaacacaaaaattagacgggcatggtggcgcacacctgtaatcccagctacttgggaggctgaggcaggagaattgcttgaacctgggaggtggaggttgcagtgagctaaaattgtgccactgcactccagcctgggtgacagaggaagactccgtctcac

SEQ ID NO: 118523 - DNA, 1000 bp, Homo Sapiens
agttgcagaccaaccgagctcgagctactgtggcccccctgcctatgactcctgtcccaggcagagcctccaagatgccagcagccagcaaatcttcctcagatgccttcttcctgccttcagagtgggagaaggatccctcaaggccctaagtcaccagcaccagagcccagctgcccagcttaaccatatccatgctcaggttcacataatggctatctgtggtcagacttgctctctatccgcctgagcctctgtgagtgagggctgactgggaaacaacagccttcctgtcctgtttcagtgctgtcccactcctcaagtctggaagcgacacacccgagcctgtcctttctccagcaaggactttcattttctttagaatcatttgctactgtttacacaggtgaagattaaacacccagtaagcttctaccattgttaggagcattcataactcagaatttcttcttgtagctctgtgtaagcaggtggatgaggtcagatcacctttggtaaactggacctcaggaacaaggatgaggttttgaaagctcataaaagacaagtaagattgaaatccaagcctcatttcagagcctgtgcccttcccactacaccaccaggcttcagcctccaaagagacaagtgcttggtacctacatgcaaagtgtgtgtgctggggggtgggagggctgcccagaacaggggagaggatggtgtaaaaaaagacctactcctttcctgttaccctctccccacatgtaccaaccttcctgttgctccctccatccacagaataatagctaccatttataaaatgtttactctgggctgggagcagtggctcacacctgtaatcccaacactttgagaggctgaggtgggatgatcacttgaggccaggagttcgagaccagcctgagcaacactgtgagacccccccgccatctctacataaataataaaaacttttaaaaaaacaaaaaaaaaaaaaaaa

SEQ ID NO: 118524 - DNA, 1000 bp, Homo Sapiens
ggtcagtccaccaggggttctgtgtttaccagtgctgaacataccaagaactgaattcaactacttcaccgagacgaggtttattttagaagagctaaatatttccgaatcattccacatattccgggatgaaattaacctgcatcagctaaatgatgaagggaagttatcgataacacttgttggcagcagtgtgctggcgagtgaagacaaaactttagaatcagcagttgtcaaagtcattaatccggttgagcagagcgatgccaacgttgagttccgagagtcttcctcttctctcgtgctaaaggagattctccaagaggctcctgagctcatcaccgagcaactggctcatcgcctcagaggtagcattcttttcaagtggatgaccatggaatcagagaagatctcagagaagcaggaggaaattctttctatcctggaagaaaaatttcctaacttgcctccaagagaggacatcatcaacgtcctacaggagacccagttcagtgctcagggtttaagtattgaacagacaatgttgaaagatctaaaggagctgtcagatggagaaataaaagtggccattagtactgtgagcatgaaccttgaggtaagggtgggaatgcttttttagcattgattgatttcccacaattgcagtctgagcaactggaatgtaactctctccattggataagtccatgatagtcctttgcttctttgtgatacatttgacttggaatatagtggcaggttattatttgggtgaaaacactatgctaagtcaatgaaaaatgccaaacctggattctcaagatgaatgctctttcattcatctcagtaaaacaaagcctaaaacaaacactcagatgtgggtgtatatttaacctgtttaatagcaattatgatatgtgtgattaggttcacttccatattttctgtgtaccaccctgtattgttcatagaacttttcttaaaaaaaaaaaaaaaaaaa

SEQ ID NO: 118525 - DNA, 1000 bp, Homo Sapiens
agcaatgggccttgtaccaaaggacctcatggctaatgccacttgcttcaggagtgcctcacgtagatagattgaggttttataataatcatttcagaattttactctgcatcacaatgtatttcctctttaatgttgtaaatatttggcaatttaagacattgtgtaaaaagcaatctgtaaaaacatctccaggctttgatttttgtaccatggaaattgtatttaaccatacagggttttggtatgtttatattgtttaccttagtgatgtatttgtttaagtggctaacatccaaacgactgtttgaaggcatcagagtaatcttcagtgtggaatgttaaataacgcttttatactgtattttgtactatgatgtaactccccttccttatggctaggctactgtaacacttgcctgtaatcagtgaagggctgtgcaccttgtactatttcacaatgggttctgctggacagataatgggccagtgttattgaggtgatcaagatctgttccacagggctaatgccaccatctcccctcaaaattttgtagaggttctaaaaagaaagtggtatgttgtgtgatgatcagcactaagtcctgcattcctgttaaagccacttgggtcataagaagggagtaaaaaatgaagtctgactagaattctattgcagaggccagtacatttagtatggcattgagttgtgatatagttttactttgatgtgcattttgaatttcagctacacctagatagacgtaaaatgataattaaaatgctgtaaccaacttatctaataaaattggcaaccagccactattttgttgactatgagaaagttaaaagtttatgttaatttttagggtctgatagaatatttcatgtgtattacagtggtattcatatgctatgtctctaaactttattttcaaaagcttaaggcccaaatacaaacttctctggaataaacgtggtgttttattttctgggttat

SEQ ID NO: 118526 - DNA, 1000 bp, Homo Sapiens
gtagtgcctctttcatccactagtgcaaatcatagctgggggttgggggtggtgggggtcggggcctgggggactgggagccgcagcagctccccctcccccactgccataaaacattaagaaaatcatattgcttcttctcctatgtgtaaggtgaaccatgtcagcaaaaagcaaaatcattttatatgtcaaagcaggggagtatgcaaaagttctgacttgactttagtctgcaaaatgaggaatgtatatgttttgtgggaacagatgtttcttttgtatgtaaatgtgcattcttttaaaagacaagacttcagtatgttgtcaaagagagggctttaatttttttaaccaaaggtgaaggaatatatggcagagttgtaaatatataaatatatatatatataaaataaatatatataaacctaacaaagatatattaaaaatataaaactgcgttaaaggctcgattttgtatctgcaggcagacacggatctgagaatctttattgagaaagagcacttaagagaatattttaagtattgcatctgtataagtaagaaaatattttgtctaaaatgcctcagtgtatttgtatttttttgcaagtgaaggtttacaatttacaaagtgtgtattaaaaaaaacaaaaagaacaaaaaaatctgcagaaggaaaaatgtgtaattttgttctagttttcagtttgtatatacccgtacaacgtgtcctcacggtgccttttttcacggaagttttcaatgatgggcgagcgtgcaccatccctttttgaagtgtaggcagacacagggacttgaagttgttactaactaaactctctttgggaatgtttgtctcatcccattctgcgtcatgcttgtgttataactactccggagacagggtttggctgtgtctaaactgcattaccgcgttgtaaaatatagctgtacaaatataagaataaaatgttgaaaagtcaaactggaaaaaaaa

SEQ ID NO: 118527 - DNA, 1000 bp, Homo Sapiens
cgcatctgcagcacttacaggaccatgtaccgcgttatgtggcgggaggtgaggcgggaggttcagcagacccatgcagtgtgctgccagggctggaagaagcggcacccgggggcgctcacctgtgaagccatctgcgccaagccttgcctgaacggaggcgtctgcgttaggcctgaccagtgcgagtgcgcccccggctggggagggaagcactgtcatgtggacgtggatgaatgtaggaccagcatcaccctctgctcgcaccattgttttaatacggcaggcagcttcacctgcggctgcccccatgacctagtgctaggcgtggacgggcgcacctgcatggaggggtccccagagcccccaaccagtgccagcatactcagcgtggccgttcgggaggcggaaaaagatgagcgcgctctgaagcaggagattcacgagctgcgagggcgcctggagcggctggagcagtgggccggtcaggctggggcctgggtcagagcggtgctgcccgtgccgcctgaagagctgcagccagaacaggtggctgagctgtggggccggggtgaccggatcgaatctctcagcgaccaggtgctgctgctggaggagaggctaggtgcctgctcctgtgaggacaacagcctgggcctcggcgtcaatcatcgataagaagcctctacagcacccctgccccctaatttatacagaaaccggacccactaatcctctgggattggccgactgtgagctgcagataaggctatcagccaccaaagagcaatgaacaatggaaacttcagagagctgaagaaagggggaggcctgtgttcttggcctgcccctgagtcttctggctgggggcaggttgcctgggcaagaactgcttcaattccttaacaaatgcaaccaccaacacccagatctctctctctctttattttcagtttttttgctgttatccagataattaataaaaaccaaccacgcaaaa

SEQ ID NO: 118528 - DNA, 1000 bp, Homo Sapiens
atgacattattcgagcaccaaccatcgagcaaatgaaagatgtatatatagtacaggacctcatggaaacagatctttacaagctcttgaagacacaacacctcagcaatgaccatatctgctattttctctaccagatcctcagagggttaaaatatatccattcagctaacgttctgcaccgtgacctcaagccttccaacctgctgctcaacaccacctgtgatctcaagatctgtgactttggcctggcccgtgttgcagatccagaccatgatcacacagggttcctgacagaatatgtggccacacgttggtacagggctccagaaattatgttgaattccaagggctacaccaagtccattgatatttggtctgtaggctgcattctggcagaaatgctttctaacaggcccatctttccagggaagcattatcttgaccagctgaaccacattttgggtattcttggatccccatcacaagaagacctgaattgtataataaatttaaaagctaggaactatttgctttctcttccacacaaaaataaggtgccatggaacaggctgttcccaaatgctgactccaaagctctggacttattggacaaaatgttgacattcaacccacacaagaggattgaagtagaacaggctctggcccacccatatctggagcagtattacgacccgagtgacgagcccatcgccgaagcaccattcaagttcgacatggaattggatgacttgcctaaggaaaagctcaaagaactaatttttgaagagactgctagattccagccaggatacagatcttaaatttgtcaggtacctggagtttaatacagtgagctctagcaagggaggcgctgccttttgtttctagaatattatgttcctcaaggtccattattttgtattcttttccaagctccttattggaaggtatttttttaaatttagaattaaaaattatttagaaagttacatataaa

SEQ ID NO: 118529 - DNA, 1000 bp, Homo Sapiens; identical to SEQ ID NO: 115530

SEQ ID NO: 118530 - DNA, 1000 bp, Homo Sapiens
aatgtaatgtgacgctggaagtgagcacagggcctggagctgcagtggttgctggagctgttgtgggtaccctggttggactggggttgctggctgggctggtcctcttgtaccaccgccggggcaaggccctggaggagccagccaatgatatcaaggaggatgccattgctccccgaaccctgccctggcccaagagctcagacacaatctccaagaatgggaccctttcctctgtcacctccgcacgagccctccggccaccccatggccctcccaggcctggtgcattgacccccacgcccagtctctccagccaggccctgccctcaccaagactgcccacgacagatggggcccaccctcaaccaatatcccccatccctggtggggtttcttcctctggcttgagccgcatgggtgctgtgcctgtgatgatgcctgcccagagtcaagctggctctctggtatgatgaccccaccactcattggctaaaggatttggggtctctccttcctataagggtcacctctagcacagaggcctgagtcatgggaaagagtcacactcctgacccttagtactctgcccccacctctctttactgtgggaaaaccatctcagtaagacctaagtgtccaggagacagaaggagaagaggaagtggatctggaattgggaggagcctccacccacccctgactcctccttatgaagccagctgctgaaattagctactcaccaagagtgaggggcagagacttccagtcactgagtctcccaggcccccttgatctgtaccccacccctatctaacaccacccttggctcccactccagctccctgtattgatataacctgtcaggctggcttggttaggttttactggggcagaggatagggaatctcttattaaaactaacatgaaatatgtgttgttttcatttgcaaatttaaataaagatacataatgtttgtatgaaaaaaaaaaaaaaaaa

SEQ ID NO: 118531 - DNA, 1000 bp, Homo Sapiens
ggggcctccaggggattgggggctgccgtgtgtgttatatcatgattagagctttcacttcctgctccctgctgttgggaaccaggctgtgtgtgttgcttaaattccccttgatgaccagcagagtcactgccactcagccatggcacactgctgtaaacctggttttgatctcctttcaatcttttgctgattaactacacattgatcagtgttggccaccctcaccctgccatagaccatccgctgtcttcctctgtagagttaactattttctcttttatgaggaaatagtgtgtttgcttaggagtgtttactgtctggtaactactgtgctaagccctttcctgttgcctgccatccctgctgcgagcagggacaagctgggtgctcactcatggcatcttatctgttgcagatagtccactgtgtgcagaggcatgggagttgtcatgttgggaacatgctagacctcagtatccttgagggatgctgccttgggtctggaaactgttagaggaaaccccaagaggtgcaggcactgagcctctcaggacaatgacctggggtcccagctcccctggaggggcctcctcatgattgtttgggggttgatcacagaccaagagtgacgagtgatgtcaccctgtgactcatggccggaccttcttgcccctattgtctcagcacaacattattcgacttttccctcagcgtgggtgggcagaggaaaagccctgtggctctggggacttgggatccagagttgaagacccttcagctggctctgccctgccagtgccacagagtgccatggcccaggaagacaggttttcttccatctaggccaggccatccagtggccatcctccgtgtcctcccgcctcctcctggtgtgacttctgaaaaccaagaatttgttcctgttgactttttctgtgctatggaccattgtcctctcacccactcaataaatcttgaaacaaaaaaaaaaaaaaaa

SEQ ID NO: 118532 - DNA, 1000 bp, Homo Sapiens
cggcccctgccccagcgccaacgccaaccccaaccccagtccaacctaccagtcctcctcctggccctgtagcccagcccactggcccgcaaccacaatctgcgggctctacctctggccctgtaccccagcctgcctgcccaccccctggccctgcaccccaccccactggccctcctgggcccatccctgtccccgcgccaccccagattgccacctccaccagcctcctggctgcccagtcacttgtgccaccccctgggctgcctggctccagcaccccaggagttttgccttacttcccacctggcctgccgcccccagacgccgggggagcccctcagtcttccatgtcagagtcacctgatgtcaaccttgtgacccagcagctatctaagtcacaggtggaggaccccctgccccctgtgttctcaggcacaccaaagggcagtggggctggctacggtgttggctttgacctggaggaattcttaaaccagtctttcgacatgggcgtggctgatgggccacaggatggccaggcagattcagcctctctctcagcctccctgcttgctgactggctcgaaggccatggcatgaaccctgccgatattgagtccctgcagcgtgagatccagatggactccccaatgctgctggctgacctgcctgacctccaggacccctgaggcccccagcctgtgccttgctgccacagtagacctagttccaggatccatgggagcattctcaaaggctttagccctggacccagcaggtgaggctcggcttggattattctgcaggttcatctcagacccacctttcagccttaagcagccacctgagccaccaccgagccatggcaggatcgggagaccccaactccccctgaacaatccttttcagtattatatttttattattattatgttattattacactgtctttttgccatcaaaatgaggcctgtgaaatacaaggttcccttctgca

SEQ ID NO: 118533 - DNA, 1000 bp, Homo Sapiens; identical to SEQ ID NO: 115949

SEQ ID NO: 118534 - DNA, 1000 bp, Homo Sapiens
ctgactactcgtacctgcggcagcttttccggaatctgttccatcgccagggcttctcctatgactacgtgttcgactggaacatgctcaaatttggtgccagccgggccgccgatgacgccgagcgggagcgcagggaccgagaggagcggctgagacactcgcggaacccggctacccgcggcctcccttccacagcctccggccgcctgcgggggacgcaggaagtggctccccccacacccctcacccctacctcacacacggctaacacctccccccggcccgtctccggcatggagagagagcggaaagtgagtatgcggctgcaccgcggggcccccgtcaacatctcctcgtccgacctcacaggccgacaagatacctctcgcatgtccacctcacagaatagcattcctttcgaacaccacggcaagtagctgctcgtctcccatcggaaggcagcactggattcctggtcgggtggcttccagtggtcttcagtctgtcgtgcaccgatgagaactctccttattgctgtgaagggcagacaatgcatggctgatctactctgttaccaatggctttactagtgacacgtcccccggtctaggatcgaaatgttaacaccgggagctctccaggccactcacccagcgacgctcgtgggggaaacatactaaacggacagactccaagagctgccaccgctggggctgcactgcggccccccacgtgaactcggttgtaacggggctgggaagaaaagcagagagagaattgcagagaatcagactccttttccagggcctcagctccctccagtggtggccgccctgtactccctgacgattccactgtaactaccaatcttctacttggttaagacagttttgtatcattttgctaaaaattattggcttaaatctgtgtaaagaaaaaaaaaaaaaaaaaaaaaaaaaaaaaaaaaaaaaaaaaaaaaaaaaaaaaaaaaaaaaaa

SEQ ID NO: 118535 - DNA, 1000 bp, Homo Sapiens
agttttgttctttattgctccctcccagacactccctgtggctgccctttgtgattccctcagatctgccctaatcccgggcatttgggtgggggaatcttgcctttccctttcagagccccagggatctcatctggggaactgtcattgccagcagaggctgttccttcctgctgtttggagatgtgactcattcattcactcactccaccctgcctctgcatcccttaatggagaaacgggcctaaaaccaaacgggtaaaaagccctgggccatccctgtcttcctgtcccttgtctgcccagttgacacctactggtgacttctagggcactgaggagtgaaagcgcctagggctggagaatagcgctgagttgggtttgtgactcttccctctccctgcctcacaggattgtgactccccagcccctgccctcaaagcttcagacccctcaggtagcagcaggaccttgtgatcttggccccttggatctgagatggtttttgcatctttccaggagagcctcacattcttcttccaggttgtatcacccccgagttagcatatcccaggctcgcagactcaacacagcaagggtgggagacagctgggcacaaagggggaattccgttcagcatgggctctaaacccacagaactgacaaagcccctgcttccccaccccctcctcaggctcctgcgagcacacccccacccccaaatccctccctgttctacactggggacagcagaattttctccccgtcttccccttcctgccattttccctcccttgaaaggttgacactggacaaccttggggcagctgagccctggccgcctcctggctggaaccatgagaaggaagctcagtacttcccacagtgtccctgttgataactgtttttattaactgaattgtttttttcatggaccaaacttttttttgtactgtccccttattgatgttacccagttttaataaaagaatcttctgaa

SEQ ID NO: 118536 - DNA, 1000 bp, Homo Sapiens
cctggcccctgccaatggctcggcgccctgtgggagcttcgagcagctggagtactgggccaacaacttcgatgactttgcggctgccctggtcactctgtggaacttgatggtggtgaacaactggcaggtgtttctggatgcatatcggcgctactcaggcccgtggtccaagatctattttgtattgtggtggctggtgtcgtctgtcatctgggtcaacctgtttctggccctgattctggagaacttccttcacaagtgggacccccgcagccacctgcagccccttgctgggaccccagaggccacctaccagatgactgtggagctcctgttcagggatattctggaggagcccgaggaggatgagctcacagagaggctgagccagcacccgcacctgtggctgtgcaggtgacgtccgggctgccgtcccagcaggggcggcaggagagagaggctggcctacacaggtgcccgtcatggaagaggcggccatgctgtggccagccaggcaggaagagacctttcctctgacggaccactaagctggggacaggaaccaagtcctttgcgtgtggcccaacaaccgtctacagaacagctgctggtgcttcagggaggcgccgtgccctccgctttcttttatagctgcttcagtgagaattccctcgtcgactccacagggacctttcagacaaaaatgcaagaagcagcggcctcccctgtcccctgcagcttccgtggtgcctttgctgccggcagcccttggggaccacaggcctgaccagggcctgcacaggttaaccgtcagacttccggggcattcaggtggggatgctggtggtttgacatggagagaaccttgactgtgttttattatttcatggcttgtatgagtgtgactgggtgtgtttctttagggttctgattgccagttattttcatcaataagtcttgcaaagaatgggattgtcattcttcacttcgaaaaaaa

SEQ ID NO: 118537 - DNA, 1000 bp, Homo Sapiens
tggagtcagatctcagagatggccaaagatgttgtgaggaagctcctgaaggtcaaaccggaggagagactcaccatcgagggagtgctggaccacccctggctcaattccaccgaggccctggataatgtgctgccttctgctcagctgatgatggacaaggcagtggttgcaggaatccagcaggctcacgcggaacagttggccaacatgagaatccaggatctgaaagtcagcctcaaacccctgcactcagtgaacaaccccattctgcggaagaggaagttacttggcaccaagccaaaggacagtgtctatatccacgaccatgagaatggagccgaggattccaatgttgccttggaaaaactccgagatgtgattgctcagtgtattctcccccaggctggtaaaggagagaatgaagatgagaaactgaatgaagtaatgcaggaggcttggaagtataaccgggaatgcaaactcctaagagatactctgcagagcttcagctggaatggtcgtggattcacagataaagtagatcgactaaaactggcagaaattgtgaagcaggtgatagaagagcaaaccacgtcccacgaatcccaataatgacagcttcagactttgtttttttaacaatttgaaaaattattctttaatgtataaagtaattttatgtaaattaataaatcataatttcatttccacattgattaaagctgctgtatagatttagggtgcaggacttaataatagtatagttattgtttgtttttaagaaaagctcagttctagagacatactattactttaggactgtgtagttgtatatttgtaagatgacagatgatgctgtcaagcaatattgttttatttgtaataaaatatacaaaaatcacttgccagcagtagaaaaaggaccgactataccgacctttctgattagtaaacagttgaatcaaggactctggaaaaaaaaaaaaaaaaaaaaaaa

SEQ ID NO: 118538 - DNA, 1000 bp, Homo Sapiens
agcggatccgcagtgtgctggacggccctgtgctgagcaacattgaccggattggagcagaccatgtgcagagcctcctgctgaaacactgtgctcctgttctggcaaagctgcgcccaccgcctgacaatcaggacgcctatcgggcagaattcgggtcccttgggcccctcctctgctcccaggtggtcaaggctcgggcccaggctgctctgcaggctcagcaggtcaacaggaccactctgaccatcacgcagccccggcccacgctgaccctctcgcaggccccacagcctggccctcgcacccctggcttgctgaaggttcctggctccatcgcacttcctgtccagacactggtgtctgcacgagcggctgccccaccacagccttcccctcctccaaccaagtttattgtaatgtcatcgtcctccagcgccccatccacccagcaggtcctgtccctcagcacctcggcccccggctcaggttccaccaccacttcgcccgtcaccaccaccgtccccagcgtgcagcccatcgtcaagttggtctccaccgccaccaccgcaccccccagcactgctccctctggtcctgggagtgtccagaagtacatcgtggtctcacttcccccaacaggggagggcaaaggaggccccacctcccatccttctccagttcctcccccggcatcgtccccgtccccactcagcggcagtgccctttgtggggggaagcaggaggctggggacagtccccctccagctccagggactccaaaagccaatggctcccagcccaactccggctcccctcagcctgctccgtgatgctccacctgccagcccccggattcccacacatgcagacatgtacacacgtgcacgtacacacatgcatgctcgctaagcggaaggaagttgtagattgcttccttcatgtcactttctttttagatattgtacagccagtttctcagaataaaagtttggtttgt

SEQ ID NO: 118539 - DNA, 1000 bp, Homo Sapiens
cttttcttaatactgaacgtagcataagggcttctggaacccagaagaggagacagtttaccatcctcaagatcattcagtgtttttcctttaaaaaaatggtcaataaagctcctttggcagaatcccccaaagaaccagggtattctttttccatccctagccattctggatcttgtgaccctccatgccaaccagcttccctactcctaccctggcccttttatactaggactccttaggaggagtgagacaggtgataatggatccttaacagatgaactatccacagaaggaagagggatccgtctcttaagtaattggttagttaacactgaattttggaggcaaaggagggttggcctgagttaggaaacaaaatgggatctttctgacacacttagggcagaagtgaatgcctgtcacggagggattgatcttcagggctgtttttgttcctgcctttagagttccatgaacaccatacctttgctactactatgtgcaggaacccttggtcacatgtgacatgtctgtgggaagctcccagagtttggtttggtccctggttttcagtcttgctgagactctgtctggatttgcctgcagagtttggataaaaaatggcaggttgggtaaccctccctgttcatcccatgttagctccaaagcatttcccaccctccatctaccccttccagaagcaaaaacaaaccatgactgaggcaggcatggagttgggcgttaggggcaggcagagggcctttgctacactgctgacagctatagggagccccaggtaatggcatgagatagctggtgttagggctatctcaggcaatatggccacacctgggtctttatgcatgaagataatgtaaaggtttttattaaaaaatatatatatgtataaataaatgatctagatattttcctctttttctgaagctactttcttaaaaaataaataaaatgtttatagcattcctggtaaaaaaaa

SEQ ID NO: 118540 - DNA, 1000 bp, Homo Sapiens
tctcagtcccctggcccggccagccaccgtccccagcacccaagcatgcaattgcctgtcccccccggccagcctccccaacttgatgtttgtgttttgtttggggggatatttttcataattatttaaaagacaggccgggcgcggtggctcacgtctgtaatcccagcactttgggaggctgaggcgggcggatcacctgaggttgggagttcaagaccagcctggccaacatggggaaaccccgtctctactaaaaatacaaaaaattagccgggtgtggtggcgcgtgcctataatcccagctactcgggaggctgaggcaggagaatcgcttgaacccgggaggtggaggttgcggtgagccaagatcgcaccattgcactccagcctgggcaacaagagcgaaactctgtctcaaaataaataaaaaataaaagacagaaagcaaggggtgcctaaatctagacttggggtccacaccgggcagcggggttgcaacccagcacctggtaggctccatttcttcccaagcccgagcagagggtcatgcgggccccacaggagaagcggccagggcccgcggggggcaccacctgtggacagccctcctgtccccaagctttcaggcaggcactgaaacgcaccgaacttccacgctctgctggtcagtggcggctgtcccctccccagcccagccgcccagccacatgtgtctgcctgacccgtacacaccaggggttccggggttgggagctgaaccatccccacctcagggttatatttccctctccccttccctccccgccaagagctctgccaggggcgggcaaaaaaaaaagtaaaaagaaaagaaaaaaaaaaaaaagaaacaaaccacctctacatattatggaaagaaaatatttttgtcgattcttattcttttataattatgcgtggaagaagtagacacattaaacgattccagttggaaacatgtcaaaaaaaaaaaaaaaaa

SEQ ID NO: 118541 - DNA, 1000 bp, Homo Sapiens
gaagaaggatgagaagttcgagcgagaaaatatcctgctacagcaaaaaaaaaagatgaccaaaaaattcgaaatggagtcaggagaagaagataagaaaataaatgaatcctgcagtgctgtctttgagaacttcattcaagagaaggaggagctcttgaaacaacatcaaagtgacaccttgcaattagaagagctgagaaaaaccaaagaggtgccctggagaagagaccaaataaatagacattggcatgatgtcctgcaacagcttcttcttatgcaggtcatgcaggaagaattgcatgcacaagcccttatcctagagtcactgaacacaaacctctactatacccagttggaactccagaaagagaaagctatagtgggaaatctggagaaaatgcttcaaaccaagtttgctgaaactgaagaaaagtataagcacaccatacagatcctgacggaagagaacattcatctgaagcaaaagataatttctaagaatgaagaaatttgtgaaggatgttctgggagattggcctctattactgtttctaaggatgattctgacactgtgcaagatggtagcaagaaaggacaagaatcataaacaaaaagttgctctgcattgttgaagatggttggcacaccatttctgtaggcccaggaaactcctgggagggttttcttgagaaaatgcatataatgagtttagttcttgggttgctctgactctctgaatgtctgaaaatgtttgaattctcatctgaatttcacagcttatcacggactcttcactgaaaaatgatgctctccatactgggagctgagctttctctgagttttgtactatttttcttctaccttgacgtatttcgttagaaagaaactgatttgaaggccttcttcatattgaacttttactatatttgggaggtgtacctttgtcccctggggcatttaggtagcaaaaaaagatgatgtgttgattttaaaaaat

SEQ ID NO: 118542 - DNA, 1000 bp, Homo Sapiens
tctcaattcatatggaatctagatggatatttcatgcatacccatagagaagtgtgtaagtgatatgtcagaagagcttcttactgatttcacctaaaatgagaaggaagtcctgttttcaagaatgacattagagtcatgcagctttgggaccatcagttttatactgtgataattgaaaatgaaacatgttcttattttccttaaattgaagaaaaccctttagttgtctacattggatggccttattacctctcaatcatcttttcataaatgatgtgcagaaattgtacttaaggacttaggagtatatgggaggttattggttttatgtttaaggatacgtttacttgagtttaagatacaggtcatccatcattcttaggctcactttttacagaaagtatgcaaatagtaaagtgacagcactgctaatgtttttccccagtactataacttgtggtttctgaactcattattgttgtatttccaaaaaagtaataccttttaattagtgtattaaaagttaagtataattattttaatgcaatctaatacaatcagattactcagttgccttacctcatgggaagagttacttttttagatctaaaaagctgaatagcatgttagttacttggtttcaacttgagttttcttttaatgttaataagattgaaactttagtatttagtggggaatggaaagagttgcccttgttgcaagtaatgaagcctgatttgattatgaagctgcttaatcactcttcatgtgttcagaattactgttttttttgtttgtttttcctttttgtcactgtgtacattaaaattttggaagatgctttactatgtaaagtatagatggtcattttaatcattcagccacatacggttggctggtaaacagcttattctgatacaagaatgcttgggtgcatatggaaagattgtgaaagagtgtgtcttgcatcaacagctgtcttatttatgatatataa

SEQ ID NO: 118543 - DNA, 1000 bp, Homo Sapiens
ttttcaacatattggcaacatattttaaatgaaaacactaaaacaattcttagtatgagacaaaactgtaaggaaaaagagtgttaataccatgatgcattaacataaaatatcaaacacacaaagtcataaaatgaaaatttacagttttacctgttcatatctagtgccccacagtgtgtgtcaaccaaaggtggcagtggctacatctgcctgttggactggtacaggttacaatatgtcctcttccattgcaaattaaagtccaaatagagaaatacttaggttttagaacacatcagaggtatttctgctgtatttttcaccttaaaaattgacacagagtttactaatagaggagtagagattgttgaccatttttaaaaaacgatagccactctttttcttttatgtttaaaactgaagttttgccaaatgggaaaattactgttacctctaccatcttaatgtagtaactttagaatttaaatttttatattactattttcctttttgttgttcacatagtcttaaggcacctatacttttaaattgactttttcatttgatattatctatatgtatgtagttgtgataatgattattttaattatattactttatactcttaatttatttagagtatttctctattgctgaatacttaagtagttttaaattttattatgataaattcctgggagggggattatttagtgaaataatatgaagaactttatgacttatgtttgccttattgcattcccaaagagttgtaacattttacagtgttaccatttgagtaggggttttatatgttgttgctaatttagtaaacataggagagaaatcaaagtttttctgatttgcttttatgtgatttatctgtatactttgttcatttatataaataaatgtcttaatggttttttttaaaaaaaaaaaaaaaaaaaaaaaaaaaaaaaaaaaaaaaaaaaaaaaataaaaaaaaaaaaaaaaa

SEQ ID NO: 118544 - DNA, 1000 bp, Homo Sapiens
gtggcaggagttatagtgccaccagagggaaaaatccaaaatgcatgtaatcccaataccattttcagccgatcaaagtactcagagacctggcttgcacttattgaacggggaggttgtaccttcacacagaaaattaaagtggcaactgagaagggagccagtggagtgatcatctataacgttccaggtactggcaaccaggtgttccccatgtttcatcaggcatttgaagatgtcgttgtggttatgattggtaacttaaaaggcacggaaattttccatttaattaagaagggagttctcattacagccgtggttgaggtggggagaaagcacatcatctggatgaatcactatttggtctcttttgtgattgtcacaactgctaccttagcatatttcatcttttatcacattcatagactttgtttagcaaggattcagaaccggagatggcagcgattaacaacagatcttcagaacacatttggacaactccaacttcgagtagtaaaagagggggatgaagaaataaatccaaatggggatagctgcgtaatttgctttgaacgctataagcctaatgacatagttcgtattctgacttgtaaacattttttccacaagaattgcattgacccctggattttaccccatgggacatgccccatttgcaaatgtgatattcttaaagttttggggattcaagtggttgttgaaaatggaacagaacctttgcaagttctaatgtcaaatgaactgcctgaaaccttatcacctagtgaagaggagacaaataatgaagtttctcctgcaggaacctcagataaagtaatccatgtggaggagaaccctacttctcagaataatgacatccagcctcattcagtagtggaagatgttcatccttcaccttgatggcatgacttttgaggaagtgtattaaacctgtatgtgaaatcaggtcctaatactgacaagcagtttgtctgttaaa

SEQ ID NO: 118545 - DNA, 1000 bp, Homo Sapiens
cctgtggaaagaagagacagacagagtgtgggtttgttcggaggcctctgctgtcaatggattccaggagcaaggccatttgtcgcgctttccaaatttcttaggcatttattttgataagtttatagccatcatgtttctaagagacttggagacaccagcaaactgctagaactcaaactcttcaattactcaaagaaggagccatttcagttaactcaagtgaatgaaagagttttggaatctgctgtgggtccttccctgttgaccatttggtaacttataatctgacaaaaactcttgagctgcaacaggccttgccagagggctcaggatgggaaaggaagaaggggataggaaaagaagaggtaattttacatttcccctttaaagtaaattttagccaactcatcattctgaaatgtccctataaagaatgagtcgaactagaccagaagccagcctactccttcttacatagcttctccaacaggggtagcaatgacctgtccacttcaaacacagataaggcctgccatcctcattggttaaaggcacacgtgagactttcagtgggctctgctgagaaggaaggcagcccaggagtcaggtatgcaggcattgcattgtcagtgtctgctctcagagtttacacattcaattgcttccaagggtgaatctcctgctctgtgaatgctatcagaccccaaaggccaaccttgggctgggtctatgtacgttcttccgaagcactgatgatcaaaattgaagacacattcagaggtttgattggttgagattaactggtgtggtggttggtgtatgtatgttttatttttatgtctttgtatgtagttctacataatgcaaattgtgctttctgatggacaagacctcataactgtgattaatatcaataaaaaggggatgttgtggaaaaaaaaaaaaaaaaaaaaaaaaaaaaaaaaaaaaaaaaaaaaaaaaaaaaaaaaaaaaaaaa

SEQ ID NO: 118546 - DNA, 1000 bp, Homo Sapiens
gaaggggatgtgtgcctgggagaggctctgtctccttcctgctgccaggacctgtgcctagacttagcatgcccttcactgcagtgtcaggcctttagatgggacccagcgaaaatgtggcccttctgagtcacatcaccgacactgagcagtggaaaggggctatatgtgtatgaatagaccacattgaaggagcacaatgccctcctgtgttgatgccacttcccagggtggagacagtggaaaagaaccgaggacaggaaaggattgggtaggtgaaggggtcaggggactggtagtcacccaatcttggagaggtgcaaaaagcactgggggctacccgttagctgcatctgccctggctgtttgcccgttcatgtcacaaactgccactactatgtacctgcagtggggttgcagagatgggggagactcaagtcttactccccaggagctcccagggcccaaggaggagaatgctgcctcctttcagtctggtctacacccactttctggtagcctctctgcttcctgtaattctggctgtttttccagactcagctcaaatagtgcccctccttaagcccatccctcgcccccagcctgaggtgatctttccctcctctgaactattagagcagttactgtctgttcagttcgtttggcaggcacacacagtggcataaattctattgttttgaactctgatttaaaattaaattgcagctgggcgtggtggcttatgcttgtaatcccaacacttagggagtcaggagaatcacttgagctcaggagttctagaccaatctgggcaacagagagaccccatctcttttaaataaaaagttaaattgcttaatttcccccgtattcctggcctgtctgcccctttcacataattttaacctggtttcttgtatgtaaactccttgagggcaagaacatgtttgaacatagaaaaaaaaaaaaaaaaaaaaaaaaaaaaaaaaaaaaaaaaaaa

SEQ ID NO: 118547 - DNA, 1000 bp, Homo Sapiens
ccagttctgcgcaagacaaagaagaatggatcaaggcccttcaagaaaccatcgatgcttttcatcaaaggcatgaaaccttcagaaatgcaattgcaaaggataatgacattcactcagaggtttctactgctgagctagggaaaagagccccaagatggatccgagataatgaagtgacaatgtgtatgaaatgtaaagaacctttcaatgcactgacacgaaggaggcatcattgtcgagcatgtggatatgtggtttgttggaaatgctccgactacaaagctcaacttgaatatgatggtggtaaattgagcaaagtttgtaaagactgttatcaaatcataagtggattcacagacagtgaagaaaagaaaagaaaaggaattttagagattgaatcagcagaagtatctggaaacagtgtggtgtgcagctttcttcagtatatggagaagtcaaaaccttggcagaaagcttggtgtgtgatccccaagcaagaccctcttgtgctgtacatgtatggtgccccccaggacgtcagagcccaggccaccattccacttctgggctatgtggtggatgaaatgccaaggagcgcagacctgccacacagtttcaaactgacccagtctaagtccgtgcacagctttgctgcagacagtgaggaactgaagcagaagtggctgaaagtcatccttttagctgtcacaggtgagacaccaggtggtccaaatgagcatccagccaccttggatgatcatcctgaacctaagaaaaaatcagaatgctgaactcctccaggaccagccatggtgtggaggtctcaggacttacagctcaagacattcccagctcttcttacacatctgctagcactttatgttgaaaaatataggcccataaatgcatcttttgaggactattttcctatgtttatgtactcttagtgaaattagtgtgcagagtcattctaccgataaagttttgaaataatgtg

SEQ ID NO: 118548 - DNA, 1000 bp, Homo Sapiens
cacatggccataaataatagaaagaaagctacaaccacaggctgtttgaaagcttcacctcacctttctgcaaggcagaaaaagtatgaaaaaaaccaaggcttttttcagtagcgtcctatggatgtcacattgtacatcaaacaaccttgtgattataaaacgatcctgggaaggagcccctaactagggcaagtcagaaatagccaggctcgcagcagcgcagcgctgtgtctgctgtgtcctggggcctcccttgttccgacctgtcaattctgctgcctgtcacgcgggtggttctgcccatcgcggctgcgggtcaagcatcttcaagggaaggacggactggaggcctcaccgtggactcaactctgcattctccgtgccacattcctccagttcccacacgtagaagggaacgaaactgacgtctacctcatggggctgctgtgtgggtttgggaggcaaaaatctatgaagggttttttgaaatcccataggtgccacatctatgagatgtttgataaatgtgaatatgcttttacatttgggcttatctaatttgcaataagagagcctctctctatcaacaccagcttctctctcgggctgtttgctcagggaaggcaagaaagccacgtgctggccctctgccttctctaaagtgctgttggagcatggaggagctggaggagatggggatggactgacagctaagagggcggctgctgggactagatagtggatgaagaaagaaggacgaggaagccgtggggcagcctcttcacatggggacaggggatggagcatgaggcaagggaaggaaaagcagagcttatttttcacctaaggtggagaaggatcactttacaggcaacgctcattttaagcaacccttaagaaatgtttatgtttctttattaccaatgtaatctatgattattgaaggaaatttagaaaatgcgtagatacaaaattaaaaaaaaatactgtccaaaaa

SEQ ID NO: 118549 - DNA, 1000 bp, Homo Sapiens; identical to SEQ ID NO: 115971

SEQ ID NO: 118550 - DNA, 1000 bp, Homo Sapiens
tgggtagggagctgtctaatccaagtcccaggcttttggcagcttctctgcaacccaccgtgggtcctggttgggagtggggagggtcaggttggggaaagatggggtagagtgtagatggcttggttccagaggtgagggggccagggctgctgccatcctggcctggtggaggttggggagctgtaggagagctagtgagtcgagacttagaagaatggggccacatagcagcagaggactggtgtaagggagggaggggtagggacagaagctagacccaatctcctttgggatgtgggcagggagggaagcaggcttggagggttaatttacccacagaatgtgatagtaataggggagggaggctgctgtgggtttaactcctgggttggctgttgggtagacaggtggggaaaaggcccgtgagtcattgtaagcacaggtccaacttggccctgactcctgcgggggtatggggaagctgtgacagaaacgatgggtgctgtggtcctctgcaggccctcaccccttaacttcctcatgcagactggcactgggcagggcctctcatgtggcagccacatgtggcgttgtgaggccaccccatgtggggtctgtggtgagagtcctgtaggatccctgctcaagcagcacagaggaaggggcaagacgtggcctgtaggcactgtctcagcctgcagagaagaaagtgaggccgggagcctgagcctgggctggagccttctcccctccccagttggactaggggcagtgttaattttgaaaaggtgtgggtccctgtgtccttttccaggggtccaagggaacaggagaggtcactgggcctgttttctccctcctgaccctgcatctcccaccctgtgtatcatagggaactttcaccttaaaatctttctaagcaaagtgtgaataggatttttactccctttgtacagtattctgaggaacgcaaataaaagggcaacatgtttctgtt

SEQ ID NO: 118551 - DNA, 1000 bp, Homo Sapiens
ttggcgagatttgggggtgctaatccaggacagcattacacgccacaactccagtgttcccttctggctgtcagtcgtgttgcttacggtttctttgttactttaggtagtagaatctcagcactttgtttcatattctcagatgggctgatagatatccttggcacatccgtaccatcggtcagcagggccactgagtagtcattttgcccattagcccactgcctggaaagcccttcggagagctccccatggctcctcaccaccgagacagttggttttgcatgtctgcatgaaggtctacctgaaaattcaacatttgctttttgcttgtgtacaaacccagattgaagctaaaataaaccagactcactaaatcctttccaataattgactggtggaaggaaaacaaaaaacaaaaactaaaaacctcttagcttttctgcaattcaactttttatttttatttttatttctatcaaagacggtagagagaaacagcttgatgctgtttctacatcaaaaaaaaaaaaaaaaaagacagactgttggtcttactaaggatgtttttaccagcctgcctgacttctgcaaacctaccctgtcaaggagatcaaagggacgcaggtttctgtttattctgaacaagggccaggccccgcggagtgtctttggtggatcccagataactcctaggtgctgctctcagacactgaggagttgagcaaatctgttctattctgcagaacccataggacaaataagagttctactagaattaacagcccaaaagaatagctacagctaagtgaagccacttacgtgggctttaaaaaaataatgtgttagctgattcacatgcactggagttaattagtcttagaaatgtgtgcatccatacaaatgcacaacataaagtgaacatattcctaggccctttctgcctgtgtcagggccaggaagtagaggctgggaactcttctggtccccagtatggcag

SEQ ID NO: 118552 - DNA, 1000 bp, Homo Sapiens
ggagcaacaccttcacggtcaaggcccagcccagtgacaacgcgcctgcaaaagggaacaagagcccttcgcctccagatggctcccctgccgccacccccgagatcagagtcaaccacgagccagagccggccggcggggccacgcccggggccaccctccccaagtccccatctcagagctctcttcctgctgtcgtggtggagaccttcccagcaactgtgaatggcaccgtggagggcggcagtggggccgggcgcttggacctgcccccaggtttcatgttcaaggtacaggcccagcacgactacacggccactgacacagacgagctgcagctcaaggctggtgatgtggtgctggtgatccccttccagaaccctgaagagcaggatgaaggctggctcatgggcgtgaaggagagcgactggaaccagcacaaggagctggagaagtgccgtggcgtcttccccgagaacttcactgagagggtcccatgacggcggggcccaggcagcctccgggcgtgtgaagaacacctcctcccgaaaaatgtgtggttcttttttttgttttgttttcgtttttcatcttttgaagagcaaagggaaatcaagaggagacccccaggcagaggggcgttctcccaaagattaggtcgttttccaaagagccgcgtcccggcaagtccggcggaattcaccagtgttcctgaagctgctgtgtcctctagttgagtttctggcgcccctgcctgtgcccgcatgtgtgcctggccgcagggcggggctgggggctgccgagccaccatgcttgcctgaagcttcggccgcgccacccgggcaagggtcctcttttcctggcagctgctgtgggtggggcccagacaccagcctagcctggctctgccccgcagacggtctgtgtgctgtttgaaaataaatcttagtgttcaaaacaaaatgaaacaaaaaaaaaatgataaaaactctcaaaaaaa

SEQ ID NO: 118553 - DNA, 1000 bp, Homo Sapiens
caagttgaagggacagggcaacaaaatacagtagtagtttcttttgtattttgtatattcgcctgaagatcatcccgcaaggcaggctggaggtgccggtgggcctgtgttgctgggattttagtctgtgctgggaggcagggctccgctgcgcctcagctgtgggggcctcaggcaggtccctcagttctcacgccttcctgtccagtggaatgggggccaggagtgctggctcctcgtgtttggtgagggtggagtgaggcccctgcagagctgctgatgaggtgggcacagcggccgttggcagctgctgttgtgggttgctttgtcaatctctgccccggtctgatgtttcctacagggagatgccttggatccaggttcagggactaaatacacttggcagctgaagatgaattggaatggtcacgttttttaggctggacagcgtcccgccacagctactacctgacactgagctcatgcagagagatgatggctgatgttccttctcccttgggacatgggtctggcacctgtgggctgtcgatagtgccctctgagcagagggtcacggtcatgtcagtttgggggaattctctgttgtgcctcacagactcccccctttctttcctccctccccttctcattttgatgtctaaagcatcaagtccctcttcctcggagtttctctagctgcagtggaagattctgttttcctgtggggaaaatgctcacttgagattttgcagggacccgggtctgtctggtttctgatgacatagtaagagaaaggtcttttttcaggttggctggtgaaaggaattgcatgtgactcacacaaacaggagctagcccaatcatacactgactcgcgtgggtgttaaaatgtttatcatgcctaagggagacatttatgattaaaccatttatgctacataaaaaaaaaaaaaaaaaaaaaaaaaaaaaaaaaaaaaaaaaaaaaaaaaaaaaaaaaaaa

SEQ ID NO: 118554 - DNA, 1000 bp, Homo Sapiens; identical to SEQ ID NO: 117081

SEQ ID NO: 118555 - DNA, 1000 bp, Homo Sapiens
tgaatgaacaggaatgagccggacagcctggctgtcattgctttcttcctccccatttggacccttctctgcccttacatttttgtttctccatctaccaccatccaccagtctatttattaacttagcaagaggacaagtaaagggccctcttggcttgattttgcttctttctttctgtggaggatatactaagtgcgactttgccctatcctatttggaaatccctaacagaattgagttttctattaaggatccaaaaagaaaaacaaaatgctaatgaagccatcagtcaagggtcacatgccaataaacaataaattttccagaagaaatgaaatccaactagacaaataaagtagagcttatgaaatggttcagtaaagatgagtttgttgttttttgttttgttttgttttgtttttttaaagacggagtctcgctctgtcacccaggctggagtgcagtggtatgatcttggctcactgtaacctccgcctcccgggttcaagccattctcctgcctcagtctcctgagtagctgggattacgggtgcgtgccaccatgcctggctaatttttgtgtttttagtagagacagggtttcaccatgttggtcgggctggtctcaaactcctgacctcttgatccgcctgccttggcctcccaaagtgatgggattacagatgtgagccaccgtgcctagccaaggatgagatttttaaagtatgtttcagttctgtgtcatggttggaagacagagtaggaaggatatggaaaaggtcatggggaagcagaggtgattcatggctctgtgaatttgaggtgaatggttccttattgtctaggccacttgtgaagaatatgagtcagttattgccagccttggaatttacttctctagcttacaatggaccttttgaactggaaaacaccttgtctgcattcactttaaaatgtcaaaactaatttttataataaatgtttattttcacattga

SEQ ID NO: 118556 - DNA, 1000 bp, Homo Sapiens
aatacagctatcaaaatgatcccaggtgtggtggacacaggcctattcatcaacatggctgagagagtctactttgggatgcaggatggctcagtgaacatgagggagaagcctttctgttgaccctgcaaggagcagagtgtgttcaccttgagtctccagcccacagccaaggtggacgtacctctccaggagcctttgccttaatgtatctctgcctggacaacttgtggtggggggtggggggaagagtgggagggggagttaaatccagtcttatgaagtattgttattaaatgtctttttaaaaagagaaatataaacatatatttttactattaaaatattcagttttttaaatgaagtagaacttgagttcatgttttatatgaaatatttaccaaaaaaaaaaaatgaggtaaactgtatttaaaacctttgacttgagtctgctggtaaagcttctgaatattgagtttgctgagaaataaaaatcaaaacttctttaagctggtaaagtgaggggcccaccagcagtgatctcctgatgccttactggaaactttgtttacttgtctgctaccctctgatttgtttttagttagtttttattgtgagcacacatagtacctagttacatcttaagatcaggtgtataaaactgtggagtggagcggtatggtatggaatgacttggaatgtaagctgtcagggagaaaatgttgttacacttttgctaagatctgggggtttcttcatattcctgctgttggaagcagttgaccagaaatgcttgccagtactgccaaagcactgctgtgaaatgtgaagtactttgtttttttatttttaatgattttctttttgttattaatatttttctctgttcctttgttattacttgcatggtttggcgtcagaagtccttacctctttatattgtttgcaggtttaaataaaacagtgtggtgccaaaaaaaaaaaaaaaaaaaaaaaaaaa

SEQ ID NO: 118557 - DNA, 1000 bp, Homo Sapiens
tggcgggacactacacctcagccatgctatgggtggcattcctctgctggctgctggccaatgtgatgctctccatgcctgtgctggtatatggtggctacatgctattggccacgggcatcttccagctgttggctctgctcttcttctccatggccacatcactcacctcaccctgtcccctgcacctgggcgcttctgtgctgcatactcaccatgggcctgccttctggatcacattgaccacaggactgctgtgtgtgctgctgggcctggctatggcggtggcccacaggatgcagcctcacaggctgaaggctttcttcaaccagagtgtggatgaagaccccatgctggagtggagtcctgaggaaggtggactcctgagcccccgctaccggtccatggctgacagtcccaagtcccaggacattcccctgtcagaggcttcctccaccaaggcatactatcgccccaggagactttccctggtgcctgcggatgtccgaggcctcgcgccagcagcgctcagtgcccttcctggagctctcctggcccaggcctggcgggcactgcttcccggcctgcgatgtcccaaggcggggaaggagtccagattgggtccccctcacagtccttggcgctttggtccagaagggtgcgaagagcgctgggccgaacatactggagactcaccacggcccctccgaggaagaggcacaggacgcctgtggcggtggggatcgaaagaaaggagggcatgtggagtcagggctatgttgcccaggctggtctcgaactctggcctcaaacgaccttcctgcctcgacctcccaaagtgctgggattacaggcgtgatgcccgggccttcttccatcttttggagcctaccccttgtgttacctcccgccacacacctctaatctgaattacatgaaacacggcaagacaccaaaaaaaaaaaaaaaaaaaaaaaaaaaaaaaaaaaaaaaaaaaaaa

SEQ ID NO: 118558 - DNA, 1000 bp, Homo Sapiens
ttttcagtatgtacttgaaggaaggaggtggagtgaaagttcacccccatgtctgtgtaaccggagtcaaggccaggctggcagagtcagtccttagaagtcactgaggtgggcatctgccttttgtaaagcctccagtgtccattccatccctgatgggggcatagtttgagactgcagagtgagagtgacgttttcttagggctggagggccagttcccactcaaggctccctcgcttgacattcaaacttcatgctcctgaaaaccattctctgcagcagaattggctggtttcgcgcctgagttgggctctagtgactcgagactcaatgactgggacttagactggggctcggcctcgctctgaaaagtgcttaagaaaatcttctcagttctcccttgcagaggactggcgccgggacgcgaagagcaacgggcgctgcacaaagcgggcgctgtcggtggtggagtgcgcatgtacgcgcaggcgcttctcgtggttggcgtgctgcagcgacaggcggcagcacagcacctgcacgaacacccgccgaaactgctgcgaggacaccgtgtacaggagcgggttgatgaccgagctgaggtagaaaaacgtctccgagaaggggaggaggatcatgtacgcccggaagtaggacctcgtccagtcgtgcttgggtttggccgcagccatgatcctccgaatctggttgggcatccagcatacggccaatgtcacaacaatcagccctgggcagacacgagcaggagggagagacagagaaaagaaaaacacagcatgagaacacagtaaataaataaaaccataaaatatttagcccctctgttctgtgcttactggccaggaaatggtaccaatttttcagtgttggacttgacagcttcttttgccacaagcaagagagaatttaacactgtttcaaacccgggggagttggctgtgttaaagaaagaccattaaatgctttagacagtgt

SEQ ID NO: 118559 - DNA, 867 bp, Homo Sapiens; identical to SEQ ID NO: 26106

SEQ ID NO: 118560 - DNA, 1000 bp, Homo Sapiens
ctacaactccagaagagatcttggagaaattaaaaaaggaagccaaaaaaacataaaagcaagaaatgaggccgggcgcagtggctcatgcctgtaatcccagcactttgggaggccgtggtgggcggatcacctgaggtcaggagttcgagaccagcctgaccaacatggtgaaaccccatctctacgaaaaatacaaaattagccagatgtgatggcgcatgcctgtaatcccagttactcaggaggctgaggcaggagaatcacttgaacctggggggcggaggttgcagtaagccgagatcgcgccgttgcactccagcctgggcaacaagagtgaaactctctccccccgaaaaaaaagaaataaaaaatacatccttgagaaacttttttattgctaatggtgaagaggctgttaaatagaaaaatatactacatgcacagaagaacatgggggacatatatatatgtatatattcgaataagactccaaaaagtagaaatttaaaaagtgctatacattgcatcaggttctaaaatcccaaaccccaaacagcctggaacatgttactctgatttcatggcgttgtaaaataacagagctgggaagaatattcaagatgacctgatttaacacctttcattctgttggggggcctttgatttcctatatccagaagttgagagacttactcaagattgtaccatgcaagctggcaactagaacccaaatccttggactacttgttgaatgcagtttttctagattgtaaattaaaaatcatatctccacaacggttctggaattctggggattgccttctaatccagtttacaagtgacagaaaacctgttatgctgctttgtagtcttaccttagatttttaaatgcttatttaaatgtaaaaaaaatttttttttacatcttttaaagactatatttaccattttgttgaaaaagtaaagaaaaatcatgacttgtaattaaatgtgaatt

SEQ ID NO: 118561 - DNA, 1000 bp, Homo Sapiens
tgcccagaaattggtcgtctgagagctttacgtcatcttcgattagctaataaccaactgcaattcctacctccagaggttggcgatttgaaggagctgcagacactagacatttctaccaatcgtttgctaactttacccgagaggcttcacatgtgcctttctctgcagtacctcactgtggaccgaaatcgtctatggtatgtgccgcgccatctctgccagctgcccagcctcaatgagctctccatggctggaaaccgtcttgcatttttgccacttgatttaggtcgatctcgagaactacagtatgtatacgtggataacaacattcacctgaaaggcttgccatcttatctgtacaataaagtcatcgggtgcagtggctgtggtgctcccattcaagtttccgaggtgaagctgctttccttttcatcagggcagcgaaccgttttcctcccagctgaggtgaaggccatagggacggagcatgatcacgtcctccctctgcaggaattggctatgagagggctgtatcatacctaccacagcttgctgaaagatttgaactttctgtctccaatctcattacccagaagtctcctagagctgctgcactgccctctggggcactgtcatcggtgtagtgagcctatgtttaccatcgtctaccccaagctctttcccttgagagagacgccaatggcagggctgcaccagtggaagacaactgttagttttgtggcttactgctgctccacccagtgtctgcagacttttgacctgctgagttgataaacactcaagaacctcaggagcgctgccagcttgacactggggaatccagccagtccagcacactcttccatcctgtcctgtccaatgcgggggcactgcagaactctctagaaatgtcatgattgagcttcagagctaaaatgccttcacccttcccccaagttggaatatatcctcccccaaattaaaaaaaaaaaaaaaa

SEQ ID NO: 118562 - DNA, 1000 bp, Homo Sapiens
catttgtggcccacaaggagatcaagttgacactgttgaataaggcggctgataaaggaagcaggaagcgctatgaaccatcagacaaggacaggcagagccctcctccagccaagcggcccaacacatccccagaccgaggttctcgggaccggaagtcaggtgggagactgggctccccgaagccagagcggcagagaggccagaactccaaagcccctgcagccccggctgacaggaagcgccagctgtcaccccagtccaagagctccagcaaggtcacgagcgtgcccggcaaagcctcggatcccggcgccgccagcaccaaatcagggaaggccagcacgctgtctcggcgggaggagctgctgaaacagctgaaggccgtggaggatgctattgcacgcaagcgggccaagatccccgggaaagcataggccgtgccccgaccggactggacgcatttttatacatagggtaagcgcagccattttggattttgcagttaatgtcttattttggctgtgattctttttaaaaagtaaaaaagaaaaaaaagtttctcagctggaaaagaagccacacaggaaatgacaacgacgctgaatcccagcctccctccccagagcagaagtcccgcaggacagacagacacagacagcgctagtgaccagcacggttctcatgtaaattacaagccccagccgccagccccgccttctcttcctcctcctccgtcttcttccctggccctggtcaggcctgtggagccccagctctgggtccctagcccgggtccaggcagccaggctccctcctgagctgagaaacggaacctcgcgaaccactggtggcacatccttctcctcccccgcccctgatcacccgcccccggatcagaaatatatctatattctcgactaaagtctcatcaggaaatatttcctgtcttttattttaagcatcaaattgttttagttgatttaaaaaaaaaaaaaaa

SEQ ID NO: 118563 - DNA, 1000 bp, Homo Sapiens
ggaggcatgaacaaaggtggaaacattgctgttggcttcggcagtatctgaatttactgtgagatggagggtttaaatctaaccccatggaatgcaggagtccatgaattatctaaatcgatcattttgatctttaatcaactctgcaattatgtgtaccttgtttgctcaattaaaccctgaactatttgagaatgaaagctatgctgttcctctagtgcaagcctcagggcctgtcctgtgcctacaggatgtccccattctgccaaaacctgtccctcttccagagactcctacttcaatgtctcttgctagaaacacatccctttcctcacacatccagtcactcatcaagtgtaatctgtctcctaaatatctctggaacctatcttcttttctccaagttaccatcacctcttgtctaaactgctacggaaacttcctaacctgttctcccatttccacttctgacttccatgctgcaatgagagtcagctatgaaaaacaaacctaaacatcgaactttccttagcttcttcagtggcttccaactgcttttggaataaagtcctaaattcaaagatcttgtataaatcaggctcatctcgcaacacccctctttgttctctatggcctagacacactggctttcagttcattacatgtcttgcctcagaccctcacacactgtcctctctgcctgcaacactcttcctttcactttccacctagctgatcctaaatgttccttcctcagggaggtcttttctgatttcttggtgggtcaagactttctgataaatcagttagcaccatgcattttccagagtttttattacaattgtaaaattatggctgtaataggctggctgcgctgctagattgtaagctcacgagggcagagatcttgttcacatcttgctcactgctatattctcattgctgagcacacagttgcagctcaataaattttgaatgaactccaaaaaaaaaaaaaaaa

SEQ ID NO: 118564 - DNA, 1000 bp, Homo Sapiens
ggcccaccatgtggccctgctgcgcagtggtggaggggccgacgccctcgtggtgctgctcagtggcctcgtgctgctggtcaccggcctgaccctggccgggctggccgccgcccctgcccctgctcggccgctggccgccatgctgtctgtgggcattgctctggctgccttgggctcgcttttgctgctgggcctgctgctgtatcaagtgggtgtgagcggacactgcccctccatctgtatggccactccctccacccacagtggccatggcggccatggcagcatcttcagcatctcaggacagttgtctgctggccggcgtcacgagaccacatccagcattgccagcctcatctgacggagccagagccgtccttcttctcacagcggcctcagcgtccccagagccgagccagggtgtgagtgcatgtgaacgttgagtacacatgagtgcgtgtatgcccccaggctgggtcagctcttctgtggattgcatggcgtgtgattaaaagcccatgtgttcccacacatccacatcatgggaaggttaatgtgtgcctccttggaactgggtgttggtgtccatggaacttcctctctgtatctcaggtcagtaggcgcagaaacgcctcatgatgaagattcttgagccccatttccaagacccctcacatccaatcctgtcctgtaacatccatcaaggatttccataggggtgactggtgcccacccaagactgcaccagtgcctgctcattgaggagagtaactgctggccaggcagaaagaatatgggctctgcaatgagacagacctggaggggactctcccgttgagcactagcagctggaggagttgggagttcatggctatcatggttgtgttaatcgattgtggggatgaaatgtcattgtgtatggaaggcggggctcatggctgattggcaataaaatggcggctgccgttgtcattgtctccaaaaaaaaaaaaaaaaa

SEQ ID NO: 118565 - DNA, 1000 bp, Homo Sapiens
tgcttttccattaagacttgttccagtgggaaggagctttggaaaaattgcaaaggtctgaatcttcagggcattttcatgacaggacttgccaataataataataataataataataataataataataataataaagctccagaggcctaactggtttctcaagtcatttcagtgatatcattgaaacgtttttgtggtacttccctttgtctttcactgtttcatttttatattgcttcatttacttctttgcttttggctttgttattagaaaaaataattatgaggtctgttgtgcatgttgactgtgatattaagttatggcatgccattaagttttccagacgatgttggatgtatctgattagttcatgtcatctgtaaatacaattcttttttgtagtactttggaatggagcctttttctggtgtactgtatgccatttaagtttcacatacaagctgctttcggcaaaggctcgaatatttataaatttcagatggttatcctcactttatagtacacttaagtggctaccatatattttttatatgacaattggctgaatagctgatgtgtatgacacttttacacagatttgcactttggaactattttatagttgtaatgcatcaatcaaatacatttcaagcacatttcttgatcaatttaccagcaaccctctgaaggaatgaaggagagttgtgattgctatgtcaatgagtgaaatatacttaaaaatggcagagatatatagtacattattgtagcaaccttatatctgatttgagatactgtgttgccaaatgtccatgttatgtttatttctctattggttgtatttattaatttttagaagcctttaaactgtgttagaatctttttgaaaaatgttgattttgcatcataaagtttcaatttatcaaggatatcttttcagttacacttttagaaagagtgaataaaaagggcagtgagttatgctcttggacttgg

SEQ ID NO: 118566 - DNA, 1000 bp, Homo Sapiens
ttgacttcagagttttctgtaatttgacttcagttaagaactttgaggatcttcaaaatgaaattaaagattcagagattagacaaaaactgagaaagttgtacggctctccaggtgacattgacctctggcccgcccttatggttgaagacctgattcctggtacaagagtgggaccaacacttatgtgcctgtttgttacccagtttcagcggctaagagatggagataggttctggtatgaaaaccctggagtatttaccccggcacaactcactcagctgaagcaggcgtccctgagccgggtgctttgtgacaatggtgacagcattcagcaagtgcaggctgatgtctttgtaaaggcagaatacccacaggattacctgaactgcagcgagatcccgaaggtggacctgcgagtgtggcaagactgctgtgcagataaacaagctggaggcacgcctgaggcaggcagggtgtacagatgttagaggggttccaaggaaggccgaggagcgctggatgaaagaagactgcactcactgcatttgtgagagtggccaggtcacctgtgtggtggagatttgtcccccggctccctgtcccagtcctgaattggtgaaaggaacctgctgtccagtttgcagagaccgaggaatgccaagtgattccccagagaagcgctaataaaagttttgtgctgttgagccccaaatgggaaatttctcaggaagagacatttaggacttcagaacttttaacttgtagtcacattgttgatatggaaaccactgacttaagcaacttagttcatctaatcttacatatacttacgatcttttattttttcattttctaacataccttgaaataattcaaaactaaaagcaataaagtgcatatgaagtgtttgatcataagaaatatttcttactgtaagctgtcagttttatatgccacacctggaaataaaaagaatatcatggaatatttaaaaaat

SEQ ID NO: 118567 - DNA, 1000 bp, Homo Sapiens
gcgatgcctctacacagctctcatcctacgtgaagcaggtccagacaggccacaagcccagcacaaaggagatagttcgcttctccaaactatttgaggaccagctggccctggaacacttagatcgccctcagctggttgccctttgcaaactgctggaattgcagacatttggaaccaacaacctgctccgctttcagctcctgatgaaactgaagtctataaaagcagatgatgaaataattgccaaggaaggggtgacagcattgagtgtatcagaactacaggctgcctgtagggcccgagggatgagatcactgggtctcacggaggaacaactgcgacaacagctcacggagtggcaggacctccacctgaaggagaacgtccctccttcccttttgctcctgtcccgcaccttctacctgatagatgtgaagcccaagccgattgagataccactcagtggggaggctccaaagactgatattcttgtggaattacctactttcactgaatctaaagagaacatggtggatcttgcacctcaactgaagggaactaaggatgaagactttatacagccgccaccagttacatcatcacccataacaccatcaacacctatttcattacctaaaggacccatcacttcttctgaagaacctacactccaggccaaatcacaaatgacggcccagaacagcaaggctagttcaaaaggagcataaaggactacttgaggatggagctcactctcttcagcttccggccctcaacagtggcatctgtaaaggacctcccagataagactgtctggcttcagagagcggatcagctgtttagcccgtggggcagtcctttgaggcctggtaaccattccaggtgatgtgggtagtgagaccaagttcagaccacttagaaaaatataattgcaaagtcccatttcctctgtaccattgtcaccccactcaactttgtataaagcccaccccccatc

SEQ ID NO: 118568 - DNA, 847 bp, Homo Sapiens; identical to SEQ ID NO: 31193

SEQ ID NO: 118569 - DNA, 1000 bp, Homo Sapiens
taacatgtcccctcctgagctcagcccccacccccatactcctggtggggaccaggtcttgcttggcttcggggctgaccgccggtcccctttcttctcaccacagtgcccatttttcatccagggagaacctcggggctgggacacctcctggccctcaccctgggtcatgtttacagtcctcagtgccccacaccggtggccccctgaggacacctccaccctgaccttgattttcccaaacgctgcctcttggtgacagactcagcccaaaaccccttccttctgtctctggagacccttgagcttggggaaatatggaggggtgtgtgtctgcaatcaaggcctctgcagctcacggctggcccggtgggctgggacttccgtctgaattttaaatacttagggttcatttttttttctctggcaacaaagcttgatgttttcactgctttagtttcctgtttgctggtgggaggggatacggtctgtgactctggacttgctctgggggaacagttgtcactgcccccggggagaggggcagcttgggctggagaagcacagccagagacagagcccctcgagagggatccttggctgcttcattgtcttccccccagcaagccctgctctccacaggcacctctggggtcttggtatggtccccgctcacctccttccagagtcctgagtggtgtgggtgtgggtggcacaggatctggggcatgggaggggttcagagcttcccagagccccgtgtcctggcagactcagctggtgggctggggtgttaaccccagtcctggcgtaggtttacagactctcaaggtacgttggccctggtctcctgggagagaggggtgagggatgtcccctaccaaagcacaaggtgggatcaggctgcctcctgggttgggtgtcgggggagctgtccggcagcctggcagggagatgcaagggctaaagtaaaattttgtcaagtaaaaaaaaaaaaaaa

SEQ ID NO: 118570 - DNA, 1000 bp, Homo Sapiens
cacaactcaagcaacatcagagaattcacactggagagaaaccctaccaatgtaaggtatgtggtagggccttcaaacgggtctcacatcttactgtacattacagaattcatacaggtgaaaagccatatgaatgtaaggaatgtgggaaggcttttagtcattgctcacaattgattcatcatcaggttattcacactgagaaaaagccctatgaatataaggaatgtgagaagaccttgagtcatgattcaactaccgttcaacctcagagaatgcataatagagaaacacatgtgaatataataaatgtagaaaagccttccatcagcagttaccccttactaatcatcagagaatttatgttggcaagcaaccatatgaatggaagtaatggggaaagcccattagcctaggctaattgtgactgtgacttacttctccctcttggagaaagacttgaagaatgtaatgccagtgacaatgccttcattcagaggtaagcctttatcctaagtctgaaaattcatatcaaagaaaattttatggatgtaaattgttcagatcataattgtcaaaaatgctgggaaaggttgggagaaattttatttctaacacattccagaaccacattttctaaccacagtgtagtaattttatcaagagcaaaagttatagttttcttacaagttaaaaaaacagccagattatcatttgcttaacaaagaaatcatgcaattaccataaatggtaatgaaaagaatgaattgagagtttaacatgccaagagatgtgaaatgtggccaaagagatgtgagggtaaggggaaagccaaagctacactggaggaatttttatagcctttgaatgcatgcatatacatgaaaatctgaaagataaactcatatgcactaaacatgctattcaagtctaccaaacatccaggcagtgaaagaagaaagtaacagaaaatgatgaaataaagagaccatcttacaat

SEQ ID NO: 118571 - DNA, 1000 bp, Homo Sapiens
ctctccctgcttccagcccttctctctgcacctctctggtcaggcctagtcactagcccagcatgtcaactttggcatgacccagggccatggcgttgacatctctatctgcacccacccataggtgctcttgtctagcttaatgactctaaaccccgtctctattctgataatcctcaaatttctgtctgtaacctagacctggccacgaaaccttgggctcctacctcatcaccatttctacccaagggtttaaaagacatctcaaattccataggtcctaaatggagtttccaatctttccccctaggcgtgcctctccccagcttctttttttttttttttttggatggagtctagctctgtcacccaggctggagtgccatagtgtgatctcggctcactgcaagcttcgcctcccgggttcacgccattctcctgcctcagcctcccgagtagctgggactacaggtgcccgccaccacggtcggctaattttttttgtatttttagtagagacggtgtttcactgtgttagccaggatggtcttggtctcctgacctcgtgatccacccgcctcggcctcccaaagtgctgggattgcaggcgtgagccaccgtgctgggccccccctccccaactttcttcggctctgtcctttgccgctcagaccaaaaaccttagagctgtctttgacttctgtctttcccttccacccacagttaaccaggaaatcctgccatctccgcctttattttattttattttttgagatggagtttcacccttgttgcccaggctgtagtacaatggcatgatctcggctcacggcaacctccacctcccgggttcaagcgattctcctgcctcagctactcgggaggctgaggcaagagaattgcttgaactcagaaggcagaggttgcagtggaaaaaaaaaaaaaaggtaatttctctctctttctctctctctctgacacttgctttagaggctacatt

SEQ ID NO: 118572 - DNA, 1000 bp, Homo Sapiens
gcaaggacaggttccaagtgcccagcaggatgctgtttttgaattaatttccatgggatttaatgtagctttatggtataccaaatatgcttcaagactggctggaaaagaaaatataacagaagatgaagcaaaagaagttcatcgaagcctaaagattgcagctgggatttttaaacatttaaaggaaagtcatctcccaaaactcattacacctgcggaaaaaggaagagatttagagtcacgactcatagaagcatacgttattcaatgtcaggctgaagctcaagaagtaacaattgctcgagcaattgaactaaaacatgctcctggactaattgctgcactggcgtatgaaacagccaatttctatcaaaaagctgatcatactttatccagtttggagcctgcatattctgccaaatggagaaaatatcttcacttgaagatgtgtttctacacagcttatgcttactgttaccatggtgagactttattggctagtgataaatgcggtgaagcaatcaggtctctccaagaagcagaaaaattgtatgcaaaggcagaagcactgtgtaaagaatatggagaaaccaaaggacctggaccaacagtcaaaccttcaggacatctgttctttaggaaacttggaaaccttgtgaagaacaccctagaaaaatgtcagagagaaaatggatttatttactttcaaaaaactccaacagaagccccacagctggaactcaaagcaaattatggtctcgtagagcctatacctttcgaatttcctcctacaagtgttcagtggacaccagaaacattggctgcatttgatctcaccaaaagacccaaggatgacagtactaaacccaaaccagaagaagaagtgaaacctgtgaaagaaccagacatcaaacctcaaaaggacactgggtgctacatctcctaaaatacaacttgcacttagaatttctctagcagtaaataagataaaccacag

SEQ ID NO: 118573 - DNA, 1000 bp, Homo Sapiens
accagtctaaacacccaaggttgtaccacagagggagacctgctgtttgcccagaagtgtaaagaactccaaggatttatacctcctctcacagacctactcaatgggctgaagatgggtcgttttgagagaggattaagcagttttcagcagagtgtggcaatggacaggatccagcgtattgtaggtgttttgcagaagccacagatgggggaacgttacctaggaaccttgctacaggtagaagggatgttaaagacttggtttccacaaatagctgcccagaagtcatcattgggtggtggcaagcatcagctgaccaagcattttccaagccaccacagtgattcagctgcttcctctcctgcatctcctatggaaaagatggaccagacacagctaggacatctagctttaaaaccaaagcagccttggcacctcacacaatggccagctatgaacctcacctggatccacaccactccaatttgcaacccccctctcagctccccaggtactatctcctttagccatggtcctttaggcactggaaccggcattggcgtcattcttttcctccagcatggagtgcaacccttcacccactctgccccaaccaccccagtcccacctactacagcatctcctgtcatccctggtgagcctatgaaactatctggagagggtcctcgttgctacagtttgccagtaactctgccatcagactggagctataccctatcccctcccagtctacccaccttggccagaaagatgaccataggacaccgggagcagcagagaagccatcctccagttgctgctgatgctcatcttctcaacctctagcccagggcatacagctgtccactgtgacttctactttgtgtaaatatttatgtatatatgtatttttactattaatgtgtgcatttgtgttgagggaagataaatcctttctgattaaagaaatttttttataccaaaaaaaaaaaaaaaa

SEQ ID NO: 118574 - DNA, 1000 bp, Homo Sapiens
atattcactgttgttagaaatgtttaagttgctgttctgtgatgaatctaaatcttttctcttgctaccaagctattgtcactgcagtgcattataccaaagagcgaagtcagtgccactgaaaatacagaacccattaatatcgtggctatctgattacatttatattccaagatgaaccttttttatatatgctaaaaattttggggaatatgttttgggatgtattatggagctaaaactctaacctcttaatagttttatagaacttaaaaattttttatacaattacccaattggtgatatgatcttaagcttttgtgtcagattatttaatatgatgacttcatgctttattatgccttattatggctgacgtattactgtggtgaaacaaaatatctttaaaagttaaaacatccagatatataagctattttttcctaaggataaagtacctttgagcatgagtgtatcacagctttcattaggaaaacttttcattacatacttgtttaaactctgtcttccagggtaaaaataataaggttgaatcattttattaaaaatactttttaagaaaataactatgaacatctgaatattaaagatataaaaatgcacataattcatatttcaggtggtatttgcattcagtgccttactggtattctcagaacattttaatgatttctaacatttcttaacagtcatagatatatacattttcattttttgtacttgaatattctaaataaaactgacatttactcttgacaaataaaacatatatttactaaaatgtgtttaattttcctttctgaaaactctcattttaaaaacgttcatttaattatgtatttgaattattttggagatgaggtattttatgagtattttcagacaatgaaacttattagtctgtgtcagattctgagcaatcatagagtcatctaagttgtaaataaaaccttgcatagcacaaaaaaaaaaaaaaaaa

SEQ ID NO: 118575 - DNA, 1000 bp, Homo Sapiens
gcatactataagatttttgataacattgacaggagtgtcatatattctcaaaaaatatgtcatctgttaattaaaggagtgggcatttgtgaagacaggaattctacatggaaagctgacatgaatgataaattcactgtagtgagtaattttggtaacaaacctaatgtgtgtttttttggtttgtttgatggacatcacggtgcctcagcggcagagttgacatcaatggaactcccagttttacttctccatcagctttccaaatttgatccttcttaccaaatgacaactgatgagcaacaaataatcaattccttttacactgtgtttagagaagaatacacagcaatagaagacctcttttctgccataaacaaaacagaagcagtgaggtgtgagtatgaggacacacacaaagcctttgcaaaagcattttggagaatggataggcttttaggtcttggaagaaaagaagtgtccagggttcaatggagtggctgctctgcagttacttgtatattggaaggcaaacctaaaagtccttatgctcataagaattggaaaagaaaaaatacccatgatgggttggcagagagctccccttccaggagatgccaaaaataatttctggaatattacatgttgcaaacactggtaccaggagaaatgaacatttgcctgaatactatggctaagcatcataaataactttagaatctccttctaaacaaagaatgtttttgaaaagcccaaattaatgtgattctgggtgtcatctgtcacatttgtaaaatgagtatattatcacacaatccttcgcaactgtgccagcacttccctagcaaactgcaaacttgagtttttcaggaaaacagtttacatgagaaaaggcaagttctttcccatttcgaatgaagtaccattaaactctgtcacctagtgaaaaataataaaaatacttgcaacttttaaaaaaaaaagaaaaaaaaaaaaaaaa

SEQ ID NO: 118576 - DNA, 874 bp, Homo Sapiens
ggggtacgcgggcaagatggaggcgactacggctggtgtgggccggctagaggaagaggcgttgcggcgaaaggaacggctgaaggccctacgggagaaaaccgggcgcaaggacaaggaagatggggagccaaagaccaagcatctcagagaagaggaggaagaaggcgagaagcacagggaacttaggctgcggaactatgtcccggaggatgaggacctgaagaagaggagggtgccccaggccaaaccggttgcagtggaggagaaggtgaaggagcagctggaggccgccaagcccgagcccgtcatcgaggaggtggacctggccaacctcgctcctcggaagcctgactgggacctcaagagagatgtggccaagaagctggagaaactaaaaaagcggactcagagggctattgccgagctgatccgtgaaaggctgaaaggccaggaagacagcctagcctctgcagtggatgctgccaccgaacaaaagacctgtgactccgactgaggcatgccctgccccaccactcgcccatcaggcctgtcctgcaggggatggtcttgggcagggatgggggctaggcttgccatcacctccagtttggcttctgagcagagactccctgcccatcaagtctgaaacccccatggatgaggtcagctccttgtctgctgggtggcccctgccattctgaatggaggcagaaccagcaacaactctgggcgtgcctgtgtctgcacatgtggatgtacatatgtctgtatatatgtatatattttgaactttctaaaaaaaaatctggaaatagaaacaagtaaacccctgtgtgtggcgaaaaaaaaaaaaaaaaaaaaaaaaaaaaaa

SEQ ID NO: 118577 - DNA, 1000 bp, Homo Sapiens
gtcctcccagacaccttgaaaataaccaattcaccccagaagttaatcagctgcagaagggaggaggtggatgcctgtgccacggctgtgatgtctcctgaggaactcctcagggcctggatctcataggtttgcggaagggcccaggtgaagccgagaacctggtctgcatgacatggaaaccatgaggggacaagttgtgtttctgttttccgccacggacaagggatgagagaagtaggaagagcctgttgtctacaagtctagaagcaaccatcagaggcagggtggtttgtctaacagaacactgactgaggcttaggggatgtgacctctagactgggggctgccacttgctggctgagcaaccctgggaaaagtgacttcatcccttcggtcctaagttttctcatctgtaatgggggaattacctacacacctgctaaacacacacacacagagtctctctctatatatacacacgtacacataaatacacccagcacttgcaaggctagagggaaactggtgacactctacagtctgactgattcagtgtttctggagagcaggacataaatgtatgatgagaatgatcaaggactctacacactgggtggcttggagagcccactttcccagaataatccttgagagaaaaggaatcatgggagcaatggtgttgagttcacttcaagcccaatgccggtgcagaggggaatggcttagcgagctctacagtaggtgacctggaggaaggtcacagccacactgaaaatgggatgtgcatgaacacggaggatccatgaactactgtaaagtgttgacagtgtgtgcacactgcagacagcaggtgaaatgtatgtgtgcaatgcgacgagaatgcagaagtcagtaacatgtgcatgtttgttgtgctccttttttctgttggtaaagtacagaattcagcaaataaaaagggccaccctggccaaaagcggtaaaaaaaaaaaaaaaa

SEQ ID NO: 118578 - DNA, 1000 bp, Homo Sapiens
tatgctgtgctgcctcttgttggagagtaaacctgttttacagtgtgtgtagtatggaagcagcataataataagaatagctgttccttattgagccattactgtggcagacaccgtactataagctgtggtatcaccattatctcatttgaatctcatagtagacctatcagttagaggtatgtaaatgcttcctcctctcccagcacctttacagatgaggatgctgagccctagaggtgaagaaagttgtctaatgacagagtgcttgtaagaggtaaagccaagacttgaagctctttcttgcagttactggatttctcctaatttacgggaactaatacagtacagtagctaaggatgcaagtactgaaaccagaaatcttgcctcaaatgccatttctgccacttgagctgcgtactttggacaaattaatctcatctttcccatttgaaagtcagacataatgtcttccctagaggcttgtgaggattaagtgaggcaagtgtatgtaaatgggctgagatcagagcttggctcacaacactcagtaatgatcactgccaattttttttggtatataaataaataaatacactatttcccccatgtttccaatttttaagacattgtatagtgaatttattgtatctttctcagattaacaattgcacacagtgcttgaaatttagaggtatttcacctgaaaagatgtctagagattgaaagaaaacatgctgggcatatgatttgaaaatataaataacatgctatttaaaaataagtttaccctatgttttctatcttttctggcacctagatataccatttaataagtaatagcaaggataatcatttttttaagccctggaaaatcttgattaaagaggacatttcagtattgcaaataaatgcatggtatttgtgtaacattgtggaaactaataaacacaaattgtattataaaaaaaaaaaaaaagaaaaaaaaaaaaaaaaaaa

SEQ ID NO: 118579 - DNA, 1000 bp, Homo Sapiens
gctctactcgtgcggtgcttcttctccttggcatacagctcacagctctttggcctatagcagctgtggaaatttatacctcccgggtgctggaggctgttaatgggacagatgctcggttaaaatgcactttctccagctttgcccctgtgggtgatgctctaacagtgacctggaattttcgtcctctagacgggggacctgagcagtttgtattctactaccacatagatcccttccaacccatgagtgggcggtttaaggaccgggtgtcttgggatgggaatcctgagcggtacgatgcctccatccttctctggaaactgcagttcgacgacaatgggacatacacctgccaggtgaagaacccacctgatgttgatggggtgataggggagatccggctcagcgtcgtgcacactgtacgcttctctgagatccacttcctggctctggccattggctctgcctgtgcactgatgatcataatagtaattgtagtggtcctcttccagcattaccggaaaaagcgatgggccgaaagagctcataaagtggtggagataaaatcaaaagaagaggaaaggctcaaccaagagaaaaaggtctctgtttatttagaagacacagactaacaattttagatggtaaggttcacaaataggttgatttctttcttcagctttctgacatgtccagcccatctctaatgaggactcccagatcatcactttatggctgttaggtgtttcccatatgaaattagaggagctgggtcagggagacaaaagtcttctattagtcttatggatagctcctccttgagtgtattttgtgcaaaagattaagaagctggactctactgccattaaagctgagagaatcctaaggttatttgtggcttcggggttatatttattactactactactaataaatattcaacaagtaaataaatcttttttaaatcaaaaaaaaaaaaaaaaaaaaaaaaaaaaaa

SEQ ID NO: 118580 - DNA, 1000 bp, Homo Sapiens
aagcagggtgacggtttggtatccccacctaagaccctcccctttcccctgaggccagccgtcagcccctggcagggggtcttggaagccagaggtttttgctcagggcagggaaagggctgcaggatccccgggggctgccggaggtcggtctcactgacatcatggctgaccccagcatcgcctggtcccacagatgtcgccctctggtcgcctgtgtcttctcaccatcgttggcctgattctccccaccagaggacagacgttgaaagataccacgtccagttcttcagcagactcaactatcatggacattcaggtcccgacacgagccccagatgcagtctacacagaactccagcccacctctccaaccccaacctggcctgctgatgaaacaccacaaccccagacccagacccagcaactggaaggaacggatgggcctctagtgacagatccagagacacacaagagcaccaaagcagctcatcccactgatgacaccacgacgctctctgagagaccatccccaagcacagacgtccagacagacccccagaccctcaagccatctggttttcatgaggatgaccccttcttctatgatgaacacaccctccggaaacgggggctgttggtcgcagctgtgctgttcatcacaggcatcatcatcctcaccagtggcaagtgcaggcagctgtcccggttatgccggaatcgttgcaggtgagtccatcagaaacaggagctgacaacctgctgggcacccgaagaccaagccccctgccagctcaccgtgcccagcctcctgcatcccctcgaagagcctggccagagagggaagacacagatgatgaagctggagccagggctgccggtccgagtctcctacctcccccaaccctgcccgcccctgaaggctacctggcgccttgggggctgtccctcaagttatctcctctgctaagacaaaaagtaaagcactgtggtctttgcc

SEQ ID NO: 118581 - DNA, 1000 bp, Homo Sapiens
cgggcacgcagaagggccccttaaaagtttctctttcatctggccagttttagatacacaattttgtcagtttacttacagtgcatactcttgggtagtacttgtgctgaccaagtatcttagaggcttattttattatagtagccaacatttatccagcacttaccttatataaagggctgtttgtgcatgagctcattaaaatcgtgacagcagaccaatgagtgagaaactgccccattttgaaggtgaggaaattgaggttctgggtataactttctttggtcacataatattaaattttacaatttgagccttgagccatacacaaaaccaccacaaaattagatttatagactcaaaatgaaaacatcagcttactggtttgtagttcataccagtcatacattccaaaacatgttttgagtcttactctgtgcctgaccttgtgcttgataacagggatataatgggaagcaacactccagtggtcagatgctcacagtcttatggaggagcccaaataatatctggggaagttaaagtccatataatgactgataagagtacaatacaggtgccatgggaacacgtgacatcactgaagactgcctggaaggggccgcgcgtgtgttcatgcctatacgataaacatgatacataatgaaaatgcttatctttaggagaaaggagagcctagagtagcaggatcaaggatgaaagctggacttcaaatatgccttgttagtgtaaatgtgactgtggaactgtatgagtattttaagattatggagtaaagtaagttttaaaaagcagtccctaatcatcaaaagtaaaaaactcttgatgtagtcatataaccacactaagaactcttccaggtgacttcaaaacataggacagtacatctctagtagaatatgccctgagaatgaaaagaatgtaacagtgttagtattttgaataaacatgttattactaaaaaaaaaaaaaaaaaaaa

SEQ ID NO: 118582 - DNA, 914 bp, Homo Sapiens
acttgtgtccgggtggtggactggattagctgcggagccctggaagctgcctgtccttctccctgtgcttaaccagaggtgcccatgggttggacaatgaggctggttacagcagcactgttactgggtctcatgatggtggtcactggagacgaggatgagaacagcccgtgtgcccatgaggccctcttggacgaggacaccctcttttgccagggccttgaagttttctacccagagttggggaacattggctgcaaggttgttcctgattgtaacaactacagacagaagatcacctcctggatggagccgatagtcaagttcccgggggccgtggacggcgcaacctatatcctggtgatggtggatccagatgcccctagcagagcagaacccagacagagattctggagacattggctggtaacagatatcaagggcgccgacctgaaggaagggaagattcagggccaggagttatcagcctaccaggctccctccccaccggcacacagtggcttccatcgctaccagttctttgtctatcttcaggaaggaaaagtcatctctctccttcccaaggaaaacaaaactcgaggctcttggaaaatggacagatttctgaaccgcttccacctgggcgaacctgaagcaagcacccagttcatgacccagaactaccaggactcaccaaccctccaggctcccagaggaagggccagcgagcccaagcacaaaaccaggcggagatagctgcctgctagatagccggctttgccatccgggcatgtggccacactgctcaccaccgacgatgtgggtatggaaccccctctggatacagaaccccttcttttccaaattaaaaaaaaaaatcatccgaaaaaaaaaaaaaaaaaaaaaaaaaaaaa

SEQ ID NO: 118583 - DNA, 1000 bp, Homo Sapiens
aaaactgccagatatatttcagagttatgatcgattgctaataacatcttggggtcatgatcctggagtagttcctacctcaaatgtgctcacgatgttgaatgatgctttaacacattctgcagttttaattcaggggcatggtctgcatgggataggagaaactgtccatgtcccatttccatttgatgaaacagaactacaaggagagttcactcgtgtcaatatgggtgttcataaagcattgcagatactaaggaacagagtggacttacagcatctctgtggatatgtcaccatgttgaatgcttccagccaacttgcagatagaaaactcagtgatgcttctgatgagagaggagaacctgatttggcttctggctcagatgtaaatgggagtacagagtcatttgaaatggtcattgaggaagcaactatagattcagcaacaaagcaaacctctggtgccacaacagaagcagattgggttcctctcgagctgtgctttggaattccactgttcagttccgaattaaaccggaaagtttgtaggaaaattgctgcacatggcctttgcagaaaagagagccttcaaaacctcttacattccagtagaaaactctctctgcaagtccttaactttgttcactcattccaggaaggtgcttcaatattggatattcacacagagcccagtttttcaagtttgctttcacagtcatcgtatgctgacatgggtgttccacttcctgcaaaaaacttaatatttaaagatggtgtcttatcagaatggagtggacggtcaccttcctcacttcttattgctaatctccatttgcaataatttggttacaccatttgttgctcacactttctgccttttttctttcttaacgttagctttatagtgtcagccactaaaaagcatcctgctgctgcagtgcaattcttgcttaactaatattaaaagttggggaacataaaaaaaaaaaaaaaaaaa

SEQ ID NO: 118584 - DNA, 1000 bp, Homo Sapiens
gttagggaggagtccatcctcctcaattttttggaatagttttggcaggaatggtaccagctcttctttgtatatctgatagaattcagctgtgaacccatctggtactgggcttttttcagttggtaggctatttattactgaattaattccagagcttgttactggtctgttcagagattcgatttcttcccggttcagtcttgggagggtgtatgtctccaggaatttatccatttcttctagatttcctagcttatgtgtgtaggggtgttcataatattctctgatggttatttgtatttctgtggggtcagtggtgatatcctcctcatttctgattaggtttattttgatcttctctattctgtgttagtctagctagcagtttatctgttttattaattttttcaaaaaaccagctcctagattcactgatctttttgaaaggtttttttttggtctcagtctccttcagctctgattttggttattgtcttctactagctttgggcttggtttgcttttgaactttttcatttcaattctattacttctaattcatttaaaagttgtcctcaattcagttaaaaaatgaaaagttaagaacttaaagattcttcacaacaaattatgaagctgaaggaccaatatagtcagaccattttcttaaaacgttacatttttgtgaataattttatttattccatgatgagaatcgatcattaatatgagtaaccttcttctcaaaacaaccagcttttaaagaaggtgaattccaataccaaaagatttttattacttctttttggagtcttttttctatctcttctgaatatctttagccatggccttgttacagttcaagaatcatcttttgcctggactacagcattattttgttctaattattttaaatattgtgttttacatattttggttctcatattaatcttgcttttacattttttggttcataaaaataaaaaatgtttttttg

SEQ ID NO: 118585 - DNA, 1000 bp, Homo Sapiens
tagttctgtccgaacacatgaaagaactcatactggagaaaaaccctatgaatgtaaagaatgtgggaaagcattcaattatgccagttccattagaatacatgaaagaactcataccggagaaaaaccctatgaatgtaagcaatgtggaaaaacgttcagttattccagttcctttcaaagacatgaaagagctcataatggagataaaccttacgtaaagaatgtgggaaagctttcatttatcacacaaccttcgaatacctgtgaaaatgaatagtggaggacaggtctacaagtatctacatatctaaagaatatggaaagtcttcagtttgctttctgggtttcagacttgtttgggagctcacccctttctcctgtttctcacttttggaataggaatctctatcctgtgcctgtctcatattttggaaatacatgactagtttggttttcaccggttcggagctgaagaagaattttgcctcagcatgaattgagtctcatccatatctgagtgatgtgatattgagatgacactttggagtttgagtttaaacattaggcttcatgctggaattaactgagacttttgaggcctttgggatgagatgaatatattttacatgtgatgacatggattttgggggccagaggtgtaatgttttggctgagtgtatgccacctcagattcatatgttgaaaccttacccccgtgccccccctctcccccacaatgtgatggtatttggaggccctgtctctggtggtttttaggattggaggacatcatgaagatggaggccttgtaattgggattagtttcctgataggaatccctagagagctagctttgcccttcaccatgagagggtgcagtgagaagatagctatctttgaaccgggaagcaggcccttaccagacatggactatgccagtgccttgatattggacttcccagcctcccaaaccatgagaaataaatgtttgttgatt

SEQ ID NO: 118586 - DNA, 1000 bp, Homo Sapiens
cctcaacagcgagggcggcagcctgctcgtgggagtagaggacagcggcctggtgcagggcatccgctgcagccaccgtgacgaggaccgcgcacgcctgctggtggactccatcctgcagggcttcaagcctcagatctttcccgatgcctacactctcaccttcatccctgtgatcagtacctcggagaccagcgtccccctcaaggtgatccgcctgaccgtgcacacccccaaggcccagagccagccgcaactctaccagacagaccagggggaggtgtttctgcggcgcgacgggagcatccagggcccgctgtctgccagcgccatccaggagtggtgcaggcagaggtggctggtggagctgggcaagctggaagagaagatgaaggcgctgatgatggagaaggagcagctccagcagcagctgcagcagcacgggcctgtgtcctgcacctgctgtgtcctgtgagggccctggggagcaggcaggacggcacggcactctccacctgagacccagggatttcctgtttgagtgtaaggccaaccagtaaagcccatgcgggctgctgagaggcggacagggactccttcaacatggcacatgagcaggcacccatgtggcttcaaccctgacagacccatctgtgtagccaagaaactgctctcagccctgtccccaaatgaccttactttcagaaagaatgtgtaaaaccctgcccagagctcccctagggctaagctataagggattgtccttctccctaaaatgctcatttggcccaggctgaggtctgtgactccagttggctacacagtgccagaaaggaatctgtcatctcaggaaagcccctcaaagatggcgaggcatatttgatgactgtggttacagggcaagaggccaccctgcagcccccacccctgacttgctggaacttgtgactgtcaaagctccattaataaattacatgcacctggaaaaaaaaaaaaaaaa

SEQ ID NO: 118587 - DNA, 1000 bp, Homo Sapiens
aaatcagtagcaatgcaaaaatattctgattactttagccttatggatattatgctttgaagtcatgagtgggagttgccttaaatgttaaaatgaaaactttgtggttttaacagctaattcttttgctttctgtaaatgtctactaaagaatctagacttttctctatggtctacagtgttgtcctagatgaacattgttgcctttctttcacagagccttcagagggaaacattcccatccattgttcctggaaaggtgatccctaccacgggatcccaaacttggatagagccagttcaacctcccccaatccatacacatacatacctaggtcatcctatcacccaaaagagggacaaacatctgacttggacagctgaccagtgactgatcagattctctctctcttgagagcatgaattaagagacatggagactgcagtcacttgggagtagacacctgaaactaaaaagtcaaacttcattatgcagctagtttgacttggtttctcttcctgttcaaaggaagaatgggtagaataaagatttgatgtggtctggccccttgtctatgatctttttagcttgatttcttgaaatgctgcttcttccctacccactgtaactggcattcccatagtactgaggtactagagacctctgagatctgcacacatggttccctccacccagaaaactgcccttttctttctctcatcctacatagctgcctggcaaatccctagtcttcatcagctcacatcacatttccatgacaatcccctttgattcctcagaatctggccttcctttatagcactggtcatattgtattgtgcatatctggttatttgcctgttttccatgaacatttcaagcttatgggggagaagacactgtatacattttcatctgcattccttagaatctgcataacagctggtatagagaaggtactcaaaaaatccttaatgaataaagtaatggatcgtaccc

SEQ ID NO: 118588 - DNA, 1000 bp, Homo Sapiens
tacagcagcataacgcagagaaggatagcctagtccgagaccatgaacgggaaattgaaaacctggaaaaacagcttcgcgctgccaatatggagcacgaaaatcaaattcaggagttcaagaaacgagatgcacaggttattgccgacatggaggcccaggttcacaagttgagagaagaattgatcaatgtgaactcacagcggaaacagcagctggtagagcttggtcttcttcgtgaagaggaaaagcaaagggctacaagggaacatgagattgtcgtcaataaactgaaggctgaatcagaaaagatgaaaatagagctgaaaaagactcatgctgctgagacagagatgacactggaaaaggccaacagcaagctgaagcagattgagaaggaatacactcagaagcttgccaaatcttcacagatcatagcagaacttcagacaaccatttcctctctgaaagaagagaacagccagcagcagcttgctgcagaaaggcggctccaggatgttagacaaaagtttgaagatgagaagaagcagctgattagagataatgaccaagcaatcaaggttttacaagatgaattagaaaaccgttctaatcaggtgcgatgtgcagagaaaaaattacaacacaaagaattggagtcacaggaacagataacttacatacgacaagaatatgaaacaaaattgaaaggattgatgccagcatccctaagacaagaacttgaagacaccatttcctccctaaaatcacaggttaattttctgcaaaagagagcttccatccttcaggaagaactgactacatatcaaggcagaaggtaactgcacgagagaatgcaacggatgcaatttccaggctgtgctgtggacttcttccagcaggtttgaagatttggatattgtaaactgtgagatcagtggcattttttaaatccttaaatgtaattaagatcataaaaacatgcatcattcataaaaaa

SEQ ID NO: 118589 - DNA, 1000 bp, Homo Sapiens
taaagcaggagaattgcttgaacctgggaggcggaggttgtggtgagccgagatcgcgccattgcactccatcctggacaacaggagtgaaactccgtctcaaaaaaaaaaaagaaaaaaaagaagtacaagagtataataccttcatgacagtacagctgactcaatccggaccacgtgtcaaggtgtaatctcgaccttgaaagctcattatctgagaaggacttttcagcacatcctagaagcagcggatggtgaggacacagctatgatcagggaattttggagaaactacagcatcatggatgctgtggacatggccatcgcatgggaggagctcaaaccagcactaatgaacagcatgtggaagaagatttggcctgagtgtgttcaggcccagcgtttttcccaggcagataacattgcacagcttcaaaaaaacattgtgacccttgccagaaatgtggcctttgaagaggttgctgaggctgctgtggaccagttgctgcagtcccatgaagaagatctctcaaatgaggaactgatgcggctggaacaggagctggcagtgggggaggaggagagggaagatggtccctgggcactgtggcagctaaccacaggaagactgtcggcagccctctcacattttgaggctggcttgtaggtccttgctagtaacagccctaatgatgactggaaactgagaggttccagagaaatcagtgttgcagtaaactgctagcaggagctgtacaatgagaaaaagcgccactcaaaacaactctcttaggtcatttttcaatgtgtgtaaccaaaagttaatcagaataaagcggaagcaccatgatgacctcaacagtggaggcccagccaggcctccctgctctgtggtgttggacatccctggaaaccttgctgttggtatttccattttgatacttgagagcatcaaattttgtcattaaaatgttatttaaataaaaaaaaaaaaaaaaaa

SEQ ID NO: 118590 - DNA, 1000 bp, Homo Sapiens
tgggcagggacggggtacagaggatagtgtgggtcagaggtgccagtagtataatattcatctccctggagttatgttgaaggcagagttttcatagggttagattttttttatccttttctagttcagttaattcatcctgttgaattgcaccatcgtgaaagatgggaaaaatcgtgatgatgggtaaggggaaaacttcccggaaggcaatggggcaaggaaaaagaaagcctatgggaaatggctgtgctcccaacatagctttgcagatgatgtgggtttttttttttttttttggttgtttgttttgagagagagtcttgctctgtctccctggctagggtgtggtggtgtgatcttggctcacggcagccttgccctccctggctcaagcagtcttcatctcagcctccagagtagctgggactacaggcatgtgatatgatgctcggctgatttttgtttactttttagagagatggggtcttgccatatttgccaggctggtttgaactcctacaactcaagcattcctcccaccttggtctcccaaaatgttgggaccacgggtgtgagccaccgcgcccagctagctcctgtgttttgtttttgttttgtaactttggttgatgttaaggccctccattttggaaagcaggaaaacaggatttttttttttttatcttgttccctggaggatccagggatgaggatagagtggcctgagagcagtgcttggattcagcctcctgctgggtccttctgctggatacaggcaccaagaggcgggggtggagcagggagctgcgccttcctggggtgcccggtggtgtgtagagaaaagctgcttgtttactccttaagtcaatgtattggtgactgttgatttgttgaacaattcaggaatcaagggctgtggagaaactccctcatgttgttggcaacaggtgaatgaacctagagcggtgacatgaaaataaagctcactgttactcgc

SEQ ID NO: 118591 - DNA, 1000 bp, Homo Sapiens
tggaagtgggtatatttgaggttatatctcatttagttatttgtttactgttggcaccgaattcaacaatgaagtatatgcaactcttacaaaacataaattttaataatattctaatgcaaattactgaaccctcagtgcattaaaattatttcctaatttatgagcctcttagtttggaggttgcttgaagccacaaataaaactcaaatgagagtcagttctttgtcccactgtagtttgcattttgtttagtttggttttagctctactaaggtttcacatatgtggctattgccacattcctctactgttttctttctgatactggacatgctagtaacttggagaggagaataaaagaatgtctcctggaattttacattcccattaatgtcctcattcaattggcagacctaggatgtatggttaactctcaggccattatgtttttcatggcccatttcccaaactgcattgttggtaggtgccttgctaagctgtaatgcagtgaagaagatggtggggcatttttagtaattggaactgtaacattaatctacaagattgaaccggggatgtctggatgctgacaagggagagccaagtactgttaatgccatcaatcctctaggaaggaattggtggtttttctgaagtgtgggggaaagggtggtttcttgctggatttcatggccagtaagtaaatttaaatgcttcatttttaatttggatgtttctgctagagacctttgatttggaaattagttattttgcatgtttgtcaactgtatatgtatgaaaatagaaaaaaaacatgctttttgtaaaaacccctaagatttgtatatgttcatctttaggcttctgaaagggagagaaatcatattggaaatcagtgttggtgttctgaaatctgcttgtaaaactctcatctcattttacattgatattaaaacattttaacactaaaaaaaaaaaaaaaaaaaaaaaaaaaaaa

SEQ ID NO: 118592 - DNA, 1000 bp, Homo Sapiens
ctgttgggccgcgagcttatggccctgggcagcgacccccgggtgacgcagctgcagttcaaagtcgtccgcgtcctggagatgctggaggcgctggtgaatgagggcagcctggcgctggaggagctgaagatggagagggaccacctcaggaaggaggtggaggggctgcggagacagagccctccggccagcggggaggtgaacctgggcccaaacaaaatggtggttgacctgacagatcccaaccgaccccgcttcactctgcaggagctaagggatgtgctgcaggaacgcaacaaactcaagtcgcagctcctggtggtgcaggaagagctgcagtgctacaagagtggcctgattccaccaagagaaggcccaggaggaagaagagaaaaagatgctgtggttactagtgccaaaaatgctggcaggaacaaggaggagaagacaatcataaaaaagctgttcttttttcgatcggggaaacagacctagatccaaggccacaagtaaggctatggctctgattctagaagacaaccttccaagatgcctggcaaaaccacctccctgtgccacacagacacactaggcctgtgtatttatttccccttcaaagcagactgaggagggaggagacgaggttctcttggcatcactttctccctggctgcagaactagacacccttgaagatttggcctgggccagtgagactgaaatcaagaaaaacagaagggatgtgcagggtgggggggtccacttcctgctcccatgtcaacccccagggcctccagtgtgcagacgcgtgtcctactcatctgctcccacggatgaccctggtcttcaatggttagcagaagggagaaaagaaagcaggaaaatgtgctattgagattccagtggtgacttcactgatatttagtgaatatttgatttagccaacatgcctttctttatgtgattttgtattaaagtaaaatgatttttatactttc

SEQ ID NO: 118593 - DNA, 1000 bp, Homo Sapiens
ggaagcagaatcacttatgtgaaaggagacctttttgcatgcccgaaaacagactctttagcccactgtatcagtgaggattgtcgcatgggcgctgggatagctgtcctctttaagaagaaatttggaggggtgcaagaacttttaaatcaacaaaagaaatctggagaagtggctgttctgaagagagatgggcgatatatatattacttgattacaaagaaaagggcttcgcacaagccaacttatgaaaacttacagaagagtttagaggcaatgaagtctcattgtctgaagaatggagtcactgacctctccatgcccaggattggatgtggtcttgatcgtctgcaatgggaaaatgtatctgcgatgatcgaggaggtatttgaggcaacagacatcaaaattactgtgtacacactctgaaccagtgaacattttggatgtttccgtgttctcctgtgtcatctctactgggccataggaccgggcaaacctaccttaaaataggcagaggaaagtttcatgagaagtagtgtgtttaacaagacagactttggttgctgtattcaagtatttggattatgactgtggaggagggcttgcttaagatatgtggttgtgtttttttgtggaaaagtaaggagttaggtggcttgataataggcagggaaaccagattgtcgggactatgacctttttctccagtatgctacctgatttgtttggctggccactaggtggcagcattggttctacttctctgctttttaagagaaatttcaggaaggatgatcattccagttagtttggcattttttgtcgtttgtgcacataacttggtgttatccttatgtcatcagattcctcctaggggagagtttttgttttaattacaaaattaaattctacattgttaccaagaaatttgtggtgataaaaatggaaaaataaaaatttggggagttaaaaaaaaaaaaaaaaaaaaaaaaaaaaa

SEQ ID NO: 118594 - DNA, 1000 bp, Homo Sapiens
attcaggttcaggggctggatggtatgtgtttctgctgccttattcaatccaccacttctctgtgaaacactctaccttgtttttggtttgattctactgatgtcagggtttagccggtagaaggagtagttcagtttgtcaattcaggagaaactgtactggtcagtcacatcttacggcgaagggagagggaccttaggggagcagagaagacaggcaaagttgtggactgtttgatcttgtattacccacaggaatgagggcagctaaacccatagaaggagttggaccaaggcgaattacgagtcctggtcccagcagtatgtgtgctgacttctgggtgccccagaaatagacctctcctgtagagtggtgatatacagaatgagtttcagtttgcattgcagctgggattgaaagtaatcagtcgtgagcaggcaggcaggaggtcctgttagccctgccttccaggaaggttggggtgggagttttgagtgggaaagaggatgacatgtgtgagagagttctgagcctgtttgctagggagagtgagtgagtgctcttgggcactgctcaggccgtttctgctgacttgcctggcttacaataaatgcccaataaatatttgttgaccatatgtgttgtacactgtggtgccctgtccagtcccctctaccaagctgagacccccatccccagctgctctgagtttgggctgcaagtgctcacagctcttgttctccagaaactggagaattgccctcaggagatgagagccatctcacctcacccaggagtcacttcctctctacaccccaacacctggttcatttgattaaagcggagaaaactccagggtgctatgactgctctggcacccttggatcaggccaagctagactttttctgagccttcatccgtgctaagctctctcccttctctatcctgtttcattccctccctcaaaggcgtttcccaaataaatcacactgtcaatc

SEQ ID NO: 118595 - DNA, 1000 bp, Homo Sapiens
gatggccatcctgcggttcccttacgagtcctgggggaccccgttccagcagctgaagcaggtggtggaggagccgtccccccagctcccagccgaccgtttctcccccgagtttgtggacttcactgctcagtgcctgaggaagaaccccgcagagcgtatgagctacctggagctgatggagcaccccttcttcaccttgcacaaaaccaagaagacggacattgctgccttcgtgaaggagatcctgggagaagactcataggggctgggcctcggaccccactccggccctccagagccccacagccccatctgcgggggcagtgctcacccacaccataagctactgccatcctggcccagggcatctgggaggaaccgagggggctgctcccacctggctctgtggcgagccatttgtcccaagtgccaaagaagcagaccattggggctcccagccaggcccttgtcggccccaccagtgcctctccctgctgctcctaggacccgtctccagctgctgagatcctggactgagggggcctggatgccccctgtggatgctgctgcccctgcacagcaggctgccagtgcctgggtggatgggccaccgccttgcccagcctggatgccatccaagttgtatatttttttaatctctcgactgaatggactttgcacactttggcccagggtggccacacctctatcccggctttggtgcggggtacacaagaggggatgagttgtgtgaataccccaagactcccatgagggagatgccatgagccgcccaaggccttcccctggcactggcaaacagggcctctgcggagcacactggctcacccagtcctgcccgccaccgttatcggtgtcattcacctttcgtgttttttttaatttatcctctgttgattttttcttttgctttatgggtttggcttgtttttcttgcatggtttggagctgatcgcttctcccccaccccctaggg

SEQ ID NO: 118596 - DNA, 1000 bp, Homo Sapiens
tgacatcctctcttgtcattctcttctcccctttcccacagacttccctcctgggtccaggttcagaaccaagacttctgtacctagtgctgcctgattggtgaacattgacttcaagtagcatagcccttgtgtgactcacaactccgtgtccttcctaaagtttcgggaagcagggttgtctaatatgcacatttcttattttggtcatatttttactttagtgtcactcaccttttacaaagtgactttgtactcatttagggctctatcggaaatgcttccattttgccttttctacagttaggccaattttgaaatatataaattctatgcaacatttatgttgagttaccaatggaagccaaaagttctcttcccaaactgccaagaatgatacaggccataattgaaatgggaataccttttaagtttcattaggggtggggtgggagtgggacaggaacaagacttgcctagatctttgttgtatcttggggacttttactttgttgtttgatgcttaaacttcaaaattctctgtattcaaatttgattgtggcgaatctacttcaaaaaggaaaaataatccaactttgtggatattaaatggaaggtttgctgttttgatctagttgtttccagtggagcagttttatgaaatatgttctataagatgtacattttttcattgtaacatagaaattgtaaataattgattaaagtgctgcattttgatgaattttttctagccatttttaaagagaaaactaggaattgagtattttgtgtacggtatgtttccatcctccctccccttcctcctcccctcctctctctctcttcctacctatttaattttcatttgtcatgaggtttttggatttgccaatgatctgctggacatcatgccccatgtcatagagaataaagctgatgattgtaccagtcttaaattattcatgattcaataaaattgatgcttatttattcagaaaaa

SEQ ID NO: 118597 - DNA, 1000 bp, Homo Sapiens
aaaattagccaggggtggtggtatgcacctgcagtcccagcaacatgggaggctgaacaggagaatcgcttgaacccgcgacagggaggttgtgatgagccaaggtcatgccactgcactccagcctgggagacagagcaagactccatctcaaaaacaaaaacaaaacaaaacaacaacaaaaaaagaagttaaataacttgtttaagatcacacagctagtgcagttaccccctctcagtaattatgtttggcaaatatgaaatacaaggatctggcaaggttaggaagaggttaagaatatcagtgacagtactctgaggcatctgggcatgtcagatgaagatttattattcagaaaagttaagtcagctgttgcagggatcagttgttttattcctggaaaatgtttttcattttgctgcaaatctatatctgacctgctgaggaaatcgtttggtgaaatgaatccagaaagcagagaaaatgcttcattactttaaatagcagcattaagcccattatagcctctgaattgtcccttccttgagtttgctaatgcttccaacttagtcatttgaagcccaagagtctaattttatatgccctgccaatgtcctcatctattgcagaatgtataattatctatttgttttggactatatgttacaaaaatttaaaacataagatcctctctctatatttcattattggtgaacccacattgtgctgtgttttgtgatattttatcattttctagattcttatgtggatctaataacgaccacttgaacccagtttcacagaatccttatttttctgttcaaattaggaattagggacatggatgaaattggaaatcttcattctcagtaaactatcgcaaggacaaaaaaccaaacaccacatgttctcactcatagataggaattgaacaatgagaacacatggagacaggaaggggaacatcacactctagggactgttgtggggtgagggg

SEQ ID NO: 118598 - DNA, 1000 bp, Homo Sapiens
tccatgggtttccaacccccatcactggcaccaggatctcccacaggcactggtggtgtcatcacctgctggccccactacagcctgagtaggcctgagtggccgtggccaggctgagacctgtcaggccatactgacaagcagaggtcagagacactggtggggagctggcaatgaaaccctgtcctgggacatgggtttcatgttcttgtacacttcccctctgggatcaggtgaggggtccagacagctgaccagacagcttgacagctggtcaagacggtcacgggagctctaggtgggcacaaccaacccctctcctgggaggcccctgccccactggggataggagcctgtgtccctggtgctaagcactctcttcacttgggccattgttggtgggggctcctttccggccagaccacaaggccagaagcaataatggcacctcagcagttccagtatggataggggttcctgttttactagcttttacatctttttatttaaaacaaaacaacacaaaaaaacaatgtgcccccagatgtcagaatgaggcgactagggcaccatactcactttccagggctgggggaagggggacgcaggatcatcccctcccaaggagatctgtgggggtcccaccgtccatctggacttctcagcctgtttggctagaactcaggcctggagtctgggtctgccccctccccggctccttggggctctctggtctcaggccagctggcgatgggtggctagagtgatgaactcaagccctgtggccacagttctgggagccttcaaccctggctcatgctgccatagtctccacggtgcccttcacagagggcttggtagtggcagaatggccatgcccaggtgtgtgttgagaccattgacaactgctcgtgtacaggcaccccacagccccagagcatggggcacagcaggcatgcgagtgagaggatgaaggggaataaagtcagtacaactcgtg

SEQ ID NO: 118599 - DNA, 717 bp, Homo Sapiens
gcacgagggctacggccctggaacggggccatggagaagctgcggcgagtcctgagcggccaggacgacgaggagcagggcctgactgcgcaggtcctggatgcctcatcccttagtttcaacaccagattgaaatggtttgccatctgcttcgtatgtggcgttttcttttctattcttggaactggattgctgtggcttccgggcggcataaagctttttgcagtgttttataccctcggcaatcttgctgcgttagccagtacatgctttttaatgggacctgtgaagcaactgaagaaaatgtttgaagcaacaagattgcttgcaacaattgttatgcttttgtgtttcatatttaccctgtgtgctgctctttggtggcataagaagggactggctgtgttattctgcatattgcagttcttgtcaatgacctggtatagcctgtcatacatcccatatgcaagggatgcagttattaaatgctgttcttctctcctaagttgaaaatcagaaacttgtggaaaagagcacttgaatgttggtactctatgtttggtgaagtttgcttttccccataaaacactccaggaacaactgacgtgacagttgaagaccgttttgtactaagtctcattttgtatactggtaaaaactacatgcttgattaaaccattaaatgcttgtaactttaaaaaaaaaaaaaaaaaaaaa

SEQ ID NO: 118600 - DNA, 1000 bp, Homo Sapiens
gataccaacaaagaaagaagcatcaaaatgtcaagattcatcagctcttctgcatcccggccttcattatggtgtttctcaaactaccaccatcttcatggagaccatacatttcttgatgaaagtcaaggctgtgcagtatgtgcacagagtgcttgcacatgagctgttatgccctcaaggaggccccagctgtgaatattacttggtgctggcccaaacacacattcttaagaagaactttgccaaggcagaggaataccttcaacaagcagcccagatggactacctgaaccccaatgtctggggcctgaagggccatctctattttctgagtggaaatcattctgaggccaaggcatgctatgaacgaaccattagctttgtagtggatgcttctgagatgcacttcatcttcctgagactggggctcatctatctggaagagaaagagtatgaaaaggcaaagaaaacctatatgcaagcctgtaagagatcaccttcatgccttacctggctaggactgggaatcgcctgctatcggctggaggagctcacagaggctgaggatgctctttctgaagccaatgcattgaacaactacaatgctgaagtatgggcatatctggctctggtctgcctgaaagttggacggcaattagaagctgagcaggcctacaagtacatgatcaagctgaaattgaaagatgaggctctgcttgcagagatccacacactacaggaaacagttggctttggaaatccatctttctgatacccctccagctgaacaattttctgcatgggactctgagttcctttccttcccagagagttttaccgtatgaagcctggagctggagaacgaaagaatcttcactataaacagagacccattcatttatttccattggctgtgttactggatgttttactggttgacgagaaactgggtcacaataaaaaaatggagatatgaaactcaaaaaaaaaaaaaaaa

SEQ ID NO: 118601 - DNA, 1000 bp, Homo Sapiens
cttttggcagaattctccctctgttgtaattggtaggcatcaaaatccttggcaggaatgtaacctgaatctaatgagagaagaaggtataaaactggctcggagaagaagtggaggaggaacagtctaccatgatatgggtaatatcaatttgactttctttacaaccaaaaaaaagtatgatagaatggaaaatctgaaattaattgtgagagctctgaatgctgtccaaccccagctggatgtgcaggctaccaaaagatttgaccttttacttgatggacagtttaaaatctcaggaacagcttctaagatcggccggactactgcctatcaccattgcactttattatgtagtactgatgggacgttcttgtcttctttgctaaagagcccttaccaagggatcaggagcaatgccactgctagcataccttccttagtgaaaaatcttttggaaaaggatcccactctgacctgtgaagtactaatgaatgctgttgctacagagtatgctgcttatcatcaaattgataatcacattcacctaataaacccaacggatgagacactgtttcctggaataaatagcaaagccaaagaactgcaaacttgggagtggatatatggcaaaactccaaagtttagtataaatacttcctttcatgtgttatatgaacagtcacacttggaaattaaagtattcatagacataaagaatggaagaattgaaatttgtaatattgaagcacctgatcattggttgccattggaaatacgtgacaaattaaattcaagtcttattggcagtaagttttgcccaactgaaactaccatgctaacaaatatattacttagaacatgtccacaagaccacaaactaaacagtaaatggaatattctctgtgaaaaaattaagggaataatgtgattccaagtaaatgtcttaatacagtttcaattagaaaataaaatgtctcatacttgcacattgtatgtc

SEQ ID NO: 118602 - DNA, 1000 bp, Homo Sapiens
agcgtgtggaggagtggtctccccaacttcctagcagtcgccttggccctgggagagctgggctaccgggcagtgggcgtgaggctggacagtggtgacctgctacagcaggctcaggagatccgcaaggtcttccgagctgctgcagcccagttccaggtgccctggctggagtcagtcctcatcgtagtcagcaacaacattgacgaggaggcgctggcccgactggcccaggagggcagtgaggtgaatgtcattggcattggcaccagtgtggtcacctgcccccaacagccttccctgggtggcgtctataagctggtggccgtggggggccagccacgaatgaagctgaccgaggaccccgagaagcagacgttgcctgggagcaaggctgctttccggctcctgggctctgacgggtctccactcatggacatgctgcagttagcagaagagccagtgccacaggctgggcaggagctgagggtgtggcctccaggggcccaggagccctgcaccgtgaggccagcccaggtggagccactactgcggctctgcctccagcagggacaggtggctgccccaccgccctcatcctgacccccagccccggtagagccctgactgggagctagccccaagcttctctttccttacctcctccgtgcagctgtgtgagccgctcccatccctggcagagtctagagccttggcccagctgtccctgagccgactcagccctgagcacaggcggctgcggagccctgcacagtaccaggttggggggaggcccaccctgtcattctgccctgtgcgcccccgccctcaccctgcccaccgctcctgtcctctgctccctgcaggtggtgctgtccgagaggctgcaggccctggtgaacagtctgtgtgcggggcagtccccctgagactcggagcggggctgactggaaacaacacgaatcactcacttttccccacaaaaaaaaaaaaaaaaaaa

SEQ ID NO: 118603 - DNA, 1000 bp, Homo Sapiens
agcccctaaagtgcagcaaaacccactgcctccaggaagccaaggagaattatttctgggggacatagctgcctcatagcctactatgaatgaaccatcatctttcatgagaggcaaacattgaccctcaagtaaccaaccaatacgagcacctgtacacaaatgcccacaggtgttggctgggattggctggcttgtggatgatgtcacagtttccctcctctgactcaacaatgccatcagcactgaaaaggctgagccctgactacagctcttgcagacagaaaaattcgctgcaagtacagcactttctagattgctcctggagtgtgggaacaacagtctctcctgtccacgttactgaatccagaaaaaaggtgaacttacgaacatgggaaaagaaatccagctaaagcctaaggcaaatgtctcttcttacgttcactttttgctgaattacagaaacaaattcaaggagcagcagccaaatacctatgttggctttaaagagttctctagaaagtgttcggaaaaatggagatccatctcaaagcatgaaaaggccaaatatgaagccctggccaaactcgacaaagcccgataccaggaagaaatgatgaattatgttggcaagaggaagaaacggagaaagcgggatccccaggaacccagacggcctccatcatccttcctactcttctgccaagaccactatgctcagctgaagagggagaacccgaactggtcggtggtgcaggtggccaaggccacagggaagatgtggtcaacagcgacagacctggagaagcacccttatgagcaaagagtggctctcctgagagctaagtacttcgaggaacttgaactctaccgtaaacaatgtaatgccaggaagaagtaccgaatgtcagctagaaaccggtgcagagggaaaagagtcaggcagagctgatggatccagtttgaaaaaacaaaatgccattcaaccgtaaaaaaaaaa

SEQ ID NO: 118604 - DNA, 1000 bp, Homo Sapiens
agtggaaattactcaaacacgtattgtgccttcaatgagaagccttctcactgaaagagctgccctggacggaaaatgagtagtgagatgatgctggtggaagtatttatagatgcgcagtgcatgagtacttggcaaggatgctatcaaaggggaaactgacatcaaatgtgctgtggttctgggtgatttatctggtcccttcccatcccagagctttatgattctgtaataatcaagggagaaacccattacatagtggacaattttttttctttttttttctttttctttttttttttgagacagagtcttgccctgtcgcctggctggagtggagtggcacaatcttggctcactgcaacctccacctcccaggtccaagcgattctcttgcctcagcctcccaagtagctgggactacaggcacacaccaccacgcccagctaatttttgtatttcttttttttttttttgtagagatggagtttcaccatgttggccaggatggtctcgatctcttaaccttgtgagccaccgtgcccaaccctaacaattatttttaaaaggaggaatttaaatgagctgtggattattcattttgtcccataagaagataattaaaaaatgacaaaaatgaactgaacaaaaaagttctaacaaaataataaggctgaatttttaaagtctcttccgcatcttctgttccctgggatgccttagacggggtgtgcagtattttaggtacatcgtgagcaaggagcctgcattcccagggggcggcagggacagcatgtaaggtcttagtccagctctgtgatctgaaggcaaagcctctatgtgtgaaacacaggggtacctcaaaaatagaacaagagcactccatccatgtgcggatgactgtcaaggtcactgagacctacagtgatctggaaaattaaagctctctggccgcctttcctctcaggacatacttctggagatcaaaaaaaaaaaaaaa

SEQ ID NO: 118605 - DNA, 1000 bp, Homo Sapiens
atcttgccaggctcctctgccaactgtaggcctgcctcatccctgcactggttccaacctccctgcactaatgcctgcatcccctccggcctcttggccccctatccctgcacttctggaaacctccctgcactctggaaacctccctgaacacctccccaactctgcgctctcagcctccctgcatctctcctggcctccctgcacttcttccagccccccaaattctctggacctccaccctggccgcctcctcccaactttcattgtcttggcatctctcaaccctcagtcctctcttccttcccttctttatcatctcccctttcctctccacgtcccgcccccttcctcttcctgcctcctcatctcccttaagcatcctcttctccaacctcccgtcaccgtttactctgcaaaactgacagcacttagacgaggcttgggggcagggagcagtgttgggagagggctccccaaccccaggctcggactgttctctgctgggaccacccagggtcggacacccaagggtgcctggcaggtcgcagagttggcaagccgggcctcgtatggggactcgggtgagggtggcgagtactggttccgaacgcacgcaggggagaagggagggacgcggcgctgacccttccaggtcagctggagttgacccgcccacctgggcttttcaaccccagtccgcgagtttctttcttgaaggtgtgggggctagattcattcacgtgcttcgtaatgaaataatccaaaaaataggaccaaagcgcccactggcaggagcgagggcggggcgccgcgctctataattattttctaagatgatgggggaggtttgttgcacgcgacagcccgctgaggaggcggggaccgagctacaacgcggttcggatttggcgggggtttttttccttaaaaaaaaaaaaaaaaaaaaaaaaaagtctgggggaagaaaaaaactaaaattcttaaaaaaaaaaaaaaa

SEQ ID NO: 118606 - DNA, 1000 bp, Homo Sapiens
ggcagagggcaggggacagacgacccagaggtcccagcactgaatgagcaggcagctcccacctcctggcaggcttccttctgggacaggggcgacattgctgggaagtgctcaggaggtagccgaggcctgaggaaggagagcgccagctctgggctggacatcagcaccccacaacactcctcgggatgaagtgacccttgactagcccctggccatctctaggggagtcaggccgctggggacagatggccaggccggcctctcctgcctggcgcaggcaccgtggcccctgcagcggaaaccaaagtccccctactatgtgcggggcgcctggggactgagtggctaacgggaagcctccctgcttctctggggccagagcagcttccaggaagtgaagagacccctctccccagtgccccacatctttctctgggagacactcgcgccccctatcctggccagtgatggaggggtatctctacaggggtcctcggtctccatctacttccctttcttcatgtgtttccagccccaccctcagccagagccaggcccccaggcaggagcttcccagcgagcggcctcccctcacttcctcctggtggtcccgttgtctctgctgaatcagagctgagaacggtgccaaaatccaacgatgccccccaggccccttcctcccttcccccggccccccgggcctcatgaccctgggggctgcccccctcggtgctcccggagcctccagtagagtagcgtcacaagcaatctccctggcgcttcctgggtggggacccctgctccgtccccgcttcctagctgcccacttttcagtgttacgaagcctggggaccggggcaggcacccacggggctctccacacgccccctacactgcccgccaccattttgcacactgcctgttcacatgtcgcccaggcgggaaaaatggaaaataaagtgtatttacacagtcaaaaaaaaaaaaaaaaaaaaaa

SEQ ID NO: 118607 - DNA, 689 bp, Homo Sapiens; identical to SEQ ID NO: 31232

SEQ ID NO: 118608 - DNA, 1000 bp, Homo Sapiens
aatttttctatattttaaaaactacagtttccatgataaaaggaaaacgttttgatttatagtaccaagtgcttaaacacaaggatagtgttagattttcgagtgactttcctttttgcattttttggcagtaaaagccaaacgttgtatttgttcttttcagagttgtccagcccttttttcctttgtccaaaatgattctaaatagaatctaataaaccaatgtagcattatttttttctaaatgaagccccaaaaaagaaaagtgccttgcatcatttaaaaaaaataattaaatcctcatggcctctaaattagtatgtagaacactgaaaagttcttaacatttttgtgtaatttcctttctttttaaaccataaattagtttaaactgaaagtacgaggctggaagaaatattagtaaattatttggaatatagaatgtttactctttctttttatgttgtcttaatgattctgtgagattgttccggctcaaacagaagcttttctttggggaaggtgatttgtgggagactctagtgtattttaaattagcattttaatccattcttgacattcagttagtccagatctgccccataatttgctttagtaaagtcactttatggatttttggctatgttttagtttgtgtgtataaaagttctaagaaaacatttttgctattttaagtatgtaagggaagagaggagtgtttttaactttttatagttgatgactttagggtagcacaaacaaaactcctttgtatctaacttttctcaatcctctcttgaggtgctttactaatgggaatgatttctgtatgttcccttggtaccaagaggtactatgcaaagtaacctattacaccaagttacttgctttgctttcctctctatgatgtgataatacagtaaaagctttcttacccagcatagtgggagagtggagattaattaaaattgttaattaagagttaaaaaaaaaaaaaaaa

SEQ ID NO: 118609 - DNA, 1000 bp, Homo Sapiens
ctttaaatcatctctagattacttaaaatacctaatacaatgtaaatgctctgtaaatagttgttatactatattgtttagggaataatgacaaggaaaaaaaagcctgtacatgttcagcacaagtgaaaccatcctttttgcccccaaatattttcaatttgtatttggttgaatccatggatgcagaactcacggatacagagggccgactgtactttctttaaagtgttcaaaagtattactagcaaagaggaggaggagcaaagcatatatcagaagtaaaacaatttttcttgttgactgctttggtaaaaaacagtttgatggatagttttacatttcactggactagataaaaaatggtgctaatatttatgtagcttgatgctatagttgctttggtatcaaacttaatacctaacccatataagatccttattatataattttgtgatcagtaaaatgatattttaaagagtgatcttaaaaatatgacctggtcattgcacaacgtttgcatttgaaatgaatttttgtactatagggtggatatggagttattcagtgcaagtgtgtgcttaatatcaaaccctatgcaaggagctatgtctagatttttggtccaaatttgcctccttcaagcctactagtgtgagatggaaaaaaatcgattgctcttttaatattatttccattttgaaattctcgacacttgaatgaaggcagtagaggcctctttttggatttctcttctaataacaaaactttatttagggaaggtttccctgtgctatcgtaagtttgttttgagcactgcattcactttaaaattctggaggaacaaaggctgggcacataatcacaaagcccaggccacacaataattcggggttgtattttctaagaactatgtattgtttttagcttatagttaatattgtatttacttggaaaaatgtgaataaagttaattaacattacaaaaaaaaaaaaaaaa

SEQ ID NO: 118610 - DNA, 1000 bp, Homo Sapiens
catcatgtgatttctgatgaagaaataattcagaactggcatcttcctgaaagattcaaagcatgtaaccatcgacttttctttaatttctgcccagctttgagaaaggagaaaatgaagcatagtgaggtttaggaacttacccaatattggacagcaaatgagtcatgaggtgggatttcaacaagtctgcagtcaacattgcatcacaaatgacagacagtgcagagatttgagtgtacttttcacactgagtgtggaaagaggagaagaataagtgtggaaatactcctctactattttgaagctggataactgggacagaaaagaacttatttaacagaaatggcagcacttaaagacttttggtgaaaagataagtttggtcatacttctttgaggcaggatattaaagaagaaataataactagacattggaaatgaaaaacaaaaattcagaaatagtgttctggacttgattgtaaattcaggagtatttgcttggggtcatagttaaagcctagttctctcaggtaaatacagggatcaataaaggctgaaaactaaggacacaaccttggggcactgtctcattttgtgggtagaaagcagtgtaaccaatgaagataaaggataattgatctcagcaggtaagagtaaaaaaaaaattaaatagaaaagaaaaaaacatattggaagaattttttatggtaaagaggatgtcgcatctttagaatttcaatagcttgcagttgttggacatgaaattgtggtgggttatatataactgccaagtatagaacctttactgagaatattttggacagaagaaaaataaagctttaactataggaaatagaatttatgaaagatttattaaagtgaagtggtacttgcctcactttaacttaccaaatatataacttaccatatttataaactgaggataaatgagttttgattagaaagagaaaaaaaaaaaaaaaaaaaaaaaaaaaaa

SEQ ID NO: 118611 - DNA, 1000 bp, Homo Sapiens
tagctgaggcccagcggcaggccgaggcactgggctaccaggctgtggtgctgagtgcagccatgcaaggtgatgtaaaaagtatggcccagttctacgggctgctggcccatgtggctagaacccgcctcaccccatccatggctggggcttctgtggaggaagatgcacagctccatgagctggcagctgagcttcagatcccagacctgcagctggaggaggctctggagaccatggcatggggaaggggcccagtctgcctgctggctggtggcgagcccacagtacagctgcagggctcgggcaggggtggccggaaccaggaactggccctgcgtgttggagcagagttgagaaggtggccgctggggccgatagatgtgctgtttttgagcggtggcaccgatgggcaggatgggcccacagaggctgctggggcctgggtcacacctgagcttgccagccaggctgcagctgagggcctggacatagccaccttcctagcccacaatgactcacataccttcttctgctgcctccagggtggggcacacctgctgcacacagggatgacaggtaccaatgtcatggacacccacctcttgttcctgcggcctcggtgatggcataggtcacattttgggagttcagaggaggcctacaagggcaaggtcagatggcagagcaaggttggtcctcagggcctctctaagccttagggcccctcctctccttggccttggctgtttggttaactgtcaccttccactcagggcctctgctctatatctattcccttccagccagactggcagatgggggcttccccctacccctgaggatgaggacaagcccctcggccagttcagcgttcccgtgcttctcccttgggcagcctctctcttgagcccctcaccctgtttctttctgtgaagcgagaatgtctgaaaataaataggaccatgccatgggtaaaaaaaaaaaaaaaaaaaaaaaa

SEQ ID NO: 118612 - DNA, 1000 bp, Homo Sapiens
tggtgaatgaaattaacgcgtatgctgctacagagaccccgcatttaaagctgggcctgatgaactttgcagatgagtttgccaaacttcaggattatcgacaagcagaggttgaaagacttgaagccaaagtagttgaacccttgaaaacttatgggaccattgtgaaaatgaaacgggatgacctcaaagcaacactcacagcaaggaatcgagaagctaagcaattaactcagttagaaagaacacgtcagcgaaacccatctgatcgacatgttatttcacaggcagaaacggaattacagagagctgcaatggatgctagccgaacaagtcgtcatctggaggaaactattaacaactttgaaaggcagaaaatgaaggatataaagactatattttctgaatttatcacaatcgaaatgttatttcacggcaaagctttagaggtctacactgctgcctaccagaatatacaaaacattgatgaagatgaagatttagaggttttccgaaattctctgtatgcaccagattattcatctcgtttagatattgtaagagcaaattcaaagtcacctcttcagagatcactgtcagctaagtgtgtatctggaacaggacaggaggctggctgggccgcaacttgccaaaccctgatctagagagctatgcccttttcatatctagccttcagaatataaaattcaacaaacttattttcaagatacaacttttaggtatccacttgtcgactaagaaaggatcaacaagcagaagatgatgaggatgacgagttagatgttacagaagaagaaaattttcttaagtaaactacacatttccattttcatcataaatgacttgaaatccacaatgactaaattgtagaactttatactcactttgctatgttaagcctcaaagtgaagtccaactggaaacagaaaaataattaaaggaaacttatgctgaccaaaaatgaaaaaaaaaaaaaaaa

SEQ ID NO: 118613 - DNA, 1000 bp, Homo Sapiens
tgcacccccacccggtggcgctgaccactgttgccttctccaccgatggtcagactgtcctctctggagacaaggatgggctcgtggctgtgagccacccctgcacagggacaaccttccgtgtgctgagtgaccaccagggcgccccaatctctaccatctgtgtcacgtgcaaagagtgtgaagacttaggggtggagggcacagacctatggctggctgccagtggggaccagcgggtcagcgtctgggcctccgactggctgcggaaccactgtgagcttgtggactggttgagtttcccaatgcctgccaccacggaggtaaaccatgctcctggcactgtgggtggggccggtacccatccaccccaccgcagcatgctgcgcctttgctgactcagggccacctggcaccctccctcgctgccttctgcccttgggatggggcgctcctgatgtacgtgggccccggtgtttacaaggaggtgatcatctacaacctctgccagaagcaggtggtggagaagataccactgcccttttttgccatgtccctgagcctgtcccccgggacccacctcctggctgttggctttgctgagtgcatgctgaggctggtagactgtgccatggggactgcccaagactttgccggccacgacaacgcagtgcacctgtgcaggtttacaccgtccgccaggctgctcttcacggccgcccgcaacgagatccttgtgtgggaggtccccggcctctgagatgcagcagggactgtggtggtgggcatcacgcctggtcatgccaggcacctggacacaggcttggcagaggcgccaggttgtcaatggcctcatgctgggacaggccaggattcacgtaaatcgcctggagcaagctgttgtaaatttggcgccctgtgaatactttcatacctgttgcccttttgcctaagaaatctttaatgtttctatcttgtaataaacatgggcatttattgc

SEQ ID NO: 118614 - DNA, 1000 bp, Homo Sapiens
agtaacctatcttacatgagattcggaagtaagttaagaaggcattagtcatggtttggaagcaccatacagggagacagctgtgtgaatacaggctgtatggacacttgcttccatcccattttcctgcttctttgggttgccaatcaagagtatcctcaaaacgacttgactttaattttctcggaggtgataggcttccacacaggtctccagaagccctgcattgaatatccatccacactttggttttccttcagacattattatgtctgtactaggcaactaattcagactgtcctggttgggaatattctgtgatgctctgactcccctagtctgtagacagaattggcatacggtctaatttgtgtagtaagcacctttgttcatactagtagtgactgtattcttgattcagcctgatagctaccatgctgctgtcaaaaccaaccagaggggagcttgttcttctactgtagtgtgcagtgactggcctcacccaggactttgatgtgagaatgagcactttcctctatcaggaaatttcaagtgtttcctgttattcgtagctcaatgtaatgcctcagttcattttcagttgtttgattatatgtgactaatatgtattttttattcaaacaagacttctgtacatgtttcttcaaaacagtttattaactgtcttcagtcttggattacatcaagtttataattttggcaaattgttaagacactgtgaagtcagcgttaaccatgtgcatacaacttaaggaattttttcctcctcatgtaaattttacttttcatgcttatatagtttcaacttttatcttcatagtaatttctcatctactcataataccaaaagttaagtcatgctgttttgtgtgctctcttgctaaagaccgcagagaccatacctgttgtcaaagagggtgtaataaactgtaataataatcatgaccacaaaccataaaggactgtgtgatgtatcagt

SEQ ID NO: 118615 - DNA, 1000 bp, Homo Sapiens
acctgccttttcccatctccccagcataacctaatattttttttttttttttgagacggaatttcgctctgtcacccagactggagtgcaatggcttgatcttggctcactgcaaactctgcctaccaggttcaagcgattctcctgcctccgcctcccgagtagctggaattacagacgcctgccaccacgcacagctaactttttttttttttgtatttttagtagtgactgggtttcaccatgttggccaggctggtcttgaactcctgacctcaggtgatccgcctatctcagcctcccaaagtgctgggattacaggcgtgagccactggcccggcggcacaaccaaatcttattaaactcaccctaggctggccgcggtgactcatgcctataatcccccagcaatttgggaggcagaggtgagagaatcgcttgagcccaggaattcgagaccagcctgggccacatgacaaagccccatctctacaaaaaaattacaaaaaaaaaaaaaacaggtgtggtggcatgcacctgtagtttaagctgcttggaaggatgaagtgggaggattgcttgagccggggaggtggaggctgcagtgaactgagatcacgtcactgaactccagtctgagcaacagatcgagaccctgcctgaaaataaatcaataaataaactcaaccgaaatgggtatgaaagttgaaatgggtatgtaagttgaaaaccagaagttttgagaaacatcctttgttaactttcatcctacaaattgggtcattcatgtcctacgcagctaaaacagagcccaggagccagggaggaaaagcagtcaggccacacaccattgctcccaaaatggacttctctgcaagcctgactcctgaaactgtgcattgtaccctgaaaccagctttatccatagcttctgcaataaatggctgtaagtcttggaaaaaaaaaaaaaaaaaaaaaaaaaaaaaaaaaaaaaaaaaaa

SEQ ID NO: 118616 - DNA, 1000 bp, Homo Sapiens
gacatgcttgtgtaattggctttgtttataatttttattttttaatatgggtcagacttttggattaaaaagtattatatcatggacatacattttttaaagtaccaaaggtatttggtaagcgagcccaagtcatgtaattgaaacttctgtacattaaaagaactgattcatgaagacgttttctaactttttctctttaagtgctcctctagactagactgattgaagtagacagtgtggtggaatcagtttaatcagaaaaagacataccaagtagctggtgctaattattataagactaacattctgataagccatggtataattaacattattaaaatgtttacatataatccttcttaaagtatactcttttaaaaatccattgacataaccttacttttagtttagtgatccagaatttccccagagcttaagccactgcagtaaattaggtacgtaggatattcagtcgctactagccacaaggagtctccttattttaatgtacctccctcagtactttattcctgcagagcgcctcagagtgggggagagaaatgagcaatcctggctcagttggattatttcagcattttatttctaaatctgtagtgtgatcagaaatatttaaaattaaaaaaatactttacagagagaggcctactaatcaatgtgcttagagaaacaaactacctttacattcaattaacaacaaaaaaagttacagaaattttaacaaacatttttctttatctgagtatgggagaaaatactaatgctgacacgtttaataattagaaaagatcattccagatcttatggaaaattgtgttttaaattccagcagtttgctcttgagacatggtaatctcttaatgtaactactaaaggagaggtagattgaaaagatcttgtatatacataattatgtcagatggttcaagatatcaaaataaattgttttgttgaaaatgaaaaaaaaaaaaaaaaaaaa

SEQ ID NO: 118617 - DNA, 1000 bp, Homo Sapiens
ggaggcaaaggggagagaggcttccaaggggcccatcatttggaaagggaaaaccagcttctgttgccgtggcaactccactgggatgctctgctatttgcacattttgaaattggaggtgggtagtgagaagggaaaaaggaaagaaaaattgagggagatgagagtatccagggcaaaagaaaggagagaaaagcaaatgaagtttaggaaaaatccagcttcggacaggtgaccctgacagtgcttaatgacctcagatgagtcccagggccgcggggacttccccattaagtcatggtggctccagccaatgtcagcccaggtcccccactgtcagagaggaaacagaggctcgaagatgagaagtgccctgcacaaggtcaccttgtgacttggaggattctccaggtaaaagcagccgtattgggggaaggcctctattcttgtaatgaaccaaacgtttgtgccaaccccccaaattcatatgttgaagtcctaactcccaacgtgatggttttatgaggtggggtctttgggaggtaagcaagtcataagtgtagaaccttcataaataggattaatgtccttataaaagggacccccaggacctggatatggtggtgtgaacctgcaatcccagtgctttgggaggctgaggtgggaggatcccttgaggccacaagtttgagaccagcctgggcaacatggcaagaccccatctatacagaaaatacaaaaattagccaggtatggtggtgcacacctgtagtcccagctacttgggaggctgaggtgggaggatggcttgagcccaggagtttgaggctgcagtgagccatgattgcaccactgcactccagcctggaaaacggagtgagagtgtcttaaagaaaaaggggccctagagagttctctggtaccctggtttcagacttctagcctccagaatggtgagaaataaatatgtattttttacgaaaaaaaaaaaaaaaaaaaa

SEQ ID NO: 118618 - DNA, 1000 bp, Homo Sapiens
gatctcagctcactgcaacctccgcctgctgggttcaagcgattctcctgcctcagcctcctgagtagctgggattacaggcgcctgctaccacatccagctaatttttttttttgagacggagtctcgctctgtcacccaggctggagtgcagtggcacgatctcggctcactgcaaactccgccttccaggttcacgccattctcctgcctcagcctcccaagtagctgggactataggcacctactaccacgcctggctaattttttgtatttttagtagagacggggtttcaccatgttagccaggatggtctccatctcctgaccttgtgatccacccacctcggcttcccccagctaattttttatattttagtagagacaaggtttcgccatgttggccaggctggtcttgaactcctgacctcaggtgatccgtctgctttggcctcccaaagtgctgggattagaagcgtgagccaccacgcccagcctttttttgtatttttagtagagatggggtttcgccatgttggccaggctggtctcaaactcctgacctcaggtgatctgcccacctcagcctcccaaagtgctaggattacaggataagccactgcacctggccagctctagtcttattttgctgaaaaagggaggcaattgagggaaaggcctgctggcctgggacactggagacgtgggtttaccacacagccttgggaaatttatctaactctctgggcccctttgtacttttcagcttagagatttgggggttaaagtagatcagtaatttccaaactcttcacagagtaccagggtctgtagagatgcctcacaggcctccatgacaggccaagaagatggcctatgatctctgaaaccagcccccacttcaatcagatcaaagtaattccattctgttttatatgctgggattctgcttaagatttcatttgataaaaagaatcttctgcttaaaaaaaaaaaaaaa

SEQ ID NO: 118619 - DNA, 1000 bp, Homo Sapiens
tacatctcgcctggtacaggaacataaaaagcttttagatgaaaacaaaagcctttctacttactaccagcaatgcaaaaaacaactagaggtcatcagaagtcagcagcagaaacgacaaggcacttcatgattctctgggaccgttacattttgaaatatgcaaagaaagactttttttttaaggaaaggaaaaccttataatgacgattcatgagtgttagctttttggcgtgttctgaatgccaactgcctatatttgctgcatttttttcattgtttattttccttttctcatggtggacatacaattttactgtttcattgcataacatggtagcatctgtgacttgaatgagcagcactttgcaacttcaaaacagatgcagtgaactgtggctgtatatgcatgctcattgtgtgaaggctagcctaacagaacaggaggtatcaaactagctgctatgtgcaaacagcgtccattttttcatattagaggtggaacctcaagaatgactttattcttgtatctcatctcaaaatattaataatttttttcccaaaagatggtatataccaagttaaagacagggtattataaatttagagtgattggtggtatattacggaaatacggaacctttagggatagttccgtgtaagggctttgatgccagcatccttggatcagtactgaactcagttccatccgtaaaatatgtaaaggtaagtggcagctgctctatttaatgaaagcagttttaccggattttgttagactaaaatttgattgtgatacattgaacaaaatggaactcatttttttttaaggagtaaagatttttaattctgtgattgtgtgtatgtgtgttgaaactgtaaagcttttatgactctaatattaatctcttaaatgaaattaaaaggcaaaagaacatgattgagcttaaatgatcatttcttcctgcagtgattcttggattgttttctcatgtatttg

SEQ ID NO: 118620 - DNA, 1000 bp, Homo Sapiens
tctgttaccaaataatggctaatgttacaaaaagttatactccagagacccaaagcttgacatttacctaatgtatgagaaaatattaccaattaacaataaagaatgatcatatttttaacctcttttacatagcctaataactcagcaaggcctcaacgtctgtgctaatttaaactgccaaatattgactgcagcaaacaagaattatattcagaatttatgagggtactgttaggagtatactgcttacaggtttagatatagtctgttagaattaaaaccaagtttagtgttcatatttacctcatgggctttatcaagcccatattacctcagcttatatatagttaccatttttaggtttttaattgtttgacacttggatgataaatgcagtcattttattctcaagtgcttaaaattaatgtaattaaaagcttagctgactacagaataggtgagggtttcttaaaaatgagatttaagggctgggcacggtggctcatgcctgtaatcccagcactttgggaggccgaggtgggcggatcacttgaggttgggagttcatgaccagcttgaccaacatgaagaaaccctgtctctattaaaaatacaaaagtagccaggcatggtggcgcatgcgtgtaatcccagctacttgggaggctgaggcaggagaattgcttgaacctgggaggcagaggttgcagtgagtcgagatggtgccattgctctcgtttgggcaacaagagtgaaactcttgtctcaaaaaaaaaaaaaaatgaggtttaagacagttttgtcattactggtgggatctggtcacacaagatagcattaaacgtgacatggcacataaaattggttaaaaaattttgttttttaattacgtaatgtaaaagcccaacaaacactttatgcaagattggaatgtatcttcaaattcagatttaataaacatgtaaagatcctctgtaaaaaaaaaaaaaaaaaaaaa

SEQ ID NO: 118621 - DNA, 1000 bp, Homo Sapiens
gtgggctacttgttgtgtggaaaaaggaaaacggattcattttcccatcggcgactttatgacgacagaaatgaaccagttctgcgattagacaatgcaccggaaccttatgatgtgagttttgggaattctagctactacaatccaactttgaatgattcagccatgccagaaagtgaagaaaatgcacgtgatggcattcctatggatgacatacctccacttcgtacttctgtatagaactaacagcaaaaaggcgttaaacagcaagtgtcatctacatcctagccttttgacaaattcatctttcaaaaggttacacaaaattactgtcacgtggattttgtcaaggagaatcataaaagcaggagaccagtagcagaaatgtagacaggatgtatcatccaaaggttttctttcttacaatttttggccatcctgaggcatttactaagtagccttaatttgtattttagtagtattttcttagtagaaaatatttgtggaatcagataaaactaaaagatttcaccattacagccctgcctcataactaaataataaaaattattccaccaaaaaattctaaaacaatgaagatgactctttactgctctgcctgaagccctagtaccataattcaagattgcattttcttaaatgaaaattgaaagggtgctttttaaagaaaatttgacttaaagctaaaaagaggacatagcccagagtttctgttattgggaaattgaggcaatagaaatgacagacctgtattctagtacgttataattttctagatcagcacacacatgatcagcccactgagttatgaagctgacaatgactgcattcaacggggccatggcaggaaagctgaccctacccaggaaagtaatagcttctttaaaagtcttcaaaggttttgggaattttaacttgtcttaatatatcttaggcttcaattatttgggtgccttaaaaactcaatgagaatcatggt

SEQ ID NO: 118622 - DNA, 1000 bp, Homo Sapiens
ctctgagggacctttagttggctctgtgggactgttccggatgggcctctgggtcactgcccccatcgccttgctgaagtcgctcatcagcgtcatccacctgatcacggccgcccgcaacatggctgccctggacgcagcagaccgcgccaagaagaagtgacgctggagccccgggtcctggctgcccacctgccctgggagtcttgctgtgccacacagctccccaccccctgctaggaggtcccagtctcacgccttcctcatgtgttgttctacctgctgggatgggggtcagcctctctttggtgacgtcacgttctctgggatcctgaggacccgggcctcaaatcagggaggatacgcgggaggccccctccatccaggcggtgctcctggggtgccgggaccgggcagtgtcacaccctgcctgctcagtcctggggtccgagatgctagggacgcttgagtgagggaggtggtgtgagggccaggtttcctgaaaggcgggagtcagacctccgcccccagccagagcaagcttggggcaccatgcccaggagggaagaagccatccacagccttccctgtcaccggctcctctgtcctgcctaccctggtcctggcgggacttcactatttgacttggtttcctttcagatattcttggctcagggcctgggttgagggagcttagggaaggacgtccgtctgggtgcttttcctccagtttgctggctggcttctccgtctacccacagtgacctcacagagaggccctcctgccacccatgctcatgtggtgtccccaccgcccacttgtttgatgtcactgactgtctacatgtatttatattcttgatattttctaccctcactagaatgtaaactccatgaaggcacagacttttcttgttctcttctctatccctagagtaagaccaacttgaacctggcatatagtagctgcttaataaatactcgtctgtcaatgaaaaaa

SEQ ID NO: 118623 - DNA, 1000 bp, Homo Sapiens
ttagaaaaaaaagccaggttacgcaacaggcattctgtcatgttgaacaattttaaataaagagaatatctggtgttaggagcttgttttgctgaagatttctccattcctggtgctgagaataaaggcaaccagtagccaatgtcctttagattgtctgatttctttttgttgtggagcacacctgctaactgctccctcaacataactatgaaatcatagctctgttttcaccaaagaacagaccaattaacatacttatttgcagaagtggtgtagttctacaaaacggcaaatgaagttcaacttaatattctctataatgtattattttattttattttttacaattagccttttttttagttaatttttgtcaaatgaaacgacttcaggcaagtctcttttataatggtttttcaagtgccatttattctagtttatcatgttttgcatgtttgaaagtatgaatgtgctctttcctaaaacatggcaaatgaatagatgtagagaataacaatattacttacaagatgaaatgattagattagaagtgtccctttattagactttgtcagcctgactgggtacaattcttttgttaatttgcagtgtggtttgtatacacgtatacgtgttatcaataataagattttgcaactggatgacacaagattttacttgaacagtgaaggacaaaaatcatgattgtggaagatatttttaaaatctgattttgcagcgatcacttttaaaccctgtagtgatgtaagactaaaatataattgctaagattttgttggttaatgtaaagatatgacttttctgcactgtactctcttcataggattgtaaaggtgttctaatccaattgcatgatgtagtaagcctcttaaatatgtgtgttaaatatattgagtttggattaaaatgttgacatgatttcacatttgaaaataaaatcatactcttattttgaagttaaaaaaaaaaaaaaaaa

SEQ ID NO: 118624 - DNA, 1000 bp, Homo Sapiens
agttcgccgaccgagtgggtcaagtggagctggggccagcccggcgccgcagggtcccgcgctcctccgggacgccttcttccctcagcaccgacactccgctcaccgggaccccctgcacccctacgccgtcccctggcagtcctccatgccccagtcccgacaacggctcgggctcggctctcgcgcccgcagagggcctgcccctctagtcctgggtcgcggccctgcccatggggtctcaggccaggtctctgctggcagaggcggtagtaaagtccctgtaccccgtctcccagggcacaagctccctagcctctttggatccattgcccctgagctcccagagtcacccctccacctccgcagccagtgaagtgtgttgtgcctgctgaagtgatcaccccccgcccccagccctgcatcaggccacaggtcttggctttctccttatcaccatttgctgttatcacggcacacagcagggaatcccaggcccccccgccaagtggttacccaagtcaccactcctgacccaaaaatcaggcatggcattaaaacgttgcaaattcctttactgttatcccccccaccaccaggaccatgtagggtgcagtctttactccctaacccgtttcccgaaaaaggtgctacctcctttccagacagatgagagagggcaggacttcaggctggatccaccactgggctctccctcccccagcctggagcacgggaggggaggtgacggctggtgactgatggatgggtagtgggctgagaagaggggactaggaagggctattccaggctcagccctgctcctgcagctttgccgctgagtgtaggaaaaacaggcatgacagaccagggtgagggttgtgcccagctgggccacggccatgcgtggggtggcccaataaacaccgtggactcccaaaaaaaaaaaaaaaaaaaaaaaaaaaaaaaaaaaaaaaaaaaaaaaaaaaaaaaaaaaaaa

SEQ ID NO: 118625 - DNA, 1000 bp, Homo Sapiens
gttaaggcttgagaagctctgaataattcaaaagtattagacccacacagccttggagagaccttcagaaactaaggaggagttttatattaagggagacattttagtcagtaagacgatataacctacttactccgtaaggggaaatgaaggcccagagaagggaagggacttgaccgaggtcccacttctgtttcgaggcagaagccagactaattttcatgcctcctgactcccaatcagtttcacaaagggattcaatctgtttatatacgttacattcctggatacgaggtcttttgatgttcagagtaactgactagttagtattagaagaccctcgaggtttttttccacagaaaaacatctgaagatggattgggtgagggctggcaaaacgaaggcatgccgggccagctccttaacccaatgacccagtgatgctgcaaggctggaacggggtccaggagactgtgtgtaacaggtgccctaggtgacccttataatcagggaagtttggtgaacaaaaatcgaacccatgagtgaacataaattaaaaagttgatcaacctattaaaatgtgtatttcattgggtagcttttctcactgtagacagattttttccttcttcaatgaaaaggcttttaaattagtacaactgttactatttaaaaaaaaaataccctaagtactctgtttacttctggtgaaacaaaaccagtcattagaaatggtctgtgcttttattttcccagactggagtggcttttctgaaacacacacacacacacacacacacacacacacacacacacacacacacacgtacacacatccctcacttctcttaagccaagaagtttgctttccctagctgcagtgtagatggctcttgtttttgtttttttgttttaatcatttggcattcacatgtggctgttaatatgtgcttgtttttaattaaaacaagaagctttaaaaaaaaaaaaaaaaaaaaaa

SEQ ID NO: 118626 - DNA, 1000 bp, Homo Sapiens
atttcgctactttttgaggaaaggttgctcattgggaccatggaaccatatatatgaatttgtaaatcatgcaattaaagcacaagcaaaatataaggagtggttgccacatcttctggttgctggatttgacccactgattctactgtgcaattcttggattgactcagtcagcattgacacccttatcttcactttggagtttactaattggaagacacttgcaccagctgttgaaaggatgctctctgctcgtgcctcaaacgcttggattctacagcaacatattgccactgttccatccctgacccatctttgtcgtttggaaattcggtccagtctaaaatcagaacgtctacggtctgacagttatattagtcagctgccacttcccagaagcctacataattatttgctctatgaagacgttctgaggatgtatgaagttccagaactggcagctattcaagatggataaatcagtgaaactacttaacacagctaatttttttctctgaaaaatcatcgagacaaaagagccacagagtacaagtttttatgattttatagtcaaaagatgattattgattgtgagataggttaggttttggggggccagtagttcagtgagaatgtttatgtttacaactagccttcccagtaaaaaaaaaaaaaaaaaaaaaaaaaattgtaaacatcacttatattactttattgcagcttcatcaccagtacattatatgttgtaatatttatttacctgatcattttgatcattttctgctttattttgctaataaactgtgatgttacttctagtgctaaacatggcatatttccacctatgattcgtgtttacctggtattaggagctcagaatggaatgcataaagcttcactggaagtgtatacaactgtggtgtagaatctgttattattatcattattattttatttagacttgactatctcttatgtttattaaagaacatgttttcct

SEQ ID NO: 118627 - DNA, 1000 bp, Homo Sapiens
gacctggaggagggcatgctggccgtggtgaaatgtctcaagaataccccagccttctttgcggagaggctcaacaaggccatgaggggggcaggaacaaaggaccggaccctgattcgcatcatggtgtctcgcagcgagaccgacctcctggacatcagatcagagtataagcggatgtacggcaagtcgctgtaccacgacatctcgggagatacttcaggggattaccggaagattctgctgaagatctgtggtggcaatgactgaacagtgactggtggctcacttctgcccacctgccggcaacaccagtgccaggaaaaggccaaaagaatgtctgtttctaacaaatccacaaatagccccgagattcaccgtcctagagcttaggcctgtcttccacccctcctgacccgtatagtgtgccacaggacctgggtcggtctagaactctctcaggatgccttttctaccccatccctcacagcctcttgctgctaaaatagatgtttcatttttctgactcatgcaatcattcccctttgcctgtggctaagacttggcttcatttcgtcatgtaattgtatatttttatttggaggcatattttcttttcttacagtcattgccagacagaggcatacaagtctgtttgctgcatacacatttctggtgagggcgactgggtgggtgaagcaccgtgtcctcgctgaggagagaaagggaggcgtgcctgagaaggtagcctgtgcatctggtgagtgtgtcacgagctttgttactgccaaactcactcctttttagaaaaaacaaaaaaaaagggccagaaagtcattccttccatcttccttgcagaaaccacgagaacaaagccagttccctgtcagtgacagggcttcttgtaatttgtggtatgtgccttaaacctgaatgtctgtagccaaaacttgtttccacattaagagtcagccagctctggaatggtctggaaatgtca

SEQ ID NO: 118628 - DNA, 1000 bp, Homo Sapiens
ccttgaaaggcatcgactacgagacggtgcccatcaatctcataaaggatgggggccaacagttttctaaggacttccaggcactgaatcctatgaagcaggtgccaaccctgaagattgatggaatcaccattcaccagtcactggccatcattgagtatctagaggagatgcgtcccactccgcgacttctgcctcaggacccaaagaagagggccagcgtgcgtatgatttctgacctcatcgctggtggcatccagcccctgcagaacctgtctgtcctgaagcaagtgggagaggagatgcagctgacctgggcccagaacgccatcacttgtggctttaacgccctggagcagatcctacagagcacagcgggcatatactgtgtaggagacgaggtgaccatggctgatctgtgcttggtgcctcaggtggcaaatgctgaaagattcaaggtggatctcaccccctaccctaccatcagctccatcaacaagaggctgctggtcttggaggccttccaggtgtctcacccctgccggcagccagatacacccactgagctgagggcctagctcccaaatcctgccccgttggcacagggccacaggagcagaagctgggtgggctgaagaggcctggaaacgagagtcttaattgaggagatgggagactcgaactctagccctggatctgccttcctgctgaaacttgttccacctcagtcccctcatctgtcacacgcatgtggggtggagtagggagatgcggggagcagggtgggcaggaatactgttatctatgtgacggggcagtcgtgaggctgagatgagaatgcggattaaaatgcctggcgtgctcaccgtaacaccacggggaaggctgtgtgccttttctcatccgcttttgttgtgtgtgactccaaagaatgcccgcgctgaaatttggcgtgaattaaactgaagcccaggcctctaaaaaaaaaaaaaaaaaaaaa

SEQ ID NO: 118629 - DNA, 1000 bp, Homo Sapiens
cgcgaagtgccagatgcaggcggggaagcccatcctctattcctatttccgaagctcctgctcatggagagttcgaattgctctggccttgaaaggcatcgactacaagacggtgcccatcaatctcataaaggatgggggccaacagttttctaaggacttccaggcactgaatcctatgaagcaggtgccaaccctgaagattgatggaatcaccattcaccagtcaaacctgtctgtcctgaagcaagtgggagaggagatgcagctgacctgggcccagaacgccatcacttgtggctttaacgccctggagcagatcctacagagcacagcgggcatatactgtgtaggagacgaggtgaccatggctgatctgtgcttggtgcctcaggtggcaaatgctgaaagattcaaggtggatctcaccccctaccctaccatcagctccatcaacaagaggctgctggtcttggaggccttccaggtgtctcacccctgccggcagccagatacacccactgagctgagggcctagctcccaaatcctgccccgttggcacagggccacaggagcagaagctgggtgggctgaagaggcctggaaacgagagtcttaattgaggagatgggagactcgaactctagccctggatctgccttcctgctgaaacttgttccacctcagtcccctcatctgtcacacgcatgtggggtggagtagggagatgcggggagcagggtgggcaggaatactgttatctatgtgacggggcagtcgtgaggctgagatgagaatgcggattaaaatgcctggcgtgctcaccgtaacaccacggggaaggctgtgtgccttttctcatccgcttttgttgtgtgtgactccaaagaatgcccgcgctgaaatttggcgtgaattaaactgaagcccaggcctctaaaaaaaaaaaaaaaaaaaaaaaaaaaaaaaaaaaaaaaaaaaaaaaaaaaaaaaaaaaaa

SEQ ID NO: 118630 - DNA, 1000 bp, Homo Sapiens
gcggctgcggctgcaccgtgtgaacctcatcgctctgcagcggcgccgggaccctgagcaggtcctgctgcagtgcctgccccgaaacaaggtggacgccacccttcggcggctgctggagcggtaccggggccccgagccctctgacacggtggagatgttcgagggcgaagagttctttgcggccttcgagcgcggcatcgacgtggatgctgaccgccctgactgtgtggagggcagaatctgctttgtcttctactcgcacctgaagaatgtgaaggaggtgtccttctaccgtggcgcggtgcctgtgcgggtgcccgaggaggctgaggctgcccggcagaggaagggcgcagacgccctgtggatggccactctgcccatcaagctgccgagacttcgagggtccgaggggccacggcggggggctggcctctccttggcacccttgaatctgggagatgccgagaccggctttctgacgcagagcaacctgctgagtgtggctgggcgtctgggtctggactggccagccgtggccctgcacctgggggtgtcctaccgggaggtgcagcgcatccggcacgagttccgggatgatctggatgagcagatccgtcacatgctcttctcctgggctgagcgccaggctgggcagccaggggctgtggggctcctggtgcaggccctggagcagagtgaccggcaggacgtggctgaagaggtgcgcgcagtcttggagctcggccgccgcaagtaccaggacagcatccgacgcatgggcttggcccccaaggaccccgctctgcctggctcctcggctccacagcccccagagcctgcccaggcctaggccccacagacttttaggctggcccagatattccccagtggatgggcagagcccccaccttcaagtctctccagtgtgtggggacgggtccctgtgagcaacaaaactgcactgtttctttcacctcaaaaaaaaaaaaaaaaa

SEQ ID NO: 118631 - DNA, 1000 bp, Homo Sapiens
tataagatttaaccatgtttgacgtattttaatttagttaatgaagcaaaattcagtttatatttcactagaactgtgtacttgattgattttcagagaaatatcacaaattagaaatattaaatctaaggatgaaaggtatatataaaacaatttgggggccaggcacgatggctcaaacctgtaatcccagcactttgggagaccaaggcgggtggatcacttgaggtcaggagttcaagaccagcctgggcaacatggcgaaaccctgtctctactaaaaatacaaaaattagccgggtgtggtggcacttctctgtaatctcagcttctcaggaggctgagacaggagaatcgcttgaacccgggaggcagaggttgcagtgagctgagatcatgccactgcactccggcctaggtgacagagggaaactccatctccaggaaaaaaaaaaaaaaacccaatttggataccaaattaatcaactaatttgagctatctggccttactcttagtagtttttagtacgtgctggacaccacttttaaaaagcaatcactgtgctagaaaagtatattggctttgttaggattaaagttcattaacttcaatgtaatcatgcctcctattactgaagtcagattggaaccactaaagatccaaactttctgtctggtaatagaaagtaaaaatctagacatcatttacatttgagaagctgtttttaacattattttaaaatgccaaatatgttctttctagaaaaatatttatttttgtttttgttggatagcttttaattacatttcagagaggtgtaattttgggtagatgctcattacatttttgaaaggtttatgattccaaaataaagatttatatgactggtgatactggctttacagaaatttcagagaactaatttttaaaatctttagcatttaaaactttttttgttttgttttctgacatattctgacaaagagcagcaaaccactg

SEQ ID NO: 118632 - DNA, 1000 bp, Homo Sapiens
aaggatattcagaggtgcatctttttctgtaagagtgacattttaaacaaatgtaaggttttggggaataagaatcgtccacattcccacaggaaatcattgctatggtctcccctaggaatgtgatagatagcttctataattatgcagcattatccatagtatgaaacctgtagttttaatggtttagaaatctatgtctcatttcatatctaactcatgtttttgatacgaatcaatatatatgttgatatcatgagttaatatgagtttgacatgaatcatcaacatagtatatacatatcaacataactatgttgatgattcatatcaaattctcaatgcaggtcattactgtaagttttccatttttgttacaaataataagtaagatgatactttaaaatctctgttcttcacaaggtacctctttaattcatagccttttatgtcagcattattcttcttttgggggttggtcagcaactttgagtgccattgcaagcagcatcatttaagtagttttataaagaaaagaagtctgatatcttgggcagcttgctgcttactggggagaccagcatgcttagacacttattgccagggttaaacatatgctctggcaccaagttcaaatctttcctccccatttgtgagctgtgggactttaggcaagttatctaaatgctgctatgctatagtctccccacctgtaaaacagaggatgataccaataccttcctcatagggtacataagattaaataaatacaaacttgtacttaaaatgtagctctcaataaatatgcattatgatttacatacgaaataatagcatttaacaaatgtaggtagaattttaagtatcatgttaaaattaggatacgaaatgcctctgctgacattcttgttactcttttctccacagtcaaaacctgaatcagaatatttcaaaagagaggaaataaaagttcagcttaaaactgttctgccctaaaaaa

SEQ ID NO: 118633 - DNA, 726 bp, Homo Sapiens
tgacagccgccaacacagagccctggagaggtggggagctgctgaagggcgggagaagttgcggcgtggcgataggtctgggtgttctgggaggacccctaaaagggagcagctctgccaggtcagagcttgaggtagcatgtgtgccgcttccaggaggccaggatggagacagcagttcgaggaatgcccttggaatgccctcctaggccggagcggctcaatgcctacgagcgcgaagtgatggtgaacatgctgaactcactgtcgcggaaccagcagctgccgcggatcacgccccgatgcgggtgcgtggacccgctgcccggccgcctgcccttccatggttacgaaagtgcttgctcgggccgccactactgtctgcgcgggatggactactacgccagcggggcgccctgcaccgaccgccgcctgcggccttggtgccgggagcaaccgactatgtgtacctccctacgagcaccggcccggaatgcagtgtgctgttacaactcccccgccgtcatactacccatatccgaaccttagatgggacacaagtcacttcaagaagtctggtggtccccagagaaacaactatgttatccatcctgagtttgtgtctgagacctatcccgactatcgttgctggtagagcctgggcttgctgtgccaagggggcagagcaataaataaactcttcaaccccaaaaaaaaaaaaaaaaa

SEQ ID NO: 118634 - DNA, 1000 bp, Homo Sapiens
agctttcacggatctagaggtgatcaccaatcgcccaaagggcttcaccaggtttcggtcggccgtcagagtatccattgcaatttccagaatgaaatttttggttcgacggtggcatcgagtcacaggttctgtttccatcaatattaacagagatggctttggactgaatcaaggtgcagaaaagactgactcattttatcattcttctggtgggctggagttatatggagaaccaagacatactacgtatcgctcaagatcagatctggactatattaggtcccctttaccatttcagaataggtacccaggcactccagctgatttcaatcctggttctttagcatgttctcagcttcagaattacgatcctgacagagccctaacagattatatcactcggctagaggcactgcaaagacgacttggaactatacagtcaggttcaactactcaatttcatgctggcatgagaagataatcctttgaaacatcattaattgaagtgattttaaatagatttccttttgtaaatcaatggttcttttgtgcttttgtattgtgaatattcaatgggaccaatatgaacacagcttatgattgtatacaaatcccttgccagcacatgaaaacaaactggaatttgtatatataagcattgtgtatgtattcatgcacaataattattgaattacctgtatatttgtggaatgctaatttaaaacattaaattataaaccttgtgtatttatcaaatgggtgaaaagattaaacttttacgcattacaatactgctgaatgtgtagctcgaggtgtcctgcacttttcttataaggctactgaagttacatgttttgcctaatatattctactggtgatgaagacagataatatcacttgtagagacctatttttgtataatggtagaagttttgaattttatggggtattttgtcaagtactgaaataaaaatgacttcaccattttcaccacact

SEQ ID NO: 118635 - DNA, 1000 bp, Homo Sapiens
ttattgactttttacttatttgataaaaattaaagaactatttttgttttggtcagataaattgacaagactaatcagtattttattataagtaaaagatttttcttctttccttaaaaatatttttttttcacctaggtctaaatagctaactaactggtagaccagagtattacatcatcttattttggttttataccaataaaacatagcgtggaactcattcaggtaatgttttgcatttcattgcttttggatgaacaaaggaagtaaactaatcctttataaatgaaaacccagaatagttggtatgtcagctagtcattcctgtcatattcccagtagaatgattttcaagtttgaatttctgtacaaatatctaaataagagatgtgcagagagcaccaattttccttcaatatccattctttacttttcacataatgatagaacctttgatttttcaagtgggtatgcctcctagaataaagactacatttcccagtctcctgtgcaggtatgactgtgttctggacaatggaatgtgaggggaaacgattttttgtgtccttaaaatggcatgaccatttatttgcccctttctccatcctgttgcttggaatgtggatctggtagtgagccatcttggaccctgaagaggaggcaacacaccattgtagaagaaaaacaacagaaggatcctggtccctgtacgacctcattgaagaaacaccataagtggcgtggactatctacctccagactgttttacaagagagaaattagcatattccatctaatacagtatgatgtaactaatgttacttttgtaacagtcagtggtttgttctaacaggacagtagaacacttgcaaggtaagtaaaaccaaatgtattagcattattcctgcttttccttttttgtcacttttatcctttttttaaaactgaaaatatttttctcttgctatttatatatatatgataaaaatgcttggaa

SEQ ID NO: 118636 - DNA, 1000 bp, Homo Sapiens
gactcacccacagcccactctctggacaccaatcctgggaggtgggagctggaatggggagcaatgagaggagggagtgagactgttggcttaggaagggtggtacctctccctgcatcatacccaggaactgccagctccaaaatattggggtacagctcaccaccccccactccgccaacccattcctacctcctctagtgcagggacccaagttagatgatgagaaaatgccaaacaaagggaggcaaggacagagaaggtacctgcaggacccacaaggcccatactggcccccatctgaacccacctctcccacccagatcaacatccccccaacccctgtgcccccatcatctggaccccagagccagccctcccactaccaccaccaccaccccggggctccttggctcacctttctagaacatgggtacctcctctttttgggggctcatttagactgctgcctttgctgctgacttgcagtgtgactcgggcccattgttcaatctctgtggccctgagacaccagggaaaatctccccccccacaggacatactagttccctggcaggcaagggcttccaactgaggcagtgcatgtgtggcagagagaggcaggaagctggcagtggcagcttctgtgtctagggaggggtgtggctccctccttccctgtctgggaggttggagggaagaatctaggccttagcttgccctcctgccacccttccccttgtagatactgccttaacactccctcctctctcagctgtggctgccacccagccaggtttctccgtgctcactaatttatttccaggaaggtgtgtggaagacatgagccgtgtataatattttttttaacattttcattgcagtattgaccatcatccttggttgtgtatcgtgtaacacaaataatgatattaaaagcatcaaacaagccaaaaaaaaaaaaaaaaaaaaaaaaaaaaaaaaaaaaaaaaaaaaaaaa

SEQ ID NO: 118637 - DNA, 1000 bp, Homo Sapiens
aggaactctaaaaacaagcaatttgccagaagaattgcggaaagtctttatcacttattcgatggacacagctatggaggtggtgaaattcgtgaactttttgttggtaaatggcttccaaactgcaattgacatatttgaggatagaatccgaggcattgatatcattaaatggatggagcgctaccttagggataagaccgtgatgataatcgtagcaatcagccccaaatacaaacaggacgtggaaggcgctgagtcgcagctggacgaggatgagcatggcttacatactaagtacattcatcgaatgatgcagattgagttcataaaacaaggaagcatgaatttcagattcatccctgtgctcttcccaaatgctaagaaggagcatgtgcccacctggcttcagaacactcatgtctacagctggcccaagaataaaaaaaacatcctgctgcggctgctgagagaggaagagtatgtggctcctccacgggggcctctgcccacccttcaggtggttcccttgtgacaccgttcatccccagatcactgaggccaggccatgtttggggccttgttctgacagcattctggctgaggctggtcggtagcactcctggctggtttttttctgttcctccccgagaggccctctggcccccaggaaacctgttgtgcagagctcttccccggagacctccacacaccctggctttgaagtggagtctgtgactgctctgcattctctgcttttaaaaaaaccattgcaggtgccagtgtcccatatgttcctcctgacagtttgatgtgtccattctgggcctctcagtgcttagcaagtagataatgtaagggatgtggcagcaaatggaaatgactacaaacactctcctatcaatcacttcaggctacttttatgagttagccagatgcttgtgtatcctcagaccaaactgattcatgtacaaataataaaatgtttactcttttgtaa

SEQ ID NO: 118638 - DNA, 1000 bp, Homo Sapiens
taacctgacagttgttgccaggaatttgctttgtttactgctagtatattagaaatcctagatctcagaatcacaatagtaataaacaacaggggtcattttttcctaacttactctgtgttcaggtgtggaatttctgtctcccaagaggaaatgtgacttcactttggtgccaatggacagaaaattctacctgtgctacataggagaagtttggaatgcacttaatagctggtttttacaccttgatttcgaggtggaaagaaattgatcatgaatctctaataaatttaaatctcttaaaccagtaggtgcttaatattttttgatttgattaatgcccatttaaatctcatgggttctattaaaaatatatatatatagggccccaatccattgccatcaaattgcccttggacttttccaaggtatattatggggttttatgcaaaattccaagctaccatgtaactttttttaaccatttaacaaggagggggaactgtttcctaccttctttacatgttgtgcattgttgtggtccagaaatgccaaacctttttaaagatggtgcaactttgagtccttggcttgactatacaggccttgaacttcatggcatatcaactttgccatatctgcaggagagctgttctataagaaatagctcagagttgcaaatatcacatgtgaatgatacggtaacttttaagaaatgtctgtattgtatttgaagactgtttgccataaatctgaaatttgaacctatgtatttcaatttggtatgctaaaaagttctgaattaatgtaaagttttttgttataatattgtaatctcagttcaaaagttaactgcaaatataaaacccaatgatttctatatagtaaattgaactgtaaaggtaacttgtgtgtgattctgaatacatagataaatgtttttattcctcatgttttactttggcttctatctgaaatagaggtaaaattttacatatca

SEQ ID NO: 118639 - DNA, 1000 bp, Homo Sapiens
cctgatgaccactagaggtatgtctgcccctcgtcaccctgctgcacaccaatctgtggcccttcatcatgctaagaacaagaactgcgccatggctggctccttctcttctccagcccatccctctgcagcctgtcatccctgtctgtgaccattggtcgggcccctgggctctagagtgacttttgacgccctccatccctcccgccaggcactgtcctccgcaaggcctggtgcagccctggcagtaactggcttgtaagaggctcagacaccaagctgggcctgcagaggaggggcacagtaggacacagtgactgcccaggtgtccacacacctgtaggcctctgagccagcgtccagggtacaggtgcgggtggtggggatgaaggcctgaccagggagggagaagcaggtttggagaggaccctgtgcccaccctgacagacaccctggctggccctgactgactgtattctctggccacattcaagtcccccattggtgggggcagagaagtaggaccaggccatccttggctccagagctcgaagaccccaagacagccctctgctctcagcggcgccacagagagcctgggctcagccttctgcatcaggacatggcctcgtccactgagggcacgatttaaacatttgacatcagaagctttatttgtaaacctcacacagataaggaccaagggctggcggtgtggccagaggacaggggaagctgaaggccccgtgcttgagctcggcagtcctgctccttgcagtgaagccaccatgggtgaccgtccagcctcacccggtggcctgcacagtgagggaagggcttcagggccatctgctcccagggcaggggacaggccaccaaggacctttggcaaatgaaggtttacatttctgtagtttgtttgttttagagcttaatttgtagttttttagctattaaaaccatttgaatttttaacgacctgaaaaaaaaaaaaaaaaaa

SEQ ID NO: 118640 - DNA, 1000 bp, Homo Sapiens
ttaaatgacttaatgtgtattaaagggcttacatgggtattagctaatgcagtagtatgattgttttattagcatatgcattatccatatagctttggtttatattttccatagagcctaaactttatagatcactatctaaatgaaaatttacatcaaactagtgttttaatatgacagttctagtgttgtttaagtctaagtgaagatttagggcatcttcctgggttttgggatttgtgcagtgtggcttctgaccagctgcatagacatggctccaggtaacagtccctgggactgagcagtggcccatgttggctgttggagctttcttttccctcatttgttatgagtcaataaagaagcagaaggtttggacgtgctagccagtgggaaagggaacctgagatggagctctctgatcaccctttcagccccagggcccggctctgtgtgagaagtctgtcccaaaattctgggacggaccacctcactgaccagctgaccagctgaccaggtctgtgtgttgcaggtgggtgttgggaagaataaatgtctgtatgccctggaagaggggatagtccgctacactaaggaggtctacgtgcctcatcccagaaacacggaggctgtggatctgatcaccaggctgcccaagggtgctgtgctctacaagacttttgtccacgtggttcctgccaagcctgagggcaccttcaaactggtagctatgctttgatgtcctgttgaggccatcggacagagactggagcccaggtgacaggagatggtgataccagaagtcaagggttggggtggcgacacggcctcccgaggaagaggtctgcttgatggtgactctgcaggagactctgaagtgactgctgggaaaccctttgggagacctgacctggggccaaaaataaagtgagccagcgtcatgaacgcatgctatttagggacaaaaaaaaaaaaaaaaaaaaaaaaaaaaaaaaaaaaa

SEQ ID NO: 118641 - DNA, 1000 bp, Homo Sapiens
ctggaggaccagtatttcccatggagggcacctgccccatccgccagcgccaagacaacaggcccactcctctgattacctccgggggatggacggcaaacaggtaaggagttccatgcaactgcggatggagcccctctgagaaacacatgcccctccaagtggggtctggggcctggagagaccctcccacccagcagaccaggagatagctgggggacaagggcagacggcccctgcctgggaaaaaccacactcacaccccaccccgaagagctgtggagaccaaaccaagactacgctacacacagaacgccgagaagataaaccaagctttacacgagcaggatggggatgggaaaactaaaggggccccctgtgaccgaggagcagggtccccagggggcagctcccacggagcgggcttgaacagggaccacccctgcagagccagccagggcggagagccataccctggccccagcgcgccccgacacacatgcttttctccatgacacgaggccagtccccaggagcagccccaggagcacaacctgagatttctaagcttgcaggttacaaaaaacaaaaaaaacagagaagctgcctgcgtaaaaagtgccacccacggaggcaggacacaggcagcgtgtggcccattcagcaggcccaggtcttcagggtgaggctgctggcgagggcaggggagagggggcattctggttaaaagcaagaaattccaaatactcctccctcgggatcaacatccccccaaataagggcgcccagggatcttgcctggggaaagtggggtgcagaaggcatgacccacgccacagcgggctctcagcacccttcccacgtcccatgtcacaggctctttgagctgctggctttgttctctcaagtcaggtctgagggaacccatcggcttctgtaataatcgtattgcctatatacttgaattaaaaatatatggtggctcaaaaaaaaaaaaaaa

SEQ ID NO: 118642 - DNA, 1000 bp, Homo Sapiens
cgttggccacagcatgggaggaaagacagccatgctgctggcactacagaggccagagctggtggaacgtctcattgctgtagatatcagcccagtggaaagcacaggtgtctcccactttgcaacctatgtggcagccatgagggccatcaacatcgcagatgagctgccccgctcccgtgcccgaaaactggcggatgaacagctcagttctgtcatccaggacatggccgtgcggcagcacctgctcactaacctggtagaggtagacgggcgcttcgtgtggagggtgaacttggatgccctgacccagcacctagacaagatcttggctttcccacagaggcaggagtcctacctcgggccaacactctttctccttggtggaaactcccagttcgtgcatcccagccaccaccctgagattatgcggctcttccctcgggcccagatgcagacggtgccgaacgctggccactggatccacgctgaccgcccacaggacttcatagctgccatccgaggcttcctggtctaagagttgctggcaagaagatggccgggcgtggtggctcatgcctgtaattccagcactttgggaggctaaggcgggaggatgacttgaggccaggagttggagaccagcctggccaacatggtgaaaccctgtctctactaaaaatacaaaaattagcctggcgtggtggtgcacacctgtaatcccagctactctggaggctgaggcaggagaatcacttgaaccctggaggcagaggttgcaatgagccgagatcacaccactacactccagcctaggcaacagagcaagactctgtctcaaaaaaaacaaaacaaaaaggaggcacaaaaccccaggcttcaagtctctgcagcctgctccacatttgggcacagaaggactcagacaggcactgtgtgggcacgaggttttacaggggtggtcagacctcaggctttaatgaataaagacactactccc

SEQ ID NO: 118643 - DNA, 1000 bp, Homo Sapiens
ggccggacacctcattctgcaggacagggccagctgtctcccagccatgctgctggaccccccgccaggctcccatgtcatcgatgcctgtgccgccccaggcaataagaccagtcacttggctgctcttctgaagaaccaagggaagatctttgcctttgacctggatgccaagcggctggcatccatggccacgctgctggcccgggctggcgtctcttgctgtgaactggctgaggaggacttcctggcggtctccccctcggatccacgctaccatgaggtccactacatcctgctggatccttcctgcagtggctcgggtatgccgagcagacagctggaggagcccggggcaggcacacctagcccggtgcgtctgcatgccctggcagggttccagcagcgagccctgtgccacgcgctcactttcccttccctgcagcggctcgtctactccacgtgctccctctgccaggaggagaatgaagacgtggtgcgagatgcgctgcagcagaacccgggcgccttcaggctagctcccgccctgcctgcctggccccaccgaggcctgagcacgttcccgggtgccgagcactgcctccgggcctcccctgagaccacactcagcagtggcttcttcgttgctgtaattgaacgggtcgaggtgccaagctcagcctcacaggccaaagcatcagcaccagaacgcacacccagcccagccccaaagagaaagaagagacagcaaagagccgcagccggtgcttgcacaccgccttgcacatagcagaggctccgggctgactccttcctggtgggaaaggaagatgcctgtcctctccgtggaggaccctgggccctcaccgcaggaagcagtttgggttttgaaaggttattgggtcccttccttgggctgtgttcttgctggtgagcaaagtgttgcctgcaaaaataaaatgcagaacgtactctaaaaaaaaaaaaaaaaaaaaaaaaa

SEQ ID NO: 118644 - DNA, 1000 bp, Homo Sapiens
ggggatgtcttcattcgacagttttactcagtctttgaccgtgggaataaccgtgtgggactggccccagcagtcccctaaggaggggccttgtgtctgtgcctgcctgtctgacagaccttgaatatgttaggctggggcattctttacacctacaaaaagttattttccagagaatgtagctgtttccagggttgcaacttgaattaagaccaaacagaacatgagaatacacacacacacacacatatacacacacacacacttcacacatacacaccactcccaccaccgtcatgatggaggaattacgttatacattcatattttgtattgatttttgattatgaaaatcaaaaattttcacatttgattatgaaaatctccaaacatatgcacaagcagagatcatggtataataaatccctttgcaactccactcagccctgacaacccatccacacacggccaggcctgtttatctacactgctgcccactcctctctccagctccacatgctgtacctggatcattctgaagcaaattccgagcattacatcattttgtccataaatatttctaacatccttaaatatacaatcggaattcaagcatctcccattgtcccacaaatgtttggctgtttttgtagttggattgtttgtattaggattcaagcaaggcccatatattgcatttatttgaaatgtctgtaagtctctttccatctacagagtttagcacatttgaacgttgctggttgaaatcccgaggtgtcatttgacatggttctctgaacttatctttcctataaaatggtagttagatctggaggtctgattttgtggcaaaaatacttcctaggtggtgctgggtacttcttgttgcatcctgtcaggaggcagataatgctggtgcctctctattggtaatgttaagactgctgggtgggtttggagttcttggctttaatcattcattacaaagttcagcatttta

SEQ ID NO: 118645 - DNA, 1000 bp, Homo Sapiens
gcccccacccaccacctgcctggagaggaacgggtcgggtccgtgtcggagaagtgacaggtcccagagccaaagccggccctcaagcatcatcagggagtggtgtagtcagttgaaggcagttcccaccgagttttccgagcctcagaatccaggagatacgcacagccccacccactctgagatgacagtggctgacttcccgtgctgggcttttccattgtccccctggcctccaggctcctcctctgcctctccatggagtgggtggggaggtggtgggggccggcgtcccctgcgtgtgtgtgtgtgtgtgtgtgtgtggatgtattgacctgtgtttcccaagacagcaggtgccacggcccgccccgcctgccagcccgaattcccgttctcctgtgtctactaacaaggacatgggggtgggcggtgacctccgcatccctcagagctcagagggtcctcgctgccaccggtccccccctagcccgtcatcagccggtggcagctccatcttccattcctggttttagggcagaatccatggagactgcttccagaaggcatctggctctgagttataaattacttccctggtcctgacagtcacctggggtcccccctctccctggttccacctttctgaggaggagcctggagtcagggctgggttttggattaacccatccttcctagttaacacctttttgtttttattttattttatttttgtttgttttctccgtgtgtgtgttttcctaatttatttacctctgtttcccctttttcctttttttttttaattaaagagcaaagctttttattactttgtaatttaaaaaactgaaaaaaaaaaaactgaagaactttggggggaattttgtacttttttcctgtgtaaatattggacttttttgagctttatcgtggttgttaatttgaagtaataaagtagaaaagataaagtgaaaaaaaaaaaaaaaaaaaaaaaaaaaaa

SEQ ID NO: 118646 - DNA, 1000 bp, Homo Sapiens
agctgggaaaattgaggagagtcctttcagtgtcgaggaatccagcactacgccctgccctctactgactggaggcaggcctctgcctactttagaagttaaaccacccgataggccttcgagcaaaagcaaagatccaccgagagaagaagagaaagaaaagaaaaagaaaaagcacaaaaaaagatctcgaacaagatcacgttctcccaagtaccattcgtcatccaagtccaggtctagatcacactcaaaagcaaagcattctcttcccagtgcctatcggacagtgcggcggtcgaggtcccgctcccggtcccctcggaggagagcccactcccctgagagacggagggaagagaggagtgtgcccactgcctaccgcgtgagccgcagccctggggccagcaggaagcggacccgctccagaagtccccacgagaagaagaagaagaggcggtcccggtcgcggaccaagtccaaggccaggtctcagtcggtgtcacccagcaagcaggcagcgccccggcccgcggcccccgcggcccactcggcgcactcagccagcgtctcccctgtggagagtcggggctccagccaggagcgctccaggggagtctctcaggaaaaagaagcccagatctcttcagcaatcgtttcttccgtgcagagcaaaatcactcaggatctcatggccaaagtcagagcgatgcttgcagcttccaaaaacctgcaaaccagcgcttcctgagacggggccagcggaggcagagccgggaggctgcgtgggcttctgggcaggctcacgcagacgccggccacaccatccacctggccgcctccatggacccttggtggcttttgtaaattaatttttgatgacattttgagttttaagatttctgaccagcagtctcttacctgtatatttgtaaatatatcatgtttctgtgaaaatgtattatgaaataaaatgggaggaaacaccttttctagctag

SEQ ID NO: 118647 - DNA, 1000 bp, Homo Sapiens
tgtgcagatcgcgctgcagctggctcacttccgggggtaagttctgcctgacctatgaggcctcaatgaccagaatgttccgggagggacggactgagactgtgcgttcctgtaccagcgagtccacagcctttgtgcaggccatgatggaggggtcccacacaaaagcagacctgcgagatctcttccagaaggctgctaagaagcaccagaatatgtaccgcctggccatgaccggggcagggatcgacaggcacctcttctgcctttacttggtctccaagtacctaggagtcagctctcctttccttgctgaggtgctctcggaaccctggcgtctctccaccagccagatcccccaatcccagatccgcatgttcgacccagagcagcaccccaatcacctgggcgctggaggtggctttggccctgtagcagatgatggctatggagtttcctacatgattgcaggcgagaacacgatcttcttccacatctccagcaagttctcaagctcagagacgaacgcccagcgctttggaaaccacatccgcaaagccctgctggacattgctgatcttttccaagttcccaaggcctacagctgaaggttggagaaatgccagctgccctttcgtccccacactgtggaggaagggacctgtggcagctcacaggcatgaggggtggccgtgcacaggtgcccaggctccaaggacagctccggcagcaggtcctcgctgggcagatgctgctccctgagggcccaggtggtggagcccttaggtacctgtgttttgtttgggaactcggaggccctccccctcccccagctcagaccacagaggtggcaagagaagggctgaagctggaagactgttcatgagggacttgtgtgacctgctttgaaatgtgtgactctgctgagtgacgtaggctctgagatagctgtccacgcccacgtgtttgcttggaataaatacttgcctcagaaccttca

SEQ ID NO: 118648 - DNA, 1000 bp, Homo Sapiens
gcttatgtttgccaagacagctgcagtctctgagagaattcacgagcaggttcgggaccggcagctggagaaggagtacgtgtgccgggtggaaggggagttccccactgaggaagtgacctgtaaagaacccatcttagtggtgtcttacaaagtaggggtgtgccgtgtagatccccggggcaagccctgtgagacagtgttccagaggctaagctacaatggccagtccagtgtggtacggtgccggccactcacaggccgcacacaccagattcgagtccaccttcagttcttgggccatcccattctcaacgaccccatctacaactcagttgcctggggtccttctcgaggccggggcggctacattcccaagacaaacgaggagttgctacgggacctggtagcagagcaccaggccaaacagagcctggatgtgctagatctctgtgagggtgacctgtccccaggactcacagactctacggccccctcctcagagttgggcaaggacgacctggaagagttggctgcagctgcccagaagatggaggaagtagctgaggcagcccctcaggagttggacacaatagccttggcatcagagaaggcagttgaaacagatgtcatgaatcaagagacagacccactctgtgcagagtgccggctggtgcgacaggatcccttgccccaagaccttgtgatgttcctacatgccctacgctataaagggccaggctttgagtacttttcaccaatgcctgcctgggcacaggatgactggcaaaaggactgagggtgtggccaatggagggattgcttcttgggttgtgacaaggatgggctatagggcaagggctgaccccatgggctagtacttggggtttctataggaatgaggacgggcttctaaagagacctgctcatacttgctacctccttccagtgggaatttggagactttttggtttgtaaatatatccctttttctaacatc

SEQ ID NO: 118649 - DNA, 1000 bp, Homo Sapiens
agaccgacactgtgatccctgtgctgggtccggggcccagtgtagcgcctgtccccagccatgctgtggttacctctccttgccgccctgtcaccttcacctcctggagtaagcagcgaggaagagcagcactggtcccaagcagaggccttgccctgctgggaccccgggagtgagagcagcccaaggatcccagggtgcagggaactccagagctgcccacctcccactgccccctcagcacacacacagtccccaggcggcctaggggccaaggctggggcggctttggtcccttttcctggcccttccttccccacttctaagccaaagaaaggagaggcaggtgctcctgtaccccagccccactcagcactgacagtccccagctcctagtagtgagctgggaggcgcttcctaagaccctttcctcagggctgccctgggagctcattcctggccaacacgccctggcagcaccagcagctcttgccacctccagctgccaaacagcagcctgccgggcagggagcagccccaggccagagaggcctcccggtccagctcagggatgctcctgccagcacaggggccagggactcctggagcaggcacatagtgagcccgggcagccctgcccagctcaggcccctttccttccccattgaggttggggtaggtgggggcggtgagggctccacgttgtcagcgctcaggaatgtgctccggcagagtgctgaagccataatccccaaccatttcccttggctgacgcccaggtactcagctggcccactccacagccaggcctggccctgcccttcaccgtggatgttttcagaagtggccatcgagaggtctggatggttttatagcaactttgctgtgattccgtttgtatctgtaaatatttgttctatagataagatacaaataaatattatccacataaaaaaaaaaaaaaaaaaaaaaaaaaaaaaaaaaaaaaaaaaaaaaaaaa

SEQ ID NO: 118650 - DNA, 1000 bp, Homo Sapiens
tcagacccagaagaacttcttttactagcttgcttcctaaatgccttttttcctctccttttggtctccaaatggcctggtcagcttttggtaatattcttcctcatcttccacctagcttgagaaggatgttctccatatagagtttagcgagtgcctaatccctccttttgtaagattttgttccctcagcttgaggaacaacttcatcttcaactttttatttctccctgatgttacagtttggtagatttcaaactggaatagctagcatgtgcttgctaaataattttatgccagccttatcctgtatcctagctgttcttaacagcaggtacaaaaatgcctgtttttcagcaaggttgaaattgggaatgtccttttgaatcagaagaaaataggccatagactcatctcccagcacaaatgggcattctatgaaatggtactggccctaggaggatttcctcaaccactctcctactcttggccttgaacctacctctgggttggatcttactattgtagctgctcactataccctcctgcatgcttagaataatgctttgaggggagcactggtaaaacacagtatttatttttttacctcctttaagaggacttggaggtaagttgcattcattcactcaagtttccctcttgctgtctaatagaagcttactttttgctatatcagcatttgttacagccaatatttaaggacaaaatttagaaaatatatcatttcctggcccatcatcaaactaatacagcttaaccttgcagctaccaatttttgtgtcaagctagatatctttatttgatatctaaggtgcaagaccaacaatatattaagagatctgtagacatgaaggcaaagctcttgtattttttttcatccaaacacctcaatttattttataaattcgttcatttttcctgttatgttttatataatatatggactaaacaaaataaaataacagtgcaaaagagaaac

SEQ ID NO: 118651 - DNA, 1000 bp, Homo Sapiens
gtgcctttggggcatattgtggccaatgagaaatggcgcgggtcacagctggcgcaggagatgcaagggaaaattaagctcattttcgaggatggcttgacaccagacttttatctgtcgaacagatgctgcattctttatgtcaccgaagctgatttggtggcaggaaatggctacagaaagaggcttgttcgggttagaaattccaataatcttaaaggaattgtagtcgttgaaaaaacccggatgagtgaacaatacttcccagccctacagaagtttactgtgctggaccttggaatggtgctgcttccagtggccagccagatggaagcatcctgcctcgtcatccagttggttcaagagcaaaccaaagagcccagtaagaaccctcttctcgggaagaaacgggccctgctgctgtctgagccttcgctccttcgaaccgtgcagcagatcccaggagttggaaaagttaaagctccccttctcctccagaagtttccaagcatccagcaactgagtaatgcttccattggggaactggagcaggtggtcggacaagcagtggcacagcagatccatgccttcttcacgcagcccaggtgagggctggcctcagggccacggcatcttctcccgagaccacaaacaccaggatcttgttttcagctttaaaaaccaagagaatgggccgggtgcactggctcacgcctctaatctcagcactttgggaggccgaagacagcggatcatctgaggtcaggagttcaagaccagcctggccaacatggagaaacccctaaaaataggaacaattagccaggcatggtgacaggtgcctgtaatcccagctacttgggaggccgaggcatgagaatcacttgaacccgggaggcggaggttgcagtgagctgagatcgtgccactgcactccagcctgggcaccagagcgagactccgtctcaaagaaaacaacaaaaaaaaaaaaaaaaaaaaa

SEQ ID NO: 118652 - DNA, 1000 bp, Homo Sapiens
ataaccaacaaatggtaggaagccccatctattgctttttctcaattatgactgcatagtttgtggaaacaaagatcttgaggaagatgagggaagccctcccctcttcatagtccccatctcttctcctttgtacctgtcaacaccagagttcagtgtttaaacagacaaaatataaagtattgagtaggtggttcatatgccgaatccacttggtaggaagaaaccaccagctttatagtgtgcctgatagattttaaacattcctgggcacccactcaagagtgctctttttatcaccttctggaaatccgcaaagttgcaggggcctctggagtgtctcttctctagagagaattggtgggacccccctcagtgcagtggccccaactagtggagggagagaggacttaagtcagatggactcaacagaaatgggtttccagaagaataatgaaaagttgtgggtaggaaaatgaatcatttggactcttcaatgaaatggagtgagcccaggagagctcagccaacagaggcactctgggaacctgttagtaaagccagcctggccaaatgccatttgattttgaacctcgtaggtccccactcaccctctgccaggagctaagtaaggcaggagagctgacttgggactcctggctcggccccaacagggagcccccttcccaccatccctcggcaagctcaccacctcatccttctgccaaggcagctttcctttcttttgtgtgttttctgtgttcttagcctccaccctcctcctgccacccttgtggactaggaccaggtcctgaccccagtcagaaaatgatgatatgtacagtggcacaccttaaccagtcactaattttcactgttgtgaaagtgatttgatttagaattaaacaaatggttttacattacaaaaaaaaaaaaaaaaaaaaaaaaaaaaaaaaaaaaaaaaaaaaaaaaaaaaaaaaaaaaaaaaaaaaaaaaaaaa

SEQ ID NO: 118653 - DNA, 1000 bp, Homo Sapiens
tatcctgtcgctaatgtcagttaaatagcttattcctgtcccacttgatttcactggtaagaatgagaatgaaatacttaaaggttttatttgaggggacttagctgccattttatggaaaaacatgtagtataaaaggtttttctccagggtcatttgacagaattctccaggtgttcagagaaagaggtcgccccaagtggcccagagtcgtgacagtccggaggggctggtgtggccggtgggcgctgcctcttcatctgatggagccaggaggtccgccggtgggggaaaggcttcttccgaggcttctgcactcgcctgggaagaggcccagtcactacaggaccctgagatgtccagaccccttatgcaaagaggcaaaattgttgccttggccccatcatggagtaacttaaaaatacatatctatcttccagaacaagccacacaacaacacacctcccctccttgagcctggcacacagcaccgggctctctgaatttggaaagtgtttcattttgtggcctactgctcggggcaggggggctgagccaggatgtgcaatagaagcaggggttgtcccctctgccagatctgtggggagctgcccaggccacccgtgcacctgtcctgcttcctgcagtccccactccctgcctcctttgagggactgggggactcggggtagggggacagacgggaaagggtctgaatgctctggcaatggcgagaagaagcgatcgccacactgccactctgctgcccagccaccaggatttctgcctggagccctttgccctgtccctgctgcctgaggtggcgtagagcagaggagaagaatttgctccaggccaggagcacaaatcgttgttcaatgaatttctctccaactcgaccttggtaaacggaaatgttgggggtgaagagaaacaatcactatttttttcttttttatctggtaaataattaaaagaaaaaccgaaaaaaaaaaaaaaa

SEQ ID NO: 118654 - DNA, 1000 bp, Homo Sapiens
gcactgagtgtggaagagctttcatccgcaagtcaaactttattactcatcaaagaattcatactggagagaagccttatgaatgcagtgactgtgggaagtcctttacctccaagtctcagctcctggtgcatcagccagttcacacaggagagaaaccctatgtgtgtgccgagtgtgggaaagcctttagtggcaggtcaaatctcagtaagcaccagaaaactcataccggagaaaagccctacatttgttctgaatgtgggaagacctttcgacagaagtcagagttgattacacatcacagaattcatactggagagaaaccttatgagtgcagtgactgtgggaagtctttcactaaaaaatcacagctccaagtgcatcagcgaattcacactggagagaagccttacgtgtgtgctgagtgtgggaaggcctttagcaacaggtccaatttgaataaacatcagacaacacacactggagacaaaccctacaagtgtggcatctgtgggaaaggcttcgttcagaaatcagtgttcagtgttcatcagagcagccacgcttgagagaaacagtgtgagaaaacccccctgagggttgggtctgattgtacactgttgcacgcatgcagcagaaaaatatgtatattattgtaaatagaaatgaccacatcagaatgtcacacatggctgttctggagagggcctctgagaaggcactgaatgaggcgagggacccttcctacattgtcaccatccccagtaaaccttgggtcattattcatactgacaaggaaccgagtcaatttggtgaataggaaaagccttctcatgaaaactacaatagaatactgttaccaaattcttcataagaaagatcatattatgggaatgataatcctgtttactgtggattaggtatagtgccaacagtttgaatggtaagacaacataatatatatgatagtgatgaaaaaaaaaaaaaaaaaaaaaaa

SEQ ID NO: 118655 - DNA, 1000 bp, Homo Sapiens
ctttgttcttagtaatctattatagttacctattttaaggtaaggtctgtaggcaagatatgtaagtaaagacaagccctacaattttaaaataacaaagcttatgtcttaagttgtattttttcaaaggttcatgtttttctgagtaaatgtggtttattagcatgaaatattatgccttttacttaaattattttatgtaaaatagggcactgtttaattatgaaagggggaaaatcattccaaataagagtttaatttttattaattataaaaaactctgtattagtttcctagatgtgctagaacaaattaccacaaactgggtggctttaaacaacagaaatttattctcttaacagttccagagactaaatgtccagactcacaatgtcccagtgccatgcttcctccttaggccctaggaaagaatacttcctagcctcttcctggcttttggtggttgccagcaatccctgctgttccttagcctatagtggcttgactccaatctcagttttgttgtcaagtggtcttctaccctgtcttctatgtttgtatccgtgtccaaactctttttctagggagaccagcactggattagagttcaccatgatccaatatgacctcatcttgactacatccgcaaagaccctgtctccaaataaggtcacatttacagggtaccatgtgttaggatttgacatatcttttgggggacacaattctacccactacaggcccatatcttatctaggatgttggtggcaagaaggtgaagattactacctcttttgatataactagtttctgaggtatttaaaaatttggttttaaaaatattaagctttttgctcatttgcatgtatacttttctctcaacattgttttggtttatttaggttatttgttaaaacttcagtaaatactaaagttacttgtattagaacataataaaagtagagaattaaactacctaaaaaagaaaaaaaaaaaaaaa

SEQ ID NO: 118656 - DNA, 1000 bp, Homo Sapiens
tttatatatgggacttgagcatttgtggattttgatactgggggatcctggaaccaatcccccatggataccaaagtacgactgtagttatctattttttacatacttattattaccaccatgctcagtaagtccatttttgcatggaatatggagccttaaaacatgtcatgaatttggagtccctggcacataaatctaccttcaaatcagaggtccttaatgatgcctaaacatacagtaaaattagaatcagaaatacttctttaaaaaatattcaaaatgtgtttgtttcccatgggattattctctatcccacacgaatgtaaaaaaatccacattaatgatccatttaagtatagttttattgggtccttttctaatgattaaaggttctttctcaatttcattcctcagtcctgcaagtaaggactcatactgaagagtactgaaacaaggacttcttgtcagaaacagcttctggaatcttgggttttgtttttgttttttgacaaaatacactattggccatgtccatcacgagagtgtttgtagtaattaattaccttgtacaggacctggcacttagtagcattcttcaaatgttccctcagtgatccttttactctccttgtcacttatttgggagaaataggggcacgtgagataagaagaagaataattttgatgttggtatgcttgccctgttacttatagacagtctttgtcataggcaaacttgaatttgatttaaaatagggctgggaaaaatattcaataactgtaagcccccttttggatgccaaacttagaattttgtacattctctgatgaacaagcatttagatcgtaacatggtaaagcctattaccagccaatgttgttagcatctttgtatgcacatcactgtttgtgcaatatatgaatattttgttgcattgtattcttatataaaaataagtagaaaacataaaattgaaattgctgatgagaaaaaaaa

SEQ ID NO: 118657 - DNA, 760 bp, Homo Sapiens
ccacgcgtccgggaagcatggaggtccatggcaagccccaggctagcccgagttgttcgtcgcccacccgggattcctcaggagtcccagtgtccaaggagctgctgacggcgggaagcgacggccgcggaggtatatgggacaggttgctcatcaactcccaacctaagtccagaaagacctccactcttcaaacagttcggatagagaggagtcccttattggaccaggtacagacatttctcccacagatggcacgggcaaatgaaaagctaagaaaagaaatggcagctgcaccacctggtcgtttcaatattgaaaacattgatgggcctcatagtaaagttatacaaatggatgtggctttgtttgagatgaatcagtcggattcaaaagaagtggacagttcagaagagagttcacaagacagttcagagaacagttcagaatcagaagacgaagatgacagcatcccatctgaagtcaccatagataacattaagcttcccaattctgaaggtggaaaaggcaagattgaagttttggacagtccagcaagtaaaaaaaaagaaatagtcaaataaattatctgaaaagaaaaaaaaaaaaaaaaaaaaaaaaaaaaaaaaaaaaaaaaaaaaaaaaaaaaaaaaaaaaaaaaaaaaaaaaaaaaaaaaaaaaaaaaaaaaaaaaaaaaaaaaaaaaaaaaaaaaaaaaaaaaaaaaaaaaaaaaaaaaaaaaaaaaaaaaaaaaaaaaaaa

SEQ ID NO: 118658 - DNA, 736 bp, Homo Sapiens
ccagtttgttgttttacctaaaaggtgttttccacgtggagtgggactgagaggcacaggtggctgaggggacccgcctgggacgtgaggcgcaggtgtgctcggccccttcatctgtcagctgcagcaatggaatacgtgctggaagtgaagaactctccgcggcacctcctgaagcaattcacagtgtgtgatgttcctctgtatgacatttgtgactacaacgtctccagggaccgatgccaggagctcgggtgctgcttctacgaaggcgtctgctacaagaaagcggttcccatttacatccacgtgttctctgccttgattgtgatcatcgctggggccttcgtcatcaccatcatctacagagtcattcaggagagcaggaaagaaaaggccatccctgtggatgtcgcgctgccacagaagtccagcgaaaaggcggagttggcctcatccagcagcaagttagggctgaagcctgcgagtcctgggcctccaagtgctgggccctcgatgaagagtgacgaggataaggatgatgtaacagggacaataacagaagccgaagaaactgaggactgactgagacgcatgaagaagtggagattgtcagaattatccaaatgaaatggtacagcaggtgcactgttaacagtgtgatggaatgaccacccaaagagaaaaaaataaaggtattttgaaaattaaaaaaaaaaaaaaaaaaaaaaaaaaa

SEQ ID NO: 118659 - DNA, 1000 bp, Homo Sapiens
ataaaccttcctgagagcatcgtggcggggacccactacagccaagaccgattcctccgggctctgagcaactaccgggacatcaatatcgacgatgagactgtcttcaactattttgatgaacttgaaattcacccgatacatattgatgtaggaaaacttgaagatgctcagaatagacttgctatcaaacagctcatcaaagagattggggagcctcgaaattatggtttaacagacgaagaaaaggcagaagaggagcggaaggctgcggaggagcggctggccagggaggctgctgaggaagcagaacgcgagcaccaggaggccgtggagatggcagagaagatagctcgctgggaggagtggaataaacgactggaggaagtgaaaagagaagaaagagaattactggaggctcagtcaattcccctgagaaactatttaatgacctatgtgatgccaactcttattcagggcctgaatgaatgttgcaacgtccgacccgaagaccctgttgattttctggcagaatatctcttcaagaacaatcctgaagcacagtgaaacttgaaagatctggtattatctacctttacagaaccacagatcacttattatactttgaaaaattgctttgaaaaatgcttttccagttcttagaaaattctttttttgtagacaaatattctataaactagaatctctattaaaagctatatgacatgactatgtcattaaaactatatttgaaatgtaaattgataaagacatttgtgcatagctcatgagacaaatactgatttaatattttattctttagtcagatctaaatataccgcttctgtacactaatgtttataggtatttatagcatgaagaaaatcagactatatattgtagactatgtattattctaacatgtaggctgatttacatgacttgttatcgccccaataacaatgttattagaaatggaaataaattgaagtgatttatg

SEQ ID NO: 118660 - DNA, 1000 bp, Homo Sapiens
tccagcagagcctgcttgaggcgggcagtgagtatgaccaggtcaccatctgggaggcgctaaccaacagcaagccaggcacccaccccatgtcctacgagggtcgccgacaggacaggagcgccccgcccacgccgcagcgccagcctgcgcccccggcgtcagtgcccagccctcggcccagctcagggccaggttccggcggccacgtgttccggagctacgacgagcagctgcggctggcgatggaactgtcggcgcaggagcaggaggagaggcggcggcgcgcgcgccaggaggaggaggagctggagcgcatcctgaggctctcactgaccgagcagtagcgccccctgccgggaccctcgccagcgccacgcgcgccacgcccagggccaggagccagacaaaccccggcctgcgcgcctgcagagcggcggctggagactggagccaccgcctcgcgggtgcagcagcacagcagggagtgtgtccaacgtagccccctggcctgtgcaagccctgactccctcatggtgcctcggagagtggggagcatattgggctggggtaagcactagacccaagtagactggacacaaagggctcgcccagggccctggcgccacccccaccccttcccaccagctgctgctagcctctgtggttgtacatcccacttgcccccacacggagactgactctaaaacccttcatccaatggtgctaacccccggctctcccctgccccacctcacccacccagagaagcacagaccccgccaggggcaggggcccaccgcacacccttgtcccgggcctgtctgggactggccttcccggctcagccagtgaggctcagaagggacacaaagagggatggaagaaaagaacaaagagaaactgttcctcccacccccttccctgatgccaggggcaccagactgattctgaggcacaaataaaagaggcttcataccggaaaaaaaaaaaaaaaaaa

SEQ ID NO: 118661 - DNA, 1000 bp, Homo Sapiens
agccaccgcgcccggccgaatcttgttttcaaacaggtcccaagacacttctgacttagcactttgttagcaatgcattttcctgcatttgtgaagaatccttcatgactttcaccataaaggatggttttgcaaagatatgagaaaaaaaaaatgccaataacagaacccatagaaatgaacctaagtgatgaaagaaaacaaagaaatagagttgtcaggaatccaggtgtacctgagttactaggattggaaggctattgagaggactttgaaatttcacaatttgtggtcatgtcaacaaatcctagtgtaagattcatatttgtgttttctgaggtactttagatgaacagtaaatattcaatagaaaaaaccacgtattatatgatcagtgttttcaagtctatgtgaaattgggtaggtgtggaataaacttgttttttgttaattttaagctttttattttattctagaatatgtattctattcacaagactcaacaaaaaaaagtatcggccgggcgcactggcttacgcctgtaatcccagcactttgggaggccacggtgggtggatcacctgaggtcaggaattcaagaccaccctggccaacatggttaaaccccatctctacgaaaaataaaaaattaactgggtgtggtggcacgcgcttgtagtcccagctactcgggaggctgaggcaggagaatcacttgaacccgggaggcggaggttgcagtaagccgagatcacgccactgcactccagcctggtcaacagagtgggactccgtctcaaaaaaaagaaaaaaagtatcaaaagatgctgtgagaaatctctcttgttgctgtcctttgccaaactcagaactattccatgcaggtgccattgcttgtggcttggagttttgttgttgttttcttggttttgcttgttttttgctttttcactgtacgcctttcaggttttctaatgcatatgcaaataaacatcaatct

SEQ ID NO: 118662 - DNA, 1000 bp, Homo Sapiens
atcttggagtagggtgggccccaattcaaggactggggtccttaaaaaaagggggcctggggcagggcgcggtggctcacgcctgtaatcccagcactttgagaggctgaggcgggcggatcacgaggtcaggaggtcgagaccatcctggctaacacggtgaaaccccatctctactgaaaatacaaaaaattagctgggcatggtggcacatgcctgtagtcccagctactcgggaggctgaggcaggataatcacttgagccaggaggaggaggttgcagtgagccgagattgtgccactgcactccagcctgggtgacagggcaagactctgtctcaaaaaaagaagcgggggagtgggggattgaggccacgtgcagtggctcactactgtaattccagcactttgggaggccgaggcaggaagattgcttgaactcagaagttcaagaccagtctgggcaacatggtgagaccctcgtctctacaaaaaaaaaattatcgtggtgggccgggcgtggtggctcacacctgtaatcccagcactttgggaggctgaggcgggcagatcacaaggtcaggagatcgagaccatcctggccaacatggtgaaaccccgtctctactaaaaatacaaaaattagccgggcatggtgttgcgtgcctgtagtcccagctacttgggaggctgaggcaggagaatcgcttgaacctgggaggcgcaggttgcagggaggcggaggttgcagtgagccgagattgcaccactgcacttcagcctggtgacagagcgagactcgtctcaaaaaaaaaaaaaaaaaaaaaaaaaaaagtgactgtggtggtgcacacgtataatcccagctacttgagagatgacgagggaagatcacttgagcccaggagttaagaggctgcagtgaccgatgatcatgccactgcactccagcttgggtgagagtgggactctgtcttaaaaaaaaaaaaaaaaaaaaaaa

SEQ ID NO: 118663 - DNA, 1000 bp, Homo Sapiens
atccttttataaacattccagatttcatacaggagagaaaccctaccagtgtatcatatgtggcaaagcttttggcaacacatccgtgcttgttacacaccaaagaattcatacaggagagaaaccttacagttgtattgaatgtggcaaagccttcatcaagaagtcccatctcctcagacatcagataactcatacaggagagaagccctatgaatgtaacagatgtgggaaagcattttcccagaagtcaaatcttattgtacatcagaaaattcatacataatattcactttatgaatatgagaaggccttattaaatatttgctaaatcttattaaatactaaagaattcatggtgagaagtctacaatttaaatgaatttggaagagtagattcccataaaaaacaatcaatgccaatcatgttctggaagtgataataaactttttacagaaaatatgacagaaaacaactataaataatagagcataaagcttggaaagtaagcataacttaaaaaatcaaagaaccagtgaaaactacatttgccattcctgacttttaatttttataataaaataattatgcaagtgtgagtttaaaatatatgcttatacattatattaaagtatgcctattaacagtttctgcagtaaataacattttttcttccagtctcaacatacataattaatcaagtgagaaaatgtgttttaatatgtcatatgaatttcagtgatattttcatccatttgctggcacttttaatgggcatgacagtgtttctgaatctgagtctcctttaattatacaagtgaagacttcttattaaaattaatataaagatattttcctatgtatgtaaataccagaacaaaaaacaagacactaattgaggagagaaaggcacttgtattctgtattacagtaagtattcagttgaggaaaagaattatttaaatatgtaaataaataatttgcacttcaaaaaaaaag

SEQ ID NO: 118664 - DNA, 1000 bp, Homo Sapiens
ctctacctaaggtcagggctatatgtgggaagcatggattatatctgaccctgagcctgctggaaacattgcttaaccatcaagatttgggttaccaaaatgaaataaaatggcagaattttgttgagatgctgaccagagcttcttctgatttgttatctgatttgcctacagggaagaatgaaaagaaagcccctgcccctccaatggagcctgaagtccccgagatgtctcaaagcaaaactgaacatatgaaaactccagaagaggagctgcagccagaaagctctcctgctgaaacttcagcctgcaaagatcctctgaaacctttaaagatcaggccagtctcccagcccttcgtgaatccagctgtgaagaacaaggctgaggaatgtgagacgtggatagacaggttcaggaagctggaaaatgccctctacctgtgtgatctgagtaacacaggagttctggagaaggaacgagccagacgcctcattcacaactacaatctcatttacaacctgtccctgagccctcagaaaatcgaccaggccttgcgcagattccgttcgggagaaaatatgctcttggagccagcactgcggtacttaaaggagctatgataacaagcccatattgtgagaacagatgtttcccttatctccctttttacccagacacatgtttctccccagcctaagtgtagtggcggaggcattgtcagagtggaggccgatgcagctattgtagatgcttttgatttggacttagtttctggctatgatgctcactcataagcagttcaaagtgatcagaggaaacctagttttatcttttgatgtggcaagaacccagctacttagaatctccttctgttttaataaaacttattattaatattaaaaaaaaaaaaaaaaaaaaaaaaaaaaaaaaaaaaaaaaaaaaaaaaaaaaaaaaaaaaaaaaaaaaaaaaaaaaaaaaaaaaaaaaaaaaaaaaaaa

SEQ ID NO: 118665 - DNA, 1000 bp, Homo Sapiens
acttctgctcggggctgctgcaggacccagcgcagttccggcactacgcgctcaatgtgcccctgtacacacacttcacctcgcccatccgccgctttgccgacgtcctggtgcacagcctcctggctgccgcgttaggctatagggagcgactagacatggcgcctgataccctgcagaaacaggcggaccactgtaacgaccgccgcatggcgtccaagcgcgtgcaggagctcagtaccagtctcttctttgctgttctggtcaaggagagtggccccctggagtcagaagccatggtgatgggcatcctgaagcaagccttcgacgtgctggtgctgcgctacggcgtgcagaagcgcatctactgcaacgcactggccctgcggtcccaccacttccagaaggtgggcaagaagccggaactcacgctggtctgggagcctgaggacatggagcaggagccagcacagcaggtcatcaccatcttcagcctggtggaggtggtcctgcaggcagagtccacagccctcaagtacagcgccatcctgaagcggccaggcacccagggccacctgggccctgagaaggaggaggaggagtctgacggtgagcccgaggactcaagcaccagctgagctccaccagccgcctgccccgcctgccccgcctgcctgtcccgccacactggctttaggacctgttgacacggaggggggtttttaatttggtttttaacagctcaggggtttgtttttatttttatttaatttttgcagctcaacttttaaacaaactgcaggggagagggtggggctggaaggaaggctgaggcctggtcagcagtgaccccagcagagcaggccccagtcctcctgggaggctggccccccttttttctgggccctactgccctcctctgcccaggaaatgggggggtttcagcaactcagtgtcacagaataaaatcaagtgtggagtgccaaaaaaaaaaaaaaaa

SEQ ID NO: 118666 - DNA, 1000 bp, Homo Sapiens
tggtcctcagaattggtttagggttgtttcgcggttcttcccgtattctgcctccgaggcccagtggggctggctgtgggccccctgtgctgtttgaggcgtgaaactcacctcaggaaatgtatctgatccattagcgtggattcatattatttggtgatggagaatcttcagctgtgttaagtgttaccgtcagtttcagagatggcttctttgcaaaggaaagggctgcaggcaaggattctcacctctgaagaagaggagaaactgaaaagagaccaaactttggtgtctgattttaaacagcagaaattggaacaagaggctcagaaaaattgggatcttttttacaaaagaaatagcactaatttcttcaaagacagacactggaccaccagagagtttgaggagctaagatcatgtagagagtttgaagatcaaaagttaacaatgcttgaagctggctgtggggttggaaactgtttattcccacttttagaagaagatccgaatatctttgcctatgcctgtgatttttctccaagagccattgaatatgttaagcaaaatcctttatatgatacagaaagatgcaaggtattccagtgtgatctgactaaagatgatcttctggatcatgtaccgccagagtctgtggatgttgttatgttgatatttgtgctgtcagctgttcatcctgataagatgcaccttgtcttacaaaacatttacaaggtattaaaaccaggcaaaagtgtcttgtttcgtgactacggactgtatgatcatgccatgcttaggtttaaagccagcagcaaacttggagaaaacttttatgttagacaagatgggaccagatcatatttttttactgatgacttcctggctcagctctttatggacacaggttatgaagaagtggtaaacgagtatgtgtttcgagagacggtgaataaaaaagaaggcctgtgaaaaaaaaaaaaaaaaaaaaaaaaaaaaa

SEQ ID NO: 118667 - DNA, 1000 bp, Homo Sapiens
ttacaggcggggtctcactatattgtccaggctagaagaattttctaatggtctattacacctcccgtgttggcaagtaaattcagaataattttaggttcttttgttattcagtagttttgcagacttaaaagtgtaaatttagaattagaagatgaagctatagtagtaagaatctcaagctgaagggctttggggagccaaagcagcatattacagcataggcttgaacttaaatctcagctcagtcacctgcaggactttaggcaccagtgatttcacccttctgagcctgtttctttattcgtaaaatgattataataattctttcacagcgttgtgaggattaagtgaaatgtgttaaatgcctactacagtaggtgctcagatatttatttttatttttttattatgcacattgtttttcctgcctttttatggctgtctaaagtctagggaaaagggaagactggttaatgatgagtagaaaaaacttgtaagctaatcattcactgacttattttccttccattttctggtttttaaaattagccacaccacaggaaacccacatttttagatggaaagagtaagaaaattgtgtcagtgctcttagttattttcatcttaatggtatagtgaaaagacattgacttgagatgatactaaggaagctttggctcactctcacttgaagaggggatcttggtgttgtagtacttggactgtacaaatgttttactgacttttcttactgctgtaaaggaatcaggcagttgggtattgatatgttatttggtgctctcattcatggcaaaggatttgataaataaaagttctttaaacactaaagcaaaatcaaatgagcaaaactaaggatgaaatgtaatattcatcagaacaaggatcactgagaaaaaatattcagaaacaactttaataaaacctgaattgaaataactgcaaaaaaaaaaaaaaaaaaaaaaaaaaaaaaaaaaaa

SEQ ID NO: 118668 - DNA, 1000 bp, Homo Sapiens
ggaggtattactagaacagtttctgactttgcctcaactaaaacaaattattaccgacaaagatgacttagtaaaaagtattgaggaactagcaagaaaaaatctccttttggagcccagcttggaagccaaaagacaaactgttttagataagtatgaattacttacacagatgaagtccactttcgaaaggaagatgcaaaggcagcatgaacttagtgagagctgtagtgcaagtgcccttcaggcaagattgaaagtagctgcacatgaagctgaggaagaatctgataatattgcagaagatttcttggagggaaagatggaaatagatgattttctcagtagcttcatggaaaagagaacaatttgccactgtagaagagccaaggaagagaaacttcagcaggcgatagcaatgcacagccaatttcatgctccactatagattttcctggaaacatgaactgccaagagaggaatgggacacaaaaccaaacactgttttatatttatggtttgcaaactggcatttcatcagtggctaaattcacagatatcctatatagattgtatacagaactgagactgattttgtaccgattagaatgattgctatgatctttgagaaatttttctgcactatttgcactgaaatgtttatttattgttgataaattgtatcatatttaagttccactgctgttcctcttaccttgattaaatgcctatgcatgtacttttagctagtttttaatattttataaaacttcatttaaatttgtatttttaacttgaagttccatttctttatcaaggatggtatttagatttttttcctcttaaccttttttcaaaaactattttcaactgtgaggaaacccttatttttctttctttgtggataaaactttcaaaagcaatttaagatattcatagtgttaggaaacaccaaacctgcctatgtgccatctcacaaaagaaacttttaatacctaca

SEQ ID NO: 118669 - DNA, 1000 bp, Homo Sapiens
actcagtctctgagaaaacaattggactgatgcgaatgcagttttggaaaaaaactgtggaagatatatactgtgacaatccaccacatcagcctgtggccattgaactatggaaggttgtcccagctttggacagcggaaactccttcacagcggctgctatgtccttgtgacacgcttccgtcattttttggagcactttcttattttctgacacaataagatattctaggatccttttgaatctctcccctgcctcacctttggaatcgcccatttctcgagagccctgattcctttaaggagaatggtagtagagacaagtgtctgggcactaggctgttaaaagacataatctgactaaaagatggcttatgaaaatcgtcgatgaaagagaaaaaaatctggatgacaaagcatatcgtaatatcaaggaactggaaaattatgctgaaaacacacagagctctcttctttacttaacactagaaatattgggtataaaggatcttcatgcagatcatgctgcaagtcatattggaaaagcacaaggcattgtcacttgcttgagagcaacaccatatcatgggagcagaagaaaggtgttccttcccatggatatttgtatgctgcatggtgtttcacaagaggactttctacggaggaaccaagataaaaatgtgagagatgtaatatatgacattgccagtcaagcacacttgcacctaaagcatgctaggtcctttcacaaaactgttcctgtgaaagcatttcctgcttttcttcagacggtttctctagaggactttctaaagaaaattcagcgagtggattttgatatattccacccatctttacagcagaagaatacattacttccattatatttgtatattcagtcatggagaaaaacatattaaaataatttcatggcaaaaaaaaaaaaaaaaaaaaaaaaaaaaaaaaaaaaaaaaaaaaaaaaaaaaaaaaaaaaaaaaaa

SEQ ID NO: 118670 - DNA, 1000 bp, Homo Sapiens
ctaggggttagtatagttgtttaagttagaaaaaacatgctgttgtctgcccctcattcccttcatgaccttgggcaagtcacgtaatgtttttgtgcctcaacaattcactttttaaaaacatgatcgtatgatgaatgatattattttgttatttatatttactgtgattgataactgttgaaccaaaataataaaataattaatttaaacaatgtcaaaatcctttagcagttatgtatatattttctccattgtgtgtttaaattatgtcatgtccagttgccaagcacaatgaaaaagatgtattattttttaaattgaataaaaaattaggaaaaataaaatttctaattattatttttagtatgatatttttaacaagagtctataggcaaacaatatagggtgtgctgtgcattgtcagccctatactgtggtcttaataatgccagcttaaaaatcactgttgtgctctgcatttcgtgtgttagaagctgattctaggctgaggaaagcaagagttctctacttttgctcaatattgaggcttacccagtttgactctacagccagtgaagtggtttattgcttcaataaaaatatacttgaatgatgaatttatttatgttttgttttgtttttatttagagatggggttttgccatgttggccaggctggtcttgaactcctgacctcaggtgatccacctgcctcagcctcccaacttgctgggattacaggtgtgagccaccatgcccagcctgaatgatgaatttatgtgaacacaaagccctctgaaaaattaatgattttcaatttgttgtcttcttgaaaactgaatttaagtattatttaaacagaaaagtgtcagaaatcaaatgcagtatctccctctcccttttttaaatgttgaattagtagggtttttgtatagctttttgtattgtgtgtatttatgatatgtgaaatgtacataaaattaaacaatgtgaaaat

SEQ ID NO: 118671 - DNA, 1000 bp, Homo Sapiens
ccgtgtgggccctgctgcagcgtaacgagttcctgctgctgctgtccctgcaggagaaggagcacgcctccagactgctgggctactgtggggacctctacctcaccgagggcgtgccgcatggcgcctggcacgcggccgcccttccacccctgttgcgcccactgctgccgcctgccctgcagggtgctctccagcagtggctggggcctgcgtggccttggcgggccaagatcgccatcggcctgctggagttcgtggaggagctcttccacggctcttacgggactttctacatgtgtgagaccacactggccaacgtgggctacacagccacctacgacttcaagatggccgacctgcagcaggtggcacccgaggccaccgtgcgccgcttcctgcagggccgccgctgcgagcacagcaccgactgcacctacgggcgcgactgcagggccccgtgtgacaggctcatgaggcagtgcaagggcgacctcatccagcccaacctggccaaggtgtgcgcactgctacggggctacctgctgcctggcgcgcccgccgacctccgcgaggagctgggcacacagctgcgcacctgtaccacgctgagcgggctggccagccaggtggaggcccatcactcgctggtgctcagccacctcaagactctgctctggaagaagatctccaacaccaagtactcttgatggggcagtgaggggcctggccacccttcctggagctggccaggtgccagggtccaaccctccctcaaggaatcctgtcagaagatgtgaaatgcaactgtgttgcaaaatcactcccctaccgtcagggctctggattccagcaccacagacatgagaccccagctcggagcaaaggcggacatggacatcccggcaggagagtcctccaagggggtttgttactctgaagaacgtaatgtcaataaacagcttttatgtaaaaaaaaaaaaaaaaaaaaaaaaaaaaa

SEQ ID NO: 118672 - DNA, 1000 bp, Homo Sapiens
gttgccatttcatgcagtcccagtttttgggaggcaccatgattattattattggtggaatcattgtagcatctgtgctggtattcatcattattctgatgatccggtataaggtttgcaacaataatgggcaacacaaggtcaccaaggttagcaatgtttattcccaaactaacggggctcaaatacaaggctgtagtgtaacgctgccccagtccgtgtccaaacaagctgtgggacacgaagagaatgcccagtgttgtaaagctaccagtgacaatgtgattcaatcttcagaaacttgttcgagtcaggactcctctaccactacctctgctttgcctccttcctggacttcaagcacttctgtgtcccaaaagcagaaaagaaagactggcacaaagccaagtacagaaccacagaatgaagccgtcacaaatgttgaatcccaaaacactaacaggaacaactcaactgccttgcagttagctagccgtcctcccgattctgtcacagaggggcccacgtctaaaagagcacatataaagccaaatgctttgctgactaatgttgaccagattgtccaggaaacacagaggctggagttaatctgaagagcaccacttctcctctctctcctgaaaaaatttgccactgatatttttactggataaaattcaaaaatgtttcaattcacaaaggctaattgttgaactggtgtcatagaagaaattgtctacaggagccaaggtgaaagtctctgatgacggcggaactggctccattagaccatggttcatcctcttttaaaaccaaatttttttttcttctggcctacaagtattttttttttaaaaaagaaaaaaagcctacattggcatcaagttctgtatcaatccatcttacattgccatccatgatttaacagactgtagaatcttgaataatctatatcactttaacaaataaatgttttactatgacaaaaaaaaaaaaaaaa

SEQ ID NO: 118673 - DNA, 1000 bp, Homo Sapiens
tgcacaaactatcaaacatagcggactctggaactgggccaactcttcactgtatgcattagtgattgcagtgtttttttcttcttcagatatttgcatgttccctggattttgtattttttgataaagatatattcttgggccacagtagctggagatataatgccggaggattctttttttttttttttttttgagacagagtctgtctctgttgcctgggctggagtgcagtggcccaagctacgctcactgcaggctccgcctcctgggttcacgccattctcctgcttcagtctcccgagtggctggaattgcaggcacccgccaccacgcccaactaatattttgtatttttagtagagacgggggtttcgccgtgttggccaggatggtctcgatctcctgacttcgtgatcctcccgcctcggcctcccgaagtgctgggattgcaggcgtgagccactgcacccagcctcttttttttttttgagatggagtttcgctcttgttgcccaggctagagtgcaatggcatgatcttggctcactgcaacctccgcctcctgggttcgggcgattctcctgccccagcctcttgagtggctgggattgcaggcgcccgcgaccatgcctggctaattgcatttttactggagacgggtttcaccgtgttggccaggctggtctccgattcctgacctcgggtgatccacccgacttggcctcccaaagttctgggattacattttttttttaaagaaagaataaattaattgtgattaaagttgaaatcaaggcatagtctttccagtctaatttttactgtaatgcttgtatgtcaacagttatgaaggccaggcgcggcggctcacgcctgtaatcctagcggtttggggggctgaggagggtggatcacttaaggtcaggagttcaggaccagcctggccaatatggtgaaaccccatctctactaaaaataccgaaaaaaaaaaaaaaaa

SEQ ID NO: 118674 - DNA, 1000 bp, Homo Sapiens
gtaactgggcatcctgtattttacctgccactgtgtgacagtttcctgcccccaaaggctgccccagtgacggagctctacacagatggaccagtcatgttctgtggaatgggcggcttctccgacttctacaagctccggtggctggaggccattctcagctggcagaaacagcaggaaggatgcttcggggagcctgatgctgaagatgaagaattatctaaagctattcaatatcagcagcatttttcgaggagagtgaagaggcgagaaaaacaatttccagattctcgctctgttgctcaggctggagtacagtggcgcaatctcggctcactgcaacctttgcctcctgggttcaagcaattctcttgcctcatcctcccgagtagctgggactacaggagcgtgccaccacacctggctaatttttatatttttttagtagagacagggtttcatcatgttgctcatgctggtctcgaactcctgatctcaagagatccgcccacctcaggctcccaaagtgtgggattataggtgtgagccaccgcgtctggctgaaaagcactttcaatgagactgtgttgaataaagggccaaggttcttgccacccagcactcatgggggctctctcccctagatggctgctcctcccacaacacagccacagcagtggcagccctgggtggcttcctatacatcctggcagaataccccccagcaaacagagagccacacccatccacaccgccaccaccaagcagccgctgagacggacggttccatgccagctgcctggaggaggaacagacccctttagtcctcatcccttagatcctggagggcacggatcacatcctgggaagaaggcatctggaggataagcaaagccaccccgacacccaatcttggaagccctgagtaggcagggccagggtaggtgggggccgggagggacccaggtgtgaacggatgaataaagttcaactgcaactg

SEQ ID NO: 118675 - DNA, 1000 bp, Homo Sapiens
ccgaagagcctcccaagccagcgcggctgtcacgggcagcggctccccggaccccgcgggctcgggcgcaacttcgtggcgtcctgcacggcacttgggggtcccagaaggccccggcctgaggaggccgcccacctgcgggaccctcctcctcgcgggcgggcgccggcgctgcctggcgggggccgcggaggagccgaaagggcgttgggatccaggggaagggtctgtcctgcgcttcgaatccttgtttgaactttttaaaaattcgaaaactttggggaacgaatgcaacagggagtaaggactctcacccgagagctggcttctgccacttgccctgccggtttcttggtactgggaggctgcaggcttccttctgtgcaccgagacttccttgagcaagtggagctgtgggaattgcactcttggaagatcccgcatgggttcgaggtgaggccgcttcagaacctcaaatgaaagactgtctcctcgtgggagagcacctggggccatcagaaatgtcttttcatctttttctggaggagacgaatgatagggcctggtttacattcatttaactctttatgaccttcactcagctgtggatttgggggcactttgtgggagacttggcttttttttttcttctggttggaagaacctaaattagcgaatgtttttcacaaaatgtattgttcaggatgtgagcgtggcaaatttgtccgtgttctgtttaatgacctctttaaaggtactgtgtactctttaatagggatatcatgtaccaggtgtcccagtagagcactgacatgtgtgtgcctgagtgccagccaccgtgtgaactctttggaggttttgcattttaggtaaataactgtctgtactcttggagtaacaagaatttggaaacaggagaagtaaataaataaggttgcctttttcaaattcagggtttttttttttaaataaaggaaaatttgtagactctttataatag

SEQ ID NO: 118676 - DNA, 1000 bp, Homo Sapiens
cattggtggatctgcagctacacacagaagcccaggctcaaattgtgcagagctggaaagagctggccgacttcacatgcgcattcacaaaggctgtggctgaggcgcccttcaagaagctccgagatgaaactaccttctccttctgtctggagagtgactgggctggaggggtgaaggtggaccttgctggcaggggactcgcactagtctggaggagacagattcagcagctgaaccgagtcagcctggaaatggccagtgcagttgtgaatgcctatccctccccacagctcctggtacaggcttatcagcagtgtttttcggataaagaacgccagaatttgctcgcagacatacaggtgcgccgtggggaaggtgtgacatccacttctcgccgcattggaccagaactatccaggcgtatctaccttcagatgaccactttacagccacatctctctttagatagtgctgactgattctagccctcagggatgaggatgaaaagctggaaacttccacttccccaacctcagagcctgactgtaatgaagagactggcagcacctcctggaacacaagcctaggtgaggcccagtctttcttgggtcttattatttgtgaaggtctctctgcctgtcggctggggcagagactgaaatactgccacctacctttggcatttaatgttcctctcctggcaaaaattcactgccacagacaaaccacccccactcctacccagccagccctcaaaacacaaaggaacaaagacagtccactcagacacttatttaataactgtagaaatccaaaagaattagcatcaaatcttgaagtcgtgagtgaagctgcgggttggcttgactgggctcagccactgagctgcctcaaccggccaaggaacgggattatgatgactatgcggacttctatattgtcttcatctcattgtgtgtattatgtatttagtttcaataaagcatttgtaccaatg

SEQ ID NO: 118677 - DNA, 1000 bp, Homo Sapiens
attgtcacggtggttgctgccttcgtctgcacttaccttggaagccaatatatcttcacagaaatggcctcgcgggtgctagctgcattgatcgtcgcctctgtggtgggtctggccgagctgtatgtcatggtgcgggcaatggaaggcgagctgggagaactgtaactggtgcttcatcatcaagtctagagaagactttgggggcttcaggctccaattggcagtcaccgactcagtcaacccatcagactttttgtattcagctccagttagtcagaagaccagcccaggccagctgctgtttctgtggggagccctaatcttctgtgaatttccaaagggagcattggaggagattgagataacacatctttaaaacagaaagaactggtcttggtctatcagtacctcttcctgaatctggtacccatctgccttctccagttcattctaaacactgctgggactagggtttttccatcaggagcaaatggaatccaggccttcccagaagtagaccatactgccttgaacttgtccatatgtacaaactaatcaccagctttctccatacatttttaatgcagacctgtaattgagttcagaagcctccaagaaaacagaaaggatcccctttctccagtttgtgctggaagaggagctgatcagagacatcaaataagagaaagatgggttgctagaggatggtagaactggaagcaaggcagctacctttttgcaaaaggaaatggtgttaggccccttttccagaagataagacagactcatagagattaaatgatcactatggtccttcttctgttaaatggagccaaagacgcctatgttgttctgaagtcttgtaatgtttaacttctgagaacttagattagtggtgtgatgatagagtctgtataacgcattgaaaagggtatcaggcttagttatttatccaataaatatttattgtatgcagggtaaaaaaaaaaaaaaaaaa

SEQ ID NO: 118678 - DNA, 1000 bp, Homo Sapiens
tgggatgagagcagatgccgcggtgactgcaaggagcctgacaagtgctgctggagacacaagcagtgcactgggcacatcatctaccctttcgcctctgactgtgtccgccacagcctgcacctacactctgtcaaccactgcaactgtaattctaggctgaaggactcttcagaggatagcagcagctcccggggcgcgggcccaacctgctcccatgtcatcgagtccccttgctttgagctcacaccggaggaggagcatgtggagcgattccggtatggctggtgcaaaagctacagacctgtctctgtggcagtgatccaccatccactctaccatgagtgtggggcagatgatctaaatgaagaagaggaagaggaggaggaggaaagcaagccccccatcccgacacaggtggggcccgccaccgcctcccctgacctaggcaccagcatggccactggtacccctgactccacagcgcccatcaccatctggcgctctgagagccccacagggaagggtcagggcagcaaggtgatcaagaaggtaaagaagaaaaaggaaaaagagaaagacaaggaggagatggatgagaaggcaaagctgaagaaaaaagccaagaaaggccagttgactaagaagaaaagcccggttaaattggagccttccccgccagacgtgagccgatcattaagcgcaagacagctggccaggatgtccgagtccagcccagaaagccgggaagagctggagagcgaggacagttacaatggccgggggcagggagaactgtccagcgaggatattgtggaatcatcatcgcccaggaagagagagaacacagtccaggccaaaaagacaggggcaaagccctcacaagccaggaaggtaaacaagagaaaatctcccccaggatcaaaccccaacctcagttgaggccagggtggtcagggtgcagaataaatgccatcgagcctgaaaaaaaaaaaaaaaa

SEQ ID NO: 118679 - DNA, 1000 bp, Homo Sapiens
tggacatcgtggcggggcagacggtcacctggatgggcctcttctactgccccctgctgcccctgctgaatagcgtcttcctcttcctcaccttctacatcaagaagtacaccctcctgaagaactccagggcatcttcgcggcccttccgtgcctccagctccaccttcttcttccagctagtgctcctcctgggcctgcttctggctgcagtgcccctgggctatgtggtcagcagcatccactcctcctgggactgcggcctcttcaccaactactcagcaccctggcaagtggtcccggagctggtggcccttgggctcccgcccattggccagcgtgccctccactacctgggctcccacgccttcagcttccccctcctcatcatgctcagccttgtcctgacggtgtgcgtctcccagacccaggccaatgccagggccatccacaggctccggaagcagctggtgtggcaggttcaggagaagtggcacctggtggaggacctgtcgcgactgctgccggagccaggcccgagcgactctccgggccccaagtaccctgcctcccaagcttcgcgcccgcagtccttctgccccggatgcccatgccctggctccccgggccaccaggccccgcggccgggcccctccgtcgtggatgccgcgggactgcgttccccttgccctggacagcacggtgccccggcctccgcccgcagattccgcttccccagcggcgcggagctgtaacccctacccctgcctccccgaagcctccctggggcccctccaggcctccttactccatcttccagacccctggcgaccaccgcccctctcagtggctccagggcctccctcagaggtccccaaagatggacacacaaccccagcggcagcaggaaaaacatatgggaattttctttctatattttaatctcatccctttaaaatgtctattttttattgtgttttttataatatacataatctat

SEQ ID NO: 118680 - DNA, 1000 bp, Homo Sapiens
gagataatctccagtctctgtgcagacactgtcattgcactttctgctgaaatggtagtttcttgccagcaaggtgagattatggaatccagaatcttttttcaggggccacatgcccatttccccacttgcatgaatgtcgacactgtagccacagttttggccgtaaatgtgaatttggcaagtaaccactgttcccaaattgggaaatgtcccagtcagaagaagattatctgggacactgatactgacagggagatgggacattctgagggacccggaggcagggagccacctcctcagcttccctgagggctgcctagaatctctcttgtttcctctcactctgaattattcttcctctcatgactgaccaaatacatggaacctcacaaagtccattttaagagctttatcttgtgaagtgaagaacatgaagatagtttgaatcaaagttattgagtggacacttaatgtctttataacattttttacatatgtgtttgtgttttttggggagcataatttgcaaatggaatatctgttattttactaagatgcttcatggatacaagagttaaaacttcctgtcccatttagtgaaacaaaaggttaagaaatgtggataaagcttgtaagttagaaatggcaagataatcagctatatgaagaatctcagctgggtgttttggctcaggcctgtgatcccagcactttgggaggctgaggtgggtggcttacagggtcaggagttcgagaccaccctggacaatatggtgaaaccctgtctttactaaaaatacaaaaattacccaagcatagtggtgggtgcctgtggtcccagctgcttgggaggctgaggcaggagaattcgttgggcctgggaggcataggttgcagtgagccgagattgcaccactgcactccagcctggtgacagggcgagactccgtctcaaaaaaaaaaaaaaaaaaaaaaaaaaaaaaaaaaaaaaaaaaaa

SEQ ID NO: 118681 - DNA, 1000 bp, Homo Sapiens
gtcagcaaagttctgagtgctccaggaagaagaggaaggtcagtgaaccagtgaaggtcttcatccctaacagaaaatgaaagctaaatattccttctacatttattttaaaataagtttattttgtaaaaacatgcataaactgtcttagcaggaaagtacattcctgttaccaaaacctttttctaaattttttgctcaattttttttgtcagttgctaagtgctaaattactggccaggtaggacgcgagtccactttgccataaggaaagcgggtcaatagggctgcctctggatagcattacttcaaagctgggttagagatgaggcaccttttatattatatttgtaaaagaaccacagcagctattttggaaagaagctgttgttctcaaaggaaagaaggatttttttgcataattaaactcttcagctatttagactactgtgaaatgttttgacttgttgtaacctgtatactggaatccctctctagctgtattaaaaattcccacagagttgcataggatgtgtggaggtgcttatccaggtgtgatttatgtgttaacctcagtcacgaggttgatcagctaattgtgggaccaaaatgtgccctgcctcaactctggccccaggccctgttctgttatccaatccgaaacacggaacatgctgcaattcaggagtctggctctcttcttaagacctatattaaatatttcccaagaagcacttcagtttatcagtctgtaacctgcaaatgatgctattagttccctccttattctggaagaatttggatagacttaattgatgattagtatgagatgaacaatagatgacttaaagtgttatttctattatttatataacatgagatttagtaacttataaaatgaggtttagtaatttaatttaaatggataggaccaataagttaaatattaagtgtgtgacttatggttaaataaaatgaaaatacaaaaaaaaaaaaaaaa

SEQ ID NO: 118682 - DNA, 1000 bp, Homo Sapiens
aagaaaaagaaagaaaaccattctctatttttccatgggtatgatctggcttaaaacaatatggaatattttcctgacagacttgaaaactaggatcttcctcagatgtctgtaaataactctggtatccaactgggtgtattctagtgtggaacaaaaaacagtgaacacaagtgcttacttgtggatactatcttaccaacggatcacaaagttctctttttggtgtactgttgttgacagggattgtgtactgtttcgacccaagtactgctgtatcctgtgtagtactagatctgtatctcttgtctgaattaaacatttttagttgctgtgtaaatgttaggaagcaaagtagctttgaattttctctgtaagagaataaaagataaaataatgtattttctttatttcacattttatttggagatatttaaatgaaatagaaagccatataacatagctataattactacctgtttgctatttttgtttaacttattttgtagcttcctcactggtttgtgttgctaagcaaacgtatacaaacagaaaaagagcttcctaaattgcacatttttgcacctcttgtgcattctgcaagaagacaatgaatccatgtatttctatataagtatcttcttcatttttaacctgttttcatttgtaatgatgctacataattttgtggctccctaatgcaataatgtacagaagataaaaaaatttataattgaacaatttgtctttctgttcgctgaatatattgcaggtcatgctcccatgcccccctttctaagccgatatcaacaagactggaatgtttgtgatatcaggggcaagagttatcatagaacaacaaaatagagtggactcttttagagcatctatatctgcaacctgtaaatggtaaaatgtctgtgtatttttttaaatgtaccttttcaataaaagtacaaaaaataaaaaaaaaaaaaaaaaaaaaaaaaaaaaaaaaaaa

SEQ ID NO: 118683 - DNA, 1000 bp, Homo Sapiens
ccctagattttccacagaatgagcctcagatcaagaatcagtttaataagaagctatcaggaagacttgaaaatacaaaacagcaattgcagctgcctcttcatccttcatgggaagcaagcagaaggcgaaaagaacagcaatctaatattgctgtgtttcaggggaaaaaaaattacgtttgatgattgattagtgcctctttctgcaaacttttccatctaaaaaaaaaaatgttttttttgagacaggatctcattctgttgcccagactagagtacaatattgcaatcacagctcactgcagcctcaaactcctgggctcaagtgatcctcccacctctgcctcccaaagggctgggactgcaggtgcatgcactaccatgcccagctttctcaccccaggctctgcagctattacttaaactcgtatttgaataagtctcttggggagaattatagaatgtttgtttttgtatttttttttaaagtaaattcaacttacgcttatataagcctttcacaaatccaatatgtacttaaattgatttttaataatatccctcagactgtttcccttatgaagtaatttggggattttagtgatctcatattttctctttagtgcttatcatgaaatgtgcttcactggttcagctctgttgtttccttaaacataaatgtcaatatatatttaaaataataatggaaacataggaaatcagctatttaaaccagatcacccttgttaaaaatcattcttgttagcaaactaaaatagtaacttttattatggatgtacagataaatattaattttattatagttttaagtacttgtgatcatgtactttttgattctaaaatagttgtctaggacaattttgggattcttaattatattttagttaagaaaattgtttaaatatagcaatacaaccaataatttgttttatgtttcactgcatataaatatttccattaaatcaagaatgtatatt

SEQ ID NO: 118684 - DNA, 1000 bp, Homo Sapiens
ctcattatggaagacaaagaaatccccatcaagagtgagcctctgccaaaaccgcccgcatctgccccaccatccatcctggtgaaaccagaaaactcaagaaatggcatcgaaaagcaagtcaaaaccgtgagatttcagaattacagccctcctcccaccaaacattacacctcccatcccacctccggaaagcctgaacagccagccaccctcaaggcgtcccagcctgaagcagcgtccttgggcccagagatgaccgtcctatttgcccaccgaagtggctgccactccggacagcagacagacctccggagaaagtcagctcttgccaaggccacaaccctggtgtccactgcctcaggcacgcagaccgtgtttcccagcaaatgaacctacgggtggcttttcctagaccccaaagaggtgaattgcatttaaatacagtctgcctccactgagggcatcctgccattctttggggacttgagcatgggtccttgttcttcctatttcacctccaggaaagcaaaagtgggagcagaaattcctgccctgggtgggaggatagatggcgtggccttccaaacatacaaacataatgatttgatgccacaaagctcgcttactcagaccaaggagtgaaaaattgtcgtgcccactttatgccccagcatggagtatgtggcctcttgtcatccccgtgttactgtgtagaatttctatggtgtcctaaagggggctgcagcaggggtgtgacaacggtgggattgttggcgttgcttctttgaccttacaatatcctcaacaagcattagaacaacttctgccatcttctggggcctgtacactggccactagtagctgccatatctttttccctctgtaaagtcataatcctggctgcaaagggaggatttctgcgcggggtgtgaggtggatactttgaacattctgagaacccaataaaactagaaggagccaaaaaaaaaaaaaaaaa

SEQ ID NO: 118685 - DNA, 1000 bp, Homo Sapiens
ttgtttattctgtggaattgacttgacaaagcatgaagatattcccagtgtctgtctgataatattttgcatctaagaatgggtttgactcaagatcttgggttaccaagatgtcttaaatgttcagtaaatatctttcttacagtccagtagcttagagcatgtttgctgattgatattacatttaaacttggggctacagcttgttacctagaattttgagatactaagagaatgcaattttaaatgcccactggttttatttgttttggagagagggtctcattctgtcacccaggctagagtacagtgggaacagtcatggctcactgcagcttaagctcactgcctgggctcaagtgatcttactccagcctcccaagcagctgggactacaccaccacaggtatgcaccaccatacctggctgatttttaaaattttttctagagatgaggtctcactatgttgcccagctggtctcatactcctcagttcacgcattcctcccacctccacctcccaaactgctgggattacaggtgtgagccaccatgcccaacacccactgatctttaactctcacatgttgggcataagaagtcactatataattgttactggaaagcaagacttaacgaacaattctgactatgaaaaatgtctctttcagtttgttctgtaaatatttagaaaagtgacagctgtcaacctcagagtaactatttctaaaaatgtaaatatgtattaatccttgtatcttttatggtaattttgcatattgatatgaattatataaaattgtttaaaataaaaggtgtccttgaattactgaccacccatagatgtctactgttaccaggttttacaatgcaaattttcactaatacctgggtttaatacagctcacatcactgaatgttacacatgagtttaaatgggtaatatacaggttttgttataataaagttactgattaaattaaaaaaaaaaaaaaaaaa

SEQ ID NO: 118686 - DNA, 1000 bp, Homo Sapiens
ctcagagctggagacggctcagaaactgctggagtatcataggaacatcgtcagggtcattccctcctaccccaaaatcctcaaagtcatcagtgctgaccagccatgtgtggacgtcttctaccaggctctgacctatgtccaaagcaaccatcgtactaatgccccgttcaccccgagggtgctgctgctcgggcctgtgggcagtgggaaaagtctgcaggccgccctcctggcccagaaatacaggcttgtcaatgtctgctgtgggcaactgctgaaagaggctgtggcagataggaccacgtttggcgagctcatccagcccttctttgaaaaggagatggcagttcctgacagcctcctcatgaaggtgctgagccagcgcctggaccagcaggactgcatccagaaaggctgggtgctacacggcgtcccgcgggacctcgaccaggcacacctgctgaaccgcctgggctacaatcccaacagggtgtttttcctgaatgtgccatttgattccatcatggagcggctgactctgagaagaattgatccagtcactggggaaaggtaccacctcatgtacaagccacctcccaccatggagatccaggctcgcctcctgcagaacccaaaggatgctgaagagcaggtcaagctgaaaatggacctgttctacaggaactcagctgacttggagcagttgtatgggtcggccatcaccctcaatggggaccaggacccatacacagtcttcgaatacatcgagagtgggatcattaatcccctgcccaagaaaatcccctgatgggttcagagccaggagcgctgccccagggaaagagttaatcccctgcccccagccccccagcctcggcacagctcccctaaaaagccaataaagcctgctggatacagaaaaaaaaaaaaaaaaaaaaaaaaaaaaaaaaaaaaaaaaaaaaaaaaaaaaaaaaaaaaaaaaaaaaaaaaaaaaaaa

SEQ ID NO: 118687 - DNA, 1000 bp, Homo Sapiens
tctttggagagagcatatccatctcctcctcactgcctcctaatgtcatgaggtacactgagcagaattaaacagggtagtcttaaccacactatttttagctaccttgtcaagctaatggttaaagaacacttttggtttacacttgttgggtcatagaagttgctttccgccatcacgcaataagtttgtgtgtaatcagaaggagttaccttatggtttcagtgtcattctttagttaacttgggagctgtgtaatttaggctttgcgtattatttcacttctgttctccacttatgaagtgattgtgtgtttgcgtgtgtgtgcgtgcgcatgtgcttccggcagttaacataagcaaatacccaacatcacaaagatgatctttcttcttttaacttgatgatgatgtgcaggcacaaatctttggagaaggcttaactgtggaatagatgaattctagaactcttgaccctgcaatgagaaactgtgacagatctgtgtcaattaacttgattagccagaaattaatcacaggcctagagaccaaagaaaaagctcccctgagtctcaggcaacagttttgtcacggatgcaaagcttcctgaaatcatgaatgctggactcagtttggcaaacgcttacacctattatgttctgagattctgagaaccagaatgcaaacttaagtaagatacagttcccactgtaggtgttttaatcctggtcttatatagaataaaccagtactttgctgagtgaaatcaccatatagaattcagtattaacagatcatgcattcagatgcttgaatgtgcattcttgttgtgggcttgatttagatcctattgcggggtcattacgcaaaaattcaatcataccttccatagacaaatgtctgatttttgtttaaatctgtccgttaggtggcctttccttatctgaggtgtagtggtctaacatttaggaagccttgctttgactttatcgggcagcatt

SEQ ID NO: 118688 - DNA, 1000 bp, Homo Sapiens
caccccaagcccccaacccgagtctttccgagggcgagattccagtcttgctgctggacgactacagtgaggaggaggaagggaggaaggaggaggtgggaacgcctcaccaggacgtcccctgtgattaccatccctgcaagcacctgcagaccccgtgcgcggagctgcagaggcggtggcggtgccggtgccccggcctcagcggggaagacaccatcccagacccgcccaggctgcagggggtgacggagaccacggacacgtcggcgctggtccactggtgtgcccccaactcggtagtgcatgggtaccagatccgctactctgcggagggctgggcggggaaccagtcggtggtgggggtcatctacgccacggcccggcagcaccctctgtacgggctgtcgccgggcaccacctaccgcgtgtgcgtgctggcggccaacagggcgggcttgagccagccacggtcttcgggctggaggagcccgtgcgccgccttcaccaccaagcccagcttcgcgctcctgctctctgggctgtgcgccgccagcggcctgttgctcgccagcaccgtggtgctgtccgcatgtctctgcaggcggggccagacgctgggcctgcagcgctgcgacacgcacctggtggcctacaaaaacccggcctttgatgattacccgctggggctccagaccgtcagttagcccagcttctgggataacgcgtctcatcgaactggatctgagcgcaaaaaggaagacacagacggtcaaaaacgaccccatccgctcctagggtttctaattcccgtgaagccagaatgccttgagcacacatggaacttgccacactgagtgtctgggtccaaggaactgctgccctcccttccttctacttaactctgttcccagaaacctgatggtcaatgccagatcgctccccactgcaaaaaaaaaaaaaaaaaaaaaaaaaaaaaaaaataaaaaaaaaaaaaaaa

SEQ ID NO: 118689 - DNA, 1000 bp, Homo Sapiens
ctggaggcatcaaaggctgcatccgttctgccaacagctgttcggagagactcgttccagatcatcccgtcattttcagtttgttggacattttacagcttcaccaggagaatgtgcaactttattccagcattcgatgcatttttatagaaacactttggaaacactttggatgaaccaaggccttttccttatttaagtagactcagaacactccctttcttttcttttctctctctctctctctttttttttacgaaagacttagaattgcatttgtccttttgtgggtgtcctgtgagaggtgatatgggggctaagaggactggctttctaatagaagaagtgagcgcctgagaggacaatttggtcattggacacggattgcaggctttgagaagcgctcagaggcccagggcggcgggctcagccattcggcttggggcaccaggctccccagagacaatgctcagtattcattcatacacagacgatggaagaagccacttcttccctgggcggtgtgggtttcccccagctcttcccacacgtgtgttaggaaatgcccgtgaacttgccctctgggctttttaatgagaggcttggcgcatgcggcacccagcggctgcttccctgcaagccagcgacttgccgagcagaatgagctctgctcctgagccccggtagctgcttcctcatctgcatttcatctggagcagggcaggtaaccacaggaggaggcatgcccgaggcagccaggactgggcgggaaggtgctccctggatatactctgtgaaccttctggaaggctgctggcagtttttcctttttgtccaccaccctgctctttttaataattgtacataatccgtgtatttgttttacctgctcatcttctaaactggcgagccctatagttcgttctcattgttagattttgccttttacaagtgtccccaacctgcaataaacttttccctcttgaaaaaaaaaaaaaaa

SEQ ID NO: 118690 - DNA, 1000 bp, Homo Sapiens
tggcgctgtcctgccatgtctcaaaggaatgtttgagaaacttcatctaatattagttataaggttgtggaatttatgcttggcccaccttccaagactggcactgcccaacagacaccgctgaaatcatgtgggtatccctaggatggccttcagagccctcaaacttacaagcacctggtagttgacatcatatggggaattttctattcaccgtacttatccaaaaatctcttttaaaaagtaaatttgtgcaacaacgtttatttgaaagataatgtcttctcaaaatcagaaactgcagtggtaattaaattaatagaaaagagaacaaactgcaggtttagaaaaatggttttcatattcaccattcttccacctcattgaattgcatgctgtagttctagcttttctgctataatatgtaaatatgactgtagccttttaagcttcagtctcagcagagaatttcctaaatgcgtttgacctaatgaaactgatcatggcttcccacttaggtttttcttcttatagctttatagaactatataataatatggacttgctgtgtaatggaattaaagtgcttttgcacaataagttctgcaaaaccctctcattcatgaaaaggtgctccttgctagacagaaacttgctgatttacagtattgttatttttgtctaaagttctgtaaatacatgctttaatgttatctttgagaaatctatgtaaataatatagtctacaacatagagactgtataattctgtgttatatatgtgcctagtgctctgttggcactcaataaattttaagtaacaaaattgataatcatatagcgaaggcatatttttcttccaagctcaagtcaggattgtgactatatattaatgagactcagtaatccaacccacacctgagaactcgtctcattactttatagtcatgtcatgtatgtttttttaaccatgaaatgacaataaaatgatttttaaaatg

SEQ ID NO: 118691 - DNA, 1000 bp, Homo Sapiens
ccctgcctgggttcaccccccacaacccagacccagaaccgctctccccttccctgcccagtgcccctcttccccagcccagacccccaggtgcccaaggcctgctgctggagcaggcaccttgggctgggcctgctcccccagggcccagggccccccagcttagaacagcccttggtgaggtggtcatgcccgggcaaaggccctgcttcctggaaaggacactcagagcagctccaagacagaggctctgtggcgggggtccctgagagtgcccccacccatctcatgccccagggaccgccactgcccaccgcctccagcagccatgcatgtgcgcccgcagccctgcctccacagctcgccacacactcacgcttcgccagagacaggaagtgcgctgcctccacggccccttgcccttgctcaggttcttggaccccaggcagctggtgtggagccccttggccagggccatgggagtcccgcgcagtcagctccacattggcctctgcagctgggtgaccagagccccgggcacggccccagctccgtggggctctcacggtgccaatcacaagacccagggttgtgcttttgagttttagaattagtcattctttagagcagccagctagtggcatttctaggaaaactgtgacctgtgacaaatcgctgcatttttaatgtcaagatgtgttttcccacataaattcaccggagacatccgggccccgcttcgatgtaacatgagaggaagtcggcgtcctggccacgaaatgcagttcacttttttttaggcttttatatggattatgttttgctgacccacgcccgcattttcagattttgtatctaacagacagtgctcagtgcaaatcaacattccagcggtcaggactgaccccggggcagcactgggctcaggcttcagcgcgactgtccgcatggctccctcccgtcctggcaccaatttctgaataaagtcctttctaccagc

SEQ ID NO: 118692 - DNA, 1000 bp, Homo Sapiens
gagctcggcacccacggtggtgtctgtgctgtgctgctttggtctctggatccctcgttccctggtgctggtggaaatgaccatcacctcgttttatgccgtgtgcttttacctgctgatgctggtcatggtggaaggctttggggggaaggaggcagtgctgaggacgctgagggacaccccgatgatggtccacacaggcccctgctgctgctgctgcccctgctgtccacgtctgctgctcaccaggaagaagcttcagctgctgatgttgggccctttccaatacgccttcttgaagataacgctgaccctggtgggcctgtttctcatccccgacggcatctatgacccagcagacatttctgaggggagcacagctctatggatcaacactttcctcggcgtgtccacactgctggctctctggaccctgggcatcatttcccgtcaagccaggctacacctgggtgagcagaacatgggagccaaatttgctctgttccaggttctcctcatcctgactgccctacagccctccatcttctcagtcttggccaacggtgggcagattgcttgttcgcctccctattcctctaaaaccaggtctcaagtgatgaattgccacctcctcatactggagacttttctaatgactgtgctgacacgaatgtactaccgaaggaaagaccacaaggttgggtatgaaactttctcttctccagacctggacttgaacctcaaagcctaaggtggatggcttggacaatgaaaggatgctgtactcattagaatacaagattcctttactgtccctcaaccttgaccaaatgggaagcattcccccttgtcaacacaagctggcagatacatttgactctacagatgaaggtgaacaatgttaggataaaattgctttggatcttgcctggaaggtgttttaagttttgtaataaacaagatgatgtctgaaaatgtgtaaaaaaaaaaaaaaaaaaaa

SEQ ID NO: 118693 - DNA, 1000 bp, Homo Sapiens
agaccagagaggtctttccatacaatgaaagctataactagctggttgtgtttaaccactgctatcacgctatcctgggactgcatagaactttgacaaaagacagacttcatggtacacaacttcaacagattttctgtcatattctcaccagcacatctgaatgaggctttgtgttttccttgctctcttgcatgttccttttcaactcatggcccacagtgactctcagagatttatgccaaaattgcatacaattgttttctgaatcataacttgtctatttttctgcctatgtgtgctactttcagtttgtttctcatcaacattttgactctcagaagagcctccatttgcccctttctctctttaggtatctaagatctttgaacacctggacctttacatttgatccaaccctatcaaataatgaacttctcagagaggcatctggggtcctggaacttcatgttgatgaagtcatattatataatatgataaaaatattctcatgcagtattttaaataatttcaaattctagaagaagcaaatttcagcgacatgtcattgagtttttatttggtaaagctataattgtgcagtgtacaaagcactttttaaaaagatagtttattctgtcagggtatatgaagttagtatacagccagaacagccaagcctcaattcttgtaccttgtgtctttttattactgtttaatcaatagatatcatatgtttatgacagtttcaagaattgtttttaaacccaaacttaattttatgtttcagactattgttagaaaaacaaaacaaaaaacaaaaaaaccctcactaatttgccctaattggatagggcaatcaggacaaaatctgactttcgaatatttaaaagatatgtaagtttgattgcattttcgtacattttaagcaaactaggttaacaacaacatagcctagtcaaacttctcaggaaacttgttttaataaatatgtaaaaat

SEQ ID NO: 118694 - DNA, 1000 bp, Homo Sapiens
gaaactttcggctatataaatcatcaaaaattggaaagcgtgtggctttggaggttactgaagataacaaattttttcctatacagtcaaaagatgtttctgacgaatatcaatattttctctcttctttggtcagcaatgtcaggttctcagatactttacgaattcttacatgtgagccatctcagaataaacaaaaaggagttggatattttaacagtatcggcacttcagtagaaaccattgaaggttttcagtgttctccctatcctgaagttgatcattttgttctttctttggtgaataaagatggcattaaaggaggaattcggcgttggaactactttttcccagaagaattactggtttatgatatttgtaaatatcggtggtgtgaaaacattggaagagcccataagagtaataatataatgattctggttgatctgaaaaatgaagtttggtatcaaaaatgtcatgaccctgtatgtaaagcagaaaacttcaaatctgactgtttcccattacctgctgaagtatgtctcctgtttcttttcaaagaggaagaagagtttacaacagatgaagcagatgaaactaggagcaatgaaacccagaatcctcataaaccatcacctagcaggctgtcaacaggtgcatctgctgatgctgtctgggataatggcattgatgatgcttattttttagaagctactgaagatgctgaattagctgaagctgcagagaacagtcttctcagttataacagtgaagtggatgaaattcctgatgaactaattatagaagtattacaagagtaactaattcactatgaacacttttgtcaccaggctataatttgcctgatgtctgtgagatttgataaatatatcattcaacctgtttatataaactaagttttattactttgctttccaatttttgttttttacttctgtaaaccaatttcattaaaaattagctttggtgtaaattcagg

SEQ ID NO: 118695 - DNA, 1000 bp, Homo Sapiens
agtgactgtagcctacactccatgcttccttcatattggaagaaaagtttctggtagagagtcggccgggtgcactggctcaagcctgtaatcccagcactttgggaggctgtggcaggtggatcacctgaggtcaggagttcaagaccagcctggccaacacagtgaaaccccatctctactaataatacaaaaattagccaggtgtggtggcacatgcctgtagtcccagctactcgggaggctgaggcatgagaatcgctgcaacttgcaaggtggaggttacagtgagctgaaatcacgccactgcactccactccatctcaaaaaaaaaaagagtctacattaaacagattccaaagtaaagtttcttcatcccaatgcatggccatgatttacacagacgtgcctagcatggctcatcaacatctgaacggttgttccctaccatgcctctgcaggcattccacagagtcaggagatgggttcacaggtaaagattgggggctttagtggcttgtaggggacaactgctcagttgcagggagagggagcatttctagaaatagccagattttgctgcccaactagatctgtcctcctggttttagggggcccttcttgatcccctctgagtgactgagggaggttacattgtaaaatatgtccatgagccaaacaggcttatggaaagttcttctacacacaaaaaaatcaaagctctcctctccccatccccaaccactgctagaaaattggccataatgaaactgacttgacaggttaaaagaccctgtcctagatgcccaggaatcaggtagtcacacattttatggacttcatggcagcgatgagtaatctgtgatgatactaaatagaagcaataataactaactccattaaatgtcacgctgattgtctgtttttatagcaaaaaaaaaaaaaaaaaaaaaaaaaaaaaaaaaaaaaaaaaaaaaaaaaaaaaaaaaaaaaaaaaaaa

SEQ ID NO: 118696 - DNA, 1000 bp, Homo Sapiens
gcgacatcgggggtacctgtatacaaagtcatagctccaggggggcattgtatacatgaaaatcaaacctgtgacccagagatttttaatacaactgaaattgccaaagcttgccctggggctctgtgtaactttgctttctatggtggaaagagcttgtaccatcagtacatccctaccttccatgtatacaacttatttgtctttctctggcttataaacttcgtcattgcattaggtcagtgcgcccttgctggtgcattcgctacttattactgggccatgaaaaaacctgatgacatcccacgatatccactttttactgcatttggacgagccatacgatatcacacaggatccctagcatttggatctttaattattgcattaattcaaatgtttaaaattgtactagaatacttggaccaccgtcttaaacgtacccagaacacattgtctaaattcctacagtgctgcctgagatgctgcttctggtgtttggaaaatgcaataaagtttttaaacagaaatgcctatattatgattgcaatatatggcagaaacttctgcaggtcagcaaaagatgctttcaatctgctgatgagaaatgttttgaaagttgcagttacagatgaagttacatactttgtattattcctggggaaacttctagttgctggaagtataggtgttctggccttcctattcttcacacaaagactgccagtgattgcacaaggaccagcatctttatattactactgggtacctttgctgacagtcatttttgggtcttacctgattgcacatgggttcttcagcgtctatgcaatgtgtgttgaaacaattttcatctgcttctgtgaagatctggaaagaaatgatggatccacagaaaaaccctacttcgtaacccctaacctgcatggaattctgatcaagaagcaactagttccccagaagcagaaagagtagaaaagctccaaaaaaaaaaaaaaaa

SEQ ID NO: 118697 - DNA, 1000 bp, Homo Sapiens
gatgtctttaatgaagacttttctaatagaaaaccatttatcaatagggaaataacaaactatcgggccagacatcaaaaatgtaacttccgtatcttctataataaacacatgctggatatggacgacctggcgactctggatggtcagaactggctgaatgaccaggtcattaatatgtatggtgagctgataatggatgcagtcccagacaaagttcacttcttcaacagcttttttcatagacagctggtaaccaaaggatataatggagtaaaaagatggactaaaaaggtggatttgtttaaaaagagtcttctgttgattcctattcacctggaagtccactggtctctcattactgtgacactctctaatcgaattatttcattttatgattcccaaggcattcattttaagttttgtgtagagaatataagaaagtatttgctgactgaagccagagaaaaaaatagacctgaatttcttcagggttggcagactgctgttacgaagtgtattccacaacagaaaaacgacagtgactgtggagtctttgtgctccagtactgcaagtgcctcgccttagagcagcctttccagttttcacaagaagacatgccccgagtgcggaagaggatttacaaggagctatgtgagtgccggctcatggactgaaactcagcagggactctgggaagtctgaccaagttggagcagatggtttgttacttgaatctccaaacacttagttgaatttttacagatatttcagatcagtggtgttgggccactattgttacctcaaatttattttttgcccttattcatttctccagctaccatgtactattgtttaatgttcagtttggtttcatttttaattttatggttctgtgcgtcccccatatttaatatttattattcaaacgcatgcatatagacagagcatgcagtgaagagtattaaaaaaaaaagcttagcaaaaaaaaaaaaaaaa

SEQ ID NO: 118698 - DNA, 1000 bp, Homo Sapiens
ttatttattttttttttttgaggcggagtctcgctctgtcacccaggctggagtgcagtggcgcgatgtcggctcactgcaagctccgcctcctgggttcacgccattctcctgcctcagcctccccagcagctgggactacaggcacacatcgccacacccggctaatttttagtatttttagtagagacggggtttcaccgtgttagccaggatggtctctatctcctgaccttgtgatccgcccccctccacctcccaaagtgctgggattacaggcgtgagccaccgtgtccggccgtagtttattttaaaatatatttttaaaagctttgtaaaaattatgtcattctcagaattgttgtcttcaaagcattgtcagatgtagagtgctcagatgtggctcttaaagactatatacatctgaatttttcatcctatagttagtaagatgcataaaatcaatccactactgaaatagtttccagtcagacatttctgagttcagacatttctcaacattcttttaacaacatttttctgaatcctcaatagaaaatcacattaatcttattttaaaatttggcctttttcaacactaacgttgagtaccggtagcttgtgatcaaaggcatatacttccttatgagatttctttactaaagcaagatttcattaaatctctatttcctaaatatcattctatacaaaagatattttttaaacggtaaggattaagacaatcactgatagctttgttgtgagcaattttgattcccatgtatcacatgaattacacttccttaaataaattacagtttatggctgtatgatttattctctaattctaacatagtctagttgtcaaaaggaaatatgtaatctttttatgattgttgaatcaataaataccaatttgtgaaacatgaatgtgtttaaactgcagtgaataaatgagatgtgctttaatttaacccaaaaaaaaaaaaaaaaaaaaaaa

SEQ ID NO: 118699 - DNA, 1000 bp, Homo Sapiens
ttccctctgggcccagcctctccccacccccaccttgttcatcaggggccagccccatcccagctgccctccctcaccacatctacacatactccggcatctgagtgaagtgtccccagggacatctctcccacactttccccagtgctttctttctaaaagacaccgggctgacgtcaggggtgtgtgtccttcagctccctgagccctgtcacccttccaggacacccaccttgtgcatctaagcatttctctgctcattggggaaatcctggcctcattggagactcaggttcgaggcctgccctgaccctcgggcctcgggaaggtcagagagcccggaatcctccagaatggaagagtctgactctggcattccacagaggtgccgataccaggccaaggcctcacagcagggtagtggcctggccgcaggtctcctggccccaagatcagctctgtcctttgtcatctgttgccacatccatggaactcaggtttcctatttggaaactagagtgttgaaccagataaggttcatcaggcccttccagctccccaggctccctgaagtcctgggtctaggccaggcattgtccccctgcttcctggaaaccctcattttccttgtctgtaatatgaagtcagcattggccccgccccccaccccctaccatctcccaatggaggggaggttgcaggggagagctgccgccagcccactcctgaggcaccaccacagtcagcatcgacaggggcacagcagtggcagtttgggacctccctgtgcctctcagcactcccttccccacccccatagcccaaggacaaggctaccacagaaggttaccacaggacctgggcttcgtctccaggggacaaggagacactgtcagcctggtgttcaccaggcctggtagatgagatggcttgtctcatccacaccacagaaggaaataaaccatgtggcttaaattttaaaaaaaaaaaaaaaaaaaaa

SEQ ID NO: 118700 - DNA, 1000 bp, Homo Sapiens
tattctctgttcatacagcaagtatggaaaaaagatgatctagaagtcaactatctcaacctccattgttacccactaggtttttttctaataatgttaaaggctatttaatttatttaatcaactttaagcattacattctcaattggggacaaaaattggttcttggggtgaaaaaatattagatatggcttgtggacttccaatatcatcctatccaacaaaatcttattccttagtattaatttatctcattgggaagaaatttgtagttaaaactatttaatgtaatttgaatttaatttctgtaattgggaaggagggtaataatgaacaaaaagtttgagaaaaaaatgctttaatgggttttacaggcatgctacaatccaggactgtggtgttctatgtgccgtgtatggtcatattagtagctatttgttgcaagatacttgaagccaaatgtttgcagtataggttcctggctactgtttatgctgtgatttcactctgtctatcatgggcagtattagaaaacacactggttttcactatctggtttacaaacactatcattattttacctggattgaagtgcagaatttggcatatcgatgcatgcaatggaaagaaaaaaaatttgttaaaatttgtaaatgttcagctaaatctcagatatactgtgggatgagtatctcagggtaagtaacaaaaaaacaaacaaaaaaaatcactgaaatttttccctcacagtcagtagctttgtttgatatttaacaataagtatatggtgatatacttgaaatttatgtccagaatgtcactggaatattacaatgagcataaataatcaagcttaggactaaatgaaagatactatctcatgtatgctttaaatagagaatttatttcttttaaaaataaagctatttttccttaaaaaaaaaaaaaaaaaaaaaaaaaaaaaaaaaaaaaaaaaaaaaaaaaaaaaaaaaaaaaaaaa

SEQ ID NO: 118701 - DNA, 1000 bp, Homo Sapiens
ctgctgctgatggatacttttccctcactgccatggcacaccagtcatggatcttgtaatcatgccaagagaatagatacattatggacctcttgttcttagatatgggcctctcagcctggcagatgtggaaactcaaatttctcgtcccactccaggttttggctagccaaccctgcaggaaagtggtttataggccattcatacttaagttgatcacttgcccatggtggacatttttgtggtggtgatgtccattaaggaaaccagattttcaattatttagtgagagaagagttagagcaaaagacagtggtaaatgttttattccgtctccatgaggaattgaaggagttggtctccacctagagatacatttgatttacagcttaagtaattcagaggctaagctctaagcttttttctctcattgctggaatgatttaagcagaagtccttttgtgtacttttaaaattgtatctttccaggagcccctcagattgtaccttgctttctcaccaatagacaccttcccgacacttttttaatgttgtagctgagcactttaacaagttgagcattccatgtttcattcttagaaccttctttaatagagggtcttccctcaacagcctgtgcctctggtctacctttgaccaccactgataactaatatattggtcacaatgactggaatgtgactagtgatctcaggagatggcactgtcctaaagtgctgtcagggtggcaccactgctctctgaacaacttaccttggtcagagggactcaggtttgggacagcacaagctgaaggctggagagtaacttgcatagtaggaccatacctcttcctttcccatcccacccacatatgatagacagcccctctgttgagatatggaggggacagatactggaatcgggggtgggacttgcagttacttaaaattttttaataaactgtgccctgaaacctaaaaaaaaaaaaaaaaaaaaa

SEQ ID NO: 118702 - DNA, 1000 bp, Homo Sapiens
ataactatcagggtggatttggaacaacactcatggctaaggatctgggattggcacaagactctgctaccagcacaaagagcccaatccttcttggcagtctggcccatcagatctacaggatgatgtgtgcaaagggctactcaaagaaagacttctcatccgtgttccagttcctacgagaggaggagaccttctgagtgtgccctttggccacggacactgttgggaaccaaactctgtcttggagcctccttttagctcactccacaagtaaatggatttaatcaaaggtcacctatctgcttttgattgtctaggtcacagtaatccctaggatttttcaccgcttattctttttgtctttttaacaaacatattatccgaattttttttctgcaagccactgatagtctctgctaactagcttaattgacctttttacaaagtttgatccccaagcatcctcaactaaatcattgaatacttcaatcaggatattatctgctttactttacaaataaaaccaaatcttttgtcaacaggatgaaacccatcttaaaggaaagaaaaggaattggtgtgaagagagaagttagagaagggaaatgcagtgaattactatctgtgtccatcaggaagtttgtcctgttaaccaaatggttactgcactaccagggttactggtttattttccagggagctgataaagcaggagaactgttgctgcatgttttctatttggactccgtcacaatatggtaggatatccctcaccaactcccgacactcagcagacttgtttttatatttttttctttcttgttcattcttactacgtattttttgacttaagaatgacatctttagatgcatttcagagccaatgatgatatttgctttagataattattatattattataaatatagccatattattttgaattcaaataaatttctatactggtaaaaaaaaaaaaaaaaaaaaaaaaaaaaaa

SEQ ID NO: 118703 - DNA, 1000 bp, Homo Sapiens
tcccgcggagcgccacatcctacaccctcagcctggataagctccggcaaggagtgacttacgagttccgggtggtggctgtgaatgaggcgggctacggggagcccagcaacccctccacggctgtgtcagctcaagtggaagccccattctacgaggagtggtggttcctcctggtgatggctctgtccagcctgatcgtcatcctgctggtggtgttcgccctcgtcctgcacgggcagaataagaagtataagaactgcagcacaggaaaggggatctccaccatggaggagtctgtgaccctggacaacggaggatttgctgccctggagctcagcagccgccacctcaatgtcaagagcaccttctccaagaagaacgggaccaggtccccaccccggcctagccccggcggcctgcactactcagacgaggacatctgcaacaagtacaacggcgccgtgctgaccgagagcgtgagcctcaaggagaagtcggcagatgcatcagaatctgaggccacggactctgactacgaggacgcgctgcccaagcactccttcgtgaaccactacatgagcgaccccacctactacaactcatggaagcgcagggcccagggccgcgcacctgcgccgcacaggtacgaggcggtggcgggctccgaggcgggcgcgcagctgcacccggtcatcaccacgcagagcgcgggcggcgtctacacccccgctggccccggcgcgcgaactccgctcaccggcttctcctccttcgtgtgagcaaagcgccgcgcctccctcagggcggaacggaggcaactttccggagtctatttttgttaagacaatcaactccaataactgagctgaagtttttgtttaaaaagaaaaaaatctgataagtgatgattttacctacttgtggacactagatttcaattaggaaggtttttttaaacggctttttgtaacttcgctgcaggaagcaggtttgtttc

SEQ ID NO: 118704 - DNA, 1000 bp, Homo Sapiens
tggtgtaggggggaaaatgtgggctgaggggattcagacatccagggtcaaacatgggatgtttgacaaatttttaaacaaatagaaaggggtttgatcacatagttgcgtgttctgaaatgatacaggaacattttctatcagatttcagaactacctgtgcttctgataagcaagactgttaactttggggtgtggaattgttgtgtttcttctttgcattgactgctaggaagctctattctgttcaccatagaaagtttgtaggaattcctgacataaatagtgaagactatccttacatctggtttccaccttattttcctgccctcgttttaacatcacccagatttcttcagttataaatatgccatacacctttgtaagtcacctcaaatcttcttcaaaagaagcagaacagtgaaaaaaacagatgagtaagttaagagttggtcatctggaaagaagaaaactcagtaggcaccttcttttgttttttcttgtggtgtccggatcagcatcctgcatgtgagattcatccacgttgtcctgtctagcagtagttcagttctcttcatggttatgtctggtttcattctatgattatatcacaatttatctattctacacttgggtggcagctgcttcagatttttacttttaaaaaatatacttaaaagtgaactacaggcagggcatgatggctcatgcctgtaatgccagcactttgccaaggtgggcagatcacctaaggtcaggagttcaagatcagcctggcctagatggcaaaaccctgtctctactaaaaaatacaaaaattagcttggtgtggtggtgggcacatgtaatcccagctacttgggaggctgaggtagggagaactgcttaaacctgagaggtggaggttacagtgagttgagattgtgccactgcactctagcctgggtgacaaagcaagactccatctcagaaaaaaaaaataaaagtgaattacaacact

SEQ ID NO: 118705 - DNA, 1000 bp, Homo Sapiens
gaaaaggtaaaattgagagacttttgttagaggagctatttggaatgaaccaacatttcagattttccaaaatgtaagttaggaagtctccattgtctctgcattaacaaaatacactgttactatcttaatctcaagagtgtcattacagtgagaatctcatttaaaagcataccagtgaaattaatagcagtgcttatcaaagaacactgaaatctgtgagaatctttctaggagcattcttttcttcttttagttccaagttccagggtatttttcattcctagtaggtttatatgactcacagaatgtggacttttttcctgtttggagtatttttgtaatgtaagtatcggatagctgcaccacagcatgcataaattgcacattttgttttactttctttatagaatatttaatttcaaaaatataatttatgccaaaaaaagcatacctttcaattttgctacttggttgatttagcacaaaatgcaaagtcttggggcagagagggggagtgaaaaaaattttataggtaattgttacaaaaatacctgtcagaaaccctaaagctgcattgtaaaacaaatggtgtaaactagttttgaaaagtggtaaggaattgtgaaaaaaatctcagacttaatgctctctaaccacatgagtttcttcttttttatttagtaatacgctgctacatatttggaggttctggtgtttgtaggtcactgaacagacattgaaatctgatttatattgtataactgtaacatagaaagaaaaagtatttatattttttctgtaagaatatttcattgagttgtgtataatttaaataagatttgtccccaaatggttttgctcaccttgattttttttgttgtgattttcttgtttttgtataatgtgtatagtttatgtcaagggcattaaaagcctcctgaagcataatcttatcaaagggatacattgttaataaaatgtacttaaaattcttaaa

SEQ ID NO: 118706 - DNA, 958 bp, Homo Sapiens
ctgccctcctgcttccgttgctagggacgcttcggccgaggataccgcaatggatcaggaagaggggctgaaggccttggacaatattgtcactcaattcaacgcctatgaagatttcctggactcgcagatcactactgtggacttgtactacctggaggatgaaaccctggcccgccagttggtggagctaggctaccgagggactggagagagagtgaaaagggaagattttgaagcaaggaaagcggctatagagattgcaagactggctgaaagagctcagcaaaagacgctaacaagtgctggtaaagacctacaagataattttctgacggccctggcaatgagagaagaagacaatcgcagtggaaaactgagttccgtgatctttattcgtgacagaaattctcatgggcaagagatatcaggatacatcgactatgcccacaggctaaagacggaagattttgaagtctactttactggaaaaaaaagacttcttccaaggcctacagatataagcttttacaactgggacgctgatattgctgttagtaattcaagtcccaactatcaagtgattgccgataatccagaaggcttacttttcagatacaaaagagacagaaaaattcttaatgtggacccaaaggcgcagccaggtgacaactctactagaatcactatcctgacagaactctacatacaagctgtcatttttgaccacatttccagaaggaagacttaagtaccaacatgttaatttcctaataatttgctaaatttaaataaattccgtagacagagcaaattagaataataaatgagccctgtagctggaaggcaaattagaacaataaagttaataaagaagttagaaagaaaaaaaaaaaaaaaaaaaaaaaaaaaaaaaaaaaaaaaaaaaaaaaaaaaaaaaaaaaaaaaaaaaaaaaaa

SEQ ID NO: 118707 - DNA, 1000 bp, Homo Sapiens
actggctcggcaattcgctttataaccattcttattcccaaagttggagcacataaacatttagatgtcttttcctgtaaaatattctagacatttacccaaactctagttcaacatatactcaacttgcactgtatatctccctgtcttttttgagacagagaagaaattcaggaggttccccatctccagagtttctctgttggaaagcagtatcaagaagcctttaaaaaattgttgttaagctttgccacctgcagaaatgcattgccccacattattcttctggggttaaagtagtaagtttggttgaggaaggaagtcaaaacagtcagtaatgatttctgttctcttatgcatattcgtgtatacatgggcaactgaatctagcaaggactctttcgtgtcacaccttaaaatcttcatgctgtagtcactccagaccatggagtggctttccagctgaatgaatcctatgtctcgcgtgcaggtggttggttttcaatgttcttgctaattttttttctattggatcttgggagttttctttgtttgctcctgtgtttgcccagctttaataaaaccaggcgcaaacaaaaaccatagcattctgaaacaatagggggcccacattggacccagtatgtcactttaatggacttcaagaaaaaatctgaatgggaaaaatgacactagaatgtatactccacacattttatgccatataatggtgtgttttcttaattttgtttcttgtggcgaaatgtggctttcaaattaaaatggccttttcttctttgaaactttttgttttgacttgtataattaagggtttggaaagattcataattctgagagaggtttgcaaccaggagatacaaagaagtctcagtagtaatcttgttcatgtgcttttacagccagctacatttaagaatgtattagttacagaaattatatgtctgtgtatgtgtctctactcaataaagtacatgcctcc

SEQ ID NO: 118708 - DNA, 1000 bp, Homo Sapiens
ccagtgaagcatctctggaggcagccctgtgcctgggtttcctgaggccttgcagcaacatggtccaagagttcttgttgcagtgcctgtgccaaggactcaagacccagcggatgaaggcacttaggatgctggtcaaggtgatgcacgtgcactcagccccagtcatcaaggccatcctagaccagctgtgttcttccagtgtccttgaggaccgctttgaagccacccaaatgctcaagaccattgggctggaacagatccaggcacaggggctagaggaactcacatttaacctgctcaggaggaagacgcataatgaacccttccttgctgtgaggcaggctgtggctcaaactgtggaagagctcaagttgaagcctacgatgatgaacttggtggaggcacaactgatgaacccagatgccactgcacgccaggaagcagtcatctctttgggtgtcctggggatccgcagtccacaagtgttccacttgctcctggacttactagatgcagaaaaccaccaggctgtgaagaagagtctacaagaaacattaatcctttgtgcctcaattgatccctggatccaaaacaagctgaaaaacaaggttctctctgtatatgaggcacctaagaccaatgtgaaggcagagcccacaaggttccagaaagagcctgagaacccagaagagttaactattcaagactttcgacttgcaaagctgaaccccttgtttattgcaaagtccatcaccaaagtaggccaaaagaaaacgcctgctttcccaccgtgctgctcgaaaccacgaaaacataggccacaggtcatagggccctggcagccaaggatcaagaaacagctccgggtccttgctgaaattgccaaataagtcaattctttgggcctactccccgactccctccctgaagatgcttctcaggctcccatgagaaaacaatctatacttatcttccgtgaataaacaagtgtcactct

SEQ ID NO: 118709 - DNA, 1000 bp, Homo Sapiens
aaactactttgatgatattccccgatcaaaactggagaggcagatggctcagacaggagactggggagaaccttccattaccttgcgacctccgaatgaagccacagcctctaccccggtacagtactggcagcatcacccagaaaagcttatcttccagtcgtgtgattacaaagctttttatttaggttctatgctgataaaagagcttagggggacagaatcaacccaagatgcttgtgcaaaaatgcgggctaactgtcagaagtctacagagcaaatgaagaaggtccctactattattctttctgtctcatataaaggagtcaaatttattgatgcaacaaataagaacataattgctgagcatgaaattcgtaatatctcctgtgctgcccaggacccagaagacctctcaacatttgcctatatcacaaaagatttgaagtctaatcaccactactgtcatgtgtttactgcctttgatgtgaatttagcctatgaaatcatcctaaccctgggacaggcattcgaagtcgcttaccagctagcactacaagcaagaaaagggggacactcctccacacttccagaaagctttgaaaacaaaccctccaaacccatccccaagccccgcgttagcattcgcaagtccgtggatcttcttcatgccagccataccgggcaggaaccatcagagagacacactgaggaggcactcagaaaattttgatagaattgaatttacatatagctgataaagcctaaatagaaaggttgatgtatttagcttgaatccttcactttagtggtctaatcaacagataaatgacaagcaaagaatgaaacaatccaaaaatgtttttcaaaacaattttgtgaattttatttttacaaaaattttttaaattcatattttaaaatgtataccaaggcaaaaaaatcatataagctatatcataaatacaagagtttcaaaacatacaagagacatataatg

SEQ ID NO: 118710 - DNA, 1000 bp, Homo Sapiens
cggagaagcctaaaatttctttgaattaaaaactgatcctttttcataaagacccagtcacttctcccagtttagtgataacaggtatgcacaagaagctgaagtcttttagattttatagagagtaattctgaaacctgccagaatgctggtagcctgtggtctccatggcaatgggtgtccatggtaaaatatctatagcttctgctcactgggcaaatataaaagacaacatattatttaacataatatgttgtcttttatatttttatttaaatctggattatgaaaatatagtacccatgagcatttcatgttagaaaccccatttaaagcactataaggctgaataggcacaagcgattaaaagtagatgccaggccacataaaaataaatgttttaatttacttagagctgtattcaagttgtttgataccagacagaaagctgacagtctgttctttgtaaactgcctttccctgtttttctgttttgttttgtttctcaagtttcattttttactaagccccttctgacacctaggcagataaagataagagtagtgcgcagtacaaatgtcagctctgaagaggaggaagtaaatcttcaatgctagggcagatcttcactatccgtgatccagtcttaatttgagcatgagagcaaaatttagtcatctacacaagaagcaaaagcaaggaatagttgttgggtttttgttttttggttgttgttttttttttttttaggcaaagaagtgttgccggtagggtatgtgtgctttctttgccttcctatttcctttcaaagaaatctcttgtaaattacaaaactgtgaattgggttgccaaaaactgttgcccttcgttagatgcttcaaacagtgtaaatcctatactgcaccctgtccacctctgctccctcctccctcccctgagagtgaggacctcatccgaccatgtaattaccattcgcttgctattaaagagcctttcaaac

SEQ ID NO: 118711 - DNA, 1000 bp, Homo Sapiens
ccatggctggggctcggaagaggaccctggcccagagctcagaggacgaggacgagggagtggagctgctgggagtgagacctcccaaaaggtcccccagcccagaacacgaaaactttctgctctttcctctcagcctgagtttccttctgacaggaggaccagccccagggagcctgcaggaccccagcaccccactcctgaacctgaatgagcccctgggcctgggcccctcactgctctctccgtactcagacgaggacactacccagcccgggggccccttccagccaagggcaggctcagcccaggctgactgagccggctcctctccccatctgccttctcctcccccagaaaggacctcaaccacactccacgccggcagccaacgcacaggatgggggcgccaggagaggggcccctctctcctctatgtaccccctgcccacctcgggcctacctcagccctcacccctctgcctgctcccaatctgggggctctctggggtggtctcagctcagtgacctctgggaggtggtccctggccccctcctccttctctcaggatttctcttggggttctcaatacttggttacctcattatccctttctctgcctctcttggctttattttggggaatcaggggtgaggagggttgggggggtcatatctgtgtttccaggttctggggagaacaatgatccacgggtcaacgtgatcacatttccttctatccttcttgtattattatttttatttttgtcaatttcatgatatggtttttaatcatgatgaattgcctggggtctgtaagaatgtgggactctgatcttccccctcttcaggtgtcagtgcggagaggctctgggccagacctcacccccagtgacttccgattgaggccaaagaccccaagctgcccgccagctctgactgccccttgcgctctgggcttcctgccgcccccagctttgcctggacactgacttcattc

SEQ ID NO: 118712 - DNA, 1000 bp, Homo Sapiens
ggctcgtggcgggagctggagcgcgtctacagccagcgcagccgcatccacgacgagctgagccgcgccgcccgcgccccggacgggccccgccacgccgccggcgccgccaacgcgggacccgcagccggcccgcgtcgtcctgtcaacctcgactcagcgctggccgcgctgcgcaaggagatgctgtggggcctgtacgagtcaatccaggactacaaacacctgtgccaagacctgagcttctgccaggacctgtcatcctccctccattcggacagctcctacccaccggatgcgggcctgtctgacgacgaggagcctcccgatgccagcctgcctcctgacccgccaccccttactgtgccccagacgcacaatgcccgtgaccagtggctgcaggatgccttccacatcagcctctgaagggctggggggcagggggcatgcacccatgcaaaaggctcagaaactccccctccggcaagccctcagacttcggagcctgcgccttcccccctaccgcctcacctcacaggagggccaggcatgtattcctcagaggcgaaactgccaaactctttctcctgtcttgggttggctggcactggggcgggcatctagggtacagcctctgctcatggcactgggcctccagttcttccacatgtgtgcacccccagcttggccaaccctcagccttgcggtggggcccgaagcatcttcccttccgcttggcgtctctgggattgggatgagtgcctggctcccatctcctcctcaccttttgttgctatcggcagctgctggctcaggggcatcccacctccgggctctgggttcctctgccctggaagggctccaggacccgtcccaataaccacccacggccaggagggccaaggccccgtgctggatatttaaatttaggggccggtctccagggcgcgtagataaataaatacactcagcgtcaaaaaaaaaaaaaaaaaaaaaaaaa

SEQ ID NO: 118713 - DNA, 1000 bp, Homo Sapiens
cagctggttcctctcgagcgagtgtccctaaataggagtttacaagatgtctgggggtaaaagcactgtgcttttcagtggtggctgcgtgaaagggagcgacactcagctgtgtgttcctgggcttgtgtggtacttagaacctcagttctattacgttatagtcagacatttttttgacagtatgagacagactgcaggatgaaaatatttgtcaaaatcttaactgaatgtttactggaagtacttgagattccatttgagagttgtattgttaataatttcatgtcagtgaactgatatctgatgtttatgatatggtgtctttttcttgaaacaagcttccaagggctagaaataaaatagccaaaaaatgctggagttctgagtaattaaatggcagcatttttttgtgacaaaggtaagggttaagacagtgtgtgtgtgtgtgtgtgtgtgtgtgtgtgtgtgtgtgcgcgcgcgcgcgcgcgcgtaacgtgggcgcatccctcttttccttccctgggttcagtgtggctgggtaaggaccgtctgtttgtagggctgccaggctgcagcctgctgctccagggagcaccagctgcagctgatccaatacaccaagcctgtgtctccctcttctatcacctctctccaggatctctgctgtctcttggatcccatctgcctagatggaagaggatcctatccgaagctaggataaatgttgtcttactcctctgctatgttctcccagaaaaaattgattacaagttctctgctgtggttgctgcagctccaggaagtccccgcaatgtctcacgttgtctttgaccagtggtccccagtaccaggccagcgaagacaactttataatgtcatttgtgttgtgaaaattcttccactgacccaaaatggaaccgtacaaagcctatccgtgtatatggaaaagtctcatgcacctggattaactcagaaaaagtaaagtcctgaaacttca

SEQ ID NO: 118714 - DNA, 1000 bp, Homo Sapiens
gcgaaattgttttgcctctgtctttgaaaaatacttccaattccaagaagagggcaaggaaggagagaacagggcagttatccattatagggatgatgagaccatgtatgttgagtctaaaaaggacagagtcacagtagtcttcagcacagtgtttaaggatgacgacgatgtggtcattggaaaggtgttcatgcaggagttcaaagaaggacgcagagccagccacacagccccacaggtcctctttagccacagggaacctcctctggagctgaaagacacagacgccgctgtgggtgacaacattggctacattacctttgtgctgttccctcgtcacaccaatgccagtgctcgagacaacaccatcaacctgatccacacgttccgggactacctgcactaccacatcaagtgctctaaggcctatattcacacacgtatgcgggcgaaaacgtctgacttcctcaaggtgctgaaccgcgcacgcccagatgccgagaaaaaagaaatgaaaacaatcacggggaagacgttttcatcccgctaatcttgggaataagaggaggaagcggctggcaactgaaggctggaacacttgctactggataatcgtagcttttaatgttgcgcctcttcaggttcttaagggattctccgttttggttccattttgtacacgtttggaaaataatctgcagaaacgagctgtgcttgcaaagacttcatagttcccaagaattaaaaaaaaaaaaaaaagaattccacttgatcaacttaattccttttctttatcttccctccctcacttcccttttctcccaccctcttttccaagctgtttcgctttgcaatatattactggtaatgagttgcaggataatgcagtcataacttgttttctcctaagtatttgagttcaaaactcctgtatctaaagaaatacggttggggtcattaataaagaaaatctttctatcttaaaaaaaaaaaaaaa

SEQ ID NO: 118715 - DNA, 1000 bp, Homo Sapiens
agtgaccccttagtcattttatattcttgtctgcctttctagaaaaatggttgtcataaagtggaaagtgattaaaaagcatcaaataagaaattatttcaagtggatttttaaaaatatttttttgaagggcagggggaaaattcaccccttttctgatttgaaatatgttgtacatatttccatttgatggataaatcattaagtaagaatatttgatttaaagtattagccaacctcttcaggtattagcctgaagataaattttaacaaaacatatacacttgggtatccgtcattgctcaaactctatagtgtattgctggagccaataggcagggtatattttattagctaaatttgatatttgtcttctgccttctgtatcacctccaagctataggaaatcaggattttgttggctttaagaaaacacatggtatgttcactgtatattaaatatacctgtatttaatgttttctcttaggacagaaaagtagacacacacacacacacacacacacatgttgtgttcagctttctgttttatattatttgccattgagattagaatagaacaggctctattcatgcaaactatatgaaatgaaaaacttttaagactcttcattaattggagcttctgggcaacatcgtgtgtgtgtgtgtgtgtgtgtgtgtgtgtgtgtgtatacagacattttttttttaacttgttgattcagatgtcttggtccctgaatagtcctagattacttattttgagaattcattgttaaaaattacagggaattaaaataattgccttttttttttttagagggtaagagatgggtagaagagtatgcctctgaaaattttattagtttattcttgtggagaataccaagaaaatgtgtatttgcccattgctaaatatgatatatgccattttgtatttatttgtcccaagtgtctttttgtaagaggagaataaacaataaggaattactgatcaaa

SEQ ID NO: 118716 - DNA, 1000 bp, Homo Sapiens
tctctaaaatatttctctaatagtgatataaatggctattttattatgatgtttgtatgtgttttgtatttctctgtaaaccatgctccagtctttgtttttctgttaccataatgtaagagaaggtcctggaacagagactaaatcccacgaaactgacattgttaaacacactaaaacagaagtacttacctcttgaagatttaatatataatggttgacatgatacatgtacatgatgaatgaccagatgcttatggtctacattttcctttatcctgttagtattaccttccttaatctttgttcattaacatgctaattcctcttcagtgtttattttctagtgacagaatgctaacatttcttacaccctggcagaagggagagaaatgtgttttggggtgggtaactaaatttttgagtgaaatatcataagatgagaatggaaagagggagacacaaagagttataacaaaaaaacaatggtttttttagccatttgactggctctttaaatagtctacaagacattcacgtttaacatcacttttagtgaaataaaatgtgccatactagtatgtgcttcaaaagggcaaatgtgctttagtgccctaaggctaaattttggtcatttgacatcagagatgttgtaagtattgcacttaatacgcacctatttctcaatagtgttattttttggctagcattttctttaccactatcttgttgatagctttttgttctctaaggttgaaacatgacagtgcttatctcaaacagattacccatctgcagaactaaggaaagcaatttatgtatgaaagaaattcttgaattcgtcattctcaacctttgaattaaagcttagactaaatagtaatatatcgtgggaaggattttggttttgtgatatttctgtgaattaaggaatagatgttaaccattattttgtagaaaagtgatttgtatgtggttaattataaataaaactggtacc

SEQ ID NO: 118717 - DNA, 1000 bp, Homo Sapiens
agaccatttccctacgctttgctgctgctgagagttacctgaggcacttgttaaaaattcagcctcccaggtccctcccctcggagaggctgattcactgggtctgggaaggagcctggggattttaatttttcacaagtgccccagatgattctcatcaccaagcaaattttggaaatgctgttcaacagcgcccttaaattggaaacatctttgcagctcgttttattgaaattcataatcaggggtgtcctctagctcccacggtctccagagcagcaaggccggctatggagctgccgtcgtgtgaccacagtgtgatgtctcagaagggctctgggtgggctgagcatctgggctgtgccctggctctgcttttcaccctggacaaagtcgctgtggacttcaatttcttcacctctaaaatgggggacttggaccaggtagattgctgagctcactaccaggttcaaagttcaatgacaaactcagtttactgaggtttgagagaacatccctccaggggagcctgggagctgctctcccagtctaagcatgtagatatcatcgtttgccttttgtgtgtgtgtgtcccttatttgataaaaagatgttttgagttgttttttttttaagcactcacttgtaattttagtttttaaacccaagtccctctaactttgcctttgataccaaacaattcaaaagttggatctgagtttggagaaagatatttccaacctaagtgggtattattttgaaaccagatttttaatttaatagcctatatttgtagtctgttggataggtgtttccaaagtgtgtcttctcaagtgaaaacgcaactctaggtttcaagtactccttttctccgatcctgtggtacttgaatatccaaaaaccctgcactttgaacaatcagctgttgctatctggaactaaacagaactatgagtaaaattgcctggatactttaaaaaaaaaaaaaaaaaaaaaaaaa

SEQ ID NO: 118718 - DNA, 1000 bp, Homo Sapiens
agcatcagctatttatgcaaaatacaaattacatggatttcagtaccctcctgggaaccgaataggtgtttccttcattgatgatggaagtaatgcaacagagtaagtaccattccaggagtgtctaaagccgagctttgagtgtacatgattgataggacttgaagaataaaaatagaaacaattgacctctcaggtgagaaagtcacacaaaacaagctactgttaaaagactgaatatttttagttttctgtaaattatcagttattttttccagtctccttagaaaaatggcaacacagatggtagctgcacagcttgcatcaatggtgtggaataacccaagtcagcaacaatttatgcaatttggaggaagctctggatcacagttgcctcaaatccagacagatgttgtacttccatcatgcaaaaaaaaagctcctgctgaaactcctgtgaaagaaagactttttattgtgtttaatcctcatcctttacctttagacgtattagaagatatattctgtcgttttggtaacctgatcgaagtttaccttgtgtcaggaaaaaatgtggggtatgccaagtatgccgatagaataagtgctaatgatgccattgccactctacatggaaagattctgaatggggtgagacttaaagttatgctggcagattcgccaagagaagaatctaacaaacggcaaagaacttactgattcttgagaacaaagactaaataatgacataatcctcagctgactgactgaaaatgtgactggacgcattccctgtggacagttgacagctttttttttttccatatacctgatagtctgtgtacagcattgttttgtctgggaagcagggattgctgacatgtatttttgaatccatacattaatgctaaaacgaatatagtagttgttccttagagcaatatgttgttacgtgtagcagaaataaagttttctttgcttaactaaaaaaaaaaaaaaa

SEQ ID NO: 118719 - DNA, 1000 bp, Homo Sapiens
aaatcactacatggcaaggatagtggaacttacgtctcagttgcagctggctgacagtaagtcagtgcatttttatgccgagtgccgagcactgtctaaaagactggccttggctgaaaagtctaaggaagcattgacagaagaaatgaaacttgccagtcagaacatcagcagacttcaggatgagctgacaactaccaagaggagttacgaggatcagttaagtatgatgagtgaccacctgtgcagcatgaatgagacattatctaaacagagagaagagattgacacactaaagatgtccagtaaggggaattctaaaaagaacaagagtcgatagttttgaaatagctggttggcgactgttctttccagacctgctcctgctgcacagagccgcagggctgagaccacgtccatgctggctgccttcaggaagctaaagtattgttggacctagtaaactagtcagtgttggaaacggccttgaaatatttaaaacatatttgtaaccagtgaggcaaatacagaagttgatgtcggcagtaaatggaaaacaatacgtatgtcatggatattgtaggtttccttatgctgtttttactgtgcactttttaaaattaggttttaatttcagtatgtaagaacaaatattttgtatactttcaaactcaattatatggtaatcgatttggtatctatggaatagatatatgtttctggaaaaaaatgcttaaattgtcaaactgtcattacttcttattatagttgaaggcattctccagattctttttaaaagatttgttcaaatttctctctctctctctctctctctctctcttctttctctctgagggagagggagccctccaaacttcagatcctgtgggtttagtatcattatcttcagctctttgatcccctgtgttagagtaatagctaaaggaagttcatgtcaataaattcatacttatatcccaaaaaaaaaaaaaaaaaaaaa

SEQ ID NO: 118720 - DNA, 1000 bp, Homo Sapiens
ctcatttcagtgtgtggagttgtggttgtagtgtttgcctggtacatcacccatgatgtcaattaaaaaaagttttgatcttttaatgtaactcagattggatttagataagttgttaaatttgaaatattagaaaatgtatattatagaacatgatatatatttacattcatctctgtattctctcagctgttgttagaaggacagaatgttaaactttatcttaattagtatactagaaagggcagtatactactgtttaaagtgaaggcatgactgaaactaaaatatttcataaggcttagctagaggcagagtaacgtgtttttgttcattgggcttccttgtacttagttttttcatttaataattcaaaccaacacttttaaaaaaataattcagatgagactgagccatatctgcagtaagagaaatatttcttaatgttttggttacttatgatagagtacttttcttgttactgttaactttgtgctttttaaaaaaagtgattctctaacagacctcttaaattgtgacatgaaggtatgtaattagatttcagaaattggtttattagtgaggaatttttatcaataaatgtcatggggcgtgttcttcagaatatatagttattttcaacaaatgccaggctagattcctcacatgtggctatttcttatgtaagaagcttttaactgaagttggcatgtttcgtaaaacttgcgtgtcttttaaaaataataaaaggaagatgagtatttatgaagaatatgtgctgacaacagggcttatgaggtctatgtaccttaatctcgtttctccttaccacaatcttaaatagatttcagctgaaaataatcagttcttatgaaaacaaatagagaaatatcagtaagtcaaatctgtttgaattataattcctttcaaatagttttgctatttaatttatatgattaatgttttcattaaaatttttgataccaaaaaaaaaaaaaaa

SEQ ID NO: 118721 - DNA, 1000 bp, Homo Sapiens
ccaatggctgcgtggccctgggcatcaaactacctcacacggagtacgagatcttcaaaatggaacaggatgcccgggggcgctatctgctgttcaacggtcagaggcccagcgacgggtccagcccagacaggccagagaagagagccacgtcctaccagatgcccttggtccagtgtgcctcctcttcgccgagggcagaggacctcgcagaagacagtggaagcagcctgtatggccgggcccctgggaggcacacctggtccctgctgctggctgcacttgcctgccttgtccctctgctgcattggaacatccgcagatagaagttttagaaagttctattttttccaaaccaggattccttactattgacagatttgctttaccaaaagaaaagacatttattcttttgatgcacttgaatgccagagaactgtccttctttttctcctctccctccctcccagcccctgagtcatgaacagcaaggagtgtttgaagtttctgctttgaactccgtccagcctgatccctggcctgagcaacttcacaacagtaattgcactttaagacagcctagagttctggacgagcgtgtttggtagcagggatgaaagctagggcctcttatttttttctcttaattattattatatttctgagttaaacttagaagaaacaactatcaagctacaacttttcctgccattttcctgtggttgcagcctgtcttcctttgaaattgttttactctctgagttttatatgctggaatccaatgcagagttggtttgggactgtgatcaagacaccttttattaataaagaagagacacaggtgtagatatgtatatacaaaaagatgtacggtctggccaaaccaccttcccagcctttatgcaaaaaaaggggagaatcaaagctttcatttcagaaatgttgcgtggaaaagtatctgtaattaaagtttcgaagtaatttaaaaaaaaaaaaaaaa

SEQ ID NO: 118722 - DNA, 1000 bp, Homo Sapiens
atgccgagatggccatcgcactctggaacaacatgctggaaccagtgggccgcaagactacctccaacaacttcacccacagccgagccaaactcaagtgcccctctcctgagagcccttacctctacaccctgcggaacagccgattgctcccagaccaggctgaagaagcccccgaggtgctctactgggctgtcccagtggcagcgggagtcggccttgtggtgggcatcatcgggacagtggtctggaggtgcaggagaggtggccggagggaagatcctccaatgagcctgcgcactgtggccctctaggcccgggggtgggtcctcaccctaaactccctatagccactctcttcaccgccctctgccccagccactcccggccaccaggacatgcttcaatgcctggtgccataggaagcccaggggacagtcacaacttcttggggcctgggcttcttccaggcctatgctcctggaatggatacatttaaataaagtccaaagctattttattcctgggtttgcctgcgtgaagcactcaccttccatctcttgtgcagcccaggtgtgggagctgccactttttgtggcctgcctccagcagggctgcccaagccacgaccaaccagagcccaaactgcctgccaccacgagcatatcctcaagtcaccaaacccactatttcaaaggcagaaaaaatgctggtcaccaggtggtggctggaattttggagctggctggttgccattcagtccaatccaacacatacctattaagcaactgttttgtatccaggacaatgcgaagcactgaggtgcctcctaggctgtgcatgtcgcagcctggcagagaggtcaaactccttcaataaccaagaagccacgtgatgatgtgtaactactagggcatcagtaggtaaatgtgtctgattgttttaaagaatagaaagggttcttcggggaaagtttcttgggggagagcaaccttcacat

SEQ ID NO: 118723 - DNA, 1000 bp, Homo Sapiens
ttctccagtgctctcggggagggtgcaccaggcccgccccaccctgtgagaagccgcagcccgttctccattgccatttggtcctgccttccccagagctgctagcagctcggtcgaggcaagagtgactggctcagagagcgagctttgtggtattgataaatgaataaattagtatgttcatgttggaagtggctggctctgcagagtgatggacagcaggtggcatcttacattgtgatttgtggtgcacagttaaaacacttcccttcgtttcagaaggagacaatgtgaatacttggaaattatagtgaataagatgcctcccaaacttgaggaaaaggtcagattctaagagctaaacgttaagatgtaatgttccagaacaaagaggcccagagtcactgaacggggccccagggctcctagcttgagtgtaatctgagtcagcttatgaaaaggccccaaagaagaaagtggaatgtgtgctgggcacatgggacagccatggcactgagactttggaagtggccttgccagcgctgtcctgtctttctggcccacagatgagggctcctgattgtggaaggccacggaagggacctgaacacgatggcacgagacaagttatctcctgtgactgctcctctccagcaaccctcagctcaggctagactttccccctgtgttgagaatgccctgccctgtgtggaagcctgatgcatttagtgacagtgtgttagctttgttagtttctagtctggccagcaggctttccatgtgatctgccattggcttgcttcagtggccagtggagccaggggtgtccaccagagtcttggacacagacttctgaggtggcagcgggagggagcctgctccctgccacacacgtacaatttctaatccatacaggcctgggtagtatatacacacatacgcagagccttaggaattgtgaaaggccaatcaaaacttggggccctaatttcactctgcc

SEQ ID NO: 118724 - DNA, 1000 bp, Homo Sapiens
cagcacaggtggctgcaggaatggcttacatcgagcgcatgaattatatccatagagatctgcgatcagcaaacattctagtggggaatggactcatatgcaagattgctgacttcggattggcccgattgatagaagacaatgagtacacagcaagacaaggtgcaaagttccccatcaagtggacggcccccgaggcagccctgtacgggaggttcacaatcaagtctgacgtgtggtcttttggaatcttactcacagagctggtcaccaaaggaagagtgccatacccaggcatgaacaaccgggaggtgctggagcaggtggagcgaggctacaggatgccctgcccgcaggactgccccatctctctgcatgagctcatgatccactgctggaaaaaggaccctgaagaacgccccacttttgagtacttgcagagcttcctggaagactactttaccgcgacagagccccagtaccaacctggtgaaaacctgtaaggcccgggtctgcggagagaggccttgtcccagaggctgccccacccctccccattagctttcaattccgtagccagctgctccccagcagcggaaccgcccaggatcagattgcatgtgactctgaagctgacgaacttccatggccctcattaatgacacttgtccccaaatccgaacctcctctgtgaagcattcgagacagaaccttgttatttctcagactttggaaaatgcattgtatcgatgttatgtaaaaggccaaacctctgttcagtgtaaatagttactccagtgccaacaatcctagtgctttccttttttaaaaatgcaaatcctatgtgattttaactctgtcttcacctgattcaactaaaaaaaaaaaagtattattttccaaaagtggcctctttgtctaaaacaataaaattttttttcatgttttaacaaaaaccaaaaaaaaaaaaaaaaaaaaaaaaaaaaaaaaaaaaaaaaaa

SEQ ID NO: 118725 - DNA, 1000 bp, Homo Sapiens
gtctgcctggtcaatgctgagctgtaccccacattcattaggaatcttggcgtccacatctgttcctcaatgtgtgacattggtggcatcatcacgccattcctggtctaccggctcactaacatctggcttgagctcccgctgatggttttcggcgtgcttggcttggttgctggaggtctggtgctgttgcttccagaaactaaagggaaagctttgcctgagaccatcgaggaagccgaaaatatgcaaagaccaagaaaaaataaagaaaagatgatttacctccaagttcagaaactagacattccattgaactaagaagagagaccgttgctgctgtcatgacctagctttgatggcagcaagaccaaaagtagaaatccctgcactcatcacaaagcccatacaactcaaccaaacttacccctgagccctatcaacctaggtctacagccagtggagtctattgtacactgtggaaaaatacccatgggaccagatcctgccaaattcttccagctcactttattctcagcattcctaggacattggacattggttttctggagggttttttttccatctttgtatttttttaaatttgattcttttctttgcaatgctatctaaccagaatacataggggaactgtgggctaggcaaacaaaatagaaaaaagtgtgaaaaacagtaaagttgggagaggagcatctattttcttaaagaaataaaacacccaaaacaatataaagttgtccagaatgtatgtcaagaattttagataggcctttcagtaacacaggtgaagaaatttttaaaaatacattgattattatctaggttagacttaaagtgaatctcaaataaaagaatcaggaatacaacttaagtgatcatgaggtccttccatatttagattgggtaagcatgaatgtgtattttctacaaaagaccttgagaagagttcaataaaaaatgttagcattataaaaaaaaa

SEQ ID NO: 118726 - DNA, 538 bp, Homo Sapiens
gccggacggacgctcgtcttcgcccgccatggccgagagcgactgggacacggtgacggtgctgcgcaagaagggccctacggccgcccaggccaaatccaagcaggctatcttagcggcacagagacgaggagaagatgtggagacttccaagaaatgggctgctggccagaacaaacaacattctattaccaagaacacggccaagctggaccgggagacagaggagctgcaccatgacagggtgaccctggaggtgggcaaggtgatccagcaaggtcggcagagcaaggggcttacgcagaaggacctggccacgaaaatcaatgagaagccacaggtgatcgcggactatgagagcggacgggccatacccaataaccaggtgcttggcaaaatcgagcgggccattggtgagtgtccctccacccttcgccgggtccgctgaacagggaggctacccgctcccagctggggttggtgagagtgggactcgggggaagaagatggccctgggggtcccctgttctctgaattc

SEQ ID NO: 118727 - DNA, 1000 bp, Homo Sapiens
gcaagcataagaaggacatcagtgagaacaagagagctgtaagacgcctccgtactgcttgtgaacgtgctaagcgtaccctctcttccagcacccaggccagtattgagatcgattctctctatgaaggaatcgacttctatacctccattacccgtgcccgatttgaagaactgaatgctgacctgttccgtggcaccctggacccagtagagaaagcccttcgagatgccaaactagacaagtcacagattcatgatattgtcctggttggtggttctactcgtatccccaagattcagaagcttctccaagacttcttcaatggaaaagaactgaataagagcatcaaccctgatgaagctgttgcttatggtgcagctgtccaggcagccatcttgtctggagacaagtctgagaatgttcaagatttgctgctcttggatgtcactcctctttcccttggtattgaaactgctggtggagtcatgactgtcctcatcaagcgtaataccaccattcctaccaagcagacacagaccttcactacctattctgacaaccagcctggtgtgcttattcaggtttatgaaggcgagcgtgccatgacaaaggataacaacctgcttggcaagtttgaactcacaggcatgccaggaggaatgcctgggggatttcctggtggtggagctcctccctctggtggtgcttcctcagggcccaccattgaagaggttgattaagccaaccaagtgtagatgtagcattgttccacacatttaaaacatttgaaggacctaaattcgtagcaaattctgtggcagttttaaaaagttaagctgctatagtaagttactgggcattctcaatacttgaatatggaacatatgcacaggggaaggaaataacattgcactttataaacactgtattgtaagtggaaaatgcaatgtcttaaataaaactatttaaaattggcaccataaaaaaaaaaaaaaaa

SEQ ID NO: 118728 - DNA, 1000 bp, Homo Sapiens
acaaaaatatagaattaaaacctttggttccaaaatgggaaaggttccacgatacataaatcatttctcatttgctttaaaaaatttaaaagtgtaaaaattatgagagactttattcgttaacaatgggggtaaagagctatatacatgaaaatgagtcttataaaattaagtgaagtgcaaataaaagcactgctactataagacattctggaatggttgtttaataagggtattatccatttgatctatagcaatgtgattttatttttaaaaagaaaagcagtgtgttttctttttttgttgttttcttttgcttaagcacttcatcaattgctttattctgtatctgcgaagtaatctgcaatctcttttgttctttttaaaatttgatttgttataaaattgccaaatagaagtgtttcagatacatagtttgtacctgtatttttattttattgcctcatgttcttgtaagtcattcttaattgaccaatgattgtagaccttgcttgagtattttttctaataaaacaaagcaaatcacatttagcttcaaattgtaacaattcaattgaattttaaaatgacacctgaaaagatacatctgatattttctatatagagcacagtaaataagttttttcattgtgtagaaatacttagatgtcaaaaccagatttcgtgatccttgattaacttctgagtactcaatcaatcataatccttttgctgcttatctgatgttggtttgatactgttaacacaccaaaaagaatatggaattgaaatgagctagctttataacttgtatgtatacatatatacacataacatccaattatgactgggtaataagtgtgaaaattttaatttgtggttttcatttattaatgtctgcccatctgtattgttgctcctaccttcaaatatgacacctgaaataataagtctgttgtccagaatttaaaaaaaaaaaaaaaaaaaaaaaaaaaaaaaa

SEQ ID NO: 118729 - DNA, 1000 bp, Homo Sapiens
accttgtgcaaggaaaatgtccaaatgatgctctctctcttgtgatttctttaacaagacttggaacatgtgcaaatggaatcttttctgtacaagataggattcattgcaaacaagctttaatgcaaatagtttagaaaagaaaggaccagtcttcactttctgcattatccccacattttattcattcatccagattacttcttcagtgcctcaggagtattcttctacaccagctgctgttaaaatgtacaatgaactctagtcccaaggaatacagaagtgctcttattaccagttttcccacttgtggccgcctttgcaaagatccatattctaatttaagtccccaacctctgaatttggttttaagtttacctagtgactgactactctctttataaaaaagaccttatacttaatgatcatttccaaaggagaccactccttaacttttactgcaaacccaacaagatgagacacttaaacccagacagatgtaacaaaggatttttgttgtctaagtcccaaagtattatatagaaagttcctgcttttatgggtaaacttattaccttaatatgttctgtggtttgctgttaaccaagattctcccatttaaaatgccacagaccgaccctcaaggcagatccgaaagcctagtagttagttgcactgggttgttttgacaagctaccacacgtcttaagtaaatagtaaagcctttatttttgtgttaagaacagcattttgaaaataaaacctatctgcccatgctttacagccttttaaatttgtaatatttatatagtcgtttatggtacatattgattgtcttgaaatttctttaacttcttttttataagtatgcaacagtcagccgggggaagataaaggtacattataaaacacacattaatgcatttaataaatatatattatctatcaaaaaaaaaaaaaaaaaaaaaaaaaaaaaaaaaaaaaaaaaaaaaaaaaaaaa

SEQ ID NO: 118730 - DNA, 1000 bp, Homo Sapiens
ggcggcggccagggaagcccggatggcggaggtcgcccgcttgctgggggagccagtggacgaagagggtcccgagggcaggcccaggtccagacacgggaacggaggcctggctgcgttgccctatctccgtctccgccacccacttagcgttttaggcatcaattaccagcagtttctccgccactatctggaaaattacccgattgctcccggcagaatacaagagcttgaagaacgccgcaggcgattcgtggaagcctgcagagcaagggaagcagcgtttgatgccgaatatcagcgaaatcctcacagggtggacctcgatattttaacctttacgatagctctgactgcctctgaagttatcaaccctctgatagaagaacttggttgcgataagtttatcaatagagaatagttatgtggtgacactacttcaagagaacctctgcattccagtcataccaatcctgcaacttgattttcagaagtcaagagtatatcgcgataagacagtgcacaggtggaggggaaaaaaagggggagggggaagcttatcttgaaaaagcatcacagaagtagaaaaaaatgtcgaaagcattataactgtaacgttctttgagtttgtgattgatccacatttttccccctgcattatggaaaatgtctctcagcattgctttattacaaagtaaaggatggttttataaaattgagactgatgaaacatcaatactagagcccatgaggatgaaagaaattatcaaatagtgctgaacagaataagatgttaacgctgagttattaggactggaaggctatgaaaagaacttgaaattgtcggaatatgtgctctcttcatgtcatattcaatagaagtttctagtttaagattgattttgtgttttcttaggcatttcaagtgacaagcaaagtaaatgtatatattatgtgataaatcatgttttcaagaacgtcaaaaaaaaaaaaaaaaaaa

SEQ ID NO: 118731 - DNA, 1000 bp, Homo Sapiens
tttgcacatttacttatttttaaaaatttttatttattttttgagatggagtctcactctgtcacccaggctggagtgtagtggtgcaatcctggctcactgcaaactctgcctcccaggttcaagagattctcctacctcggcctcccgagtagctgggattacaggtgtgcaccaccattcctggctaatttttgtatttttagtagagatggggtttcatcatgttggccaggctagtctcgaacgcctgacctcaggtgatccgcctgccttggcctcccaaagtgctgggattacaggcataagccactgtaccaggcctcatttacttattaatttatggtctctctcctgtcaaatataagctccacggaggccaggaatttgcctatttccatccccactgtgtcctcagctcctagaacagttcctggcttgtaacagaaactcattacacatttattgaatgaatgaataaataattctctcctctcttggtttctttggctctgcctttgtctgtcctgtgagatctctctgctcccccagaatctcatctctatgacatccctatcctggccctcccccaaccacgtttttctttgttgctggttctccaggaagcagacacctctcactcccgacaggacatgctggagtctggcctcggccaccagaaacgcttagcacgtcaccaaagacactccctgctccggaagcctcaggacaagaagaggcaagcatctcctcatctccaggatgtgaggctggaggggaatccaggggcccccgatcctgcatccaggcagcctctgaccttcctccttatcctcttcctcctcttcctcctcctggtgggtgccatgtttctcctgcccgcgtcaggaggcccctgctgctctcatgcccgaatacccaggacaccctacctggtgctcagctatgtcaatggtcttcccccagtctgatgtgtgtaataaatggtcactgtcaaagg

SEQ ID NO: 118732 - DNA, 1000 bp, Homo Sapiens
cctgcaccacaccctacatgatcttctttggccacggctatgctcgcctcacccttagcctttacgacccccattccagcgacctcggcggccacttgaccaaccagttcatgcagaagaagagccctctgtacatgctgctgaaggagcacacggtgtggagcatggaacatctcaaccgctacatcagtgacacgttctggaaggcccggggcctcgccaaggactgggtcttcaccaccctcaaggtgcgtccactgtgccctccagtctgggagtgagatccctcggggcgggggtgtgtggtcaggctgggcaccaggcacacagatgtccgtggcgtgcgtgggcggctgcgctgaagtgtgacctgaccgtgtggaaccaaacccttccagcgtctctgctcacttagctggcagtgcctgtccccagcagccagcaaaggcccggacggaaagcccagtcgggggtctgtcggcacgagtcccgcgggcagcctcgccgtagggtcaggggacagctcggcttcagtgacagccaccatgtgaagagtctttgttcctttcagatcctccacttggcaggcagggccaacagcagcccccgggccaggtgtcctggagcagcagcagctgcccgtgcaggcccggactctccctagctaagggccatgtgcggtggagtgtcctaattttgcagggttcctttctgtgggggtacctgtggggtacttcaaacagccctagcagcaaaggcccttgagcagcgcggtgtgaaactgggataaaaacggggcttggccgaaggacttttatctgtcttggtcaccccggccaggccccggaagcagcagccagggatggtccttcctcacccacaggcgtgtgtcactgtggctgggacggcagcgctcagaggagcctccagttactttcctcacatctcccaaactctctcttaattgcgataattcacagaacataaaattcacgatctt

SEQ ID NO: 118733 - DNA, 1000 bp, Homo Sapiens
cacgaccctgcacgtgcgggccctgctgcagcagcaggacaccttggcgaccatcatcgacatcttggagtactcaaacaagaagaggctgcagcaattgaaatctgagcttcaggagtgggaagaaaagaagaaatgcaagatgagctatcttgagcagcaggcagagcagctgaatgccaagattgagaagacccaggaggaagtgaacttcctgagcacttacatggaccatgagtattccatcaagtctgtccagatctccactcttatgcgccagctgcagcaggttaaggacagccagcaggatgagctggatgacctcggtgagatgcgcagaaaggtcctggaatccttgtccgacaagattcagaagaagaagaaaaaaattctgagttctgtggtggcggaaacccagcgtccctatgaagaggctctcctacagaagatgtgggaaagccaggacttcctgaaatgcatgcaaaggttcagagaatttattgaccagtttgaggagaacatgcctgtattaagggccgaggtggaagagctccaagcccagacccgggaaccccgagaggtcatatttgaggatgttctgcttcggagacccaagtgcaccccagacatggatgtcatcctcaacattcctgtggaagagccactacccttctagatggcagtgccatgggccgccctcccctcctgctctcttcccagcacctggagccttggatcatttacttccaggaccggatctccattcagaccctgatctacagtctccctgctccctctgcccttcctccctctttctttccctccctccctccctcccttcttccccccttcccttccctcctccttccttcctcctctccctccctccctcctttctttcttcctgtggttttttcctctcttcttcccttctttctggttggtgctgctgggccaggtgggaatttctgattaaatctgctattccttttttaccaat

SEQ ID NO: 118734 - DNA, 1000 bp, Homo Sapiens
aaggtcggggtcagacacagacagagtcaatgcagtatgactgatgtttaagtgagggatttctggaagctcatagaagggaccacagcattccactggtcagggaagactccatagagtaggcaacatttgggcagtgttttgaagaatgacaagggcctgccagacagtacatgggggagaaggactttcaggggagaggaacagcatgggcaaagttatggaggcatgcaaacatctccctcttctctcccttactttccaagcaagttaggtacgctttccatggggattctggcctgtgtggtaggaagggatctcccttgctcccatgttgctggctgtccgtacatcaccctgtcccctgcaggagggggctacaggccatctccctcctgtaggcctctgactcccctccacttttgggccctcagcttatctcgggcaggggaccattgcagcatcctcccctcctcggactcaaggtgctgaggtataagccctgggccccagatccctggtgacaccttcctggagaagactctcaaaagtgactgtatatttgagttcaccagcaataactccccacactcgaagcaggtccaaacccaggatctcagggtccttgggctctgtggcactgtcttcccaagatccttcctgttgcacaatgggaaacctaagaggaaaaagacaggggcctgcttgcccagccatgcgagggattccatgcccacctgccctctgtctgcctcgctggaatgtgggcccctgctccccgtcaggttgtgctgtctctgacctatgtttacatccccgaggggtttctgcctcctccccacccaggtcagggtgtggtccagcagcttgctgtggggtgctgacatgtgtcaccactgccccccttgcccccgggggggtcatggtctcctcctggatgctgctccttgaatcttttttcttgataaaccttttacaattaaaaaaaaaaaaaaaaaaa

SEQ ID NO: 118735 - DNA, 1000 bp, Homo Sapiens
attcacccccaagtctggcgtcaagatccatgtttctgaccaggagctgcagagcgccaatgcctctgttgatgacagtcgtctagaggagctcaaagccactctgcccagcccagacaagctccctggattcaagatgtaccccattgactttgagaaggatgatgacagcaactttcatatggatttcatcgtggctgcatccaacctccgggcagaaaactatgacattccttctgcagaccggcacaagagcaagctgattgcagggaagatcatcccagccattgccacgaccacagcagccgtggttggccttgtgtgtctggagctgtacaaggttgtgcaggggcaccgacagcttgactcctacaagaatggtttcctcaacttggccctgcctttctttggtttctctgaaccccttgccgcaccacgtcaccagtactataaccaagagtggacattgtgggatcgctttgaggtacaagggctgcagcctaatggtgaggagatgaccctcaaacagttcctcgactattttaagacagagcacaaattagagatcaccatgctgtcccagggcgtgtccatgctctattccttcttcatgccagctgccaagctcaaggaacggttggatcagccgatgacagagattgtgagccgtgtgtcgaagcgaaagctgggccgccacgtgcgggcgctggtgcttgagctgtgctgtaacgacgagagcggcgaggatgtcgaggttccctatgtccgatacaccatccgctgaccccgtctgctcctctaggctggccccttgtccacccctctccacaccccttccagcccagggttcccatttggcttctggcagtggcccaactagccaagtctggtgttccctcatcatccccctacctgaacccctcttgccactgccttctaccttgtttgaaacctgaatcctaataaagaattaataactcccaaaaaaaaaaaaaaaaaa

SEQ ID NO: 118736 - DNA, 1000 bp, Homo Sapiens
gggttgctgttgattgaagatgtatataatatctccggtttataaaacctatttataacactttttacatatatgtacatagtattgtttgctttttatgttgaccatcagcctcgtgttgagccttaaagaagtagctaaggaactttacatcctaacagtataatccagctcagtatttttgttttgttttttgtttgtttgttttgttttacccagaaataagataactccatctcgccccttccctttcatctgaaagaagatacctccctcccagtccacctcatttagaaaaccaaagtgtgggtagaaaccccaaatgtccaaaagcccttttctggtgggtgacccagtgcatccaacagaaacagccgctgcccgaacctctgtgtgaagctttacgcgcacacggacaaaatgcccaaactggagcccttgcaaaaacacggcttgtggcattggcatacttgcccttacaggtggagtatcttcgtcacacatctaaatgagaaatcagtgacaacaagtctttgaaatggtgctatggatttaccattccttattatcactaatcatctaaacaactcactggaaatccaattaacaattttacaacataagatagaatggagacctgaataattctgtgtaatataaatggtttataactgcttttgtacctagctaggctgctattattactataatgagtaaatcataaagccttcatcactcccacatttttcttacggtcggagcatcagaacaagcgtctagactccttgggaccgtgagttcctagagcttggctgggtctaggctgttctgtgcctccaaggactgtctggcaatgacttgtattggccaccaactgtagatgtatatatggtgcccttctgatgctaagactccagaccttttgtttttgctttgcattttctgattttataccaactgtgtggactaagatgcattaaaataaacatcagagtaactc

SEQ ID NO: 118737 - DNA, 1000 bp, Homo Sapiens
gtatgcccttagcgtaggctaccgccacattgattgtgctgctatctacggcaatgagcctgagattggggaggccctgaaggaggacgtgggaccaggcaaggcggtgcctcgggaggagctgtttgtgacatccaagctgtggaacaccaagcaccaccccgaggatgtggagcctgccctccggaagactctggctgacctccagctggagtatctggacctgtacctgatgcactggccttatgcctttgagcggggagacaaccccttccccaagaatgctgatgggactatatgctacgactccacccactacaaggagacttggaaggctctggaggcactggtggctaaggggctggtgcaggcgctgggcctgtccaacttcaacagtcggcagattgatgacatactcagtgtggcctccgtgcgtccagctgtcttgcaggtggaatgccacccatacttggctcaaaatgagctaattgcccactgccaagcacgtggcctggaggtaactgcttatagccctttgggctcctctgatcgtgcatggcgtgatcctgatgagcctgtcctgctggaggaaccagtagtcctggcattggctgaaaagtatggccgatctccagctcagatcttgctcaggtggcaggtccagcggaaagtgatctgcatccccaaaagtatcactccttctcgaatccttcagaacatcaaggtgtttgacttcacctttagcccagaagagatgaagcagctaaatgccctgaacaaaaattggagatatattgtgcctatgcttacggtggatgggaagagagtcccaagggatgcagggcatcctctgtacccctttaatgacccgtactgagaccacagcttcttggcctcccttccagctctgcagctaatgaggtcctgccacaacggaaagagggagttaataaagccattggagcatccaaaaaaaaaaaaaaaaaaaaaaaaaaaaaaa

SEQ ID NO: 118738 - DNA, 1000 bp, Homo Sapiens
ccaacaggactgaagccatgtgggaagattttataacctgcttaaaggatcaagatctgatattttctgcagcatttgaggcccagtcttgctacctcttaacaaaaactgctgtttctagacctttgtttttggttttggatgacaatttttattatcagagtatgagatatgaagtctaccagctggctcggaaatattcattgggcttttgccagctctttttagattgtcctcttgagacctgtttacagaggaatggccagaggccacaggcactgcctcctgagaccatccacctgatgcgaagaaagctagaaaagcccaaccctgagaaaaatgcttgggaacacaacagcctcacaattccgagtccagcatgtgcttcggaggccagcctggaagtgactgatttattgctcactgctttggaaaatccagtaaaatatgctgaggacaatatggaacaaaaggacacagacagaattatttgttcaactaacattcttcataaaactgatcagacactccgaaggattgtatctcagacaatgaaggaagcaaaaggtaatcaggaagccttctcagagatgacatttaagcaaagatgggtaagagcgaaccatgcagctatctggaggatcattctaggcaatgaacacatcaagtgcagaagcgcaaaggttggctggttgcagtgttgcagaatcgagaagaggccattgagcacggggtgagatgaacaagtgcttcctcacaacttgaagcttctagcagaagaacttaacaagctcaaagcagagtttttggaagacctaaaacaaggaaacaaaaaatatctgtgctttcagcaaaccattgacataccagatgtcatttctttttttcattatgagaaagataatattgtacagaagtatttttcaaagcagcattaaaatttctgaactgccaaaaaaaaaaaaaaaaaaaaaaaaaaaaaaaaaaaaaaaaaaaaaaa

SEQ ID NO: 118739 - DNA, 1000 bp, Homo Sapiens
gtgcacccgcagggtgtggtgcctcacacctgtaatctcagcactttgggtggtcaaggcaggaagatacctcgaggccaggagtttgaaactagcctagacaacaaagcaagatctcatctgtactaaaaatttaaaaatttgccaggggcggtggcacatgcctgttgtcccagctgcttgggaggctgaggcaggaagctcgcttgagctcaggagttcaaggctgcagagagctaggatcacaccactgcactccagcctggacaacagagtgagaacctgtctttaaaataataataataataataaaaaaatagctgggtgcggtggctcatgcctgtaatcccagcactttgggaggccaaggcaggtggatcacctgaggctaggagttcgagaccagcttgggcaacatggcgaaaccccgtctctactaaaaatacaaaaaattagctgggcatggtggcgtgcacctgtaatcccagctacttgggaggctgaggcaggagaatcacttgaacccgagaggtggaggttgcagtgaaccaagatcgcaccattgcaaccccacctgggcaacaagagggaaaccctgtctaaaaaaaaaaaaaaaaaaaaaggatttattatgtgctcactgctggctcaggccccaacctctggccttttaagttacctagacttgagttctggcatccagagctaacaatcattcttcagatcacccacaccggatggaatctctagctattttatcagctaagaaaatcagggtaataatgaaaaagcagtagggcctggggctagcactgagttcagatccagctttcaggaggacagtggaaagagtgcagagcctctgcctaggccctgggccccacgaagcaggacaggcagagcccagggtactgttggcatctctgtccttcccttcaggacaccccttacctatctgcctcaaccagactgggtacaaaataaagatcaagtctcccgg

SEQ ID NO: 118740 - DNA, 1000 bp, Homo Sapiens
gggggcacgctgagtggcggcattctctccagtggcaagggaaaatatagcaggttagaagttcaagccgatgtccaaaaggaaattttccccaaagacacagccagtcttggtgcaattagtgacaacgcaagcactcgtgctatggccggttccataatcagttcctacaacccacaggacagagaatgcaacaatatggaaatccaagtggacattgaagccaaaccaagccactatcagctggtgagtggaagcagcacggaggactcgctccatgttcatgctcagatggcagagaatgaagaagaaggtagtggtggcggaggcagtgaagaggatcccccctgcagacaccaaagctgtgaacagaaagactgcctggccagcaaaccttgggacatcagcctggcccagcctgaaagcatccgcagtgacctagagagttctgatgcacagtcagacgatgtgccagacatcacctcagatgagtgtggctccccccgctcccatactgcagcctgcccctcgacccccagagcccaaggtgcaccgagcccaagtgcccatatgaacctctctgccctagccgagggacaaactgtcttgaagccagaaggtggagaagccagagtatgaagtggaatgaatgctcctgttctgagaagcacacttgtaactgcatcttttggaattttttttttttttttttccaaggggtagagatttatgtattttatttcacagattctctggtcacaggtttttgcccagggaaattctgagaaattcacaatttcttaccagataaaacatgaaaagtttgccgttagttcccctcccctcccctccctctttttagttttaatttattggttaaactgatggcagcaatccatgaggtgtgtcaaagagtgtacatatgtatgtgtgtatattgaatgctaaacatattactgaaagacacattttaataaagatttctgtcataattcaactt

SEQ ID NO: 118741 - DNA, 1000 bp, Homo Sapiens
catcacaggctgcaccaacgctgcgggcctcttggtggttggcaactttcaggtggatcatgccaggtctctgcactacgttggagctggcgtggccttccctgcggggctgctctttgtttgcctgcactgtgctctctcctaccaaggggccaccgccccgctggacctggctgtggcctatctgcgaagtgtgctggctgtcatcgcctttatcaccctggtcctcagtggagtcttctttgtccatgagagttctcagctgcaacatggggcagccctgtgtgagtgggtgtgtgtcatcgatatccccattttctatggcaccttcagctacgagtttggggcagtctcctcagacacactggtggctgcactgcagcctacccctggccgggcctgcaagtcctccgggagcagcagcacctccacccacctcaactgtgcccccgagagcatcgctatgatctaaggtctggggagggtggctggcccggcctccacagcaccccaccccatatcttctttccatttatttcgtaccaaaaacaattttgagaaagtattctgttgggatctgggcttcctcacttctggagaagtggccatcccatgcccacctgtgccatggaggagtgggccctgccagctgccacagctgcatgacctgcttccccaccccacggtgtcgttttgtttttaaaggtcacctgtcctcactcacccagccagcccttcaggtgccttctactcccagtgccaaagccagaccactggggtttcctgctgcaggaattgggggctgggaacagcagaggggatagaagtctggtggaggtggagtgggcacgccttagcctacggaaaggcccatttctgggcccactgagctgcactgggattcttcactctgcccctcacttcctttagggcaaataacacagcagaaccacgtgggtattttagtacttttttttatattaaaagaattctaatttgc

SEQ ID NO: 118742 - DNA, 1000 bp, Homo Sapiens
gaggtgatccagagaaggcggagaaggaagaagtaacctctgagtggcggctattgcttctgttccaggtgctgttcgagctgttagaacccttaggcttgacagctttgtgagttattattgaaaaatgaggattccaagagtcagaggagtttgataatgtgcacgagggcacactgctagtaaataacattaaaataactggaatgaactcctgatcccaaagcctattgtgttttcaacacaaggtaataggaagccaagcaacttgcatgtctcccaatccctgtctagggacagctgctggtgcaggatggaagacttcctataaacagaatgggcgaccaattgtgtctacagagggggtgggctgagcatgggcacgcatgtccccagcctcctggacgagcaaagtcagtcaaagcgctggtgatccctgctccgcgtgcgtagcagtgtctgtgcctctcctgcccaggggctagagagcagtctccagtgcagggtccccatcctatctgaaaacagtggagtcagtgaccccaggtggagggacttccagttttaacaatgggttggtatgaaggccagaaggagtgaaacatgtgaactttctggcgaggagactccctcttgaatcatccatatgtagccccggggtcacttgcgaagagtctctaacagcttctgcctcactcctaagctctgaccgctaggctttcaccccagccgccggtcctgattcctgagatcccaatattgagcaccaggtttcctggaattgtgtgctgcggctgtgatgtaggtttcggtcgctggaagctgctaaaccatagctgacgccccctcctaagccagccttccttccccgcgcgggcatctgtccagggccttgtcgcgctctcagtctccttcgcagcctggccccaaccgttcaacttcaataaagcaaaactccagccaaaaaaaaaaaaaaaaaaaaaaaaaaaaaaaaaaaaaa

SEQ ID NO: 118743 - DNA, 1000 bp, Homo Sapiens
agaaagcaaatacaatgggaaaaaaaaacatatcagaatgtcttgtattaaatgtttcctctgtattctcagggtgaattaatgtagtaatatttaaaattacaaaatagattgttaactgttacactgtggcattggaattttaactctttgtatttactggtatgagagggctatctacaagggtaatatttctgattaccctggtttacagaaacctccagcagtctttgaaacatctcacatgactctagttattgattgcttttaatggttttatggtactgttgatagtcatagtggctgcctatagaacaatcttcaaactgagccatgctttaggggagggaaaggggctaaagtctcttctgttggtaatttattagttactcttgaaacagtaaaatccaacagaaaggaagagatagctactgtatattacagtaaagaaagctgcatagttattttaaatttaatggagatgaatatggttaaaatatataactactgctgcttgagaatagcaagagtattgttttaaaacatattccacccaacttgagagttcttttaaaatgattggccatatgaacatttgtaatcttgccattaggtttggacctgccatattttgttttattctgtgatcctaactagttccttttaataggctaaaatatttatcaatactgatcagactttaaagaaattactttgtaaacctgctgactacctgtatgtattgtatatatattatatattaaatatataatatattgagattataaaagatgaaaatattgaatccttataatattttaagttgcagaatgtatgttaaaaagtgacttgaatgagatgtatttgtatctagaaattttatttctttttggaatgagattaaaatacattttgaaagttaaaaaaaaaaaaaaaaaaaaaaaaaaaaaaaaaaaaaaaaaaaaaaaaaaaaaaaaaaaaaaccaaaaaaaaaaaaaaa

SEQ ID NO: 118744 - DNA, 1000 bp, Homo Sapiens
cggctacatcatccacctcctcctccggaccctgctggaggcagccttcggggccttgcactactttctctttggattcctggccccgaagaagttcccttgcacgcgccctccgtgcacgggcgtggtggactgctacgtgtcgcggcccacagagaagtccctgctgatgctgttcctctgggcggtcggcgcgctgtcttttctgctgggcctcgccgacctggtctgcagcctgcggcggcggatgcgcaggaggccgggaccccccacaagcccctccatccggaagcagagcggagcctcaggccacgcggagggacgccggactgacgaggagggtgggcgggaggaagagggggcaccggcgcccccgggtgcacgcgccggaggggagggggctggcagccccaggcgtacatccagggtgtcagggcacacgaagattccggatgaggatgagagtgaggtgacatcctccgccagcgaaaagctgggcagacagccccggggcaggccccaccgagaggccgcccaggaccccaggggctcaggatccgaggagcagccctcagcagcccccagccgcctggccgcgcccccttcctgcagcagcctgcagccccctgacccgcctgccagctccagtggtgctccccacctgagagccaggaagtctgagtgggtgtgaaaaaaacagcacctggcggtgccccggggctcacgcctgtaatcccaacactttgggaggcccaggcaggaggatcgtttgagaatatatctccttgcccaagagtttgagaccagcctggacaacataatgagaccctcgtctctacaaaatatctaaaaattagctgggcacagtggctccctcctgtagtcccagctacttgggaggctgagatgggaggaccatttgagcctgggagatcgaggctgcagtgagccaagatcacggcactgcgctgcagcctgggcaacacagtgagaccctgtc

SEQ ID NO: 118745 - DNA, 1000 bp, Homo Sapiens
gtccttacgaggcgtcatacagaggcagtggggtgggcacagatgagcagagtggatggttcggtgggtccccacgaggcgagtggtggtcatatgtgatggcacgtgttcacacaccctcctgtgtacccccccagggtcaccgaagtccccacacgctggctctccacacccctcctgttccagaaagcatgtccgaaagcagtccaggagattattaaggggtcgccatgaatccactttggttttaaaaccattcccgaatgtcctagtggattgtgttgtgctgcctaagctgccggctgcaggagccagagaagtgacccccgcgggagcagcggcaggtggatctccacggtggctcgctttgtttttgttttgttttttcttttaagacggagtctcactctgtcgccgagtttggagtgtattggcgcgatctcggctcactgtaacctccgcctcctgaattcaagtgattctcctgcctcagcctccctagtagctgggattataggcgccccccaccacgcccaagtaacttttgtatttttagtagagatggggttttgccttgttggccaggctggtcttgaactcccagcctgaaatgatccacccacgtccacctaccaaagtgctggaattgcaggcatgagccaccactcccggcctgctttttgtttttgaagacaggacttaggtctcctcctcccgaactctaaacctgcgtgtgtggctgtgcaccgctcgtttgtagcgtcacctcaggtctggggaagtctgtgctggcatctcctcattgtgccttcatcagagctggtgccttcgggccagaaagactctcgttctttctagatggtgggatcaggggcctttgctgtgtttcccttggtggatttttgtgttttgtaagttgtctattttgataatgtattatttttataactgtaaaaaaagtaaatagcatattttaaagtgaaaaaaaaaaaaaaaaaaa

SEQ ID NO: 118746 - DNA, 1000 bp, Homo Sapiens
tttggtggcgccaaccatggaggctacatgaatgccggtgctgggtatggaagctatgggtacggaggcaactcggcgacagcaggctacacaggttttgtatgaatttttaaccttttaacaaactcccaaatctggttgatgcctttgacagtgatgaaaacgatttcaccacatctgaatccagagaaaccggctttttttcttattgcgagcatgttaaaacgttgggaacatgtggggaattgtatattgcgctgaattaacttctcccgcctcttgtaatgctctggtgggttcttgtttgggaatgcgatattttgtggctggtttagctagagagtgaactctcaaaggtatcaaaactgtgcttccattattagtgcaagaaacagacaggctttaaggggtagatgacgtgaaattttgcaagtcttaattacagctgcagatgcatgggattctggatttttttgttgctttttagtttaatgggactttaaaagtaattgaggagaaagaaccgtgatgttccctgtttctccagtaaaggactggcttttgcttgggcagaggtggtgctgctgggtgtgcagctgccacagactccaaaggcgtagaagtttgtgccaacacacggagtcattctggctctctgctgaggcccctgttttctggcaggtgccctccttggaaactggttttggctctgatcagcggttctttttgcagcaaagcctgcatctgtgttgacttgcaagattttgcgtttattcaggcaaaaactggtcaaaatggttactacatgatttgttcccagaggtttgaaacattcagtgaaactttttaaaactttgattgcatgatgtattttttttttagaaagttattgtttgagaataatgtctttttataccaggaaaatagttatcctgaatgacgttgaaaactccccctcccctttatttttttttaatcaatacatgtgaaagtaacaagc

SEQ ID NO: 118747 - DNA, 734 bp, Homo Sapiens
gaggtaaaggccgcgcttgggtgtccctgggtggtcgggtccccgagttgggaggggcggaaggctgaacctccagcttgagccggacaagccgattcccagcgttgagagggtagagatgaactgtgtgtgaggccaaactggatcggtcaacatggtcttccccctccccactccccaggagcccatcatggcgacgccccctaagcggcgggcggtggaggccacgggggagaaagtgctgcgctacgagaccttcatcagtgacgtgctgcagcgggacttgcgaaaggtgctggaccatcgagacaaggtatatgagcagctggccaaataccttcaactgagaaatgtcattgagcgactccaggaagctaagcactcggagttatatatgcaggtggatttgggctgtaacttcttcgttgacacagtggtcccagatacttcacgcatctatgtggccctgggatatggttttttcctggagttgacactggcagaagctctcaagttcattgatcgtaagagctctctcctcacagagctcagcaacagcctcaccaaggactccatgaatatcaaagcccatatccacatgttgctagaggggcttagagaactacaaggcctgcagaatttcccagagaagcctcaccattgacttcttccccccatcctcagacattaaagagcctgaatgcctttgaaaaaaaaaaaaaaaaaaaaaaaaa

SEQ ID NO: 118748 - DNA, 885 bp, Homo Sapiens
acttccctgggttcacagcaggggtggaactggattcttcctggatggggatccagatggaggtggagctgcaccccttgtagagaatggctgcgggtcccaggccaggagctccctgcagggcgggagctcccacgatcgtattgacctctggaagaagacagacactttcccacgggagctcctctccagccagagctacacttggcaaacctttggtcctaaatgatttattcactgaattgaagaaatacggtttacatatcttccaagtatatatgtagggttgatttgggaagcagagcacagcagcccaaatttgcttgtaatgtcggcgactacagcctgctggcctgccttcactgtcctgggggaagctcggggagaccaggtggactggagtagactgtacagagacactggtctggtgaagatgtccaggaaaccacgagcctccagcccattttccaacaaccacccatcaacaccaaagaggttcccaagacaacccaaaagggaaaagggacccgtcaaggaagttccaggaacaaaaggctctccctaaaagaccaccgcttcaaaaaaacctgaggaatggagtgggccaacactatccagccactctgaccagccgaaccaggaactcaatcaaaatgcgccacagcaggaccacaagggcaaggagaccaccgccttctccagtgcttccttgggcagccagtaattcccaggcaaggccagagacttcaagtctatctgaaaagtctccagaagtctaaccccagataaatagccaacagggtgtagagtacgttttacaccccaaagggtatgccccatggtgatagaaataaaatgaacatgttgtaaaatgaaaaaaaaaaa

SEQ ID NO: 118749 - DNA, 1000 bp, Homo Sapiens
taggagtgaaggtcagcatgttctcatgtgctcatcctcttggtttccccaaagaccgggagggtcacggatggggcgtgcagaatccttgtgttttttctcgctgggcagcttgaggggctggggagtattcccagggtctttgctctggagagtccctgcagagccactggctgaggttgggttcagggttcagcggagtcctccatgcttccaaaggccgggaagcacccgcctctctatcgagtcagtgctgtgcgtgtgtgtctgagaatgtgtgtgatgtgtggagtgtgcgtgtgtttgtgtgtgtgtgtgtgtgtgttggggcagaaggaccactctttcctggggatcccttgacccttataactagaagggaccttagggagcatctaagctggtgcccccattgtacaggcgaggtccagagggatggcatctgcccaccccaccccttgccctcttgttgcctgcactcatttcccagggaccctcctaggataggactgccctccttcctggccccctcccgccatcctcccagccacccacataatcaccatctcagcccaactctggtggccctctaggtctccatgcattcttcctgccctagagtagccagctcaccaaggcctttatccccagcccaggagaagggtcagggagggaaggggctgcaccagccctgagacctcaaagacttgggagaaaagccaaaactcctcatgcccaggcccacatgtctgaccaccccagcccaccccgccaccaaggtaaaagcacaacaggagacccccttattaatgggtgaaatgattggggttgtttttttagtcacacagccccatcctcacccctttgccttgctgtctgtctccaccccagcctctgttccccatttgcctctctttcacctccaagcccccaaatgtaacctctagttgcggacgcggttgttctatcaataaagctgcagtgttctagcgctcagcgt

SEQ ID NO: 118750 - DNA, 1000 bp, Homo Sapiens
ggatgtggagttccttcctgtgtatcaccccagccctgaggagagcagggaccccaccctctatgccaacaatgttcagagggtcatggcacaggctctgggcattccagccaccgaatgtgagtttgtagggagcttacctgtgattgtggtgggccggctgaaggtggcgttggaaccacagctctgggaactgggaaaagtgcttcggaaggctgggctgtccgctggctatgtggacgctggggcagagccaggccggagtcgaatgatcagccaggaagagtttgccaggcagctacagctctctgatcctcagacggtggctggtgcctttggctacttccagcaggataccaagggtttggtggacttccgagatgtggcccttgcactagcagctctggatgggggcaggagcctggaagagctaactcgtctggcctttgagctctttgctgaagagcaagcagagggtcccaaccgcctgctgtacaaagacggcttcagcaccatcctgcacctgctgctgggttcaccccaccctgctgccacagctttgcatgctgagctgtgccaggcaggatccagccaaggcctctccctctgtcagttccagaacttctccctccatgacccactctatgggaaactcttcagcacctacctgcgccccccacacacctctcgaggcacctcccagacaccaaatgcctcatccccaggcaaccccactgctctggccaatgggactgtgcaagcacccaagcagaagggagactgagtgcctcagcctctcaccccctcctcctcagggcagcgctaggggcctcccctatgcctcagccccatctctgctcctgtttgaattttgttattgttgtttggttgttgtttttttaagttgattttaattttttgtttggttgatttttttgtaaaaaactattttatatataaatataaatctatatctatatctattaaaaaaaaaaaaaaa

SEQ ID NO: 118751 - DNA, 1000 bp, Homo Sapiens
gaccgacatggccgacacacgggaggccattgtgcgtgcctcacgcctgcccatgtccatcatcatcgtgggcgtgggcaacgccgacttcaccgacatgcaggtcctggacggcgacgacggcgtcctgcgctccccacggggtgagcccgcgctccgggacatcgtacagttcgtgcccttccgggagctcaagaacgcatcccctgcggcgctggccaagtgcgtgctggccgaggtcccgaagcaggtggtggagtactacagccacagaggcctgcccccgagaagcctgggcgtccctgccggagaggccagcccaggctgcacaccgtgaagatgtggagggcgtagggtgggggcagtgaggaatgggtccgtacagcctctgtctgcaacatgcttggggtcccttaagctccctccgacctcccagaagcctccagtccccaccaggccccactcccagtcctcctgggatcctgctggcttgggcccggctctggggcccccaaggccgaagggtgacaaaatacaggcccccatgcctggccctgcctgagccaggtgggtggagggagggagatcatgagggacttggagggagctgggagttcatccacgggagaccctgccccgatgagaaggggcagggactgggggctctgctttgcgtctaacctttgtgggggagggccagcaaggcagtccccccacgcccgagaaagcctgggggacccagacacctgtccccacagtcaaagcctggggacccagacatcctgtccccacagtcagcctcctgtccctgctggtgcccccacacccacctaccctgtgctttttgccgtcgggcctctgcacctgggtccatggggtctgcctggcctgtgggttctgccggtggggcttcaggagtaataaagtgtcaccctatccttgtaaaaaaaaaaaaaaaaaaaaaaaaaaaaaaaaaaaaaaaaaaaaaaaaaaaaaaaaa

SEQ ID NO: 118752 - DNA, 1000 bp, Homo Sapiens
ttactggctgtaccacttttgaagaagctcttgaaatggcatctcgtggagatagcaccaaagtggataaactagtacgagatatttatggaggggactatgagaggtttggactgccaggctgggctgtggcttcaagctttggaaacatgatgagcaaggagaagcgagaggctgtcagtaaagaggacctggccagagcgactttgatcaccatcaccaacaacattggctcaatagcaagaatgtgtgcccttaatgaaaacattaaccaggtggtatttgttggaaatttcttgagaattaatacgatcgccatgcggcttttggcatatgctttggattattggtccaaggggcagttgaaagcacttttttcggaacacgagggttattttggagctgttggagcactccttgagctgttgaagatcccgtgatcattacctggggaggggttcctgaaaccttccacaatgggatctgtggactttcatttttttaagagacttactcaatttcatgactgtactacctgaaacaaagtgagaaaggacaggtgtatttttctaagtcatcaagataaatccttaagaattcagtctaaattagcaaccaggaaggaaaaatatattaaaaacaacaaaaaagtggcacatgtccaggcagtgtgaggatttgctgtatataagttgcctgctttgtatttttgaaatctctgcatcactcattggaagtgcttctgaagagagctgctctgtgttcagttgactggttttgtgtcctgtttgaacttgctgaatgtaaggcaggctactatgcgttataatctaatcacaatttgtcaatatggtcttggcaatcatctgtgcattactctggtttgcattaagcctgtgtgtgaacttactgtaaaacatgttttatttcaaggttctgcaaaattaattgggcaggttaattgtgtacctgaaacttaacaagcagtttttggaagggc

SEQ ID NO: 118753 - DNA, 1000 bp, Homo Sapiens
tcttacataaggcctttcttaggaattatgtgtatataaatctttgaaatatctttatatacctgagttttaggttccaactgtgttagacatgagtttgctagatccatggtctctagatggtttacttaaataggccaggcgcagtggctcacacctgtaatcctagcactttgggaggccgaggtgggcagatcacgaagtcaggagatcaagaccatctggctaacagggtgaaaccctgtctctactaaaaaatacaaaaaattagccaggcgtggtggtgggtgcctgtagtcccagctactcaggaggctgaggcaggagaatggtgtgaacccgggaggcagagcttgcagtgagccgagatcgcgccactgcactccagcctgagtggcaaagtgagactctgtctcaataaataaataaataaataaaaataagcctgtggcctgttttgagggaaaagtaacataactctgataattaattatgataataactatgatagttaaaaatacgtcattttaaagatttcccaaaccacaccactaaatttgttttatgaattgattttattttatttgaaattatataatgtagtcaactgcaatatggaagtttgttcttgtttctttgtcaataaccttaccagttttataatgcagtttttgatggaattaaacacaaagaacttgaaagcagtcagttacaaaaaggtagttgtggtcaagtagttttaatatgtaaatttgcaagtttttggagaacccccaaactccttctccactggagttaggagggcctgtggtagacagcgtgaatcatgaaaataagcctggagagttctgttattaaggggcatagcattaatttttgcagtcttaaaattacacttcttgacttctgaatgtctcttatttgcgtgcactgacaaaattctatttgtttacttttatattaatggtaataaaatagattataaagaaaaaaaaaaaaa

SEQ ID NO: 118754 - DNA, 1000 bp, Homo Sapiens
cacagaataagagtttgccgtgtaaagacaatatccccattcgtcatgctcttattttcccgtgggatatttgcatacaaatgcatgtctgttaccaaaatattgtgtaacacagacagaaaccacctgtttttgtctttccttgtttcccttaatatttcatgaattgtctagcaaaaatggtaggatgcttctgtagttcacaaatgttacatttcagagactttggaggaaaaattattttaaataactgtcaactgtttcattgctttttaaatttttcacgtgcataaccccctttagaagtaaatttttacactattttgttgtttaaaggaggcatttctacttccttgagttttgctgttgccaacctaaaacatttccctttggaacatgagttataagttattacttttcctttacatgtttacacttttataaaaatcagatttttcagtggtctctccagatattaacaagaattgttgtgtaactcaaagatttgcttttatagacttgatttcaaattcttaagttcagcctttccctatcaatcacaaatcatgtattggaaattataaatggcaaccaaaaaccggcttttaaaaaatatttttggatatcattgatgtgctgtcacactatatattgagtgactttctgaacaaatttatccagaacatccatagcccaataagcttttgtctaagttgtcatcttacttactcacaaaggaggggaaaacgttattttcatagctgcttttagaaatgtagattgtaacagcctccttggacaacattgtgagtctgttttaacattaatatactcttacaacctaggaatctcctgggaatctatccctaaggagtaaaaagcgccagcacttaagattatatgtttactaatgtatattgtattttttggtaaggaccaaaaaaacaaacaaaaaaaagaccatcagtaagggaatggatgaataaattgtggtaaaaac

SEQ ID NO: 118755 - DNA, 1000 bp, Homo Sapiens
atgctgctttaggactaaaaaaaaaaaaaaaaaaaaaaaagacactgaagcttaataccttaatgacccagaagacctagatttataaagccatatagaataaaaatgttaatttcttggtttcttcccagaattatattttaatgactccataaatacattccaaatattcagagattcatgagaaaggattcttaacaaatgtttaaaaataacatttctttttggtgttttaacacttaattttataaactgcagaacagcatctctaaatggcttttttttttttttttaaagacaaagtagtattatgttgcttcagtttctttaaatacctcgtttcttttgagaccaaaaattcccatcaaggaaataaatcagcctgattttaacattttacatattacattgcctttaagcactatgattggatggctttttttctatttgtttaataatccttggctaaattcacatgtatctaaagtaaaatagctgagttactgaattctataaggggaagaaaaagcatttattttcacatgattaactgaaatggaaaagtaagacatttagcagaataattcatttaaaaataattttaaaaaatcagacatatttaaaaatctaggttgtctatccagtatgtgaatgcttaattataattgttacatgttgaatgggtattaagagtaagtcaccaggtacacaaaactgccatcatagcaaaatgagacagtgttgaaaagacaaaatattttctggaatgaaaatatattcaagttgatccatattcagatgttttctgtttaatacttcagattggtcctttgtccacatttgtttaaaacttattgtaatgttaatttatacttttggattgtgcctttgtcatgagttgagaaaagtagtcctacaaataatgtgaaagttgttaccaccacagcatgaatgtataattgtattaaaattgatcatccacagaaaaaaaaaaaaaaaa

SEQ ID NO: 118756 - DNA, 1000 bp, Homo Sapiens
catctgcaaggaatacgtagaggatctggccaaaatccccaggagtttcttacaagaagcaaatgtcacccttatagtgattggacagtcatcctaccatcatattgagcctttttgcaagctgactggatattctcatgaaatctatgtcgatcctgagagagaaatttataaaagattgggaatgaaaagaggtgaagaaattgcttcctcaggacagagcccccacataaaatcaaatctactctcaggaagccttcagagcctgtggcgggcagtgactggccctctctttgattttcaaggagacccagctcagcaaggtggaaccctcattttaggtccaggtaacaacatccattttatacaccgcgataggaataggttggatcacaaacctatcaactctgttttacagcttgtaggagttcagcatgtgaactttacaaacagaccttcagttatccatgtgtgacttaaaatgcactcagtcactttcaactggaccttctggaatgtgaccttcaatgcctgggtgtaatatcctcgtgcagtgtctaacctgctgtcccttcccagcctttgaggagttagggaagcataaagggggcttgaacctgttgaattgcatgctgggaagcatcagttgtcaaaatatgttatatacttccattttataacttttaacattttatacaaaaaaaatgaatatacaaaatataactttaaaagctataaaatcataaatactctaaattattttacattatggtatattcagtcaatgaaagagttttttggcaatataaattctgacagtatataaggggacaggagaacaacacaagaccattatattcagtgaagaaggcaaaatatcaaatctgtcaacaatgtaactgcatttttatatgtatatatttgtatttttgtatgctttggaaaaagacaggaaataaacaccaaaatgttgccagtaggtaaaaaaaaaaaaaaaaaa

SEQ ID NO: 118757 - DNA, 1000 bp, Homo Sapiens
gtcagacttttgagattgcaatttctaaccagatgagacaacattatgacagaattcatgagacactaataaggaaaaatggtcctgctagactactgagttcatcagcaagtacttttgagcagagtataaaagcatatcatatgatgaataaatttcttggctccttcattgaccatgttcataaggaaatggattactttataaaagataagttgcttcttgaaagaattcttggaatggaattcatggaaccaatggaaaaaagcatcttttacaatgatgaaggttattctttcagcagtgtcctgtattatggaaatgaagctactcttcttatttttgatctgctgttcttctgtgttgtggatttggcttgccaaaattttattttagcatccttccttacatatctacaacaagagatttttagatatatccgtaatacagtaggacaaaagaatttggcatccaaaacattggtggatcaaagatttttgatttaacttcctgaataaataacttaaagactcagtataatcatggccaaaaaaaagtcatgatatcaggttagtttgccatattttttaaaacttataatgcagactattctgtttttgttttttatttgcagaaagatttatttttataacttgggaatatataacctgatataatagaaaatactgttttcccattgtgtgtagtatttaatgcagtaaataataaattaatactgacagtgaggccaaaaaaaatctaaatgttgctttcagcataatactttttaatgctaattaaaacagtccccatcatttgtctctgtagattattttataaactgagagctgcctgaatcttctcacattgacaaagtaatttgattccaagtttaagactagttttcagtttgatattttcatgttttgtgtgcttatggttaaataaatgttgaaagatattttcaagtttaaaaaaaaaaaaaaaaaaaaaaaaaaaa

SEQ ID NO: 118758 - DNA, 1000 bp, Homo Sapiens
aatcttgactatgcttccagaatctgttaaatcaaaatatcaagacctactggcagttgaacatcaaggggtgaaactgcgtgaaaacagacatcaacagcaaagtacctttaaaccagaagaaattctttacaagactttgggtttcagtgttgcccaagcaactagctcattgatttctgctggaaaaggtgtcttcgttactaaaggattggtaccaaaaggcgcagtcgtatctatgtatcctggtacagtatatcagaagtatgagccgatctttttccagtccattggaaatccgtttatttttagatgcctggatggggtactcattgatgggaatgacaaagggatatcaaaagttgtgtacagatcttgcaatgggagggatcgactcggccctttaaaaatgagtgatagtacatggctaacgtcagaaattcataaccctctggctgtgggacagtatgtcaacaattgttccaatgacagagcagctaatgtctgttatcaggaatttgatgtgcctgcagttttccctatagaactgaagcagtatcttccaaacattgcctacagctatgacaaacaaagcccacttcgatgtgttgttcttgtcgcacttagggacatcaatcaaggagaagagcttttttcaaactactacacaattgtcagctaactctgtgaatcagaaattattaggttttctactcagctattaattctaagtgttttttgttaatcacttctctgagttctacctgtaaaacaaatattttgagacttaattggaataggaatttcttatgtttttgttgatattatatttatgttccaatttcatgataaaagctacttgcttcattacaatttcaaatttgtaatgcaattccaagtttaattggttttcacctaaatacacaatagcttattaaattaaaacctactctttgaacttataaaaaaaaaaaaaaagaaaaaaaaaaaaaaaaaaaaa

SEQ ID NO: 118759 - DNA, 1000 bp, Homo Sapiens
caagatgagctatgtggcccaccccgtggagaagcgctttgtgcatgaagcagagaagttcaggccctgtgaaatcccctttgaaagccttaccactcaaaaacaatcctaccggggcctgatgggggagcctgccaagagcttgaaacctctagccaggcctcctgggctagacatgcctttctgtaacaccactgagtttcgagataagtaccaagcttggccaatgccccggatgttctccaaagctcccatcacctacgtccctcccgaagacaggatggatcttctgacaacagtgcaggcccattacacatgccctaagggtgccccagctcagtcctgccgacctgcacttcagattaagaagtgcggtcgctttgaaggctcttccaccaccaaggatgactacaagcagtggtccagcatgcgcacagagccagtcaagcccgttccccagctggacttgcccaccgagcccctggactgcctgaccaccactcgggcccactatgtgccccacctgcctatcaataccaaaagctgtaagcctcattggtctggccctcgaggaaatgtccctgtggaaagccagaccacctacaccatcagctttactcccaaggaaatgggcaggtgcctagcttcatatcctgagcctcctggctacacctttgaggaagtggatgctttgggtcacaggatatacaaaccagtttcccaggcaggctctcagcagagcagccatctttctgtagatgattcagaaaaccccaaccagagggagttggaagtgttagcctgattttgaaaaacagtaatttagaaattacacagtacttttaaaagcagacaactgagaattatttgttggacaaaaaagaattccctaaaatgacaaaaaacaaaaaacaaaaaaccttcaccacttccagagcacttgaataaaatgagaatcacttaaaaaaaaaaaaaaaaaaaaaaaaaaaaaaaaaaaaaa

SEQ ID NO: 118760 - DNA, 1000 bp, Homo Sapiens
cgatgaggcgccctcgccccccaggctactggcggcgggcagccccctggcgcacagccgcaccatgcacgtgctgggcctggccagccaggactccctgcatgaggactctgtgcgcggcctggtgaagctcagctccgtgtgacccacatggccccaggccgggggacaccagaggctcctccatgggcagcaggagtgagcggaggggtgtgtcccacagcgactttcccagccaatgccacggtggagatgacagccccaggtctggggtacagagaccacttaggatggcacagggtggctggccccggatgctgagagcttggtttcatttgaattttcttccccaacctgagtgctttgacaacaatggaaatagagaagtggctgctttcttttggtgaccctccaggggtggaatcggagtgtgtctgcccgcccttgtgacagacacacggaaggcttctgacgcttgtggccagactgcaattgcacttatgtgttatgctactaatatttgaaacagacctgccattccatttgttaattaaaaaaaaaaaaaatcctaaagggaaaaaaccgaccaggtgtggatctgcatgccacgctgccgtctgtgttacagtggtgttgctatttccaaggaagtgctgctttctttttctttttttaattttgtgaattttcaagtgctgttttgttggaagacagtgcaacgaactgagactaatggacagtgtcatcactcagcttactgggctgaggcgtctgtggagaggtggcaccggggctgcagagggcggctggggttccgtcgtgtcgggtgtcacttcaccttctgtttggccgctcgatgaggtctcgtgttgagatattgtgtgccacaacccccacagtcttcacctccgtgtgtgatgaaacttcccgtggacagccaataaaatgacgtcctctgttattttggaaaaaaaaaaaaaaaaaaaaaaaaaaaaaaaaa

SEQ ID NO: 118761 - DNA, 579 bp, Homo Sapiens
ctagagagctggcgcacctcctgggcctgacgcgggcttcctggattgcataaaggctccttctccttacatagccagggcaaaggtgcatgacaactctgagcaagtcaaaacaaccgtcagcagcgggaaacctcgatgaacaaacaccgggagagtgtttctgcagatcctgctttgtgacttcgagtgaagtgtggaagcgctggaagcacttagaccctgcctgtgccgcagacccctgggaggcaccaacaccccggatcgagaagcccgatgggaaagaatgtctgggaaggacgtcatgcccgaggcttgcgtgacagtttccactcacagtgcgctcactctgaacctctgtgcacacgatgggcctgcatctcttcccactatctgctaggaaacacgaggggaaggaaatgaccgcagaagggagtgcaccgtgggggcaggaggtgctgcggccaatgggcagtgctgggagatgaaaccaacagcggcgattgccccagaaagaacttggcgctgctaaggcaatggcggcccgaaagaggcccctgacgcatgaggagcggccgc

SEQ ID NO: 118762 - DNA, 1000 bp, Homo Sapiens
cacttttgcaagcgtgtaagatgttacctggtttgtctcttttggaaaacaaaaatcagaaggctgcattctagagggcagagaaattcccccgaagactgagctggttgcctgcatcctctatcttctttgacccttatgactgaaagatcatcagtttggaaggtactggtccaatttatttaggaagtatctcttggagtttcagaaatgctagcttggacaactgaaaagtcacatcacagctggcattctgggggctaccaaaacaccccttctggagtagaagctgctggaaggcaggcctgagccattcaccacggacaggaagagcagctctggctatcaccactggcctctggggtcttcatatcttgccatctcatccagggttccatgaaagttacccagggtcctcatgtccttccttagagcctgagtggtgtgaggtgacaggtctctctctccactgcccctttctggtttaaaaaaatggtgcttgatgagggaaggtagactcttccctaggactgacgagttacggctgccagatgcctgcatgggaagaggtggacatctgcatcttccattggtggtcaaggatgggtgtgggagaaccacacctagtgcaagcctggtactcagtaaatatttgttgaaatgaatgataagagcattggtccccaagccagagagccagaagccatcacctaatgaccgccccttccttccggtctacaagagctctcaaggctgggtctgccaccactctgctttgcccaagtgtgacagcactggggaggagagacaggataaagggcagatgtcagcaatactaagggcttcctcatgggagggcatgaggctccactcattgtcttgtgacttccatccctgctgaatggggctgcaaggccaaggctccttaggggaggggtccttacctctgatccacttagagcaataaccactttttaaatgtaaaataaaaagacaaatg

SEQ ID NO: 118763 - DNA, 1000 bp, Homo Sapiens
aattccattcatcatgacattcacattttacttttctcaatggaatgcttgcttcaggcttaccaatcacacctagaactgaagtctgagtgagtggtattaataatttttctgaaaggaataaaattggaatgtttctaaatgtggagaaattcttcagtatcctaataatatacccaaatgctttttctgggagagagcattcttttacaaaagaactttccctataaaagcatcacagtataatgtgaattggcattaaaatctttggatgcttttgcattattaaagttcatggagaaatatattctttttactatgtatgtattaataaaaagtgggcaaagtaaagtttgcaaaatttagtttctctaaatttttgcacagtgactgcagctggctatgggtcagctcttaatacaacaaaaccttgactggaagtcactatagaaaggttgtacatagtctcccagtctacatgtcctggctgttaatcatcttggccccttgaggcacatcacagtttgaaggacctgtttaagttgaaatagactttgcttatttattgggattctaaaaaattctgagtgagtttgcagtatgagaggaaataagatttcctcctccttcctctcattttatattgactgtttgccagaaactgttttcttctgttttcttatattttgtttttgagatggagtctcactctctcacccaggctggagtgcagtggtgcaatctcagctcactgcaacctctgcctcctgggttcaagtgattctcctgcctcggcctcctgagtagctggaattacaggcacgtgccactacgcccggctactttttgtattttgtttttagtagagacggggtttcaccatgttggtcaggctggtcttgaactcctgacctcaagtgatccacccacctcggcctcccaaagtgctgggattataggtgtgagccactgcacctggccaaaaaaaaaaaaaaaaaaa

SEQ ID NO: 118764 - DNA, 1000 bp, Homo Sapiens
gagctatgtcatcttatcttttaattattaaaacagagcttcctgctgctattgcagaatttttgactggagactatagtagatattggtatcttgatggacaaacactactaataatcatatgtgttggcattgtgttccctcttgcacttcttcccaaaataggctttcttggctacacaagtagtttatcatttttctttatgatgttctttgctcttgtggtaataattaaaaaatggtccatcccttgtcctctgacattaaattatgtagagaaaggcttccagatttcaaatgttacagatgattgtaagccaaagctctttcatttctccaaagagagtgcttatgccttaccaaccatggctttttcatttctctgccatacctcaatattgcccatatactgtgaacttcaaagtccttcaaagaaaagaatgcagaatgttaccaatacagcaattgctttaagttttctcatttattttatatctgcactctttgggtacctcactttttatgacaaagtggagtcagaattactaaaaggttatagtaaatacttatcacatgatgttgttgtcatgactgtgaagttatgcatactatttgctgtgcttttgacagtccctctaatccacttccctgccagaaaagctgtaacaatgatgtttttctccaattttccattctcatggattcgccattttttgatcactctagcactcaatattatcatcgttttacttgcaatatatgttcctgacattagaaatgtatttggtgtagttggtgccagtacatcaacatgtttgatttttatattcccaggactattttatcttaaacttagcagagaggattttctgtcatggaaaaagcttggggcattcgttttgctcatctttggaattttggttgggaattttagtttagcactcatcatttttgattggattaataaataaaagaaatattttcctacttcttacaagaa

SEQ ID NO: 118765 - DNA, 1000 bp, Homo Sapiens
aacaagaacacaaatgtgaaatcatgggctgactgagacaattctgtccatgtaaagatcctctggaaaaagactccgagagttataactactgtagtataaatataggaactaagttaaacttgtacatttctgttgatcacgccgttatgttgcctcaaatagttttagaagagaaaaaaaaatatatccttgttttccacactatgtgtgttgttcccaaaagaatgactgttttggttcatcagtgaattcaccatccaggagagactgtggtatatattttaaacctgttgggccaatgagaaaagaaccacactggagatcatgatgaacttttggctgaacctcatcactcgaactccagcttcaagaatgtgttttcatgcccggcctttgttcctccataaatgtgtcctttagtttcaaacagatctttatagttcgtgcttcataagccaattcttattattatttttgggggactcttcttcaaagagcttgccaatgaagatttaaagacagagcaggagcttcttccaggagttctgagccttggttgtggacaaaacaatcttaagttgggcagctttcctcaacacaaaaaaaagttattaatggtcattgaaccataactaggactttatcagaaactcaaagcttgggggataaaaaggagcaagagaatactgtaacaaacttcgtacagagttcggtctattaattgtttcatgttagatattctatgtgtttacctcaattgaaaaaaaaaagaatgtttttgctagtatcagatctgctgtggaattggtattgtatgtccatgaattcttcttttctcagcacgtgttcctcactagaagaaaatgctgttacctttaagctttgtcaaatttacattaaaatacttgtatgaggactgtgacgttatgttaaaaaaaaaaaggtgttaagtcacaaaaagcggtaataaatatttcatttttgaaaaaaaaaaaaa

SEQ ID NO: 118766 - DNA, 1000 bp, Homo Sapiens
tgatgttacatgcaagactgttgccaatatgatcaaggggaaaactcctgaggagattcgcaagaccttcaatatcaaaaatgactttactgaagaggaggaagcccaggtacgcaaagagaaccagtggtgtgaagagaagtgaaatgttgtgcctgacactgtaacactgtaaggattgttccaaatactagttgcactgctctgtttataattgttaatattagacaaacagtagacaaatgcagcagcaagtcaattgtattagcagaatattgtcctcattgcatgtgtagtttgagcacagatcccaaaccttacggccaagtttcttctagtatgatggaaagtttcttttttctttgctctgaataaaactgaactgtgggttctctataagtggcattttgggctttccctcttttttgtaaagcaatgtctgcctagtttattgtccagttaactttagtgaccttttaaaagttggcattgtaaataaaacaacttgcaaaaaagttttctggaatagaattaacaaaatattatctttattcatgagttggaaactggaaaaaggcttcttgaagtaaatgttctgagtggagctactaggatgtcttccagcctcctgcagtcaaggagtaccactgtattgattagcctgtatgtagcagggctcccttcattgcatctgaggacttgttttctttttctttatttttaatcctcttagttttaaatatattgcctagagactcagttactacccagtttgtggttttttgggagaaatgtaactggacagttagcttttcaattaaaaagacacttaacccatgtgggatgtcatctttttataattagtgttcccatgtggagaaaattattcacactacttgcatgtaaagaataatttaacttttaacattaaaatatgtggtaaaacccagaaagcatccatcatgaatgcaagatactttcaataaaaagtaagttatat

SEQ ID NO: 118767 - DNA, 1000 bp, Homo Sapiens
agatccgaagagttgtggcagccttgaaatggaatcgattctccattctgggccacagcttcggtggcgtcgtgggcggaatgtttttctgtaccttccccgagatggtggataaacttatcttgctggacacgccgctctttctcctggaatcagatgaaatggagaacttgctgacctacaagcggagagccatagagcacgtgctgcaggtagaggcctcccaggagccctcgcacgtgttcagcctgaagcagctgctgcagaggcagagaacagcattgacttcgtcagcagggagctgtgtgcgcattccatcaggaagctgcaggcccatgtcctgttgatcaaagcagtccacggatattttgatccaagagagaattactctgacaaggagtccctgtcgttcatgatagacacaatgaaatccaccctcaaagaggactacttcggatacaatcacagcaaccctggcctcggccctgccctgtccctgccatgcaacttcacaactcagctggcctagacccctgggaggcctccaagtccctaagcggttccagtttgtggaagtcccaggcaatcactgtgtccacatgagcgaaccccagcacgtggccagtatcatcagctccttcttacagtgcacacacacgctcccagcccagctgtagctctgggcctggaactatgaagacctagtgctcccagactcaacactgggactctgagttcctgagccccacaacaaggccagggatggtggggacaggcctcactagtcttgaggcccagcctaggatggtagtcaggggaaggagcgagattccaacttcaacatctgtgacctcaagggggagacagagtctgggttccagggctgctgtctcctggctaataatctccagccagctggaggaaggaagggcgggctgggcccacctagcctttccctgctgcccaactggatggaaaataaaaggttcttgtattctca

SEQ ID NO: 118768 - DNA, 1000 bp, Homo Sapiens
gaggcttacgggttcattgattggtttgaaaaccagccaagatgaactccttaaggacaggatttggtaagtgattgacttctttttagttccatgatcttgagattatttttagctttataaatttagcagtggcagggcccgtggagaatcaggttaatgaggtaaaggctttctgggtatttgctgccaaggccacatcaccaattttctcgatttaaaaaactgtcaagagatttatttttccattgcaggttttaaagtggagattctgaagtggaaaataggtactgtcagaacaaagctacctggaaacagcatagagtgaagcctttcgtgagggcttgcaggccgctgctgagtggcagtttacagaagaggtcgcggggtgagcctcttagcaggacagaaaacaaggcagcagcgcacctgccaccccttcacgagctgctccttgagcctaaaaagtaggctttattcatcccttctgttcatttaccaacctgggggattgatacgaccggggaaaatgttcctaaaccaggaagctgcgttagccgatcaggctttgtaagatctcgccaacagctagctgcttaggagtacccccacgatacgcacagcacaccactgtcccttcactgcactttcttcctgccttaggtagttgggcttgcccaccctagtttgcttttgtagtggtttggcaaggttagaaggcctcggcctctctgtcatgctgggaagtgcctactctctgggccactgctgcagaggccgtggcacttgtcatgggtttggaagacccagccatctgcagcagaggcagcctatcccattgcaaggagaggaactgaacggagtaattattctactcttctttttacataaatgtttatttaaatattctaaattggattttctttcacagatactgattattctttccagttcttaaataaaactgcacttgatttcactcaaaaaaaaaaaaaaaaaa

SEQ ID NO: 118769 - DNA, 1000 bp, Homo Sapiens
gcccccagaactgcagcatcatgtaatctgggacctgccaggcaggggtgggggtggaggcttcctgcgtcctcctcacctcatgcccaccccctgccctgcacgtcatgggagggggcttgaagccaaagaaaaataaccctttggtttttttcttctgtatttttttttctaagagaagttattttctacagtggttttatactgaaggaaaaacacaagcaaaaaaaaaaaaaagcatctatctcatctatctcaatcctaatttctcctcccttccttttccctgcttccaggaaactccacatctgccttaaaaccaaagagggcttcctctagaagccaagggaaaggggtgcttttatagaggctagcttctgcttttctgccctggctgctgcccccaccccggggaccctgtgacatggtgcctgagaggcaggcatagaggcttctccgccagcctcctctggacggcaggctcactgccaggccagcctccgagagggagagagagagagagaggacagcttgagccgggcccctgggcttggcctgctgtgattccactacacctggctgaggttcctctgcctgccccgcccccagtccccacccctgcccccagccccggggtgagtccattctcccaggtaccagctgcgcttgcttttctgtattttatttagacaagagatgggaatgaggtgggaggtggaagaagggagaagaaaggtgagtttgagctgccttccctagctttagaccctgggtgggctctgtgcagtcactggaggttgaagccaagtggggtgctgggaggagggagagggaggtcactggaaaggggagagcctgctggcacccaccgtggaggaggaaggcaagagggggtggaggggtgtggcagtggttttggcaaacgctaaagagcccttgcctccccatttcccatctgcaccccttctctcctccccaaatcaatacactagttgtttct

SEQ ID NO: 118770 - DNA, 1000 bp, Homo Sapiens
ggccctgagctttgtcctgaaggaaaatgactctggggaggtgaactgggacgccttcagcatgcctgaactacataacttcctacgtatcctgcagcgggaggaggaggagcacctccgccagatcctgcagaagtactcctattgccgccagaagatccaagaggccctgcacgcctgcccccttgggtgacctcttgtacccccaggtggaaggcagacagcaggcagcgccaagtgcgtgccgtgtgagtgtgacagggccagtggggcctgtggaatgagtgtgcatggaggccctcctgtgctgggggaatgagcccagagaacagcgaagtagcttgctccctgtgtccacctgtgggtgtagccaggtatggctctgcacccctctgccctcattactgggccttagtgggccagggctgccctgagaagctgctccaggcctgcagcaggagtggtgcagacagaagtctcctcaatttttgtctcagaagtgaaaatcttggagaccctgcaaacagaacagggtcatgtttgcaggggtgacggccctcatctatgaggaaaggttttggatcttgaatgtggtctcaggatatccttatcagagctaagggtgggtgctcagaataaggcaggcattgaggaagagtcttggtttctctctacagtgccaactcctcacacaccctgaggtcagggagtgctggctcacagtacagcatgtgccttaatgcttcatatgaggaggatgtccctgggccagggtctgtgtgaatgtgggcactggcccaggttcataccttatttgctaatcaaagccagggtctctccctcaggtgttttttatgaagtgcgtgaatgtatgtaatgtgtggtggcctcagctgaatgcctcctgtggggaaaggggttggggtgacagtcatcatcagggcctggggcctgagagaattggctcaataaagatttcaagatcctcaaaaaaaaaaaa

SEQ ID NO: 118771 - DNA, 1000 bp, Homo Sapiens
tctgatattaacaaccgtacatactgctgaatttaactcaaaatatttcaggtaagtgaaagtggtgcttaatgtagactatagaatgactttcaggtgttttcaactgaaagtatatatccagaactgcatccttatagaaatacaagtaagacttaggataatttgccttcaaaacagttttcctaatctcagcagtatccagtgagtgaagaacacttgactgactcttgggccacctctgttacttactgtactatggaagctcctggtgaatgtttacaattatgggatgtagtatttctatttgtactttaagtcaaatgcttatatgaaatatgtgacaacaaatagagaagactggctctgttagtaattatgcagtatgtactctatttaaggatctgtggtagtataacatgagtgaatgtcattaattttgaagtaataactgccacatgtgggaagtaggggagtaaggagaatgaattccaatctgtgattaaaagtgtaaactatagactctactgtagtacatttcaggatctagaagttttacttttataaagatggtgtccggaagatgttgctaatgtattttacttcaacatagggaacaaactttttaagtatattaataaacctgtatggttagtttttaacagttttttaaaataaactatggatatgacaaatattctgtgttttactaagtgcttggataggctttctaattttgtatacgtgctagagttaattattgaacatttttatccaaatttagttgtaactctgtttatactactgattgctcattcgtttaaatgatattttaatgtaaaagtcataaccaacatatgaacagacagatttatgtctttaaacacagaatgtaagctatagtttaatctgataccagttgctggaagttgccatttgtttttcttaaatctatacccataaaacttcttttaagattaaaaaaaaaaaaaaaaaaaaa

SEQ ID NO: 118772 - DNA, 1000 bp, Homo Sapiens
tgtgtatctggagagcaatgctgacacaacatctcaagggaggcgaagcaggcggttggagactgagagccgcttcgatatgattgggcactggattatccatcaggacaagaggacccggtgtgccctctgccactcacagaccaacacccggtgtgagaagtgccagaagggtgtccatgccaaatgcttcagggagtaccacatccggtgacatcatgagacatgcttctttggtttataatgagatgtttacagttaaatacagatggcagttgagcacttctgttttgtgttggaaaaaagacctgaatttctaatgacttgattttctattttctccctacccacaatacagttatcttttttattgtgttgtgttatgcctacatgtgatataaattaatatttatattcatttatatttatatttttgaacttatttatttaaagttatggatcactttttattcaaataaaagttgtgctttggggtatatttgaatcctagcaagaataatcaaaggaaaacttgcaagaacagtaagaagactttaccattgcatgccatggtttataatctaagataggcaatagtgtataaatatcatgtaaatgtgatggatttcttaatcatatttatttcatattaatccaagtttatcaaacttttgagggataatctgccttgtatttagtcagagggctagaggtgcagatttcatattttcttaatgaaaatattttcctaatacacatatatcaatgtgagattcatttttgtaaaaaaaattatttttttaattttgtgggtacatagtaggagtgtatttttatgggttacatgagatattctgatacaaacatgcaatgtataaaaatcacatcagggtaaatggggtatccatcttgtcaaacacttgtcctttgtgtttcaaacaatccaattatactgttagttattttaaaatgtgcaattaaattatttttaactataaaa

SEQ ID NO: 118773 - DNA, 1000 bp, Homo Sapiens
aactatggcccacgaatcaaacctggcctgccacctgtttttatacaacctgtgagctaagaatggtttatatgttttcaaatgattgggcagaaaatcaaaagaagaacaatatttcatgacacctgaaaattctatgaaattcagatttcagtgtccataaacaaaatgttattagagcatagccacacccattcatttatggtattgtctgggactgctttcttggcagagttgaatagttgggacagggacagtatagcctgcaaagcctaaaagatttactacttgtctccttaaagaaaaagtttgccagctcctgatctagaccaagagggagatattgaccttacttgcatttatccggcattatttcaacacctcctgtgaagaaagtacttttctggcatagctaccgtgagttctcagcaggaacttcccagcgatgataatgtacatgaaattagccacgtaacaagagtctatttgccttgaaaaaacaattatccttgaacttcctccagctatgcagggattctcattaaagagctgatctgcatctgtttatccattttagtagcttttaaatatgattttatgtgaagtgccatttctttattctactaaagagagacagcagaaataaagatcagaagcaaatgtgagcaaatctgttttactgttaacttcaattatgaacttgaaattgtgccacatgactttttcctctaaaaactggatcctagtgttttaattacctgtgtgcagctattttaaatagcattttacttgaataatatgtatgttgtcattgtttcatgctatactttgtgggataaaacttgggaatgagtgtggtaagaaatttataaagttttgcttttaaaacgtggacataactcatttttctagtttttgacaattgtgtgttttagtgtctagtctgcagagagctgtgtgattaataaacgtggaattaacagaatttcctctccctgta

SEQ ID NO: 118774 - DNA, 1000 bp, Homo Sapiens
ggcagcactgtcaccacccagctgggaccttatgccttcaagatcccactgtccatccgccagaagatatgcaacagcctagatgcccccaactcacggggcaatgactggcggatgttagcacagaagctctctatggaccggtacctgaattactttgccaccaaagcgagccccacgggtgtgatcctggacctctgggaagctctgcagcaggacgatggggacctcaacagcctggcgagtgccttggaggagatgggcaagagtgagatgctggtggctgtggccaccgacggggactgctgagcctcctgggacagcgggctggcagggactggcaggaggcaggtgcagggaggcctggggcagcctcctgatggggatgtttggcctctgcttcctcccagttcacagccagagttgcctctcctcctcctcttccccaacccccagaccatgaccagccttagaaaatccatgtactctgttgttagagggcccagagttccttctccacccccgctctctctctcttggcctgagatctctgtgcaggaaccaagatggggctgaagcctctggaggcagttggttgggggcgggcaggcaggaggccctccctccacccccccaccctcagcccggcaacttctgggttccatgggttttagttccgttctcgttttcttcctccgttattgatttctcctttctccctaagcccccttctgcttccacgcccttttcctctttgaagagtcaagtacaattcagacaaactgctttctcctgtccaaaagcaaaaaggcaaaggaaagaaagaaagcttcagaccgctagtaaggctcaaagaagaagaaaaacaccaaaaccacaagggaaaagaaaaacccagtttcttaggaaacgcaaacgatttattatccagattatttggataagtcctttttaagaaaaaaaaaagaaaatgaaaaacaacacaaaaaaaaaaaaaaaa

SEQ ID NO: 118775 - DNA, 867 bp, Homo Sapiens
gggcgcagagctggcgctctagcccacggagttggttaactcctctcaccggcccctggaaagggttccaagtcctttagtacccgacgctgtctgggaattccgggcgtttcggctccttggtcgcagaggcaggaggcgtgcgtggcaggagggttcgggttatatactcctaggtcctgggacagaatagttacgacctctgggacaggaactcttctctcttttgttaataaacttccaactccctcctcagacccgaccgcatgtctgtcatggacctcgccaatacttgctccagctttcagtcggacctggatttctgttcagattgcggctcggtcctgcctctgcccggggctcaggatacggtcacctgtattcgctgtggcttcaacatcaacgttcgggactttgaggggaaggttgtgaagacttcggttgtgttccaccaactggggacagccatgcctatgtcggtggaggaagggcctgagtgccagggacctgtggttgacaggcgctgccctcgatgtggtcatgaaggaatggcataccacaccagacagatgcgttcagccgatgaagggcaaactgtcttctacacctgtaccaactgcaagttccaggagaaggaagactcttgacctttttcctgggcaactctacagtccctccctcctttcggaaggtgaaggatactgggtttttagatgccttgtccatcctgtctggttgcaatgttttgctcccagaagagaatcagatcatcatgtggggattaccattgttcctggagtactcctacccttagttgaatttccttattaaagttatatttttctataagaccctgacaaaaaaaaa

SEQ ID NO: 118776 - DNA, 1000 bp, Homo Sapiens
aaggagaccgctaagctgcgatgctgcgtcgcaggcgggaagcaattatccccgctgttggaactgcggcggcccatggggccccgggcgggaggacaggttcttctgcccacagtgccgagcgctgcaggcacctgaccccactcgagactacttcagccttatggactgcaaccgttccttcagagttgatacagcgaagctccagcacaggtaccagcaactgcagcgtcttgtccacccagatttcttcagccagaggtctcagactgaaaaggacttctcagagaagcattcgaccctggtgaatgatgcctataagaccctcctggcccccctgagcagaggactgtaccttctaaagctccatggaatagagattcctgaaaggacagattatgaaatggacaggcaattcctcatagaaataatggaaatcaatgaaaaactcgcagaagctgaaagtgaagctgccatgaaagagattgaatccattgtcaaagctaaacagaaagaatttactgacaatgtgagcagtgcttttgaacaagatgactttgaagaagccaaggaaattttgacaaagatgagatacttttcaaatatagaagaaaagatcaagttaaagaagattcccctttaattgtggatagtttaaagtttaaaaaataaagttcttgctgggcacagtggctcacacctgtaatcccagcactttgggaggctgaggtgggtggatgacaaggtcaggagttcaagaccagcttggccaacatagtgaaaccccgtctctgctgaaaatacaaaaattagccgggcatggtggcgcgtgcctgtaatcccagctacttggtaggccgaggcaggagaatcgcttaaacccgtgaggtggaggttgcagtgagcagagatcacgcaactgcactccagcttgggcaacagagtgagacttaatcttgaaaaataaataaatgaaaaataaaaaaaaaaaaaaaaaaaa

SEQ ID NO: 118777 - DNA, 1000 bp, Homo Sapiens
ggaagcaaagacctcttccctctgccgtttctgtcccacttaactgacctcactggaggctacatcacccaaagtagatgttagaaaacctaaattaatgaaccatatttttaaaatcctatttttcccaaacagggccctctgcagcccatcctttccttccgtccttctgaaaccacataccccaggcccaagcgccttgctgccacgcccaacctctttgggagaagtatgaatgcgtgtgtctaaattaaaagaaaaaaatatttaaacgttttttaacaaaaatttatttttgtatttaagctaaattgccttttaaattccttcaagcttggttcattgaggtggttaagtataaatgctattaactaggaattagctgtatagttaagttatgcctgtgcaaagaagaggctcaaatgctgtccccggcagctttcctgggggactagagctccttctggccatgttatatgaaatgtaattcttattttataaataatgtgatgtaaatgtaactggtgccccctccccgatgtgactgagggtgagtgagtggtggcggggctgctccttcccacccctcagaacagctctgatcctcgttaatacctggctgcgtgtgcagctgaggagggagtgaacctcaagcctaaatacctgttaggattggagggtctgggtgggcctgggcctagcaatcaagcttctacctgtaccttatgtaaggtagaccctcctagtgtcagtacctgagctagtttacctcagttccgcaggcaggacagccggtccgggaaccctgagtgagaatgagtgtggatgtgtacagtacacgcactggacggcagcgggaggctgggactttccattacaaatagagacttcattcctgttgagtctagttggaatttttagtatgaatgtgagatttttctcctgcttgtgacattaagaataaaaaactgtgatctatcgtaaaaaaaaaaaaaaaaaa

SEQ ID NO: 118778 - DNA, 1000 bp, Homo Sapiens
cccccggagagccgccgggtggggagcccctgatggaggactgcgagaagagcagcgacacttgcaaccccctgtcaggcgccttctcaggagtgtccaacattttcagcttctggggggacagtcggggccgccagtaccaggagctccctcgatgccccgcccccacccccagcctcctcaacatccccctctccagcccgggtcggcggccccggggcgacgtggagagcaggctggatgccctccagcgccagctcaacaggctggagacccggctgagtgcagacatggccactgtcctgcagctgctacagaggcagatgacgctggtcccgcccgcctacagtgctgtgaccaccccggggcctggccccacttccacatccccgctgttgcccgtcagccccctccccaccctcaccttggactcgctttctcaggtttcccagttcatggcgtgtgaggagctgcccccgggggccccagagcttccccaagaaggccccacacgacgcctctccctaccgggccagctgggggccctcacctcccagcccctgcacagacacggctcggacccgggcagttagtggggctgcccagtgtggacacgtggctcacccagggatcaaggcgctgctgggccgctccccttggaggccctgctcaggaggccctgaccgtggaaggggagaggaactcgaaagcacagctcctcccccagcccttgggaccatcttctcctgcagtcccctgggccccagtgagaggggcaggggcagggccggcagtaggtggggcctgtggtccccccactgccctgagggcattagctggtctaactgcccggaggcacccggccctgggccttaggcacctcaaggacttttctgctatttactgctcttattgttaaggataataattaaggatcatatgaataattaatgaagatgctgatgactatgaataataaataattatcctgaggagaaaa

SEQ ID NO: 118779 - DNA, 1000 bp, Homo Sapiens
tctcgagaaggccaaggaaggcaggagactctattccgatgtataagaagtatgccctcccacccggaccgggcctacaacagctgctatagcgcaggtgtcttccatttacaccaaggggatattctgagtgtcataattccccgggcaagggcgaaacttaacctctctccacatggaaccttcctggggtttgtgaaactgtgattgtgttataaaaagtggctcccagcttggaagaccagggtgggtacatactggagacagccaagagctgagtatataaaggagagggaatgtgcaggaacagaggcgtcttcctgggtttggctccccgttcctcacttttcccttttcattcccaccccctagactttgattttacggatatcttgcttctgttccccatggagctccgaattcttgcgtgtgtgtagatgaggggcgggggacgggcgccaggcattgtccagacctggtcggggcccactggaagcatccagaacagcaccaccatctagcggccgctcgagggaagcacccgccggttggccgaagtccacgaagccgccctctgctagggaaaacccctggttctccatgccacacctctctccaggtgccctctgcctcttcaccccacaagaagccttatcctacgtccttctctccatctatcggaccccagtttccatcactatctccagagatgtagctattatgcgcccgtctacagggggtgcccgacgatgacggtgccttcgcagtcaaattactcttcgggtcccaaggtttggctttcacgcgctccattgccccggcgtggcaggccattccaagcccttccgggctggaactggtgtcggaggagcctcgggtgtatcgtacgccctggtgttggtgttgcctcactcctctgagctcttctttctgatcaagccctgcttaaagttaaataaaatagaatgaatgataccccggcaaaaaaaaaaaaaaaaaa

SEQ ID NO: 118780 - DNA, 1000 bp, Homo Sapiens
aacttgatagcagagggggttttatgcaaacgcactcacctccgccttggggaatgaaagggtcacttctgcatcatcactagctagttttctagtgttagagaggcttacaaatgtttgccattctcataagtgttttgaacttgatctttgtgacttgtgcttttttagcttctctcttgaatcagagtatcattgtcttcctccaaggagttagaatttcccagtttaaaacaaaaagggaaatgtcctaggttttctttgtgcttctcatttttcctttgttgattcaattcctgtgatttttgttctcttccctgaagtgctttacagtgcatggaatctccatcattgttattttaacgatagtaattcacagtcctcagaagcctatttttaaagcagaagcaaaaaagaaaaacaaaataacaaaaacaacccttcctcttttctctcatctcacctctctgtgttgattactaatcatcttagatattattgctagtggatgtatggtagatgggttgaagcttttctgataattattacacaatttaaaacaacatatatatttaaaataaatatatacagtaaatatattgagccatgttaacctgccaatgagatctgtgaaaaaataatggcctcatttttctctttttaatttcttttacccttttgtgaagcagctatacgtggcatacatgtatttaaagaaaaaaaaatagatgtagagtgttttttttacacttttaacttagcatgtggtgttgaagtattactgtagatcaagtttgtcttccgcactaagatgtgaggaaattgtgatttgttctctccaccacaaatgaattacacatttattatcttctatcattttgaaacactgcagtttaccatgggacactgtatatatttcttgccataatggtaaaggactgattgatatatttaagagttaataaatttgtgatttctgctgaaaaaaaaaaaaaaaaaa

SEQ ID NO: 118781 - DNA, 1000 bp, Homo Sapiens
accacggaaccttccatctaagatttcttccagggaatgccagcaatcaggcagcacccagctgtgggggcagtggggtgggggagacccacattgatgactttttttttttcttttaatgaagaaacaccaaagaaagctgtggaaaggacctgccccacatgaaaaggataagccaagatggctgtaaacacagagcatttgagctgccactcttggagcacattgatttttcaaaagccagctctgtcaggaaaggaggtgctgttatgagcagctcttccagtgggcaaagaggacgcccataatttcttccattgctagctcatctgtgggaccaatttggtgtaagcaacctgtggcctgcacttgtggcctcgaaggaagcacaaaccctccatccacttcccatttcctctgcccttttccacctcccccttccatcccaccagctgccagtggctcccagaaagccttattgagccccttgttgacacttggggctgcggaggcctctccctactggtctggcctttcctgagaggcaggtcttccgtcctcagagcctttctggaacaaggagaatgcctgtgcaggtggacacacaggcctggcctgtcgctctcacttgtcttccagcggggagcttcacgttgccgagtggaagaaccatgacctccacttgcttccaaggtgctagggaagtttcagggtacgctggttcccctctccagctggaggccgagtttctggggactgcagatttttctactctgtgatcgattcaatgcccgatgcttctgtttcattcccgaccctttctactatgcattttccttttatcaggtgtataaagttaaatactgtgtatttatcactaaaaagtacatgaacttaagagacaactaagcctttcgtgtttttccacaggtgtttaagcttctctgtacagttgaaataaacagacagcaaaatggtgccaaaaaaaaaaaaaaaaaaa

SEQ ID NO: 118782 - DNA, 1000 bp, Homo Sapiens
aataaaggaaaaccactagcatttcgagtaggattgtctgggccccctggtgctggaaaatcaacatttatagaatattttggaaaaatgcttactgagagagggcacaaattatctgtgctagctgtggacccttcttcttgtactagtggtggatcactcttaggtgataaaacccgaatgactgagttatcaagagatatgaatgcatacatcaggccatctcctactagaggaactttaggaggcgtgacaaggaccacaaatgaagctattctgttgtgtgaaggagcgggatatgacataattcttattgaaaccgttggtgtgggtcagtcggagtttgctgttgctgacatggttgacatgtttgttttactactgccaccagcaggaggagatgagctgcagggtatcaaaaggggtataatcgagatggcagatctggtagctgtaactaaatctgatggagacttgattgtgccagctcgaaggatacaagcggaatatgtgagtgcactgaaattactccgcaaacgttcacaagtctggaaaccaaaggtaattcgtatttctgcccgaagtggagaggggatctctgaaatgtgggataaaatgaaagatttccaggacctaatgcttgccagtggggagctgactgccaaacgacggaagcaacagaaagtttggatgtggaatctcattcaggaaagtgtgttagagcatttcaggacccaccccacagtccgggaacagattccacttctggaacaaaaggttctcattggggccctgtccccaggactagcagcagacttcttgttaaaagcttttaaaagcagagactaataaaattcatcctgtataataattttacatatcatttcataaagtattttaatagaaaaatcacttgtatgcttatattttcagtaattattgtatggtgctcttgtcttctttgtttgtgacccatgcttgaaaacttgaaggaagttag

SEQ ID NO: 118783 - DNA, 1000 bp, Homo Sapiens
gcatgcaggatggctctgagagttttttcttccgacacggacaccggggactgctgactatgcaactaaagtcacccatgccctccagcaccacccagaaagactcgtaccagccaccaggaaacgtctattggccacttcgagggaagcgtgaagccatgctggagatgctcctgcagcatcagatctgtaaagaggtgcaggcagaacaggaacccacaaggaagctcttcgaggttgagtctgtgacacaccatgactaccgaatggagctggcacaagcagggactcctgccccaacaaagcctcacgactaccgccaggagcaacctgagaccttctggatacagagggcaccacagctgccgacatggtggccattgcccacccaggtaccagcagcagaagactatctgacttggaaagaatgggggtttacaggagtccaggaggtcctttccgctctcctaagagccacacctggtgaatactcagtaaacatttgcggaatgaatgaacaccctgtctgcagcaggacatggacaaataggctctgccatcaggaaatgggaagcaagaaaacggtaactcaagaggacagaggctggtgaggaggtaaagcaggcccagtgaaatggacctgacagcccaaactgtcagagaggaggaaagcaggcatttgattttggtaattgtgccaaagctatgtaagagaataaatgccattgttttaaggaaatacacagtgaagtttttaggaaatacacactaagtatttagggataaagtagttatccctaaatagtagtctgccacatgccaaacaatgttaggtactttccatacaacgaatctattattcccatcttacagataaaacaactgaggctcagggagattctgtgacttacctaaggccacacagttagcaacaagccaatattcaaatccagatgatttttactcccaaggacaataaatccaactcaataacttcaaa

SEQ ID NO: 118784 - DNA, 678 bp, Homo Sapiens
ctcgcccaaagaagactacaatctccagggaaacctggggcgtctcgcgcaaacgtccataactgaaagtagctaaggcaccccagccggaggaagtgagctctcctggggcgtggttgttcgtgatccttgcatctgttacttagggtcaaggcttgggtcttgccccgcagacccttgggacgacccggccccagcgcagctatgaacctggagcgagtgtccaatgaggagaaattgaacctgtgccggaagtactacctgggggggtttgctttcctgccttttctctggttggtcaacatcttctggttcttccgagaggccttccttgtcccagcctacacagaacagagccaaatcaaaggctatgtctggcgctcagctgtgggcttcctcttctgggtgatagtgctcacctcctggatcaccatcttccagatctaccggccccgctggggtgcccttggggactacctctccttcaccatacccctgggcaccccctgacaacttctgcacatactggggccctgcttattctcccaggacaggctccttaaagcagaggagcctgtcctgggagccccttctcaaactcctaagacttgttttcatgtcccacgttctctgctgacatcccccaataaaggaccctaactttcaaaaaaaaaaaaa

SEQ ID NO: 118785 - DNA, 1000 bp, Homo Sapiens
aaaggatatttatatagccttttagtagcaaagtcatacttacgtgttgtcactggattatcataaaagggagaaattaaatattactgtactcttagttgctgtgtagctaagtcaattttaagccagtaaaagcgatggatacataatgatttgatctgatctttaactattgtgaatcacagctacaccaaaactcttcttgtaagaatactgactaatatgccatgttaatctggctagattattaggactagataatgtaaaagtgatgattgtttagtaactaaattttagcaacagaaattagaattttgctttttcaaccagttaccataaagaagttagtgtatatataaacacaaataattagtgacagattcataaaaaattgaatgttgtacacagtaattttgtcagaggtagagaagacagggattgggaagtggtgggtgatggaggacctggatatatttatcaaataaagggttaccagaagtgttcattaaaggaattttagccatcatctagttcaaacctcaactattacaggtagaaaatcagggcaggagagaatataattgtgaaggagtcagggctaacacctggatctccagaaacctagcccagcaggttaatcttcacacatctctgggttctgagaaaagcctggaaaaatcacacttctttgtcattgtcatgctgaggtaataatagcaaaactgttttctttcccttaatttcctttcctaagcttatgtaatagtttggccattaaatatcttgccctattttccctattactgctagtatgctacttcttacatacccaaaagaaattcagttatttattgtatatttattgtattctaatataattgaaataaatggcatggatttattttttcttaactatttggattaaagctttgtggttcatgcaaacaatgtgcagatgatagcacctccatattactaataaaaatatgataaccatcaa

SEQ ID NO: 118786 - DNA, 1000 bp, Homo Sapiens
ataaattcatcagataacctcaagtcacatgagaatcttagtccatttacattgccttggctagtaaaagccatctatgtatatgtcttacctcatctcctaaaaggcagagtacaaagtaagccatgtatctcaggaaggtaacttcattttgtctatttgctgttgattgtaccaagggatggaagaagtaaatatagctcaggtagcactttatactcaggcagatctcagccctctactgagtcccttagccaagcagtttctttcaaagaagccagcaggcgaaaagcagggactgccactgcatttcatatcacactgttaaaagttgtgttttgaaattttatgtttagttgcacaaattgggccaaagaaacattgccttgaggaagatatgattggaaaatcaagagtgtagaagaataaatactgttttactgtccaaagacatgtttatagtgctctgtaaatgttcctttcctttgtagtctctggcaagatgctttaggaagataaaagtttgaggagaacaaacaggaattctgaattaagcacagagttgaagtttatacccgtttcacatgcttttcaagaatgtcgcaattactaagaagcagataatggtgttttttagaaacctaattgaagtatattcaaccaaatactttaatgtataaaataaatattatacaatatacttgtatagcagtttctgcttcacatttgattttttcaaatttaatatttatattagagatctatatatgtataaatatgtattttgtcaaatttgttacttaaatatatagagaccagttttctctggaagtttgtttaaatgacagaagcgtatatgaattcaagaaaatttaagctgcaaaaatgtatttgctataaaatgagaagtctcactgatagaggttctttattgctcattttttaaaaaatggactcttgaaatctgttaaaataaaattgtacatttggagatgtttca

SEQ ID NO: 118787 - DNA, 1000 bp, Homo Sapiens
ttcaaatgcaaaaaacctattttatgctttgttaaaattatggtgtcacttagattgactttagttgactgcactatataatatagaactatgaatatgtagaataacatgaaaaattggaggtgctggtggtatggctgaccctgtttcagaagcaggatagtataaaagcatcagcctaagaatggcactcccactaactagctatgtaatcttgacctctttgggctttagttcctctcataaaaggaagagatgtattggattagactagattatcaccactttctcttctagttctaatttttttaattctaatacctatattttcaagttatgtcaattaaatcattatcaggttatttcctaatgtaagaatagctaaaatgttgcagagaaataagtgacccaacaaaatttattcatctgttatgggtaagatctgccataaattcttcctaaataatttgtttactaactctttaggccactgtgctttgcggtccattagtaaacttgtgttgctaagtgctaaacagaatactgctattttgagagagtcaagactctttcttaagggccaagaaagcaacttgagccttgggctaatctggctgagtagtcagttataaaagcataattgctttatattttggatcattttttactgggggcggacttggggggggttgcatacaaagataacatatatatccaactttctgaaatgaaatgtttttagattactttttcaactgtaaataatgtacatttaatgtcacaagaaaaaaatgtcttctgcaaattttctagtataacagaaatttttgtagatgaaaaaaatcattatgtttagaggtctaatgctatgttttcatattacagagtgaatttgtatttaaacaaaaatttaaattttggaatcctctaaacatttttgtatctttaattggtttattattaaataaatcatataaaaattctcaaaaaaaaaaaaaaa

SEQ ID NO: 118788 - DNA, 1000 bp, Homo Sapiens
ctgttacaggatagcctgcatttgcatgtgtgtacatatctaggcatctatttatgtataaataataacagagccgacgtgtcctcgcccaggagggcttccctgtcagcaataaccggcatccgttttggaacctgcgtctggggctccagtcgctgctcttgctggcgtccatcgccgcctcggacggccgtgcattttctcgtctcacgcagttcgaggaggaccctagaaagccaggagctgtgattgacagtagctgtaggttaccagacggcaacattagaaagtgattgtaaataacatgcaacctaagtgtaatatatttgttcagttataagatgattgtttcacagaagccttaccactctctgcttcatctaagaaaaccaataccaaaaacgccactttaatgctcagccctgcgttgtgtgttttcagatgagttactgttaacaggtaggtttgtgtaggccttgctgggcactctgtacaattagttgcttattacgtatgattactcacagcgatctattgttccatataaccaaaaagcatggtttattcattgaaacacggttgacctgaactcgtgccttaggaattaatgcccccttatggaacctgcctgaattgcacctgcgggtggaggctccggctgtgaagtcactgaacagaacgtcgctgatggagaaagggctcccgcagaaggaacggcctgtaccgtgcgctccggcacaatcgcgtctcttgtgtctcactcacggaaagaaacaacctgaaggccatcccgtcggtctgcacgtaaccgtgaagacgtgtggccgcgtcccacctgcggctgggtaccctgcacccggcactgtaggagtcacgtgcagcctttctcaggggactgtcattgaaaaggaaacgtttgatgtctgtgtcagctgtctttgtagttaggaaatagatccaataaagccgtatttttttgctggaaaaaaaaaaaaaaaaa

SEQ ID NO: 118789 - DNA, 1000 bp, Homo Sapiens
ggaaaagggatgagagaaaggaggtggtatggaagactcagcaggaacaaggtaggcttcaaagagcctatattcctctttttcccacaccgatcaagtcaactcagtactcacgggagaaaaatagactttatttacaagtaataacatttagaaaagatccatccccggcccttaaaaaccttcccatcactccaaatcccaccccagtgcaagtctggggaaggtagggtgtgagctgctgctgaaggctgtcccccaaccccactcctgagacacagggcccatccgtcctgggaaagagcatcctctggcaggtgctcccaccaggtcagacccagtcctggacttcaagagtgagggcccctgctgggcccagccaccaggacagcaggaaccagggcctactcctcttatggtcccttctagatccagaggctaagaggaagactggccaggcccaaggacccagccatcaaaaccagcctcaaatctggttgtgatggagaagtgactttgctttaagaaaaaaggaggcaaggtagggagagcgcccacactgtccatgctccaggccccctgggccagctccgagaaggcgccagtgaaggaccagggaccaggccagggtgcgggcaggcatcactgtctctaggggtttggctactgttggcctgggagctgagagaaggcactgagagggacagtaggcggaggaccaggtgacggcagcatcggggacacaggtggggccactcactggtactggccctttagtgctttgcctgaaagagacacagtcacatggccagatgagaacttgcgatactagcctgcacccactggctgggaagatctcttcctgctcccacgcccctgtctggatcccctcccttgtgagccccagggttatcagttgctggctgtgcctgagcagctctgggtgctctccatgagaatggggccatctgtcttctctccttggagaggagctaccagg

SEQ ID NO: 118790 - DNA, 1000 bp, Homo Sapiens
ttaatgaatagttcctgaacattgcactgatatcatcgattagaattttgatatttaatttcatctttatttcctggtagagaatgcaggaaaagatgtcaggtacataacataaaacagattgggaatttattgtttccaaagggcatggccttccttagcatcagtttgaagcttttgttatgacttagctgacttgtggcagcggggcaagcaaaaacaataacactgcttataaatggcaccacatcttgttaacctcccccccaaatactctctgaaagtcatgcacatacctatgggattttacacaccaccagcttaaaatgctatgtctctatccatcagaaatagtcattattctatttttaaggcagcaacaagaaaagaaaaaacacttttcctgagggatttctaaccatgtatctaatcctcccatttgggcagtataggtgtttgcttttttgttttctttttttaagaaaaaccttgaaacctttgacactgacagatgtgtttgcaaggatacggcttcagtattactaatttccatgtgtatctggaagtatttttaaatggcataccaaaatccagaagtttaaagatgcctataaaagtaaacaacatttatttaaaaagaactctgaatatgccttcttttttaattagaaatatcttcgagacttgggtgtttgttaataactaataactggagtaagctacaggatctaaagcagccctttttacagtctagttaggagagagaaaataattgcaaatatccacttagaggcaaagaacaattttttattatcaaaaaggtttctgcacattgttgtggcaatattgtatctgtttagaaaatgggcttttccaaaagcaaacaaagataggttcctcaggtgaccaaaactgaaaatcaatatttccatgtttcattaatcaaggcataaaatacaattaaagcaaaatattttacattaaaaaaaaaaaaaaaaaa

SEQ ID NO: 118791 - DNA, 1000 bp, Homo Sapiens
atatactgtatggaaagttacaactgtgttagactaacaagtaattataaaaggaaatttttccttctaaggtcagtgagtgttgttgctactgaaatgaattcctgtatactcaacactgtgagcatgctaatgtatatgctggtgattcttatgcaaaggtgaagccacctcaagatgaatatcttaatttattactttcaataaaaagacagtttaaaaggcatggattttggtagttgaaatataagagtggagaagaaaagtcagatggtttgtggcaggtgccaccgggcaagcagacaacataatttatttccagaaaacaacagaatgaacatcatcatgaatacatgaatcggctgtgatgtgtgaactgctaagggccaaatgaacgtttgcagagcagtgggcacaatgtttacaatgtatgtgtatgtcactttcggtacctgtgaatgcatggggacgtgctgaacccgaaaaaaagtgcctttccataaggactgcaatagagagggcaatttaccctggtggtacacggaacctagattcactcctgccatgccttgccaatagtaagctgcagggtggaacaagaaatcacttgctctggggggaagggaggggggaatgggtgtgtcagctgggtagatacaaaccctgaaaagagaatccatgtgctactggcaggcaacattttttaaagctctttcagaaaccctcatatttggggtttcttttcaggaaacattcctgtggagggaaaacgaatatgaagataattttcagctaattatctgggtgacccagaatcgtgtatatggctataggatagacttcttaataatggcaagtgacgtggccctggggaaaggtgctttatgtaccgtgtgtgcgtgtatgtgtgtgtatctatacaagtttgtcagctttggcatgactgtttgtctcgaaaaccaataaactcaaagtttagaaaaactcaaaaaaaaaaaaa

SEQ ID NO: 118792 - DNA, 1000 bp, Homo Sapiens
tctgagaaaatgatccaaggcgataaggaagctgttctccagtattttaaggagcttaatgatacattagaacagaaaaaaaaaagtttcctaacggctctctgtgatgttggcaatctaattaatcaagaatatactccacaaattgaaagaatgaaggaaatacgagagcagcagcttgaattaatggcactgacaatatctttacaagaagagtctccacttaaatttcttgaaaaagttgatgatgtacgccagcatgtacagatcttgaaacaaagaccacttcctgaggttcaacccgttgaaatttatcctcgagtaagcaaaatattgaaagaagaatggagcagaacagaaattggacaaattaagaacgttctcattcccaaaatgaaaatttctccaaaaaggatgtcatgttcctggcctggtaaggatgaaaaggaagttgaatttttaaaaattttaaacattgttgtagttacattaatttcagtaatactgatgtcgatactctttttcaaccaacacatcataacctttttaagtgaaatcactttaatatggttttctgaagcctctctatctgtttaccaaagtttatctaacagtctgcataaggtaaagaatatactgtgtcacattttctatttgttgaaggaatttgtgtggaaaatagtttcccattgaaaatgtcaacctgaattgtttaaatgggcttattctgtacattgctaaacaaaaaatggggtagcatggataaagagcaaactaagctttattagtgctgcaactaatataaacaaatgtttatatttgttgcttcttttggttagcaatgatatgtcaaagttatatctgaaatagtcaaatctttgggaaacagaatctagtaacaatttgaaaagtaatacactatcccatttttattggctttatgatgtgatcaaacatacctgtgtttgagatagatttaagagccctaaatgcttatcac

SEQ ID NO: 118793 - DNA, 1000 bp, Homo Sapiens
aatgttcttgtgtagaaacagaaggacagcatttctgttagtcatttcctggaaaagtaatattttaaggggaaattatggaaacaatctaattgttcaattgctgtgctagtggtagggtttattttctgggaggtctctcctttgtgtgtctgtatgtttgtgtacacacacgtgcccatctgctgtcccagaggggaggggttgtgtgtgcgagtgtatggagttagtgtggaacttaagagctggaagacagctgtagagcaaagcacatccaggagccccagttgtcactgcagtctgggcaaccccagcaatgaaaaggggtgagataacgctcattgctcttcagagagagtggttggagccccccccgccccgtatgcttacattattgctcttttagtttgacatggtgtttgggttttgtttttttgaaaggtctgaaaaggtgaagccccctacccaatggcaatatgaaaccttttgtgcttctcttcagccccttccctgtgtccacctttctctcctcttcccaagcctttttcctactacctttacccagtttgtgtgtttgagctctgcattcaggcagctgcaacattccagtgtttgaactgtcactgattcttgcgccctagacaagctaaccaggtttaccatctcactcccagtaatacccagctcctatctaaagccccattctgcatgagaatttggtgtttggaatgttttctgactcttggggcgggattcctcgccttatcatcctcactgtggagtaatgagggggaggagaatctttatcagaaactggttttgtgtagtaaactttcttttgtggttttttgttttgttttctgggttttgttttttgtttttgtctgtgcaagacctgcagctgctgaaaatcagctttgcctttaattaaaccatgttctctccaaccaaaaaaaaaaaaaaaaaaaaaaaaaaaaaaaaaaaaaaaaaaaaaaaaaaa

SEQ ID NO: 118794 - DNA, 1000 bp, Homo Sapiens
gaaagattgctataatgtataatgggaaatgtttggccatgcttggttgttgcagttcagacaaatgtaacacacacacacatacacacacacacacacacacagagacacatcttaaggggacccacaagtattgccctttaacaagacttcaaagttttctgctgtaaagaaagctgtaatatatagtaaaactaaatgttgcgtgggtggcatgagttgaagaaggcaaaggcttgtaaatttacccaatgcagtttggctttttaaattattttgtgcctatttatgaataaatattacaaattctaaaagataagtgtgtttgcaaaaaaaaagaaaataaatacataaaaaagggacaagcatgttgattctaggttgaaaatgttataggcacttgctacttcagtaatgtctatattatataaatagtatttcagacactatgtagtctgttagattttataaagattggtagttatctgagcttaaacattttctcaattgtaaaataggtgggcacaagtattacacatcagaaaatcctgacaaaagggacacatagtgtttgtaacaccgtccaacattccttgtttgtaagtgttgtatgtaccgttgatgttgataaaaagaaagtttatatcttgattattttgttgtctaaagctaaacaaaacttgcatgcagcagcttttgactgtttccagagtgcttataatatacataactccctggaaataactgagcactttgaattttttttatgtctaaaattgtcagttaatttattattttgtttgagtaagaattttaatattgccatattctgtagtatttttctttgtatatttctagtatggcacatgatatgagtcactgcctttttttctatggtgtatgacagttagagatgctgattttttttctgataaattctttctttgagaaagacaattttaatgtttacaacaataaaccatgtaaatgaaaaaaaaaa

SEQ ID NO: 118795 - DNA, 1000 bp, Homo Sapiens
cctactgactagctgtgccactctgggcaaatgctcttccttgagcctgtttccacacctgtaaagtggggatgatgatcctatctcactgcttttgtgaggattacaggaaagcacctgtcctggctctgtacctggcacgtagtaggtgctcagttcatgctggtttccttcctgcctttagtagggacctgctctgtgctcacacctcggctgcatgcaccctgctgtgacggaggctagtgtggaagaggtcctgtcctcagggaattaactgtcttattgggagacaacaactgtcctccttggaacacccaagaaaccatgcaaagcagtggacaacacagaacacgccctcctcctcgctgcctgcagctccaatctgattctgcttgggaatgggcggagcacgtgggctgcttaactgctgtataggacaagccccttacccctctctgggcccatgaattcctggcttggtttatgttctgatttgacacactgattttaatcttcgaatcatgacactgagtgcagaggaggtggcattccgacagcaggacatacatgttggtgtgaagactgggacgacactgggtagaatctagtttttaattattattaatataaaggatcaaattaatttaaatatgattctgaagtctacagaacttttagttctgtgctgtctatgtggacactttggtaaaatgcaaattatgatatggacgttatcattggtctggtgagatgtttcatatttgtgacagttaatttaaaaattatgagttaatgctgcctgtgtctatggggttctgtcttctttgatagccatctattcatctggatcatgggaccctctctaatccttccaccaatcaaataagctattgctattggtttggagttgagatatcagtctcggaaacttctgaaaaatgctaataattacccaaggattatgtcaaattttaaaataaatgtgtgtgtgtttctttaa

SEQ ID NO: 118796 - DNA, 1000 bp, Homo Sapiens; identical to SEQ ID NO: 118795

SEQ ID NO: 118797 - DNA, 1000 bp, Homo Sapiens
tcatcatcagtagtcctccagcctgggcagctgtccccaccctttttcatgtaggtgcaggaagttaaatctcatttccaggatgcatgtgaacatttacaaagttgaactttgagtgcattctgctcatatgaattattgggattgttgatatatattgtattatgctaccaaagaaatattggttttattagaaggaaatggtcatcctctggaccatggagactagctcagaatacgctgatttccctctcctgactttgccaagcctttggctgcttttgcctgataaagggcagggccatctgaagacacttccaccagtcggctttggagtcacgggagctagtgcctgctcacacatttttcaaaagggcagtgcactcagaacttcactgtacctgggatttttaattcctcttgcagtgttgaccagcagagagacttgaggctactttaagcctccactatgtgtttgtagataaaattctccattcaaacattttaaaggactttgaacattatctgcttatggaagttgtgcccttcacttggttagtaaccacctcagccataatacttaccatcataggtttcttaaaatgctttttttttttccctaaacttgagtttccttagtgatttcaaaatgaagtataagaatatcagatccagttagcaaaagcctaggacttgtttctccaaacattgtactaacattcaacttgttttaaaattatgactcaagaattttaaaaaattattctggacatgaattaaaacttttttataatataagtatttttctgattgaaaaaaggatataattgacttcactctaattgtcatgtatatttccataagtaaatggattttgaagtatttttattttttgaactttatttaaagcatttgtgatgacatgttcaacttttgcatgtatgtagcctttgaagtaaaaataaataggaatgttaggctcacaaaaaaaaaaaaaaaa

SEQ ID NO: 118798 - DNA, 523 bp, Homo Sapiens
gttctaattcactgcccacagccctgctgataaaagcaaagctcatctctgccgtgctgcagggaaccctatttccttcccctgcagctcagccacctcctcctctcaggtctgccagccatgaaacttctttacctgtttcttgccatccttctggccatagaagaaccagtgatatcagctctggtgaggacagtgggatgctgcctggatactgccaggcaaacgccacatccttcgatgcatgggtaacagtggaatttgtagggcctcttgcaaaaagaacgaacagccctacctctattgcagaaattgtcagtcctgctgcctccagtcctacatgaggataagcatttctggcaaagaggaaaataccgactggtcttatgagaagcagtggccaagactaccttgagtgctggtgattaccattctcaagctctctgggcacagagacctgctgtcaacccccctcattaaaattcatgtgcctgctaaaaaaaaaaaaaaaaaaaaaaaaaaa

SEQ ID NO: 118799 - DNA, 1000 bp, Homo Sapiens
ctgtgtgcatgacccaattgcaatcttagaaaaaaataataattaattaattttaaaaagaaaagaaatggctttattttgctggagcgttatacatagcagtaaaggtgttccttcctggcagcgtatgctcccatgctggttttccactgcctgacagttaccacccttgagaggctccaacggaagccatctcgaagaattgatgaagaaacctaggactttacatcttgagcaacattcaattaataggcaatttgcttgagctacttcttgccagcaagttggcagttgcctggtgatcgagaaagaacggatatgaggttcatttatctttcaaaccgggtggcaaagcattcgtggacgaggtggttgttcaagggccatttcactgtgcaccacatttcgttctccagaccttccccccaggcccatgccttaccatggcggggaggtggtggtgaatatatgaggacatattggccttttgctatccttcctgctatgcctgaaaccgtttcctcttctctttccctggccaatggtaaatgagcttggaaattcagcatcttggggagcagcagcaagagggtgtatggatcagagcagagacgtgaaaggaggccacctggggtagaagcaagcaggggcgtcttcaggcatgtagagacacagttacctgcttcccctttagagccaggctttccttaaagaccttcactctggtattcctgctgtctgtgttgtccagagagcgagcacagtagtgcagttcctgtgtgagttctgtcttcacagactcctcatcacagactcctttgatgatgtcattactatctaaaaccactgcagggaagccatctggagactgggcatcctgagagattttcctagactactaggtagatacatgctgaaatctcccccaaagcaacccataactaaataaaaactttaaaactttaaaatctccctcatcctaaaaaaaaaaaaaaaaaaa

SEQ ID NO: 118800 - DNA, 1000 bp, Homo Sapiens
tgtgccatccgtggtataggctggctggtatgaagtcattggcctgtatgccagagagctaagagaagaaaacggggtctgtggcggtactctgaacaatttcctcagaacctcttaataaataagtttggtaatgctgaggccaggccttttagagctttcatttgatctgtatctgatctttcatttcctgccacctgatggtggattcagcagaaggcaagatggttataattctaaaagaatagcttgtttgtttgtttgggaaaaggagacttggggaagagttgtgtatgtgggtgtttctccccctagttaattcctgttgtgtaagggtaggctttgttgaaaaagaaagaaagattgaactacaggtgcatagcaagcactctttctgggtaactaggctgctggttttaattaccctcagatttcacccataaaaacgcacaattgtattattttacagagatgtgtccagcgccccctgtggtgtgtgagagaaagcagctagaactcaagtgactaggtgggcccagctggcttcgtgcaggagggcacggtgggtgagccattctcgccattctcatgtcagactgaaaggagggcctgggccagctttgaaaaggcaggatgaaatggaaaggtcaccacacttagggattttagaccttgactaacaagctccaggtgtagaaaaattcaaaacaaaatgtcaggaatctagcagtgttgtctgccctggagcaaacaaacagtatgtgattttgcttcgcctattttttttttcttttttgggggaagataattaaaggcagaatgactgcgtttgtaaaagaaggaccaccaactatactgacatttataaatgaacctttattaaagacacttcaatgccatttgttagacacttcaatattttacatggttttcaatgtacactgtaccaaaatttctataaataaataactttgtacataaaagtaaaaaaaaaaaaaaa

SEQ ID NO: 118801 - DNA, 1000 bp, Homo Sapiens
ggccttctgtatgttcagcaaagagagcttgcagtgacctccccaaaggatggctccatctccattctgggttctgatgatgccactacttgtcacattgtggtcctgaggcacacaggtaatggggccacctgcttgacacattgtgacggaaccgacaccaaagctgaggtccccttgatcatgaactccataaaatccttttctgaccacgctcaatgtggaaggctggaagtacaccttgttggaggcttcagtgacgacaggcagttgtcacaaaaactcactcatcaacttcttagtgaatttgacaggcaagaagatgacattcacttagtgacattatgtgtgacagaattaaatgaccgggaagaaaacgaaaaccactttccagtaatatatggcattgctgtcaacattaagactgcagagatttacagagcatcctttcaagatcggggtccggaggagcagcttcgtgctgcgcgaactttagcaggaggaccaatgattagcatttatgatgcagagacagaacaacttcgtataggaccgtactcctggacaccatttccacatgtggatttctggttgcaccaagatgacaagcaaatactagagaatctttccacttcgcctctggctgagccaccccactttgttgaacatattagatctaccttgatgtttttaaaaaaacacccatctccagctcacacactgttttctggaaataaagccctactctacaaaaaaaatgaagatggcttgtgggaaaagatctcttctccaggaagttaaaaaacatgaattaccaaagaaagcaccttcttggcctgacagaccattggtggggctggcacgaatccagatctggatcctacatctgttgggtcttaggcctccttccctcctcagtgtctttcaaatgactttcatcaaatgactttcaaaataaaaccttattttggcaaaaaaaaaaaaaaaaaaaaaaaaaaaa

SEQ ID NO: 118802 - DNA, 1000 bp, Homo Sapiens
cccatccacctacactcaaacgtggcgtggacagtggaagatccagtggacagtgctcctcccgggcagagaaagaaggagcaatggtacgctggcatcaacccctcggacggtatcaactcagaggtcctggaagccatacgggtgacccgtcacaagaacgccatggcagagcgctgggaatcccgcatctacgccagtgaggaggatgactgagcctcgggatggggcgcccaccccctgccctgccctgaccctcgtgggaactgccaagaccatcgccaagcccccaccctaggaaatgggtcctaggtccaggatccaagaaccacagctcatctgccaacaatcccaccatgggcacatttgggactgttgggtttttcgtttccgtttctatcttcctttagaaatgtttctgcctttggggtctaaagcttttggggatgaaatgggacccctgctgattctttctgcttctaagactttgccaaatgccctgggtctaagaaagaaagagacccgctcctccactttcaggtgtaatttgcttccgctagtctgagggcagagggaccggtcaaagagggtggcacagatcgcagcaccttgaggggctgcgggtctgagggaggagacactcagctcctccctctgagaagtcccaagctgagaggggagacctgcccctttccaaccctgggaaaccatccagtctgagggaggaggccaaactcccagtgctgggggtccctgtgcagccctcaaacccttcaccttggtgcacccagccacacctggtggacacaaagctctcacatcgataggatcccatgaggatggtccccttcacctgggagaaaagtgacccagtttaggagctggaggggggtctttgtcccccacccccaaactgccctgaaataaacctggagtgagctgccaaaaaaaaaaaaaaaaaaaaaaaaaaaaaaaaaaaaaaaaaaaaaaaaaaaaaaaa

SEQ ID NO: 118803 - DNA, 1000 bp, Homo Sapiens
tcaagtctttcaattttaacacactgcttggagaagagtggaaacaaccggaatcagacctgtggctaatagagaaatgtgatatataggagtaatagataaccataccgatcattttttcctctataccttttaagataaacaaaaaataaatatcaattttttaagatgtcatgcatacatttcaacaacaaatatcttcatagaagtcactgaaaatatagtatctgtggcaaattgtatatgattaacaagaaaatatatgattctttgtagatgatttcatctgtaaagtcacaatgtttctcagagtcacttagtccaggatgttgcattcccagcacacagtacagttattcttgaaaactacaagtgaaaaagggggaacaattgaggttgtccaaggccacctagaggactgtcttgcactaccttgtgattcaaccatttcattcctagatatataccccagaaaaatgactgctcatagcagctttattcataatagcacaaaattgtaaacagtgaaatttccatccataggaaaatggatagacaaactacaatatagtcagtggaatactgttcatttaaaaaaggactgctgatacatgcaacaacctgtatgaatctcaaaaacattaagttgagcaaaacaaaccaaacataacatactatctaattacttttatattaaagccacttccaggcaaaactaatatttgatgatagataccagaacagtggctgcttagagtgagggcagggaattcaaattgaatggaaaaggggcctgaggaaattttctggggtgattgaaatgttttgtattttgatctggatgatggttatgtagctgcatatatttgtcaacattcctcatgctgtatgtttagatttgtgattttactatatgtaaattaattccttaataaaatactattataaaataagctgtaaattaaatggaattaacttcaagtttaaaaaaaaaaaaaaa

SEQ ID NO: 118804 - DNA, 1000 bp, Homo Sapiens
gagagttagatattgctaatttcttctgaaactgcatgaaaaagataaaaagtagtaaaatggcattggtaacaattaaaaaactttgaaaaaaatgattgttttctatattctctttattattctgacatatttttgaaagggacaaaattcagttctagtgatattgtgaccatttacagtaatttctattactctgttaggaaatatgtttccttggccaggtgcaatggctcatgcctgtaatcccaacactttgggaggccgaagcaggcggatcacttgaggtcaggagtttgagaccagcctggtcaacatggcgaaaccctgtctctactaaaaatacgaaaattagcctggcgtggtggcaggtgcctgtaatcccagctactctgtctcaaaaaacaaacaaaaaaaggaaatatgttttcttatgtaaataaactattctatttttatagtgatagctgagtagaatctttacaggttaaaaaattagaatatttcatggtcaattacataattgaaatatgatcatgaaatggttggtccacttacttcagtagtctgaaaaacttatgctaattatttacatttacactgtgatacaatcagttgcatagcaattggtcattattattaccagagaattttatttggttgctttttcattgatttgagcaaatgatttacagtgttctctgtttaggctctcactgttgttctggaatatacaggtaataaatagtttgatgtaccatactatcaacatatttacttgagtaaggaacacttttgtgcgtacagtattatttggcttcttcagttgtgcttttaatgcttggatatagttaggttaaaaacattttttatatgcactaataattattagcattgcctttttgggtactgtatttatatgtagtcaattgaaatccttgactttaaaataaatttaaagtgtggcacatttaaaaaaaaaaaaaaaaaaaaaaaaaaa

SEQ ID NO: 118805 - DNA, 1000 bp, Homo Sapiens
atgcaatttctttttcttttgaaaagttatctactgcccttcttggaagtttgcaggattggatgggaacaaattcagaggatcttaggtgctggcttgtggagacaaaaggagggaaatgggtagagcctgtttgtcttgcttccccagagatagaatgtgaagacacgcgctagaaatcgcagtcctggccagagacgttatggtcattgtgagggactggtggcattgttcctttttgaggggctggggggactcaaattggtggctgttttcacacagatgtgttggtttgtggtccaacttctttatctgaaaaagccagtgagaaaacatttttgatttgatttttctaaactatctaccatattttaagtgtagcagctttgactttgcaataacgtggcaagtatctgatttctcctttgaggcagaggtttaagtgtaggcctgttacacttgtttgatacctttttcatgacagtctcagtatagatcagttggtacagaaatacatgaacacattttgatagggcttatttcacacaaagaagtttatggttatttgtgtggggtggtgttgttatatattattgtctttaagggaaaagaagctataagattcgctgacagccaaagtatcatttagaaaagtgaagcaacaagatttaggttgatgaaagatacatgagtttgcattttgacctgttcagtgtctgtcttccagcacggtgtgtacacttcttcaaaattgtacacagtttgctaattagaaatatcttggaaagcctcatggtcactaattttcaactagcatcaggtattttgaaaacgtgtgtctggatattaactcttgtttaaactgaatgtatgatattttgttagaatggaaaagtactatcttgttaatttaagtattttaaatatagttgtatatttttcttactcttaaaaaaaaaaaaaaaaaaaaaaaaaaaaaaaattaaaaaaaaaaaaaaaa

SEQ ID NO: 118806 - DNA, 1000 bp, Homo Sapiens
taggagacttggcttcacacaaaaaagataaacttgaacagcttcaaacagttctggagagcagaagcatcacagtgtacatcccaggaaagaagtttggggaggatattgatcaacagatgacttttccagttcagtgcagtttttggtcttttgttgatgtggattcatcttcaaggagaaatgcacagaaaatcaacactctaattggtcagatggattgcagtttgattccagctaaccttgtggaggcatttggtttattgattaactgcaacgagtcatctccctgccacccatttcttcctactgtgcaacacactttgaacaaagccattaatcctgaagggctgttttatgcggcttctagacagttcacaactgaagattttgaaaagctattggcttttgcaaagaatttgaatgtagaattcagcttggaagcagaaagaatgacccatggctattatctagcaagtcgcagaatcagaacaggctctgtatgtggatcaaagctgtcagcatctgcattaaaatatctgtaggtattcaattcaagattttaaaatcagcattgagtttcaaatgatgtgtttaattaaattgctaatttacctatttcacttgtttctctgcttgattgctagttggttggtttgtaaatggccttgttccaaaaggactaaaggcttcacaattccttttgttatatcatgttacatcattttaatctctaataatttttttactaaactgatttttattggatgccatatgagatatgtctgggaaaagtgcactgatttcaaatgcaaatccttgtttttaaaaatgtggctgttgggcgggcacggtggctcacacctgtaatcccagcactttgggagtccgagagggcagattgcctgaggtcaggagttcaagaccagcctgggcaacacagtaaaaccctgtctctaataaaatacagaaaaaaaaaaaaaaaaaaaaaaaaaaaaaa

SEQ ID NO: 118807 - DNA, 1000 bp, Homo Sapiens
atgctgcctcccatctatttactgcaagccttggtggaaagaatcagtattcatcatgtaaagaaatgccacagaaggactggtgtttttctacccctaaagatacatgggatgattcttggcagccttcaggccttgtaaatggaacgaaagtagaagtccataagccagaagtactgggtgctcaggaaaaaaatactggcacaaacaggactcaaaagcaactagacataaatggttcttcagattcttccacactgcccaaattggaagaattctgtacctctcttacccagtcagagcagtcagcagacgggagccagtctgaacccaacaacagtcagactcagccaaagcaaattcagctttccacagcagcaccctgttcaacaactgcagtggatgattccgcagaaaagccctctggttctgtggaaagctcaccagagatcctaaagaatgaagatttttctagcagccgtgctattacattgtacaaagacaagcgtcaagaatctgtagaccagctgtctttgattttgtcttatgagtgccagatttctcagaagctctacattcctcgaagtacagccactgctgccttaggtgctgccgcacggttagctacatccaggagcctcctacactggtaccccagtgtgaaaaggatggaagcatgagggagggagggaggagggagaaaaacagaatccagccgcttaggctttgatgaactcccaggccaaaatgaggagttattgaagcaaaatagtatcttgatcattgatacttttgtctttctgtgactatatgttagctttattatgctaacagtctactttgatgtgtaagtaagtattgatatttactgttaatcttgatttttcttgattttattctgtgtcattttgttcacctttgtttttaatgtagtttaaaggaatttgtttttttgtgtttgtttttcttgtacattatcatgactgataaatgaaaattg

SEQ ID NO: 118808 - DNA, 1000 bp, Homo Sapiens
aaactgtgcctctgggagactcatttgacgaggaataatctggcccactttcccaccctgaaattggcttccagaaatgaaagcgatggcctgaactacattcccaaaatcgcggaactcaagaccgaattccagaaaaggctgtctgatttcaaactctacgaaagcgaactgactctgttcagctccccgttctccacgaagatcgacagtgtgcacgaggagctccagatggaggttatcgacctgcaatgcaacacggtcctgaagacgaaatacgacaaggtgggaataccagaattctacaagtacctctggggtagctacccgaaatacaagcaccattgcgcaaagattctttccatgttcgggagcacctacatctgcgaacagctgttctccattatgaaactgagcaaaacaaaatactgctcccagttaaaggattcccagtgggattctgtactccacatcgcaacgtgatggagagaaaactcctggcagggccctatggtgggaaaggctggagtcttctagtcccaagggattgggagatgacaaaatgaatttttttttcttttttgagatggagtcttgctctgtcgcccaggttggagtgcagtggcgtgatctcggcttactgcaacttccagctcctgggttcgaacgattctcctgcctcagcctcccgagcagctgggactacaggcgtgcgccaccatgcctggctaatttttgtattagtagagatgaggtttcaccatgttggccaggctggtctccaactcctgacctcaggtgatccacctgcctcgacctcacaaagtgctgggattacaggcatgaaccactgtgcccagctgacaaaatgagttcttaaacttttttttttttcagttttttttccactttgaatcagaaatataatctgcagtatcatacttgtttatattacattgtgtgcctcactattcattaaaaatcaagaaagttttattgt

SEQ ID NO: 118809 - DNA, 1000 bp, Homo Sapiens
taagtaactttacaattattatcaaatacttcaatgtagatatttcttaagttgaaatagcattaactaggataatgctttcatgttattttattgtcttgtgatagaaattcaacttgtaccatctaaaactaggttgctataaaaataggaggatgaagtcaataaagtttatgccagtttaaaaactggaaggaaaaggtaagagctctccattataaaatagttgcattcggttaatttttacacattagtgcattgcgtatatcaactggccctcaatgaagcatttaagtgcttggaattttactaaactgacttttttgcaactttgggagatttttgaggggagtgttgaaaattgccaaacactcacctcttactcaaaacttcaaataaaatacacattttcaagagggagcaccttttatatttgataagttttcattataaaccttataataccagtcacaaagaggttgtctgtctatggtttagcaaacatttgcttttctttttggaagtgtgattgcaattgcagaacagaaagtgagaaaacactgccagcggtgattgctacttgaggtagttttttacaactaccatttcccctccatgaaattatgtgaaatttattttatctttgggaaaagttgagaagatagtaaaagaattaggaatttaaaattacagggaaaaatatgtaagtgaaaagcaataaatattttgttcactttgctatcaagatgttcactatcagatatttattatatggcagcaatttatatttttaatcattgcccattaatagacgcagtaaaatatttttgaatcagacatttggggtttgtatgtgcattaaaattgtcttttgtactgtaagttactgttaatttgaatattttattgaactgtctccctgtgcctttataatataaagttgtttctacaacttttaatgatcttaataaagaatactttaggaaaaaaaaaaaaaaaa

SEQ ID NO: 118810 - DNA, 1000 bp, Homo Sapiens
gggccacctacccccacctgaacttcagcattcccatcacggtgctccagccggccctgcagcagtacagccagacccaagacctaggtggcctccgtgagctggaccgcgctgctgagccagtcagggtggtgtggcggttgcagcggcccctggcagaggccccgcggagcaagctctgaggctgtgttaccacctttggaaagaagagtgacctttttctgctgtaggaagtgatgttgaggtgacggtggcctcaggattcagggcccagcccctgcaggggcccaggctgcctctcatctccacccactgactgcagactgggctttgggctctggggcaaacttctcttcagccccatggatccttaacctggcagcccgttttggggtgctttcttgagcccccagttctctgtcccctagcactagactcagctgtattgtttttccttctggggagcccactccaactgcacagaagttctgggcctgacaggtagattccagctggaaggcaggcccgtgcctggttttgcgtctgttcccctgagggccatcgtcatcctggagcttcaatggggccttggctcctgtctgcctctcagtcagagtcagggctgacaaaggactcagcttccttagcatctcagcagaaaccttgctctgaagaccagagacagaagggacagaaacaggagtgcctcctgctgtgccaggcccatgggcagtgcaggcagatccctgaaggtcagcactcctgggtcttcatatgccaacaggggcgctcttgacactgtgccttcattttccagcccacagcctgggtctcagggatcttgaggggtagaacatgtctggttggggcttgggaataaacatgatctattgaaaaaaaaaaaaaaaaaaaaaaaaaaaaaaaaaaaaaaaaaaaaaaaaaaaaaaaaaaaaaaaaaaaaaaaaaaaaaaaaaaaaaaaaaaaaaaaaaaaaaaaaaaa

SEQ ID NO: 118811 - DNA, 1000 bp, Homo Sapiens
actgagccactgccagccgctctcctgcccacctctccccaccctgaacccagctcctgccacagactgaccctgtggcctcagtgacccactgccccaagtggtgctttcagagaattgattcagccatctgcgcccaggccacgtgtcccgatctgggattagaaaatatgggtccattcctttctagaaaggggacaaccaagtgtctcagtttgccttgcggggagggggctcctgggccatgggacttccagtgctaaaactgggaaagccccaggtaaccccggactggtggtcaccatagtatggtttttcatttgtatctcctggggagcttttaaagagtactggtgaaaaacacatagtaaattaattttaaaaatgtaaaaaacaatgcctgtactgaagtaccaccaccgatttaaatgggctgagttgggggaggcatggggtcttttttttttttttttttttttttttttttttttttttttttttttttttttttttgagacagagtcttactctgtttcccaggctggagtgcacaaacatggctcactacagcctcgctctcccgggctccagtgatcctcccgcctcagcctcccaagtagctgggattataggtgtgtgccactgtgccaagctaatttttttattttttgtagagatgggatttcaccatgttactcaggctggtctcaaactcccagcctcaagcgatgctcccacctccacctcccaaagtgctgggattacaggcgtgagccaccatacctggcgcatgcatattttttaagagtacccactggagtctaatatatagcctgggttacctgggatgaagaataaagagagcaaactaccacaaccaatggttgagcccctgtcaagtgccagtcatgatagtagtaataataataataaacatctattgggccagaaaaaaaaaaaaaaaaaaaaaaaaaaaaaaaaaaaaaaaaaaaaaaaaaaa

SEQ ID NO: 118812 - DNA, 1000 bp, Homo Sapiens
ggaggccccggtaagccaggagggagcacaggccgaggcggccggagctggtaaccaggagggcggcgactccggccccgacagcagcgacgtggtgcctgcggccgaggtggtcggagtcgcagggcccgtggaaggcctcggggaggaggagggtgagcaggcggcaggcctggccgcagtcccccggggcgggagcgccgaggaggactcagatatcgggcccgcgacggaggaagaggaggaggaagaggggaacgaggcggccaacttcgacttggcggtggtcgcccgtcgctacccggcgtcgggcattcacttcgtgctcctggacatggtccactcccttctccaccgcctctctcacaacgaccacatcctcatagagaaccgtcaactcagccgcctgatggtggggccacacgctgctgcgcgcaacccctggggcaacctccccccgctgctgctgccccagaggctgggtgcaggggccgcagcccgggcgggcgagggcctgggcctgatccaggaggccgcatcggtcccagagcctgcagtgccagctgacctggccgagatggccagggagcccgcggaggaggccgcagaggagaagctctcagaggaggccacagaggaaccagacgcagaggaaccggccacagaagaaccgaccgcacaggaggccacggccccagaggaagtcactaaatctcagcccgaaaagtgggatgaagaggcccaagatgctgcaggcgaggaagagaaagaacaagaaaaagagaaggatgcggaaaacaaggtgaagaactccaaagggacctagacgcagcagaggtgaagccaagaaaatccagatgcctgtgggaattgtaacacatatcattccaaagttcgttacatcaaaagtgatatccagtgacatctaactttcatggatgtatgtgacagtgttcaagttaaaaaataaaagtttgttttaaatgaaaaaaaaaaaaaa

SEQ ID NO: 118813 - DNA, 1000 bp, Homo Sapiens
agcatcagcttggtgccaggtattttacagctgtaaccatgcaggttaaggtctcatccccgctaaatgagaggaaaccggctcagggaggtacagcaactgggtggaggctgcccaggtggtggcagcactgggctcgggggtcagtttggtcctgaaactgggttggggacagggatagtttccagctcaaagactgtaaggactgaagcgatgaggccgagggccctaaggccctggcacccggctccccggcccatgtcctcacttgcagctgttcgcggtgggtggcttcgacggcctgaggcgcctgcacagcgtggagcgctacgaccccttctccaacacctgggcggccgccgcgcccctcccggaggccgtgagctcggcggcggtggcgtcctgcgcgggcaagctcttcgtgattgggggcgccaggcagggcggcgtcaacacggacaaggtgcagtgctttgaccccaaggaggaccggtggagcctgcggtcaccagcacccttctcacagcggtgtctcgaggctgtctcccttgaggacaccatctatgtcatggggggtctcatgagcaaaatcttcacctatgatccaggcacagatgtgtggggggaggcagctgtcctccccagccctgtggaaagctgtggagtcactgtgtgtgacgggaaggtccacatccttggtgggcgggatgatcgcggagaaagcaccgataaggtcttcacctttgaccccagcagtgggcaggtggaggtccagccatccctgcagcgctgcaccagctcccacggctgtgtcaccatcatccagagcttgggcaggtgattcagatttggacagcctgagccaggaggcggagaggcaggcggagctcagatgcacactctgctccctcatggcacctccacgcaaacagcccttaacttaatggtcccttttcttgtataaataaaatcttgttgggtctgtgttccagctgcagtc

SEQ ID NO: 118814 - DNA, 1000 bp, Homo Sapiens
ctaatagaaacacagcctttccaatcctctggaacatattctgtctgggtttttaatgtctgtggaaaaaaactaaacaagtctctgtctcagttaagagaaatctattggtctgaaggtttctgaacctctttctggttctcagcagaagtaactgaagtagatcaggaaggggctgcctcaggaaaattcctagatcctaggaattcagtgagaccctgggaaggaccagcatgctaatcagtgtcagtgaatccacagtctttacttcctgcctcataaagggccaggtctccccagtaccaagtcctttcctcatgaagttgtgttgcctcaggctgtttagggaccattgcctgtcttggtcacatgagtctgtctccttactttagtccctgggcaatccttgcttaatgcttttgttgactcaacaagggcccgaggccttaggttttctattaaggtctctgccccaggcatggtgctctatatcttggccaaataaattactttccttgaatatccaggaatcttttagtctaaagcaatgaggagttatcacctcatcctcaaactccaacaagatctatgccttagtgttgtttttgttgtctgctttgatgtaaaagcaagagtatttggagcaagaagctgcaatgcgccaaatacacaataggccttttctttatcattcatacgacatttctggtttaggtgtatgtagttgggccatgttacttgtccagaggaagagactaaagatataagaataattttttagtcctaaatgctgttttgtttactttctgtcaagatatttacccgtgtcaaattcaaactacagtactgtgtaattatgtataaagtttttttatttatttgaagttagactagatatacgtttttaaatttaacatctggctggacagtgttctattaactcattgaatgtgtttcctttgtcttgtgttaataaatattgatgcctgattctgtttaa

SEQ ID NO: 118815 - DNA, 1000 bp, Homo Sapiens
tggtgcacgtctgtaatcccagctgctcgggaggctgaggcaggagaatcacttgaaccagggaggtggaggttgcagtgagccaagattgcaccactgcactccagcctgggcgacagagtgagactccatcttggggggaaaaaagtatatatatatacacacacacagacacacacacacacacatatatctctaaatgtgtgtatagaaccttttatcagtataacattgatttataattaaatgtgggtgaggaagaatgtgtggagtgtttcagaaattttgatcttaaaagccttttcagaaactcaaagctttcagaaattaatagttatattaatagccttctaaacagcattaagttttcaattttaatatatctatataaaatatagtgtcaaagaaagtaacatcaatatagtgggtctgtaatggaaatctgtcaatgaacatgaactgagttcttcaactacaggttgaaggataattaaacttttcattaggagtgttcagctacatggattcatggaatggtggttcatagtaagtgatggtaatctttttattcatgggtgtaaaccctttataacttagtgcttaaaatattaatcttttgattatataatgtcccatgaattatagtttaccaatagttctaaaacatgctaacctgaccttttccttctaatttgtttttaacttcattcgagatagtacctctcactcacagatatttatttggttatcaagtgaagataggtgtgtctaaaagtgatcttctgaatcctgtctccctagaggtactagtatctagagtttacccagaaaattttatgattgtaacaaaaggaagtagtgacttatgaaggttttgtttcttgaattttacttttgctacttgtccaatagtggctagtttatgtttatcaatatagttattcactgtgccttaagtttatactttgtttatgcaaactataaaatttcccataaatgt

SEQ ID NO: 118816 - DNA, 1000 bp, Homo Sapiens
cacgagtgcttccaggaggagctgaggaaagcgcaaaggaaattactgaaggtgtcccgggacaagagtttcctcctagaccgacttctgcagtacgagaacgtggatgaagactcttcggactcagatgccactgcatcatcagataacagcgagacggaggggacacccaagttgtctgacacaccggcccctaagaggaagagaagccctccgctggggggcgccccctctccctccagcctctccctgcctccttcaacagggtttccccttcaggcctccggggtcccctccccatacctgagctcgctggcctcctcccgctaccccccattcccttctgactacctggccctgcagctgcccgagcccagtcccctgaggcccaagcgggagaaacggccccgcctgccccggaaactcaagatggcggtgggaccccccgactgccctgtgggagggccgctgaccttccctggccggggttctggggctggggtcgggacaaccctgacccccctcccaccccctaagatgcccccccccacgatcctgagcacggtccctcggcagatgttcagcgatgcaggtagcggggacgatgccttggatggagacgatgacctggtgatcgacatcccggagtgaccgtgacatcacgccatgcccaccacggccccgcccggcgccctccccgtgccagcacacacgagtccagcttcctcggaggtgtttattgatgcccagctgccatgctccggccactgacacaaccagaaaaggcgtaaacatgcacgggtgtcccccaggagggtggcaggggccctgccttcaaaccccggccccctccaggggacagttatttaaacgagtggccgggagcatctgccacctgctggggaggcagagaccctgcaatggccacctctttaaaagggctgctgtacagggctaggttttttcaatgaagtttctgtattaaaggagtggctctggg

SEQ ID NO: 118817 - DNA, 1000 bp, Homo Sapiens
ccacggactcactgcagggcatcatcctgaccggctggcagaggtacgaccactactctgtgctgtgcgagctgctgcccgcaggagtcccgtccctggccgcctgcctgcagttgcttctacgcggaggatttgatgaagatgttaaagcgaaagtggagaaccttctcgggatttccagcctggaaaaaacggaccctgttaggcaagcaccctgcagccctccctgtccccttcttcccctccccttcccccgcccgtggagacagctgttctcagcagggctctccgcagggagggggccggctccttccctggcagcaacatccttgcccttgtcacacaagtcagcctccatctgcgcagctctgtggatgcgctgctggagggcaacaggtatgtcactggctggttcagcccctaccaccgccagcggaagctcatccacccggtcatggttcagcacatccagcccgcagcgctcagcctcctggcacagtggagcaccctcgtgcaggagctggaggctgccctgcagctggctttctacccggatgccgtggaggagtggctggaggaaaacgtgcaccccagcctgcagcggctgcaagctctgctgcaggacctcagcgaggtgtctgcccccccgctgccacccaccagccctggcagggacgttgctcaggacccctgaggggagagctcatgccagggggctcctgctggaggctgggggggctctgcactgccaaatggcctgggcaatacgggcccacgtgggcgtcgtgccctctggcccagcagtgtcttgcccacactcagttcctgagggccctgggcagcccctgggggagagactagaaaacacagaaggaagcagcacagggagacccgctttgtgatctgcatgtgtgacactgattctttggaaataaagagtggaagctgcaaaaaaaaaaaaaaaaaaaaaaaaaaaaaaaaaaaaaaaaaaaaaaaaaaa

SEQ ID NO: 118818 - DNA, 1000 bp, Homo Sapiens
tcctgctgtccgctgacctgaaggggttccagtacttctctaccctggaagaagcagagaagcacctgaggcagaagccagggacccagccctacaacatcagagaagactccattctggaccaaaaggttgccctgctcaaggcataatggggccacccgtgggcatccacagtttgcagggtgttccggaaggttcttgtcactgtgattggatgctggatgccgcctgatagacatgctggcctggctgagaaacccctgagcaggtaacccagggaagagaaggaagccaggcctggaggtccacggcagtgggagtggggctcactggcttcctgtgggatgactggaaaatgacctcgctgctgttccctggcatgaccctctttggaagagtggtttggagagagccttctagaatgacagactgtgcgaggaagcaggggcaggggtttccagcccgggctgtgcgaggcatcctggggctggcagcaccttcccggctcaccagtgccacctgcgggggagggacggggcaggcaggagtctgggaggcgggtccgctcctcttgtctgcggcatctgtgctctccgagagaaaaccaaggtgtgtcaaatgacgtcaagtctctatttaaaaataattttgtgttttctaaatggaaaaagtgatagctttggtgattttgtaaaagtcataaatgcttattgtaaaaaatacaggaaaccacccctcaccctgtccacttgggtgatcattccagacccctccccaaacatgcatatgtacctgtccgtcagtgtgtggatgtatgtttacagttctacataaatgggatcattttatacatggtgctctggaacccacatttttcatgcagtcatttgcagtgaattatttattgtgataataaatagcattagaatacaaaaaaaaaaaaaaaaaaaaaaaaaaaaaaaaaaaaaaaaaaaaaaaaaaaaaaaaaaaaaaaaaaaaa

SEQ ID NO: 118819 - DNA, 1000 bp, Homo Sapiens
cctattcatctgaggactaagctctgatttttcatcttgcccaaattcctttctaaggggtatggggagtcatgccctacaaaccataaattctcatcagatgggttttatttaaccctgtatattgtgacttactttctaatctgactctggcataacaagggaaaaaaatcaaaatgttttaccccaaaatatatttccttgccataccttgaaattgtcctgcaaagtctcttgtggggaaactccacattctgtagagaatatcctttcccctttgttttccttcctttctttccagatccaggagataatcaactaagagccaggcacccttttaggtctaataagaaacactttacaacctgctctctctctgaagtctgctttctgagagattcctctgcacaataaaacttgatctccacaatcctttatcttaacctgaacattcctttccatggatctcaggtcttcagataaactaaaccaattgtcaaccagaacatgtttaaatttacctatagcctggaagccccaactttgagttgtcctgcctttctgaaccaagccaatgtatttcttaaatgtatttgattgatgtctcatgtctccctaaaaatatataaaaccaaactgtaccttagccactttggacacatgttctcaggacctcctgagggctatgtcatgagccatggtcactcatatttggctcagaattaatctcttaaaatattttacagagtttgactctttttgttaacacatccgaacctgcaactacaaatgccaccattaccacttaaaacttgatagaactagcatcagtcatcaaaataacctgttctatattaagttaacttttagttatcaccagtaatactagcctacaactactcgccacactggctcttccccaaaattgaaattgtacaatatgtgagtctaattcttgctaacataacattattgcctacattaaaagcttctgcaaagc

SEQ ID NO: 118820 - DNA, 1000 bp, Homo Sapiens
aagatattttcttcttgaagagacttttcgattagtcctcatatatttatctactaaaatagagtgtttaccatgaacagtgtgttgcttcagactattacaaagacaactggggcaggtactctaatataaaggacaggtggtgtttctaaataattggctgctatggttctgtaaaaaccagttaattctatttttcaaggtttttggcaaagcacatcaatgttagactagttgaagtggaattgtataattcaattcgataattgatctcatgggctttccctggaggaaaggttttttttgttgttttttttttaagaacttgaaacttgtaaactgagatgtctgtagcttttttgcccatctgtagtgtatgtgaagatttcaaaacctgagagcactttttctttgtttagaattatgagaaaggcactagatgactttaggatttgcatttttccctttattgcctcatttcttgtgacgccttgttggggagggaaatctgtttattttttcctacaaataaaaagctaagattctatatcgcacatgagcattaagttcttcattgccttgttaaggaaaatgagtaggcagactcagaatctgttatattgatttcagttacaatttaatctttacaattaaaagggcgaaagatgtagaattttagtttttgttgttgactcgaaataaccagttttcttgattagagtttaagcagatttaataccatgaccttgcttaaccgtttcttcttttttacttgcttgctgttcttttgggtcaaaggagcaggctaatgcaaagcttttggagactgctaagtgttaaaaagtgattaaacacacactctgctattttttcacttcttggaggtagaagtcgagtatgaggcagttattttttagagtgtggaattatagtctttccttgctcctagttattctgtatatctttactttgtaggtaaaaataaatgtttatttaaaac

SEQ ID NO: 118821 - DNA, 1000 bp, Homo Sapiens
tctaatcctagtgagaggtgaagccagttggacttcctgggtcgagtggggtggggtcttggagaaattttctatctagctagaggattataaatgcaccaatcagctctgtgtctagctaaaggtttgtaaacgcaccaatcagcactctgtaaaaacgcaccaatcaatgctctgtgtctagctgaaggtttgtaaatgcaccaatcagcactccgtaaaacggactgatcagtgctttgtaaaatggaccaatcagcaggatgtaggcagggccaaataagggaaaaaaagctggcacccaagccaacaggggcaacctgcttgagtccctttccacattgtggaagctttgttccttcactcttcatgataaatcttgctgctgctcactctttgggtccgcactacctttatgagctgtaacactcaccacgagggtctgtggcttcattccttaagttagcaagaccacgaacccacagggaggaacaaacaactccgggcacaccacctttaagagctataacactcactgcgaaggtctgtggcttcactcctgtagtcagcaaaaccacaaacccaccggaaggaagaaactccagacacatctaaacatctgaaggaacaaactctggacacaccatctttaagaactgtaacactcaccgtgagggtccgtggcttcattcttgaagtcagggagaccaagaacccaccggaaggaacaaactccggacacactagcacttacaggaggcccaggtgggaagatcacttgaggccaggagtttgagaccagcctgggcaacgtagtcagaccccatctctacaaaaaaatttaaaaaattagccgagcatggtggcaagtgccagtaatcccagctactcttggaggctgaggcaggaagagcccttgagcccaggagctggaggctgcagtgaactatgatcaaaccactgtagtccagcctgagtgacagagtgagaccctgcctct

SEQ ID NO: 118822 - DNA, 1000 bp, Homo Sapiens
gctgcaggtgaaggtggtggggctcttcagctgccccaactttcagattgcgaagagcgccgctgagaatctgaagaataatcatccatccaaatttgaagatcctatattagttcctcttcaagaatttgcatggcatcaatatctacaggagaaaaaaagggaactcaaaaatgaaacctgggaatattcttcctctgtgatttcttttgttaatggtcagtttctgggtgatgcattggatctgcagaaatgggcccacgaggtgtgggatatagttgacattaaaccctctgcactttatgacgcactcactgaggatttttccgctaagttcttaagagacaccaagcatgatttcgtgtttttggacatttgtattgattcttctccaattggaagattgatttttgagctatactgtgatgtgtgtcccaaaacatgtaaaaattttcaggtcttgtgcacaggaaaagcagggttttctcaacgtggcataagactacattacaaaaattccatttttcatcgaatagtacagaatggctggatacaaggaggggatatagtgtatggaaaaggagataatggagagtcgatttatggtccaacatttgaagatgaaaacttttcagttcctcataataaaagaggagtacttggaatggccaacaaaggccgtcacagcaacgggtcacaattctatatcacactgcaagcaactccttatctagatagaaaatttgtggcttttgggcaactgattgaaggaacagaagtgcttaaacaactagaattagttccaacacagaatgaaagaccaatacatatgtgtagaattactgacagtggagatccttatgcttgattttcatatcaatattttctgtgataatttattactttgtatctgatcagctgtttgtggatttaattaaaaagtacttgataaattgtaatttgaaaaaaaaaaaaaaaaaaaagaaaaaaaaaaaaaaaa

SEQ ID NO: 118823 - DNA, 1000 bp, Homo Sapiens
gctgtcgctgagcccgccgttccggccggggaaccgggcgaccagccgcaggccgaggccatcccgggcttggccgcgaggccgcggagctcccaacggtccccgggggcccgggacgcgctgtggggccggggacaagcgggcctcgctgggcctggcgagccgcgccagttcatctgcaacgagtgcggcaagagcttctcgtggtggtcggcgctcaccatccaccagcgcatccacacgggtgagcggccctacccgtgccccgagtgcggccgccgcttcagccagaagcccaacctgacgcggcaccggcgcaaccacacaggcgagcggccctacctgtgtcccgcctgcggccgcggcttcagccagaagcagcacctgctcaagcaccagcgcgtgcaccgcgcggcccctgcgtgcagccccaaggaggaggcgcgctagtggactggacctcagcggacccgtggtggtgcgggggatgtttgcggggtgtgtgtggggagtgggggtggccaggattgctggctcctagaaccccttagagcgggaccggtggattccttaaggctctgaagggctgagaacagttctagaagcgtcccaaagggtgctgggaaaggtcccagcgtgggttgagggaggagggaagatccgagttcctcaccgcgggccgggatgtgaccaccctcttcagaggttggaccccaggcttcaagcaccgagtgaggggtctgttggggacgctgggagagtctctggtgtgaagtggcttaggtctggactggtcagctgtggcaccagccggtcctgcccacgcttcaggatggccgggggctgcccctgtgggagagttgccaagactcggcgataccaaggatggaagccagaggctgtggcgagggagagccaagcatattcccagcaccagggccactgctggcacgtcgtagacatccaataaatatttttggaaggaaaaaaaaaaaaaaaa

SEQ ID NO: 118824 - DNA, 1000 bp, Homo Sapiens
caactggtttcatctccttcagtggtgtagagtctgctctctcctccttgaaaaacttccaagcctgtatcaactctggtatggacacagcttctagtgttgctttggatcttgtggaaagtcagactgaagtgagtagtgaatatagtatggacaaggcaatggttgaatttgctacattggatcggcaactaaaccattatgtaaaggctgttcaatctacaataaatcatgtgaaagaagaacgtccagaaaaaataccagatttaaaattattggtagagaagaaatttttggctttacagagcaagaattctgatgcagactttcaaaataatgaaaaatttgtacagtttaaacaacagctgaaagaactaaagaagcaatgtggtcttcaagctgacagagaagctgacggaacagaaggagtggatgaagatataattgtgacccaaagtcagaccaacttcacctgccccattacaaaggaggaaatgaagaagccagtgaaaaataaagtgtgtggccacacctatgaagaggacgccattgttcgcatgattgagtccaggcaaaagcggaagaaaaaggcctattgccctcaaattggctgtagccacacggatataagaaagtcagatcttatccaggatgaagcacttagaagggcaattgagaaccataacaagaaaagacatcgtcattccgagtaggaaaagccacctgcctgcagggacaccagcagcctacctcctaccccagctgtctgttgagagcagtgctgaccccagcagttagggactggctgcatagcatacttgttgggggtaaaacttgttgcttttatgtgtgcttgaaaacatttttcaaagttacacaacagaaatgcaatcatattgtttatttttaagtgttctataatgttaaataaaactttgatcatctgcaaaaaaaaaaaaaaaaaaaaaaaaaaaaaaaaaaaaaaaaaaaaaaaaaaaaa

SEQ ID NO: 118825 - DNA, 1000 bp, Homo Sapiens
ttgttgtttttaagacagaatttcactctttgttgcccaggctggagtgcaatggcgcaatctctggctcaccgcaacctccgcctcccaggttcaagcgattctcctacctcagcccccagagtagctgggattacaggcatgtaccatcacacccggctaattttttgtattttaagtagagagggggtttctccatgttggtcaggctggcctcgaactcccaacctcaggtgatccgcccacctcggcctcccaaaatgctgggattacaggggtaagccactgtgcccggccggttatttctttaaaaggtaatcatttgtcaagagtaaaacccagaagctctgacaggccataatttcagatcctttggcttgggcagttttgattttccccgtgtttgcatggcatgaagtcttcgtccttgtcacggtagcttgggatgactcccagtccacatggaaaacatcagggagtgacaatccagcaagaaatccctcgctagttccacacctacgcaccgagcgtcggtgtgccaggccctgtgctgggcagagtgtggtatgtcagggtgtgccggttttaggtaacaagactccaccactgagtggcacctgccctattgcaaaggaatccagttcctccggaataacagtcccactgttaacctggtgctactgggaagttccacacagtaatctgagcagtgactcatggaaggatgaggaacgtttgctccagcttctctccctttccagcaagggcagagctcctaaagccaggggttagcacctggccagcttatgtggcagatggtctcagttacaacttcgctgctttcccaaactcctgcagccctcctgagtccgacttccgttgatagcaaggcactgggtggcagcaaccttttttctagtagtttttttcccagcagttttccatttctccacagtatccttttcatttagaggagcttaataaatgctttttaaaaagt

SEQ ID NO: 118826 - DNA, 1000 bp, Homo Sapiens
tccaaacttgctctgagctaaaggagaaatggaaacttgaagctggtgttatgtattttgcaggaaaacagtttcattttttcatagcaaaaatatagttggtgtatatctctccttaagtctctggtttctaaaaaccctacttcagtaaaggtcctgattagttgattagtgaatgtgtatttctaaatatttgtattcagtaggggtatggctgattaatttaacattaactattaggtaattcatattatacatttaagttctttctgttctgtgtagaagattcagaaatatgtcttcaaagacaatgacttgatctaattgataagaacctccaataaatatgttctaatatttttcaggaagaataaagaatagagagagacatataaatgtgcaagaggcaaaactttgagcatagtgtaaaatttaacatattaactctcacgaaaggcaaaatccttttatgtgcagatactttaattcatgtagattttcctattaatcagtaaagttgaatcctaacaataatgccatgtgacaacctatttagattattccagaattaaattcaatttattttctagagctcaagtaaccactaccttaactgaaatttgatgttaggtttcccttgttcctccgaatggttcttccacactcaaaataattgaatggttgagttggttaagcaaagagttatcctgccacctaagagcattcattaaatgattatttattaccacctactttatactatcttcctttctttaaacatggagtctaaatatgtaatatatcaaaaaatacttctgatttggtagatttcttatatcaagggtgagaattgaactgtgccattggctattcaatagcttattgaatgtatgttttggatgccacatcctcctggaagcaaattttgccaagatactgtttattattatttttaattaaagtgatactattccattttcaattaaaaaaaaaaaaaaaa

SEQ ID NO: 118827 - DNA, 1000 bp, Homo Sapiens
atgttttgaatctcttgagatgtgtttaccccactagatacatatttgccactggttagttctccatctaagctcaagaggttattcatctctctttagattccagtggcttttcttttaacatccaggtaaaacagaaactgctatggtatacaaccaagttttggggttaaacataatcagaaaagaaaatccagttaaatttatgaagtgagattttcagatcctagatcttgaataaaggaaaggtcttttcatcttgatggccccaaagcttgttggtcatggtctttatttctggccactatcttcttaaataatatatttttaagccctcatttatttttggttttgggtgaggaaagtcatgttttctaagtcctctcccctaataaaacctacccaacaatagtgctttgaaaagtggtagttatcttgaagatactcttgccaaatgcaaagataaacattctttttgtctgctttataaatatgaaatatgccagatctatagtattttaatgtgcatctactttaaatgagtcatcttggggtttttataattcccttatgttcttgcccctctacacttgaaataacaaaatgccttaattttatggattagttctcttatagtagacaggcagctatatgcagcaaaaccaataaagttatttttcaactttcatagttgtaaaatatcttataccagaatacaaaacagctaagaaaacatgccacattttattttagcattttcaaataatttgtttttggtgtaagcacaggataaaaaaggagagcgtcaaagaaaagagacataacacctaacattcataaaaattaacaaagtatattttggatgatgtttttacaggaaatattttaaataagttggtagaacttttaaaatggtactgtattagctaataaaatattcagtacaaatatatgtttggatttatgcattaaaaaactaataaaattatttccaacttta

SEQ ID NO: 118828 - DNA, 1000 bp, Homo Sapiens
atgccgttgctgaggtggctgaaggcaacgggaaggaaggaggcggccagggcctcgtcccagtgggtcacgacgccctgccagagaccaatgctggtggcctcccctcccaggtcaagggctcccttgccctccccttccctgctgatgtccaaggcaaagatgcctttactgacatcactgaaggcaaagagaaggaaggtggcctggtcaccgcgggtcacgacgcccctctggaggccaatgccgagggccccatcacggttagtgagggctgcatcaccatccccttcgcagtcttcgatgtcataaagcgcaagggcggtggccacgttgcctacggcccccagggcaatggctgcttctcccaaggctattaccagaagaggcagctgaggtccaggttccacaaggcccgctgtgggtgccgccgggaggaagacgagcgccctggccgtgcctgccgtaggccgcacgccgagccctacgaggacttctggatctgggtgtccatgaccgtgtgcgtcttctggctgatgtgcatgtgtcggctgaaccccgggatctacccgcagcaagtgtgacgccccgaagttcaggcaaccctcgcctctgggaccccgcctcgcctctgagacaccccccaaccccgcctttgagatgcccgccccgcctccgagaccccgcctccacctccgagacccctttctctgagacccccgcctctgaggccccgtcccccgcctccgagaccccgccctgcctctgagaccccgcctcacctctgagacaccccccaaccccacctttgagatgcccgccccgcctccgtggccctgcctccacctccgagaccccgcctcacctctgagaccccgcccccgccagcagctcagcccctcctgtctcttgcccctggttttgtgggtctgccctgagctgtgcctgtgtgctccagcctcttcctatgtgtgtaacttcaataaaaccaagcaaagcc

SEQ ID NO: 118829 - DNA, 1000 bp, Homo Sapiens
atgcgtgatctaaaagctgttgggaaaaaattcatgcatgttttgtacccaaggaaaagtaatactcttttgagagattgggatttgtggggccctttgatcctttgtgtgacactcgcattaatgctgcaaagagactctgcagatagtgaaaaagatggagggccccaatttgcagaggtgtttgtcattgtctggtttggtgcagttaccatcaccctcaactcaaaacttcttggagggaacatatctttttttcagagcctctgtgtgctgggttactgtatacttcccttgacagtagcaatgctgatttgccggctggtacttttggctgatccaggacctgtaaacttcatggttcggctttttgtggtgattgtgatgtttgcctggtctatagttgcctccacagctctccttgctgatagccagcctccaaaccgcagagccctagctgtttatcctgttttcctgttttactttgtcatcagttggatgattctcacctttactcctcagtaaatcaggaatgggaaattaaaaaccagtgaattgaaagcacatctgaaagatgcaattcaccatggagctttgtctctggcccttatttgtctaattttggaggtatttgataactgagtaggtgaggagattaaaagggagccatatagcactgtcaccccttatttgaggaactgatgtttgaaaggctgttcttttctctcttaatgtcatttctttaaaaatacatgtgcatactacacacagtatataatgcctccttaaggcatgatggagtcaccgtggtccatttgggtgacaaccagtgacttgggaagcacatagatacatcttacaagttgaatagagttgataactattttcagttttgagaataccagttcaggtgcagctcttaaacacattgccttatgactattagaatatgcctctcttttcataaataaaaatacatggtctaaaaaaaaaaaaaaaa

SEQ ID NO: 118830 - DNA, 1000 bp, Homo Sapiens
ttctcattattcacagtaattatgttctacagaatattctcccataaacactgaattaaatatggaacaactgcttttaggagaaagtgtatttgtgtatatgtgtgtatacatatgtttatctcacacacattatgagcttgaattcttaattcatcctagcaaattctaccttattttacagaagtgaaagtgaggtatcagaagtgttaagtgacatgcctgaggcacccccctaacaggtgtcagagctgaaattcaaaccccatccagctggccccggagccagagcttcttgtactacacagaattgcccctgccatttccaccctccagtcatttctctatgagactgaagcaggaaggcagagcatcatcttgttcagcctcagctgggaacatgtgtactgggtgactcaaatttttcacccatttacacatatccacaaatgactgcaaaagtgccacggatatcaatttgagggttataaattttagcaagttggtaaattcacaaatacataaccttgaataatgaggatcaactgtaccatatttaataaagcacaaaacccacacagattgtcttattacagcatttgataaaatccaaaactctttcataaaaacactcaacaaacttaggaataaaaggaatcttcctagatatgataaatataacatctatgaaaagcccacacctaacattatacttcatggtgatagactgaaggctgaatgttttccccttaagattgggaagaaggacaaggatgttcactcggcactacttctattcagcattgtacttgaagttctagccacagcagttaggttaggaattcaaggtttgttcaacatctaaaaatcaaataagctaataaagaaaagaggtttatactgcaaaagaagtgaaactatatgtattcacagttgatacatagttgtatatagaaaatgctaaagaatccataaaaagtaataaatgagttcaacaggt

SEQ ID NO: 118831 - DNA, 1000 bp, Homo Sapiens
gagagaagaaacggaagaggaagtttatttgttgaatagcacaactctttaacctgagggagtcatctacttttttttcctcctttacaaaaaaagaaaggaaatataaaagccgggtttttgcaacatggtttgcaaataatgctggtggaatggaggagttgtttggggagggaaaggagagagaaggaaaggagtgaggtatttcccgtctaacagaaagcagcgtatcaactcctattgttctgcactggatgcattcagctgaggatgtgcctgatagtgcaggcttgcgcctcaacagagatgacagcagagtcctcgagcacctggcctgttgctccaacattgcaaagacacattatcagtccctatttctagagggattactttgaattgagccatctataaaactgcaaggtcttgcccttttttttaatcaaaactgttctgtttaattcatgaattgtatagttaagcattacctttctacattccagaagagcctttatttctctctctctctctctctctctctctctctctactgagctgtaacaaagcctctttaaatcggtgtatccttttgaagcagtcctttctcatattgagatgtactgtgattttactgaggtttcatcacaagaagggagtgtttcttgtgccattaaccatgtagtttgtaccatcactaaatgcttggaacagtacacatgcaccacaacaaaggctcatcaaacaggtaaagtctcgaaggaagcgagaacgaaatctctcattgtgtgccgtgtggctcaaaaccgaaaacaatgaagcttggttttaaaggataaagttttcttttttgttttcctctcagactttatggataatgtgaccgggtcttatgcaaattttctatttctaaaactactactatgatatacaagtgctgttgagcataattaaataaaatgctgctgctttgacagtaaagagaaggaagtattctgaaaaaaaa

SEQ ID NO: 118832 - DNA, 1000 bp, Homo Sapiens
taaataaagaaagtgtgaggtctactttaaaaaaattcaaatgaagagaaaaagaaaaacagcattctagaaatggcatttctcctaattaattttccacttaatggaagattatcaattgtcctattttatgatcccaggactgaagacagttgtgggatatctgtcatatttatcctgtgagtcattgtgaataatgacatacagtactgaagtaatctgattttattctttggaaattcaatgcattggtcacactaataacatcaacatctgctatcacttatctttttaaaactaaccaaaaaaggctgggattacaggcatgagccactgcacccaactcctctttcgtctttctttaacacacactaggctctttgtgtattatgattcagtgctatttgtaactgtgtcccagtgaccaaattgcactcgactcgatcagctgttcatccatttcgtgttttttcctgtcaaacattaatccagcaaatatatgaggtatttaccaatttattttcttagtattacaaaataattcattagcataaagtacaatagtgaaatatttgagttgttcggaacctcaattaatcctgttttacatttcagacctaaagctggcaatcaggagaagaagcactttgttttaaatgtggagaagataacacttgattccatttcattgtcattagtgtattaaccagcaggagaggtgatgagccatttttcaaatgaaataccttttatttccatataatttttttattttagagttcaatagctgtttctatgattatcctcaatttccatatgttactgaatctgaaaaacatctttaaaattcaaacagttccattttctctcttgtaagtgttaaatgtgataaaagtacatattttaaattgttttcagctcttggatatagcagcaataaaaacactaatttgtgggtatttaagaaaacctggagaataaactcatactttaaaagatc

SEQ ID NO: 118833 - DNA, 1000 bp, Homo Sapiens
tggcaaagatccaaatcagttcacaatttcccgccgtggggccaagatttctgaaacgagctctgtggagtccgtgatgggcatcaaaaacttcatgccagctctagaggagaccccatttcattcctgtacagctgggccaaacccaaccctagggaggccactgtctcctaagccgtcatccccgggatcagttttggctcgtccatcagtgatctgccataccactgtgactgcattgaaagatgtccctttctctctctgccagtcggtcggtgtgggacaaaacacagatatacagcagatagcggccaaaaacttcacagacacctctctcatgtacccagaggacacttgtaaatctggaccaagtacgaatacacagagtggtcttttcaacactcctccccctactccaccggacctcaaccaggacttcagtggatttcagcttctagtggatgttgcactcaaacgggctgcagagatggagcttcaggcaaaacttacagcttaacccattttcaagcaaaacagttctcagaaatgtcatgattgccggggtgaaggcaagagatgaattgcattattttatatattttttattaatatttgcacatgggattgctaaaacagcttcctgttactgagatgtcttcaatggaatacagtcattccaagaactataaacttaaagctactgtagaaacaaagggttttcttttttaaatgtttcttggtagattattcataatgtgagatggttcccaatatcatgtgattttttttttcctccccttccctttttttgttattttttcagactgtgcaatacttagagaacctatagcatcttctcattcccatgtggaacaggatgcccacatactgtctaattaataaattttccattttttttcaaacaagtatgaatctagttggttgatgccttttttttcatgacataataaagtattttctttaaaaaaaaaaaaaaaaa

SEQ ID NO: 118834 - DNA, 1000 bp, Homo Sapiens
attccaatagtttaaatcgaatgaatggtgttatgtttcctggaaattcaccaagctatactgagaggtctaatataaatgggcctgggacacccaggccacttaatcgaccaaaggtttctttgtcagcccccatgacaacaaatgggttgcctgagagcacagacagcaaagaggcaaatttgcagcaaaatgaggagaaaaatcacagtgactcttcgacctctgaatcagaagtttcctcagtgagccctttgaaaaataaacatccagatgaagatgctgtggaagctgaggggcatgaggtaaaaagactcaggtttgacaaagaaggtgaagtcagagaaacagccagtcaaacgacttccagcgaaatttcttcagttatggtaggagaaacagaagcatcatcttcatctcaggataaagacaaagatagccgttgtacccggcagcactgtacagaagaggatgaagaagaggatgaagaggaagaagaagagtcttttatgacatcaagagaaatgatcccagaaagaaaaaatcaagaaaaagaatctgatgatgccttaactgtgaatgaagagacttctgaggaaaataatcaaatggaggaatctgatgtgtctcaagctgagaaagatttgctacattctgaaggtagtgaaaacgaaggccctgtaagtagtagttcttctgactgccgtgaaacagaagaattagtaggatccaattccagtaaaactggagagattctttcagaatcatccatggaaaatgatgacgaagccacagaagtcaccgatgaaccaatggaacaagactaactatttagaaacatttagatgcagtattttacatacagttctggttttaacactgtataaaacttttgtgtaataaaatggacctttagttttacaagagaagcaggttgtaaaataaagtactttatggataattccgcaaaaaaaaaaaaaaaaaaaaaaaaaaaaaaaaa

SEQ ID NO: 118835 - DNA, 1000 bp, Homo Sapiens
aggacctgggatcaaaaggttaaaactagacacaaaggtacatttaaaagacttaaaattttactggatggaacatgatggaggctcatttttaatgtccaaagtggaccaagatctcattatgactcagaaaaaggttgtggttcaccttgaaactattctaggagcctcagttcaacatgttaaactgaagaaaatgaagtactcttttcagttgtggatcgcaatgatgtcagcaaagggacatgatgggaaggaacctgtgaaatttgtagatttgcttggtgaccatgggaaacatgtcagtcctctgtgggagttgatcaaatggtgcctgggtctgtcagtgtacaccatcccttccattggactggctttgttggaagaaaagctcagatatagcaatgagaaataccaaaagtttaaggcagtggaagaaagcctgcgtaaagagctggtggatatgctaggtgatgatggtgtgttcttatatccctcacatcccacagtggcacctaagcatcatgtccctctaacacggcccttcaactttgcttacacaggtgtcttcagtgccctgggtttgcctgtgacccaatgcccactgggactgaatgccaaaggactccctttaggcatccaggttgtggctggaccctttaatgatcatctgaccctggctgtggcccagtacttggagaaaacttttgggggctgggtctgtccaggaaagttttaggaggaccttctgcaaggttaatgtgtgtgtgtgtttgtgttcgtgtggtggtgtttctattaattgggtgaaaccaagcaccagcagacaagcagagaaacaactggggaatttattgactcatttagttattctttctacttttatttccttctctaactgttggtcttactaaaatggtaatatttgcttcttgcttttatgttactggaaaattaggacatgtaaatggataagtgcaataaagtttcctaaatgctg

SEQ ID NO: 118836 - DNA, 1000 bp, Homo Sapiens
tttccctggaattttccaagttggcttcagctgaagagctgttttgtgaagcatcccaggcttgcccaggagagacatttgccactatgtcaccttatctgggcttgccctggggcactgagacagttgtttggcagccccagcccagccaggggctcatccttctcagctcttgtccctgggaggcctctgcttgtcacttcccagagattgcagaggtgtgtcctgcctaccatctgcctgtccagcttggtgggggtccgggtcaccatttcctccagtcctgggccccatccttgagggccttcccagccagccagcaggagaggcaagaactgggggaacacaggaacctaggggaggaggggagcgctgggcatcctcaggctggcggccaaggcctgcccctggaggcactagaggagggcatctgtctgtgggagcccagaggctgcagggaggaggaggagggaggtatctggtgtgagcgttgcccctgcgacatttgggaccacacaggtgggcttccttattccctgacaaagcctctgtttccagctcttccgccctctctggatgagggaacagaagtggaggaaacaaaagaagcagcagcacgcacagtcctgtcgctgggtgcggagacagcctggcaaagtcccactcagccatggcctgatgcaggccccaggccctcctttcttgggtgtcaaatgactgtgtcctggacatctgatgcaccacctgccctgcctgttgcaaacgtgatgctcccggatggagtggagaaactaggagactgggacaagcaaaaggctgcaaacaacccagaagcccatcctcagaagactggagaaatgattgaggaatgcatgggcaccgtggccctgtgctccatcacaaacacctctcagaaacaacgtgggatgaaaaagcaagacagttcatacagtatgatgccatttttataaagctcaaaaccaaaaaaaaaaaaaaaaaa

SEQ ID NO: 118837 - DNA, 1000 bp, Homo Sapiens
gcacagactatttcttgagcagtggtgacaagattcgattcttctttgagaaaggcgtttttgatgagaaaggaaatttcctggtccctccggagaaatccatcaacaaaattggccacgctctgcacgcccacgaccccgtcttcaagagcatcacacactccttcaaggtgcagaccttggccagaagtctgggcctccagatgcccgtggtggtgcagagcatgtacatctttaagtctcccctcatcaggacgcctccttcctgtacacggagcccctgggccgggtgctgggcgtgtggatcgcagtggaggatgccacgctggagaacggctgtctctggttcatccctggctcccacaccagtggtgtgtcaaggaggatggtccgggcccctgttggctcagcgcctggtaccagcttccttgggtcagagccagcccgggataacagcctctttgtgcccaccccagtgcagagaggggccctggtcctcatccatggagaagtggtacacaagagcaagcagaacctctctgaccgctcgcgccaggcctacactttccacctcatggaggcctctggcaccacctggagcccggagaactggctccagccaacagctgaactgccctttccccaactgtacacctaaaggctctcgcagggcaggagccctcgcccctcccgggtgaagctgtgggctgtaaacaccagtgccttgctcagcctcctggttgcaacagggaggtcttgtctcccctcctgggctttcctcctgccctgtgggcagcagcctaggctgggtcaggggcttccctaagatcttcacctctctgcctccctactgccccaacatagccttgaggaggcttctcagccaccaaagggttctggccccttctcactctcctctcctctcagatggaactctggttattatggtgttagttatcgaataaaaacgacttcagaatgcaaaaaaaaaaaaaaaaaa

SEQ ID NO: 118838 - DNA, 1000 bp, Homo Sapiens
ccgactgtgacaaggccttctcgtacccgtccaagctggccacgcaccgcttagcacacggaggcgcccgaccccacccatgcccagactgccccaaggccttctcctacccctccaagctggcagcccaccgcctcacgcacagcggcgcccgcccgcacccgtgcccacactgcccgaagtcctttggccaccgctccaagctggcggctcacctctggacccacgcacccacccgcccctacccgtgccccgactgccccaagtccttctgctacccttccaagctggcggcccaccgccacacgcaccacgccaccgacgcccgcccctatccttgcccgcattgccccaaggctttctcatttccctccaagctggccgcccatcgcctatgtcacgaccccccaaccgcgcccggcagccaggcgactgcctggcaccgatgctccagctgcggccaggcctttggccagagacgcttactgctccttcatcaacgcagccaccaccaggtggagcacaagggggagagagactgagccctcccttggctcactgtccccttctgccgccagccctagccagtaagaggtgggatttctaagaccgactgtatgagctcgcctcttccagatagctggcagagggcagggcaagggattggccatttatactgggctcgagctcagaagcccgaggaactctttgctcccctgctttggggagatctcaaaccatggacgtggagctgtggtttgacagcgctggctctgcttctccccacacacttacatggcaaaggtaaaaagtctgctactatcgtgggttgatgaggattgtgggcaaacaggctctcttgttaaaagtttaaactggtgtctccactttggccatatgacggtatctaagaaattgaaaatacatacatgcttgtctcaactcttccacttgtaggaatttattctataaactcatgaatgtgaaaaaaaaaaaaaaa

SEQ ID NO: 118839 - DNA, 1000 bp, Homo Sapiens
aggcgcccgccggccactgcaaccagccccgtgccgcagagaacatggccaatcagggtcgacgagaagctgggagagacaccacttgtccctgaacaagacaattcagtaacatctattcctgagattcctcgatggggatcacagagcacgatgtctacccttcaaatgtcccttcaagccgagtcaaaggccactatcaccccatcagggagcgtgatttccaagtttaattctacgacttcctctgccactcctcaggctttcgactcctcctctgccgtggtcttcatatttgtgagcacagcagtagtagtgttggtgatcttgaccatgacagtactggggcttgtcaagctctgctttcacgaaagcccctcttcccagccaaggaaggagtctatgggcccgccgggcctggagagtgatcctgagcccgctgctttgggctccagttctgcacattgcacaaacaatggggtgaaagtcggggactgtgatctgcgggacagagcagagggtgccttgctggcggagtcccctcttggctctagtgatgcatagggaaacaggggacatgggcactcctgtgaacagtttttcacttttgatgaaacggggaaccaagaggaacttacttgtgtaactgacaatttctgcagaaatcccccttcctctaaattccctttactccactgaggagctaaatcagaactgcacactccttccctgatgatagaggaagtggaagtgcctttaggatggtgatactgggggaccgggtagtgctggggagagatattttcttatgtttattcggagaatttggagaagtgattgaacttttcaagacattggaaacaaatagaacacaatataatttacattaaaaaataatttctaccaaaatggaaaggaaatgttctatgttgttcaggctaggagtatattggttcgaaatcccagggaaaaaaataaaaataaaaaattaaaggattgt

SEQ ID NO: 118840 - DNA, 1000 bp, Homo Sapiens
tcgcgctgggaaaactggacaggccttcacactgctcctgaaagtgcaggagaggagattcctccgaatgctaactgaagctggggcacctgagttgcagcggcacgagctctccagcaagctgctgcagccgctggttcctcggtacgaggaggccctgtccaagctggaggagtctgtcaaggaagagcgcaagcagagggcggcctaggctggggctcagagggccggagggactgaacgctcaccaccctgaccctccttccagagcagtgctgatcactggatcctgtatgtgaggaaaggaatcccccagtggacacagccttcctccccaagcacgtggtctctgcgccaggcagccagggcgtcagagctcaagcacctgccccgactggagacttcagggcttgtcactttcagagtgtggaggtcaggatggctgcgggcaatgaagccttagtaaaacggtgaaaagtactcccagacggacgcgggcacccgtcatgcttttgctgagagttgggggcattaaccttgagctaatgttaaaaatcaagctcttggccaggcatggtggctcatgcctgtaattccagcactttgggaggccaaggcgggtggatcacctgaggtcacgagttcgagaccagcctgaccaacatggagaaaccctgtctctactaaaaatacaaaattagccaggcgtggtggtgcatgcctgtaatccagctacttgggaggctgaggcaggaaaatggcttgaacccgggaggtggaggttgcagtgagctgagattgcgccactgcactccagcctgggcaacaagagcaaaactccgtctcaaaaaaaaaaattgccgggcgcggtggcaaatgcctgtaatcccagcactttgggaggccgaggcaggtggatcacaaggtcaggagatagagaccatcattgctaacatggtgaaaccccgtctctactaaaaatgcaaaaaaaaaaaaaaaa

SEQ ID NO: 118841 - DNA, 1000 bp, Homo Sapiens
ctgtccctgaggaaacagacatgagtcttggaggttctgaatgattttattgctaattatcacagtgacatagactagaacagaaattagaagcatagtaagattgccaaaatcagagaatcttgcaaagttctgtaattctaagtgttgttctagatttcctctagagaaggttattagaatctccattgcgtttctctttctccttctctttcccttgaggttaggaaacaggttaaaactcagagaactccaataataatggtttaaaaacatcaggggcttcctgtatctcctgtcaggaagccgaggaataagcaggctggggctggtgggcgtcaacatcccagttttgttctatctttctgtcccacctgcactgggatgtggcttctacactcgaatttgcttcttggtttcaagacagtggtgttctttccatagctgagcagattattttgagaggtgggtgatatgtgagagagaaatctggaaccttcttctgggtagatacaggataagatagatacagggtaaaatgttgagcactttgtacatgctttgagagcataatctttgtcatctgtttttttcccctagacaatatcaggttaccgtcaacattaatccatttaaaaggacatggactgttgccattaatacttttggattccatataacccttaacacaataacttctagaaaatgtgtgtgccgtagacacaaagaagggaacaatagacaccagggtatacttgagggtggagggtggcaggagggtgaagattgaaaagctgcctattgcgtgttatgctggtttcctgggtgacaaaattacctgtacaccacacccctgtgacacacaacttactcatgtaacaaacctgtgcatgtaccccttgaacctgaaataaaaattggaaagtaaaaaaaagtgtgtaaatatatttagttgaatcaaataataaagatgaatcattatgaattcacaaaaaaaaaa

SEQ ID NO: 118842 - DNA, 1000 bp, Homo Sapiens
acctggaatatataaccagtgttgtggatttaacagaaatgtacagcaaggagatttacaactgggggagggtgaagtgaagacaatgacttactgtacatgaaaacacatttttcttagggaaggatacaaaagcatgtgagactggttccatggcctcttcagatctctaacttcaccatattaccacagacatactaaccagcagaaatgccttaccctcatgttcttaattcttagctcattctccttgtgttactaagtttttatggcttttgtgcattatctagatactgtatcatgacaaagactgagtacgttgtgcatttggtggtttcagaaatgtgttatcacccagaagaaaatagtggtgtgatttggggatatttttttcttttcttttcttttctttttttttttttttgacaaggggcagtggtggttttctgttctttctggctatgcatttgaaaattttgatgttttaaggatgcttgtacataatgcgtgcataccacttttgttcttggtttgtaaattaacttttataaactttaccttttttatacataaacaagaccacgtttctaaaggctacctttgtattctctcctgtacctcttgagccttgaactttgacctctgcagcaataaagcagcgtttctatgacacatgcaaggtcattttttttaagaaaaaggatgcacagagttgttacatttttaagtgctgcatttaaaagatacagttactcagaattctctagtttgattaaattcttgcaaagtatccctactgtaatttgtgatacaatgctgtgccctaaagtgtatttttttactaatagacaatttattatggcacatcagcacgatttctgtttagataatacaccactacattctgttaatcattaggtgtgactgaatttcttttgccgttattaaaaatctcaaatttctaaatctccaaaataaaactttttaaaataaaaaaaaa

SEQ ID NO: 118843 - DNA, 825 bp, Homo Sapiens
ctctctctttcgattcttccatactcaagagtacgcacggtctgattttctctttggattcttccaaaatcagagtcagactactccctgtgccatgaacggagatgacacctttgcaaggagacccacggttggtgctcaaataccagagaagatacaaaaggccttcgatgatattgccaaatacttctctaaggaagagtgggaaaagatgaaagtctcggagaaaatcgtctatgtgtatatgaagagaaagtatgaggccatgactaaactaggtttcaaggccatcctcccatctttcatgcgtaataaacgggtcacagacttccaggggaatgattttgataatgaccctaaccgtgggaatcaggttcaacgtcctcagatgactttcggcaggctccagggaatcttcccgaagatcatgcccaagaagccagcagaggaaggaaatgtttcgaaggaagtgccagaagcatctggcccacaaaacgatgggaaacagctgtgccccccgggaaaaccaactacctctgagaagattaacatgatatctggtgtccttcagagatactgcaggttcggttccagaccactgcaataaagaaatagggaggcccaagaaaaggaagagagacgcggaacagctcatcggtggagcagtcagaagacacaaaacattaatcgattaagtttgtcatattctatgggtgcagttcctggtacccccaaaacaattacacacaacagggtgattatagtcaataataacttaattgtacttaaaaaaactaaaaaaaaaaaaaaaaaaaaaaaaaaaaa

SEQ ID NO: 118844 - DNA, 1000 bp, Homo Sapiens
agtacccacgtcgcggctggggcgggttttatcagagagcgggcctgccctccaatgtggggctgtggggccaccagggtggtatcctggccagtctgccaccaccctctctctacctgtcacctgagctgcgctgcatgcccaagcgtgtagaggccaggtctgagctgaggctgcagtcctatgggcgccacggttcccaatcccgactgtggggcaatgtggaggctgagcagtgggcctcgtctccaccacctccccaccggctgccccctaacccctcttgggtccccgtggggcacagcccttacccctcagtgggctggatgctgtatgactcctgggatcagcggcgtcgtggcacggagggctttgagcgcccccctgcctcggtgtcccggaacgcccggcctgaggcccagggctgccgggagcaccactccccacagtcccaccagcagagcctgcttggtcacgcctatggccagtcccaccgcagtccccacccatccacggaacccttgggctacagctcccaggacccccgtgaggtgcggcgtcgggcagctgactgggctgaggctctgcccgcctggcgtcctctgactacctctgcctccctcacggtgttggactaggcctcccatcaacggaccccagctccaagctcagtgctggtcccccattcctcccagccctggcccaaagtccaggctgcggaccctgcccctcccccgaccatgtttgtcccactcagccggaatccagggggcaatgccaactaccaggtgtacgacagcctggagctgaagcggcaggtgcagaagagcagagccaggtccagctcactgccaccggcttccacctccaccttgaggccctctctgcacaggagccagaccgagaaactcaactgaccagcaggcggatgtggggtgtggggcagggcatggagggagaggaataaagagaaacagagtccaggaaaaaaaaaaaaaaa

SEQ ID NO: 118845 - DNA, 1000 bp, Homo Sapiens
ttagctcatgtatttgaggaagagcagctgtctttttatatgttttttgacaaatcatattgtattcttttgtacaaaaaagaactacttgtattctagaagaaatatgaaatgcttaatttataagcgggctggagattttttccaatattgttttctttgaaaatgaaaggggatcatctattttagttttggggtctgggaactttttgaaaatttaatttgtggaccaatgttttgtgaaagctaaagagggcaggggttaaaatagggcttgaatttctcattctgtatagaccagcaaacttccctgtgcaaggcaagtttacatcacaaatccaagaatgtttgcatcctaaatgctagtttgcttcagcccctagttaacctcaggacttggtttgcatataaaaggtagacagctgatatgttttcatgaataaatattgtcagccagaaaaggttggtgtcaggtaatgcatatttttttaagctttgttttatatttatttttcatttagtttttattgggaatggttttcaaagaactctcagttctgcctaggtgtttttgggggagccctgttttccatagtgtaattccatttaagaggttgtctaaaagtctttttaattaatagaaagattttaatatccaagagtagtcaaattaaggatataaactttccacaccttcctgtcgtgacagataaaagcacagaaaggacaacccttgaaatcatgtaacgttggtcatttcaatattttgtacctgttttaaattctgttagtgtatttacttcattgtaaatatttttgagggtacctttgtattttgcttttgaccttggttctgtgatttggatgtcaacaacttccctaaaaagcaccagtgtgttaggttctaatgtcatgacccaatttgtgttattcatctttaatcctgttttcagtctctatgtgtacagcagtatttttaataaagaattacagagataaa

SEQ ID NO: 118846 - DNA, 1000 bp, Homo Sapiens
ttggaccctaagcagtataagatgtgcttaggatccaaggcaagtactttcgcctcaaccatgcaactggctgaactctggcttgaaaaacatttaggtgtcaggtacaatcgaactctctcctgacagtccaggcaacacattttgccttttttaaggggagtttacctcattgttggttgttgttatttttattgtattattgttattttattattattattgttataattttattttgttgtcctggtcttaaactactcttggttgtcttcctaagggtgtttgttgacctcaagcaagaagagtctgcagttcactgatgtttcagatttctactgaagtcaatatgttattacttttatataactttatttgagattgagttaaatcatagcaatcaaatgacttttgaaacgcattcatcacaagagacagcttagaagaatgttctcttggggcttaaagatgcaatatcgacttttatttggtttctcaaattcaatgtgatacaaatatttactggtgaaaggtaccacaaaagtgctttatgcttcctatggggaagggactctgtaacataaacttgagttttgtaatttatacaaggacttaaatatataaacaataattttcttcatctttagaatttttaaagtaaatgaatacctatgattgtatgtttattttttaaaaaaagttttaaaaattgaggagttttgttccacaagcaaccggtactggctaccctggtcttatgacaattatgagctcctcacaactgtctgctataaatgcgaatgaactttattttctcaaggaaatatgatttaattaaatattcatgtacattttagaagctttatgaaacaatgtccttcatttgctggcaagaagataaaatatgacagaacctgtttatttaaaataaaacacaggtatagcagtattctttttcaaaaacactgaaaaaaaaaaaaaaaaaaaaaaaaaaaaaaaa

SEQ ID NO: 118847 - DNA, 1000 bp, Homo Sapiens
gagagagccttacagctggttccagacagcaaactgctgaaggaaaatcttgccaaattggatcgcctagaaaaacgattacaagaagttcgagaaaaggatcaaacatagcaccaccgtctgacccaacctcataggataatgtggtgcctctgaaaggggagtgatggaagccttgctttcacatcagcaggggcacaactaatgagattttctctcattccgagttcagggtgacacattttgggacatctgctggtagcccagtgctgaaggacttgcttttccatgaagaagacgaaaacagcaaacaagggcaagaaggtctgagagggaaggagaatgacatttacacattttacagatttttgtttggtttaactccagatttctcttgatatatctctgtgcttttgagacctggagatctaattctgtttagacattttttgtcccagaaatacagaagcttgaaatgctatgaaggcagagcttctattctttatgggatgaaatatttcaaaagaggataaatcctctgtggtaagccatttggaaaatcctaccaagaattggcttatttaattttccagaaccaggaatgagtatctaatagcttttgtagaaccttccagaatatgtggggaaaaagggctattgctaagtgagctttatctaatatcctcctaagagttttactagtgcttttttgaggaattacagggaagctcctggaattgtacatggatatctttatccctagggggaaatcaaggagctgggcacccctaattctttatggaagtgtttaaaactattttaattttattacaagtattactagagtggtggttctactctaagatttcaaaagtgcatttaaaatcatacatgttcccgcctgcaaatatattgttattttggtggagaaaaaaatagtatattctacataaaaaattaaagatattaactaagaaaaaaaaaaaaaaaaaaaaaaaaa

SEQ ID NO: 118848 - DNA, 1000 bp, Homo Sapiens
gccacttctatctgggctgttgctaatattgaggaggcttgccccacccaacaagccatagtggagagaactgaataaacaggaaaatgccagagcttgtgaaccctgtttctcttgaagaactgactagtgagatggcctggggaagctgtgaaagaaccaaaagagatcacaatactcaaaagagagagagagagaaaaaagagagatcttgatccacagaaatacatgaaatgtctggtctgtccaccccatcaacaagtcttgaaacaagcaacagatggatagtctgtccaaatggacataagacagacagcagtttccctggtggtcagggaggggttttggtgatacccaagttattgggatgtcatcttcctggaagcagagctggggagggagagccatcaccttgataatgggatgaatggaaggaggcttaggactttccactcctggctgagagaggaagagctgcaacggaattaggaagaccaagacacagatcacccggggcttacttagcctacagatgtcctacgggaacgtgggctggcccagcatagggctagcaaatttgagttggatgattgtttttgctcaaggcaaccagaggaaacttgcatacagagacagatatactgggagaaatgactttgaaaacctggctctaaggtgggatcactaagggatggggcagtctctgcccaaacataaagagaactctggggagcctgagccacaaaaatgttcctttattttatgtaaaccctcaagggttatagactgccatgctagacaagcttgtccatgtaatattcccatgtttttaccctgcccctgccttgattagactcctagcacctggctagtttctaacatgttttgtgcagcacagtttttaataaatgcttgttacattcaaaaaaaaaaaaaaaaaaaaaaaaaaaaaaaaaaaaaaaaaaaaaaaaaaaaaaaaaaaaaaaaaaaaaaaaaaaaa

SEQ ID NO: 118849 - DNA, 1000 bp, Homo Sapiens
ccgtggcccacccaggctggtgaccccagctcaggcaagggttcaagctctggaggccagccctgagctttggtgggtgactacctctctgtgcttcagtttcccatggctggaatacttacctcagggacatatgcagatccaaagacctaaacaatgtaaagtgctttttctcttttaaaagtatagcattatcttgtatatattttacccaatcaatatgttgtttatagtttcattgctttaaactttataaaaagagcttcaggccaggcgtggtggctcacgcctgtaatcccagcactttgggaggctgaggcggtcagatcaccagaggtcaggagttggagaccagcctgcccaacatgatgaaaccctgtatcaactaaaagtacaaaaaaaattagctgggtgtggtggcaggtgcctgtagtctcagctactcaggaggcttaggcaggagaattgcttgaacccaggaagcggaggttgcagtgagccgagattgtgccactacactccagcctgggtgacaaagcgagactccatctcaaaaaaaaaaaaaaaaaaagtttgagacttccttctttttgcactcaacgttgttactaagattcatctacatttttttagttcattcctttttccatattgcatataattccatgggtgactataccctgatttcttcatcagattgccttatttactgctgcgaacattcttgcacacatgccctggtacgtgtgtgtgtttttaggggccgagacaggtggatcacctgaggtcaggagttcgaggtcagcccggcctacatggtgaaaccccgtctctactaaaaatacaaaatttagccaggcatggtggcatgcacttgtactcccagctacttgggaggctgagacaggagaattgcttgaacccgggaggcagaggttgcagtgagctgagatcgagccactgcactccagcctgggtgatgaagacgagactctgtctc

SEQ ID NO: 118850 - DNA, 1000 bp, Homo Sapiens
tgccaccaaggcctcctaggaaaaattgtaggaatttatgggtataatattgtggtctgaatggcgtgaatttttatcccgaggagggggcagttgtgacaacctccagtgcatgtgggaacagcatgaattgggtcccttattcccagggggtgccccatattccccaatactgtaaagcagatgctgtttagcacctgccaaggagccatatgccctgaagttcagcattaggcaggtatctcttaactgtaagacataccaggcccagctgggaccataatttgtacagaaacactggatgtgattaatagggagtaggcgagattatagcaaaccagcagaaatggaactctgctaaatgtgcatccgtgaatgctcccttgaatgtggctgtgcaggattcagggtttgcagaaattctcaggacctcagacctctgtcctatgactaatgttactggcagagcaaataatctaaaggttttggttttgtggattaccatctccgtgctgtgcatctgaaggccagtgctgtgctggcaggaaaatagggactgagaaaaagcagatcctatactatagggactgtagtatctatgacgtagccagccattctttgctcccaaggcaagaagaaagagatgacagagtcaatatagggttgccaaatcggattttctaaaatgagtaggaagttggatttttatgtgcaacagtttcttttaatgctttgttgatatgtgattgtcatgcaataattattcatatttggtaagttttgtacatatattatgtacactcagggaaccaataccataatcatgataatgaacgtatccatcacctgcaaagctacctcatgcccctttacattccctccttgccttccctaggaaaccgttgatttacattttttactttagatttgtttgccttttctagaattaacacaattggaatcataaagtatttatactctcaaaaaaaaaaaaaaaaaa

SEQ ID NO: 118851 - DNA, 1000 bp, Homo Sapiens
agctgaaaaggggctctccctgggaggatctgacggaggggcatccattctggacttgcactcaggggccctgtctgtcgggaagcactttgtgaacctgtacagatacttcggggataaaatacagaacatcttctcagaggaggacttccggttataccgggaggtgcggcagaaggtccagctcaccattgctgaggcttttggcatcagcgcatcctcgctgcatctgaccaagcccaccttcttctcccgcataaacagcacggaagcgcggacggcgcacgacgagtactggcatgcgcacgtggacaaggtgacctacggctccttcgactacacctcgctgctgtacctctccaactacctggaggacttcggcggagggcggttcatgttcatggaggagggtgccaacaagacggtggagcggagagctggatgtttttgtttccggatgatgtcttgtgggttccaagaagttaatggaccgagagccagtgaagctgctggtgcgaaggctggagtcaggtgtcctccggggactcaccacccgcccgagaggggagagacacatgcgattctggaagctgagagcattgcttattgttgattccttggttgccgtgctgagtcctgctttaaggaagcaggtcgcgtctccttcttcacctcggggtccgagaacctacaccgcgtggagaaggtccactggggcacccgttacgccattaccatcgccttcagctgcaaccccgaccatggcatcgaggacccagcgttcccgtagccagcagccgggccaaggtaacttcaggagggcccgtgtggaggcagccgcgccagtcgtgcacccacccccacgtccacccgctcctgttgcacagagtgccttaggaattctctgattttgatttgctgacgtgttaatcttttcatctgtgagtaaatgaagggaaccagcaaaaaaaaaaaaaaaaaaaaaaaaaaaaaaaaaaaa

SEQ ID NO: 118852 - DNA, 1000 bp, Homo Sapiens
gtgcacaggaaatgactggtaatggaaaaaatgttgtaataaaataatctaatcaaagaatattattaaatttaacatagtctatgtccaaaaggcttagttgcttcttatgcagatagatgtgtgaaatctaagcagtaatgtactttctccctttgtaaagacttggggagtaaggacattaccaactaaattgcttcttcgaaactgaagtgagtcccggtttgtttcattttaatgggagggtaataaagatgaaagaccaacattttaactgatggatcccttaagctacagaatagaaatttattgtgttttgagggaatatactaaatgcagctatgtaaaaataaaattcaaacgcccaggattaaaataaaatataatctgaaaacctcatgttctctctttccccaaactaagaaagtgcactgcatgctgttttcacttattcttagaaaacaagcatgaaagattcctcccattcagataatgccaaaaatatgtttaaacttttttttattcttttgaaaaatgatttgtaaattgagggtcatagttcagcatcagtttcatcttctgggattattgttcaagaccagcctctaatgggaggtgaaacggtacgatggtctcaacacctttcttctgaactgtaatacatatcacaaaaagtacatccataattcagggcaattgtcagtctttttagagaaggggccagggtggaacaatcccagtgagtaaattatttctcagcgtggacttctctgcatgtcgggcttagggtcaccagccgggcagggtggaaggagcttgcctctttgagaaaccaaggagtcccagtgatctgttaccatttggttatgacttctaaagagccaaatgctattccttcaagcctgttttgcaggcagaaaataccagcagtgtcatttaggggttcctttgatgatgactactgctgttaactgacctcagcattaaaaaaaaaaaaaaa

SEQ ID NO: 118853 - DNA, 1000 bp, Homo Sapiens
tctactgctttagcatttgtgtcttcaaatttctctcctttggttatataccttgcgtattccgcacattgataaagtttctttcttacagaagttctgatattgaattaaggaatgggtcactacttaagactttatcatttcagctacacataaaaggtttctctcccctatggattttgctaatggttgagtgatacctaaaggccttgttgcattttttacacttggggtttctcttcggtttgaattctctcatggttaccaaaactctgttaaaggacttttcacagtcgttaaatgtgtatggctctttcccaatatgaatttttttgatgttaactaggcttttagacttagttaaagacctgtgtgctctgctgcatttatagggttttgggctgctgagaataattgatgctgattaaggtgcaaatcatgactaaagacttttctttcttcttttgcatatagtagagtgaggtgagggtcgtggctaaaaccccacaataactttacattcctagctttacagtcttgctgtgaattctctggtgttcattaaagtgtgagctgtgttaaaaggcattcttagattcattttaaccacatttttaaaaactcacagttggttaacatgatggtttcagattgcttgcctcttttctctttctaccttacagggctccttttctagcttaaataagggtactccatctgccacagaatccaggattctatagttttttagtttcacttccctatgttctttttttttttttaatttttaacaatgagatgataccatgttacagcggtattacattaagatacatttaatatagccacaattaaagtatgtattatgtatttatgctggtgttctttcatgttatttcttctagtgaaaatttccaagtaaactgttattgagcatatacatttttaaaaaaataaaaccatacacccctaaaaaaaaaaaaaaaaaaaaaaaaaaaaa

SEQ ID NO: 118854 - DNA, 1000 bp, Homo Sapiens
ttcggtgagagagcaccccaggggcacgcaggccgtcctgtcctcgagatcaccgcgtcacgacttttggggagactcacccccaccaacaccgtccagagaggcctgagggagggattccatgctgccttctccggactctgcgtcgggtttcctcaccctgttcggccctttgtgactcttggcatccggagactttcccctcgacccagtggagccgtcaggccggagcctcagagccttgacacccaagcactgccacggaagtctccccctttgccaagcctcggggactggtttctaagacaaccgtgggaaccactgtgacgggagaaaccgcttgtgcttcgcgcatgcgcattggctgggccgactctttctcccctcctggcagtcaggctgcgtcccctttaaagaacgccaccgctgagaactgaccctcacatctcccttcctgaatttctttagggaaagcaacaaccatccctgtaagccatgggttttcatgcggaggaaggagagggctagttgtctgagagggtaactgcttaaggctgcagactaggaaatgggattccaggtttaagatagctcctttctggacctcagtccttcacctagtcacctagtcacagggtggattgcctctaaggatacttaggggaaaaggaaccaaatttgggatggttctccttgctttaagccttgataggagacggggaggccaacccttctctgcagaccgtgatcctcactagacagaggagctccaaacctgcccatctcatcccatgcaccgacggtgcctggcctggctccaaactcccgaaaggaactattttacaggtgccaaaaaggggacagtgttgataataataataaaatgaaacaatctgattggggcattgctggatcagaaaatgtgtgacctttttaaagttaaattgttaaaaaattttaactattaaacattttaaatattaaaaaaaaaaaaaaaaaa

SEQ ID NO: 118855 - DNA, 1000 bp, Homo Sapiens
cagatatggaccatcagtgactcatgctggatgaccccatgctccgtcatttgacaggggctcaggatattcactctgtggtccagagtcaactgttcccataacccctagtcatcgtttgtgtgtataagttgggggaattaagtttcaagaaaggcaagagctcaaggtcaatgacacccctggcctgactcccatgcaagtagctggctgtactgccaaggtacctaggttggagtccagcctaatcaagtcaaatggagaaacaggcccagagaggaaggtggcttaccaagatcacataccagagtctggagctgagctacctggggtgggggccaagtcacaggttggccagaaaaccctggtaagtaatgagggctgagtttgcacagtggtctggaatggactgggtgccacggtggacttagctctgaggagtacccccagcccaagagatgaacatctggggactaatatcatagacccatctggaggctcccatgggctaggagccagtgtgaggctgtaacttatactaaaggttgtgttgcctgctgagctgtgccctattgtgtggtcgggggatgaggatatggcagggaagctttcaccagccacacaagggtcctttctccaatccgttcccttctgccacctgccttctcactagctgtctcaggagtagtctcatatcagggatcctctctccaggccccaggtcatcccccactgtaaagccagttggcttctgtgcctgactctgtgctgagcacagagaaaagtcaggtgcagtcccagtccttgagatttcccagtttaggtgatggccagtcatgtgctggtaaatgttaagccatttaactggagctccgatttaactgggaaccccttctttgtagaactgcccatttccatggtgcaaaaactcttatggccaaattcaaactataaacatgatgtcaacttccttgtaaaaaaaaaaaaaaaaaaaaaaaaa

SEQ ID NO: 118856 - DNA, 1000 bp, Homo Sapiens
ttggccagatcatacttgaaggccttggaaatggagtctgctgattagccaaaaagcccactttaggatgtatatacaaagacgatatctttatggtcgtatatcaatagccagctagacgagttttctaatcccttctttgtgaattatgaaaaccacgtgttatatcctgttgctagtctgagtcatttggaattgtgggtaaattattatgtacgatggaatccacggatgagacctcagatgcccattcaccagaatctcaaggagctgctggccgtcagggcggagctgcagaagcgtgtggagggcctacagcgggaggtggccacgcgcgccgtctcatcctcatctgagcggggctcctcgccctcccactccgccacctccgtccacacctcggtctgatgggcgagaaatatgtaatcccctggctgactaggactgttaaacatagtgtggactggatgatgccttcgacaaaccagagaagccaagttggggggagctggtgcctggagtgggccctgtgcacctcacctggcggaggctggggggggctctgtcagcaggaccctagaggagactctcattcgattttaaagaagcacaacgggtcattttcctttgtatgttcctagcgcagaactgtttctaaaacaacttgaagtatagttttgttatctaagcaatttttgttttaagtaagtaagtgtactagaatgcgaagccgttatggttcaggtttttaaaaactggtacagtattgtatttgtctcatctgttgcactgtatttcaatcatctgtaattaaaatgatcatatgtttgctccctggtcttttttaagtaagtaagtaagtatcttagtagatttttcctttgaggaaaatcggtaataaaataacatggattgaatgtttactgtgcgtcaagcacagttaatatatgatgatgtaaagtaactaactttatgtgatttaattcattcagtaaattgt

SEQ ID NO: 118857 - DNA, 1000 bp, Homo Sapiens
aaaatttaaacaagatgaagaaactccaagggtttgagtaaatacaaagactgaagaaatttcacagcagtttattaatgtatataaacttataaatatttctccagcaaatttgaggaagcatgatatatttgaattaacaccaagggtgatatttcttttagagatgttagttaatctgttttgtgtcttacgtgaaatttcactgtagactgttttaaattgccaagactgcacaaaattacagtgctaatgtatatggttgcagttcacataaagacaaaagcatctgttatgaaatgagtagtaatattgggtggttgatttgttcttagcagacttggcttcattttggtcttgagataaaatggccagcataaatgctgtttatattcacgttttcctaggtgtgtgtgtgcaggccacagcagcatgcccttggtgtagtcagtgccgaaaggggtctgttccttcttgagcctgcctgcagggatggtctccttttaaagcaggttgtgtgcagcattcagtacactgaaggcataaaccttccactcttgaacaaagcagctgctttttaaaagcgagaaaaaggaaaacggggcacaggccattcgacgccttctccaaggggtctgatttgctgagacaccagcttcaccttcttaacaaggcacctaattacaacaagcatgcacattttggtgcattcaagaatggaaaatcagaatagcagcattgattcttctggtgcagctcagtggaagatgatgacaaccagaagacatgagctaagggtaagggactgttctgaagaacctttccatttagtgatcaagatatggaagctgatttctgaaaatgctcagtgtgtactctaattatttatggtaccatttgaattgtaacttgcattttagcagtgcatgtttctaattgacttactgggaaactgaataaaatatgcctcttattatcaaaaaaaaaaaaaaaaaaaaaa

SEQ ID NO: 118858 - DNA, 1000 bp, Homo Sapiens
agaaatctaaagatgttataaactttactgccgagaaactttcagtagatgaagtctcacagttggtgatttctccgctctgtggtgcaatatccctatttgtagggactacaagaaataactttgaagggaaaaaagtcattagcttagaatatgaagcatatctacccatggcggaaaatgaagtcagaaagatttgtagtgacattaggcagaaatggccagtcaaacacatagcagtgttccatagacttggcttggttccagtgtcagaagcaagcataatcattgctgtgtcctcagcccacagagctgcatctcttgaagctgtgagctatgccattgatactttaaaagccaaggtgcccatatggaaaaaggaaatatacgaagagtcatcaacttggaaaggaaacaaagagtgcttttgggcatccaacagttaatcacttatgtttttagagcatgcaatcttaactttgttaaactattattattgatcacattttgatttttttctctccacatcaggatagtttactgaagcacaatctcttatactagtgggacaaaagggagaaaaaggaagcaagataaatgggtatgtaggatgaagggttatttaaaatggaactaaagatagaaggaggactgtaggaagaaatggaataatttaaatgtgaggaaagatatctgtggtagacatgtccttccatgactaatttctaattgtaactcaacacacattgaggtatgggccctcctcagtgactttaactagctcagaaacgtactcccccaccaaccccacctcaccgccccccatcccggttctgggagagcattgttattaaggatgcatgacaggaatgttggcagaactggaaagtattaaaaaagcattatcagacagtcttgatattatacattttcagaaatatattaaaaataataaactaaaacccatgatttcaaaagtttaaaaaaaaaaaaaaaaaaa

SEQ ID NO: 118859 - DNA, 1000 bp, Homo Sapiens
ttatttttacatccatttatttctagcttgttctccagcacttcagtgtttgaaagtttcatcctaaaatatatactacaggaaagctgcagttcattttcatgcatggatcattacatttttcacttgtaaatgtaggtttttatgaaaattaaacattcccctatttttctttaaattttatacaaagcactttaatgatagatgcaaccttatttttcagttcctatttttttaaagaccacacatttactaatgttaatatgaaggtaataaatagcttactgatattttatggatgcagacaatccatgcacaaccacttcttatgatactagtttatttccttaaatattgctacaaaaggaagatgcgggtgtaagccctgatttttttttctcccaagaaaaatcttaaaggaccactttagataatatttgattcctactgtaaaatttagaaaatgatgaattcttgtccatttttgtaatcaagattttaggaaaaacagaagtacatctatctttatgaaattttgggcaggtttttgtgtatcaatattttgtacttttagggaatattttattttttagttatttgtgtcaaattataattataaaaggtacagcagaaaatataccatgtttttatataggttcacacctgtacttaggagggaccctgtccatctatatactttttgtataaaattttaaaatgttaaagatccacaaggtcttaataaaatgattctatagctagaaaaacatttaccttcccagtgctttgcactaaaatatactgtgaaaggaaactagaaagactgtaactattgctggaaatgttctatattgaatgtacatgctcttgttggaaaaatgtactatatgtgatggaaataaaccagaatcgaagttatttcagctaaatgtgcttcagcaaaggtgcattggttgaaacttaaatgttttattatcaaaaaaaaaaaaaaaaaaaaaaa

SEQ ID NO: 118860 - DNA, 1000 bp, Homo Sapiens
gtgtgcagcgctgaagcacccaggctgcagcatacgggagctgtggttgatgggctgtttccttacttccgattcctgtaaggacattgctgctgttcttatttgcaatgggaaactgaagaccctgaaacttgggcataatgaaataggagacactggtgtcagacagttatgtgcagctttgcagcatcctcactgtaaattagagtgtctcgggctgcaaacgtgtccgatcacccgtgcctgctgcgacgacatcgccgcagcactcatcgcctgcaaaacactgaggagcctgaacctcgactggattgccttggatgctgatgcagtggtggtgctgtgtgaggcattgagccacccggactgtgccctgcagatgctggggctgcacaaatctggctttgatgaagaaactcagaagatcctgatgtctgtggaagaaaaaattccccatctgaccatttcacatggaccttggattgacgaggaatacaagatcaggggtgtgctcctctgatggggaacaccctgaagtagtcgtctcacaaaggctttccttggccacagtgggaccttcacctggcacctctatcctgtaattgcacatcatggcagcagggctgtgatttcagaggtactccctaagtgttctagcaatatgattatggagtgtgattcagtgtacatgctgattgtctttgcctcggtcctatatccccttgtctttagaaatcccatcctgccttgtgatatttagaagcacaagtacgttaaacaagtgctaaacgctctggaaagcatggctttattttcttaatggatgtcttggtgtgtaggagcatgcatttgtaggcaccacaatccggatacttctgacacagaagtgatgctagaatgtgtctatagattgtattgctagcatccagactttctagtttgtccagatttcgatttgatcaattttcttgtccaataaaaaagcatttccaaatctcta

SEQ ID NO: 118861 - DNA, 1000 bp, Homo Sapiens
aggctatggtggtttccaggctcctctgtcagtggaccccgcaacgtgtcccattgtccctggacaggaaatgattatagaaatatccaagggacgttcagggcttggtctcagcattgtgggaggaaaagacacacccttggttaatggggttgacctgaggaactccagccacgaagaagccatcacagccctgaggcagaccccccagaaggtgcggctggtggtgtatagagatgaggcacactaccgggatgaggagaacttggagattttccctgtggatctgcagaagaaagctggccggggcctgggcctgagcatcgttgggaaacggtaaagacgtgctgtgggagttgggatctgcctttttcatccagagctctgatgcctgtgaacactgaaagagaaagcctaatgtaaagtagtgatgggatttctaaaaataagatatttatgaaaatttgacaacatgggtcatatttctgagcaaggtcttaccagaaaaattgtcatatcaagatagaactccaagtccaatcaatccagactgatatatttctgtacagagtaagaacaactagcaaggttctttcacttggaattactaagatcggagttttgcagaggttgattaaagcaaccatacccaagaaatagctagcatcaagaatgagatttatccaatgttgggtcaagaacattgcttcgacatggaaattaacatggaacattgcttttcgtgatactgttaatttcatactatgttgaaactagttgagtagacatagttaagagataaacataattcttcacgatagtagttttctattaagaaaaatgtcctgctgggcacagtggcatgtacctgttgtctcagctatgtgggaagatcacttgaggccaggagttcaaggctatagtgtgctatgatcatgcctgtgaatagccactgcacttgagcctcttgggaaacataacaagaccccatctgtaaatt

SEQ ID NO: 118862 - DNA, 1000 bp, Homo Sapiens
taaagcaaagaagaggttcatttttgtaaataacactggtttcaaatagtgatgttagacttaacctaatttataaacaagagattaatatctccatgcatagttttagacaaaaaaagatgtttcaataaaattactgtcttgtaatataaatgttgtccacttcccttttccacaggcctagaacagttaaagggaacataatttgtttaggctcccacataaatgtgaatctggccaacaactttggttcatcctttagtgaattagaggatttggctaccctgagtatatttatattcatttcttctgttctccttctgttattatacttaatcttctaaactaaactaatgtgaacagtagggaagcaagggcccaaatgcataagtttctttgcactgttgcacttacttaatacaaataaatgttttttaaagcttttgtagtatgtttttatgagttaacatcctaatgtggtaggtattaggtaatgtgctgtcatgagaaaaattgagacttccaagaaaactggacaccaggtgagggttggtttggagacggaataggtgtagctgcctttccttgaaaaacagtgtgtagagatggctgagtgcaatggctcacacttgtaatcccaacactttggaaggctgaggcgggaggatcagtatatcggtacgtctgagcccaagagttcaagatcagcctgggcagtatagcaagaccccatctccattttttttttaatgattttttaattaaaaaaaagaacaacaggatagagctgttggggtggcacagtggcccaaagagcagcttcagagataattccttggttctatgatccctgtttaactccaaattacagtcggacttggatacatcatttgtaacattgtaggaaagaaaaaagtcttggttgtgaaaaacgatttgcatttgggtaaaataaagtgaccatgcttttgttctgtaaaaaaaaaaaaaaaaaaaaaaa

SEQ ID NO: 118863 - DNA, 1000 bp, Homo Sapiens
ctgacagaggaattccagaatgtaaggatcatcaaacctgaagccagcaggaaagagtcatcagaagtgtacttcttggccacacagtaccacggaaggaagggcactgtgaagcagtgaggatttcttgtgccattttcataatggtcattagctccttttaagctagaaacgtagcctgagctcctgaagagttcctgggagatttgagctgattttggagatggagcaggacaagtggggagtctctctctctctttctctctctctctttttaaccaaaaagagatgacaaaactaagttcaggggccatggaaaatgaaaaagtccgctatattgtgatttgggaagagaaagttatcaagagaaagaggtgaggatggaaggatggagaaaaacagactgtgggaaggatcagaaggaatccgccgaggcagggatgggtgtgcccatgtgtgccttgacgggacttcatcttatagactgttaaactgtcacacacaaacaggctttccacccctgctctgagagcaccacgcacagatttccagttcttagtgtggctgtttaaagtagaaaatctgggggctgggtgaggccactcatgcctgtaaacccagggctttagaaggctgaggctgggggattgcttgaagtcaggagttcaagaccaacctgggcaacatagcaacaccccccatgtctacaaaaatgaaaaaccaaaaagcaaaccaaaagaaaaatctgaaatttccatctggggattaacttctgtctttctggtgaacaatatagcaattcacgcattcttcaagcagcaaaagttcccggaacaattagggaagacgtatggtctgaatttatccaggcagtgggtctgctttggtttttgctggaaatttatatcagtgtctgggctcccaagaacataaatgtaattgccaaagcaaaaaaaaaaaaaaaaaaaaaaaaaaaaaaaaaaaaaaaaaaaaaaaaaaa

SEQ ID NO: 118864 - DNA, 1000 bp, Homo Sapiens
ttttgatccatatgttaagtgatagaagattttggtgcaacagtagtaggatatatttctcctagaacatcccttattggcttacatgattttattgccttttaatagatattttgtcattttggccaaacaaaagacactgagtagttacacttaagttaaaaatgaggggaaaatcattattttaggtgtggagccatttttattataaaactttctcaataaaaaaacattgaatcatttcaatttttgcagtccctgtattagtatatgaatacatacttgccatttgaattaataacatgaaaagagtatactgtgtttttaaatccgtgtttctttgaatttaaagggtgtacaggtctttctgtagggaaaattattccatgtaaacatttcaactctgtatgaaaatgttaaatattgtaagaaagttatcctctcattttttcactgctatgatatatttattataaaatagggaatgaatgaatgaatatggattgctgttaactagaaacacttctgtatgtcagtcagcatttaatgaccacctactgtgtgcacagcactactggtaaaattttgaagacattgttaacattaaaaaatattttaaagttgtctacaaatctgagccttgtaatgatgtatatttaagttatttttgtttttatagattaaagtaagattatactatccagttttattactaaaaaagactggttttaattttaccaatgtgtgaactataaaagctttttgcctacagattttacattttaaagttatctatggctgttttaaattgtctagcaatttatatggttgtggttaactcatttaagaaacaattatctttctatattaagccattttcaaatagcaagacagtgcttgtctttttttgttattacactaactgcaattcagtaagctgcatgacaaaatatgtattatgtaaataaactgggtttactaaataaaaaaaaaaaaaaaa

SEQ ID NO: 118865 - DNA, 588 bp, Homo Sapiens
gacagccagtccagggccatgaagaccaagaaccggcccccacggcgccgggccccggtgcaggacacagaggccacccccggggaggggacgcccgacgggtccctgccgaacccggggccagagccggccaagggtctgcggagccggccggcccgggccgcagcaagggctccgggcgagggcaggcgcaggcggccaggaccctccgggcccggtggccgtcgtgacagcagcatccagcggcggctggagagcaacgagagggagcggcagcggatgcacaagctaaataacgccttccaggccctgcgtgaagtcatcccccacgtgcgcgcggacaagaagctctccaagatcgagacgctcacgctggccaagaactacatcaaatcgctgacggccaccatcctgaccatgtccagcagccgcctcccaggcctggaggggccgggccccaagctctaccagcactaccagcagcagcagcaggtggctgggggtgcgttgggggccacggaggcccagccccagggccacctgcagaggtactccacgcagatccacagcttccgagagggcacctag

SEQ ID NO: 118866 - DNA, 1000 bp, Homo Sapiens
aggttcgtgccctgctgcggccagcctgactagaccccaccctgaggtcctgcatttctcagtcggtgtgtaatcacgttccagggcccaaagcccagctctttgttcagttgacttactgtttcttaccttaaaaagtaattgtagatggaaatcagttgtgtttggcaggagaatcaataaaaatctttgattcagacagcttatggggtattttaagcattcttagactagttgaacatctcactttgccccagttacaaaaatagtagaacaagcaacataaaacaatgaaggaaaacctcacttgaaggcccaggtcaacatctaagcctgttgagacttagataatcgagtctacctcttcagtaggtttgtgtggatggcctggagggcaggtgccctctgctccccagtgctacctctctcttccctagggccttttgtggattgacagtagtcccctccgtaggagctcacagtctagattagaagtgttttaatttctacacacccatagtgcacacttgtatattgaaaagatagggaagagagaaacatttatggaatcagtcgttggcaccttcaatacttcatgatttttgtcgagtttacttcatgaggaggtcagcccattggctcccatctgaaccactttgcctctgaaacttaattacatccagaaagaaggacacttgtatgctagtctatggtcagttgaggaatatgactgtttttatatgcacatgtaacccaaatgtccaatataaattggcttattttttaaaataattttaaaagttgggaaaagtgttattatttggcatgcttaaatattgaataagtattcttcatcagcatttaataaatgtataggcagatgtaaggtaatttctgtgtattttgagataatgtcaaaatcatgaatatttcaaaataaactggggagttataaaaatacaactagagatataaaaaaaaaaaaaaaaaaaaaaaaaaa

SEQ ID NO: 118867 - DNA, 1000 bp, Homo Sapiens
ttatatttgctagacttacaaattattttaaatgcatttatcttttttgacactattcagtggaatgtgtaagctagctaattcttgttttctgatttaaagcacttttaaatcttatcctgccccctaaaaacaaaaggttttgatcacaaggggaaatttaagattgttaaccctgtttttcagaagggctactgttaattgcacataaacatgaaatgtgttttcccctgtgtactaacacattctaggcaaaattcaaacttatagtggtaaagaaacaggttgttcacttgctgaggtgcaaaaattcttaagacttctgtttgaaattgctcaatgactaggaaaagatgtagtagtttactaaaattgtttttctaccatatcaaattaaacaattcatgcctttatagggtcaggcctacaatgaataggtatggtggtttcacagaattttaaaatagagttaaagggaagtgatgtacatttcgggggcattagggtagggagatgaatcaaaaaatacccctagtaatgctttatattttaatactgcaaaagctttacaaatggaaaccatgcaattacctgccttagttcttttgtcataaaaacaatcacttggttggttgtattgtagctattacttatacagcaacatttcttcaattagcagtctagacattttataaacagaaatcttggaccaattgataatatttctgactgtattaatattttagtgctataaaatactatgtgaatctcttaaaaatctgacattttacagtctgtattagacatactgtttttataatgttttacttctgccttaagatttaggttttttaaatgtatttttgccctgaattaagtgttaatttgatggaaactctgcttttaaaatcatcatttactgggttctaataaattaaaaattaaacttgaaaaaaaaaaaaaaaaaaaaaaaaaaaaaaaaaaaaaaaaaaaaaaaaaa

SEQ ID NO: 118868 - DNA, 1000 bp, Homo Sapiens
tggaaaagaaaagagaagttgcctcaggttacgaggtcttggcacaattatatgtgtaattgtgttatccaggattttcaagcttcggtacttcaagtgtcagattcaacttatgatgaacaagtggctgcacagatgccaactgttcattatgaattccccaatggctacaattgtgattttggtgcagagcggctaaagattccagaaggattatttgacccttccaatgtaaaggggttatcaggaaacacaatgttaggagtcagtcatgttgtcaccacaagtgttgggatgtgtgatattgatatcagaccaggtctctatggcagtgtaatagtggcaggaggaaacacactaatacagagttttactgacaggttgaatagagagctgtctcagaaaactcctccaagtatgcggttgaaattgattgcaaataatacaacagtggaacggaggtttagctcatggattggcggctccattctagcctctttgggtacctttcaacagatgtggatttccaagcaagaatatgaagaaggagggaagcagtgtgtagaaagaaaatgcccttgagaaagagttcccaagcttctaccttccttttgtcaccttacgtttcatagctttagtatactcaggaaaagaatgaccatcttttgtagaatgtttatacatttttgcatatttcaatttccacttaaattttttaaagctttaactggctctataaattaagtttgtgctttccttgaaatgcacttattcttattacaagcattttataattttgtataaatgtctattttctctaaatattttgctttcagtaaaatgctttccaactctgtttagtgtattaattaccagtggattggtagaactgctttttattgactagtaaaagttactgcctatgctttttaccttaggcttacagaattaaataaaaattagccattccagaaatataaaaaaaaaaaaaaaaaaaaaa

SEQ ID NO: 118869 - DNA, 1000 bp, Homo Sapiens
tggtggaaaagccacagaaccttcttcctgcccttcttgagagttccccctctttctgggtcaagagctggagtggtggctccatcctctctgggccacttcggtctaggaactcatctttgcaggaaccaggagtcctgagcacactgaacacacctcagagggaggatccttgttgtggattttgcacctggctttggggcaggggtgaagtgaccaggcttagcttgtggagtttatgggccaccagggtttggggaaatcaccatcccgcggatgctgtgacctcccttctacggagatgcaggcagtgccacgagggaggaggggacctgcaaagctagaatctagggcactgtttcctccccatccttctctttgtagagaatagagacgtttgtcttgtctgtcttcaacctacttttccttttctcttttttgtttctcatcctctctgtgccacctctccacccaggaggccatgtagcatagtggaaaaagtccctgagggcggttaggagttctgggtgaccatcctggctcagctcctaactcaccatgtgacatcaggctatccccattccccctcttgggcctcagtttcccgacttgcaaaataagcagaaagaaccagatgctctccagggtctttttctactttgctatctcatgggtcttcattttctcttattttgttttctctggatcttttccatctgagggtacaggaagtaccaggacctgtttcagtttttgaatcctgcaagcacattccaagactggcctgaaactgcatgagcaacatcactcgaaataattttttttttcaaaagcaccttaacaaccaattgcgatgctgtcctgttcctttttactcacacccttctctcctttctcgtccccatgctcccccacctcagtgctccgtgctgtatgcgtgtgctctctgttcttgtatactcaatataagtgaaataaatgtgtttgatgctgaaccata

SEQ ID NO: 118870 - DNA, 1000 bp, Homo Sapiens; identical to SEQ ID NO: 117833

SEQ ID NO: 118871 - DNA, 1000 bp, Homo Sapiens
ctcaactgcccctttcctctccctcagaatttgtgtttgctgcctctatcttgttttttgttttttcttctggggggggtctagaacagtgcctggcacatagtaggcgctcaataaatacttgtttgttgaatgtctcctctctctttccactctgggaaacctaggtttctgccattctgggtgaccctgtatttctttctggtgcccattccatttgtccagttaatacttcctcttaaaaatctccaagaagctgggtctccagatcccatttagaaccaaccaggtgctgaaaacacatgtagataatggccatcatcctaagcccaaagtagaaaatggtagaaggtagtgggtagaagtcactatataaggaaggggatgggattttccattctaaaagttttggagagggaaatccaggctattaaagtcactaaatttctaagtatgtccatttcccatctcagcttcaagggaggtgtcagcagtattatctccactttcaatctccctccaagctctactctggaggagtctgtcccactctgtcaagtggaatccttccctttccaactctacctccctcactcagctcctttcccctgatcagagaaagggatcaagggggttgggaggggggaaagagaccagccttggtccctaagcctccagaaacgtcttcttaatccccaccttttcttactcccaaaaaagaatgaacacccctgactctggagtggtgtatactgccacatcagtgtttgagtcagtccccagaggagaggggaaccctcctccatcttttttgcaacatctcatttcttccttttgctgttgcttcccccctcacacacttggttttgttctatcctacatttgagatttctattttatgttgaacttgctgctttttttcatattgaaaagatgacatcgccccaagagccaaaaataaatgggaattgaaaaaaaaaaaaaaaaaaaaaaaaaaaaa

SEQ ID NO: 118872 - DNA, 1000 bp, Homo Sapiens
ctctcccatccagccctgcttggagcccaccagccacagaagccaccatgggtggtaaacggcaggtggcaggcagtgtcgggggcaacacaggtgtgaggggcaagtttgagcgggcagaggaggaggccaggaaggaggagaccgaagccagggaggaggaggaggaagaggaggaggagatggtccctgcccctcagcatgtcactgagctagagctgggcatgtacgccctgctgggagtcttctgcgtggccatcttcatcttcttggtcaatggtgtggtcttcgtcctgcgctatcagcgcaaagaacctcccgacagtgccactgaccccacctccccccagccccacaactgggtctggctgggcactgaccaggaggaactgagccgccagctggaccggcagtcccctggcccgcccaagggggaggggagctgcccctgtgagagtgggggaggaggggaggcccctaccctggcccctggccctcctgggggcaccaccagctcctcaagcaccctggcccgaaaggaggctggggggcggcggaagcgagtagagtttgtgacatttgcgccagcccctccagcccagtcacctgaggagcctgtaggggcccctgctgtgcagtccatccttgtggcaggcgaggaggacatccgctgggtgtgtgaggacatggggctgaaggaccctgaggagcttcgcaactacatggagaggatccggggcagctcctgaccctccacagccacctggtcagccaccagctggggcaacgagggtggaggtcccactgagcctctcgcctgcccccgccactcgtctggtgcttgttgatccaagtcccctgcctggtcccccacaaggactcccatccaggccccctctgccctgccccttgtcatggaccatggtcgtgaggaagggctcatgccccttatttatgggaaccatttcattctaacagaataaaccgagaaggaaaccag

SEQ ID NO: 118873 - DNA, 1000 bp, Homo Sapiens
ttcctgcagtcccgtccatttccagagatctcagcaagccacttaccttcccagatggatgcacattgcctgcagggatcaccgtggttcttagtatttggggtcttcaccacaaccctgctgtctggaaaaacccaaaggtctttgaccccttgaggttctctcaggagaattctgatcagagacacccctatgcctacttaccattctcagctggatcaaggaactgcattgggcaggagtttgccatgattgagttaaaggtaaccattgccttgattctgctccacttcagagtgactccagaccccaccaggcctcttactttccccaaccattttatcctcaagcccaagaatgggatgtatttgcacctgaagaaactctctgaatgttagatctcagggtacaatgattaaacgtactttgtttttcgaagttaaatttacagctaatgatccaagcagatagaaagggatcaatgtatggtgggaggattggaggttggtgggataggggtctctgtgaagagatccaaaatcatttctaggtacacagtgtgtcagctagatctgtttctatataactttgggagattttcagatcttttctgttaaactttcactactattaatgctgtatacaccaatagactttcatatattttctgttgtttttaaaatagttttcagaattatgcaagtaataagtgcatgtatgctcactgtcaaaaattcccaacactagaaaatcatgtagaataaaaattttaaatctcacttcacttagccgacattccatgccctgaccaatcctactgcttttcctaaaaacagaataatttggtgtgcattctttcagactttttcctatacattttatatgtagaaatgtagcaatgtatttgtatagatgtgatcattcctatattgttattgatttttttcacttaataaaaattcaccttattccttaaaaaaaaaaaaaaaaaaaaaaaaaa

SEQ ID NO: 118874 - DNA, 1000 bp, Homo Sapiens
cctgccttggcagaggaggaggagtcaagggagcagggcagctctaccaggcaaggtgtttccccagcataggcgcagacagttgggacgaaacttcagagcccaggcagtccctgaatgaccaggccagtgttgtcactgagtggtcccctgctggttgggagtgaagagaatccaggctggcagagctggagccagttggggagcacggttctgggagctctgcaaaatcagtagcaagtgctggaaaaggcacatgccgaagatactcaagagctcccaagatttgcttgaggctagcccagtgaaaaaaaccagagactcatgtttccaggggtcagtctgtcaggcaggaaggacccaggatttgaacccagcttcagtgtgcaggctctgaggctgcccaggacgggaaagtccaaggaaggggcctggtggtgctccacttgcagttctttaaagaatgctgctttttattctcctaaccctttcaagtgggtgcagacttctcgttagcagctggaagacattcctcccacacttttcccttcctggcccaagagagcatccagaaggcagtaggacctggtttttcaggtactgggagccgggggctcactgcttgcactgtgcttagggtagggatggtaaatatcctccctgcatggctttatcctccctctcatcccaaagcaggtatcttctggttgtcacagagtttcattgagtccagctgcagccacgtggccatctggagctggtgctataggtgaccatctggtacattgaggggacctgtttgcctcctccactctataagcagtcatcttgggagaccgggaggagaaggtggtgggctagtcctgtgtcctcctccacttcccatgcctctatgttacccatctgtgtctcctgtgcagaaggagaggaaggggcattaagagatgaagggtgattatgtattacttatccatttctgaataaacatttgttattccta

SEQ ID NO: 118875 - DNA, 1000 bp, Homo Sapiens
actgacttctgtccactctggagagcagtgaggaattaatcttgcttttgcttgtcctttggcctttcacttctgccttctgttgagaattatcaccatgacacctgccataccgtatagagagccaaggtacagccgttagagactatctaattgagcccctacattttgtagttaaggaaaactgaggcctaaatgtgaccaaaccaacattgtaatccagtcccttcttggaacctaaattgaactgccaagtactgcgcatgcaagagaccctttattggccttacagtgggccattcatttctataggcaaagaaagctctagacagattggaataggaaatggatatttgccttttagctacacccctttgtctgtcttcctcattttgttcctttttttttccctaaaggggagtcaagttccctgggttgttcccctcataaggtattagggacttgtgtcacatctctctggagttttctattttaaagaggaatctgaaagcaataagctctttggtcttcttaagatggctacacctcaatttaagatggggtattctttcactagttgaggagtagaagaggatgaccagctagactcccatggaattggaactcctattccttgcttagacattacaggttatgctttgagatctctttggggtgaaggattgaaattaaaccctgagccaccgtgtccttgtagagcacagagtagagaacaactggcagctttgaaaaaacaccatgaagaagaaatcgttcatcataagaaggagattgagcgtctgcagaaagaaattgagcgccataagcagaagatcaaaatgctaaaacatgatgattaagtgcacaccgtgtgccatagaatggcacatgtcattgcccacttctgtgtagacatggttctggtttaactaatatttgtctgtgtgctactaacagattataataaattgtcatcagtgaaaaaaaaaaaaaaaaaaaa

SEQ ID NO: 118876 - DNA, 1000 bp, Homo Sapiens
tcaggaagtgggtgtgtgggaaacctgaagatggcgtgcacaggacacagcgtgggcggcctgggcagaagggcggctggctgtcctggagctgctgctggagcctgccctcagagtgtccctttccagtgctgtggcattctgtggcagcttccccaggtgtggtgacggggggggggcggggcctccacctgtgacagccaggcttgagggtggacggcgtgcctctcccaggagccttccccatgtccttgccttgctgagaattgccctcccatgccgctgaggtgttaggtggtttagggccaaaaggggaaaaccacttgagtcttgtggtgtgtggtgggcagacaccacagggtggcatcacctggtggcatttccagaacctcagccccgattccagcacccaccaccgcctgaccctgtgtaacctgctgtcccgggtcccagagtgcactctgccccgctgctctgctgcctgtcctgggaaagtatctttgccccactaggaaatgtaaacaggagggcttggggagcgtgggcacttttctcatgagcagctactgcggcgttggcaggactcgctgctgctgctgctgcttgtgtaggtcggggagccagagatccccgaggacgcgcgccggacagtcggcactgaccggcccacctggtagcagaggacacccccagccccccaagcattgaagacatagtgtatttcctcgtatcctttctcccttgggtgtagttggggtggggaagcagggaaggctggtgcgatctccattccttgggctccacgtccgagttcatggtgcgccgctgtgctgggagctgcagtggtaatgtgtgggacaccttgaccaaaggggagctttgtctcgtgtgttttgaaaaaggcttaatgaagagaatgttgttcattcttagtagtatagtttgcaattcttaatggcaaataataagtttcagtagaaaacaaaaaaaaaaaaaaaaa

SEQ ID NO: 118877 - DNA, 1000 bp, Homo Sapiens
gcgggctaatgcagagcagatgggcctgcagggcagtgctcagcatttcaacatctttcccctggacctttggacccaaggtgattgcatgctggtgtctttagctaaaaataaagttaatgtctttggggcaatcataaatatggctgcttcagtttctggggtgattggtggtctaaagttttcaagaacctactatgtgaaaggcatttgacattcactaatttaatcccaactactactccattttgaaggaaaaaaatgaaggctctgaaagtgtaaatcgcttactgaagggcacacggccaggatgacagcggagccaggatcaccccaggtctgtctcattgcatatgtcatggctctgcaaactggggcaataggtgagcagggagaagagtcatggccaaataaaattgagacataccgatacacacacacacacacacacacacacacacacacatttacacggtaacagctcttattaaggtacaactaatgtacaataaggtgtacatatttaaaggatactatttgataagttttgacatatgtctgtacctgggaaaccatcactacaatcatgatggtgagcatatctaatactctcaaaagtttcctcttgccttttgtaattccattctgccatcccacctgtccctcccactcctgatcccaggcaaccactgatctgctttctgtcactatagattagtttacattttctagaattttatataaatgaaataatacaatatgtactatttttctgtgtttctttcactcagcaaaattattttgagattcattcatgttattgcttgtttattcctttatattgttgagtagttattccattgtatgaatatgccacaatttgtttatctgttcatctacatatggacatctataatgtttgcacttttgggctattaaaaatcaagttgatgtgaatgtttgtaaaaaaaaaaaaaaaaaaaaaaaaaaaaaaaaaaaa

SEQ ID NO: 118878 - DNA, 1000 bp, Homo Sapiens
gaatgccttagttattatgaagacaggtacccaaaacatgagggtatcttttcaactttaaatagagactattcttttagagactactcaagtgaatgcacacacagtgaaaattctcggagttgtgagaacatgaatggaacttcttactataacagtcatagccacagtggggaagaaaacttaaaccctgtgcctcagctggacattggaaccttggagaatgtcttcacagccccgacatcaactccttctagcatccagcaagtcaatgtcaccgacagtgatgaggaggaagaagaaaaagtgctcagggatttataattttaaaacaaatatgcacagaaaataaacatttcttaaaatatattctgggtcagttggtatgagaaaaaaaaaagcctagaattctttgttgaaagttttcagtcgtgatttgaggagttaaaaccaaatgcaatttatgtcttcataaaattttgattagtgaaactagagtctggatgtttcattgtaggaatatttaagttattaagtagtttaattttaatggctgaaatttgcatcaacatgtattattattactttatcctggaacatgcaaaatactgaagcctcacagttgtatgtgaggggaaaggggaaataaatctagcatagtgtgatttttattttatctcaggatacattttttaaatgattttttgtttgctttttatgtaatacttatggatgttgtcaatttttgatgtaacattttgaaagtattttgacaactcctagtgaacttggacttggttgctaaatttaacttacactaataaccaattataagttccaaatgtgttttaatggcacctgggtgattcttcagctaaatttagtcatttctgtttctaaatatttttatcattttaaaatattttttttccatttggcatacatcgttctttgttgtaattaaataaacatagataaaattgttaaaaaaaaaaaaaaa

SEQ ID NO: 118879 - DNA, 1000 bp, Homo Sapiens
ccgtctgcctgctcctcaggaccactcagtccacctgttcctctgccacctgcctggcttcaccctccaaggcctccccatggccacagtgggcccacaccacaccctgccccttagcccttgcgagggttggtctcgaggcagaggtcatgttcccagccaagagtatgagaacatccagtcgagcagaggagattcatggcctgtgctcggtgagccttaccttctgtgtgctactgacgtacccatcaggacagtgagctctgctgccagtcaaggcctgcatatgcagaatgacgatgcctgccttggtgctgcttccccgagtgctgcctcctggtcaaggagaagtgcagagagtaaggtgtccttatgttggaaactcaagtggaaggaagatttggtttggttttattctcagagccattaaacactagttcagtatgtgagatatagattctaaaaacctcaggtggctctgccttatgtctgttcctccttcatttctctcaagggaaatggctaaggtggcattgtctcatggctctcgtttttggggtcatggggagggtagcaccaggcatagccacttttgccctgagggactcctgtgtacttcacatcactgagcactcatttagaagtgagggagacagaagtctaggcccagggatggctccagttggggatccagcaggagaccctctgcacatgaggctggtttaccaacatctactccctcaggatgagcgtgagccagaagcagctgtgtatttaaggaaacaagcgttcctggaattaatttataaatttaataaatcccaatataatcccagctagtgctttttccttattataatttgataaggtgattataaaagatacatggaaggaagtggaaccagatgcagaagaggaaatgatggaaggacttacggtatcagataccaatatttaaaagtttgtataataataaagagtatgattgtggttcaaggat

SEQ ID NO: 118880 - DNA, 1000 bp, Homo Sapiens
gccccttcctctgctgctcttggagccttggaagcctctcctgtccttggctcttccctccatgcctgtcagctgcctggggagtgagcctccctggtccttcctgcctgaaacagcctgaagggaattctccctaggtctcctgggagtcgagtcccaattcttggcttaagcctgttttagtcagagaccacccaacttagcgtgcaggtcaccggagtgggtggagggtcagaggtcgggtcttcggccctgagaagtagaaatgcaggggccgtgctgtccctggtcccccagggaacagcaaggaaggaactgagccttctccagcagggcttcctgtcccgatgcttctgtctccactcggctttcccaaaaggcggcacccagctcctcaatcgaagcatctgcctcccacccctcggccccctcaagcccaccatctgcttctgagtgtcgcactaggattttcattgcttattttaaagtgtcttaatcctttgttcccagacacacaacccctctagctctcggaggggcgatcatgagaaaccttccagggaaactgagcacaggatgaactgttagttgtttttaaaagtctatataaatatttcaacagatcgtaaagaaaaaatttatctctttggtccttgcaagagaagtcaaaggaacttttgtttctcctcaagagcctggacatctctgtctgtcatgactggaaagggcccgttgtgctgaaatcctatcatcatggtggatttgatcttcagtggccaaacacgaattaaagtataattcttaactgaactggtgggtgggttgagctttagggaagtatatggcggtcattcctggtgcgcctatcggtgtgacatgagccctggagtgtgtcgtccctctcagccctgctcctcctgcctcctggggtccagtgactgggaccctactctagaactgtgtaccatccaattcgccatcataaaggaatcttcctgca

SEQ ID NO: 118881 - DNA, 868 bp, Homo Sapiens
ccaggacaggcattcaggcagagcaagctccaggtttcaccacaatgcccatccctgcctccccactccacccacctctgccttccttactgctgtatctgctgcttgaactggcaggagtcacacatgtgttccatgtgcaacaaacggagatgtcacagactgtatcaactggggagtcaatcatcttgagttgcagcgtacccgataccttaccaaatggacctgtcttgtggttcaagggaacagggccaaaccggaaattaatctacaatttcaaacaaggtaactttcccagagtaaaagagattggagacaccaccaagcctggcaacacagacttttccacccgcatccgtgaaatctctcttgctgatgctggcacctattactgcgtgaagttcataaaaggaagagctatcaaggagtaccaatcaggtcggggcactcaggtgtttgttactgagcagaatccaagacctcccaagaacagacctgcaggcagagcaggctccagggcccaccatgatgcccatacctgcctctcggccctgcctgagagaaacagcacaaactatttcgtccaaccctgctgctgcctccggctgctgggactcacaggcttgctgtcaaaataatccaaacagggaaggaacgtacaagtaaataacaaaagcccccatactcttctgactccctggagacagctactttttaggagtttcatttgccttcttcaagagagctttcttccactgacataaaatgccagcttgatcgtacaataaatctgtctatttacctgggtccaaaaaaaaaaaaaaaaaaaaaaaaaaaaaaaaaaaaaaaaaaaaaaaaaaaaaaaaaa

SEQ ID NO: 118882 - DNA, 918 bp, Homo Sapiens
gctcctcttcctctcaggctccgagacggccccagcagcgtccaccgctgtccatatgccaggagggtggctgggcaggctgctgtctaggccaggctaacccctgcggtgggcgtgggtgtcaccagggccgatggcgcttgtgcagaaacccacgtctctgagctgccagcagccaagctgtcctgatgacattcccgggtgggcgcacaagcctgcactgtccgtatagaatcggcccaggctgtgcagcaggggaacccggagcccggaccccgccacggaggccaggctgccgtgcaccatcctgggtgtcctcgtggtgctccgggcgcaggtggcagcagccatggaggagctggaccggcagaagattggaggattctggagggaagtcggtgtggcctccgatcaaagcctggtgctgacggccccgaagcgggtggagggcttgttcctcaccttgagcgggagtaacctgaccgtgaaggttgcatataacagctcaggaagctgtgagatagagaagatcgtgggctcagaaatagacagtacgggaaaattcgcttttcctggccacagagagatccacgtgctggacaccgactacgagggctacgccatcctgcgggtgtccctgatgtggcggggcaggaactttcgcgtcctcaagtactttactcggagccttgaggacaaggaccggctggggttctggaagtttcgggagctgacagcagacactggtctctacctggcggcccggcctgggcggtgtgccgagctcctgaaggaggagctgatttaatggagttcctgcctcagaccacaaggttcggagcgcccgcccacccctgcccctcctgggcaccctgcccaccaggtcacctgcacctgctctgaataaactgtgaagtc

SEQ ID NO: 118883 - DNA, 1000 bp, Homo Sapiens
ctggtgcccattgtccccccacagggcaccatgtttgtcctggagatgagggacccagccctgggccgccgctgtggctgtgtgctggtggagtcagaatgtgtgtgcaagcgtgagaaactcctaggggacgtgctgtgcctggtgcaccaccacagggacccctcggcagtcttggggaagtgtagtagctccatcaaggcagctctctgcaccggcttccacctagacgtgtgcaagactgtgcagtggttccggaacatgatgggcaatgcctgggcccttgtggcccacaagtatgactttaaactcagtctcccaccgtctaccacctcctgcaagctccggctggactatcgctcaggccgctttctctcaatccacttggtcctgggggtgcaacgagaagacaccttggtctacctggtgagtcaggctcctgaccaggagcagctcaccagtgtggactggcctgagtcctttgtggcctgtgagcacctgttcctgaagctggtggggcgctttgcccccgagaacacctgtcacctcaagtgcctccagatcattttaagtctccggcagcatcagagcttaccccatggagcatcccgccccatcctcacttcttaccattttaaaacagctctcatgcacctcttgctacggctgcccctcacggactgggcccacaacatgctctctcagcggctccaggacattctctggttcttgggccgtggcctccagcaaaggtccctccatcatttcctcattggtaacaattttctgcccctgaccatcccaatccctaagacatttaggaatgctgagccggtcaatctcttccaacacctggtgctcaaccccaaggcacattcacaggcagtggaagagttccaaaaccttctgacccaggtgaaaactctgcctcatgccccactggctgcagcaccttgatgtaaagaccattaaaaaaaaaacagaggaaggtatttctaaa

SEQ ID NO: 118884 - DNA, 1000 bp, Homo Sapiens
tttggtacatatccataaattctccataaaagtaggaccaacttacattaccaccaatagtgtatgtgagccttatttttatgtatgataggactttttttagtccaaatgttcctatagattttctgggttttttttttttttttgtccttggaagaataaccttccttccaccaagtccaagaacctgagatttttaatcattaggttttagatttcctttagcagcagagactgacttgctgtatagagggaagtcaagtagtgactaactcactatatgtcaaacacatcattactcttctcttttcctactttacatgtaatggttgcgaggaccaactttcaaatgagctaacttgggtgagacgttcactaaagtaccaagcacaatacaaatgcatcttcgagttctttgggcctcactttccctatctgaataataaggatagtaatcccttgccttttctcaaaccagttcaactcagcaaacacttcctgagcacctgctacatgccaggcaaaatgtgaaatttgcatgctatgaggctaaatggtactgattctcaaaacaaggagctcatagtctaaaaccatttttctttcttttttttccccctaaacaacctcttaaaggggtaagaagttagggggttgtttattaagaacccctgaagagcaaccctttaccactctcttaaatttgaaaaattccaaaataatattaacacctcttgactagaaaaggaaaaaaaaggaacatgccgtatgaagagcctctccaataataaatgcaaagcagctgtcaaaatatagagtcaagtgatactttcataaagtgtttgcacaattagaaaatgttatcctttttctcgggagaaatgggacatttttattttctctgctaagtgaaatgcaactttttgaagaatcaacacgcttgacatttttacaatgtacataaagaactgaactattattaaaacaacttacacactcc

SEQ ID NO: 118885 - DNA, 1000 bp, Homo Sapiens
ggtcccctgtcccggcccacctcctcccaccccgggtctcctgtcctgggctacctcctcccaccccaggtcccctgtcccgggccatctcctccctctgggtcccctgtcctgggccacctcctcccctcacccatccctgctcacaaggagcttggactcatcccaggaggtgccctggacctcagcagcctgccctgggtggcagccccagcctgaccactcagacagccgcggcccccaaggcctgactcttcttgtgggagggcgaggtcagcttgagtccctcctcttcctggagggatgcccaccgtgcccttctgattcccgcctctggtcctttacatgtgcataaccacatgcacacacactcacgcatgagcaaacgtgtacagactggcacatgcctccacatgcgaacacccacttacacacacgccactcacactggcacacatgctgtctacccgtgcacaggcacacgtgctggtctgcacacacctgcacacacctgcacactcgctatgccaggcctcctgggtctgcagtgagtctgggggcccatggggacagggacaggtgaggggcttcctgaggacctggggctgttgggagccgctgtgggccacatcttctgccccttctcagcctccctcaccccagccccttcccctagacccactgctggtcccctttctccctcctgcttctcacctgaagccacctgcccctcctttgtgccctcccttgcttcctcctgggctctgtcccctgctccccctttgtcctccatcccgactccatctcccccaccaggctggtcaccccaggccagcgtctgttgaaggatgaagcagctcctgtccggcccagccctgcctcacagctgtgcgagctctgccctcctcagctctcaaacctgaataaatgcaccaagcccagaaaaaaaaaaaaaaaaaaaaaaaaaaaaaaaaaaaaaaaaaaaaaaaaaaaaaaaaaa

SEQ ID NO: 118886 - DNA, 1000 bp, Homo Sapiens
gccggcgcgccgcagcctggtgtcgcctgcagctacctgggccctcggccccagcgcacgccgtgttcagcgcagtctcgccctggctggtgcgcaggcccacgtcggcgccatgctccaggtacagagccacatgttgctccaggccgcgcgccgccgccacgtgcaggggcgtctcctggctctcgcctgctgccaggttcaccgtcgctcctgcttccagcagcaacttggcgcacctggggacaagagagcaaggtcctgaggaaaatcctgaaggcttgggaccccttcagcttgctgtgacactcccttgcctttccacccctctcagcttgaggtcctacctggtgtcctccatgagaatcatacaagccccgctacagacaacagaattggaaggtcctgagagctaccagaagcatcttcagttttcatatgaaaaacttaagcccaggagtgatttgtgcagccaaggacacacagcaagttagtggctgcaccagaaatagtactcactgcctcagacagtccctcccacagtctactctgtctccaccccaaggtctggttctgaatcattcagttgtcagttgtctccttttttttttttttttttggagacagggtctctctctgtggcccaggctgaagtgcagtggtgtgattacagctcatgtagcctggacctcccaagctcaagcaatcctcctgcctctgcctcccaagtagctgggaccacaggtgggcagcaccacacctggctaattttttaaatttttttttatagagacagggtcttaccatttgccccagctggtctcaaacccctgggctcaagcaagcctcctgccttggcctcccaaagtgctgggattacaggtgtgagccaccacacccggccttatctcctaacattttgatagcacaaaattttgaaaacccacttctgtgtacgttatgaagcatagaaaattaaacagtatgcaccaaaaaaaaa

SEQ ID NO: 118887 - DNA, 717 bp, Homo Sapiens
ccgggccgaagtccggtggatgaagggcggaagtagagtgtctaatcctgcagtcatggcgcaggaagaggaagatgttagagattacaatttgactgaagaacagaaggcgatcaaggccaagtatccgccagtcaataggaagtacgagtatttggatcatacagcagatgtccagttacacgcatggggagatactctggaggaagcatttgagcaatgtgcaatggccatgtttggttacatgacagatactgggacagtggagcccctccaaacagtagaagtagaaacccaaggagatgacttacagtctcttctgtttcactttttggatgaatggctttataagttcagtgctgatgaattcttcataccccgggaagtgaaagtacttagcattgatcaaagaaatttcaaattacgatcaattgggtggggagaagaattttcattgtccaagcaccctcagggaacagaagtcaaagcaataacatattcagcaatgcaggtctataatgaagagaacccggaagtttttgtgatcattgacatttaagacaccaaaaaataaaagactcctacgaagaactgtttttgttttcctcttccttttgagaagacactatgaattaaattctacagcttttttttgatatatggaaatttgtagaacagaaatattttagttaaagtgtgactttcagaaagggaaaa

SEQ ID NO: 118888 - DNA, 1000 bp, Homo Sapiens
ccagtgcccactggatcgtgctggcctctcccagatgtccccggggacctcctgcctctggctgacggtccaccctgtgaatcttatcagcccaggctgctgccaacagcgcccagcccacagcttctcccagcctgaaaccaacacattttctaataagttatttagacagaatagcactctgcatgactttaattcttgggacaaaacggtagtttgtaccctaagacacagtttctggcccagtgtgatgggggtgggtggccgggtgggtggagcgttttgctgttggaaacctggagggaaaccctgattggatgtcatttcctgccatggagcacgcctcccagccctggcctgcagggtgggcagggtggggggcaagggagtccgcagcctccgggaggaggggcagggcgctgccttgggctgggtgggaagaggggtggccgcctcggcttccgctggccatgctcctggtctctccttcctgaggtcacaggcaggggctgccctggacggggggcggggggggtggcctggaaggggagacagaggtggagggtggcacaggctgcacattcagcttagaagtggacctggctttggtggcaggagaagaataaacacttgcccagacccctttgtgtgggggaattggggaggggtcgtggcaggcagggtgggccacggaactgggtcccaggcatcaaggccacgtgcagggccatggagggatgcttctcacgaggcgcttcagaagcgagcgaagggacagagaagccctgcgtccaagggccttttgtcctgttagcaattgaggtgtgcagagcactgtacagaccccactcccctgtacattcctccctggaggtgcccggtccccgcttggggatgggagttttgtagactgtacagaaatcggcaccctattttcttgcagctcagattttgttaatctggaatatacagacagacgtaaagtgttttagcaaaatgg

SEQ ID NO: 118889 - DNA, 1000 bp, Homo Sapiens
tcggtgcctgaaagaattagaagaaatggaaagacatataaccctggaaaaagtctttgaggattcagacacacctgtgatagacattacattggatgtagagtctagagaactgacatttttattgagatgacacaaaagcagtataataaaaggtaatgaataataactggaaaattcaatgccacaggaatatagttggaagaaagaatgtactaattttataagctcccacttatagtagccgaggctctgacagttcagaatccattgactctctgacttaccttctcaagttaacttctcagaaaaaacatttgaaaacaaagaaggaaaggaattctaccatagcaagccaccaaaatgccagaggacaagaggtttatgatagagggcatttgctgcaaagacacacacaatcaaattctgatgtgaaagatacaaggccaaatgaaccagatgattatatggttgattatttcagaagacaattacctaatcaaggtttggatctgcaccacaacttaaaaagcaaaataaaagaatgcatatctttccaaagcaagaagactggcataaattggacagatgatgaaaaaagaagctacaaggataaaggaatagttcaaactcaagaaatattgcagtatttgctccccatcgtgcatagcactaaaaacatgcaaaccactcagataaaacagctattcaatccaagaaccaacttccaaatccaacatcagtaagtcaatacaattttatcactcttatctatttaacacatcttttttaaaaaagcagggcttattaatttattatcctacgaaaaaaaaatctgctcttgaaaatgatgtcagctccatcacatttggcaaagaacaaagacccaaagctgtcagaaaacactggataaatgaaggagtaagttatcaggccttatttaattgattatttgcatgaaactactcattaatttagatctattaataaagtaggcata

SEQ ID NO: 118890 - DNA, 1000 bp, Homo Sapiens
gcgagcgctgacagccatcatcacctaccatgacagggaaaacagaccaagaaatggtggcatctgtgtggccaatcatacctcaccgatcgatgtgatcatcttggccagcgatggctattatgccatggtgggtcaagtgcacgggggactcatgggtgtgattcagagagccatggtgaaggcctgcccacacgtctggtttgagcgctcggaagtgaaggatcgccacctggtggctaagagactgactgaacatgtgcaagataaaagcaagctgcctatcctcatcttcccagaaggaacctgcatcaataatacatcggtgatgatgttcaaaaagggaagttttgaaattggagccacagtttaccctgttgctatcaagtatgaccctcaatttggcgatgccttctggaacagcagcaaatacgggatggtgacgtacctgctgcgaatgatgaccagctgggccattgtctgcagcgtgtggtacctgcctcccatgactagagaggcagatgaagatgctgtccagtttgcgaatagggtgaaatctgccattgccaggcagggaggacttgtggacctgctgtgggatgggggcctgaagagggagaaggtgaaggacacgttcaaggaggagcagcagaagctgtacagcaagatgatcgtggggaaccacaaggacaggagccgctcctgagcctgcctccagctggctggggccaccgtgcggggtgccaacgggctcagagctggagttgccgccgccgcccccactgctgtgtcctttccagactccagggctccccgggctgctctggatcccaggactccggctttcgccgagccgcagcgggatccctgtgcacccggcgcagcctacccttggtggtctaaacggatgctgctgggtgttgcgacccaggacgagatgccttgtttcttttacaataagtcgttggaggaatgccattaaagtgaactccccaccttt

SEQ ID NO: 118891 - DNA, 1000 bp, Homo Sapiens
ggacacaacagccaaattgtgggacattcagaatggcgaggaagtttacaccttaagaggacattctgccgaaatcatctccttgtcatttaacacctcaggagacagaatcatcacggggtcttttgatcataccgttgtagtgtgggacgctgatactggaaggaaggtaaatatcttaattggtcattgtgctgagattagcagtgcctcattcaattgggattgctctctaatattaactggctctatggacaaaacctgcaagctgtgggatgctacaaatggaaaatgtgtggcaaccttaacaggccatgatgatgaaatactagacagctgctttgattacactggaaagcttattgcaactgcttcagctgatggaacagcaagaattttcagtgctgccacaagaaaatgcattgccaaactggaaggtcatgaaggtgaaatttcaaagatttctttcaaccctcaagggaaccatcttctaactggcagctctgacaaaacggctagaatctgggatgctcagactggccagtgcctccaggttcttgaggggcacactgatgaaatcttttcatgtgctttcaactataaaggcaacatagtcattacaggcagcaaggataatacctgtaggatatggcgttgactgaaggaagctggtcagtgagcaaccttgctagcaatggtaatcaagaactggaacttcacagacagcagctctcttaatatttcttatactttctctttttctgcaagtcaactatttctacaactgtccttcatttcacagatatgaccattaaacatgacaaagttatgccactccaatattattatttgatggcgatggcaggacacagcataatgtttggctaatgccaccagttatttcagttgtgtttgttttttaaaagcattatgatactgaaaaaggagaccagaacaacttaacaacgtgtctcctggattttactttgaagcctattgt

SEQ ID NO: 118892 - DNA, 1000 bp, Homo Sapiens
ggccaggctggtctcaaactcctgacctcgtgatccacccgccttggtctcccaaagtgctgggattacaggcgtgagccaccacgctcagcctttaattttattattataaaaaattgagccagggtcttgctatgtggctcaggctcatctcaaaatcctgggctcaagtgatcctcctgcctgggcctgccaaagtgctaggattgcaggtgtgagccactgtgcctggctggcagagcttttccatatgttactcctcatgctggttggaatcatggctgcaggcttccacttggtctgatcagactggtattcattcctgcctatgtccccgtgaaggattcggtaagagtgctatttcctcctccctttagaagacaggctgtcttctttcatcaacttagagcagataatccccatgtgtgcctctctccttccttagatggggaacaggatccctttttgggacaatcaagaaaaaaactcatgtaaacagtaatcttattacttgtatttgtgactaactccagggaaaagggtagaatatttaggccacttcaggcactaccatggagtgaactgaattcatacggatggcttgggctgacacagtttcttcccagtggaccaataaatcagactcacccgaacccctggggttttggtagaattggacctactctaggactgtggggaactaaaggagcatttggctcactgtagctcttctatcatgagccttgaccgtcaggccgcaatcagaccttactgatgggatctctgcagtttattacgtaggcctcccgttaccctggtacccaaatacgtcccccacctctagctccctagcctcacattgaatgtctcttcaacagcagattgtggtggaagttatagccgtgtgcctctatttattctctgaattgtactgtagaaaaaggtgtttataaagaataaagaaatcaccagaactgcctaaaaaaaaaaaaaaaaaaaa

SEQ ID NO: 118893 - DNA, 1000 bp, Homo Sapiens
ggagcctgcacccgcgcagaaggggagccggggccgagcctccgggcctgaatacgggccagccgccgaggccgccagagcagggccgcctggtcccaccggcgtcgctgggttcttcggtgcttctggccgagcaggcggcctacttgggcagggctggacgctgggacctggagctgccgccgtctcttcaaagccatgataccccctcgtgggaagaagggaccgacgcgcgagtcgcgctccgcagtcgagccgggaggaacccaggctgctgccctgcccagcccgaccctgccccggccccgcttccaccttgcgcatttggtactggcttttgtgatacttaggaaccctggcatcttttctatattatccagtgtgataatcttttcacgttttatagagcaaagacagagcagttactcttcatattgcaatatctgtgtttgactaggaataatagtatttttatggaacatttacaaaattatattttttaagaaaacaatcaaaacaagcattgggggattggggcaaggatggaaggagcagtggggcagctgccagagctcaggcgagccatggggtctgctgtggggtctgccctggccacccactgtgtgtctgggtccttgaggtttgtacgtttctctttgatgaccaggaagaaatcccagcaccccagccacaggctgtggctgctcccagcagaggtggggccggcagagaaggggcctcctccacccagagtcctggccttggcccgctgtcaccttcaaagctgactgtgccccgctgcgggaggggacggcaccccagtggtggcagagcttgggggcctgggcaggggcccgcttggcgggccgggcaacacgtcaacattcttttctgttcttggcattaattattgctgtctttttttaaaaaaaaaaagtttaaataaaatgtctcagagcaaaaaaaaaaaaaaaaaaaaaaaaaaaaaaaaaaaaaaaaa

SEQ ID NO: 118894 - DNA, 1000 bp, Homo Sapiens
gcaccatacgccgaccatcctcaagtgcagccagcgggtccaggaggcactgcggggtcgggagcacgaccacatctaccggggaatccacagctacctgaggtacctgaagcccaaggacacgtccatgggcaactcctcctcggggatggcgaggaagggccccatacgtgcgccagggcatctgcgcgccactgtgcgctgggattaccagcctgacatctgcaaggactacaaggagactggcttctgtggcttcggggacagctgcaaattcctccacgaccgttccgattacaagctcgggtgggagattgaacgggagcttgaagagggtcgctactgtatctgcgaggacgaaaaccatgaagtgggaagcgaggaagaggaaataccattcaggtgtttcatatgtcgccaggccttccaaaacccagtcgtcaccaagtgcaggcattatttctgcgagagctgcgcgctggagcacttccgggccaccccgcgctgctacatctgtgaccagccaaccggcggcatctttaaccccgccaaagaactgatggcgaaactgcaaaagcttcaggctgcagaaggaaaaaagagataagaaagactcaagtctgtatgtacactggggagaagcagcctgttgagtaagatgagagagatgacagtcttcctgcaatcccatgcctgagtatgtaaccaaaagaattgaaatccggatctcaaagaggtatgtgcactcccatgttcactgcagtattatttgcaaaagccaagaggtgtaaacaacccaagtgtccatggatggatgaatggacaaacaaaatgcgatacacacacacaatggaatgctattaagccttaacgggaaggaaatcctcttaaagatttaaactgatccttttaaggatcacatgctacaactagaatgaaccttgaagacgacactgctaagtgaaataaactagtcacaaaacgaaaaaaaaaaaaaaaa

SEQ ID NO: 118895 - DNA, 1000 bp, Homo Sapiens
agtatccctgaacagaaatgcaacccccatttgccaacccagctgggcaacgagacagttgtggcaggccccgagggctatgagacccagtggtgggatgccccgagcattgtgggcctcatcatcttcctcctgtgcaccctcttcatcagtctgcgctcctcagaccaccggcaggtgaacagcctgatgcagaccgaggagtgcccacctatgctagacgccacacagcagcagcagcaggtggcagcctgtgagggccgggcctttgacaacgagcaggacggcgtcacctacagctactccttcttccacttctgcctggtgctggcctcactgcacgtcatgatgacgctcaccaactggtacaagcccggtgagacccggaagatgatcagcacgtggaccgccgtgtgggtgaagatctgtgccagctgggcagggctgctcctctacctgtggaccctggtagccccactcctcctgcgcaaccgcgacttcagctgaggcagcctcacagcctgccatctggtgcctcctgccacctggtgcctctcggctcagtgacagccaacctgccccctccccacaccaatcagccaggctgagcccccacccctgccccagctccaggacctgcccctgagccgggccttctagtcgtagtgccttcagggtccgaggagcatcaggctcctgcagagccccatccccccgccacacccacacggtggagctgcctcttccttcccctcctccctgttgcccatactcagcatctcggatgaaagggctcccttgtcctcaggctccacgggagcggggctgctggagagagcggggaactcccaccacagtggggcatccggcactgaagccctggtgttcctggtcacgtcccccaggggaccctgcccacttcctggacttcgtgccttactgagtctctaagactttttctaataaacaagccagtgcgtgtaccaaaaaaaaaaaaaaa

SEQ ID NO: 118896 - DNA, 1000 bp, Homo Sapiens
ggccgcgctcccctcccccgcgcctgtgtccccagggcgcagggccgcgcgtccagccccagacccgccggggtccctggggacgcgccagcccggcagtggctcgacgatggaggagccgcagcgcgcccgctcgcacacagtcaccaccaccgccagctccttcgcagagaacttctccaccagcagcagcagcttcgcctacgaccgggagttcctccgcaccctgcccggcttcctcatcgtggccgagatcgttctggggctgctggtatggacgcttattgctggaactgagtacttccgggtccccgcatttggctgggtcatgtttgtagctgtattttactgggtcctcaccgtcttcttcctcattatctacataacaatgacctacaccaggattccccaggtgccctggacaacagtgggcctgtgctttaacggcagtgccttcgtcttgtacctctctgccgctgttgtagatgcatcttccgtctcccctgagagggacagtcacaacttcaacagctgggcggcctcatcgttctttgccttcctggtcaccatctgctacgctggaaatacatatttcagttttatagcatggagatccaggaccatacagtgatttaccattttgataattaaaaggaaaaaaaaaggaagactctcactgtaaaaacagctgtaggtataatgtatattcccagagaattgtatttaactaattaatgttttttatattcttaaatttgctcacaaattgtggtttgttacaattaaactggatacttatttgcaaagtgttgtagcttataatgaactcttaagtatcttattaatgtattaatgtcttcatagatcatattttcttagacaatgtttaaatagataaattgctaatattgagaatgtgtcaagtttgtaaacctaacttttaagatgccagattcttttttgattaaatgttgcaaaatcccaaaaaaaaaaaaaaaaa

SEQ ID NO: 118897 - DNA, 1000 bp, Homo Sapiens
gttccttatcacctgccaacaggaagcgaaaggggatggagtgagcccatggtgacctcgggaatggcaattttttgggcggcccctggacgaaggtctgaatcccgactctgataccttctggctgtgctacctgagccaagtcgcctcccctctctgggctagagtttccttatccagacagtggggaaggcatgacacacctgggggaaattggcgatgtcacccgtgtacggtacgcagcccagagcagaccctcaataaacgtcagcttccttccttctgcggccagagccgaggcgggcgggggtgagaacatcaatcgtcagcgacagcctgggcacccgcggggccgtcccgcctgcagagggccactcgggggggtttccaggcttaaaatcagtccgtttcgtctcttggaaacagctccccaccaaccaagatttctttttctaacttctgctactaagtttttaaaaattccctttatgcacccaagagatatttattaaacaccaattacgtagcaggccatggctcatgggacccaccccccgtggcactcatggagggggctgcaggttggaactatgcagtgtgctccggccacacatcctgctgggccccctaccctgccccaattcaatcctgccaataaatcctgtcttatttgttcatcctggagaattgaagggaggtcaagttgtttgtcaatgatttgtcagagaacctgttgaaatgtgaattaagaagctaagaaaatatttcttagcaacattttctttttcttttttttttttttcttttgagacagagtctcactctcgtcgcccaggctggaatgcagtggtgcgatctcggctctctgcaacctctgtctcccgggttcaagcgatttcctgcgtcagccccagagtagctggaattacaggcacacaccaccacgcctggctaatttttgtatttttagtagagctggggccaccctggcccggccccg

SEQ ID NO: 118898 - DNA, 1000 bp, Homo Sapiens
ctgagtgtcatctcaaccccatcatcctgcccctgtggcatgtcggaatgaatgacgtccttcctaacagtccgccctacttcccccgctttggacagaaaatcactgtgctgatcgggaagcccttcagtgccctgcctgtactcgagcggctccgggcggagaacaagtcggctgtggagatgcggaaagccctgacggacttcattcaagaggaattccagcatctgaagactcaggcagagcagctccacaaccacctccagcctgggagataggccttgcttgctgccttctggattcttggcccgcacagagctggggctgagggatggactgatgcttttagctcaaacgtggcttttagacagatttgttcatagaccctctcaagtgccctctccgagctggtaggcattccagctcctccgtgcttcctcagttacacaaaggacctcagctgcttctcccacttggccaagcagggaggaagaagcttaggcagggctctctttccttcttgccttcagatgttctctcccaggggctggcttcaggagggagcatagaaggcaggtgagcaaccagttggctaggggagcagggggcccaccagagctgtggagaggggaccctaagactcctcggcctggctcctacccaccgcccttgccgaaccaggagctgctcactacctcctcagggatggccgttggccacgtcttccttctgcctgagcttcccccccaccacaggccctttcctcaggcaaggtctggcctcaggtgggccgcaggcgggaaaagcagcccttggccagaagtcaagcccagccacgtggagcctagagtgagggcctgaggtctggctgcttgcccccatgctggcgccaacaacttctccatcctttctgcctctcaacatcacttgaatcctagggcctgggttttcatgtttttgaaacagaaccataaagcatatgtgttggcttgttgtaaaa

SEQ ID NO: 118899 - DNA, 1000 bp, Homo Sapiens
agacgctggtccagaaggtggtgtcgccatacctgggcacctacggcctccactccagcgaggggcccttcacccattcctgcatcctggaaaagcgcctcctccgccgctcccgctcgggggacgtgctggccaagaaccctgtggtgcgctccaagagctacaacacgcctctgctgaaccccgtgcaggagcacgaggcggagggcgcggcggccggcggtaccagcatccgcaggcactctgtgtcggagatgacgtcctgccccgagcctcagggcttctccgacccgcccggccagggccccaccgggaccttcaggtcctccccggcgccccactcagggccctgccccagcagactgtaccccacgacccagccccctgagcagggcttggatcccacccgcagctccctgccccgctccagcccggagaacctggtggaccagatcctggagtccgtggactcggattctgaagggattttcattgactttggccggggccggggctctggcatgtccgacttggagggctctgggggccggcagagtgtcgtgtgaggcctcacagctggccttgagtttttactgacacgtccctgtgtgcgggggtgtccatgtggcgtgtgtgtgagtgagacttttttactgcgtcccgtcccgccagccctatcggcctcgtcactggccttggtcactttgtatttctgtcttggttggaaataccatcagccttccttgctcggcccaggtctgtttcaggcatctgagtcggcgtttacccaggggccgggccagagacgggggtcggccgctcgctcccacgctcctcctgccccagccctctggtgtccacacctgcccacagagaatgtaaacccagtgggctctgcccacgccgggccccaaagtgaccagactccagcacacctgtctcctcctgcctggggtggccatggggatggaagggggtggaataaaacctgtcaacctgg

SEQ ID NO: 118900 - DNA, 1000 bp, Homo Sapiens
ctgtgctctggctggctgggcctctatcctgaagagggaaggtgctagaaattagaacaagtgactgtaggggggaccgtctagaaacaccaggcccagacacacggtccctcaggtcaggaggagtgagcagccggcacagcctcctgggaggatcccgaagtagggactggggctgagagcagagaggagggtcgggcgggcccgcctcagtgttgcttctcacagaagctgcgactctagaccaggcctgcagccagaacgccgattccgggagcttgggagccctgcgtcagggcccagagcctcgcacttgctgtgtgcgaagatcgccttgctttactgtgaccacagccccgacgcggggctgtttaacaagaacttcagcgcagccggcgtttctgttaccccggccgcggctcttggcggcgggagaggcgcagtggctgcaggctgccccctgccggccacaagggagcagcgtccgcgccgccgcccaccggccctcccgccagctcctcagcctgctccctgggaggcaggctccagaagcaccccgacggggggccttattaagtgcgagaagcctctccagcgagtcttccccgtgtgtcctcatctgcggcaggcaggagagggggagcaaacaggaaattccacagctgcctccagaaacattaaccacccctctctagtcttactggtattttttgtttccttaataaagctccagtctccctcatttgagcaatactctcatttcctctgatgtctggatgatcggcagggcaggaatctgagcgctggccccgtggtgaggccatgttctcataatcaggctccagccagaaaaataagaaacaccgcaacaggcttcagtatcagggctgaaactgctggatgaataaactatttattaaaaacggaaaaaaaaaaaaaaaaaaaaaaaaaaaaaaaaaaaaaaaaaaaaaaaaaaaaaaaaaaaaaaaaaaaaaaaaaa

SEQ ID NO: 118901 - DNA, 1000 bp, Homo Sapiens
atacctgaatataacaacctttaaaaaagcaaaataataagaaggaaaaattccaggagggaaaatgaattgtcttcactcttcattctttgaaggatttactgcaagaagtacatgaagagcagctggtcaacctgctcactgttctatctccaaatgagacacattaaagggtagcctacaaatgttttcaggcttctttcaaagtgtaagcacttctgagctctttagcattgaagtgtcgaaagcaactcacacgggaagatcatttcttatttgtgctctgtgactgccaaggtgtggcctgcactgggttgtccagggagacctagtgctgtttctcccacatattcacatacgtgtctgtgtgtatatatattttttcaatttaaaggttagtatggaatcagctgctacaagaatgcaaaaaatcttccaaagacaagaaaagaggaaaaaaagccgttttcatgagctgagtgatgtagcgtaacaaacaaaatcatggagctgaggaggtgccttgtaaacatgaaggggcagataaaggaaggagatactcatgttgataaagagagccctggtcctagacatagttcagccacaaagtagttgtccctttgtggacaagtttcccaaattccctggacctctgcttccccatctgttaaatgagagaatagagtatggttgattcccagcattcagtggtcctgtcaagcaacctaacaggctagttctaattccctattgggtagatgaggggatgacaaagaacagtttttaagctatataggaaacattgttattggtgttgccctatcgtgatttcagttgaattcatgtgaaaataatagccatccttggcctggcgcggtggctcacacctgtaatcccagcacttttggaggccaaggtgggtggatcacctgaggtcaggagttcaagaccagcctggccaacatgatgaaaccccgtctctactaaaaatacaaaaaat

SEQ ID NO: 118902 - DNA, 1000 bp, Homo Sapiens
agaaccaaagtggaccgaacaccattacatatggcagcttctgagggccatgccagcatagtagaggttttacttaagcatggtgctgatgtcaatgcaaaggacatgttaaagatgacagctctccattgggccacagaacacaatcatcaagaggtggtggaacttttaatcaaatatggtgctgatgtacacacgcaaagtaaattttgtaaaactgcatttgatatttcaatagacaatggaaatgaagatttagcagagatattacagattgctatgcagaaccaaatcaacacaaacccagagagtcctgacactgtgacaatacatgctgcaacaccacagtttatcattggacctggaggggtggtgaacctaacagatgaaacgggtgtatctgctgttcagtttggaaactcttctacatcagtattagctacattagctgccttagctgaagcatctgctccattgtccaattcttcagaaactccagtagtggccacagaagaagtagttactgcagaatctgtggatggtgccattcagcaagtagttagttcagggggtcagcaagtcatcacaatagttacagatggaattcagcttggaaatttgcactctattccaaccagtggaattggtcagcccatcattgtgaccatgccagatggacaacaagtattaacagtaccagcaacagacattgctgaagaaactgttataagtgaagaaccaccagctaagagacaatgtatcgaaataattgaaaaccgggtggaatctgcagaaatagaagtaaggagtcttttacccggtgtgctttgccgcagtcatccaaaataaattcaattttttttgtcttttatatttattactgacagtattgttttgatacagaatgaaagtgcgtagtattttcattttgtttatttttgccttatacatatagcaagccctcaataaataaatattgaatgaatgaaaaaaaaaaaaa

SEQ ID NO: 118903 - DNA, 1000 bp, Homo Sapiens
tgcagggccctgtggttggacttcacctctcagcactgaaaacccaaaacccagctggccttaacactccttaaagacagaagtcacacttgaacaaaacccacacacaacaaaacctgatttgggagacggtgtctccactgagcacctgctgggctgagcttctacctacgagtgaaactctgtcctcccgcgaggaccaggcatcgctgtgtgaggacggcacggccagcgcctgctgtgagtgggtctcccaagactaggcctcaggacgcggggggagccatccccgccgccctcacaggacccaccaggcagcggagacatgtggaattagagtattttgaggtgtcctttctttacaaaataatggggtcttgggcatttcacatcactccatttctactgagactttcagaatcacacaggccctttccgtggatttcatttggggcaaagaaacaacgtagttttgtttttgttttcagcctatggaatgatttccttttgtctgtcttgttcaagttcagacgaagctactctggcatctgcacatttccgtgttacagcagctgcctgatgaattttatccacctccatttcagcatgtggctcgcgtggacaggtggacggacgctgtggccgcatggaaccttgagaacccagggacgagccagtgccgggaaggaactgccgggactcaccgagctgcacttaactgttctctttctggctattttttgttgtttgtttctttgtgttgactttgtccctggcaaaattttccactctgagtaaaacaagtctcctaagtattgtgtatgtttaaaacgacagaaccatttctacttcatttggaaaaagattcagtcttttatcacaggcccttttgaaactcagatcccaggtctctccgtggtatgtttgtatttggggtgtccctccggctctaggcggcctctgacctgctgtctactccccaccttcggtgagcggccgc

SEQ ID NO: 118904 - DNA, 1000 bp, Homo Sapiens
ggagtcaggataacactgacgctccctggcatcctatcttattcagccctaccatcttgccagctctgtctttccagctgtctgtcgctaaaacgtggcctatagcttcccttccggaaagcttgctttgaaaaacttaaaaagcccccgtttacatgtaggcaggactgtgataacagtgcaagctctgtgttgacaagagttgtggacaaaaagccaaaataaatattcttcctgattaaaaaaattttttttgaaaaaaacaaggccagccccaaccttccaaacctccatcaccaacaacccaaactggatgtcaagcaaaatgcacaattcctacagaagaggcaagacacagtcaccaatgatatctcgccaaagaaaccacgcccacaccaatgccaacacaaaactgtgtttactgaaagccgaaaacagtattaaaaaaagtgtgtaagtaaagtgttatggtagggttcttcagatgtaatattttactggtactatttatttataaataggaattctaattaagtaataacatgaaatgaaacccagcataggagctggccaagagcttttaattttattgatactcaaaaccaagtttgtgtttttttgtttttttttgtttttttcctctttcgaatgtgctttgctttttttgattaaaaagaattttttttttccttttttataaacagaccctaataaagagaacagggtaagatgtgaggctgagtgtgtttaagtacgtgagagagtgtgagtgtgtttgtaagtgagtgtccctatgcgattatgtctctttacgttgctaaggggggagggtgaggattaagtactcgtgccttatatttgtgtgccaattaatgcctaataaataccatgtgcttaaacaagtaaaaaaaaaaaaaaaaaaaaaaaaaaaaaaaaaaaaaaaaaaaaaaaaaaaaaaaaaaaaaaaaaaaaaaaaaaaaaaaaaaaaaaaaaaaaaaaa

SEQ ID NO: 118905 - DNA, 1000 bp, Homo Sapiens
cagtaatctattttctgtggattcaaataatatgaaatgagtataaaatcatgtattggaacgatgtgtgcaagtcaccattctgccttcctaaggcaggagacctgatggatttggggagggtacatggggccttcagttgtgttttctttgtttttttctaaaaattgatgcagaggcatcacaatgttaagatttttacagggtagtgtggtgggtactttttaactgtttgcttaaagtgtttcaaagtaaaaatatttcttaagcatagtctctgacatcttatgactttatagaaatccctgccaggtacatgatgttacttagagtgagccacctaatctttcaaggcttccatttcctcacctgcaaaaattgggagtgtcagaggcgtttgaaccagagtgactccatcttgaatagggaactgggtaaaataaggctgagacctactgggctgcattcccaggaggttaggcattccaagtcatgggatgagataggaggtcagcacaagatacagtcataaagaccttgccaataaaacagcatgtggtaaagaagccggtcaaaaccaagatggcaatgaaagtgacctctggttgtcctcactgctgtaattatactgtaattataatgcattagcatgctaacagacactcccaccagtgccatgacagtttacaaacgccatggcaggcctggcacgatggctcatgcctgtaatcccagcactttgggaggccaaggcgggcggattatgaggtcaggagattgagaccagcctggccaacatggtgaaaccctgtctctactaaaaaatacaaaaattagctgggcatggtggcacgtgcctgtaatcccagctacttgagaggctgaggcaggagaatctctagatcccgggagttggaggttgcagtgagccaagatggtgccactgcactccagcctgggtgacagagcaagactctgtctcaaaaaaaaaaaaaaaaaa

SEQ ID NO: 118906 - DNA, 1000 bp, Homo Sapiens
gaggacagccaggctgaagtcctgaaggtcatcaggcagtctgctgggcaaaagacaacctgtggccagggtctggaagggccctgggagcgcccaccccctctggatgagtccgagagagatggaggctctgaggaccaagtggaagacccagcactaagtgagcctggggaggaacctcagcgcccttccccctctgagcctggcacataggcacccagcctgcatctcccaggaggaagtggaggggacatcgctgttccccagaaacccactctatcctcaccctgttttgtgctcttcccctcgcctgctagggctgcggcttctgacttctagaagactaaggctggtctgtgtttgcttgtttgcccacctttggctgatacccagagaacctgggcacttgctgcctgatgcccacccctgccagtcattcctccattcacccagcgggaggtgggatgtgagacagcccacattggaaaatccagaaaaccgggaacagggatttgcccttcacaattctactccccagatcctctcccctggacacaggagacccacagggcaggaccctaagatctggggaaaggaggtcctgagaaccttgaggtacccttagatccttttctacccactttcctatggaggattccaagtcaccacttctctcaccggcttctaccagggtccaggactaaggcgtttttctccatagcctcaacattttgggaatcttcccttaatcacccttgctcctcctgggtgcctggaagatggactggcagagacctctttgttgcgttttgtgctttgatgccaggaatgccgcctagtttatgtccccggtggggcacacagcggggggcgccaggttttccttgtcccccagctgctctgcccctttccccttcttccctgactccaggcctgaacccctcccgtgctgtaataaatctttgtaaataacaaaaaaaaaaaaaaaaaaaaaaaaaaa

SEQ ID NO: 118907 - DNA, 1000 bp, Homo Sapiens
agagacctgattgttgcagaggcctagatgctctgagggccattcacaattctcagggctcagcagtgatgggagaacagaggacagttccaggataaactgctgcctggggctgtgggatgaatcagtcaccccgaatcttggaaaaacccccttccaggagaggatgggcaggcatttaaaaagtaccatttttgtggttgtttggagcagggatgtacaaaataattttaatgtattaactcatactgcctgtcttttataggggaaaaaaataaccttttttattttaaagttataaggtttttaccttttagttgcttggatgacagggaattagcctaccccattttggtctggaacagaagactttcaaatttaatatggtccaagtgtcttcctactcaaggtaaacattatctccaaaattacatttatgattctaatatttggcattgtgtctgtatctaatttaaacagatgttaatggacgtctggccgaaactattatacttttataagatgagctgaatcctcttactttaaaaactggtctttttatttaccctctgtggtagaagagtcaccagcaggttccaaattgatgtgtatgataggaaaaaaaccttaattttaaatataatatagagccttaaactatgccactgggtggcagaggctgtataaaacgcacttgttttcatgcaggagcggggcaagtaaggttgagcctgactgtaaacctagaactgcggaaggactgggacttttgtacaaatttcacatttattttacagcaatcatgctgcatttgtgttagtgttctttataataaaaaacaaagcagcctcctggctggctgtgttacaagtgactcttccttagacagctagaaagatgctgactttgtcaaacttgcatttatatgaaaaccttctgtctctaatatcacagaataaactttctttagatgctgttctttaaaaaaaaaaaaaaaaaa

SEQ ID NO: 118908 - DNA, 1000 bp, Homo Sapiens
tagaaccttacaagtcattctggggttataaagatcataacatgatttatagccccagactgacttgtaagcagctgcatttaaagtacttactcagacactcaggcctgagagatagacccctttctttccagcactagctgaaataatcaagtatatagtttgttcaggattggcactaaatgtgatttaatcttttaataaaagggtccttttgtacccacttaggcttcttcgtaattaccagaaaggtgataagcctgcatgtgtctggacaccaaagattgagaagctgccagtggctgcaagagagcctactgtaaccctcatggccaccccctgatgagtgttacctggggaaagggctagcaagaggtgaagcctcctggtcatatgatgctgggggtgcctaattccttaaaggccaaggtcttctgaaataataatggtgaaggacagaaaagtctttatgagaaatcacataggatatattaagataatgataaagatacctcagcaagaacatacctaatatatacacttcttttaatctgatgacttaatgatttctgttatcaagaagtatttatgacttgagataagtcaggattaactgttatcacctctcctgtacacctccctcctttttctcctttgtacccacatgtgcaaattttttcagaggtgacaatttagcatttaatgtttttttttctgcttcaagttcttaggtccctttggaggatattgatgggggtggaggtggggatagaacatctttcacactgtttggtacagagatgctcaaagcttttcccagggaaaggaactctctaaaatagtaatctgatttgatgaaagataaaattttaatatagcttcagttaaccttcaggatactttaaatgctacattgtatataaaagtaataaagtacaaatgaccccgaaaaaaaaaaaaaaaaaaaaaaaaaaaaaaaaaaaaaaaaaaaaaaaaaaaa

SEQ ID NO: 118909 - DNA, 1000 bp, Homo Sapiens
agagccggaagatccaagcaacagatcatttttctctgaaattatctcttcgatttcggatgtgaagttcagccacagtgggaggtatatcatgaccagggactacttgaccgtcaaagtctgggatctcaacatggaaaaccgccccatcgagacttaccaggttcatgactacctccgcagcaagctgtgttccctctatgaaaatgactgcatttttgataaatttgagtgtgtgtggaatgggtcagacagtgtcatcatgacaggctcctacaacaacttcttcaggatgttcgacagaaacaccaagcgtgatgtgacccttgaggcttcgagggaaaacagcaagccccgggctatcctcaaaccccgaaaagtgtgtgtggggggcaagcggagaaaagacgagatcagtgtcgacagtctggactttagcaaaaagatcttgcatacagcttggcatccttcagaaaatattatagcagtggcggctacaaataacctatatatattccaggacaaggttaactaggtggacaagttattacttaataatctcacatactgaatactagtcaaacaagtttttaaatgtttctttgggtcttcatttgatgcattgactttaatttccctatacaggaaatgattggaatagaattaaaaggagtccaacattcccagctccccagttctaagaaacttttgtcaaacccaataggtttgggacacttctgtttagaattgaaagctgccagctaacagtaattcttccatagttgacttgaacttctgatgcttttattgcccagttttctctggtgggtccagtgttttgttcctaggtgtctgctgcgataaaatgaggttgtctgtagtatttaaggagaaaagagataagttttttttaattaagcaattccatttgattgaaaaaaatcaacaaaaaataaacaccgtttactcttagacaaaaaaaaaaaaaaaaaaaaaaaaa

SEQ ID NO: 118910 - DNA, 1000 bp, Homo Sapiens
cttttaacatacgcagagatagatatctgtccggccaactggaagcggattgttttaggggcgatcctgctggcctccaaggtgtgggatgaccaggctgtatggaatgtggattactgccagatcctgaaagacatcacggtggaggacatgagcgagctagagcgacagtttcttgaattgctgcagttcaacatcaatgttccttccagtgtctatgccaagtattattttgatcttcgttctctggcagaagcgaacaacctgagctttcccttggagcccctgagcagggagagggctcacaagcttgaggccatctctcgcctctgcgaggacaagtacaaggacctaagaagatccgcgaggaagcgctcagccagtgcagacaacctgactctgccccggtggtccccagccatcatctcttaactacggaggcccgccggaggccacaccatcccttagtttctcctttagtttgagaaaagacagacttggggtgggtttgtttttgttttttctttccttttctttttttacgcatagctccgtcaagctgcctggatgagcgcccatgcagcaaggcttggaggaagcgtcagtgccctggagatcccagctcgctctccccactgtcagcaacagcacttccttcgtggaggaagtggactcgaatcctggaggaggaaataaagggaaagggaagtcgtggagaggcagggaaaatggttaagcagcccggccctctggagtccccatgggggcggtagctgaagttggcgagcgcagcggtggatgcagagctggctgcacccagggctgggccagtgtgtcctgtaagacttcttgcattccttctgctgcttttttgggatgggggtatttttgttcatttgtttttgccctgttttgattttggtcccacagagcaggggatgtagtttgtacccaccatggcgcagacttccaaataaatagtactggtcatttctctctg

SEQ ID NO: 118911 - DNA, 1000 bp, Homo Sapiens
atattagattgaatacttaagttagatgtggtttcccccattgtagcagggagctagcgtattagccttgtgggcaacatgatgcatgggaaatgaaagatttttgtaaaaagtcagtatttatttccaggaaaagcctgaccttgctatttgaacacccaagactctttagaggatgtgtttggtgttcacatgtgtttcttctattttggatagtagagaagtaaagcttacaaagaatgcctagaacaagaacttttcatcattaaaaatttttcccagtgttctgatatgtgactttgaggccaatgagtcataaacaaatataagaaagctgtcaatgagtttcttcaaaggagggaaaactttctacgaatctaagatccatggagctagaattgtagaactaggctcatcagaatcgtgactattattgctccatcaaactgtgaaaagaaatgatgtggaccttgctggaaacaaaggcttagcaaacaatttttgttcaatgcccaccaagacatatagaattgggaactgatacatgtgtcccttataggctcaaaaattatatcttacaatttcttatttagggggaaattatttgaatcagattctatttagtcaaaccaccttttatgttttattatttttgaattcatggagccatcataaaaatatttttaaaatcagaattattgataccctgtagtgcaaaatgtcaatttttaatgtataatcagaagtctgaatttttataaaacatatagcataaaaacttccagtactttggttgacccttgtatgtcacagctctgctctatttattattattttgcaaaataaccattttaacatttgataaagcatatttatgaacatatttcttaataagaaaaatatccattttattaccattttctatctttttcaaaatatgcaagtttttacctatatgtcttataataaaagaaataaaatatttgaaaaaaaaaaaaaa

SEQ ID NO: 118912 - DNA, 1000 bp, Homo Sapiens
gcgctccgctagccaggccgggagcaagagccaggcggtggagaagccgccgtcggagaagccgcggctgaggcgctcgtcgccgcgggcccaggaggagggcccgggggagccgccgccgcctgagctggcgttgctcccgccaccgccgccgccgccgccgactcccgcgaccccgacgtcctcggcgtccaacctggacctgggcgagcagcgggagcgctgggagacgttccagaagcggcagaagcttacctccgagggtgccgccaagctcctgctagacacctttgaataccagggcctggtgaagcacacaggaggctgccactgtggagcagttcgttttgaagtttgggcctcagcagacttgcatatatttgactgcaattgcagcatttgcaagaagaagcagaatagacacttcattgttccagcttctcgcttcaagctcctgaagggagctgagcacataacgacttacacgttcaatactcacaaagcccagcataccttctgtaagagatgtggcgttcagagcttctatactccacgatcaaaccccggaggcttcggaattgccccccactgcctggatgagggcactgtgcggagtatggtcactgaggaattcaatggcagcgattgggagaaggccatgaaagagcacaagaccatcaagaacatgtctaaagagtgagcttctgcctctcctgccctgaaaaggaggaatgattggggccagcaactttgctctccctgccgtgcctcggtggtgctcctgaatgtggctgacctgggctgctggttccgttgactagggtcatcttgatctctgcagtttgctccagctaccagtttctttaggcagctctttgtcctccctctgcccagattttgatgtagtctaattgacatccttctcttcccaacttttgtgtgatcttttaggaaaaaaaataaatatttttaacattaaagcaaaaaaaaaaaaaaaaaa

SEQ ID NO: 118913 - DNA, 1000 bp, Homo Sapiens
atgtccacagaccccagccaagcccaggtgccagtagggctggaccagtctgaaggggcctcccttcctgctgctgccagccctgaaaggtcccccatctgcagccatggcatggaccccaacccactgggctgccccgattgtgcctgcaagacccagggccccagcacggggctggactgaccacagcaggggacctgagccgtcttccccagtctccatatgcagctctctcttataccctcgggttcctcccaggagctctggaggtacaggatttccacaggcctctttcctaaatggaaggaattggaactgaaagggaaaggaaatggaaggaaggggaatttggaggagagaacacgcccacccttgggaagctgcctgtccccagaggagccccaccagggagcagctgccccctcatcagagacctgcagagtcaaccaagcacaggttagagtcccaggaccggaaaccaactgtgggctttctgtacttctcatagctttggagtctggctgtccatcaggaggtcccgagggctctctggggcctgaggctcccacaccagctctcccctggcctcaataaaaccaggtgcatgcctgttcttccatccacactccagggctgcccaccagctgacaggcaccatcaactggcagcaacagagcaggcgcaggtacaaagaaggcagctcactcctgctcttaggagatccaatcagatctgccctgtacagccatgtaggctgtgcgctgcataactccagggacatgagtcacacagacacaatgtgagtgtgctcccccgtcatgcaacatctggacacaactaacagagcatggtgaatacatgctgaattgcattcagtatggctgtgaactaggcctggggacaagaatgaattttacatggaaagaatttcctgtagcaggaacagaggggataacaacagcaataaataataataagaagaaaaaaaaaaaaaaaaaaa

SEQ ID NO: 118914 - DNA, 1000 bp, Homo Sapiens
actgtacctgggttacttgcaaaaattactaatgcttcagtttttctgttgtatttcatttccagttttcaggcagttatttttattattgtactttaagcttttaagatgaattgttatacaagaggtgcttatgcttagcttgatgaccaggatgttatttttaacaaaatgattgctgaagtgtttcatcctggctggtccttcacttgtgttggatttagaagtgaatgtgtttggaatatggcctacagagaatagaaacaaatccatgtaaacaattttgaaggaggcatgggagctaaaaatcctgtgatactaagatctcagtcatatgaattacaacgtagtatttactggcaagaaggagaaagttgaaggactcagctaaaggagtacagcaattgtagtaactgacacatcctctctttgcaagctgctgactgggcacactcatgccaagtttcagaattattggtcttctgggtttttgctttttaaaagaggtgtgggagcagaggaatggaaacaatcgtgagtttttgagctagggaaagttggagctcctttaatctttttaaaggatcagtgctgccctaagtgaataaactcaattgtccatctttattttagagttttaatgaattcaaggaagggagcatagcatatctgtggcaaactattttccactcaaatcctgagttattgctgcatgctttaatttcttccctttcagcatctgagaaccttaaagccaatgtctgcgatctttttttggatatttatacttttagatatatagtacctttaagtagcagtatgggacaaggcttgtaaatgttttgtctaatgttctattgtcaccttttatgcatttatcacttccaaatctaactttgcacaagtaacccatgtaaaaaaaaatgtacatttttcaaaagttgtaaataaaaataaccttaaaaaaaaaaaaaaaaaaaaaaaaaaaaaaaaaaaaaaa

SEQ ID NO: 118915 - DNA, 1000 bp, Homo Sapiens
accttcatggggctgtttccagctcgtccacaagctcatcgattttctttagtagattaccggtgtaaatacccagtgtgcttatgagtcagttagtagacgtcttcattcattggagtaactggtttaggctttccagtttggaaaaggagcagagagctgtccatctggattgatggaagaaaagagaacctcatccatgcctggagaacatctagaaaaccttcagccagcctccagtgctgtcgagagaccaccttcccccgacccggaggcacttccttggggtctttctctagggtctcctctctacaaagcacaacactaatgttcgtttccttagacctcagttcaagtgcccctatttatttcaataagaacgcacatatcccagctgttttttgtttgtcacctctatttagttgttacctgtttctctcttctttcaccccctgtccttttccacccttttaagagttacgctagcagatcttactccacgtatactttttggtttgtgaaggcatcggttaagggcacaaagacagccatggggacatttatgtaaatacgtctctaattgccacactgcagctgaacagtgtgtagtattttcccagtcagctttgccatactgacgtcaatcatttgagagaaattattcagattttatttttgtatctgtggtaacaaaacattaaccaaaagattttctgtccagaagcctccccgaccccccaagctatttgctcacattaacaaattaaagtgcctgaagcataattcattctttacctgtatactaaaaaccctgttgtattgatttttttataataagcctttttacctctgtgtaaaaaatatatatacaagtgtatgatgtacattttagttcttaactttttttttatggtttctaatatgtatgaccaatgtagccattgctttaaaatgtaccgtgtaaatataaacacatcctatcagaaaaaaaaaaaaaaaa

SEQ ID NO: 118916 - DNA, 1000 bp, Homo Sapiens
tttcggcagaagcctaacctgtttaggcacaagagggcacactcaggtgcctttgtgtgcagggagtgtgggcaaggcttttgtgctaagttaactctcattaaacaccagagagcacacgcaggggggaagcctcatgtgtgcagggagtgtgggcaaggctttagccggcagtcacacctcattagacaccagaggacacattcaggagagaagccttatatttgcagaaagtgtggacggggctttagtcggaagtccaaccttatcagacatcagaggacacactcaggatagaaactttatgtgtatagggaatgtggtacagcctttagccaggagtcatacttcatcagacaccagaggacacacacagtgctgtggctttttcagccattgctagataccaaagtggagacattctgtgtgtgattatgcatgagactgtactggtaagacttgtatctccatccacctgaaggagaattgctggctcattttcaggagccctgcccttcctcactgtggatggtgggttgtggaaacccggtcaggtaatgatagtggcaggaggcagtcaaatgcccaggcagataggggtgggtacctggtgaaacccaaccttaaagctgaagacagtcccggctaaatcctcatactgaattgagaacctgtcttcccatttggtgtgctttcctccgattgatcccaacccttcacctattttacgtatacctgccctttcctaattggtttttacactgctgtgcccaccttttgagtggtgcctttgcatacttacaaatcagtcaacgtgtattcccctattctgagcccataaaagacccagactcagctgcagtgaggagagaaatcaccctgctgtgggggttggggaccactccctgcatcccctctccactgagagctgttcttttgctcaataaaattcttttctacccatcctcacccttcaaaaaaaaaaaaaaaaaaaaaaaaa

SEQ ID NO: 118917 - DNA, 1000 bp, Homo Sapiens
cctggtgggcctagatgaagacgctcaaggaccctcgtgacttggccgagacaggggaagggagaagttgagtcgggcaaggaagagatgctaaagcctggggaattaagaacatgccagaatcatcccgagggagtctggaattagggagggtgaggactcgctaggatcgtcctgtggatctggtgagtataccctgagctgagcctgaccttggtgatgtggggagcctccatgacggctccccctgagattcaggtgggagaagatgcaccgtctggaggcctggcccatccagactcccaggtaaccccgaatactcttttttcaggctacagcaggagctgatgaccctcatgatgtctggcgataaagggatttctgccttccctgaatcagacaaccttttcaaatgggtagggaccatccatggagcagctggaacagtatatgaagacctgaggtataagctctcgctagagttccccagtggctacccttacaatgcgcccacagtgaagttcctcacgccctgctatcaccccaacgtggacacccagggtaacatatgcctggacatcctgaaggaaaagtggtctgccctgtatgatgtcaggaccattctgctctccatccagagccttctaggagaacccaacattgatagtcccttgaacacacatgctgccgagctctggaaaaaccccacagcttttaagaagtacctgcaagaaacctactcaaagcaggtcaccagccaggagccctgacccaggctgcccagcctgtccttgtgtcgtctttttaatttttccttagatggtctgtcctttttgtgatttctgtataggactctttatcttgagctgtggtatttttgttttgtttttgtcttttaaattaagcctcggttgagcccttgtatattaaataaatgcatttttgtccttttttagacaaaaaaaaaaaaaaaaaaaaaaaaaaaaaaaaaaaaaaaaaa

SEQ ID NO: 118918 - DNA, 1000 bp, Homo Sapiens
ctggagtgcaatggcgtgatctcggctcaccgcaacctccgcctcccggattcaagcaattctcctgcctcagcctcccgagtagctgggattacaggcacgcacctccacgtccggctaattttgtatttttagtggagacggggtttctccatgtcggtcaggctggtctcgaactcccgacctcaggtgatctgcccacctcggcctcccaaagtgctgggattacaggcatgagccaccgcgcttggccagactgcgtcctttttaagcgaacattttagggcctgggagtttgtcaagtaaggaagtctcaagcccaaagagcagcgtcctgaccatggtggtttcattacgagcccttctgctggctctcaggcagaagccccacagcaccgggaccattcatgaggtcactgcccagctcatgatgtccgtgaggctgtccttttggccagtagccgtgtgcagctgtgtggcacagatggcttcgttcatcctgatcaaggccccacctcagccacagcagtccccccaacctgtgttgtccaccctattattcatgtacctgccaggccctgctagatagcaccccgtggcattacataacacttcatgagtggctgtgtcttgtaattttggggacaggtttctctctttccctctcttttttttgtcaaaagcccagagactgacaaccagctgcagtgtctaagtgttcctcactgacagggtggggcctcaccacccctggagggagcagcgttggcagggagacagcctggcccagtgaccctgggcccaagccagcccctccagggctttcagggaagcgccatccattttcaaagatgtcaaacgtcacttcttcctgtagggcccgagtcctgcctcctatcagggccagatcatagaaggctattttctattctggggaacgattataacttaaatgattgttttaataaaaattctaagctggaaaaaaaaaaaaaaaaaa

SEQ ID NO: 118919 - DNA, 1000 bp, Homo Sapiens
ggagttcctggcccagtttcagagcctcgatgcagaaaccaaagaggaagaagatgcttctgggtcacagccaaaggggcttcagaagacagacctctatcatcttcagaagtccttattggaaatgaaggagttaagaagaagtaagaagcaaaccaaatttgaagtactcagagaaaatgttgtgaacttcattgactgtctagtgagagaataccttctgcctcctgagacacagcctctccatgaggtggtgtacttcagtgctgcccatgcccttcgtgagcatttaaatgctgctccgcgaattgccctccatactgcactcaacaatccttactattatctcaagaatgaagcactgaaaagcgaagaaggctgcattccgaatatcgccccagacatctgcatagcatacaaactgcacctagagtgtagcaggctcatcaacctcgtggactggtcagaggcttttgcaacagttgtgacagctgctgaaaaaatggatgcaaattctgcaacctcagaagaaatgaatgaaattatccatgctcggtttattagagctgtttctgaactagaacttttaggatttataaaacctaccaaacagaagactgaccatgtggcaagactaacatggggaggctgctagaaagcaaataagcaaagccagaactatcacatttagcttaagagaaaaaggtgaccagtcatatttacatatattagaggagcctgttttgttgagaagataaatgtgtaacccccattgatgtttaaccagaaaagtacattgctaaccccaaacaggcatgtatcaaaacacctgtggagtactttagactccaacaaataataatgtaactaaaactgctcacacattttactgtactttccaaagtcattactaaattgtgagtaaatcattcttgaacttagagtatgtaaatgtaataaattccgttatccaggagtataaaaaaaaaaaaaaaaaaaa

SEQ ID NO: 118920 - DNA, 1000 bp, Homo Sapiens
aggagcaggaggaggagggccggaagcggtatgaagcccagaagctggagcgcatggagaccaagtggaggaacggggacatcgtccagccagtcctcaacccagagccgaacactgtcagctacagccagtccagcttgatccacctggtggggccttcagactgcaccctgcacggctttgtgcacggaggtgtgaccatgaagctcatggatgaggtcgccgggatcgtggctgcacgccactgcaagaccaacatcgtcacagcttccgtggacgccattaattttcatgacaagatcagaaaagctcacgtaatgcctgctggcgctgaccacacagctccttcctcctctcccagcactggcacgaagtgctccctgctgcgtcatcaccatctcgggacgcatgaccttcacgagcaataagtccatggagatcgaggtgttggtggacgccgaccctgttgtggacagctctcagaagcgctaccgggccgccagtgccttcttcacctacgtgtcgctgagccaggaaggcaggtcgctgcctgtgccccagctggtgcccgagaccgaggacgagaagaagcgctttgaggaaggcaaagggcggtacctgcagatgaaggcgaagcgacagggccacgcggagcctcagccctagactccctcctcctgccactggtgcctcgagtagccatggcaacgggcccagtgtccagtcacttagaagttccccccttggccaaaaacccaattcacattgagagctggtgttgtctgaagttttcgtatcacagtgttaacctgtactctctcctgcaaacctacacaccaaagctttatttatatcattccagtatcaatgctacacagtgttgtcccgagcgccgggaggcgttgggcagaaaccctcgggaatgcttccgagcacgctgtagggtatgggaagaacccagcaccactaataaagctgctgcttggctggaaaaaaaaaa

SEQ ID NO: 118921 - DNA, 1000 bp, Homo Sapiens
ctgtggtatgtgcccctgtcgctgaagaatgtggacaaggtcctcgaggtgcctcctgttgtgtattcccggcaggagcaggaggaggagggccggaagcggtatgaagcccagaagctggagcgcatggagaccaagtggaggaacggggacatcgtccagccagtcctcaacccagagccgaacactgtcagctacagccagtccagcttgatccacctggtggggccttcagactgcaccctgcacggctttgtgcacggaggtgtgaccatgaagctcatggatgaggtcgccgggatcgtggctgcacgccactgcaagaccaacatcgtcacagcttccgtggacgccattaattttcatgacaagatcagaaaaggctgcgtcatcaccatctcgggacgcatgaccttcacgagcaataagtccatggagatcgaggtgttggtggacgccgaccctgttgtggacagctctcagaagcgctaccgggccgccagtgccttcttcacctacgtgtcgctgagccaggaaggcaggtcgctgcctgtgccccagctggtgcccgagaccgaggacgagaagaagcgctttgaggaaggcaaagggcggtacctgcagatgaaggcgaagcgacagggccacgcggagcctcagccctagactccctcctcctgccactggtgcctcgagtagccatggcaacgggcccagtgtccagtcacttagaagttccccccttggccaaaaacccaattcacattgagagctggtgttgtctgaagttttcgtatcacagtgttaacctgtactctctcctgcaaacctacacaccaaagctttatttatatcattccagtatcaatgctacacagtgttgtcccgagcgccgggaggcgttgggcagaaaccctcgggaatgcttccgagcacgctgtagggtatgggaagaacccagcaccactaataaagctgctgcttggctggaaaaaaaaaa

SEQ ID NO: 118922 - DNA, 922 bp, Homo Sapiens
tctctgctgatctgagtctgcctgtggcatggacctgcatcttccctgaagcatctccagggctgaaaaatcactgaccatggcaccatggtctcatccatctgcacagctgcagccagtgggaggagacgccgtgagccctgccctcatggttctgctctgcctcgggctgagtctgggccccaggacccacgtgcaggcagggaacctctccaaagccaccctctgggctgagccaggctctgtgatcagccgggggaactctgtgaccatccggtgtcaggggaccctggaggcccaggaataccgtctggttaaagagggaagcccagaaccctgggacacacagaacccactggagcccaagaacaaggccagattctccatcccatccatgacagagcaccatgcagggagataccgctgttactactacagccctgcaggctggtcagagcccagcgaccccctggagctggtggtgacaggattctacaacaaacccaccctctcagccctgcccagtcctgtggtgacctcaggagagaacgtgaccctccagtgtggctcacggctgagattcgacaggttcattctgactgaggaaggagaccacaagctctcctggaccttggactcacagctgacccccagtgggcagttccaggccctgttccctgtgggccctgtgacccccagccacaggtggatgctcagatgctatggctctcgcaggcatatcctgcaggtatggtcagaacccagtgacctcctggagattccggtctcaggtgaggaagccacagtcttctctagtacaattcagggaagccagacaggttgtggagagctttacaggcagggcagcccctgctaagaaagacaaaaaggggaaggagaacacagaaatcctagggacaca

SEQ ID NO: 118923 - DNA, 1000 bp, Homo Sapiens
atttgaggttacatgatatgctttatgctcataactgatgtggctggagaattggtattgaatttatagcatcagcagaacagaaaatgtgatgtattttatgcatgtcaataaaggaatgacctgttcttgttctacagagaatggaaattggaagtcaaacaccctttgtattccaaaatagggtctcaaacattttgtaattttcatttaaattgttaggaggcttggagctattagttaatctatcttccaatacactgtttaatatagcactgaataaatgatgcaagttgtcaatggatgagtgatcaactaatagctctgctagtaattgatttatttttcttcaataaagttgcataaaccaatgagttagctgcctggattaatcagtatgggaaacaatcttttgtaaatgcaaagctgttttttgtatatactgttgggatttgcttcattgtttgacatcaaatgatgatgtaaagttcgaaagagtgaatattttgccatgttcagttaaagtgcacagtctgttacaggttgacacattgcttgacctgatttatgcagaattaataagctatttggatagtgtagctttaatgtgctgcacatgatactggcagccctagagttcatagatggacttttgggacccagcagttttgaaatgtgtttatggagtttaagaaatttattttccaggtgcagcccctgtctaactgaaatttctcttcaccttgtacacttgacagctgaaaaaaaacaacatgggagtaataatgggtcaaaatttgcaaaataaagtactgttttggtgtgggagttgtcatgaggctgtgttgaagtgacttatctatgtgggatattgagtatccattgaaatggatttgttcagccatttacattaatgagcatttaaatgcaacagatatcatttcaggtgacttaacatgaatgaataaaagtcaatgctattggaaaaaaaaaaaaaaaa

SEQ ID NO: 118924 - DNA, 1000 bp, Homo Sapiens
ccatttcctatggccgactccagcccttgggttcatattaccctaggtgatggcagcaccttccagaccaaattgttgataggtgcagatggtcacaactccggagtacggcaggctgttggaatccagaatgtgagctggaactatgaccagtctgctgttgtggctactctgcatttatcagaggccacagaaaacaacgtagcctggcagagatttcttccctctgggcctattgctctgctcccgctctcagacaccttgagttccttggtttggtccacgtcccatgaacatgcagcagagctagttagcatggatgaggaaaaatttgtggatgccgttaactctgccttttggagtgatgctgaccacacggacttcatcgacacagctggtgccatgctgcagtatgctgtcagccttctgaagcccactaaggtctcggctcgccagctgcccccaagcgtagccagggtggatgccaaaagccgagttctgtttcctcttgggttgggacatgctgctgagtacgtcaggcctcgggtggcgctcattggggatgcagcccacagagtccatccgcttgcaggacagggtgtcaacatgggctttggggatatctccagcttggcccatcacctcagtacggcagccttcaatgggaaggacttaggttccgtgagccacctcacaggttatgaaacagaaagacagcgtcacaacactgctcttctggctgctacagacttactaaaaaggctctattctaccagtgcctccccgcttgtgttgctcaggacgtggggcttgcaggccacaaatgcagtgtctccactcaaagaacagattatggcctttgcaagcaaatgagtactcctctcctaaagaaagattacgttgatgaaaaagaacatcctgcccaggacccatcatacatattttcaagatcttatttaatttaataaacttactttacattaaaaaaaaaaaaaaaaaa

SEQ ID NO: 118925 - DNA, 1000 bp, Homo Sapiens
ttccctgtgctccttttactcaacccctggggtatctaatcttgccaggtcttggccagttgagattctgttccacctgcctgcctggccctttcctccattaccatccagactgctcgcctcctggggattctcaggggctccattatggcttgatttactccacgtgcagaagtcttgagtggacctaggaggtaggtgggatattttttttcactaggatacagctcatgccaacccatcctaagtgagttcagaatcagggtatcttgccctataagataaacagtcaaaatgccaccgagctgttcactagtgatgtgtggcaaatcaaatcaactgttgaagaaggggtgagttttctgtgctacaagcacctgtcactgttggtacttgcaggaggcttctgctgggtatgttttggaagtgagtgtcactacttggctttgcttagcaggttctgcttcacacttgttctttgacctgctgacttgtgacttgcagaaacataggcagtagtcctagcctggtaaagaccctccaccacccctataagtttgattgctatgcaggtttgggagaggaggcctattgggctcttggatggaaccctttcccgtattaaacaaaccagagacagaatcagtgctgactcaggatctcctggtttggaatcgtaatgtgcctcaatcctctttccaagcaggcctcaccagtctctttctctttcctgcttcacccctgcaatgagccaagaaccaacactacatccacctagaactgcagaagggcttgtggtttcaaccaagacccatcctgagcaagggacttggcttggtgcttttgatcccaaagttcccacaccggcagtggcctgctggggcaatggcatctgtcacggtgttttctccagcaggtggagattatggaacctacatatgggtctggaaaaactgtacactgttgtcaccttgaccattaaaaaccagaatgaggacaa

SEQ ID NO: 118926 - DNA, 1000 bp, Homo Sapiens
ccttcctggtgctgctcctgagggaatgcttccgagacctgagctggctggcactcatccatagcgtccgtggggaggcggggctgctggtgacgagtatcgtcccgaagaccccgtttttctgggccatgcacatcactgaggctctgcaccagaacatgcaggctctgtttagcaccctggctcaggcggaggagcagcagccctacctggagggctccaccgttatgcgcgggactcgctgtctggcagagtaccacctgggggattatggacacgcctggaacaggtgttgggtgctggacagggtggacacctgggctgtggtcatgttcattgattttggacagttggccaccatccctgtgcagtctctgcgcagcctagacagcgacgacttctggaccatcccacccctgactcagccattcatgctggagaaagacattttgagttcgtatgaggttgtccatcgaatcctcaaagggaaaatcactggtgctttgaactcggcgttgcacatcctaaagtttgaagagtctaaataacggggcttccctcagcatgttccctctcctgtttgccacggatccagaggccacctgccctgtcttctcgtacccctttcactcttgaggcctgggaggtgaaaaaggccagactgtgcccaggattgattcaattttgcttttactcccagcttccctctcaaaagagagtgaagtctcatttgtcatgtgtcttcagttccccaacttggcatgaacatttgaaccaaacataggaaactaccattaggttggaagcctgaggcagctgggatggtctttcttgtgtctcttctttgcaccccagagcatgatataagtggtcctaacagattctggataatggagaagccctctgctggttttcctggcattccatgtagaataggtagagaatatttaaccaatgagcaaataaatgttggcatgtttcatgaaaaaaaaaaaaaaaa

SEQ ID NO: 118927 - DNA, 1000 bp, Homo Sapiens
gcagatttcattgcatttattgtgttcatatcattttcttggggattatttgtaggacaaccaacctggagttttgcctctctagagtaccacccagtaagtctggctgagcatcttatgtccagtaggttcttggtaaacatttgctaaatgaaattactgattgaaatttggggaaaagtgaataagaagactatctaggacaaaaagccaaagccgaaaatagtatatgagcattctagcccagagactgtcgctactaaaagaatgaaggaaataataaagtgatagacagggaaggatagaaaagacttaacaatatacatgtgttccgtctttgctgttttggagaatgatggataagtagtgtttcctgattctgaagcatagctgaacaatttaattgtggtttaccatctttttggttccctcttcagtaattaacctatcgaaaatctgtcctaaatgtttggactggggcacagttccctccatcgctttgggagaaaatcattaatatggcatactgcagattggagggcaggaccactgagggtgtcatagacattagctctatggaattctgctagcaatttccaagtgacagtgaggaattatggatatatgttgaggtcattcagcttcctgagtaccacattccccagctacttagacacgggttaaaatattaagatgtcctagttcaacagcttgaattccattgattgatactgatagtgcctgtccaagacaccagctgaaagacttgttttgtgtacaaaatagttctgaaagtggtgagatacaaaaaggttttagaatcactgccctgttgagagaaattagggggaaatgattacatttagaagctgctagagttatccagtgtttgctggtctttgcaacaaactgtggagaatgggtggtatgtaatgctttggtaggcttcaatcactgataaaagatcatgttaaaataaaaaaaaaaaaaaaaaaaaaaa

SEQ ID NO: 118928 - DNA, 1000 bp, Homo Sapiens
gcctggccttttttttttttttttttttactggatttctttttctcctgattttcggcctcagctcctagagtggcctcagctaggtaaccaacgggagtcgacttatctatgccaggcctgcagtttcacatctgtgacgggatgggacaaatgacaccgtggtattcgatgacagctcccaggtatttcaaggttggcccttactcattcagggggtatgtttgagtgccacggtgtgcccagactctgctaggcaccagagagacaagatacgagtgacatggttctcctcccactgctgacggaggaattaacacaaaagcagacaacactctagaactggagagaggtccagattgcgacaggagccacaccagagtgtgcaggcttcatggaggacagaagcgacttttgtgccgggacttaaaaagataaggaggccaggtgtggtggctcatgcctgcaatcccagcactgtagaaggcagaggccggcagatcacttgagcccaggagttggagaccagactggggaacatggcaagaccccatctctacaaaaaaattaaaaaatttggcctggtgtggtggctcatgcctgtgatcctagcactttgggagttaaaatacaacacttcccagctgcccttatagttaaggtctggccagtgaaatgtatgtggaaatgttacatgacacttctagaaggattcttaaaagacaaatacaccctttcttcccccttcctatttcctggaatgtgggtgtgatggctggagccctggcagccatactgccacgtgtacagacgagtgccgtcctttagggatgacaggagcctggttccctgatgatggcagagccagatatcagcacaaacttatttaaatgggagagagaaggggagaaccaatctcaacttctaccttgtgtaagctgctggttttgggggttttctatgacagataccaaaataaaccctaactgaacatgtactcc

SEQ ID NO: 118929 - DNA, 1000 bp, Homo Sapiens
ttttgacagatgccaagaacatacattggggaaagaacagtctcttcaataaatggttctgggaagactggatattcatatgcagaagaatgaaactagactcctatctcacaaaaatcaaatcaaaatggattaaagacttaaatctggccaggcgcagtggctcacacctgtaatcccaacactttgggaggccaaggctggtcttgaactcttgacatcatgatttgcccgcctcagcctcccaaagtgctgggattacaggcgtgagccaccacacccggcgacttcatccactgtctgtccgcttcctgtgtaaggccgaccacccagcccccaaacaacccttaaaatgagacccaaaccaaagacctaacatataagcctcaaatcagtaaacctctcctgaaacaggcagaggaactgcctgcccagaaatactcacaataggctgtgcagattgtaaagagatcaacagcttcacccacgctctgcataaactctggtactggctgtgttctccatagaaggtctcgctgtgttgcctgggctggagtgcagtggtgtgaacacagctcactgcagccttgatctcttgggcttaagtgattctcctgcctcagactcctgagtagctgagaccacaggtgcatttcaccactcagctaatttttagtttttttgtagagatgaggtctctaccaagctggtctctaactcctgggctcaagcgatcttcccatcttggcctcccaaagtgctgggattacacatgtgaaccactatgcttggctcaaagatttattgataataccctgcaagcacaagcgtgcaaagcaaaaatggacaaataggatcacatcaagttaaaaagctgcacagcaaaggaaacaataaacaaagtgaggaaacaaccacagaatgggagaaaatatttgcaaaccacccatctgacaagggattaattaccagaatatataaggagctcaaacaactctat

SEQ ID NO: 118930 - DNA, 1000 bp, Homo Sapiens
taaacataagagaattcatactggagagaaacccttcacatgtgaagaatgtggcaaagccttcaattggtcctcatcccttactaaacataagataattcatactggagagaaatcctacaaatgtgaagaatgtggcaaagcttttaatcggccctcaacccttactgtacacaagcgaattcatactggcaaggaacatagttgaatgacatttctagtaatctctaattccagtgtctttacacagcaaataaattggagaatattgctcccatataaacttgtattatttttcttattttaaattttttaaaatttctgtaggtacatagtatgtgtatctattcatggcttatttggattattttgatacaggcatatgacatgtaattatcacatcagagtaaatgagttattcttcacaagcatttgttctttgtattacacacagtccagttatacactttaattttttttttttttttttttttttgagacagagtctcgttctgtcgcccaggctggagcgcagtggtgcgatcttggctcactgcaacctccacctgctgggttcaagcaattctcctgcctcagcctcatgagtagctgtgactacaggcaggtgccaccatgcccagctaattttttgtattttcagtagagacagggtttcacaatgctggccaggctgttctcgaactcctgagctcatgatccacccacctcggcctcccaaagtgctgggattacgggtgtgagccatcgtacctggccactttaattatttttaaatgtgcaattatttttttactacaggttattttatgattataataagtatatgagtataattataattcacacatttctaagtcatgaatgcttttaaaaaatgttccatatttatctttgaacatgtagcatctctttccgcaaataaatgcagactttggttttgatttacatcaaaaaaaaaaaaaaaaaaaaaaaaaaaaaa

SEQ ID NO: 118931 - DNA, 1000 bp, Homo Sapiens
ctgctgccgctctgccggaattacgtgcgcagggtccacgtcgatcagttccttccgccggtgcagctcccggcccagctccggccgggcgaccagtccgactcaggcagcgagggagagatggaggagcccaccgttgaccactaccaactgggcgatctggtagctggcctgagccacctggaggagctggacctggtgtacgatgtcaaggactgcggcatgaatttcgagtggaatctcttcctcttcacctaccgcgactgcctctccttggcagccgccatcaaggcatgccacaccctcaagatcttcaagctgacccgaagcaaggtggatgatgacaaggcacgcatcataattcgaagccttctggaccacccagtcctcgaggagctggacttgtcacaaaacctcattggagaccgtggtgcacgaggcgctgccaagctgctgagccacagccgcctgcgtgtgctcaacctggctaacaaccaggtgcgtgcacccggtgcccagtccctggctcacgctctggcacacaacaccaacctcatttccctcaacctacgtctcaactgcatcgaggatgagggtggccaggctcttgcccatgccttgcagaccaacaagtgcctcaccacgctgcacctcggtggcaatgagctgtctgagcccaccgccacactcctgtcacaggtgctcgccatcaacaccacactcaccagcatcaacctgtcctgcaaccacatcgggctggacggtgggaagcagctcctggaaggcatgtcagacaacaagaccctcctggaatttgacttgcgcctgtcagatgtggcccaggaaagcgagtacctcattggccaggccctctacgcaaaccgagaagcagcccgccagcgggccctgaatcccagccacttcatgtcaaccatcactgccaatggccctgagaactctgtgggataaaatgacctgacttggaaaaaaaaaaaaaaaa

SEQ ID NO: 118932 - DNA, 1000 bp, Homo Sapiens
aaggaagccgcaaggtttaaaagacgagtcctaattcagtaccttgagaaggtactagaaaaaataaattcccaccaccttcacaacaacattagtcacatcaacagcagatcatcatgttagtgcaaagaccagtgagaaaaaaatgacaagttttctgtgctgtaggatggaacaggatattgttgaagcctcctggaatgtttgagtcaagggaattgctttccagatgctaagaagcagcagtggggcttttgaattttatgattatctggcagtgaaagctgggcttttgccttaataattttttaaagtatgaattgttttgttttgttttcctcaattgaggaagctgatgttattaattcacaggctaaattcggtaaacaccactgcccctaccacgggtaatgagaggtcactcacttgaactttgccattccaggcattctcagagtggcgaggggccacctgcaagtggagcacaacttggtgctcttactgtgtccttcagaaagaataggtgtacagaaaggaaatggcaatcttatgtgtgctgaacaaagttttcaacaattcctagttgtgccttttaaaccatgcaatattcaggatagtttgaatcaaagaagtaagaagctgctatttgggtaacttatttctctgtgggaaggggcagggagagtcaccaaacaatctacctccaactctcttctcttttgtctagagacattacaaagtgcacttgaggctgcccccaacctctgacatttgttcttgcatgtgatgatagaaagtcttcagatggacttatacattctgtgctttggaagcacaagaagaacaaaatatgtgtatatttcctttaatgtttatacaaaagtttatatggagcagtattgttatgtttgtatgaatttgcaaaaattaaagtgtacaaagagattttgattttgcatatataaaataaatcattttattgattttcacaagttcaaaa

SEQ ID NO: 118933 - DNA, 1000 bp, Homo Sapiens
atgtccaattgttaaatgtaccattctgaacgatgttaaagcaagtgtggtttatttatggcatgaaccatgtaacttgaaatatgaacttacaaggaggggcactcattaggtaacaagttcttacaccaaacttccttgatgaaataagccaaaataatcctaaaattcattagaagaacttgataaaagactcaaataaatgttagaaagagcccgtaattttaggactcctataaaattcttccttgtttgttaatgctattaaaactcagattcaagggaaataccagcttccacttgagtcactttgaaatagttaattcaacagcaccatgttagaaatatattggcagccaagactctgaactctgcagaaacatttgtttcacccagacttcaaactctagccctgactatgatgcccctgtgtgcatttacaataaagactccaacggagggagcctgttggtgttaaattgtttacatttctttatacaaataatgtgctttcagtgccttagttacagctccctttctgtttcttgttccaaggattctgtagtatgtagtgtgtttcttaggtaaagtctctttttgctactgaaagggaaatggtctctaaacactggtcactgtagcaggtaaacactactctaacgtggagaaatgagcttcatgctgaggtagtggttgccttagagctgttatttatgctgtagaaaacgaaaatggttttgctacctgataagcttcagattagatatagccctaaagttatcctgtacctgcattaaattttcattttagaagagaatcttggttttggtaattcatttttttttaagatcattatgtgcaaaacaccaagttttaaaaataactcacagaatggccttagttttcaatgtctgatggtatatttgtgagttgtgttatctgtaatatacatcccagaataaaggagtgaattaaatagtttaaaaaaaaaaaaaaaaaa

SEQ ID NO: 118934 - DNA, 1000 bp, Homo Sapiens
ccccatgacagccgcagcctgctccccacctgcaaacttcagccccttctgggcctcgtccccgcccagccaccaggcgccctggatcccgccctcctcccccaccaccttccaccacctccaccgcccacagcccacgtggcccccaggagcacagcaggggggcgcccagcagaaagccatggcggccatggacggccagagatgagactggacgccgccgggcgctgggctggagctgggggcagcccagggttgtggggacacaggagggccagggaggggggagccggggagggcagggggtttcccgaagatcgcactggaagattttataaaagaatttttgtgggtcggggggacagtaaacttcctgggccacgtgggtccttcaggagtttttcaggcaagtttttcctctgtttttaatatataactataatatatatgaatagataaatataactaatgtgcgtgagaatgggcctggcacacctggggtgctcgggggtagggctgccatgctgcagagctgatggagtgatgttgtgggcacaaggcatctgtcagctgcctcctttaacagccatgccttctggaatctggaagaggacaccactcctgcagtcaccgggcagccacatagcagctgcaggtcccaggagggcctgaggtcaaagctgtggaaggccctcttggtatcagggctctctccccatggcctcttccccacctctgattgctggttgtggccccatagctcatcacccctgtctcctgctgaatgtgcagggctgatgtggcactgaggagctgactttggtcaaaggccaggctctgcccagcaggggacttgactgcccctcccgctgcgtgtccaggtccaaagtggagagcctgcctttgggtttagttcccgaatcagaatcccatctcaccagggcgaaattttaatttaaaaacttaaaaagagacttttctaaaaaaaaaaaaaaaaaaa

SEQ ID NO: 118935 - DNA, 1000 bp, Homo Sapiens
tatttttattcttttgagatggagtttcactcttgtcaaccagattggagtgcagtggtgcaatctcggcttgctgcggactccgcctcccgggttcaactgattctcctgcctcagactcccaaatggctgtgattacaggcacccgccaccacgcccagctaatttttgtatttttagtagagacggggttttgccatgttggccagactggtctcgaactcctgacctcaggtgatccatctgtctcggcttcccaaagtgctgggattgcaggcttgagccaccgtgcctggcctcaaactttacctttagacagtggctcttcagggcctttgtgtacatcctccaccaaaacggacctgacattgattgactaaatcaggatggaaatgatggcttgtgaaactaaccgttgtaaatttaaagatattcacatttgccaaatgtgttctcctctggtggctcactttgagtggctcacatgccttctatagaattgtgggaatatggaagaggtccagtaatatcttatgaatctcatgggtcctttcctttaattattctataggtgtttcattataggagcgcatctttaattagacagtattttaataataacttatttgtctggaggacgttggttcagtatcttcgtaaaccaagaactggtaaaccacagcttagtagatctaggactaagacttaaaatgtggttggaatctcactcaaggcctacccacctaaaactgcgtcctagcaattgcatgctgactgcacctatgagtcgtaagtctgtagttgcaacgtgtgtctagtttgatattctttctaaatactggtaagagaaacagacataccagaacttgtggcttgctgaagatggtatgagtaatgtggaatctggggaaggggtgcatgtcacatggaaattgggagtctttgaaaaatatctctatcctgtaaattaaaaaataataaatctagtttcggagtgtgc

SEQ ID NO: 118936 - DNA, 1000 bp, Homo Sapiens
caccagcgtggctcctggtgccagtgacctgccaggaggccccttgtgattataaaaccgttcagttgggccgggcgcagtggctcacgcctgtaaccccggcactttgggaggccgaggcgggcggatcgcggggtcaggaggtcgagaccatcctggctaacatggtgaaaccccatctctactaaaaaacaaaaatacaaaaagttagcctggcatggtggtgggtgtgtgtggtcccagctacttgggaggctgaggcaggagaatcgcttgaacccgggaggcggaggttgcggtgagctgacatcgtgccactgcactctagtctgggtgacagagcgggactccatctcaaaaaaaaaaagaaggaaaatattgtaagcctagtggcttataaacaacagaaatcagtttcagttttggaggctggaagcccaagatgaaagcaccagtagatgcaacctcttttgtaagggtgatggtcccatgatgaggctgtgcccctgccctgtgaccggatgacctcccaaatgccccacctaataccatccccttgcaggtgaggacttaagcaggtgggttttggggggacgtgctcaggccacagcagggtgcatgaagagccagtgagcctcattgagcccctctggtcagccagatctgacattgagcccagcattgaagatcaaagcaggtggggctttgggatgtgaagtgggttctgacgcggggccccacagacctgtctccgcgtgagctgcctgcaggcccctgcgtcattcctcagctgcgtgcgaggcctctggcttggagagcctccccgctgtgcacagttctctctttgccagggcagggcttggggcagcaccaggctggggcagaggaggaaagcaagaggacagacctccagaagagcagcggagggcgggtgaggatttccccatataccagtgtgtgttcatctacccatgaggaataaaaccatgcagcagcatgc

SEQ ID NO: 118937 - DNA, 1000 bp, Homo Sapiens
agatggaactccattaggacacacgcggttccaaggggctgatgatgttaccagtgtcttattttctccctcctgtcccaccaagctctatgcctcacatggagaaaccattagtgtactggatgtcaggtccctcaaagattccttggaccattttcatgtgaatgaagaagaaatcaattgtctttcattgaatcaaacggaaaacctgctggcttctgctgacgactctggggcaatcaaaatcctagacttggaaaacaagaaagttatcagatccttgaagagacattccaatatctgctcctcagtggcttttcggcctcagaggcctcagagcctggtgtcatgtggactggatatgcaggtgatgctgtggagtcttcaaaaagcccgaccactctggattacaaatttacaggaggatgaaacagaagaaatggaaggcccacagtcacctggtcagctcttaaaccctgccctagcccattctatctctgtggcttcgtgtggtaatatttttagttgtggtgcagaagatggtaaggttcgaatctttcgggtgatgggagttaagtgtgaacaggaactgggatttaagggccacacttcaggggtatcccaggtctgctttctcccagaatcctatttgctgcttactggagggaatgatgggaagatcacgttgtgggatgcaaacagtgaagttgagaaaaaacagaagagtcccacaaaacgtacccacaggaagaaacctaaaagaggaacttgcaccaagcagggtggaaatactaacgcttcagtaacagatgaggaagaacatggcaacattttaccaaagctaaatattgaacatggagaaaaagtgaactggctcttgggtacaaaaataaagggacaccaaaatatattagtagctgatcaaactagttgtatatctgtataccccttaaatgaattttaaatccaataaaaacatttgaagaaaaaaaaaaaaaaa

SEQ ID NO: 118938 - DNA, 1000 bp, Homo Sapiens
gtaaaaggtgctcctttgcctgggtttgaattccagcgctgccacttcctctctgcacctcctggcaagtttcttctattccccacgtttaaagcgatggcacctccgtcccagggtggtgtgaggattacccagtgtggtaggtgctcaataaatgttggtcattgttatcactgaagcccaacatgctagtgcttctagacccttctgtcagtgctgataagcccttgctaagtcccagccccttcatgcttggctggcgtctgccctagggctggggttctcaagcccctggccctggcccagagatttggattcccttggcggccgtggagcccagcctttgatgtctttcaaagcttctgtggtgcgccctggattgagaaccaccacccgaggggtacagcccctctcttccaaccgagaagttcctgtcccagaatggacccagggacaagagaccctgagagccctgggactgggagtgtctgctcctctgaggccaggaggccggtgctgggccagagaggacggcgtggcgaaagtcagcgtccactgcagcacaggatcagatggccgtgtgctgtgcatgcaggagcctcgccttctgtgtctttagtcttgagccaaaatttgctcaaagactgatctcttccttgcagggaacagctttggggctgggggaactagaacccacatgttggtctaaaccctgagaaggtggcagtgaggaagtatcccctcaggtgactggatctgtgttcctccttaacatcatctgatggaatggcaatgaaaagcgtggattgtggaaaatacagaaaaacataaaggaaaaaactccaatcccctgagcccaccactgttcaggacccctgcttttgtcacctactatttccctttagtttttagcagcggctggatgtgatatgtctagtttaaccagtccccttgatctttctatataataaataacacaggagtgaacatcctgaatcag

SEQ ID NO: 118939 - DNA, 1000 bp, Homo Sapiens
agagcaatccagtggggagaagatggccgtccatttcactatctcttctatactggcaaacagtcatactattcattaatgcatgatgtatatggaatgttactcaatttagaaaaacatcaaagtcacttgcaagccaaaagtctgctcccagaaaaaactgtaaccagagacgtgattggcagcagatggctgattaaggaggaactagaagaaatgttagtggaaaaactgtcagatctagattatatgcagttcattcggctgctagaaaagttattgacatcgcagtgtggtgctgctgaggaagaatttgtgcagaggtttcgaagaagtgtaactcttgaatcaaaaaaacagctgattgaacctgtacagtatgatgagcaaggaatggcctttagcaaaagcgaaggtaaaagaaagactgcaaaagcagaagcaattgtttataaacatggaagtggaagaataaaagtaaatggaattgattaccagctttacttcccgatcacacaggacagagaacagctgatgttccctttccactttgttgaccggctgggaaagcacgacgtgacctgcacagtctcagggggcgggaggtcagcgcaggctggagcaatacgactggcaatggcaaaagccttgtgcagctttgtcaccgaggacgaggtcgagtggatgagacaagctggactacttactactgatccacgtgtgagggaacggaagaagccaggccaagagggagcccgcagaaagtttacgtggaagaaacgctaagggtttgctcccaggaaaggagaggaagagctatatatatgtgccgacatgtggcagacacacagtaaataatggctgaccagcatgagggcagtactgtcagaaatttctttgagctgtgagatggatttatttttaaatgctactttgtaaaggtgacctttaaaaaataaaaggaaaataaagaatgttagtttcaaaaaaaaaaaaaaaa

SEQ ID NO: 118940 - DNA, 1000 bp, Homo Sapiens
cttcatctgtacattctgtgataccaggcaaattaccaattacacacagctacttatattttatgaagggcattttttagatgacctcatcctctgtgttatttgttgattgggtttgttttctgtttgttggtttgtttgtttcttccacgtaaggaaaagtagtgtaaacagtagcgagaaaatggaaaccacagaggaagatgtattttgcatgtttttcctttcagtgttcttacacgttgtatcactgcattgtggtaatagcttctataaaatctgccatagttggattatgcagctttgcaaaaatttttactagattttgcactaactcatattagctttgtcctaccaacttctggaatttatctaattattgtttttcaaagtttctttccttttaatgtttccctgctatgcaaaacctttcccagacctcagtttcttaaaagaaagatgttgctacagttcccgattctttcttattacaggctcaggtgtacaggttattctgggttaattttatctaatgaagcccattcctttttgtacataaagatgtcacttaaacttatgcttacaaactaaagactaatcgctcaatatgaaaacatgaaaaaatttttgcttaaagtattaagatggaagtagttaaatatgggttattttgtccttttacttttttaaaaaatgttacatattgtatgcactgtgctgatgcaagaattctacattttaatgaattataaaattattctgcatctcatcacgtcacagtatttctgtactatttattcatatatataaatatatatgggcttaatcatttaaaatttgttgcagcaagaactttcctacctgtaggcaatagattgctatgtttttaacaaattgtggcaaattctaaacagcaattcttttgtacgtaataggacatttcatcctagaaaaataaagtaatgtttttgacattgaaaaaaaaaaaaaaaaaaaaaaa

SEQ ID NO: 118941 - DNA, 1000 bp, Homo Sapiens
taaattagcatctgagtttattgatgacattgagttaatgttttcgaactgctttgaatacaaccctcgtaacacaagtgaagcaaaagctggaactaggcttcaagcattttttcatattcaggctcaaaagcttggactccacgtcacacccagtaatgtggaccaagttagcacaccaccggctgcgaaaaagtcacgaatctgactttgtccttctaaaggatatatttgaagaaaaacaaattgttcatgaaaatggaacattaaatcatgctgtataaagcaataacaattgattgaccacatgaaagtgtggcctgcactatattctcaattttaatattaagcactcaggagaatgtaggaaagatatcctttgctacagttttgttcagtatctaataagtttgatagatgtattggatacagtactggtttacagaggtttttgtacatttttgagatcattcatgtgtccagagatcttggaaaatattttttcacccacgatttattttgttattgatgatttttttttaaagtggtggtattaagggagagttatctacatggatgagtcttccgctatagcacagtttagaaaaggtgtttatgtcttaattaattgtttgagtacattctttcaacactacacatgaatgaatccaatcttataaccttgaagtgctgtaccagtgctggctgcaggtattaagtccaagtttattaactagatatttatttagtattgagagtaatttgtgaatttgttttgtatttataaaatttatacctgaaaaatgttccttaatgttttaaaccttttactgtgtttttattcctctaacttccttaatgatcaatcaaaaaaagtaacaccctccctttttcctgacagttctttcagctttacagaactgtattataagtttctatgtataactttttaactgtacaaataaaataacattttttcaaataaaaaaaaaaaaaaaaa

SEQ ID NO: 118942 - DNA, 1000 bp, Homo Sapiens
tgtccctggtaaatgtttcccggctgggcgcggtggctcacgcctgtaatcccagcactttgggaggccgaggcgggtggatcacctaaggtcaggagtttgagatcagcctgcccaacatggtgaaacctcgtctctactaaaaatacacaacttagccagtcttgttggcgcacgcctgtaatctcagctactagggatgctgaggcaggagaatcgcttgaacccaagaaagaggtggaggttgcggtgagccaagattgcgccactgcactccagcctgggcaaacagagggagactccatcgccccccccaacaaaaaaaaaagtttcccatacactggcctgccccaaaacccactaacaattttagcaaaacagtccaggccaaagaggaagcatttcatgttcaataagaaacccagccattccgcatggctggttcctgagtggctctggtgatactctccagccacctgctgacattcagaatctcagacctcgggactgctgttgcggtaccgtgtgtctgacacctgccagcagccctttgctatctgcgcgcaggatgggggtgactgcccagacattcccgctagataggctctgatttccggggcagcctttcagatgcggcagacatacaacacctgtactttagagttttaagggaaaaaaaatcagaagtgctggttagatagtaaaaacttaggataacttagaaaggctagttttagcttcctttgtggctccctggtgcaaaacaattagcagttatgcaatggacctgattctagtttattctaattaagaagtgaggccgagtttgacttcgttcctgaatacaatcttgagtaactgggaaagtctgagtgaaaggatggcctcattctctttctaatcttgctggtttcaagattagaaaatggcattatttgatctgaaatgtttgagaagacacgaataaagttacttgggcagaaaaaaaaaaaaaaaaaaa

SEQ ID NO: 118943 - DNA, 1000 bp, Homo Sapiens
tcccatctgggtgcctgagttttgactccaatcagtgataccagaccacattgacagggaggatcaaattcctgacttacatttgcactggcttcttgtttaggctgaatcctaaaataaattagtcaaaaaattccaacaagtagccaggactgcagagacactccagtgcagagggagaaggacttgtaattttcaaagcagggctggttttccaacccagcctctgagaaaccatttctttgctatcctctgccttcccaagtccctcttgggtcggttcaagcccaagcttgttcgtgtagcttcagaagttccctctctgacccaggctgagtccatactgcccctgatcccagaaggaatgctgacccctcgtcgtatgaactgtgcatagtctccagagcttcaaaggcaacacaagctcgcaactctaagatttttttaaaccacaaaaaccctggttagccatctcatgctcagccttatcacttccctccctttagaaactctctccctgctgtatattaaagggagcaggtggagagtcattttccttcgtcctgcatgtctctaacattaatagaaggcatggctcctgctgcaaccgctgtgaatgctgctgagaacctccctctatggggatggctattttatttttgagaaggaaaaaaaaagtcatgtatatatacacataaaggcatatagctatatataaagagataagggtgtttatgaaatgagaaaattattggacaattcagactttactaaagcacagttagacccaaggcctatgctgaggtctaaacctctgaaaaaagtatagtatcgagtacccgttccctcccagaggtgggagtaactgctggtagtgccttctttggttgtgttgctcagtgtgtaagtgtttgtttccaggatattttctttttaaatgtctttcttatatgggttttaaaaaaaagtaataaaagcctgttgcaaaaaaaaaaaaaaa

SEQ ID NO: 118944 - DNA, 1000 bp, Homo Sapiens; identical to SEQ ID NO: 116002

SEQ ID NO: 118945 - DNA, 1000 bp, Homo Sapiens
ttttgatgtggttcccatgttctctaacagggccagctgagcagcacaggccaggaggccacagtgtaagcaataacagatctgccacatgcagaagcaaatatcaggcctgtcgcacacgggcggcatttaaataggaatttctatttttgaaataagggatggtctatgaggcatacagtagatttgatgtgatccttttctccctcccttccataatggatcgtggtctgtgtgactgaacccacacagagtgtcatgggtgacagtttctggttgaagtagctccacgcctggcttctgtggacagcagattcttttccttctcacaaggggctcatttaaaatttggaggctgggtgctgtggctcacgcctgcaatcccagcactttgggagactgaggcgggcggatcatgaggtcaggagatcgcgaccatcctggctaacagtgaaaccctgtctccactaaaaatacaaaaaattagccgggcgtggtggcgggcgcctgtagtcccagctactctgaagactgaggcaggagaatggcgtgaacccaggaggcggagcttgcagtgagctgagatcacgccactgcactccagcctgggcaacagagtgagactctgtctcaaaaaaaaaaaaaaaaaaaatggaacgcagggcaagaactcgtatttggaaggagatgggggaaaggagcggtattatacctatgttgtatttgcaggcaaatgagatggagccctctctgtaaagaagagtcatttgtgcaagtagacggggtctgtgggtgcaggccctggaggggcacacaattgcctggaggcttctgtgagatcgggagagggaggagaggcagtctcttgacaaaataaagtatttttattcatttgtatttattaaatgaaaaaacaatcccatggtgtccctgttgtgtggtggaacctaatgactgttgaaataaagttctgtgttttccctgccctgcaaaaaaaaaa

SEQ ID NO: 118946 - DNA, 1000 bp, Homo Sapiens
tgggacgatgcttcctctcatccaaaacacatgcagagtcacatcctcatcctagtgtttggcagtttgagaccgctaccctgaacttaagagctttaaatatgagggttgtgtttctgggggggttatttttttggtgtgtgtgtgtgtgtattgtgcttagaaaggttgcagatttcatcttcacctaccaagaggcggccgcctccttggacaagccgctcatggaccattagacttgagaagacgacccacgtggtgactgcaaagccctgggtacttgccttcatgttctggtttggttttccctttttctgctgctcttggcagcagcctggtcatcatctgcttgtgggagtgggaaatgggtattttagacccaacacaggttctaaatttaaaacaaataataattggaacaaataaaggttcttgtacccagagtgattctacatgggaaaaacaaaccagcttttttcagagagtgaccgaataggaagaagggattcagaaatatgatgtagtagaacatgccctgcaggaagaaaatgttttctctcctgcgtatgttaagaggaaatcagtttaaaatgcctgctaatcaaatgtcgactcagctaaccatatgtccaggttgctgcagagtttctttcaaatctgagtgttgcctgctgaactcggaggggagtttggagaaattttagacagcagctctgtgttctttttttgccgcagccaataagataatagcagaattagccaatcctaaaaccttctaaagacgatttttgagcatcccactgggattatttaatttttctttttgacgtgtgtttttagtttagaagtgctgtattccacaaggtttaagtcagtgaggttggaagataccctatcttttttattcaaaaagcacaatcaatcttttgtttgaaaatctatataaagtacaacttgcttttagcatgattattttcctaaataaaaagacaaagaattt

SEQ ID NO: 118947 - DNA, 1000 bp, Homo Sapiens
agaaaacagttatattgtcataccatagtaggaagaaaaacctttatttggaatatacactactgtaagtttgtacagatcatatacctaccacctgtctttgcttaaagagccttgattacataaatatgtaggaaaaaacatattgagttcaaaatttatatctaacattgtttatgttatgatttttttttaattgcaaagactaggtgtatatttttttctgtttttctaaatgacccgtggtacttaataggtgtactaaaattgtgttgggagcagggatttggaaatttctgagagatgtgtagttaatttagtaattctgtttcatgagatatgatctgttatgctagtggtttaataggcttgctatgtaagtagaacgtggctcaactagatatctttatatgtatgggcattactcttagtgatatttgtttcctgtcctttgttgctcatgctgtttaagtgcaggctgagacccagcctctttgtaagtacagtaaaataatccaccgttttttacagaccctagtcaaagggttaaaaaaattaagattgctttccatgtttgaaatttaccattgagagtcaatgaagttgctattttgagtttagcattgatattgtgaaaataagtgcaatttggatttcatgtttcttaatattcattcttgtttcacaaatgaatgattaaggaattatgcatcataaaggaacctaagtgaggtatatgatgagtgtattgtctttgcacacacatataggtatattctgaatacaagcttattcacattttgcttcctaatctttttgttgtacagggattcaggtttcttattcttacaacatgattgtttatatgtgaagcacatcttgctgttgccttatttttgatgcttttattcatgacaagaattgtcaatataagaatgtatatcttttttgcaaccaatttaataaaggagttgaaagaaaaaaaaaaaaaaaaaaaaaa

SEQ ID NO: 118948 - DNA, 817 bp, Homo Sapiens
gtaataaccgcgcgcggcgctcggcgttcccgcaaggtcgctttgcagagcgggagcgcgcttaagtaactagtccgtagttcgagggtgcgccgtgtccttttgcgttggtaccagcggcgacatgacggggtacactccggatgagaaactgcggctgcagcagctgcgagagctgagaaggcgatggctgaaggaccaggagctgagccctcgggagccggtgctgcccccacagaagatggggcctatggagaaattctggaataaatttttggagaataaatccccttggaggaaaatggtccatggggtatacaaaaagagtatctttgttttcactcatgtacttgtacctgtctggattattcattattacatgaagtatcatgtttctggtgatacaattctggagactggagaagtaattccaccaatgaaagaatttcctgatcaacatcattaaagattatgtaaaaagttaaaaggcttatgagcctaagtttgttcctatattaccatatttactgaattttctggaaaagtaactttaataaagtttaatctcagaaattgtcatatctgttttcaagcattgtacaatttgagactgagtaatttaacaataagtaaaaagtggacatgctaaacaaatatgagagactacctactttttctggtcattcttgacttggaaaacggtatggaaaagtatttagttacatgtttgtttgtttttttcttacacagtacttacactaatttggtatcagggtatgcaacagtgaaatatcacaataaacaaatgtaagaacag

SEQ ID NO: 118949 - DNA, 1000 bp, Homo Sapiens
aactacaacagagatgaagttcagctgccccggggacctagtgccacaccagtagattgttcactctgtggtaaaaaaagaagatatgttagactgggattgtcttcatcatcatctttatccagtcatacagcaggggtgacagaaaaacattctcaggactcatacaactcactgtcaatggacataataggtgatccttctcaagcttatactggttctgaagtagtcaatgaccatcaatcaaataaaggaaagaaaactaatttcttgaagaaagacaaatctatggagtggtttacaggaagtgaagaatgagatggcccaactaaaccaatttggaatcattaactacaaaatgtcaaactaactgcaagacaagtgtcaaaatgggatgtttaagcagttttgctatgttatacatcttttagttgttattttcaaaattatatgtataagttatataagtcatagtaatagctaaaaatgccaatctatggaagcagtgattttcaatataaagttctattttgatatttttccatcttcaagtcagttactgtcatctggagtactcagttaagttgtggtttgaccttcctcaacttgacaagaaaagctaatttaagagaagaaaaacataaagtcattatattaattaaaagaaaaaacaccatttaatatgttctgaaaacattactcacctgtatgaccaggttgccagtgtactggtctagcaacatagggaaatgatccatatggaaaatcagaatgcgattcttctgttgtaaaaaaatatatgtactataagctacataaaatattttctatttttttcacaaaactgttaaaatatgagttactctctttattgtaagttttttctttatttatttccttgcatatgttttagagctactctgccagttattatacagaaactatttgtcaatgattatgtaataaacatatgattttataaccaaaaaaaaaaaaaaaa

SEQ ID NO: 118950 - DNA, 1000 bp, Homo Sapiens
atggaaaattattatcctttgaaaactgattgataaatatattccccctcctttagaaacagtcaaaagccacttcaaacaagtttcaaaataaaggaaggtagcaagttaggcgatggattatattttcttgcttgttgtataccagttgtcaaggacattataaggactcccaaaagcattttgaagaatggcaatatcaaataagtgtatgtcctctcaaatgaggcatttttaattgttaaaatctatttggacgctcaggttatgatatgtttatgaaaaataagcttcattatttttatagctacatcctattattcccttttagaaacaagaataacaataagttttaatagttgccatacttagcatttatcaggtctaatgaaaccaatattgaatctctgataaatattttctgatgttactagctatgggaaattagaactggcacaaccctgacattactaagtggaaatgttaggatttttcggcatcgcatgttagaatctctaaaatttaaacattcctgttaaatgactaaggtttgcttttatcaatatgaattctgaaggccaatatcataccattaactatgaaagcttttaattcctaaaaatagttttagagatattcaagcaatgctctcctaatatccatacgcaagtgtgtttatgacacaaattcactagtctgtttaaaaatgaattctttatattgactggtgttccacatatttcagtaatttctgttatgagaggacttgaaatagcaaattgccacacagttaactggatagaccacgtacgtggtgatcataaccacttggtactacacccagaaactcaaaattgtctttctcctgatgagatatgggtgcccttttgtacgtctaggcctaggtaaccagtggagtgattatattagcaaatgtgtttgtatccagagtcttcctgtcattgtaataaaaaatttatttaaaaaaaaaaaaaaaaaa

SEQ ID NO: 118951 - DNA, 1000 bp, Homo Sapiens
aaagtcccctcaggaattttcagaggaaagaacattttatgaggctttctctaaagtttcctttgtataggagtatgctcacttaaatttacagaaagaggtgagctgtgttaaacctcagagtttaaaagctactgataaactgaagaaagtgtctatattggaactagggtcatttgaaagcttcagtctcggaacatgacctttagtctgtggactccatttaaaaataggtatgaataagatgactaagaatgtaatggggaagaactgccctgcctgcccatctcagagccataaggtcatctttgctagagctatttttacctatgtatttatcgttcttgatcataagccgcttatttatatcatgtatctctaaggacctaaaagcactttatgtagtttttaattaatcttaagatctggttacggtaactaaaaaagcctgtctgccaaatccagtggaaacaagtgcatagatgtgaattggtttttaggggccccacttcccaattcattaggtatgactgtggaaatacagacaaggatcttagttgatattttgggcttggggcagtgagggcttaggacaccccaagtggtttgggaaaggaggaggggagtggtgggtttatagggggaggaggaggcaggtggtctaagtgctgactggctacgtagttcgggcaaatcctccaaaagggaaagggaggatttgcttagaaggatggcgctcccagtgactactttttgacttctgtttgtcttacgcttctctcagggaaaaacatgcagtcctctagtgtttcatgtacattctgtggggggtgaacaccttggttctggttaaacagctgtacttttgatagctgtgccaggaagggttaggaccaactacaaattaatgttggttgtcaaatgtagtgtgtttccctaactttctgtttttcctgagaaaaaaaaataaatcttttattcaaaaaaaaaaaaaaaaaaa

SEQ ID NO: 118952 - DNA, 1000 bp, Homo Sapiens
gtacttaaaaggtaaagtagtaaccaaagagaaaatccaggaagccaaagatgtctacaaagaacatttccaagatgatgtctttaatgaaaagggatggaactacattcttgagaagtatgatgggcatcttccaatagaaataaaagctgttcctgagggctttgtcattcccagaggaaatgttctcttcacggtggaaaacacagatccagagtgttactggcttacaaattggattgagactattcttgttcagtcctggtatccaatcacagtggccacaaattctagagagcagaagaaaatattggccaaatatttgttagaaacttctggtaacttagatggtctggaatacaagttacatgattttggctacagaggagtctcttcccaagagactgctggcataggagcatctgctcacttggttaacttcaaaggaacagatacagtagcaggacttgctctaattaaaaaatattatggaacgaaagatcctgttccaggctattctgttccagcagcagaacacagtaccataacagcttgggggaaagaccatgaaaaagatgcttttgaacatattgtaacacagttttcatcagtgcctgtatctgtggtcagcgatagctatgacatttataatgcgtgtgagaaaatatggggtgaagatctaagacatttaatagtatcgagaagtacacaggcaccactaataatcagacctgattctggaaaccctcttgacactgtgttaaaggttttggagattttaggtaagaagtttcctgttactgagaactcaaagggttacaagttgctgccaccttatcttagagttattcaaggggatggagtagatattaataccttacaagaggtatgtgttttatattaaaagtttcaataaggcatttcttataattaagtttgtttatgtttgataaagaacacaatataaatacaaaaaaaaaaaaaaaaaaaaaaaaaaaaa

SEQ ID NO: 118953 - DNA, 1000 bp, Homo Sapiens
aagccattgtggagccaactccagggctgggggtcaggagtcctaggctcccattcctgctccattaccaaccgaaggctcggtcttaattcccccacctgtctaaggggaacagaaaacccctgccaaaactaccctttcccccatggggtgctgtgaaactcaaggagatgactgtggatgaggggtccatgcaggcatctccaggatgccctgacactgtgctttaggactggctgcgctcatgggcagagtagcttgtggccctacccccctgaatccatagagcctaagattctcaaattagcacacccttctcagatggccacgatgtaggctccactttgccaacttcccgagaacaaacaggcctgctcacaactgcccctcaagttcaaccccgggaccgcccagccccgcaaagcaaagaccctgacttctcctgctcttgagccagctgtgctttgcccgtggccagaagctcagcagcggctcctgggaaaggcctggaaaggatgagggaacaggcgaggaacaaaggcaacctttgcacactcacctgagccctggggacccttggagaaattaggtgtcacctgctgtggcaaaatgggtttagaaatctttgccaggtcatggcccactggattctggatactctgaggcctggtttgtcaggcaatatgcccttgagcaggtcaccccctgggaatggggggtactcacgcaccccgctttgcacaccacagagtgccctcacccactccatggacctcaagcagccctcagagctggagcccctgctgcccagctcagactctaagctcaacaagcccttgagcccccagaaggagaccgctaactctcagcagacctgagccccagagcaggcctccttccctgtgtgctggggagtctcatcaccgccccctaaaaatgacgttattaaatgttgtagctctgtgaaaaaaaaaaaaaaaaaaaaaaaaaaaaaaaaaaa

SEQ ID NO: 118954 - DNA, 1000 bp, Homo Sapiens
cctcctaaggaagggaacccggcagagatcaacgtggagcgggatgagaagttgattaaggtcttggacaagctcctcctttacctgcgcatcgtgcattccttggattattacaacacctgtgagtaccccaacgaggacgagatgcccaatcgctgtgggatcatccacgttcgggggcccatgccacccaaccgcatcagtcacggggaagtgctggagtggcagaagacttttgaggagaagctcacgccgttgctgagtgtgcgggagtcactctcagaggaagaggcccagaagatggggcgcaaagacccagagcaggaagtggagaagttcgtcacctccaacacgcaggaactgggcaaggataagtggctgtgtcctctcagtggcaagaaattcaagggtcctgagtttgtgcgcaaacatatcttcaacaagcatgcagagaaaattgaggaagtgaaaaaggaagtcgcgttttttaacaacttcctcactgatgctaagcgcccagctctgcctgagatcaagccagcccagccacctggccccgcccagatactccccccaggtttgaccccaggactcccctacccacaccagactccccagggcctgatgccctatggtcagccccggcccccgatcttgggctatggagctggtgctgtccgccctgcagtccccacaggaggccctccatacccccatgccccgtatggtgctggtcgagggaactatgatgccttccgaggccagggaggttatcctgggaaacctcgcaacaggatggttcgtggagacccaagggccattgtggaatatcgggacctggatgccccagacgatgttgatttcttttgagccgtcccccgttcctcagtcctgtatcatccatacttgtactaccttgtcctatgaagctctgagaattttttgtacgatcagccttactgctaataaaagcacttccacagggaaaaaaaaaaaaaaa

SEQ ID NO: 118955 - DNA, 1000 bp, Homo Sapiens
caggtgagaggctggcaggccaccacagctggcctggacctctctctgaaggacctcacccaggagtgctacgatgtcaaggctgcagtgcaccagatcaacttcaccgtggggcagacttccgagtggatccacgggatccagcggaagacagacgaggagaccctgaccctccagaagattgtcaccgactggcagaactacacacggctcttcagcggcctgcgcaccacctccaccaagactggagaggcggtcaagaacatccaggccaccctgggggcctcctcacagcgcatcagccagaactcagagagcatgcacgacctggtactccaggtcatgggcttgcagctgcagctggataacatctcgtccttcctggatgaccacgaagagaacatgcatgatcttcagtaccatacccactacgcccagaaccgcactgtggagaggtttgagtctctggaaggacgcatggcttctcacgagattgaaattggcaccatcttcaccaacatcaatgccaccgacaaccacgtgcacagcatgctcaagtacctggatgacgtgcggctctcctgcacgctgggcttccacacccatgccgaggagctctactacctgaacaagtctgtctccatcatgctgggcaccacagacctgctccgggagcgcttcagcctgctcagtgcccggctggacctcaacgtccggaacctctccatgatcgtggaggagatgaaggcagtggacacacagcatggagaaatccttcgcaatgtcaccatcctacgaggtcacactttgttttcacataatcggatatgatatgaagccagccataaagcccaggatgaccaagaatataatttgaaaatgaatttgtttactatccttaatggtaagcatcaccttaagcacatattatgccttgagacactagccaattgtggtacatgaaaataatttataaataaataaatttacctatattagg

SEQ ID NO: 118956 - DNA, 1000 bp, Homo Sapiens
agagccttttggacagaaaactgggccaggaaaaggcatctcagaccacaaatagagaatttgattcctcatttgccacataagtcatctgcttagcttttcctttctttttttttttttttttttttttggaggcagagtctccgtttgtcgccaggctggagtgcagtggtgccatctcggctcactgcagcactgtctcggctcactgcagcctccgcctcccgtattcaagcgattctcctgtctcagcctcctgagtagctaggactacaggtgtgcaccaccacgccccgctaatttttgtatttttggtagagacggggtttcaccgtgttggccaggatggtctcaatctcgacctcgtgatccgcccacctcggcctcccaaagtgttgggattacaggcatgaatcaccatgcctagccacttagttttttgtcattcccacctttctatcccatagaacactcttttttatcttccctgaaccatattgatgagataaatagggctgggggctgggccccgctggtcactcaacagagtatttcccttggccgagatggaagttttgtcccaatagatgagctgctgagcatcaacaaggtgacatttttctgctgcccatttgtgtcctggagacggtggtaccctgaaggcagaggccagctgctgcaagacagcaatgacagtccacctgccggcctgattcctgcatcatggaataaccacatggctaccttctatcctctgttcccaaatggtggtggcacttatcctgaagtcatcaatgatttccctttgaaactactttattttactaatttaaactattttgtactgatgtagccctgaggtagttcatgaaaatgctgtgcactcattccatggaataaatgttggaaagctgatcttttctgatataaaatgttgaattataaaaaaaaaaaaaaaaaaaaaaaaaaaaaaaaaaaaaaaaaaaaaaaaaaaaaaaaa

SEQ ID NO: 118957 - DNA, 1000 bp, Homo Sapiens
taagcccaaagattacatgttggtgttcaaagtgtagcaaaaaatgatgtatatttataaatctatttataccactatatcatatgtatatatatttataaccacttaaattgtgagccaagccatgtaaaagatctactttttctaagggcaaaaaaaaaaaaaaaaaaaaaagaacactcctttctgagactttgcttaatacttggtgacctcacaatcacgtcggtatgattgggcacccttgcctactgtaagagaccctaaaaccttggtgcagtggtggggaccacaaaacaaccagggaggaagagatacatcattttttagtattaaggaccatctaagacagctctattttttttttgccactttatgattatgtggtcacacccaagtcacagaaataaaaaactgactttaccgctgcaatttttctgttttcctccttactaaatactgatacattactccaatctattttataattatatttgacattttgttcacatcaactaatgttcacctgtagaagagaacaaatttcgaataatccagggaaacccaagagccttactggtcttctgtaacttccaagactgacagctttttatgtatcagtgtttgataaacacagtccttaactgaaggtaaaccaaagcatcacgttgacattagaccaaatacttttgattcccaactactcgtttgttctttttctccttttgtgctttcccatagtgagaatttttataaagacttcttgcttctctcaccatccatccttctcttttctgcctcttacatgtgaatgttgagcccacaatcaacagtggttttattttttcctctactcaaagttaaaactgaccaaagttactggctttttactttgctagaacaacaaactatcttatgtttacatactggtttacaatgttatttatgtgcaaattgtcaaaatgtaaattaaatataaatgttcatgctttaccaaaaa

SEQ ID NO: 118958 - DNA, 1000 bp, Homo Sapiens
cggtccttttaccccatgctgaggtacaccaatgggccaccccccacatagagggcatagctggccacagtgctacaccacctgcctgattgccaagggtgcccagcacgtggccccagaccaatctgagtgacttagtgttggcaaggtcccgggacctgtgcagacttcttctgggcttacccagcacgggctccctggagcccagggcagctttcagattgtgttcctccccaggagcagggaacctgtgtggcaggtgccccgggtattttggcagaactagttgattagtttagggatctctggaaatgtcagtttcctgaagagccaagcactttgtgaattctggtttgtttgtaaaacagcattattataatgtaggtatggtcaatgagcagtggtgtccatcacatatattatagaagcaagcgaggacattccaccctagaaatggttcagaaactcataggcacccttagctgatggaaacaatcaatcatatttaatacgcttagaatcagttttactccaatcagctggcaattttgagctgccggttatacaccaaaatgttctgttcagtacctagctctgctcttttatattgctttaaatttttaaagaaattgtattgcatggatgtggttatttgtgcatattttttaacaatgcccaatctgtatgaataatgtaaacttcgatttttttttaaaaaaattagattttagctggagcttttgactaatgtaaagtaaatgccaaactaccgacttgatagggatgtttttgtaagttaattttctaagactttttcacatccaaagtgatgctttgctttgggttttaactgtttggccacggcgggggtgggggcggggggttggtacagaaacttgaagctgtttgtgatatgtacaactcagatgtttctcattaaaaaacaaaattagccagaaaaaaaaaaaaaaaaaaaaaaaaaaaaaaaaaaaaaaaaaaa

SEQ ID NO: 118959 - DNA, 1000 bp, Homo Sapiens
catcgccaaccaccacatgcaatctatctcatttgcatccggcggggatccggacacagccgagtatgtcgcctatgttgccaaagaccctgtgaatcagagagcctgccacattctggagtgtcccgaagggcttgcccaggatgtcatcagcaccattggccaggccttcgagttgcgcttcaaacaatacctcaggaacccacccaaactggtcacccctcatgacaggatggctggctttgatggctcagcatgggatgaggaggaggaagagccacctgaccatcagtactataatgacttcccggggaaggaaccccccttggggggggtggtagacatgaggcttcgggaaggagccgctccaggggctgctcgacccactgcacccaatgcccagacccccagccacttgggagctacattgcctgtaggacagcctgttgggggagatccagaagtccgcaaacagatgccacctccaccaccctgtccaggcagagagctttttgatgatccctcctatgtcaacgtccagaacctagacaaggcccggcaagcagtgggtggtgctgggccccccaatcctgctatcaatggcagtgcaccccgggacctgtttgacatgaagcccttcgaagatgctcttcgggtgcctccacctccccagtcggtgtccatggctgagcagctccgaggggagccctggttccatgggaagctgagccggcgggaggctgaggcactgctgcagctcaatggggacttcttggtacgggagagcacgaccacacctggccagtatgtgctcactggcttgcagagtgggcagcctaagcatttgctactggtggaccctgagggtgtggttcggactaaggatcaccgctttgaaagtgtcagtcaccttatcagctaccacatggacaatcacttgcccatcatctctgcgggcagcgaactgtgtctacagcaacctgtggagcggaaactgtga

SEQ ID NO: 118960 - DNA, 1000 bp, Homo Sapiens
aaatgatagtaatatcttttgaagaactatgctttttcaaaagcaaaatcaactctgtataatagcacattctctactttttaaagatcagaaatgctagaattcttgacttttgtgtatgggtagtaaatctagctcactgaaaatcagagtgaaacgcctttacatttgtgcggatagagaagttaactctccctcatatgtcactgtgctaccataatccctacattttctgtctgttctagtctaagaatattgttatagatggaagttaggaccattagcccacagatgcgtgtattctctcagacataccggtgtagatgccatatttctgatgtcttcttaatgtctgtgaaagcaactggcatctacaataaatcacacttagaactggttagaggactccctcacttttgttgtccatgtggttcccttccgtggaccagccgtaataaagagccaaggtagtgatggtggccacgtgcctcgttgctatttttaaagtaatattcagatgtggttttaaatttagattatgtattccttttgaaacataagaaaaacatttaaacctatgctgaaaatacgataaaagaaaaacaactccaatatgctaaaagttaaatatggtatttaagaaaatagtcatgtatgcaattgagaaagtctataatttattttacagaaaagctggaagattatgactagatatggaaatattttttctgaatttttttttatatttcctccgacttacctctttttgaaaagagagtttttattaaatgaaccatcatgatattggctgaaaagttctacattctattattgtattgtaacacacatgtattgatgattttcattaagagtttcagattaactttgaaaaatattccacatggtaatcttataaattctgtttaattacatctgtaaatattatgtgtgtgatagtattcaataaagtaaaatcaaattgtcaaaaaaaaaaaaaaaa

SEQ ID NO: 118961 - DNA, 1000 bp, Homo Sapiens; identical to SEQ ID NO: 116958

SEQ ID NO: 118962 - DNA, 1000 bp, Homo Sapiens
cttccttgagcatttattatttaagtttgaacgatgtaaaatatggtgtagaaattcttgtgaaatattgcaagaggcgagtttaaaattctgcagatggccttatttgtgtatttgtctttttattttatctgtataattttttttgtcagatattctggggttaaagtcacatcatatgtgaggaggaaaagtttaacatgaactaacatttctgcactgtaacgtgccgggcacacactaaactcagttactgtacctacaggtaagtctacatcctctctgacagccacagcactacatcaatccctgacgttagggatacctcatgacattttcctgtttttatggaaactctgagaagctgaatgatacatgcaggggatattttttgagatgatttaaatgtaaaccaaaagatggaagacaaaaagacaaacacacccacacgcagtctttgcagtatctgacagagaactcacaggaagttacttcaagcacttgccagtactatgatattcaagtaccttgcagcatttctctgccattgctttcaatgaggccagaggcatcctggatattagacctattatactgtaagaatataagtataaagtgcgttcatatacatgtgaggttttcttttgcttgagtggacagtagcacctgtatcattgaactcattttgtatcagagcaattttgcttgcagaaagctatgaaataaaacacgtcccttaactgcattgctatggaattaattttttttccccagggaaaactagtgtatttttttatgagcaatatcaatttggagtgaccaaaagatacttaaaaatgggtttattttgatttctcatctgaaataatcatgttctggtattatatctatctatatttaataaatatatacattttaatttattatgtgtactcacatactatagaaagatattagtatgcatttaataaaacatattcacttgaaaaaaaaaaaaaaa

SEQ ID NO: 118963 - DNA, 1000 bp, Homo Sapiens
aagccttatgaaaattatactgagaacctgatctcgtttactccatgttaatcacattcctaccaacctaaatttctgccaagtcagttctctttggaggaagcccattactccgtaactgactggatggtccagtgtcattttgatctgcttttcagaatggaaatttataatataaatatatgttttaataccacaaacactgtggggcacttgatatttattagtggtgtatatggtccactggtttcaggccaaatctagaatttagtgatactggctcagaagaatttaagttctattcagccttcctgggtgttagaacctagattcaaaatggcttgtctttgctacttttgttccacattctctctctttacctttgccctaccttctgtttgtaaggatgattttaatattaattccaggaacacatgtttttatttcctctgctggaataggagaaagcttaatatattcccaagctgaatgttcttgaattatatctgcatttaccactgtatatgcatatagtgacagtataacctgtctatactacagtagttccagtcctaactttctgaattatttttaaagatcttctctaacaagctatgggaatttggcttcatactctttctttgcaacagcagtgttctgggtgataattttgaattgatacctgttcctttttctgggttttgttggctttttgaaaaattgtctttccttatcattggtgggaggcttggtagcaaagtaacattttttggaaaagaggacagaaaaattgaactacagcttgagaacgtattctttttttcctactttgttattgcaaattgaggaatcacttttaactgttttaggtgtgtgtgtccagagtgagcaaggattatgtttttggattgtcaaagaggatgcttagtcttaaaataaaaataaatttaaaaatcatcttataattagaaaaaaaaaaaaaaaaaaaaaaaaaaaaaaa

SEQ ID NO: 118964 - DNA, 1000 bp, Homo Sapiens
ctgcgaaagagacgtgagactgacatatgccattatctctttttccagtattaaacactcatatgcttatggcttggagaaatttcttagttgggtgaattaaaggttaatccgagaattagcatggatataccgggacctcatgcagcttggcagatatctgagaaatggtttaattcatgctcaggagctgtgtgcctttccatcccttccggctccctacccctcacttccaagggttctctctcctgcttgcgcttagtgtcctacatggggttgtgaagcgatggagctcctcactggactcgcctctctcctctcctccccccaggaggaacttgaaaggagggtaaaaagactaaaatgagggggaacagagttcactgtacaaatttgacaactgtcaccaaaattcataaaaaacaatagtactgtgcctctttcttctcaaacaatggatgacacaaaactatgagagtgacaaaatggtgacaggtagctgggacctaggctatcttaccatgaaggttgttttgcttattgtatatttgtgtatgtagtgtaactattttgtacaatagaggactgtaactactatttaggttgtacagattgaaatttagttgtttcattggctgtctgaggaggtgtggacttttatatatagatctacataaaaactgctacatgacaaaaaccacacctaaagaaattttaagaatttggcacagttactcactttgtgtaatctgaaatctagctgctgaatacgctgaagtaaatccttgttcactgaagtctttcaattgagctggttgaatactttgaaaaatgctcagttctaactaatgaaatggatttcccagtaggggtttctgcatatcacctgtatagtagttatatgcatatgtttctgtgcatgttctctacacaattgtaaggtgtcactgtatttaactgttgcacttgtcaactttcaataaagcatataaatgttgat

SEQ ID NO: 118965 - DNA, 1000 bp, Homo Sapiens
tggcagggacaaatggcgagactaccacccaagggttggatgggctgtctgagcgctgtgcccagtacaagaaggacggagctgacttcgccaagtggcgttgtgtgctgaagattggggaacacaccccctcagccctcgccatcatggaaaatgccaatgttctggcccgttatgccagtatctgccagcagaatggcattgtgcccatcgtggagcctgagatcctccctgatggggaccatgacttgaagcgctgccagtatgtgaccgagaaggtgctggctgctgtctacaaggctctgagtgaccaccacatctacctggaaggcaccttgctgaagcccaacatggtcaccccaggccatgcttgcactcagaagttttctcatgaggagattgccatggcgaccgtcacagcgctgcgccgcacagtgccccccgctgtcactgggatcaccttcctgtctggaggccagagtgaggaggaggcgtccatcaacctcaatgccattaacaagtgccccctgctgaagccctgggccctgaccttctcctacggccgagccctgcaggcctctgccctgaaggcctggggcgggaagaaggagaacctgaaggctgcgcaggaggagtatgtcaagcgagccctggccaacagccttgcctgtcaaggaaagtacactccgagcggtcaggctggggctgctgccagcgagtccctcttcgtctctaaccacgcctattaagcggaggtgttcccaggctgcccccaacactccaggccctgccccctcccactcttgaagaggaggccgcctcctcggggctccaggctggcttgcccgcgctctttcttccctcgtgacagtggtgtgtggtgtcgtctgtgaatgctaagtccatcaccctttccggcacactgccaaataaacagctatttaagggggaaaaaaaaaaaaaaaaaaaaaaaaaaaaaaaaaaaaaaaaaaaaaaaaaa

SEQ ID NO: 118966 - DNA, 1000 bp, Homo Sapiens
gaggaaaaattagaggtgattttcagatttcttgttctatggaagaggaagctgagctcagggagatatgagctccacagccacagctggttaggggcggctgccagtagaacagggcagatgcctggactcccaactcagtaggccttctgttacacctcaaaatgtgttacatgggaagaaaaagattaagaaaaagcaagataattttgaagaaggacgagaggaagaggcatgaacttgtcctaacaatgtcaaagaatattttaaaggtataccagttaaagtagtgtgtggctggtgccagtagaggtcagtcaagggatccctgacgagaataaagagcccagaaacaggtccatgtttatatgggaacttgatttttgacagatacggcaagctctatggggaaaacaatatgtactaccttatacccttccccaaaaacaaagggattaaagacctaaatatgaagacaaaacttttaaatgagaatctataaggttattttcatgattttgcaaatgggaaggatttctttaaagcaagacacaaaagcatacacaggaaaaaatgatgcataaaaacatggcttctgtagaacaatagagactgtaaaagaacaagctacagacaaggaaatgtttgcaatgcatggaactgtcaaaggattcgtatctggaatacattaaagaagcaaaagaacctcatacaaaagtcattgagtaaatgacagccatgcattagaacagcaattctcaaaacttttggtctcaagatccctttacactcttcaaaagtgagaaccccaaagagttttcatgtatgtgggttaaatctattgatattttctgttagaatttaaaaattatgttaaaaaaataagaagaatgactatttttcaaaacaaaaaatgagaagagtggtattgttttacatttttacaaatctctttaacatttagcttaataaaagatagctggcctctcaaaaaaaaaaa

SEQ ID NO: 118967 - DNA, 1000 bp, Homo Sapiens
tgctatgcatgctctaagtctgcatgggatatgggaatggaaaagggcaataagaaattaatacccttatgcagttgcatttaaccttaagaaaaatgtccttgggataaactccaatgtttaatacattgattttttttctaaagaaatgggttttaaactttggtatgcatcagaattccctatagatctttttgaaaatataggtacctgggtatcacacatagaacttttaattctgctggtgtaggctgttgcccaaacatctataattttactgagctcttcaagtgattctgataacacagcctggattgagaatttttataagattggcaatggaaaaacatttattcttttaaataataatttttttaaaacccaagaggtcaggggattttataaaccaatagccaagtgttctttaaataggaggcacccttcccattgtgccaaaatcatcttttcatttattttgaaatttgtatgattattttatacttgtatgttgcctttcttcgaaggcgcctgaagcactttataaacacaaatcctcacaatacctctgtgaggtaggtaaatagtacttttctatgtagtaaacctggaatatggagaatttcataacagttcattctacttaataatgcaataatggagctccaagttgtcttggacttctacaccacactcagacttctggaaagttttctgtacctcattctttagtccctgtcaaggttagtaaataaaataagtgacataaaaaaaaaaaaactaaactacttgttgtgttgaaagttcctttttgccagttatgttcaggaaacccaataacctgaaaaagtttgactttgatgtgacatcttcatattcatcaatgctgataattgtccaaaggcatcttcactatgtctgctaaataacatccaatgtgggcgttatctgttgtctaggggatgaattttaagttacaataaaatatttttctttgttttgc

SEQ ID NO: 118968 - DNA, 1000 bp, Homo Sapiens
gagcaaaataacaccacatctccaaagacttctgaacaaaaattccaagatagttttgcttttttgactgctgaagattctgcccagaaaacagagcttcaagatcctcactcactgagtgagctctcttccttgaagcactcagaagatgaagaaaaacctaagattgtgaaccaagaatcactaacagaaagtactagcttgaaacataagctgagaaacttggaagacaaagacataccagaaggtagttttgctaagtcacaacaatcaagattggaagaagaggttgcttcgggatcccctttctcaataacagaagaaagagagttgccagaaggaatttccacttcatccctagaagttgtgccagagaacttgaacggttctgccattctcccaacctttgaaaacttcactaaaaaacggaaaagaaaatatgagcttaggtacagaaagcgtccgtttaattcagaaaatgcaaagaaagcaccggattgcctaataaaacttttaaaccagatgcaactgttcagactcaataaactagagcgctttcaaaatttggttcttcaagagttgagcagtcttaagcaggatattcaggccctggaacaccttgagaaggaggttctggaattctgggggaaacagtctgctgatctgcaatctttctgtgatctgcaagtgctgaggttcaattcaactcagacttcataagaaagccaaagcctggttttatgattgcagccctcagcctgggctgcctgaagacgaagagaaagagcaaggttattgttggctcaggccttgttagccagacttcgtgctctgtacgcattcaatttcctcccctccaaacatcatccctgggaactgctgagttcagatagaatatatgttggtagtttgcagttgggttattatccatttgttcataaaaattaaccttttgtattaaaatttggtcagatagtattaatagaaagttcaggatgtt

SEQ ID NO: 118969 - DNA, 1000 bp, Homo Sapiens
gcgagacattgttgcctctatctagtcctacaagtagggttttgcatactgtgtttgcccctagggttgtcagtgcatcagaaatacttctaaatagtggtaaaaatgcacatggttaatgcacatgttacttttaaatcattaggatatccctcacctgttcctgatgaataaaaagtgtgttaaagaccaaaattcttggcataataatcagctacatacaaatcacatatagtttaatcttttttaatgaaaaaaaatcatgtttaaaatggcaaaagcccatcttatacacttttatatagctgcaaaaaaatcttaactcagctgtgggttttttgtgggttcttgtttgttttttggcatgaattgtcatctttggtgtttttttaacccccagcccctcaaaaaaataaggcctccaggtatcaagatctcatattaggattttctgtccttaattttttgagcaaaatctggaaaatgtgaaagcatatttagattttatatactatctgaaatgtgatttgttaagattcttaaatttgggcctcttagaataattttgaatgagatctaccgactcacttgtgagaatatttttcacagattatctttgggccttttcattagaaagctgtttgtttgtccccctgttggtacatttggttacctcattttgccgtttcagattgtgaaagctcacaggggtgttttttggaatcatttgctgagtcattttctcaaatcatattccattgtatcagttaacatatagttttaaatgtatgtattataaatatctgtaaccaaatcatttgaaggcttgataaatttttaacaaagtttgtacattttttatgaaagttactagtaatgctttactaagtagtgcaatgaatttttatttttaatccctgtgcccaattttggagttgagagggttgttggtaataaatgtatgatgtacacttaaaacatcaaaaaaaaaaaaaaaaaa

SEQ ID NO: 118970 - DNA, 1000 bp, Homo Sapiens
gttggtttggggaccctggtgcatgctagtgggcatgggatcagccaagcttcgttccatcttttcctaaaggtcagagctgcagcctagggggcactgccctacagaaaaggtctgcctgagaggcctgaggagcccagagcacttgactgagcttcccggaaactggccctaacctgtctgtctccgtggatgcatcctaaccctaaggaaaattccccaggctgtgatctaccctagagaaggctcgctccctgcctactggctcacaaatgaggaccagtgagccatgtccttgttccttgtttgagactgggctgcaggccccaggaagactttccttcacccaccatccccctaacctcggcagggcttctgtcctgtggagttccctggacaccttggtctggctcttgtgccaagggctgaaggaggtaccctcttggcagatgggggcatcacttgcttcctttgggaagctctaaggttgctgcagtcaccttcctcatcttgcaggtgctgaaccaacatcatcagtttctattctaatcaggccccttcccaatctccatttctctgccaagcccatttacccccacctcatgcatcccaaggctctactgggtccctggacctaaccctgctttcatcctggtggccttaactacagtggaggtggaacttcccaggaggggaagggacagaccagccccagccgctgggccaacttccaatcattccagctagaagagcttccccctgacaccctgtgactgagcctgtgtcctgtctgcctgcccagccatgctccatcggctgtgagggcagtgcccggagaggccagagggttggagctgcagggacccgtttggacccacagcctctgttctagagatgcttgtataggctgttaattgtgatgaataaacgttcaaccctcggcctgcagccagagtagccaggccgcgcaccccaaaaaaaaaaaaaaaaaaaaaaaaaa

SEQ ID NO: 118971 - DNA, 1000 bp, Homo Sapiens
gaagggtatttttcttgatccaaagtttgtgaatttggctttgctacctcaattgcaggtgtttgtttgcctttataaactgttgcaaatagaaaaaaaatagaataagtatatatttttggagtaacatcaatatttaaacatttttacacagatcggtgtttgaaaatttgccatttcaggctaatatttttatatatttttgactttttaaaagttcatcagtgtttttgctactgttaagcttatgcagtttatactgtattttttatgtatcctttatatttaccaaacctgactccctgtaaaggagtgctgtcttaaaaacaactgaaggggttaaagtcgtttcttttagtttaatagatgtgcataaggtagctttagcaattaaattctagtgaagttgatatagtctcatttttaattgtcctgtaatggaacagtagcaaattcactaaacttttgtgttcagagttaaattgttctcagtactttcaatgtaggggaatgtaataaacatagtgtgtatgtttgggttttaattacacattttatatatgagccatttagatatgcagtgttaattctatactgcatttgaagtgtatgtaacttagcttatgttaatgcagtcatgaagttggtttgctccagcatccggtagtctttaaacattcttttagtgaaattgtcattgttttatcagtgctaatgtgtgcaagcagtttttttattttgcttttctcctggcatcagaaagtggtggcgttttctgtactggattgcaccaaggaagcttttggggaggaaggaaggacattaaattctttccctggtaatgaaaagagccctttatcaatacagtgctgcaatttctggatatcagctacactttgtttttaagtttgtttttgacatgtttatttggcaaattttataatgaagttttaagttgaaaataaaatgtagcaacattttgatcaaaaaaaaaaaaaaa

SEQ ID NO: 118972 - DNA, 1000 bp, Homo Sapiens
cagccgagctgtttaacaaataaactaaccacaaaagactgagttgcaagagtctcccaggctcacattaaaccaggggttttactccacatccttcccccagacactgttcccaacctgtcatcgcagctaatctgtaggttctctttctttgggttatttttttaagtaatcaccactttcttctagtgatgctttaccaatatgatttacatttgttaacttctccccctaacatatcagatatgtaaagacaaagaacaaaaggtttaatatattacagagaaacagttaatgataatgtaatattttttaaaatggctttttgttgtttgtttggaaggcagggcaggctgccgttgctaaatgatttaataatattgtaattctgtatttctttggggggaaaaggcttttgttttgttttgttttgttttgttttgtttttgtcttgaaaataatagacatttgtagaatatggagactaactcctaggagttgctttactctgtcaggtgacttaagtcactgggattcactaattttctctgagagaacagctgattgagaatttccattgtaaatagctcagtgttgtatagtgaggcttacgatgttttgtagtcttggcgtaaggacacagcccaagtaactgacgtttcccctccccctcccctctgaggagcctgcctgcctcacaactcaccctcacttcactgaatgaggaggctgagcagctgcagtgtttctgtccggaggaaatggatcttaggccactggacaagaacctgcacccaagggccctgaacccattttcctcccctgtcccagccttcccactttgacagacacttttaactgtgttccttactgctgccacaatcagcatggttgtatagtgccccattaggccatttacatacccagagttatactcaagcagaatgcacaaatggacatgtcataatttttgttacaataaatatgaaatttacaagta

SEQ ID NO: 118973 - DNA, 1000 bp, Homo Sapiens
tcctgaagatgacccaacttgcaaaacaaaggaattttgggccaccattttggattcagcaggtcctcttcctgactatactcctccagaaattttctcttttgaaagtactactggatttacattgtatgggatgctctacaagcctcatgatctacagcctggaaagaaatatcctactgtgctgttcatatatggtggtcctcaggtgcagttggtgaataatcggtttaaaggagtcaagtatttccgcttgaataccctagcctctctaggttatgtggttgtagtgatagacaacaggggatcctgtcaccgagggcttaaatttgaaggcgcctttaaatataaaatggttgctattgctggggccccagtcactctgtggatcttctatgatacaggatacacggaacgttatatgggtcaccctgaccagaatgaacagggctattacttaggatctgtggccatgcaagcagaaaagttcccctctgaaccaaatcgtttactgctcttacatggtttcctggatgagaatgtccattttgcacataccagtatattactgagttttttagtgagggctggaaagccatatgatttacagatctatcctcaggagagacacagcataagagttcctgaatcgggagaacattatgaactgcatcttttgcactaccttcaagaaaaccttggatcacgtattgctgctctaaaagtgatataattttgacctgtgtagaactctctggtatacactggctatttaaccaaatgaggaggtttaatcaacagaaaacacagaattgatcatcacattttgatacctgccatgtaacatctactcctgaaaataaatgtggtgccatgcaggggtctacggtttgtggtagtaatctaataccttaaccccacatgctcaaaatcaaatgatacatattcctgagagacccagcaataccataagaattactaaaaaaaaaaaaaaaaaaaa

SEQ ID NO: 118974 - DNA, 1000 bp, Homo Sapiens
ttgaatgctacttgtctaaaagtccacagaatcttaatcagaggatggatgttttttatttgcaaccagaatgctctagttctacagatagccctgtctggtatacgtctacttcactggaccgaaacaccttggaaaatatgcttgtacgggttcttctagtaaaagatatttatgataaagacaattatgaactggatgaagacacagactaaaaaggaacgttgcagaagcaatcgggataaaacagcattagatagtcatgctgctagatctttattatggaaaacatttcaagtttactccttctgttttgagttttgtagcagtgtacccacgctgggtattaccatgtaaataatctgtgagtgaaagttgccattattctatgtagtggttttaggatacttaacaaatacattcaaattctttttttattattatttatttgattaggtatgtttgtaactttttacattacagaatatgaatgagaatgtgccatgtataatttttttcttgtagtaagaaacatccatattgcacaactctactgttgcaaagcttccttggaagggggctcttttactgggttcttaaccagatggttgtgtatgggtagcactactaaaagtttagaacttgcagtgtctttcggaatttttaaaataaactgtaaactaataggctggggtttttgttttgttttggggttttgttttgtttggttttacattttagttactgaagccttacaaggttatgtagagagataccatcttctgtaccaaaaatagacaagagaatgctgtcaatattggtgtactgtaatgtgaatctatgctggtgaaaacaattttttgttccccttattaaaaccttagtgtccttttctcatttgtggctttctgcatcacccaatcaataaaaaacaaatatatatatgtatatatatgtatgtatgtgtgtgtgtatatatatatatatatatatatatata

SEQ ID NO: 118975 - DNA, 1000 bp, Homo Sapiens
tttgagactagtacccaagtgcagttttagtatggctcaacatgggtcagatttagtgataaagcaaattctccttggcctcaggcaaatagtttctaaagattctgtgaatagtggacaactgcccatgagcatttgacttcccttactctttgatgatcgtagagaaagacttggtaatttatctaagtatctttaataaatctttcagcagagagattaaacctaggttcagagcatgggtgctctgagggacaaagttggattagtataagggagctggagcagctgatagtggaaaacagaataatgattcaaagagtcttctgtcaccatgtcatattgtggttctttcagttccatgatatgtttggctctgcatgccaaagtccagtgattaagcatatataagttgtcaaggaaacaaagcccaaatgtttttaaaacaagtatacagtttttgtcattgtttaagaaagccagttgtttggcatgtgagttaaaggcagttccaatgcctgatggttcccagatctatgaaatgagtggaccattaaccttacatgtaaagattatgttagtaattaagaaacctaacaaaggtgttaccaaggaacctttgggagtgccttttttgtttttcaagatggacccaaaaaagtggaggaagatattgttcttttgtgccctcctacctgtgagagatatttgtagtcctatgtgaatgagcttatccctccacaaccaggtgcatatgaaagtgtacatattatgactgccaagtattggaaatgaaaagacctggagtctatgctaggaagctgagatattttggtattgcattggtttttatggtaactaggttttgcatgcaattaaaaatccttatttcttgttctagggcttcccttagttaatggttattataaacctattaattcatctgttttaaccattaaaacctgttttgtttttagctttgaaaaaaaaaaaaaaaaaa

SEQ ID NO: 118976 - DNA, 1000 bp, Homo Sapiens
tataaccatcggtacttcttctctttctgctttttcatgactctgggctgtgtctactgcagctatggaagttgggaccttttccgggaggcttatgctgccattgagacttatcaccagaccccaccacccaccttctcctttcgagaaaggatgactcacaagagtcttgtctacctctggttcctgtgcagttctgtggcacttgccctgggtgccctaactgtatggcatgctgttctcatcagtcgaggtgagactagcatcgaaaggcacatcaacaagaaggagagacgtcggctacaggccaagggcagagtatttaggaatccttacaactacggctgcttggacaactggaaggtattcctgggtgtggatacaggaaggcactggcttactcgggtgctcttaccttctagtcacttgccccatgggaatggaatgagctgggagccccctccctgggtgactgctcactcagcctctgtgatggcagtgtgagctggactgtgtcagccacgactcgagcactcattctgctccctatgttatttcaagggcctccaagggcagcttttctcagaatccttgatcaaaaagagccagtgggcctgccttagggtaccatgcaggacaattcaaggaccagcctttttaccactgcagaagaaagacacaatgtggagaaatcttaggactgacatccctttactcaggcaaacagaagttccaaccccagactaggggtcaggcagctagctacctaccttgcccagtgctgacccggacctcctccaggatacagcactggagttggccaccacctcttctacttgctgtctgaaaaaacacctgactagtacagctgagatcttggcttctcaacagggcaaagataccaggcctgctgctgaggtcactgccacttctcacatgctgcttaagggagcacaaataaaggtattcgatttttaaagataaaaaaaaaaaaaaaaaa

SEQ ID NO: 118977 - DNA, 1000 bp, Homo Sapiens
gcaggaattgctacacactttgtagattctgaaaagttggccatgttagaggaagatttgttagccttgaaatctccttcaaaagaaaatattgcatctgtcttagaaaattaccatacagagtctaagattgatcgagacaagtcttttatacttgaggaacacatggacaaaataaacagttgtttttcagccaatactgtggaagaaattattgaaaacttacagcaagatggttcatcttttgccctagagcaattgaaggtaattaataaaatgtctccaacatctctaaagatcacactaaggcaactcatggaggggtcttcaaagaccttgcaagaagtactaactatggagtatcggctaagtcaagcttgtatgttttaattgataaagaccagagtccaaaatggaaaccagctgatctaaaagaagttactgaggaagatttgaataatcactttaagtctttgggaagcagtgatttgaaattttgaggtgacaggcttttaaggtatattttgtagcatgggttggcaatctacagcatgtgggccaaatccagcctgctgcctgtttttatataccctgtaagctaagaatggtttccgcatttttaaatggttgggaaaagaaatcaaagactaataattcatgacgtgaaaattatcagaattcacaaataaagctttattggaactagctatactcatctgtttatatattatctgtggctgctttgaaatgagtagttgcaatagagatggtaaagcctacaaagcctaattatttactgtctggtttttgtcagaaaaaagtttgtcaatccttgttttagaagatggaaaaatgtgaagatctttggagattctcttgagtggtatatctaattgaaatgggatcttcgtttggcttgtatgttgatgaaatcaacttaggtatacaatataaaaaataaagaccctgaaaattgttttggaaaaaaaaaaaaaaaaaa

SEQ ID NO: 118978 - DNA, 1000 bp, Homo Sapiens
caggatgaagcatttacaacccggttcactcttctcagccactgaagtattcccctttatgtacaggatgctttggttatatttagctccaaaccttcacacacagactgttgtccctgcactctttaagggagtgtactcccagggcttacggccctggccttgggccctctggtttgccggtggtgcaggtagacctgtctcctggcggttcctcgttctccctgggaggcgggcgcactgcctctcacagctgagttgttgagtctgttttgtaaagtccccagagaaagcgcagatgctagcacatgccctaatgtctgtatcactctgtgtctgagtggcttcactcctgctgtaaatttggcttctgttgtcaccttcacctcctttcaaggtaactgtactgggccatgttgtgcctccctggtgagagggccgggcagaggggcagatggaaaggagcctaggccaggtgcaaccagggagctgcaggggcatgggaaggtgggcgggcaggggagggtcagccagggcctgcgagggcagcgggagcctccctgcctcaggcctctgtgccgcaccattgaactgtaccatgtgctacaggggccagaagatgaacagactgaccttgatgagctgtgcacaaagtggcataaaaaacatgtggttacacagtgtgaataaagtgctgcggagcaagaggaggccgttgattcacttcacgctttcagcgaatgacaaaatcatctttgtgaaggcctcgcaggaagacccaacacatgggacctataactgcccagcggacagtggcaggacaggaaaaacccgtcaatgtactaggatactgctgcgtcattacagggcacaggccatggatggaaaacgctctctgctctgctttttttctactgttttaatttatactggcatgctaaagccttcctattttgcataataaatgcttcagtgaaaaaaaaaaaaaaaaaaaaaaaaa

SEQ ID NO: 118979 - DNA, 1000 bp, Homo Sapiens
cgcatccacggcgatcccccgggccctggcgctaagcccccggcccctcctggtgcgcccgagcctcccggcccctttccgtgcagcgagtgccgcgagagcttcgcgcggcgcgccgtgctgctggagcaccaggcggtacacacgggcgacaagtcctttggctgcgtcgagtgcggcgagcgcttcggccgccgctcagtgctgctgcagcaccggcgcgtgcacagtggcgagcggcccttcgcctgtgccgagtgcggccagagcttccggcagcgctccaacctgacgcagcaccggcgcatccacaccggggagcggcccttcgcctgcgccgagtgtggcaaggccttccgccagcggcctacgctcacgcagcatctccgcgtacacacgggcgagaaaccctttgcctgccccgagtgtggccagcgcttcagccagcgcctcaagctcacgcgtcatcagaggacacacaccggcgaaaagccctaccactgcggtgagtgcggcctgggcttcacgcaggtctcgcggctcaccgagcaccagcgcatccacacgggcgaacggcccttcgcctgccccgagtgcggccagagctttcggcagcacgccaacctcacccagcaccggcgcatccacacgggtgaacggccctacgcatgccctgagtgtggcaaggccttccgccagcggcccacgctcacgcagcatctgcgcacccaccgacgagagaagcccttcgcctgccaggactgtggccgccgcttccaccagagcaccaagctcattcagcaccagcgcgtccacagcgccgagtagctccagccgggacgcactgtgtccgccatggtcagaacacctacctcccctggttattgtgaggctggcgattacataagtataagcaggtccgcccagggcttggctactgtaggtgtccaataaacagtagatggaaactgggtctccacccaaaaaaaaaaaaaaaaaa

SEQ ID NO: 118980 - DNA, 1000 bp, Homo Sapiens
agtttaaggggtctgtttctcatctccatggacatcttcaacagcttcacctgacaacgactgttcctatgaagaagccacttgtgttttaagcagaggcaacctctctcttctcctctgtttcgtgaaggcaggggacacagatgggagagattgagccaagtcagccttctgttggttaatatggtataatgcatggctttgtgcacagcccagtgtgggattacagctttgggatgaccgcttacaaagttctgtttggttagtattggcatagtttttctatatagccataaatgcgtatatatacccatagggctagatctgtatcttagtgtagcgatgtatacatatacacatccacctacatgttgaagggcctaaccagccttgggagtattgactggtcccttacctcttatggctaagtctttgactgtgttcatttaccaagttgacccagtttgtcttttaggttaagtaagactcgagagtaaaggcaaggaggggggccagcctctgaatgcggccacggatgccttgctgctgcaaccctttccccagctgtccactgaaacgtgaagtcctgttttgaatgccaaacccaccattcactggtgctgactacatagaatggggttgagagaagatcagtttgggcttcacagtgtcatttgaaaacgttttttgttttgttttgtaattattgtggaaaactttcaagtgaacagaaggatggtgtcctactgtggatgagggatgaacaaggggatggctttgatccaatggagcctgggaggtgtgcccagaaagcttgtctgtagcgggttttgtgagagtgaacactttccactttttgacaccttatcctgatgtatggttccaggatttggattttgattttccaaatgtagcttgaaatttcaataaactttgctctgtttttctaaaaataaaaaaaaaaaaaaaaaaaaaaaaaaaaaaaaaaaaaaaaaaaaaa

SEQ ID NO: 118981 - DNA, 1000 bp, Homo Sapiens
agtcttaataatcacatgcggacccacagcgccaaaaaaccattcacgtgtatggaatgtggcaaagcttttaagtttcccacgtgtgttaaccttcacatgcggatccacactggagaaaaaccctacaaatgtaaacagtgtgggaaatccttcagttactccaattcgtttcagttacatgaacgaactcacactggagagaaaccctatgaatgtaaggagtgcgggaaagccttcagttcttccagttcctttcgaaatcatgaaagaaggcatgcggatgagagactgtcagcataaggaatgtgggaaaacctaaaggtgtccctgttctctctgaagacatgaaaactcactggggagaaaccctatgaatgtaaaaatgtggaagcaactttgtatctcaggtcttaatgaacacatatgaattcacagtggagaagaccctgcatcagggaatgtggaaatgactttgctgaattctcaagccttaccaaacacatcagaaatctcactggagagaaactgtatgaatgtagagaatctgggaatacctttctgaatcccacaaaccttaatgtgtgtatgtgaactcacattggagagaaaccctgcaatttaaatggtatggtctggatgatgccccactccatatttgtaagccctaagtcctagttccttacactataactgtatttggacatagggttttcaaacaggtgagtaacttcaaatgaggttgttgggttcgatccctaatctgacatcactggtgtccctataagggaaactgaaggaaggatacacatggagaagactgtgtggatccaccagaagatggccatctacaagccaaggacagagacctggaacagatgctttcattatggcctccagaggaaaccaaccctgtctccaccttgatattgcacttccaggctccagaactgtgaggcaataaatttctcttggttaaatcaaaaaaaaaaaaaaaaaa

SEQ ID NO: 118982 - DNA, 1000 bp, Homo Sapiens
ctgatttgatactagtcagtttgcttgaaactagttcacctaaagctagatctcttaaaaccaatttactgaaaacttgtttgcttaaagttaatgacttaatgactaatttgccaaaagctcaattcctattttggtgtgtttatatccatttaggtgtcctattcttttttgtcatgctttggatatttcaaggatttatatctattcatccaagagtacttctgagctattatcagcaacataaatttatcaaatttgcagcactttgtaaatgatgagattgcttcctacctttatggatgtctttttctatgttatctaccattcaaaaacttttttaaaaagtttaaagtttctagcaataaatacaattggtacagacattttgtgtatcatttttttgtttcttaatccaatattcctttacaaattaaatgccttgaaaaatataatggagttcaatgtgattttgatgctttggtctaacttctacattcctactgttaaaaaggccagtatatcttaaacaaatgaataggcatgaggcatattcagttgacttacaatgaaaagttatacagacaacagtaataactaaaagggtgaatctgctaaatccttttgaaatgctgcagatttgataaatatttattttagactaattggttttaggtgaattggttttaggcaaattaatttagtaatctttgatctttagtcttcattttctgtcactcagtgagtttcttactggaaatgatgactcctgacaacagaatttccacatttgggggctattctaaggtgactatgccagccaacctgggaaatacataaaagagatctctgagtgagagggaaagaggtcagatttatacaactgagcgccagaggggaaaatgcaccttgttggagtgagaaatgttctgaaactgaattacttcttgtacagctgagatagcttcttctgaactattattaaataagtgaatacaaa

SEQ ID NO: 118983 - DNA, 1000 bp, Homo Sapiens
gagaatctcagaagtagtttgctgctaatatatacatatattgtataaaaaggtatattttggttttgttaaaacccttgttgacttttctacactgaacattttttttaacttgatttaataaaaatgttaattttggaagtgcagttttgtaaaaacctttttcagtcaaacagtaaagactttatttatggattgtaataacaaccacaagaaaagccatacatcttaatgaacatacgcctttgttctgtcattttaaagagtggtgtttactatgtgtgtgcttgagcattttctttcagttacatgggtgtaatttaaaaaacagctcctttttaagacttttgaccatagtgttttccagtttaaagcaataactttcatagtttctttcaaagtttaatacatccaatatgtcaagttaaaccattctgggatttgcaaagtttaatacatccaatatgtcaagttaaaccattctgggatttgcaaagtttaatacatccaatatgtcaagttaaaccattctgggatttgggaacttctttaaaggaaaattgtagtagaggtcatcttgatggaattgtgttttaaagttttgtgaatgagttaaatatcattgatagtcttgtgtgtctcacatatcagctttttcataaggaaaatactttatttgcttttatctgagaatttctcagtatgaaaatgattgtttaaaatttcccctctttttgtcagtgcattgggaatagggatagactttacagatttatggaaattaaatttatggggaaaagtttatttttaatattacttatagctgagtcagaattaaaggagggaattgtattgatactccaatacctaaatttcacaataccacttaggaaagctatttcaacaaattacagttttattgttaaaacagagtcttatttgagatgtattgctttatttttcaattaaaagtggttttctcctaaaaaaaaaaaaaaaa

SEQ ID NO: 118984 - DNA, 1000 bp, Homo Sapiens
ttcaagcttcggggtgtcttcctgcttgggtggtcctttggagaaaggcatttatttctctgaagaaggaggtcatgtcgtcttggctcactctgtattgttggggccagaatttaagcttgttttcagcatccgcccaagaagtctcactgggatcctaatacacatcggaagtcagcccgggaagcacttatgtgtttacctggaggcaggaaaggtcacggcctctatggacagtggggcaggtgggacctcaacgtcggtcacaccaaagcagtctctgtgtgatggacagtggcactcggtggcagtcaccataaaacaacacatcctgcacctggaactggacacagacagtagctacacagctggacagatccccttcccacctgccagcactcaagagccactacaccttggaggtgctccagccaatttgacgacactgaggatccctgtgtggaaatcattctttggctgtctgaggaatattcatgtcaatcacatccctgtccctgtcactgaagccttggaagtccaggggcctgtcagtctgaatggttgtcctgaccagtaacccaagcctatttcacagcaaggaaattcaccttcaaaagcactgattacccaatgcacctccctccccagctcgagatcattcttcactcaggacacaaaccagacaggtttaatagcgaatctaattttgaattctgaccatggatacccatcactttggcattcagtgctacatgtgtattttatataaaaatcccatttcttgaagataaaaaaattgttattcaaattgttatgcacagaatgtttttggtaatattaatttccactaaaaaattaaatgtcttttaagaaacattcttttccacttgttaaaaaaattaaatatattttaaagcactttaagaatatgaaactttcatatatgttaaaggattataatttatggaattaaaaaatgcagtgtagtccttaaaaaaaa

SEQ ID NO: 118985 - DNA, 1000 bp, Homo Sapiens
cgacttggcagcacgaaggattcttttctctttcatgcttctcaggctcaatagtttctaattaatcttaaaatccatgtcttttacattgtttttttaattaagtgctgtttactaaccaaataatatttataacatgagtaagctataattaataacaatgaaataaatacccatgtacccaccactggacttcagaagtagaactcatgactgggactaggatgaggcaagggagaccctggccttgggcacaaaatgtaagggatgccaaaaaaatacagtaatcaaagtaagtaatatttcaatccaatatttttaaaaatcagaattaatgcaaaaaaaaccatgatgaacaaaatattaaaatttaaaataaagacaggattagtattactgagttttccttttgtcccaggctctaatatggcttggcatggggcagaacattacaacataccagtcgtgtcatggtgcccaaggctccacagacctcagtggctccctgctgcctgccacagcatctgttttagcagcctcgactcctcagcactcctcagcacacacctcttcttatcaggcttcctccacttagcaacttgctaacggccacctctgtgccttctgatccctgggcgccaatatcctcctgcccttaccatccttccaggcccaacttaaatcccactttcccatgaagcctaactgcgtgaacacccctacccccatacccattagcagtgattttgcccttccccgtaatgctgtcccacttataactgtgctctacttagcattctcagggatcataccttaatgttttcagtatgtctgcgttctcctactagattgtatgtccctcaagagcatgttctgtttctcttctgtctgacagagcactattatacctgactttcagtaactgttagctgtgattagttagctggtggatttaattgattaaaaaattacgattgaatgtaaaaaaaaaaaaaaaaaa

SEQ ID NO: 118986 - DNA, 1000 bp, Homo Sapiens
tttctttgttcccatttatccaaataacttggacagagcagcagagaaaagctgatgggagtgagagaactcagcaagccaacctgggaatcagagagagaaggagaaggaggggagcctgtccgttcagagcctctggctgcatagaaaaggattctggtgcttcccctgtttgcgtggcagcaagggttccacgtgcatttgcaatttgcacagctaaaattgcagcatttccccagctgggctgtcccaaatgttaccatttgagatgctcccaggcgtcctaagagaatccaccctctctggccctgggacattgcaagctgctacaaataaattctgtgttcttttgacaatagcgtcattgccaagtgcacatcagtgagcctcttgaatctgtttagtctcctttttcaacaaaggagtgtgttcagaaaaggagagagaggctgagatcattcaggagtttgttgggcagcaagcatggagcttcttgcacaaattctgggtccataaacaacccccaaagtccctgctgatccagtagccctggaggttccccaggtagggagagccagaggtgccagccttcctgaagggccagaaaatttagcctggatctcctcttttacctgctaggactggaaagagccagaagtggggtggcctgaagccctctctctgcttgaggtattgcccctgtgtggaattgagtgctcatgggttggcctcatatcagcctgggagttatttttgatatgtagaatgccagatcttccagattaggctaaatgtaatgaaaacctcttaggattatctgtggagcatcagtttgggaagaattattgaattatcttgcaagaaaaaagtatgtctcactttttgttaatgttgctgcctcattgacctgggaaaaatgaaaaaaaaaaataaagcaaatggtaagacccttaaaaaaaaaaaaaaaaaaaaaaaaaaaaaaaaaaaaaaaaaaaaaaaa

SEQ ID NO: 118987 - DNA, 1000 bp, Homo Sapiens
gttggtgctgggggctcccctggtgctggccggcgaggactgcctgtggtacctggaccggaatggctcctggcatccggggtttaactgcgagttcttcaccttctgctgcgggacctgctaccatcggtactgctgcagggacctgaccttgcttatcaccgagaggcagcagaagcactgcctggccttcagccccaagaccatagcaggcatcgcctcagctgtgatcctctttgttgctgtggttgccaccaccatctgctgcttcctctgttcctgttgctacctgtaccgccggcgccagcagctccagagcccatttgaaggccaggagattccaatgacaggcatcccagtgcagccagtatacccatacccccaggaccccaaagctggccctgcacccccacagcctggcttcatgtacccacctagtggtcctgctccccaatatccactctacccagctgggcccccagtctacaaccctgcagctcctcctccctatatgccaccacagccctcttacccgggagcctgaggaaccagccatgtctctgctgccccttcagtgatgccaaccttgggagatgccctcatcctgtacctgcatctggtcctgggggtggcaggagtcctccagccaccaggccccagaccaagccaagccctgggccctactggggacagagccccagggaagtggaacaggagctgaactagaactatgaggggttggggggagggcttggaattatgggctatttttactgggggcaagggagggagatgacagcctgggtcacagtgcctgttttcaaatagtccctctgctcccaagatcccagccaggaaggctggggccctactgtttgtcccctctgggctggggtggggggagggaggaggttccgtcagcagctggcagtagccctcctctctggctgccccactggccacatctctggcctgctagattaaagctgtaaagacaaaa

SEQ ID NO: 118988 - DNA, 1000 bp, Homo Sapiens
catgttggccaggctggtttcaaactcctgacctcaggtgatccgcccacctcagcctcccaaaatggtgggattacaggtgtgtgggccaccgtgcctggctgattcagcattttttatcaggcaggaccaggtggcacttccacctccagcctctggtcctaccaatggattcatggagtagcctggactgtttcatagttttctaaatgtacaaattcttataggctagacttagattcattaactcaaattcaatgcttctatcagactcagttttttgtaactaatagatttttttttccacttttgttctactccttccctaatagctttttaaaaaaatctccccagtagagaaacatttggaaaagacagaaaactaaaaaggaagaaaaaagatccctattagatacacttcttaaatacaatcacattaacattttgagctatttccttccagcctttttagggcagattttggttggtttttacatagttgagattgtactgttcatacagttttataccctttttcatttaactttataacttaaatattgctctatgttagtataagcttttcacaaacattagtatagtctcccttttataattaatgtttgtgggtatttcttggcatgcatctttaattccttatcctagcctttgggcacaattcctgtgctcaaaaatgagagtgacggctggcatggtggctcccgcctgtaatcccagtactttgggaagccaaggtaagaggattgcttgagcccagaacttcaagatgagcctgggctcatagtgagaacccatctatacaaaaaatttttaaaaattagcatggcggcacacatctgtaatcctagctacttggcaggctgaggtgagaagatcattggagtttaggaattggaggctgcagtgagccatgagtatgccactgcactccagcctgggggacagagcaagaccctgcctcaaaaaaaaaaaaaaaaaa

SEQ ID NO: 118989 - DNA, 1000 bp, Homo Sapiens
tagcagctggtcgaagccatggagaggtccctgaagtcagtatctactcagtcatcttcaagtgtctggagcccgacggtctctacaagttcactctgtatgctgtggatacacgagggaggcactcagagctaagcacggtgaccctgaggacggcctgtccactggtagatgacaacaaggcagaagaaatagctgacaagatctacaatctgtacaatgggtacacaagtggaaaggagcagcagatggcctacaacacactgatggaggtctcagcctcgatgctgttccgagtccagcaccactacaactctcactatgaaaagtttggcgacttcgtctggagaagtgaggatgagctggggcccaggaaggcccacctgattctacggcgactggagagggtgagtagccactgctccagcctcctgcggagtgcctacatccagagccgcgtggaaacagtgccctatcttttctgccgcagcgaggaggtccggcctgcaggcatggtgtggtatagcatcctcaaggacaccaaaatcacgtgtgaggagaagatggtgtcaatggcccgaaacacatattatttgactctatcaaaagtctctcctttttaaaccttttcttatggatggctgtcaatcccgaggcagaagttttcaggtggagaccaagcggcctttgctcttcttccttcttcctgccacactctgctttcttcctgccatggacccctggaggagacctatggagggacagttttgacctgacccctagaggagacagttttgacctcttcagcaccaggaaggaagctctgaggatggttgcagtgaggaagcatgggtctttaaggacttctctctcttttttgctggacattattgagtttgtgggaccctgcctcttcctgctacctgtgggtctgcccagagtccctgcaggcctgtccatgcattaaaaattcctattgtctctcaaaaaaaaaaaaaaa

SEQ ID NO: 118990 - DNA, 1000 bp, Homo Sapiens
aatattcagttttctccatcagctaaactacaggaggttttggattatctaaccaatagtgcttctctgcaaatgaaatctccagccatcacagccaccctagagggaaaaaatagaacactttacttacagtcggtaacctctattgaagaacgaacaaggccaaatctctccaaaacattgaaagaattggggcttgttgatggacaagaactggcggttgctgatgtcaccaccccacagactgtactattcaaacttcattttacttcttaaggaaaatctccacataatagaaaactcatggaaataatatactttgtggatgctaagaagttgaatcgatgtcatttttagcaatagtgttgccacgatttgtctttttttatataatgaaccactcttttttaactttgtaaccttcccttgaagacagaattttggtgttggtgcttgtaagcattttcattaataatatgagaaatgatacctggagagagagattatgagcaaatgtattgcttcttttagaggaggaagcatacaacctcttttgtgtgaattttgttattatggtcaaagaatgcattcctaagttttcatttgagtacccaaatacacaaaaggtgtccctttaaggaaaataaagaattaagttttaaataacattacattttacaatctgacatctggagtatattgaacataggctatttcttgatataacactcatttaattgtggccatccaaatgaatattattgcagaatttatcttgttcataatgatttgtaaatggtgttatagctgaatacctgtgcatgaaaatgggcaatattttcatctgtttacttgtagtgccatagaggccaatatgcacaatattaactaatgccaagacatggctgtttaaaaaatttaatgttcaaacagttatcactgatgcttttgcactatttattaataaaatcatatattgtgtaaaaaaaaaaaaaaaaaa

SEQ ID NO: 118991 - DNA, 1000 bp, Homo Sapiens
tattccatcaccttcctcctctgctctgggtggtaagggaagccctcccggttcccacaggctatgatgctgcatggcagaggcaggtataacacagcactacatattggaaattttttatttttctaaataccaatgcagttttgctacggttacaattttgaaatattaactgagcctcaaaatcaccctttctgtcaagcatatcttggcctctcccatgtctcagtgttgcctgcatttctcccaggacttgggggtggggtgaaaagcgtacaaaagatacttaaaagggctcctggggtacacaagcccagcaggtcctgagtgaagccgtgggccctccaaatgctcgttttatagcaacctctctctaccctagttctccaaattcacttctgccttcctcaggtttgatatctggcaggtttgactatccagaggaaattaaatatttttatataaaattaaattataataaatattgccaaatgctttcctttagcattgttccaagtctaaatgttaacctcaagctactgcaatttagacaatgaaatgggctgggtctacccccagccaccagccctcatcctctctacccagtgctctggtttatgcttgtctcctgactgctctgcttaaaggtgaaagtagcaggaacaacaacaaaagccaaccaaaaacaaggtagccagtgcaagacatctcactcttctgacatcctgcagtccccaccagtcctgaccgtgggcccctcaggggtctgggagtgtgacgttgtaatcttcatccgtctctatcccaacttcctcctgtgagacagggagacaagtgaatgagatgtcaccaggataagaccacagggaagcaaagaaggaagagagctccacttacaaagaactgcttcttgctcttggggtatccttcaagtattgcatcagacagctctgtagcctgacaagaaataaaaccacccgttttcagatgggcaaaaaaa

SEQ ID NO: 118992 - DNA, 1000 bp, Homo Sapiens
gggctagtgagctggaccggaagtaggtttctacccgaccgcattttacgtggtgctgcatttccggtagcggcggcgggaaatcggctgtgggagagaggctaggcctctgaggaggcgaatccggcgggtatcagagccatcagaaccgccaccatgacggtgggcaagagcagcaagatgctgcagcatattgattacaggatgaggtgcatcctgcaggacggccggatcttcattggcaccttcaaggcttttgacaagcacatgaatttgatcctctgtgactgtgatgagttcagaaagatcaagccaaagaactccaaacaagcagaaagggaagagaagcgagtcctcggtctggtgctgctgcgaggggagaatctggtctcaatgacagtagagggacctcctcccaaagatactggtattgctcgagttccacttgctggagctgccgggggcccagggatcggcagggctgctggcagaggaatcccagctggggttcccatgccccaggctcctgcaggacttgctgggccagtccgtggggttggcgggccatcccaacaggtgatgaccccacaaggaagaggtactgttgcagccgctgcagctgctgccacagccagtattgccggggctccaacccagtacccacctggccgtgggggtcctcccccacctatgggccgaggagcaccccctccaggcatgatgggcccacctcctggtatgagacctcctatgggtcccccaatggggatcccccctggaagagggactccaatgggcatgccccctccgggaatgcggcctcctccccctgggatgcgagggccccctcccccgggaatgcgcccaccaaggccctagactcatcttggccctcctcagctccctgcctgtttcccgtaaggctgtacatagtccttttatctccttgtggcctatgaaactggtttataataaactcttaagagaacattataattgc

SEQ ID NO: 118993 - DNA, 898 bp, Homo Sapiens
gtataaggtccacaccccgggagctgagtgattgcagaaactggccttccatctctctcagacaccaagctgcagatccaggtcaccacctagaggggaggaagacctcgctttggagagtgggaataaaacgctcgtggaaaagggtacacgcttttctgggaaagtgaggccaccatggctctggagaagtctcttgtccggctccttctgcttgtcctgatactgctggtgctgggctgggtccagccttccctgggcaaggaatcccgggccaagaaattccagcggcagcatatggactcagacagttcccccagcagcagctccacctactgtaaccaaatgatgaggcgccggaatatgacacaggggcggtgcaaaccagtgaacacctttgtgcacgagcccctggtagatgtccagaatgtctgtttccaggaaaaggtcacctgcaagaacgggcagggcaactgctacaagagcaactccagcatgcacatcacagactgccgcctgacaaacggctccaggtaccccaactgtgcataccggaccagcccgaaggagagacacatcattgtggcctgtgaagggagcccatatgtgccagtccactttgatgcttctgtggaggactctacctaaggtcagagcagcgagataccccacctccctcaacctcatcctctccacagctgcctcttccctcttccttccctgctgtgaaagaagtaactacagttagggctcctattcaacacacacatgcttccctttcctgagtcccatccctgcgtgattttgggggtgaagagtgggttgtgaggtgggccccatgttaacccctccactctttctttcaataaaacgcagttgcaaacacctgaaaaaaaaa

SEQ ID NO: 118994 - DNA, 1000 bp, Homo Sapiens
cggagtcaggtttcagtgtcttttccctcccttagcccaaccctccaaggcctcatgtctcctaagcatgctgactgcatccgaaaggcccccactcaccatggtctgccctcaccccacatatgtgtgtacacgcgcacgcctgtatgtgcgctgccctcagacatgcaagtgaaaggaggaggcttctgtgtaaatgcactttcttcctcccctctttctccataagaccccaggcagaggtgggtgcctcccctcccctctttgtcactttggtttcctataaatatgtatgtatcgtatgtgcatctttgctattgtaaataactttgaccttttttgttcctgttcctgaagtgctggaggcagttatggaaggagctgcttagggaagaggggtttcacttgtatctccttagttaacaacccagttccaggatcgagcctaaagcgggagccaggcctgagtgttcctgtccctgtgagtgggaaggtcttctggctccccatcccacctggctccagagcctgccctccacagcttgctgccaagctactccctccctccctggacttctcatcttcacaagatggggatcatgggggtttcttaccccacctatgtccccctcttccccaccctgtccctgtagaaaaccagtgaagcaggtacggagctgaggactgggccccaggaggtggggacaggggtctgaatgccgagtccctgaattcacccaggaccatccaaggggccaccgcagcattggccccatcaccacgtcctcacccaactctccctgatgaatagaatatacacactgtgctaggtgtatatatacatatatatatatataaatatatatataatatataaaatatagatatggaaatgactgttctgctgttaagataatgtatactcttttattttcttcctttcatggttaagattttttttttaagaaaagttaaatatccttcaaaaaaaaaaaaaaaa

SEQ ID NO: 118995 - DNA, 1000 bp, Homo Sapiens
ggagtataccctgggagaggagtcggaagcccctggccagagggcactcccctccgaggagctgaacaggcagctggagaagctgctgaaggagggcagcagtaaccagcgggtgttcgactggatagaggccaacctgagtgagcagcagatagtatccaacacgttagttcgagccctcatgacggctgtctgctattctgcaattatttttgagactcccctccgagtggacgttgcagtgctgaaagcgcgagcgaagctgctgcagaaatacctgtgtgacgagcagaaggagctacaggcgctctacgccctccaggcccttgtagtgaccttagaacagcctcccaacctgctgcggatgttctttgacgcactgtatgacgaggacgtggtgaaggaggatgccttctacagttgggagagtagcaaggaccccgctgagcagcagggcaagggtgtggcccttaaatctgtcacagccttcttcaagtggctccgtgaagcagaggaggagtctgaccacaactgagggctggtggggccggggacctggagccccatggacacacagatggcccggctagccgcctggactgcaggggggcggcagcagcggcggtggcagtgggtgcctgtagtgtgatgtgtctgaactaataaagtggctgaagaggcaggatggcttggggctgcctgggcccccctccaggatgccgccaggtgtccctctcctccccctggggcacagagatatattatatataaagtcttgaaatttggtgtgtcttggggtggggaggggcaccaacgcctgcccctggggtccttttttttattttctgaaaatcactctcgggactgccgtcctcgctgctgggggcatatgccccagcccctgtaccacccctgctgttgcctgggcagggggaagggggggcacggtgcctgtaattattaaacatgaattcaattaagctcaaaaaaaaaaaaaaaa

SEQ ID NO: 118996 - DNA, 1000 bp, Homo Sapiens
gtgggaagcccatgatcatctacaagggcggcacctcccgcgagggcgggcagacagcccctgccagcacccgcctcttccaggtccgcgccaacagcgctggagccacccgggctgttgaggtattgcctaaggctggtgcactgaactccaacgatgcctttgttctgaaaaccccctcagccgcctacctgtgggtgggtacaggagccagcgaggcagagaagacgggggcccaggagctgctcagggtgctgcgggcccaacctgtgcaggtggcagaaggcagcgagccagatggcttctgggaggccctgggcgggaaggctgcctaccgcacatccccacggctgaaggacaagaagatggatgcccatcctcctcgcctctttgcctgctccaacaagattggacgttttgtgatcgaagaggttcctggtgagctcatgcaggaagacctggcaacggatgacgtcatgcttctggacacctgggaccaggtctttgtctgggttggaaaggattctcaagaagaagaaaagacagaagccttgacttctgctaagcggtacatcgagacggacccagccaatcgggatcggcggacgcccatcaccgtggtgaagcaaggctttgagcctccctcctttgtgggctggttccttggctgggatgatgattactggtctgtggaccccttggacagggccatggctgagctggctgcctgaggaggggcagggcccacccatgtcaccggtcagtgccttttggaactgtccttccctcaaagaggccttagagcgagcagagcagctctgctatgagtgtgtgtgtgtgtgtgtgttgtttcttttttttttttttacagtatccaaaaatagccctgcaaaaattcagagtccttgcaaaattgtctaaaatgtcagtgtttgggaaattaaatccaataaaaacattttgaagtgtgaaaaaaaaaaaaaaaaaaaaaaaaaaaaaa

SEQ ID NO: 118997 - DNA, 1000 bp, Homo Sapiens
gaaattgatgggtattaagagtgaagatgaagctggatgtagctcagttgatgaagaaagttacaagactctgaagcagcaggaagaagtatttcgaaatttagatgctcagtatgaaatggcaagatcacaaacccacacacaaagaggaatgggtttgggtttcacatcttcaatgcgaggaatggatgcagtttgaaaatgatcacacttgtaaagtttgggacttatagacttcttgttctgatgtcacgtccttgttcaccaaacagctagcactctagcttgcatgggtgttgcattgactttaatttattgaaaaatacaaatttttgtaaatatcagatcagtgatactggtgttagtgttgtaatcaggttaaacccacttccattaaacttgacaggactatagaaggataatattttttagttcatgaattctacttttcaaatatataaaagctgcaggtggggataaaatctcatacatggattttttcgtgtccgctgtcttgtgtacttttgtacttaaccttgtacagttattttcatctcttgaaacatgaaagaaatgttatgtagatgttctttagaagatctggccatttggtacataatccagcacagataagctgggtggtaatgataataaaaatggttttctcaaaactggtgttaatttaagttacctgggatgtttctttgaatttgttttatagtttctgtagcatttggcaattgctgttagaaaacactagctagaaatcccctccccaccaccctttttaaggccagttaactatactacagtcaataccgtggtgagcaaaaatgtaaaaggtggaaggagaaaacttactaaaatagtatgttttcctattataagggacagacttggtattcagtatttgtcaaatattacatgtgttattcaggagatagattaatgcattaaagggatgtaagcacttttattttaataaagtgccttataacaa

SEQ ID NO: 118998 - DNA, 1000 bp, Homo Sapiens
tggcccatgggctggcatggtcatattacatcggatatctgcggctgatcctgccagagctccaggcccggattcgaacttacaatcagcattacaacaacctgctacggggtgcagtgagccagcggctgtatattctcctcccattggactgtggggtgcctgataacctgagtatggctgaccccaacattcgcttcctggataaactgccccagcagaccggtgaccatgctggcatcaaggatcgggtttacagcaacagcatctatgagcttctggagaacgggcagcgggcgggcacctgtgtcctggagtacgccacccccttgcagactttgtttgccatgtcacaatacagtcaagctggctttagccgggaggataggcttgagcaggccaaactcttctgccggacacttgaggacatcctggcagatgcccctgagtctcagaacaactgccgcctcattgcctaccaggaacctgcagatgacagcagcttctcgctgtcccaggaggttctccggcacctgcggcaggaggaaaaggaagaggttactgtgggcagcttgaagacctcagcggtgcccagtacctccacgatgtcccaagagcctgagctcctcatcagtggaatggaaaagcccctccctctccgcacggatttctcttgagacccagggtcaccaggccagagcctccagtggtctccaagcctctggactgggggctctcttcagtggctgaatgtccagcagagctatttccttccacagggggccttgcagggaagggtccaggacttgacatcttaagatgcgtcttgtccccttgggccagtcatttcccctctctgagcctcggtgtcttcaacctgtgaaatgggatcataatcactgccttacctccctcacggttgttgtgaggactgagtgtgtggaagtttttcataaactttggatgctagtgtaaaaaaaaaaaaaaaaaaaaaaaaaaa

SEQ ID NO: 118999 - DNA, 1000 bp, Homo Sapiens
gctgacaaccaagcctcgggggaaatggttttgcccacgctgctcccaagaacggaagaagaaatagataagggccttggattccaacacagtttcttccacatcccctgacttgggctagtgggcagaggaatgcctgtgctggggccaggggttcagggaggagtggatggcacagtgctgtcatcccttctcctcccctctccccactcccggtgctgaggctgcatcagaccctggtagggaggggtgccgcagccactaacggtatgtgctctccttcagccctctcccttcggagggacgtggtcttgcccactgtccttttgcctccatgctgaggtcggtgctgtatttcagagggagggtccttttcattctccttgctttgtatttaaggactggggcatagcatgggggcagtcccccagacctcttcattccccctcctgtggtgagggctaggtgtgatcaacacttttcttctccattcccttcctgcttttttcatggtgggggatccaccaggtcatctaggctctggccctagttgaaggggcaccccttcctctgtgccaagaggattcatcctgggagagggggcaaggtggaatgcagataactcacatgtaaaaggaacttgggtaggtaaataaaagctatacatgttggcctgctgtgtttattgtagagacactgttttagtaaacatgctgagcattcattttgcgtcctctgggttggatgcaatgtgagaggatggcatgccagaattaggacacgacatgaaaccagagtggtgcctctgtccgagaacttgtaagttctcaacttgggaaagacagaggtgctggagggtaggcctcagaccagggggtctccaaaactttgtaaatcatgcatcttttctccataaaacatctttcacttaatttccaataaatgatgtatttgtgctatacatacgtactgctatactataaaaaaaaaaaaaaaaaaa

SEQ ID NO: 119000 - DNA, 1000 bp, Homo Sapiens
tgtatgctgtgggcggctacgacagctcctcacacctggccactgtggagaagtatgagccccaggtgaacgtgtggtcgcccgtggcgtccatgctgagccgacgcagctcagcgggcgtggccgtgctggagggtgccctgtacgtggcagggggcaacgacggcaccagctgcctcaactcggtagagagatacagtccaaaggctggagcctgggaaagcgtggcgcccatgaatatccgcaggagcacgcatgacctggtggccatggacggatggttgtacgccgtggggggtaacgacggtagctccagcctcaactccatcgagaagtacaacccgaggaccaacaagtgggtggccgcatcctgcatgttcacccggcgcagcagtgtgggtgtggcggtgctggagctgctcaatttcccgccgccatcctccccgacgctgtccgtgtcctccaccagcctctgacccacctaccaccagaggcctgcagcctcccacatgccttaaggggaccgtggcccccaccagggacgtcctgcgccatccgttcacgtctctgcatccattccttcatgtctttatttagttgtttatttatttagttatttatcttatttattgaggggtgaggagtgccacggctgcccgtttacacctttagcgtctggtcctcctgcgtgtcctcccctccactgcctgcatggggggcgcggggagtgaccaggcgggggcctcaccgccccagggccgttgcctgctcagaccttgcaggctgtggagcaagaggccctgggtctctccaagcagctgcagaccccagctcgaattttgcacatggcggggtcccgggaagggtggggagcaggtgtccttcctgtcgtcgtctgccgtgtgccatctttcctggatcttgtagcgggtgcacacgcgtgcactgggaccccacacagcaatacgagtccaacttaataaacacatttctggggttc

SEQ ID NO: 119001 - DNA, 1000 bp, Homo Sapiens
ctaaaggctgggcagtgcgtttagtctgtggcctagaagacctcatcagcccccgagaggaggccttgcattacctcactgggacctgtttgggggccatccctgcggtccaccctctgaacccccagcatgtttgtcctgtttctcaccattgggttaaggggtgccgagcactagctagacttccacatagtcccaccccaagtgggcggcagtgttcctggcatgaccaggattcctgtgaaagcaggagcagcagcaagccgtcccgggcctgcctttcccatcctttggttctcctttccagtctgggttcacaccctgaaaagggatgggtgtgtcctctgagcactctggcatttgtcattgctgagcccatatcagtaggtcctgggacttgacaaagtatgtgggaggggaaggaaggacagaacttgactggctccatttcatggaccaactgatcaattgccagtactaagccactcattgttatggcttcctttttgaaaaccacctgtctcaaggattcaggtttctgctcacatccccagctgatgctcaataaaactcagccaggagcatatggagatgctgacagccaggtaatgggtgagactgtggggtcccttttcctctaaagcctttactctgaggataaggtcacaaagtagggtgtgacttgaaagtatcgtgaccatgtggcccaccagcagcctttccaaaggggaactccagagacatttcataatgcaaacagcactgttgctttaagaacaaggcctttggaggtggctaaacttgcacgcacgtgtgtgaaaagccatcccatcttctgcctccagttggagctttcagctgttaaaacagtcagaaactattgattcttccctttaggaaaaaatgctcaggcagaacggggtacatccacaggaggaatcggacgagaggatgtgacattcggtccaggagagaaagagcagtttctgttaaagatgta

SEQ ID NO: 119002 - DNA, 1000 bp, Homo Sapiens
ctcagtgagcccttctcccattccagatcatcagcacacccacacccaccataggtctctcttctccggtcttcccagaagggtaaaactcccagcctaccctgctccagcttcagcccaggtagttggtgtgtctcaatatgaatagggggtgagtagcttcatagaaagaatggggaactcccttggcctcaagccagtatagtttggaagttgggggtcggggatgttaagggtggggagtatcctgcctgtgacctctaggttatgaaaactatcttagaaggtgcttttagaaagaaccaggagaacaaccaaagcagcttacagacgcctgaacggagaatgaagtgtttcaagtaagcgagtctgcaagttctcagaagcagacagatatccaatctggactgcagccagggaagtcctctctctcgctctctctctctctctctctctctctcattgcttgtatgacttcacaagcaactcaggatcattctagcaggctttcccactgtcaaacagagacttcattctaaaaagagaagtgataaacagagctccagctctgctagctctatatatttactgattagtggaaagcactgaccaaggagacttttaagccagtggttcttcagaatcacctagatgcctccaccctccagagatccagagtccaggagtctgaagtggggccccaggtgatgtcattgctgctggtcccaggaccacattttaacaatcaatgttttcagatgtctcatgaggaacactacttaatgcagtgggaaagaaaatatttcagaggagaattttttcttaaagaagctgcatattctggactctaatttagtttaattcactccaggatggcacgcaggattcctaattcttaaatgccattcagtctggacttcaaatcacttgtcttcagaaaataaaagatttgttccaccaaaaaaaaaaaaaaaaaaaaaaaaaaaaaaaaaaaaaaaaa

SEQ ID NO: 119003 - DNA, 1000 bp, Homo Sapiens
ctcaattggaaatttttggattctgggatggcagtactaaaatactttttatgtatcattgctaggttccagcctaattaagaacatagaaaattgacctctaattaagtggatcattattatggcatttcttaagctttatccaaatttcagctacataaaacatttcaggatttaaattagtaccatatcaattttctgtgatgatgtttaccaactataaagcactatgttggtttactacttcagtaaattattcttagtgaattattttctaaattaaaaaaaatgacttggctttggtattgataatagtattcacaacctgcatctgttaagatgtttgatctttaacccacacaatgtaagggtactgttgtcattgttctcaggtaggtgattctgccttccaagagtatatgtttctttaatcagtttaaaagataaaggcattttgggttttaagacccctgctttacatctcaggtaatgtgtagattgtacttctctggaaccaaatgtagttttctacactcagttgtaaatgttaatctttctcaaatgtgcacattctttaaaagtgtgttcctaagtagaaatatacctaaatgaagattctcttattttatcatataaatttatgcaacgataagttccaaatgtatttttcaaaacagaatggaatatcagagtacattttcatgaagtttaaaaatcaaggactgttcctgattagatgacgtatttattggtggccttcttatctaagcacatgagtagttggctctgaactttgtgtatttgaaaaaggaaaattcagtggaggcttttgtttgtgtgtgtgtggctttgaaaacaaattatttgagaaagaccataacacagtgagtagcctatatgtgcatttactgaattgttaatttaaggatatatattaatagagtatgtttaaaataaatattgttttcatcactgaaaaaaaaaaaaaaaaaaaaaaaaa

SEQ ID NO: 119004 - DNA, 1000 bp, Homo Sapiens
gccggcgctgaccgaggaactcatctggagcccggacattggggacacgcagctggacgtagagtttcttatggagctcttagatccagatgagctgcggggagaggctgggtactacctgaccacgtggtttggggcgctgcaccacattgcccactaccagcccgaaacagaccgcgctccccgggggctcagctccgaggcccgcgcctccctgcaccagtggcaccgcaggcggacgctgcacagaaaggatcatcccagagcccaggccaacctgccctttaaggagccatgggcagaagagactgtgacagggaccagtgacaactaggggtttcacacccctccgttcatgcctgtaatcccaacattttgggaggccaaggtgggaggattgctcaaactcctaacctcaagcaatctgcccacgtcggcctcccaaagtgctgagattgtaggcgtgagccaccgtgcccaattgtgatcgtttttcccaaagaatgtatcacatgctaacaaaccatatatttatgtatttcattgttcatagtaactacaatttaaaaaactaaaaagaaacaagtgaggccgggtgcggttgctcatgcctgtaatcccagcactttgggaggccaaggtgggcagatcacctgaggtcgggagttcaagaccagcctgacaaacatggagaaacccgtctctactaaaaatacaaacttagccgggcatggtggcgcatgcctgtaatcccagctactccggaggctaaggcaggagaatggcttgaacccgggaggcgaagattgcggtgagcggagattgcgccattgcactccagcctgggcaacaagagtgaaacaccatctcaaaaataaataaataaataaaaagaaacaagtgaagttaacgttaataataatatatttgatttaacacaatgtatcccaaatattatcacttcaacatgtatccatattaaaaagttactgacatattt

SEQ ID NO: 119005 - DNA, 870 bp, Homo Sapiens
ctcgccctcaaatgggaacgctggcctgggactaaagcatagaccaccaggctgagtatcctgacctgagtcatccccagggatcaggagcctccagcagggaaccttccattatattcttcaagcaacttacagctgcaccgacagttgcgatgaaagttctaatctcttccctcctcctgttgctgccactaatgctgatgtccatggtctctagcagcctgaatccaggggtcgccagaggccacagggaccgaggccaggcttctaggagatggctccaggaaggcggccaagaatgtgagtgcaaagattggttcctgagagccccgagaagaaaattcatgacagtgtctgggctgccaaagaagcagtgcccctgtgatcatttcaagggcaatgtgaagaaaacaagacaccaaaggcaccacagaaagccaaacaagcattccagagcctgccagcaatttctcaaacaatgtcagctaagaagctttgctctgcctttgtaggagctctgagcgcccactcttccaattaaacattctcagccaagaagacagtgagcacacctaccagacactcttcttctcccacctcactctcccactgtacccacccctaaatcattccagtgctctcaaaaagcatgtttttcaagatcattttgtttgttgctctctctagtgtcttcttctctcgtcagtcttagcctgtgccctccccttacccaggcttaggcttaattacctgaaagattccaggaaactgtagcttcctagctagtgtcatttaaccttaaatgcaatcaggaaagtagcaaacagaagtcaataaatatttttaaatgtcaaaaaaaaaaaaaaaaaa

SEQ ID NO: 119006 - DNA, 1000 bp, Homo Sapiens
acaattctaaccttaacagataatatgcctcatgtgcatttgggaacaggatagcttgagccatattcctagttgccttgtcactgattttatacattttaaattgtgacttcctctaatcacgaactaaaatttaatattgtatataataccggagtattttatgcctgcctcattttattatatgattagctcctgcatttctttggttctaagtttgtgttatttcagaataactaaagtacttcagaatgaaactggatacagtatattcagttcataagtgtaattgaccatacttgaatatgtttaagtttataagtaacatcaggtgttatgaaattaatataaataagatgtttttgtaagtttttattttgaaataagtttagattcacaaaatcttaccaaaatattccagagttcttgcccttaacccagcttcttccaaagataacaacttacataagcatagttcattaccaaatacaggaaagtgaaattgttacaatactgttaactacagaatttatttggaaatcaccagttttaacatgcatgcatttttgtttgttttttatatgtagctttaagaaatcttaacacatatattgattcatgtcaccaccaccgtaatcgagattcagaatgttgcatcaatgcaaactccctcatgctccttgtttatagtcacaacctctcctcagccctaacccttggcaatcagaaatcttttcatctttagttttgtcattagtagcatgttataaaaatggaatcatacagcatgtacccttttggtattggctatttcaactaaagcagattaacctgaaatccatccaagttgttctgcatatcattgttctgtttttattggccactaataatctatgatacgaatataccactatttgtttattcacccactgaaggacattagttttgttcccggtttttcttactgttacaaataaaaatcctatgaacatttgtacac

SEQ ID NO: 119007 - DNA, 1000 bp, Homo Sapiens
gacggcgtgagtttactggtgcagagaaccattgcaagacttcgcctaaagaaaatttttagtggtgtctttgtaaaagtcaccccccagaatctaaaaatgctgcgtatagtggaaccttatgtgacctggggatttccaaatctgaagtctgtccgagaactcattttgaaacgtggacaagccaaggtcaagaataagaccatccctctgacagacaatacagtgattgaggagcacctggggaagtttggcgtcatttgcttggaagacctcattcatgaaattgccttcccagggaagcatttccaggagatctcatggttcttgtgccctttccacctctcagtggcccgtcatgctaccaaaaatagagtgggcttcctcaaggagatgggcacacctggctatcggggtgaacgcatcaatcagctcatccgtcagctgaactagacccaggtgaggcagggctgaaaactgcccttgggctgacttttgataggccatgccttgccactttacaagttctttttgcatttactagtatttaagagtaaccttgagattgggaggaatagaggaggctggtacaaatagatggagacctgctgggatcagtgaatgcctgattaggacatggggctatgcatagcctaagagttataggcttaaagatgtcgagtaactaaaaactgtattgctggccgggcgcggtggctcacgcctgtaatcccagcactttgggaggccaaggcgggcagaccatgaggtcaggagattgagaccatcctggccaacatggtgaaaccctgtctctactaaaaatacaaaaatgagctgggtgtggtggcacgtgcctgtagtcccagctactcgagaggctaaggcaggaaaatcgcttgaacccaggaggcagagattgcagtgagccaagattgcaccagtgcactccagctgggcgacagagcgagactccatctcgaaaaaaaaaaaaaaaaaa

SEQ ID NO: 119008 - DNA, 1000 bp, Homo Sapiens
ggccagcagccctggggcaggggaaggccccgcggaggagggcaccagggacagcaaggtgggcaagttcgtgcccaagatcctgggcacgttcaaaagcaagaagtgagtcttctggcctggcaacccaggccagggtgcccgcatcgctgccccggtcatccagaagccccgcggaacagagagccctgctcatgtgcttgagcagcggctgtcaggccacggccgcttggggcttggctgagtgcgccagacctcggctccactggaggctcacctggcagctgccgtctctgccccctggcctccccaacgctggggctgcacccctcgccaccagtgcctttctcccctcagcaccttcatctctgcaccgtcagccttgcgtggcgcagcgtctggctccgccatctctttgtgcctcagtcccccccgccccctttatttttttgagatctagggctggagtgcagttgagcggtctgggctcactgcaacctctgcctcccgggttccagcgattctcctgccccagcctcctgagtagctgggattacagatgtatgctaccacgcccagtgtaataaaccctaagagggaactgatttaagaaacaaggccgccaaacaaaggcagcagttccgactccagcagctgggaaaggaaggaaagtgaccccactttcactcctgcacagcccactggttaccaaaaccaccgtgcaagtcgggatgacagcagggacttctggccaggtgggaaaggtgcctggaagcgggatgcgcctgtgcgtctcttggccatgatgttcttgtgggcatgttattcttggtgctgcctggggtgttgctgagcggacaggctctccagctggagtccatggagaggccagaggctggcggccctgcctgggccttcggagcctcctgcctgcaccctccacctcttctaaaccatgatgtggcacattttggtgttaataaaacacaacacacaaagt

SEQ ID NO: 119009 - DNA, 1000 bp, Homo Sapiens
tttcaaaggctccacagctccaccgctccacctggcttcactccagcaccctgtccctggagcacctctgtcctgtctgggccaacctggtctccctgccccatgccctcccctggctcttagcaacctgcccttttattcatgccatttggggtcacagatgcctagctggacacagctcccagaactggctccaccctggggccttgcccctagtaccccctggcaggagcaacccaccccatggtcgaggttcccctacccctggatcctggactgaagccatttcctacagagaagcgttcccaccccctctcaggcacaaaagccggtgtccagggactcaagacctgtacctggggttgcaggggctcctgccctgctgtatcccaccaggagggggccccactgcccttccggcccttaaaactgggctgggagtgaagacggggaagtgtgtgagacaaaacaaagccggcttgtttcctccccttggcaggctaagctctcccggcagcccgggctctggggcggaaggagaacagtgtcatctcttcctttgttgataaattgccaaagagtgggaacaggtggggtcaggggccagagtgcaggggagggggcaatggtggaggtggcggggggaagcagagggaggtgggctgaggcctcggtggggccagtgcgacgctggcttaaggagctggaggggttcctaatacacatttaattcagtttctcttccctaagaggctgccggagttggggcctcctccagcagagaccctcggacccctgcagggcctggacttggggtgaacagggcttcagtcagcgcaagtattccatttgcatttggtaatttttcatgccacctatttatgaatatataaatctttataccaaatctattttttaaaacatggaaaagttgcctttatggaaacttggcagagccagagtgtacacattcctaaaccattaaacagatttctataac

SEQ ID NO: 119010 - DNA, 1000 bp, Homo Sapiens
ccctagaccacggacattaccgccgctgccaccgggccctacccctgcccagcagccgggccgtggtctggctgaagctgcggggccgcggggctccgagggaggcaatggcagcaaccctgtggccgggcttgagacggacgatcacggagggaaggccggggaaggctcggtgggtggcggccttgctgtgagccccaaccctggcgacaagcccatgacccagcgggccctgaccgtgttgatggtggtgagcggcgcggtgctggtgtacttcgtggtcaggacggtcaggatgagaagaagaaaccgaaagactaggagatatggagttttggacactaacatagaaaatatggaattgacacctttagaacaggatgatgaggatgatgacaacacgttgtttgatgccaatcatcctcgaagataagaatgtgccttttgatgaaagaactttatctttctacaatgaagagtggaatttctatgtttaaggaataagaagccactatatcaatgttgggggggtatttaagttacatatattttaacaacctttaatttgctgttgcaataaataccgtatccttttattatatctttatatgtatagaagtactctgttaatgggctcagagatgttggggataaagtatactgtaataatttatctgtttgaaaattactataaaacggtgttttctgatcggtttttgtttcctgcttaccatatgattgtaaattgttttatgtattaatcagttaatgctaattatttttgctgatgtcatatgttaaagagctataaattccaacaaccaactggtgtgtaaaaataatttaaaatttcctttactgaaaggtatttcccatttttgtggggaaaagaagccaaatttattactttgtgttggggtttttaaaatattaagaaatgtctaagttattgtttgcaaaacaataaatatgattttaaattctcaaaaaaaaaaaaaaa

SEQ ID NO: 119011 - DNA, 1000 bp, Homo Sapiens
tcccttgcaaaaacaattagcaaaattgaagggcaactggaggaagaaggcttacctgaatatatagatgatattttttctggtgttagtaatgacattggaacagaagcacagatcagatttctaaaggccaaactccatgttatgcaggaggaattggataatgttgtatgtgaatgcaataaaaaggaggatgaaattcagaatttaaagtctcaagtaaaaaattttgaagaagattttatgagacagcagcgaacaattaatatgcaacagtctcaagtagaaaaatacaaaactcttttcgaagaagcaaacaaaaagtatgatggattacagcaacagttgtcttcagtagaaagggaattagaaaataaaagaagactgcaaaaacaggctgcaagtagtcaaagtgccacagaggttcgcttgaatagagctctagaagaagcagaaaagtataaactggagttaagtaaattaaggcaaaataacaaggacatagcaaatgaagaacacaaaaaaattgaagtgttaaaatcagaaaacaagaagctagaaaaacaaaaaggagaattaatgatagggttcaagaaacagttaaaattaattgatgttttaaaaaggcaaaagatgcatattgaagctgccaagatgctatctttcactgaggaggaatttatgaaagcacttgaatggggaaattcataagtgatctacttcagttagtctctatgacaataagaaaactaaggctcagagaaaaagccaaaactagtacttgcatgacacctagtcaagtcctagtagtattcgactttcattttgtggatcaatttttatttggaaaatagcagcaattctcgtaggagtcagattaaaacgtctacaactaccttgaataacttcaactatcaggataattaaaactgcaaaccactggaaaaaaaaaaaaaaaaaaaaaaaaaaaaaaaaaaaaaaaaaaaaaaaaaaaaaaaaa

SEQ ID NO: 119012 - DNA, 1000 bp, Homo Sapiens
agcacgagcagaacatgcagctgctcctgcagcagagtcgagaccacctcggtgaagggttagcagacagcaggaggcagtatgaggcccggattcaagctctggagaaggaactgggccgttacatgtggataaaccaggaactgaaacagaagctcggcggtgtgaacgctgtaggccacagcaggggtggggagaagaggagcctgtgctcggagggcagacaggctcctggaaatgaagatgagctccacctggcacccgagcttctctggctgtcccccctcactgagggggccccccgcacccgggaggagacgcgggacttggtccacgctccgttacccttgacctggaaacgctcgagcctgtgtggtgaggagcaggggtcccccgaggaactgaggcagcgggaggcggctgagcccctggtggggcgggtgcttcctgtgggtgaggcaggcctgccctggaactttgggcctttgtccaagccccggcgggaactgcgacgagccagcccggggatgattgatgtccggaaaaaccccctgtaagccctcggggcagaccctgccttggagggagactccgagcctgctgaaaggggcagctgcctgttttgcttctgtgaagggcagtccttaccgcacaccctaaatccaggccctcatctgtaccctcactgggatcaacaaatttgggccatggcccaaaagaactggaccctcatttaacaaaataatatgcaaattcccaccacttacttccatgaagctgtggtacccaattgccgccttgtgtcttgctcgaatctcaggacaattctggtttcaggcgtaaatggatgtgcttgtagttcaggggtttggccaagaatcatcacgaaagggtcggtggcaaccaggttgtggtttaaatggtcttatgtatataggggaaactgggagactttaggatcttaaaaaaccatttaataaaaaaaaatctttgaagggac

SEQ ID NO: 119013 - DNA, 1000 bp, Homo Sapiens
ggctgtcagaactggatccctggggtgatatttgggaattagtggagtgatctctgaagacctagggctatgatctggagctgctgtggctgaaatttggggcctctgaagtggcatggagattgaggtccagagagcctgagatcttgagggctgacatttggagagatggggtcgagggttgtctttgggccttgactgctttgggcctttctcactctcattcccgggatgctttgccagaatctctgctggattggccgtaaccctgtccccgagcgggctcacagggtctgaaggccacgcatgaggcaaaggtaaagttctgagccacccggtgcctccttcccaggactgcaagatggaggaaggcgggaacctaggaggcctgattaagatggtccatctactggtcttgtcaggtgcctggggcatgcaaatgtgggtgaccttcgtctcaggcttcctgcttttccgaagccttccccgacataccttcggactagtgcagagcaaactcttccccttctacttccacatctccatgggctgtgccttcatcaacctctgcatcttggcttcacagcatgcttgggctcagctcacattctgggaggccagccagctttacctgctgttcctgagccttacgctggccactgtcaacgcccgctggctggaaccccgcaccacagctgccatgtgggccctgcaaaccgtggagaaggagcgaggcctgggtggggaggtaccaggcagccaccagggtcccgatccctaccgccagctgcgagagaaggaccccaagtacagtgctctccgccagaatttcttccgctaccatgggctgtcctctctttgcaatctgggctgcgtcctgagcaatgggctctgtctcgctggccttgccctggaaataaggagcctctagcatgggccctgcatgctaataaatgcttcttcaaaaaaaaaaaaaaaaaaaaaaaaaaaaaaaaaaaaa

SEQ ID NO: 119014 - DNA, 1000 bp, Homo Sapiens
agaactatggcatggttagaccctggccacttgattgcatgtgcctccccagtgggcgtgccctggttcccaaccagttgtggccactgccactgccctgcctggggcaggagttgaggttaaggctaactacaggctccttccaggccacctaccactcagaccctgcaggaggtagcacaaagcattcacagcctgtggagtcagaggccaatttcttctccctgagcaagaagaatggaagcaaatgaaaagtgctcacagtatgctcaactgcccctgctcaggtgaagaatagcctgtctggatggagagatgtcaggctacttgatactcagaaaaacaggtctcaaaacagtgccttccaaataatacatgtggatgtggacactcttctatagacgaggtggagcttaattcctgtccttacccccatattcccacctcattaccaccctttgaaggtgaactagacttaatgatacttcccacgactaaagtagggaaagggaaaagtcacaaacttatagtggggaagcctggcagacacctaaccaagtgatgtcatgtatatgtcatgagaggggtgcatcacttccctggtattcctaccaaaaacccaaattcccagtgtatgatcttgagacaaatgttagacaaatccagacgtggggtacattctacaagatacctggccagaactcaagactgttgagatggccgggtgcagtggctcatgcctataatccccgacactttgggaggctgaggcgggcagatcacttgaggtcagaagttcgagaccagcctggcaaacatggtgaaaccccatctctgctaaaaatacaaaaattagccaggcatcatggcatgtgcctttagtcatagctacacaggaggctgaggcaggagaattgcttgaacccaggaggtggaggttgcagtgagccaagatcgcatcactgcactccagcctgggcaacaagcaagactccacctc

SEQ ID NO: 119015 - DNA, 1000 bp, Homo Sapiens
tgttaaacctgaaaaattggatgcattttatagctgtgtttccacacttatgtcaaatcagctaaaggatctattaaggagaactgtagaaggatttgtaaaactctttgacccaaaagatcaacaaaggctgccaatatttaagatagaattgacatttgatgacgacaaaatggaattttatcctacctttcaagatttggaagataatgtcttgagtttggtggaacgaatagccgaagctctgcagaatgtccaaacaatcccctcttggctatcaggaacttcaacaccagtaaatcttgacacagaacttcctgaacacgtgttacactgggctgttgatacactgaaggcagcagtacatcggaacttagaaggtgcaagaaagcattatgagacatatgttgaaaaatataattggctccttgatgggactgcagttgagaatatagagacttttcagacagaagatcatacttttgatgaatatacagaggagctggattgctgggtggtatgggaagtgtatttttaactttttaagaaactgttaagccaggcatggtggcttgcacctgtggtctcagctactcaggaggctgaggtgaaaggattactggagcctgggagttcgagtctgcagtgagttatgatcatgccactgcactccaacttgagtgacagagcaaaactctttgtctcaaaaaacagaagaaacttaaatttctttcaaagttgttataccatttacaatctcaccagcagtgtatgagatttccagttcttccacatccttttcaaccttcgggcttatcagtcttttactttttactattgttttattttttcccactgcactttcacatctagattatcagtctttttaatttcatgtgtatattggtatcccactgtggttttaatttgcatttccctgatgactaatgatgtttagcatcttttaacatgtcatgttccatctgtgtatctttttact

SEQ ID NO: 119016 - DNA, 1000 bp, Homo Sapiens
aaggtcactgagattctaagtaagatagtaaatctaaggtcactgagccaaatccttttcaataggcatatattaacaggctgcttattttggcggaggttacatatggatgaaaatgaatcttagtcactgaatattcatatacatttcccccaaaaccttagacattcatagtagattttaattagttagctttctaactagtcagatttctgcccaaagtgcttagtcaatagtaattaagatataggtaattaagatatagcttcaaaaatggctttgcttttgatttctactcatattcgtatggctccagaaaaatatttttttcatatttgacaatgtcagctccactttagaaattttcaataaccagatgagaaaaaaattaagaaattgctcaagggaaacatttgtaaatggatttgaaagattgagccaaattctgttgtcagttctaagcatgcagttctcacctccatttagtcccccatcagaacagaggtcaggaatttagctggggagcctaaatttagttcagcttacctttgagaatagcatcaattcagactctcttttcattatgttttcttttctttttccctctttttaaactacattgtgttagagtcatagtctaggatcctgagagattttccattcttgtcaccattcacttgcattgtaaagattttctttgtctgttgttggcatagattcttttgtacatatttatttatttgtgtttatatatgtcaattggtttcctttcttagcttgatattgcctagctttgttgttttaattaactttctattagagagactgtatatattttttctaaatactttgtgaaatcatttttggtagcaatatctttgaatatgatgaataaaagtgactgtgagtgcaaatagaattagcagtaagaagctactctagctaatttgccattttacttaaatggaaaatgtttttcaaataaatacttatgttgttc

SEQ ID NO: 119017 - DNA, 1000 bp, Homo Sapiens
ggcccggcctttcctttttcctctcctctcctgccgagagtggaacacacgtgtcctgggagctgcatcttgtgtagggtccagctgcttttggggactgcaggaatcatctcccctgggccctggactcggactggggcctccccacctccctctcggctgtgccttacggagccccaatccaggcctcctgtggctgttgggttccagatgctgcagctccatgtgacttccaagcaggccctccgccctccctgctgaatggaggagccgggggtcccccaggccaactggaaaatctcccaggctaggccaattgccttttgcacttccccgttcctgtcacatttccccagccccaccttcccctcctgatgccctgaaagcttccggaattgactgtgaccacttggatgtcaccactgtcagcccctgccttgatgtccccatttagccatctccatggagctcctgctggagggccctgaaccctgcactgcgtggctgcccagccagctgcctcctgtcctgggaggaggcctcctgggtgtcctcatctggtgtgtctactggagggtcccacaggagaggcagcagaggggtcaggggaggtctcctgccgggggttggcctctcaagcctcaggggttctagcctgttgaatataccccacctggtggtggcccctccgatgtccccactgatggctctgacaccgtgttggtggcgatgtcccagacaatcccaccaggacggcccagacatccctactggcttcgctggtggctcatctcgaacatccacgccagcctttctggggccggccacccaggccgcctgtccgtctgtcctccctccagcagcaccccctggcccctggagtggtggggccatggcaagagacaccgtggcgtctcatgtgaactttcctgggcactgtggttttatttcctaattgatttaagaaataaacctgaagaccgtcaaaaaaaaaaaaaaa

SEQ ID NO: 119018 - DNA, 1000 bp, Homo Sapiens
atgtttttgtctttaacagcataatttatattgctttttcaaatgatgtagctgcattaattgtgttcatcatgactttggcgatttttaacaaaatttttaaagacccagtgagagtctgtagtgattattacacggataatgttttaaatgtctaggttctgtatttttttcttaaatagcaagaaaatacagattgctagtatagtcaacagtatttggctatcaataaagaatctctttaagatctcacccggctggcattctgtaacagaggggattacctggtgttttaagtatttaatgtcctcatagtgtggaaatcccctaaattgattagaaattgtattttatgaaaaataacttgtattcattcttgtgtatttattacaatatataaataatggcaactctttgttttatacatatataatttataactgaatctaagtattagactgctactcatattttgaactgcaggtgtaggacagtgtttgctggtaacaactccagtgtgtattaataacttgaaaaggagcatttcactataaaagataatgaagtaggtaatgaaatcagtccttgaatgaaagcagtgcccttgagaagggatttttttttaaatatacagtaaaatatttcgtgggaacctaacactcacatagcatatggtttattaataatgcatatcctttctaatcacttcttcaattctttttgctgcagttctgtgctaaaatggggttgtggttaagtgaacgagaactctgcctacctaagaagttcattgtgttctaagtggaaggagagttactgaagggaatgtgaatttttaccgtttgtacttaagatacattggttgtctaaaatggctctggataacatttttgggttaaaaaatgtaatttaaagccaccatagaaagtattttctgatttactgtccaaatgaattttgttgttaattgagaagtcaataaaatggattaaactgacag

SEQ ID NO: 119019 - DNA, 1000 bp, Homo Sapiens
agaattctcttcttgtgctggacacagcatctcattctataaaagtctataaagttgactgggggtgatgggctggggtgggtccctggaatcagaagcactagtgctgccattaatgaattgtttaaccctggataagtcacttaaactcatctatccaggcagggataattaaaaccatctggcagacttacaaagcttgggacagttattggagattaatctaccatttattgaatgcatactctgtgcaaggaaatttgcaaatattagcttatttaatctgtactatccagtgaggtaatttcttcccccccaagatagagtcaagctctgtcacccaggctggagtgcagaagcatgatcacagctcactacagtttcaacgtcccccgctcaggtggtccttccacctcagcctcccaagtagctgggaccacaagtgtgcattaccacactcagctaatttttgtattttggcagagatggggtttcaccatgttgcccaggctggtctcaaactcctgagttcaagcaatccaccttcctcggcctcccaaagtactaggagtacaggcatagccacttgctcagccataatttttattattaatctcattgtacaagtgagaaaactgagacccagagagcttaagtgacttcctcgaggtcatagttacttactgccttagtcccaatttgaattcaattctgattccaaataagttgcgcttaaataagacaacagatgtgggaaaaatatgtgaatgtgtagtgttgctatgtgtactgtctttacaagtagctaattattttagcacaaagatgtgcaaagaaaggagactttatggagagttcaggagaaaaaggattttgtggtggccatcactttcattcaatttgcgactgctctgatggcacattagatgaagttactgttgatcctgagttacgtgaataagaaaaacaattgaactgcttattaaaaaagtaaacatgt

SEQ ID NO: 119020 - DNA, 1000 bp, Homo Sapiens; identical to SEQ ID NO: 115653

SEQ ID NO: 119021 - DNA, 1000 bp, Homo Sapiens
agccgaagggctcctgacagtggccagggacccctgggtcccccaggcctgcagatgtttctatgaggggcagagctcctggtacatccatgtgtggctctgctccacccctgtgccaccccagagccctggggggtggtctccatgcctgccaccctggcatcggctttctgtgccgcctcccacacaaatcagccccagaaggccccggggccttggcttctgttttttataaaacacctcaagcagcactgcagtctcccatctcctcgtgggctaagcatcaccgcttccacgtgtgttgtgttggttggcagcaaggctgatccagaccccttctgcccccactgccctcatccaggcctctgaccagtagcctgagaggggctttttctaggcttcagagcaggggagagctggaaggggctagaaagctcccgcttgtctgtttctcaggctcctgtgagcctcagtcctgagaccagagtcaagaggaagtacacgtcccaatcacccgtgtcaggattcactctcaggagctgggtggcaggagaggcaatagcccctgtggcaattgcaggaccagctggagcagggttgcggtgtctccacggtgctctcgccctgcccatggccaccccagactctgatctccaggaaccccatagcccctctccacctcaccccatgttgatgcccagggtcactcttgctacccgctgggcccccaaacccccgctgcctctcttccttccccccatcccccacctggttttgactaatcctgcttccctctctgggcctggctgccgggatctggggtccctaagtccctctctttaaagaacttctgcgggtcagactctgaagccgagttgctgtgggcgtgcccggaagcagagcgccacactcgctgcttaagctcccccagctctttccagaaaacattaaactcagaattgtgttttcagcaaaaaaaaaaaaaaaaaaaaaaaaaaaa

SEQ ID NO: 119022 - DNA, 1000 bp, Homo Sapiens
tagagtcgctggcttattaacagtattgtgtgtgggttgggtttttagtttgttccttctttttgaagtcccttcatttcaatccttgactctctctccccttcccttgcccagctctgttgaatgctgctgtgcgcgtgtgagggccgctctgcacacagggcccttgggttgtgtgaactgaaattctccctgtatttgtgagactcgcaggagtccccatctgtagcacaggcaatgccagtgccatgctgcagcctcagaaaccaggcctctcactccagcagcaggcagaaccgtgtctgtggtcgggtgctgtccacagctctgtctgccttgttcttgggcttgagctggatagaggtggggtctcttcaccttccctgaattcagaacagaccctgtgcctggccccagtgtgcccaggcaattccccaggccctcactgggagcccttggtgttctgagcagcagggcccaggcagcacatgagcagtgcccaggggctccctgcgtgaggacggcaaggtgcgatgtatgtctaacttattgatggcaggcagccccctgtgccccctaagcctggccctggttattgctgagctctgtgctcagtgctgcggcctggccgtggctcgtctgttcctttggggggcccgggcgggttgtgggaatcagtcttcacagacagacgtgagccaggcggaggactcgttccttgcagaggtcagtcctcacctgcaggtgtcggggtgggggggggcaaggaggggcaggcacacaccatgtctgacctgaacccgattctggggagcatcttcccgctccggccccacgacctccacagggttacattgtaatatatatgccccagctaacctgtctgatggtggcatcttcctgcagacatttcaaacatgtaacttttatatgaaaaaaaataaacacagatgaaagctgcccaatgccaaaaaaaaaaaaaaaaaaaaaaaaaaaaaaa

SEQ ID NO: 119023 - DNA, 1000 bp, Homo Sapiens
ttctcagaactcggttgtccaaccacaattccctttcccttaggatagggctatattggcaaaatgccgcccgaacagactgctgacagtaaaccaaatattagtttctctcaccttcttgaaggcatttacagtctttgtaagcttttctcctagattttccctttcctgttcctgcttagattctaagaatgaagtgcatccttctccttttcttcattaggtgaagtgggatttacccattaccatatattcaccaccaggtcactgacgagagactccagtgaatcgctttccctctgcattcctctccttgtacagactagagggtcacattgtgtaaagcctaacatagccctgcaaagagatctggccccagcagtgaacacaaactcagtaattctctttagagtgaggtggtaatcagtgcctcttggtttcagccgtggtcctagtggctacttatggaagaataggaatagttccacaacatcctgtaacattggcttacctgtatattatatgccacccgtaaccataaaaacaccaggatttaggttccttgaaggtaatgactatgggtccctctctgtggaagaatactgaatagaagagagaaatcactcaatatgtggaatgactgatatggtttggctgtgttcccactcaaatctcatcttgaattgtagttccaataatccccacatgtcatgggaggaacccagtgggaggtacttgaatcattgcggtggtttcccctgtgctattctcatgatagtgagtaaattctcacataatctgatagttttataaaggagcttcccccttcactcagctctcattcttctccttcctgccactatgtaagaaagatgtgtttgtttcccctttggtcatgattgtaagtatcctgagaccttcccagccatgcaaaactgtagatcaataaaacctctttcctttataaattaaaaaaaaaaaaaaaaaaaaaaaaaaaaaa

SEQ ID NO: 119024 - DNA, 1000 bp, Homo Sapiens
agagggtcattcttaagccacacattagctgcactgcgtggctgcagccaaaacaaagaactgggtgttgagtattcatcaactaagaaccaaaatccagggcactcatatgtgaaggataagaacctcacttccttactcctccaaaaagaagtggggaaagaaccatcaaacctttcctcctgacttaccaaaccaggaaaacagcaggagagggtggctcaggacttagggacagggtatagcttagatggtggaaagcaaaggagagcaggaagttgtaaatcactggctaatgagaaaaggagacagctaactctaggatgaagctgtgactaggctggagttgcttccttgaagatgggactccttgggtatcaagacctatgccacatcacactggggctagggaagtaggtgatgccagccctcaagtctgtcttcagccagggacttgagaagttatattgggcagtggctccaatctgtggaccagtatttcagctttccctgaagatcaggcagggtgccattcattgtctttctctcctagccccctcaggaaagaaggactatatttgtactgtaccctaggggttctggaagggaaaacatggaatcaggattctatagactgataggccctatccacaagggccatgactgggaaaaggtatgggagcagaaggagaattgggattttagggtgcagctacgctcaccctaaacttttggtggcctggggcatgtcttgaggcccagactgttaaccaggctctgctggcctgtttactcgtcaccacctctgcacctgctgtcttgagactccatccagccccaggcacgccacctgctcctgagcctccactatctccctgtgacgggtgaacttcgtgtactgtgtctcgggtccatatatgaattgtgagcagggttcatctattttaaacacagatgtttacaaaataaagattatttcaaaccaaaaaaaaaaaaaaaa

SEQ ID NO: 119025 - DNA, 1000 bp, Homo Sapiens
cctgacggacagcaagggctccctggtggtggtgtcctcgctgctcggccgcgtgcccacgtcgttctccactccctactcggcggccaagtttgcgctggacggcttcttcggctccctgcggcgggagctggacgtgcaggacgtgaacgtggccatcaccatgtgcgtcctgggcctccgagatcgcgcctccgccgccgaggcagtcaggggagtcacgagggtcaaggcggccccggggcccaaggcagccctggccgtgatccgcggcggcgccacgcgcgcggccggcgtcttctacccgtggcgtttccgcctgctgtgcttgctccggcgctggctaccgcgcccgcgggcctggtttatccgccaggagctcaacgtcacggccgcggcagcctgagcaccggggggtgcccctccagtcccagacggcaatgttcctccctccaactgtccctggagccagaacactcacagagacacccctgagagggtggccacagcccaagatgaagtcatcaagacagaaaagcaaaaccgagaaaaacgacgggcacctggaaccagtcacggcttgggaggtgcaggtgccccgtgttaggcgcctttgtcggggacttgcaaggcctcacctgtttggccatgattgatgacgtgactgcttccattttgcagatgaggaaactaaggctcagagaggccacgccacccttgagccacccatggacccctctccatctcctgcctgcgcctttaagtccctgatttattctttccattcattccatctgggaggaacccccccaactcctgccagcttcccctagctggggtctctggtactcttcacacctgcaggggcgtctacactgttcgtctacctggtggcagggtctgagcgggaggaggagggaaagagtgtgttctgagctggacccagcctcttgttcgagaataaaaactcttcttctcttgcaaaaaaaaaaaaaaaaaa

SEQ ID NO: 119026 - DNA, 1000 bp, Homo Sapiens
gaatttctttttgctttaacaactataaatattcttagctgtctagagaaaagatgtatgttattttgaaatgaatggtatgtcattctggataaatccccaagcccctttatgaatgtagtgaaatacatggcatgtgggttataaacgttgctgtcaaaagatttaccaggtctacaccattatgcttattatttttttaattatcctttttatttattaaatagagacagagtctcactatattgccccagctggtctcgaactcttgagctcaggcagtcctcccaacttggccgtcgaaagtgctgggattataggcatgagctactgtgcccagcctgcttattgaagatacatttctagtggaaattgatgaaacaatttaggttttggaaaaagaagtaatatttaatcttttaaggaaggagtttatttctcacatgccattataaactatgtgtattagataccttgggttgaatacacttttaacagccctagatcgatagccctagccctagatagatagccctagccctagatagatagctattaggttggtgcaaaagtaattgtggtttttgccataacctttaattgcagcaaaaactgcaattacttttgctccaacctgacagctaggtatctagctagctagaaaggcagatagacagatatatagatgatagatagatagatgatagatagatagatagatgatagatagatagatagatagatagatagatagatagatagagatttattgcaaataattggtttacataattttgggccccagatggttaagtgctaaatttgtagggtaggctatcaggaagtgcaggctggaaacatgcaggagctgtccctgaagtccacaagtggaatttcttcttcatcatggaaacctcagttttgttcatacacctaaatacttcagtatgtctttcctaaaataaaaggcatccatttacctaaaaaaaaaaaaaaaaaa

SEQ ID NO: 119027 - DNA, 1000 bp, Homo Sapiens
ggaacacatgagcatgtaacagagccaggaaccctactgcagtaaactgaagacaagatctcttcccccaagaaaaagtgtacagacagctggcagtggagcctgctttatttagcaggggcctggaatgtaaacagccactggggtacaggcaccgaagaccaacatccacaggctaacaccccttcagtccacacaaagaagcttcatattttttttataagcatagaaataaaaaccaagccaatatttgtgactttgctctgctacctgctgtatttattatatggaagcatctaagtactgtcaggatggggtcttcctcattgtagggcgttaggatgttgctttctttttccattagttaaacatttttttctcctttggaggaagggaatgaaacatttatggcctcaagatactatacatttaaagcaccccaatgtctctctttttttttttttacttccctttcttcttccttatataacatgaagaacattgtattaatctgatttttaaagatctttttgtatgttacgtgttaagggcttgtttggtatcccactgaaatgttctgtgttgcagaccagagtctgtttatgtcagggggatggggccattgcatccttagccattgtcacaaaatatgtggagtagtaacttaatatgtaaagttgtaacatacatacatttaaaatggaaatgcagaaagctgtgaaatgtcttgtgtcttatgttctctgtatttatgcagctgatttgtctgtctgtaactgaagtgtgggtccaaggactcctaactactttgcatctgtaatccacaaagattctgggcagctgccacctcagtctcttctctgtattatcatagtctggtttaaataaactatatagtaacaaaaaaaaaaaaaaaaaaaaaaaaaaaaaaaaaaaaaaaaaaaaaaaaaaaaaaaaaaaaaaaaaaaaaaaaaaaaaaaaaaaaaaaaaaaaaaaaaaa

SEQ ID NO: 119028 - DNA, 1000 bp, Homo Sapiens
aaataaacaaaaagccaaacaagccttagcttttcttaaagactgaaatgcctggaagtgtccctttatttataaaataacttttgtcatatttcttatacatgtttcttgtaagaaattcagaaactacagacaaagagagtggaaattacccactgtcaggcctctgagcccaagctaagccatcatatcccctgtgccctgcacgtatacacccagatggcctgaagcaactgaagatccacaaaagaagtgaaaatagccagttcctgccttaactgatgacattccaccattgtgatttgttcctgccccaccctaactgatcaattgaccttgtgacaatacaccttccccacccttgagaaggtgctttgtaatattctccccacccaccccacgcccgcacccccgcacccttaagaaggtattttgtaatattctctccgccattgagaatgtgctttgtaagatccaccccctgcccacaaaaaattgctcctaactccaccgcctatcccaaacctacaagaactaatgataatcccaccaccctttgctgactctttttggactcagcccacctgcacccaggtgattaaaaagctttattgttcacacaaagcctgtttggtagtctcttcacagggaagcatgtgacacccacaatcccacctagcccaggagagagctacggcagggtgtgtgttttgacactgagcttggggctttttccatcttctccccacagcctctggctccacacctccaccgttcaagcgccagaaagagctgtctatgcagcctgctcttgggcctggggatgagacacacaattcattggctcctggattttaagtagacatttgtaaatctatagctaactactgtccttaaagccattgtttccattacaaaatccaactctctgagagaaaagggtgttttaaatttaaaaaaataaaaacaaaaaagtttgattgagaaaaaaaaaaaaaaa

SEQ ID NO: 119029 - DNA, 1000 bp, Homo Sapiens
ttcatctttcatatctttgcctaaattcatttgctacagtgcaggaaccaaaacttgttcatctcatgattccctacatctgacataaggaaagtaagtgctcagaaaaatgtgcaggtcaataagttgcaaaagttggggctgcaattaatgctaacataagagctaaatgcttgattagaaatgatctcaaaaccttttagaatttccaaaatcttcatattactgaaactgtcggaatatatgggtcttgaaattcagaagatgatagtcactcttcccatatttataggctattaaggcaagggatatcttaaacatcatattactttatttagatttctactactccaattattaatgttatgtatttctcattgttttacttcttcatggtattatgaagactatatagatgattcaaccaagcctgcaaatctccctcttgtggaattccactggacccaatctgttttccatttccattgcaatactactaaagccatacaatatcaagcaccctccctctaggtccagggactatcacagaagaagcaggcatgtaagattttaaggactggtttcgaggggtcgagtgtaggaaaacagcctgttgcattgtaagagtgatgtcatcttgaagagcagctggcatgatgactgctgtttgactcctgcataccaagatattctgcagcaatgtctttaaacagtgccggtagtacagataacccctcataaagatgcttatctaacctccccagtgttcaggtgtttcacaagaaagtctgagatatgactagctacacgttttgccaaaaatgcttgttatataaagggtacttttgggagggtgagtgccgccatttagtggctgctagaaacattgcttctgtttgtaagttcctattaaatgtttctttctgagaaaaaaaaaaaaaaaaaaaaaaaaaaaaaaaaaaaaaaaaaaaaaaaaaaaaaaaaaaaaaaaaaaaaaaaa

SEQ ID NO: 119030 - DNA, 1000 bp, Homo Sapiens
tcttctgaatagtaacaacaagagctgatactaatgaaacatttactatgtgccagatatggtcctgaatatttcatgagcatttcctcactgaatccttacaacaaacttatgaggcaagttctattacgtttttttttttttcacgttataaataaagaagctgaaggtcaaggtgcttaagtaatcttttccaagtttccttagtaagggacagagccaggatttttttatttttattttttgagatagcgtctcactctgtcacccaggctggagtgcagtgacacgttcacagctcactgcagcctccacgtcctgtgcttaagcgatcctcccacctcagcctctcgagtagctgggaccacaggtgcgagcccctacacctggataatttttgtatttttagtagagacagggtttcacctggtcttaaactcttggattcaagcgatcctcccaccttggcctttcaagatgctgggattacagacatgagccaccgtgcctcgccacagccaggatttgaacaaacttggtattcaccaccacattctttgcctctattccaaaaagatgcttcatcagatccttcctgggagcctcacattcaagggtctgacttgtgagacccttgggaaaaaatgggcatgtttgaccatatttaacacagagtttcccaaagttttggattagaaagctcggccgggctcggtggctcactcctgtaatcccagcactttgggaggccgaggcaggcagatgacctgagtttgggagtttgagaccagcctgaccaacatggagaaagcccatctctactaaaaatacaaaattagctgagggtggtgacgcatgcctgtaatcccagctactcgggaggctgaggcagagaattgcttgaatccgggaggcggaggtggcggtgagccgagattgagccattgcactccagcctgggcaacaacagcaaaactccatcccaaaaaaaaaaaaaaaa

SEQ ID NO: 119031 - DNA, 1000 bp, Homo Sapiens
gatggcggcgcccatggagctgttctgctggtcagggggctgggggctgccgtcagtggacctggacagcctggccgtgctgacctatgccagatttactggtgctccactgaaggtacacaagatcagcaacccctggcagagcccttcaggaactctgcctgcccttcggaccagtcatggagaggtcatctcagttccacacaagatcatcacccaccttcgaaaagaggtacatactttttggatagacaccaagaactacgtggaagtgacccggaagtggtatgcagaggctatgccctttcccctcaacttcttcctgcctggccgcatgcagcggcagtacatggaacggctacagctgctgactggggagcacaggcctgaggacgaggaagagctggagaaggagctgtaccgagaggctcgggagtgtctgaccctgctctctcagcgcctgggctctcaaaagttcttctttggagatgcccctgcctccttggacgccttcgtcttcagctacttggccctgctgctgcaggcaaagctgcccagtgggaagctgcaggtccacctgcgtgggctgcacaacctctgtgcctattgtacccacattctcagtctctacttcccctgggatggagctgaggtaccaccgcaacgccagacaccagcaggcccagagactgaggaggagccataccggcgccggaaccagatcctatctgtgctggcaggactggcagccatggtgggctacgccttgctcagcggcattgtctccatccagcgggcaacgcctgctcgggccccaggcacccggaccctgggcatggctgaggaggatgaagaggaatgatttgtcctcacgctcccaagactggtttttctactctcatgcattccagaggcccccgtgcctcctcgttgttggtacagccggacacggggtgctgccacccagaataaagccactcacactgactgggctcaaaaa

SEQ ID NO: 119032 - DNA, 1000 bp, Homo Sapiens
agacttaaattaatgtgagatatgtaccttcatattcagaaatctggatgtttccttcatacattaaactattaataagcataacttttctactggtgtaatttaagtataaagtaaaataatgggcattatcattggatgtttccccacattggcttttaaaatacccatcttgctttctttttggtttatttgtagcaaggcacatatagaagaagaaatttctggcttttccatgttgttttattaccttttctcacttttaaaactaatacagacttatctcctcactcctttttctctccttacctttaccactaataccagtaaaattatctttctgatagtgaaaaggttctgtcaagattttcactgtaatggctgctacagagatggaccatcttcatcatcaccagtggtttcttctaattataaaatgtttaaactttctgagaatttaaaaagccaccactgttcccagtcagcatatacaagctcttaatattctgtttattaaataattcaatgtactattttatattggatgatattgattcttaacattggcttttcagtcatcaacagtcaacataaaaatttcaattttcagtaatttagtggaaaatatcttatttcttttttcaattttaaaggcttcctgcttttttacccttgtatattatcagtgaaaaggatcaacagttaatttgagccaagtaataaaagaaattctgcatttgtcacgaagacaatttatggtagacagataaatacacagattacagtgtaaagtctccatttaacctgtttataaaagatacaaggccacactaaactactcagtgggatttatatattccatccacttgaaacaataaacagtaatgtatccaagaagattatgtgtcctaccctgtctcatggaaaaattaattatatggttgaaatgtaaaagaaagtaagcataaaaatcgagtaatgtataaaaaaaaaaaaaaaa

SEQ ID NO: 119033 - DNA, 1000 bp, Homo Sapiens
ccacacataaaaacttaggtaaatgacatagacgcacttgggtgaaataaaacaacaaaaaaggtaatccagtaatccacgtcaggattcaccttagaagtttagcacacgcccttcaaaacctgttgaataatttgattggcaaatactatctgtcaccaagtccctttttgtcatctatttaaacctttgttaactctccttaaaaatcttgtacattataagcttaactatataaaaagaaaattgatagaaaaagactaagggaatatatggaaatattaacaatgtttattttggatgaatggaattctagatgactttaattttctttatatcagtatttttcagattttctatatgctttccttttaaaatcagattttagtttttaaaatactgatacatccattttgatataccatgtattcacactttaaaaaatacacatagcagagtatcggaaagtatgtaccaaaacattgatctggctaccactgggagtcaggatcatgagttcatcttcttccttcttactgcttttccaaacattctccagtaagcaggtactacatttataatggaaggaattttttaaaaaattttaagctgtacactttcaagtaagatctgaattctaatgctggcttgtgcctcttactatgtggtttggtcattatagataatgcccagtttcagtttccccatctttgaaaaggagataatatgttatctcttgggagtagttctgaatatgaagtgtgttgatacaagaagcactgacaatgtttctgtttcttaaatttaaaactggcctggtttgccttttttatcaagagagcttaacagataaaaaatgaaattagtctattttctacttgccagcagagtatctgtcttattttaggatgcagtgtgaaacttaccattcaactgaacaactagttgtcaactaatgaaaataaaacattttctctaagaaaaaaaaaaaaaaaaaaaa

SEQ ID NO: 119034 - DNA, 1000 bp, Homo Sapiens
ctgctttactgtctttcacaagcgccttttatatcctgtcaatcatctgtgtcgggctgctctatacatattacaccaaaccagatggctgcacagaaaacaagttcttcatcagtattaacctgatcctttgcgttgtggcttctattatatcgatccacccaaaaattcaggaacaccagcctcgctccggcctcttgcagtcctccctcatcaccctctacactatgtacctcacctggtcagccatgtccaatgaacctgatcgttcctgcaatcccaacctgatgagctttattacacgcataactgcaccaaccctggctcctggaaattcaactgctgtggtccctacccctactccaccatcaaagagtgggtctttactggattcagataattttattggactgtttgtctttgttctctgcctcttgtattctagcatccgcacttccactaatagccaagtagacaagctgaccctgtcagggagtgacagcgtcatccttggtgatacaactaccagtggtgccagtgatgaagaagatggacagcctcggcgggctgtggacaacgagaaagagggagtgcagtatagctactccttattccacctcatgctctgcttggcttccttgtacatcatgatgaccctgaccagctggtacagccctgatgcaaagtttcagagcatgaccagcaagtggccagctgtgtgggtcaagatcagctccagctgggtctgcctcctgctttacgtctggacccttgtggctccacttgtcctcaccagtcgggacttcagctgaacctctgagtgccaaggacaccactggaactcacaaaggcacccaactcagtgatgtcctaattactgctggatgactcaagccacaccatgcctatgttctcaggtgaagaagaataatagaaaccacatagatgggtaggtgtaccaagcattaaacagacagtatccaaaaaaaaaaaaaaaaaa

SEQ ID NO: 119035 - DNA, 813 bp, Homo Sapiens
gaaaagcgcgcgcggggattccaggagtcgtggtttcttgccttgatgtactggagcaatcagatcacacggcggcttggagagtgagtgcaaggttttatgagtggaattagccctcagcagatgggggagccagaaggcagttggagtgggaagaacccagggaccatgggcgcctccaggctctataccctggtgctggtcctgcagcctcagcgagttctcctgggcatgaaaaagcgaggcttcggggccggccggtggaatggctttgggggcaaagtgcaagaaggagagaccatcgaggatggggctaggagggagctgcaggaggagagcggtctgacagtggacgccctgcacaaggtgggccagatcgtgtttgagttcgtgggcgagcctgagctcatggacgtgcatgtcttctgcacagacagcatccaggggacccccgtggagagcgacgaaatgcgcccatgctggttccagctggatcagatccccttcaaggacatgtggcccgacgacagctactggtttccactcctgcttcagaagaagaaattccacgggtacttcaagttccagggtcaggacaccatcctggactacacactccgcgaggtggacacggtctagcgggagcccagggcagcccctgggcaggagacgtggctgctgaacagccgcaaaccatcttcacctgggggcattgagtggcgcagagccgggtttcatctggaattaactggatggaagggaaaataaagctatctagcggtgaaaaaaaaaaaaaaaaaaaaaaaaaaaaaa

SEQ ID NO: 119036 - DNA, 1000 bp, Homo Sapiens
ccgttttcggtacaaggaacatgaagatggctatatgcggctgcagctggttcgctacgagagtgtagagctgacacagcaactgctgcggcaaccacaagagggatcgggcctgggaacgtcgctgaacgagagcagcctgcagggcattattctagaaacagtgccaggggagccaggacgtaaggaagaggaagaggagggcaagggtagcgaagggacagccctctcagcctctcaggacaaccccagttctgtcatccacgtggtgaatcagaccaatgcccaaggccagcaagagattgtctactatgtgctgtctgaagccccaggggagcctcccccagcccctgagccaccttcagggggcatcatggaaaagcttcaaggaatagctgaggagccagagatccagatggtttgaaggccgcagagccagaccatttcttccccaggtcctgaagtttgagccaggcaagtggcagtgcccctagtgggcagccgttgccaatggatgcctttaggagtggtgccgagagcagtgtggtccactctggcctgggtttgcatcattctgcagactctaaagacttcccttttctgccagactacattttgtggggagcctgaggactctggattctttgaggggatcctggatgtgtgtgttcttgttaaagaggctgttatcaggcttaaccataaccctcaagatctgcttgacagtgattaaatccttagctcacatccattcccatctttcgggctccttaggcccaaggatggcatgtgactggtccctgcaagggtcctttctttgtcaccagccaaggcattgataaccaagtagccattttcctcttaaggtttcctctacaaccccaaggactttcatgattatcctcagggacaggattggaggcattgagcgtgtttattaacaaattgtttttggtaataaaataaatgcttggactcttaaaaaaaaaaaaaaaaaaaa

SEQ ID NO: 119037 - DNA, 1000 bp, Homo Sapiens
tccaggtcctcgagaggttgcagcaaagaggatttgaaatcgtgggctcctgtgggggaggagtagactcgtcccagttcagcgaatacgtccttcggcgggaactgaggcggacgccccgtgtaccctccgtcatccggataaagcaagagcctctggactaaatggacatatttcttatgcaaaaaggaaaacacacacaaccaataactcaaacaaaaaagggacatttatgtgcagttgggacagcaaaccaagtcctggacgtaaaatcgaataaaagacacatttatatccaatagagaccacacctgtattcatatgggaacaattggaatagtgatatcctcaaggtgtaaaaaatatataaatatatatatatatgtcaaaaggtaggaaatgcaaaaaaaaaaaaaaacacgggtgacagccgcagttggtgctgtgaaagtggcgagaagtgtcctgggcctcccgaggcctctgacaaataaacaagccatgagtggtgaggacacagtctccttacagtttccattgccaacaacagccatccatatttcttttttcctttgtctttctttttcctttttttttaaaaaaacaaaacaaacaaaacaccttgaatcaagtttgtttgtatatggaggttccacgtctttctttaggcagggaccaggcaggacttcagaaaaaccctcatgagcacattgcaaagatgttagacatgaaattttaaatgtagtttgtacagaagtcacacttttttgtccacctcacagatgtgaactttactttgttttaaaactgatcagttttgccaaggggccagaattattccttgttagaattgctccagttcaagtctgctgctttcctacaatttttcaaattttataatgtattaaatacaataaactctgtttaaaaaataaggtctgtgtgaaacacacatgtgggggtgaggctggattaaagtgaaattttttctttttgaaaa

SEQ ID NO: 119038 - DNA, 1000 bp, Homo Sapiens
agtaaagagaatgagaacagtgtggtaaaagggtgatttcagtttaaaacttaaaattagtactgttttattgagagaatttagttatattttaaatcagaagtatgggtcagatcatgggacataacttcttagaatatatatatacatatgtacatattctcatatgtaaagtcacaaggttcatttatctttctgaatcagttatcaaagataaattggcaagtcagtacttaagaaaaaagatttgattatcatcacagcagaaaaaagtcattgcatatctgatcaataacttcagattctaagagtggattttttttttttacatgggctcctattttttcccctactgtcttgcattataaaattagaagtgtattttcagtggaagaaacatttttcaataaataaagtaaggcattgtcatcaatgaagtaattaaaactgggacctgatctatgatacgcttttttctttcattacaccctagctgaaggacatccagttccccagctgtagttatgtatctgccttcaagtctctgacaaatgtgctgtgttagtagagtttgatttgtatcatatgataatcttgcacttgactgagttgggacaaggcttcacataaaaaattatttcttcacttttaacacaagttagaaattatatcccatttagttaaatgcgtgatttatattcagaacaacctactatgtagcgtttattttactgaatgtggagatttaaacactgaggtttctgttcaaactgtgagttctgttctttgtgagaaattttacatatattggaagtgaaaatatgttctgagtaaacaaatattgctatgggagttatctttttagatttagaataactgttccaatgataattattacttttatatttcaaagtacactaagatcgttgaagagcaatagaacctttaagacagtattaaaggtgtgaaacaatggcaaaaaaaaaaaaaaaaaaaaaaa

SEQ ID NO: 119039 - DNA, 1000 bp, Homo Sapiens
atcatggaactatttcaaaagcagtcatatggtaagatggatcaggagtctttaaaaataaaactgagaaagaaaaatcatgtgatcaattcagtagtagagacagaggttggtatcaagtctatgttcatacacttaccagtgccacccagcagggccatacaagacacatgaaatgagatcagctcaagggtgacaagatgaaactgggagagggccggggagacccgaactcttaatattggattccacacaagaggaaaaattttagtccagctcccagcatggcagctaatggcaagttagtaccataaagccaactcttggaatatacctgacttccacgataaaatggagatgagtgcaggggtgagtgtatagttaagaaaacaaacaatatattactagtccaggtggtagatgacagatttttattatttacacttctctcaaattattacattcagcatgttttgctttttatgttatttaaagtataaaccctcatataattccctaagatgggtggcatgccaagtagctaaatgaaatatcatcccagcccaaaagtacttattcgaatgaaatattacatttttcttaaataaagcaataaattaggtaccctattatcatggtattttcttttttggccagcttttctagataaggttgtattgctactgcaactaacaaaaaagatgtggcagggctgggcacggtggctcacgcctgtaatcccagcactttgggaggccgaggcgggcagatcacgaggtcaggagatggagaccatcctggcccaacatggtgaaaccccgtctctactaaaaatacaaaaaattggccaggtgtggtggcaggtgtctgtagtcccagctcctcgggaggctgaggcaggagaatcgcttgaacgcgggaggcagaacctgcagtgagccaagatcatgccacagcactccagcctaaactacagagctagaaagtggctagagcagcc

SEQ ID NO: 119040 - DNA, 1000 bp, Homo Sapiens
aatctcaacactttgggaggccaaggtgggaagatcacttgatcccaggaattctagatcagcttggacaatgtagtgagacctggtctttaccaaaaaaaaaaaaaaaaaaattagctgggtgcgctggcatgtgcctgtggtcccagctactcaggaggctgaggcaggaggatcacttgagcacaggagtttgaggctgcagtgagcagcctgggcaagagagtgagactccgttttgtgccactgcactccagccagggtgacagagtgagactctgtctcaaaaaaaaaaaaaaaaaaaaaggcattgggatttataatgtgctgtttaaagtctgaagctcggccaggtgcggtggctcacgcctgtaatcccaaaactttggaaggctgaggcaggtggatcacctgaggtcaggaggagttcaagaccagcctggccaacgtggtgaaaccccatctctataaaagtacaaaagggcatgatggcaggtgcctgtaatctcagctactcagtaggctggagcgggagaactgcttgaacctgggaggtggaggtttcagtgagccaagatagcgccattgcactccagcgtgggcgacagcaagagacttcatttcgataaataagtaaataaataaataaagtctgaagctccactggtcactccttttattgattatttgcagctggtctaaccagttacgtatgtctggcttgattacatggccagagcaacataaaagccctgctgggaacttctgatttgagctcttccaaaaccaggatggatgcctcacatagatcatgatgattcaatccaaaggcactttgcagtgcagtccacatgtgcataaggaccatggggagcttgtatttgggaattctgagattcctgatgtttacctacctagtctttctcttgctgccctgtatcctttgcctttaaataaaaatcttaagtgataaaaaaaaaaaaaaaaaaaaaaaaaaaaa

SEQ ID NO: 119041 - DNA, 1000 bp, Homo Sapiens
aattcaagttaactatcctggaatgtttgaattgatggaagatttacaagaacaaaagtccagaatgttgacctaattttacaaaacaagctgcatatcagctgatgaatgcatgagaaattttcaaggctttcacagtggtcttaaggtatgggtgagagtaactgtgcttggaatagaaaagccctgctgcatcgagacacaatgctggcagctgcggcagtgtacagagaaatgtacagaaatgaagatggttcagtacctgctacataccagatctattacatgataggatggaaatatcatgagtcacaggcaagaccagctgaaagaggttccgcaactgtgtcatttggagagctaggaaaaataaacaaccttatgccaccggggaaaaaatcacaataaatatttattcagtgttaatgtcgtccagaattttcatcagaaatggatagctttaacatctaaaattattatattttgaagcaagaagcactctaagctatttactaataggcttttcatataattaggaaaacctaatatcacatctatagtaaccatttcagtttcatattgtttctgttctcataaggatactgctgagtgtctttgcagattcagcctaaaagcaaagaaaatatttccctaaaatatttgcaaataatgttcacatatgtaaatgccttggaaaatattactcatgctgaccttttacacctttttcatttgtcatactgttttctttgccttgaagaggaacagatgaatatgcaccttctccagagttatgtggttttagaatttagaagagcatgtatctttattaaatccctcctcaactctttttttttaaagcatctgaatttaaccttatttcttttttatctccatggtgtgggtgggaccaccatggttttacaccccaccctaccttagggaagaagaaaacattttaaagaataccagaagtagaatcacatgtaacagtctctgc

SEQ ID NO: 119042 - DNA, 1000 bp, Homo Sapiens
ggagcctgctgccccctccccgcgggtggggacgttctatgcaatacagggttccactttagaagtgcgcgcggctagggtcaccgcccgcccttcccggcgcagcccccgagctccacagctggggcagcccctctggcttctaaatccgcggtcgggattcttcctcctgtttagttttttagtttttccttaaaaaaaaacaacacatcgatggactttgcttccctgttcttgaagaatacttgaatgtcggggggcctgggggtgggggcctcggagaccgtctgcctggccctgctgcccctcctgaatctcgtatgatggtcacagtccggtggccgtgggggtgctctgccttccctggtccccactgcccatatctgtggactgccccttccaaagacccctggggggggtggggcattccgcccacccctttcccccatcacttctcgcctgtcagtgattccatgtttcgtaacgggggattctctgcctttttgtatcaaagaacaagcaaatggacccccgcccgctgcaggcgcccatagccatcgggtctctaaagctgagtggctagcagcgtttgtttgtttgtttttttttttttttctgaaggtgggacagtcacttcctcctccctccccacccctgtcgcatccacgtgcgacctggaggactggtcagaaccgttactgtgaatgagtgaagatcctggaggaccctgggccccaggccagctcccatcgctgggggacggtgaacggccatgtgttaatgttacgatgtttttaaaagacaaaaaaaaaaaaaaaacctcaaaagtttttttaaagtgggggaaaaacatccaagcactttaattccaatgtaccaggtgaactgacggagctcagaagttttcctttacaccaactgtcaatgccggaattttgtattctgttttgtaaagatttaataaaagtcaaaaaacttgcaaaaaaaaaaaaaaaaaaaa

SEQ ID NO: 119043 - DNA, 1000 bp, Homo Sapiens
tcgagccggtgcgcaggcagggcaactacctgctgtgctcactgctgctgggcaacgtgctggtcaacaccacgctcaccatcctgctcgacgacatcgccggctcgggcctcgtggccgtggtagtctccaccatcggtatcgtcatcttcggagagatcgtgccccaggccatctgctcccggcatggcctggctgtgggggccaacaccatcttcctcaccaagtttttcatgatgatgaccttccccgcttcctacccggtcagcaagctgctggactgcgtcctgggccaggagataggcaccgtctataaccgggaaaaactgctggagatgctccgggtcaccgatccctacaacgacctcgttaaggaggagctgaacatcatccaaggggcgctggagctccgcaccaagacggtggaggacgtgatgaccccactccgggactgcttcatgatcaccggcgaagccatcctggacttcaacaccatgtctgagatcatggagagcggctacacccgcattccagtgtttgaaggggagcgctccaatatcgtggacctgctgtttgtcaaagacttggccttcgtggatcccgatgactgtacccccctgaaaaccatcaccaaattttataaccaccccttgcactttgttttcaatgacaccaagttggacgctatgctggaagaatttaagaaagaacacacaaacaagaaacccaaatcataccaacactgaaaagaagagacaataagaagcattctttctttcaacatcacagacattggcaactctaggatgtctatacagagggataaaaaggggtggcagttggctgggcgtggtggctcatgcctgtaatcccggcactttgggaggcccagggaggtggatcacttgaggtcaggagttccagactgacagtctggccaccatggtgaaaccccgtttctaataaaaatacagaaaaattaaaaaaaaaaaaaaaaaaa

SEQ ID NO: 119044 - DNA, 1000 bp, Homo Sapiens
agggacagtgcggcatattcagattcagacctctttgggctgagccaccttgtgagtgcagttactgcctttgtgtggccgtgacctctatttgtttgcttttaatttgccaacctatcgctgctggcagcactttttgagcaagccgagagcacccattttggctgggggttcagatcgatggccttgtccatgttgtcctttctggcttccctgatggtgtcatgtttcagcgcatgcgccccagcctttcccatgtgccaaaccagaagctccactgcccgtaggctgtccctgtagccctgctccctccctggaggctgctcttctgattctgagagctggcctagtggtgctgagggcccctttctgcttctctgcccacctgctgagttgccactcgcagtgttgtcagttcccgtgttctgagaagaggtcatgcctgggaggaagggatcgtcatgctgcatcgaatcctctctccgccgtgtggcccccaggagagtagctgcctgttgcacctgctccacacctccccacagcctccctgcaggtgctgtgtggccgtgatgtgcagagagcagtgagggagggttcatgaaccaggtggatcctctttaaaaaaaaaaaagtttttgttatatctctagaacatttcaagtcttttcctttttttctgttcctagctatggggttttagagaagtgggaacaggaaggcatttgtctttttcttctagtttactacattttccttccgtagttcttcagctgtgtggaaacgggcatcacaaggacataggatcatagattgggtagggagggaggaggatttctggaacttttctcaaaggaatttggacccttataaatgggactgaaggtcaaaacaacagtgatatccttgcttagaaattgtcctcaaggaataaactctgagagcaagcccgggttggaaacagatgctttaaaaaaaaaaaaaaaaaaaaaaaaaaaaaaaa

SEQ ID NO: 119045 - DNA, 1000 bp, Homo Sapiens
gtaagccggcgtccccgcccagccgagagggccggcgcctacctgagggcccctgtgtcccgaacccggagcggaggcgcccaacccggcagacgggtgcaggcccggcctttccccacgcggactccgcgcgaccccggccctctccctgcggccgcagggcttccccgcctggcgcctgccctccagggctggggcctcgcctggcgggaccccgcagcagccccggccccatccccgcccagagccgggcgtcgtgtgggtccgtgggtgataattgagagcgtcagacccaggactgttcagggaggagccccggtcagactcccacgtgtgaagaccgggccccaagtggcaagggctggcctggggcgggcagcttgggtcctggacgttgataggaagcggaaggggaatcgcgggaagctggcccaggtcaggtccgcaaaggcttctgaagaagaggaagggcgagtaggggcacctggacgctgatggtggccaggatgctcagctggccaggagggcagcacctgctggggacggtggccctgccttcatgcccaggacaccagctgggtccagctagcagccactgggaatcagaggaatggggcagagctgggcattcaggaccttgaggacacgtgaccccacccgcccaccgccactatcaggccccgggaccgcactgacaggaaaccttccgtcgtgagggagcacttcccaggggccgcagggacgacactctccagggaggccccagcaaccacaccatcttcttgctgtgagaggtctcaccccgggctacctcctgtcactactcactgccctggggtccgtgggcaagttgcccagggtgggggtgcctagccaggtgcagtccccgccccgcctagtcctcggcgtcacgcaatgctcacctcgcctcttccccactaacatcccagactttaaaattcagtaaatcagatgtacaccgaaaaaaaaaaaaaaaaaa

SEQ ID NO: 119046 - DNA, 1000 bp, Homo Sapiens
tcagttcttcagcctggtacatgagaagctggggtcagagctgccaggcctggagccagccctgcaggtggacctggtgtgggccctgtgtgtgctgcagcaggcacgggaagcagagctgcaagccgtcctccaccctgaatttcacatccaatttctagggggcaagtctcagaaggatcagaacaccttccagaagctgctccacatcaacgccactgccctgctggagtaccccgagtactcgggtccccttctgcctgcctcggctgtggcccctgggccctcagcccttgacaggaaggtgacccccctgcaaaaggagctgcaggagacgctgaaggggctgctggggagcgccgacaagggcagcctcgaggtggccacgcagtatggctgggtgctggatgctgaggtgctgctggacagtgacggcgagtttctgcccgtaagggactttgtggcacctcaccttgcccagccaactgggagccagtcaccacctccagggtctaagaggctagcgttcttgcggtgggagttccccaacttcaacagccgaagcaaggacttgctgggtcgctttgttctggcccggcgacacatagtggctgcaggcttcctgatagtggacgtcccattctatgagtggctggaactcaagtctgaatggcagaaaggcgcctacctcaaggacaagatgcgcaaagcggtggctgaggagctggccaagtgacttgtgccagcagcatggactgcgtgcctctccgccggaggtctagctgtgggcggccaagaagggtcacccttgaggacaaacctctgtgcaggaccttggccagagtggggagggtggccagccactctgagggacagaacgtcctcttgtgtataataaacctttaattttggtgttggacccctggggccttcccaggcttggtcaccctctgcactgtcaaaaaaaaaaaaaaaaaaaaaaaaaaaaaaaaaaaaaaaa

SEQ ID NO: 119047 - DNA, 1000 bp, Homo Sapiens
cttctgtcgagggttttgaaatggttaacttcaaagaagagggctttggtttgagagcaacaagagatatcaaggcagaagaattgtttttatgggttccacgaaaattgctaatgactgttgaatctgctaaaaattcagtgttggggcccttatattctcaagaccgaatccttcaagccatgggaaacatcgcactggcctttcatttgctgtgtgagcgagccagccctaactccttctggcagccctatattcaaaccctccccagtgaatatgacactcctctctactttgaagaagatgaagttcggtatcttcagtccacacaagctatacatgatgtcttcagccagtataaaaacacagctcgacagtacgcctacttctataaagtcatccagacccatcctcatgccaacaaactacccttgaaggattctttcacttacgaggactacaggtgggcagtctcttctgttatgacgaggcaaaaccaaattcccacagaggatggttcccgcgtgaccctggctctgattcctttatgggatatgtgtaaccacaccaacggcctgacaccagaagattccttcgctcttgctgtcgcctctgcctaagaccctccattccttaggcacttacgggactcactcatagacctcctccagcgtggctgccctgagcaccctatgtggaatgactacgcctccagctcatccgccctcctgccctgtcctgttacatttccctctattgtccagatccgcttgtttctgcctttttaaaaaattattgttggttcacccccccgcctcccattagaatggaagatccatgaacgcagggtgattttgggggagggtctgttttgctcattgctatatcgctgtggtttttaatgaattcatgaccggtaaataaatgactgtaaaagccccatgcctaggaaaaaagatcagaaagaaataaaccaaaatgttaacgtgaaaaaaaaaaa

SEQ ID NO: 119048 - DNA, 1000 bp, Homo Sapiens
acgcctgccgtccctgccccgctgggcagcccttcagtgtggctggcgttggggccagtgagttgcctctttccctccttgtctggccccagtggtctggggagcccccaggcacacctaagcgtcgtggagcattgttctgccacagccctgcatactgaccccgggaggctgggcaggtggacagccccagccaccaccttcagcctagcctgtcccccaaggatggtgaagctcagcaggggtctgagggtagccggccagaagaggctggaacctcctgctcaagtctagacccctacttctctgctgcccccaccctgccagagctgatgtttccaataccaagatgtcttcacagggcacagcccctgcagagcatcttggtcatttggaagaggacacggtatcccctctggccagagtatgtcagagaaggaagagtagggcttttttgttttgtttttttttaaaggtgcttgcttgtttaatgtaaataatagaaagccttaatatcttttctgtaacacggagtaatattttaatgtcatgttttggatgtacataatatatttataacaaagcagcaagagtctacttaaccttggctgcctcgtggtgtttcctggctgggtggggtggggggtatcaaggagcctgggacgtgaggccccactctcgccccattcccagctccccccaaccctggcctcaggatgagagctgtcacctgagacagtgaattaatgttgacatctgctccaaagccttttggaggggattgggtgaggacagtggtctttcctgttgatcatgatgataaagtaatgatggctgatccctatttgtgacttccttcagcaaatattcactggcacctggtgtgtgccaggctctgtcctgtacacaggtacagcggtgaaagaaccaacaaagacctatcctggtggagctgacctcctgggaaaagagtcaataaacaaataaatgcacatggaaa

SEQ ID NO: 119049 - DNA, 1000 bp, Homo Sapiens
caacgacctcatgtacattgctgacctgggccccggcattgccccctctgcccctggcaccattccagaactgcccaccttccacactgaggtagccgagcctctcaagacctacaagatggggtactaacaccacccccaccgcccccaccaccacccccagctcctgaggtgctggccagtgcacccccactcccaccctcaaccgcggcccctgtaggccaaggcgccaggcaggacgacagcagcagcagcgcgtctccttcagtccagggagctcccagggaagtggttgacccctccggtggccgggccactctgctagagtccatccgccaagctgggggcatcggcaaggccaagctgcgcagcatgaaggagcgaaagctggagaagaagcagcagaaggagcaggagcaagtgagagccacgagccaaggtgggcacttgatgtcggatctcttcaacaagctggtcatgaggcgcaagggcatctctgggaaaggacctggggctggtgaggggcccggaggagcctttgcccgcgtgtcagactccatccctcctctgccgccaccgcagcagccacaggcagaggaggacgaggacgactgggaatcctagggggctccatgacaccttcccccccagacccagacttgggccgttgctctgacatggacacagccaggacaagctgctcagacctacttccttgggagggggtgacggaaccagcactgtgtggagaccagcttcaaggagcggaaggctggcttgaggccacacagctggggcggggacttctgtctgcctgtgctccatggggggacggctccacccagcctgcgccactgtgttcttctcttaagaggcttccagagaaaacggcacaccaatcaataaagaactgagcagaaaccaacagtgtgcttttaataaaggatctctagctgtgcaggaaaaaaaaaaaaaaaaaaaaaaaaaaaaaaaaaaaaaa

SEQ ID NO: 119050 - DNA, 1000 bp, Homo Sapiens
acagtctcagaggacaccattaggctaatagagaaacagatcagccaaatggccgatgacacagtggcagaactggacaggcatctggcagtgaagaccaaagaactccttggatgaaagtccactggggccagcaatactccagagcccagtttctgctggatcccatgggtggcacattgggacttctctccctcccccatctacacagaagactgtcaccatgctgacagaagcctgtccttgtaaggcccagccttccaggggaacactcagacatgttcattctcttcctgcttctgctctgggccggtgggtggctctcagaaaatacttgctgctggcaaaaggcctgtactcaggcatttgctttgacttgatgttgccaagggactgaggccattggcaggcttagtaccacctgctcctcatcttaggagtctccttttcaaataattaggctctgttcccattttaaaactctgatattggccttcacctgtgactggacactttactagaggcccattttcactaaacaataaaatctaaataaattggaaggaataacaaccacaaaggaaagaatagagttggtctggattgatgatcactgaggatctgtatgtgaggcacccataacagtagttttgcctgtgagtcgtcttcacacatgctgttttctctgcctggctctctcttcccctccttacctggccagtcctgtttatcatcaggccttgtcttggatatcacgtcctctgggaagtcttcttttcccctctaacctaggaccctcattaccggctctcatagcacagtctactgctttgtacgaattctaagtattcttgttgcacttaattagcctgtatatcctcagaactttgtgtaatgcctggagcatagtaggcagtcatatgttgtatcgtgaataaattgcacatagtagctacccagcaaaaaaaaaaaaaaaaaaaaaaaaaaaaaaaaaaaaaaa

SEQ ID NO: 119051 - DNA, 1000 bp, Homo Sapiens; identical to SEQ ID NO: 115102

SEQ ID NO: 119052 - DNA, 1000 bp, Homo Sapiens
gtttgctttggaaaggcttaatgatggaatgttagcatcttcactagggtaaagaagaacaaaaagaatgttgctggaacgtaaaatagtatttaaaagttaatgaacacttctctagttttcttagttatggccttaataattagtctcttggcttaaatgtccactggttttactttgacacagttgaacaacactggggttaagtctctggtatttaggctggcaatatatatattaaccatattttaaaagtaccaattttgtttttacagaaaagataaaactcaaaagagaacagtgtattccttctgaggggcttttataaattattaactataatatatgatggattttttcctaattttttatatttccttacaattttggtggccattaatttaactttaggcttttgggcatatgctagtctgagcttccgaaaagatacatatatgtttcccttttcattagctgaatgaggatattttaagaagttgaaagagaatttattttcaagttgtgagtaaatcctcctttgaaattcacctgattattagataacttaaagtttatttttaaaagctgacaactttttatgaatcttcgagttgacagttcctaaaagcgtaactcagatattaatgggctgtgtattaaatggttttattttcagttttgcagcacagaacactgttgaaatatccatatcaacttgatttttttaacctaattcaggtgtcctttgcatctcttaaatgttgggggtgggggtcagagccagttatccggcttctgttttgtcgattgcttagatttgttcctgttgtcaaaactgttacccccaaaattggtgtgacacatgctcatgcataaaatgttaaaatgagtacatccttgtatttgtatttgttttcaacatcgccaaggtgctatgggaaattaacaaaattagaaaaaaaataaaattattaaaaagcagaaaaaaaaaaaaaaaaaa

SEQ ID NO: 119053 - DNA, 1000 bp, Homo Sapiens
gcctcctgctcaccgtgctggactacgacacgctgggggccgacgacctggaaggcgaggccttcctgccgctgcgtgaggtgcccgggctgagtggctctgaggagcctggtgaggtgcctcagacccgcctgcccctcacgtaccccgcacccaacggggacccaatcctgcagctgctggagggccggaagggtgaccgagaagcccaggtctttgtgaggctgcggcggcaccgggccaagcaggcctcccagcatgccttgcggccggcaccgtagccgtagaggtttgcggtggggctgggtccccggtggggacttgcaagggctttcctgtagggtctggggcttccccgccacatcgcggccctccagcctggcctaacacttggggagccccagcatgcggagtgcccagagtgcagacctcccctgcctcccatggtgatgggggctcagcagcgacatctctactcccgcctccctgcctccagccctggctgcaatgtctctaccacatcccagcaccagggggagcaaaccctgcccctgcccgcctctcagaaaagctgctgtggtgggcaggggattgggccatctgtctcctggccctggcccatctgcctcctggccttcctgttccagccactggggtgggggccaggttcactgggaccagggctacaggcacagagtctcctggaaaagggagaggggaccctgccaaagatgaggctccagctgccctggggggagggtggtggccattactagagggggcctgggtcctctccccaggggctgccagcatccaggccaggaagcctggagccaagaaccttctggctctgagggagcaagagctggcaggcggcagggctggcacagacagacggaagcagaaaggacagtttggctgctgtgtctgctgcgcacgccccctccccggacagcacctgccacctagaaactttcttagcaaaaaaaaaaaaaaaaaa

SEQ ID NO: 119054 - DNA, 1000 bp, Homo Sapiens
gccctgagggcaacagcagcacggcactgcccacccggctgctgatggcctggtgccagctgggagtcctcccggcacttcgaggccactgagccacccttccagccccagcccaccatggacaggggtatccagcttcctcctcaacctcgtcctctgcccctgagccagtgacgcccaaggacatgcctgttacccaggtcctgtaccagcactagctggtcaagggcatgacagtgctggaggccgtcttggagatccaggccatcactggcagcaggctgctctccatggtgccagggcccgccaggccaccaggctcatgctgggacccaacccagtgcacaaggacttggctgctgagccacacacccaggagaaggtggataagtgggctaccaagggcttcctgcaggctaggggaggagccacccccgcttccctattgtgaccaggcctatggggaggagctgtccatacgccaccgtgagacctgggcctggctctcaaggacagacaccgcctggcctggtgctccaggggtgaagcaggccagaatcctgggggagctgctcctggtttgagctgcattcaggaagtgcgggacatggtaggggaggcaaaaagccttgggcactaccctccctgtggagctgttcggtgtccgtcgagctagccacaccctgacaccatgttcaagggtaccggaagagaagggtgtctgcccccaacctcccctgtgggtgtcactggccagatgtcatgagggaagcaggccttgtgagtggacactgaccatgagtccctggggggagtgatcccccaggcatcgtgtgccatgttgcacttctgcccaggcagcagggtgggtgggtaccatgggtgcccacccctccaccacatggggccccaaagcactgcaggccaagcagggcaaccccacacccttgacataaaagcatcttgaagcttttaaaaaaaaaaaaaaaaaaaaaaaaaa

SEQ ID NO: 119055 - DNA, 1000 bp, Homo Sapiens
ggaagggtctgacaggccacagcccttgcagccggagggctttcccacactcaagagaggggccttacagtccctctgacacccctcccccttcccctcgctccctttcttcacccggagccctctgcagagattagctgtgtattgatttttaagttataagcaaagggtattttatttaatattaggttatgtgtgtgcatgttgtgtgtacctgtgtgcatgtatgtgtgtttctctactgagcctggggtctctagccagggagaccccatcttattcaccatgtccaagatcctgggatctgggcccagcatctcttcctcctttgtagatgctggagcccagccaaggtctgggagctatatgggaagtgggggctgggatctgggtgggaatatgtgtttgtatacaaaggggccctccttaaaagggacaggatgaccttcccgaggaactcattggcctggggtagtttaagaagtaatgttctttctttctttctcttttccctacctcctgctaacccaaccagagatccccttccttgctgagagggttgggggcaggaggagatttggcagtgcctgcaggttgcctggccaggtggagagggggaaagaggaagggcaccgtgggtgtaagatgcctttctcctccacccatcgaaaccagccaccccttccctgtgccaccaagacagccttttccagtggccatcctaaggggaactcccaaatgggtgttgctggtggacacagatgctccccccaatggaagccccaagctctgaggtatgcgggtagaggctttggataggttttcttctgctcccctcttttatagatctaggctgcttggctgcctgtctttctaggcagtccccctagaggaaaaatgtaggaatttattttttctttaactgctgtgaactcactttgagggggtaggaggagggagaaacagcctgtgttttttatgcaataaagtcatcaactac

SEQ ID NO: 119056 - DNA, 862 bp, Homo Sapiens
gcgggggtcgcgctgcacagcctgcggcgcagcggaggcggaccgcagtcgagtctgcagagtgttgggtctgtagccagcaaattacttcatcatctagattatccattcagttgatcctaattagcaaggataacaagaatcgtccgcactaaagtcccctgcagcgtgaccatgtcgagaccccggaagaggctggctgggacttctggttcagacaagggactatcaggaaaacgcaccaaaactgagaactcaggtgaggcattagctaaagtggaggactccaaccctcagaagacttcagccactaaaaactgtttgaagaatctaagcagccactggctgatgaagtcagagccagagagccgcctagagaaaggtgtagatgtgaagttcagcattgaggatctcaaagcacagcccaaacagacaacatgctgggatggtgttcgtaactaccaggctcggaacttccttagagccatgaagctgggagaagaagccttcttctaccatagcaactgcaaagagccaggcatcgcaggactcatgaagatcgtgaaagaggcttacccagaccacacacagtttgagaaaaacaatccccattatgacccatctagcaaagaggacaaccctaagtggtccatgaagagtttgattttgttttgagcctggaggaaaaggaaccaagttaactgagatactgctgctggaatgggcgagacattgctgcaaagaagtcaagcttttttcagacaaaaggtgtgagggggcttgcttggtatgcttacctgggcttgtgtacctcagtggtttttgtgtacttttttcaataaaatatcaaagttgaagaaaa

SEQ ID NO: 119057 - DNA, 1000 bp, Homo Sapiens
gtaaattacaatattagactaagtaagtttttccaactcttcactaccaattaccttaggcttttataatgctccgcctacttcagtcccatgtttcagaagcttttgtctattttttaaactcattgattaaataatgattaatgcattctccacattttaatattgcaaaggcccattggagtttctgaagtggctccacagaattgaaataatttcaaataactgtaaaggaactgaaaatcttcacagagatgaagtggggtttccattaggtgctttgaaatttgataacaaatcatcaacttccactggtcaatatatagattttgggtgtctgaggccccaagattagatgccactaatctccaaagattccctccaattatgaaatattttaatgtctacttttagagagcactagccagtatatgaccatgtgattaatttcttttcacactagataaaattacctggttcaaaagtggtttttgtttattaaatttggtaataaatatatataatacacagacaggatagtttttatgctgaagtttttggccagctttagtttgaggactccttgataagcttgctaaactttcagagtgccctgagacacttccagccatccctcctcctgccttcattggggcagacttgcattgcagtctgacagtaattttttttctgattgagaattatgtaaattcaatacaatgtcagtttttaaaagtcaaagttagatcaagagaatatttcagagttttggtttacacatcaagaaacagacacacatacctaggaaagatttacacaatagataatcatcttaatgtgaaagatatttgaagtattaattttaatatattaaatatgatttctgttatagtcttctgtatggaattttgtcacttaagatgagctgcaaataaataataccttcaatggaaaaaaaaaaaaaaaaaaaaaaaaaaaaaaaaaaaaaaaaaaaaaaaaa

SEQ ID NO: 119058 - DNA, 881 bp, Homo Sapiens
gcgccatggcgctgtcctggctgcagcgcgtcgagcttgcgctctttgctgccgccttcctgtgcggggccgtggcggccgcggcgatgactcggacccagggctccttcagtggtagatgtcccctgtatggtgtggccaccctgaatggctcctccctggccttatcccgtccctcagcaccatccctgtgctactttgtagctggggcctctggcctcttggccctctactgcctcctgcttttgctcttctggatctacagcagctgcatcgaggactcccacagaggtgctatagggctgcgcattgcactggccatctcagctatagccgtcttcctggtcttggtgtctgcctgtatccttcgatttggcaccaggtctctctgcaactccatcatctccttgaacactacaattagctgttctgaagcccagaaaattccatggacaccccctggaactgctctgcagttttactccaacctacacaatgctgaaacctcttcttgggtgaatttggtattgtggtgtgtggtcttggtgctccaggtcgtgcagtggaagtctgaagccaccccataccggcctctggagaggggtgaccctgagtggagctctgagacagatgctctcgttgggtcacgcctttcccattcctgaagaataagcggagtgcttcctgcagccgaagactccatgcccaagtgcctgtaatcccccccctcaaggccctgtttatgttgggagtcttagttttcctttcgttggggggtgggggggaaacataatgacaggcccccctccacctcttcctgcagctgtttttgtaccaaaatattatattactgtcttcatcttaaaaaaaaaaaaaaaaaa

SEQ ID NO: 119059 - DNA, 1000 bp, Homo Sapiens
tgcctaactgttgcgtggagttcacagttcgactaaccctgtgaacacccaagccaggagttctatgagaagccaaatggtgctcgcaattgtgcttgctgctggactggcaagcttcatgttatgtttatttggtgtgcgtgtgtctttattattttgtgtaaactatattctgcttatagagagtctctgagactaaaattgacaacttgaaaagtattccaaggaatattatgaaaatagggcaacatggactgtttaagatctccatgtaattgaaattcatgcaaggaaacaactcatagaaaagataaatatggatgcccttcacatgttatcaacctcgtaacttttggtgcttgctgaatcagtccatgaaaagctacagcccgctctttgggaatgctacatacccatttctggtatttaaaaaatatctaggaggagctaaatgacaaaacacagcagtgttttgagggagaaaggaccatcatttataatgctctgtacatactaccagagctgcttggaaaattaaaggccacttgtggctttttcctaccaactgatacgtttaaatttgccctaggattgagctaacagcaaaaaaaaaaaaaaaaaaaagagagaaagaaaggagtaaacagtggtaataaaaaaatccatctgtcttcttgctatgttaatattaataaatcataatatgacaagaccctcactgaataagagtattttcagtcatcagaagccagctgttggtaggcattaatgagtttaaaattgttctcaattgaaaaaacatcacactattttgccaaaaccaaagtaattataatactgtgtcctcctgtaattttttgagaagtggttataaagggcatatttacataaattctactttattcctcaacttctttgatgaatgtaacccaattttacttctttaaaaagtctcaattcaagctggattagccagctcagcataatcaactagacagtg

SEQ ID NO: 119060 - DNA, 1000 bp, Homo Sapiens
caactagcagtctgggaacactgggttggagctatcaggcctgcacagaagtagtcatgcccttttgtactaatggtgtcgatgacatgtttgaacctcactcatggaacttaaaggaactttctgatgactgttttcaacagtggggtgtgagaccaaggccctcctggatcactactatgtatggaggcaaaaacattagttcacacacaaacattgttttcagcaatggtgaactagacccctggtcaggaggtggagtaactaaggatatcacagacactctggttgcagtcaccatctcagagggggcccaccacttagatctccgcaccaagaatgccttggatcctatgtctgtgctgttagcccgctccttggaagttagacatatgaagaattggatcagagatttctatgacagtgcgggaaagcagcactgagaaacttttgattgttttcaatttcttcttttatgttcacaccaccacattcccattcactttgattttctacatgtaattaccttcttttgtttatcattagatttgatggggccaaagttgagatagaatagagggtgatgacggtaagagcaagtgtcccatgaatgtgatttcctgggttctcactgtctttgcaccacgtctaggaagaatcttcttgatagctctcccacaccatcagtggccctcataactggagtagagttcctggttgcttttcataagagggagagttactttctttgtatctctgcaagcagagatttctctttggttttgaggttgaagtgtctttggcccatttgtaagtccccatccctaccctacacaaagtaaaagcagaagatagataaaaaatgatgtaattgcagctggtaggatgtctggtgccaatccaggaagtgagagccatttcttttgtaccggatttaatgactttgaactgtgctgtaaataaataatacagctggaccttaaaaaaaaaaaaaaaaaaa

SEQ ID NO: 119061 - DNA, 1000 bp, Homo Sapiens
gccactacactgcatatgcgaagaacaaactgaatggtaaatggtattactttgatgatagcaacgtgtccctggcctctgaggatcagatagtgactaaagcagcttatgtgctattttaccaacgtcgagatgatgaattttataagacaccttcacttagcagttctggttcctctgatggagggacacgaccaagcagctctcagcagggctttggggatgatgaggcttgcagcatggacaccaactaatgctgactccacgatcctgccaccctgtagcgccagtgtaatcccccaggagaacatctttgacactctgcagactgctagtgttctgtctaaaaaccagacaaggaaatacccttcttttatgagcagaaggaaacaaaaaaaaaaaagaagaccgtttacctagaagaagctatgtcaagaggctgaattatttttatttttaaacaggtggtgagaaatttctgtgaaacctgtgaagctgaaaagggggtgggatgggggtactcaatggagtatgtctgatggatcccgaagaatggagaggaacacaggcgctgagtatggagcagcctggagacccaccccacctgcagggctgccctgagcgcctggatttctggttctgatgccaatactagtcaccccaagtagtctgctcacagtaacccaaacctcaagtaaactcccctttccctcgctatgtgcactgatatgggtttataattttctgaaagttacccactgaagcccatttctccgttgagtcatcttgtaatttccagctttctccccgctaaggaagatatctagtgttggggatcctggcccctcaacctcctgtggaacccagcagttctgttatatcccctgctaccctagatgaattaagacggttaaatactgtgtggaacttttattagataacacactttttattagataacgcttaaaggaagtcagtacataaaaaaaaaaaaaaaaaa

SEQ ID NO: 119062 - DNA, 1000 bp, Homo Sapiens
agtgatactgtgacaaaaccatccttgcattcttcctagaagagttcctctgctccttccattccatttttgtgtttgttttgttcttttctgtcactgatccgtattaccacttttggaaaaaaataaataaataaataaataaaaggcagcttgagtttccaaacgtgtgattcacttgtgaacaaaagtcattctaacaattgccttcagcgtcacgtgcattgccactgcgctttcggcacgagggatgctgagccctggtgtcagagtcgtaatttaaagcgtgtgtgtatatggactttgtcccttaaggtcgatataaagaatcctcgcagaatcacagacctgtgccgcccgccaccttctgccattgttacattacagatttggtttagttttgttttgttttgttttttcttttagaactgtatagtattgaaaaagaaatcaaatgtaaatgtctggttttcatataatgtttaaaaagaccattgagaaggaggctggcgctcgccccatgtcccccttgattgtaaattgcttctgttctgtttataagtaaactgtgcatgactcctgcttagcggtcattatcgtgtctgttggtgaaatttttattaaaaggaaaattctgtagatgcacttattgaatatgtgattaggatctacgtctgagactaggagtcctgaactgctgacgcgaaagaggcgcagttcccaattaatacggaaatcgctgtgggagaagaatgaaataagacgtgaagtgtaggaaatcatgaaaagaacaattttgcaaattgcattctgatgcttgtgatgaacacaaatgtacttgtgtagagacatttccttaagagaaagcctaggagaagccgatttggaggttaatgctgtagaataggactgtataccaaatgtaatctttccaatgctccaatgaatttatacatgagattgatatgcaataaatctgtgtgcttttctaaaaaaaaaa

SEQ ID NO: 119063 - DNA, 1000 bp, Homo Sapiens
ggttaccatagttaccaccaaggataccaggatggttaccaggatgactaccgtcatcatgagagttatcaccatggatacccttactgagcagaaatatgtaaccttagactcagccagtttcctctgcagctgctaaaactacatgtggccagctccattcttccacactgcgtactacatttcctgcctttttctttcagtgtttttctaagactaaataaatagcaaactttcacctattcatgagttattattgaaacctcaaatcataaagacatttaaaagaattgtttttctaactggaggggctctagtgctaaataatagtactgaaaattgatattattttccttttcttatatgaaggaccttatttggcatataaaattttataaaatatgtatttaaagctttttcttattttttgtattaattggtaagtgaaaactctgttaaagatcacaccacaatgttttcaagaaacatctgaaaagataaaacaaagaacaaataacttataatacttacttaaattgacactttttgaaatgccagtctgaaaataattaagatatctctgctttgtatgagtttcttttatgaaacttgataccacgggagtccagtaatattggccacaaaagccagagaaagtaccaagcccagctttgttatcatagccacttcctgccctgcttctgttatttttagtgttttttcagatataaatcggggtccaggaaatcctcaccagaatctggcactgcagccaaaggcgatacttccagagttctagtaggctgctatggaatttctggcatgaaaattcttgacccctcacactttaccccctgtacagcacaggcataccatggagatattacaggatcagttccagaccaccataataaagtggatatcgcaataaagtgagtcacacaaaaaaaaaaaaaaaaaaaaaaaaaaaaaaaaaaaaaaaaaaaaaaaaaaaaaaaaa

SEQ ID NO: 119064 - DNA, 1000 bp, Homo Sapiens; identical to SEQ ID NO: 119063

SEQ ID NO: 119065 - DNA, 1000 bp, Homo Sapiens
ggagtcacaggaagaattgtagataagcctgactggcagccctatttgccacagaacggagacaacattgaagttgccttctcctactcctcggtcttatggccttggtcgggctacctggccatctccatttctgtgaccaagaaagcggcttcctgggaaggcattgctcagggccatggtggtcctggccttctttgtggtacaaatcaacaaggccaagagcaggccgaagcggaggaagcccagggtgaagcgcccgcagctcatgcagcaggttcacccgccaaagaccccttcggtgtgaccggcagcctggctgaccgtgagggccagagagagccttcacggacggcgctggtgggtgagccgagctgtggtggcggctggtttaaaagggatccagtttccagctgcaggtttgttagagtctgttctacatgggcctgccctcctgtgatgggcagaggctcctggtacatcgagaagattcctgtggatcccgtcaggagggacttagtggctctgccgccagtgagacttcccgccggcagctgtgcgcaccaaagactcgggagaactggaaaggctgtctggggtcttctgactgcaggggaaggatgtactttccaaacaaatgatacaaccctgaccaagctaaaagacgcttgttaaaggctattttctatatttattgttgggaaaagtcactttaaagacttgtgctatttggaagcaaagctattttttttgtcagtggaatgcagtttttttactattccatcatgaggaacaacatagattccatgatctttttaatgacagtacagactgagatttgaaggaaacatgcacaaatctgtaaaacatagaccttcgctttatttttgtaagtatcacctgccaccatgttttgtaatttgaggtcttgatttcaccattgtcggtgaagaaaattttcaataaatatgtattacccgtctgaagcttaaaaaaaaaa

SEQ ID NO: 119066 - DNA, 1000 bp, Homo Sapiens
ctgtgacatcagcaggttgaaggagcagctcaaggctgcaacggaagcactgggggagaagtcccctgacagtgccacggtgtccggatatgatataatgaaatctaaaagcaaccctgacttcttgaagaaagacagatcctgtgtcacccggcaactcagaaacatcaggtccaagtccgtaattgagcaggtctcgtgggatacctgaaatgcacccgcttcccggcccatgcaggagagtctgaaggaaggcctgacggtgcaagaacggttgaagctctttgaatccagggacttgaagaaagactaggtgtgtcccatccaagttgagcacgcgccttccccagcttgcagcagcacaccccaagcgctgcttttcacctgtacctttgttttattattattattattattgctgttgttgtcatcgttaactgtgggcatggaatgcgtgaggctggcttctgggttgtccacaccactctctgctgtgttgacttcctgttgtcttcatcaaagcttttttccgtggtattctaaaattaggccagcagtgggggctgggagggcatctgtgttagtcctttcctggctgtgacccgccacactcactgtcagtattaaggcccagcagcctgttgataagctaccctgtctcaccatgtgctggtgtggaaacggggcccagccagcacgcctcaaggtagatggaatccccactggtcagagaaaaagctatgcggacactccagcttggcctgggtcacagcactgactcctcacccgctagtctggctgttaagaggagaaagtgcactgccttccagcccaggaggaggacagcattttgtatttgttccactgatgcagcttagaaccacacccctgagagtcgtggcaaacctttcacaacctggaaaatgttgaaagcaaccattcctatttttgtttgttttttattaaatcttgcacaaaaaaaaaaaaaaaaaaaaaaact

SEQ ID NO: 119067 - DNA, 1000 bp, Homo Sapiens
tatattcctaaagtcggaccagaaatctgacagctgcctttgaaacccaaagcctcgggttctttcaagctacatgtactaaattgtcgaaggtctcccaggagctctgtactgaggcagacacagaaagacacaaaacggtcgtctttcctgcccaagtaaagcttacagactaactggggagatgtagtgtgcatacaaaacagtaaaagagccatctcaaggacagagagcatagaccaagtcatctggaatggtctacatgccatgcggaagtccaccgaagggttagaacagggtgtcccagactctctcttctgagggaaggttggttgcaaaagtgggattcatgaccctcccaggctacaccatcttctttagaatgagaactgccaggtgacgccctcgctgctcctacctggctactaaacatcgacttcggttcacttcacggatgttcagtggatatcggtcacatgccaggtccccagctacgcattcaaggatggataatatacatagcagcacatccttgaggaactcataccttggtaaagggaaagaaatccatgaatggatacctctgtgtcctaagtgtttgtaataatgctgtgtgtcaggcctctgagcccaagctaagccatcatatcccctgtgacctgcatgtgcacatccagacggctggttcctaccttaactgatgatattccaccacaaaagaagtgaaaatggctggtccctgccttaactgatgacattaccttgtgaaattccttctcctggctcatcctggctcaaaagctcccccactgaacaccttgcaacccccacccctggccaccagagaacaaccccctttgactgtaattttccattacctacccacatcttataaaatggccccatccctatctcccttcgctgactcttttcggactcagcccgcctgcacccaggtgaaataaacagccttgttgctcacacaaaaaaaaaaaaaaaa

SEQ ID NO: 119068 - DNA, 1000 bp, Homo Sapiens
atccccgcgtcgctgccccggcctgatagcccctactctcggccgcatgactcactgccgccgccttcacccaccacaccggtgcctgctccacggcctcggggccaggagggggagtatgccgtgcccttcgatgcggtggcccgttccttggggaagaacttcaggggcatcttggcagtccctcctcagctcctggccgaccctctgtacgacagcattgaggagaccctgccccctcgacctgaccacatatacgatgagcccgagggagtggctgccctgtccctctatgacagcccgcaggagccccggggtgaggcatggaggaggcaggcgacagctgacagggaccctgctggcctccagcatgtccagccagccgggcaggatttctctgcttctggctggcagccaggaactgagtatgacaatgttgtactaaagaaaggcccaaagtgacagaggcagcagagggatggtccaccgccccttggcttctgctggtgactcctcctggccactgcatcagaagaacctcctctgccccttctggagcccgaggcctggcctgtcttcgttggggctgataaattgcctctcccagggcctgctgggtgagtcaccatcccaaagcaggaagggtgccctggagagaaccaccctcctcctactctttttccacttcctcctctttctttccccagctgaggaggaacctggggcatttagggcagaggacaaaaggatgtcagcaattgcttgggctgcttggctatgcaagcctcctgcctgctgatggccacttcagggacagcctgggcccaggcacccagggggatggcggcagcttcctgcacctttcagatttcttggtggcattaaagcattttcagaacaaaaaaaaaaaaaaaaaaaaaaaaaaaaaaaaaaaaaaaaaaaaaaaaaaaaaaaaaaaaaaaaaaaaaaaaaaaaaaaaaaaaaaaaaaaaaaaaaaaaa

SEQ ID NO: 119069 - DNA, 1000 bp, Homo Sapiens
gcatgcggcccagcccggctcccaccgaggcgcgggggccgttttcaacgcttaaaggtgtcttcctcccaagtggtgcctaaagtttaaccaaaaagaccagactaatatattaatatatatctgctgtccagacagcctgtatcttgggggacagggctggcccagccctgctggccgcctcaccccctcgggtctcctcactcccttctacctgccactcacacagccaggtgccttggagggtcccaagctgggccccagcccaccctcctgtcttcccagggtagcccgcctgccagtcctagctgcacagggcagctgggcccaaccctgtctgtagagggccctggtgtttctagcactggcctgcacggtgggccttgctggggacggggggccccagtcagcctctctcccagtctacccagagaagccccttccccatgggaagacgaggccctcgggcccagcccccacagtgctgtctgatctgtgctttccagctcaccccccacactcactcctgagacccctggcctccggcgtcagcctccagcctctgttcccctagtaagtgccttccatgtcggcctctaaccccaggccccgaggacccagacccagtggggaggcggacgttccagccggcatggctgggaactgcagacctgtcctcctggtgggtccaggggcccctccagcttgtggagccccacactggggtgccgcctgcccgtctctctcccatggagccccagccccctttgggcccagggacaccagccaggctctgtgctgaccctcctgttgcacccagccctggtctcagcagcgaccacccctgcctccaccctctgagctttgcatgttccactaaccccgggcgggtggcaggtggaggtgtcaggctgctggcgcctctgcaagggcagaacactaacctgaccgtgggcggggccttgcggtatccgcccccaataaaagcaattccaacctt

SEQ ID NO: 119070 - DNA, 1000 bp, Homo Sapiens
gctggcaaaatccaagatgctcactcctgagcatgtgtttattcatccgggatggaagctgctggaagtcccagaaggacgaaccaattttgataatgacattgcactggtgcggctgaaagacccagtgaaaatgggacccaccgtctctcccatctgcctaccaggcacctcttccgactacaacctcatggatggggacctgggactgatctcaggctggggccgaacagagaagagagatcgtgctgttcgcctcaaggcggcaaggttacctgtagctcctttaagaaaatgcaaagaagtgaaagtggagaaacccacagcagatgcagaggcctatgttttcactcctaacatgatctgtgctggaggagagaagggcatggatagctgtaaaggggacagtggtggggcctttgctgtacaggatcccaatgacaagaccaaattctacgcagctggcctggtgtcctgggggccccagtgtgggacctatgggctctacacacgggtaaagaactatgttgactggataatgaagactatgcaggaaaatagcaccccccgtgaggactaatccagatacatcccaccagcctctccaagggtggtgaccaatgcattaccttctgttccttatgatattctcattatttcatcatgactgaaagaagacacgagcgaatgatttaaatagaacttgattgttgagacgccttgctagaggtagagtttgatcatagaattgtgctggtcatacatttgtggtctgactccttggggtcctttccccggagtacctattgtagataacactatgggtggggcactcctttcttgcactattccacagggataccttaattctttgtttcctctttacctgttcaaaattccatttacttgatcattctcagtatccactgtctatgtacaataaaggatgtttataagcaaaaaaaaaaaaaaaaaaaaaaaaaaaaaaaaaaaaaaaaaa

SEQ ID NO: 119071 - DNA, 1000 bp, Homo Sapiens
atcgatggtctgtggaggtgatacctcaacaaactgaagaaaaaagtgacccagtcccctttcaaatcatcaataactacttctctattggcgtggatgcctctattgctcatcgattccacatcatgcgagagaaatatccggagaagttcaacagcagaatgaagaacaagctatggtacttcgaatttgccacatctgaatccatcttctcaacatgcaaaaagctggaggagtctttgacagttgagatctgtgggaaaccgctggatctgagcaacctgtccctagaaggcatcgcagtgctaaacatccctagcatgcatggtggctccaacctctggggtgataccaggagaccccatggggatatctatgggatcaaccaggccttaggtgctacagctaaagtcatcaccgaccctgatatcctgaaaacctgtgtaccagacctaagtgacaagagactggaagtggttgggctggagggtgcaattgagatgggccaaatctataccaagctcaagaatgctggacgtcggctggccaagtgctctgagatcaccttccacaccacaaaaacccttcccatgcaaattgacggagaaccctggatgcagacgccctgtacaatcaagatcacccacaagaaccagatgcccatgctcatgggcccacccccccgctccaccaatttctttggcttcttgagctaagggggacacccttggcctccaagccagccttgaacccacctccctgtccctggactctactcccgaggctctgtacattgctgccacatactcctgccagcttgggggagtgttccttcaccctcacagtatttattatcctgcaccacctcactgttccccatgcgcacacacatacacacaccccaaaacacatacattgaaagtgcctcatctgaataaaatgacttgtgtttcccctttgggatctgctaaaaaaaaaaaaaaaaaaaaaaaaaaaaaaa

SEQ ID NO: 119072 - DNA, 1000 bp, Homo Sapiens
ctacgcgtgctgccccggctggaagaggaccagcgggcttcctggggcctgtggagcagcaatatgccagccgccatgccggaacggagggagctgtgtccagcctggccgctgccgctgccctgcaggatggcggggtgacacttgccagtcagatgtggatgaatgcagtgctaggaggggcggctgtccccagcgctgcgtcaacaccgccggcagttactggtgccagtgttgggaggggcacagcctgtctgcagacggtacactctgtgtgcccaagggagggccccccagggtggcccccaacccgacaggagtggacagtgcaatgaaggaagaagtgcagaggctgcagtccagggtggacctgctggaggagaagctgcagctggtgctggccccactgcacagcctggcctcgcaggcactggagcatgggctcccggaccccggcagcctcctggtgcactccttccagcagctcggccgcatcgactccctgagcgagcagatttccttcctggaggagcagctggggtcctgctcctgcaagaaagactcgtgactgcccagcgccccaggctggactgagcccctcacgccgccctgcagcccccatgcccctgcccaacatgctgggggtccagaagccacctcggggtgactgagcggaaggccaggcagggccttcctcctcttcctcctccccttcctcgggaggctccccagaccctggcatgggatgggctgggatcttctctgtgaatccacccctggctacccccaccctggctaccccaacggcatcccaaggccaggtgggccctcagctgagggaaggtacgagctccctgctggagcctgggacccatggcacaggccaggcagcccggaggctgggtggggcctcagtgggggctgctgcctgacccccagcacaataaaaatgaaacgtgaaaaaaaaaaaaaaaaaaaaaaaaaaaaaaaaaaaaaaaaa

SEQ ID NO: 119073 - DNA, 1000 bp, Homo Sapiens
gagcaaaagccggcaccatgagggtgggacaccctatgctgagtatggaggctggtacaaggcctgcaaagtgagcagccccacagtgaacactactctgagaaacctgggagctctgtataggcgccagggaaagctggaggctgctgagaccctggaggaatgtgccctgcggtcccggagacagggcactgaccctatcagccagacgaaggtggcagagctgcttggggagagtgatggtagaaggacctcccaggagggccctggagacagtgtgaaattcgagggaggtgaagatgcttctgtggctgtggagtggtccggggatggcagtgggaccctgcagaggagtggctctcttggcaagatccgggatgtgctccgcagaagcagtgaactcttggtgaggaagctccaggggactgagcctcggccctccagcagcaacatgaagcgagcagcctccttgaactatctgaaccaacctagtgcagcacccctccaggtctcccggggcctcagtgccagcaccatggacctctcttcaagcagctgacattcaacccggcccccaggtctgctgggtccccccacccccacagccctcacagcattccccattgctcctggctcttccccacccctaggtgggacagtgaaggggagcagtttaaccagaagattgctgctgcccttagggtctcagctccctcctcaggaatccctcttaggaaggaccctcaggacaccctctctgcaccctgtggtcctctagagtagctagctctgaggccccaaggtgggtacaaagcaggtatggccctcagagatgcagcctgctgctggcttttcagtcagagggttgggggctggccagccaagctgccttgccctggccgctcttactccctccctctgctgtctcacttcaggtccatgtatttcacttttcttaaataaaagaatcaggtaacctttcaaaaaaaaaaaaaaaaaa

SEQ ID NO: 119074 - DNA, 1000 bp, Homo Sapiens; identical to SEQ ID NO: 119071

SEQ ID NO: 119075 - DNA, 1000 bp, Homo Sapiens
tgggtctgattactgcaacacagagaacgaagaagaacttttcctcatacaggatcagcagggcctcatcacactgggctggattcatactcaccccacacagaccgcgtttctctccagtgtcgacctacacactcactgctcttaccagatgatgttgccagagtcagtagccattgtttgctcccccaagttccaggaaactggattctttaaactaactgaccatggactagaggagatttcttcctgtcgccagaaaggatttcatccacacagcaaggatccacctctgttctgtagctgcagccacgtgactgttgtggacagagcagtgaccatcacagaccttcgatgagcgtttgagtccaacaccttccaagaacaacaaaaccatatcagtgtactgtagccccttaatttaagctttctagaaagctttggaagtttttgtagatagtagaaaggggggcatcacctgagaaagagctgattttgtatttcaggtttgaaaagaaataactgaacatattttttaggcaagtcagaaagagaacatggtcacccaaaagcaactgtaactcagaaattaagttactcagaaattaagtagctcagaaattaagaaagaatggtataatgaacccccatatacccttccttctggattcaccaattgttaacatttttttcctctcagctatccttctaatttctctctaatttcaatttgtttatatttacctctgggctcaataagggcatctgtgcagaaatttggaagccatttagaaaatcttttggattttcctgtggtttatggcaatatgaatggagcttattactggggtgagggacagcttactccatttgaccagattgtttggctaacacatcccgaagaatgattttgtcaggaattattgttatttaataaatatttcaggatatttttcctctacaataaagtaacaattaacttaaaaaaaaaaaaaaaaaa

SEQ ID NO: 119076 - DNA, 1000 bp, Homo Sapiens
gggctgaaaggtgctctacttcttaacttgttttttccatgttgtagacaaatgaaatttgtctaaatgcttttgtctaaaaatgcatttgtctaaatgctttagattgatgtagggtttagatcctctttaatactttgagatagtcttattctgattttttttttcttctggaaaccaagtagaattagggatgggaatacaaatgcatttattctggcttctgttttattccaagaagcttcttggaacaaatcagtaggaattgaaaagaaagcatgaccaacccaattacaggggataaatgtaagcttgttaaagtaagcaccacaccatgtttctgtctccccagcacccagcacagtgctgtgaaccttggcagatgctagataaatgtgtgttgaatgaatgtgcctatgaagccacaaagatgccacatgttagtatatcagtgagaggtgactccacagtgctctctggagaagcaatatgagtgactgaagagtggggccttttgcttttgcctggatataggggtgctcttctactgtaattgggtgtggaaaaactctggctttatggtattccattaggttcttttcatttaaagtagtcttaaaatcaaagtatccaatattttaaagccacaaagtagattacataattagcagagattttagtcagtaaaatgttagaaatcaaactataagaaaattcaagtcctttattttgtgtcttgggtatatgtcattattttaaattccacactcccttatttaatcactttggtaagtgcctttgatgttttgaaatgtatagtgggagatgagcaaatgtaaatgtcatgtgccctgttccctagcttctcaattcctcataaccatttttaccagtgttgcaaagtttagacctttgtgttaatatcagaagtgtatttgtagcccctccatagtgaacaatgaaataaactatttcatagaaaacaaaaaaaaaaaaaaaa

SEQ ID NO: 119077 - DNA, 1000 bp, Homo Sapiens
agcagcctccgccaccccctccgcccagcagcagtatggcttccagtacccccttgccatggcagcaaagatccctccccgcggcggcgatggcccgagccatgagagtgaggactttccgcgcccattggtgacccttccaggcagacagcctcagcaacgcccctggtggacaggatggttcggcaaagcagcctgagttatttttgtggacggaatcggaacacgctggctccatatcgtgaaatttttattaatttttttctttttcctttgttacttctttatcttttcctttcttcagactccgtccaaggagatgctctccccggtcttctgctgcaatttagattcctttcccttctctccagttctccttcccttaccaaggagaggggagcaaatggttttgggcaagggctttggccattcatgtcaagctggttgtgggtttttcaaggtgccatagccacccccaaagatgtttgtttaaagcgtggggttttttaatctctgccacccttgtcaagggagtcttgtaaagttgccgagggtaggttcatctccaggtttcgggattcccatccgtcctggcgatcctgccagcagtgggtgggcagcctgagctccctcgggctcgcctgccagcctggagttcttcctgtgctccttgatcacctgagctgcctcagattccatttggtcctctccttcctggaaggcttccttttatgttttgttttaatcccaaatgtctgaatgttttgcagtgtgtaggggtttgagccccttgttcattctccttcctttttcctcccgcttccctctccatgaagtgattctgttgacaataatgtatactgcgcgttctcttcactggtttatctgcagaaatttctctgggcttttttcggtgttagattcaacactgcgctaaagcggggatgttccattgaataaaagagcagtgtggttttctgggaaaaaaaaaaaaaaaaaa

SEQ ID NO: 119078 - DNA, 1000 bp, Homo Sapiens
tggccaagcccttattccgatctacacagagccttcccactgtggacacctcggcccaggcggcccctcagacctacgccgaatatgccatctcacagcctctggaaggggctggggccacgtgccccacagggtcagagcccctggcaggagagacgcccaaccaggccctgaaacccggggcaaaatccaacagcatcattgtgagccctcggcagaggggcaatcccgtactgaagttcgtgcgcaatgtgccctgggaatttggcgacgtaattcccgactatgtgctgggccagagcacctgtgccctgttcctcagcctccgctaccacaacctgcacccagactacatccatgggcggctgcagagcctggggaagaacttcgccttgcgggtcctgcttgtccaggtggatgtgaaagatccccagcaggccctcaaggagctggctaagatgtgtatcctggccgactgcacattgatcctcgcctggagccccgaggaagctgggcggtacctggagacctacaaggcctatgagcagaaaccagcggacctcctgatggagaagctagagcaggacttcgtctcccgggtgactgaatgtctgaccaccgtgaagtcagtcaacaaaacggacagtcagaccctcctgaccacatttggatctctggaacagctcatcgccgcatcaagagaagatctggccttatgcccaggcctgggccctcagaaagtaagagctctgggaaagaacccaaggagttgggggaaggagagagccccaaataaacacaacctgagaccccaaagttttaaggtgaaaaaagaaccaaagaccagacacagtggcttccgcctgtaatcccaacattttgggaggccaaggcgggaggactgcttgaggccagaagttggagaccagcctgggcaagtggacacctcatttttactaaaaataaaaaaaactagctgggcaaaaaaaaaaaaaaaaaa

SEQ ID NO: 119079 - DNA, 1000 bp, Homo Sapiens
ccagtttattcctgagctacagtagagccctgcccttgcccctgtgctcaagctgtccaccatcccgggcactccaaggctcagtgcaccccaagcctctgagtgaggacagcaggcagggactgttctgctcctcatagctccctgctgcctgattatgcaaaagtagcagtcacaccctagccactgctgggaccttgtgttccccaagagtatctgattcctctgctgtccctgccaggagctgaagggtgggaacaacaaaggcaatggtgaaaagagattaggaaccccccagcctgtttccattctctgcccagcagtctcttaccttccctgatctttgcagggtggtccgtgtaaatagtataaattctccaaattatcctctaattataaatgtaagcttatttccttagatcattatccagagactgccagaaggtgggtaggatgacctggggtttcaattgacttctgttccttgcttttagttttgatagaagggaagacctgcagtgcacggtttcttccaggctgaggtacctggatcttgggttcttcactgcagggacccagacaagtggatctgcttgccagagtcctttttgcccctccctgccacctccccgtgtttccaagtcagctttcctgcaagaagaaatcctggttaaaaaagtcttttgtattgggtcaggagttgaatttggggtgggaggatggatgcaactgaagcagagtgtgggtgcccagatgtgcgctattagatgtttctctgataatgtccccaatcataccagggagactggcattgacgagaactcaggtggaggcttgagaaggccgaaagggcccctgacctgcctggcttccttagcttgcccctcagctttgcaaagagccaccctaggccccagctgaccgcatgggtgtgagccagcttgagaacactaactactcaataaaagcgaaggtggacaaaaaaaaaaaaaaaaaaaaa

SEQ ID NO: 119080 - DNA, 1000 bp, Homo Sapiens
tggagaaggtcctggtgtacaataatacatccattgttcaggatgagattcttgctcaccgtctggggctcattcccattcatgctgatccccgtctttttgagtatcggaaccaaggagatgaagaaggcacagagatagatactctacagtttcgtctccaggtcagatgcactcggaacccccatgctgctaaagattcctctgaccccaacgaactgtacgtgaaccacaaagtgtataccaggcatatgacatggatccccctggggaaccaggctgatctctttccagagggcactatccgaccagtgcatgatgatatcctcatcgctcagctgcggcctggccaagaaattgacctgctcatgcactgtgtcaagggcattggcaaagatcatgccaagttttcaccagtggcaacagccagttacaggctcctgccagacatcaccctgcttgagcccgtggaaggggaggcagctgaggagttgagcaggtgcttctcacctggtgttattgaggtgcaggaagtccaaggtaaaaaggtggccagagttgccaacccccggctggataccttcagcagagaaatcttccggaatgagaagctaaagaaggttgtgaggcttgcccgggttcgagatcattatatcttctctgttgagtcaacgggggtgttgccaccagatgtgctggtgagtgaagccatcaaagtactgatggggaagtgccggcgcttcttggatgaactagatgcggttcagatggactgagcttggatgcttctgaggcaagctgaagctttgggttctgactgacccaccctacaggactgctgaacagagagcccagtgtgactagggatcctgagttttctgggacaattccagctttaatcaatacattttgttaaatgtgccataaaatgagactttttacgcctttataaggccttagatgtaaataaactcacccaaacaaaaaaaaaaaaaaaaaa

SEQ ID NO: 119081 - DNA, 1000 bp, Homo Sapiens
ctgcccagcagccccgcggccgccgcctgcgcccccctggactccggcgcctccgagaacagccgcaagcccccttcggcgtcctcggccccggccctggcgcgagagtgcgtggtgtgcgccgagggcgaggtgatggctgcgctggtcccctgcggccacaacctcttctgcatggactgcgccgtccgcatctgcggcaagagcgagcccgagtgtcccgcctgccgcacgccggccacccaggccattcgcgtggagacggagaccccgcagcccggcggcgcctcagcccttcaacgacagtattgagtggtcaggttacaataaaccggagagaaaaggtccgcttgcactttttttagttttcttatttttagacacccctcccctccagggtgatctttaaaaaagcaaaacaaaaaacacgacttttccagcgctcagcgttttttcctttcgtccgaagccgttttctgatttgacttttctcgccggccggtctcaggccgcacagacgttccagaggaggagggtgacatttttactccctttttggggctaaccatttatgcttttgtacatcaaccgtgcgcggccggagggggcaggggggcgggggcgaggggcgttccaatcaaatttctaactttctgttaattattaatcccctttttactgcggtttctgttgtcatttttaaaatttttttaattttttttttttttttacttttactttttacctcttgtgtatatgtagggaatttatagggaaatatgtactttatggaataaattttaagaactaaaatatattttattttaaataaagtaatggacctttaatcttacacagctaaattactgattatatatttgctgagctgatttaagggttaaaaaaattgtatcaagagttttattttttgacttcaaagccttcttaataaagcctcttttctacatgtgaaaaaaaaaaaaaaaaaaaaaaaaaaaaa

SEQ ID NO: 119082 - DNA, 1000 bp, Homo Sapiens
tattgcctcctcgccctggtgaggggaggtgctgcttttctgccccacctgccggctggttccagcagcgctggggcccagctggggggccgggatgggggcttctctctctgggaggggtgcaggtgccctccccaggctgggagggttccttccctagctccccatctgcccccgctggtgagagttgggcttcttggtcttggaactccctggcattgggaacagagcatttccagcatttgttgttgttgttttactcacctaacccttagaaaatgaatgttagaaggtgcctgccgaggcgggacagagtgtttgctcgcgctggagaaggctctgctcagccctgagagtcccttcctgccccaccgatactggcactttaaaaaggaagctgaccgcacagtgtccagacgaattggcccccagaagatggggagttctgtcctgcccttctgtgtctgcgtgacctcacccagcctaggagggaggtgcattcaggctagatttgcctctcattcaaagttctggggctttgggcggaaaacagccagctttggcgctgttggggagactcctccagaccaggaaccccagaaggagacagagcctgccacatcctcccacgccaggccctgggccagggtgattggactgagaatttggccacaaccaaattgatgctggctggaaccagaggccagaaagcctggccttgtccccatgtgggagccctgtcctcagccctcttgtccccttgagctcagtgaattcccaccaggtgcccacagctcctggacttcaaattctatatattgagagagttggagagtatatcagagatatttttggaaaggagttggtctatgcaatgtcagtttggaatcttcttgaaagtttaatgtttttattaggagatttaaagaaaataaaggtctacaatatcaaaaaaaaaaaaaaaaaaaaaaaaaaaaaaaaaaaaaaaaaaaaaaaaaaa

SEQ ID NO: 119083 - DNA, 1000 bp, Homo Sapiens
ggtcctgaatgaagctgtacgcctgcctcatgccagaagcggctggacagtggctgcctcatgacccttgcagtctcccacatccagggcctgatgacatgcccccttgtcccaagtttcttgggaacccctgaccctgctggcccctctcatccaccccaaccctatccaccctggaccacctctgggggtctgtcagcctgctggtccccgcaacagatctttgggggcagcctctatgggacaagagtgacacagggctggagaagaggagtgaggagcctccttgtgtctgatgcacagatgtggccctttcaaaccctggtgtcaccctctgggtgactggatcccaagctccagcctcttcctgggccagccaggaaggctggaggaaagctctttgctgagtgcatgcatgggagtgtggggggtgactgagccctccccatgcaaggggcttggcctgggaccctggaagctgtttccctactgggataaagttgcgtcagccgcaggggtctctgccctcaaagaccccccactgcagggagccccaccccataagagggtcacggaagtccatgtccgcccacccccagtggcttctggtgtggccgtattggcctagaggggctgactggggagggtcagggccaagccctcagcatctgctcctgtccctgctttttcacgcctgctgcctgaagtggtagccccgcctgctgcttccccacctcccctccccacctcttctctcccagatggggcccttgctgcgtgacggggtctccatgcgctttatttatttgcagtctgttttctaggcggtggagctagacactgaccggaatgacatacttttctgtgtgtgattcactgtgtactggtcagcacaggctggccagagagctgttcttgtttctggtgttgtcacgtcttcttgttttctctaagtttaaaaaaaagtccttggtttaatacaccaaaaaaaaaaaaaaaa

SEQ ID NO: 119084 - DNA, 1000 bp, Homo Sapiens
gtgggcagtggcaggtggcctggcactgcatggagccagcacgttgacctccctctcagctccctgctcagggacggtggacaggttgcctactgggacactctaggttgctgggtccatggggaggattgggggaggagaagcagtgccttccctctcgtgtggggtgggggctctctcttcttggtgcctgctgtctttctactttttaatttaaatacccaacctctccatcacagctgcatccctgagagtgggagggggctgtagtggtagctggggctcccaagaacgactcgggaatgtcatctccatcttcacccttcagagagcagtcctttctctgtgcagctggagacgctggtgaggagagccgggtccaggttcttaagaatgaggtgcggaggggctctccggtgctgctgggctgggttgagcaagcctacgcagacaagtgtgtgtgtggaccatccgcacctccagcccccaccccaccctctttgtctcagcgtgttatgtgcaatgacctatttaaggtaaacccattccaactacagcagttcagggctgatccaagcactgcctccctcctgctctgtccaggtggtctggaccataaactcaacttgagagggaaggcttggggttgaggacttgtgatcagaaaaactgaagatggaagttttggccggtgctcattagacatgagtcctcactctgtgtcctgagcccgtgtcattcttccaacctccctgcccccacacacttatcccagacacaacaccatgtggtctggaggtcccagcccccaccctaaaaaggttatccctgagaactccaccagacttgggagcccaagtgcagtgcctggtgctgctcccatctgccgccccccttctctcctgcaattggtttgtactcactgggctgtgctctcccctgtttacccgatgtatggaaataaaggcccttttcctcctggctgcgccagtaaaaaaaa

SEQ ID NO: 119085 - DNA, 1000 bp, Homo Sapiens
gaagggagcagtctgaggaccaagggaacccggcaaacagcacctcaggtactccaggccctcctggctggagagggctgtggcaatggaaaattagtgccaactgcaatgagtcagcctcggttaaatagagagtgaagaatgctggacaggaacctccaccctcatgtcacatttcttcagtgtgacccttctggcccctctcctcctgacagcggaacaatgactgccccgataggtgaggctggaggaagaatcagtcctgtccttggcaagctcttcactatgacagtaaaggctctctgcctgctgccaaggcctgtgactttctaacctggcctcacgctgggtaagcttaaggtagaggtgcaggattagcaagcccacctggctaccaggccgacagctacatctttcaactgaccctgatcaacgaagagggacttgtgtctctcagttggttccaaatgaaaccagggagcaggggcgttaggaagctccaacaggatggtacttaatggggcatttgagtggagaggtaggtgacatagtgctttggagcccagggagggaaaggttctgctgaagttgaattcaagactgttctttcatcacaaacttgagtttcctggacatttgtttgcagaaacaaccgtagggttttgccttaacctcgtgggtttattattacctcatagggactttgcctcctgacagcagtttatgggtgttcattgtggcacttgagttttcttgcatacttgttagagaaaccaagtttgtcatcaacttcttatttaaccccctggctataacttcatggattatgttataattaagccatccagagtaaaatctgtttagattatcttggagtaagggggaaaaaatctgtaattttttctcctcaactagatatatacataaaaaatgattgtattgcttcatttaaaaaatataacgcaaaatctcttttccttctaaaaaaaaaaaaaaaaaa

SEQ ID NO: 119086 - DNA, 1000 bp, Homo Sapiens
tggtgcgggacgcaccctggaccgccagcagcagtgagaaggctcctgacatgagcagctctgaggaatttcccagctttggggctcaggtggctcccaagaccctcccttggggccccaaacgataatgatcaaaaagaacagaaccctctccagcctgctgacccaaacccaaccacacaatggtttgtctcaatctgacccagcggctggaccctccgtaaattgttgacgctcttcccccttcccgaggtcccgcagggagcctagcgcctggctgtgtgtgcggccgctcctccaggcctggccgtgcccgctcaggacctgctccactgtttaacactaaaccaaggtcatgagcattcgtgctaagataacagactccagctcctggtccacccggcatgtcagtcagcactctggccttcatcacgagagctccgcagccgtggctaggattccacttcctgtgtcatgacctcaggaaataaacgtccttgactttataaaagccaaacgtttgccctcttcctttcccacctccctcctgccagtttcccttggtccagacagtcctgtttgtggagtgcaatcagcctcctccagctgccagagcgcctcagcacaggtgtcagggtgcaaggaagacctggcaatggacagcaggaggcaggttcctggagctggggggtgacctgagaggcagagggtgacgggttctcaggcagtcctgattttacctgccgtggggtctgaaagcaccaagggtccctgcccctacctccactgccagaccctcagcctgaggtctggtgagtggagcctggaggcaaggtggtaggcaccatctgggtcccctgtggccgtcacagtgtctgctgtgattgagatgcgcacaggttgggggaggtagggccttacgcttgtcctcagtgggggcagtttgccttagatgacagctgggctcttcttcacaccacctgcaggccctccctgcccc

SEQ ID NO: 119087 - DNA, 1000 bp, Homo Sapiens
cttcagtcctaacttatagtatgagtctctaaaaagcaagtttttcatttgttagaggtcgttattgataaccagtctgtatagttaaggtaaaaaattaagcttttcttctatagtctgtgtccatactcacagaatgaatggcacacctgagatcaacattcacatagtttagactccaaaccattcagtctaaaatactgaaactttggaatatagggaatgatgataaaagtggatttggtttgagtagcagaaaactacttatgtccttttcttgcctttccaagaaaaatgttttttgtttttttttttaatcttgagttatctggatattgccttgactccatttcattttggctatgtagatacaacttagtctttgtgattgtgatatatttgctaagttttaaataaaacttcttttggatagaaatcattagaaaccaagcatactgcactctaatattttactgtaaaggcttatgatttttatttctactgccattaattttttagatggatttgtttcctcttacacaactagaattaatgtatttttcaccagttttccatataccttaggtcttgatcgtttgtccttaaaaaggggatcagcatgagtatagacagtagaaatgtatgggtagtctaaccacttttatcagagacagagcagggctgtggtctcactctagctgagcagagtattaacttggtagcaagagttcctgatacaaatagatgcaatgactgtaaatggtgtcagcagtacacatggataatcagtatttgactgtaatagtatagtagttaaatacagcacttaaaaataccacagacacagttaaagcaaaaggaaacaataaaaggaatgtctgcatgctattttaatctcacattctttatctgtcttaaagtggaaatccatttgcctataaatacctgtaaacgactttaaaaaataaatgattattgctttgtgacaattgaaaaaaaa

SEQ ID NO: 119088 - DNA, 1000 bp, Homo Sapiens
atagtattttgtaaataaagatgatttaaatatgaatcttatgagtaaattatttcaattttattttagacggtataactatttcaatttgattaatccactattatataaacaatagtgggagttttatatatgtaatctttcaggtggggaggctttaaattctgaagtctgtgtctttatgccaagaactgtatttactgtggttgtggacaaatgtgaaagtaactttatgcttaaataaattatagttgatttaaagatttgtttggcattgataataataaaatcagtagtttttctataactatggctctattaacttttttccttttaccaataactttgaggtgcaaaactcaaacttatgtgggtcttttgtgttcaattatgttatgacaaatgtgctctctttcttgtaaatagacatgagtggcccaaagcaacaaattaatacacttttaaaagtcaaaattgattatattttaaagataaccaggatattatctaatggtgaattgtagaattttgatcttcttattcactgagtttcttgcacggtttctttattgcttttttttccccgcctgttcttttgtaaggtatttactattttctgtggaggatattgagatgtactacaggataactgtagtgaatgatgtgtcatcattttgagctttggactcaatatctttagtgtttccctaaatcagatttgtaggtcatgttaagcttcttgcacattaatatgattatggaaggaaaggcagtgaagcataactaataaacatcataatacttaacgttgcccagttggttgttttagtattagacttttttttcaatgccaaaagatagaagattaaatattcttgaataaagcagtgatatatattggaacacttcaccccagcatttccccaggtgttgtttggaacactgatcttgtgaagtatttttgctccctttctattctaaccctcacctcaaaaaaaaa

SEQ ID NO: 119089 - DNA, 1000 bp, Homo Sapiens
ttaggaagtacttactgaaacatttttgtaagacatttttggaatgagattgaacatttatataaatttattattcctctttcatttttttgaaacatgcctattatattttagggccagacaccctttaatggccggataagccatagttaacatttagagaaccatttagaagtgatagaactaatggaatttgcaatgccttttggacctctattagtgatataaatatcaagttatttctgacttttaaacaaaactcccaaattcctaacttattgagctatacttaaaaaaaattacaggtttagagagttttttgtttttcttttactgttggaaaactacttcccattttggcaggaagttaacctatttaacaattagagctagcatttcatgtagtctgaaattctaaatggttctctgatttgagggaggttaaacatcaaacaggtttcctctattggccataacatgtataaaatgtgtgttaaggaggaattacaacgtactttgatttgaatactagtagaaactggccaggaaaaaggtacatttttctaaaaattaatggatcacttgggaattactgacttgactagaagtatcaaaggatgtttgcatgtgaatgtgggttatgttctttcccaccttgtagcatattcgatgaaagttgagttaactgatagctaaaaatctgttttaacagcatgtaaaaagttattttatctgttaaaagtcattatacagttttgaatgttatgtagtttctttttaacagtttaggtaataaggtctgttttcattctggtgcttttattaattttgatagtatgatgttacttactactgaaatgtaagctagagtgtacactagaatgtaagctccatgagagcaggtaccttgtctgtcttctctgctgtatctattcccaacgcttgatgatggtgcctggcacatagtaggcactcaataaatatttgttgaatgaatgaa

SEQ ID NO: 119090 - DNA, 1000 bp, Homo Sapiens
aaatgttcaatgaagtcttctgttcatctgttgaaactaggaaaatacccaaacttaaatggaagaattctgaaagagaggatagaatttaaagaacaagagtatataaagttattctttgaatatttcgttgactatatgtacattgagttatctatatttgtaaacaaattagtcatggaaaattattctatctcaaagtctccttttagtctagataatcattatttcattttaaaattagtgtttttcctagtttgcactgatgcgtgtatggatgtgtgtgagtcagtggtagcttatttaaaaagcaccttatcctttctcccataacctttgtacactaaaaaatgaaagaatttagaatgtatttgatgatagcattctcactaagacacatgagaatttaactttataaccgcgtgagttaagatttaattcataggttttgatgtcattgttgaagttatttgtaattcagaaaccttgcttgtgtgatacatagtctcttcatttattactgcttgtctgttgttatatctggattatcaaaagcaatagtgcaccaattaagatgtgctcaaatcaggacttaaatcataggcaccacatttttcatgtcagactagttactttgttgattctcagttactgtaggcatcaaaaggcaaaaatcaaaaaaaaaaaaaacaaaaacaaaaaaaaagatgaacctaggtctgtgtaaagtaaggggagtgttaggagcagccaggactgtgtagtgtgtgtttggttgcatcacaaacatcgtatgtggagacattgcaatacagtgttttttgttttcaacttttcttgtattgtatatttgtattatgttttgaatgcttttctcttttcataattaaatattaatgtttgggataactgccaagaagaagtaaaaatattgaatggaacttctatatgaggatgctgtgatctaaaaattaaatctcagtgggcggagaaaaaaaaa

SEQ ID NO: 119091 - DNA, 1000 bp, Homo Sapiens
gaacagcccccaaagctaagatcctgccaagctaaatacagtagttctaatgaaatgtgagaggctataatcccatttgggaaattcctaaaaagtcatgaggcaggggattggtttatgttattatcatgacctgagagtcatggctcagagccaaatgttcaggattgaattcaacagcatttaaatgtctttagagcaggatggaaatatgttagcaatgcctgcagagtgccaagtaaacgcaaaagccaatgagatcataaaggaagttgttagctaacctaggtggagtcgccaacttccttctactctaataattaaaaataaaaataatacttgggaggtaactggaataaaggttctaaaatcaaaaccctctgaagggtgaaaactgggagcctcctgttcccatagtaaccacagcactcagggcactgtctcccagcgctggagtactgtcttatgaccagagatcctaagcaacctctgctcatctgagttgtccaccatattgtgggcatgagtccttgacaatagtaaatagcacctctgttcccttattgggtaaatgattttccaactctgggaatgtgtagaattcattatggaaataatgcaataattcaaatccataatattgatactttcatgttaagtttaggactaatcttgtgtatgctccttaagtgatttgaatctttaaaaagcttatgattccaatttgaaatgtgaaattgattttacgtttgtgatttgaagttgaaaggtataagaatatttaacttagctcatgaaaagtattagactagatttactataagtttaatgtattagatttacaagagatgcttaaatatatgagaatgttttgtcttaattggttataatcttgtcatatcaatgatttgaagtgctaaaatagaaaattaaatatgataaattacacaagaagtttagaatgtttaaaagattttaataaacaaagcctataactaag

SEQ ID NO: 119092 - DNA, 1000 bp, Homo Sapiens
tccagagtgagatgctggagaccattccagaggaggcgggtatcaccatgagcccagggcctcaatgagcctggtccatgaagtgcccaccacatcgcagcacttttaccacgttttgtcctcagaccccgcccatgctgtgtggtctctgcatgtctccattcttctctgtctctgtcttgcatgtctcctaccatgtcactgtccctgggccacccagtgaaagcaaagcctgggaatctgctcattgttgtttgggctcaggtattgagcctgatggcccaggtattgagggcctcccctgctggtggccctgtcctgggatcctcagaagcctgactgtcctatgggcttctccagtgtccacaggggcttgggatggttgtggggggctggcccctctagcctttccggtccttcctgggcaaatctaagccttggccagggccgaagtttaggcccctgtcttgttcatgtagccgaggggcaggcgggggacctctacacctctgctgtgggcacggggctgctgagggtctgtggaactccagcagctctgcactgggtagagctgggcctagagctcagtcacaggcctgggcttcctggcctgagtgggtagacgcaggcggcagaggtgctggaccacatctccgccaagtcactgcccagcagccttctccgtcctgtccccagcccacgtgctccttgggtgtcagcttcctgtgcctctgtgggagagggcagctgccttgtgttatgtctggggccacagttgctgcaaagtcctggatctgccactcaaccccgggagtggtgttcccagtgtggctcccagagctttgaccagattgtgatcccagctggcccctatgttgtgttctggactgaggcctttgctgtgaactgcagtgtttcatacgaaccatctttcctagtgcatgagaaataaagattatttaagtaatgagaaaaaaaaaaaaaaaaaaaaaaaaaaaaa

SEQ ID NO: 119093 - DNA, 1000 bp, Homo Sapiens
caaggccatgtccattcccatgtgggtggacaatgttcagtgtccaaaaggacctgacacgctgtggcagtgcccatcatctccatgggagaagagactggccagcccctcggaggagacctggatcacatgtgacaacaagataagacttcaggaaggacccacttcctgttctggacgtgtggagatctggcatggaggttcctgggggacagtgtgtgatgactcttgggacttggacgatgctcaggtggtgtgtcaacaacttggctgtggtccagctttgaaagcattcaaagaagcagagtttggtcaggggactggaccgatatggctcaatgaagtgaagtgcaaagggaatgagtcttccttgtgggattgtcctgccagacgctggggccatagtgagtgtgggcacaaggaagacgctgcagtgaattgcacagatatttcagtgcagaaaaccccacaaaaagccacaacaggtcgctcatcccgtcagtcatcctttattgcagtcgggatccttggggttgttctgttggccattttcgtcgcattattcttcttgactaaaaagcgaagacagagacagcggcttgcagtttcctcaagaggagagaacttagtccaccaaattcaataccgggagatgaattcttgcctgaatgcagatgatctggacctaatgaattcctcaggaggccattctgagccacactgaaaaggaaaatgggaatttataacccagtgagttcagcctttaagataccttgatgaagacctggactattgaatggagcagaaattcacctctctcactgactattacagttgcatttttatggagttcttcttctcctaggattcctaagactgctgctgaatttataaaaattaagtttgtgaatgtgactacttagtggtgtatatgagactttcaagggaattaaataaataaataagaatgttattgatttgagtttgctttaattacttg

SEQ ID NO: 119094 - DNA, 1000 bp, Homo Sapiens
cggtcccgcggcgctgcagttgtgtccagccggtcacggggcggctatggcggccacgttcttcggagaggtggtgaaggcgccgtgccgagctgggactgaggacgaagaggaggaggaggaggggcggagggagacgcccgaggacagggaggtgcgtctgcagctggcgcggaagagggaagtgcggctccttcgaagacaaacaaaaacatctttggaagtttctttgctagaaaaatatccgtgctccaagtttataattgctataggaaataatgcagtagcatttctgtcatcatttgttatgaattcaggagtctgggaggaagttggttgtgctaaactctggaatgaatggtgtagaacaacagacactacacatctgtcctccacagaggctttttgtgtgttttatcatctaaaatccaatccctcggtttttggctcttgtccaaggaagaacatgcagataactattctcacatgtcgacatgttaccgattataaaacctcagaatccaccggcagccttccttctcctttcctgagagccctaaaaacacagaatttcaaagactcggcgtgttgtccattgctagaacaaccgaatatagtacacgaccttcctgcagcagttctaagctactgtcaagtatggaaaatcccagcaattctgtacttgtgttatactgatgtgatgaaattagacctaatcacagtggaagcttttaagcctatactttctaccagaagcttgaagggtttggttaagaatattccccaaagcactgagatactaaagaaattgatgacaacaaatgagattcagagtaacatttatacatgatcttaaacattgttttgtagtgtatattacttgtccattcctttaaggggagcagcctgcactcttttgtagattacttttgggggatatattttgagaatgatgaaacggaataaaattgtaaaaaactaaaaaaaaaaaaaaaaaaaa

SEQ ID NO: 119095 - DNA, 1000 bp, Homo Sapiens
tgtgtgtgtgtatatatatatgtgtatatatatgtatatatatatatgtcttggctaatttgaggccatcttttgtctagatcttcagagcatgggacaaacagatttgagagaagcttgtgaagtactgaaagtgataaagaacttggtcttcagctggtgaccttgttagttatcctctctgtacctcagttttctcatctgtaaaatggagatgccaatatctgctgttggatgccaatatctactacaagttgttgttatgcatattaagtaatataatgcatgcaaaatgcttagcacagtgcctggcatataataagaaaccaattagtggattctgtggttatttttgtgaggctatgaagaaactgaaagctgaggacaagtagcctaggctaggtacctaggatgagaaatccctgaacatgagcccagttattcttccagcaaacacttattttattgtagtaagatatatataacataaaaattactattttaaccatttttaagtgtacaattcactggtattaaacacattcacattgctgtgtaaccaccaccactattcatctacagaaattttgttatccaaacagaaactctgtatccattaaacactaactccccagtactcccttccccagcccctggtaaccactattctaattttgtctctaagaatttgactattctaagtacctcatgtaagtgtaattatacaatatttgttttttgtatctgacttatttcacttagcacaatgttttcaaggttaatctatgttgcaacaatgtcagaatttcttttctttttaaggtaaataatattccatggtatgtatatactacattttgtttatctattcatctgcccatggacatttggattgtttccaccttttggctattgtgaataatgctactaatctgtcatgggattagagtgagaaagaaagaataaaaaaataatgctgctgccaaaaaaaaaaaaaaaa

SEQ ID NO: 119096 - DNA, 1000 bp, Homo Sapiens
gttgtcacaagccgcccttgaagaaaacgcagcaaaatattttaaaatgaagatattgcagtccccagagccagtgaaggtttcttttggtaaaatgaaattgtgccattgtcaaagtaccccgtagtgatgagcactgactggttcactggccacattttagttcttcataataataggccacaaaagggctctgtggtttgcctccatgtgcactggcccctccccacccctagggggcactcagtagctgctgagaaggcctgtccacgaggctgttggaacccctccaataaatacttagaggtagtgtatctgatgcttgttttcgtggagaaaattgtattggagaacttaaaacatcacgaatatttttaataggatccgcagacacccaaaggagaagcttggtcttttccaggtatttccaacttgagttcaacccaaagcctttgaaaggaatgcattaccacatgaccacatgctgagaccccatggggtctaacacgggacctaagaaagtctctgcagccagatagtacatggtgtctccacaaaactaggcattctggagattgcccagaaagggatgtgaggggaccgttaagatctgtcttgcttatctcatgcactcacattccttcagcctcctggagttcctgataaaaggaagccagggtgttgacattttttagctattgatttcccaatagcttgtggatcagttgtacacccacacttccttctctgcctaattccgtttttctggaaaaagtagtatgcccatgtatgtgtgtttttcttaacacaggtccatgaaagtttggcttcctggtttgatgtctgttgcgtggcctggaaaccagggagcagcaactattgagatggtttctgtgttcagtgaaaaattctatttcattgagacaattttttctttatccacagtaattttttgacactgtcatcatgaaactacccttaggaaaataagattacctgc

SEQ ID NO: 119097 - DNA, 1000 bp, Homo Sapiens
cagataaaactacaacaagaaatagagaatctgtttatttactgctagatatgattgtacaagaatctccattccttacaatggatcttttggaatcttgttttccttatgtcttgctgagaaatgcataccatgctgtctacaaacaaagtgttacatcttctgcataaaattacctacttaatcaagataagcacgcatttttgttgccttggttttacctgtagactgtggaactattttaccttaagacctgaaaaagttttgtggattataaatttctttcatacggttgtattttctgatcattggtttcttaatatggttgtactacagtatacttggttgatttaggttgcacattcactgaattcactgagattattcctataattttaaagtatcatttatttgaaaaacatacattatcaacatgtttttgatatttgataatgaaaaaaatctttgcttgtttatttctgaaaaagaactgtatttagtgattattttagatagtgatattatagtattcatctgtgtgtaaattatttcatatagggaagagttctgatctgtacctatggttcttattgaaaacaacattggatgtgcatttctgtgatgttatgaatacatttctactttattttgaaacatttgccaaactaaatactgtaacactgtataacatttaaaaatgttaaagaactgcttagtattagaagcagatcatttcccaaaattctaagagcagcagcatatgttgttgcttgtataaagcctagcgataatttttagactaacttccatggtgccctgttggcattagcactaccattgtaccctgctgtataataaacaatcttagacatttatcaactgttgatacaaatgttagtccctaaccactttttatatatgttttaaatttttgaaattcaagtgtacctgccataacataaaataaacactagactgtatcacacttcgattgaaaaaa

SEQ ID NO: 119098 - DNA, 1000 bp, Homo Sapiens
catttatcagtgacatcatcaactgcggcatctacctcttttctcctgaagccttgaagcctcttcgggatgtcttccagcgtaatcagcaggatgggcaattggaggactcaccaggcttgtggccaggggcaggtaccatccgcctagagcaggatgtgttttcagccctggcagggcagggccagatatacgtgcatctcactgatggtatctggagtcagatcaagtccgcaggttcagccctctacgcctcccgcctctacctgagccgataccaggacactcacccagaacggctggccaagcacaccccagggggcccatggatccgagggaatgtgtacatccacccgaccgccaaggtggccccctcggctgtgctgggccccaacgtctccatcgggaagggggtgaccgtgggtgagggtgtgcggctccgggagagcatcgtcctccatggagccactttgcaggagcacacgtgtgttctgcatagcatcgtgggctgggggagcaccgtgggacgctgggcccgcgtggagggtacccccagtgaccctaaccccaacgatccccgagcccgcatggacagtgagagcctcttcaaggacgggaagctgctgcctgctatcaccatcctgggctgccgagtccggatccctgccgaggtgctcatcctgaactcgattgttctgccacacaaggagctgagccgaagcttcaccaaccagatcatcctctgagtagggctgccagaaggcccccagctcctacccactccccttgaggctgctgcctgcttggccagcctctgtccagaaaggaccagagaaagccaggctggatcgtcacatgccggggagcaatgtggatggcctggggactcctgggttttctccctcccgactccctaataaaccccgtgaaccttggaaaaaaaaaaaaaaaaaaaaaaaaaaaaaaaaaaaaaaaaaaaaaaaaaaaaaaaaaaaaaaaa

SEQ ID NO: 119099 - DNA, 566 bp, Homo Sapiens
caagcaagcaggctatataagtttcagaaggctgggctccactcagatcttttccagcagctgctgccgtgccagagaggcgccttcagagacccagcgcttacacaatacccaccatgtcccaggctggtgctcaggaagcccctatcaagaagaagcgcccccctgtgaaggaggaggacctgaagggggcccgaggaaacctgaccaagaaccaggaaatcaagtccaagacctaccaggtcatgcgagagtgtgagcaagctggctcggccgccccgtcggtgttcagccgcacccgcacaggtaccgagactgtctttgagaagcccaaagccggacccaccaagagtgtcttcggctgagaagtgtgcgccactccccttgctgcccgaatgctcggaaacaggagccttacccaggaactcttttttatgccagaacgcttcctctcccctgctgtctctggggctgccaccctcccccacagtccaggcccttcagccaagggctctgcaccagcaccttggaagcaccaataaagaggatgcccacgtggccccagc

SEQ ID NO: 119100 - DNA, 1000 bp, Homo Sapiens
ttttttttttttggagacagcatctcaccctgtcctggctggtctcgaactcctgacctcaggtgatccgccggcctcaccctcccaaagtgctgggattacaggcatgagccaccatgccagacttcccattttactttctgcaagctgtttccctagcagctccctctaggggagaggtgaaatcttgcaagttgtagcaagagcacacaggaaacccctaactttcctataccccacccgcctcttcccctttctgtcccgggatacctggcggcaagagacttcttggctattgtccatgctcccagaatcaagcataaatgccagacacggcgattgagaagccaatcagtgaaccctttggcaaagcccccatccacacctggcactcccctctaccaatccctggcacagggttcctggagagcaggtgctgtacattttacagctttacaatggggctgttgacagccataattagggaggcatgaattatgcggctataatgcagagccctacaattaaggcgggaatgaggggctggaggcagcaaacggaatctgccctatgagcgtggctgttgagtcctgtctcctgggtctgactttccgtaatatgattggggtacagtagaggtgattaatggggctggcatctctctttggcctgaggttctgtattctgggaaaggtacacagggtggagtagggagaagctgccccaggaggcgatgtagtggtggaaagaagaggcagagaggtcgtcgtcgtcgcccagcagcaagggctgcaaaatagtagaactcgtggttgctttggacaggtgtgatttgtgcaagccaggttcaacccttgcctcaagaaatcagatgggaccaatttagtgtccttccacctgtgagccaagcccccatttgaggacatctatcgtattcttgtgtgctgggtctcaaatagaatttttaaagattcttagatgtaaaaaaaaaaaaaaaaaa

SEQ ID NO: 119101 - DNA, 1000 bp, Homo Sapiens
gggcctttggcacagcagccggtgtctcctgcgcccgcctcccccatggccccatgcagccccaggggcttcccccctgcccatggagtagagcccgagatcctggccactatgccagttctgacctcgcatccccctaccccgagcccatgcagtctgggaacatgccgccttctctccagcctctgtgcctttgttccaggtggtctcaccctcctgtccctggctgggctaggtggtcctgtccaggctcctgcagcgcccccctcactttgacactggactaggatgcagcctcccttctgtgtccccttgagggtaccctgggtcccctcatcaggggcagaggcatgaaagagtcggggctggatggccgggggcttctgggcccgacgcctagtgcagcccctggggtcgtggtttgacatttgtctgcctggtgcaaacaaggaatccttgcctttaaggtgacaggccctccacaggcttccagacttgaaggaaaaggtttaagaaagaaaacaaaaccaacagttagtggagtcaaagcccagacactgtaaatagaaccccctccaccaccccccgccgcccagcatcctacctggactgcggtgctacgagggcctgcgggcctttgctgtgtgccaccctccctgtaagtctatttaaaaacatcgacgatacattgaaatgtgtgaacgttttgaaaagctacagcttccagcagccaaaagcaactgttgttttggcaagacggtcctgatgtacaagcttgattgaaattcactgctcacttgatacgttattcagaaacccaaggaatggctgtccccatcctcatgtggctgtgtggagctcagctgtgttgtgtggcagtttattaaactgtcccccagatcgacacgcaaaaaaaaaaaaaaaaaaaaaaaaaaaaaaaaaaaaaaaaaaaaaaaaaaaaaaaaaaaaaaaaaaaaaaaaaaaaaaaaaaaaaaaaaaa

SEQ ID NO: 119102 - DNA, 1000 bp, Homo Sapiens
ggagaccgcatcaattgacatccagatcattgaccgtccaggtccaccccaaattgtgaagattgaggatgtctggggagaaaatgtcgctctcacatggactccaccaaaggatgatggaaatgctgctatcacaggctataccattcagaaggctgacaagaagagcatggaatggtttactgtcattgagcattatcatcgaaccagtgccaccattactgaattggtcatagggaatgaatattacttccgggtcttttctgaaaacatgtgtggcctcagtgaggatgccaccatgactaaagagagtgcagtgatcgccagggatggtaaaatctacaaaaatccagtgtatgaagactttgatttctcagaggcacccatgtttactcagcctttggttaacacctatgccatagctggttacaatgccaccctaaactgcagtgtgagaggaaatcctaagcctaaaataacctggatgaaaaacaaagttgctattgtggatgatccaagatacaggatgttcagcaaccagggagtctgtaccctggaaattcgcaagcccagcccctatgatggaggcacttactgctgcaaagcagtcaatgaccttgggacagtggagattgaatgcaaactggaggtgaaagtcattgcacaataaggatttttgaatgtataatatcatctaaggtgggctctccttctgcagactcctcttgcaaggcgtacctccaaacataattgattcgtatctgcgagacttacactcaagcaatcctgaggaatactgagggagggcctggctactgtctctctgcactctgctgctttgaaatctggttgaaatgagaaaaagcattttctgttttcccaccaggcccccaagtgtggtctttttctttcctcctaatgttgaagagaaaaaaaaaaaaaaaagtttgcccagattgcttaattaaaaattgcaaacaaaatctcatttgaagtcaaa

SEQ ID NO: 119103 - DNA, 1000 bp, Homo Sapiens
aggaaaatagtggccgagtatgagaagaccatcgctcagatgatagaggacgaacagagagagaagtcagtctcccaccagacggtgcagcagctggttctggagaaggagcaagccctggccgacctgaactccgtggagaagtctctggccgacctcttcagaagatatgagaagatgaaggaggtcctagaaggcttccgcaagaatgaagaggtgttgaagagatgtgcgcaggagtacctgtcccgggtgaagaaggaggagcagaggtaccaggccctgaaggtgcacgcggaggagaaactggacagggccaatgctgagattgctcaggttcgaggcaaggcccagcaggagcaagccgcccaccaggccagcctgcggaaggagcagctgcgagtggacgccctggaaaggacgctggagcagaagaataaagaaatagaagaactcaccaagatttgtgacgaactgattgccaaaatggggaaaagctaactctgaaccgaatgttttggacttaactgttgcgtgcaatatgaccgtcggcacactgctgttcctccagttccatggacaggttctgttttcactttttcgtatgcactactgtatttcctttctaaataaaattgatttgattgtatgcagtactaaggagactatcagaatttcttgctattggtttgcattttcctagtataattcatagcaagttgacctcagagttcctgtatcagggagattgtctgattctctaataaaagacacattgctgaccttggccttgccctttgtacacaagttcccagggtgagcagcttttggatttaatatgaacatgtacagcgtgcatagggactcttgccttaaggagtgtaaacttgatctgcatttgctgatttgtttttaaaaaaacaagaaatgcatgtttcaaataaaattctctattgtaaataaaattttttctttggatcttggcaaaaaaaaaaaaaaa

SEQ ID NO: 119104 - DNA, 1000 bp, Homo Sapiens; identical to SEQ ID NO: 119103

SEQ ID NO: 119105 - DNA, 1000 bp, Homo Sapiens
cattaatatgtacacaaatgtgcacattggactataatgtaaaatgtgtcttttattgtgggtcatagtcactgaagtttgaaaaacattgactcagaacatctcatgacctagtcaggttgttggttatattctaaatccagcatgttttatttaattttgatttcaggacataaagatctggtccctgatgaagaaaaaaatctagctatgtcagatgcagcagagtttccaaatcagattcctcaaaccacctttgaaaagccacagagtcttgagttcctaaatgactttgaaggcaaagccgtggaatcctaacagatcaaattggatgaaatatataattacttgatagcacaataaacatagaaagaatttatatgaatgtctatatttaaggaagaataatttgaaagatttatgtcagtcttagataataccatgcaaggcaattaaatcactgtgacagcacagaggtcagagttccgtcattttgcattacttgtatccactcatgtttgtttcataataattgcattttcttagaactattttggtgtcaaatgctattttttatattacattaaaatagagttgtcagtcattgcatctgcccatacatcttttgagagaaactgcttccttccatcagccatacctaagacctgcacctaagtggccatgtttgctcaaatgtcctcatcaccttggcctcaactaattaggccaaacagatgtacttcactcaaggagaaccaatcatattttctctctgtctctcaaaaaaaaattgaactgagaccagtgagtaagttggtgtctgggtcaggttaatggtggtgaactatgtgcctgtgagctcttcagagctggttgggttcaccaccttcataagacctgcctctgtaccatttttccttgagtgtgctttgtataaaggtctgtacaataaatcacacttttttaaagcttaaaaaaaaaaaaaaaaaaaaaaaaaaaa

SEQ ID NO: 119106 - DNA, 1000 bp, Homo Sapiens
ctgatggtctccctcctctgcctcctgcactttagcatcgtgtccgtggccgcgcacttggctctgttgctgctctgcggcaccatctctctcagggtttaccgcaaagtgctgcaggccgtgcaccggggggatggagccaaccctttccaggcctacctggatgtggacctcaccctgactcgggagcagacggaacgtttgtcccaccagatcacctcccgcgtggtctcggcggccacgcagctgcggcacttcttcctggtagaagacctcgtggattccctcaagctggccctcctcttctacatcttgaccttcgtgggtgccatcttcaatggtttgactcttctcattctgggagtgattggtctattcaccatccccctgctgtaccggcagcaccaggctcagatcgaccaatatgtggggttggtgaccaatcagttgagccacatcaaagctaagatccgagctaaaatcccagggaccggagccctggcctctgcagcagccgcagtctccggatccaaagccaaagccgaatgagaacggtgtctctgcccgcaggacgcctgcccccagcccccgcagccctctggccccctccatctcttgtccgttcccacccacccccctcctcggcccgagccttttcccggtgggtgtcaggatcactcccactagggactctgcgctaattacctgagcgaccaggactacatttcccaagaggctctgctccaggagtccaggaaagacgaggcaccttggccgcggggcctgctgggacttgtagttgcctagacagggcaccaccctgcacttccggacccgccgctggaggcgccgtgaggcgttggtgtctcctggatgctactagccccaacgccggggctttgcatggggcccaggggaggcctgagcttggatttacactgtaataaagactcctgtggaaaaccaaaaaaaaaaaaaaaaaaaaaaaaaaaaaaaaaaa

SEQ ID NO: 119107 - DNA, 1000 bp, Homo Sapiens
tctcttataagttattgtgattcattttagttactgtgttttattttgaaaatatttaaatattgcacttctataaatagtatgataaatgcacagacaattgcagtaaattcttttttaagctaggatatttgaaatgacaacctttggttaagtgtgtcaaggttgcaacagaattttcacaatttttttgttgtttgcaaattgttactaatattgaagaggtaagggaggcaatgcaaatgatttttaatctttttttattatcttttcagcagtttatattttttgtgactttatgcaaccatatttttactttgtcttgacaactgaaagatgtataaggttttttgccagaaatgtactgtatacatagttttaagtataacagattttactgatatgtaaaaattttgccattaaaataaatgatttctcactgagaggaacttttctaccaggttggggcatatgggagcttaatatatcatatctaatttaaaataatttcactgaaataaactccattgcttttacctaatttttttcttgagatgcttttgtagtttttcagagttttagatgattttatacaaaatcctctgcctagcactgctctttttgatgttgtagtgacaccatttacattgaattaatgcttggtagcctggggctagatgtggaactccatggatctgtgttctgactggcacctttggaatgaaagaaaagtgtgtgctgtccaaattttttccccttaattctttccctcatcttctcacccataatagaaattttatttccattgtgagttctgacaagaatgaaattccacatacaacataactgtaaattgttggtaggtagaagttaatatttgtggttcatgtatattttgaccagagtatatttaagtatataatttcagcttccttgatttagaaatatgatataataaagaaaaactccatttatcatctgttaaaaaaaaaaaaaaaaa

SEQ ID NO: 119108 - DNA, 1000 bp, Homo Sapiens; identical to SEQ ID NO: 117184

SEQ ID NO: 119109 - DNA, 980 bp, Homo Sapiens
ggctgtgcgctctggggcacctcatgcagacgggagtagggaggctgttttttgcgcgtgcatatggcggtggcgggtggggggaagggggagatcctgctgcactggccgcccaagttggggggcgagctcggtggtgacgcgcggccctcacgtgacccagagctgcagagcgacgcagccttcggtgcagtcgtcactcgcgtctggctaccagctccccgctgccctgagctcggcgggctggcattcggcccggggaaaagcggagcaggtctgcgaggctaagtgtctccgcggcgcacctcgcggcgagaatccggaggagaaggagactgcaaggataggcccagaaaaacaaccagaaaaaaaaaatctcatcatggcaaatattcaccaggaaaacgaagagatggagcagcctatgcagaatggagaggaagaccgccctttgggaggaggtgaaggccaccagcctgcaggaaatcgacggggacaggctcgccgacttgcccctaattttcgatgggccatacccaataggcagatcaatgatgggatgggtggagatggagatgatatggaaatattcatggaggagatgagagaaatcagaagaaaacttagggagctgcagttgaggaattgtctgcgtatccttatgggggagctctctaatcaccatgaccatcatgatgaattttgccttatgccttgactcctgccatttatcatgagattaatactgtgattcccgctgttttctttttccttgcattttcctaatatgcctttactgatccgtttgctgtgaaccctatgttatttccatgtgtcaagtgggtcttgtgttgccagcttctatttgaagattgcctttgcactcagtgtaagtttctgtcagcagtagtttcacccatttgcatggaaaaatttaaagctaataaagcaatttaaaaagcaaaaaaaaaaaaaaaaaa

SEQ ID NO: 119110 - DNA, 654 bp, Homo Sapiens
atgagctggacctgtccgcgttgccagcaacctgttttcttcgctgagaaggtgagctccctgggcaagaactggcaccgcttctgcctgaaatgtgagcgctgccacagcatcctgtcccctggcgggcatgcagagcacaatgggaggccatactgccacaagccatgctatggggctctctttggacccaggggggtgaacattggtggtgtaggctcctacttgtacaatccccccactcccagccctggctgcaccactcctctcagccccagcagcttcagccctcccaggccaaggactggcctcccccaaggcaagaaaagccctccccatatgaagacattcactggggagacctcgctgtgccctggctgtggggagcccgtctattttgctgagaaagtgatgtcattaagcagaaattggcaccgaccgcgtctgaggtgccagcgttgccacaagaccctgactgctgggagtcatgctgagcatgatggagtcccctactgccacgtcccctgctacggctacctgtttggccccaaaggtgggcagccccatcccagacactgggatggcatgtacatgcctgaagtatggcatgtacatggtctgtgggtatgtgtggacaacttcccctgtggttaa

SEQ ID NO: 119111 - DNA, 1000 bp, Homo Sapiens
gctagtcacaaagaatagtctacaaatatgctttgctaggttcagaagattgagtttatcctgatttttgaaaaattaaccaggtatctttatcactgtgtatttttccaagcacagtataaaattttaacaacgcacaaaaaaatacagaactgcaggggattttatcttggatcattatccatttaatcatctaattagacatgaactcagttagctgaatcatttacattttgactccatagcttagggcagacagaagcctgtatggcttctgcccagaactctgtcccctgctacatgtctaagtttacttgtatttatttcagagaagaactctaagatgttgctttgctactttaagtggtattgcgtgccaagcctctattatacaaaccatgcagactcgcctctagagattctgattcggttgatctggggtgtgtggctgaggcatcagtactttttaaagcttccaggtgttctaatgttgagacccactgatgttccacaatctggaagaaatcatgtacaggaataatatgctatgcacagggactatgctccttggctcaccccttctcccttataaacaatgagcagttcttgatgaacctctttaaatttaaatctcctgactcacattttaccaattgtacatgccacattctcagcttacgaactaccatgttttgttattcttaatatcaactgtttggtaagagtacagttgtttttatacactctaagaaatgtgtttataatctactgtaatttccactaaatggaacccaaatattaatgttatggtaccatatactgatgtaaaaatcatgctggcatccatgaacacaccggtaaataaaacatagtccaagtggaagaattcattaataaggaacttttaattatgtcacaaatgaatagttggtttccaatgcacaaatatcatgtaaactaatctaaagatggtttgcttaataaatatttgaatgtgacc

SEQ ID NO: 119112 - DNA, 1000 bp, Homo Sapiens; identical to SEQ ID NO: 115619

SEQ ID NO: 119113 - DNA, 1000 bp, Homo Sapiens
tacctgctttacaagcaaatgaagcaactgaaaaaccccttggaaatagtcagcatacctgataatcatggacatattgatccctctctgagactcatctgggatttggctttccttggaagctcttacgtgatgtgggaaatgacaacacaggtgtcacactactacttggcacagctcactagtgtgaggcagtggaaaactaatgatgatacaattgattttgattatactgttctacttcatgaattatcaacacaggaaataattccctgtcgcattcacttggtctggtaccctggcaaacctcttaaagtgaagtaccactgtcaagagctacagacaccagaagaagcctccggaactgaagaaggatcagctgtagtaccaacagagcttagtaatttctaaaaagaaaaaatgatctttttccgacttctaaacaagtgactatactagcataaatcattcttctagtaaaacagctaaggtatagacattctaataatttgggaaaacctatgattacaagtaaaaactcagaaatgcaaagatgttggttttttgtttctcagtctgctttagcttttaactctggaagcgcatgcacactgaactctgctcagtgctaaacagtcaccagcaggttcctcagggtttcagccctaaaatgtaaaacctggataatcagtgtatgttgcaccagaatcagcattttttttttaactgcaaaaaatgatggtctcatctctgaatttatatttctcattcttttgaacatactatagctaatatattttatgttgctaaattgcttctatctagcatgttaaacaaagataatatactttcgatgaaagtaaattataggaaaaaaattaactgttttaaaaagaacttgattatgttttatgatttcaggcaagtattcatttttaacttgctacctacttttaaataaatgtttacatttctaaataaaaaaaaaaaaaaaaaaaaa

SEQ ID NO: 119114 - DNA, 1000 bp, Homo Sapiens
acaccagggagaagaacgaggccttgctgggggagctcttctctagcccccacctgcagatgctcctgaatccagagtgcgacccgtggcccctggacatgcagcccctcctcaacaagcagagtgatgactggcagtgggccagtgcctctgccaagtccgaggaggaggagaagctggcggagcttgccaggcagctgcaggagagtgctgccaagttgcacgcgcttagaacggagtactttgcacagcatgagcaaggggctgctgcgggcgcagccgacatcagcaccctagaccagaagctgcgtctggtcacttccgacttccaccagctaatcttggcttttctccaagtctacgacgacgagctgggcgagtgctgccagcgcccaggccctgacctccacccgtgcggccccatcatccaggccacgcaccagaatctgacttcctacagccaaatccccagaggccaacctaaaaagccggctttagttacgatgactacagttcccacgtgcgcaactctgcccttggctcaaggattccgtgatgttcattttggttttctaagcgagaggctccgagccttccaacctctgactggctggtcctgtgagacccctcgatcagggatgctgctgcaagtggtcatggcagttgctgacacctctgcgaaggccgtggagaccgtgaagaagcagcaaggcgagcagatctgctggggtggcagcagctccgtcatgagtctagctaccaagatgaatgaactaatggagaaatagaaagtcttcagtgatggcctacgccaaagcacaggatggggcgggcaggaagccctctcccaagatcgagttggccgaggatggatgattgtggcagcagaagccgttgcagccccacgttgtgctctaggcagggacctttggcccctttggggagggagagacagacgggcggtttgacttggacacaaagaaagccttggtttctaagc

SEQ ID NO: 119115 - DNA, 1000 bp, Homo Sapiens
ggaaagagaccccaaggtgctgacattcccagaatacatcaccagcttgtcagactccggcaccaagcacatggcggctggagtccgcatggagtgccacagcaagggacgatgcccctcgtcctgccccctgtgtcatgtgacatccagccctgacacccctgctgagccggttctgctggaggtgaccaaagcagcccccatctatgaactagtgaccaacaaccagacccagaggctcttgcaggaggctaccatgagctctctctggtgctcagggactggagatgtcatcgaggactggtgtcgatgtgactccactgcttttggagctgatggactccccacctgtgcgcctctcccacagcctgtgctgagactctccacggttcacgagcccagcagcactcttgtggtcctggagtgggaacactcagagccaccaatcggggtgcagattgtagattacctcctccgtcaagagaaagtcactgacaggatggaccactccaaagtggagacagaaacagtgctgagctttgtggacgacatcatctctggagcaaagtctccttgtgcaatgccatctcaggtgccggacaagcagctcaccaccatctctctgatcatacgatgcctggaacctgacaccatttacatgttcacgctgtggggagtggacaacacaggacggcgctccaggccaagcgacgtgatcgtgaagaccccatgccccgtggtggatgatgtcaaggctcaagaaatagcagacaagatctacaatctcttcaatggctacactagtgggaaggagcagcagaccgcctacaacaccctcctggatctgggttcccccaccttacaccgggtcctctaccactataaccagcactatgagagttttggggaattcacctggcgatgtgaggatgagttaggtcccaggtaatcaataaactaagtcaacccttaaaaaaaaaaaaaaaaaaaaaaaaaaaaa

SEQ ID NO: 119116 - DNA, 1000 bp, Homo Sapiens
cagcagatgtaccagagcctggccgagctgggtaccctgccccccgagacgaaggtgttctgcggccacgagcacacgcttagcaacctggagtttgcccagaaagtggagccctgcaacgaccacgtgagagccaagctgtcctgggctaaggcacggcccctttcccgccgcggcaagagggtggggggggagggaacaggcttcggggtggggggggctctcagacaaggcctaatggtgaccggggcctgtggtcactccagaagagggatgaggatgacgtgcccactgtgccgtcgactctgggcgaggagcgcctctacaaccccttcctgcgggtggcgtgagtatggctgttgtcccggggcctccaccgttacgtggacccttaggaaggcatctggggactgcgtgttgggctgagtgagcatctctggcttgggggaggctgctcattaagtgcctgcctgcccgcccacccctcggcgccatgctcccgcgtgggcagcgggccctgcgcctcactgcacccctccctgcagagaggagccggtgcgcaagttcacgggcaaggcggtccccgccgacgtcctggaggcgctatgcaaggagcgggcgcgcttcgaacaggcgggcgagccgcggcagccacaggcgcgggccctccttgcgctgcagtgggggctcctgagtgcagccccacacgactgagccacccagaccctcacagggctggggcctgcgtccctcctcgtgacctcggccagctggacccacatgagggccacctctggaaccttcttcgaggccctggccagccatctgcccagcctcggagggtgggcaacctggtgcttcccgggtggacacacaggaccactcagtggggcctgtgtgggcgccgagacctgggtgtctgggaagtggggcacacggggcctccgaactatgaataaagctttgaaaggccaaaaaaaaaaaaaaaaaaaaaaaaaaa

SEQ ID NO: 119117 - DNA, 1000 bp, Homo Sapiens
cacgggctgccgctccagatgctgctgctgccgccgcggccaccccaccctcggtcctcctctccggaggccatggacccaccgccccccaaggctccccctttccccaaggcggaaggcccctcctccactccttcctcggcggcggggccccgacccccgcggctgggccgccacctcctcatcgacgccaatggggtcccctacacatacacggtgcagctggaggaggagccccggggcccgccccagcgcgaggcgcccccaggagagcccggccctcgcaagggctacagctgcccggagtgcgcccgtgtctttgccagccctctgcggctgcagagccaccgcgtgtcgcactcggacctcaagcccttcacgtgcggcgcctgcggcaaggccttcaagcgctccagccacctgtcgcggcatcgcgccacgcaccgcgcccgcgccgggccgccgcacacctgcccgctctgcccacgccgcttccaggacgccgcggagctggcgcagcacgtgcgcctccactaagctcgagacccggcctgtgctgccctgcccgtctcagggccaccaagtctgacccacacagcgtcactcactcccacacacaccccctggctctgctgaggttactgccttaccctgggcctcagtttccccaccttccaaagggaggagcatcattccttccttaccccctttctagctgtgtgatgtagaccaaagtcgttgcccctccctgggcctgggaaccagtcggaactgggttccagtccagctgtgctgtgtgagcctgtgcaagtgacatgacctctctaaaccttggttttctgctctctggagcggtgaaccggtggttgtctgcggggaagagatgataaagagcacgggcacggtctggttcatttctgtatctaccccccttccgcccacgcccccgaccctttgctcaataaacattccgcactccaaaaaaaaaaaaaaaaaaaaa

SEQ ID NO: 119118 - DNA, 1000 bp, Homo Sapiens
gactgcctgaactttgctactagcctgaacgacagtgccttggaaaggcaggctccatgcggcagcaacaggattgtcttcggtaccttaaatatgctccctgtgcttccccagggaggatctctgggagcagagggcggctgtagacatcacagctgaagaggtgacctcaggccctgggagcctcagctccctctgccctgtaccctaggcacgtggctccagcaagagccccaggcaggacaaagggagcaggcagcagctgcagaaacagccctagacaggtgctggcctcaaccctggcaggggagggggagcccagagtgatgtttctcctaaggccaaaccccaggggtgggtcatttgagaggagttccagctgttctggccacactgggctggtggggaaggagcggcggcctctttccttggagggtccctgattcctgaggatcctccccgagccaggcacgggggaccacagggctgccgtgagcacccaccctggttctccaggcccctctgtccagaggcagggcctgaacctcgggctcctgcctggaccagtgacagcattggggagagaagcactgggggtcttcagaccagccagcaaggggccgtgccagtgcccagagagcaggtcagacaacaggcaaccctgaggcagctggctccctctctctgccctgcagggcttgccgcagggcgtgaggctccccagccacagccccctcttacttgccttaaaactggagagaggaatctagtatttgcacttagcaaaatatttaaaaactgaaaaaaatgtgcatgatctgtcactttgtataaaaacaagaaacgattagttcattaaactttttctttaccttctggtagtaaaaatagataaaataattccgtttcaactactgtgtgtaaaaagcctgtatcatatgtaactgggacttttgtaaataaatgtttgtgcgctctgctcaaaaaaaaaaaaaaaaaa

SEQ ID NO: 119119 - DNA, 451 bp, Homo Sapiens
gcattcttcaggtcatctgaaccttctgagaaaacatggtcaacgtcttgaaaggagtgcttatagaatgtgatcctgccatgaagcagtttctgctgtacttggatgagtccaatgccctggggaagaagttcatcattcaagacattgatgacactcacgtctttgtaatagcagaattggttaatgtcctccaggagcgagtgggtgaattaatggaccaaaatgctttttcccttacccagaaatgaaaatactcaatatggaccatttaggaattataagcagcaactgtgaaagacttgccactcaatatcttaggtgactgattagacatagagggttgttttaggagcatgccacgggaaagactgagggatcatgatcatttgttcagaaaaaaagcccctgaactgattttgttaccatagaatttaaaaaaaaaaaaaaa

SEQ ID NO: 119120 - DNA, 376 bp, Homo Sapiens
tctaggactcagaaatatagatgttagtaagagcaaacagacataacagataacacatacaaagtgcctaccacatgctaaccactgctgcaggcactttctatagaagaactaatttaatcatcaccataaccctatggggtagatgatatttttacaacctccattttacagatgaagaaactgaagcatagacctgcttatgtgagaagaaacgcagggagacagttcagtcactgcaatcttcatgcccatcagtttcttgtgagaagaaaacaagtggatatacactgttccaagcagcatgtgttgaaaagatttgtcttttccccatttaatggtcttggtacctttctcaaaaattgaccatatatga

SEQ ID NO: 119121 - DNA, 1000 bp, Homo Sapiens
aaggaaaaataaaacatacttcacattagaacacagaatcatttacatcctaatactgaccacagttcactaaagctcagtagcattaacagatatagtttggaattgcagtttcctcacttcagggtgacaagatatgtataacagtgacagaaatctccaaagctgctgtatatgatatagctttgttaaatatgaaggtcctttaaatacaattgatgtttagtactatatatgtacttttcacattctttggatttctggaaggttatgacactttactgtttacagctaatgcatagttacttgcatgccatggttgtacagtagcagactatgaccctattgtgatattaagtgtttatttcataatgccatttatacatagctgaatttgatgaggattgaatgtcatatataagaggaatgatcatacaatatgtagttgcatcttatataagatttctaggttgcatctaaccatgactatgtcattattttgataattaggcatttatgaattatagtatatattcctcatgttggcatgataattttgctattttccatgcattaaaaatcagccttccatctgtaaagggcggtaatggtgcccacctttcgaggcattgcgaggctagatggtaacacacagaaagctcccacagtgggaccttgatgcagcgtagctggtattaacaaccgtggggacaccaggccactctttttctaccagttgttttatgaatccacctattaattttcatccatcttttggtcgtaggtaaaggtcaatcaggtttttcaaaaagactccctgaataacttaagttcctgtattgccagtgttcaaaagattgtgtaaaagttcaagcccgttttagaaagccaacattttatgttataatatgctgttaatcaggactttattaaataaaaacattggctcttccaaaaaaaaaaaaaaaaaaaaaaaaaaaaaaaaaaaaaaaaaaaaaaa

SEQ ID NO: 119122 - DNA, 1000 bp, Homo Sapiens
tgtgatggttgctgactaatccgggatttcatgagtcagaggcaccacccctcaccccagctgcctgctgcttctgacggatcttggtgctcaggctgcctggctctccgagtgaggacgcagcctccatatttggtgcactcaggcatggctgggacaagccagctgccccagggttcttcccctggtgattctcgcctgctttctcatctcaggggaggcagtggcacctccctctccctgctgacatgaagagagctatgatatgccactgctgccaactcatcctctgcccccacctcgaaacccacagtccccagtggagggccactactcatccccattggtttcccaggggaggggtgttgtctggaagggcaggttcagatgcagccttccagatttagaggcactgggaggacagtggctgagtggaggcgcccagacctgggcaggcagcaggctcaggcccacaccttgtgatttttgaaaccaaagcccagaagatgatgtttacttctctctccctggctctgcccttcttactgcaaaccatgctgtgccttagggcccttctcatagctgttcctcatggccatgactggaacagggatgcaacctctttctacacaagcacagttagttgggtgaagtctttttttttgtttgttttagacggagtttcactcttgttgcccaggctggagtgaagtggcgtgaccttggctcactgcaacctccaggccagcctcagcctccctagtagctgggactacaggcacccactaccacgcctggctaattctttgtatttttagtagagatggggtttgaccgtgttagccaggatggtctcgatctcctgacctcgtgatccacccacctcggcctcccaaagtgctgggattataggtgtgagccaccgcgccgggccggttgctggcatcttaatgttctgtaggtggaatatttccaataaacacaaggtgccgtaattgac

SEQ ID NO: 119123 - DNA, 1000 bp, Homo Sapiens
agggctcctcacggacacacaggccaggaggcaagcatgggcgtcttgcgggcggtagcgccgacactgtgcgctctcctgcagacagcctctccacgtcaagcttccagtctgtcaagtccatctctaattcaggcaaggccaggccccagcccggctccttcaacaagcaagattcaaaagctgacgtcccccagaaggcggacctggaagaggagcccctacttcacaacagcaagctggacaaggttcctggggtacaagggcaggccagaaaggagaaagcagaggcctctaacgcaggagctgcctgtatggggaacagccagcaccagggcaggcagatgggggcggcggcacaccccccaatgatcctgccccttcccctgcgaaagcccaccacacttaggcagtgcgaagtgctcatccgcgagctgtggaataccaacctcctgcagacccaagagctgcagcacctcaagtccctcctggaagggagccagaggccccaggcagtcccggaggaagctagctttcccagggaccaagaagccacgcatttccccaaggtctccaccaagagcctctccaagaaatgcctgcttctgagcccacctgtggcggagcgtgccatcctgcccgcactgaagcagaccccgaagaacaactttgccgagaggcagaagaggctgcaggcaatgcagaaacggcgcctgcatcgctcggtgctttgagctacccgcatctggtcagtgccaggcccaccaacctgcagctggagattggctctctatagcatttcctgacacttccgctacttttaggcctggctaaattccaagatagataacactcaagatagataaagtacttgatctccaaactgacaaactgtttattttctagctgttattttgctatttggcatttacataaaagcacacgatgaagcaggtatcgccttacctgttgaaactgaaaataaagcttgtttatttcc

SEQ ID NO: 119124 - DNA, 1000 bp, Homo Sapiens
atgtcaacaattggatgtactcactgagtcaccccttactctgccactaatttatttccttgttgcttaaatgatgagagacatataatctccaccctcacggagttgtcatcaccctggagaggaagaagacagccaaaagagagaagtattgtcttgtagacttactagattcacatagtatcatccttctccagtgtgtaaggtgttgtctaaataggtccagttaaagaactacagggtagccatttttaaaaaaaaattttggccacgttttcaaattcacattccccctcggattagagatgctcaacctgcatcaacaaatctaaagcctgcatctggctaccctggggcgagtcctgtttacagtgcctattcctggagctcgcctctttttgccttttgtttgattatgtgatgtattacttttcccagcaggccagtgctagcatactggaagagggatttaataagctggcacccttgatgctatgctcctaatccaaccttatttgcctcattggccatttccattatggtggcagccctccattccagccacagcagcccctcagcgtcccccagtcacactgtccccattgctgctcatctgtgcctttgtccatctacaatgcccttatttcactctgcctgtgggagtcctgtgaatctctccaaagccaactcagttcatctttctgcttgaaaccttccctgaataggccaggtgcggtggctcacgcctgtaatcccagcactttgggaggccaaggcaggcggatcacaaggtcaggagatcgagaccatcctggctaacacagaccattctctactaaaaatgcaaaaaattagctgggtgtggtggcgggcgtgtgtcgtcccagctacttgtgaggctgaagcaggaaaatggcatgaacctgggaggtggagcatgcagccagccaagatcgggccgctgcactccagcctgggggacagagcgagactctgcctc

SEQ ID NO: 119125 - DNA, 1000 bp, Homo Sapiens
tggccttagactctccctgtccccagacccaggacgcatgtgtttcctttttcttcatttctattaaagatgggtctcattctgttggccaggcatgagagcggtgacaggatcagccctcactgaagcttcaatctcctgggttcaagggatcctcccacctcagcctccaaagttgctaggaccatagccaggtgccaccgcaccgggcaaatttttgtgttcctagtagagatgggctttcaccatgttgcccgagctggtcttgaattccagggctcaagcgatccagccgtattggcctcccaaggtgctgggattacagccatgagccaccatgaccaacgtgtttcttaatttaaaaaaaaaaaaatagaccaggtgctctggctcatgcctgtaatcccagcactttgggaggccaaggtgggcagatcacctgagatcaagtatttgagaacagcctggctaacatggcgaatcctcgttttgaccaaaatatagaaattagcctggtgtggtggcgagtgcctgtaatcccagctattcaggagggtgaggcagaagaatggcttgaattcgggaggcggaggttgcagtgagctgagatcctgcaactgcactctggctgggcaagagcgagactccatctctaaaataaaattaaagtaatataaaaaactgcttctcatgaaagctttggtataatcttacgaggtaacatcattgttttgcaactacggtatgtgttcaaaatgttcttctttgaccccacatttcattagatatatttttaagccattttaaaattgtttttctctgaaatttattgtgtttagtttacattgaggactgcatgctttctagtctgtatcatacattggaaacattttctagtacctgataaatgattttaggttgtttcgatgtgtacttgataaagatatcaaggaactttttctttatgctaacattaaaatttagttgaagtagcctatta

SEQ ID NO: 119126 - DNA, 1000 bp, Homo Sapiens
cgccacacccttctgcgcgccccagccccagagctgctcccggccaacgtggctgggcgggagacagacgctgagtcctggtgccagaagctgaaccagcgcaaggagaacctctccaggcgggaacgggagcaccacgcggaggccgcgcagttccaggaagatgtcaacgccgatcccgaggtgcagcgctgctccagctggcgggagtacaaggagctgctgcagcggcggcaggtgcagaggagccagcgccgggcccctcacctgtggggccagcccgtcaccccgctgctgagtcctggccaggccagctccccagccgtggtccttcagcatatctctgtgctgcagacaacacaccttcctgatggaggtgtccggctgttggagaagtctgggggcttggaaatcatctttgatgtttaccaggccgacgctgtggccacattccgaaagaataaccctggcaaaccctatgcccggatgtgcattagtggatttgatgagcctgtcccagacctctgcagcctcaagcggttgtcttaccagagtggggatgtccctctgatctttgccctggtggatcatggtgacatctccttctacagcttcagggacttcacgttgccccaggatgtggggcactgacctcacagctctgcagaggatggagcttgctccgggggaccgggactgtctgttctcagggaccatctcggctgcctcctgtacccagactctaacctgtagcttcagaggccagtctgggccttggccctgggtgtctgatactcacagagtgaaactgtgaccctctcccttccctgctgccttgcagtgacccctctggaactcaggactcgattttaaggacccaggaggtggggcagaagagaggactgtgtgcctttaacgagagggtgcctgcttcgtgctataaagccaaagccattaaaaatagatttcttttaaaaaaaaaaaaaaaaaaaaaaaaaaa

SEQ ID NO: 119127 - DNA, 1000 bp, Homo Sapiens
accaaccccacagccatctcccctgaggagtacttcgaccccaacttcagcctggagtcacggaacattggccgccccatcgagatgtccagcaaagtacagaggttcaaggcaacactgtggctgagtgaagagcacccgctctccctgggtgaccaggtgacccccatcatcgacctaatggccatcagcaacgctcactttgccaagctgcgcgacttcatcactctgcgccttccacctggcttccccgtcaaaattgagattccccttttccacgtgctcaatgcccgcatcaccttcagcaacctgtgtggctgtgatgagcccctgagctccgtgtgggtgccggcccccagctctgctgtcgccgcatcagggaaccctttcccgtgcgaggtggaccccaccgtgtttgaagtgcccaacgggtacagcgtgctgggcatggagcgcaacgagcccctccgggacgaggacgatgacctcctgcagttcgccatccagcagagcctgcttgaagcgggcactgaggcggagcaggtgaccgtctgggaagccctgaccaacacccggcccggtgcccgccctcctccccaggccacggtttatgaggaacagcttcagctggagcgggccctccaggaaagcctgcagctgtccacagagcccaggggcccaggatcccctcccaggacacccccagcccccggtccacccagctttgaagagcagctgcgcctggccctggagttgtcttcacgggagcaggaggagcgggagcggcgcgggcagcaggaggaggaggacttacagcggatcctgcagctgtcactcactgagcactgagccatagccccgggagggctggccaggccactccctgcccacttttgtaatttatttatttataaactctctgctgctgagcttggggcctggagccccaggaatgagcaggcaggggagactgagatggaaataaagagactgtcgcagc

SEQ ID NO: 119128 - DNA, 1000 bp, Homo Sapiens
cttacagaaatcaaaaggttcctgcttttcccaccttgtttggaattagaaaaaaacttcccctgcactattagtgttttataggcctcttctctccaagacagaaaggaggagagggtaacggggcttattttcttctcccaggactcttgaagaaggattcaggatgtggctgtgccgctggggataaacggtgtaacactggggcaggtcagtttccttgttggtacgatgggactcttacacaggccccttcctttccagcaccagatactgctacaccatctcatcggcatggacctatatgtggcagcaagtccatctcatcgcttttggtgaaagtcagtccagtttgtaaagattctcattgtcactgtagacgaggaactgggacaccaaaaggagaaactctggccacacttgcaccctgttcccaatcctggtccagtgtcacccacagatggtaaggagctctagagacctcaccagcccctgggattggtcacctcactcttctatggacagagattcctgctgggatcctttgagggcaagcagacccttcttccagctcggactgtgaactccactgcagccgtaaggactgtctgtgacagtgagcccgagatgactgggctctgtgctccctcccggccctccaatccttggcctgccacagagaactgagctcttttattagcaccatgaatgtgactgatacagctagccattcccttgtgcgaatgactcagtttattaatgctctgctaaagatggcttctttgcttgccagcagccttaaacagtatttcattaaaactggcttaattattttgagaagacggcccaattaaaagctatacactccctctatgtgagtgtttatacatagagctgtatatataatacatatttgtaagtgtgtgtatatatatatgtgtatgtatgtgtctataaatatataggcttagcaatttcattacatgggataaattgttgg

SEQ ID NO: 119129 - DNA, 1000 bp, Homo Sapiens
cccctgagtccgcttctcagtgtttctgactgtacttgttaaaagtaagacctgaaagctccaaaggtcagtgtaaagatggagtgttcatgagaaagaaaacatggtaaccttgtgagtgcctgtaagaaccacactgtaaagaactcatcattaatgcttgaaaatgttattaagaaggagacttaccatgcagacattccctatttaagaaccatttggttacagtgggttaagaatcacagatttttttttttaatctcacctgagttagcctagaatgcgctggttgcaaagtggtgtcagctgtggggatcttgggccctcgttcctcacctgcatcctgccctgcactcaggtgctccccctgaagtcagggtcacatcaggtagacctgttactatatgcacctttggcctggaatgctctgaagttggactggaaatgttactaggttggcctgttacaaaaaggaccccatcctgcttaaacacattgatctcccttgccctgcatttgagtctttctagcccacggtctgaaacttgaggcagctttccagatttggaatgtaaaaggctcagtgggcactctgttcatccctgggtggggagggcccagccaacagaagtgcatgtccactgtgcgggccagtgtgtgtttacacaaatttcatctcagctttgaaaatgctgctattagtttccactgttggtgaactggattttttcctcctattgaaatgatactttcatacttataaagctgtcgtcaatatttatttcaaggtgctagatttaattttgttattaaattgaaatgcttatcttgtgttcaagcacagcactgattttaacaacctgcatttaatgtgaagtaaccgaagtaggatactgtaactgtgtaaggattttgtttgtaatcttgtaacattgaaccattgaaatgttcagttctttgcttttgagcaaaacgtcaattaaaactaaagtaaaatcct

SEQ ID NO: 119130 - DNA, 1000 bp, Homo Sapiens
aattcttaccatactttcctgtattcttactgagaaataaaaatgggacattgagaagcaaaattaatcccgattaggctcgctttgggacaagcaaccactttgcatgattacccatcgttaggtgtgaaacggagccaatgatcgctcattgtcgaggagaaaagacctggagaccacggcttatccagtctcgctcctgacctgcatctgaacacctgaaggaagaaactttaacaagaaaaagacttcaagtgacagaggagacaaaagtctcaaaggtgcagaattcaagaactcatggtgtctcaggatgggtgtgaaagtaacaaatatgagatcccctgacaactaaacccaggcatgtccaggaatcccgggatgcggtgaaagttttcacagtggagctcacaggaatccccagatgccgtgaaagttttctcagcggagctcacaccagcattgtctggaatattaaatgttgttatgctttgagattggcacttatgccattcaaatttttttattaagaagtacaatgaaatttaacttattccatttttgacaccaatgtaatgaccaaattaaactagattttcaaaaataatcagaggccctgccccacaaactcctcctgggcacaggaagatgtggggccagtcagtagtgactcctcttgggtgctgatccaccatgctgaattcagaccggcgccagtcccctgagcgcctcccaattcctatgtgatttcctgtccctagtatatgaacatgtcagccttgatgtgatcacacaaattatgggccatgacgcatctaccactcttgcctgttctgaagggctgcctttagttgtcttgcaaagagcacttacacctcttccctacggcacagaagccctgggtctggggtgacaggggcagagacctgcctgtcctccagccacccaagaccatgcttctgtctgtaggttcccccaataaaacaccctttactgacag

SEQ ID NO: 119131 - DNA, 1000 bp, Homo Sapiens
gaattttggaggtagaagatatatttgagagtaaaaaggggttctgttaacccatttatgcctgaggttgcaattttttgaagttttgcaatcagatcttggcaatgacctggagcggtaggatataaataattcccacatgcttagcattccaataatggaacactaggcataaatgggctaaaaattactttggagcagccgtcttaaatggaccatttagggcaaactggaacatatggacaccctaacattctggccccatcactcactctacagccatcttcttttaaaccactgcacctctctgagtctcagtttcttcatctgttgaatggagataatcatatcaactcccccaagcaggcacttttaaaatactagtaaatgcatactgattacctgacagtactgagcaccactgcatgctctgtaaaggttaaccattgctattattgaaaccaaactgctcactgaggtctgtgggcctatgtgatttgacccctagctgcttttccaaattcatttcttcccccttcccccttctcccttctattttattacactggcaccacaaaggccgcccagcagtcatatatcaagcacattcctgcctcagggcctttgtacctgttgttccctccacctggaatgttttcccctaaccccttgctcctttacttcattcaggtttttgcccaactgccacttcctcagagataccttccgagatatatgatgagctgatataaaataatgcaactattgttctacctccattgctttattcttttatgctactttaattggattcatagcagttggtattttattttagaattgcctgtgtatctatctgtctcttctgatagaatgtaagctccccaagggccaagattctgtatgaaccattcaccaacgtatccccagtgcccagaatggtgcctggcatatgtgcttaacaaaataaactgactggattatttatccatattcactt

SEQ ID NO: 119132 - DNA, 1000 bp, Homo Sapiens
agctgtactagttgttaaaacgtggacgtgcatctgtagcacttggttccatccactgcctcccagcacctgtgctgcccctccccctccccatggcatgcccagaacctcctcatgcccatcacctaaatggttaatgctgggcacatctgggggccacatggacactgctctggatcagacaatcattttgactatgacccctggaaaaaatcatggcatgaactgccacggatgcagcagtggcttacagagcattcgcttctcggcatcacacaccagccaaggtttacggagccccggatggttgccaggcacagtgctaggccctggggattcagacacaaagcaggtacagcacaaagtcaggcaaggctcagagacccaggagctggttcgtttggctcaagatgaagcaggaggggagaaacaggagaggagaggccaggaggtcagcagcggacagaccaaggagggccttataagtcaagccatggaatttgaactttatcaggcaggccaggagaggtgtgggaaggatctgaacagaggagatactgggtgaggtttgtgttttaccaagaaccgtggatgctgaggggaagagaggttgcagctgagcaagactagaagctggtcattgggctgagggtgagctcagggcagggctgatagggtctaaggaggaggacagtggagatagacagacagaaagcagaatcggctgggtgcggtggctcacacctgtaattccagcactctgggaggccgaggtgggcggatcacgaggtcaagagatcgagaccatcctggccaacatggtgaaacctgtctctactaaaaatacaaaaattagccaggcatggtggcaggagactgtagtcccagctactcgggaggttgaggcaggagaattgcatgaacccgggaggcggaggttgcagtcagccgagatcgtgtcactgcactccagcctggcgacagagtgagactccttctc

SEQ ID NO: 119133 - DNA, 1000 bp, Homo Sapiens
aaaccatactacctgtaaaggaagatatgctaacaaacaacaaaactggcaggaaccaagattcctactgacactacccttagttttaattttccctgacaacaaatgaggttaacagagcataattatctaccgtgaccccttcaaaaagacaggctgtatacatttgcactaagagaagaaatcgtgtaatgtcagcaaatttcccccacttaaaacttctctatttaaaaagcttcacgcacacatgcacgcatatgtcttcaagatgaccacaatttattttgcagtcattctttgcaccagttcccaatttttcccactagcttgcaagctccgtgactcgaggagaccgggggatcagagtttgtttttgcggagaagtgagtcctttatgccccaaatagtgactgacatagagaaggtactcagtaaacactttttaaaggaatgcctgcctgactgaagcttaatgatgtgaggcttctagtgtgataccctaccttgttttaacctgaagtgactcttccttagctaagagagccagacggactccatcgtgactccttcactcgcagcccctcacccacccccttcctcaaggacttaacttgtgcaagctgactcccagcacatcaagaatgcaattaactgataagatactgtggcaagctatatccgcagttcccaggaattcgcccggttaatagcacccagagcccctgcgtttgtgtccggttgataacgcccaaagcccggcgtccatcaccttaggatagacttaaagcctctgcacctggaactgtttactttcctgtaaccgtttatccttttaactttttgcctactttacttctgtaagattgtttcaactagattccccctctcccctgtctaaaccaaagtataaaagaaaatctagctccttcttcggggccaagagaattttgagcgctagctgtctctcggctgccggctaataaaggactcctgaattcgt

SEQ ID NO: 119134 - DNA, 1000 bp, Homo Sapiens
atgatatggattggctttgtcctcactcaaatctcatctttaattgtaactcccacaattcccacatgttgtgggagggacccagtgggaggtaaacgaatcatgagggtgggtctttcccatgctattctcatgatagtgaatatgtctcatgagatctggtgcttttaaaaatgggagtttcctctcacaagttctctctcttttcctgttgccatccatgtaagatatgacttgtcctgcttgccttctgtcatgattgtgaggtttccccagccacgtggaactgtaattccattaaacctatttttcttcccagtctcgggtatgtctttatcggcagcatgaaaacagactaatacagaaggcattcagtagaggtttgttaatctaataatgaaaaatgattgaatagtgtcgtgtcagttagcttttgctgcataacatgaaatcctaaaagtttgttgtttaagcaacaatataattagctcatgattggttggctcagcatttctggttggcctgacttggctgttgtcttcctaattggctcacgtccatggtcagctgatgggtcggctggaggttagatgatctaagatcaccttacacatctggcagttggcaggctgttggccagggttatggggatgattacaccatgtgtctctcatcatccatcaggctagcccaggcttatttacagggcagtaacaagaatagcaagagtgtaagcccctacgttcaacccctttccaagccactgctcatcacatttattaatgtcccattttccaaagcagtcacatggccaaacccagattcatggggtggagaaataggctctataccctttgatggaaggagcagcaaagtcacagtgcaaatgagtatgtgtataggaataagaagaatcacacctatttaagtgcaccataaacgttgaggaaattttcacttaatctacctgaatattaaaaactagagccaattcaaaatc

SEQ ID NO: 119135 - DNA, 1000 bp, Homo Sapiens
ggggacacttggctttggtgtttgcactttacagatcctgcggtccacgaggggcctcaggagaggacgtgtcaggacgtggcttcccagccttctgccttgggcagtgggggtgctcctgtctgtccttttcccccacaccctggactgtgcttggctgttggtgcacatggttggcacacggtgggcagagggcagagaatgccactgcttggttattggtcccctttgaccaggaaacccaagaggagacacctcagtcagcagaaaggccacctggctcactggctcattccaggagtgggagagacggcagggtctcctctttgtcctccggcatcaggaaggggatggtgtccactccccactgtggtggctttaggcaaggttcttattgtctgctctgcctcggtttccccatctggaaaatgggggcaggggtcctgacctacctcaggtggaacggtgagcagggaacatgtcggagtccttcagagaatgtgatgtgaggttggatcaacagtgtgggttcctgtcctgtttccccttcctctttggggctgaggaggaggttaaaggccaaatgctgtttcccaacaccccaaagtctgcacacgtctcatgaatgcatcacatttctgtcatatggatattagccattccgaaatctgtgtaatcaacttcacattattcaagttacaaatcactgtgtccatagaaaaactgtgctggtatttgctggacaaagggttgggccccttttatttttacctgccacccagcatctcccccacctgccccttctgggtgacacagccggtaaacggaatcacgtatggttctttctgtgggtctgtggcacagcaggaagagcccggtgccgccagcaccttgtggaagaccacacatgggtggtcccacagcatgggaccaggctggcctgagggatgcccagttgtaacaatgctgctgtcactgtctcattaaatatacatccttt

SEQ ID NO: 119136 - DNA, 1000 bp, Homo Sapiens
gtgtatatcagcctcgtgtttggtatttcatatgattcgcctgattacacagatgaatcttgcactttcaagatatcattgcgaaatttccggtccatcttatcatgggaattaaaaaaccactccattgtaccaactcactatacattgctgtatacaatcatgagtaaaccagaagatttgaaggtggttaagaactgtgcaaataccacaagatcattttgtgacctcacagatgagtggagaagcacacacgaggcctatgtcaccgtcctagaaggattcagcgggaacacaacgttgttcagttgctcacacaatttctggctggccatagacatgtcttttgaaccaccagagtttgagattgttggttttaccaaccacattaatgtgatggtgaaatttccatctattgttgaggaagaattacagtttgatttatctctcgtcattgaagaacagtcagagggaattgttaagaagcataaacccgaaataaaaggaaacatgagtggaaatttcacctatatcattgacaagttaattccaaacacgaactactgtgtatctgtttatttagagcacagtgatgagcaagcagtaataaagtctcccttaaaatgcaccctccttccacctggccaggaatcagaatcagcagaatctgccaaaataggaggaataattactgtgtttttgatagcattggtcttgacaagcaccatagtgacactgaaatggattggttatatatgcttaagaaatagcctccccaaagtcttgaggcaaggtctcgctaagggctggaatgcagtggctattcacaggtgcagtcataatgcactacagtctgaaactcctgagctcaaacagtcgtcctgcctaagcttccccagtagctgggattacaagcgtgcatccctgtgccccagtgattaagttttattatgtagaaaataaagagcaaacagtacagctgaaaaaaaaaaaaaaaaaa

SEQ ID NO: 119137 - DNA, 1000 bp, Homo Sapiens
gtgctcattgtagtacattttttaaaaaccacaaatgagcaaagatttttttaaaaccttaaatgtctggccgggtgtggtggctcatccctataatcctacactttgggaggccaaggtgggcggatcacttgagctcaggagtttaagaccagcctgggaaatgtggtaaaactccgactctatttaaaaaaaaaacaaaaacaaaaaaaccttaaatgtcaaaaaaaaataatattttcaccatccagacgtcaccattataaattcttagttcagggctgggcgcggtggctcatgcctgtaaccctagcactttgggaggctgaggcgggcagatcacttgaggttaggagtttgagaactggcctggccaacatagcaaaacctcatctctactaaaatacaaaaattagccgggcgtggtggtgcgtgcctgtagtcccagctactcgaaaggttgaggcaagagaatcgcttgaacctgggaggtggaggttgcaatgagccgagatcacaccactgcactccagcctgggcaacagtgaaactccatctcaaaaaataaataaataaaataaattcttagttcatacccttccagaattctctctctttttaaaacctagatgagattaacctgttttttattcaactgttgtctctaccttcccaatttgatcaattttcatgtcattggctgggtgcggtggctcctgcctataatcccagtactttgggaggccgaggcgggcagatcacttgaggtcaggagttcaagaccagcctggccaacatggtgaaaccccatctctactaaaaatacaaaaattagctgggcgtagtggcgcgtgcctgtaattccatctactcgggaggctgaggcaggagaatcgcttgatcctgggagttggaggttgcagtgagccaagatcttgccattgcactccagcctgggcaacaagagtgaaattctgtctcaaaaaaaaaaaaaaaaaaa

SEQ ID NO: 119138 - DNA, 1000 bp, Homo Sapiens
cttaacacagtcgtgaacaaacacaaggacctgaagacacacgggttcacactggagtcctgccgtagcatgattgcgctcatggatacagatggctctggaaagctcaacctgcaggagttccaccacctctggaacaagattaaggcctggcagaaaattttcaaacactatgacacagaccagtccggcaccatcaacagctacgagatgcgaaatgcagtcaacgacgcaggattccacctcaacaaccagctctatgacatcattaccatgcggtacgcagacaaacacatgaacatcgactttgacagtttcatctgctgcttcgttaggctggagggcatgttcagagcttttcatgcatttgacaaggatggagatggtatcatcaagctcaacgttctggagtggctgcagctcaccatgtatgcctgaaccaggctggcctcatccaaagccatgcaggatcactcaggatttcagtttcaccctctatttccaaagccatttacctcaaaggacccagcagctacacccctacaggcttccaggcacctcatcagtcatgttcctcctccattttaccccctacccatccttgatcggtcatgcctagcctgaccctttagtaaagcaatgaggtaggaagaacaaacccttgtccctttgccatgtggaggaaagtgcctgcctctggtccgagccgcctcggttctgaagcgagtgctcctgcttaccttgctctaggctgtctgcagaagcacctgccggtggcactcagcacctccttgtgctagagccctccatcaccttcacgctgtcccaccatgggccaggaaccaaaccagcactgggttctactgctgtggggtaaactaactcagtggaatagggctggttactttgggctgtccaactcataagtttggctgcattttgaaaaaagctgatctaaataaaggcatgtgtatggctggtcaaaaaaaaaaaaaaaaaa

SEQ ID NO: 119139 - DNA, 1000 bp, Homo Sapiens
tggaggaagttctccagcttcagctcaactcacagcttctccaagcatcaccctgggagtttcctgagggttttctcataaatgagggctgcacattgcctgttctgcttcgaagtattcaataccgctcagtattttaaatgaagtgattctaagatttggtttgggatcaataggaaagcatatgcagccaaccaagatgcaaatgttttgaaatgatatgaccaaaattttaagtaggaaagtcacccaaacacttctgctttcacttaagtgtctggcccgcaatactgtaggaacaagcatgatcttgttactgtgatattttaaatatccacagtactcactttttccaaatgatcctagtaattgcctagaaatatctttctcttacctgttatttatcaatttttcccagtatttttatacggaaaaaattgtattgaaaacacttagtatgcagttgataagaggaatttggtataattatggtgggtgattattttttatactgtatgtgccaaagctttactactgtggaaagacaactgttttaataaaagatttacattccacaacttgaagttcatctatttgatataagacaccttcgggggaaataattcctgtgaatattctttttcaattcagcaaacatttgaaaatctatgatgtgcaagtctaattgttgatttcagtacaagattttctaaatcagttgctacaaaaactgattggtttttgtcacttcatctcttcactaatggagatagctttacactttctgctttaatagatttaagtggaccccaatatttattaaaattgctagtttaccgttcagaagtataatagaaataatctttagttgctcttttctaaccattgtaattcttcccttcttccctccacctttccttcattgaataaacctctgttcaaagagattgcctgcaagggaaataaaaatgactaagatattaaaaaaaaaaaaaaaaaa

SEQ ID NO: 119140 - DNA, 1000 bp, Homo Sapiens
ctggcaaagaggggctgtcagtgaaagagccccagctggtgtggggcggagacgctaaccgcccttctgcgttccataaaggtggctccagaaagggcatcctctaccccaagcccaaagcctgctgggtgtcccccatggccaaggtcccagccgagagccccacgctcccgcccaccttccccagtagcccaggcctgggcagcaagcgcagcctggaggaagagggtgctgcccacagtgggaagagactgcgggccgtgtctccctttcttaaggaggcggatgccaagaagtgtggggccaaacctgcagggtccggcctggtctcctgccttctgggcccagccctggggcctgtgcccccagaggcctacaggggcaccatgctgcactgcccgctgaacttcactggcaccccgggccccttgaagggccaggctgcactccccttcagccccctggtcatcccggccttcccggcccacttcctggccaccgcaggcccctcgcccatggccgctggcctgatgcacttccccccaacgtccttcgacagtgccctccgccacagactttgcccggcctcatctgcctggcacgcaccaccagtcacaacctatgcagcgccccacttcttccacctcaacaccaagctgtaggccagcccatggtgttgtgtacactgtggagtcgacaggggcctacaacaggcaggtactgctgccagggggctctgaactagtgcctgctacccaggacacccgggccatgcccctggctgggcagcctggcacaagtgaagaagaaggcagtgggaaaactgggtttatctcaaggcagcagcctgagcccaggagcagaggacccagttgttataaggcgctgggagaggatgggcagctcccactgccccagagcggagctcgaagcacccaggttgcccacggaaaatccaataaaaagacaccagtgtgaatccaaaaaaaaaaaaaaaaaa

SEQ ID NO: 119141 - DNA, 1000 bp, Homo Sapiens
ccttggagcccacacacgtttcatctttttcccctctgagagcaagaagagacatggcatgttctctgggaccctggaatcctaggtacccacatgtgtgccaaagcctaccccacctggcaggtgtcccacagcaacagaaggaatagtagtccccactctttccatcagccctaccctaccctcattccccgacaccctctggcttgaaccatggctgagcagtgccggcatacgctttgctggcatgcttggatgcccagctgtgtccagaggtggcctgggaccgccagttgcacgcctgccacctcagccagcccccgcccagctcatcagtctgaatggagttgccttaaattggcaggtggtaccgtactcactgcccttggagctgtgaccggctcctgcctgtccaccccttcccgaggtggctcctgcttaccttatcatcccagggctctgattagccaggcctggtcagggtcctggggacggcacccagatatgcagagtcaccctgacactggtgccaggctgacctcagctcccgaaggctcgcacagcctccccatccttccttcccagcccttgtggctctgtccacctgatcccaataccagcttcccccagcccctgccaccccagagggcggccacgacagggagaggtgtagatgccaccatctgagggagaggaacgtggaacaggagcaggctctgatgctgagaggcttgcctccgggggctggaagcctgggtggccggggcccctgaagaaggctcccctctgtatcccccaggtctcctcaacactgggctgatcctgaatggcacaggccaaggggaggccagcctcgcctttctacccaggccccctgccctgcccacctcaggcccccaccctccactcctccccacggtactgtgaacgtcgtgtgactcagtgcagagacagataatatatttaattcatgtacagaaaaaaaaaaaaaaaaaaaaaa

SEQ ID NO: 119142 - DNA, 1000 bp, Homo Sapiens
tatcctggtgccccccacccctggaagagcccagtctgttgagttagttaagttgggttaataccagcttaaaggcagtattttgtgtcctccaggagcttcttgtttccttgttagggttaacccttcatcttcctgtgtcctgaaacgctcctttgtgtgtgtgtcagctgaggctgggggagagccgtggtccctgaggatgggtcagagctaaactccttcctggcctgagagtcagctctctgccctgtgtacttcccgggccagggctgcccctaatctctgtaggaaccgtggtatgtctgccatgttgcccctttctcttttcccctttcctgtcccaccatacgagcacctccagcctgaacagaagctcttactctttcctatttcagtgttacctgtgtgcttggtctgtttgactttacgcccatctcaggacacttccgtagactgtttaggttcccctgtcaaatatcagttacccactcggtcccagttttgttgccccagaaagggatgttattatccttgggggctcccagggcaagggttaaggcctgaatcatgagcctgctggaagcccagcccctactgctgtgaaccctggggcctgactgctcagaacttgctgctgtcttgttgcggatggatggaaggttggatggatgggtggatggccgtggatggccgtggatgcgcagtgccttgcatacccaaaccaggtgggagcgttttgttgagcatgacagcctgcagcaggaatatatgtgtgcctatttgtgtggacaaaaatatttacacttagggtttggagctattcaagaggaaatgtcacagaagcagctaaaccaaggactgagcaccctctggattctgaatctcaagatgggggcagggctgtgcttgaaggccctgctgagtcatctgttagggccttggttcaataaagcactgagcaagttgagaaaaaaaaaaaaaaaaaaaaaaaaaaaaa

SEQ ID NO: 119143 - DNA, 1000 bp, Homo Sapiens
aaggctctgaagaaaggggacattgtggcccgagacgaggtggagagcctgatgtgtgagaagcggatattggcggcagtgaccagtgcgggacaccccttcctggtgaacctcttcggctgtttccagacaccggagcacgtgtgcttcgtgatggagtactcggccggtggggacctgatgctgcacatccacagcgacgtgttctctgagccccgtgccatcttttattccgcctgcgtggtgctgggcctacagtttcttcacgaacacaagatcgtctacagggacctgaagttggacaatttgctcctggacaccgagggctacgtcaagatcgcagactttggcctctgcaaggaggggatgggctatggggaccggaccagcacattctgtgggaccccggagttcctggcccctgaggtgctgacggacacgtcgtacacgcgagctgtggactggtggggactgggtgtgctgctctacgagatgctggttggcgagtccccattcccaggggatgatgaggaggaggtcttcgacagcatcgtcaacgacgaggttcgctacccccgcttcctgtcggccgaagccatcggcatcatgagaaggctgcttcggaggaacccagagcggaggctgggatctagcgagagagatgcagaagatgtgaagaaacagcccttcttcaggactctgggctgggaagccctgttggcccggcgcctgccaccgccctttgtgcccacgctgtccggccgcaccgacgtcagcaacttcgacgaggagttcaccggggaggcccccacactgagcccgccccgcgacgcgcggcccctcacagccgcggagcaggcagccttcctggacttcgacttcgtggccgggggctgctagccccctcccctgcccctgcccctgcccctgcccgagagctcttagtttttaaaaaggcctttgggatttgccggatccttgcaaaaaaaaaaaaaaaaaa

SEQ ID NO: 119144 - DNA, 1000 bp, Homo Sapiens
ttatagatggttaagttgagaattaattatgtttatcatggatggctactaataccaagctcatgattgttgcagcctcaacgtcttaggcagtaaaacttgtctgcagcactaaagggggagaaacccttatattttgcaaactgtccattcgttaaatttattgtaacctaataccaaaaactgccgtttttcatattatttccccacctcctacttttttttttttttttgctacttgtaaaataaccccttctagaaaataagcattaactggaatgtttcaaacaattttgcttcattttactatcagccactagtgaactcttacagagatgtacatttaagataaaattagcttgtgctaagtgttttaaaaacattgtttactgttaaaggggaattgcacattatatttaactgggattgctccctccctcagttctttaaaaaacaagagtcaaggctcacaccaacttgtaggctgtgggagctttgccataggtagatacaatgtagaagtatacttttttaaagcatgaagaagacaaggaacttcattataatgtaccaggtagaggacattattattcaaaggattatgcacagctcagtgaagatgaagttacaatttttctcgcagctttgttgctattattttcttctgcataaatgtatgctcatttcattatgtgccttgctccctgattgtgcaaagctatatatatatatatatatatatagatagatagatagatatatgagagagatatattcagtactactgaggatgtttttctgaggatgtttttgttctgctggattaagttattttccaagttactcttgccagttatgtcagtaaactattgtaatggcttagcacactagtcgtacagtcagtgtaaatgtttttcatttacatgttttcattatatcagcttatcaaatccttaataaaaaaaattcatagatttcatttaaaaaaaaaaaaaaaaaa

SEQ ID NO: 119145 - DNA, 1000 bp, Homo Sapiens
agaggattggagggagtcagttgtctgaaaaatattatcctagagatattctaaaggtgagattcctttctccctgtgttaattcttgttccactatccactgctcttcatctctttatagataataattagaaatctactcattggattataagtttattcattctcaaatactccacttttctatggtttgggataatttctgagtcttcagattgaagagggaaggcatggagggaagaaaaagtccagatcccccagcttgtttccaaccattttaagtccaaagaattataatcctgaatctcacagtgtgtcacacctgtaataggagtaaattatgcaatcaattttaattaccaggagtttaaaatccaaatgtcaaggaactgttttgaccctgaaggctatttaatccactgtcccctacaaggcctcacaagtgctgggggaaaaaaaacagcaatgaggatgatcctgagttaatgtgtatgctccgcaagagagcttgcctataccttgattatttcataaaatcacatgttaatacattgctttcagaatgaaatactgacttgatctgataggagaaaatggtaatatttcatagttgttttccaaagacaaatttaaatgttgtctgttatctccttacttagtttaagaatttagttttgaaccccattgactttgtcatttgcaattttaaaaatatttgggactgggcatggtcgctcacgcctgtaatcccagcactttgggaggctgaggcgggtggatcatgaggtcaggagatcaagaccatcctggctaacatcgtgaaactccgtctctactaaaaatgcagaaaattagccaggcgtggtggcgggcgcctgtagtcccagctactcatgaggctgaggccggacaatcgcttggacccaggaggtggaggttgcagtgagccaaaatcgtgccactgcactccaccctgggcgacagagcaagactccatctc

SEQ ID NO: 119146 - DNA, 1000 bp, Homo Sapiens
ccacggtatttttgtcaatgacgccactgaaagggatcaagtccgtgattttacctcaggttttcctctgtgcctacatggcagcgttcaacagcatcaatggaaacagaagttacacttgtaagccactagaaagatcattactaatggcgggagccgttgcttcttcaactttcttaggagtaatccctcagtttgtccagatgaagtatggcctgactggcccttggattaaaagactcttacctgtgatcttcctcgtgcaagccagtggaatgaatgtctacatgtcccgaagtcttgaatccattaaggggattgcggtcatggacaaggaaggcaatgtcctgggtcattccagaattgctgggacaaaggctgttagagaaacgctagcatccagaatagtgctgtttgggacctcagctctgattcctgaagtcttcacctacttttttaaaaggacccagtatttcaggaaaaacccagggtcattgtggattttgaaactgtcttgtactgtcctggcaatgggactgatggtgccattttcttttagtatatttccacagattggacagatacagtactgtagtcttgaagagaaaattcagtctccaacagaagaaacagaaatcttttatcacagaggggtgtaggcgtgagttttaggtgaatttatgtggttcctgcttgaaaaccttcccctctccaggttcggtttagagaactttgccacaggtcttctggggaccccagaggtgtctgtgctgacaaggcgacttcagattccatactgagatcgttcccaggctggcgtctctggggtttttaaggctggctggagaagacagtgggagggtgccccgtctgacacccctggggttgctgagggaacggttggagtggggatcggcctgcgaaaggatactgtgaaatcactaattaactaataaacctgtctcaagttgaggatttgaagaaagaaaaaaaaaaaaaa

SEQ ID NO: 119147 - DNA, 1000 bp, Homo Sapiens
ttgggaccattcttagtaacctgaaatttcttttttaattgcatgaagtggattgatcatgagcaaatgatgtgcttatttctccctcactgttgaatatctttgaacttgctgttttcaatatgggcagcacaaaggtgagagatacatattaatagtagtatgtattactcttatacattagatacctatatttaaatgaaaggcccaatttgtaaacatatacattcatattctctcttgccccaagttttaggaacatgttaggatataggagacttaatttataataatgagagcatttttttattttactaaagccatttttatagtcaactatcttttcttatttgtgtgattagaacttagaaaaatatttactagttgaagttattatcagtttttaatttagttcttaaactcatttcacttctaataatttctgttataaatttccagcattttaatgaaaatctaatgatgtaataggcattttctttatttgaacctacctcttttattttctgaaccaaagagaaagatggactggtgtttgtgaaacatttttaaaaatgtagtttcatttatattagttatgtttgataaatgtctcagtatttttataatatgataagcctgggattctacttttagggttatttgtacttttgagtaatatataaagtgacaatattaaggtacatgatcagctctttctatttttactcgtaaaaattatggaaatgaataattttgctaacaactttgaaatttcaaacttctggaaaatatgaaaatattcattgttcattatgaatttaaattgtaaggtatgaatgtgatttgtctgtacatcttgtatcttttccaaaaaatgattctgtatcttttggaaaaaagccgagagttgaagatagtatatttctggtagtactgaatatttacttacagtttctatcaaaaatatatatttgtttctaaaaaaaaaaaaaaaaaaaaa

SEQ ID NO: 119148 - DNA, 1000 bp, Homo Sapiens
atatcagattcagttgtgttcatagactcaagaaacagttaatctcaatatacaagacagttgtaaaattaggaagaataaagttggtaaacattttatatttaattattcaattcattttactttagcccatgtacttcagccaatttgctacattttatatcagtctcttgctgggaaaacccaaacagatataacacatgctaaattgatttcacaattagggactagtaaggatcaaaataatccatgcaaatataatagtgaatcacttcgccttttaaaaaagataaatcagaccatgaactttttttatgctgggtgacttatggaaaaattattctttccttacattaggaagaagtctgcttttcaaaattgccccaaattatagaagccagagtgttctgtgatataattttgtgttcttcacaagcaggcagaggcatctagataaattctaatttctaggtataattcatattgtattcagaactgataactgcacaaataattgttggtttcatttataactttttatagcagagaatgagagatttgtaaactttttccctacatattttttccaaaagtaaaaaatgtagaacctatacatcaaatctatgtatatggatttatttatctatttattcatttacttatttattttgagaggtaatctctctctgtcgcccaggctggagtgcaatggggcaatctcagctcactgcaacctccgcctcctgggttcaagcaattctcatgcctgagccccctgagtagctgggattataggcgcccgtcaccatgcccggttaatttttctatttttagtagagatggggtttcaccatgttggtcaaactggtcttgaactccttacctcaggtgatctgcccacctgggcctcccaaagtgctgggattacaggtgcaagccactgtgactggcctgtaatatggttttatattgtacagaataaaaattgcaacctttgctt

SEQ ID NO: 119149 - DNA, 1000 bp, Homo Sapiens
caatgggttgttggaaggaagtgaagaatgtgactgtggcactaaagacttcaaaccggctaatatgatttgtaggaaatcagttggtaaagaatgcgatttcactgaatattgcaatggggaccttccatactgtttgcctgacacttatgtacgtgatggagaatattgtgattcaggtggagccttctgttttcaaggaaagtgtcggacttttgacaaacaatgtgatgatttaattggaagaggttcaagaggtgctccggttttctgttatgatgaaattaataccagaggagacaattttggaaactgtggcactgcacactgtctttttcaacatattctatgtggaaaattagtctgtacatgggaacacagagacttaatatcacgtccaaatttatctgtgatttatgcacatgtacgagaccaaacatgtgtgtctacatacctacccaggaggacgccacctccagtaaattcacctatttcaatcacatcatattattcagctgaagacagagatgaaacatttgtacaagatggttccatgtgtggtcctgatatgtattgtttcgaaatgcattgtaaacatgttagattcctgatgaatttaaaattgtgtgatgcttctaatcattgtgatcgtcatggagtttgcaacaattttaaccattgccattgtgaaaagggatataatcctccttactgccaaccaaagcaaggagcatttggaagtattgatgatggacgcttagtaccaccaactgagagaagttacatggaggagggaagataggccacttttcaaaaacaacggtttcaactcattttctacatttctctacctgtgcttcttattactactgccattttaataaaacagaaaaaattgagagagctatgctatagaggggaaaatgaaagtgagagctctgtgtcagaagaaagcagcagtaacagcaagtcatccctcagtgaaagcaccagtctctaa

SEQ ID NO: 119150 - DNA, 1000 bp, Homo Sapiens
actatgaaagtaaactcggcacattacccgaaagtctcaatgtcatattttcacccccatcaatattattgatgattgctcattttctaatgtgggacctgaaatttaccaggtgcttaaagaatctttttgtttttcagattcattgattccaggtaaatcagaggaacaagcaacatgaacagaaatatgtagaaaaagctattatgcagaagcataattgttgtttcagaagtccagcatctggtgcacttaacaatagagaatatattaaactctttccaaaataacctgttgttcctacctgtgttgtaagtgttttgtttgtttttaagtaaatattggtgatttgttgccaaaaacctaaactgtttgttgctgtcaacttaaataacgaacagagagaggctctctaaaagaaaatggcatttattcaggaatagagcactgcaatgagaaaatgcatgcgatagttaactgtgtgtatcctgggagatagaggaagacaaaggtctttaaaggaaaaatgaggagggttacataattgttttgagataattatttttgactacaaggatcagtaacaaaggtgacaccagtcccaggttggacaggcaggtgctcggcaggcattgcagaagtattttttgtgtaagattgagatggcctttgtgcaggattgtggttttggaatcttctgtgatcgtttttgctatcaggcatttatgcttgcgaactctttatggccttccctgtgtctattttgattccacctttctcattgcccactctaaactgtaattctgcttttatgttgactgagatcaggagaagaatttgcaaacttatatcctgagacagaacagtaatgaggagtatcgtgttccttacctaatgtataatattgggctcagaagcagttgtcttttttatttgttgaacgttgtattaagttgagaatgcagctgccattaaagattaagagtaatccttgagaagg

SEQ ID NO: 119151 - DNA, 1000 bp, Homo Sapiens
caggtgcagtagctcacaccctgtaatcccagcactttgggaggctgaggtaggcagatcacttgagctcaagagttcaagaccagcctgggaaacatggcaaactcccaccattacaaaaaaatacaaaaattagttggtcatggtggtgttcacctatagtcccagtgacttgggaggctgggatgggaggatctcttgagcccaggagatgcaggcttgcagtgagccatgatcatgccactgtactgcagactgagtgaaacagcaagatcttgtctgaaaagaaaaaaaaagtaaaagaaaaagaaaagaaaataactcccattgctaaagacatatatgcttatcaggttaagataaagtgaattttgttcttcccaatgacatttcaggatatttgttcacaggaaagaacatgttgggaattggtactggctagaaatttctgttgagtatttattaccccatggtaataatggtaaaccacagtttagaaagattttttttgacagccacagcatgttccgaagagatgattggaagatggaagtggagggttaaataatgaaatgcagctaacatttcggaaagtttctaaaagttgtacaacatgccctacagctactctttaaatctccaaatcaaatgagtttcaggtggagcctctgggaggtgatgaggtcatgagagtggagcctcatgaatgggatgagcactcctacaaaaaggattccagagagctcgcttgctccttccacagtgtgaggacacagagggaaggctctgtctatgaatgagaaagtgggtccccaccagacattgaatctgccgcatcttgatactggacttccagtctccagaactgtgggcaataaatgtctgttgtttattacctgtccagtatctttggtattttgctatagcaacccaaatggactaagaaaacaccagaggccatacctaataaaaatattgacatcacaaaaaaaaaaaaaaa

SEQ ID NO: 119152 - DNA, 1000 bp, Homo Sapiens
gaaatcttgaatgctgctctaggagatgaaatatttcttcactcatcctggataaaagaatacttcacttgggctggatttaaagattacaaccttgtggtcaggatgattgagacagatgaggacttcaatccttttcctggaggatatgactatttggttgactttttagatttatccttcccaaaagaaagaccacaacgagaacatccctatgaggaaatccatagccgggtggatgtcatcagacacgtggtgaagaatggtctactctgggatgagttgtatataggattccaaacacggctccagcgggatcctgacatataccatcacctgttttggaatcattttcaaataaaactccccctcacaccacccaactggaagtcattcctgatgtgctgtgagcagaatgggcctgcgattttgcaagaatgcaaaaccacatgaaaatttcaagaattcactgatctgatgcaaaataaaaatttatcattacatcttgaacccaggaagcttacagcaaagagactatgctttatgacgtcagcaatagataattccacgttgcctttgtgatttgtatatatagcttacatttgtggaccactacatagccagattcaaaaatattttacttgttccatccacagttctctacagaaagaaccaatgaacccaataggaacaaattctctgtggaaaacaaagcatagctgtagtagatacgaatccaatcacagaggaaacaggaagagaaaaacatccaagactacagtgaaaactggaaatggtctgttttcgtgatattcgtatgattaagatgcaaattttttcttaggaaaatgtgattgttaactagcattctgttttacatgttgacatttctaacacacacaccactgatttgaacttcaaaatttattttctgattatatatgctaggtctgattctgaagatacaagaattcaatggtggaatttgtctcctgaaatt

SEQ ID NO: 119153 - DNA, 1000 bp, Homo Sapiens
agcagcatggctccaggcctagagagccagggcagagcctttgcaggagttatggggtgggtccgtgggtgggcgacttcttagatgagggtttcatgggaggtaccccgagggactctgaccatctgttcccacattcagcaagttcattcctgagggctcccagagagtggggctggttgccagtcagaagaacgacccggacgcagtggcactgatgcatcccgatggctctcctgttgtggtcgtcctaaaccggtgagggcaatggtgaggtctgggaagtgggctgaagacagcgttgggggccttggcaggatcacactctcagcttctcctccctgctccctagctcctctaaggatgtgcctcttaccatcaaggatcctgctgtgggcttcctggagacaatctcacctggctactccattcacacctacctgtggcgtcgccagtgatggagcagatactcaaggaggcactgggctcagcctgggcattaaagggacagagtcagctcacacgctgtctgtgactaaagagggcacaacagggccagcgtgagcttacagcgacgtaagcccaggggcaatggtttgggtgactcactttcccctctaggtggtgccaggggctggaggcccctagaaaaagatcagtaagccccagtgtccccccagcccccatgcttatgtgaacatgcgctgtgtgctgcttgctttggaaactgggcctgggtccaggcctagggtgagctcactgtccgtacaaacacaagatcagggctgagggtaaggaaaagaagagactaggaaagctgggcccaaaactggagactgtttgtctttcctggagatgcagaactgggcccgtggagcagcagtgtcagcatcagggcggaagccttaaagcagcagcgggtgtgcccaggcacccagatgattcctatggcaccagccaggaaaaatggcagctcttaaaggagaaaatgtttgagccc

SEQ ID NO: 119154 - DNA, 1000 bp, Homo Sapiens
gtctccagctggggtggacgtgcccaccagctgccgaaggccaagacgccaggtccggtggacgtgacaagcaggacatgacatggtccggtgtgacggcgaggacagaggaggcgcgtccggccttcctgaacaccttaggctggtggggctgcggcaagaagcgggtctgtttctttacttcctccacggagtcggcacactatggctgccctctgggctcccagaacccacaacatgaaagaaatggtgctacccagctcaagcctgggcctttgaatccggacacaaaaccctctagcttggaaatgaatatgctgcactttacaaccactgcactacctgactcaggaatcggctctggaaggtgaagctagaggaaccagacctcatcagcccaacatcaaagacaccatcggaacagcagcgcccgcagcacccaccccgcaccggcgactccatcttcatggccaccccctgcggcggacggttgaccaccagccaccacatcatcccagagctgagctcctccagcgggatgacgccgtccccaccacctccctcttcttctttttcatccttctgtctctttgtttctgagctttcctgtctttccttttttctgagagattcaaagcctccacgactctgtttcccccgtcccttctgaatttaatttgcactaagtcatttgcactggttggagttgtggagacggccttgagtctcagtacgagtgtgcgtgagtgtgagccaccttggcaagtgcctgtgcagggcccggccgccctccatctgggccgggtgactgggcgccggctgtgtgcccgaggcctcaccctgccctcgcctagtctggaagctccgaccgacatcacggagcagccttcaagcattccattacgccccatctcgctctgtgcccctccccaccagggcttcagcaggagccctggactcatcatcaataaacactgttacagcaaaaaaaaaaaaaaaa

SEQ ID NO: 119155 - DNA, 1000 bp, Homo Sapiens
taaagagcagagtgactgtgggtctggaatggctggtgtacttgggaatgtactatcaggattttacagcaatgctgggaaatgacagggaaaatgacaggaatgaatctcaccagattttttatgtactcagcagagccttgagttacggtgtttattttccaatcaagtgaagatatctcctacttctcctactggaacatctcagcttctgcagtgaagaaaaattcctgtgatagttcagttctttagtttttctatttgaaaaaaaaaaatcatttaaatgatcctttgttcacggctctccttaatgactgagtgaacagttcctatctgtatatttgactaaaccttttcctaagctatctctcatggttcctatgtttttttatcataattaaaagcaaaaccatctggatcacctaacagtcagaggtcagtatctcagcgtgtgaattatagaggaaatacagagagaacctcttccacttttacttttcgtccaaataaaatgcatggtgtaccagaagttgaagatcgggttgaggattggggctagctcgatgacactaaggccccaacatcgcgggacctgctgtggcgcggattcttaggaacgctgttctagccggccccctctccaggggtcgccgtggccggcattatttcctagttcttcttgtaaccctgaggtgccagcgcggggagtgaggaggggtcagggggctaaggatgcaacctctgacgttctgcgccttcctaggagagtcttacatgtgttgagatttcacaagcaatgcgagttgtaaaataccagctctacaagaagctaggctctgtgacggcatagttttcagtagctttatcacaatattcacaatggagaattatatgacatggtagcagaaataggcccttttatgtgttgcttctattttacctcaaattgtagatatagggtaatcaataaaatccatccatgccaaaaaaaaaaaaaaaa

SEQ ID NO: 119156 - DNA, 1000 bp, Homo Sapiens
cactgcagcctcaacctcccaggttcaagtgatcctcccaccttagcctcccaagtatctgggactacagcaatatggagaaggcatcaagaatgtacttcattcacccgccaacagtataaagaactagaagctctgtttagccagaccatgttcccagacagaaatcttcaggagaaactagctttgaaactcaacctaccagagtcaacagtaaagaacccagtgtcatggtaaattggagaggatgtgagatgataacctggctgttttcactcaggagaagcctggaatgccttctccaagaacagaccacaatctcccctcttcccccactcccaggtttggtttaggaaccggcgattcaaattgaagcagcagcagcagcagcagcagcaatcagcaaagcaaccaaaccagataccttccatccaagaagaatgtgcccacctcccccagaacatcccccagtgcttatgctttttctcccgtggtttcagatttctacagctcccttccacctcagctcttagacccttccaattgggcatggaactctaccttcactgagagtcccacaagtgacttccaaatgcaagatactcagtgggagaggctggtggcctcagttcctgctttgtactctgatgcctatgacatatcccaaatcatagaactgtataatcttcctgatgagaatgagatatccagctcttctttccactgtctgtatcagtatctctcactcacaaagtaccaggtaggaggacagggttcctctctcagcacctttgctggtctagctgtaggcctatctcccacacaaacctggcccagtatgataaggcaaggctttaaagactacagtctaacagacagcctggaattccagaaaacctccaatatggtagactttggatttctctgactagagtactaataaatatggaccatttagaaaagaggtcttcttgcatcttacacatgaaaaaaaaaaaaa

SEQ ID NO: 119157 - DNA, 1000 bp, Homo Sapiens
tggtcagtttctagaagacatggaagcatatgctgaggacctcagccatgtggcctctggggaatcagtggatgaagacgtccctcctccatcagtgtcatcaccaaagctggctgcgcttctccgggtatttagtactgtgctgaggatcattggggaacgcttcagcccaattcgggtcctccaattactgaggcatacgtaacagttgttctgtacagagtaatgagatgtgtgacggctgcaaaccaggtgtttttttctgaggctgtgttgacagctgctaatgagtgtgttggtgttttgctcggcagcttggatcctagcatgactatacattgtgacatggtcattacatatggattagaccaactggagaattgccagacttgtggtaccaattatatcatctcagtcttgaatttactcacgctgattgttgaacagataaatacgaaactgccatcatcatttgtagaaaaactgtttataccatcatctaaactactattcttgcgttatcataaagaaaaagaggttgttgctgtagcccatgctgtttatcaagcaatgctcagcttgaagaatattcctgttttggagactgcctataagttaatattgggagaaatgacttgtgccctaaacaacctcctgcacagtctgcaacttcctgaggcctgttctgaaataaaacatgaggcttttaagaatcatgtgttcaatgtagacaatgcaaaatttgtagttaaatttgacctcagtgccctgactacaattggaaatgccaaaaactcgagtctttaattgtaatgactttgttttatccacagttaagccttttctcattacatatttatgtatttcactgtcatgtcaacatgtctgcagaatcactgtatgtaacaaacagccatatttaagacatgcctggataaataaaattggtaggaatgttttcttgccattataaaaaaaaaaaaaaaaaaaaaaaaaaaaa

SEQ ID NO: 119158 - DNA, 1000 bp, Homo Sapiens
ctcactccccttccaccctcagctccaccctcagcagatgataatatcaagacacctgccgagcgtctgcgggggccgcttccaccctcagcggatgataatctcaagacaccttccgagcgtcagctcactccccttccaccctcagctccaccctcagcagatgataatatcaagacacctgccgagcgtctgcggggagcgtctgcgggggccgcttccaccctcagcggatgataatctcaagacaccttccgagcgtcagctcactccccttccaccctcagctccaccctcagcagatgataatatcaagacacctgccgagcgtctgcgggggccgcttccaccctcagcggatgataatctcaagacaccttccgagcgtcagctcactccccttccaccctcagctccaccctcagcagatgataatatcaagacacctgccgagcgtctgcgggggccgcttccaccctcagcggatgataatctcaagacaccttctgagcgtcagctcactccccttccaccctcagctccaccctcagcagatgataatatcaagacacctgccgagcgtctgcgggggccgcttccaccctcagccgatgataatctcaagacacctcccttagctactcaggaggctgaggcagaaaaaccacgcaaacccaagaggcagagggcggctgagatggaaccacctcccgaacccaagaggcggagggtcggtgacgtggaaccgtcacgcaaacccaagaggcggagggccgctgacgtggaaccatcatcacccgaacccaagaggcggagggtcggtgatgtggaaccgtcacgcaaacccaagaggcggagggccgctgacgtggaaccatcatcacccgaacccaagaggcggagggtcggtgacgtggaaccgtcacgcaaacccaagaggcggagggccgctgacgtggaaccatcattacccgaacccaagaggcggaggttgagctga

SEQ ID NO: 119159 - DNA, 1000 bp, Homo Sapiens
acaaacgtgtattcttttgaatataccttttagttctttttggtgtaaatgtacacacgcacacacagttgtggatttttttaaacaaaaactggatacactgaatatactctttaataacttttcaagtgtgtatttatattttagaatatgtaatcctacacagatacaaaattcaaaaagtacaaactgctctgtagtcagaagtaaatcttctccctaccccgtctgccagcatctagtttccctctaatttattttgcatcctagtggagatgcttacacattgtcaaacatatgtatatattcttttatcacacacaaatggcagcatattggacactttttgttttttgctccttctgttccttcacttaataatatcacgaacattttcggcatatcaaactttctcaacagcatcttcattgtatggatggaccctttttttatcatcaatcctcaaatagtgattatttcatttgttcccaatcttcattgtaaatagtgttgcaactgacattcttgtagctaaattttgcacatgtctataacgatttccttaggataaactccaagaagagacttgcttggctatttttaagaattttgatacatgttgccaaccaccctccagaaagtttgtaccaaaacgctctcctatttggatcctagagagtaccctgtttcctgcaccctaacactaggtatcatcacttatcaaatctttcccaatttggtagctgggataatagtatgtcaatgttattttaactttctttgattcttcgcgaataacattttcatatgcttattgaccatttgtacttctttctttgtgaattttctatttatttgatattggtatgtttattatcaatttgtaattttattaagaatattatttttgtcaagaaatgctgcaaatatgctttccaagtgctttgctttcaaattttgtttatggtgctttttgacatacataaattcttaattctgc

SEQ ID NO: 119160 - DNA, 993 bp, Homo Sapiens
atggggaaggccgggggcgagggaggagaggcagggccgccgatcctcctcctccccactgagcccgcccccgacctcccgccccgacgccggagttcctcgcgttcattggctagagggcgcatcactcagtgccaggtggcggcctccccgcttgtcccgcctcccgctcctcctcattgtccccgccccttgctctgttttcttccagctgccggaccagcgggcctgccgcctctacggaccagtccctgctcaggtgtcacttttgctggcaggccgagattagggcaggagagtgggcaaggcgtcgcggccaggaggagaagggctctaccacgccaccctcctttggcctccgaacgcggaccccgcacacacacacccgcgcctctttggcaagcgtgccttgtcggctgggttaagccgcagtgcgtgcacaccgagcggcggggcgctgtggaacgcgggagcggactagcggaggaggatgcggaccaagccccagcgacccagggcaactcggagctacctcgggcagccctgcgggtctccgaggagaaccgaggagacgggagaaacatgggagagggtggccttttccctgttcacacacacatgcacgcagccactggccgggacagttgacacccatcttccttccctgctccttccagtcattctacacccgcttggtgctgccagtgcgggcagggccttggagcccaaagcggatccccacacttgtccctacggtcggaaggaaagtagaggagagaaagtcaggcgcggcagggctaagagcaatagtggcccaaatgttcctggcccgcctgctgcgccacagagtctgaaaagcgggtctccgtctaccagaaggtgacctccacacagcccctctccccgaccaactgcagcacccaaggactggcaacgtggttggagcttttggggggaattatgaagaaatctgaataaatttctcacccttca

SEQ ID NO: 119161 - DNA, 1000 bp, Homo Sapiens
aaattaaaactaacacaacaaaaggcgctgaatcaaaagatctttgcttttatttggctcagaatgtttttggcttttctgctaaagatggcagaaattactctacacagacctgatttttctttattgcagaccattcttgtgggcttaccctgagacttttatcccaattagtgaatcttggagggaatacttgcttatttatgacttaggtatttccccccaaactttaatattcttgagcacttgaaaatacttttgagaaattttaactgtgattaaatttaggtttattagaaatattctgtacacatttgcctccatggtggcgtaagttctgaaaaattatatgaccgtgacaatagtttatcatcatcattattgttattcaaaataagggtaaataaatctctgtattgccaaagtgacttaaactgttctgatgaccacacagtgtgatttctttagcagagaaagttggttttaaaaataaatagtaccacttttctaagactgtacagtttacaaataaggtttttttctttgttgttttcctcttctattaagttttagtgaaaagcctaattacagaaaattgtgcagatactagtgaagatactagtataagtttaaaggaacacgtgactgtaaaatctcacatttacaaagtgcttgatctcttcatatttcacacgcatgttttagaatagattttagggagtgtttaattcattatccttttgacttaaaatttttgttaccaacttcctaggacttagataatatataaataagtacaaatcccaggggaagtgttgtgatgctagactaaaaggtgggaatgtgctgctgttccgtgagccttgttccattgttgaaaatttgatgcctcagtgtttattcagtaccacctcatggagcttcaatgtaaatggattatatgtataattggtaatttgtatagttttgtagattgtagattaaatgcactcatcatgtc

SEQ ID NO: 119162 - DNA, 1000 bp, Homo Sapiens
aacgtcagtcttctacttaaaatgtgtctatattcatggtatttccattcagtgtagatggtaaggaaaacatctagtcattaaagatttacttatagcagactccagaacactacctacaatggggtttcagtgactagaaatcttgaaggtttatgattgcatcaaattgagcctgtactaatatctaaatatctgctcttatgttctgctttatcccttgggattaccttctaaggtttggtcacaccagcaaactgaaacagatcttaatgtacataaaaaatttatactaatattactcatctgtgttacagtattttgaaaaatgtttcaggtgtcatctagtcgtctttcatgggtgtgattagttacaaatgttatgcttatgttttcatacttaatatcaagctttctttgtaccttacaagatagtatttttggttctaaaaaaaacaagcaaacttcatttttgtagtatccagaaattacctggagtcagtatttttattcgccttctagaacttgtgatccacacatcacccatttatattagtggtaaaattatctgctaaaatctaattgtaagaaaggcttaccttctgtcatcaagtgattgtatcatcctggatcgtcatttccaaggaactagcctttcttttcctaagcgtctgtatgtgttctaaaacttccagtatatatttatagaacttagaaaaaatgttacattattcagagtagcaagtcttactggagtacctatgtttgttttcttggtttttatttttttttaagtttaaaagtagtaattaaacctatattttgtgattgtttcctggtctgtgtttttaaattcctttccttcagttttcctcatgaagatgtttcagatactgaatttgtttagacattgaatgactttgttaaaggcacaattaatcacattggttgtactctgaagacagacttctttaaaaaaaaaataaacaatttaaaacaa

SEQ ID NO: 119163 - DNA, 1000 bp, Homo Sapiens
atgtaggaactaactatttttaacttcttcctggggcctgagcagggaagggtgggactggaaggcactaaggggaagggagaagccctcagggcaggccctgctccccctacctccttgccagggcaagggtggagtgtggaagacgtgggtcccccagagcaggcctggcccccagctgtgagggcctcagggaggcccgagggggagtgctgggggtctcagctggcttagctcctaagtttaccaaatgttaatttagtcttggggagaacagcaagggctggaggccagtgctgcagggccagccccactcctgacacctgggcccttgaagctccttgaggggcaaggcccaggagttccagccctcaggttcctgagggtccaccctcagtccttccccccgccgcccctccccggactccccacaagagcctccctggccccagggccgcctaccaggctggtactcattctatgaccaccgcccccaaccagctgcccccagctctccctgccccctcccctctctggcagctagcagggcaattggcggggaggagtgcggactgaggactgaggaccaagggggcccaggccctgccctcctacccggaggggctccgtttgcattccttggtgctctctgagtgcagctggtgtcccgccctgttctgggcggacgcctgtgtgcgtgtgtgtgtgcctgtccagtgtatattgtgtcttagcttccattttaaaaattgttctgtacagagagagatgcagcaggggcgggagggcagagtgggcggaggggagcagccgcacccccagcaccgggtgtctgcggtaggaacaagagggctgagagggtctggtcctggcccaggctcccccttgggctcagcacgaaagggctttcaatgaattaagtgaaaactttttccttttttacaaaaatgcaaaaatcaacaaagctccaaacctattggaaataaaatatgaacttgca

SEQ ID NO: 119164 - DNA, 1000 bp, Homo Sapiens
actgccactttgaacagtttaggtcttaaagagaaagtcaatctaatgccaaggggagaacaatgagctgaaattgtaccaactcctctggccctccttccctcaattaaaaaaacacacttaccagttttgcttattttacagatatctggtggttctatagtttaaagcagcttgtgaaattaaaaaagtggactcaattttgtttacctttctgtaagtttttcatttttgctgtatagcattggcaaaaatatgtacaaattgacctctgttcttatttcctattgtgagcattataaagataagctcctatgtaaaaccttgctctcagatgagtaaaatatgtatcacagcatagctcagcaataattcatgctcagctgtggggaccctgggggctttttgaagatgatggaaccgcactagggttgaaactgatggctgtggagttaattgtgttttcgagcttgaatctcacctgtgattttttttttttaatgttgtttcatgacttgatttttctcataagccaatgtatttgtaggtttactggattttatttttagggagtgggtaatttcttcccttttttgattaagttggttcagctatggtgctattcagtaggtatcttcagtgtcaggtcccgtagctgaatgccattgttattataattattatttgtaatcacattgtaagcttgaatttgggcttgtacctgcatcttttgtattctgtacatctggttacttagactttgggagtccaatttggtttcagtcatgtatgtctactttgtagtttaagtagacttcatcaactatggtctattttgggtttgtagttttaatttagaattgtgttaaattgatgttttgcatttgacttcatttgacattagttgaagtaaattatttaatttttgaattctggaatttgaacatttactgtaatttgtaatataactgctgtgaaatacttgaataaagatgacaag

SEQ ID NO: 119165 - DNA, 1000 bp, Homo Sapiens
tgaggctgagggtggagtccatttgctgaccccacagcctgcatcctgcccagatgtgtccagctgcagggggagcctcaggaaaaccggctgctgctactcctgtgaggaggactcctgtcaagtccgcatcaacacgaccatcctgtggcaccagggctgcgagaccgaggtcaacatcaccttctgcgagggctcctgccccggagcgtccaagtactcagcagaggcccaggccatgcagcaccagtgcacctgctgccaggagaggcgggtccacgaggagacggtgcccttgcactgtcctaacggctcagccatcctgcacacctacacccacgtggatgagtgtggctgcacgcccttctgtgtccctgcgcccatggctcccccacacacccgtggcttcccggcccaggaggccactgctgtctgagaacgttctgcctccatccccatgctctgtccacctggagccaggatgtgcattgtctgatcatgaaaaccttgggcctcctctgcggagccccccggcctgtgtgtggcaccccgcgctccgtgctcctgctgcccaccccgtgggtgaaaccggccccagaagggtgaggggccagcaggacccctttcgggagggcgccactcaggagtcctaccctgggagagcctgtggcccaccttggccttgcccctccctgatgtcactgggacgccctggaacaaactaagcatgtgcgggcctatgtgtccctgccacggccggagcgcccgcgcagcacggattccagctggccacgtccggccgctggggcagacaggctggtccaggcaaggccagctgctgccaggaagctgcgacaggcaaggcggccgcctgtccatgcctgctgcagggtaactcagggctgaggtcgcaacggccaggtcagagaggggtcagcatcccaaagccccctctgctcaacccagcccagttttgcaaataaaccctgagcattgagta

SEQ ID NO: 119166 - DNA, 1000 bp, Homo Sapiens
ggtaggttccctcttagtcttgctgctgttgctggaattccaaagtgaccttagaaaccacgtgggggaaggcagtgctcactacttagaagggttgcttctgagccgcctggtcccccaagagcacaacaggcctcctccctctgaccacagggtcatgcctcctccctctgaccacagggtcatgccagcctccatttgctctgcgggagaaaagcccatctctagcacaccttgaccccaggaaccgggttcccgtatggaactgggaagaaaccgcccctgtgccagctcccgcgggccctcctcgttccctcccagcctccatggccgccctctagagcctccctgctgtacggagctctgggctccgcctatttgcaatgttactctgaagtttctggtgctatttttgtgttgtaatgtgaatacaggcttccttgatttttttttttaatgggggtattgggtgggacagacggggtcagggaggccccaccatggcttgtcgagggcacgggcacctgcatggcggcgctctccctgcctcccctgccgggctgcaagcctgaggtctgtgctgccagacggggatgctcagggctggggctgcagagccgctgccctggccagggcaccctcatgcaccgacccaacccaggcctgggacgcacgtgtcctctcacagcgtcgtgcctgtgaaggtgggtcaaagggtgagagggcttccttctcacccttctctccataagtatcttgaagatccatggtttgttttgctctattgtttagtttttacttgggtgcaatgtgtacgtcaaaagtttttattttgatatttgaaagagaccaaatcaggcccagaccgcctctctggaaggtgttgtaggccattcaaaacgcctccggagtgtcgcaaaccaagtgcggaggggccctgaggttgtactgtaaacatcatagtgacttgtcttttcaaatatattcccactattttcgc

SEQ ID NO: 119167 - DNA, 1000 bp, Homo Sapiens
cgcaagctgcttcgacagcatcttgcagctggagcagagtcactgggcggccgccgaggtccccgaggtgctgcagggcctctaccaggcgccgctgtccatggacgtccatatgctcgtggccgagcacgtgaaggcggccggcgccatctccgcggagctggaggccaccaccctgcgaatctgcacgcgggcgctcggcctcttcgtgcccaggtttgaaaaggcttttctggcgtcggaggcggtgagcgagccgcacctgggcgcctacatcaacgcctgcgaggagctcaggaccagtcttctctccaggttcccaggaacccaagaggagctggagaagcccctggtgacggccacctgcagcttccagaagcacttgcttcagggcttgcagcgtgagttgcagccgctcttcagggttgtgtgcaccagggactggctgacgcaggactggctgcatcccctcatggacaaggtggtgaccttcgccggtcatctccagcgtgtggcccggccgcgggcacaggagactctgcaggaggtgcaccggttcgtggtccgcgagtacctggcgcgggcgctgaggccacgggagcggttccggggcatggagcgcatgcatggctcccagaagatgagcctggatgcccaggccatcagcgacaccttccagggcctgggttccgaggccacatggttggaccaagccatccagtgcgtggctgagatcctgggcgagacctacaaagatgacatccagcggcacctggagactcttatccggagctaccccgacatcaggcgggaccacatactggccattctggcgctgcgccgactgggccgccagcggaaccagcatctcttgcagcacactcaagacctgctgagagctgcggccggggcggcgggtgcggaggcccctcggggccgcgtgctcttcgaggagatcaaggtgcccagtgccatggctgtgctgatcacctgcgtctag

SEQ ID NO: 119168 - DNA, 1000 bp, Homo Sapiens
gaagaagaatcccgccatttgggagggggtgaaggccagaagcctggaggaaatatcaggcgggggcgagttaggcgacttgtccctaattttcgatgggccatacctaataggcatattgagcacaatgaagcgagagatgatgtagaaaggtttgtagggcagatgatggaaatcaagagaaagactagggaacagcagatgaggcactatatgcgcttccaaactcctgaacctgacaaccattatgacttttgcctcataccttgaatcctaaaagttttcgctgaggttaatgtgaacactgctttacaagcttgtatttttgtgatttactttttctgtaagccttttggggtttacacttaccagtttctaatggaaattagaattctaattgaatattgttttgtctcagcctaaaagttacggtcagcatggcaattcacctattttaggaaaaatactcttttcataatatgaaatgcataaagcagttcaaaaagcagtctgtattccatcatcttcctttttcattccagtccttatttttgtaagtattacttttcctcctccggctacctggactcaaaatctcagttgtctttgacagtttttttcttgtccctgaccaaaaaagaatgatcatacccagaattcaatgtttgatattttaagaatgtatgttctagtgtttttcagagtgagtctaccatctgtataaaaacaccttgggggcaggcaggggcatttaaaaatgtaggacctatcgtccagactcacagagtggggctccagaatctccatttttaacaaactctcttaagtaattctgatgtgtaccaaaatcagtgccattggtgtgtgtgtacgtaactatatacatatgtgtgtgtgtgtatatatataatgtgtcataaccgtaaacaataaacaatatcaagataaatctgactttgatgggcaagtaattaaaaaagaaaagtatgagaccttaaaa

SEQ ID NO: 119169 - DNA, 1000 bp, Homo Sapiens
ttccttttttcctctcagttgcctacacttggttttaataaattactcagttgagtttttctttaaccacagaaacccaaatcatattgccctttcagatttagtcttcatggggttggattatgtcttatattttctctgtcagagttatttcatatatggattttacttgaaggaaatttacagtttactctaaattgatttgttcttggaacttttttacctgctgtgaattgatacctagttataaaaagctagcatttgcctagatcataactatgtatggtatctagttagaaaaaaacaagcaaaaagctattatgagtttccaagagggacaattaatgcattttcataccaaatgcgaatatttaggtgatcacgtgcatcttttcttgtatggatggaaaaatcaagaattgtacactgtttaatgagttctccatattcctttaggagatatttgctttgcaattacatgttacaattagaataattacaattaaaataatattacatgttacaattagattaatagtgatgagagggaaaaaagacacccttctgtttttttctctcaagccagtctaaaaacttgaagagccatttaaaattaaatgtcactatacttgtattataaatcaatacataagtttaaacctgttatatactcagtgcaacagaaaaacccatatggaggttcaaccactgatgtattttgaatgatcctaaatataagtcttgggtggctaaatggccctctgcttaccagtctgaaaatgaaaccgattatactcatcggccttatttactgtaatacaaactggttaaaactatgttaactgaatgctagtttgaaacaaattatctacattaagtcatcttaatgttttctctttaaaagaaataaaaaaatctgtttcttctgatttcgaaagtaatagaaactctgctgtagaacataaactaaaaatattaaaaagtataaaggtaaaaaatg

SEQ ID NO: 119170 - DNA, 1000 bp, Homo Sapiens
tgagtgaggaggagacagaacaccctctcctgcctctgccccgagccactaaacccagaatctccaggaaatttcgttgctgtactagtgccctcagcaggtcttcccattagtggacttctgaagcccatggtgaatcccactaccgtgtctcagatgggactcaaactaggctgtatcatcttgtcctgaaacctcacaaaccttggacttccaaagaagaaaagaaaaagtcaccaaaaaccagagatgaacccactgacacgtgggcactggtgtggctgctctgggcagatgacagcaggaaaagattctgcgctttcagggagggggcagagggcagcttgcttctgcaccccaagttgtttcttctcatttatgaacccaagcatgattcacaaaggggctggcaaaacaattgtctaattgaggaatctgatctgcattgattttgctagttccttttatgttaggatttatggtttactcaaaaatttcatcatcatggaaattggctttccccggggtcttttgcccaggagaagttttacctcagttgtccagtgttttcccacatggtacctgacgcccgctaactaagcagaggctctcctcaccacgcagaggcgcttcaggtcatgacagtgatgcccctatcttagaacactcagaagattccagaaatacagggtcctgtccttgcataagttcctgcaggacaggaagtgtcccaaggctcaaaacaacacagaccacatccacacaaaaggcgcatgccggcttcaggcgctaggctgagacgggtaccccccgaatggccttgtgcctccaaaagcctcacgctgcaactttgctgctcctgtctgttgcccagagaggcctcacacaggcctcagaaatgtttcttgtcacacaaagcttttggtagccgattccaagcgagggatttaatccttacatttttgcccatttggctccaaggaaggcttattagacctgt

SEQ ID NO: 119171 - DNA, 1000 bp, Homo Sapiens
tgcatgaggtaggtgttctgagtaatattctgcattatattgagagacaaatttttagttttagttaaaattaaaaataaattagtatattattttactaattttacttttatgaaaatgcagtacatgttaaaaattttagattatgtgtgaacttaatttcttaattcaacatttttaacagtttaaatattgtgcattcaatcaagtcacattattccacttactttaacctagtccaccttactcaagggtgtaggtaaaaggtggtaacaaggccgggcacggtggctcacgcctgtaatcccagcactttgggaggcaaaggtgggtagatcacctgaggtcgggagttcaagaccagcctgaccaacatggagaaacgccatctctactaaaaatacaaaattagccaggcatggtggcgcatgcctgtaatcccagctactcgggaggctgaggcaggagaatcacttgaacccgggaagcagaggttgcggtgagccgagatcatgccatggcactccgtcctgggtgacaaagtgagactccctctcaaaaaataaataagtaaataaaataaatggtggtaacaatacactatttggtaaaagaatgcactaacatctgtagtactaatcttttttccagtggctttaaactgcaaataaggaatgttgtttctgtaggtaaaatttttatttattttttcccatttaaatttacttttgttagttttttcaggcatataatatttatgttatatatggcatattctgataagaggcatacaatatgtaataatcacattagggtaaatgaggtatccatcacctttagaatttattttttgtattatgaacagttcaattgtacagttttagtttttttaaaatatacgattgttattgactacagggttatttttataataaaaattatatacaagtataaaatttacacatttctgagtcctgaataaataaaaataatttcttgt

SEQ ID NO: 119172 - DNA, 1000 bp, Homo Sapiens
ggaggtgactgtgtcccgctcggggggccacgtgtgctggctgcgggagggggccgagctgtgcccgggagataagtatgagatgcgcagccacggccccacccacagcctggtcatccatgacgttcgacctgaggaccaaggcacttactgctgccaggccggccaggacagcacccacacacggctgctggtagagggtgagtaaagccaactgggcagcggcaggagggtgagggcgcctgggagctgatgggttaagccacacctatgggaggctttccagaacttggggtggcaacgggtcctgggatacgtaggaggtggggatgggggaggggaggggtagagcacacccagggctggaaagccctggaactgcttggctcagatcagctgctcctggtcagctgttcccacctttctacgccccttcttgccaggcttctcctctctcctgccactggaccatgtttgtctctcttgaacagccctgtttctaccagttcctttcctccccacttcaccaacactgccttcctccagcctgtccctcctccttcctgccctctgcccagcttgcctctgcccatctcagcaagttccatgtcagccttggcagaagcctctttctttcctcttccccataagagacatcccaccttctatcccaaatcccagcattcccttcaggtgccgcgctgtgccccacccctagctgacccccaccttcctgccgccaagacagccctaaccaaggcccagaaagggtagggcagaacctgggggcccagctctttgtgtactggtgtccaggctctgccaggggagaggaaggtggtacccccttctctccccagccccatgtggagtcattcctctgcaggcaactaggagaacctaaccaggccaggcgggtgcccttggacagcttggaaggcgtttgcccttaccctgggcaggggtagagagacaaggaacaataaaagtgctacagctc

SEQ ID NO: 119173 - DNA, 1000 bp, Homo Sapiens
aatgtcacattaagcaaagcagccagggtctcatcgtgttgagactcgagtctctcagaccttggattcattccctggtgtctttgagcctcagtttcctcattggtaaaagagaagtgaagcagtgtctcacagggtcattacagagattaaatgaaataaatgaaataacatagaccaggagggcgtggtgtttaaaagtcacagatggggcaccctcgggccatccagcccagtgttttctttagcccctatgatgttcattttttgttatatcccattaggtgcccatatttaaaaattgggagatttcacataaaattaaaaggtctgcattttcttttttcttttctttttttttttttttgagacacagtctcactctgtcaccaggctagagtgcagtggcacgatctcagctcactgcaacctctgcctcccaggttcaagtaattctcctgcctcagcctcccaagtagctgggactacaggcacgtgccaccacgcccagctaatttttgtatttttagcagagatggggtttcaccacattggccaggatggtctcgatctcaacctcgtgatccacccacctcggtctcccaaagcgctgggattacaggcgtgagccaccgcgccaagccaaggtctgcatttttctttagaactcagaacacccaatagtcctaggcccccatcctcgcatggcagcaagctaaataagcatcttcccactgcgagttggggcatgacccagcctatggtttgccatactccctctttttctccgttttttcattaattgtgaacctgacctgcatcaccctttcatgtcagtgctctccaaacctgcttgcttgcacccctctagtcgaaatattttgtgcttaccccaatatatgtgtgtgactattgaactctattcgtagactgcttgtactaatgtcatttgcatcataaaatattcatatccaataaacatattaaaaggatgagataa

SEQ ID NO: 119174 - DNA, 1000 bp, Homo Sapiens
agattggtgtcaaaattaatgagaagagtggaaaaatacctgtaaatgatgtggaacagaccaatgtgccatatgtctatgctgttggtgatattttggaggataagccagagctcactcctgtcgccatacagtcaggcaagctgctagctcagagactttttggggcctctttagaaaagtgtgattatattaatgttccgactacagtgtttactcctctggagtatggttgctgtggattatctgaagagaaagctattgaagtatataaaaaagagaatctagaaatatatcatactttgttctggcctcttgaatggacagtagctggcagagagaacaacacttgttatgcaaagataatctgcaataaattcgaccatgatcgggtgataggatttcatattcttggaccaaacgccggtgaggttacccaaggatttgcagctgcaatgaaatgtgggctcacaaaacagctacttgatgacaccattggaattcaccccacatgtggggaggtgttcacgactttggaaatcacaaagtcgtcaggactagacatcactcagaaaggctgctgaggctaggcctgctgctgtttagttctccttgtcatattctcatttctctcaaagataagaatgctctcggataaaatgagcctgtgctcatgacagctgctctgttactcagggaccagtgcagggctgtcttacgacacttagatgagaaagtagacaaggaaagaggacagcagtgggcatctgccttgtggtcttgctgacagcgagaagcagtgggactgcttccttgacgccttagcttggagccccgttatgaggtgagccaaggctgactctcgcaagccaggactgagcttccctcggaaagacctttgagtggcaccattcacctaagttagcttttctggtcgctattgtttttatcccctttgctttgttgtttctgtgaaaatatattttcagttaagaaatgc

SEQ ID NO: 119175 - DNA, 1000 bp, Homo Sapiens
cggcggcgacgggggccgggccgcgcgtgacccgccgcagtcacgccgttcttaatcactagtagctggtgctccaggctggcggcgctcacctttctcctagccgggtgacccaggggatttattttatgttggctttctctgaaatgccaaagccacccgattattcagagctgagtgactctttaacgcttgccgtgggaacaggaagattttcgggaccattgcacagagcatggagaatgatgaacttccgtcagcggatgggatggattggagtgggattgtatctgttagccagtgcagcagcattttactatgtttttgaaatcagtgagacttacaacaggctggccttggaacacattcaacagcaccctgaggagccccttgaaggaaccacatggacacactccttgaaagctcaattactctccttgcctttttgggtgtggacagttatttttctggtaccttacttacagatgtttttgttcctatactcttgtacaagagctgatcccaaaacagtgggctactgtatcatccctatatgcttggcagttatttgcaatcgccaccaggcatttgtcaaggcttctaatcagatcagcagactacaactgattgacacgtaaaatcagtcaccgttttttccctacgattacaaaactgccagtcctatatggagtctgatcacaagactgcagtttcttcacagatctcaggaagttgtcgtggggcagaggctttttaaaaacatgtgattagggagctatctttatctgaataataacgaatttttaggtaaaacctgagatagagtactacaaaatcatgttgatgacttcagattttggaagttaaatcatgtctgttatttgcattctttagaaacttgactaagtacctgaattcatatttctattctactgtgcaacatagtgatgattcagaaatttttcctttggggaaaaaaatgaatatgaacatttccatt

SEQ ID NO: 119176 - DNA, 1000 bp, Homo Sapiens
ctcccgagtagctgggactacaggcgccaccaccttgcccaactaattttttgtattttttagtagagacgaggtttcaccgtgttagccaggatggtctcgatcttctgacctcgtgatccgcctgcctcagactcccaaagtgctgggattacaggtgtgagccaccacgcccagccttttttttttctttcttttgagacagaatctctctgtcatccaggctagagtgcagtggcacgatcttggcttactgcaacctccacctcccaggttcaagcaattctctgtctcagcctcccgagtagctgggattacaggcatgcaccaccacgcctggctaatttttgtatatttaagtagagacaaggtttcgctatgttggccaggctggtcttgaactcctgacctcgtgatccacctgccttggccacccaaagtgttgggattataggcatgagccaccgtgcctggctgatgctggagcttttatgtgacatggtgactcttaaaactggggagggacgtagagatgagagtttcacacaccagcccataggtgggatgtcaagacccatcggaagtgtcgctggcctaagagaagagcacttatttctcaccatggctgatctagaattgttccctgattctgaaagaagtttacactacactggtaagcagtactattagactactgactgtggccttctgtgcatatggaataatgatttctcagatttgtaggcttgaatgtgaatgttattttatcagtaatcagaataaattgcttatattcaggagttattttaaatatttaaatgaaatttattttaggcaccaagcactacataaactcataataactatttgcaatgcattagcatcactcacggggtaatgaaaacataccttagctgctgtaaaagcaaagtcttccgtgtccgggtgggctgaaagtttttaataaaattttagctaaacatttgtttaagtgaatact

SEQ ID NO: 119177 - DNA, 558 bp, Homo Sapiens
atgctggcagaactgatatttctctttaggagtctccatgggatacttgcctccgcaggcaccataggagcagtggcagcttggctgatgagctataagccagccttgtttgggttcctattccttctgctgttgcttagcaactggttggtcaagtatgaacacaagctcaccctcccagagccccagcaggaggaagagaaaccaaagacttctgaaaacgactccaagaacagcaaggccgtgaacacaaaagaagtcaatagaacgcatgcctgctttgccctccaggacgagatcctccaacggctgttgttcagtgaaatgaagatgaaggtcctagaaaatcagatgttcatcatatggaataaaatgaatcaccacgggcggtcaagcagacatcggaattttcccatgaaaaaacacagaatgaggaggcatgagtcaatttgccccaccctgtctgactgtacttcgagttcccccagctaatgaggccgaggcgggctggcctctgccgatgttaccttttacctcagtaaaacccagtcacagcct

SEQ ID NO: 119178 - DNA, 1000 bp, Homo Sapiens
cccgggagcggggtcctggtgtctgttcacaagcgtggagttcagtgcgcaaagaaactaccctgacttttacttctgggcagatggggtggagggagtaccccttcaattcagccttacattttcctgtttgaccaaagattgcccaagtctggcgttcctcccttgcaggaggtggaggttgttggtggaggaggagccatctttgtttgctggtgcccggaatggtctcctcttcttctttccctatccctccaaactgtcttgtaagatgagacctggggaggaaacttctttttggaaattggtgtagaagaggtgtgtggggctacctctatgctcctctgcaaggggcctttggcgatgttctggacatggctgaagattgacttagagattgaccctccacctcgacattactgacatttggggccaggtgattctttttgaggggactgtcccctgcattgtaggatgctgagcagcatcccgggcctcaccagatgccagtagtgccatcccccaaccatacccctggttgtgacagcccccaaaaatgtctctagacattgcgaaatgttccctgcagggcaaaattgcccccatttgagaaccactggcttggagaagggactacaaatgtacttcctcccccattcttttgacgctaagccaccctggtcctgacgcctcccctcacttagaaaaggcatacaggaggccgggcatggtggctcacacctgtaatcccagcactttgggaggctaaggtgggcggatcacaaggtcaggagttttgagaccagcctggccaacatggtgaaaccccatctctactaaaaatacaaaaattagctgggtgtggtggcgggtgcctgtaatcccagctacttgggaggctgaggcaggagaatcacttgaacctgggaggtggaggttgcagtgagttgagatcacgccactgcactccagcccgggcgacagttcaagactccatctc

SEQ ID NO: 119179 - DNA, 708 bp, Homo Sapiens
atggacagggagacactcctcacgaaggggtggtcctcatcctttcagatcaacttcctgctggaggctccaccctcaccacgtccctccctcttctctcatctggagtcaccttttgggattttggagttgagcaccatggggactccaaatgatcaggcagtgctgcaggccatcttcaaccctgacaccccatttggagacattgttggattggacctcggagaggaagcagaaaaggaagaacgagaagaagatgaagttttccctcaagcacagctggaacagtccaaggccctggagctgcagggggtgatggcagcagaggctggggacctcagcacagccctggagaggtttggccaagccatctgcctgctgcctgagagggcttcagcctacaacaaccgtgcccaggcccggcgactccagggagacgtggcaggcgccctggaggatctggaacgcgcggtggagctgagcggcggccggggccgcgccgcccgccagagctttgtgcagcgcggactcctggcgcggctgcagggccgagacgacgacgcccgcagggacttcgagagggcggcacggctgggcagccccttcgcgcggcgccagctggtgctgctcaacccctacgccgcgctgtgcaaccgcatgctggccgacatgatggggcagctgcgccgcccccgtgacagccgctga

SEQ ID NO: 119180 - DNA, 1000 bp, Homo Sapiens
gagggcccaggccctggtcccccagtggaccccagtggtctagaggaatgtgagccccgcctgtccgcacagtgtccgcccacctatttatgacatatttaatgctgggtcccccatcgtccctggaacccgaggcctcactcctgtgcttgaaggtggctgaggccgggccagtcttcctggggatggggcctgaagcctcagggagcccctctgttcccactcctgtcatttgaacccctctgggtggggtttggatgtgcctcgcggggttggatttatgctgacctgctacttaccaggcccaggctggggtggtgtgaaccctcagtgtcctgtggcgcccccaccccggggccactctgcttctgctgtgagccccctcctcgcccaccccgccacgtggtgagggttattttaagttctcagagacccaccgcgtctgcctcgtgctcttcttgcccctggagcgctgggggcatcctgagtcaggctgtgagaagattcgccaccagagggcgccccgggccctgggtcgtccaaggggacaaggacgttcccgtctgtgcttcggggttccctgacccccccatcctgcagcccaccttcctgcagtgtcgtggcaggcgacaccgactcctaggcgccctccagagccaagcagcttgcgacttctggtaggcaccggaatcccctgggatgcttgttttaaaagtcctgggccgggcacggtggctcacgcctgtaatcccagcactttgggaggctaaggcgggtggatcacgaggtcaggagttcaagaccagcctggccaacatggtgaaaccctgtctctactaaaaatacaaaaattagccggacgtggtggtgtgcgcatgtagtcccagctactcaggaggctgaggcaagagaatcgcttgaacccaggaggtggagcttgcagtgagccaagatcatgccactgcactctagcctgagtgacagaatgagactctgtccc

SEQ ID NO: 119181 - DNA, 1000 bp, Homo Sapiens
agaaagtgaaaaagaaggtaatggaatatgaatatgaagctgagatggaggagacttaccgcaccagcatgttcaaaactttcaaaaagactctggatgatggcttttttcccttcatcatcctggatgccatcaatgacagagttaggcattttgaccagttttggagtgcagcaaaaaccaagggatttgaggtatatttggctgaaatgagtgcagataaccagacttgtggcaagagaaatattcatggaagaaagcttaaagaaataaataagatggctgatcactgggaaactgcacctcgtcacatgatgcgtctagatattcgttctttgctgcaagatgctgctattgaagaggtagagatggaagattttgatgcaaatatcgaagaacagaaagaagaaaagaaagatgcagaggaagaggaaagcgaactgggttacattccgaaaagcaaatgggagatggacacatctgaggcaaagctagacaagttggatggcttgaggactggtactaaaaggaaacgtgactgggaggccattgccagcagaatggaggattatcttcagctccccgatgattatgatactcgtgcttctgagccaaggcctcgcggagcttctttgtgtgtcaccttgcttccacgtttcagttcttgttttgtttctactgctttagttttttttaaagttctccagtgtccccaagaggtattagaatcttgctgtacccaagcaagacgttaatttttcttttaactgttttggggagggagggagtgatagcttaactgctgaagccaggcgggggtctgctggaggattccaacagagagtatttcctccactgtacaatgtcacagactatctctatcatcattgctttgtggctgtttctgttttttactgtatgtaactggtagctgattgtactaggattaaaaacaataaactttcatgataaagccgatgagattcatgggctatacagc

SEQ ID NO: 119182 - DNA, 595 bp, Homo Sapiens
agaaggaagaggcactgccacatgctggaggctggaacctgtgccatcatggctcgcctcgctgtgattgtcagtgatgtcggagactgcagctcagccacagtggtagaaatgtgatggggtagatgttttcctagaaacatgattgtttattggcattgatctcacagtctggtgaggacttctttactgataatgtcaagttcaggttaccctcccaaccaaggagcattcagcacagaacaaagtcattatcctcctcactctgtaaagtatacgtttcccagcacccaccaccagcaggatccagcatttggaggcaaacatgaagctccatcctctccaattctggggcaaccgtgtggagatgatcaaaatgcttcaccttcaaaactttcaaaggaagagttaatagagtgtatggatcgtgtagatcgagaaattgcaaaagtagaacagcagatccttaaactgaaaaagaaacaagtaaaagtcttcgtctaatatattctaagaatgtatgtttttctccctacagaagatatttttgagttttccatattttgaaactttacataaaaggaatcattcctta

SEQ ID NO: 119183 - DNA, 767 bp, Homo Sapiens; identical to SEQ ID NO: 56644

SEQ ID NO: 119184 - DNA, 1000 bp, Homo Sapiens
ttagtacatttaatttggtacattttcataaaatatgaagggataactacaaactggagtaaaaatgatggtaattaaaaaaaatcctcagtatccctagcttgtctattaactgtgataatctgacttgagtcagattgaatatttggagtgcttccccagaataaccacttatttttgaagctatcatgtgaagtatttttttaaaacaaaacaaaaattatggtcattaaaaaactagagaattagccatattaaggatttttcttgactgcaaattacttctaaagaatcatcagtgtatagattagaagtgctcattacctgcaacttttaaaaaaaattcagttatagctgcttttgaagaggtttccatttttatttaaattactaatggatcaaagaacaattgtttattttttctctttggttttagatattaatgataaccttgttggaattttttttccaaagaaaatatttttataattaaataatttaatgtttttcttccttttcattacctactcttggcagtgttagggtatctgtttacctttaaaatgataagtctcactcaagattttttatgtatgtataaatattttggtgtgctacaaaagcctttgcaaattatcagtagtagtttttttttttttttttttttttttaaagaatgagccgatattggcttagtgctcactaggggacatgcacatggaagctcacctctaagaaagggctgggcagatggatttattttttcccacctgtgaatatgtaaaacaaaaccattatctttgagggagtttttaataccaatgacagaacagagatttgtgtgctcatcttaagagccagagccatataagcatcttgggaaagcaagtttgaaccagctgctggtgtaatgtacagttatatttgtctataaatggagctgtttatggcaatttaataccattctctttgtaaagtgaataaatattcatctttaccc

SEQ ID NO: 119185 - DNA, 1000 bp, Homo Sapiens
gtactccagcaaagtcatagctgaagcccaaatcgctcaaacgtgtgaagtcaatcatttttcctatagggctctgtttccttttctttaccttctagcttctcttgataaaacagttgggagaactgccaacgtgttcatcagtgagagggtgtggttctttccgatatgttcagcacgtgcatattcatttatgagaaaccaaagtaacttcttcaactcgggttactgtgggatgattaagtagatataaagtgatttaaaagacagcatggtactttcactcagcttaacatgcagctgggatgtctacaatacaagatgtggtgggttttattttattttattttgaggcaggagtgtaattatcttagggttgatataaaggcccatgggaagagttacggattgtacatgggaagaatccataaggagtattgccttgctcaagaatttaatccgctgacagtatgcttcttccagtttgccttacttcctctgcaagtttctttgctccttagggcagaggttttattgaatagattaaatgaggtcagtaagattagttaaaaatagtcattccttgtgggtgttggacacagcttgaaaggagtgtttaaaaaaaaaaagctagggaggaaaagaacaagaaagatagacttcgagagtgataagagaaaaatacagggagatggaatggaaactaccaggaaggccgggcgcggtggctcatgcctgtaatcccaacactttgggaggcggaggtgggcagatcacctaaggtcaggagatcgaggccagcctgagcaacatggtgaaaccccgtctctactaaaaatacaaaaattacctgggtgtggtggcgtgcacctgtaatcccagctactcagaggctgaggcaggggaatggcttgaacctgggaggcagaggttgcagtgagccaagatcgcaccattacactccagcctgggcgacaaagcgacactccatctcaaattt

SEQ ID NO: 119186 - DNA, 761 bp, Homo Sapiens
atggctacctgcaagatagggcctggtccatgttctttgtccattaaaccagattgtggttgctttgtcttgtgtcaaccttacagaatatcaaattatgagaaacaggaagtgatttccccccggaatccttggtctgatttcagattagaatcagctatcgtgccttatgttctcacagggttcaatcttgtagtggattcagtggtcctagttcacctcctcagctgtgctgatgtcatgaaaaccagccttgacctcacaaactaccccttgatgatgctgaccgctggactactaatatccaactgcctgtgtcatttcttcatctttccttggtgccaaccatgcctgcatatcagggcagcattctatgatcccatggctctcacatcgacagaccacaacactaagccaacaatgatacggcgtccaccagcagttgtttgctacatttgtggtcgtgaatatggaacaaaatctattagcattcatgagccacaatgtctgaaaaaatggcataatgaaaacaacttgttgcctaaagagttaaggagaccagtacctaaaaaaccagaagtcaggaccattactgccaaaggcttctatgatcttgatgctttaaatgaagctgcttggacaagtgcccacagccagttggttccctgtaatgtttgtgggcgtaccttcctgccagacagactgattgttcaccaacgatcttgtaaacccaaagccgccaagtaaagcccttttctctc

SEQ ID NO: 119187 - DNA, 1000 bp, Homo Sapiens
agtacagaaattacagaaggaactacagagataccttactcggaagattggctttgaggcagtcatgaggattcggtgcaccaaagtatacatgctgtcgaagtcaaccgacttactgtctttgcctaacgtcaacccagacgctgggtatgcagtacagatgtcagtggaagagagtcttactgacactcagttggtttcttttcagtcagcactcttgtatacatccagcaaaggcgaaagaagaattcgtgttcatactttgtgtttgccagtagtttcgactctgaatgatgtctttcttggagctgatgttcaagcaatttcagggttattggccaatatggcttaccgttcttcagtcttaagtaaccagcagcctggactcatggttcctttttctttgcggcttttcccactttttgtgttggctctccttaaacagaaatcattccagactgggacaaatgcacgtctagatgaacgcatttttgctatgtgtcaagtgaaaaaccagcccttggtttaccttatgctcacaactcatcccagtttgtatagagttgacaatctctcagatgagggagcactcaacatcagtgatagaaccatacctcagccccccattcttcagctttcagtggagaagctgagcagagatggagctttcctcatggatgcaggctctgtactgatgctttgggttggaaaaaattgtacacagaattttctcagccaagttctaggagttcaaaactatgcatcaattccacagcctatgacagaccttccagaacttgatacaccagaatctgccagaataatagctttcatctcttggcttagagagcagagaccatttttcccaatactttatgtaataagggatgagagtccaatgaaagcaaacttccttcaaaacatgatagaagacagaacagaatctgcattatcatattatgaattcctgttgcatatacagcaacaagtgaataaatga

SEQ ID NO: 119188 - DNA, 783 bp, Homo Sapiens
atggattgctcacgcttcccatcccccggactccacccccagcgggaggccacggggccgctgtgcgcacgcgccgccgcacaccgggggctctcgggcacccgcgcggcgccggttggccttcccggcgctcgcccgggggcgcgcttgcgcgccagcggctgcggacaccagcctgcgtccccggcgcggcgggccatggaggccctgaggagggcccacgaggtcgcgctccgcctgctgctgtgtaggccgtgggcctcgcgcgccgccgcccgccccaagcccagcgcctcggaggtgctgacgcggcatctgctgcagcggcgcctgccgcactggacctccttctgcgtgccctacagcgccgtccgcaacgaccagttcggcctctcgcacttcaactggccggtgcagggcgccaactaccacgtcctgcgcaccggctgcttccccttcatcaagtaccactgctccaaggctccctggcaggacctggcccggcagaaccgcttcttcacggcgctcaaggtcgtcaacctcggtattccaactttattatatggacttggctcctggttatttgccagagtcacagagactgtgcataccagttatggacccataacagtttattttctcaataaagaagatgaaggtgccatgtattgaaagtgtgcgtcaaagaacataaatatcagtggattttctctgtgtatatgtgcagtatttatttttgatcctttaaaataaaacttttgcaaatacttttttctttctaca

SEQ ID NO: 119189 - DNA, 461 bp, Homo Sapiens
ataaatgccagccagcatccctgtctctggggccctggagaggccttcaacacacctggcctcactgccctgtggcttcaacaaagaggccgagcatctcctataaaccttgaggtccatggatgacatagcggaatgatggatttcagaaaaggcaggtgcttcccactctttaaatttttgtttattctttccaagtttcccatcaacagccctgcagtaaaaattcagggcttcagagacaaatatttcatgagtacagactgtgatgaggaaaagcaagccattccctctctatcaggatccagagcacactgctgttacgactccagaaccgataaggaagctatgtgtggaagtatgagctcaggtcgccttctgaccctctgtgacggtctatttcaggcagttatggatagataacattacagacactggtaattaaaacaacactaattttg

SEQ ID NO: 119190 - DNA, 566 bp, Homo Sapiens
atgacgtcggccgtatcggggatgctggaacctgcggttgactcctttgcgaagctgctgtcctttcctcaacgttaccacccggctgggcagcctaccctcgcagcaacaggtgtgcaccttccaagcttgcaacagaccacattcagaagcttgatttcttgttgttctgggaatatctggatcagagatttctccaagccactctccccgtcatctcctccacccccaggacccaactcctgcccctcccaccctagcccctgttctccctgcccacctcctaccccactggagtggcctttcatcaaacctaaaccaaagaaaccaacagaccttgctgtcaccactactccgggacctggaagttaaagcgagggagagacggtgaaacacagaaagcagaacgccttctgttcttccacaacacagggtttgtggacgtggccactataagaactcgcactgcgtgctgattatactcctcagcacaattcatttcttaaactttttagaataatttaaaatttacaaaaagttgcaaaaataaaaaccagtaaactttt

SEQ ID NO: 119191 - DNA, 1000 bp, Homo Sapiens
tgtgtccttgattcccttcttgcctgacactgtctcatttggtggtatctgtgacctctggagcacatctgatcaatttcttgatctcctggcaggggatgaagaagaacatgcagtactattgtgtaattactttctgtctctgggtaagaaggcctggctgttgatgggcaatgctattcctgagggtccaactgcctatgtgctaacttgggagcaaggtcgttatttaatatggaatccctgcagtggacatttttatggacaatttgatacattctgtcccttgaaaaatgtgggctgtttaataggtcctgacaatatttggtttaatattcaacgatatgaatctccactaaggataaattttgatgtcaccaggcccaagctatggaaatctttcttttcaagaagccttccatatcctggcctttccagtgttcagcctgaagagctaatttaccagcgctcagacaaagcagctgcagctgagctacaagacaggattgaaaaaatactaaaagaaaaaatcatggactggaggccacgccatctgactcggtggaataggtattgtacctctactctgcgtcacttcttgcctctgttagaaaaaagtcaaggagaagatgtagaagatgaccacagagcagaactgctaaaacagctgggagactacaggttctctggatttcctcttcacatgccttattctgaagtgaagcctttaattgacgctgtgtatagtactggagtacataatattgatgttcctaatgttgaatttgctttagctgtatacatacacccataccccaaaaatgttttgtctgtttggatctatgttgcctctcttatacgcaacaggtaatttttttcactgtactttctgtatcatgtaaaaactacacttaggatatgagaaaattttaaattatatgcatcacatcagaagaacatattattggcaaataataaaattatcaactgttttcaaact

SEQ ID NO: 119192 - DNA, 677 bp, Homo Sapiens
atttccaactagctggcgggggcggaagatggcgacgcccctcgggtggtcgaaggcggggtcaggatctgtgtgtctcgctttagatcaactgcgggacgtgattgagtctcaggaggaactaatccaccagctgaggaacgtgatggttctccaggacgaaaattttgtcagtaaagaagagttccaggcagtggagaagaagctggtggaagagaaagctgcccatgccaaaaccaaggtcctcctggccaaggaagaggagaagttacagtttgccctcggagaggtagaggtgctatccaagcagctggagaaagagaagctggcctttgaaaaagcgctctccagtgtcaagagcaaagtccttcaggagtccagcaagaaggaccagctcatcaccaagtgcaatgagattgagtctcacattataaagcaagaagatatacttaatggcaaagagaatgagattaaagagttgcagcaagttatcagccagcagaaacagatcttcaggaatcacatgtctgacttccggatccagaagcagcaggagagctacatggcccaggtgctggaccagaagcataagaaagcctcagggacacgtcaggcccgcagccaccagcatcccagggaaaaataaaatggccgccgctttcctgttctctggctgt

SEQ ID NO: 119193 - DNA, 1000 bp, Homo Sapiens
gccggtgtgcacagtgtgctgagttctcagttcctggccctgtgtacgctgaaaccctccctggtggtggagctggcaagagacctgctggagttcctgggcagcgtgaatggtctctgcagcagggcgagcctcgtcaccagcgtggtgtgggccatcggcgagtacctgtcggtgacctacgatcggaggtgcaccgtggagcagatcaacaagttcttcgaagccctggaggctctgctattcgaggtcacccagtgccgcccctctgctgccctgcccaggtgtcccccccaggtggtcaccgtgctgatgaccacgctgacgaagctggcctcccggagccaagatctgatccccagggcctctttattgctgtcaaagatgaggaccctggctcacagtccagccaccagctccacgcacagcgaggagggcgcggaagccatccgtacccgggccacagagctgctgaccctgctgaagatgcctagcgtggcccagtttgtgctcacacccagcacggaggtgtgcagcccccgctatcaccgcgatgccaacacggccctgcccctggccctgcgcacggtcagccggctggtggagagggaggccggcctcatgccagggtgaagggacagtggccagggacttcggtgcagattaagagcctgggcagccagcttgctactgaggccaggctgataggagctcaggagggcgcgggagtcctgggagaggaggcaaggcccacggtgggcttggcaccctcacagacacgcggggctggcccccctgctcaccctctgggctttgtctccgagccttttgctcccaggcaacactgagctgagctgaggggtgccatggagcggctctgattggaggcttgaggccctgtggctgggtcgggtggaggctgctgggtctgtttcctagtcttttgtttttggacagttgatgggcaagaagagctgcagtaaaagtaaatctcctttaa

SEQ ID NO: 119194 - DNA, 1000 bp, Homo Sapiens
cagagaatccacactggagagaaaccctatgagtgtgatcactatggaaaagcctttagcgtgcgctcaaccctcactgtgcatgaaagaatccacactggtgagaagccttatacttgtaatgagtgtaagaaagccttcagtgtaagggcacacctgattatacatcagagaatccacaatggagagaaaccctatgaatgtaatgagtgtggcaaagcatttagtgtgagctcagaccttatcaaacatcagagaatccatactggtgagaaaccttatgagtgtgatgagtgtggaaaagctttcagtgtgagctcagccctcatcaagcatcagagaatccatacaggagaaaagccgtatgagtataaggaatgtgggaaggccttctatgtgaactcagcacttattaatcaccagaggattcactctggagaaaagccctatgagtgtggagagtgtggaaaagcattcagccagatctcaacgcttattcatcaccagagaatccatactggagagaaaccgtatgagtgtgaagagtgtgggaaagctttccatgggagttctaaccttactaaacaccagaaaacacatgccaaaggaaagtgtcatcagtgatttatgtggcaaatatattccaaagggcttttgttacatcggaagataccattgaaagaagagtatggttaaagttaatgccttaattgacacttcacccttgaaatactgaagtgagaagtcactcaaaagtaactccatcagcattgtttctaaggctctaaaatcacatctacttctgagaagaatggagatttacagacagtcatctgggtggaggacacccttttgggatcagcactgaaagtgacgccatatcccactccaaaccagcacaactataaatactaagcagtgagtggtattctgaagactttgaaggaggagctatttctgaaaataaatttattttgttgaagaatttaaccattaagcg

SEQ ID NO: 119195 - DNA, 1000 bp, Homo Sapiens
gaattccagatggtcaaataaaaaaaatgttcctaaacttggtgatatgaattcatcatttgaagatcaaagacaagctgaattagaagctgctcggttagctaaggagaaagaagaggaggaagtcagacagcaagcattgctggcaaagaaggaaaaagatatccagaaaaaagccattaagaaggaaaggcaaaaacttcgaaactcatgcaagacctggaatcatttttctgataatgaggcagagcgggttaaaatgatggaagaagtggaaaaactttgtgatcggcttgaactggcaagcttacagtgcttgaatgaaacactcacatcatgcacaaaagaagtaggaaaggctgctttggaaaaacagatagaagaaataaatgagcaaatcagaaaagagaaagaggaagctgaggctcgtatgcgacaagcatctaagaacacagagaaatcaactggtggaggtggaaatggaagtaaaaattggtcagaagatgatctacaattactaattaaagctgtgaatctgttccctgctggaacaaattcaagatgggaagttattgctaattacatgaacatacattcttcctctggagtcaaaagaactgccaaagatgttattggcaaagcaaagagtctccaaaaacttgaccctcatcaaaaagatgacataaataaaaaggcatttgataagttcaaaaaagaacatggagtggtacctcaagcagacaacgcaacgccttcagaacgatttgaaggtccatatacagacttcaccccttggacaacagaagaacagaagcttttggaacaagctttgaaaacatacccagtaaatacacctgaaagatgggaaaaaatagcagaagcggtgcctggcaggacaaagaaggactgcatgaaacgatacaaggaacttgtcgagatggtaaaagcaaagaaagctgctcaagaacaagtgctgaatgcaagtagagccaagaaatga

SEQ ID NO: 119196 - DNA, 1000 bp, Homo Sapiens
atgggagctgcggctgcagaaggccaggcccctgaccccagccctgccccaggcccacccacagctgcagactctcaacagccccctggtgggagttccccctcggaggaaccacccccaagcccaggggaggaggctgggctgcaacggttccaggacacaagtcagtacgtgtgtgcagagctgcaggccctggaacaggagcagaggcagatagatgggcgggcggctgaggtggagatgcagctgaggagcctcatggagtcaggtgccaacaagctgcaggaggaggtgctgatccaggagtggttcaccctggtcaacaagaagaacgctctcatccggaggcaggaccagctgcagctgctcatggaggagcaggacttggagcgaaggttcgagctgctgagccgcgagctgcgggccatgctggccatcgaagactggcagaaaacgtccgctcagcagcaccgagagcagctcctactggaggagctggtgtcgctggtgaaccagcgcgatgagctagtccgggacctggaccacaaggagcggatcgccctggaggaggacgagcgcctggagcgcggcctggaacagcggcgccgcaagctgagccggcagttgagccggcgggagcgctgcgtgctgagctgaggccgccggcccgggtggcccataacttctcgcgtccccggcgtccgccgccgccccgggcctgcgctgcggacgacccggccgtcccggaggccgcgcgcgtgtccgctaggggccgccggcgcccttccccgtacagggcagggcggatccccgaccccacgggcggggcggccgccgtatttatttgtcaccgagggtgtgtgcgcgctcgcggcgggtgcggggtcctccccgacggcacggccgggccggcggcctcggggagagggatgcctgggcactaccgccccgcgctggcttgccctcctgttctccagagcaataaagttggacgagacta

SEQ ID NO: 119197 - DNA, 391 bp, Homo Sapiens
agaggctggatatacaaagagacaatggcatgaccatctgtacaaatggaactatggcccacaacctgcagcagccagcccaggaagccaacccgtcacctgcagcagccaggatggatgctggcctgccctcagagtctgagagactctcctgccccacagtgtgggctccaccaccctcctgcctgctgtgggaaatcaggagggtgaaggtgaagctggacttggcccagaggtgcccacagggacgcccagagctgcacaagctccctccatcttgcctctgggaccagctctgcattgctccaaagccctcatcagtgtctgctttctgttgcaataactgaatacctgagattggacaatttataaagaaaaaaattatatctga

SEQ ID NO: 119198 - DNA, 1000 bp, Homo Sapiens
gcggaggccggtggcgacgacgcccgctgcgtgcggctgagcgccgagcgggcacaggcgctgctggccgacgtggacacgctgctgttcgactgcgacggcgtgctgtggcgcggggagaccgccgtgcctggcgcgcccgaggccctgcgggcgctgcgagcccgcggcaagcgcctgggcttcatcaccaacaacagcagcaagacccgcgctgcctacgccgagaagctgcggcgcctgggcttcggcggccccgcggggcccggcgccagcctggaggtcttcggcacggcctactgcaccgcgctctacctgcgccagcgcctggccggcgcccccgcgcccaaggcctacgtgctgggcagcccagccctggccgcggagctggaggccgtgggcgtcgccagcgtgggcgtggggcccgagccactgcagggcgagggtcccggcgactggctgcacgcgccgctggagcccgacgtgcgcgcggtggtggtgggctttgacccgcacttcagctacatgaagctcaccaaggccctgcgctacctgcagcagcccggctgcctgctcgtgggcaccaacatggacaaccggcttccgcttgagaacggccgcttcatcgcgggtaccgggtgtctggtccgagccgtggagatggccgcccagcgccaggccgacatcatcgggaagcccagccgcttcattttcgactgcgtgtcccaggaatacggcatcaaccccgagcgcaccgtcatggtgggagaccgcctggacacagacatcctcctaggcgccacctgtggcctgaagaccatcctgaccctcaccggagtctccactctaggggatgtgaagaataatcaggaaagtgactgcgtgtctaagaagaaaatggtccctgacttctatgttgacagcatagccgaccttttgcctgcccttcaaggttaaagattgagtgtctttaatctgcagaataaaaaaaaagaaattg

SEQ ID NO: 119199 - DNA, 1000 bp, Homo Sapiens
tcctgcacgagccgccctcgccgccgccgcccttcgaccactacctgggccacaagggggcggccgagggcaagacccccgacttcctgctgtcgcagtcggtggaccagctggcgcggccgccgtcgctgggccaggcggggcagctcatcttctgcggctccatcgaccacctcaaggacaacgtctaccgcaacgtcatgcccaccctggtgatccccgcgcactacctcaacggggagctgcaggccctgaccgagaagaagctgctggaactgggcgggcggcggggcacgcagcaccgacgccagcctggactcgggcgtagatgtccacgaggcgcggcccgcgcgccgccggcccgcgagggaggagcgggagcgcgccccgcctgccgcgccgccgccgccgcccgcgcccccgcgcctggcgctcagcgaggacacggagcccagcagcagcgagagccgcacgggcctctgctctccggaggacaactcgctgacgccgctgctggacgaggtggcggcgcccgagggccgggcggccacggtaccccgggggcggggccgcagccgcggggacagctcccgcagcagcgccagcgagctgcggcgcgactcgctcaccagcccggaggacgagctgggggcggaggtgggcgacgaggcgggagacaagaagagcccgtggcagcggcgggaggagcggccgctgatggtgttcaacgtcaagtagcgcccgcgcagggcctggcaccgcccctcccgcgcgggcccgcacccagggtgcgcgccccgggggcccgcgggggccctcgcgcgtagctcccagccccaggccggagaggggcccaggggccttggagctgttccgtggttggtgctgggtcgtgtcttgcaagggaccctgtgtctgcctccaagccggggaggagggggggtccagacccccacggggaggtgccggggaggagggctggggggaagcagtgcctgtg

SEQ ID NO: 119200 - DNA, 762 bp, Homo Sapiens
tctttcccttcagtgtgccactgaagatcctggtgtcgccatgggccgccgccccgcccgttgttaccggtattgtaagaacaagccgtacccaaagtctcgcttctgccgaggtgtccctgatgccaagattcgcatttttgacctggggcggaaaaaggcaaaagtggatgagtttccgctctgtggccacatggtgtcagatgaatatgagcagctgtcctctgaagccctggaggctgcccgaatttgtgccaataagtacatggtaaaaagttgtggcaaagatggcttccatatccgggtgcggctccaccccttccacgtcatccgcatcaacaagatgtcgtcctgtgctggggctgacaggctccaaacaggaatgcgaggtgcctttggaaagccccagggcactgtggccagggttcacattggccaagttatcatgtccatccgcaccaagctgcagaacaaggagcgtgtgattgaggccctgcgcagggccaagttcaagtttcctggccgccagaagatccacatctcaaagaagtggggcttcaccaagttcaatgctgatgaatttgaagacatggtggctgaaaagcggctcatcccagatggctgtggggtcaagtatatccccaatcgtggccctctggacaagtggtgggccctgcactcatgagggcttccaatgtgctgcccccctcttaatactcaccaataaattctacttcctgtccacctaaaaaatacaaaaaa

SEQ ID NO: 119201 - DNA, 1000 bp, Homo Sapiens
ttatggtcattcaaacagaaacagaccgacatataacattacattgcctctcagtcaatggctcgctgcccatcaattacactttctttgaaaaccatgttgccatatcaccagctatttccaagtatgacagggagcctgctgaatttaacttaaccaagaagaatcctggagaagaggaagagtataggtgtgaagctaaaaacagattgcctaactatgcaacatacagtcaccctgtcaccatgccctcaacaggcggagacagctgtcctttctgtctgaagctactacttccagggttattactgttgctggtggtgataatcctaattctggctttttgggtactgcccaaatacaaaacaagaaaagctatgagaaataatgtgcccagggaccgtggagacacagccatggaagttggaatctatgcaaatatccttgaaaaacaagcaaaggaggaatctgtgccagaagtgggatccaggccgtgtgtttccacagcccaagatgaggccaaacactcccaggagctacagtatgccacccccgtgttccaggaggtggcaccaagagagcaagaagcctgtgattcttataaatctggatatgtctattctgaactcaacttctgaaatttacagaaacaaactacatctcaggatggagtctcactctgttgcccaggctggagttcagtagcgcgatcttggctcacttcaatctccatcttcccagttcaagcgattctcatgcctcgacctcccgagtagctgggattacaggtgcccgctaccacgcccagctaatttttgtatttttagtagagatggggtttcactatggtggccaggctggtcttgaactcctgacctcagatgatctgcctgcctcggcctcccaaagtgctggaactacaagcctgagccaccgtgcccggccctgaatcgctttagtaaataaagggtctccaagaataaattcatccgaacatgca

SEQ ID NO: 119202 - DNA, 673 bp, Homo Sapiens
agacaggaagaagggcaaaggggaagaacacgatggcttttagcagcctgacgccttggtttttagtttctgtctctagtgacaggtggaaaagaaggatgaggaaggggctttactggcccaaccagaaatagtaactaagaacccatgactgtattctctcccttggacacccctgggaagctctgtactgaaaaaaaatgaaagccttccagatgtgttctgctatggtccacaggctggagggtgcatggaacccacccagaggtgctctgcaatcagcaattcagtgagccattcacagtccaaccagttgccttctgatgagaatgcatcacaccgcatgtggggagggccatgtgggaattctcacacctgttgcctagatgcctgtgtctggttagaaccactgcatgctttctttcagtctacattgaatacgtctttgctgctctgggatccatcctccagtcttcagtcagctaagaaaatgacctgtgggcacgttggcttcctttcttcggattaagtggttgttcagagagaggctgagtctgattgtttacacaagaaggaagtgaacactggctgtgtgcctggcactgttaggagccatcaaaccatgtccagaaaggacgcagggaaaggagatgtcgatgtttccagacatttt

SEQ ID NO: 119203 - DNA, 1000 bp, Homo Sapiens
acaacccacagtccccttgggaacctgtatgagagcaaacctccaagccacaagtgaggatgtgcgtggtttcaaggctccaggcgccagcaaaagctctctactccctagaatgtctgtctcccaagacccaagaaagctgtgtctcatggaggaggctgttagtgaatttgagcctggaaaggccacgaagtcagagacccagcctcaagtttctgccactgttgtgctccttccagatgggcaagcatctgttgtgccccatgcttcagagaatttggcttctcaagtgccccagggccatctccagagcatgcctactgggaacatgcaggcttcccaggagctatgtgacctcatgtcagccagaaggagtaacatggggcacaaggagcccaggaacccaaactgtcaaggctcatgcaagagccaaagcccaatgtttccccctactcacaagagggagaactctaggaagcccaacttagaaaaacatgaagaaatgtttcaaggattgaggactcctcaacttaccccaggcaggaaaacagaagacacccgtcagaatgaaggcgtccagctactgccatcaaagaaacagcctccttcaataagccactttggagaaaacatcaagcaattttttcagacgattttttcaaagaaagaaaggaagccagcaccagtcactgctgagagccaaaaaacagtaaaaaacagatcatgcgtgtacggcagcagtgctgaagctgagaggctcatgacagcagttggacagatactggaggagaacatgtcactttgccatgcgcgccatgcctcgaaggtaaatcagcaaagacagcagtttcaagccccagtctgtgggtttccctgcaaccacagacacccgttctactcagaacacagcagaatgctgagctatgcagccagcagtcaacaagccactctcaagaaccagagtcgtcccaacagagacagacaaatcagagatcagtag

SEQ ID NO: 119204 - DNA, 1000 bp, Homo Sapiens
aaatacctttcctctcctggaagatgaggatgacctctttacagatcagaaagtcaagaagaatgagacaaaatccaatagtcagcaggatgtcatattaacaacacaagatatttttgaggatgatatatttgctacggaagcaattaaaccctctcagaaaaccagagagaaggagaaaacattggaatctaatttatttgatgataacattgatatctttgctgacttaactgtaaaaccaaaagaaaagtccaaaaagaaagtggaagccaagtctatatttgatgatgatatggatgacatcttctcctctggtatccaggctaagacaaccaaaccaaaaagccgatctgcacaggccgcacctgaaccaagatttgaacacaaggtgtccaacatctttgatgatcccctgaatgcctttggaggccagtagagcacacagggtatccacaggttaccctgcagctacattgttgagttagtgatgatgttgtatatgctgatggtcttaactggattacaaaaagcaaatactagaacagctagctcatcgttcacccaatgtacttggtatttttctgcactggtttaatcatgcttaatactacaaaacaaaaataaatatttcacagtggttggtttgttttgtttttaaaccacagtttgatttagttagccttgctggggccataatatgcttcagggtgtgtaaaagaagaaatctctttgtggctttcatgggcagggaatcccagagatagcaaatgccacctgaccagaagtctttgttatatggatgggaaccctaacttagggcctgggcaggggaaagagaaagaaggtgagagattatacttcatgagtcttagcaatatgggagcaggttttcactgaattctgagggtgcctctgcatgtcctccaaggcaaagtttggcaaactgtggcccccccactgtcatattttgttaataaaattttattggaacacaacc

SEQ ID NO: 119205 - DNA, 1000 bp, Homo Sapiens
ctcctcaccagcacagaagccaggcaagctctccgacatgtacccctccacggtgcccagtgtggacagtgctgtggattcatgggatgggtctgcaatagacaccagctatggaactcaaggcactagttttcaggcctcaggatacaatttcaacacctatgactggaggagtccaaaacagagaggcagcttgtccccagtcactaagcctcgaagccagacttacccagatgtggggctgagttatgaagactgggaccggtccacagccagtggttttgcaggggctgccgatagtgcagagacagaacaagaggagaacttctggtctcaagcgctggaggatttggaaacctgcggacagtcaggaattctgagagaactggaggcaacaatcatgtcggggagcacgatgagtttgaatcatgaggctccaacacctcgcagtcagctggggcgacaggccagcttccaggagcgcagcagctcgcggccgcactacagccaaacaactcggagcaacaccctgccttcagatgtgggtaggaagtcagtaaccctgagaaaaatgaaacaagaaataaaggagatcatgtctccaactcctgtggagctgcacaaggtgaccttgtacaaggactctgacatggaggactttgggttcagtgtagcagatggcttactggagaaaggagtgtatgtcaaaaatattcgcccagctgggccaggagatcttggtggcttaaagccctatgacaggctcttacaggtgaatcatgtccgaaccagagactttgactgctgccttgttgtgcccctcatagcagaatccgggaataagctggacctggttattagtagaaacccactggcttcacagaagtctatagaccaacagagtctaccaggagattggagtgaacagaacagtgcttttttccagcagcctagccacggtggtaatttggagacacgagaacccactaatacattatag

SEQ ID NO: 119206 - DNA, 1000 bp, Homo Sapiens
atagcaacctcttgtaaaaaatcatgaagatagaattcaacagtgtatattctattaaaaagtaaattggctgggtgtggtggctcatgcatgtaatcccagcactttgggaggccgaggcaggaggatcgcttgagcccaagagtttgagaccagcctaggtgacaaagtgagaccccatctctacaaaaaaattaaaaaattatccagatgtggtggtgtttgcctgcggtcctagctacacaggaagttgaggcaggaggattgcttgagtgcaagagtttgaggctgcagagagccaagattgcaccattgcactccagcctgggtgacagagcgagaccctgtctcaaaaaataaaggaaattggctttgactatgaaaaacagccattttcaacctttttataaaacctcttcagggaatattggaatattatttttgtcaggcaaaaataatccagggcttgagcattgctgtagaatatgttatctgttcaaaacttagcagagcacgcatgcatcacatgcattgtcatcagtatttgagagctgaaccaatggtttttgatggttgccgtaacagaagatctgtgaagaggatggtggtttgcacctgttcctgaagtcaaactggaaaaggttgcaggtatttcaattttctcaatcattttgcataaatgtattaatattttgagtagtaatagttctaaacctgcaggaaggcatcattgtatactgtggtatgtagagaatactactcttacactgctctttatcttaaaatgttttggtatactgtgaatattttcctctaagtatttggtgtattttgacagttattaaaggagaatataaaattaaagattctggtctaaactaagaataatggaaagttgcttcgtcctgccttagaggagttttcagttcatcctcttcttgagaaactatgtgttgctgttactaaataaacatttactcaataaacgttttatttcctc

SEQ ID NO: 119207 - DNA, 1000 bp, Homo Sapiens
ctttttatgatacaaaatgactttgtattcaatcagaagcatatacttatgttattttgggtttgtttataattctctcattgtaaccaaattattttaaaatgtatagtataaaaagttacccgtggtattaagtgacaaaagcgtacttttattacaactccagttgttagattgcttctcagaatgctaactgtttattttgctaataatgttaggcatctaatcatctagagctgtccaaaaagatatgttgtctttgttaatccttggggttcaaggtgataaagtttttctagtaaggctcccctcgataatgttcctatttgaccaaactaacaaagattactttttaaaaatttttcagataaaataacttggttctttctgctgcattagttgattgttccaaatttgaggtttgtaagtttattcttatcactgactagggtacccaaattcttgcatttgtctccttatacacatctaacatatcaccaaagacaaataaagatacactctggcccaatctttgcttaaaaattccaaagcactaggagcactttaagtttggtctcgaaaggagttgtttataaaatcaaagggctaccgattccctgttcatcctgcactgaagcacatgatgacagtatcaaaccttcatttttgttcattaaaaagtgaatttcattacttaagtgtgtaattctatagtgattagcagtatttgttttcatcatttcacttgggtggccattaattttgaaacctttaccactcattgtagttggttgtagttttatggaaaatgtaatttatagctaaagtggcttttttatgcatagctgccttttttattgtttaacagtgtttctcagctatataatcagtttcaaactggttgtaaaagtatagctgtggccaatgaatgtatttatttgttgtttcactaaattgtaacaaaacactactattaaaaataaaagtgtttgtgctttta

SEQ ID NO: 119208 - DNA, 1000 bp, Homo Sapiens
gaggtgagctcccgggatgggaaaggcgacctgggggagccgcccccgacacggcccacggtgggcaccaatcttactgacatcgtggcacagagaaagatcaccatccgggagcttggggggtgcatgggccccatctggtccagttactatggaaactgccgttctctcctgtttgtgatggacgcctctgaccccacccagctctctgcatcctgtgtgcagctcttaggtctcctttctgcagaacaacttgcagaagcatcggtgctgatactcttcaataaaatcgacctaccctgttacatgtccacggaggagatgaagtcattaatcaggcttccagacatcattgcttgtgccaagcagaacatcaccacggcagaaatcagcgcccgtgaaggcactggcttagcaggggtgctggcctggctccaggccacccacagagccaacgattgactgcacggcagaggcgcagctggcctgagctggggagaggtggcagagggcagtatggctttgctgccaatagtttcttctcacaggggcagaataacccaaagtaaccctacatgatggggctctgtgctgagatgcaatgatgtgtaaactgaggcatgtggagatggaagttgacatctggcctctgaaaaaagtgtccccaggggctaggcatggtggctcacacctgtaatcccagcactttgagaggccgaggcgggtgtatcacctgaggtcgggagttcgagactagcctgaccaacatggagaaaccctgtctctactaaaaatacaaaattagctgggtgtgctggtgcatgcctgtaatctcagctacttgggaggctgagacaggagaatcccttgaacctgggaggtggaggttgcagtgagtcgagatcatgccattgcactgcacctgggcaacaagagtgaaactccgtcttaaaaaatataagaaataaaaaaataaaaacctgtccccagactggatgag

SEQ ID NO: 119209 - DNA, 1000 bp, Homo Sapiens
ctggtcagaacgctcagatgcccgttcagaactttgccgacagcagcaatgcagatgaattggaactgaaatgctcttgccggctgaaagccatgattgtgtgcaaaggctgtggggccttctgccatgacgactgcataggtccttcaaaactttgtgtagcatgcctggttgtacgataagagctgagtgaaagatgcagtatcccttttccacacggaaaagccaaatagcatcagcaacaacaaatagaataatgcagtggtttctatcatgctaatttattttgctttggagcaggtacctttcctctatggcattattttcttgcatttctcataaaggggaggatgcatcccaactgaatggctcactggcatgtcttttatgtgttcagttgccattcctagctttggaaagtttctatctgtccatgtgtatacaagtcaatgccccatttttgtttttcttttaaccgaggtgtagataggaaaaggacatttttaattacttaataaccggaaatgcagatgtgtaaggagaatgagaggaatgagttaaagtggttatgcatttttctatagatgagccattacagcaaggaattttacagttgacttctctgaacctagctttaccacagtgattaaatcctatttagaaaggggaatctgatttaaatgtgtgattccttgtatttgctcctatcacaaaagatatattaaaggaggtatgccattaatgaaatccactgtcctgagtattatctttcctcctgttgtactttctcagagactatggcagaatatctggatcttccttggattttgtacacatattgtagtgaaatgtgtcctacatctgaaattgcatgggactcatgcccagcaatctggttctaggcctttgacacctgataatatgagagcaattggccagccaatagccataagcccagaggattttagagcttcatgtgtggcttttaagagcaggtttg

SEQ ID NO: 119210 - DNA, 1000 bp, Homo Sapiens
ggcggccttggccttcaccaagagcatctctctcctcttccacagcatcaactactacttcatcaacagccagggccaccccatcgaaggccttgccgtcatgtactacatcgcacacctgctgaagggcgccctcctcttcatcaccatcgccctgattggctcaggctgggccttcatcaagtacgtcctgtcggataaggagaagaaggtctttgggatcgtgatccccatgcaggtcctggccaacgtggcctacatcatcatcgagtcccgcgaggaaggcgccagcgactacgtgctgtggaaggagattttgttcctggtggacctcatctgctgtggtgccatcctgttccccgtagtctggtccatccggcatctccaggatgcgtctggcacagacgggaaggtggcagtgaacctggccaagctgaagctgttccggcattactatgtcatggtcatctgctacgtctacttcacccgcatcatcgccatcctgctgcaggtggctgtgccctttcagtggcagtggctgtaccagctcttggtggagggctccaccctggccttcttcgtgctcacgggctacaagttccagcccacaggaaacaacccgtacctgcagctgccccaggaggacgaggaggatgttcagatggagcaagtaatgacggactctgggttccgggaaggcctctccaaagtcaacaaaacagccagcgggcgggaactgttatgatcacctccacatctcagaccaaagggtcgtcctcccccagcatttctcactcctgcccttcttccacagcgtatgtggggaggtggagggggtccatgtggaccaggcgcccagctccccgggaccccggttcccggacaagcccatttggaagaagagtcccttcctccccccaaatattgggcagccctgtccttaccccgggaccacccctcccttccagctatgtgtacaataatgaccaatctgtttggc

SEQ ID NO: 119211 - DNA, 1000 bp, Homo Sapiens
gggggatcaggtgtccacctgcagcctggagatgaactacagcagcaactcctccctggagcacagggggcccaatagctctacctcagaagtggggctcgaggcttctcctggggccgcccctgacctcaggaggacctggaaggggggccacgagttgccgtcgtgtgcctgctgctgcgagccccagccctccccagccgggcctagcgccggagcagctggcagcagcaccttgttcctggggccccacctctacgagggctctggcccggcgggtggggagccccagtcaggaagctcccagggcttgtacggccttcaccccgaccatttgcccaggacagatggggtgaaatacgagggtctgccctgctgcttctatgaagagaagcaggtggcccgcgggggcggagggggcagcggctgctacactgaggactactcggtgagtgtgcagtacacgctcaccgaggaaccaccgcccggctgctaccccggggcccgggacctgagccagcgcatccccatcattccagaggatgtggactgtgatctgggcctgccctcggactgccaagggacccacagcctcggctcctggggtgggacgcgaggcccggataccccacggccccacaggggcctgggagcaacccgggaagaggagcgggctctgtgctgccaggctagggccctactgcggcctggctgccctccggaggaggcgggtgctgtcagggccaacttccctagtgccctccaggacactcaggagtccagcaccactgccactgaggctgcagatcttaggttaggtaacactccagccccctctgagatcacctacacaccttctgttcacttctgtcatcctattgctaaattactttgtctcaaggaccgagatctcactcagcagacagcagcagcccgggagcctgagctcaggaggaactcttacctggaaattgggaactgtatggagactccaaactga

SEQ ID NO: 119212 - DNA, 1000 bp, Homo Sapiens
catcctggctaacacgatgaaaccccgtctctactaaaaatacaaaaaattagccaggcgtggtggtgggcgcctgtagtcccagctacttgggaggcagaggcaggagaatggcatgaacccaggaggcagagcttgcagtgagccgagatcgcgccactgcactccagcttgggcaacagagcgagactccgtctccaaaaaaaaaaaaaaagtatagaaaaaaatggatacttgcaaatttacatttatttttgcactgagagtttactgttaaattgtctacaccatcatccctttttctttttatccttagttctagtccaaattatttttgatttgtaaattattaggaaagtttttatactagtttttttaaccctatgtattattacagatggaagtaattatggcatgtgtgagttataatctaaattaggggcaagtatccctttttttatatgatgaaattgtgcataataacttggctagggcaagtctccaaagtaattcagatttaactcttcactgctagacccagttgtgttcaactttttacatattattgccaacacactttatctctctgtgtacagtgttaatctgattttataaatctatatttttttctttaagcaaatttttgttttaaaatttgaagccaatcataaagataatatagcataagacattttcttttctaaaaacaatcagcatcattttaaaaggatgaactaatacaggtgtatgtaatagcagtgtttccaaactggcaatttatgctttaaatttaaaaataaggtcatttttctccatcaggggcaaatgtttacttgtaattttcttcctacagttcgtgttaaattactttttactattattatattgtaaactccttgggatttggcaccatttaaaaattcatctttgtattcccttaatatttggaacagtattgtacatatggtaggtacttaataaaggtttgaatgagtgtgta

SEQ ID NO: 119213 - DNA, 1000 bp, Homo Sapiens
tcctcttcactagtaggcagcccttctaggccatctagtgctagtagtagctctagtaatgttaagagcaaaaagagcagcaaataaacattttaatctcttctgaaaaagttgtaaacacaaaaacaaaaatatactttaaaatacaaaacgacccaacacattttatctagtggaaagtgtaaaaacttagtggtaagtgtaaaaactgatagttttaaaaaaaaaggaacgttctcattttctctactgttttcttcatactgaagaaattaatagcagattcttgacaaggctacatgttatacaagcataggaaaaatgctgtatttcactgtaattctgatgttcgtagtgttagaaaatagtttgcttcattatttcacgaaactacactcacttctaatgtaacaatctttcaagaagaaatttctaaagatttactgtactattatgagcgtattgcaatgtgaaaatctcatttaccctacaagacaccaaaattaggttttctttattcaaagtaactatttctcagacttttggggagaaaaattgttaaaggcagtttcttcttttgctataatttttaaccaaaaaatagcatcaacccctacccaccccacccccccaaaaaaaaaccggtaagagaaacactgtatatcaattttaaaatgcagcataaatttagaaaaatcacttctgaccttgaaataaatcacttctgaccttgaaataaacgcattaaagatttgctttcagatacagccaaccaagtataaacaattttgaaattttcttgatttaataaacgatttaatgaaagctaggtatgacttgatttgcaatagaaatttcatttacagttggaggtagactgccaaatgtagtagtttttccagttaacacttcattataacatgtgcccaacactttgtactcttggaatagagtgtggaatattataaaactggattttaaataaatgtattagaattca

SEQ ID NO: 119214 - DNA, 1000 bp, Homo Sapiens
tgggcggcccctggaggtgctggagaagcctgtgcatttgccaaggccgggacacccagggcctagtgagccagcggaccagaaactgtccgctgttggtgaaaagcaaaccctgtctccaaagcaccccaaaccatccactgtgaaagattgccccaccctgtgcaaacagacagacaacagacagacagacaaaagcccgagtcagccggccgccaacaccgacagaagggcggaagggaagaaatgcactgaagcactttatgctccagcagagggcgacaagctcgaggccggcctttcctttgtgcatagcgagaaccggttgaaaggcgcggagcggccagccgcgggggtggggaagggcttccctgaggccagagggaaagggcccggtccccagaagccaccgacggaggcagacaagcccaatggcatgaaacggtccccctcagccactgggcagagttctttccgatccacggccctcccggaaaagtctctgagctgctcctccagcttccctgaaaccagggccggagttagagaggcctctgcagccagcagcgacacctcttctgccaaggccgccgggggcatgctggagcttccagcccccagcaacagggaccataggaaggctcagcctgccggggagggccgaacccacatgacaaagagtgactccctgccctccttccgggtctccaccctgcctctggagtcacaccaccccgacccaaacaccatgggcggggccagccaccgggacagggctctctcggtgactgccaccgtaggggaaaccaaagggaaggaccctgccccagcccagcctcccccagctaggaaacagaacgtgggcagagacgtgaccaagccatccccagccccaaacactgaccgccccatctctctttctaatgagaaggactttgtggtacggcagaggcgggggaaagagagtttgcgtagcagccctcacaaaaaggccttgtaa

SEQ ID NO: 119215 - DNA, 1000 bp, Homo Sapiens
gcccatgatcgcggcgctcctgcacggccgcacccacctcaacttccaggagttccggcagcagaaccacctgagctgcttcctgcacgtgctgggcctgctggagctgctgcagccgcacgtgttccgcagcgagcaccagggggcgctgtgggactgccttctgtccttcatccgcctgctgctgaattacaggaagtcctcccgccatctggctgccttcatcaacaagtttgtgcagttcatccataagtacattacctacaatgccccagcagccatctccttcctgcagaagcacgccgacccgctccatttgacccctgacccagccttcctcctgccagcgtcttcctcccaggtgaaagcatcttctctccccagcgacctgtccttcgacaacagtgacctggtgatgctgaaatccctccttgcagggctcagcctgcccagcagggacgacaggaccgaccgaggcctggacgaagagggcgaggaggagagctcagccggctccttgcccctggtcagcgtctccctgttcacccctctgaccgcggccgagatggccccctacatgaaacggctttcccggggccaaacggtggaggatctgctggaggttctgagtgacatagacgagatgtcccggcggagacccgagatcctgagcttcttctcgaccaacctgcagcggctgatgagctcggccgaggagtgttgccgcaacctcgccttcagcctggccctgcgctccatgcagaacagccccagcattgcagccgctttcctgcccacgttcatgtactgcctgggcagccaggactttgaggtggtgcagacggccctccggaacctgcctgagtacgctctcctgtgccaagagcacgcggctgtgctgctccaccgggccttcctggtgggcatgtacggccagatggaccccagcgcgcagatctccgaggccctgaggatcctgcatatggaggccgtgatgtga

SEQ ID NO: 119216 - DNA, 1000 bp, Homo Sapiens
gaactgtcctcttgcttcagaagccccttttgagtgtggtctctggtgcaagttcctgtgagctgcctggcccggtgatgctcgacagcctggactctgcaacacctgtcaactccatctgcagtgttcaaggcactgtggttggcgtggacgagagcactgctttctcatggcctgtgtgtgacatgtgtggcaacgggagattggaacagaggccggaagacagaggcgccttttcctgtggggactgctcccgggtggtcacatctcctgttctcaagaggcacctgcaggtcttcctggactgccgctcaagaccgcagtgcagagtgaaggtcaagctgttgcagcgcagcatttcctccctgctgaggtttgccgccggtgaagatgggagctacgaagtgaagagtgtcctcggaaaggaagtggggttgttaaattgttttgtccagtccgtaaccgcccacccgaccagctgcattggattggaggaaatcgagcttctgagtgcaggaggggcctctgcagaacactagcggttgccgcaggatctgtgaactttgcaatgtggctgcaagggtggtggtggtggtggtgatttggggtagttatttgttaactatggacacagtgaacgtagtttacgatcttgaaatgaaacttagatttttctggggaaatgttcagatacagttttgtgaactgtaaatcaaaatacctttttctacagtttatcttttattttctgcaaatttaggaacatatttactcgttttcacattgaatcttaagtttaagctcttcatttggtatttaggcaatatatgagaaaaaaattttttttgttcatttgtaattttaacaagttgaacattttaccatgattgaacatgtttttattacagtatttaacattcccccaaagaataccctgcaaagtgtaaacctttgtcccatactgtgatattactgttctgctacaataaatgtcaaacct

SEQ ID NO: 119217 - DNA, 1000 bp, Homo Sapiens
gagactacatcattgtgattcatttaaaaataacttaaaacaaaattcagatataattaggcatgagagaatttgtgcaggaaagaaaccttggaaatgcaatgaatgcgagaaagccttcagttactactcagcttttgtcttgcatcagagaattcacacaggagaaaaaccctatgaatgtaacgaatgtggtaaagcctttagccagagcatacaccttactctgcaccagagaattcatactggggagaaaccctatgaatgtcatgagtgtgggaaagccttcagtcaccgctcagcccttattcggcatcatataattcatactggagaaaaaccctatgaatgcaatgaatgcgggaaggcctttaatcagagttcatacctcactcaacatcagcgaattcatactggagagaaaccttatgagtgtaatgaatgtgggaaggccttcagccaaagcacattccttacccagcatcaggtcattcacactggagagaaaccttataagtgtaacgaatgtggcaaagcctttagtgatcggtcaggtcttatccagcaccagagaactcatactggggagcggccatatgagtgtaacgaatgtgggaaagcctttggctactgctcagccctgactcagcaccagaggactcacactggggagaaaccctataaatgcaatgattgtgccaaagccttcagtgaccgctcagcccttattcgtcatcagagaacacacactggagagaaaccttacaaatgtaaagattgtggaaaagcattcagccagagctcatctcttacaaagcatcagaaaactcacactggagaaaagccctacaagtgtaaggaatgtggaaaagcctttagccagagttcatccctctctcaacatcagaaaactcatgctggagtgaaaaccaagaaatatgtccaagctcttagtgagcatttaacctttggccaacacaagagaattcatactggataa

SEQ ID NO: 119218 - DNA, 914 bp, Homo Sapiens
atgggggtagcgggctgggcacgcgctccggaggctgcaggcgccatgggcagagtgaggaaccgcgccactgctcagcggcggaggcgaaagcggcccggggatcctcccgccgcctgcgcggccatcgcggtcatgggcgccagccgcgcgcagtgcccccgggtccaagtcggggtcgggagccacgcggcggccaagaggtggctgggaaagttgcggcggaagcgccggtggcggcgggcccgggaggcgggctccagagatccgctgccctccgcgccactcccggacccgccggcgcccgccgagtcccctaaggagctggacctgggcgcacagcgggagcgctgggagacgttcaggaaactgtggggcctcagctgcgagggcgccgccaaggtcctgctggacaccttcgagtacccgggcctcgtgcatcacaccgggggctgccactgcggcgcggtccgctttgcggtctgggcccctgcagatctgcgcgtcgtggattgcagctgcaggctgtgcaggaagaagcagcaccgccacttcctcgtcccggcctcgcgcttcacgctgctccagggcgcagaaagcatcgtcacctatcggtccaacacgcacccggcgctgcacagcttctgcagcaggtgcggggtgcagagtttccacgcagctgtctctgacccccgcgtgtacggcgtcgccccgcactgcctggacgagggcaccgtgcgcagcgtggtcatcgaggaggtcggcggtggcgacccgggggaggaggccgccgaggagcacaaggccatccacaagacgtcctcccagtcagcccctgcctgtccccgcgaacaggagcagtgattggggccgcaagcccgcctgaaaccggcccgggcggccctgcggggagc

SEQ ID NO: 119219 - DNA, 619 bp, Homo Sapiens
tgagcgagcgcggggtgtttgggatgcggcacggcgagggggagcaggcttggctcgggcgtagggaattggtttttttgttttagctatccaggttgtgactggtttacataattacacgattaagccatcattgtaggaaaggctttgcaggagaaaaatgtcttaactggaggtctttgagacagaaaaaccctgcctcagcccttgggtcctgagagtcgcgtttcttctccccttcgcttaaatatgtaaaccagaatcattatgtttggttcatggaacggaggaaaaaaatccgtgtgcagggtcgagactgtcgtggcggaagccgcagcacccgggaggcaggaaaaggaaacctggacacaggcacgtatgagggaagacaatgtggagaggcaaggagaagatggccacctgcaagccaaggagagaggcctggaacacactcttacttcatggccctcagaaggaggccaccctgtcaacaccttgagctcagacttcagcctccagagctgtgaaaaaagaaatttttgttgtttaagcccctcagtttggggtaatttcttatggtggccctagccaatgaatacaggtcccaaataactcttca

SEQ ID NO: 119220 - DNA, 1000 bp, Homo Sapiens
gggagaatgcactttgtcctgccaagagaatgtggttgccaaggggacagaacaccagtgttccacgtggaacttccaggcagggcactggggcacagtaggaggaacccagaagatgctgcctctcctgatcatctgtctcctgcctgccattgaagggaagaactgcctccgctgctggccagaactgtctgccttgatagactatgacctgcagatcctctgggtgaccccagggccacccacagaactttctcaaagtattcactccttgttcctagaggataataattttctcaaaccctggtaccttggtgaggcacagccaggagatcagggattggatgtggcctctttacctgacctgggatcttactcccttgacttccctttgacctgtatctcatcctcagatcgtgaccatttggaagaagaaacagccaaattcttcactcaagtacaccaagccattaaaacgttacgagatgataaaacagtacttctggaagagatctacacgcacaagaatctctttactgagaggctgaataagatatctgatgggctgaaggagaaggacatacagtccacactgaaggtcaccagctgtgctgactgcaggactcacttcctctcctgcaatgaccccactttctgcccagccaggaaccggcggacctccctgtgggctgtgagtctcagcagtgctctactcctggccatagctggagatgtttcttttactggcaaaggaagaaggaggcagtaaagcaggaacagggcagcccgcatgtcttccagaagtgaacagaggccgcagctaccaccgtcacaaagttcactcatctctgggtcccggtgaccccatccccccataccctccatcctgggtcctggggccccaaagctctgaggcctaggagactgcgctgtctcgtggtttgcctactcctacacctttgtaaagagtctcttcattaaaacccctcttcatagccta

SEQ ID NO: 119221 - DNA, 1000 bp, Homo Sapiens
cgacccagcagctccgctgttttcagagtgaatatgttaagctttgatgagattctattttcagtaagttagtgcttctgggacacttggagaaagctgtgagagtcattgtctacgcaaagaacaacgaagctgatcctaaaagtgatccaatctaagaaaatggtaaaacgagctctggccacagcacagaattttatgtgaggaactcagatttttgaagacttaacaattgcagagaaaggttgcagcctgcacaccatagcccacctctctgagcagactttggttttgtgtggtgacgtggcacatgtttgtacactgggatttttcaaaggacgctacgcgagcagactgacttgcctcttctgtgagcactgtggcttttgtcagatggagtgccggtctgcagaggactgctctttcgaatccacagtgttatctgtgtaaatagctttaatttttcttctgtgtcttaggtgaagttttgttcatgtagcaaccaggtagacagtgaccaaataaggctgtaaatgtgctgtagttttctactgtgatgtacttgaaggagaacctgtgtcctctacttttctgatctcccacaagtattttgtgtttgtttcctgagtcctgaggttattattttactcctgttttgcccccagttttctttgttttttttctggagacccagggaggcccatggtggagatcatttgtaaggaatggatcatggtctgggtttccaaaactaccctagtacagtgaatgagagaaatctgcctggaaattgtttcagaaccatgtacctttatgctttgtgattgtgaaacattgacttttttgtaaccccaaaatgaaaactgtttagtaaaggggatctattttgtgtgttttgaaacttaggtgcaatgtcccctggaaaaagctaaagaaatgtatatgttcaatgacattttaaaataaaatattatatatatgtatatacgacatattcagc

SEQ ID NO: 119222 - DNA, 1000 bp, Homo Sapiens
taatattactttacctccactatgctgttgtggtcctgatttttgggatgctcatcctgatacctgtgccaacaactgtattttctataaaaaccacagagcatatactcgggcactacattcattcatcaattcctgtgatgtccctgggggtaattcaactcttcgagtcgcaattcataattttgcttctgcacacaggcggactttgaaaaatctataataagaatctgaaattaactggtagtattttggcttttacttaaaatcatccctgagagagtatttaagaaaagctgttcaagttataaaatatataatctgggaagaaatactgtctcatataataattagattgtaatcattgttttaatctctgtctgggaaccaagattgaaagctgacttacttctctcttctgtcttgtgaaccatacggagcctattattttaaaatatgatcagacaagtaaggcttctcttactttgctctgctctgatcagaagagctcatgtgaagtctttgagattctcttatttatcatctttctaaaactgtgtttttgagcttgacagtactgaaaatgtctggatgaagcagaaaagaaagtgatgaaatgtgtttctgagcatcagagaccatctatattgccattaccttttctagttgtatataagaattcaagattagaagaatttagatttgttgcacatttttttcctcagcattttttcctcttgttttttaaaatgtattgcctctttccccattcagtgacactggacataggaatttttaattgtgtaattttctgttgcaaaaagggtaaataaatcctttgtcttttgaatatcttctatgtgaaataattgtgagtgacatttgaaaaagtgaatctgaagtcaaagtgagtaaattccttatttccctattttttaaaaacctggtatatgacatggctacagggcaaatgaaataaaaattgccatagttggtatga

SEQ ID NO: 119223 - DNA, 1000 bp, Homo Sapiens
gtgtgactggcgatggtcacgtgatccctccagacaacatctgccccttgtcatctgcagcgggatctccaaccagccgctggaattcaccttccagaaaagagacctgcctcagatgatggacgaggtgggtcgcatcctctgtaacctgtgcggtgtggtttctggaggggtggtctgtttcttctcctcctacgagtacctgcgccaggtccatgcccactgggagaagggtggcctgctgggccgtctggctgccaggaagaagatattccaggaacctaagagcgcacaccaggtggagcaggtgctgctggcgtattccaggtgcatccaggcctgtggccaggagagaggccaggtgacagaggccctgctcctctctgtggttggaggaaagatgagtgaagggatcaacttctctgacaacctaggccggtctgcagagctgcaggagaagatggcctacttggatcaaaccctcgtgagtgaccccagtgtcacagagggtgacagacccagagcccccggccaggcacccccagggaaggctctggtggagaacctgtgcatgaaggccgtcaaccagtccataggcagggccatcaggcaccagaaggattttgccagcatagtgctcctggaccagcgatacgcccggccccctgtcctggccaagctgccggcctggatccgagccagtgtggaggtcaaagctacctttggccccgccattgctgctgtgcagaaggaatgggggccccagggccacccttgtccaggctccctctaccgtagaggtgagaattccagggcgctacagtttgaaaaccactattttatgagccaagaggtgtccaagcaggaggagcacgtcacatccccactgaaaaagcccacagaaaatgaaaagcccacatgcttgtccattgctgcaggatgggggcaagtggagggggagaggtgtcggcgctcccaccttactcccagtcatggctga

SEQ ID NO: 119224 - DNA, 1000 bp, Homo Sapiens
atcatgatataattgataaaattgttgttcagaaataccacactattaatgggcataattgtgaagtgaaaaaggccctttctaaacaagagatgcagtctgctggatcacagagaggtcatggaggtggatctggcaattttatgggtcgcggaggaaactttggaggtgctggaggtaattttggccttggtggaaactttggtggaagaggaggctatggtggtggaggtggtggcagcagaggaagttatggaagaggtgatggtggatataatagatttggacgtgacggtggcaactatggtggtggtcctggttatagtagtagagggggctatggtggtggtggaacaggatatggaaaccaaggtggtggatatggtggaggtggtggaggatatgatggttacaatgaaggaggaaattttggcggtggtaactatggtggtggtgggaactataatgattttggaaatcatagtggacaacagcaatcaaattatggacccatgaaagggggcagttttggtggaagaagctcgggcagtccctatggtggtggttatggatctggtggtggaagtggtggatatggtagcagaaggttctaaaaacagcagaaaagggctacagttcttagcaggagagagagcaaggagttgtcaggaaagctgcaggttacctcgagagagttgtcccaaatgcattagaggaactgtaaaaatctgccacagaaggaacaatgatccatagtcagaaaatttactgcagcttaaacaggaaacccttcttgttcaggactctcatagccacagtttgcaaaaagtgcagctattgattaatgcaatatagtgtcaactagatgtagattcctgaggtcttttatctgttgtagctttgtctttttctttttcttttcattacatcaggtatattgccctgtaaattgtggtagtggtaccaggaataaaaaattaaggaatttttaacttttcaa

SEQ ID NO: 119225 - DNA, 1000 bp, Homo Sapiens
atgaagaacataacttaaatatagtcaactttggtttcagcaccacatttgcagaaggagagatgctgggagccttttatgggacttgctcttatgttgccccagaactcttcctgggccatggttaccaagtccctaacaccttatttctctctctaaggcaggaatctcataagccaagatttaaatgtcatgggaaagtggaagtaatacactattctttaagaattacattctttaccatggaggggaagaaagatacttggatcctgagtcaggatttgtccccctccaaacaaccaatgtcagttggagagctgaaggctgtgacagcacgctgccacgccgacgcagaccactctctgcatgccagcccgcccgcacccaccatggccacagttcagcagctggaaggaagatggcgcctggtggacagcaaaggctttgatgaatacatgaaggagctaggagtgggaatagctttgcgaaaaatgggcgcaatggccaagccagattgtattgtcacttgtgatggcaaaaacctcaccataaaaactgagagcactttgaaaacaacacagttttcttgtcccctgggagagaagtttgaagaaaccacagctgatggcagaaaaactcagactgtctgcaactttacagatggtgcattggttcagcatcaggagtgggatgggaaggaaagcacaataacaagaaaattgaaagatgggaaattagtggtggagtgtgtcatgaaccatgtcgcctgtactcggatctatgaaaaagtagaataaaaattccatcatcactttggacaggagttaactaagagaatgaccaagctcagttcaatgagcaaatctccatactgtttcttttttttttttccattactgcgttcaattatctttatcacgaacattttacatgcagctatttcaaagtgtgttggattaattaggatcatccctttggttaataaataaatgcgtttgtg

SEQ ID NO: 119226 - DNA, 734 bp, Homo Sapiens
ccacttcagcttctgccagacagatggaactctccagcatgaaaatctgcgcagccattccaacaagcagggctctgcctgaggttgtccgaaggatgccgaggaaaaggatatcaggactggaatggctcttacagcaagatccaacgatagggccttgggagatggaaaaggaattaatcttctcaccctggcgagttttcctgaaactacttatccttagcgtcagcgctgtaagaggtggagccgctcagtcccgcgggtggctgcagacagaagcccttgaagttaacgtagcgacgacgtggtccttgtaggaccaagcattcttggcattctgtcgagattgagattccagagcatcggatgaacgggacttatagctaaggcgtactcacccacccctcccttcgtctttttacgcacgcagcaactcgtcctcacgtgcataggggtagtggacagtgttgacttgaattgctgtccctcgttccaagcctttcctgtgaatgaacccgaaaacactcgacaggtcgtgaataatcgttttaatgagtgtgcaaagcgtgcgacggggtgcaccgagctgtcgggttaaacaaacaacttgtaccctgaccaaatccgattgttaaagtgcaaagtgatgtcagtaccatttccattgcctttcggaaatccacagatctgacacgcgggagtccaattttccccattaaagaaaaataacaata

SEQ ID NO: 119227 - DNA, 556 bp, Homo Sapiens
agcatcacccaacaaccacatccgtcctctagagaatcccctgagagctcagctcctcaccatggactggacctggaggatcctcttcttggtggcagcagctacaggtgcccactcccaggtgcagctggtgcagtctggggctgaggtgaagaagcctggggcctcagtgaaggtctcctgcaaggcttctggatacatcttcaccgactactatatgcactgggtgcgacaggcccctggacaagagcttgggtggatgggacggatcaaccctaacagtggtggcacaaactatgcacagaagtttcagggcagagtcaccatgaccagggacacgtccatcagcacagcctacacggagctgagcagcctgagatctgaggacacggccacgtattactgtgcgagagacacagtgtgaaaacccacatcctgagagtgtcagaaaccccagggaggaggcagctgtgctggggctgagaaatgaaagggattattatttttaatgttgtttacagtatgtcattaataaattgaaaaaagtaacaataga

SEQ ID NO: 119228 - DNA, 1000 bp, Homo Sapiens
gacagctagctttcctcacctcaggattctaggtaggcagataatcattccaagtgaaggttatagattgtatcctagatccccttctgctgtttcagcttcatatgaaacaaccttgtctcaagaaagagattctactatatttggtataaggggaaagaagttacatttttcatcttcgtatgctcataaagcatcttctattgccaaatcctccagcttttcttttatggaaagagacgaggaagactctataatcatctccgaaggaataattgaggaatacctagcattcgattgcacagatatggaagagggatttcatgggaagaaatcagaagcagctacagagaaacagaaattagggtatcctcccattgctccattttactgcatgaaagaagatgtccttgtttatgtgtttgacaatgtatggagcaaggttgtgagctgtatggagcagttgacacgtagtcactgggaaggatttgcccaccatgatgagagtaatgttgcagttaccagacccgtttcagaaagtttctgtgtgctgagtgagccacatcctttggtgttaccacgagtgccacagtctaaggtgctgtccgttacctcaaatccaatgagtctctgtcaagcaagtagtcatcagccaaatgttaatggtctcttggtttatgggatgcctctacagccaagaaatctctccctaatggacaagctcctagatcttgatgacaagctacttatgaggcctgggtccagtaccatcctttcaactcgaaattggccaaatcgagctgtggagtttttagtacatcatctctgtcatacacagtgcagtccaccaagagacgcaatccatcgccacgaacccttcatccgatcagcacaagccattcacgtgctggaataccaagacttgtggaagaaatcctcagaggagcccgagtcccagcggcagccaactggctctcctctccctcaccaatgtccctga

SEQ ID NO: 119229 - DNA, 1000 bp, Homo Sapiens
caaggccttctccaggccctggttactgcagggccatgtccgcacccacacaggggagaagccctatgcctgctcgcactgcagcagggcctttgccgaccgctccaaccttcgggcccatctgcaaacgcactcagacgccaagaagtaccggtgccggcgctgcaccaagaccttctcccgcatgtccctcctggcgcggcatgaggagtctggctgctgcccgggcccctgagaggcacgtggtcggcgcaggtaggagggatggtcctcaccgggagagctggcgtccctcctgcccccagaggagccaggagtctgggagggcggggcctggcctcacacttggtgcgtcctccacatctgcgtccaatcagaaccaaagaagtccagcgggggccactgggccggaggacactcccccaggcatcccaccgcgcggagcccactcagaggagactcctctcccggggaaggctttcatcagaacaagagccatggttccatttcgacacggccaggtctccggggctacccttccaagagtcagagcctcggggaggtggccgccagcatgggccggcactgccgccggatggctggcaaggctgcctagttccattgcagcagaaatgaacagttctgacttatagtgagcaccgccctgtggcccttcctcagtaggcacaactacctctcagccagcccccgccagcctttggtttggggtctgggacgagctgccccatgtcacacgtctatgtgcatgtgcacacacactcaaacatgtacacacacgtgccctccccacctcactagactctccgggagatggggcaggactgggagagcccacgattggtgatttgggtgtgttgggatgaggcggagtgcctgtgggatttgtcccggtcagagcctcagggggctggggtctcagggcactcagcttcccaggcaataacagccgtggggtaataaatggtctctgcacacctgc

SEQ ID NO: 119230 - DNA, 1000 bp, Homo Sapiens
gccggccgcccgccagaacgaaaaaacggcccgatgagatgctgcttcccaaaggccaccaaggggccagggccctcagccaggacagaaaggcctccagttgccagccagccagccagctgccaggtggaccaatcattttcggtttcatggaaacaaaccataaatcaatgtaagaaacagccaagccgcagtttctgaacacagccaacgtttactgaccgtcctgcgtcttggaccagcctacttttgacccagtgaactattttcacttgaagccagcacagaaggttttcaggcccaggatgctgtctaaatcgggttgatggacaaagagaggctgtttgagcctctgagccaggtgagtttgggatccacagccctcagaaaaccttcaccccttaggaacagagaccaaactgaaataatgacctgtggaatgattccatgcctgctaaaaactcgagggacaaggaacagactcataaattattaattggcctttgtttatgtttcaaagtaaatggtcgttttctttatgctaagtctttgtacctggcacccccatccatacacttttttaaggtaggttagatgtggttaaaaatgacagtaaacccaccagcaagcaaaaataatcttagaaagtgagaggaggtcactgaaacctggcctgaggtttgaagaagatggagaagagttatatttattgagaaccggctctgtgccaggcactagatgttcctccacttacgatggggttacctcccgttgaaactattgtaagttgaaaatatggtaatttgaaaatgcacttaatacccctaacctactaaacatcatggcttagcctagcctaccttaaacatgctcagaacacctaaagttgagcaaaatcatctaacagaaagcctgttttataataaaatgttgaatatctcatgtaatttattgcatactgtactaaaagtgaaaaagaatggttgtaagagtacttaaa

SEQ ID NO: 119231 - DNA, 1000 bp, Homo Sapiens
gctgagctgacttgccaggctgccgctggacgcgtagagatcaggccagcgccgcgctcatttttccaggtagacctactctgtggaacggaagtgccctagctgctttgtttttgtagcacttgctggctgaatttttcttttgctaatcgctaaccagaaagtctggttagagggggctcaactcaatccctttggtccccagcgccagacaagagttaattctggaaaattcagtacttgaatgtacctgccttattgcataccaatttactggggggaaaaaaaaagttaagagatgccggctccagatctccacttcattcacaggtgattttggaaatcctgtaagttacacttcctgttctggttttgttttgttttttgtttcctttggctgattcctgctgagtgaggccagttcctcatcaggctcagggcaggtgccttttcaggcgtggcctcctttccatctagcacagcatctttgtctctgttctgtctcctccaaatccaagatgattttaattagtacagacatgtacagtctacaattaaagagtgatttgtactaatatgattttgattcttcctcctctttgctgtcctttcaagacacttgctggaaaaagctttaatgcacttagttttcctttaggttttctatgactcagatgtaaaggactttctctgtacagtatattatccaatgcatgtttgttctctctcctgatatattgaacaccacacagttgtgaagccgtgcagtggggatgccccacaccccacagaggcatctacccctgtgtataaggaaagacattttcctttgctgtacttgcttgagcagttttattgtctgtacatgtgagctgtgtgagatagatgtgaaaagttcaaatgaatgcattttcctgccccatgtatacagattgtcatctgtacaaggaactgtatgtatgaaagcaaatgtacttatttataaatggctaacacttgg

SEQ ID NO: 119232 - DNA, 1000 bp, Homo Sapiens
agtaaatgtgaatgtacacatgagttgttgctgaagctgacaagcatattacatacatgcattttccctgtgccctcatagttgcagttagagttccagtacctgtaggctcacctgggaggcagattagacccaaaggtagatgtttttcccctttccatgaagcatgtcagtgggagttgcttcctttgatttccctagtactaaattttaaggcttttgtaaaaacaaaacaaaactaggagcttggaacagttaaaaatcaacactgctaccatcaattcatcaaatatttacttagagctttcatacattaagattccagtaaccaataaattagaattcatttcttctgcataaagtaaattttcatacacttgacctactaagacagcaagggtgtcctaaattgaggcatttgtataatgcctgcataactaaatggtcactaaaatgggacagcatggggcaagaccttgtagttcttcacagaatatttgtggtcagtttctccaattaatttgctgcatgagccaaataaccataattcactttttatacccactggtgccataattagagaattagagggtgtagacagaggttaatgccaatgagaaacacaggacagggttttttttattataaaggtcattagatacaaaagattgtttttcaaaaaatttctaattctaacaaaggggatcaatcagaaatgaaactaagctactttctaaagtgacactgtatcagaataatccagatttgaatataacattttgccaccaactgacatttagatgaaggactgcctctctgaaagagttcagatcatattcaggggtgaatccaacaccatggaagaaagactactgatgaaaatattttcccactttgcacaaatctgtaaactacacctttgtttatagaaaaatgcttgtaatagtcactgtaatatttagctgtggataaaaatttgtggaaataaatacttttgaat

SEQ ID NO: 119233 - DNA, 1000 bp, Homo Sapiens
atgttatttttggattgtaaggtgagacttgtttagctttggaaaaaaatgcccaacttgtaataggggaggaaaaataattttctgtttttggaattcttagatggaacgctctgtaaaaactgacagattaaaatgagaaaaagagaaaagtttaaaaacatgtatatcttatggttacatgggagatactcagggaaaaatgagtaaatctccaacaggtggctttcaattcaagcataaatactatcttcaacttaaagaaagaagatttgaggtgcagtagtggggagttaaccagcaaaagcacattagacaagggtaaggttcgttatacagacttaagtccatgcattctccattgataagactcttcagtgatttagttatccttctcttcttggtgttgagagaggtagcttttaaatggtgatttcctttatagatgtaaattttccttacacaagtaacttctactttattttcacaacttcctttgttagcattttttttttccaaaataattagcttggaataattcttaagccaaagggacatattttggggttgcatattctggtttcctaccattatattttggggtggcatagtttggtcttatacactgtgttccactggcaatgaaaagagttcttgtttttcctccagcaatttgtcatttgttaaagagcttagcagttctaagagatatagaccagctgtgctatctttttgtggttttcagttctctagtatgttgagcatctttttgtaagtgtacttgccatctgtagatcttctttggtgaagtgtctgttcagatctgtgtgcatttttaattgggttgtttaacttattgtttagttttaacaattttttatatattttgaatacaaattctcagatctgtattttgcaaatattttcttcaatatgtggcttgtgtttttgttctcttgacaaggtctcttccagagtataaactgtaaatattaagaaa

SEQ ID NO: 119234 - DNA, 1000 bp, Homo Sapiens
ccattttgatgtttgaaactaccttggataagcatatcaagacccttcagagattctaaaacatgttcagcactttctggtacaatattctcaaagaaccaggatacatcttatttctcaaaatgaaacaaaaatgtattagacattacccctgtgatttcaagcccacagtctgtcactttgaagtatttgtatccttttacaaaagaaaagccaaatgaagatctccctgaaaaaatattttaatagaatatgtctttatttcagtatcttaaatagtgaagatggagaaatagtcaataatgaagagcatgaatatgcatccaaaaaaaggaaaaaggaccattttagaaatgacacaaatactcaaagtttttatcatgaaaaatggatctatgtccataaagaaagcacaaaagaaaggcatggctattgcaccttgggagaagcctttaatcggttagacttctcaagtgcaattcaagatatccgaaggttcaattatgtggtcaaactgcaggacaagttcgagcatcttaaaatgattcaacaggaggagataaggaagctcgaggaagagaaaaaacaactggaaggagaaatcatagatttttataaaatgaaagctgcctctgaagcactgcagactcagctgagcaccgatacaaagaaagacaaacatcctgatccatatgaattcctcttattaagaaaaataaagcatccaggattcaatgaagaactgactatcaccttgttaatcattcagaaacatgttgcaggcttaagccatttttgatatagatactgaaacaattacttgctaagagcaaacttgaaggtatggataaggccctgagtcatcttcctgagctgaatgatagttaagctgaattaacaatttggacaagacagcaaatgctattgtccaagttttctaaagaagaatctgaagtgaaatgacatcaagagacctatcaagacctgtatccaggaaaag

SEQ ID NO: 119235 - DNA, 1000 bp, Homo Sapiens
cttgcagtttgaaatgtgatgttctaccattggttttgagtacgtgaatacttcctgtcctactgtttcccctaccctattctcaccttctctccgcccacatcctcaccaagagattgtgtgggacatgaccttgaaatgctggcgatgatccacactgggatatcatcgctggcgactgcactctcaggagcccaaaatcaggagtgaaattgccacttctagtccccttatttcctatggaaacaacgccttccgcacccctagcacctgccgtcctcactgtaaagcttcatcaggatcgtccaccgtgtatattatacgcttcagatcatgttgcttatattgttgctgcaatgaccatcgttttcactttgctggtaaccacttgattgctgacagctacagtcaatgaacctgctgatgactttttttaatgtagtacaacagtgacagttatgacaggcttaccttggaagagttgtcatttttactgccaattttttggatgaagatgtttttataaacctttcaaaatggtctgcaaacagagcaggaattgcacaattaactcaataatgctgtgtgttctcaagaagctcccttagtgaggccgatcttaagatggccgattctgcccgttgaaggcatcctgggaaagaaaacaagcatcccagcgggcatctcaccacgacttctcctggagtcctcacacggtcactgacaactacagtcagttttaggaactagagtgccgtatcatcagacttaccctgtcctgccccaccttccctgctaacatcgaggtgtgtgcagttaccttctgagcttggaacaagcagactggaattttcctctgctacctcttgtgtataaaatcttgtttataaaatttcaaaaggaagtagatacactagggaagaaccttaattctaaatttggttcatgtgtggcaaagttcttagcttctaagagtataaaataaatttttcaaaaacag

SEQ ID NO: 119236 - DNA, 1000 bp, Homo Sapiens
gcccttccagatacagctaccagctcctgcagtgtgatagtcctcggacagaatcacaaagcctccttcagcagagttcctcccccttcagaggacatcctacacagtctccaggatacagttatcgaactactgcactgagacctggaaaccccccctctcacggttcttcagaatcatccctctcttccacgtcctattccagccccgcccaccctgtgtccacagactcgttggccccatttacggggacaccagggtattttagcagccagccacattctggaaacagcactggcagcaatcttccaaggaggagctgcccttctagtgctgctagccctaccctgcagggaccctcagactcgccaacctcagattcagtttctcagtccagcacaggaactctgagttccacctcctttcctcagaactctaggtcgtcattgccatcagacttacggactatcagtctgcccagtgctgggcagtcagctgtctaccaggcctccagggtatctgcggtttccaattcacagcactacccacaccgtgggagtgggggtgtgcaccagtaccgactccagccactgcaagggtcaggagtcaagactcagacgggactttcctagggcttctggatttgggcaaacagaactgaatgagcccatagctgcttccttccagctgcctctggaacctaggccgagcatattgctgaggaacggggggtacaaggtgccagaggattgggtctggtggacaagaaacaagacttgtggtcacaattggcctctggccttggagaaagctgtaaatcttgtctgaagcagagactataaagaagtttctccctgctgtcaagggtacattgttgacaagcaaatggtgtttcggttagtaacggttctaagtgcaatgagttgtgttgaagcctccgtctcccatccttgcctgtagcccgtagtcacttgtgcagtgaggacatctttttaaattt

SEQ ID NO: 119237 - DNA, 1000 bp, Homo Sapiens
ggaaaggattccctttttaataaatggtgctgggaaaactggttagccatatgtagaaagctgaaactggatcccttccttacaccttatataaaaattaactcaagatggattaaagacttaaatgtaagacctaaaaccataaaaaccctagaagaaaacctaggcaataccattcaggacataggcatgggcaaagacttcatgactaaaacaccaaaagcaatggcaacaaaagccaaaatagacaaatcgtatctaattaaactaaagggcttctgcatggcaaaagaaactatcatcagagtgaacaggcaacctacagaacgggagaaaattttttcaatctacccatctgacaaacagctaatatccagaatctacaaagaacttaaacaaatttacaagaaaaaaacaaacaaccacatcaaaaagtaggcaaaggacatggacacttctcaaaagaagacatttatgaagccaacagacacacataatcccaaatcatgctactataaagacacatgcacacgtatgtttattgcggcactattcacaatagtaaagacttggaaccaacccaaatatccatcaatgatagattggattaagaaaatgtggcacatatacaccatggaatactacgcagccataaaaaaggatgagttcatgtcctttgcagggacatagatgaagctggaaaccatcattctccgcaaactgtcacaaggacagaaaaccaaacaccacatgttctcactcataggtgggaattgaacaatgggaacacttggacacagggtggggaacatcacacactggggcctttcagtgggtgggaggctgggggagggatagcattaggagaaattcctaatgtagatgatgagttgatgggtgtggcaaaccaacatggcacatatatacctatgcaacaaacctgcatgttgtgcacatgtaccctagaacttagagtataataaaaaaaaagaaaacagtg

SEQ ID NO: 119238 - DNA, 1000 bp, Homo Sapiens
gcctcccggtggcctctgcaggcccaagtcgttctcaagtcggcttccccaggcccagctccggcctctcggcggcctctccgggtgcaaaagttcctcgagtcagcctctccaggcccagctcctcctgcctcccagtggcctctttcggcccagcccagctcatgcctcccagcggccttcccaggccccgcttttgactttcggtggcctctgcaggcctcgacaaggcctggcctcctgcctcccgaaggcctgcacaggcccagcctctgcctcacagcagactctccacgcccagctagctctcgcctcactgcagcctcccaagtccaaagctcctgcctctcggccgcttcggcaggcccagctcccgcctgccagtggcctcttcaggcccatggggctcattcctcacaacggcctttccaggcccagtttttcccttccggcggcctctccgggcccagaacctcctcaagtcggcctctccagacccacttgcaccctccgggtgtcctctctgggcccagctcttcttcctggttgcgtctccaggcccgactcctgcctctcaacaacctctttggactcagtgcctacccatctcctggcggccttggtcggcccacagcttcctgaagccaagctccccaggcccaggtcaggcctcacggtggcctctccaggctcagctcctgccctccgatggcatctgcaggccccaaacggcctccggtcggtgggctcctctaggcccagcttgggcctcccggcggcctctgcaggcccaagtcgtcctcaagtcggcctggaattgggcctggaagagcagcaagtcggcctccccgggcccagctccgtcctctcggcggcctctccaggtgcaaaacttcctcgagtcagcctctccaggcccagctcctcctgcctcccagtggcctctttcagcccagcccagctcatggctctcagcggccttcccaggtcccgcttttga

SEQ ID NO: 119239 - DNA, 1000 bp, Homo Sapiens
cggcgccgggccggcggcgcgcagtcctggctgtggttcgccacggtcaagtcgctgatcggcaagggcgtcatgctggccgtcagccagggccgcgtgcagaccaacgtgctcaacatcgccaacgaggactgcatcaaggtggcggccgtgctcaacaacgccttctacctggagaacctgcacttcaccatcgagggcaaggacacgcactacttcatcaagaccaccacgcccgagagcgacctgggcacgctgcggttgaccagcggccgcaaggcgctggagaacggcatcaacgtgacggtgtcgcagtccaccacggtggtgaacggcaggacgcgcaggttcgcggacgtggagatgcagttcggcgcgctggcgctgcacgtgcgctacggcatgaccctggacgaggagaaggcgcgcatcctggagcaggcgcggcagcgcgcgctcgcccgggcctgggcgcgcgagcagcagcgcgtgcgcgacggcgaggagggcgcgcgcctctggacggagggcgagaagcggcagctgctgagcgccggcaaggtgcagggctacgacgggtactacgtactctcggtggagcagtaccccgagctggccgacagcgccaacaacatccagttcctgcggcagagcgagatcggcaggaggtaacgcccgggccgcgcccgccgagccgctcacgccctgcccacattgtcctgtggcacaacccgagtgggactctccaacgcccaagagccttcctcccgggggaatgagactgctgttacgacccacacccacaccgcgaaaacaaggaccgcttttttccgaatgaccttaaaggtgatcggctttaacgaatatgtttacatatgcatagcgctgcactcagtcggactgaacgtagccagaggaaaaaaaaatcatcaaggacaaaggcctcgacctgttgcgctgggccgtctgttccttctaggcactgtatttaactaacttt

SEQ ID NO: 119240 - DNA, 712 bp, Homo Sapiens
ggccggttgcttaggggctgtagcgccggcagcgtgcattgttgtgggctgtgtactagtagggtaggagtttttgttcagggaccagcggaacgaggctttctgtcgttaataggtttctgggtaaatggcccaaccagagagttctgcagattttggcatagctcaacaaaataactattactgctactggcaaagtctcccctctgctattagagtgaagcaggagttccagcccagccagagttaccgctatggcaactggtatgcgcgacagcacggctcttaccttctttctggctacagctatggctgtgcagtggatggaaatggaaaggactgtttttctgcgcatgagacccctgaacacacagctggaactctggttatgcctaaggaaaccacacctctagctgaaaaccaagatgaagacccactagaagtgacgtctcagtatgttgcccaggctgatctcaaactcccagatttaagcaattcactggtctcagcttcccaaagtgttggggttacagatccacatcttcatttgaatattgaggaatcaaaccaagagtttatggtgaaaagtgaagaactctacgactccctcatgaattgccactggcagcctctggacacagttcactccgaaatcccagatgagaccccgaagtgaagcaaggtgttcattaaactccgcaattatcatact

SEQ ID NO: 119241 - DNA, 1000 bp, Homo Sapiens
cgccactccatggcagcttttggtctgtttccggctctgccctctgccctgaactctcatccggcttgtacctgcctgctggacccctccacctggaggccagcccatgtctcaggcccagccctagcctcttctcctcaaattctaagtgttttctctttaggtttccctggctttgtgaatggatcatgtgtctctaggtataaacctgacatcatctttccacccggcttacctccaccagatctccccagttctgtctccatcttctacctgcagctgctctgttctcatggtcactgctgcatcactgagtctggacccttgttatcattttcaaactggcctccttccctcgttccccacttcttaaagtcacctgtccattgccaccagattaagctttctccagccagatcacctctctctgagaaacctccattgacatggaaacaccattgtctggcacacatactcacatactcaccttcccgtcttgatccccacacatctttccagcctcccctcccactccactccctgctctctcctccacctccccatcctcttgtctcccctcccctctgaatccagcccagcggggcttctcctgcctccatcacatcacagaagtacctcctgcttctggttttaattagagccttccccgattacattttcctctgaattttttcctatctacatttgatctgtcatgtttaaaccccctacttctaagggaacttctctaatctcttatcctcatccccaaatagtgttttcttcctctgggttcttataatgttggtatcaatctcacagcatttagtgcttcctgcctggtgtgacagttacctgtgtgcatgtgcaatttctaatttcccacgctagactgtgagcttcctaaggcaagaatcatgccttgttggtttctgtattcctcatggtgccaaacacagtgccttctacattgcaggcgctgaataaacatttttaaagc

SEQ ID NO: 119242 - DNA, 1000 bp, Homo Sapiens
gtgggcaacggctgccctactggacagcccagaagcccagctctgcctggtcacagagggtcctacggggccacactgggcttgagggccttgcttcacatccgcaggagcacgaggtcacacggcccggggctgcttgtctggggggcctgcaccacggtctgctgttgagatgttgctttttggtttcccagatcaccagtgagattgcgtgtctttccctgggcccatttacaagttgtatcttctttggtgtgacatctctgtttaaggctatcccttgttcttctgtgggattgtctgtcttcttctcattcattcataggagctcttcatgcacccagattccagccctcctccctgaggaatgttgcaggtgctgcctccgagtctgtggctgggccttcctctccctttatgacgtcttttctcaaatcaaagttcttcagtccagtctttgcatatttaccagtcatttctattggaatttgttttttatgatttttaggcaatttttttctcctccagggtcataaagacataggacatcgcttttgtgttgaggtgtatgatccacctcaaattcactcctgcttgtggtggaagtcagggctgaggctcatttcccctggtgcgtgtttgtgtattccacggcacaagtggactctgctatcccattcgatccattcgttgtccgtgtcaaaaatcaattgaccatccaggcacagtggctcatgcctgtaatcccagaactttgggaggccgaggcaggaggatcacttgaggtcaagagtttgagaccagcctggccaacatggtgaaaccccatttctactaaaaatacaaaaaattagccaggcgtggtggcgggcgcctgtaatcccagctacttgggtggctgaggcaagagaattgcttgaacccgggaggcggaggttgcagtgagctgagatcgcgccattgcactccagcctggcctataagagtaaaatactgtctc

SEQ ID NO: 119243 - DNA, 684 bp, Homo Sapiens
atggtcagggaagacccttggtgtgtgatgtggcttaagagtgatggaaaccatggcaagggggacgggatccctgatcacttctcaggctccaggtctgaggctgaccactccttaaccatctctaacatccagtcccaggacaaagctgactgtatctgtggtgtatctcacagcactgcaatgccatatttggtttcaaaaccagagaagacacctgaggctgagctggctgcagtgtggacactcctcgggaggacagcagctccaaggacacgagaagcctcagccctgggccccagaatgcactgtcctgcaggcaccacagacaccaggcagtggatacctttgctgaatcctaaggagccaaagcatttttatgacaaacatgacctcctccctgcaatcgtcacatcctgggtagtctggacaatgcataaaccagaactgaaccaaggtgaaaataggtgggagcctcagagaccacctgccaaacaggctgagcccaagtcaagtcatgaagggatacagccaatgggtgagcactcttgtcctgtgcacaacagcattttagaatgggaagagatgcgacactcacctcccccaagaaaagtgcattacagcacaggccaagtgcaaacctgccagcaactggtggttctgtccaagaagcctttgccataa

SEQ ID NO: 119244 - DNA, 1000 bp, Homo Sapiens
gctccctctgtggggcctgctggggcctgggagccccccactgagcccacaatgccacggaaatccttgttggctgcccccgagaggggccttcccagctgggaagagctcagagctgacagctgcctcctgccatgtcaaggccccccaaagagcctcaggggctctggggccctggagggtggggttggggggtgggactctcctcccccactcctgctccctctcccttttcactgttgctttctatgtatagctccctagacctttcacttttttaaaaacgcgttttgtgtagagaataaggaacgtggatctttttattttgcaatcctgggccagctagaagccaggagctgattgaccttttaacttttttcagtggccacattttggttatcgatgtacctagaagtatgtaaattagattaaatttctcttctggaaacaccctggggcaggcggccagcgtgtgtttttctgtcaagtggacaggctggcattggctggcagccggggctgggatcggggcctcctctgtccagagcgccatggaggccctgggttttccagttggccgccaagccgaccagacgcagctggggatgagcccaagttcccagctgttggctctttaggccatggctgggagggggtctctggctggctggcaaagcggctccagtgagcagatgaaccagggttctgggcagcctgtctgggaagggagccaggatcaagaagcagttgaggctagaggagcttatcaaaggcaggagctaccagcgagggtgtcagggacccgttgggagcatttgggtgggggccagtggggttgtagagagctggaactcacctgcttttaatacatgtgacttctagtgagacacatgcacccctgacccaaggaacatgcggggaaaagaggagccactggctcctttgcgatgttatttattttctcgctctgcaaatgtttattgaacatttctgagatttt

SEQ ID NO: 119245 - DNA, 498 bp, Homo Sapiens
atgtacggcggcggggagcagagtaatcccggaaggacagggagagaggggtggccgtgggtggggtgggagggcaaggagttggtgcacacctacaagggctgcatcaggtcccaggactgctactccggcgttatatccaccaccatgggccccaaggaccacatggtaaccagctccttctgctgccagagcgacggctgcaacagtgcctttttgtctgttcccttgaccaatcttactgagaatggcctgatgtgccccgcctgcactgcgagcttcagggacaaatgcatggggcccatgacccactgtactggaaaggaaaaccactgcgtctccttatctggacacgtgcaggctggtattttcaaacccagatttgctatgcggggctgtgctacagagagtatgtgctttaccaagcctggtgctgaagtacccacaggcaccaatgtcctcttcctccatcatatagagtgcactcactccccctga

SEQ ID NO: 119246 - DNA, 816 bp, Homo Sapiens
atggctgccacagcagaactgggtggagcgtgcttctgggaccacagcctgaggaagccaggcctgcctagcttggatgagccccgccggctggcaggacgcagctccggagagaccctgggctccatcactgtttcccagctggtcccctggtcccccggatcatgggagctggacctgtctctgcaggtattggagcagattcacagtgcggaacgatgggctgagttactcacgttcaaccccgcgtgtgtgatttcaggggctgagcttggcgcgccatctccttgccttttgaaggcgagtttggctgtgaacggagctgctggttctgatcccgaagaaaacaggcagattttggcgcggcaaaagtcaaactcacagtcggactcccatgatgaggaggtgtcgcccacccccccgaaccctgtggtgaaggcccgccgccggcgaggaggcgtgagtgccgaggtgtacaccgaggaggacgccgtgtcctacgtcaggaaggtgattcccaaggactacaaaaccatgactgcgctggccaaggccatctccaagaacgtgctcttcgctcacctggatgacaacgagaggaggaggtgggcagcccccgttgctcgcctgggaatcacagctgccttctccggcctccgggagaacgctcggcgccaggagaagcgtgtcacagctctcaggaaacgtgggctcaccacgcaggggtggcttcccgaaatactatgctgcgtgcacctgccctgctgccgagctgagtccctgctctgggaaggcccggctgccttcctcaaatag

SEQ ID NO: 119247 - DNA, 1000 bp, Homo Sapiens
tggtgactgatcttcgtggccgcaacctgcggcccatgcgggagcggactgctgtccagggccagtacctgacagtggagcagctcacactagacttcgaatatgttatcaatgaggtcatccgccacgacgctacctggggccatcagttctgttctttcagcgactatgacatcgtcattctggaggtctgcccagaaaccaaccaggtcctcatcaacattggcctgctgctcctggccttcccgtcccccactgaggagggccagctccgaccaaagacctatcacaccagcctcaaggtggcatgggacctcaacacagggatcttcgagacagtcagtgtaggcgacctgactgaggtcaaagggcagaccagcggcagtgtctggagctcctaccgcaagagctgcgtggacatggtcatgaagtggctggtgccggagagcagcggccgctacgtcaacaggatgaccaatgaggcgctgcacaaagggtgctccctgaaggttctggcggacagcgagcgatatacgtggatcgtgctgtgagggccaggccgccccggacactgactccaactacctccgtggcctgggaccggcccccttcctggggtggcctcttcctggccggctggcccaccgactgatgaccggcactagtgttagcctgcggaacggggctgggcagggcagcctctgttggcctgagggtctggacgctttttatttatgcctatttaagttgggaaggggcagagagagggcgccccctgccccaccagcctgagtgccccgccttcaccccgagctgggcatgggcctggcccctcgtgcatttgcccttttctcggctacagctgtggacgttgccctcggggaggtcgaatggaccccattccccctgccctgcccgcccccagcctccccacccaggccggcaacctggccatccccattccgttcttcttcatgtaataaatgttttaatttctgaa

SEQ ID NO: 119248 - DNA, 1000 bp, Homo Sapiens
gggttttggacttgcttggagctttttactcttattttgattctctctcccttttggaatgggaatgtctgtcctatacctgtaacaccattttatcttgaaagtggataacttgcctcaatttcggaggtttacaagtaagactctggaatttggacttttgagctgatgctgatgctgaaatgagtttttggggctatgaggatggaaaaaaacgtatatgtatttaaagttgtgagaaagacataagttttggagatccaagggcagaacactatgacgtgaaagtttgttccctctgaaattcatgttgcatgaactttgtccccagtgtggcagtatcgagaggtaaggccttcaagaggtaattggatcacggccctcaggagggaatttatcaattaatggattaatggattaatgaattgtcatgggagagatattagtggtttcaaaagcagagaaagagagacctgagctagcacactcctccccttcaccatgcgatgcccttcactaccttgcgactctacagcgagtcaccaccagcaatgagacgctcatcagatatggatcctcaaccttgaaatgctcatctccatactgctttgaaataatcattaaaactatacatttaacaagatcggagtcatatggtgcgcatctgccagcacagattgccacctttggacagatgaaaatactgaggcagagaaaagttaagtaagttccccaaagagaaatacacagctaagaagtgttagtttaacctgaccatgtggcagaaagccagatatgcaaagaaaaacatgggggaatggatcaagaatgcaataatacaagaggacatcaccaagggaatgagcctagaccaagaaaggtactacaaactgggtctgaagcactgtgaacagggtggaagaagagcaaaacataaaacctgtttcagagaatgagtgacaagttttgttgggtcaaatacagcgactgctcatgtata

SEQ ID NO: 119249 - DNA, 567 bp, Homo Sapiens
atggatgtccctgtggttgggaaaggggagctcagggtaatggagtatcctcaagaacctgcagatattacctccctccagaaccgtggtctcagccctggctgcatattccttcaacgggagggctttagaaatgctgtgccagagctgcaccccagaccaacaaaatcagactctccaggatgcggccaaggcatcagtatgtggaaagctttcaggaaaactgagcaaaatgaaagccaattcaaagaagaaggaattaagtacataattgtgcagatgatacatggaaatggtaagaatggtgacaatgggacgtaagtgactgaaatttgggatacattggattagaagaaaataagcccccaagaaaccggaataagtctggagggcagcaagagtgactgtccagctaagaacctcatcagcaatacaaaacattgtcacagatgttgaaacagaccctgaggttaatgcattctttccaacattaggtcctaaaacttctcctgaaaagctaccttaaatctaacttttgaaagtgcacaataaaggtgaattaaataa

SEQ ID NO: 119250 - DNA, 1000 bp, Homo Sapiens
catttgatgccatgcaactgagaagtggttcaagctggatttgaacaaatgtagtcagactctgcagcctatgcatgtacccactgtgctatgctgtcgcattgaataaaatgcagtgccctcaatacgaagtcaatgtgagcacataccaagaatcatattgggaaggagaagtcctcagtaggcaaaacactttccagcaatgttaacctggatgtggatagaaaggagacttgggaatttctctgacttaattcatctctgggtccatttgaagcacagcagaagagaggggaagaggtgctaggagtggtgggctctgaggttcaagccccgccaatggccaggcctaataaagatctagacctccttgcagaatgaggctttctccaaaacccttcagctgtggtttggtggaagaggcctcactacatctagctaattttgttcattcattcattcattcactcatttattcaaccagacttcatggacacttctccatgtcagggcctgggcgttgtgtcagggttgcaaggatgagtcagggattatccgtcatcacccggaattcatgagcacatggggaagacagcttggagaaaatcacagtaataggggaaaataagggctgagaaaaaagtccatgcactgcagcggacaggacagcagatcagctcctgtgggttaaaagtgggctgtgggctgggtgcggtggctcacacctgtaatctcagcactttcggagactgacgtgggcagatcacgaggtcaagagatcgagaacatcctggccaacatggtgaaaccccgtctctactaaaaatacaaatattagctggccgtgttggcatgcacctgtagtcccagctactagggagactgaggcaagagaatggcttgagcctgtgaggcggaggttgcagtgagccgagatcacagcactgcactctagccttgtgacagagtctcaaaaaaaaaaataaaaacaaaaaaggtg

SEQ ID NO: 119251 - DNA, 846 bp, Homo Sapiens
atgactgcccctctgcgccggcagcagcaggtgggcgagagacaggcctcagacgtctgcacgtctccgcctcgccttccttctaccgaccccccgccggacggcgagggagaagacactggttcctggaactaccgggtctcggcgccagaggggcggggaggggcggggtctcgatcgcgctattgtcatggagacgggaagctggctgcagcggcggcggggaccgtggggccgaggtggctgccagccggccaatgtctaagcgaggcggagcggcccaggcggcccgagcctgggggagcgcgcagccggccagtggcggcctcgccggcggcctcttcccgggctcgcagtaggcccgagtcgtcgccgggagctcctgggagcagcgtccccgccctgctcccctcgctcccgcctcttgcggccccacggcccctcagcgcccgcccccggctccgcccgccgcagccgcagcccctggcgctaacggtcggtaacggcccgcgcgcgccgcccgccgggggctcgcgccagccacgagggagcgtccgcggcccgcgcgcccgcgcggcggaggagaggtgttaagtgtgatgcttccataatacatttggatgctgtcagctaagttcacttctgaactaaggggttcctccaaatgttggctgaaattcatcccaaggctggtctgcaagtgagtgtctgcacacagtttgcttgtatgtggagtcgatccaaaatagcatcaatgttggttttaccaaagtatttattattgataatagaggctaagtacaaaatgtagagaatgtcagctacttgaggcctttgattattaaa

SEQ ID NO: 119252 - DNA, 1000 bp, Homo Sapiens
aggcagaggaggcggccccgagggagcgcccggctgagaggcggggggccgaggggcccggggagcgggcgtcaccgagggccctggaagcggcagggctgggggagaggagacgcgtgtgtggagcatggggaccccagcccagctcccacttgcagacctgggccgcgggctgccggccgagtggccggggggcctggctgcccaggaggcgggccggggccgcggccgggggcgcggagcggagttagggtcgccaggccgagccgaggtgggacggaccgacgcagagaggaagggaagccacctggcctgaagatcctgtctctaagatcccattctgaggcttcgagggtctggcttgagcagcacagacagggacgtgtctaaccgggatgaccatgaggtctcatcgcagtttgccactaaccaggtccacgctgcttttatgagctgtaacactcaccgcgaagatctgcagcttcactcctgagcccagcgagaccacgagcccaccgggaggaacaaacaactccagacgcgctgccttaagagctgtaacacttgccgtgaaggtctgcagcttcactcctgagccagcgagaccacgaacccaccagaaggaagaaactccgaacacatctcaacatcagaacggacagactccagacgcaccaccttaagagctgtaacactcaccgcgaggttccgcggcttcattcttgaagtcagtaagaccaagaacccaccaattccggacacagtagcatttgggaataataagaattgtagctgggcatggtggtacacgcctgtagacccctagcagctgccatcatcctcaccatccgcatattattgatatattaactctttgatggcaaccatagcttatcccccttatctccctatgccctacagcagggcagtggaatggttaagaggctttgaagtctaagagtgctggcttaaaaccctaatttgtcattttggatgtgtg

SEQ ID NO: 119253 - DNA, 1000 bp, Homo Sapiens
agggaatatcgtcactggtacagatgaacagactcaggttgtgattgatgcaggagcactcgccgtctttcccagcctgctcaccaaccccaaaactaacattcagaaggaagctacgtggacaatgtcaaacatcacagccagccgccaggaccagatacagcaagttgtgaatcatggattagtcccattccttgtcagcgatctctctaagattttgagacacaaaaggaagctgtatgggccgtggaacagttgaacagattgtgtaccttgttcactgtggcataatagaaccgttgatgaacctcttacctgcaaaagataccaagattattctggttatcctggatgccatttcaaatatctttcaggctgctgagaaactaggtgaaactgagaaacttagtataatgattgaagaatgtggaggcgtagacaaaattgaagctctacaaaaccatgaaaatgagtctgtatataaggcttcattaagcttaactgagaagtatttctctgtagagctgccagagcagagctgagccacccattgctggagaggacatccacgcaggcctggacgagccggactgccttactaaggatttcctccgtatctgactgcaactcagcactcagctgcatgcgggacaggaagaggaagatcaaaacgttgtgccagaaactacctctgaaggctacactttccaagttcaggatggggctcctgggacctttaacttttagatcatgtagctgaggcataaatttgttgtgtactatgtttggtattttgtcttattgtttctctactaagaactctttcttaaatgtggtttgttattgtagcactttttacactgaaactatacttgaacagttccaactgtacatactgtatgaagcttgtcctctgactaggtttctaatttctatgtggaatttcctatcttgcagcatcctgtaaataaacattcaagtccacccttttcttgacttc

SEQ ID NO: 119254 - DNA, 1000 bp, Homo Sapiens
cactttggaaggccgaggtggacggatcacttgagcaccctcctggaggacgggactttggtctggttattccccgctgctgtgacagcgcccatgacagcagctggtccccactagcacccaggaagtatttatccaatgactcaatgaatctgccgccggatcgcccgggactgctttcactttctgtcagtccagaagtggagaccactcccccggcccttgcatctgggcttccttgtgccctgccttggacagttggctgcagtggaagtgacgctgtgactgccctgtgcccaagcttaagaggccttgcctgcatctgctccatcttatgggaccctgcctggtgaaggacccaaggctggcctgctggaggaggagatataaggagaagagtcacagtgccccatccaacaggtagctgccctccaggggcagagaagcccagccatggtcaggagagccacccagctgaggcccacctccaccaggattgccacccagctgaaccccacctcagccaggagagccacccagctgagccccatctggccaggagagccatccagctgagccccacctctgccaggattgccacccagctgagccccgccttggccaggagagccacccagctgagccccgcctgggccagaagagccacccagctgagccccgccttggccagaagagccacccagctgagcaccgccttggccagaagaggcacccagctgagccccgcctggccaggagagctgcccagctgatccccgcctgcagaatcacaagtgaaataaatgattgttgctttgagtcagaggtcagcggaccttttctgtaaaaagccacatagtaaatatctttggctttgtgagccacaccatgtctgtcacattagtgaaccctgctattgtattgcaagatgagccgtggacaatgtgtcatccagtgggcttggctgtgtgccaataaaactttatttttttggacactg

SEQ ID NO: 119255 - DNA, 691 bp, Homo Sapiens
atggaggaattctccctttgccgttccaaggatgccgccgcctcctaccggggctcccggggggcctatgagttcagacttggggggctccatctgtccctccctgaggtccctcatcttgtccctgctctgattctgtcagcagatcctgaacactccttggtggggacccatgcctccaaggctgcccccaatgccagctgtcctggggaaactccccagaactctcggggaaaggcccgagaaccttcggaggaagcctccgggactcctcgccacctgctctgtttctctcccggccccactgccttcaggagtcccccaaaatccacacagcgactcgagcagccttccactcagccagaggagggtcgggctcccccgcctgctctcggtggtggcgtctggcccttcctgccgtttccaaggcctccggaagcaccaacccagttctcagttacctcctctggccggaaggcctcacgttgtcctccagagctgctctgggcccagggctggctccgtgaccacctgatggacgtgctgggcagcatgggctcccaaggcagcatccccagctgctctcccaccccaccccagctgcccggcggctgggcccacgagggctctggggacacttccataggaaaggggcctggcactttgtgattgccacgtgtttcctgttaag

SEQ ID NO: 119256 - DNA, 1000 bp, Homo Sapiens
ttggccttatgagaaataataagtatttttctatttacatgagaatttaatctcaaaacaggaatcagaaacatattaagtccagggcataaaacctaaaccactgctcatatttattctttctaaatagagcaaagtgtaaaatcttctccataaaatgcacattgtgcttatgaaaaggccagtcttagtgagaatcattggtattccatagaagagtgaattaaacacagccaagggaagacccaagtctcatacttctcttgtatattccagagttccaggggaattccaggtgatagaggtgatctcccatactgttaaagcaaggttgcagacacttgggaattttggtcccagtactctaggaggtcacacctctgtcctggaaaatactacaggaatgtatactcttcctatgactcattctggtcattcttccagcatcacaaaaaccaaaaaaaaaaaaaggaaatatgtccaaatacatgatttgctatccctcctcttcaggtttcttacctgttacttacggataacagcattaccacaggattatgatgaagatacaatgtccaaatataaacacagttttgagcaaaatgccttgtacgaattggtcaatgaacaactagtaaataattatgtgaatatttactgaattatatggatcctatgaataattactgaataattcatgtgattgcttttattggcagtgctgaaaactcatccccgtgtgacctcaagtaagccatgtaactctgtgaacctgcagttttatcatttttaaaataaagaaacatgacagattttcattatgacacagaatgtcaggtctcccagatgccagaaaatacatttacttaaagccgttgatacgtcttaaagcggtttccttacagtgtcattggaggacagtgtggagtgcagagagacatgctttgaaatgggattgatccagtcctccttccttcactaccacatgaatgctgggcag

SEQ ID NO: 119257 - DNA, 799 bp, Homo Sapiens
atggggggcagggagaggggagggggccgcaggtggcttggggcccgctgggctcagctcacactcggcggccccgcatcgcgtggcgcgggctctgccgtccgcccccagcggccgcgctccgcgaactcctgccgtccctggcgctcggtactaggcgctcgctaccgctcccggccccggcgatccagcgggaggcggggccacgtgaccgtgcgtgacgtcagggccgcggccgagccggccaaactcaagttggttcagggaattgtcaacaaagggacgagagacgcgcaactccgctccgcactgtgcgccagcatccccggggcacggagggcgctgcggcccgcccggagacccccccacccaggctggatccgggccctggggcccagggagcgggtgtggacaaatcctccaagatttaacttccaagaaaaccggcggcggagcgggtggaggaggcgaggatgtgtggccaatgcacgcggagtgcaaggccgcctagttgggagccgcaagagcctgcctggtgtggcaggcacacggaacccaatccctgtctgtccgctgcggcctgggaggggagcgccggcctcaccagaggaaggagcacgaggggaggagttccgagaggaaataattagtgaaatatttgcagaagatgctgggatgtggatttaattccggatggacagtggtgcttctgattccctcagtctgtttccccacccacgatctcctctttccttggcctagacacaccaaaaataattcaataaaataaaaataaaaa

SEQ ID NO: 119258 - DNA, 1000 bp, Homo Sapiens
gaagcagggtgcgcggccccacgaggcagtcggtgttcacccctatcgagcatggtgccatgaagcccttcatgcagatgtctctaaatgccccattcatgcagccgcagaagcaggccaactgttgattctgaaggcctttgtcaactacagtgtgctgtgcctggaatgcaaaaatgcagcaggacaaactcccctgaccattgtgttcaaacacaagcataaagactgtgtattatatttgctcagtaaaatgtggtccacagtttcttttccaaaaatttcagtcccaatgaggatttatattaaaataaaacaatggatcctcagagctcagagtcacagtcttcataaaagccagttttgtggagcaagggtctttggggcaaaagttggagacactgtgatggtggatggtttcaccaaaccaaaaatgacctccaagagctggcataaggctgggaacagcgactcacaaagcatcgtgctcaagctaccatctctcagcaaacaaactgcaagcagcaaacctgtcaatcctttggcaatttcacagccggacacaagaaaacaagccctcaaatttcatccactggtgaatgcaagttcattctctgaattacaaaaacatcaacaacaaaatcagaaaaaaattactgccacagctaggaaaaaagaaaagctcataaaaaacacatatcttccccaagtccccctccctccagtttcaagagtgggatattcacatccatcgtttttctatgcaacacccagtgctgactttttactgaagtcctccttctcatctttcttagagcacagtgggaagactccatgggagaacgcaatctactgcttagctgtggcaagtgcctttaaagagaaacgatggcttcagcagttagaaatagcaagagtcctggccaaaaagagcatttctaacttgactacccgaggaggtctgacagcgtgtgaaaactctctagaaactgtgctttga

SEQ ID NO: 119259 - DNA, 1000 bp, Homo Sapiens
ggccactgagtcccctactccaggggcggcggccgctctccgaaagagcggcccttctcgtccctcccgaggttatccggccagcggcccgatcgtctccctaccgctttgcaagccgggagaagtgcgtcccttctcgcttgccttatggctggcgaagcggggaccgcactatagtgcagccgccgaaggggggaacgctcacgtatggctctcggcttcccaccgggaggtgcctgggagaggcaggcagagcccagccggccgcctgcggctcagtaccgaccgtgccgcgtcgccgggctctgcgtacccctgtctctgcccaggctcccgcaaaacttttattctctggggcccccggggtgtgtgaaggaattggaaccttccgccatctccgcgctccccttcggcggcgaccgaggggacctgcgtccctcgtccgccgggctctggagccctgcgcctcacctgctgatcgctctccggagtctcgagggggcacccccggagggaccgcgcgggcgccggcgcccctgaactctcccgctcaccgcggcagacccgcccagcgcaactttaacttgattcttcttgcccaaccggggcaccagcggctgctgctgcggcggctgctgctaccgccgccgccgcggtctcacaaaggggctcagggaagggaggcggcgcgggcggcagggacgggcctccgggccgccgaggcggggagacaaaagggaagctgcctctgctcgcgctgcctgctcggagccgcttgctcggctgcctctggctgggctccgcgatcctctcccccaccctcgggcactgctccgcctccctcccggcgggctgtccccgcagtgctcccggacccggcgagccttcggggcgcgcgtcgctggtggtggttgaggctctagcgataataaatgatagaggatacaatgactttgctgtctctgctgggtcgcatcatgcgctacttcttgctgagacc

SEQ ID NO: 119260 - DNA, 824 bp, Homo Sapiens
atgggcggtgggctcgccgttccacctcccgggcggcggtaccctgaccagatgctaggactgacagaaggagggcaccctccaatggggatggcatacaacctccaaagttttggcaagagggatgaaaatcagaaaggcctcgctgcttgcccatcactcagcgatgagcatctatttgcactaagaaaaaccacaaataacccgcttcgaacacaccatcttcctgtccctgtggcccctcttaggggaagtcgatggcaaacgcgcgtccgcatgctggcggcccctagcggcagcaggcgcgctctgcagggggagacagcgccgtcgcccccgcccgggtcggcggggatcgagttcggcccctcccactgcgggagccgtcggaggccgcgtcggagaaacgcgcctctgttcggactggaaacgaatctgggaacgaatcggatttttaaaggcattgtttgcttgaggagatcatgcttctcccctcccccgccagcctttttgcaaaggctgagcccagtccagccaggacggccgagggatctctgctccgggacgcgatttgctggcattgtcttcgggcccttccccagcggccccgcctccctgggtgaatccccggcggccagcgcagcgcaggcagcgatcctggcggctgccggggccggcagcttcctggaaagttacttcttgttggagccggcaataggcaaagtgtgttctgtgaaatccgcagagccgagattgactacgttccgggaatgagagggctgtgtcattcccctcattgcctgctgcattgacggcgtaacagg

SEQ ID NO: 119261 - DNA, 1000 bp, Homo Sapiens
acgtgggaaccgtggaaatcaccctagagtaaggctcaaatgtcagaaagctgcaggaggctccagatttaaatccctgaagagcctaagaatgtaatgatctctttcttttgttaatactgctgttgcctctattttcttgggggtgagtcttctcttcctttcttaaaaagcaactctgggccgggcgcagtggctcacgcctgtaatcccagcactttgggaggccctggagggtggattgcctgaggtcaggagttcgagaccagcctgcctaacatggtgaaaccccgtctccactaaaaatacaaaaattagctgggcgtggtggcacacgcctgtagtcccagctcctcgggaggcaggagaatcgcttgaaccccggaggtagaggttgcagtgagccgagatcgcaacactacactccagcctgggcgacagagcaagactccttctcaaaaaaaaaaaaaaaaaaaaaaaaaggccgggcgcggtggctcactcctgtaatcccagcactctagaaggccgaggcgggcggatcacctgaggtcagaagttcaagaccatcctggctaacacggtgaaaccccgtctctactaaaaatacaaaaaattagccgggtgtggtggtgtgtgcctgtaattccagctactcgggaggctgaggcaggagaatcgcttgaacccgagaggcggaggttgcagtgagcccagatcgcaccattgcactctagcctgggcaacgagagcgaaactccgtctcaaaaaaaagcaagtccgagggctcttattcttatttaagaaatttttactcttgaacacagaggaaacctggagaccgtgactgttaatcaaagatcctcttaactcttgacaaagttttctggattcctgagttctaaatcatgggactgttgacacccttttgaactaaagaatttgtaacaatttggtaacattcaaatctttaatacacaataaacaggattctgcaaac

SEQ ID NO: 119262 - DNA, 533 bp, Homo Sapiens
gcggccgcctcctcggagcgaacacgcgcccacgacaaacggggggagcgggattaaggaaaaccccgagaatagagaatgaatgcattttgacaattcgtgaaaataatcactagtttagtatccgtggttgtaccagttctctgaattctaaagatgaaaagatcattgagaacatctttgttactggcactgtctacatggtattttgagcagagttttgcagtgtttccaagtgctgcagtttcttcccgcagagagatggccactacagactctagctgccagaagaatttcccccagatctggaaagtttctacagttgcttacctcgaatattcacatacagagaggtacttcctccaaagtgcggttttccaacaactccataatgataacatgggaactggacctggctctgccaacagatgtcaatactttcacgatgaagagaaatagcgattccttcatgatctgcttcaaaatattggaatagattttagtgattctggaatggatgagaagatttgaca

SEQ ID NO: 119263 - DNA, 567 bp, Homo Sapiens
cagaggaagaaagccttgtcacactaaaggagagacagcggatgttctgaacagtcctgtcgtgaaacgttagacaacgtggacgaaacaggcacattcctaagcatcacacattactgaaactcagtcaagaagaaatagaaaatctgaatacatccatggcaagcacagaaactgaactaggggattcgaaatcttcccacaaagaaaagcctaggcccaactggcctctatgatacagcaagaaggtgccatctatgaaggagaagacaagccctcaccagacaccaaatctgctgatgctttgatcttggacttcccagcctccagaactactatcgatttacagcaatggattggtcaaggaaggataaagaaacttggaaagaactatcatgatacctgccctgagaagccaaaatttggtttaactttgtgttgtttactgtttggttctataaaagctaagtttataaaatattgtatgacaggtgaatttaaatgttactaaccatcttggatgtcctgctcttctgctgtacagcaataaagtctctctaaatgcaa

SEQ ID NO: 119264 - DNA, 1000 bp, Homo Sapiens
ggatcgcccctccccgaccacgcccctcacccccgcccttccggggccgaaagcgaaagcgcgctcggtctctcggtgctcgctccatcgggtctggcggggctggcagcggcgaggacccgggtctggcgctgtgggccgggagccgtggggcggcatggaggggctggttgtcgccgccggcggggacgtctccctgcacaacttcagcgcgaggctgtgggagcagctggtccacttccacgtcatgcggctgacggactcgctgttcctgtgggtgggggccacgccgcacctgcgcaacctcgccgtggccatgtgcagccgctacgactccatccccgtgtctacctccctccttggagacacttccgacacgacctctactggccttgcccagcgcctagggctcggagggaagactggcctggcctgtgagtgtggcgtagagtggggattaagcaaaggtcatgaggctgaatgctccactcttcccacaccccaacacacttcctgtgggccagccaggaagaccaacaaacaggtgtttgtcagctataaccttcagaacacagacagtaacttcgcattacttgtagaaaacaggatcaaggaagagatggaggctttccccgaaaagttctagctgagtggcagaagtgagaatttgtaaacttatgtacaatgtacgtgtaaataaatggattgaatttcagtttgtcatcaggccgcgctcccgttttgtttttaaggggttaatcttttgagcttccttctcagcagtgtgtgggccaaaaggctcatactgacccacctggtgaaggagaggcaaagtgggcagtatatacttcctcatttggctgtgagtgatagagggatgaaatgggatttttgttgggattgaagactgtaatctaagagtttcaatcagacatgactgtgacgtgcatcctcaattagaattaaagtgatgtataaatatgctttagatttgtgtgtg

SEQ ID NO: 119265 - DNA, 1000 bp, Homo Sapiens
ccatgaatccaacttctcatggagaaatgttaatattttttcagtttgaatcaatcagggtgaaactaccatgctattggtttgcttactttttattatttcatgtaaaatctaagacaaaatacattaaatgcttattgacatatgtatttattcttcaccaggctgataatatctgcctaattttaaactttcttccattttgtaggtttcaacttattctattgtaagatactgttaaatctaatagaggcattgtcacttttacgtataattttattttatttcatatatttcctattggttttttacatttaaattatggagcacttcatcatataaaaaacttcaattatatttaaacagtaagtctttggatttttttgccttttaatttccatattacataataatgagataaacattaatgttttcagggtactttaaattttagataattactcattgtattcatgtgaaatttgtttttactgcatgtgtgggttggaggacggttttcacttctgattcatctttactcttatctcatcagagctcatacctcttgtagttgggggattgcagtttataattccaataaatggggcaaattcaataataacataatacaaatgagtttgaatgcaggacaggtcttcaaagcatacacaacatgggcctacatatgtacaacaataataatttataagttactgtttggatggaaagtaaaagtacagaaaatttgttaaaggaaattaaaatggagatcatgtctcaataatctctgagcagacaaaattagttaggtctcataagtgatctcaacctcgcttgatttgcaaatacaaacaaaacttacattatttcttgtagctgcatattgaaaaaagagaaatgaagctcaaccagtcagaagtagccaacaaccttatataaatagaaactgtccaacaaggtaaacagacaaacaaaaaacaataaaaaaagttgtgctacc

SEQ ID NO: 119266 - DNA, 1000 bp, Homo Sapiens
cattcggcctggcctgcgcctttcctctcctgcctgggcagccagactgcacaagcctctgcatttgaactggcttctccgtggaacttggtttgtaaccacggagcaaactgcaggaccaggggcagagaagttgatggcaagcctttttcctggcagtatccagaggcggttctagtaaagaggctggattccgagaggccagagcggtatcatacgaacgccgttgcctggagacggagtggggtgccattgcctagagactgcagaaggcccgcagccaagcgagtggtaagaggacgccgagagagccccggacccacggagcagccccaaggctatggcgggacacccgaaagagagggtggtcacagatgaggtccatcagaaccagatcttgcgggagctgtacctcaaagagttacgaacccagaaactccacacgcagtaccatgtgaatcccctgcgcaaggttcacaggattacgaggaagcctatgtcttggcatgataacctggaggaacccgcagacgccaggtttctgaatctcattcaccatgctgcccaggggccaacgaagaagtacccggaggcacagactgaaaaccaggaaattgggtgggactcagaagccttggtcgacccagaacgccgtgaccacaggatgaaccacttcagggtctacagtgacatcactctgtacaaagctaaaatgtggagcttgggagaagatgatcgccacaagtagcatctcagctgtggagtcaggccctggatttaatgccctaaatatccactgcctagaagactaaacattattttaaccccccgtcccccatccataattcatggataatggcaaaaattaggaagcataaaaaatatgcggaagaaggaaataaaaattgcccattatctcaccatatggaagtgactaatgttagcattttaaaccatttgtttttaaaattaataataaattgcatatatttattgtgta

SEQ ID NO: 119267 - DNA, 1000 bp, Homo Sapiens
gccgggattgcgccagtgcactccagctgggcgacagagcgagattccatctcgaaaaaaaaaaaaaaaaaaaaaaaaaactattgctgcagtcattcagatggaaatggggaaagaataatattaactgatttcaaaaaggacttgaagatgtgaatcatctattttgctgaagaaatcttaactctttgaaattactttttgttgctgttgtcatactcttaggtgccaaactgcggtaaattttttatcagtgaagtggaagcatgtgttttgttgttttgggaatttttatcaagtatcttcagagaagattatttcctgctttatcttcaaaaactggaaaggaagggtcaaagaaaagacagtagctggccggtcatggtggctcatgcctgtaatcccaacactttgggaggctgaggtgggcagatcacctgaggttgggagttcgaggccagcctgaccaacgtggagaaatgccatctctactaaagatgcaaggattggccgggcgtggtggtgcgtgcctgtgatcccagctgctcaggaggctgaggcaggagaatcgcttggacctgggaggtggaggttgcggtgagctgagatcacgccattgcactccagcctgggcaacaagcgaaactctgtctcaaaaaaaaagaaaagacagtagcttatgttcatgtcaagcacctctcatcacagtctagttccaaggaaaaaattcccagcgttttctacattcggtgctgcgtcatctgaaatcggcacattccatggaggaaggagtcctgctttgttgcatgtatcctagggtttaatgttggtaaatgagtcactctagcatttgtagaaggctccctgagactcctgcagcagtcgaccaagcccaaggacataattgaatctggagagtcctggggccttgttttgaaaaagacttgaaatacacataggaagaaaggcataaaaataaatgttcacttgtctctgctgt

SEQ ID NO: 119268 - DNA, 1000 bp, Homo Sapiens
cttgaaatgacaaaattatagacatggaggacaaataacagattagttgttgccagggattagggatggggttatgggaacagagagggaagtgaatgtgactataaagcaggtagtctttgtggcgatggaacagttttgtatcttgattgtgattggtggtagtgacacaaatctgcacctgtgataaagcgatacatagctatacacacacactgtactaatgtcagtttcctagttttgattttatattatagtaagatgtaaccatgggagaaactgggtgcagggtacaggggacctcttttgctatctttggaacttcctttgaatctaaaattatttcaaaattaaaaaaaaatttttttaaattatcctagctaaagcatcaagtgaaagttcttaagagaaaaaaagaaaacaagggaagggaaggtacaggatgtctgggaaattgtctgtgacatttaaactggtttttgcccagggggcatttgccaaatctggtttcctttcctcagcatcagagagcattgaggaacctgaggaaataataaggtctttctttctgggatgatgaatctgatacgttcttcctcttcaccttaaagctgagactcagctaaactggaaaccaccaccaatcccaccatccttcaagattgcagggaaagttgattttctgcatgcttcttagtttttaatgtgcatcagaatcacatggaggacttgttaaaacaaagattgctgggcaacatccccagagtgtaagattcagtaggtctggggtgagacttttaaaatttgtacctctaataagtttccagatgatagtgattttgctggtcgggaaccacactgcaaaaattatttgtatagctaaaaccttgtcggagtgaatatgggggcaagatcactgctgagaattttaagcaaccagctgacccttgtataatttgcagtgcgaatttaacgctgtgtaggtgatctaaaaaaaaaa

SEQ ID NO: 119269 - DNA, 996 bp, Homo Sapiens
atggcggcacttccggcacctaccaccggcggggagggcagaggaggagggggagcgcggcgagggggaacgtatcaccgcggcgccgcccgcagcgccgatgcgagcggagcgcggcgtaggggcgggccgagcgccgggcgctgcagcgccccctcgggctgggaagtggaggagcagccgcacctaagcccctggggccgcgggcggagccctcaacctagggagctgcaggggcgcatctctttgtctccgatccctactggagggaagagccaggcctgggaatctgaatgcagctggcagccccgccccggcacccgcctgctcttctcgcgggtccggaccgcgagcgcgggggccgacgggtcgccgctgcgccgggccgggatggcggccaccgcgctgctggaggccggcctggcgcgggtgctcttctacccgacgctgctctacaccctgttccgcgggaaggtgccgggtcgggcgcaccgggactggtaccaccgcatcgaccccaccgtgctgctgggcgcgctgccgttgcggagcttgacgcgccagctggtacaggacgagaacgtgcgcggggtgatcaccatgaacgaggagtacgagacgaggttcctgtgcaactcttcacaggagtggaagagactaggagtcgagcagctgcggctcagcacagtagacatgactgggatccccaccttggacaacctccagaagggagtccaatttgctctcaagtaccagtcgctgggccagtgtgtttacgtgcattgtaaggctgggcgctccaggagtgccactatggtggcagcatacctgattcaggtgcacaaatggagtccagaggaggctgtaagagccatcgccaagatccggtcatacatccacatcaggcctggccagctggatgttcttaaagagttccacaagcagattactgcacgggcaacaaaggatgggacttttgtcatttcaaagacatga

SEQ ID NO: 119270 - DNA, 1000 bp, Homo Sapiens
gacagcgaccagcgagaaggggccatgatgatggtggtggttttgtcaaaacgaaaagggggatatgtagggaaaagaaagagagatcagactgttactgtgtctacatagaaagggaagacataagagactccattttgaaaaagacctgtactttcaaccattgctttgctgagatgttgttaatctgtagctttgccccagccactttgccccaaccactttgacccaatctggagctcattaaaacatgtgttgtatgaaatcaaggtttaagacatgtagggctgtgcaggacgtgccttgttaaccaaatgtttgcaagcagtatacttggtaaaagtcatcaccattctcttgtctcaataaaccagggacacaatgcactgtggaaagccgcagggacctctgccgttgaaagctgggtgttgttcaaagtttctccccatgtgagagtctgaaatatggcctcgtgggatgagaaagacctgacggtccccaagcccgacacctgtaaaaggtctgtgctgaggtggattagccaaagaagaaagcctcttgcagttgagagagaggaaggccgctgtctcctgcctgcccctgggaactgaatgtcgcggtataaaacacgattgtacatttgttcaattctgagatgggagaaaaaccgccctatggtgggaggcgagacatgtttacagcaatgctgccttgttattctttactccactgagatgtttgggtggagagaaacataaatctggcttacgtacacgtccagtcatagtaccttcccttgaacttcattatgacatagattctattgctcacatgtttgttgctgaccttctccttattatcaccctgccctcctactacattcctttttgctgaaataatgaagataataataaaaactgagggaactcagagacccgtgccagtgcaggtccttggtatgctaagcgccggtaccctgggcccactgctgtttctctat

SEQ ID NO: 119271 - DNA, 1000 bp, Homo Sapiens
actagtatcttatagaacacacatagaaaatagtgctctacagtagtcactttcacatttttttcttggatccaacttcatgataagaaatacattttaactcataatctattcacatgtatatgaataactgaaacagaagtttcacaaaattatgattatgtttgccacaaatggtgtgctctaatattttccttctgtttcatcagaagaaaaatactggttactatccagctaagctgattttgtgacccattaatgagtttcagttctcactttgaaaacactgttctagaattacagaaaggtctagggatgagaactaacaccactgtgcatcacagtgtgtcagtctgtgccaggcagcttataaatattttttgcctctaatttttatacatttatgaggtaagtatcattttctaggtaaggatgctaatctgtctccaagccaaataacacacagtaaatcatggcaccaggatttgaatctgggtctttatacatcatagcccatgctgttctcactgtattttgctttttccaagtataaccccgttttcacacgaatggccccttcacatatttgaagactaccgtcgtgtccgtgctgaccctttctccctgccacacatgagagtttcattctgtcgcccaggctggagtgcaatggcgcgatctcggctcactgcaacctctgtctcccaggttcaggaaaatggctttgtaaagaagcttgagcctaaatctggctggatgacttttctagaagttacaggaaagatctgtgaaatgctcttctgtcctgaagcaatactgttgaccagaaaggacactccatattgtgaaaccggcctaatttttctgactcttacgaaaacgattgccaacacatacttctacttttaaataaacaactttgatgatgtaacttgaccttccagagttacagaaattttgtccctatttaatgaataaattgtatgtatttttctctata

SEQ ID NO: 119272 - DNA, 1000 bp, Homo Sapiens
ccgcggccatgttgctagcatcctttatgtttgcacttccagccacttacgatgtgaaatttggggagaatgtagtatttttttgcttcttttgtgtgttttttatttttgtgtttttgttcttttacttttctctgaaagtgattcatttattctggagatctctttatcattctctgagtcccagagcagatgtcccctcaggtagcaacctgtacagaagaaagcacgtgggttttagaaccagacagatctggatttgaatcccagatgcaataagatgaaggtgaagtgcctcacacaggatgtggcacatgacagtgcctgaagggctcccttcaaggaagccgtcctgccccgccccctcctctgctcctgcagcgccctgcacagctctgctccccgcatgcaccgcatcgggtctcagttttttgtttgcgagcttgccctgtccctgcttgtagcccctgagccctcacagttgtcacacacccagcagtctgccaaggagctgcttttcctgactactgtctctccatgcctagggaagtcaaagccctgggccttgccttcagggagttgacagtgtccttgaagtggtgaagtgcccaccacatgaaccaaggagagacgccaaagcagctgccatggactctggcctgtccaagcctctgtgcacctgcagtctctttccactggcacttccctgctttgctaccatcgtggaagaatggaagggagggggagaaggtgggtgggctcagggagaacggccagagtggccagaagatgcagagagaagccccactgggatctgagtattccccaagggcactcagccacagggatgaactagtgtttgtttgtatccttgcagttatgtgacttaaagtgactcagagatatctatgtatgcgagtgtactccgctggcaatgaagtaaatatatcaatttgtggaagctcgtgtgtcttctcaactgataaaccatacgttccct

SEQ ID NO: 119273 - DNA, 1000 bp, Homo Sapiens
caagcaaaactacaagaattactccatggagtcaaggacacactttcgaatccaggcagccacactccaagccaagtcttccctagagaacagcagcagatccatggtctcatcagtgtccttgtagctttgtgcagcagttccgggctggaagacagagacagctggacagagctcctgaaaacatttcaaaataccccctccccctgccctgccctgcctttggggtccaccggcactccagttggatggcacaacatagtgtatccgtgcagaagccgagctggcattttcaccagtgtagccaagggcctttgccaagggcagagcaggtggagccctctgcctgccctatcacacatacgggtacttgcttttcactgtgatgtttaagagaatgtatgaacagtttacattttccttagaaatacattgatgggatcacagttggctttaaaaaccaacaacaatcaaccacctgtaagtctttgtcttcacctattatcatctggaggtaaatctctttatatgatgatgccaaagggcaaattgcttttcaaattcagcaagttctcagcttgtgtgacggaaggtccttcagaggacctgaggaatgcctgggagaggctaagcctcaggcttcaatgcttctggggttgggcatgaggatgtacacagacacccactaccttactactcacacttcatttcactccttttgtaaatttccaatttaaaaatcaagcacgtctttttagtgagataaaatctgagctcttctgtagaaaaatcaatctctaccagtagaaaatgccagggcttgatggaagagctgtgtagccctttctatgccaaagccaggaaatttggggggcaggaggaggttctcagaatccagtctgtatctttgctgtatgccaaactgaaaccactgggaataatttatgaaacataaaaatcttctgtacttcactccaaggtacatttgcttactgacagc

SEQ ID NO: 119274 - DNA, 1000 bp, Homo Sapiens
gtctttggcaggctttcttctccgcctttgcctccacaaactgccactgcttaacggtcactcacaaagggctcccctctctgaaaattagtccttctggacttttcttgcaactaccattcttcagtagtttcataaatgagtaagagttttataacatctgaggggtgggggtttttttatgttaccataggagcaaatgtgttccacatcctttcacacgctacacagaaaattgtatgttgtgtttaaatcatagccaaattgcaaagaaaattatggtttctttattttgttcataactgatctaatctttctcataattatctccttctaggttgaaaggattataaaatgtaattatgtttaaaattccatgtgatctaaaattccatcattctatcatgagcccaggagctcctgctacataaaacatatgctaatcaataaatgtgatacatcacatcaacagaataaaaaacaaaaaaaaccatatgatcatctccatagatgcagaaaaagcatttgataaaattcaatatcccttcataataaatactggcaacaaattaggcatagaaggaacatatttccacataacaaaggccatatatgacaaacccacagctaacattatactgaatggggagaagctgaatgcctttcttccaagaactggaacaaaacaaatatgctctctttcaccactcttattcaacacagtgctagaagttctgtctaaagcaatcaggcaagagaaagaaataaaggttttccgaattagaaaagaggaagtctaattgccccctctttgaagattacatgatcttatatctagaaaaatgtagagactccaccaaaaactctcagaactgatcaacacagtaaagttgcaagatacaaaatcagtcaacatgcaaaagtcagaagcatttctatacaccaacaacatggtagctgaaaaagaaatcaagaaagcaatcccatttataatagctac

SEQ ID NO: 119275 - DNA, 1000 bp, Homo Sapiens
gcgagtctcctccctcagcctcccaagtagctgggattacaggcatgtgccaccatgcccagctaattttgtatttttagtagagacagggtttctccatgttggtcaggctggtctcgaactcccgacctcaggtgatccgcccgcctcggcctcccaaagtgctgggattacaggcatgagccactgcgccagcctaaagtgtgttcttaccacctatttttcttcccataggagttagccagtgaagggagaatgtctggttttctatgctgtcagaaatctcttttctaggtttgtaaaattgaacttttagtacttcgaattatttctctttaagataaaaatgcatacgatttttacactgatcttagatttttgacttatgaggccagtggtttaaacaatcattattgaataccaagcccaaaagtttagttaatacaccaattgtaagttctggtctgaattttgtcaacatatttagaatgtaaatggcattattaaaaatgtatctgatttctctgtgaacagtaatatttcatatttttaagtttaaaaatgttagtgtaagccaggcacagtggcattcacctgtagtgccaaccactcaggaggctgagatgggagaccttttaagcctgagtttgagtcaggcctgggcaacatagatgtgagcacctatctctaaaaatgtaaataaataaaaatctcaaaaaaattaaaaatctcaagtgtaaaaacagttctgtagatagatggtagtgatggtagcacatcaatgtgaaggtatttaatgccactgaactgtacacttataacgaattaggataaattttatgttatgtgtatttactacaattttttaaaaatcgtatatgtagtttaacaggtgtggtcaatatcaaaacttaggtatttaatcttgttaaattatataagcagaaaatgctggaaaaagtacctgtcatagaaaaaaataaacttcctaaatcaaagt

SEQ ID NO: 119276 - DNA, 856 bp, Homo Sapiens; identical to SEQ ID NO: 56789

SEQ ID NO: 119277 - DNA, 1000 bp, Homo Sapiens
gaaaagtgtaacaagtaatttgaatcaggtttctcacactcatgaaagtgaaaatgatctctttcatgaaaattgcatgttgaaaaaggaaattgccatgctaaaactggaagtagccacactgaaacgtcaacaccaggtgaaggaaaataaatactttgaggacattaagattttacaagaaaagaatgctgaacttcaaatgaccctaaaactgaaacagaaaacattaacaaaaagggcatctcagtatagagagcagcttaaagttctgacagcagagaacacgatgctgacttctaaattgaaggaaaaacaagacaaagaaatactggagacagaaattgaatcacaccatcctagactggcttctgctttacaagaccatgatcaaagtgtcacatcaagaaaaaaccaagaacttgctttccacagtgcaggagatgctcatttgcaaggaataatgaatgttgatgtgagtaatacaatatataacaatgaggtgctccatcaaccactttatgaagctcaaaggaaatccaaaagcccaaaaattaatctcaattatgcaggagatgatctaagagaaaatgcattggtttcggaacatgcacaaagagaccgatgtgaaacacagtgtcaaatgaagaaagctgaacacatgtatcaaaatgaacaagataatgtggacaaacacactgaacagcaggagtctctggagcagaaattatttaaactagaaagcaaaaataggtggcttcgacagcaattagtttatgcacataagaaagttaacaaaagcaaggtaacaattaatattcagtttcctgagacgaaaatgcaacgtcatctaaaagagaaaaatgaggaggtattcaattatggtaaccatttaaaagaatgtatagatcaatatgaaaaagagaaagcagaaagagaagtaagtatcaaaaaatataaatacttttcaaccttcctgaaagaaaatggccttggctaa

SEQ ID NO: 119278 - DNA, 1000 bp, Homo Sapiens
ctataaatttgccctttctggacagttcaaatcaatggaatcatacaatatgtggtcccttgggtctggcttttttacttagctaatgtttttgaggtttgtccatgacagataacgtcttggtagtttgttccttttattgctgagtagaattctgttgatggatgtaccacattttgtcagcagagagccttttaaacttggattccaacttcctgttgtctaaacggaaccctccgaacgtaggacttataggggaagctgctgtgcatgtcaaaaaaactactaatcagaatgagctttgtcatccagagccagaactgctgcagaaatttttataattttgcaacttctttttttacaaggaacttttgtgctactacacatcaggacttttgaagcatccaataaatccatttaataagtatgagcatgtgtctgagtggacaagaaagtgaaaccatccatgctacattggataatttttcctcccccagactggacagggaatctcagctttcaaaacagagtaacctggctccacttacaaagctgcacaggcattaaagatcgtgctgcctttgttaggcagatttggaggggaggcccaacagcaaagatggagaggaaaaagggagtggagcttgtggaacaggaagccccccagggtctgtgcagggctgctcagctcttgaggatgttgtggatggtgaagtggtgatggtgtcccggagcagcccagcacctccactgggcccagaaggtcttgacttcggacacttacccctgtttcacaagtgtttataaagctgtttttgctttttttcccctaatcattacttggtagttattaatccttctttgggggagggacagggctttaaaactgaagaaaataattttcataaaaatatcaaaaatggaaaaaagttactttgtaaaaaatttgctatacaaaccaaatggcagctgttgagaatctcaataaaatgttaaatgc

SEQ ID NO: 119279 - DNA, 1000 bp, Homo Sapiens
atcggccctcagggacgtaagtctgcctagaggagagttgacacaccaaaaacaaaacttctgtttcaaaaatccagtccctgaaggcaatcgggaaaaagtgtgaagaacaagggcagagcttcccaactttgagcctgagtggtgaaaggaagcaagaagaaaaggggtttgtgggtgctcggaggagccccacaactatacccccatcctctccaagatccaccagaacagatacctacataaactagaggcatttgagaacgaaggcctcttgcccccgaggcagcagtagcagacttgtatggcccacatgtattagtctgttctcacactattaagacatacctaagactgggtaatttataaaggaaagaagttgaattgactcacagttcagaatggcttgggaggcctcaggaaagttacatcatggtggaagtggaagcaaacaggtctttcttcacacggtggcagcaagaagtgccaagcaaaaggaggaaaagccccttataaaaccatcagatctcatgagaactcactatcacgagaacagcatgagggtaaatgctcccatgattacattacctcccaccagctccttcccaccacatgtagggattataggaactataattcaatataagatttggggtggggacacagccaaaccatatcagaggatgagctaggggtgcacagggggagtaggctgtgaaggacatgtagtacccacatctctaggcctgcaggtgcctttccgacaggaacaagaggaacgtggtaacattccagtgtggcctggccagcaggcacagccaggtaatgtatggcgcagcaggcaccaatgtggcaggggagggccacgtgctcctgtgtctaccccaacacaaaggtgcttctccataaccactcctacccgcctcccccaaaactggctgagtttaagtttctgcaaactggcaaaatgagggcttgaaataaaaattgtctgtggact

SEQ ID NO: 119280 - DNA, 1000 bp, Homo Sapiens
gatcgcaccactgcactccgatctggcaacagagtgagactccatctcaaaaaaaaaatgtttatagcactatttgatgtatgttttcagtgcttaacactatgccagaggatggaaagaatgggtaacctgtgaattttcagagaagaaacaaggaaattgaatttttggaatacaagttggctctttccttgtgtacatgcagcctaggatagtggaatgagcaaaatattaaaaatctagtcctggcaccactggttatggtaaggggatttttgtataagtcaattagttgttgaatcattttctcatctgtaaattgaaaatggcactctcccctgagataatgcatgttacttgccatggaaatataagggtcaggattctatgaattaatttttaagtagcttagtatcattcaatagtattctaaaataccaggttacttatactacctactcatgtatgacatttgtgttagtataccttctattcatcaaaggggctatgagctagacctgcagattaacacgcagatgtggccttaaaaaaaaatcagttaatctgggatccagagaagtaggtgaaatttgaacaatgaaaatacattaacagcttctaaagatttatagcagtattatgaccagcatggtagtgatgaaatttgcaatttaaaaaattaaaattgggccagttgtggtggctcatgcctataatcccagcactttgggaggccgaggagggtggatcatgaggtcaggagatcaagaccatcctggccaacatggtgaaaccaccccccgtctctactaaaatacaaaaaatcagccaggcatggtggcgggtgcctgtagtcccagctactcgggaggctgaagcaggagaatcatttgaatccgggaggcggaggttgcagtgagccaagattgcattactgcactccagcctggtgacagtgtgagactccgtctcacacacacacacacacacacacaaaata

SEQ ID NO: 119281 - DNA, 1000 bp, Homo Sapiens
aatccctccccaactgagtgtcttactgtgttattaaatcttatcttttagttaatagttgcagtatttcttttaaatgtttttgttttaaacttaggggtaggatcctttatttgttcagttgtttccaactatttgggatactttcattccctgctatttatgaagtacatgtttatcactaagtgtagtggtttggtttacattaataattttatgtgtggtctaaaaatgcagtcactaagagaatgtacactgtggttatggtcacagtggttatggatttattggcagtggagtaccatggaggtcactgcaatggtgctaaggctgacagtggaatcttctgtttagggccttaagcccctgagggtcctggtgactcagggaatccatcacagccccgggtctttcaccccagttcactccttttatgtttggcctagattgacccatgcctgccctcttctcaacagctgagtagggaaccagccatctgaatgagctgatcgttgtttatgttcaaatgagtaaatgtccagaccacttaaaactacagctgcttttctggcagtctcgtctgcggggccaaaacttaataaaccacaggaaatagactgtcattcttagtttgctgccagggcttattttagattgagagcatactggtacatgagagcagtagtgttgtttgctcttattttcaaccagggagctatctggcaccttttgtgctcctggcttttttcaatcatagcactattgcatctcctagctatttcttttgcccagcagggtaatattgagtcccattgcaagtatggacaaggcctctggttctcctcaccacccaccttttcagccatagaacatcactgaaaatgcctaatgcctggatctgtgttctactttagtttcactgggaagtctttcagtgggagatgaataaatgttatacattgttatgtccagttatgtcaataaacccactaatagagat

SEQ ID NO: 119282 - DNA, 1000 bp, Homo Sapiens
cccaaggttattttatcttgcaaaagaaacctaaaccaaactaagggccttacagtttatggttagactgaatcaaaagctataacctcaatttttccaaaaacagcttctgactgcaaaagcaagtcatacagttgttaggtatgaaatagcactgatcaggaaatgcatcttcgcagatggtatttccttcagaaaagacttttctacttttaatataaattaagccataacagtttcatgctgtggaaagagggtgaaaaggttcattttaagagattatataatatgaactttcacatttactgtgaaatgtctaactttgccagtgcttcagcaagtttttttggggggtgatggggaggggtagtattggttttagaggtttcaaatctgtgaactttggagaggggacagttgttggctctggtatttactagttttgtagtaacgttttgctagcctgactgacttttcttactggtttttatgcccacggtccgaggggactgttcttcttgttgggggtgtctgcggaatagcgtctcgtcttgtttgtataggcagtcaatgtgtgtgacatgtgtgtcctttcagtccggaagcccactgtgtgacaatggcgtggggtgtggctgggaggtggggtgctgaagcttgaagagcatttctttgctgattcataacagtatttcccatcttttgcctgcaggcagggaaagtgtacagtatttattttgtttctgttttactttaaatttgtaagtctttaagtagcttacattgattattataggggaggacaagtgacttgtttaaagttgtatttagtattctttccaatttctgtattttaaaatattgaaattaaaattgtattacttctgttttgatttttttagcacttagtgtattttttgctcattttgtttgaaagtataaatgttgaaaattgtataaaatgcgtccttgaaagaaaaagaatctgaattctatatcc

SEQ ID NO: 119283 - DNA, 1000 bp, Homo Sapiens
gagcggcggccctacttctgcccccgctgcggcaagagcttcgcgcgcgagggctcgctcaagacccatcagcgctggcttgggctcttgaaggtgtgggccgccgccaggctccggccgcccgctcgcgttcctccctcgggaccctctggctggctgcgcacagctgcttccggctcctgccatggttctccttctctggcccatccggcctagagcagttgcagagtgggcaggatcttaagacccgataggtgcagaacccatctggacacggagaccaggaatggagttccatggaggcctggctggcactgcacccgggcatgaggacacatccagtaagaagacctgcctcaagaggtgcactgcggtgaccagtggaggtgactggttggagcctggaattggaagcagattccaagctctggtggacaaactctccaggcctggtgggaatcacagctggggcagacctcatcctggctgcctggccacaggcccccactctctgccactggtggtaggacgatgcctgtgtggagagctggcttctctgctcccgcctggtccaccacttggctagagttcagagacaggaagtgattggtctaagctaacacagcaagttggtggcagacctggttctagaggcaaaaccttcttccagatgtgaatgaaacctgcaggcttcattttcctttctgagcagtgcttcttagctctttggagacacgaagcccttggaaaatctgatgaaggttacggaccttccctaggaaaacagataactgacgtagactcaaaaaccccaagcaatttcaggagccactggactccctgaatgaaacccatccctggactccaggctaagaacctcagccctggggacttcacctgctgccctttccttacctgtcacacattgagccccgagtcaaggccactgtacaagtagtgcccctccctccccctggccaagcctccttcccttgttcag

SEQ ID NO: 119284 - DNA, 1000 bp, Homo Sapiens
acgccgtacgtgccagatggtgttacctggagcttaaaaagctgcacgcaagtgttaaacttctgtaggaggaatactgttggcgttcaaaagcattgctgtttcagttaagtagttccttaattacttacaatgtagtaaggctacattgaaggaagatataaatttcagtcaagactacgactgagcaaagacaatggccaagaacaaattaagagggccgaagtccaggaatgtatttcacatagccagccaaaaaaactttaaggctaaaaacaaagcaaaaccagttaccactaatcttaagaagataaacattatgaatgaggaaaaagttaacagagtaaataaagcttttgtaaatgtacaaaaggaacttgcacatttcgcaaaaagcatttcacttgaacctctgcagaaagaactgattcctcagcagcgtcatgaaagcaaaccagttgatgaagctacaagattaatggctctgttgtaatatactggtgatgcatctaattctccacaaagaccaataaattgaatgttttatacaattttatttttaaaaatcttgttaatgtacaggcattggcacattttaaaaacaaactacataaacagatctttcctataacctaggaaagtggaatgtcagaagtcaacaaaatgtgataaacttaaagtgctaaaacagaaggcacttcacaaaatctgttcactgaaacagttatatatcctcgtttacatccttcactttacaagtggcagtgaacgtctgtttggatagaaggacatacagaaatacaggcagtttagtggcagtaaaaatataagacaagtaatgagtccttggccaacttgtttttgatgacctgtagtgtcctttaactttcctccttaagaagaaaaaacagaaggattcacaattagaagaaaagttgaaatccagaatatagttacttttgggagtggggacgtttgtggatattaaatcacttatccc

SEQ ID NO: 119285 - DNA, 1000 bp, Homo Sapiens
gtgtcctcccttactcccctctcgctccctctaccctctatcccctagggttcttttattaatggaatttctccagttatagagaaaaaaatgacatttgaaaactaaagctcatttatattaatactaaggtcctgtgggcctagtgcgttactcttcccagtgatacctagattttaagagtagagaacagaggaaacatgggatgagaggagagaggttttttagacaacatttgtagacacctcaaattatatcactgttctctagcgccaatattcccaggtaaattgaccattaaagcaatactcactgacctactagtttattttggtcagctgagtaccatcaggatatttaaccctttaagtgctgttttgggagtagaaaactaaagcaacaatacttcctcttgacagctttgattggaatggggttattagatcattcaccttggtcctacactttttaggatgcttggtgaacataacaccacttataatgaacatccctggttcctatattttgggctatgtgggtaggaattgttacttgttactgcagcagcagccctagaaagtaagcccagggcttcagatctaagttagtccaaaagctaaatgatttaaagtcaagttgtaatgctaggcataagcactctataatacattaaattataggccgagcaattagggaatgtttctgaaacattaaacttgtatttatgtcactaaaattctaacacaaacttaaaaaatgtgtctcatacatatgctgtactaggcttcatcatgcatttctaaatttgtgtatgatttgaatatatgaaagaatttatacaagagtgttatttaaaattattaaaaataaatgtatataatttgtacctattgtagatttgttgtttacttttttgtgtggtcagagttgtttcatgtcttcaaatacatgccaaggatcatttactttcagcccacttcataaaaatctttgaactctt

SEQ ID NO: 119286 - DNA, 1000 bp, Homo Sapiens
ctcaagcaatcctcccacctcagccccctgagtagctgagactatgggtgtgcaccaccacacctggctaatttttgtattttttgtggagacagggtcttgccatgttgcccaggctggtctgtaactcctgagctcaagggatccacccacctcagccttccaaaatgctgggattacaggcatgagccactgcgctaccgagaaatcgtcattctttaccaccactgctgcagctagcagctcactcttcagtgctttaagcaaatgatcctcaggaaagaaaaggtatttgcttattgcaggtgcaaagaggctcagattggaacttttccctgaaactatattgtagcccagagttcctgatgtaagacgctttatttaaagacatccgtgagctttttcactggcatatcaatacttcataacactaggaaggtatccagccttttccttatgctagttccttcccttatttgccagatggggaccctgtggggaggtgacccagtgtgaggccgaagctctttcccagagccccacaggccagtggagggtcgtgtttgtgctctgggcatcaccgtcttgggtctcggtcccctgcgactgcagctgctacatccctccctgctctgagataaatgttcttcccatgaagcagacggttcacttttgggatggcgctgtctccaggtttggctgtctcagtccagatgatgtttggttagtttccattcccagaaccacaagcctttgagttctgaaagtttgtgacagaatcaagaggctaatttgggagatgtgagattcccagcccacctggtattgccctcgagttagtggtaaattttgctatggaaaatatctcttgtcaagaccaagctccggcgcattgcctccctcttttggatggccatggcatctcatgaaccacttggaaatgtgttttatgttgttctccaaatattaataaaaatatcccggagaggaggttcactaa

SEQ ID NO: 119287 - DNA, 1000 bp, Homo Sapiens
cagaatacaaaatcaacaaacacaaatccatagcatttctatgcaacaataacaaactacctaaaaaagaaattaagaaagcattcccattcacaatagctacaaacctccacccccaggaataaatttaaccaaggaggtaaaggatctctacaatgaaaactacaaaacactgatgtaagaaattgaacatgacacaaaagaaagaaaagacatcctatgttcatgaattggaagaattaatattgtccaaataaccatattatccacacaatctgtagattcaatgcaattcctatcaaaatataaattacattcttcactgaaatagaaaaaagattcctaaaattcctatgaaaccacaaagactctgaatagctaaagcaatcctgaccaaaaagagcaaagttggaggaatcacactacctgggttcaaaacatactacaaagctatagtaaccaaaacagcatggtactggtatgaaaacagacacacagggcagttgaacaaaatgcagaacccataaacaaatccacattagccctaactgacttttgacaaaagtgccaagaacacacttggggaaagtacaccctcttcaataaatggtgctgggaaaactggatattcatatgcagaaaataaaactaggcctctatctttcaccatataaaaatcaactcaaaatggattaaagacttaaatgtaagatccaaactataatactaccagaagaaaatataggggaaatgagtcaggacattggtttgggcaaagattttatgaacaaaacttcagaagcactggtaatgaaagcaaaaatggacaaatgggcatatatcaatctaaaattgctctgcacagcacaggaaacaaatgacaaggtaacaaccaacagaatgggagaaaatattcacaaattatccatctgaccaggagtgaataatcagaatatataaggaattcaaacaattgaatagcaaaaaaaaaaaaaaaaaa

SEQ ID NO: 119288 - DNA, 1000 bp, Homo Sapiens
caatggcttcctagcgcacttgccaaatacctgcctccaagccgtctgcttcttccatcaggtccttgcttttggatcccagagacttcatttcctgccctacttttccttccaagagctcagtggagagttctcttcctaaaaaaagagaagcttacttcctcagcagtgttatctctgggtctcaaccataaggctggaattttcccactcagccatggagtagtgttgccctttccatcttcctgaagccagagcatgcaacatgtggtagaagccattagtaagagatgggtagcagtcaagggcatggccccaagtctggactcgtggctactggggagaaagggaaattgatgaagctcctatagtgtgactgctattgtgtgctacattcacagaatccccaactgccctatgatgcagaccaggctctccaaggctgggtcctgagaaatggtactttcttcagatgttaatagattctgtgtgcaattttgggaaattctatagttctttgttcagtgcttttaataggctaatgtgcatggtgaaactcaaagggggaggttatgacaggcagtctcccccaaatttatttcacccaaatgccccatactagattgaatagtgtccccccaaaattcaagtccacccagaacctcggaatgtggccttatttggagatagtctttgcaggcataattaatcaaggtgatgccacgctggagtagagggagccctaacccaatgacggatgtccttagaagacgagaaaacagagacacatggcgaagaaggccatgtgatgagagggtcagagactggagagattcatccacaaaccaaggaacgtcaaggggtgccggaaacccccgaagctaagaagaagcaaaaaaggagctttcccctcagggttcagagggagcatggcctggctgacacctcgattttggacatctagctccagaactgtgagaaaataaatttctgttgtttt

SEQ ID NO: 119289 - DNA, 1000 bp, Homo Sapiens
tgttggaaggtgaccaaggtggaaagagacgttgctttggccctgcaagtaagaagagagagggaatagcctgaaggagtaacactaaatttaaaatgacacttttttaccaaccagcgaaagcagatgttcaaaggggatattggccaggtgggttgggggagaaggagccaattcaatgtctagtctttactggaaagaagaaactttacagcgcattttgagcaatttagtgcagagtctcagtgggtcaactggcggggcaccagatagtaatggatttcacagttagggcattgctgggtctcacctttgtgcagccaaaaactagaggacagcactgttgtactcttcacagatgcagcccactattcacttgttggtgatggaggagactaaattagggtcttctttggtgccagaagcttccttttggagtagtgtattctatgggtccagtccctttcatgcagccattatgacctacatctccagtccagacacatcaccatcagtaggaacaccaccttcagatgccatggagcacatcaaggccacccactggaaccatgggccctcagagtctgcaagggcagcactccaactctgtggcataacctcaaagccatatgctcacgacaagcagcagcacttctgggaacaggcttcagagacaacttgagttcttccttaatttctctcagtaagatttatagttttctatgtacaggttgtgtactttttctttgtgtgaacttattcctatttgaaacttcagatgctgtggaaattgtatgtttttaaaaaagttttctaactgtttattgttggtatgtagaaatatatctgatttgcatactggtcctttatccagcaaccttcttaaattcactttttaattctaataatttatctgtagattcttttggattttctatgtatgtaactatatcatttgtaaataatgccagcttatttcttcctcttcctcactctgaca

SEQ ID NO: 119290 - DNA, 1000 bp, Homo Sapiens
tgggctgagtcaacgtggtcatgaacatgtgacaggaggcagcagaagttgcagagaagagtgaggcacgtttgaaaaaggctgaaaaatgtttctgtccaggcaagggtgtgtgctgaatgactcaaggattttttgggcaacacaaaccaacacgagccgtgtgaggatcaggtgacagctgcccaaaagctgacacaaggaacaagcctggaggagtgaggatgggtgctgtgaaggaggttgtgcagctgggcccgcagtcggacctggtgagatcagaggagggggtgccaccagtctgtggacgaagatgagaagctggaatagagcagaaaacaggaggctgccactctccatctttcccaaagtcactccaggagcaagggtgtcatttactgaaatgacagactctccatttcacatttttcccccaagtgcagagtgcagggaagcagatgggctaaatttttagagtcagggttattaatgtatactttacatagtaaactttccccttttaagtgtgcaggcctgaggtttgccaaatatgtgtaggcatttaatcaccaccacgatcaagatgtagaatattcccactatcaaaaagtttgctgtgtcccttgatggtcatgccccattccacagccccagccccagcccctggagattgctgtctgctttatgttccagtggttttatcttttccagactgtatggatgtgaatggaatcagatgtgattccaaggtgttttatcttttccagatgtgaatggaatcagatgtacgaaatcctatggtagggggtcttctgagtctagctccttttgtttagcgtgatgcatttgaaattaatccatgtctcaggcatcaggagttcatttctttttctgctgagtagtatttcattgtatggatgtactgcaatttgcctatccattcacctgttgatgtacatttgagatttttggcaattatgaataaagctgctataaacag

SEQ ID NO: 119291 - DNA, 1000 bp, Homo Sapiens
tctgctgaggatgcatccgagtttggaaaccccacttaagggatggagcctgggggatcacattaaacggaaaatgccaacgacttctaccacctctacgcgtttttagtttttcattttctcgaaggaagcgccagaagcctgtggagtaattgtaactagagggagaacggaaagctgaggtgactgctccggggacttggcgcggcgccttggtggctttggttgctcttccacgctcccggcagctgaccagaatctcttggagggtctcctgggccacctcggccgcgccagtcgtgcagtgagacttctgtagttttaaaatgccacagtccacggcccggtcggcaccgctcgcctgaatcgtgggctttgggaaccttggaggctgctgctccaggaactcgcggtcggccgggagccggggagcttcgttgctgggagcgggcggtattcgcggactccggcggccctggcgggtcgcggccgggatccgagccggggatgacgatgctgatggagctgatggggcaagagtgggaacggagaagtgcagctttctgcaggctgcgcctcaatcgctaagttccactctccatcctctgccgcgctactcctggcatgtggatcaccaagatacaatttctggtcctgtctgttcttattgatgtcctttacagttaataaatttgattgccactaatcagtctgtatctcttgcaaaaacaccacatttagcatccaagtagagtcagagtatgttttttatgagattgtactaaagtaaccttctattacatttcttattaccatattgcatttcctatagtgggcagcatagagcaggtggatcctgacaaagtaatgttagagatgtgctgacagctttacaatagatattctccaactaatttgacaagatataaaataaaatgtagttcgtagttttcaagcattaatggaaagtgttcctattaaaaaattaccaataacagtg

SEQ ID NO: 119292 - DNA, 1000 bp, Homo Sapiens
gaccttcgctcccctcagagcagccctgaaaatattcccggctggtctttgcctctccacggtcacagcagcctcgtgatgaagatggcagggggaattctacagagaggacaggacttccttccatcttctcctgctcatagctgctgcctgggatccactcatccccttcttctctccttggcctcactctgcagtgggggtgctcactgactccagggttcagccactgtctgcatgctaatgagctaaggagtcccacacctccaccaccagcccagcactcaactccatgggccccagggctgggccccagggcgggaagggatgtggtcctccccctgaacacagtgcatggtgcctcctggggctgcgcagggaggaggccttgcccggacctctctcctgggcaccaggaacctctggccaactgcctacaggacatctccacctggatgtcctacaggccctcaaactcaacctgacccccgcccaagcacctcagctcctttcccttttcataatggtatcattctcccagggactcagtcttcacacctttgccctttttgatgccccttctgcctttctctcacttctactgtcttcccaagtcctgtcggtcctgtcccatgctgtcccttttctccatcttttctgcccctggatcacgtgtcttattttctagtgatcaaacatgtttacagcatgtgttagatggctggctctgctctaagtgccttacaaatcctaactctcctcattctcacaaccttcagtttacagaggatgaaactgaggcacagagaagtcaagcgtcttgtgcagggccaggattgggacccacgcagcctgctccagagccgggctctgaccctccacaagagccatcactaaagttccacttaccgctgcaccttcaatctcttcctctctccatccctcccacatgttcacagacaaaatcttcttccttatttaataaaacaatataatgacc

SEQ ID NO: 119293 - DNA, 1000 bp, Homo Sapiens
agtaagaataatattcatgaaatgtcttctttgggccagatatttttttaggaactttcacatattgtgcttacatcaactctgtgggaaatgtatgattatactatcctcatttgtaacagacattgttgggtgcctatataacatataacagctatttttcttcatttttttcttgctgatggcgcttttttttttttagtgtttacttcccatacaaaacttatgtctccatgtctccatccttcagcaataggggtaattctgaaaggtcattgttttgcaattgcccttgaaaggaaattcttggacataacaacagataagattctagccaatgaaaggtgatgagaaggttgctgagaagtttctgagaaaggtttctttattctttaacaaataccctggaaagagacaggccttctgctgctgttcatggttgtacctgcacaggatgcctgaaaaggagtaaccgtggggtcagaagaggagccagcgtgaggacaaagcagatacactgaagtaccacctgtcactgaatttttgtgcaagagtataaacattctcattgtttaatctttctgtgggagacgctttactatgtgtagcaaagtcattctaactgacataccattttccattgtatgagaaaactgatgtacagaaaggttaagaaacttgcctgcatttgcatgcataatgaggagtggagagaacaggttgtgccttctaatatacaggcaagatatgtctcttttaaacagcacatacagacacactccaaaatgacaatttccatcattttttaaaaattaaatgagacaaagactctaaaactatttaaataacatgtacattactgtcttgggatttatttttgtttcagctctattgagatatagttgacaaataaaatggtatgaatttaaggtgtacaatgtgatgatttgatgtatgtatatattgtgaaaagaccaaaataaagtcagttaacatatct

SEQ ID NO: 119294 - DNA, 1000 bp, Homo Sapiens
tccaactcccagccctgttcagaaacatctattgaatgagcacatgaatgacaacatgaatgaaatcacagtatattgtcccattcctggggtatatgaaaaacagagggaaaggaattccaagatactccttcaccgttccagcctgccctgttccactccaggcctcacgactgcactcggccccgccccagccctgccccctctccggcagttactagcataaagatgcaaagtccaggcaaaacaactctcagttctgaaggaacaatgagaaacggtgatgaaaggaaatacatgagtttgcggaaaattactgttctgtctgtttcatctgcctattttatgaataactgctgacatcccttcaatcaccattggctgctccgagcagcttctcagagctggttttcgattttctttcacagtctttctcagaactctgcgatccccagaggttacaaatctgtgttgggtgctttctctgctaaagaagaattttctaatggcacaactgaggtttcgaaaaagtcagcttcgagaattttcctaagtactaaatcatgtgcactgaaagcattggaaagaaaccacacctgcacgagaatttcaaagccgggggctctatgactggctggacgctggagccctcctttaaaggatggaggcaacttggccaactgcatattattttctatggcagtggcccccactgttctcaggccatgaaactcgggaacggattgtggctgtcacgcagaatcaaagagatggattggccgtgttgcttcaggactcaatcttctcaaagcttctgactccagacagacagtgcctccccattctgctggctgagacaggaggggtataagaccaaaaatcgaagtgtgtaagatcctgaattccactgcctgccaagcaactgaaagtgcagttatcatcagctgcttctccctgatctattttcccattaaaaaataaagacttggatcctgcaaga

SEQ ID NO: 119295 - DNA, 906 bp, Homo Sapiens; identical to SEQ ID NO: 32663

SEQ ID NO: 119296 - DNA, 1000 bp, Homo Sapiens
aggagtgaagctgcagaccttcgcagtgagtgttacagctcttaaggtggtgcgtctggagttgttccttcctctcggtgggttcgtggtctcgctggcttcaggagtgaagctgcagacctttgcggtgagtgttacagctcataaaggcagtgtggacccaaagagtgagcagcagcaagatttattgcaaagagcaaaagaacaaagcttccacagtgtggaaggtgacccgagcgggttgccactgccggcttgcagcctgcttttattcccttatctggccccacccacatcctgctgattggtccattttacagagagccaattggtctgttttacagagagctgattggtccgttttgacagagtgctgactacctcttgagagttttccaggcttcctaaggctttggagctttcctgagtcagggcctttgcacatgctatgtcttttgccagagaggctgattgctcagcattatgcatgcctggttccttcccatcatgtaggtcttctggtcaagtaccccctcttcagagaacgtttctcccccacccttcccctccagtgcgcactgccaaaccctgctcgaaaccaccctgttctctgtcctatggtcactcagttgacatcacaatccgaaatattattcatttccctttctgggaataaacatcacaggaataatcagagttgtagaatgagatttgtatacaaggctgcctatgtctgtgtttttataatggcgaaatattagaatcagcttaaacattgacaaatatgtgtaaggctcagtaaattacagcatatcttgagggaagagcattagtgcaaagacattaaaattttgttgttcacgaatgattgtggggcacagtggctcatgcctataattaatcccagtactttgggaggccaaggtgggtggatcacttgaagccaggagttcaagaccagcctggccaacatggcgaaattccatctctagtaaaaata

SEQ ID NO: 119297 - DNA, 1000 bp, Homo Sapiens
aagctggcatacattcgtgaaggcatgggcttccaggcatgtcatcttcactcacgaagcacacacaagaccgccaagcattaagattctcctgtggagccaggctacaatcctttaaatgaagacagacagctaggtggctgcagcccagcgctacacctcacccctccctcagtgtcatgcagaaaaaatgtattcagaactcagaagtgaagttgtgcaaatccatcattgacactagcttcaaggttacctcgggggagcagaatgtacccctgccagagagctggatagatgatgatggggacagaaattctgggggagttgtaaatggcagccactgcctctataggaaacccaaagggaacacagcagaagaggaggtggtggaggagccactgccctctcgaagggttcaatgtcattctgcagacacaaccaaataactttttcttccctgctgctcctccatttgaaatgacagccccgagctcgctttttccttgattgtgtaactctgattacagacaaggccaaggcaatcccagggcattactacaaagctaaggggtccccaaagaactaaagagtcagctccacaaaaatcccgattcctagcatgaaactgaaatatgaaaccaaacgggcatagaaaaggtatgtgcattcgaatcacatagcagtgactggagtcctgagctgtgtctgaagactgtgagatcacgtttggagctgctgattggttttcagtgatggccctgttgcacagtgccgtgagacttagctccatggccaaagacgatggtatcccctaggagccctgtgaggttgctgctgttctcttaagacaccaggtagccatctgatcctccctgagcaaactaactgggcagacaggtttattaaacctctgttggtccgacttacatgaaacaagagagttattttgttgttgttgttttgttttgttttaaattaaacctgtctttggagcctcctg

SEQ ID NO: 119298 - DNA, 1000 bp, Homo Sapiens
ccaaataatgctccatgttgtggacacatcgtattttgtttatccgttcacctgctgatgcatgccagatggttgtttccaactttttaattcccattataaagataaggaaactggccaggtgcggtggctcaagcctgtaatcccagcactttgggaggccaaggcgggtgcatcacctgaggtcgggagtttgagaccagtctgacccacacagcgaaaccccgtctctactaaaaatacaaaaaatcagctgggcgtggtggtgtgagcctgtaatcccagctactcagaaggctgaggcatgagaatcacttgaacctgggaggcgaaggttgcagtgagctgagatcgcgccactgcgcttcagcctgggagacagagactctgtctctaaataaataaataaacaaacaaataaataaatgtaaactgaggctaaaccgctccactcagggtcaacacctgccctgtgacccagcagttccacttttcggtatttatctaggagaaatgagaacacatgtccacacaaagacctgtgcacaaatgttcacagcatctttctctgtaataacttcgagctggcaacgatccaaatatccatccacaggagctgggtaaacaaaccgtggtgtcatcctggagtgggacgctcctcatcaggaaagaggaaagaatgacccatgcacgcagcagcttggaagagtctcaaaaacaagatgccaatgaaggaagccaggcacgggactgcaactgtaagctgtgactctgtgtgactccagcggtacgaacttccaggaaaagcaaaaatatgggacagagtatccacaagtggcattcagggactggagtgggaactggcagggaaaggggaaatgtattgattatttcgattgcagtggtggggaggagggtggacacctgtgccaaactcacttaaaacggatgtattttattgtataaattatgcctcaatgaaatccattcataaaaagaa

SEQ ID NO: 119299 - DNA, 1000 bp, Homo Sapiens
gaagctgcagctgaaaataatttctttttcttctatagcccaaatgaccgatggtgtagagattttcccatcatagaactgcagtctccatttctagtaggcccaggaggtgacatgtctgaggttggggtgccttggggccagtgcccagaggagaacccacattggcgtcctagtaatgtgaaccctcataagagcttcaggacagcagaggcagtggagatgccggcaggcagggagagccggcccggccagcccctcgggaatgagcttcagtcctattctagctcaaaatgataaacctcatctcaggcggctgcttgtgactccaagagaccaccaggccccggtgatagccagcacagtacctggcacataaatcccacccaccagcctggtgtggctgggagacccgcccgggtgctctctgtctctccctccctctttcactgctccctgaaggcagcatctgaagaggctgaggctgtcctgtcgctgccccgacctctgcggagaagcccgcggctgtcctgtcgctgccccgacctctggggagaggcccgcagttctgatcacggacctcagacggggaagcgcacaggaggcctcgggtggccgggctgtgctgcttctccctggacgggcagagctggcacataggaggtgcttcgcaggtgactaaggaggcaaagacccgaagcctgggggactgcagtgtccggtggatcccagctgtggccatcaggcccatgggtgggagagccaagggaggggctcagctgggcaataggatgcgagtgggcgggggacactgctgggaactcccttcactgcatggccaagaatgtgtgtaagcaaacagggcgggagagctgtgtgtcgcctcgggcagtcactcagcctctccgcccgttttcctggtctgtaaaatgggccgaaacgcccgccctgctctgctctttgggcagtttctataaatgcttggcccagcctccccggc

SEQ ID NO: 119300 - DNA, 1000 bp, Homo Sapiens
taggccaaccgccacccagagagtggcagctgcagaacccaaagacgtggagccgggctgggggtggggaagggaggccgccacagctcccgccccgccggcagtttaactgcttccgcagcctcaggcctcccggtgcgaccccggctgcgactcggatccgtttattccaaatgtcccagcccacgccgtgcccagagtgtggcgacacgaggccaaactgcgtagcaacgacgcctgattggctgcgctggtcccttcgcaacgaggcgattggctgcctggtatccaggagaccgacgtcaaactcggactgggaaaaggggaaagtctggggggagcgaaggaggggacggggagaaagaagcaatgaatgaaacgcccatcgcctggccttcccctttcccctttcccctctcctctccattcttggagcacttcctggaaaaacaccagttggggcgccgccttcccctccaaacgttggggcctgcactctcaacctgctataaggaagttaaaccgcagctcaccgaggagtagggtgtctacggggcgggcccgtgtagaccagctgtgctcctcgggcacaaacccgccgtacatgccaggcctagaagcttttggctttgtggacgcaaaatctggttggagccgccttctccaccctgactctcccgcctctcctttttagaaggaaccgcactgagaaagggtatttctgaaggctcaatgcgtaggagaaggggtgggaagatgggtttgtggaatgggctgagggtggggagtggtcaggtgactgatttcatgtttattgtacagattcctaaaacatagttttactaagtgactccttaaattctgattaatgtgatttttttttttttttgagtgtttgggttttttagttgcaaacaggagtggaattgaaatgtgaaagtatggcaaaactgtgaaagcatttaaattaaaatgtcccttcctctgcattgaaatgtca

SEQ ID NO: 119301 - DNA, 1000 bp, Homo Sapiens
ctaaggctctgtgtggtatacagcaacacagtttgagatatttctgtgatgttctgtatatcatatagttgctaacaacctgtcaaagtcatcctgacaccaaactgagaagctgatggtttgggtaacatattagaggagatgaaaaaaccgacagtcctcattactgtaataaaaccagcagagacacactgagaatcaattactgattgtgacctaatgaactaaccctcagtcaagtagaaaactgcaccaagcctcttacattatcaaatgatttaggatggagcactgtctgaagacgggcaacaagtcgaggcagatgagttttcttatattgtggctgacttaattaccttgttcctgagtgcagagatcaaattgagcaacttaaggtgctaaagctctgtgccagctggaaatgaaaaggaaataattaacaccaacaagagctacgtctaaggttgtggcacctcctgacagaagcaaggagactcaaagttaaggcggctgcaaagtccttgacgaggtgagccctgctctatccgcctggctggattcgtccaggttgcctgtggcagctgtgcactgaagagtccggctggggagccagggattcagaactcacagtgcagcctgacgaccaaagggcaaatccacctgaggacctgagtgcagatggctgggctccccggaacaaagtggaggaatgacagaggtgtaactcttacaccacagcctccatctgtgtgtcgcagagaaaaatactataatggagactattcttacacacatacacacacacacacacacacagagttcttgtcaccgatggaacagtctgtctttgtctttcatctcccacattcatgtccagatcccattgcgctgcatcacacgtgaacccagtgaggtcaacaatgaatggatggtgttcacaaagaaaccagcttatggaaggggacctgttacaattctttgaattaagttcttggaagcc

SEQ ID NO: 119302 - DNA, 1000 bp, Homo Sapiens
gaaaggatcttagctgtgtcatcactagcatcacaaatggagacaacggggcgtgtagggaaaggataactgagaagaagatacaacaagcaggagctgcacacggcagggccgcagccgaaagacgccccagcagcaactggcatcaagattcctcagactccatgagtcttgctgccaggggatagggtcggggtgagaagaaacccctaaatcgagacctggctgccttttgctggccaaaccaacccccacacaaatgtccctaacttcatttgttttctaggcctgtttcataatctgtgtttttctccggcttaatgcattcttccccgcctttgccagatatccagtagtgacacaataacagggacacaaaccagcattaaagggtaattacccacacggctcactccccgagcagggctgtggagacacgtctctcctctctgttcccttccccattcacctccctgcaaaggctttctctaaatcctgcctgtcctacaaatctcagattatggttagcatccttcaaaaagccttccgtggaggcgcagcccccatgctccgtgggtaaagagtctgggcatggtaccctggtggcatgtggctcctgtggtgcttggcaaggggcggcctggccagtgtttcatttgtcccttttgccgctgaaaccggaagctccttgagagtatgacccttggatttccatccccaagacctggtactccctgtgtttactggcactccatgcatgcttgctgaacacatgaatcgctgacttccttctgctactcatttggaaccagaaaatctaccttatttttgtttccattttcttcatctcgaaggtgaggggacaatagccttcctcccaagactgtggaataaataagagacacatcgctccaaaacattttttttcgaatgtttccactataaaagaacagctatataaaatgacttgacaaatatgtaataaatgtacttgcaaatc

SEQ ID NO: 119303 - DNA, 1000 bp, Homo Sapiens
ctgcatcccagttgctctagccatggataaaaggggccaaggtacagctggggccatggcttgaaagggtgcaagctccaagcctaggcagcatccacatggtgttgagcctgcgggtgcacagaggtcaagaattgaggtttgggaacctccgcctagatttcagaggatgtagagaaatgcctggatgtccagtcagaagtttgcttcaggaacagcgccctcatggagaacctttgctagggcaatgaagaagggaaatgtgggcttgaaaccccacacagagtccccactgaggcaccgcctagtggggctgtgaggagagggccagcgtcctccagaccccagaatggtagatccaccaacagcttacactgtgcacctggaagagccatagacactcaacaccaggagtgaaagcagccacaaagacacagaggcagagctgcccaagaccatgggaacccacctcttgcagcataacttggatgtgagaaatggtgtccatggagataatttcagagctttaagatttggctgccctgctggatttctaacttgcatggggcctgtagcccctccatcttggccagtctgtcacatttggaatgggtgtatttacccgatacctgtacccccattgtatctgggaagtaactaagttgcttttgattttacaggctcctaggtggaaggaactcaccttgtcttaaatgagactttggactatggacttttaagtttatgctgaaatgagttaagaatttgggggactgtggggaaggtatgattggttttaaaatgtgagaacatgaaatttgggaggggttgggggcagaatgatatggtttggctgtgtccctacccaaatctcatcttgaattgtagctcccataattcccgcctgtcatgggagggatgcagtgggaggtaattaaatcatggggacgggtctttcccatgctgttctcatggtagtgaataaatctcaagagttctg

SEQ ID NO: 119304 - DNA, 758 bp, Homo Sapiens
atgcgcccccacgacctgctaaaactgaaagacatcccagagacaactccagaggccaaggcgggtcggcttcctgcgtgggcccagcgccgggcactgaaaggtgaaggcgcttcttccgctcggaggaaagcctctggcggttctcgcttcgcgggctcgggatggacacgcgccgccctttctccccgccgcattcccggtgtcgacttactagctgcaagcctctgcctgccttcctgcgcgccgttccccgctagtcgctgctgctggcgcgcactcgccgggtttttcctcccacggcctcgagatggtggtgaatgtggcacggaggagccgggccttccaacccggtgggcccgagctccgaaaggccccctcggcagtgagaggggcgggagcccgcgggggccgcgcccttctctcgcttcggactgcgcaacgctgcgctctgggctgacaggcggataaaacggtcccatcaagactgagaaaaagcacaccagctattggcacagcgtgggcagtggggcctacaggatgactgacttagtctacagagatcccggcgtacttaagcaggtagtaatgatggacaggtgaggctttaggcggccgccctgggatctgaattgccccttggcccttatcgaagctgcagctgcttccgcatagctgctgtggtcaaaaaggagcccagagtgacagttttccttgacggtcgccgttctgtttgttgtaactgatctgcaacattt

SEQ ID NO: 119305 - DNA, 401 bp, Homo Sapiens
caaaaagttagcctggcgaggggaggatgatgagatttcccctgttgtcacataaacaaggaagtaaagggggccccttgtgctctcagaactccaagcatgaaacgattttctgccatttcagttcctgttatcgtgctttgaggtgcactgaactgcagcaaacccaggggatccaaggctacgttgaaaagcctttgaccacagtgcagggagcagaagacattaatgacgtgatgtcgacacagcccgcactcaggatcctccaggaaaagaacacagagataaccccggatcgatggtactttttgaaaatgctttattgcaaaagagtggctagggttttacaagggctatgaagaaacatattaaggttaataaagctttttattgagtgttta

SEQ ID NO: 119306 - DNA, 1000 bp, Homo Sapiens
aagtgatattgtgtggactgctacagcgcaatgtctaactgatgcaaaatgaagaatcaatttgaaattaagatgagtaaaggcatccagcacttacagcaaaaaacattgtcatcaggccctggggagatgaggacacctcccttcccttctcaggctccctttccctgtcagactctagctctcaaaggctgtcatcctccaagggtattccctacgtactgcatagcatctctgttaccctttgaattcaacagtattcatctcctccaacattcattcattcctttagtcaaaagtcagttgtcaaacacaaggcacaagtgcacatttaaggaattcatggccaatatttgtcatgtcatttcatgaattgtctgagaaacataaaacatacaatgaggatactgatccaagatacatggcacacaattaaattgcgaaaaacatgactctgagtccaaaagttcttattttttcacagtcttcagagtattgtatagaccccttgaaaaataaatttgcagagtgtgaatgttaattactgtcaccttcagaaaagagattttacacatgtataaaagagaaatagtgactattctagattatagagcacagaaagaattctcaaactagtataaccctatttctctatatcacaaagacatcttgtaggcatgttcctctgaaggacttgagaattatgctttttttcctccttgtctctctaaaagcaaaaagcacagtaatctcgctgaagtataatcaaaacagagcctgatgtgaaaccagagccttgagttttcatcctgcatttgttacttaaaagctgacataagaaaaattatttaacttctcttaacctcagtttcttatctataaaatgggattataaaatgtatctcacaaggtagttatgaggattaaaggaaatgaaaaaatgcttatttggttttgaatcctggtttggtctagctatcaataaaactcattaagatgg

SEQ ID NO: 119307 - DNA, 1000 bp, Homo Sapiens
atgcagcggaaaggacagtgaacgagactttgtccctggcctccaaaggcttagggcgtagtggctgtcatgaggcacagtgacaagggccaggagggggacctcttagggggccatgcagtgatggaagccagaaggaatgaaggcctgcagtgaggatggagtggtcggcctgaagccatctctagcaagtggtcaggacgctgattgttctgcgcaggttggaggtaggtggtgagtctgagaaaggggccggaaagactccccagcaactgctggcaaagggtgaagggcacgttcccacaggattcaagccagctgcctttggaggggagacgggcactcagtttaggcgctcctacagcagggtcagcaagacaagcaggttgcggcaagggtctgcgcactgctgtgtaaatgtaggggcatcggggggcagaaagaccaggggagaagtgtgcatcacccttggggttaagggacagttgtctgctaggtgttgcttcctggagatggctgaaaagccagtccagtctgcagggaccaggccaccacccacctgatgtgggagcatttcccccaatccctgctgggctgctgaatctgggggacatagggaagctgaggctggtgttctgagtagtggcagagctgagccacagggcatgtctgaggtcagccccgagcaaaatggaatagggactcagggtgggtcaggtaactggaaagcgggcactgtgcacgcagcccttgaggggagccagggtgggtggggatcccccactgtgtgcagaaggcagcagccttggaagcagggtgtgctcctcggtgtggtcgctcgataccagaaaatgactctaaaaactgaagagtgtttgagtttcattcacacaaaacatggacatcatctgtgaggctctgtcccagagagacagggccatccctcatgtctgttattgggttgtagataaacaaaagtataaatcaaacaaactgcaaa

SEQ ID NO: 119308 - DNA, 1000 bp, Homo Sapiens
agagttggggaaagagaaatgagagagagagagagagagaatgaatgataaacaatttaaacaacagtggggtgtagaccaacgcccagcctggcaagggtgagcccagagagccttccctcctggctattggcagcctccgcatggaagcctgtcgttgacttcttaatgatgagagatgttctgggggcactccaggattcttggacatgggatcgtcttcacagctgtgtctattgaaagctgaagtttcagtctcccctgccccctgccccctggagtggcttcccaggggaaattcaagggcacctgtgactgcatggctgctttcctttcctttactcaatgccgtcctttggtgacagccgtgtctcatgccaggatacatgaggtgctctatagtagtatgttttccctcctgggaggtaattttatttaaatgtgaagtcaaaaggatcactaaatagaaccatgaggcaaccactctgggcacctgcctggtgatatccacaagagctgaccacaggtgccccctgtgcccagcaagtccttggctgggcagtcacacaacaggcatggggatgtgtggccaccaagccctccagggcagtgctatttgtaatagtcccaaatgggagagatggcaaacgcccgccaatggggcagcatggataaatggatgctgcacagcaacggcgatgagtgagccccagcacccgtgagctcaccagtgtaatattgggtggaagaagccaggaggaagggcattcacattctgtgattccagctacactatgtttaaatatgggcagagctaggctgtggtgctggaagccaggacagtgggatccttgcatgggggtgatggtgctggtaggttctggtaatttcctcttcttgatctgggtgtaaacattttgtgaaaattcaatgagctgtacatttatgactggtacatttatgactttgtatgaatattatactttcataaaactacttt

SEQ ID NO: 119309 - DNA, 1000 bp, Homo Sapiens
cttcgtctgccttttattaatatctgtattgctgataaccgtgctcttgactatgtgtcccaggtcatgtcccaggtcatggagaagcccgtgccacagtgaccctccccatactcctgggggggctgctctccatcctggatcgtaaggaggcatcatcaggctgtgttcctggaaccccaataaccctgggcccccagggccagcctgttgtagagggaggctatctgaccgccggtctggcagaggagatgggtgggcagctcccagacaccccaaaggacccggttctcttcccagagcgtcctaaggttactcttggaacctgatctttgttccctcatcccagggaaatgacacactctgtatttctgttttatttagaaatgatttaaaaaacattatacaaaggctgatcagtttaaaatgtgactgacactgaaatgctgtgatgtcccccaggctgaggggaagctaggctctggggcccccagtgctttgcccctctgtctgccctgtcctggggtgatggacaaacagatgaccacaggcaggagaatctgagattggaagcctctaggctgagccctctgggcctggccccacatccctcacctctgcagcctgggctgcctgcctccatctcctgttcattctcagctggcctgccaggagccaatggggagcctggcgggaggcgggggtgcctagagctttcaagaagtgagagcaccaacctgaggagtggacagggaccaggaagtgggggaagggaggccaggaagaggtggatacaggagacacttctcatctcatctcagaccctagaggggtccacagatggggacacaagacccagccagcccactggatggcccgggcaagtaacaacctctctgtgcttcatctgagggcacggtgagagttaccgtcggcctcccagggcctaacacgagtttcatgtgagtggacaggtgtgagctaataaagtgctttgcaa

SEQ ID NO: 119310 - DNA, 1000 bp, Homo Sapiens
ataaagcaaaagaagccccttatgggtcttttgactctcacatctatttagacataattacagtcccacagggaataccagatcaatttaaagcctgaaatcaaatagctgcaggatttgagtcaatattttggtgggtgacaataaaatgtaaattggataaactacatctattacaaccaacagccatccattaactacactagagatgctgttaaaggaatagctgagcaattaggggctactagccagatggcttgggaaaaataggatagccttagacatgatattagcagaaaaaggaagaatttgcatcataattaaaaatcaatgttgtaacttcatcccaaacaacaccgcccctaatggaagtataacaaaggcattgcaaggtctgactgctctatcctgagttagccaataactcgggggtaaatgacccctttacaggatggctggaaaagtggttcagtaaatggaaaagaatagtagccccaattcttacttccatcgcagccatcataggtgtgcttattcttgtcgggtgttgtgtcacactaaggaaggagaccgctacaactcctgctgccctcctcccaccaccttgcctagttcacaagacaggaggaaagagagaaagcaaaaagctggaaagaagcaaaagtaagataaatagccagacaaccttggcaccaccacctggccctaggagttaaaaaggtaataataataacatcaaccccagacctaaactacttgtgttatctgtaaattccagacattgtatgaaaaagcattgcaaaactttctgttctgttagctgatgcatgtagcctccagtcacgttccccacgcttgctggatttatcacgaccttttcatgtggacccctttagagttgtaagcctttaaaaaggccaagaattcagtttgcagggagctcagctcttaagatgcaagtctgccgatgctctcagccaagtaaacctcttccttcttt

SEQ ID NO: 119311 - DNA, 1000 bp, Homo Sapiens
gtgacaagagcagcacttcacctctgtggtcttccttccaataccccattatcccagtcttatcataacaaaaatatcagacaaatcccaattggggagcattctacaaagtacttgacctcaaagtactccttaaaactgccaacgtcatcgacaacaaggtaagtctaacagaatgtcacagcctcaaggagcctgaggaggcaagggggctaaatgtatctggatgggatcctggaaccaaaaaaaagacattaggtaaaaactaaggaaaccttgaaaaaagtaaggactttagttcataataatgtatccatattggcttaaaccagttgtacggtccctatactaacaacacatcatttttggttggaaaacgttttctgcaataaactcaagcaagccaatttaattcattgatcaattttccatacaggagggttaaaacattttccattttttccatgttcactttcatgtcattgaaacaattttcactgggaatagtttccactcaaatattttaatgatgactttatcaatccgtattttgtccataataaatgttcccaattataggttcttccattgcgaatttactttcatagccattatttctaacaagacagttttcactaaaattttattattccatactttatttattttattgtttctttagagacagtctcactctgttgcccaggctagtggctcatgcttataaggccagaactttgtgaggccgaggtgggaggcttgcttgaggccaggagttcaaaaccagcctagtcaacatagtgagactccctctctaccaaggaaaaattaaaaagttagctgggcatggtgactcatgcctgtagtcccaactactcaagaggaggctgaggcaggaagatcatatgagcccaggagctcaaggctgcagtgagctatgatcttgcccgggtgacataatgagaccctgttaaaaaaaaaaaaaaaaaaaaaaaaaaaa

SEQ ID NO: 119312 - DNA, 1000 bp, Homo Sapiens
atgccaccaagtagctgcataactcacccatttggtcagagcctgggtctaagccaggtctgacagactccaaagcaagccctgtttacagcatgactgggatccagtggacgagggaactgagctgtcaaaactaagtgacttgattgaggccatgcagctggcgaggggaggaccaggatctgaacccaactgggtctcccaagcctgggccactgaaccatttcacctcttggaaaaacttaatggtcagagtggcccacccagtccatggacagcatggaggataaactgcttccctagaaatcctctccagcattcttgccaccacgactttgggacacattgaccatgaggaggagctggtcaatgatggacaggagtccagattagcagagatgtggtaataaggacaccgatgcctaaatacttgaaatatccaataggaagcattccacctttgtgcaaatgcgaaccacatctcaccaagttcaggccaaggctgccaccggtgacgttttggaaaagaaaaaaaaaagcggggggagaggagagaaacagagaagcaaggaatgcagaagagagcagaggccacaaaaacagcagcaacgtgtcctgtgtattctgtttccttgtaaaactatgaagcatgttaaggagatacttcattttttgaggattcatactcttgtttatattataataaaaacaacccatgttctttctaaaaatttaggcaatgccttcgtgcacataaaagtaaaacaaaatcacctgtaatcctaccacacgcagatcagcacttgctaatcttttcacagggatcctaagaatatcctattctctatagaatatagttgatttatgttacctaataactaactgttaaccattttaaaattcttcagttttacattatgctagaaaaaaggagccgtcactctacgtgacatttctgtatattggtttattcattcaataaacattttttaagtaccta

SEQ ID NO: 119313 - DNA, 1000 bp, Homo Sapiens
ctctctgtatcacttatccattgctgtgcagcaaactacctcaaaacctagcactttcagtcagcaaacacttatcagtttacagagtttctgagatcagaagtcaaggagtggttcacgtcggtggttctggctcagtctctcatggggctgcagtggaggtgcagaatctgacggggctgacgattcacttccaagctcacctcactggtgcggctgttttcaggacaactcagctccctgccacatgggcctctccatagaaagcttataacacagcagctggcttcccccagagtaagtgattcaagagagcaagccaccaaggctgggtgcggtggctcacacctgtaatcccagcactttgggaggcggaggtggatggatcacctgaggtcaggagtgtgagaccagcctggccaacagagcgaaaccctgtctctgggaaaaatacaaaaattagccaggcatgatgtgatggtgggcgcctgtgatcccagctactctggaggctgaggcaagagaattgcttgatcctggggggcagaggttgcagtgagctgagataaaaaagagagagcaagccaccaaatgggagccacacacccttttataatctggtctctgaagtcatccattgtatcctattctgtagaagtaaatcactaagtccagtcccggaagggcaattagactctatctcttgaaggaagaagtatgaatttttgcatggacagtcatgcactgcctaatgacgttttgtcaatgatggaccacatatgtaacggtggtcccattagataataatggaactgaacagttcctgctgcctaatgacactgaggccaccataacatcatggtgcaagacattccttatgtgtttgtggtgatgccggtggaaacaaacctactgtgctgccagttgtacaaatgtctaggccatacaattatgtacagtgcgtaatacttgaacataataacaaatgactatgctacta

SEQ ID NO: 119314 - DNA, 752 bp, Homo Sapiens
atggctccgtccggtttcgagcattttccgctcccttctccctccccctccggttgccgcagggcgggcctccctcccgcctgcatccagccacccctttccctcccaacgcggccccggcggcttccgctgattggcggcgagtgggccaatgggtgcggggcggtgggcggagaggccaatggcgcggcgggagggggcgtgtcccgggtgcccctggcgccggcgctgggaatccccagactcacgcagccccagtcccgccagtccgccaacacagtagtgccggcccccctctttccctggccctgccccccctccccgcctttggctcgctccgcctttctgccccccacccccacctcacgggtacgggccattcccggccaggaaacgccgtggcgccgcgttgggcctaactcgagtcctgccgcctcccgggagtgccgtgcgccgcagcccgggcccaggccccggcagcgcctgggacaagacactgaaattgaggaagagagattttggcgttctgttggtttatggagagagttgatcagagattgctccttggctgagttgctgtctgcataggctgttaacaattgtttctctggcagcagatcttgttcatcaggattgcatcatttctgggagaatggccaaggtccacagcctcaatacaaagactgtctgaagcatatgaggcctgttctctttctgaagcggcactcctcttcctgccagtcctcttcaca

SEQ ID NO: 119315 - DNA, 1000 bp, Homo Sapiens
tataaaatcataggctgggaaaagatccagtcaaattcaaaatacaccaatggattttaatgtaccagatgataaaaagtttactgatacggtttcagttaacacattgcaactaacttttaatagactacactttgtggagttttggtatagtataaaagaagaatatgcaatattacctaaatatattattgagagattgcctgccataaaaacagcatgagtttgagtgagaaaagtaattccatcagcctcctcttgttccccaaaatggctagctacagagagtttgtcactgaagattaagcaagtttttcctcttttgaaatctccccaaatcgcttatctacccaattgcagccaaccaagtgagagagctgagtataaaggggtcaccagagaacccccaacccacctgtccctgggatgagtgcacactgggatggagcctcgggaagtttgttcatttgcagtggggaggagcttggcccctcctcttcctgggtggaacctggaattcaatctgtgaggcaggacgcacacttgcaggaccctagctttgcagagagtcctgtttccctttctgtccatttttgctcaaaaattccatttttttcaaccttcaaagtgtctgcgagtctaatatctcatggccatgtgacaagaaactggctcttagctgaactaaggaaaaagtcctacgacacaaggacacaaaaatgtacctgaagaacaattagaaagtctccaccactttcaaaaatcccgtaagagtgttaagaaaacttgctaatcagagtctatctatctcaggacttactccttttcctctataaaaccaaaacttccttcaaatacctttgaatcctgctgaaaagagcatggccacagatagtttcctttaaggctgcatgatcaggaataagtagcatttactaattttgtctcaaatttaattttatctttgacattattaaaataattattccttttcctacta

SEQ ID NO: 119316 - DNA, 1000 bp, Homo Sapiens
agaaaactttcctagaaacctcaaacttctccccatgccttattggccagattgtatcccatgcccatttctaaaccaatcattggcaaagtgagtggaattgacgtgattagattaactttaccaagaatgcatcctcagagaggctgagaaaaagtccagcctcctttgaagagcctggctacctttcacctgaacaaaacaagaattctgatgaaaaatggagaatgtatgtggagcaggcacccggagtgtctatgccaggattttttttcagtgcgtttcaccggttatatttttgtctctttaccttacaagatatgtggcacgtttgcctaaaacaagccttgctttctgatttctgtgcactaggcacttaaaccttgcaaatgtcgcttacctaacagtcactgtcaaggagtacctggctaaagaatctccagctagacaaagtagaagtgtctgtgctctggcagttgaatatattgtatcaggctcaacagcacctttcaccaaaggatgagacttcacaaccattagatcttcttttattttgtttttattaaaaaaaaaaattttaacacaccattgctaacttgaagccattagatcttcttacccccaataccacaaaagtttagtggaatcaggggtataccaaggcaggtggagtaggggagctgggagtggtcagcccccagggcaggcaatgagggattgtgaatctgtgaagaattttaaagcaatgatacagctctaaatgcaatgtactatcctggacttagccctggaaaagaaaaaagatattagtggaaaaactggtaaaattcaaataatgtctgtagtttggttaatagtattataccaatgttaatttctgtgttttgataaatgtaccatggttatgtaagctggatgaaagatatgtgggaaatctctctactatttctgcaactctcctgtaaacctaaaaatgtttcaaaataaaagatttaatgct

SEQ ID NO: 119317 - DNA, 1000 bp, Homo Sapiens
tgggtagccctgctccacaaggagcagttaaaaaaaaaagtaactcagtagataaatgagaaaggaatgataattacaataacaagatgtggcaatcctgatttaattaatgaatctaagcaaaaagcaatggctttgaatagaacacagaaaagaaacaactaaatattatgtgcctcctggttgaaatatacacaattatctatgatttcatcttttgaacctgaatctgatcaagcctctagatctattcatcaatttatataaaacacaagagacacagaaaagacaaaggaatgtactaaactacagcatgaggtacaatcaagcaaaattcataccatggaaactacagaacaaacaatttagtttcttgcagaaataaattgcaagggaaaaataaagacatggttaaagacacttcggagatatgcttaccagatgcaatttatggatgtgtattagcgttctccagagaaacagaaccaagaggatatatatgggtatataagagggaatttgttatggaagccagctcacatgattatggagggtgagaagttccacaacatcccatctgcaagctgtacaaccaaggaagccaatgttgtaattcagtctgagtccgaaggccagagaaactggggccattggtgtaatcttggagtctgaaagctcaatgaagtcacgagaagatggatgtcccagccccaagagggagagaatttgcccttctctttttattctattggaacccttaacagattggatgatgcctgtccatattgatgagggtggttcttctgtactcagtttactgcttcaaatgctagtctcttctgaaaattctctcacagacccacccagaaatgttttaccagctatctggctatcccttaacccagtcaagttgacacataaaattaaccatcacagaatgttatttggattcagattttaatcaacaaagtgtgaaaaaataataagattattggagaaa

SEQ ID NO: 119318 - DNA, 1000 bp, Homo Sapiens
ctgcagcttcctcacctccctcaggcttcatagaatttaatagagttagggctttgctatggattaggtttttgcttatgggaggattgtggctggtttaatcttctatccagactactacaactttccccatatcaaaaataaggcactttcattttttgatcatttgttcactggagtgacacttacttttaatttcctgaaaattttcctttgcatttacaatgtagctaactattcagtggaagagggctagtttttgacatgccttcctcaatatgcttaataatttctagtttttgatttaaagtgagacacatgtgactcttcctttcacttgaatgccgagaggccatgcagggttattaattagcctaatttcaatattgttatttaagttatggggaggcttgaggagagggagagagagacaggagaatggccggtcagtggagcagtcagaatacacacaacatatattgattaactttcctatcttatatgagcacagttcttggcactccaaaacaattacagtactaacatcaaagatcactgatcacagatcaccataactgatattataataatggaaagtcttgaaatattgtgaaaattaccaaaatgtgacagatacaacatgaacaaatgctgttggaagaatggcactgatagatttgcccaatgcagggttgccacaaactttcaacttgtaaaaagagcagtatctgtgaaagacggtaaagcagaaagcaataaaatgaagtgtgcccatgtatactaataagacatagttcattttattaataaagcacctgtcaatttcagttgagtaatttttatcaggaatgggttttgaattttgttcaaggcttttacagcatctgtgggataactatgtattgtttccctggatctataaatacatacaggatactaatgacttttcaaatattgaaccaactttgcattcttggaataaatctcacttgatcatgat

SEQ ID NO: 119319 - DNA, 1000 bp, Homo Sapiens
agccactgtgctaggccagagccaacaggacttactgagaaattatctgagagagaggggtcaaggaagactccccctgttcaaccaagcaacgaggtgaatggtgctgctgcttcctgagatggggaagactgtagaggaaacaaaccaggaacgacaaatcagtaatttagctttgaatacattaggtttgagatggctagtctgtacccaaacagaccacactgtggcatctgggcagcaggatctgcagaatccagcaggatggatgctgatgccaagctgagtagacagttgggtctgtgagtctaaagctcagggaagacctcagggtctgggatacaaatctggagatcatcaccctgtccatgaaagccaagggaatgatggaagatactatgagaaaaagtgaagagaggaaagagaagaggtccatggaaggagacctgggagaatccaaccttcgattagatcaggaagaggagaagaatccagtaaaaaactctgagaagtctctgggaaggaagtcttccttccttcccctgtaccaggagaggtgctatcccagaaattagtaaagaaacagtttttgatggggagaacaggatcacctttgtcaactgctgctgcgagacttggaaaaataaggactgggaagagagcaatagaaactttgaaagccattggttatcttgataagagttgtttctgtgggggtggtgagaactggagcctgactggatgggttcaagagagaatggggagttctagccaagaaggctgatgaggatgagtcaaattaaaaatgttttctttttatgagtcctctcatatttactgatacaactgatatattgggtctccattctgccacattactttatattgatcatgtattgtatctgctatgcaattgtattgcatgtatctgcatggcaattgtattgccatgcaatgtatttttttttactttaaaaattatatttataaaggtttgtaa

SEQ ID NO: 119320 - DNA, 1000 bp, Homo Sapiens
cctgttctccaagcaaaggaaaaggggatggcaaacagaaataaacaggaaccgctctcagccttcatcttccgcgccctcccccagcaaactccaggacagccgacaaccaccgccacagaccagtacaaacattccaacccaggaccttttttcgcgcgccgacacagccggaagtgacgcgtacagccagcacgctgggccgccagcgggacagacgagcgggaggggcagcgtgcggggagctgggggcggggcgcggccgcagctccgtttccggtggctcgtcgcgctcgctcactccagctgcagccactctcgcccgtggctgcttcctccatcctgggccgctccgcccagtggagcctgtccggcccccttgctgcccgctagctcccgccggctggcgcaagctgtcggcgccggggcactgcgggcggggtcggagcctggccttcctgacgttgcagctgccgtccccgcacgttccggccagggcctccctcttagggccgggcggtgcccgtggctcaggctgcagagtagggaagcgagcggctgccgaggcacagcggcgatccggcgggggcggaaaatggcggcggcttcggaggagctaaatggcgccgggacccctggggggtggggtgggccgggaggttgagtagagaactgggccagaaggagtggagacattgataggctcaccccaaaatatgcttttggggactgatttagcacctgcatattctgcgtgaatctctttaattggttgcagttgagctaatggtggagccaaaatgctattgccctgtcttcatcaacatttaatcaagaacgtttgtctgcctgatgagagccacttgggttaagaaactacctgtgaatagtcatcatttctgtccttcattggggaatacttttagaggccatgttgcggagataggaacatgggagagaaacaatctgggtaacatgaaagtgatgctggttgctaagg

SEQ ID NO: 119321 - DNA, 1000 bp, Homo Sapiens
ttgggttaggaaacaggaagggataggattcaagaacagctattgcttctgttctatataggaaactgcagcgtgaaaaatgctgggctgggaattttgagacctgggttttagtttgtgttctaatactaacaagctatgtgactgtgggtaagtcatttcacattccatttggatgcctcttgagtgactccaggcctctccagctctaaaacattaagatcaggccctacgctacagctggccagtgtgtaattcttctgtttctatgctgttaggtcaaatagatcttcaatagttacttgattgttattacttttttctgaagtgggtgttttatcaatgttttaggatacagtgagtctgcttctcccctttggagttaggaaggttgtaggaatatacactgtagagcatatgggagctttatcccctccttttttccccgctacctttctccctctccttcccttcatcacatttctattgagcatatgccattgccgtgtaccaggtgtgtgctaggtttggagatacaaggtaaacctgagactttcccagtctccaggagacaaaaccctaatttctttcatctgctgtctttctctttggaaagaatcaacgatatcccaggggaatgtgcccatgtcccagggtaaccaactacagacagatgccccattctactcaagcaacttttagagtgccttgagatacacatcagataattatgcagggccaggcatggtgctgcacacttgtaatcacagcactttgggaggccgaggcagcagattgcttgagcccaggaattcaagtgtagcctagggaacatggcaaaaccccagctctacaaaaaaatacacaaattagctgcgtgtggtggcctatgacaggaggctgagatgggaggattgcttgagcctgtgaggtcgaggctgcagtgagccgagatcatgccattactccagcctgggtgacatagggagaccctgtcttg

SEQ ID NO: 119322 - DNA, 1000 bp, Homo Sapiens
ccagtgccatctgggggccagttactgtacctggtccccaggcagagctcttggcctggcagcatccaggcaggtattaagtgcccagtgatggtggcacatgggtggggacggagccacatccaagtctagccctctgattaggaggatgacagtcttggaatttcttgttctctttctcctagggttctcgttctcccagctccagcctttctagtttcgaggcatgaggcaaaccattgctgtgggaatagcagtgaccattggtagggccatggtggccgggagaggaaacctcagggtcaccccagagcctgtggggagacggagggtgagctgttgttggagctgcagaaacgccttgaagggcagcatgggcgatgaggaatgccattgcagcctagaaattcggtttctggaggtttagcctgattttgaagagtatttaagaacagagggctccagaccaggtgtggtggctcacatctgtaatcccagcactttgggaggcagaggtgggcggatcgcctgagatcaggagttcgagaccagcctggcccacatggtgaaaccctgtctctactaaaaatacaaaaattagccgggcgtagtgacacacgcctgtaatcccagctgctcgggaggcagaggcaggagaatggcgtgaacccgggaggcggaggttgcagtgagccgagatcacgccactgcactccagcctgggtaacagagcaagactctgtctcaaaaaaaataatttggagcacagtcttcctggtgcctagacatgccaaggcccctcccacgtggtacaccctctccgtttagtacctgaccacctgtttcaaaacgcaggtgtttctggtttagaaacttggaaggcggaatgtgttttcgtgtcttctaggaagggtctgctgaggaccagaccacgtaagcctgagtggatcctgactcagctgcagcccttacctgcctcgtgctgatgatctatgcatgg

SEQ ID NO: 119323 - DNA, 1000 bp, Homo Sapiens
tttggaccttgccgggccaaagtcgtgtcacgtggaacctcttaatctcagcatccggagctccaggaagggaaaatttcaagtcagatagaattctatatataccatttctttggaaccttcagccctcaagattccaacatcatgacctcagtttcaacacagttgtccttagtcctcatgtcactgcttttggtgctgcctgttgtggaagcagtagaagccggtgatgcaatcgcccttttgttaggtgtggttctcagcattacaggcatttgtgcctgcttgggggtatatgcacgaaaaagaaatggacagatgtgactttgaaaggcctactgagtcaaacctcaccctgaaaacctttgcgctttagaggctaaacctgagatttggtgtgtgaaaggttccaagaatcagtaaataagggagtttcacatttttcattgtttccatgaaatggcaacaaacatacatttataaattgaaaaaaaaatgttttctttacaacaaataatgcacagaaaaatgcagcctataatttgctagttaggtagtcaaagaagtaagatggctgaaatttacataagtaatatttcataatcttagaattctctcaaagcatgtgaaataggaagaaggaagttcttgcccagaatcttaggaaatcaccactgttcggttataatcactgcctcctgaatcgttgaggagtcttttaaattagatttttgttttgttgtctcccaagttaatattatatttagatatcagagagtcaggcaaaaaggaaaacttttatctctagggaaaaaacatttagaaaaatgtattcagtgtatctaatactgaaatgcggaaaaaaatttaatgttaaaaaaaaactatagacattgacatggaaaagagatttaatgttttgaaaaaaaactttatattaactgagtaacatcctcctgatgagaagtactatattaaatataaacccattatgttataa

SEQ ID NO: 119324 - DNA, 1000 bp, Homo Sapiens
caacgcaaggtgtgtttatttgatttaacattttgcaaaaggtgttttgatttgtggtttgttttctttcactttgtacttattgctttgggttgtttttttctggcaatgaacctgggttccaagcataggtttttcttatggaaggcagttttacaataaggaaatgtttttacttgtatttattttgtgatatttcagcaaatccaaataaatgtagtaacatttataaagctatacatttataactgatttatttgttaaatatttagtattatcaattgtctgttaaagatttgttgctacattaaatgcttggtctgtcttgatgttcagtacattattatactttggtatattgcaatattttgataattatgtattggttttagtcactgttcctgcatattaagtaataaacagattaatatcatcataaaatatcatttactcagcaatatttcttagtaaattgatacatccatttttcttatgtattgtggagagaggaaatatgacataaaatggaagaatatgggcctctgtttatctctgacctcatcgcttactgttctttcccactcctcactctactcaaagcctttaaatagctctccattttactcaacatcaaatctaaataaagctcttaaactggtctaaatgtctctacagtacttgaacctttgttatttctctaatttcatcttcaactctgctcatcgttattctcttgccctgggcatactgcctccctttttgttctctgaacgtgccaggcattttctcatctcagaatttttgcacttgctattctttctactgaattgctcttcatccatatatagcaattgtatgaccaatttccttacttttcttttggtcgttattaaaatttcaccttctaaatggagtcttacctgatgaccatccaaagctttatattctttctttgctctataatttttatcactatctattaaactatatatttacactt

SEQ ID NO: 119325 - DNA, 1000 bp, Homo Sapiens
tcaaaatcttcatgagttaaaggtgaaggtacaatcagaactggtgcatggaattggaaccataggtcttagtaaacactgtaaaaatgcactattcaaatctacagaaaatgctctctcttcaagttcagaaagaagctacaatctgcttttcctttttttctgaagatgtggggaacgaaattggatcttgtgcttttgggtgctaactttgagccctcttcctttacatctaaatgacaatttgtggatcaatgaggatgtgtcaactagccaagatcgaggacctggaggggtgctctgtggaaactgctttaaaatccttcagagggtgggcacggagctctggttctggttgaagagtcctgtcaaggccatctcaaaaggagaagcaaagcctgcagaggaggccagcctgagtcctggggtgcgaacgggtgctgcgctcagcatgaggaggaggagaccctggccacagttccatgaatctttgctcccttccacattatggattctggctaagaagattttcatctttcaccacctgttctggattcttggaacaggtaaattcattggcctacgcaagtctgagctctaggtctgaacccgcatggacctgagggtgcaccgagaaaagaaaggctgacaactggatcccgggaatgtcaaggccaccctgggcttgaagggaccggccatgcctccaagccttgcccagagagggggttcaggatgctgcgtggttccaggtgatctattgctttctcgagtttaaagttcagaggatcatgaagtaccacagctggaaggggtgtaagtgacactgcctagcctaactctcttaaaaatcatagccctactcctgcctccccaaatcagatacgacaggcataggctctgactgttccttaagtcttagtggcaatactccctgaccagttttgcggggttgctcccagttccattgcttttgtaacaggtggccagaaagcctggg

SEQ ID NO: 119326 - DNA, 1000 bp, Homo Sapiens
catatatcattcttcctggtctcaggacaagaactggagacctgctgaatggcggagctaaaatagctataacacaaacagcgctgaaacatgccccttgtttgtcacattgcaagcaatgagaagagagaagagaagagctgtggctcttcagggagcccagacctaggaactccgagccagggctgtgacaccctctttagggctctgtgggttcctggcatcttcagggttctgggcaccaccacattccctggtgtcagccgtggaagctgcttatggtatgcctggtctagctgcagccttgcatggagctggcacccgtgccagtgcctgaagctgcctgcccatcgcctatcccccctcagccggcatgcctggctgtgtgcagtggccggaccccatgcttgctcacacaccccttgctcctccgtgcctggcttacccttggcagacaagcgatccaggctcatagtgggaactgagcacagcctgccaggccgagtgggtggaacaagaccagagatccagagcaaaactctggaaaaggcgccactggccatagaggcttttggctgatgaagtaatacctcaaggatcccgtagcaataccagatggaaatctggatccacacaaagaaatggtctacaccagaaatagtaacatcgtgtatctataccagaaatagtaacaacatggatatatactttatattatttaaacttctctaaaagataattgtttaggaaataaagtaatatgcagtttataatatatgtaaaagtaaaatggatgacaataagagcttaaagactaaaaggggggaagtttactattctcagattcttaaactgtacatgatgtgatctactgtcacctgaaggtcagccgtgatcagttaaaggtgtacactgtaaaccctggagccaccactaagataacaaaccaaaagattacagctattaaactaacaaaggagatcaaatggaatcataaaaa

SEQ ID NO: 119327 - DNA, 1000 bp, Homo Sapiens
agattgggtagtgataatgccataagaggtagtgtgtgagccgtgtgctgcatctgtgctagctcaggtaagtcagcacacagcacctgcagcctcctctcacctcttccctgagcagcaccttttcacctgaacatgctgatcccctagtgcttcatcttgacagcaacttaacaagccctgggcagctttttaaaataaatgactatgatattgactatgaatctacataaaagccacttgttttttagtcataatctgtgtctaactgcagaagaaattcacacctttgaaaaacaaataaaaatgtaaaaagtgaaaattgtttgtaaccacaatattctgaaatagaacctttttgttagatcattttcaagaggatttttcatactttcctacagtaataccaatgtatatgcacttgtataaattcttggttaaaatattcatagggtgtatgtgtctaaatatagaatcataccctattgtacagttctagtaaatagctatttttttgcttttaactcagaaaatatatatttgtattatgctttacgttctgggatacatgtgcggaacgtgcagttttgttgcattggtatatacgtgccatggtggtttgctgcacccaccaacccatcatctacattaggtatttctcctaatgctatccctcccctagcccccactccctgacaggccccagtgtgtgatgttcccctccctgtctgtgtccatgtgtttgcattgttgaactcccacttatgagtgagaacatgcagtgtttgtacctgtgttagtttgctgagaattattgtttccagctttgtccatgtccctgcaaagacatgaactcatccttttttatggctgcacagtattccattgtgtatatgtgctacattttctttatcgagtctatcattgatgggcatttgggctggttcaaagtctttgctattgtgaacagtgctgcaataaacataaagtatgcatgtgt

SEQ ID NO: 119328 - DNA, 1000 bp, Homo Sapiens
cccacccaatttccagtgacaatataaatggaaatgcttttaagcagatgtgtcattataatgactcacatggtatttaatctttaggaaaataaactgaatgtttttattgtagcaaacttactgtaaagaaaagaatttttacattatatttattccccaatgtattaacatatattactgctcaaaaaggcagccagagtaaccagacggcacaatttgaatttatccttctattcgaaatgctgacttggattgccttcccccacccccactccctccaaaattgcacattagccagtatataaacaggtaggttatttatatatatgtgtactctgttttaagatgaaaagaacaattcttcactttttattagctgaaccatatgaaattgccatttgataggccaaaaaatgctcaaatatcaccaacttcataaaattcaacctaatacaaagactcaccacattaattctgtaaatagtaaattctcctaatatgtttaaaaagaatccaattttttaaaatatattttgcatatatttcagaatcatgggttgtacaaaatgaagtatattgtaaaaggcttatgtattatgtattatgtattaagtaggaaatattaaggttaatcaagtaaagatgaattcatccagcctaacctttccatccatgccaaatctgaagctttggactcataactgagtttgactgctgcagatcccaccatacttactaagtaggtataagggatccattttaatacatttcaatggttatatttagtaatacattttattcacttgcatttgtacaaaagaacttttttttaacaaaatgaagaattgtgtggaataaaaaattgagtttcttttgtttgaaattattaatgtttgaaatagattcatattgtataaaaatggaaatatatttgcattaatatttagcatgtcatttttgatccctggacaataaataatgactggtttgatgataa

SEQ ID NO: 119329 - DNA, 1000 bp, Homo Sapiens
cgaactcctgacctcaggtgatctgaccgccttggcttccgaaagtgctgagattacagttgcgagccactgtgcatggccagaactttataataattaaaagagacttgaagctgggtgtgacggtgcacacctctagtcccagctactcgggaggccaaggcagaaggatcaccttgaggccaggagtttaaggccagcctgggcaacatagcaaaacctagtccctaaaattaaaaaaaaaaaaaaaaaaaggaaaataaaggagacttgaaatttttgaactaaatagtggtgatggctatacattgtgaatgtaattaacaccactgagttaaacacttaaaatggttaaaatggcaaattgtatgttatacctattttactacaataaaaagtataaaaaagaggcaagatatttaggtgacttacagcaaccaattgcaacaaaacaaaatgttaagaaatgatctttttatgaggcaattggaaatttgaacactgatcaactataggatgattggaattattaattttgtaaaggtgtgataagatactgcacttggctgggcacagtggcacatgcctgtaatcccagctacttggcaggctgaggtgggagaatcgcttgagctcaggagttcgagaccagcctgggcaatgtggcgaaatccccgtctttacaaaaacaaacaaacaaacaaaaaagatattgcagttgtgttgtaagcgtccttatctttcagagctacatagtggaatgtttatggaatatttaggataaatgatatacgcatttgggatttgctgcaaaatgacccagagtcaggggtcagggggagaggtagagatgagacaagaggtagaggggagaggtagaggtagccacgagctgataattacagacaagagatgcggagtatgtgggggctcattatcctgcatagtctatctttgtatatctttgaacttttcaagaataaaaaagcttaaaaagtat

SEQ ID NO: 119330 - DNA, 445 bp, Homo Sapiens
aggggcgttttgttcctcctgggagggcacacttggggtggcacagaacttgggagtgagtgagtcagggggacaggagtgctgcctgcactttccctgctatttcatggatcctctctgctgcttcctccttcagaagaagaaagggaaagaggccatgccaggagctgggctgctgccaccccaagctcccgccttgccctctgaggccagggctcctcacggcatctccctgactgctgccagaaggagcaaagccaaggccaaagggaaggaggtgaagaaggagaacctcagcaaggggggcgctgtgagcaagctgatggagagcatggcagccgaggaggactttgaacccaaccaagactcgagcttctctgaggacgagcacctgccacgtggcggggctgcggagcggccgctgaccccgggtgagtggccatga

SEQ ID NO: 119331 - DNA, 1000 bp, Homo Sapiens
agcaacaagagcacaaagaaaaaaagaagaaatgaacagaataagaacattacaaagacaagctgaattagaagctgctcggttagctaaggagaaagaagaggaggaagtcagacagcaagcattgctggcaaagaaggaaaaagatatccagaaaaaagccattaagaaggaaaggcaaaaacttcgaaactcatgcaagacctggaatcatttttctgataatgaggcagagcgggttaaaatgatggaagaagtggaaaaactttgtgatcggcttgaactggcaagcttacagtgcttgaatgaaacactcacatcatgcacaaaagaagtaggaaaggctgctttggaaaaacagatagaagaaataaatgagcaaatcagaaaagagaaagaggaagctgaggctcgtatgcgacaagcatctaagaacacagagaaatcaactggtggaggtggaaatggaagtaaaaattggtcagaagatgatctacaattactaattaaagctgtgaatctgttccctgctggaacaaattcaagatgggaagttattgctaattacatgaacatacattcttcctctggagtcaaaagaactgccaaagatgttattggcaaagcaaagagtctccaaaaacttgaccctcatcaaaaagatgacataaataaaaaggcatttgataagttcaaaaaagaacatggagtggtacctcaagcagacaacgcaacgccttcagaacgatttgaaggtccatatacagacttcaccccttggacaacagaagaacagaagcttttggaacaagctttgaaaacatacccagtaaatacacctgaaagatgggaaaaaatagcagaagcggtgcctggcaggacaaagaaggactgcatgaaacgatacaaggttgcagacttaagcgaacttgtcgagatggtaaaagcaaagaaagctgctcaagaacaagtgctgaatgcaagtagagccaagaaatga

SEQ ID NO: 119332 - DNA, 1000 bp, Homo Sapiens
tgcatcaccagaggaatatgctgaatttcagtatcggaggaggcacagacaacgtcgtcgaggagatgttcacagtctactcagtaatcctccagaccctgatgagccaagtgaaagcactttagatattccagaaggcggcagcagcagccgcaggcctggcacatccgtggtaagttctgcatctatgagtgtgctgcacagctcttccctgcgtgactacacccctgccagtcgctctgaaaaccaggactctcttcaggctctgagttccttggatgaagacgatcccaatatacttcttgcaatacagttatcactgcaagagtctgggctggccctcgatgaagaaactagagacttcctcagtaatgaagcatccttaggtgcgataggcacttctttaccttccaggctggactctgtccccagaaatacagatagccctcgggctgcattgagcagctctgagcttttggaacttggtgacagcctcatgagactaggagcagagaatgacccattttcaactgacaccctgagctcacaccctctcagtgaggcaagaagtgatttctgtccctcatctagtgatcctgactcagctggccaggaccccaacatcaatgacaatcttctcggcaacatcatggcttggtttcatgacatgaaccctcagagtattgccctgattcctccagcaactacagaaatcagtgcagattcccagctcccctgtatcaaagatgggtcagaaggtgtgaaggatgtggaactggtgctgccagaagattcaatgtttgaagatgccagtgtcagtgaaggtagaggaacccagatagaagaaaatcctttggaagaaaatattctggcgggggaagcagcatctcaagctggtgacagtggtaacgaggcagccaacagaggagatggttcagatgtttcaagtcaaacacctcaaacctcaagtgactggcttgaacaagtacatttagtgtga

SEQ ID NO: 119333 - DNA, 1000 bp, Homo Sapiens
aaatgtggggtggggagcatgcgttcgaagccatttgcgcgggcagtccctgcgtgtccccccacgtgctccccagcactcgcaggacccccgcctccgagcttccctgagcgtgcagcttccagtgagggcagccccacgcacagccccccacaccctccccaacgccttcagcccccggtgcgcgtagtccccaagcccacacgtgcactctccaccttgcggcagctgcacgtacagccccccacacgctcccagccccactggcgcagaacccatcaccgctcgcccttcacgcgcttcactgggagtgcagcccccaccccgagcgcgcagctccacgcagcctctccacactctccccagcgcctgcagcacccccagtgcgcacagctctgccagtcgcttccccgcgtgccgcccctgcaccacttcgggccataaccttgctggcgactaagtctgaagaacttcccgtgatttaattcttttcttcgagtttagtcttagctttgacattttaaccaaaaggttacacgttaatttatggtatgaggtcaccacttctcctattgtccttctcagtttctccccaacctctcctattccctattttataagacaggagaaaagggagaaagcaaaaagttagaaagaaacagaagtaagataaatagctggaggaccttggcaccaccacctggccctggtggctaaaataataataatattattaacccctgaccaaaactattggtgttatgtgtaaattccagacactgtatgagaaagtactgtaaaactttttgttctgttagctgatgtatgtagcccccagtcacgtttttcacgcttacttgatctattatgactttttcacgtagaccccttagagttgtaagcccttaaaaggcctaggaatttctttttcggggagctccgctcttaagacacgagtctgccgacgctcccggccgaataaaaaacctcttccttcttt

SEQ ID NO: 119334 - DNA, 1000 bp, Homo Sapiens
gctgaccagccagagcgaggccatggccctgcagtcgatccaaaacatgcgtgggaacgcccactgtgtggactatgagacccagaatcctaagtgggccagtttgaacttgggagtcctcatgtgtattgaatgctcaggaatccaccgcagtcttggcacccgcctttcccgtgtgcgatctctggagctggatgactggccagttgagctcaggaaggttatgtcatctattggcaatgacctagccaacagcatctgggaagggagcagccaggggcagacaaaaccctcagtaaagtccacgagggaagagaaggaacggtggatccgttccaaatatgaggagaagctctttctggccccactaccctgcactgagctgtccctgggccagcacctgctgcgggccaccgctgatgaggacctgcagacagccatcctgctgctggcacatggctcccgtgaggaggtgaacgagacctgtggggagggagacggctgcacggcgctccatctggcctgccgcaaggggaatgtggtcctggcacagctcctgatctggtacggggtggacgtcatggcccgagatgcccacgggaacacagcgctgacctacgcccggcaggcctccagccaggagtgcatcaacgtgcttctgcagtacggctgccccgacgagtgcgtgtagtatctgttttatttgactgcagtctccttggtgcaaaaacaaaatgggaaaaataaggataactcagaatttcaaaaggaaatcacaaattcagctagtaatagcattttcagtacttttcataaactaagtaaatacacaaaatgttgatttttctgaccataagacatattttatgtccttttgccaaggtggatgtgttagtctcaggccctcctggccacattgcccaagtcacacaggcttctgtattatgtatttagataaaatgtgtgaaaatatatttgaaaaaaaagttcataaatatgc

SEQ ID NO: 119335 - DNA, 1000 bp, Homo Sapiens
ctgaaaaatgcgactatatggatgaggtgacatatggggagctggagaaggaggaagctcagcccattgtcactaagtacaaggaggaggcaaggaagcttctgcccccctccgagaagcggacaaatcgccgaaacaaccgaaacaagcgtaaccggcagaaccgaagccggggccaaggctatgtgggcgggcagcgccgaggctacgacaaccgggcctacgggcagcagtactgggggcagcctggaaacagagggggttaccgtaatttctatgatcgatacaggggagactatgatcgattttacgggcgagattatgagtacaacagatacagagactattacagacaatacaatcgggattggcagagttactactaccaccacccccaggacagagaccgatactacaggaattactacgggtaccaagggtatcggtgaagcccctgccatggtcacctgtcagccatgaagctgaatctctgggggtgccaggcacccccgcaaaacacaaccaaggaaaacaggggctgtcggggtggggctgagctgccggggaggggtggtggggggggagggtgctcaagcaggggtgggggaggggggaggtggaaacaaacaacaaaactgtacattttttttaaagtttgttgaaaagaatattgtcttattctataaaacatttcaaacctagttagagatttgtaatcaaaaaacatttgcgcagaaagcagcacttagggctgcctgttctataccctacagtcagacaggaaaagaactgaaaatggcacccttctgacattctgaggcagctggactggcagccaagtaaaggagagtgatgaggtggtgtggggagggtggggaggcagcgcgagggtgctctccacagcaggtaggagcaggcaggagtggggacagagggagagcttgtgactgggacagtgaaaataaacgattggctcttatcaatcacttgcaccaactaa

SEQ ID NO: 119336 - DNA, 839 bp, Homo Sapiens
atgttgtatttcgtgttctgcgtgctggattggaagccccaccccggaagtcggctggccatggcggcgccttggaggcgatggcccacggggctgctagccgtgctgcggcccctgctcacctgccggcccctgcaaggcacgacgctgcaacgggatgtgctgctctttgagcatgatcggggccgcttcttcaccatcctcgggctgttctgcgcgggccagggcgtcttctgggcttccatggctgtggcagccgtgtcccggcccccggttccggtgcagcctctggatgcggaggtcccaaatcgtggccccttcgacctgcgctccgcgctctggcgctacggtctggccgtcggctgcggcgccatcggagccctcgtactcggtgctggtcttctcttctctctccggtctgtgcgctcagtggtgcttcgagctggagggcagcaggtgaccctcaccactcatgccccctttggcttgggggcccatttcacagttcctttgaagcaggtatcttgcatggcccaccggggtgaagtccctgccatgctacctctgaaagtcaaaggccgacgcttctatttcctcttggacaaaactggacacttccctaacacaaaactctttgacaatactgtgggtgcctaccggagcttgtgaagaaatgacctcaagtcactcacctctccaagaggaggataaaaactgaaccttggggagccaggtgtgttggttcacacctgttgtaatcccagcactttgggagggtgaggcaggagcactgctcgagcccaggctgggcaacatagcgagaccttgtctctatttac

SEQ ID NO: 119337 - DNA, 1000 bp, Homo Sapiens
ctggctctcagtccccgcctcgcgaggtgtgcctcccccacctgcgatgggggtcccaagagcccggggcggaagagttgctggctgatcaaaacactgtcacctttagcagtgaaggatccagtgagattttccaggttaacggtcataatcgcctactggtccaacgttcagaagtaacacaggcacctggacaatacacagtagatgtggaaggacacggttgtacatttatccaggccacccttaagtacaatgttctcctacctaagaaggcatctggattttctctttccttggaaatagtaaagaactactcttcgactgcttttgacctcacagtgaccctcaaatacactggaattcgcaataaatccagtatggtggttatagatgtaaaaatgctatcaggatttactccaaccatgtcatccattgaagagcttgaaaacaagggccaagtgatgaagactgaagtcaagaatgaccatgttcttttctacttggaaaatggttttggtcgagcagacagtttccctttttctgttgagcagagcaaccttgtgttcaacattcagccagccccagccatggtctacgattactatgaaaaagttaccagagtttttcaacaccagaatccttgcaatataacctgacagggctccacttgaacttgaaatacaagccacactaagcttccaggtctttttgttattgtcattgttgttcatgctaagactgactgttccaagctacttctgtggactttgacttaaagagaggagtggggaatattctgaaatgctaactaacttaaaaatttgatagattaatttctaaaacatatacaaagatgttgtagagaccatacaactgttccctggaaggttggtactatttatttcttgttgaatgctgtgtgaagtttgtggagtgtttgaattctgtctctatcatttactaatagaatatatttcatcaagtgtcttaaatatta

SEQ ID NO: 119338 - DNA, 1000 bp, Homo Sapiens
accggtcactttgtccagcgcactgtgaggcccccactcaggccagccctggcccccccttggtacttggaaccgaagttacagattatattaaaataataatgtacaaaactttgtttttttgccttattatgcagaagtgtaatttcttttttggtttgtttttttaaaagcaaacgaaacgtgtaaatagtctgttgatataaatatatgacgttactaaattcttaatctagatagactttataaaaaccgtttccagaaacccctctggttgtttgtctaacatggtcacaaaaacccaggcgctgctggctgtaaacattatcagaagtttaatggcagcaactttccttcaactatgcaagcgcttcccggcggctctgctggttgggggaggaaggttccgccagcgacctcccagcccctgggtccgtggaggggttgggtcccccagcagagcccctgggccagcagaacagcactcctgggcggctcctgtgggcttcaggactggccggctccagccgcaagggcgatgctgtggacgtttgtgtggatggtgcagtgttcttggaatctgtagaccagatcggtggaggtatagaagtgcaagagtctaaaggctgattttacacacacacacacacacacacacacacacacaaaatcactgctgtgtgttttcttccgcctgaggcatcagcgtcacctcggtgtggtcgtcgcctcccaggcccttggcctggcctcctctcagtttgggttttgccctcacccacatgagcccccccatgccctgccccccttgcggccttttgtgttccccgatgtctgggctgtgtccctgccgggattcccagccttcggggtcagccgtcgagccacttgctttgctcagttctgtgtttcagccacatttccacggtggaccctgtttgttttaaatattctgttcccatgtcaatcagtgacgataaatacagccttgatttggatg

SEQ ID NO: 119339 - DNA, 1000 bp, Homo Sapiens
atgataactgattaaggcctccctcaggagatggtgagatggttatgataaggcacatttcaagaaagaggctctggggctaagtaaggcaaatggtctataactgtggttctttgaagtctggcttaatccagggatgacacccagactgtctaggaagggctgagctgcgtgccctttaagtgatcacctcttagtataatttcactgagctggaggtgagtgtaagaagttcctggttatagaagaagttataatccttggcatggcctgaagtaggcagtccacactgatatgaaatgtgctgtgtatacctggagaatgaaaatgcccatctaagactggcccaagagctgggcagccttcctccatgggaacctggcaaggcaatgggaagtggacatgggaacacctgaactttctggatgctatgaaacctcaagggaacaaattatgtggcagagagggataatctgttcttcccatctgagaaaagactgcagcaaagataaactatatgttgagatcattttatttgctacatcgggcatcattctaaaaaccattctttgcctgaatctatataaatgacagttgaaagcagtaaaagtgggactgtttcactggagtcagccacactagtggttctcaaatcttggtgaaccctgagagctacccaaggacttgtttgcaatgcagaatcacagcccccagagactgacttgtggggcccagctggttctgattcggtggccagagaaaccgcatgtgtgcactcgggccacacatacagcctggactggcttatgtcaggcccatcctggttgtcaccatgaggacaatataatgtcacttccagtacttcgtgttatttccttctcttttagtatgagaagtggccaagtggtcaatagctttcatctttgtgtaactgaatcttgtgcttcatttccttctgggcatttttcattgttgatgaaataaactttgttcaatttgt

SEQ ID NO: 119340 - DNA, 631 bp, Homo Sapiens
gcaggtcatgtggtcatgccaaggaccatatgtgctcaagattctcatgacattttggaaggaggttgggctttctttatctttcctttcttctctcccttcccttcccttcccttcccttccctatttttaaacctaggtttggtattttcctggggtgatggtgactttggaaaattgggccggggcggaagtgaaggctgcaacattccccagaacattgagagactaaatggacagggggtgtgccagattgagtgtggagctcagttcctactggcgctcaccaagtctggagtggtgtggacatggtacgtaaacgtcctccccgtcacagtgtgtgtgcttgtgccggcgcgtgcagggaacttgggcctcgccccaggaccaccccggcgtgattgtgacctgtcatatttttacttatgcatgcatctttgtcctttcctgtttgggcgagatttataggaagtgtttcttctgctgaagcctggttcatttattctgccaaatgtatgcctggtattgtgttttttggtcttgaaacacgtttcacaaaaatcaaagtcatcacagtttctgcatttgaatctggatccattgataggaaacatctgacatccatcacacc

SEQ ID NO: 119341 - DNA, 1000 bp, Homo Sapiens
tctgcgggggccgcttccaccctcagcggatgataatctcaagacaccttccgagcgtcagctcactccccttccaccctcagctccaccctcagcagatgataatatcaagacacctgccgagcgtctgcgggggccgcttccaccctcagcggatgataatctcaagacaccttccgagcgtcagctcactccccttccaccctcagctccaccctcagcagatgataatatcaagacacctgccgagcgtctgcgggggccgcttccaccctcagcggatgataatctcaagacaccttccgagcgtcagctcactccccttccaccctcagctccaccctcagcagatgataatatcaagacacctgccgagcgtctgcgggggccgcttccaccctcagcggatgataatctcaagacaccttccgagcgtcagctcactccccttccaccctcagctccaccctcagcagatgataatatcaagacacctgccgagcccttagtcttagctgtgctttgggaaaataaggagctgcactcaagcttaagaagatattgctggaagtgtacattggcacagccttcgaagcttcttggtgccctcctcatcatcacagccttgaggctctggggtaggtcacttcgtcgagctcgtttccatgaggataacgttatcttgggtgtctgtgagaatgctgcactgagtatagagcccaggctcctgggtcagccgggttcgaatcccctttcctccgtgaagatctgggtcagtcacaagtgcttcagtttcttcgatctgactgagggaggctttgactccaaaaaattaacacttgagtgtacctggccacagcttagcacatccagggtgtttccaccctttctttgggatcctcagggctggatggagccgatccttcccgtctctccttacactcgcgcactcacgctggctggaacaagtcctccaagtagaacgaagagcgcgttttag

SEQ ID NO: 119342 - DNA, 1000 bp, Homo Sapiens
caagaccatggggcatcaggacaagaaagatctatgtgggcagtgttccccgttaggctgcctcatccggatattgattgacgggatctctctcgggctcaccctgcgcctgtgggacgtgtatctggtagaaggcgaacaggcgttgatgccgataacaagaatcgcctttaaggttcagcagaagcgcctcacgaagacgtccaggtgtggcccgtgggcacgtttttgcaaccggttcgttgatacctgggccagggatgaggacactgtgctcaagcatcttagggcctctatgaagaaactaacaagaaagcagggggacctgccacccccagggccctccaagttactagacgagcccagacccatttgttgccaggacaagaagcctggagccagggagacaagggaatccgtgtccctgacccacagagcattcagggagagggcacaggcgggaccccgggcccagagccagagccaagagttcagccagaagtgggaacgccaaacccgagcaagggtcgtcggcatccaggcctgtgccggcttcacgtggcgggaagaccctctgcaagggggacaggcaggcccctccaggcccaccagcccggttcccgcggcccatttggtcagcttccccgccacgggcacctcgttcttccacaccctgtcctggtggggctgtccgggaagacacctaccctcgtgccgcaaagcaggcgtcaacgccattgttaatgcacggaggaggaacctgactgttagacctgggttttccagggttgcacggcttctgggagacggatgtgaccctgaggacagggcacaggccagtaagtataggctgagcttcccggaggaggagcagctgctgttgctggtgaccagcacattcaggaacggagactactctgtcaacagacagggggatgacctgagggacgtgcaccacttcaggctcatgcaggacccacagcctttggacctcagctaa

SEQ ID NO: 119343 - DNA, 822 bp, Homo Sapiens
atgaagcaggtcaatttgaagcttgaggacgacttccattcctctaggttctatattggctgtgatctttgtactaactggtattatggagaatgtgttggcatcgcagaaaaggaggctaagaaaatggatgtgtacatctgtaatgattgtaaacaggcacaagagggcagcagtgaggaattgtactgtatctgcagaacaccttatgatgagtcacaattttttattggccgtgatcggtgtcagaattggtaccatgggtgctgcattggcatcttgcaaagtgaggcagagctcattgatgagtatgtctgtccacagtgccagtcaacagaggatgccatgacagtgctcacaccactaacagagaaggatgatgaggagttgaagagggtgctccgttccttacagatgagagcccctctgtgtgcagcatttgaaaatgaaatcagccggcataattttggaagcatttctaggatttcaagtttccaatgctgcttccagcagatcggcttctttgtacgacccaagctctgtgccttctctggcctctattactgtgacatctgccaccaagatgatgcctcagtgattctggccaggatcatccacagctgggacctcaccaagcacctgaggagtttggctcctctaaacaagggaagctggggtcactggttcaggcactgtgacgtgggggagctaaccaagagaaaagcttggtgcctgtccacagccctgggcagagctccgtcggtggctgtcttggtccccaggagggagtctgaggatggtttcctgcagctacagacataa

SEQ ID NO: 119344 - DNA, 1000 bp, Homo Sapiens
cactcaggtgaaacaaaggtagtgagccatcgtgggaagactttacaggacatacctgaagactttctggaaatggatcttgcaaaaaatgagcacagagttcacgtgcaaatggagccggtatgacacactttcttacaacaacagccactgtgttggctggagagggatggggtgggcccaacggagacacaaggaggtagaggagctaacccctctactccactttcaaaactacattttaaagggaatgtgtatgtgaagagcactaccaacatcgcttttgttttaagttttcctttttgcttgtttttaaagccaaaacaaaaaacaaccaagcactcttccatatataaatctggctgtattcagtagcaatacaaaagatatgtagaaagactctttggttcacattccaatattaaaatagtgacacgaactggcaaagtggttttaaaagctttcacatgggataaatgattttctttctttcttttctttcttcgtatggtcttgtcagaataaactactatcttgaataaaacaacatccaacccaggtcattgaaatgaaattggccagtcaaaaaaaaaaaaaaagacttcaatcatttaaaaaattcctaattttcagaaatatgaataaatggtttttgttaaaccctttgtaaaatactgaggttcccattaacaaattatggcttctgcttgctggaaatgaagtatagtttaagaccaaacattttactaataagcaaattttaagtacatatataacttgaacttcataaatgtgaagattaccacttctttttatggccagtccttaccagaagtgtttcagtacagaatatacaaaatggcatttaaaaatgtgtttcctgttgcttttagttatacagaaatatgtgactgtagtgtctttaatttaaaccgctatttattattaagttattctaggatgattaatcaaaagaaataaaatctgagacataagcagc

SEQ ID NO: 119345 - DNA, 1000 bp, Homo Sapiens
acctggtctgcaaaaccgactgtgtcgcttttctcgggctgcggctccgctggggaggctgcggcaggggaaggctcggcagagcgcaggccgcggcctactgtgcccagcagcccccgctgccctcccctttggggccccggccccccgccagacagctcccactcccaatcgagccacccccaaccaaccatgacaattcacagctctcatcctggagagatggtttccctcatgctgggacagttctggggcagttcagaattgccaggactgtggattcccagcagcttggcctggtggacacacggaatgcaagacaacagcaaacccaccttcagccttgcactacccgagcgctgttgcctggagaccacgggacgccgttgcctggagacagcggggacgcgttgcctggagactgtggaaggcccaggcaagagggcgcgtggcagcccaaggccatggcgggacacccaaaagagaaggtgattccagatgaggtccatcagaaccagatcttgcgggaactgtacctcaaggagctacgaacccagaaactctacacgcagtatcacgtgaatcccctccgcaagattcatacagtcaccaggaagcccatgtcttggcatgataacctggaggaacctgcagatgccaggtttctgaatctcattcaccatgctgcccagggaccaaggaagaagtacccagagacacagactgaaaaccaggaagttggatgggacttagagcccttggtaagcgtggctccttcctcaggaaatacgaggaaacacagcagcaatatcaacccagaacgccatgaccgcaggctgaatcacttcagggtctgcagtgacatcactctgtacaaggctaaaacgtggggcttaggagatgatcaccacaagtagcatcccagcggatgagcccatctgtggatctaatgccttaagtgtgcacagcccagagaaataaaatactactttaaaacgaa

SEQ ID NO: 119346 - DNA, 1000 bp, Homo Sapiens
gggtccctggatgacaccagcacccagtgcggctctgtctggcaaccgctcccaaggtggcaggagtgggtgtcccctgtgtgtcagtgggcagctcctgctgaacccacagctcactggggagcctgacagtggggccatgtgcctgacactcctctctgcttgtggacctggcaaggcagggagcagaaaacagagctacttgaaggctttctgtctgcgtctgtgtgcagtgtggatttagttgtgctttttacttgctgggagagcacagccaccatttacaagcagtgtcaccctcgtgggtggcgaggacagaacaggagcctctgctctctgtacctatctgggcccggtgggctcccttgtcctggcttccatctctgtctcagcgaccattcagccctgcacaggaacacatgttgcttagaaaagccaaatccagcccttgtctctgcctcctctggtctcatgatgtgcatctgttaccttgaaactggaaaccagtctatcaatgtctgtgccaattttttattccctccccaacctccttccccatacgactttttatttatgtaggatgtgtgctgtctaatgatgggatgaccacacttttccatgttctaaaagtgctcctctcccacagggtcccagggctggtggttgctttgggtctacagctacgtcttacccgcctcctgcctcaacagcctgtgtggtggcaaagccggtgtggggctggggaacgcagcgttctccaggaggggacccggctctccttctgcagtgcaggcgaaggcctagatgccagtgtgacctcccacaaggcgtggcttccagactccccggccggaagtgatgcttttttgccgcgggccctgggtttgaagcagcctggctttctcttggtaagtggctggtgtcttagcagctgcaatctgagctcagccacctacacaccaccgtggccgacactttcattaaaaagtttcctgagacg

SEQ ID NO: 119347 - DNA, 1000 bp, Homo Sapiens
atgtcaggctcaacctctccttttaattgtaattcatgtaaccagtgtctgctcaatatctttacttaaatatctagtatgcacctcaaacttactgtatccaaaaccgaattcttgattttcacttcaacaccctcttttcctaatgctctccatctcaatgtacaacatcaccatctccacaaaaatcctctttctttcataccccacttttaatccatcagaaaatccctataattctactttcaaaacatacccaaattattgctacttctctccacttcctctgcaacagctctgtggaggtctccaatgtctcctctggactgctataccagccacctgacagccatcctgcctccctcatccctctactacagtacgtactctaccagtactctgagccatctttcacagagttagtttgagcattccctagctcaaaactctcccattgcttcctgttgcactgagaattaaatctaaagacttcacagagtccctcaaggccctacagactcttggtccccatgctgcccctctgactcacctcctccctaccactcttgccttcctttctcatccccgtcactttggcccacttgatgttctttgaacacacacatctggctatctccccaagtctttgcaattgcttaaaccactcttcccagatacccagaagacttgctttctcattttcttaaattatctctgtattcaaatatcaccccctcaagaggtctatcctgactttctctctcaccttctccttttctttatgatatttagccataattcgccccccatacacatgcatttgtttattcatctgttggtttattgtctgtctcctcactaaaatgtaattactccaaaatgtaatttccacaatagcaataaatttatctttttattttaactactgcctgcccagcacccagaacagtcgttgaaaagagcagacattcaataaatatttgctgagtaaatgaacatt

SEQ ID NO: 119348 - DNA, 1000 bp, Homo Sapiens
gccccccttgcttgccaaattgcaggcaagaagaagagaagagagaaggagacaagagctgtggcccttcagggagcccagacctaggagctccccaagccagggctgtgatgccttctttggggctctgcagttcctgcatctccaagtttctgggcgccactgcattccctgatacacacagtggaagctgtttgcagtcggtctggtccagctgcagcctcacagggagctggcacctgtgcctgtacctggagctgcccacctcactgcagctggcatgcttggctgtgtgcagtggccagatcccatgcttgcttgctcacacacccttcactgctctgtacccagctcacccttggcaggtgtgggatccacaccactagcatgagccgagtggacggaacgaacccagtgggcccgagcaaaacacaggatgttccagcataagaagacaccttctactcaagtccttgttccaccttttcaaatctcactggtctatttcccagtgggtttctaaaccaaacacccataaactcagaaaatacagtgtaaaacaaagtgaagaacaagtaagcaactcaccagagatttattcgtttcttgttgctcttggaaacacccagaggacactggaaacatagctgggatagaaggcaaatgacgtggattaaggagagaactggtgtggtgtggtcccagattcttctgcccaacgctctagagacattacctgggaaagccctcctccctcctgaaaaagaaaaacttctccaggggagaagagttcttcacgcctcattaggggcagcagaggctcaagttaagataagatacatagacaagtacattaattggtagacattagatgcacaatttatttttgaataaatatatgtattacctactaatttagtaacaatattatctaaagatataatctaataatttaatacaaagaaacataagttcactaaaataaatgttatagaaatat

SEQ ID NO: 119349 - DNA, 721 bp, Homo Sapiens
cgcggtgagtgttacagtttttaaagatggtgtgtccggagtttattctttctgatgttcaggtgtatccggagtttcttccttctggtgggttcatgttctcgctgacttcaggagtgaagccgcagaccttcgacctttgcagtgagtgttacagtgttacagctcataaagacagcactgttctcttctcccggtgggttcatggtctcgctggcttcaggagtgaagctgcagaccttccggtgagtgttacagctcataaaggcagtgcagacccaaagagtgagcagcagcaggatttacagtgcaagaaactggaagcgtgtggatgtctccaggctggaagtctgggttcgaaatgtctgcaatgcctcgcacttgtggcccgtccctgatcttcagaagccactggtttctccgccaaacaaagggtatgcacctcatgggctcaggtcaaaaaagtcttctaaacaaccctctaatgtttatctttcacagcctgccgggcacacccatcttcaaaggcagaggacggaaaagtgccaagatggatggacatatggctgtcgccgcactcccgtgtccaagcgccaaggccgaatgaccacttaggtcaggagatttttcccctccaggctgctgttcccgggagatgtcccaacgtctctagtccagcccctaactcagcactctacacatccgacgcttaacgaaagct

SEQ ID NO: 119350 - DNA, 1000 bp, Homo Sapiens
catcctcttcataacagtgggctgttaagcctggatcctgtgcaggacaaaactcctctctatagtcaactccttcaagcatataagtggtcaaacaagttgcagtaccatgcaggactagcatctggccttttaaatcagtagtcgttgaagcgttccgctaatcagatgggagtatctgccaaaagtagaccaaaggctcagcccacaactcttgtcctaccacctcaatatgttgatgatgtgatcagccgcattgacaggatgtttcctgaaatgtccatccacttatccagacccaatggaacatcagcaatgcttctgcttgatatatggtccaaatccaactatcaagtattccagaaggtgacagaccacgccaccacggccctgctccactatcagctgccccagatgccggatgtcgtagtccgatccttcatgacctggttaagaagttacataaagctgttccaggccccatgccagcactgcgggaagtttctgcaggacggccttcccccgacatggagggatttccgaaccctcgaagccttccatgacacctgccggcagtaagcccccacgctggccccagcgtgagaccccacccggcaacttcccagacactcaggaagcccacagaaggctcagctggttcctcactgcccagatgtgtacagccgctcctccctttcagcgccatgtgtgctgaggccactcttgaggagcagaccccccctgtggctgatgagactaattattcccactagccagtggactgaaggcaaagaagacttttctagaacctgatagaaggaagctgtgcagcatgctcctcgtccgtgtgtgtcggcagtgctggtgtcttgtcgtttccgcgagctattactagaatgagcccttgtgttcatgggtatcgtcatgcggggttcttgtgttttgtggggcttggggtttggtaacttatttttataagcaataaaccttttgtaccccg

SEQ ID NO: 119351 - DNA, 804 bp, Homo Sapiens
gtggctcaataccccaagcagtacctgcaactgaggattcttcccggggagatcgcagcccatctgcatggctcaagagttcgtgaactgcaaaatccagcctgggaagctggttgtgttcatcaagcccacctgtccatactgcaggagggcccaagagatcctcagtcaattgtccaccaaacaaaggcttctggaatttgtcgatatcacagcctccaaccacactaacaagattcaagattacttgcaacagctcacaggagcgagaatggtgcctcgagtctttatcggtaaagattgtataggcggatgcagtgatctagtctctatgcaacagattggggaactgctgacgcggctaaagcagattggagctctgcagtaaccacagatctcgtaggaaatgttcaaaaattctgtgaaaggtcgcaggacccaattggagaaatcatatgaaaagcatggttggtcttggtgtcacacggatcagaggcacaagcgcagaggctgtggtcatgcggaacactctgctatttaagatggctatccagataatcctgaacacgatgtatttatttgatttagactaccagcaaagattaaagcatgaaatgtaaaacatctgagaaaacttacagcccactataccaactgtgtatctgtgaaggagcccccacactttgaaaacttaagaatcccttatcatgaagtttgcctgttctagaattgtaagattgttaatttccttttgcagtctctagtgacgacacttaatttcttttctaataaaaacctatagat

SEQ ID NO: 119352 - DNA, 1000 bp, Homo Sapiens
aggacccctgttctcctcctcagatccctttcctgccacctcttcccactcccgggactcagcccaggtcacctcgctgattcctgcccccttcccagctgcaagcagggatgccggcatgagaagaatgttttgtgttcgaaattgtttgagcggtttgggtttatttttgttgggtttttttttgtttttttttttgcttacatgggcatccttcagcttttaataatctgaaaaattctatttacccattgtcaatgtgtataaattaatctgagtcaattttatacaataaaaggtgaacttttatgcatgaaacaataatttaacaaaaaatgtactggaagaagaatgttcattacaaatataggaaacataaatattaccaaatattggcaagcactaaaatgttcagaaatataagtctattacagttatagctctctcaagcaaaaaaatagcagagaaaaacttagtttaccttaggggctatttatttacttagagatttgttaaaaggtcaaatggggtcacacagaatactaagaagagctgttcacccaggcctcactaagaactcttcttcattcagtagctatatggtaatatgacaactgctcctacgacccaaagaggaactacagcaactactctttagcatctgttgctcccaactctgctttgcaattatatgactcaagcattctggctccgttaactattactgctgttactcccaattaaattccctctaaaaaataaaaatttttaaagctgcaatttaagctttctgctgcctcatgacttcaattccatcagagttatgcattgtttcctctgtacatctttgctctgcttccattgctacttccctagtaaagtgttgtatattcaaagttccaaagaaacagaatatccaagacatcaccaatcatccaaaacacagtgtaggaggccacagttaagagaagcaagaccattagctctttttataggctcg

SEQ ID NO: 119353 - DNA, 744 bp, Homo Sapiens
atggggcctttgttcaccaccattcctggtgcccattctggtcccatgcgtcctctgcccaagaaacacgtagaacccatggcagtgcgacagctgcttcttggcaacgccaccatgatcaggcacacttgtcccatgtctgtcccgttgagccggttctccgccggccctggctgcgggcggccctcatctaacaagatgcttcggtccatgggtggaggacaaaggcctatgggcttggggagcgagttctttcgtctcctacatgaccttcatctgctcgcgtttgccatgaagcgcatctggctcctcaggaacgactggggaagctgtggcttcatggtccccgaggctgcccgaggaaaggtatttcaggacagccaggagggggcgcacatccgccgagaaactgtgagcaagagcgtctgtgctgaaccatggcgccaccagagggcgcgcgatcccgccccaaccaacttcccgctgaagtgccagaagcagcgaggagcttcaacttcctcagggcagcacgggggtcgtgttaatttggtgttcttcattgagacaaagaccaacgagccaccacagccaccagtcccagaacctgccaatgctggggaacggaaaatgagggagttcaactctgctcgagctgtaaaagccaaaggtccggtgatgatcccatacccttttttccagtctcatgttgaagatttttatctcctcttagttgaattaacctaa

SEQ ID NO: 119354 - DNA, 710 bp, Homo Sapiens
atgcacggcaggagcggcggcccagcacttggcactggccacttgcaggacagcttcaatcgcggtgtgaagaagaaagcagcaaaacgaccactgaaaacaacgccggtggcaaaatatccaaagaaagggtcccaagcggtacatcgtcatagccggaaacagtcagagccaccagccaatgatcttttcaatgctgcgaaagctgccaaaagtgacatgcagcaccgagaagtccgcgtgaagtgcgtgaaggctctgaaagggctgtacggtaaccgggacctgaccgcacgcctggagctcttcactggccgcttcaaggactggatggtttccatgatcgtggacagagagtacagtgtggcagtggaggccgtcagattactgatacttatccttaagaacatggaaggggtgctgatggacgtggactgtgagagcgtctaccccattgtgtaggcctctaattgaggcctggcctctgctgtgggtgaatttctgtactggaagtgagtggggctccttttacgtttctttaacaccaccctctcggtttctctcccacatgtgctgctgccctacttaaggcctccccatctccgtggaagtctctctgctgtctcttttcctctctcagctccttggggctttccttagctctgcacctccttttcctttatcatctccttgggccatctcctccctct

SEQ ID NO: 119355 - DNA, 1000 bp, Homo Sapiens
gaagttggagggtccctgtctgaggtctgggccagactgccttgctttctggtgctgggccggatgggggccgggtgggggctgggctgggggaagggcgagggcgagttgtggcgtctctgaagccaatagctgggccatgaagatgatcttggctgtggagagccagaagggccaggtgcgcctgagctcctggagtagtaactgcatcttctctgacccctggtaccagactccagatgaggatgtcgggatgatacacaaagctgcgtccaggggaacgcgtgggagctgcagctgaggctcccgctgaagagaaaagaccagtctgaaatctacaagaacagagaattcttccaaatcaacatgaaaatacctctaaaactgggcaaagtactttttccagctctgcaagtcacctatgcacataggaaaaaaatacttaatgtgtccgataagagaaggactttaatttaaaaaaggaataaaatgccgttttctgtcctaagtttgtgaagatgaggagcagtgatatttacacttctgcttaaagttaagttgctgatgacttttcaaaaagacaatttggtggatggttccacatttggcctgtgccaatggctgcccagaagtggtaacttttctggtgcacagaaaatgccagcttaacatctgtgacagtgaaaacaagacacctctaacgaaggctataatgtgccaagaagatgtgaaactattctgctagaccttggtgctgatccaaatattaccgatgtctatggcaacactgctctccatatgctgtctataatgagaatatgtcaatggtagcaagactgttttcacacaagacaaacatcgaagtgaaaaacaatgtagagcaaccaatgttattttcaaaatatttgaaatccacttgttttaacattgacatatgtaagggtcagtttttgctatttggaagcttaagcaatccctgaataaaaataatttgaaataa

SEQ ID NO: 119356 - DNA, 1000 bp, Homo Sapiens
gttttcacagccactgcaggattcatcttccacatcttctcacctcttcttgaaacaagctatacattcgtaaagagttcatttccttggggtagtgtccttataagcttttcttaatacatcaatgatttcttcattcttccacccaagcttcaccataaatttgatgtttcctcttgctgcaattttcgtggaattcatattgctctgacgggagtccttttcagtggatgtctcatccttcttagtgcctcaaactagatctagttcagaaagtttataagaagttaggacaagtttattttagtgcaaaccagtggaaatccatgcatagtttcttcaccatgtgcattttctatgaacctttggaagaccccctgtgttgaacattgcccaactcctgggagagaagtgggtgcggtccacttcctgtcctcaatttgtccgcagcggaggagtgcacagagcaaggaaaggcaaccccagagagatcctgccctccagcatgcagcagactgctggcccagtcctggctccattgggtgctgtgtgggcccaagcaagttgaccaacctccctgaaccttaatttaatcctaggtagcccaattccagtagccattataggactgccctgcagggacagttacttaactcaggaaaagcaacctagctccaagtttagcaaccgggagctccagttgattccattagcgcaccccctgaggcattcccaagctggagtctggtggaagatgaggctcagggtgattggactgaagcaccaacctatcaaggagaagtcccacccagtctgccctgtgcgtatataaaggcgacgcgtggcggccgcagcactcattgaagccgccagttgggagaggagcagagccaggccggtgctcccgaaggcagcaagatgttgcgagccacagctccctgctggttcccacctggatacccagaaactaagaaggtggccgaggaggcggccctcgagg

SEQ ID NO: 119357 - DNA, 1000 bp, Homo Sapiens
ctatcttctggatctgccttcgcgatggtcagtgacagcttctggaagctgagcacacacaggtgcacagccatgctgtggtctggcctgctacggcagcatggcagctctggtggagccttctcccttgccatttggttcccctgtgccaagtagctgcaggctgcccctcaaatcttcatttgtcccttttcacttcctgcagaacaagcctgggttagagggtctgctggaaatggcctttgaagaccaaggataccaggatgtgtgcactctgtcgtgttctgtgatgaatgggaaacgtaggcttccagaaagccagctctcttctgaaatgtgacggacctaagcaggaagtcatccaggacaggagtggctcagtgttggggatggacgctgtcgcccagccatgctccaccagggccaccaatgtgtagttggctggtggtcttcgggcatgtgagacctgctcttcactgtttccaccccacttggtggcctccaggatggtagtggcaccctcagagccccatcttcagcatgttctgaagcctcagagtggaaattcctgctaaggctctgtgtggacgcctttctcccgtgatctaaaggggacactgtactcaagcttttgacctcatgccttgtgtagtaaaaaaggatttgggggttttgtttggttcctgagagggttgtgttttgtttttgtttccttttgtttatgttttggcctttcctctttgtctttccatgtagaccagatatttgaaagggcagacgatggctagaggtgtaatgtgcagcttgtttatacggtattttgggaaacttaccttggatgggaaatcgaatcgtggattcaccaggccggtgctggcacactcaccctcgccctttccctccggttcagtacctattgtttctcctttcaaatatgtgattgtactagctctttccatatgaaagaattctccttatttaaataaaaaaagtttaaaaa

SEQ ID NO: 119358 - DNA, 525 bp, Homo Sapiens
atggcccaggggcctgcctcagagatggtacctgcctgcaaacggcactttatccaggacacctgcctttacgagtgaccccccaacttggggccctggatccagcaggtggatcagagctggcgcaaagagtgggtgctgaatgtgcccctgtgcaaagaggactgtgagcaatggtgggaagattgtcgcacctcctacacctgcaagagcaatgggcacaagggctggaactggacctcagggtctaacaagtgccaggtggcagctgcctgactacctttccatctctactttctcacacccactgctctgtgcagtgaaatctggactcactcctacagggtcagcaactacaaccgagggagcagccgctgcatccagatgtggttcgacctggcccagggcaaccccaatgaggaggtggcaaggttctatgctgcagctctgagtggggctgggccctgggcagcctggcctctcctgctcaacctggccctaatgctgctgtggctgctcagctga

SEQ ID NO: 119359 - DNA, 813 bp, Homo Sapiens
atgtggtttggggaagccagttcatttgtgcctaaatctcctaaactgagaagaaaatgttttagacgcctggcgccaacgagaacccaggccgccccgagggcgagtcgtcggagcgaccgcagcgccctcgagcgggaatcaaaatcaaaaatcgccgaggacgaacagatcaacgccagcaagaacgaggaggacgcagcaaaaatgctcgttggtggcctgagctgggataccagcaaaaaagatttaaaagactatttccctaaatttggagaggtcattgactgtacaataaaaatggatcccaacattggacgggcaagagggtttgggtttatcctgttcaaagatgcaaccaatgtggagaaggtcctagaccagaaggagtacaggctggatgtccgtgtcattgaccctaaaaaggccatggctatgaagaaggacccggtgaagaaaatcttcgccgagggtctgaatcctgaagccactgaggaaaagatcagggagtactttggcgagtttggggagatcgaggccattgaaattccagtggatccaaagttgaacaaaagacaaggttttgtgtttatcacctttaaaaaagaacctgtgaagaaagttctggagaaaaagttccatactatcagtggaagtaagcgtgagatcacggtggcctagcccaaagaagtttattggcagcagcggtatggttctggggaccgtggaaaccacaaccgagggaaccgaggcagcggaggtggtggtggaggtggaggtcagggcagtacaaactacagcaagagccagtga

SEQ ID NO: 119360 - DNA, 1000 bp, Homo Sapiens
ggctggggagtccctgactgaggactccacgagtgagctggtcgtctctgagatcttcatcagccagacaacctttgtgggcatcatccctcttgccatgagagtcaccaggtaccttgtggactggaaaattctaaaatgcagatggactgaaagagccttgctgggaactgaccaccttaagctggtagagccccggcatctacaaaactgcctgtgtttctgttttactggcctggaggtgactggacttcattttctgatcttagctgaagctctatgcatgaccaggattggggccaaatctgagaacagggtcagagacaaggttgtagaacctaaaaagaatggtgcactttgggctgtggaggaggggcattatagggataataaaccagtgggagcacttatagaggacactgaggttttgaacactgccattctcactggaaagcctgtttcagttcctgtcaaagtcgtgagggtccaggaggatggttctgtggtctatgtgtctgagtctgtggaatgcaagtctgccaatgaagatgtcattaagtcccaggctcgtgaccacgaagaggacctggtgagggtcagagatggggactcactgagccaggtgcttcttcacccacctcacttcaggtgcgctttggagcagaaaaacacacaggattccacaccaagtgttctgcctgagcagggcactggcaaccggggtggagctgcaagagcctttggccccatggagggactgctggctgccggcttcttcacttcagctccttctggagatgaccaaggcaatcctccctccagccctgcccagtgcccaggggttggcagagtggctccacctacacctgcacgggtggccccgcgcctctcacgcaagttcggctcccgctccctccggtccctgtgcagagcgccccctgtcggcccctcgtggagcctgggccagcgcagcgagtctttccgcagacacgccctctag

SEQ ID NO: 119361 - DNA, 651 bp, Homo Sapiens
atgttgggaaggtcacgtgctacggccacgtggcccgcggcttcccgctcgcgcagtctggcagcccggagccttccgcggtcccccgcccgcccggggcccaacgacgccctactgggcgagcacgatttccgaggacagggggtccgggcccagcgctttcgattctcggaggagccgggtccgggggccgacggggctgtcctggaggtccacgtcccgcagattggagctggagtgagccttccaggaattttggctgccaaatgtggtgcagaagtaatactgtcagacagctcagaactgcctcactgtctggaagtctgtcggcaaagctgccaaatgaataacctgccacatctgcaggtggtaggactaacatggggtcatatatcttgggatcttctggctctaccaccacaagatattatccttgcatctgatgtgttctttgaaccagaagattttgaagacattttggctacaatatattttttgatgcacaagaatcccaaggtccaattgtggtctacttatcaagttaggaggcaatcttttgatgcagacaaagaagatatagcagaatctacccttccaggaagacatacagttgaaatgctggtcatttcctttgcaaaggacagtctctga

SEQ ID NO: 119362 - DNA, 1000 bp, Homo Sapiens
aattcatactggagagagaccctacaagtgtgaagaatgtggcaaagcctttaatgtattctcaacccttactaaacataagagaattcataatggagagaaaccctacaaatgtttagaatgtggcaaagatttctaccaattctcataccttactacacataagatgattcatactggagagagaccctacaaacatgaagaaagtggcaaagcttttaactgttcctcacaaattactagacataagataattcatactggagagaaaccctacaaatgtgaagaatgtggcaaagctttttaaaaatcctcaaaccttactaatcataagataactcatactggagagaaaccctacaaatgtgaagaatgtggaaaagcttttaaccagtcctcaactcttactagacataagagagttcatactggagagaaaccctacaaatgtgaagaatgtggcaaagcttataactggtcctcaaaccttactaaacataagaaaattcatactggagagacaccctacaaatgtgaagaatgtgaatgtgagaaagctcttaaccagtcctcacaccttactgcacataagagaaatcatactggaaggaaaccctacaaatgtaaagaatgtgagaaagcttttaactggtactcatgccttactgcacataagataattcatactggagagaaactctacaaatgtcaagaatgtggcaaagcttttaaccggtactcaacccttactacacataagataatttatactgtggagaagccttacaaatgtgaaaaatgtagcaaaccttttaactaatcctcaacccttactacacataagataattaatgctggagggaaatcccacccatgtggcaaagcttttaatcaatcctcaaaccttactaaacataagataactcatactggagaaaaatcttagaaatgtgaaggatgtggtaaagcctgtgaaaaatatggcaaaagctttaactag

SEQ ID NO: 119363 - DNA, 840 bp, Homo Sapiens
atggtcaaggagaatcgctgggaaaggatggaggagctggaagtcgagcagaagccacagtccagtgtggggagaatgagaactcctgagcggtcactgcccaagccgtccctcagtgcctggcccagctcggtggtccctgccaacagcaatgtgacgctgcgatgttggactcctgccagaggtgtgagctttgttctcaggaagggaggaattattctggagtccccgaagccccttgattctacagagggcgcggccgaatttcacctcaataatctaaaagtcagaaatgctggagagtacacctgtgaatactacagaaaagcatccccccacatcctttcacagcgcagtgacgtccttctactgttggtgacaggacatttatctaaacctttcctccgaacctaccaaaggggtacagtgaccgcaggtggaagggtgactctgcagtgccagaagcgagaccaattgtttgtgcctatcatgttcgctctactgaaggcagggacgccatcacccatccagctgcagagtccagcggggaaggagatagacttctctctggtggacgtgacagccggcgatgctgggaactacagctgcatgtactaccagacaaagtctcccttctgggcctcagaacccagtgatcagcttgagatattggtgacagttcccccaggtaccacatcgagcaactactccctgggtaacttcgtacgactgggtctggctgccgtaattgtggttatcatgggagctttcctggtggaggcctggtacagccggaatgtgtctccagaccacacagctgccaagggtagcatgcgctag

SEQ ID NO: 119364 - DNA, 594 bp, Homo Sapiens
atgggttattttcgatggagcatcacacaactgagtaaaatggttattgtgcacggagcgttaaacgaccgcatgaaggtgtcagcgtccattggcgcgttccacacccctcgtccggtgtcaccggaatatcgcatccgggaactctgcgcgcccatgcggagagtcggagggcgagctgacgaggacgctacggcggcgggaagtgagttccgtcctctcgcggcctctcgggagagaaatcctataaatgcaagaagtgggaaagccttcagtgctggctccacctttaccaagcatgagaaaacccacataggaaagaagccctgtgaaaggaattggtatgggaagaccttcagctgccactcttcccttgttttgcatttcagaagtcatactgtggaaaaactattcgaatgtaatgaatgtgaaaaatccttttctgatgtctccaaccttattgtccatctgagaattcacatgaacatcgcgggcctcatctggcaccagaggactcatactggtgagaagccctacgagtgtaatcgaaaccagagttgacacattggactgagacctatggggattcagtga

SEQ ID NO: 119365 - DNA, 1000 bp, Homo Sapiens
ccccatctgtgctgtgctcaccggagatacctcactccctgcccagctcttcttcccatggctccagccaccgtcccatgccctggaacctgcctccttgtccttttcgcccatcgttttgcaaaaggaacggggcgttggtctgtgtggggagatgctggagcacgtggtgagcaatgggtcacagatgagaggtggaggtggggcccagctgctgatgatgagcctcctagtcatcccagtgtctgctaacccagaaaaaggccatagcgtcagtggctgtgatgaggaactggaaaacgcctttaaagtcatggtttaccatggagatgggttacaaccaaacgccaaagcccgtcccgtggtcccactctccaggcgagcccctcgcatgtttgtttcactgctggtgttccctacacttctgctgacagatgtggccgctgcttctaagagtcaggacaccctgatgatgccacatcagaagggatgtgaaagaagagggcttcctccacgggtctaccaagtggtctaccacttgctgagtgcagagccttgtcctggtctggatgcgacgatggaaggcttaagtttctgttggtggcttagcctttggtggagagagcacatcccactgctgggcagggcagtgccctccccacagttccttccaggccgcctggggtcccacgttcatccagtccttaagcgccggctgcgggccaggccccggggatgcagcctgaatgaagcagaggagaaccctggagaccacatctgccagggaggacacaacagcgaagaaaagcaacaacagccccagatggttggggggggggtctcctcccccggcccatccacccgcacacggcccttcctgactcgttccactgctcccacactggcccagattcccaaccatgctgaggctccccacaccaattccagggactcctcggtccctgttcaggagtcgacagaagctttgtgtccatcctga

SEQ ID NO: 119366 - DNA, 1000 bp, Homo Sapiens
gaagtatcaacattgtggatctatttatgaacttccaaatctggaaggtgtgacgcgctttgtcactgtgcggccagcactctggcagcagccggagtctggctcttttatgtgcagcaatctgttcttccttttcaatctctctagtatcactgtagaagcagagatcaggtatgacttcccacaggtgctcaggggaaatagtgccacacccaagcaggacctcataggccagcaaccattatgtcagatgtcagacccttttacgatggagctggagttccaggcccacgtggtgaatgagatcgtgagtgtcaagagggagtatgtagttcagctggtgccctgcttccaggtgccattgagcctgaataacacagcgctaaagtccatcatagctctattggcgcctgaggggcacttatattggccgtcatgtgtaggggggctgctgcccctccaggccatcaagcgcattgtttccaagatgacactgctgctgggctacctctcttacgctcctccctggtgcaggccctgcccagcatctcctgcaacccgctcctcaaggcacaggacctggcccctaaccatcccacctgccctcccacctccagtttactacatcagcgtcctgctgctgctgctcttcctcagtgccacagagattgtgctgctggctgggctgctggcctggggcaactttggggctatgagcagccccagactagtcctgagagaggaaaagcaagattatgaggatccagggtctaatcctgaaagtggatggaggttgaggcaccttcctggggcacccagaagaataaagtggtcaaagagaagctgggctgagactgttgaccgtgacttctttctcatgtatgtggcctgggtgctgtgcagccaattcatcttcatgggaatttggatgtgagcagcatgcaagtccaactcagcccctagagaggctgtaccccatgacaagcagccaaggctgtaa

SEQ ID NO: 119367 - DNA, 897 bp, Homo Sapiens
atgaagaatggctttcgtggttttggtggagacaagtgctgaaaatgtgaagaatgtggcaaagaccgtaggttgttctcagattttactataaaaaagagaattcctacggcagagagatggtacaaatgtgaagaatgtgtcaaagccttcaatatttctcaaaccttgccgaacataaatttgaacagaccctacagatgtgaagaatgtggcaaatcctttaagtgcttctcagaccttactaattataagagaattcatactgctgagaaatcctacaaatgtgaagaatgtaacaaagcctatagagctattatgtagttctttgtccttagtaaacataaaatagttcatactggagagaaaccccacatccatgaagaatgtggcaaagcctttacccgctcctcaacccttattaaccacaagagaattcgtatggaagagagaccttacaaatacaaagaatgtggcaaaacctttaagtgcttctcagaccttactagtcataagacaattcacactgtgagagaagtagtgcacaagtctatccagtcaaacttgaaatggctgacacatgttaaccgtattcaccccagaagtgtagggctggcagacattactggaaggcagaagtgggaaacaagcctaaatgagaattccgtgtgcgtcaagtttgtcttcttaggaactggaaggatcagccttcaattctgggtagattacgggcagttggggggatgcacaatcagtggtgtaccaggaaagatgactaagagaaacatcgtggtcacaatcaagattaatgccagaataagcagcgaacacttggaaatcaaaagggagcatttttcaatgccctcaaattctgtcttcagttcctggattcagtaa

SEQ ID NO: 119368 - DNA, 428 bp, Homo Sapiens
atgttagtgatacctcatttttataaccccaaactagtcaccattatattgttttgggatcaatgcctgtttagatttgcctttgtatttaatatttaccagtctctgctcctctttgcttctcacttcctgtgccttctcccagagaaacggagcttttggaattctttcagcagggaactgcttcaatgtggatatgatggctggagctccagcagccatcctgtgaccctgagaacaagccattcattgaggctaatgaagcaggaagaaggaatcctgagtccttgggaaacaaggatctacctgaatagctccgaatgcctacttctagatgtccttttagaaagagaagcacacccttgtgtatttcagccactgctatttaaggtttaacctaatcatgatataattggtttttcttggaa

SEQ ID NO: 119369 - DNA, 1000 bp, Homo Sapiens
ttttattgccgaacccaggctggaagcgggcggccctaggagccgcgcacaacagcgcaagcgggctggataccgggagccgattccagggcgcccacagaagcagaatcagaggggttgctcacacccgagatgtgaggttccaggagcgccgacccagagttgccaggcctgaaggcgggagaggctcagtcgcaccctacatttcccacctccaagattttaagtatagttcgcttgaaatccctggaatgcgctttcttctggctcctacccggagatccggagtccggacaaaccggggcaggaagggtccgtcggaccagctcctcccaagccgaggcttccaggtctcggccgggctcttctccctgcttttagctgagccgggctgggcgtacctctctcctccatctagagcagggtgtgaagaggaagccagagggggctgtctgaaaatgaccctgaccccctcctcgggctgtcgtgaggaggagggccgcttcgcccggctgctcgtcaccgcgaaggctccaaagaagtgttgcgcagccgtgctggtataactgagggtgtcctggcgaagcccagcccctggcgccctggtgaccgggggggtcgatgtgcggactgggcagaactggagcccgaagctggagagcgcccctcaaaaagaagcctggaagcccgagagatgaacccgactcagagagggccaagactgcagaccttggggaccgaggacaccctcaccacgctggtgggggctggggggatggcgcgggcggtggcgtgcggggaagcgcctggggaacacctggctctgcaagttttgtgccttagcggaaagaggcgacatctctggcaagttgggagtacaggaagtagcgaaggagtgccatctggtggatccttctggtagtgacactcagacctgggccaggggccttgagacaatttacttgactggaaaaatctgaataaaaaaaagatgcttcaa

SEQ ID NO: 119370 - DNA, 1000 bp, Homo Sapiens
agcaaaactgctataacacaaaggccccaaaacacagtagcatatagaaaacagaagtttatttctcacttagtctgggaggaagcggttccagacagcaggcagctctgttcctcctagtcagtcagggacgtgtgttcctttcatacctttgctttgtcttcccttagggatgtcttttcagttgcctggtcaaacctgtctcaggcacatctgcccagctcatgaaagagagaacacaaaggagaatttacccaatgtcatcaggctttgaggacatgcttgcctcacattcccctgtgtctacacctggcaacaagagcagctgggaaatggagtgtccagctgggtgtctctctaccctcgtgcagcaaggaaagaagagattttagtggacaacgggcagtcttaatccagggctcaaacccacacccgagctgtcctcttcctcttctcttcccaaaggaagggaaataaagtctacagcccagaaaacaatgtgaccacccatcccctaccccaatcaggtccctgccattcatcccaagatcagcagtcttgggaaagtggcttggaagcctccctccagaaagaccacccttttgtccatcttcttcacatgggtggatgtgagaaaagtttctctccccactgcctgcctgccactccctgtctcagtttcagctcacgctctagccctttgttcccagtcaccaagagtgactacaaatgcgggggaacaggaggacctgaaacttcatggaaattgagactgggacacagaagccatgctcagaggcagcctaggtgagggttctgatgccaggaaatccagctactactgtgtagcctaaagcggggattaagctctcagaacttcaatgaactcttttggaaataggggtaagaagcccacttgtcagggctgttgtgaacatcaaatgtgatcatgtatgtacctagtacatagtatgccttcaataaatggtaaggcaaaccc

SEQ ID NO: 119371 - DNA, 1000 bp, Homo Sapiens
caagggatgtggcacgagtagggagcgcagcttgaggagtgtagggaggcctgcacaggggcgcctgaggttgagaccggatgacctcgcggctcctgacgcctccagcgcagagcttggggtcccggcctccgaatcccacgcctccaccgcgtccagtcgccggttcaggcgccagagggcgcgcgcgctctgggaagagatggggcttgggctcgtgaacccggaaaggttccagttttcacccagttgggaggtgcaagcgcctctgccgactccggctgagcccaaacccgggcgctgcaagatttttctacgttggtcgtgggcctgttgaaactaagttaaaactaagtcaggcaggagagattcttgggtttgttgaatgtttaagaaaaacaaaattgggggagagggactataccattctaaaagggtcattttgcacacgatgttttctttctaaaaattacagtaatgtgggcacagtattaatatatggtaatactagaaatttaggataaatatgagaataaaacctgtcaatattgtggaacagaggtttaaaaaagtgtctatgggccgggccgggcgcagtggctcacgcctgtaatctcagcactttgagaggcagaggcgggcgaatcacttgaggtcaggagttcgaaaccagcctagccaacatggcgaaaccccgtctccgctaaaaatacaaaaattagccgggcgtcgtggtgcgctcctgtaatcccagctatcgggaggctgaggcaggagaatcacttgaacccgggaggcggaggttgcagtgagccgagatcgagccactacactgcagcctgggcgacagagagagactccgcctcaaaaacaaacaaacaaaaaagtatttatggagaatgaacagcctgagtcttctcccccacgccccgccgtgaacaattcgtggctttatcatattcatccaataaagttaacacgatggactgccaatgaaagc

SEQ ID NO: 119372 - DNA, 611 bp, Homo Sapiens
cagggcaaagccaagaagtgattttcccccctccctgccacgggaactgtgacctaattctcattcctaatcacagaatcaaaggagaaatttatttcaatgagctagtctgaaagagctatttgccaaatggctttctttccaatacttaatgaaaagatgcattttgtactactttcaaaaagtgatatggacaggagacggaaatactgggtagaaaagggcagttccctggcaaagcctcaccctcaagcctggatacctgctgtcttaaacgaaaacgaaaacaggcatttctgtgttcatgctccaaaagttatcttttggcctgccacaccccctatcctgcacccatatgaatcccgaaccccagactccagaagcagaccagcaagcccgcagaccagcagaaggatggcagaacgatgtggcagagaaagggagaagaggaggaacatctgaatgccaaaatgagttcagctgggggcagtcagagaggagtccagccactgggcagccagaatccaggggaggatcacctttccacttcatccccttcctctgcctccccatccatcctgctgaaagccacctccaccactcaataaaac

SEQ ID NO: 119373 - DNA, 1000 bp, Homo Sapiens
gcctgggcgccggcccgagtcgggcaccgaacggggcgcacaggccgagcgcgccgccagcgggcctgagcgcccgcgactcgagcctccgcccccactccgctccccaacttggaggggaccccgggtttcgcgctgcgctcgcaggcacctcgagaagcaggccccgaccgctcgccgacgaagcctcgtccgggcctcctgggagcggggtggcaggtaccgtggcgcctcctcgcgttggtcttgctggttctcggcccccgaagcggagcgacggagacacagctgtggaagcatctggatccgctgcccaggtccccgagcttcccggaacccgaggccgcaggacactgaaggctgccattcccgagtaggtcacgctggacgccaccctaagctgggcccagaggctcccgtccaggagggctgcagtcggcgcagacaccgcgcgtgtggagacgggagacccatcctcctcggccgttccgagagtaggcgcggccggtcagattcgatgcagagccgaatgcgagtagaaagaagacaaaataagccccagttcttcgattctgggctgaagtgagattttcttgaatggcagccattgttttgcctcttaggtaagtgagtgcagtaaagaccggtaaggcccacgcagaagaaacactgaggaaagaagacacttccaaagtaacaaatgggaggaagcagccaacgcccgaggacaacatggcaagaaggagcctttggattccggactgggatggaaagagagttgattgaatcccggaatttggaaaccccagatacggagggcggacggtacaaccggagctgtcaggtggatttccaaggctttgcattggctgtacctgaaacttatggtggcctagactccccagtatccactcttccttatcttgagtctcactctattgctcagattaaagtgctgtggcacaatctcagctcactgcacgtttgcctcctgggatta

SEQ ID NO: 119374 - DNA, 1000 bp, Homo Sapiens
tagtgtgggtcacatcgcggatagccactggccaaagcagggaacagagacagaatgaggaagagctctgtggggagggtggggcacagggtggagaaccttcaaagtccaaaaagtatgacttgttgggattcaacgctgtaggcagtagggagccatggaaggctcttaggtggagaaatgacagccggacattagtgagcaagccctgtctccctgagcagcatgggtggtcctctgagcacgccaggcacgagtgtgcagggagctggtgcaaatgcctctgtgtgcgggtgagcatctgtgttgtgactctgcccacgcatgtgcttcagtgtgccgtgtggctgcacgccccagatccatgcggcacgtgccggccggtgagggtgctgggcaccgggaggtggcggagagggcgacgtatgcgtgttgtttgtgggcatctgttagagtgtgcatgcgggccgtggggcctcacagcatgtgtgtgcacaatctggcatgtgcgtgtgtctgccacccccaggcctgccccacccatgcatgggacctgccatgtgatttgatgctgtctttcagaatcactatcagtggcccctgaggagcgtcagccatggtaggtacaagtctcactgcctgctgcatgaatggtctgcccgccccgctgccccagctccacacagggggcatgcctggagtctcagagccaggctccctgcccctcccttctggagctgcagacttgctctttcctctttctgtccttgtgctgctggttgtctcactttgctccctgtgagccacgggactcagtgccactgctcaaggtctccatggctgagcctgggggctcttacaacaggctccatgcccaaggtggcagatgtggaaccatcagagagggcacagagctcatggtttatggtgtaggggctgggagcttggagggggttgtgtggggggctggactcaggcggccagaggcctgggcacatca

SEQ ID NO: 119375 - DNA, 852 bp, Homo Sapiens
atgacgttcacagccctggagcctggcctagaccataccaggaaccctccagctagcctggaggggtccgcactgcggggaaaaaagcaacagctcagctccaaccccaaaggttccatcaccagccaatcgtggcccggggcttctcaagaaaaccagaaacgcctacggacagaggaggagggagtaaagcctagagaggagacgggagagagacaccacacacacggcacaagatggccggagaggcagcagcaccccgagctgtcaggcgttccgccgcggccgcgaggcccgccggccggcggggagctacgcccggacggccagcaggcccgcgggagtggggctgccgcggctgaggcgaggcgggccgcgcgcgtcggcgtcacagcccgcggcagaggcgcccagggcggccgggcccacgacgccgaaagcgccgctgcggttgccgcctcggaggctcccccgggccccggcggctggacccggcgcgggcgggaggctcgggcgggcggtccggcccgggactcgggtttgggcgaccaggaggtgccggtggccgcgctcggacccggttctccaacggaggagctttttaacctctttccgccgattttgaaacggctgcagtgatacatgcgaaggtgacttaagagattaaaattaatttggttgctgttggttctgaacaaataatgagttcttttatttgaggtatgccattttgaagactgagacgttggagttttatcctagaggataaaggaaatctttgggaaagtcagtattttatatagcaaaaatggattaatacaagagtcctgtgataatatacaaccaagacag

SEQ ID NO: 119376 - DNA, 760 bp, Homo Sapiens
gcagactccaagggttttatagcgtccggtagcgacacggagccggctcccccttttccagccttcctccccatctcccattctccatcccccacgacctataccagaggtccttaggcctccacgtctctccttttgccgagtagcccaaggtttccacccatctgccagggggatggcgtccactccgatggggaatgagggggagaagaagagcagctggccatctcaagctgcaccctccttgagaggaggtccggcttcgttatctcgttctgaggaatacctgtcccagatcagtgcagaactcatggaggaggctttgtgcactgcttgctgccacttgaaccctgtgcccatcaaaaaaaagcagtcacaagaccaagcgactcagatatccaaacgcgcattcttcaccaagacctgaggcacagacacctggtgagtgaggcttcaagggagatgctctttgtcctgggagagagccctctcccctctcttccaccatctcctgctcggacagaaaccgtacctgcagcaaggcatacctcctgccaactcctggtgaaaagaacatgcctcaaaactactcttttgccactcgttaaccacttccgtttgtggggacctcctggtcatgagcagcatcatcccgaagccttcaaagtgttctggattcatcacaggaccctccagcctcagccagcaaggataccaccaggaatgaaagtgctttaataaagagacagggtgtgcattg

SEQ ID NO: 119377 - DNA, 1000 bp, Homo Sapiens
ctttccttttttgtgttttctttaatttctttcattgatgtttgtaatttttgttatagaaatcatttacttcctcggttaagtttatttctaagtacatttttgtagctattgtaaaagaaatagcttccttaattttttttctgctagtttactatcaacatatagaaatgctactgttttttgtatgttgattttatatcctgcagctttattaaattcatttatcactctaagaagttttaggtagagaccttagtttcttccgtgtatgagatcacattgtctgcaaacaaggataatttgactgtctcctttccaattcagatgccctttatttctttctctaacctaattgccctggctaagactttcactatgtgaaatatgattggtgaaagtgggcctccttttcttgctccagttttcatggtaacatttttcaccttttccacgttcagtatgatcttagctgtagggttgtctttacgcccttttgtgttgaggcatatgttttccacactaaattgtttagaggcttttgtcatgtaagaacgtttaattttgccaaatgctttcattgtgtttattgatttaatcatatggttttcaatatatatccaaaggaaagaaaatcaatatatcaaagccttacctgcacccccatgtttattacagcactattcacaatagccaagatatggaatcaacataagtgtccatcaacagatgaatggataaagaaaatgtgacatacatatataatggaatactattaagttataataaagaacaaaatcctgtcatttgtggcaacatgaatgcaactggagggcattatcttaggtgaaataagcctggcatagaaaaataaacaccacaggccaggcacggtggctcacgcctgtaatcccagcactttgggaggccgagacaggcggatcacgaggccaggagatcgacaccatcctggctaacacggtgaaaccccgtctctact

SEQ ID NO: 119378 - DNA, 855 bp, Homo Sapiens
atgtctccctgcatccttgccattggagagggaagaggaaggacccagggtacacagggtgggtggctattctccagaaatgtcagtttctgggcagggcttaggtgtctgcagtccctagtcccacccctggccttgcattccagctcagcgggtggaaggtataaatttcagctgctctcagccctgctgtgtttttccaaagccttccaacagcaacatgaagttggcagccttcctcctcctgtgatcctcatcatcttcagcctagaggtacaagagcttcaggctgcaggagaccggcttttggatactgctaatcagtcctagcactctttctctttgaacctggacaaggtgtctgacccttctcaacacagcatcagacagccacctctattgactgaagttgacaatggagaataaaactcattacccctgctgaatccaggggcccctttttacagatgagaaaagttccagaaagacccagagacataatcaggtacctgcgtcgagctctgcacaggtgactgggactgcaaccccggagaccactgtgtcagcaatgggtgtggccatgagtgtgttgcagggtaaggacaggtaaaaacaccaggccctccctgctttctgaaacgttgttcagtctagatgaagagttatcttaaggatcatctttccctaagatcgtcatcccttcctggagttcctatcttccaagatgtgactgtctggagttccttgactaggaagatggatgaaaacagcaagcctgtggatggagactacaggggatatgggaggcagggaagaggggttgtttcttttaataaatcatcattgttaaaagca

SEQ ID NO: 119379 - DNA, 1000 bp, Homo Sapiens
tgttttcctgatgactggttgtaatgagaaaaaccgagaatcacatttaaaaccttaccctaaagtgggagttgctgagagaccaaagaatgactgggcggagtccagcttggtgagtaggtgcagcgcccgcctctccgctccggccccgcctccgccctggaacgcagcgcgctccgcccgaggcctcccggcggcccatacgggaatcgcggagcttagctgtcgccacctcgcgccgggtccgcgcggcccacgggaccccccactgacgcccccggccagcggtccacatggacgtgcggggccctgaagcccccggcgggcgcgcgctgcgggacgcggcagaaaatctatttcaggaacttcaggaacattttcaagctctgacggcaacattaaacctcagaaatatccttttctacctttaacaaatgctgtgattctttcggactggtagattatcatggagtatctttttgttgtctggtagtagtagttgcatgtgccatgggaggcggagtctctgaggacatcctggctgtgcctcggcggctctggactccagctctacgcagagcgccttaacactgtactggaagaaatgggaaatcgcattgaggacttacagaagaatgtcaaggacttaatggtgcaagctggcattgaaaattctattaaagaacaaatgctgaagacctaactgcagcatgtctgtatttggagatggggcctctacagaagtcattaaggttacatcggtcctgagggtggggccctcatccaacaggattcgtctttctgagaagagacgcaaggggctcgcctgctctcccctccgtgcctgcaccagagaaggaggccatcggcaagccaaggagagccctccccagaaatcacacggaccagcaccttgatctgggacttccagaaaacagaactgtgaaaagacaagtttctgttgtttaaaccacccaatctgaagtattttgttatggca

SEQ ID NO: 119380 - DNA, 638 bp, Homo Sapiens
caattgaaaacacgggtcacagcaccttttattcgtcatcatacaacctgatgtgacaggaaatacagccaacatctccaaacagtcttaatgcctttcacaatccaatgggaaagcccaagacgccgcctctagtggggaagccatgagccttccgcctttggatgccacaaatgggaacgatagaggtacaggaggtctgccttccacgccggaccctccagcgcagtcccatgccggacacagcgaggcggcacttggcacagaacgttttcctgagaacacgtcacacgctagagcattccagaggcccgagccccttctcaacccacagaccaggattcacggggagcagctgtacctgtggcctccccgcaagactcacaccagtggatggcactcgagtccacagctgcacggagccacgggtccaaaacgaattctccactgagatgggtccacagagcctggtggccacaatggctggatctaatgtcttcctttatgaatacatctgtgcacctttggaattgaagtttaaacagaaggaaaatatgacttttcccccgtttcttccactcgggattctggctgggcttcagccagaatggatacatttggattgcagagaatcctga

SEQ ID NO: 119381 - DNA, 1000 bp, Homo Sapiens
gttgatagagaggagtggagtgatatcggacacccagcttcggcaagctctctccaagggatgaagccccacccgcccttcaggatgccagccttggcaacattgtgagaccctgtttctacaaaaagtaaacgtgtagtggtgcacgcctgtagttctagctacttgggaggctgagatgggaagatcacttcagcctgggaggttgaggctgcattgagctgagatcaagccacggcactccagcctgggagacagagcgaaaccccatctcaaaaaaacaaagaaagtggatgcacgctgctcctgccattggatcatcgcagcatttttcttttctctgatatgcgcctttttcctcatcgtgggggctcatgtttttgtactttcctctcgctactagattgtgagctgcgtgaaggaaggttcatagttgtgttgtatgtacaggcacacaaaatttgtccttggatagacacatatcaatccgcttccttctcctctctgaagttctttatttaaaaaaaaaaattagagatggagtctcactgtcttgcccaggctggtctcaaactcctaggctcaagcgatcctcccgcctctactaatatgaattattagcctatactaatatgaattcctatactaatatgattgaaattagtttgacttgtataataattgttctcccagattggccttctgttttgatagtagaactaaattattaggctatttcaagaaattaatatattactggtagaaaaactgaagctacaaaatggcctggtttctcacttcagttaaatttgtgcttctgagtgcttgtattgtaggtgaaaccgcactgagaaggtatttgtggcccgtatgctgattgattgatgagacttctttgcacaggagagctgctaaaaattactgcggtgaacaggtatgaagaagactgttctctgcccttctttttgcaataaaatgttacaaactatcttgagattga

SEQ ID NO: 119382 - DNA, 1000 bp, Homo Sapiens
tgtgcatgccgggcaaggccaagctggctcaaaaagcaaccggccacctctgcaaggttgtgccaggagccggtggaccagccaccaacctcacttgctgccggtcagcttacatcagttcttctaccctagaggtagggccccagtgccatatgcttttcctcaggcctctgctctatcagtcatcaggcagcaaccactcaggctgtgggaacctggccatccctccttccttgagtagctgaggttgctggcttgtctgcctgctacaggtgcagccttgcagatgtggctagttgctctgagccagcttggccttgcctggcatgcataggtcccaggtactgacactctgcaccgagtcagcttgtcctgccttgggtcaaattctaagtctggccagggccacagaaggcccagtcccctgggtgctaatcttggctgctttctgcacttgaacataaagtcctcctcaagaaagcctgtggtctgcctgttggcgaccaagaaacctggccatctgggcttccttgagtgggtgaggttgctggcttgtccacctgcttaaaggtactatggggatagaacacaaataataataatgcatttttcaaacaaattaattccttgattttcaaacaaattgaagacaaaggaaactcatgattcaaatgaatacatatggctcattttattcaatatttatgcttacagaatatatgtaaataagacattcccatgattaatattagtatttaagactgataaccttttgggtgggcagttaaagcttatcttctactattttctaacttcagaaatgcttttgtttgaaagttgggtgacaaagtttcaaggagattaagtcccaatattcctattttaaatctctcagcttgtgcagcagggcaggtaaacatgaagtttttaaggatagaagggacctgagagatagcagaatatgtctgctacataacaggtactcaggttatgtttgatg

SEQ ID NO: 119383 - DNA, 897 bp, Homo Sapiens
aggagtcgaaggctcaggatgaggctttcctgactttctcccctagaggactgatgttctctactggtacagaccttgttttattcatccttatgtccctaacctggaatgggcccagggtgacagttataataagtgtttgtcaagtgagcaagtgtgtggagtgtgcattgtagagagtaaggtctctacaggatcctgctggagaggcagcccactgggctcaccacttctccagaggagggactggtcccttgccagacagccctgccagctggagcaggcttcctcaggggtgcctggagctgttgaccatggctgttgccctctggcccctcttgggaagagcaacctgtcaggtgttaaagacggtcttcatttctcttctccaagtaaacatgactagtttccatctcaccatcttctggccctcagcagactggttatccagtctggagaggcaacagtagtatccagatgtgatccgaacagacagaacgatggatgcagacggaaaattcagatcacctctgcagcctgcacagccgggcctttggactcctggatgctagagtgacctgggcgctgaggagggcccccgagccagtaccaggaaaggatagactcctgcttgcagcattcccagcagaggcatcgcctgtggacaccgcgtctgtgtctgtatatggcagagctcccagatatatgcacaagggagtgaaaaaatgtgtttgcaccccagtctctaaaaattcaacagcctggttacttctgggtggtatatcgtaggtggctttaatacgtgttatttgctcatctgtatttcttactctttgcacaattaaaccatgttccttttacttatgtacatttttaataaaagaaagttgttaatga

SEQ ID NO: 119384 - DNA, 1000 bp, Homo Sapiens
tccaaaactcgccccggggtctcccaaacagacagacacagacagacagaaggagcagacaaggggactgtccaattcccaccctccgcgcccactctctcgagctctccgggtgcctcccccgccggttcccctcccccggcccgccggccactcacggattttcactcggcggtggtccaggcgcgcagcggcggcttgcagggcgtcgaggcggcggtgcagcgcggcggtgcggtggcccagcgcggccgcctggccctcgagctcgccgaagatgtccccggcgcagcgcgacagggttgttatgaggctcaaaggaacggctgctgtgaaaaaacatgctttgcaatttatgaagcactggataaacatcaggaacggtataaaagcatgctgcttactcaagaaatactagttgagtgcctgtgtgttgggcactggctagagataagggtctcctatggacagaagtgcgggcaaggagctttgttcctccccgatgtcaccctcccacagcccacttgctagcaggcaagagaggggtggaggccggcagtaaggcatgtactgaactggacctctggtggaatgggtcacccacgctgggcttgactcttaccatcagggtcctgccaacccttcagtgagactttttccgaagaatcccttttaaaatgacctcaagctgaccttcctgatgcagattccacatatggtatctgagactcacacagtgtggttggaagatagcacagtgacctcccaggcacagccctctgccagccctccactggctgccctaggatgctggccttcctccgatgggagtcgggcccagtctgctgtgagccaggagaagccagcaagctccctgcgaggcctggaggagcccttctcactcagcttggtgttcgatgccagtgcccccgcccattgtggggtgagggtgggactctcagcacagccctgtccaaataaatcctctaaagccctcttc

SEQ ID NO: 119385 - DNA, 1000 bp, Homo Sapiens
ctgctgcagagctttccgtgcaaagcgcggctcccctctgagactcggctcctctgctgacatggaccggttcatctacccacgcggacgcccatccacaaacacttagtcactgctggaggcttttaaaacacctgtcaaatgaagagtcacttcacaaatgttcactccccgtttccatgtctccccacgtcagggtgaacactttttatgcgctgtgacaaaaagagaaagactagtgtgtgttttgggggctggaggggatcattatttttttgaatttttatttattgagacagagtctgtgttgcccaggctggagtccagtggtgcgatcttggctcactgcaacctccgccttctgggttcaaacgattctcctgtctcagcctcccaagtagctgggactacaggcgcctgccaccaagcctggctaatttttgtattttttagtagagacggggttttaccgtgctggccaggctggtcttgaactcctgacctcgtgatccatccgcctcagcctccccaagtgctgggattacaggcgtgagccaccgtgcccagccaggacattttgaatgttttaaaccaatttgcctgacaggtcaaaaggtaattttttgagattcgagactgacagatgcaacagagattttaaattttgcataggcttgttaagaacccagactgggtgcagcgactcatgcctgtaatcccagcacttcaggaaggctgaggtgggaggatcacttgaggccaagagttcaacaccagcctgggcaacacagtgagactccatctctatacaaaatttaaaaattagccaggtgcgggtggtggccacatgcctgtggtcccagctacttggaaggccaaggtgggaggactgcttgagcccaggagttttgaggctgcgatgagctatgatcacaccactgcactccagcctgggccacagagcaagaccctatatttaaaaataaaaagtgttttgaat

SEQ ID NO: 119386 - DNA, 432 bp, Homo Sapiens
atgacaaccaggattaactttaaagctgttacacatattgtaaacctcagtgcttctgcaaagccacttaatctggaccactccagccggttaacctttaaaatccatgattttcaaaatgccaccagtattgctaaacgtaaaaagtgctttttaaatgaaggcaccaacaagaactactttcagatggtacagaatttcttatttcttgaagactctgtggttgaccacttcttcattagttacctgcagcaagacaccttccttttactaccaacaccactgaaggaaccaagaaaagctttattaatgatcacttggcttgcctcagctgttgaaatgaagcactttacagtctttgtggcagcagaatatacttgtccatggttcatatcaatgctaaaattccggcagggaaaaaaatgatatgtt

SEQ ID NO: 119387 - DNA, 757 bp, Homo Sapiens
agtcttgctctgtcgcccaggctggagtgcaatggcacgatcttcgcctcccgggttcaagctattctcctgcctcagcctcctgagtagctgggattacaggaaaaagcttccactgcacaactggaagaaaccactgccttgggaattttctgtcctgcaaccctcagctacccccttctggaatgctgccaccatgactgctagagacacttcgtggaagcccacaggacgtgtcaccttttctcatgggctcattttgtgggccaggcacaagcttctgttcattccacctatggggtttgtaggtcaactctctgcagcacctgtttaatctctagaagaaatgctgataaaacttggaaatgtcgtagcttaggtatcttcattttgattgaaacaaattttgcaaaaattatgaccgtgagagaaatatgacatagaaaaattacgacagggaaagaaatctcacctaactcattccatcttgcttctaacctccaagctgcttttgttcaatcctggacatagaccaacctaaccatgggagaaatttaatttatagtttaactctgaatcaaggatgagtgtccctttctaaaacagaccccctccttgtcctgatactgaaaccacctttgtaagacccaggaaagaccacgaaattgagattataggaagggtctgaattctgctaagatgtaggcatagttaaataataacctgccattgttccatagcttgctttcttataatc

SEQ ID NO: 119388 - DNA, 1000 bp, Homo Sapiens
tcttttcacacatctgcactagtgaatatctgaattttaaaagccactccagacctacataggtgatgaatgaagaagagtgcccttccatgaacacatgtgctggagacgtgttgaatttcttccccctcagcataatcagaggaggtgaccccaagcaccttagagaccatgggaagttcctaatgccggcctgatgcagattctcttctccacggagcaccatggccgctgggctctgccttccacacagaacgatgtgtacttgaaaacagtacactcttgcacagctgtccctggagcttccccgtggagctgttaaacttgccctccgctggctgttttccacaaagtaatatggttacatagattcacggctcatggcaatgtttcattaagacagttcttgatggccgctccacacctttctcaccacatctcacaggctgccctgctgagccaggtctccctggaacccggggctcctgcgcaggcccccattttgctccagaacacccaggaaggcggggcttgggctggaatggggacaccgattaccctctgttcaggcctttggtgccagctgaggtcgatactggtgccaggatcgagactgtgcgcatcccatcgagagcgggcagatgtgggggcgcactggaccgggcctcccaggctgacacccattcacagcagcctgagcctaatccgccactgctcgccttcctccgacgtctccacctaaaccatccttctgcacattgtgacccatcactccgccctttgtccacacatctccttccccacacccacaacgcggtggtccctgccccacaatgcaacggaaaccttgcggagtgctaggcggaagctgcgaggcctgtgtagacactgcctccgcagggctggcgcactcctccgagggccgactgaggggtgggttttttaagttgcaaaataaaagttatcgcctgtgggccctgaaggcctcttttccactgga

SEQ ID NO: 119389 - DNA, 989 bp, Homo Sapiens
atggcccacgccagccgctgcttctccgaaccagagctgacttcttttctagagactggtgccaacgcggtagcgccgcgaaagagcttcctctctcgcagccccggccctccccccggcgcgcgcagcgaccagctccggccgcccgagctcctccctccccaaacttcgcaggttacgtcagcggcggacggcaaggcggggagaggggcagcccgctcgcggccctcccgcctggctctcgcctcggcctgcggccgggatcctccgcccgggtcgcgcagcggaggccgagggctgggacgggcggctgggaagtgggaaagggagccagaggcgctccttttgtcttctcttcccatcccccaggtttgggaaagttttccttttgggaaagcccctctcttcagcctgctggcgggtgtcggattggttagcgaccaccggcccccgcctcccccaacaggattctcctttgggccacaggtcttccggaagttgccaaaccccggtagcggcagcgtccggctgggggctttattagggggcaccggggtctgctttccgactcccttccgactccgcgcctgcgcaggaagcgatttggggagtgttgtgaattccgagggctccacacttaagaggttgtacactcacctgtctacctggactccaatttccatatttccagccacttgaggactgagaggtggatgataaaccctgtcatagtggagcaagttcaggtgtttaaccgctgttatgggggatctgccttttctccctcttctttcttacttccataagtatgtatgtgcagagattgaaaaataaccttgagagagtccatccatctaactccagttcattggaaatttctgcttctttgagactgaggttatattccacttcttctgactacaccaccaccatcaatctccttctctgaactcttggatcattacttcaacctgaaacaactcatcagg

SEQ ID NO: 119390 - DNA, 1000 bp, Homo Sapiens
aagccgactacctcggcaaaggcttagggacaagagaccagcagcctgaactggctggggcatccggaaggcttagatcttgtggccaagagttcagaccgtggcgaagtggagagtgacatgcagttggatggcggtgactgcgtggtatggaagaaaattcagctgaaatttgctagaaaatgagttgttttggaaagagactgtagagaaaggcaaatggaagaagaaagcttctgtgcccccacagataccgactgaaaagtgttagcatgagcaaaagttcctatctaatattatatgctttcctttgctcccaggtcctgcaaccctggttccagtctggcaagcattgtagacctggctgctgaagactgacggggcccagggtccgctgcccccaccgccatcaccacctcggaacccagggtaacgctgtcagtctttgagcctacgaggaaaccattcggaagctccagaacccaggccctaatcacaacgcccctatccagcaggaagcagccagatgatcaacgacgccctttttcctttttatactaaagtaagaaataagaatgttagcccaaactgcactattttgcagacccctaccattttacaaactggtcagagtggaaaattccaccagggcctgagctgtgagaaacatcctgtcaggcaggtcccaggcctaacccctggctgcactaaattccttcattatcagcagccaaacacaccgcccccaccccattttcacaacaatcccagacctctcctgcccgggactgtaactggtccagcctgtaagcgggaagggggctctggcactagctggtaccccctctccgcaggtctttctcccaataaatctgtgttgccattgatgaggaattcctggaagacagaaagcagatggagccactgtgtaggaggctggcgggcagcagaccgccagaaaggaggaggaggggagtcggcctgtctggctggcgtttga

SEQ ID NO: 119391 - DNA, 1000 bp, Homo Sapiens
atgaaacaactcacctctcacccttggaaataacctgaatttgtacataattctcttcttttaatgagttgtccacacgcatattatgactgcatattaaaatgtaattattttatgtaatgcttatatgaactatttcttcaatgaaaagtaaaattacttatttactattgtttgcctttcacatttgttattttctattaaaaattaaagtcagttttggttacttcccccctttactacaattaaaaaaagatttcaaatataatgatgttatattaactgatagccttatatgacaagtataaaaagaagggatgaaacttaaaaacagtaaaaacaagaaggaatattgcctttacatcaatttgaaaacaatgtttcctttgatgtttgctaaaattatgcatagatacatgtttgtagtcataaaaatgtattacattggttgtcttcctaaggccacagttacctttgcaatccatataacctaagaagctgcattccagaaaaagacatcactgaggccaggcgcggtggctcacccctgtaatcccagcactttgtggggctgaggtgggcggatcatgaggtccagagatagagaccatcctggccaacatggtgaagtcctgtctctactaaaaatataaaaatttagctggacatggtggtgtgcgcctgtagtcccagctactctggaggctgaggcaggagaatcgcttgaacctgggaggcagaagttggagtgagtggagattgcaccactgcactccagcctgggcgacagagcgagactccgtctcaaagaaaaaagacatcactgaaagaaaaatgaacagaatttgtcagaattagttttttcaacaggttactttgtcatacatttctctaatatgcttggtcaatttgttttggcagactgggcagcatgcagcaattctgcattatttaaagttatcagaacaatgttaattctctaaataaaattacccaaggt

SEQ ID NO: 119392 - DNA, 1000 bp, Homo Sapiens
ctgggccggaacctggaggtcctgtttcttacagacttggttgccacagtccaggagcatttgaaggcacaatgcaggggctcagattggcacagaattcttttgtgaaatatcagtgccacagattgtaacagatagcttcatgcacactctgcattttattggtttgtttggaaatgttggccattgaattattcatagatttatttcaaatagtttggaaattgttgtacttttgaaaacatgctgttcctgtagttttttgatgagagttatagttgttatatatacataaagataattttcttttcatttttaagagacaattctttttatcctaaatattttattatctttaaatttgtttctgtattattatatgtgctcctgaagcgagcactctttttatctatgatacttccataaaaatctcttctatttatagctattggtagttccccaccagaaaaaaacataattctggtgatagaaatttttatttgctgtttaggtttgtgactgaattgtgagaattcagttgtgatttttaacatgtctcagatatatatactaacacgtctaatacatactatctaatttattggtttattttgaaaaacatgggtatagaattatttaagtattattttatttattgaaatatttattaaatatatttatttatttaaatattattattactttaaatattattttaaatattttggaaatactggtatttttgaatagatgctgtttctataaagctgtgtgatgggtgttataactattatatacacatacatataattttgttttcctttttaagagaggattcttttcatcctaaatcttttacctttcaatctttgtatctattattacacgtgctgctgaagggagcatggtttttatctgtgatacttagttaacatatatattacatttatagctatgtagtagttcccctaaattcttgtaaaaataaatttttatttga

SEQ ID NO: 119393 - DNA, 1000 bp, Homo Sapiens
ggagggaggacggatagcaccctgggaggccagggcctggcgtcccaccctgtcaccctcgtgcccagtgtccaggggctccgagttagccatggcctggcgcgtagccttaggagagaccctccagccattcggtggagcgtggagacccctcgtggccacacggaggactgcagctctcagcgtgtgacctctcgccagcatcggggctgctctgcatgtagccctgggagagctctgcaaacattgcttgagctcctttttattttatttttatttcttgagacaggatctcactctcacccaggctggagtgcagtggcacaatctcagctcaccgcaacctccgcctccagagttcaagcgattctcctgcctcagcctcctgagtagctgggattacagatgtgcgccgccacgcccggctaacttttgtatttttagtagagacgggtttttgccatgttggccaggctggtctcaaactcctggcctcaagtgatccactcgcctcggcctcccaaagtgctgggattacaggcgtgagccaccgcacccggctgcttgagctcctttaaaggtgccacgatttatgcttggtgttatggacaaagaaaggaagtgattcccatcccagagaatctaccaccgggagagttacagaggctgggccgccctatatctacctcccacccctgtatacatccatatagaagagaactcagggttcaatcaggggacctagagcaagacacccattttcccatgccttgctccccatattggccttatgggcgtggtaccctgtaaagtacctggaatagtccagagctcaaaaattcttatgattattaaaggtataaaaggacaggtaaattgaggccaagtgcagtggcttatacctgcaatcccagcactttgggaggccaaggtaggaagatggattgatcccaggagttcaagaccagcctgggcaacatagtgagacccccatctctat

SEQ ID NO: 119394 - DNA, 1000 bp, Homo Sapiens
aaaattttggttcataaaaagtatcttatataaaacctatagtaaatattttaaaaatgtgcttttccatttttaataacatgtattttggtaaatacttgattcagagagccaatgaattagagttggcatatgagtttcacatagattcttatactaggtaagtatttaccaaaacatgtatcagaagcagaaagttgttaaaaaggtttaccagacaacaagactggaaagtgtattaagtgtgcctggccttgacatcttgttctggataatctagtctacatcttaatttaggaaagctaatctgtaaaactgttcaaatatttgaacaatatttgataatgcttacataatctttcaagataatatcaggaaacagagttctttcatgtatgtaagtagttaataggacataacatcagatgtctagatgaattatagctatggcttaattacacaataatctgccttcttagtagaaattgcttatttccagcatttgctgtaaaaaaaaaaaagacagtcagtttacaaaaatatacaatcctatggatttaatttatttaaattttgttcattctaattttttttggtgcgtgataatagcaagttatcttagttgaaaatagagattcattcattaaagaatattaaatcttttgtgcccaagtgccttaataaataagtagaatcttaacttttctgataagcattccagtaaaagctaatgtacatagatatgccttgagccactgtttctactttcacccttctctccacacatattgccacgtctgctgtgtagttacctgcttacatgtacagccatttcaataaatgtattcttttaacattttatcttttaaatttcaaataggaatttatagttggtaaaaataaaaattttaaagtgatttaatattgtcattttcatgttctcaatattgttatagatccactgagaaaatgtcaaataaaatctaatatttcaaaggtg

SEQ ID NO: 119395 - DNA, 1000 bp, Homo Sapiens
aaaatttgccagtgatatgatggccttgtcacagagatcacaagggacacggagttgacttttgctcaaggtggaacgacagagctgtgtaggcaagatgagaaattgcgaacttgttcggccaaaggaggctaataatgaaggggccgggaaggaggccagtgctaccagggttatctcacaacctcagatgctggataagtcgacggaggcagaatcgctttgggatgacattcagaaagcctggagtgattacttgcaagagaaaagcctacctattctttccaaggtgcaggaatattcccctgacctgctcatccagtggtccagtaatgaattactggagacctgccttagacaaagaatgcactcggagccccaacacacctaaagccatgctttgaaggatctgccaagctcacttttaatcatgagaaagaaattacccacacggagtcagcagaaaatgagaaagtagagctcgtgctgtgaataattccagcaagtgccaaggggctagttgaggaatggcttcatgagaacatgctctaggggaactattaatagcccaccagtcgggtaggcagcattcaatccttctatgccttctttcgccacctgttgaggtctttcttctgaaacaaagaagaaatagacaaatcagacttgccctcttggaaatgtggtccagatttctctactcccaagctccaaaaaagatgttagtctaaaacagcaccttggatctaagcagcacctttgagaaagaaaagactgcttcaagaatgtctagttgcacctcctttccgtatgtggcctaaatgcctaggttggatcaatagtttaatttttttattgaactgtttaatattgactatggacttacattcacttttactgttttctgtatatttacttttgcttgaagtgttttaatattgactatttacctctgctcatttttattgattttctgtattttttcaatgaaaattataat

SEQ ID NO: 119396 - DNA, 1000 bp, Homo Sapiens
gcacagacttggggaggctcccctttcatcaggacccatgctacactcagaacaacccctgtaaaatgccattgcctccaaaacaaagctgttcgtggactctctgggatcccatatttccacacaggaactgggggtgtgtggttgtcccttcagaggggtgtcctgcctggttggggagctggccttggtgcaggccctccactaggttgcaggagagtctttcttctttgggtcagatcactggctcattggctgtgccgggggtgaacaggaatggagcattgagcttttggggaaaaaaaaaagagtgacagccactgggtcatcttccctttgtcttgcaacaggtcaagggctcagaggtttgcagggccctcctgggaagatggggcccccaggaaacacagggacttctggaattccaggacctaggggccaaaaaggagatcgtggggacaattcagttgctgaggctaagctggccaacttagagagaaagctatagagcctgagatcagaactggaccacacgaagaagctgtaagccttctccttggggaaaatgtctgggaagaagcttttcgtgaccaatggtgagcggatgcctttctccaaagtgaaggctctgtgtgctgggctccaggccacagtggctgcccccaagaatgccgaggagaataaggccatccaggatgtggccaaagacactgccttcctgggcatcacagatgaggcaactgaaggccagttcatgtacttgacgggcaggaggctgacctacagcaactggaagaaggatgagccaaatgaccacggctcaggggaggactgcgttattctcctgaacaacgggctctggaatggcatctcctgcacctcctccttcattgccatctgtgagtttcctgcctgaagaggcacgttcctcagccccctccttgcctccctgctgaactctctgctgctttggaagagaattcaatgttggttttcttct

SEQ ID NO: 119397 - DNA, 814 bp, Homo Sapiens
  misc_feature (680)..(749): n is a, c, g, or t
ttggttcaattgttagacattaaatttgtggtctgaaattgcatttgtggctttttatgtcttatagctcaaaaaacaataatgcttctagaactagcaaatgtcagagctgtgagttgaaccaggtggtctgcctatggaactgaggctgttaaccagtctgctctgttgcttcttgtggcccatccagagtcttttacactgattatgggcaggtacactctctgccagatggtgagagatcctttggccccaaatgagtggtgtgagttggactcttccagcagtgcgctacccatctgtggaagccatcatccagtcacagtctgaacacctcgttcagtcacccacatattcttcgctcttgaattgaacacctggtgtcaagcagagggctcactgcagagagcaaaggcaaatgaaacatccctgtcctgggagcctgctgtagtggggaagagggaggtgaatatgcagtctacatggttaactagaactaggaaaactggacaaaactgggcaaaattaggatataaaaagataggtaaatctgaaggtagttatgtaaatcatgatgaaaccttaagacaggcttgttttaggtgagattctaagaatgaagacaatggaaagagaaaatgtccccttttatgaccatatttcagtttaagtaatagtannnnnnnnnnnnnnnnnnnnnnnnnnnnnnnnnnnnnnnnnnnnnnnnnnnnnnnnnnnnnnnnnnnnnncggatagaaaatcagtatttgcaggatgcagaattctcatatgccaggcttggggctgactgtgt

SEQ ID NO: 119398 - DNA, 815 bp, Homo Sapiens
  misc_feature (162)..(213): n is a, c, g, or t
ttgggcctttaaagctcttatgcacacacagacaaaagtgtatatatacatgtcagagcatgtgtacatatgctttcgtatgtactcacacagtatgtctctagtatatattgtgggagtagatatatagatattcaaaggcaatgaaatattgctctccannnnnnnnnnnnnnnnnnnnnnnnnnnnnnnnnnnnnnnnnnnnnnnnnnnngtatgagttttaaatggcaatcttttacatttagcaaaatgctgcccctactggaatattgtcactgcagtggcagttgtatgtaatgatttaaaatacattatcaaaagttatttaaagaacatttaaagtctcatctaaagacatccacacactatttatttatcttccttttccttttattgttgtgtttttcttaactgaaagggagactgtcattttaaaaatgccatctgtcccatgagagtaagaaagagctggagattcacttgaggagctttgtgcatttttcctctctctgaagtggagatgttccacagaccagactgtttatttcacttataaagcaatcctaatatttccgttagtgtatgtcagccaccatctcctagatcaacttaattcaccaatttgcctcctcctttcattaataaataatgattattgagatcattttgcctgggggaagttaactactcccatgctgcagggaaatatatcacctaattgttattttgccttgttcaaaattcaaatttgaaagaaacagctctctcatgaagctgtcttaagcacattttagttaaggccctcccaaactc

SEQ ID NO: 119399 - DNA, 869 bp, Homo Sapiens
  misc_feature (175)..(431): n is a, c, g, or t
tctgatcttttaacattaggattaaaaatgaaagaattacataaaattgaggccttttgttcagaaaaggttgcagatgcacaagaatgaactttttacatttctctttaaatttagctctggattacttggtttcttgtggaactgggccattttgaatctcactctgtcagtnnnnnnnnnnnnnnnnnnnnnnnnnnnnnnnnnnnnnnnnnnnnnnnnnnnnnnnnnnnnnnnnnnnnnnnnnnnnnnnnnnnnnnnnnnnnnnnnnnnnnnnnnnnnnnnnnnnnnnnnnnnnnnnnnnnnnnnnnnnnnnnnnnnnnnnnnnnnnnnnnnnnnnnnnnnnnnnnnnnnnnnnnnnnnnnnnnnnnnnnnnnnnnnnnnnnnnnnnnnnnnnnnnnnnnnnnnnnnnnnnnnnnnnnnnnnnnnnncaagcacatcttaatatcactgttgtattaagttttcaagttccagttatttcataaatgatttttttgtttgaatcagtatccgtatagggctcatagattttattgatgtcgcttataactgtgtctatagttcttcttccgttatttccccatgtcgccccaccctttccttatttagtttatgaggaaattggatcattggtcctgtaggattttcctctagttggattttgctgattttcacctccctggtggtatttaacattatttgttaaattgatggttacatttagaggctccatcagattcagatgtttaagattttaaattaaaacattttttatttttggcaagtatactttatatttagtactgtgtatctccattaagaagcacctaatttttggtggtctccctgctgtgttttgagggctc

SEQ ID NO: 119400 - DNA, 654 bp, Homo Sapiens
  misc_feature (298)..(338): n is a, c, g, or t
ttggttcagtttgatagcccaaatgctgaacagcacagcgggatcctagcagtgcaagttcaaaagtaagtccaatcatttctgtgatactcgccctggtagcaaacagatcatctcagccaagctcttcatgtatctttgacctattaggtgaacaaatgaacctcacaggacacacagtattttttaaaggcagactcgctctcttttttgccagtgagcagttctagctaaccaagttacacactgtgggtattcctgcctgcctcttgaatacaaaggcctagttcaagtgttnnnnnnnnnnnnnnnnnnnnnnnnnnnnnnnnnnnnnnnnngagataaaactattaaaagtactactatatatataaaatctcaaatcaacttttcggcctcctcctcgtgtaccaggaagtatattctgacgaagggccccacttttgcaggtcttgcacgcccctcccttacccagaactgcagagcttcaggatggcgaaggtcacccaagggcatgagtagggagtggtgtctccaaccatcagttccgtggcactgttcagcctttgtgtgctgccctgccacccaccactcacagtgcctctgaagcgtgttacccctggagtgacgtgagcatttgaggcttgtctaagg

SEQ ID NO: 119401 - DNA, 713 bp, Homo Sapiens
aaataagctcatttaattaaaagtaaaggaaataggtttatttttggagggaggcagggaggctatatgtatattcaaactaatcgcatattcaacctaagttaaagcctcaataaaatatttaaatataaaacctttcctctgtaaccctttccagtgcctattttggtgttactcttacttaatagcatgaataattataaaatcaaatttaaatgtttaaaatcccaaagcacaaatcactctagtacccacatagctctgaattttaagtttgcatcacctaaacatgattgcttgggcaaatggaggcacaccagtaatcttcccatcaggttccatgcctgccctccacacctttctgtatccctcttatttcacaaaggctgaggagggcagcagtggaaattctgccaaccctatggcaacatggaaaaatgaggaaggcttccttccttctactgcttggaggtcctaattgttcagcaaatcgattctaagcccaaaacttaacaagacatatgaaatcttaaaatataaaccaagcttttcccccttttctgtctttctagtgattgaagctttcattacatcattcagtaataagcatttaaagaaagggagaaatatttcgaggttgaagactaagtaatgtggccatgagttggcacagatttctatagtattctttaatgaatggtagatgaattgta

SEQ ID NO: 119402 - DNA, 896 bp, Homo Sapiens
  misc_feature (366)..(412): n is a, c, g, or t
ttgggcctgctatgtcacttgaccatcgttccatccttctggtagttgagacccaaggcttcagagtcatccttgcctcccctctctttctctcatatgtctaatttaatcttatcaggaaatctactttaaaaatttacctagaatccaagtatctctcactaccttttcctaagcactgtgatctcttgcctgaatttctataatatcctcttaattgtccaccctgcttctcccctgttttcctctacattctcaacacagctcccagagtgatcctgctgaaagttaagttatatcatgttacatttcagcccagaaccctgcagggacttctcatttcatgcaaagtcaaaataagtggtnnnnnnnnnnnnnnnnnnnnnnnnnnnnnnnnnnnnnnnnnnnnnnntgagccaccatctgcgcccggctgaacaggacccatttaacgaagcactttgactgtccattggtggaggggttatgctttacttgggggaagcgcgttgtctgggcttcccggattcctcagaaccaccaggaggaaaggctaagtttgctggtctgcagagactgctgccacccttttctctaggggctcaggcccctaccccaaggagctgaaatggcttagacagcagacagctgtagctgtggtgctggttgcccctcctgtagggagctcagtaggcttcagcagattccagctgaaaggctattgagaatctgcagagctggggttgggacgctagggcccagtggcatgggttcgcaagttggatcttctgatccatgggttgcgcagttctgtggaaaaaccacggtttccccagctgggtggaatgctcactcactgcctcccttggctatgggggagggtgttcccctgcccc

SEQ ID NO: 119403 - DNA, 844 bp, Homo Sapiens
  misc_feature (586)..(609): n is a, c, g, or t
ttggtacgttttgattattagcagttaaatacattttgtatacatgaagcttagattaattcccatcatcatcatctcctgtttttatatgtgtccctatgtgtttcatgcattcctctttgatcagattggaatttgagttaaaatttagctttgtacattacgtgtgagagttacagactagcaagtctaattactttgccttaccttgagtgtatgccacagggtcagataacacattaaacatttagttacactggattactcttccaaagctgacctcctgctaatgttcagaggtaactgcaatccggaaagaaataatatcactgcagaaagaatgtgactctaaaaataaaccaggacctccctgtgatttgccttgcctgcagatgaccagttgactcttgtgctgtcagccctggggttgctaaggaagctgcttcagggagttgggggttagttgcccgctctcaacaggaatgcctcctctactttgtcagagatgctgaacaaatatcaaactctgtggcagtcatgctggcctcctaagaataacctgtgagtcagagttgatgcacattannnnnnnnnnnnnnnnnnnnnnnnaaggaactgctccaagggttcattatagaacaggagtgtgtacggaggacttaggtccccacatagagtggccgttctgtggcggctccaaccaattccatccctcctttcctgcggacacacacctggcccctggcccctgccctgtgtgtctggaggaggggcactggggaggctgtggagcagagagaagaggccggatacattgaagatggcacctgggcaagccaggctt

SEQ ID NO: 119404 - DNA, 137 bp, Homo Sapiens
ttgggccatgtagtgtcagtttcctcctgctcagctctaaggcttcttctcctgcaccctttgtccctgcagccccaagacctctctaaagcccttcctctctgaccaccagggaaagctgacaatcttctcatgtt

SEQ ID NO: 119405 - DNA, 682 bp, Homo Sapiens
ttgggtggtgaagggggacaatgagggagaggtttgaggacagggaggttctgttggctggtcggggcatgtgtggtatgcctacagggatccaacgagacccaagctgtgggctgctagatggacaggaccccattcaacaccccctccccaccactgtgtatatccggaaatgtgagactgtgatgggccacctgaggcagagccagccctggagcccaggctcaattctcagttcttggaacctctggagagagggagatctagtctgtctgggcttctggctcattctccaaatcaactcaacaaactcagcagctgccaggagccaggccctggtgaggtgtcagggctgctggctggaatggagcagggtcagtgctctggggtctgctcaggagacagtaagggggctgtagacaagcaggaacatttttgtgagtcccctttcttattggggctgctctctcaggccacccactccggactccaggatccaaatgctaactgggcctcacccagatcccttctgtaataaggcatggaagggtgtgttaactgggatattatgatagccgcaaaaagttaacagaatgacagaagctacatctcgagtaacaaccacatatgctttactctacagttaaagtctagaggaaatttctgtttaagagttggccat

SEQ ID NO: 119406 - DNA, 947 bp, Homo Sapiens
  misc_feature (109)..(169): n is a, c, g, or t
  misc_feature (297)..(343): n is a, c, g, or t
ttgggactgtttgttgctgctcaacctctctccaagttgctgtttccttcaaacatagaaatgactaatgggtagaaatatgatttggagtcacactggagtttaaatnnnnnnnnnnnnnnnnnnnnnnnnnnnnnnnnnnnnnnnnnnnnnnnnnnnnnnnnnnnnnttctagctggatggccttggataaatcatctaacatttctagatcttggtttttttatcagtagtgtggagacaataaaaaattggtgacatgtaagattgtgagaattagcatatatatatatgctnnnnnnnnnnnnnnnnnnnnnnnnnnnnnnnnnnnnnnnnnnnnnnntatatatgcaaactttctagccttaaaaagtagatggtcatttaatatgctaatgtaatgtcatggtgtgattattaattgtgtctacaaccactcttacagttgacatagtatgaatgatattacatagtcattctagtcatgaaagatagctatcacctttgccagcgatagaaatagaatctttacttgtataggcaccatgagatttcagaggctcttggagcctggagagagcatttctgctgggactccttcaatattgataaaacagaattataagggtgaggcaccctgacaagattttccttgaaacttgacattaaactgattctactcagtttacattgtgccttttttaatgttaacaggacacactgtcaatgtgttaaaagatatttcttagctgtatactgtttttcctttgtacagtacaattgtacattgatatgcaaaattgtttgtctagaatcactagcaaaaacacatttatttcttatcttgatggattcaatgccaatttcatgcatgtggatctgtaaagcaatcatcaggcattacaaggaatttgcaaggaacatttagtcaaatctctaaagcgaaa

SEQ ID NO: 119407 - DNA, 609 bp, Homo Sapiens
  misc_feature (270)..(283): n is a, c, g, or t
ttggcctcaatggatcattttcatctccttcagcacctctaccatgtaggtccttatatctgtccaggatcatttcttcctaaaggttctcatgctttcagtctgtcattcactgttgcagaattatttttaaacttcagcccttcctctgttcctttcttctgtacgattgtagtgactgcactgccgactcaggagtcccagattcttcagcccttatgaaatgttctgtgtgatgtggccttaacctgtctttctagccttatgtgnnnnnnnnnnnnnnaatgtggaaccttgtacttaagtcagattgaactttggacttactacttgaaagtggcttgtgttttttcgccttctcttatttcgttattctatcctccacttggaattatactctttccccttccccagctgtggaattttgtcagtcaggttttctcctcagctgcaactcttgttcttcctctctccttactggaaactgcatgtaacttagtgcctccttctgtcaaagttgtagtagtgatctgcactggttacacatggaaatttactgaggacaagggctttatcttcatatctcttacacagtctaaggcattgtga

SEQ ID NO: 119408 - DNA, 134 bp, Homo Sapiens
tatgtatgtgttaaggatttacaaaattaaccagctttcccgtgcagtgttcaagtcttttaataatttattatagggaagaagaagtggtgggtttgtaattctgtacttgacaatggatactgggttttggg

SEQ ID NO: 119409 - DNA, 678 bp, Homo Sapiens
  misc_feature (80)..(174): n is a, c, g, or t
  misc_feature (236)..(518): n is a, c, g, or t
  misc_feature (521)..(541): n is a, c, g, or t
taacaccattgcattgtggggttagggcctcaaagtatgaatttggcagtgggggaggtgcacaaaaaatcccacagaannnnnnnnnnnnnnnnnnnnnnnnnnnnnnnnnnnnnnnnnnnnnnnnnnnnnnnnnnnnnnnnnnnnnnnnnnnnnnnnnnnnnnnnnnnnnnnaatgtgatgttggcctcctagggtttttgggagacatggctaatgtatataatatccagccnnnnnnnnnnnnnnnnnnnnnnnnnnnnnnnnnnnnnnnnnnnnnnnnnnnnnnnnnnnnnnnnnnnnnnnnnnnnnnnnnnnnnnnnnnnnnnnnnnnnnnnnnnnnnnnnnnnnnnnnnnnnnnnnnnnnnnnnnnnnnnnnnnnnnnnnnnnnnnnnnnnnnnnnnnnnnnnnnnnnnnnnnnnnnnnnnnnnnnnnnnnnnnnnnnnnnnnnnnnnnnnnnnnnnnnnnnnnnnnnnnnnnnnnnnnnnnnnnnnnnnnnnnnnnnnnnnnnnnnnnnnggnnnnnnnnnnnnnnnnnnnnnatccagcctaatgccagaggaatcatatacttcctcaatagatgtttctcttcatctatccatctggggagacatgttttctgccacctttccccctcttcttccatagtaagaaaatgcccaatattattattatg

SEQ ID NO: 119410 - DNA, 830 bp, Homo Sapiens
  misc_feature (44)..(52): n is a, c, g, or t
ttgggaaggttaccccaaactcacatgttttagcatatttgagnnnnnnnnnctaccttcaatatcagccttttaaatttcatgaagattttggtgaggaataatagtatatagtttaagtattgacaaaactttgaaagtttctttctttaaaatgggaaatactcaatatctaaatccaggtcaggcatgggatatcagtatttaacattggatgttttatgttttatatttataatgttcaaaatgcaagcataacatttaatatttgtccacatggttttacaaaagtaaatcttaaattactaagcttttcccatatgttctcgtactttctcaaatccctataaagaattacttgttatctattaaaaatctcctttacccaaatctgtattatggtttcgccagacaaatattatgtgatgtagcccagaaaatccacaccttttgtcctttttatgttttaatttgaataatcatgtgcttagtcccttggtttactgccacatcagtttaacacgatatcagcacattcccttgtcatcatcaaggtgttggctcagatttattcttaattggatgtttaaagcatgtactaccttgttacagttggtttagtgtagtggattattgacatgacatcatgagaagatgtgtaattttataccacatttataaaacatgattttgttttctacccttcaacgtaaacattaaaaaataaggtggtacttgtgtacttgtacatcaaaacaaaattataggttgggaaacaataaatttatatatgaaaaatgtccaaatcattttaaaagtattattttcaa

SEQ ID NO: 119411 - DNA, 903 bp, Homo Sapiens
ttggcgcaaggtaaggctgatgcagaggtgcccacgggaatgtcccccttctcggacttggcccgcgcgccctgggctgtgccgtcgctgcggcctccccacctctgctgtgcatgcacagagccgcggttcacagtgtccttgagcccccgcgaggtgccggctgacagccagctcccgggcagcacccgcagcctcctcagtagcggggtggccacggcttaggtgcccgtccggggcctgggactcattgtcaccgggaagagctgcagtgagcgtctgcacctcgcgaccgtgtgccacggcaggtctgagcacgaaaccctgagagggctggcattgccaagctgagctcagaatcggggtgctgcccctggggggcttgaggagccggcaggctttggatccttgccacctgccgttccctctgcagtgccgtgggccctctgtagttaggcccacgttgtgggccgtccttggagcttccagcagccacggaacccctgggcttggctgcagcccgacccgagttgtgggtcagggttccagatgtacgtcgtccgggtcccgagactgtggcttccctgcacctcgtctaaaacctttttctctggagcctcccttgttggaaactcggaggtgctgtggggactgtccctgccctctcgaggcttagaagtctcaggtttctctggggtcctcacgtggagccgggaggtcacccgtgccccagtcagcagacacagtgcccgccacctggcagggcacagaggagagtggctttaaagcctgttctacaaggggtggggagtgcttctctgctcagggttcagagggctctgccctcagacgaacaggctctaagcacagagctctggggttggtcccagcccttgacgtcca

SEQ ID NO: 119412 - DNA, 865 bp, Homo Sapiens
tacaaaaaagttgggtgaaattctccatcttctcatgtgttttgttcttttccttttttcttgtggtattaatcatagccatttttaaagttcttatctgataagttcaatatctagatcatctgtgaatcttgatttttagtcatgtgatttttagtcatgtgatcttctcttggcacacttggtaattttggactgaatagacattaaaaaaattgtggaggttttggatagtgttttcttccttaagtgaaggtccctcccctctgctcccacttttggtaaggcagatggtatggcaatatttaatccagtcaacgactgagctggctaaatctagggttcagctttagttagggtgtggctcattactgccttaatgctattgtcctccagacattccaaagagcctggagtgatgactaggagcccttcccttggtagatccttaattcttttctttcctttatacctcaatactacctaacattctgttggcttctctgagtctttttgcttatcttaacctctctctttgtatagcttaagaattcagcaaatgtgttgagaaaataataacagtgctatgtattcttcccatctttcctcttcaggattctaacctcttatgcctctaatttaaggtaccgggattctctaaaactgtcaaaagctgattttcctgccttttggtcttgactttctgcttgttccctttcccgggaacttcagcctcttgaatggagatttggtacttaccttgagggggaaaaagtgactgaagcatattggcagacccattcttactattcccctcttctccagtgtttctgttcccttagattctggttgccggagcagttct

SEQ ID NO: 119413 - DNA, 762 bp, Homo Sapiens
  misc_feature (70)..(78): n is a, c, g, or t
  misc_feature (362)..(653): n is a, c, g, or t
ttggggagtcggtccaccaagggaggtccagactccccaggaatgttgcctggggaggggtgtcgcggtnnnnnnnnntgacccaggcccaccctctgcagggcacttaaaatgctccacatccccagtggatgcctcctgtcacgcatcacaccgtggtgtatttgagatcccatctgccacttgggctggagggaaatgaatgtttttgggtttcttgtcattgcttcctgcggattccattttactcctgttcgtttatggcctcaaacatgaatttgaagaattttgccctccctggcagtattgggaagaagattcttttgttcaagtccgtttggacaattagatgggagtattannnnnnnnnnnnnnnnnnnnnnnnnnnnnnnnnnnnnnnnnnnnnnnnnnnnnnnnnnnnnnnnnnnnnnnnnnnnnnnnnnnnnnnnnnnnnnnnnnnnnnnnnnnnnnnnnnnnnnnnnnnnnnnnnnnnnnnnnnnnnnnnnnnnnnnnnnnnnnnnnnnnnnnnnnnnnnnnnnnnnnnnnnnnnnnnnnnnnnnnnnnnnnnnnnnnnnnnnnnnnnnnnnnnnnnnnnnnnnnnnnnnnnnnnnnnnnnnnnnnnnnnnnnnnnnnnnnnnnnnnnnnnnnnnnnngaggtcaactctgcccccaggaaggtatgggaccttgcaatcttatctaggttgcgtctttttcattgaaatcacgaaatcattaacgtaagtagggaaggtcaagata

SEQ ID NO: 119414 - DNA, 972 bp, Homo Sapiens
ttgggttcttaatgttagtgtgctcggtttctaacataaactctaaataataaatttagtgcatgtagtctaagtatttttcagtttttttagaatctggccacaggaataagaatcaggttctcacagaatagaacaaggcatccctaataagtaatcccaaaggcatttctgtttaattgtgaacagacagctatctctatgactcctagcccctgaacctttccactgtgggcttccatttgtatcagaagctgaagcattggtacataggaggaagaaagacccggatcagggagacctgtgctattgacctctctgccccaggtgtctggcttctggtcttgtgccacatggctggttcctggatcagaggagctagatgtgggcctggaaaggctgattttagtgcatgaacatgcacttggagcatgtttatgggtcaaagaaaatcgagaggagaagttgaagttataggagagaaaagaaatgattaatggggcaagatgaaggaaaccggaggggtcaggatgggatcaagagcccaagtagaagaatgtatcttgaaaaggagatatttgaaacagcagggaagaagaaaaaggatagtgagatataaaaaggctactgggctttttggtctttgaaggacattttactgatgccctctattttctcagggagttaggaggcactattagtttaaatgtggaagagtgggggtttaaatggcacgagtggggaatagtcatataccctttgaacataaaagaagctgccccaaatcaaaagttttaacaaataatgttgagtgttcagctgggattgggaaccatgagtttgtaagagaccactcttcttagttagtgatttattatacagtgttcatttagcctgctataaccatagagagtctgattatagaattattctggggaatggggtttataaatggtttgtagctaacaaaaa

SEQ ID NO: 119415 - DNA, 908 bp, Homo Sapiens
  misc_feature (758)..(766): n is a, c, g, or t
ttggaaacccaccaaaaccaagatggcaatgagagtgacctccggtcctcctcatggctgattatatgctaattataatgcattagcatgctaaaacgcactcccatcagtgccatgacagtttacaggtgccacggcaatgtccggaagttaccctatatggtctaaaaaggggaggaaccctccattccaggaattgcccacccctttcctggaagacttatgaataatccaccccttatttagcatatcatcaggaaataagcataaaaatgggcaagcagcagcccttggggcctctgcctatggagtttccattctttattactttactttcttaataaacttgctttcgctttactctatgggcttgccctgaattctttcttgtgtgagatacaagaaccctctcttggtgtctggatcaggacccctttccagtaacaatgggagcaagaaagaaagaggactggctagtaaagcagactttgttgtgtaggtgaagcctaataggtcaccattctcagagagaagagatggtaaatatttcttttcagacttaaatgtaaaggtgtcagagtctcaagctctcctagatcctggaaaggcatggaaaaggcctgcatacattcatggtgattctctgtagatgcaaatatccccccacaatagacagccttgcaagggtacatctgtttgctgaacctgtgacagccatttcaaaatatgtcaaagatatatctatcgaggtaaaggannnnnnnnnccttcacccactacatagacagttttatttatttatttattttaagacaagtcttactttgtcacccgggctgaagtgcaatggcaagatcatggctcactgcaacctcacctccctgggctacagtttttgttttggtttt

SEQ ID NO: 119416 - DNA, 300 bp, Homo Sapiens
ttggtgtcaatgtctctggttgaagtgttccagtttgttgacttgtgagttaaactggtgctgtcttagagagctacaaggcctcagagaaatatcagtggggggagccacataccaccattttgtgaggaaaggctagttaaaatggacaactaagatggccttgaagtagaaaacaaacttgcaaagggcaacatgcagctggtggactcaaggtataaaagaggcaaacgttattttctacttaatttgctttgtgtggtagtaggctgatggccctcaaaggtgtacctgtcttag

SEQ ID NO: 119417 - DNA, 868 bp, Homo Sapiens
  misc_feature (539)..(552): n is a, c, g, or t
ttggcgttgttcagtggtcggctgtgtggatcccaggagagacatatgccacagactgtgagagcaaagcccgccgctgtgatctggacttgatgcactgtgactgagaatgatttccaaatgtgaatatgtgtagggacgtggtctatcaggcctggaacaagatgggggcagtgaaggtatggtttagtgtttgctttcatagtatgccatgtacaatgttttatatttcatagtttcttttaagtaactaccatgagtctctctaagcctcatggacaaagatgtagaccaaatgcaagagctgagcttgctttgggttcaaccatgatcaaagaaaaactgaggtcacctgcaggcttacgtgggaagctaagaaaatatcacagaaaaatggaaagaaatatggatgtgcagaggtaataaaaagagctgctgctggacatttatcaaagataggcaccttacagtatcttgttgcaagtccaaatcaggggagactttgttaatatgtatcttttgctcaaatttagtagggnnnnnnnnnnnnnnggattaagggcttttcaaatttggaatttgtagaagccaattaaaagaatacccttcctaaaaaccaaattgacacagctggcccccctgctagccaacccgcagttcccagttcccacctgctgagagttcagaactcagaccgtagtgtgggcttatgagactgtgcttcatgaagaaaagcagaattcccaattcaaactgttggagtgagccaagtggacagaccctccatgagtgcactttcttccagaaatccccagatttaccccatagaggtctgggattactggatataatatgaaaaacatttttt

SEQ ID NO: 119418 - DNA, 405 bp, Homo Sapiens
gactatgctactaattgttataaggtaaaattccatcattttccctgttattttgcccaagaatataaagttcacttctgacccttaatatcttaagtggaaattttaagggccatacaatgtaaatactttgaaaaggaaaaaacaggtccctccacattgtttcaaatatgtgttattatttgaacttttagcatgcatttatggggagtgtgaataacacaaatatggacaagttcataaaatacacctttgcacaaataattataatgcaagcaattacattatcaatagaacattgaacaatagaacattgtccacattcactataacccccacccgaaacacgtgaccctctaagttcacaatcccacccgtttctctaggagctaactactatcttga

SEQ ID NO: 119419 - DNA, 888 bp, Homo Sapiens
  misc_feature (47)..(78): n is a, c, g, or t
  misc_feature (758)..(785): n is a, c, g, or t
acaaaaaagttggctgcctacctaggttaggaaaggaaatgagttcnnnnnnnnnnnnnnnnnnnnnnnnnnnnnnnnaaataagggagggcatgagtggaaaagagaacaggagaagggagtcttctagccttgactttgcgaggaggccaccctgtgcttcctctgtttttataagctcaaggagacagcacagatcttctcggaaaaataaaaacaagcagttctgttctctgtctgcctggagggctctcaatttcccaagaagctgggaaggggccagagacctgggagtctgtggaaagctacttactcctcctttaccatccccacgctccatcactccaccaaccttcagcttcagcaggaggagtaacgggctggcacaccagaagaatcaacaacttgctaaactggactttgggtgatgtctccccccgcccactgcgtccccctcctgatctgctcaggcaagatagcagctcttccctccctcttcccgccctcctcactagtcttcccagtaacaattactctcacctctcctgtcctccctccccagtcctcctaactggggcaaaacggtaggtaccacccagacgagaccagaccgaagctgcccacccccaccctgccacagcttcgggacgactggatcgccgcgcctgggccggagcgagccatctgcgggcactatgcaaagcgggagacggcgcgagcggcgcccggctcacactagctcttccaggacgcaatcnnnnnnnnnnnnnnnnnnnnnnnnnnnncatttcccagatacagctgatcgagttcgccggagtggccggagcgagtgagcgctcctccgacttggggtggaggaagcacggaaaagtatacgggaagaaa

SEQ ID NO: 119420 - DNA, 181 bp, Homo Sapiens
aaaaaagttgggtcgtttgctttggagaaaagctccagctgtaagatgtcctgattacacgggacatcatgtcatatgtcaagtccgtgttgggactccatcctgatactttgattaatggtggtggaaagaaagggtatattgtttttctatttcaagacaaagaacttaactcctggcc

SEQ ID NO: 119421 - DNA, 893 bp, Homo Sapiens
  misc_feature (749)..(771): n is a, c, g, or t
ttggatgtagatgagtgcattaaggtttgtaagatctttatcattttatgtcattcattgaaaattgaaatgttcattctttttaatgttttcctatttccttttgcctagcatctgactttggtgttttaagttctgtagttccatgacatcattgtttgctgttgtgttacagagagagaaggaacctcacctgtggctcagctcaccccacatccgtttctcattacgtgtaaataaactgtcagagctgatgttacagcttttacagtttaaagcattcccctcgtctctagttccttttttcttgtttacatgttttgggcactttccctcattcaccaccttccagggtttcatagaaaataacttgttacaaaatcagttcaattctaatgtggacatagtggcatgttcataattagacccatataggggacactgagctttaaatcgttgattctaaactctatacattaaaaaaattcagcccaggcccctcaaagcctgagaaaatttaatttgctcttaatttaatgttccaaaactcactcttggaaaaatgcctgttggaaaactacaggtgggtcacatgtgggggctgtctccgtgacactcaggattccagtcagaacctaatcctcatatctattgcctacaaaaatagaccaagaatgttgctgctcttttataatcctttaaatatttaacattcaagttttctttgtcttaaattcagcctcttcctnnnnnnnnnnnnnnnnnnnnnnncctcacagaattgtgttgagatccacccgctcacacgccgtacaccacccagtggcttcatttctgggcttagccgcagaggcaagaaagggaccccacttgctcccatgcccacctccaag

SEQ ID NO: 119422 - DNA, 803 bp, Homo Sapiens
cccaaaatatatttaacttcctgtcttcctggacgaaaaagttattctcttacctttccatgaatatacacttggtttgagatttcctcgtcttacacttcttatttacaggacttagggagcctgaacattctgtactgaggaaacagaacagagggctggatattgcagaagtccatcttgccttcataatggtgctcttatggtataagtgatgaattcatctgggggtggagtgagggagtgggcaggggagattatcatggatttactaccacttatagtgccaatatgtttaaaaaaaggaaagactttggggcctcagccaatttttaactttggatgaagtaacttgcttttgcgagcgccattagataagggaaagggacttctgaaggctaaataacccattaactgtatctccctaagaagatacagttagagtaacaacagcataggaataaccatagtcatttagaattgtgtacaggtcaaatcccgttacaacaatttcagaagagtatctaacttatttgtcttaaagcttatactgcaaagtattaatatgtaatatatcagattatagaacttttttgttcttaagtttctttggagaaaaaaacacaaggacttttgaaggggcatttctaattaaccccacagccagcttccttgttaccaagaccctggatgggaatttgctatcactggttggctgcgtggcaccaggcagctcgttgggctcacttgcctcgtgctataccactccggagtgttcatttattcatgcagcctaaaaagtg

SEQ ID NO: 119423 - DNA, 116 bp, Homo Sapiens
ttggctcactaccttgccgcattctcttggtttcaagtcagcaccagtgccctggaggttgagtctgggatggagtgcgcaccggcttctgtggttgtggcctggggagggcaggc

SEQ ID NO: 119424 - DNA, 1003 bp, Homo Sapiens
ttgggctgcttttaatggaagtcgaggcagttgggtagttggtgcagggagtgcggtggtggtttttataaatacaggtaaaataatacccaaatttcaggctgaggtgcagtttctggaagaggaggagggtgttcctctccttccctccctctttccccctcccccgtttattagagtatcctcggtggaaagtgccagaaaaatgtgctgcatctctgagtcaccttttcttcccgccgaactctagcacccaagttcgctggcggattttggactctgccaaagtgctgagttcgtcgtttactttgaaagcctgaaatataactgatgtccaactgcaggaaggcgcacggaatcgccgccaccatcccgggggcgaatcaccgccctgcagccggctcctcaggggagtgacctcttggtgtcaactaaactcctttagggaaatacccggtttttccacgcgcgcgtgcgcgcatacgcgcacacacacgatccaaactagcaccaacacagtggaaagctcccagaggagcccaactgttcagcctcacatttgcataaattattggtcccaataaaattgttgcagaaatattggggaaggagtagacgctgagcctcgagtttcaaactttcaggaaatatttaagtcctggtggaaagaaagctcagcattccttcatctgggtttctgtgggtagaaatgcatttgatcaccagttttgactatggttaatgcagcatcatttaaatcctgttctagtgaatttatgaagagtttcaggtaatcccgtggcagaaaatttagggttatggcttcatttatttaaaaaactactccccagtctcactttttatttataaccccttgtgagacacccaaaaatgattcatatttttaattaataaagaggtttgaaggtcatctactctttgcattacaactgcctttttagttatcatcgggattatcccctttaaaagaagttattttccc

SEQ ID NO: 119425 - DNA, 857 bp, Homo Sapiens
ttggcatctaagatatgctccctaccttaattccatctgcagtctctccacagcagcaccgggattcatgtttgaataacgggaaggaatgctgggggacacctctagaattctatcatgggcggttaggagtgtacctgccacggagctgtcatgaaggttaaatcacgcgagttgtataaagcacagagcagaatccctggcacactcttaagggctcttacacgcattcactgtcagggagcagacatgagactcttggcagcactgatgttgtgcagatgtgggatctgccgtggccccatgggcttcctgaacagcaggtacccacctgttgatgtggcttttccaggggccttcgtttaccttggggaagttgtatcctctctcctgggcctggtgttgcattctggagatttattttcccttttgtctttatcactcaaagctggagttcaggttcggtctgccgtgacactgtggttagactttttttggcaagatacctctcacatcagatgattgagcaagaaaggaaagatctgatgtcagcgtgtaaaggctggatatgggcaccaaggattggggagctcagttcgggagatgtgttttggtctttattaccggcagcccaggggcaggaatactgactgcagctttgggtagtttgaggacacatctgaaagaggtgagctgaagcctttcagttttcagctgtacttgcattaaagcaaggcttgtccctgctggggtacccttcattcctcgacctcactgactggtgagtttcttccatttcatgagtaatgaccatctgtgggcacagagcttcgtcatcttactgaatccccgccctt

SEQ ID NO: 119426 - DNA, 585 bp, Homo Sapiens
aaaaagttggcagttttggcggggagaggtggaaaatagatctgcaagccaaaaaagctacagtagaataatataaatattgtaatggcaataaaataccagaactattaattttacatttagtaatcattcagtatcaattaaatgggtaaaatggatatgttggcatgaatgacatataactgaaaaaacactaagaactgtatagaaactgaattagacatatgagtaatattagtaggaaggggagagaatatttgattccaggtaggctaccaagcaggatgttttttcagcacagccttggaataaaatctgtaacctttgaaaacaatcacatttttgttcttatgcaatctttgtttttaaatgtatttattgttttggctctagtccctgaatgttaaaattttagtgtcagtgttaattctcacttatcttctccagaccttactccctaattttctcattttcatttgccccaataagtgccaaccttaccttgaatagaatagtggatttatcaacttacaaggactaaaaagtcgtcatttccgaaaacatctgtccaataagtctgcctca

SEQ ID NO: 119427 - DNA, 867 bp, Homo Sapiens
ttggcgcgccgcctctccagcgtcctggtggagcatcgacgcgcagccacagcctccatcggaactcgcgggttcttcctcgccaccctcccctctgcctttcccttctgctattcctctctcctgttccgccctctccgtagggatgtagtgttaagggcccggcagcaacccagctccagttgccacctggagttggaccggtctcatcgagtgtctgagaggcccagcgtcctggcagtggcaggactggtcagtacagtgagatctcacggagccgcccttccgtgaggggcttgtggggccgacgtccgctggagggataatgcccacggtcctgggggaattgtttcccaggggatgagggagttgtgaggccgcagtgcccctggtgggctggtgggaatgggaagtaggagccccgaaaagtcgcatgggtcagagtgtcagcggccagaggtgagatcgagtcccgaggggcagaagctgaacctgccctgccggcccaggatggcatctcggaggccgagccatggtgaggcttctggcagacaggagagactgcaggcttctagaaggcaggagcctctacagcagctgccttcacatctaggtattggcacatgactgcgttttgtgaggggctcctgtatgtcaggtcctgtgtttgataggaactctagctatgtcctgatagaggtgataggaaatgttgtttgttttaaagttttctcccgttattataatattatatagtgaatttggaaaatgtgggaaaggtagaagaaagaatttcatcaacctcaagtttctatatttgctgtttctatagcaatttgatgtatttatttccagaccttgttactc

SEQ ID NO: 119428 - DNA, 761 bp, Homo Sapiens
ttggggatcagggtctcagacctcttctttgaatgtataggaatcacaggctaaggaaactcaggattgaggaatcatgatcactctcagaactgtttattctctccattctgaagctgatgaaacagaggcctggagaggatgagtaacttgtatctaggaagtgatggtgcttggatcagaggtgggaaatctttcccccacctgttaacgtcgtgttcccattctcctgcttcctgggtcaggctggaggccctgcagctgtcgggagtgccagatggcatctcagtcaccaggctggagggtgcctgaggaccctgcggtcagccccagctggcagcaccacctcccaactggcactgtggacaccagtgttcagaggggctgagtgaaggaagcacgtgtagcagaggggcaagaatgcaggtgactcatgccctttgcagtgtgacttacagctgtccatggggcatcccagcctacgtgaggcagttgccatctttgctgtcagagagtcactcttgacccaggcagtaactgacgtcaagagcagaggagacagagtttggttgtaaaaacggaccaactgtgcagaagaagcagtacccagctatgagcgaggaaacctcggctccactcacagatttgctcttgccctttacaactgtgtgaccttaagtaagatgtcacctgacctgaataagcctcactcttctagtctgttcacgggtacaataatcttttgccctcactatcttgga

SEQ ID NO: 119429 - DNA, 186 bp, Homo Sapiens
atttttttgtaaacctctgccccatgtgagccaagtggatgaagaatcgaatgcgcaggctgaatcgctaaatattatgatgacgtgaggtccgattaaactgctagcttgttgcaccgtgaaggccacatttagcataaacatggaatgccagacgctggtgatgctggtacaagttgtgggact

SEQ ID NO: 119430 - DNA, 925 bp, Homo Sapiens
ttggcaagatggcaatatggcacaagagggataggaagctctgggataaattaggctatcgcatttgctgaaaatccctgtgcagagaaaaggagagccaaagaaaccagtgtggctctgtagagagctctctgataagttcaaaatttaaaaggtggggtacaagagacggaaggaaaggtgaagtccgtgataaactgagacttggaaaaggtgcagacaataaaagatattgctggttatgttcaagcaagaggaaaaaggagaagacagggttccatctggggatgaagatgtcaggttggcagttttcagagaaagcagaatactcaactctgattttcctctttctcccccgaggaaaagcacttccagactgggaagagttcagcaaaacaggggttagaggacattaaaccccaaatagaagaaaagataagagaaaacctaaccacctagccattcaaaatgagctgcaaatcccaaggtgatgacagacctttgcagataagatccagggacctttgccaatgtggctatgaaagctgcggcgaaaaggacaggggccacagtcctggacagctgcaaataccctgacaaaaaagaagaaaagggagatcctgggcacatttccctcaaaatctattctagaatataacattaaaccatggatttgagaacaccttgcttgagaacacctagaaaaataagtggtatcttcacaaagaacaagatgcggcgaaaatgataaaaatatcaacaataatttgttacttatttactcagaaggccactaggaaaattccttgggccatacatagtgttccttgtttccagttagacattgattgtctcacgattgaaaaggctagtagaaaatatcgatctcagagactgcccagtcagtggattcatgtaactgctg

SEQ ID NO: 119431 - DNA, 789 bp, Homo Sapiens
ttggggaggggatggagaccagggtcttgtggtagtttggtgggatcctcagaaggtgtggctctcccccttctgaggacgcaaaaactcccagagtttttggcgattgatgtgccacgtgtgccttgtgccctgtgctgggcgagtgtaggcacagctgtgcagacgacgcccttggcaaggctggagcctggacccctgcctggcagcagctgggcgaactggtgtcttctgcctgtgggcccagcttcacttcactagcttagcgctccctcaggagggaggaggggaggcctggtcagtggaggtcaccactgtgtttccttctgtgtgggtttatagtcacgtagcatctaggttcagacccgaagagcttggagccaggggctggggggaacagggcaggaccggccttggggcagccctgtcaggcccaccagtgccatgctggttgtgggttggcagggcagagtgaccttaagaagggccagctcagtggagcaacaggacagaagctcacatggggtccagaccacaggaccatttgagtagctctcccatatcgggtccttcgaagcacatgatttagctttactttttctccttcgtattagaaaagtcaccataataccatcaagtcataatttctgtgatctcagtgcttcaaagtaatgtgtagcaattgctggatgtgtcctgagaactgtaccccttccaccctggcgagaagcaggggccagaaattcacacaagtggcatggctcattgattgtgggagactctgggggg

SEQ ID NO: 119432 - DNA, 132 bp, Homo Sapiens
aaggcacctttgtacaaaaaagttggagaaaatagctccctgcaacctcaaactcttgggctcaagcgatcctcccacctcagccttcagagtggctgggactataggcacacaccattatgtccagctaac

SEQ ID NO: 119433 - DNA, 825 bp, Homo Sapiens
ttggatttgttcctttattaagtgggaggtgagtacatcaagaggaagaggttgcttgattcttggtcctttagatttttaagactctttggccagagttttggaaaagggattgtgtcaacaagcaaagttgtggtttcaggactgccttagaaactttttcaagagaagaaaggaaacaattctctactaggcgtaaatggcacccaccttaatttttagcctttgctttttggtgcctgtagggggagcccttgatagcagattttattcccatttcactggcttggaggaaaacaccaggagttcaagctgtttaggtaattttggcgtttggcccacctgccccagctttaaagaacagtaacttgtacaagcaatgctgactgatgattgtcagtcacatgtgagaagagattagaaagatgagtggcatttattaattttttcttaaattgtaagcttggcttcaggggtgggattgattattccagcatgtggatctgtgcacaaccaggtgactcattaagcccatgagcacacacggacaaggcattgactttgtttctgtgtttgtgactttttttcttggagagaagaaaatgaagttgacgtgaatcaacctcttgttggtagggtttttaaaatgctacagtcccagagaaagcaagagaagactcaataaaaatgaaagcctgcatcacttactgaacttttatcatgtccttggaactggactatgtgcttttcgtacattgggtggaggttgagtaacgtgctcaagctgctcggctgcacagctaggattccaacccaccagtctgg

SEQ ID NO: 119434 - DNA, 363 bp, Homo Sapiens
  misc_feature (132)..(176): n is a, c, g, or t
ttgggtatatatagaccggaagaccaaggactgagcctgtggattacctaatgttacagctggggagaggaggaaaagccagcaaaagaatgtgggaaagagtggccggaaagttaggaaggaaataggtannnnnnnnnnnnnnnnnnnnnnnnnnnnnnnnnnnnnnnnnnnnntttactgaaagctgagcaaagttaaggagaaaggattcacatttcaaatcctggatcaagttagtccaggagtgagaactgacatttgagcttagcaatgtggaaaacaccaagaccttgataagagcaattgtagtgtggtgttctaaggaaagcctgactggagtggcttcaagacacacaacga

SEQ ID NO: 119435 - DNA, 451 bp, Homo Sapiens
tttaaaaagcaaaacaatctaccttcccctgctaaaatgattacacactgatgaataatccaagatggaaacctagaggatgtgagaagatgttgtaagtgagatttcttgggagaaggtgatagctgcctccaatgtgcacaaatacgtctgtgctataagaatccctagaaagaatgttacagagagtgacctcgagtcaacaacctactaaggaaatggaaatggaaagtactgtatatttccacttctgtgccagcagatctagggacatcaccggagaggccattttagagtgactagattttggtgagggtgggggagagatggggacaggctttgctagcagtaaatatggcgaccctcatgcctcatccagtggagaagtggtacatggagatccttcctggggtatttgaggtgttcttcagcttgggagtcaaacgatgga

SEQ ID NO: 119436 - DNA, 831 bp, Homo Sapiens
ttgggcgcctgcctgtcccggctcccatgggtgctgggtgtgtggaagctccggccccctcgggctgggttcattggggtcctcctgtgtggtcagtggactctgtacccccacagcacctgaggggtggctgacactgctttcccagctgctgcaggggctcagggaacacaggtgaccccacgtctctaccgagaatgagcacaccaacacctctcagaagacagctgcagcctgcagaggccatggaccccacccaggcccacggtgtggacggctctgccctggtctctgctgagccaggcccagaggggaccccaggtgagcagcaaagccccccaggcctggggctagaccgggctaacccttcctgctcagcacctgttcacctgtcccctctgctggtggcctcctgtcctcccgctctgggctcagcagcagccccgtggagaggccctgccaccacccccgccctgctggagacaggcctcctacgcgggctcctgcagccggtcgccctgggcctcctagaagccggggatcctctgctgaccaccggcagaaaacgtgcttctcaagctgcaggtgattcaccagtagtgggcaaggaactgaatgtggtgattactgcggagtcagcaaaacccgcgtgagaacgggcagctgagggcctgccgggtgaggggaagcctcacggttcctgtttcatgagtttgctgtgagtgcacacgggctgtggctgtggagtgtgcaacagtccacgcgtgcctgcgtgtgctcatgtgcgtgtgtcaacagcttgtgtgcacgcatatgaacgagtgcgttttg

SEQ ID NO: 119437 - DNA, 665 bp, Homo Sapiens
  misc_feature (484)..(498): n is a, c, g, or t
ttgggttctcactgcaaataattgaattcttccctagcaccttttgtatttccctgcccttattttggtccataactgacctgtattttctgtattgtacattctcaataataattttgtgtcttttttacgcttgcctaaagtattatctgatcatcaattcaacttttgggggattggcatgttttcttgcaacttgagttgtaaggaattggcaaagatattttgtggccagaatttagaacttctgaagaatgttcattgctaagaaccttgtacatttttttgtttcatagtcctcacaaagacccaaagaaaatgttgctgttcaactatttatgaccctcctgctcgaaatcattctaatgttacttcatgatctgtaatggaacttgctgatttgttaatgtgcttaaggaacaaacattccttttcacaagttctgtcactgggtgggtgatgaattatacagatgacatgtgcnnnnnnnnnnnnnnnctcctcaatggtattccctgtataaatggagaactgtatttaactgtattttttgcatgagtttaccttcttgggaatacaattgtccaactttttacttatggtctggctgtagtggagtgcaaaactccgtacattgctattttgccacactgcaacaccttaca

SEQ ID NO: 119438 - DNA, 838 bp, Homo Sapiens
ttgggcttccctctgccccctggagttcgaagtgatcgccgagatcaagctgctgcagactgcctggtgcaactacaacatcccgccggataaccaatttggggcctggttccgggccgtggggcggctcagcgaaactgagaactggggtctggagggcgagctggagcccctgtccgagtcatccctgatcaccctcaggaccaagaagaacctggcctttgtcgacctctggagcgaccgccaggcccccacttctgagttcattaggaatggctactcccagtcctcctcctgtgaccaggtcatgtgtggcccctaccgagctggggggacatcgctgacgcgctcagcatgcactcaggcgggtcctctaactccaacgtgtacgagatctacctcagcttgatcccggagtctcctgatggccaggaaaagaagttctgggaatcaccctcacagtcatccccggagacatggggcatctgctcagcctccatcaggacgtcgtcctcctcaccctccaccacgcccgtggctgccacattcacccacaagcgctctgtcttccggctctgcaactccagctccgcgctgccgctctacgacccccaggtgggcgactgctgtatcatgcacatcagcctcgacgtggacaatggcgacatgtacgatatcatcctggtgatcagccaagataacgctccgctgtaatcctgcaacgccatggacagacacaagctgcaggagatgagctgagactatgagctgctgcagattctctcacatgaccggaagctgaggatccctgaaacgccaacgtcttctatgccatgaa

SEQ ID NO: 119439 - DNA, 370 bp, Homo Sapiens
ttgggaacatgaaagaatttataaccactctttcgcctccctttccaccccgtcatactccacatcctgagaatactccgatcctgacctagacgcctgcctgatcagtgcctcgaatgagcagcatcctgatccctacgttgtccatgatacccttgctaaggcctttcagaagccgactatctcactctagacattcatccaggaacattcgaccatcacttccgaggtctgggccctcccttgctttccttgagcccctgatcctggagggaaagaagcctctggccaagatatattatctaattccactacttaaagaatcacttttccttcaagctttgtacctggatattctccttaccactta

SEQ ID NO: 119440 - DNA, 957 bp, Homo Sapiens
  misc_feature (535)..(546): n is a, c, g, or t
cataaaaaacaactttgtacaaaaaagttggagattatgtataaactcattcttgtacgcatttacttaatttagaacctgggactttttaacagtcgttgtccaaaccttttatggtgggtgatggactatgcagcagtgctgaaggagcactgtttctttctataggactataggaagaaaaggattagtatacataattgtgtacatcaagacaaatttataataaaaaaagaaagatgaagggcccagaaacctgcattttattgacactgtcattttccacagggaatcttaggcagacgtcacctgttttcttttaagtaatgagagaagcccacttgtattcctgaatcattttttgagaaaagcaccagagacgattgacagtcacactttttaaaataaaacagtgactacctctagcctacatctccccaccctcatctacctgcccaatggttgtcagttcccctaaagtcaccgtctccttctattctggtattaccattagaattgaaattttcaaacaggnnnnnnnnnnnngtctagttacaaatgagtgcatggcatcccgaatgaagccctttgactgtgatttctaattttctgttcaatccatactgcacagatacaaggatgaaccaccattttggttcccaagttttattcaagaattcgtataaaatattccacataagtgaattttaatcctcgtcttcctcctcttgtttgttctggttaatttggaagtaacgtaattcataaccccttttgctgttagcagttacgcacgtccaatcacgtagattgttcttcttcaatatttcttatttcaaataccttttgggaagaggcatctcggaagtcatggtgatcttgcccttgctccttttgatcacaacccctccaatgacattcctagcttttctgctcactttgatctctcttgcaaaa

SEQ ID NO: 119441 - DNA, 834 bp, Homo Sapiens
  misc_feature (612)..(642): n is a, c, g, or t
ttggaacacaccggcgggagaacacagaacacccaccctctctttagtcaccctggaggcctcggagaaggcggtttcggtgatccgtgaagagaccccgagtctgttacatcccggagaatgacaagagagcgagtacctgggtgacgtttacgttctgggatttcgggagatgcggttttctgcacgccaggggccaagcctgagacgtagatggacggcagggataggagctctctccgcgccacaaacgcccctgctcatacctgggttccttgattttcctgcctatataaccgagcctcccatggccgggctctgagctctcattctgcggactgggacaaaggggttaactgtgatgagctttgtataaccccaggattctgcacttgcccaagggcgaggcgcaaatcaaaaactacgcacaactgaacaccgagatcaggtgagtcctgagtgtctcacgacataaaatccttacgattttaacaagagttgtatttgtgctagcactgttaactgacaaacgcatgccagatcccatctgtctttaaagctcaatgtgtgacgttagacacgtcgttttgctcttcaactttcttatttggnnnnnnnnnnnnnnnnnnnnnnnnnnnnnnncaagtgttctagatttgcaaaggaccttttcggagctaagttccagtagctatactgtaagttgatttcttgggcagttctgttggtgaggaaagagggcaaattgagaaatgaacaaacacagaagttgcaaaagccctgtgacttacagcacaggacgagtctacaaaccctgccataccacactaagct

SEQ ID NO: 119442 - DNA, 958 bp, Homo Sapiens
  misc_feature (342)..(353): n is a, c, g, or t
cataaaaaccaactttgtacaaaaaagttgggtgagggaacaacagatggatgggctggagaggtcagcgaggccgagcgcatgagcaccctggggacctgctggaggcggatggtgtctggatggtgaacgggcaggagcatctagtgattgatggcttctgggtgtttttaacgagagtttgaacaaagactcagaaatggtttttaaaataacagtcccatgtggcccacatagaaaatattgggatattttaaggtgtggattcacttttccatatttaaacacttgtttctacttggtgaaatacacaggtgacaggtcaacttcaggaataatggnnnnnnnnnnnnaagaagatgggagttgggaatttcttatattttcctctcacttcttaaaaccacctttgtgcccctgctttacattaggaaaaatggaaaggtgattaaacacggccgttaggagcctaaaatctaggtcagagtcccgtatgaaagaaatcagataagttgagagagggcgtgtgcaggttggaaatggtggcgtccatctctgctggggcgtcgatgcctcctggctggacaggtggagcctggaaggtagggaggctcggagcatgttcagagaggcagggatgtttttgactgtgggtaacactgcatgctgggaacggaaatgagcactgtgtgcccagcagggctcagactgccatgtggggtccctggagaagaaatcacgctaacactgagtatcaaaaggatgagtggtcctgggttctgctctggcagccctgctaagggcagagtctcccggtggtcctgggtcctgctctgacgccctgctaagggcagagtctcccagcctctcagagcttcagtccacttaggaaacttgaggtgagctgcaggagcctgtggagaaacgcttctcatttagtggggtgaggtgacacggg

SEQ ID NO: 119443 - DNA, 312 bp, Homo Sapiens
ggcgataaagagagactttgtacaaaaaagttggcagtgatgttgccttcaaaaacaactgtgaaaggcactatcgttaactggagaaattaatgtgttggtcttgtcaggagattgcttgcttgataagaatagcctcagggagggacaccagctgctgatacaatgatggcaccacagattaacatgcctgtgcccttactcttgccaaatcaggttgcagaagaacgcggagtcttatataatacaaggagatgtcttttcagcaagcctagctagcctagcctttagctgattagaaaagaaggttga

SEQ ID NO: 119444 - DNA, 341 bp, Homo Sapiens
ttggaaagcggaagccgatgatctggatgggactggccgtgtcggactgagaatgagaacgggagcgcgctgcccggagtaagattattggtcttgggctttcgctttctggactggcctttggggctggggctccctcctgcacctccggtgccgctgccgccggccccgcccccgggtttgggtgatgaggatttgggactacatctgcaggtgctggttccgccttttccttttctgcccccactagcactagcgctactggagtctttggtggtactcaaagttttggatttggatttggttttggttttggcacaggaactagaactggtttaggt

SEQ ID NO: 119445 - DNA, 916 bp, Homo Sapiens
  misc_feature (205)..(777): n is a, c, g, or t
ttgggtattgttctgagctcctatgtgggtcatagtttgtgacagcaataagagataatctgtctcctcgcagctaaattaagtttactgtattaactgtaacgtatgaaaataacaaattcacattgttttaataaccctttttataaaataggtgattctgcctgtcttaatttctcttgtgtggttttgataatgatcgaannnnnnnnnnnnnnnnnnnnnnnnnnnnnnnnnnnnnnnnnnnnnnnnnnnnnnnnnnnnnnnnnnnnnnnnnnnnnnnnnnnnnnnnnnnnnnnnnnnnnnnnnnnnnnnnnnnnnnnnnnnnnnnnnnnnnnnnnnnnnnnnnnnnnnnnnnnnnnnnnnnnnnnnnnnnnnnnnnnnnnnnnnnnnnnnnnnnnnnnnnnnnnnnnnnnnnnnnnnnnnnnnnnnnnnnnnnnnnnnnnnnnnnnnnnnnnnnnnnnnnnnnnnnnnnnnnnnnnnnnnnnnnnnnnnnnnnnnnnnnnnnnnnnnnnnnnnnnnnnnnnnnnnnnnnnnnnnnnnnnnnnnnnnnnnnnnnnnnnnnnnnnnnnnnnnnnnnnnnnnnnnnnnnnnnnnnnnnnnnnnnnnnnnnnnnnnnnnnnnnnnnnnnnnnnnnnnnnnnnnnnnnnnnnnnnnnnnnnnnnnnnnnnnnnnnnnnnnnnnnnnnnnnnnnnnnnnnnnnnnnnnnnnnnnnnnnnnnnnnnnnnnnnnnnnnnnnnnnnnnnnnnnnnnnnnnnnnnnnnnnnnnnnnnnnnncaagtaagataaaatacataaaagtatcttgaatacaaacttctgttctggtgctgacaggaaaagaccacagaaagttgggcaagtgtgatagaggaagagggtgttaggggaagtctatcaccaagtcctaatgttt

SEQ ID NO: 119446 - DNA, 454 bp, Homo Sapiens
  misc_feature (95)..(110): n is a, c, g, or t
  misc_feature (117)..(156): n is a, c, g, or t
  misc_feature (213)..(237): n is a, c, g, or t
ttggtttcttgtctgccggactcccgggggccgcggggcgggaggcatccgaaggaaggtagatagggaggggaagaaagaaggcagtgcctccnnnnnnnnnnnnnnnncttcccnnnnnnnnnnnnnnnnnnnnnnnnnnnnnnnnnnnnnnnngatagacattgatttttctccccctgctccccccttcttccctgccgagtgagctgnnnnnnnnnnnnnnnnnnnnnnnnngaggtgattcctccctcctgcctgcccgcccgcctgacctgtgcccggctcgcgggccggaccctccgccccggcgcgcccccggcagctctctgcgcgatgaacaaacatacactactggaggggggccgcttcctggaatggaaggcgcaccaacaacaaacagaaagtgaggaacaagaacggcttcccttggatgaagaacgagagcaagaac

SEQ ID NO: 119447 - DNA, 902 bp, Homo Sapiens
  misc_feature (65)..(306): n is a, c, g, or t
  misc_feature (309)..(449): n is a, c, g, or t
  misc_feature (810)..(845): n is a, c, g, or t
ttggggcttacttcatttaacataatgttttcaaggttcatctgtgttgtagcatgtatatacannnnnnnnnnnnnnnnnnnnnnnnnnnnnnnnnnnnnnnnnnnnnnnnnnnnnnnnnnnnnnnnnnnnnnnnnnnnnnnnnnnnnnnnnnnnnnnnnnnnnnnnnnnnnnnnnnnnnnnnnnnnnnnnnnnnnnnnnnnnnnnnnnnnnnnnnnnnnnnnnnnnnnnnnnnnnnnnnnnnnnnnnnnnnnnnnnnnnnnnnnnnnnnnnnnnnnnnnnnnnnnnnnnnnnnnnnnnnnnnnnccnnnnnnnnnnnnnnnnnnnnnnnnnnnnnnnnnnnnnnnnnnnnnnnnnnnnnnnnnnnnnnnnnnnnnnnnnnnnnnnnnnnnnnnnnnnnnnnnnnnnnnnnnnnnnnnnnnnnnnnnnnnnnnnnnnnnnnnnnnnnnaacctgcattaatgctcaacctatatgaaattttattcctttttatggctgaataatgttccactgtatgtatatactacattttgtttatccattcatctgttaacagacacttaagttatttccacattttgggtattataaatagtgctgctgcgaacattggtgtacatgtatctgtttgagtccctgtttttagttattttggttatatacctaggaatggaattgctgatcatatggtaattctgtgtttaactttttgaggaactaccactgttttccacaatggcatcaccattttacattcccaccagcaatgcacaaagatttcagtgtctgtatccttgctaacacttannnnnnnnnnnnnnnnnnnnnnnnnnnnnnnnnnnnaataatagccaatcctaatgggtatgtggtagcatctcatggttttgattttatttt

SEQ ID NO: 119448 - DNA, 834 bp, Homo Sapiens
  misc_feature (382)..(669): n is a, c, g, or t
  misc_feature (674)..(683): n is a, c, g, or t
ttggcaatcattagaataaccacaaaaccgattcttaattacctcttgcctgggacactgcagaagtaaccaaatcggtcccacaaacataagcctctctaaccctgccacctcccccagtttatgttacgtaatatggtgagaatcttcttcctcaaatactttttatcctgtcatccctgttctcaagaatcttcagttgtatcccattttacaccaggaagttcaaatgtttgaatggagatttaaaaagtctagctatgcttcttgtacatcccctctaggagcacacccactctaatcaaactgacctttttagtttagctgggctccaaccagttctgttctagctcctgaagtcagcgtcaagaaatattggtcnnnnnnnnnnnnnnnnnnnnnnnnnnnnnnnnnnnnnnnnnnnnnnnnnnnnnnnnnnnnnnnnnnnnnnnnnnnnnnnnnnnnnnnnnnnnnnnnnnnnnnnnnnnnnnnnnnnnnnnnnnnnnnnnnnnnnnnnnnnnnnnnnnnnnnnnnnnnnnnnnnnnnnnnnnnnnnnnnnnnnnnnnnnnnnnnnnnnnnnnnnnnnnnnnnnnnnnnnnnnnnnnnnnnnnnnnnnnnnnnnnnnnnnnnnnnnnnnnnnnnnnnnnnnnnnnnnnnnnnnnnnnnnnnggggnnnnnnnnnngatgttggagacctatgttctagagtaaactctgccactacctagctaggttgacctttaacaagtctatttaactttttcttaattatttctaagagagtttcaaatgaaaaaaatactatgtgtttgtaattttatgattataattcca

SEQ ID NO: 119449 - DNA, 426 bp, Homo Sapiens
atgaaaacagtttcaatctaggaggattttggatgcatctatgccttgagaaatgaatggtttgatgtaaatgcatggtagcaagaataaataattatgttaattcatataatatgttatatatagttttaaagaaaattctatcactgtcttcctatgggtagggctataatgtccagttctttcagggattaagagggtagggtctgaagttaatccttgtttgtcgtaatgttattaatttattcaaccaagacttaattgagaatgacctagcaaaagagacaatctgttcaaattaaccaacttgagtaccatttcaatttgagaactctgtctctggtgttggaggtcattcttcagaaccaacatggttcttgggaaggtaaacctcatgtacaaagtcactcagaataatacttgacc

SEQ ID NO: 119450 - DNA, 921 bp, Homo Sapiens
  misc_feature (668)..(688): n is a, c, g, or t
ttggccaagtttcttgagttgctgcttgttaacacccagcttttaactgagtgtttgctcctgatggtttaggagattttcatgttgtatcacactgtcaagttttattttgtctttttatccctccgtggatgtgagtttgaaacaagcacggtacagtaatcctgcctgatagagtagtctggaatgagaattactttttgggtgagagagttctccattttaatgtttctaaagtttttcatatgaacttggcattggaaaagggaggtaaagaaaaaggacgtttactaaaagcagtgtctactcttcccctttgtgagtgtttattcatggctaatgaaaaaaagagaaggactcttgggttttgtgttgccatgttaagcatggagagggatgcttgacagcatgctaattgaagccagagcaagtatgtccttcatcaggtaatcaggaactcttcagttgaagctgaggaactaactgattagttgttgatcataatataattggttacaaagtggaagtgccagctggcttaagtacccaaagaaaagaatgcagcagcctaacttagtgttaccatatgttactgaatttgaaactgaccttttttcccaccctacttcacacacctaaaactcttttcttgtcagaccaaagagcgnnnnnnnnnnnnnnnnnnnnncactttaccaatctgtcactcaggtacaattttgtggtgagatttttgtctgttctctttgtattgctcttaagagtcctttctcagcatattattctgccattgcctctgtcttccttggggcacctcagctctggatgctacccctgggatatctactgctgttatgtgaatgataggaggtaagtgaccattatagtaaggactctttgtaaaaaattcaaaaatttaaa

SEQ ID NO: 119451 - DNA, 785 bp, Homo Sapiens
  misc_feature (559)..(568): n is a, c, g, or t
ttgggtgtcttaacacaggagcagaacttcctagagcagaatgatgatggtagatctgaaagtggctgcgtacttggaccctcagatcagggctttgtgggagaccaaggggcctgcaagagagagctccggtcagagtaaaaaatctcctcaaatggactgtctcgatcctaagagctcttgctggcacttccggaatttcacctatgatgaagcaggtggaccccgtgaggctgtcagcaaacttcaagaattatgtcatctatggctgaagccagagatccactcaaaagagcagatactggaactgctggtgctggagcagttcctgactattctgcccagggagacacagacccagatgcagaagcaccatccacagagcattgaggaggctgtggctctggtagaacacttgcagagggaatctggtcaaacatggaatggggtgagaagaaagattcctgacatgtacagtgaaataggatgcaggtggatatagtagagatggtggcagttagttgagaaattagatggattaggtaggtcattgtttggnnnnnnnnnnaaggacagttaaggtgggacttgaaactacaggcccacagaaaagttcacaggtttcagagattgtggtagatacttccctggccttagagaaagagagttgcttttgccctctttggagccagggtgaattgagggtgttgggcctagtctggcttggccaaggagacaggacttaagtacttagaaacagaataaaagtaataaagagtcacgga

SEQ ID NO: 119452 - DNA, 621 bp, Homo Sapiens
agtatcattgggaactcataggatttaagtgaatttgatgtgttttaatccattgcagttattattcttattcatgtacaaatttccccatctttggtcagcaagcccttcttgactcctaggtcctctcgacttgacctcagtagtttttgatagctttcctgctatctgtcaataaaaagatttttcaggtttatcttttatattcccttctcatgtatcaaaatttaagaggaaaatacaaacatttcttaataattttcctgacaaggaatggtaaggctgagtttcagtggtttcttcatggttattacctttacaggacaaaccctcaggcactggttctgaatttgagtctgcactacacagaagcatagctacctgggactcctcctaccttcattgacagtgttccaggatcttgtctgagtcacttttgccagcctcaagtcttgtaatttctgtactgaataaatctttcctcgttgcttgattttttagcagtaaaattcttcaataggaagtgattcattgtacacatcctgtcctgtaaatggtcaattcggcaaatgcctttgcttctctttttaaaactgtcaagtttctctgactatgtatttt

SEQ ID NO: 119453 - DNA, 972 bp, Homo Sapiens
ccaactttgtacaaaaaagttggacaacatatacttggcttcaaagtgattacattcactagtcaagcatctgaccacatctgtcttcatcaatgagaaaggtaataatgctttgatgatctgcatatcggtgtgcagtgggcggctttgaatgtttccatccaatacgtggcattttttgaaaggaaactttgtattcatttctgaatgtttttgtcctggcttttacagttcctcactgctatgttgcaggggaaagtgtgaggtggtggttatgcattttgcaagacagtgattctttattttattacaaaaaaagaccaactctggaaggccagattaaatcattcctttcactttttaatgggatttggatgaatagagtaaaatatgcactttgcattcattgatagcatctttaggttgaggtaattgagtcttttttccctgagtgaatgaataatgacttcatctgatcctcagtgaggcctgaaacttagaccgcctttgtcacagcaaaaggatctgggctttgaaacatgctctacttccctggcttaatttttcttcattttaatccaaaaacctatttttctcaataattcaagcataaactatgtagtagttgaagtagcggaaattgcacgatatttgtcctggttgtgctgctttttaaatagagctgataaatcagccgctgtggtcttcagctgccccattctcaagggaaggcacagcccatacccgcagcagcgttgggaacttcagaactggttgagtaccgctccctttccgaccatttgtgatctgggggagcggcgctgttactggtactgtggctgacccagagaagagaaagccccatgctggagctccgagatgctgctgtggacgttttacttggctagaagggatctgctgctgtgaattagagggcagtgtgctttcttgggagaaataaagctgggaatg

SEQ ID NO: 119454 - DNA, 768 bp, Homo Sapiens
  misc_feature (214)..(223): n is a, c, g, or t
ttggtttccatgttgccagagaagcaaatgtgggctgactggctgattttagctgctatggtttttctgtaacctttaacaattgttgtgacaaataagattccatgtaaggtgcaatttctaactgtgcagtgtttgtgaaccacatccaccttctccaggtttggtatttggtcgactaagttgacgatgtcattacctttccttccatttnnnnnnnnnngttaatctgaatcgtgctgagagtttggtatgcacgctatactattcaagggagcattctcttctgtgtcagaataatatatttatgtgtgtgaatcattatacttgaatttgtggcaacattttgtatcaatgaatatatatgacacccaggctgactacaatggcttcaaagagtttaatttctcttaaatggactcagtatccttggaatgtgctgtttaagtgtttctgaattttctacacgccatttttacaggtccatctgtttatgatgtgatgagataaacaatcacgttgattttatgtttcttttcaaagaaaatgaatgtatatagtactaagcagatgaataaattattgaaaaaatatacttcatggatcatgcccactgataaaaatgaatttattttatttgttgaacaaactgactgttcaaattataagaatttatattgtccttattaatatgaatgccatctatttaaagtgttgttcaatattgatatgtgttctctaataaaatattttaaacctctttctttt

SEQ ID NO: 119455 - DNA, 628 bp, Homo Sapiens
ttggctcagcaccaacattcattctcggaggtgccaaacccagtttgcagtttttccagcacttgcagaactgtgttcccttaggggcaccagcaccatcagaggctgcttcctagtccctgccccccacgcaaagaacctatagacctttgctctgaagattatgcgacttgtcctgacaacagcaggaggagttaaaagacaagctcgtggagaagctgcacgcggcatgggagtttgaccttgcttctccctcaggcccagctaaacacactttctgggttggtttccttttggacatgaaacactatgaaagcaaaatggccttcaggtgcaaacttgatccgtaaacgcacaaggagagggatggtaccttcaagggatgcagctcagtgagacaggctttttctaaacaagcaaccaggacctggcacatgcaatagtgatgcggcatcagacaactgattgagagctagccctcatcctcaggacacaaagcacccaggacagaaagggacacacagagaaactgctaccatacagggtcactcattgaagggctaaagcatggggctaatcggttcacggcaaagagaagtttctctgatgctggttcccagaccacagt

SEQ ID NO: 119456 - DNA, 886 bp, Homo Sapiens
ttgggcaagtgtgaatagacttgtctttaggatccctctctctggtcatccctgatcatcttagggccgtctcccttttctgatttttgacagctctgtttattttgcccatggctagtcctcttgttttgtgtctgctgtgtgttcttgcccttccattgtcagttctgtacatcctggttcagcttgtctcactgtggtagccccttctgcttgtcttcagccatcttggtttaatcctcataggtcatggatgaatggagccttgctgagcactttgagggcatttctgttgggcacaacctcagaaacgggaagtcttgaggcctgggggcgtgtggtcagtgaggcctccagaggtgggttaggggtgggcacctacaagggccagttgaggggagaggtgcagggattgctgaggagactttgtgagaatgatgtcaggcccgggaagctggtgtggaagaactgagctgtcagaaggagataccaatatcccctttgcagggtggtgatgggcatcaaacatgacgtggaacatgtccccttcatggagggtttccatctaaatgcatctgtgtgccttagggatcagtagttcaggggtggtggacttttttgagtgtctcctaatttctctgaggtgtctttggctctgtgtcaccaaatgtgcctgacctctgcatcccagtggttgctgaaagggaaacagtatattgcgtagtcagatgtcaaagtagagatcttaatgagaaaggccctggcagctggagagatgagaggacctagtggtcagcttatacccagactatctctccactcctccaaaaatttgtgagtcccatagctgatgaaaagaatttacatatgggctcccccctgcttt

SEQ ID NO: 119457 - DNA, 952 bp, Homo Sapiens
ttggagaaatgccaggtctgctcctctgtggacagaagggaagtcttgatgtgcgtacttggacccaaagaaacgtcctcagggtgatgatctaggctttctttaaccctggtgcattttgctcattgtttgggagttttgaaaagggagaaaagcctgtctgggcattagggtgagaattatatagtctttcctgaacctctctccttttagtctgagtataatgatcaacttaataaaaacaaaacctagatccagagagaaaaacttagtgtggatggagactagaccatgtggctttgactgtccctgagattcaccatcttcctggagggctcttgccaattcctattgcgtcttacttggcatgattcgcctgcttcccttaacaccttgtagcacagctgacatgaggctgggatgttgagaccattactgatggtccagtaaatcacacacatgaatacttggtctagatcattttatcccaatgtctgagatgtttgatgggacacttttattccaaatagttccttggaagaaggattctgtgattagatatttgggaaatactagggctaaacaaaatactagggctaataataattaaaacacctaattttgcttaatcattgcagagccatgttatgctgatggtcctcataaaactcccaagagctagttgtggaattcagcatttcctattctttaacctcaatgttctttttttcccccccatggagaccctatttattctgtagaatacatgctgagaaatgcttgtgtagctaatttggttcatgagctgagttgctcttggggcttacatggtttgagctgttcacctgaagcctgcagacagaaagatggtccctacagtgactccacctttttgttctatatgtatatttttttctctcatagagactaccataaaatagcatttttaaaa

SEQ ID NO: 119458 - DNA, 527 bp, Homo Sapiens
ttggtgtgactgcagggcgtgccccctgcccctgtgccctccccttgccatgttacctcttccccaaacctagcggtcacaaggactgggacagtggaacaccaggccccaggaccagctctgctgcctctctctcatctacaaggccttacagcccgcatcctgctggcctcaccccatcttctttttccctaaacgaaagagcccccaccttccgccagccaccacctcttctcagcttctctgtcctgccccaggcaccttccctgcctcaagttcccccagggctccgtcttaaccactctggagcagtaagtccctcatgggaagggggcaccccaggaatctggacagagtgtaggtgtcccccatcttcatccaggtgatggttacatggaaggccccagaggggacccctgcacactccctgcactgcacacacttccctgtatgtgtggactcctcagtacagagcaaaaagattgtcctgtgaaaaaggaatgaaacattgactacaggtgagccac

SEQ ID NO: 119459 - DNA, 821 bp, Homo Sapiens
  misc_feature (503)..(554): n is a, c, g, or t
  misc_feature (703)..(711): n is a, c, g, or t
ttggcctaaaagtttaaagtagagagcaaaaatgcaaatacccaaaggatactgttagtatgtaacttttgtgtgctgctttatttctagagtttgcattttttaattgttcattcacagaaaatcctaatattgccctatatggttggtttttttcctaagtggttaatatttaaacccgctagctgtagcatgataatgtctttgactgagcttatgtagtagaaaggatgtgtctgttttctgggacttttagtcttcacttatttttctataacaatctaattgttaaaaggaaaagatggcttattgacacatatttcattaaactttcactggaagaacagtgggtcatcctactgtggattaagaatactactgacaagcaaaaagcattaagctctgtaactgtctccaacaccaccttcaccccgcctttagtgtaccttagtgtactttagtgtacctattttggcagtacggtgttttccagattctacttnnnnnnnnnnnnnnnnnnnnnnnnnnnnnnnnnnnnnnnnnnnnnnnnnnnnctaacaggaagagaaagattgtgagtgttaagaatgagtgatgattgagaaattgatggattagtgcaatggattgggaatgaatgatgctttctagtttcgtaatacttgggaagagctattgcatatagagtaagttgatttagacnnnnnnnnncttcatttcattaccttgtttaaacttgttaaatcccagccaagaaatgcagctctgtaattgtcaattaactgtattataaatatatataaaaattttgtagagctaag

SEQ ID NO: 119460 - DNA, 872 bp, Homo Sapiens
  misc_feature (367)..(376): n is a, c, g, or t
ttggtgggctctggattggtcactttgctcccagggtagccctttgctgtatctaagaattggctcaccctgggatgggcagtttctcctgggtcagcgaggcccctgagatgtcaaaatatcataaaatatagaaatcatgattaatacaattggtcctctgctgttttgacatactaaggtcacttttgatagcagaaacttttaaagagtagggcatacgttgccctgaagagcatagaaaacattttattctgagagtagaaaggaggaagacacgtggagatacaggagtcccttaggctggcccatagctgagtctctcatgtgtgtggcattagtcaagaatgtagttctgcagtttgcnnnnnnnnnntctctaacatttcttggtgcagttgttaacatgtgttaaacatatgagtctgatgatgatatcgcggtgtttctcggctcggggtggcaggtctggcggttgtgtggctgggggtgtgcactgatagttcagtaaaggataagtagagactcgtggtgttcatgtgtcaccacagggagggagtggctgtggagacccaggacaggaagtcgcggtggaaagcaggctggggtggtaggagaaggcaccgggggtgggtgctcctcccccaggggttgaggagttgactgatagggggcagttacctcctgggaaagcaagacgctcccttaagttttagaatggtacagagagtagtcccttctaccagagtttccatttagacatgggagtgtaagggccatgtttcggcagaagcagggcatgtatcagcattagtggactcctcagtattaaaggaagaacagcaacatgtcatgtgcccactttgtgcctc

SEQ ID NO: 119461 - DNA, 726 bp, Homo Sapiens
  misc_feature (169)..(335): n is a, c, g, or t
ttggggcgcagggaggcgggatttgcgtgcgggcggaacgcagcgcggctctggaggagctctgggtggaaccaagcggagaaacccgcgagtttgaagcatgtagcgaaagttgagagggatgaacttcacagtcagcggaatcgtttatcccactgtggtcgaacgnnnnnnnnnnnnnnnnnnnnnnnnnnnnnnnnnnnnnnnnnnnnnnnnnnnnnnnnnnnnnnnnnnnnnnnnnnnnnnnnnnnnnnnnnnnnnnnnnnnnnnnnnnnnnnnnnnnnnnnnnnnnnnnnnnnnnnnnnnnnnnnnnnnnnnnnnnnnnnnnnnnnnnncgagggtttgtggcaaaggctggaagggcagacaggggccttcatggagtcccgcctgcagacgggacagcagctcccagtgtcctgcttggtcctggagagagggtgagaacttcccttgggtttcatgctccacaaagtaaggaaatgagacaatgcttggcaaggtcgcctgaatatcacattcaaaaacgcctccaatgtgtgcagttgttttggcacattgtgaaaaacataggaaatgacagaggttgatgtctcattagctctgcattctaggaaacatttcagttgttggtgtttgaaattaagtctgggggaaactaagctagtaaacccatggcctttgatgacttctggcctttctgctttaagggtgaagccagggccg

SEQ ID NO: 119462 - DNA, 821 bp, Homo Sapiens
  misc_feature (313)..(380): n is a, c, g, or t
  misc_feature (432)..(470): n is a, c, g, or t
ttggaaagaatgaagagttttactaagccccaaactccccttgcctaaggagttactttcttccccagtgagctgggtgaactgttcaagcacctttgtcgggctccctttcctctaagttccctgcctctctctaccttctggcttcaaggacaaatgccagtaatgcctaactctgtactcgtccagacatcccaaatcttcccaaagccattctgatgtgagacatgagctgcaggcctggttcataactcattaataagtgaggggattgtcaacctagagcaccaatgaatgatctagcccatgtagnnnnnnnnnnnnnnnnnnnnnnnnnnnnnnnnnnnnnnnnnnnnnnnnnnnnnnnnnnnnnnnnnnnnactcccagagattctttttaattggtccaaggtaggacttgaccatctgggnnnnnnnnnnnnnnnnnnnnnnnnnnnnnnnnnnnnnnnggtttaagcctctcaaatgattgcaagatacaagtagaatggagaagcattaattcagcccttctaggtttgagttactcactctgcccacctctagagcattctatggcagggagattaaagtgtctcctaactatgcagtcactgataaaataagaattagcacattctcactaaatgaacctgactttaaggcacaagtatagattcctgaaaaagttctaagctgaacctgtacaaatggaatcattttaaacacaccatttactgtcacacagactccctgatactttagtgtgtgcacatgtgaaaccatttttttgaagtatgaaataattgctcaccatttta

SEQ ID NO: 119463 - DNA, 647 bp, Homo Sapiens
tacaaaaaagttggttttttttcaccctgctttaaaagcccttgggctcttcccagctgggtgccagccaactgtggctgcctgggacactccatcttaagtccctgtgcctctgctgtgtgttactgagtgcctaggccgtgccagcctgtattcatctgtactatgacctgaagaggcagaggccatcactgttggtccggtctccacctggggaaactgaggttgcacagtgtctctgtggtgacgagcagggcttcatccagtgcctctgtccccaccgaggggactatgggagacatggagggtgtgtgagcaacaggtgagactggagccagctgaaaactgggagaccgacccagccaacaaacaatgtcggtctctgtcttggcacctgcaggaaacaagctcctacttccagaaaaagtgctcctgggactccaggataccagatccttccctggcaccggttccaggaggacctcgttcttaggcagcatctgtgtctctgttttgtaagacacacagagtatccttaacccactgcagatatttccctgggtccatggtcaatcaacaccacctttcagtctccagcctcttaaccagcccagggctgagtgttgtttatagtattaatatgtttc

SEQ ID NO: 119464 - DNA, 910 bp, Homo Sapiens
  misc_feature (787)..(796): n is a, c, g, or t
ttggtaatctgtgtatcgagggatttaattttttttaaccaaaacttagtttctctttttatcatctagcacagatcaaatcctgtatgggccagccaaatgtttgtagtttgagaatgttttgcaaatacctctctgcttccaagccattaatagctaatgaagttttattttggtttgtccattaatttttctgcttatttttactgtattgccatgtccttgatacgagacaagtagaactaaaagagagaaaatgagaggttaagactgtcagaagatgagaaatgtgagtcataaccataccttagtgttttaagggaactttatccagtccaatccctttatagaaaaggaacttttccaagttatgttgcagtatttatagtgtgtaaaattttgtttgactttggtagttgtgcattttaaattatgaatcttatatgctacgataactagtatgcttactttctttaatgcatgtgatcatacaatgctaaaaaggtattttttaaagacccaaccaaactgaggattttgttatacatatctgtatcaacacctatatataaactcttcttcttacctgaaacactccttcacccggtttgggcactaactagatcattttcaaaggaacaaacaggaaggagcaagctggcactccagggtgcatctgagctgagaatttagaagacctcattcaagaaagtaaactgagcattgatgggaaagcactttgcgcgaagtaacattcccactgttaatgttgcagtcaaattgtggnnnnnnnnnngtggtgctaaaattgttctgaaatgaagattgtttgttgtggggaatattttaaatactcttggactttaggaggctattttatgtgtcacttgctcctagttgtttcattgta

SEQ ID NO: 119465 - DNA, 653 bp, Homo Sapiens
ttggaaaaattttactcaaaagtattgtccaaatgcattttaatctgttttattctctaaaaatctaaaacaaaaacactggcatatgacctagcagtactgccactgtttcctccgaccccactaatcaccccctcctacactggattgcctggctcccaccattattgaacatggttacaccaaacttgcctgatttttaaatgagcatcacaagccctctctacctctctgtttccccattatgcatattctccttaattatatgttttgctcacttcaactaatcatattgcccatcttctgtgaaaccacctttaccccctccgtggcaatattcacctcatgagccaacaacaccaaactcccgatcttgtgcgcgtatttcctattttacctcctgttaggctctcttccacaattcatcgcactgatttactgtctgtacacactaagctaactaaacattctacttctcactcttctgcccaagaactatcatattcctgagcccacatcttaatatgactagcttactctatagcttttatagtaaagataccctctttacggacttccacttatgactccctaaaagcccatgtcgaagcccccatcgctgggtcaatagtacttgcatcagtactcttaaa

SEQ ID NO: 119466 - DNA, 953 bp, Homo Sapiens
ttggcagttaggtctctgggctctctaaaggagtccagagctcttgtccatgtcacaaatggagccttagaatttctgtctttccttatgtggcagctttggccattgtgtcttgaaattctccctcaggaaatgtgataggggatattatcccatgggattttagtaaaaatcagcttgcctaatttcatattcgtgttcataatgaagaaatgcgaagtggtggtagtcctcaggattaagtgtaaaggaaaatatgcaaggaaaaagtagcagtgtcagcccttttggactgcttatgatttctgccttagagctacaagacttggaacaagaaataacaatacctcaagaaaatgtctggagagatagcaccactgtccctcaaagacttcagccactgcacattaccaattcagctgtgaagcatttacaactgtattatctgtgattgtctgcatttcctgtttacatgcatgtgctggggatatgctttagtgtgtatggactagagtttaaatcctgtctttaactgggctgcaaggatggctatcaatcccaaattctgttttcaactcactggaataattaatctggtgttcctgatataaaacaggtgggttctattcacatgatggctgctctttaccatatatttcacctgaccctcattttgccatgggcctcaacctttatgtgtgctttttatggctctgaaaggactggctcccgtgtgtggaatatacaaatataaacaccacccctcacatacccctgtaacttaaatgcttccatttaactcacttagattactttccccttagtggtaaacgggttgggggatgggtggtagtgcaaagaagtagtttgaaatattgccatagtaatatgggaactttttattccaaccctttaccctggcctttttttctctcaatatttggcctaaattc

SEQ ID NO: 119467 - DNA, 805 bp, Homo Sapiens
ttaaagcaacggtgggacaaatcttctgaaagcttcctaatcaacatttttctgttaaaatgtactgcatatgcacatttatatattgggagcattttaaaggtttactttgctctgaaagaaatatttaatgtgtttcaaaataattttgagattattctagttgtggttaagcttaaaggctgagaaattacttaactattcaaatagagcctgtgcaactatatgaaatgtcattatggagacactcattatgcttttcctgtagaacaaaacaagtagttgggtttatctgcaattagggttttttgaggaacgtgagggtggctggacaagttgggtagacctgcaaaagggccagcggctctctgcatggctctggccatccggcactttcccttgacttgcacaggctgccctgtgccttggagttgctgcagtgaccttgcctgtccttgcttgtgggtctgctgctgctgctttgctgctgatggctttagcacagagggggcccgtgctttttattgctcaccagaggcagatgcatctactgctgtgctgtctcgcacaccccctatgcagcatcattaggaaagctagacacaagtgattcagatggcttaggggtttatctaagccaagtcagataacctcttgaactatctttttgtagccatgaaagcagagtatatttccagaggtataagatgaaaactgtttaaatgggtcaaaaaaagtaacgtgacttttttctccaacagtttgttttgtcctaaagctggtcaagtaacttgaatctcacctg

SEQ ID NO: 119468 - DNA, 945 bp, Homo Sapiens
ttggagtatggccattttcacaatgttgattgttcctatccatgagcatggaatgatttttcatttgttagtgttctctctgactttcttgagcagtggtttgtagttctccttgaagagttccttcacttcccttgacagtggtactcctaggtattttattctctttgtagaaattatgaatgggggttcattcatgatttggctctctgcttgtctgttgttggtgtatgggaatgcttattagttttgcacattgattttgtatcctgagacttttctgaagtttcttatcagcttaagaagcttttgggtgaatatgatggggatttctagatatagaatcatgtcatctgcaaagataatttgactttctgtcttcccatttgcattccctttatttctttctcttgcctgattgccctagccagaacttccgacactatgttgaaaaatggtggtgacagagggcatccttgtcttgtgcctgttttcaagagaaatgcttccaggttttgcccattcagtatgatattggctgtgggtttgtcataaatggctcttattattttgaggtatgttgcataaatatctagtttattgagtgtttttaacatgaagcgatgttgaatttcatcaaagggcttttttgtgtctattgagataatcatgtggtttttgtctttagttctggttatgtgatgaataacttttattgatttgtgtttgctgatccatccttgtatcctggggatgaagccaacttgatcatggtgaataagctttttgatgtgctgctggattcggtttgtcagtattttattgagatttttgcatcatgttcagcaggatattggcctgaagttttctgttgtgtccctgccaggtttagtatcaagatgatgctggcctcgtaaatgagttaaggaggagtccctccttttt

SEQ ID NO: 119469 - DNA, 942 bp, Homo Sapiens
ttggggcaccggctggttatgcagaggctcgtaaggaaagcctagtggcaccggctggttatgcagaggctcctaaggaaagcctagtggcaccggctggttatgcagaggctcctaaggaaagcctagtggcacccgctggttatgcagaggctcgtaaggaaagcctagtggcaccggctggttatgcagaggctcgtaaggaaagcctagtggcaccggctggttatgcagaggctcctaaggaaagcctagtggcaccggctggttatgcagaggctcgtaaggaaagcctagtggcaccggctggttatgcagaggctcgtaaggaaagcctagtggcaccggctggttatgcagaggctcctaaggaaagcctagtggcaccggctggttatgcagaggctcctaaggaaagcctagtggcaccggctggttatgcagaggctcctaaggaaagcctagtggcaccggctggttatgcagaggctcgtaaggaaagcctagtggtactggctggttatgcagaggctcgtaaggaaagcctagtggcaccggctggttatgcagagggctggtgttctctttgtttattaagagtcattttagcagtggcctgaggaaatgagaatttccagaccgtggcccacttgatgagctgggaggtgcttgttcacataacactaatagttactctgacagatgatcttaacttccctgtcctgttttcctgttctgatgtcttctggcatcacaggtgttcatgagcggccggaacgtgcatttgcagcagttgaacacctgctttgtcagtggtgtcctggtgtgtaacagggctggggcctcttctcctgcgctggggctctgctgtccacacgtgtgtgacgtggccctgggtcgtggcctgtgtgtgtccttgaccagagaaattgtgccgtcttg

SEQ ID NO: 119470 - DNA, 929 bp, Homo Sapiens
tacaaaaaagttggggcaaactgtccttaatagctagcaggctttatgaaaggaaacataaggagtttgtgtagtcagaacttgcttaaatttgcttcggaattaggcaccataaactttagttggagaatgggacttaaattttcacatatatgtatacttaattttcagcaattatgacacaataaaaagaatatgcaaatttattgttgtttcagaaggttttgcaggactgggaacgctttagtgtcatcaacagtaaacctcagatactgttctgcacagttcagaagtaccataccaggtattgtgagtggcaagaacgccaggagacagagatgcttctggtagatgagggccagagaaaccagctctcctccattttgacagcaatttctcactgtggccatttggcctccattatgttttgagaggaatttcttgagatcttgagaaatcaccatgattaggccaattgtcaatcagtattcagaaactagaaaggaacaatgagatacttgtttatggttctttagggcatatgtttgaaaaccctctcatctcagatctgtatagctggtgtgtgtttgtgtccataaatacacgtgcattgctgtcgtgcccattaagaaagggggagtaagtaaaagaggaatcgctcagatctttccttggatgaacagcagtggcgtggttggtgtgttgactgtgaacaggctgacttagctgttgatgtatactcagaacctccatctcctcccagaccctgcactttttccttctctgcagtctgattctctaatgactgtcactggacaaaccccagttttatgctcgcttagtaaaaataagtttaaaacatttcatggtggttgacagaacttttgtccccaaacatgcggattcaattccttaaaactcgttgaaac

SEQ ID NO: 119471 - DNA, 804 bp, Homo Sapiens
  misc_feature (245)..(562): n is a, c, g, or t
ttggtgctgcatcatgcttgtcttgcaggatgggttcattcacttgatccttttattgattctttaacataatatgaacgttcacggagccaggaatccagaaggcatgcagctcagctttcaggaacagaggacaacagaggctgctgcctccaaggagaagtggaggtgggaaggatggacgtgccagggatggtgtgaactagccaattggagtctactctgatggcttctgagccccaggnnnnnnnnnnnnnnnnnnnnnnnnnnnnnnnnnnnnnnnnnnnnnnnnnnnnnnnnnnnnnnnnnnnnnnnnnnnnnnnnnnnnnnnnnnnnnnnnnnnnnnnnnnnnnnnnnnnnnnnnnnnnnnnnnnnnnnnnnnnnnnnnnnnnnnnnnnnnnnnnnnnnnnnnnnnnnnnnnnnnnnnnnnnnnnnnnnnnnnnnnnnnnnnnnnnnnnnnnnnnnnnnnnnnnnnnnnnnnnnnnnnnnnnnnnnnnnnnnnnnnnnnnnnnnnnnnnnnnnnnnnnnnnnnnnnnnnnnnnnnnnnnnnnnnnnnnnnnnnccccaggggcaggatcggcttcatttctgggaccagatttagccacccctcccctctgagggcctcttttgggtaccaatgtggcaataatatgaataacaaatagttttattgtggccctactatgtgcctgacactctgtgaaggactttccgtgtattaaatcatttgtccttcacgaggccaggtctgccacttgccctgttttatagatgacggagcttgggatccgaagaaactga

SEQ ID NO: 119472 - DNA, 751 bp, Homo Sapiens
tacaaaaaagttggtttaattgtttcgatcatagagcgaacacttctactctctgtgatagatttgcaaacagaggaaataacgcatcctcgtgtccctcttcttggtgttccacaggccatgtgtgccctagccctcgttcatgcaaggtctgtgtagggaaggtggacttcagctcagcaacagcatcccttcccacagggatcaggtgggtggcttgagataccccttccatggggcaccacccattcagtgagacggggaagccctgggtgggagggagaacacctccacatgtcttctactctctccataggatggaatgagtgtcccagtcccaggagtatccatttcccactgtgtagcccagtactctggtctcactgtctctgctgaatcctgtctcactgtgcatattattgtggtttatatcagtcagtaaaccaatgtgagtcttcatctcttgcattcttaggttcatagttttgtgtgtctcctgtaatgacccttctctttccctttccaactcctgaaagattgccactatttcctctggaactttgtttcgttaccagcaaaatcctcgacatccatacccgtttcctggctttccctctcctttcctctgaatggtagtcttttatattcagctgtccacttgacatcaaaatagacattttgaactcaatttgcctaaaacttacccacaaatttctccccaagtctctcccctaactgcaacacaaaaacc

SEQ ID NO: 119473 - DNA, 619 bp, Homo Sapiens
actttgtacaaaaaagttggctttgtctttcctttatcttgctttatcctcttatccaattctagactcttaaataatcactgtatttttctcaagtatttgttattttttattatcctttagatctttttgttcatggctctttaaaaatagttttactgataatccaatcacttggatagttaattttattactttttgtttcctttttaatatttattcttcccgttaagggttttttggctataaattcgtacttgataagctatgttatttctttgtgtaatttaatagtagcattctggagtagattctttttttgtattctggccttggaatactttaattccggaccaaaagaggtcaattttgtgagtattgcctattaagtaaacaacatccctcatttttaatccaaatatcaatttgacagaataacaagggtcagaaattcaaaatagctgttagacacctttgattctttgctgctctctggttatgtatgtgtgttgtgcatcttccttgttgttttagagtttcctaaattttttgcttctggggacttgagtatttttaaatgttcttaaaattatatgaatctacccagaatgtagatgtc

SEQ ID NO: 119474 - DNA, 676 bp, Homo Sapiens
  misc_feature (304)..(346): n is a, c, g, or t
  misc_feature (365)..(609): n is a, c, g, or t
cagataaagagaactttgtacaaaaaagttggaacttcctctttccgtataaaatagcaagggtgcccgatgtgatcttgatctggagaggtgcatggaaagtttccttcatgcaggtcactgataagcaagtaggcgcaactgcagttcctctgccttccctcccccgctgccctacttctggtctgtggctttggtctaagattgtccagtgaccatggcatggggctggctgctggccaaagggcacttctccctaccctggctgaccagactagtttattgcaggttagcgcgtgtttgnnnnnnnnnnnnnnnnnnnnnnnnnnnnnnnnnnnnnnnnnnngaaatggactttcgctctnnnnnnnnnnnnnnnnnnnnnnnnnnnnnnnnnnnnnnnnnnnnnnnnnnnnnnnnnnnnnnnnnnnnnnnnnnnnnnnnnnnnnnnnnnnnnnnnnnnnnnnnnnnnnnnnnnnnnnnnnnnnnnnnnnnnnnnnnnnnnnnnnnnnnnnnnnnnnnnnnnnnnnnnnnnnnnnnnnnnnnnnnnnnnnnnnnnnnnnnnnnnnnnnnnnnnnnnnnnnnnnnnnnnnnnnnnnnnnnnnnnnntgagccaccgtgcgcggcgcatgtgtttgttttcataactgtgaaaacagcaacaggcactgagaaa

SEQ ID NO: 119475 - DNA, 845 bp, Homo Sapiens
gctgttggatcggtgtttactaagcacctactctaagcctgtcactgtgttagtgttaaggatttgtgtgaatgacctcttttaggtacttcattttacagatgagaaaaatgacgcttagggaattaatcaccttaacaggtcacacagaaagaagactatgagttctgtctgacccaggccccatgctcctaaaccttgcatgacactgctctttggaaagccctatcaggacatcagctagagaggaatgaaaggtttttagagcccagtgatggcttaccccagctgtatgaatttgttagcaacccagttaaataaagtcttctgatttttctatagtaatctggcagtttaggaatggagaggtgggggagggaggggaagataaaagatagagtaagagttcagtaaattagaaaggggattattttgttgttcataagtgtaatgattggattttcatgcacatgtatgagatgtgcctccatcaagccttgttactacaaagtcagtgcattacccatctgatgtgggaaaaataaatcagaaagaggcctcagcttgtgggaatggtggaatgcaatggcttgtgttgttaagcaaaattgtgttttacagtaaatatttattgtggttcttttgatgcaagttatattgggatatggaggaaaatgcaaaaatggataagatggtgtatttgacctctacacggttagagaggaaggtaaagtgcttcactatagtgcttgattgaagggtatgacaggggtggaaagtggagaagtatgggaaagtattatacaagttagcttgtagagcgagggtggcattagtagggctgg

SEQ ID NO: 119476 - DNA, 730 bp, Homo Sapiens
ctttgtacaaaaaagttgggttttgcgtaccgaaaagctgatacaaattaaaacccaagtagacctcattgcatgtcaccctatgaatgttgacaatggaaggaataccttgcctgtagtatactgtcacttctggattgataagctgaggaagaaagttaagtttcttttttacataagtcagaaaaacttacagctggtgttcctagtttcctggttgacctcagcagatgaagtgaacagatagtgttaattcagattgaagaaattatctgaatcttggtttgtgtagatttacaatctacatgcaatattaactaaatcagatagcttttacagtttcacatgtgtacataggttccctcccggtcccttccatatccattagttattgaactttctaaactggcattgaaacattacaacaatgttttgttgcaccaattttataaacttaagcagtgcaatacgtgttacttttctgaggcaaaccaaaggtaaatttctcaaggttcttgctgccttctttagcagcatttgatggaagatcttttatacatttgtaatagataaaaataaaccagattgcaaatccttttttaaaatcctaaaccatgtaccaagtttttggtccaaattatgtaaataagttaaacttaaattgcattctattaaccaatatgagtgtatttctgtagcatagttatgttgaaataaagttttaaaacca

SEQ ID NO: 119477 - DNA, 909 bp, Homo Sapiens
  misc_feature (204)..(213): n is a, c, g, or t
  misc_feature (231)..(475): n is a, c, g, or t
  misc_feature (572)..(625): n is a, c, g, or t
ttggccaaaatattttcatcactccaacagaaactgtagctattaagcaataaatccctacttccccttctcctagcccctgggaacctctgttctactttctgtttctatgaattcaactactctatgtacctcacataagtggagtcatacggtatttgtctttttgtgcctgccttctttctttagcacaatattttctcnnnnnnnnnngagacagagctttgcttnnnnnnnnnnnnnnnnnnnnnnnnnnnnnnnnnnnnnnnnnnnnnnnnnnnnnnnnnnnnnnnnnnnnnnnnnnnnnnnnnnnnnnnnnnnnnnnnnnnnnnnnnnnnnnnnnnnnnnnnnnnnnnnnnnnnnnnnnnnnnnnnnnnnnnnnnnnnnnnnnnnnnnnnnnnnnnnnnnnnnnnnnnnnnnnnnnnnnnnnnnnnnnnnnnnnnnnnnnnnnnnnnnnnnnnnnnnnnnnnnnnnntgagccaccacgactggcctagcacaatgttttcaaggttcattcatgttgtaacctgtatcggaattgcgttcctttaaaaggctacatagtattnnnnnnnnnnnnnnnnnnnnnnnnnnnnnnnnnnnnnnnnnnnnnnnnnnnnnntgtttatccattcatctattggtggacatttgactattataaatagtgctgctatgaacatttgtgtaaaattatttgtttgaatgcctgtttttaattctttcagttctacctagagtaaaattgctgggttgtatggcaatcctacgtttaactttttgaagcagttgattcttattttttaggatgctttcctccatgtggttgttatatcctggtgggcccgatggcccttcgcacagggctgggcaccagagctgagcccacgtgcagtgggcaatgga

SEQ ID NO: 119478 - DNA, 307 bp, Homo Sapiens
caataaaggcaactttgtacaaaaaagttggggctcatttgcccttagaagccggaaaataggtcgcgattgttgatgttattgatggtaaaagggctttggtctatggaccttgcgctcaagtaaggagacaggccatgcctttctgatgcctgaagctcgtgaatttcatcctcaaatttccgcagcatgcccactacaagtatctccgacgatcatgccagattgccgacgccagtaggaaaccggctgcttcgatatgggccggaaagattgaaaccagaaaaacttgagccaagatgacaaa

SEQ ID NO: 119479 - DNA, 444 bp, Homo Sapiens
  misc_feature (82)..(361): n is a, c, g, or t
ttggcagattctttccgattatattctaggaatcccctggaaactaccgaagttagttcaaggtgagaaagacctaatggannnnnnnnnnnnnnnnnnnnnnnnnnnnnnnnnnnnnnnnnnnnnnnnnnnnnnnnnnnnnnnnnnnnnnnnnnnnnnnnnnnnnnnnnnnnnnnnnnnnnnnnnnnnnnnnnnnnnnnnnnnnnnnnnnnnnnnnnnnnnnnnnnnnnnnnnnnnnnnnnnnnnnnnnnnnnnnnnnnnnnnnnnnnnnnnnnnnnnnnnnnnnnnnnnnnnnnnnnnnnnnnnnnnnnnnnnnnnnnnnnnnnnnnnnnnnnnnnnnnnnnnnnnnnnnnnnnnnnnncaaaaataaaaacaatacggaataatggaatagaattttgggaaagtttgtctgaaatatcctaagtttaaaaatacttgatt

SEQ ID NO: 119480 - DNA, 975 bp, Homo Sapiens
  misc_feature (104)..(222): n is a, c, g, or t
  misc_feature (269)..(363): n is a, c, g, or t
  misc_feature (479)..(921): n is a, c, g, or t
gcaatgcttttcctttaaaagccaactttgtacaaaaaagttggatctgtaaagattccaccaaaaaactgttaaactggtaaatgaattcagaaaagctgtannnnnnnnnnnnnnnnnnnnnnnnnnnnnnnnnnnnnnnnnnnnnnnnnnnnnnnnnnnnnnnnnnnnnnnnnnnnnnnnnnnnnnnnnnnnnnnnnnnnnnnnnnnnnnnnnnnnnnntgtaaatttaatcatgtaggggaaatatttgtataccaaaaactgtnnnnnnnnnnnnnnnnnnnnnnnnnnnnnnnnnnnnnnnnnnnnnnnnnnnnnnnnnnnnnnnnnnnnnnnnnnnnnnnnnnnnnnnnnnnnnnnctatgcaaagtgctctacacattcagtgcaatccctatcaaaatttcaatggcatttttcacaaatagagataaacaattgttaaattttatggaaccacataaaccctgaagagnnnnnnnnnnnnnnnnnnnnnnnnnnnnnnnnnnnnnnnnnnnnnnnnnnnnnnnnnnnnnnnnnnnnnnnnnnnnnnnnnnnnnnnnnnnnnnnnnnnnnnnnnnnnnnnnnnnnnnnnnnnnnnnnnnnnnnnnnnnnnnnnnnnnnnnnnnnnnnnnnnnnnnnnnnnnnnnnnnnnnnnnnnnnnnnnnnnnnnnnnnnnnnnnnnnnnnnnnnnnnnnnnnnnnnnnnnnnnnnnnnnnnnnnnnnnnnnnnnnnnnnnnnnnnnnnnnnnnnnnnnnnnnnnnnnnnnnnnnnnnnnnnnnnnnnnnnnnnnnnnnnnnnnnnnnnnnnnnnnnnnnnnnnnnnnnnnnnnnnnnnnnnnnnnnnnnnnnnnnnnnnnnnnnnnnnnnnnnnnnnnnnnnnnnnnnnnnnnnnnnnnnnnnnnnnnnnnnnnnnnnntaaatattcagcttaaaatgggacaaagaattaatatatacctgaaactataaa

SEQ ID NO: 119481 - DNA, 926 bp, Homo Sapiens
ttggctaatattagaaactataaaagggtgtgcattcacatccccattctagagctcagatcccagcattcttattacatctcaaagcacctctgtgattaggctgcacctagaggcagggctgcagaaggaaaagtgcacccctgtgcactgtgcagcaccccacactttaccagtatgtccaaaggaagtttttgaggacaggggagccttcccagcctttccagaaaactgcctgtatgaggcccaaaaaacttaattgatgtcaaagagctttgataaagcaaaactaaaattcagaatgacagaaaaagagggattattccatgatgtagactgggatgaaataagggacgttagttgaaattagcgggcccttgaattaaatttggaacacccttgatgctctgaatgttcagctatggagactgatgcaggaacagaaagggcagcccctctctctcggttgacaccacttggcctgtctccctcccagaagtctcactctagaattctccttctaacccaagcaccagaaaccttaattgctgctcagcctctgtctggctccctgctctgctgcactggcttatcagtcttctttgactggaaactcaatatcccctgcagaaagtctgcaatcacgctttgaagttatttgcatccagtcagaacaacctttcagttctaattctaaattgagtgcctcggtgatttcaatcgcctgatatgtagggcaggtggattctacagcagtcacactgggtcacagttcttagtgacattagtgaattgatgcataaaactgacagaattgtgaatctcctcatggtgagtaagaatgaaagtaaccaatgctagtcaaagagttatacaatgtgaggagtttggtttcaaatagaatgaggcttacatgccctctcctg

SEQ ID NO: 119482 - DNA, 209 bp, Homo Sapiens
  misc_feature (136)..(152): n is a, c, g, or t
gggtgtttcattttaaattgagcattaagggaatgcagcatttaaatcagaactctgccaatgcttttatctaaaggcatgttgccatttttgtcttatatgaaatttctgtcccaagaaaggcaggattacatcnnnnnnnnnnnnnnnnnagcagtttgagttggtgtagtgaattcttggttatcaaaatactcttatatctttgg

SEQ ID NO: 119483 - DNA, 865 bp, Homo Sapiens
ttggccgcgtttcccgggacgctcacgatctactctccccgggaggccggagcctcgcgagaccaaagtgctggcaccgccccgtcgagcccctgcccctgtgcttccccgcctattcttgtcaggtttctcgggcctctttcgcgccccgtcccaccgactccttcccccttccccccgatttgttggagttcctgcctttacccccctgtgttttcttcccttttactggctggtccggcctccccactatcctgtggggtgttgccccacttcgggtcctccaatgtgtacccggcggcctcccccacggacacccccacttgggagccagcgaaaacgccggaagcttgtgacaccagatcccaaggacaagcccacatgtggtgaggaagttcaagggttccagagatggagcatacttgacggacaatataaataactgctgggacactgggcagtttatgctattcattgtgagattcactttgattgccattgcaaattgaggctgaatggtttggtgtctggtggaagaactgctctttatgattgtggcagggtacatttcaactcttgttagttaatactacatcacagggatgttgttatgacatccttattgtagagatgagccaagtcgagtattaaaatgaacttctatgcctggtaattacgaaaatatctcctataaacaagttgctacctgtgagtaatgggaacagtgctgacctcggcatgtcccgtttaatggaacttcctgcattcaagcaaggatttcagagatacatataaatagtcctggggaagatgtagagaagctgtcacgtgatattccctacttttttattctgttgtgcttttc

SEQ ID NO: 119484 - DNA, 475 bp, Homo Sapiens
ttgggaggcagcgccctcaagacatctccaccatggcctgcggtctgctgctcctcaccctcctcattcatggcgcaaggtcctggggcccctctgccctgactcatcctgccgccgtgtcggggtctcctggacaatcgatcatcatctcctgcagtggaaccaccagtgatgttggtggttataactctgtcgcctggtaccaacaactcccacgcaaagcccccacactcatgatttctgaggacgttaatcggccctcatgggtttcttatcacttcttcggctccaagtctgacaacaacgcctccctgatcatctctgggctcctggctgatgacgacgatgattattactgctgctcatatacaaacaccacctcccatgtggtagtctgcggaggaaggaacctgaccatcctacgacagcccccggctgccccctcggccattctgttgcccccgccctcttatga

SEQ ID NO: 119485 - DNA, 298 bp, Homo Sapiens
  misc_feature (93)..(111): n is a, c, g, or t
  misc_feature (115)..(132): n is a, c, g, or t
  misc_feature (162)..(171): n is a, c, g, or t
tcttacattttaaaaaggtacccaatttaaacggaaagttctttgacaattatattgccaagacccccttcccccggggtaaaaccccaccannnnnnnnnnnnnnnnnnnacgnnnnnnnnnnnnnnnnnntggaaacggaacccaaggggggatccaaannnnnnnnnnaagatcaaaatcccccccggcccacaaaggcccgagggctaaaccaccaggggcccaccccggtcaaatggattttccaggggggtgggaaattcaacactgccaaggccctttaaaaaatttcttt

SEQ ID NO: 119486 - DNA, 917 bp, Homo Sapiens
  misc_feature (219)..(269): n is a, c, g, or t
ttggctacagcataaaatgtgaaatgctttcatcctcattgcccatttccaactaccattctgtttctcctctattgttcatggtttttcaaacatatctttgatttttcaacccccctttttcattaatctgttcttaaaacttctttttactggctttcatacttagcattccagtgaaatgttcttagactcaccagtggacaaataataaggccnnnnnnnnnnnnnnnnnnnnnnnnnnnnnnnnnnnnnnnnnnnnnnnnnnngttgaattctccctcctttggcttgtgggatcctttttctctaatatctgtctttctttttttagttgatctttccacccactcccctttctcctcttctccactgagaataatctccctgtcttttattcacttcattttctatactcctatttatccattttgattgtttatacctactatttgtattcgaatgacttcatttttcccaccctgtgggtcagtttgtgacttttggaattttccacaggtacctgtacaacttgatatttgaaaacaggattcatcaccatatatccccagcccccgttttctttttaaacaggcctcattgcgtaattcctttgccctgaaaagtgtcaccacctttatatttttaccccagccttggagttatctttttctgctctccattctccatgtccaaaaacttgctgtcagtccagtttttaatcagttttctccttgaggcttgatctcccatttctctcatcccattatagcttttcatgtagatctgaacccaggttactgtaattcttttttttccaatttccttgctcccaggatccccatcttgtataaagtttctaagtgctcctcctcaactccatttttacaatatccgtattgtaaattttcattttc

SEQ ID NO: 119487 - DNA, 751 bp, Homo Sapiens
  misc_feature (374)..(489): n is a, c, g, or t
ataggctaggtacgaggctgggtgttgaattcggcacgagggccctttcctcagtcctgctgatgtcctccagctgattccaggctgttcccggccacccctgaggccgtcctttcgcttcttgtaaaagcctccccgcctcctgagctccctcggtcgcctcccgagaagccaacgggcctctctggtggagcgctaggttgacagcgttttagcaggaccgcgagaaaccggggagatcctcttacgaggaaaaactccaagattacatccctgttatctttcctccaagagctgactaaggcttggaacagaaaccagatgatgcacatatattatcgtcaaagagcttatgtcacattcttcttgggaannnnnnnnnnnnnnnnnnnnnnnnnnnnnnnnnnnnnnnnnnnnnnnnnnnnnnnnnnnnnnnnnnnnnnnnnnnnnnnnnnnnnnnnnnnnnnnnnnnnnnnnnnnnnnnnnnnncagccagaaacgcatctttttctacatagttgctgttgctgatgcaaagaagtctcgcgaattcaatccaaataattccactgctgtgctgagaaaagggatatgtgaataccatttaaaaaactatgctgctgctctagaaacttttataggaggacaaaattagtgcagatgctaattcagtgactggattaaggtgtcagaagctcagaatggtcagaatctgaggtgagttcgctctgtagccagggtggattgcacg

SEQ ID NO: 119488 - DNA, 994 bp, Homo Sapiens
  misc_feature (293)..(823): n is a, c, g, or t
aatgtctgtctctctgatcagtggaaaagtgaaaatttctagtatctagcactaacgtatgacccaactttgagggatcacaagctagaacaagttgaggatttaaaatcctggataattatatacttaaagctcatgagcataaagctcacttgaccatgcagaaatgctgggaagcagggtgcatggcatgggaatacatctccctgatctttgagagagcctctctggatattctttcagagcatgagccaggatgtactgactactttcttcctcgtgccgaattcttnnnnnnnnnnnnnnnnnnnnnnnnnnnnnnnnnnnnnnnnnnnnnnnnnnnnnnnnnnnnnnnnnnnnnnnnnnnnnnnnnnnnnnnnnnnnnnnnnnnnnnnnnnnnnnnnnnnnnnnnnnnnnnnnnnnnnnnnnnnnnnnnnnnnnnnnnnnnnnnnnnnnnnnnnnnnnnnnnnnnnnnnnnnnnnnnnnnnnnnnnnnnnnnnnnnnnnnnnnnnnnnnnnnnnnnnnnnnnnnnnnnnnnnnnnnnnnnnnnnnnnnnnnnnnnnnnnnnnnnnnnnnnnnnnnnnnnnnnnnnnnnnnnnnnnnnnnnnnnnnnnnnnnnnnnnnnnnnnnnnnnnnnnnnnnnnnnnnnnnnnnnnnnnnnnnnnnnnnnnnnnnnnnnnnnnnnnnnnnnnnnnnnnnnnnnnnnnnnnnnnnnnnnnnnnnnnnnnnnnnnnnnnnnnnnnnnnnnnnnnnnnnnnnnnnnnnnnnnnnnnnnnnnnnnnnnnnnnnnnnnnnnnnnnnnnnnnnnnnnnnnnnnnnnnnntccctggaagtccctcgtggctccctgttcgacctgcgctaacggaactgtcgcttctcctccggaaggggggccttccaactaccgtaggttccatcgggtaggcgtcgcccaacgggttgggagaacccgtcaccgacgcgggctaacggtatacgtctgatcaacgga

SEQ ID NO: 119489 - DNA, 987 bp, Homo Sapiens
  misc_feature (653)..(653): n is a, c, g, or t
  misc_feature (714)..(714): n is a, c, g, or t
  misc_feature (877)..(877): n is a, c, g, or t
cttgtggagtcttttttaatgactatattaaaaatcataaataccatgccaatcttttgtatgtgaggtaattaaaagtttgtcatcactgagcaattcttgcctttgaaatcccattttgcttgtagaatgttagaagaatttgccaaggagaaacaaatcttatcccaattctcactaattgttgattgtcaaagtatttcaagtccaaggtagcagcctcatagttaaggtttcctcctgcaatccactcaatacggctgacccagcctgcgtgtacaagttatgccctgcacgtctggtagaaccttgtggtagcatctaactcttccagacttccaggggaccatttctaggtataaacccagaactcattgaatgatttcctaacagctacatttccaaaggaaaacacaacaaaacttgttcatgacagccattaaacttcttgtgggctaatagaaagcaaaattctaaatggaaagaaatgcaaatttcgacacacagagcacatgtgtaggtcagaggggcaattcacttgtgatctggctgggccagcagggctccactccccagctggacctaggcaatctgtcttctgtctccatcaggttgtggcttccagaacttgggctcagagacggttccctatngcaatccccttggcaggaaagaaccttctggcacaccgttgctatcccagccttcaccctngcaactcctcatgtttatctattttattgaatgggatcagggataaccagtttctcgtcgattctggctcgaggacaatcctatatgagtcgataatcgtatcagtaagtgttctgtgtaatgtatcgtcacatcaacacatacacggagcaaatgtagctgnggctatgatgacatcaatatgcgtggccacgcgcttcatcggaactgctgcatgatatatcgcacccggaaaggtggatgggctcgtctgccagaccggccgctcgggga

SEQ ID NO: 119490 - DNA, 423 bp, Homo Sapiens
  misc_feature (296)..(327): n is a, c, g, or t
tgcatacagaattattttatttaacttaaaccatgtagtactttactagaaaaaagcagagtaagagaaactaacgttgccttagcttcagccattcaaaatagacagtttcttttttccattatgtaaagaatccagagtatatcgcaataacaggaataaattcttacaacagaatatacaaaaacattttgaaatttttttcatctactgattttttatataaacaggattttttaggaataatttatacacagaaagtcattttatgtaacaaattggccatgttattaccnnnnnnnnnnnnnnnnnnnnnnnnnnnnnnnnaacaagaaaactcagaaaatgcattatttgcggtgcatccattccatccgcttctggtttgattttttatcccagcaaagggataccagaggtagc

SEQ ID NO: 119491 - DNA, 444 bp, Homo Sapiens
ggggagaaaatcacatttattagttaagacgaccacaggctggacacaacacacatgctaaaaagtggactgtcttttaaaacttccaaggtaaataggtaaatgttttccacagcccaacaatcatttcagtgtttacaaattaaaaggcccacggttaagacattaaacagtaaaatatgtaataaatgctccaacctaccctctcccccgaaagctgcttctaagtttaaaaccatgaatttgactaaccatgccattgaaaaccatccaggttactacaggctgaattagttttcaatgtctaagtcctagaaatatcactccctatcccagccctagcaaattctaactttacatttgacataaggcattaacatcaattaaagcctcagtttaataatcagaatttaaatgaagtctcctgaagacctctcttctggc

SEQ ID NO: 119492 - DNA, 196 bp, Homo Sapiens
cttggggaaacatttattagccatggttcagaataatacaaaaataaaggtgtggctttatttacacacactcttgaagctcttggcattcagcggacagcaaacaccagtctcacactggtccttgcttaccctaaatgctattaattccatcactctgagtatggtgtttgctgtccgctgaatgccctcgtgc

SEQ ID NO: 119493 - DNA, 341 bp, Homo Sapiens
gcatttcagaatggaaataaaaactgaacccaggcaatatttagttaatctaaagtaaaactctgtacacaggtaaccttatgcagcacattgtgctaaaagtatggaacagttaacactttcagccattactgaaaataaacatgtagaaactaagcaacaagttaaaatacagtaatgcacaacttaacaattttaagttttccacatggagcaataaagcaggtaactgaataatttaaggagatgcaaatggccctcttcattcttaattctcggcaatttactcaggaaaataaatttctggtcgcagccgaacagttccagtccgatctcacctg

SEQ ID NO: 119494 - DNA, 920 bp, Homo Sapiens
  misc_feature (84)..(106): n is a, c, g, or t
  misc_feature (124)..(124): n is a, c, g, or t
  misc_feature (130)..(192): n is a, c, g, or t
  misc_feature (578)..(601): n is a, c, g, or t
  misc_feature (643)..(655): n is a, c, g, or t
  misc_feature (748)..(760): n is a, c, g, or t
  misc_feature (826)..(862): n is a, c, g, or t
ggagcgaggcctgggtggcgaattcggcacgagggcgcgcccaggacgcctcctctcgctgctggcccggccggcggccctgannnnnnnnnnnnnnnnnnnnnnnggccatggcggcggcggngcgctnnnnnnnnnnnnnnnnnnnnnnnnnnnnnnnnnnnnnnnnnnnnnnnnnnnnnnnnnnnnnnnaggacggacaggacccgcacagcaagcacctgtaccggccgactgttcacgcacgggatccgaggccgcgcacttcgcatgttcttcgcccctggtgggacctgccagggctgcaccgactggaatgacctgggagacaatacaccgcatggagatgccaagcctatggggctaagtggactgcccggcccactccacgtggggtccgcccaggggggggaaggatcccccacccttaaaagttttccaggcccaggcaaaaaaacttgggaaaaacaccagggccccccggggacttccagaacccgggaaaaacggagtgcttggccaaccctggaaaccggggagcccctgggaaacccccaaaaaccgggaaaggggggaannnnnnnnnnnnnnnnnnnnnnnngagggcttctaaacaaaaggggggggctggtattttaaaaannnnnnnnnnnnnagaaagaaaaacatcttttttaagatttcggccccccttgtgccaccaagaggggggggaacacacccgctttatatatcagagggcttcctnnnnnnnnnnnnngccgggggggagggtggggccgccctgcgggaaaaagacccctccggtggttcttcccacctaccnnnnnnnnnnnnnnnnnnnnnnnnnnnnnnnnnnnnncctcttttaaaataattccccacaaaacatttgtgaacaaaattgtggcgccggggtg

SEQ ID NO: 119495 - DNA, 415 bp, Homo Sapiens
gagcaacatgctgttttaatgagcgcctggatgcaggcgggctgaggcctaaaatggcgtcagccccaagtgaggacggaacaaaggtttcatagtctcctgtaacaggaagtctcctagtcgtacgaaactgctacgtgatacccggatggcctctttctcgatcttcaggggtacgtatcttccggccagggcaggtgtcttccggccggctctcttcctgattccgctatcttgcttcggcacgctgctgacgcaagtagccttgcgccctgggactgggcctgagaagggaggagtgatgcatctccttaagctttcaggccccggggagaatcttacactcaggaaccctctaattcagccacgtggacctgtgaatgttctttgactatgctgagatccttcccacctc

SEQ ID NO: 119496 - DNA, 455 bp, Homo Sapiens
  misc_feature (72)..(107): n is a, c, g, or t
acagtttgaaacagaaatttattctcagaataatgcacagaagcacaggttgaggctactcttgggaagctnnnnnnnnnnnnnnnnnnnnnnnnnnnnnnnnnnnngaatgccagggagaacacagttgaaggaaggaaacatgcaatcacaaacaatgaacaactctaaagacaaaaaggtttggtccaaaagaactcaacataattaatccaatgactgtgaagaacttcactgagtaggattagaaaatgccagatgaattgttccccaaggggggcccttaattgaacaagcggggcctgccttaagggaaataaggactgacccaatgcggaaaaaacctttggcctgtttgcaaaacttggggttaaattccacaagccgggcaaccctttcccatcaattgcccggggacaatccgcaatgtgttttcaaaaggtttttttgttgcc

SEQ ID NO: 119497 - DNA, 160 bp, Homo Sapiens
caaactagttattttattaaacgatattaacacacatttcaaaaggatttcattgttgttgcttctaaagcatgtacttgttttgttttccacaccgaacacgtgagaatatcaatccaacatatctattttagatcttaacaggcgcccccgcccactt

SEQ ID NO: 119498 - DNA, 503 bp, Homo Sapiens
  misc_feature (375)..(388): n is a, c, g, or t
acttttcaaagattttactaaatcatttttttaaacaaaatatacattaaatctcagatttacagaatatagaaataatttatccaaagaaatttgcatttaaaattgttaatattgcacccaacagtatgtctttgacacatttgcattgtcaatctttcacacactagtttccatagttcgagaattctgttttttaccattgggctgtgaatgttcacaatatcagtcctgttgaattcctatgaggtaatcacaatgtgtatatgttcattttctaggtatgataaaagaatgtatggctttttattctgtggaagtaaaatcctgaacgtttacaacttttccttaacttgtaaataaaaaattgtaagnnnnnnnnnnnnnnacagaaaacttagcttgtgtaattctgttagtttcagatttctctcctgtttttgcaaattgtgggaaagattgacaatgcaaatgtgtcaaagacatactgttgggcctcgtgc

SEQ ID NO: 119499 - DNA, 370 bp, Homo Sapiens
gattaagtcatttatttcaatacaggcattgttttaaatttgcaccttgtctttaacacatttcataaccagagaacaggtctgagaacaagtacataaaaggattatttgacaaagttttaacaaaagtgcttacagcttatttgtttcagatatacagaactgccagtcacaaagagccactaagtggcaatacagccacaaacttgcctgggaagtaaaatattttacatatttacactgtacatttaaatgggatattctgaagcattattattatcaataaactctaagcaagaagttctctaaaactcatagccccataaaattaatattctttgttaagtgccagacctcgtgccgaattctt

SEQ ID NO: 119500 - DNA, 401 bp, Homo Sapiens
  misc_feature (68)..(84): n is a, c, g, or t
aaaagttactatttaaaggttggtttgattgttgcgtcttaattgcctctcctcccagtttgccagtnnnnnnnnnnnnnnnnngggaaaacagccaggccactgttgctgtcacattctggagcctgggccagggccatttcccatcgatgtgagctcttctcatctcacagcattccctgcgctgcttccacccccttctccccttccagatacccagcatcgcagcagggatttcacaatcccatactgtgtcgcctcccatccaagcgccagggagggtggggggtaggagctaagacttcctctggacagatgggcagggcagagttcactgaggtgaaggaagaccacaggttaacaccaaagtattgtacagctgtcaatgcaaaacttttttg

SEQ ID NO: 119501 - DNA, 210 bp, Homo Sapiens
  misc_feature (80)..(88): n is a, c, g, or t
ttttttacacccaatgaattcatctctttattgcatattgctatttttaaaaaaacatgtacagtctcataacacatacnnnnnnnnnctcagtactatctaacaacagtcttgcacctaaagactaagtggttccaactactaagctaataagatataagacatataattaagtttacaaattatgcattttctttttggcattaattt

SEQ ID NO: 119502 - DNA, 407 bp, Homo Sapiens
tgatccaattttgacttaatgtgattactgctctattccaaaaaggttgctgtttcacaatacctcatgcttcacttagccaaggtggacccagcggacatggttctgcatgcttttgcgggcagacacgcgggcgcgatcccacacaatcttgcggaggcggccccgaagcagtttgcgttaatacgcgccggttcatccagaaccaggatgtgttcctcttctcttacatgcgcctgtgatagcaggcacttcatctgatcaggggcgtacggcatagaagtttttacagctgtgatattctttgcgtgtagctattgaagttgcaaaaatattattattaagattatgacaagtgtgtcttacgtgccaccacggcgttttatctataggactctcattcggga

SEQ ID NO: 119503 - DNA, 604 bp, Homo Sapiens
agggcttgatatgtctaaatgtatcaagtttcaagtgtgctaactttatgaacacttgtctctgtccttaaatgcataacatgatcttaaatttttcagatctttaaaaatgttaagcaatgcaaagatttctaccccatctccctccatatctttaaaagccaaaaaccacctaccaaaactccattactgtttgtgaatgaagaattttcatgacttgaaaaccttcctaatgtcccatcgttaacactaacttttttaaaaaggagggctcttgttgtgttctttaacctcttttcacatcataaacttcttcatggttgacatcagtactatcctcttaaaaattcaaatgtgaactaacagcatcatttattgaaggcatattatgttaaaattagtgattttcccaaggacaaaatgttaagtagaaaagtcagtactcaaattcaggtgtgactcccaggcccaagcatagcctggaatgaattaagaaggtcaccatattaattttcataaggtgaaagaaaacaagcattatatatttttccacatcagaaaatgttgaagacctaagagactccagtgggtggctctgaaccct

SEQ ID NO: 119504 - DNA, 437 bp, Homo Sapiens
tttttcattataagtatttcagcaattaaactttaattatattaaatgattatatgacacagaactaggatctcttacaaaagtttagatcagagtgtcattgcaattaagaccaatgtagccaaaaaatagattaacactcttcaaagtcacaggaataaaaacaggaagtttaatgtaatacaaattgcgtattcaaccaaaaggggtattttattgttgttagttattcaacatcttgccctgagaggacagggccattagcatgtgaattatttgatccgttctcctcttccaaagctataatatctggaatttcatcagtctcagatgtcaagtctatggtggtgaaatcaaacacctgtaaaagaagaatcttggatattgaaacaaacaccgatgaagtgagttgtcaggtccatctgagctcatggaga

SEQ ID NO: 119505 - DNA, 510 bp, Homo Sapiens
  misc_feature (80)..(100): n is a, c, g, or t
aagtagtttaataaactccacaaaataatagcagatgcattgaaatatttacataattcgattttcaaatctctcattcnnnnnnnnnnnnnnnnnnnnntttctgcctttacggcagcagaacctctttcctgaaatggattggtaaaataagatacttcactggagaggaactaatttatgtttaagaggtattcatattcagctaagaaaatacaaccctttttcagctatatagattagggaatataaaatgatattttctacattttttgacctgtattcaaagttctaaattcaactttgacttgaagagagaaggtgattttggtacccatacagagtagatcatcacaattacaatggaaagataattaacgttttatatgctgtttatttgcttttgaaagtttgggtcagaaaggctgtgataataattctggcccaaacaggtatgcttatacctgacacaaatttcactaaaacctaacacttttggcttggagttct

SEQ ID NO: 119506 - DNA, 407 bp, Homo Sapiens
  misc_feature (63)..(113): n is a, c, g, or t
caaaacacaacaaacatcagtttatgtcctgctcatttttggatccctaatggctggcacagnnnnnnnnnnnnnnnnnnnnnnnnnnnnnnnnnnnnnnnnnnnnnnnnnnnatagtccttcaaagcatcttcagaatcaagattgtcatctagattgcacccgaagtttatctttctagtattcagaatataatcaatcattgcttaaattattccatttcatcattcttgaataaaagctactaattttaaatactaatatctgagatatcttcgaaaagaagattagtcgttgtatgtgttgcttataaattttctctatggtggaaaatattcccaaaccatgtctaagcaatgaaaaaccagtgttctggcaggaaataaactgatgtttgttgtgttttg

SEQ ID NO: 119507 - DNA, 315 bp, Homo Sapiens
  misc_feature (160)..(224): n is a, c, g, or t
gataacggggacgagaacaaagagctgcatgggacaggtgaggccagacaggaagactgcagcgaacaagagggcacagtgggatccatgcggcaatacaggagcttccagcactaacagaggagcctgatcccaccttcatcacacagacttagatggnnnnnnnnnnnnnnnnnnnnnnnnnnnnnnnnnnnnnnnnnnnnnnnnnnnnnnnnnnnnnnnnngcagacacactcaaatctgctaagagctcctacaacctcccccagcaggtcatttgacaattctgcatcttccgctctctggtgctggggc

SEQ ID NO: 119508 - DNA, 362 bp, Homo Sapiens
ccgggagcccttaaccggtccgggagcccttaaccctccgggagcccttaaccctccgggagcccttaaccctccgggagcccttaaccctccgggagcccttaaccctccgggagccccccggagcccttaaccctccgggagcccttaaccctgtgtgactgggcaagggctgggcaggcatttccagcatgaacacgctttcccaggcccactggttggagggcaccgaggggagaagggggacagaggaaaggagccggaagcaggatccagaatttgaacctaggtggcgtgactccaagagggccctctctctcacttgacttcaatagtgacattagccaacttcaatagtgacc

SEQ ID NO: 119509 - DNA, 422 bp, Homo Sapiens
tttgctttctgccttctaaagtgcaacagtatatatcttgtagaactgtgggaggagagaagataatttttctaccttactccatattcttacttcaaactattttgaatagaggttcactgagccattgctgatagactgtgcatagctactagctgtcacactattgtaggttttttggagagattcatagggaagtgaatgtaaccaggaataaaggctctcactttagctctgggactatgcagtggatcttgggaacaaaataagatatctaatctattttccccattctggctagattttggttgttgtgatgctcctacttcctgtataggtttttgggatcatggtgcaggctagtaataggattcagaattgcttcccttttatatcgaccatgtaagggattctaaagggag

SEQ ID NO: 119510 - DNA, 438 bp, Homo Sapiens
gctgcgaagatacttttattacatttcatgcatacactggattttaacaaccagaacatggtgtaattggtgggggctggagagacagcagtcactcccaaccctgagggtgagtccccaacctgagggtgaagagaaaatgattacagtctctgccatagagcttagaatcatccaaacctgggtttcaaattgaaaggcccaaatagcttgagagggctccaggtatttcagctcaaaatagtctcctggttcaagagaactcctgtgaggtcttccacaggaaaatcagtctgttgtgtgtgaccggaaaagttacctaaaagattgaaggagtcaaagaaatggtaaatccaacccacccctgtatgtaaggcgaatacaaacctcactggctttcctaagtttgagttttttattgagaataggcagggaatc

SEQ ID NO: 119511 - DNA, 313 bp, Homo Sapiens
  misc_feature (148)..(188): n is a, c, g, or t
taaagagaaatgtagactgtactaaatatttcatagaggagacctaggaggaggttgacacagcacactgctcagcagatgacttaaaattttcccttagccatttttgttctctcaagtccctttcatccataccaccactgctgannnnnnnnnnnnnnnnnnnnnnnnnnnnnnnnnnnnnnnnncttctgacaaactttgctggagtcctactccttttctctccttcttgagaaaaatgcaaattttgctccactgttttggtatagcagggaagcttccatctttttttactgaagcataacatcag

SEQ ID NO: 119512 - DNA, 936 bp, Homo Sapiens
  misc_feature (286)..(294): n is a, c, g, or t
  misc_feature (418)..(545): n is a, c, g, or t
  misc_feature (598)..(619): n is a, c, g, or t
  misc_feature (682)..(723): n is a, c, g, or t
  misc_feature (789)..(797): n is a, c, g, or t
  misc_feature (832)..(832): n is a, c, g, or t
  misc_feature (861)..(861): n is a, c, g, or t
gggtgtaattaagttaataggaatggcagggatgaatataaatcagaacaggactaacagtttgaaacattagatattcaaatgctcagagctgatgagccgagccactacgctaacaactctgcaaaccaaagggttcacaaattgcacaagaacctggcctcgatcccattgtggtgctggtgtgataaaaaataaaagagggcccggttggttcaattgttgctttggacagaggaggacaagcttggccctgcccccagcggaataaaaccattttttaaannnnnnnnnggcccctttggcggaattatttctctttatacactggggggtggttttaaaaattatgagaaatagagagggcaatatccctccgttttcacaaatggtggcccttccgtaaagggaaatttgnnnnnnnnnnnnnnnnnnnnnnnnnnnnnnnnnnnnnnnnnnnnnnnnnnnnnnnnnnnnnnnnnnnnnnnnnnnnnnnnnnnnnnnnnnnnnnnnnnnnnnnnnnnnnnnnnnnnnnnnnnnnnnnnggggcgcggcccctacccgatattttttaaaaaccatccccgccggcgggtgnnnnnnnnnnnnnnnnnnnnnngcgggacaccaaaacaaacaaaaccctctttttgttcccttccgcgccgggggaggggcacannnnnnnnnnnnnnnnnnnnnnnnnnnnnnnnnnnnnnnnnntgggggggagaaaagaaaacctcttctcctccttcccccacaagagcatttcctcccacatactcnnnnnnnnncgtggggcgccttctctccccacaccaccaagganatccgccgtctaggtcccccctgtccccnaacacaccccacattacatgacgcttctttcctgtcgccactaaacacggcccgcccctaacacagcgggcgggg

SEQ ID NO: 119513 - DNA, 468 bp, Homo Sapiens
  misc_feature (74)..(354): n is a, c, g, or t
agttcacagatctagtaagttaccctcagtttgttttaaaaagtgaacaaagtccatgtaaacatgttcccagnnnnnnnnnnnnnnnnnnnnnnnnnnnnnnnnnnnnnnnnnnnnnnnnnnnnnnnnnnnnnnnnnnnnnnnnnnnnnnnnnnnnnnnnnnnnnnnnnnnnnnnnnnnnnnnnnnnnnnnnnnnnnnnnnnnnnnnnnnnnnnnnnnnnnnnnnnnnnnnnnnnnnnnnnnnnnnnnnnnnnnnnnnnnnnnnnnnnnnnnnnnnnnnnnnnnnnnnnnnnnnnnnnnnnnnnnnnnnnnnnnnnnnnnnnnnnnnnnnnnnnnnnnnnnnnnnnnnnnnnnggacgtagccccatttctcttcccggacaggtcctctgatagtcgggtaggttctcaatcaagcctctcattagttatttggtctgtcaatccatttcattcctgcagtcttcc

SEQ ID NO: 119514 - DNA, 200 bp, Homo Sapiens
catgtttaaagcagtaatttattctgagatttacttttgtctgttttctttccagtccaggtatcaatattttcaagaatattaaagtataataatcaaacattcaattcataacatatatgcttatcagaagcttttacaaaatggaaattttatgttagaagatttgggctaccagtaatattcactgtgcatatttt

SEQ ID NO: 119515 - DNA, 329 bp, Homo Sapiens
  misc_feature (228)..(284): n is a, c, g, or t
taatagatgtgggagtgctccattttccccgacagcgaatttcccctgagaaacgatactagaccctgggtttgcccaccttgtaactcttccttatctcctccttttcatccctaattcatcctccctctggcatggaattgacgcccgtgcagtacatttgccaagtggaccttctttcaatttatgttttattttgctatggtggtgattctttatttgctggtnnnnnnnnnnnnnnnnnnnnnnnnnnnnnnnnnnnnnnnnnnnnnnnnnnnnnnnnngcccagaaaaacctgacttcgataccaaaaaagatgaaactacag

SEQ ID NO: 119516 - DNA, 366 bp, Homo Sapiens
aacaatggtaatatgcaaataacataactgaataatctttttgaatggaagttcttgatctcgatactaagcagattttccttagcatgtctacaggaatttagtgtcaggtcagagttatggtttcaaaaaattaggatttctgtaaacaaaggcctgcacttaaaccttaaaatttattgactgacatgagtggtataactagtgtatatatcaagagttaacatttttaaattggtgtgcaagaagcctgattcaaagtagctcacatggtaacatttattgtaatactttgagatatttagtaataaatattacaaatgtataagtcttctaagacccaaaatgtataccttaagaaacatt

SEQ ID NO: 119517 - DNA, 275 bp, Homo Sapiens
ggacagactaattctgaaaataccgaaggaaaagtagctctatgttctcaccccggttttcctgcgtgtgtgcccttgggtgcgatgcctcccccagcgctctgtggtcgccggtgccagggccccctctggtttggcagggcctggctgcctttgctccctgcagtgagtcttttggtgttttcatgcacggcttgtgcttctggatctgaggcctctcgtgttcacgcggacacttccttccttaagaagacgcctaaaagaggaagttggaa

SEQ ID NO: 119518 - DNA, 317 bp, Homo Sapiens
aggaaaagttttttccatttaatactagactttcaaggattgagatgcaagctttgtatgcaattacatccaatgttaaaattggtaatacataatttacaaagattaacatcaaaacaatcatctatttagatatgcttttgtaaaaaggaaatatattagcagcatttatattttccgcaatcacacagcctacagacatgcagactaactctgtatctatttgcagtgatgtagtgctttgccccgcatttcaaacaccaaaacccgcctggcagctggggggttctttttatttcgttattataaaataactg

SEQ ID NO: 119519 - DNA, 438 bp, Homo Sapiens
  misc_feature (110)..(118): n is a, c, g, or t
  misc_feature (244)..(300): n is a, c, g, or t
  misc_feature (379)..(391): n is a, c, g, or t
aaggtatcacaatgagcaggaaacatacttgatgaaatattttcaaaggagtatattcaattaccatctacaatcaacttaactatgacaacaaagtttttgtgacaaannnnnnnnncagtttgaaagttccatggggttctgtttgttagtctccatgtattttggtacagttcgagatcagcattgttacagtaacaaaaaagctaacaagactacattatagaaaaacaccaagaacatnnnnnnnnnnnnnnnnnnnnnnnnnnnnnnnnnnnnnnnnnnnnnnnnnnnnnnnnngtacattgcaaaggctgttcatatacctcttcacctcagggtcacgttcatttatgctttctttcctacccaaacttgnnnnnnnnnnnnntgaagaaagtaaacaaacaaaaaactagtcaaagctttgtttcacag

SEQ ID NO: 119520 - DNA, 595 bp, Homo Sapiens
  misc_feature (46)..(90): n is a, c, g, or t
  misc_feature (355)..(454): n is a, c, g, or t
  misc_feature (456)..(461): n is a, c, g, or t
gggatttaggatttcagctcaggaaagaaaactacataggtgtttnnnnnnnnnnnnnnnnnnnnnnnnnnnnnnnnnnnnnnnnnnnnnttatacatatccttcccatgagtttttcatttctaatactggctgtgtaatacagtatgtttcataggcttgctgtaataatcgatgggatgtatctaatagtgtttattttactgtaactgggccacagttaggaagttctcaattaaaattagctgtcattattcctagtattaatatggtgatgaacagctaaagagcatttaaataattatcattaatatggataaattttgaccatacctgaataaatatttataatatnnnnnnnnnnnnnnnnnnnnnnnnnnnnnnnnnnnnnnnnnnnnnnnnnnnnnnnnnnnnnnnnnnnnnnnnnnnnnnnnnnnnnnnnnnnnnnnnnnnnannnnnnccctgggcggcccgccccgccccccaaaaatttttcaaaacctttctttgggcgcgcggccccaaagggaaagggaccttggccaaacttgttcccaagaaaacccggggcaggaaaagggttgggatcccccc

SEQ ID NO: 119521 - DNA, 671 bp, Homo Sapiens
  misc_feature (534)..(596): n is a, c, g, or t
  misc_feature (627)..(627): n is a, c, g, or t
cagggtgatgtatgtacatgtgtgcctgccagacacgacaaaatctaacagtgttgtctccagttacatcgagtcagatgccgggagagaggggtgtgggttgctggattacaagggcaggctgccttcttataaaattcttctgcatgaatttttccaatgagcactgattcattagaagagagttatttgtttttgaaaatggagtgagactgatttcatggcagatgtccttggggcttctggatgtaaacacccattccatcaaaatcctgcatttggctgaaaccttccttgtccgttgcttatgttgatgaaggttggaaggggtctggaattcctctggaggtgggactactttgaggctgttggggtttggtgagacatagtattgtggcctctctcttatgttgtgtttcaaagctgggtttggcttcttagaagccgtgagacagcaggctggactctcctaaggtgtcaatgtcatggaagttaataacaggtggggtgtggggagaggctgttctaggttannnnnnnnnnnnnnnnnnnnnnnnnnnnnnnnnnnnnnnnnnnnnnnnnnnnnnnnnnnnnnnacagcagccgtcaagcaggcagcagccctgngcttgtgcacacggctggatgtcagatgcgtccgtccaggcact

SEQ ID NO: 119522 - DNA, 446 bp, Homo Sapiens
  misc_feature (422)..(422): n is a, c, g, or t
ttgtctgactttcctgggctcgaggttttcctttattcatttatcatgatacagctttggccaacatacacacaggagagaaattgttgacatgtggaacccaagtacagaaaatctttcattttcctccctgtctgttcaccaaataagtttttgtttatttaaagactacagaggatttggctgttaagaaccaaatgcctttggagtggaattacaacataatttatcatttcctctgtttattaaaaaatcctgcatctttgagaagcacatttgcagtgagtgggggatttcggccactcatgaaagactgttgcaaagcccctgtcatgtggcttaccccaaaagaggctccttaattgctctatctatccctgctcttcccccagctgacttctgatcatgtgatgaccacttanggctggtggatgggttagaggaca

SEQ ID NO: 119523 - DNA, 252 bp, Homo Sapiens
gctttgtccgtcagcttcttcctcaggtgaacacatataacttgcttctcatatttagagctcatatccccaagagtgagatattgacagtaccttttaagtacagaatccaacataaagtcctattgttaaaaatttctcatcatcaattaggattttttaaatgtgccaacatgcttaaaaattaggataactaaaatatattatgacagaaggaaatataaaaactatccttgggatttaaaacaatac

SEQ ID NO: 119524 - DNA, 338 bp, Homo Sapiens
  misc_feature (82)..(129): n is a, c, g, or t
aaatttttataaaaaatttttttcaacatacaacattttccagcaaaaaggcaatttacaggaaaagttggggtcccctgcnnnnnnnnnnnnnnnnnnnnnnnnnnnnnnnnnnnnnnnnnnnnnnnngggatttgctgattcttttttactgccctcaaaactaaaccccccgctggctttagctccaaaataaaaggaaacggggctgggaccgaaataaaactccccccaatgaatttcaacctcagggaaattcacttgcaaactcccccaacaaaaaggaacctcctcccaggggcaaattggccatgttcattcattaaatatacaaatca

SEQ ID NO: 119525 - DNA, 279 bp, Homo Sapiens
  misc_feature (157)..(226): n is a, c, g, or t
cacataatattctatagagtattaaatgagatactagccctaggcaggtcccattttcttatcaacttctagaaactgtcataaagaggactgcatctcccacagcaacactgtaattgggagttgtattcctcatcaaggacaagatggcaacggnnnnnnnnnnnnnnnnnnnnnnnnnnnnnnnnnnnnnnnnnnnnnnnnnnnnnnnnnnnnnnnnnnnnnnggcttgtgcccatggacctaatgagaacaaggactcctgtcttcttgcccaaa

SEQ ID NO: 119526 - DNA, 375 bp, Homo Sapiens
  misc_feature (91)..(194): n is a, c, g, or t
ttttaactcctgggctcaagcaatccttccaacctcagcattctgagtagctgggatcacaggtgctccccatcacaccctgctaatttannnnnnnnnnnnnnnnnnnnnnnnnnnnnnnnnnnnnnnnnnnnnnnnnnnnnnnnnnnnnnnnnnnnnnnnnnnnnnnnnnnnnnnnnnnnnnnnnnnnnnnngagtgagccactgcctctgccttcaggtagcaattttattagcaaactataagcctaaagtaatagttaaaattctcactgtgatattcattactaacccctgaacctgtacccttcagcttaccactacagtacttctgtagtagagcgagtatgggttttggtatcagacaggtccaaa

SEQ ID NO: 119527 - DNA, 443 bp, Homo Sapiens
tttggaggactaccccaacatctatttatttacttataatcacatattctatgagtatattacagaaaatatgttttatcacatcattttattagaaaattacataatagcaatgggttaatgtatgtcaagaacctactgaggctccataatggaaactgttactattaatagcatagtaaatagccaagaaaaactaaacactgtcaggaaaagctcagtttctcaaaaaacataatagggaaccatgaaagacaaaaccagtacctcagctcatcctacatctcagcaatgcctcagacatttctgctaacaagacatacattatgaagattacacatgctcttgttcacatgcccacaggactactgagaatcttccagagaacacaaatgaaagccacttttctaatcatcaccagcttaaactaagctttggatatt

SEQ ID NO: 119528 - DNA, 649 bp, Homo Sapiens
agtgctggctgtgactacctgatgaaacttcacaaacatgtaaaaaatagattgccatttaaaatgtgcttttcaagtttgactttttaggatgcaattaattcactaaatacagaacttaactaaggacaaaaatttagagatcagcattctttcccttcccatcacgctcaacttaacatgaagaactgtaaacatcctaagcttacaacaaacctatctagttagacttcagttaaccacttacacatccccctcccccatgaactatttggaaaaagctgcaggcgtaatattggatccctaaatactttattctccttataccattatcagacccaagtatcatctaatagtccataatcaaactgcctaaacagtttctacactgtctttttaactatttcaaactatcaaggttcgcattttcttccttagaacttttagtctttttcttccccaaaatatttgagtccatgccagttgcctttagttgtacccaaataatggtttgtctatttcctaaaagtagtactcttaaatttaaatttagtgttatttttgttgtcattgttccttcttcctcatgtggttgtgcaggcagagcttgagcatccagattttcaaattaaaaaataacagatactct

SEQ ID NO: 119529 - DNA, 481 bp, Homo Sapiens
gaacaccgtcccctagcgggcgttactcacatactccccgtaaccccctaacctcttttcccaggagagccggccctcagaattagtgcagattcgaagcaggccgcaggtgctcagccagctgccaccactgtgcctcaactgctccatcagaccacaagcagccaaggcagggaccgctggctcccaagcgcatctgcgtgtccagcgcactgcctggatgaggcaatacattcttgttgaccctcatctcctttccagacctcccaaagcctttcacatgctttccggaacatgggctgtcttctctgaagggccctttccctttggtcctgatagaatcctgcctagggaggctgtttttcctttcacacaccaggtgcctgggagcctggtcccttcatgcttctaaatcatgcctagatctcctctctccaaaaccccggcttctaggaagaccatgccatcaagccacaaccct

SEQ ID NO: 119530 - DNA, 700 bp, Homo Sapiens
taagccaccatgcccagcctggatattttatttagttggaattatacaatactgtatgtgaccttttgagtctggcttgtttcacttaacgtaatgttttcaaggttcattcatgttgtagcatgtataaatacttgttcctttttatgactggctgaatgatacaccattgtatggatatactacctttatccattcatccattggtggccttttggttattatggatagtgcaactatgaacatttgtgcacaagtatgtatttgagtgcctatcttcagttctcttgggtgtatacctaggagtggaattgctgggtcatatgatggttctatgtataacttactgaggaaccaccaaactcttccacagtgactgtaccattttgcattcctaccacacatgtttttataaataattttagtgctggtcaaacctctcattttatgaatgagcatgctgaggcccagagaggttaagtaacttgcccaggtcacacccttagtcaggatccagactaaaaccaaactttcctgagttcctagactttcaaacactaagagcctcccatgtcacctttaaagacctcgactacttgcccgagttttcattaattgacttagaaacctgcctggtgaacaactgagttagccgtatttatgaagctttttttctctcaacatctattgaaagaaccca

SEQ ID NO: 119531 - DNA, 806 bp, Homo Sapiens
  misc_feature (192)..(339): n is a, c, g, or t
  misc_feature (657)..(657): n is a, c, g, or t
  misc_feature (660)..(691): n is a, c, g, or t
  misc_feature (695)..(697): n is a, c, g, or t
  misc_feature (704)..(704): n is a, c, g, or t
  misc_feature (708)..(708): n is a, c, g, or t
  misc_feature (713)..(714): n is a, c, g, or t
  misc_feature (717)..(720): n is a, c, g, or t
ggcttgagattgaacttgacagctcgaccctaggtacccgccacgaatccagcccagcccgcggggcaccgggtttctccagacctcgcagggaacatttgcggatgggctggtagaggaggctcggacatcccagttccgcacccgcactcgaccaacgcgtggtagcggaacccctgtcgtagcgaggcnnnnnnnnnnnnnnnnnnnnnnnnnnnnnnnnnnnnnnnnnnnnnnnnnnnnnnnnnnnnnnnnnnnnnnnnnnnnnnnnnnnnnnnnnnnnnnnnnnnnnnnnnnnnnnnnnnnnnnnnnnnnnnnnnnnnnnnnnnnnnnnnnnnnaacaacgttcccaaaactctaaacttacaaatgttgtctcccgtccatcccataaacttaggcgacaaacctggcgcagggtgacctgagacaaaggcttcccggcccctgtctccaagtcgtccatccctggggcgtaggcacgttttagtgagccctgtccggcgaaacccgaaactgcggccaccttggcagcggtgggccccaaaaggaaatattcaaatattctgaaactcgtgcatgatttaggactgacatttttacgtttaattttcttgcagttttattcttgctagtaaaggtaattcgttagaaaanaannnnnnnnnnnnnnnnnnnnnnnnnnnnnnnntttnnnaaaaaanaaanaaaannaannnnaaaaatgtcgggccgcctcggccccccaaaacctttttaaaaccatccgtttggcccggcgggccccccttagtaaagggaactta

SEQ ID NO: 119532 - DNA, 595 bp, Homo Sapiens
accagtaaaccaaagaataattttacttaaagtacagacaacctcctaacaaagagttgaccaagttaacacctgaaatttaaaaacctttcatcagactgctttcagcatatttaggatacatacatttcttcttttgaaatctctaccatgagagactaaacacagtacgatacttgcagagatttccattaacaacttcttttcaaatagtgacatttgcaatggaaacagctggtctctattctcatctctaacaacagaggtaggcaggcataaagggtaaagagagttgcctctcagtttgactctctagccagaaccctctgcagagaaggcacttagaagaagcaccccacgtggacatgctggccagagtcctgagtggaaacaagcctgtcagagaactgcaatctatgccagtaagtgaacgagagaagatataaccacacggacaccgtcttacatttattcacacagagggataagaatcagtacaaataataaacagtgctttaaatacaaataaatagctctggtttctaaaggaaacaactctatatataattctaagttttcctcgtgccgaattctt

SEQ ID NO: 119533 - DNA, 482 bp, Homo Sapiens
  misc_feature (366)..(419): n is a, c, g, or t
ctcttactgtatctatgaataccaactcaaaatctccctccttaaactctccagcacatctccattgttcttgaataaagtcccactccatgactcaagcttcctcctgcaaacctcctattccatgatctgacctcactgaggttcagttcctgggaaatcgactgctcttgtctcattcttcctagtcacgcatgctgtctagcaaccgtctgtctaaacccgcatgaatctttcaggtttcttctgaatactcacgacttccagaaaaccaagcccgaacccttctgtatgtttcctgctccatgccgttggctgcctagcctgttaaactctaaactcggcctacttgttcaccatatctcnnnnnnnnnnnnnnnnnnnnnnnnnnnnnnnnnnnnnnnnnnnnnnnnnnnnnnaagtttaggctccataagtgggagaggtctatgtttgtgtccatgtaggatacagtagggaga

SEQ ID NO: 119534 - DNA, 993 bp, Homo Sapiens
  misc_feature (221)..(233): n is a, c, g, or t
  misc_feature (262)..(851): n is a, c, g, or t
aataaaaccaacataacagaatgtagaaatctaaacgaacatttctccctcaaagtagttacatccttagctccaacaaaactactattgttggagacttatttagaactcctgtttgaggaaaggccttaaaaggtggtttatgagccacattagaaaatacccttctaaactttgggctgtttaaaaacagaaaatccatactcagaggatgacaccgnnnnnnnnnnnnngcctacagccgcctcgtgccgaattcttnnnnnnnnnnnnnnnnnnnnnnnnnnnnnnnnnnnnnnnnnnnnnnnnnnnnnnnnnnnnnnnnnnnnnnnnnnnnnnnnnnnnnnnnnnnnnnnnnnnnnnnnnnnnnnnnnnnnnnnnnnnnnnnnnnnnnnnnnnnnnnnnnnnnnnnnnnnnnnnnnnnnnnnnnnnnnnnnnnnnnnnnnnnnnnnnnnnnnnnnnnnnnnnnnnnnnnnnnnnnnnnnnnnnnnnnnnnnnnnnnnnnnnnnnnnnnnnnnnnnnnnnnnnnnnnnnnnnnnnnnnnnnnnnnnnnnnnnnnnnnnnnnnnnnnnnnnnnnnnnnnnnnnnnnnnnnnnnnnnnnnnnnnnnnnnnnnnnnnnnnnnnnnnnnnnnnnnnnnnnnnnnnnnnnnnnnnnnnnnnnnnnnnnnnnnnnnnnnnnnnnnnnnnnnnnnnnnnnnnnnnnnnnnnnnnnnnnnnnnnnnnnnnnnnnnnnnnnnnnnnnnnnnnnnnnnnnnnnnnnnnnnnnnnnnnnnnnnnnnnnnnnnnnnnnnnnnnnnnnnnnnnnnnnnnnnnnnnnnnnnnnnnnnnnnnnnnnnnnnnnnnnnnnnnntttgcggctacggatacctgtcggccttctccctcggggagcgtggggctttctaaaactcagcggttggtactcattcggggtaggcgtcgctcaaactggggtgtgacacccccgtaagccgacgttgcttaccgggata

SEQ ID NO: 119535 - DNA, 477 bp, Homo Sapiens
ggatctagaggatcccttgctctggaaaaggggctatggtagtaaagttgttactgtcctttttctgcttcccctggaaatgacaggcattactctcccattggcctcccttatccacttaagccccaaccttgatcatcaagggcagcgcatgggtgatcctgttcccatgaggattgtgtgtcgcacctgaacacaggacacagcgtgggggaaacaaccttgccttcctcggttctgctgccgccagtcgccctcctaggctacccgaaatgcctctccctccagtctcagctctgatccatgagccgtcaaaggcctgagactgcactgatctcaggaaaacagaagtcttcctttcccacactaactgaaaggtgacacaggaaccaactccttaactttccaaattactgagaactcagactgccaaataccgtacctcttggccagtggggcctgcttggtctttctata

SEQ ID NO: 119536 - DNA, 430 bp, Homo Sapiens
aactgaaccgttgggggacctttttgaagaaaggacacagaaggcttggaatggccctgacaagtgacaactcagggctgccctttcaaaagttgaccgaagggtgggtcctaacggccaccccaaggcggtctgtgtgaaccggaatagatgtggtcctggggcccggaatcactgttgcaagagtcccaagccaaccttggaactgggaaggttattatgggggtggactatgaccgtgttgggggctcctgatcccaaaacatctaaagtcaggttccagagaacaagccatggggacctgaccagcaaccggggaccatccgtcactgtgcgggacggtgatgaaaagcaaagcagcactaagcggcctcctcagggtcaatcgggttaagacagctgcccccagatcctccaagtcctcctcccc

SEQ ID NO: 119537 - DNA, 350 bp, Homo Sapiens
tttaatttataaaaagaggtttaatgcattcgcatttccacatggctgaggaggcctcacaatcatggtggaaggcgaaaggcccgtcttacatggcagcaggcaagagaatcagagccaagcaaaaggggaaaccccttataaaatcatcagatctcgtgagacttattcactatcacgagaacagtgtgggggaacgctcccatgattcaattatctcccaccgagtccctcccacaacacatgggcactatgggagctacaattcaaaacgagatttgggtggggacacagccaaaccatatcatcttggttcccatagctagaatcagtggagtaaggattcaaac

SEQ ID NO: 119538 - DNA, 1072 bp, Homo Sapiens
  misc_feature (161)..(195): n is a, c, g, or t
  misc_feature (452)..(497): n is a, c, g, or t
  misc_feature (631)..(991): n is a, c, g, or t
  misc_feature (1013)..(1013): n is a, c, g, or t
  misc_feature (1027)..(1027): n is a, c, g, or t
  misc_feature (1047)..(1047): n is a, c, g, or t
atcttcacttaattgcatcacaagtaacaagaatgaaaaaggccacagttcatatattttcaccattacatatgtctataatacttgaaatgagtatggcaaaaccagcactgcacaaagatgagtccacttcaagtcccatgagaaagagcatgtctctnnnnnnnnnnnnnnnnnnnnnnnnnnnnnnnnnnngagaggcctaaaggccttggtgccccattgtgttggaattcatcatattccatcttgacttttttgcttccagtcagccagcagactaaatttttgtgcttgtttatgctgaaattgattcattcctgactcaagttcacttttggacacagatcatattctgcctgttggatgcaaaagatgaaaatcctcttaactccaagtcttggttcgactccctccccactccccaacccctcatcaaaatcaagatcacnnnnnnnnnnnnnnnnnnnnnnnnnnnnnnnnnnnnnnnnnnnnnnggaatcggaagactgaatcagaaccagttgcaccactgggtggactgacagttgtataaacattagtgttccttgcagctacacagaagacaaatggtaaaaatttctagatgaaccctcgtgccgaattcttnnnnnnnnnnnnnnnnnnnnnnnnnnnnnnnnnnnnnnnnnnnnnnnnnnnnnnnnnnnnnnnnnnnnnnnnnnnnnnnnnnnnnnnnnnnnnnnnnnnnnnnnnnnnnnnnnnnnnnnnnnnnnnnnnnnnnnnnnnnnnnnnnnnnnnnnnnnnnnnnnnnnnnnnnnnnnnnnnnnnnnnnnnnnnnnnnnnnnnnnnnnnnnnnnnnnnnnnnnnnnnnnnnnnnnnnnnnnnnnnnnnnnnnnnnnnnnnnnnnnnnnnnnnnnnnnnnnnnnnnnnnnnnnnnnnnnnnnnnnnnnnnnnnnnnnnnnnnnnnnnnnnnnnnnnnnnnnnnnnnnnnnnnnnnnnnnnnnnnnnnacacgatcagggggatacgcangaaagacatgtgancaaaagtcaccacatgccangatcgtaaaacggcgggttgctggg

SEQ ID NO: 119539 - DNA, 109 bp, Homo Sapiens
ttttctgtagcatagctcattttattgtttaaacagtttttgcataggaaatatatccgcttccagtaattgactgcagtatgagcagctgctagcagtataggctgga

SEQ ID NO: 119540 - DNA, 918 bp, Homo Sapiens
  misc_feature (127)..(865): n is a, c, g, or t
ggtgtgagggtcacattttctacccagccattcttggcattgcaacctccatttctagctcctgttgaattttctccacccaaaccccaaaaataaatggatccatgatcctcgtgccgaattcttnnnnnnnnnnnnnnnnnnnnnnnnnnnnnnnnnnnnnnnnnnnnnnnnnnnnnnnnnnnnnnnnnnnnnnnnnnnnnnnnnnnnnnnnnnnnnnnnnnnnnnnnnnnnnnnnnnnnnnnnnnnnnnnnnnnnnnnnnnnnnnnnnnnnnnnnnnnnnnnnnnnnnnnnnnnnnnnnnnnnnnnnnnnnnnnnnnnnnnnnnnnnnnnnnnnnnnnnnnnnnnnnnnnnnnnnnnnnnnnnnnnnnnnnnnnnnnnnnnnnnnnnnnnnnnnnnnnnnnnnnnnnnnnnnnnnnnnnnnnnnnnnnnnnnnnnnnnnnnnnnnnnnnnnnnnnnnnnnnnnnnnnnnnnnnnnnnnnnnnnnnnnnnnnnnnnnnnnnnnnnnnnnnnnnnnnnnnnnnnnnnnnnnnnnnnnnnnnnnnnnnnnnnnnnnnnnnnnnnnnnnnnnnnnnnnnnnnnnnnnnnnnnnnnnnnnnnnnnnnnnnnnnnnnnnnnnnnnnnnnnnnnnnnnnnnnnnnnnnnnnnnnnnnnnnnnnnnnnnnnnnnnnnnnnnnnnnnnnnnnnnnnnnnnnnnnnnnnnnnnnnnnnnnnnnnnnnnnnnnnnnnnnnnnnnnnnnnnnnnnnnnnnnnnnnnnnnnnnnnnnnnnnnnnnnnnnnnnnnnnnnnnnnnnnnnnnnnnnnnnnnnnnnnnnnnnnnnnnnnnnnnnnnnnnnnnnnnnnnnnnnnnnnnnnnnnnnnnnnntgtactatcgtctgagtcacccggtagaacgactatcccatgtgagaccatgg

SEQ ID NO: 119541 - DNA, 397 bp, Homo Sapiens
ttttaaaactcaagttttattgcaatacatcttgcattacattctaataataaacggttgaagtataaattttgaaattagttaccaaaaatcatttactaaacagtagttttactaaaaatactaggattgggaaaaataaacactaatagaaagtactccaaaatgttaacaacgtttctatgggcattgggattgggggtggtttatactttctcattttctgtattaccaacacttacaattcacaatcaggagaaaaacctattatatgatacttaaaacattaaatctctgattgtcacctataggaaaaggcaactcactatccatttgaaagatccctttagacttctgatcgacctcactcgataactgcacaacctctggacacaaa

SEQ ID NO: 119542 - DNA, 695 bp, Homo Sapiens
  misc_feature (626)..(626): n is a, c, g, or t
cagggatacaaagggtttatggcttataaaaataagttaccaaaacccaagccccacaaaacacaagaaccccgcttgacgatacccatgaacacaagggctcattccagtaacagctcggcggagaacgacagacaccagcactggccgacacacatgtggacgaggagcagtgcgtgcacagctttcctttctaccaggttctaaaaggggtcttcttgggccttcaggctccgcgtggcatagggggaattaattagtcccattcagccacagagggagctcgtgctcctctcaagaggtggcctcgtgcacacatgtggcgcgtgctttatgaaggggaggagcagcgtgtacacattcgtgggcaggtgaggacaccagctgtgagccttcgtggtgggctcccgtggcgtgtgtcgtgggaaagggtgcgtggggtggggctctgaggctgtggggccagcggtgggggcatacgtgccggcaggttgtcatgggaaggcttcgagggttcggaaatccctccatgtcgggggaaggccgtcctggcagaaacttcccgcagcgcggggcacgggggcctgggaacacgctttatggtaacttcttaaccaggtcatganggatcgggaccacgacatccgggcatctgggggcagctgataggggagcagggcagtgggtgggcatgc

SEQ ID NO: 119543 - DNA, 379 bp, Homo Sapiens
tttgtatttttaataagatatttaatacgtgttcaggtagaagtaggtacaatgacagaaaataaggtagaggaatgtgctagacaccacagatacgtaatgatggacaataaatgacatgatgtggagagttcacccacacatgcagacttcttatgttcacataaacatttatctgcatgcatcacccagtagagacaaactgcacttacactgtgaagtcaacgaggagataaagtaaaaatcaaatacttatggagagagtcagtctctccatttagtgggaaacccttcagaacacgcacacagcatctcccctcccttctgaataccatccatagcctgcagcagtagatggcaaatcacagcctgggccacc

SEQ ID NO: 119544 - DNA, 395 bp, Homo Sapiens
aacgggtgatgcggttgacattgaccgcctagtgtgctgactgaacatgaagcaggagttcgatgatacatccaaggctggcttcttgtatgagtttctcagtatgcagaagcacaaggtgatgaacttgcaccagcgtctggaaggaccgcggccacacaacaaggtcgagaaccgatacatgaacattctgccctttgaccacagccgagcgatcctgcacgcacgggacagtaacatctcagggtgcgactacatgagcgccaactacatcaagaaccaacttggttggcgtgatgagaacgctaagacctacatcgccagccagggctgtctggaggccacggtcaatgacttctggcagatggcgtggcaggagaacagccgtgtcatcg

SEQ ID NO: 119545 - DNA, 575 bp, Homo Sapiens
  misc_feature (312)..(440): n is a, c, g, or t
acacatctcagaatgatctcattaagggacaaggaagctgtgctatatagccaccaaattctattcttcattggttgagaacatcaggagaaattgtgaatgagtttgaaatgggcaccaaaagattaaatggaggtctcacctagctcatctatccaggtgagctccacctttcatcgtcattgaattattttacaattctttaagttgtagaaaatagatagcaatgtaaatgatttttgcccataggaatgcagtgaatacgactgactgttatccagtggatagtgaccagttttgtacctgctatgnnnnnnnnnnnnnnnnnnnnnnnnnnnnnnnnnnnnnnnnnnnnnnnnnnnnnnnnnnnnnnnnnnnnnnnnnnnnnnnnnnnnnnnnnnnnnnnnnnnnnnnnnnnnnnnnnnnnnnnnnnnnnnnnncagtgcttcggaggtgagttctcactatcatgagacagaattagttactgcaagagtggggttattacaaagagagatcaccccttgtgttttctttctcttttgcaagtacctgctcaacactctcacatgtga

SEQ ID NO: 119546 - DNA, 484 bp, Homo Sapiens
aagtattgtcatttatgtatctttaacaaaagataaaatacaaaacggacacaacatcagcctttatgttgaaccaccctgtttaggtaggaaaatgaacattgtttttcattcttaaagtaaataggaattaaatctatttgcattgctgtttaatttcataccaatctaaagctcgacactatgtatatccaaagtacttgacaatttgactcagttactcacaccactgtttctgagatgctgacttaatgcagtatcctacaggtggtttttggtagtttagaaaagccagtgagtgggctgttaaaagttgatatactgatgtcagaggttttgttaggctgttttcactgattctactctgtcagtattatcttcacagtgttctgagaagaggcttcaggatcatggcaatctattactaatatccctagaagctatccttataattctttcaataaaccaacttcaggcctcgtgc

SEQ ID NO: 119547 - DNA, 108 bp, Homo Sapiens
gaaatgttccaggtctgtgaaatgtcaaatctgacaacagcttgacaaaaattaatcaagagaacaacttgacttaatggagagtgcacagtgttttttggctcagaa

SEQ ID NO: 119548 - DNA, 365 bp, Homo Sapiens
agagtccaggtctgtcgcccgcgtcttcgtcggtggcagcagggctgactggccacggcggccatctgctagagcgcatttcttcccatgaaacgccacctcctccgaagtgcggagcgaacgcagccaaatctacacaaagactgacaagctggatccactcgacggaacccagggccaaaaaacggcggcgagcagcgcctcgggcccgcgattaccggttttctgagcaccggacagcgtgagccgtgccagccctgtctcgccatcccagccgaggagggcagcgcgatggctcttccctgccttgaaatcaaccccattgccagccgctttcgccggcagagcattttccgtggggtcca

SEQ ID NO: 119549 - DNA, 666 bp, Homo Sapiens
tatacggctaaggtacgaggctgggttgagaattcggcacgaggcttgaagctcccagtgtgccaaaccatttagtgccttggctgtttatcccactgccttggaagatggactcctctcatctctgagccttatacctagctgcttcctcatctacctgtggtgtttgggaccaagcctccaatatctctgaatagcccactcctagcttggaaacagctataagggctgccctgaccccttgtcaaatgatcaccaattcttggtggcttggctgggtgacaatgaacagtgtctgctggggtctgtgacacactgtttctggaacaatggaagggatggaaggctctacccctccgtggcagcccagcattttggccaactctgtatctgaacttgagctttctatggaacaaacaatggtcttagttttttaagagcctctgaggtctcatgattccatggagagtcatggagtagaattagtggaccagaaaccatgacatttgccatctaggtactctgcatgtcagggtggagtgcacagatgagcagagttggggtgatgatggatgtctgtgcatagaaagtcccctggctccaagagccaataccagtggtgcaatgagtacctctctttccttgaccagggtatagtagtgtgag

SEQ ID NO: 119550 - DNA, 187 bp, Homo Sapiens
acaaaaagaagatattttattgaggaagttgcaatgtttttacatacatgcacaatgcttacacaaattcagcttcgtgataatgcactttcatggagtcaaatttgcaaaaatgcataaaatgaattagaactttctaaacatctttatacaatttataccttcagtattaaaaatggactgagga

SEQ ID NO: 119551 - DNA, 104 bp, Homo Sapiens
agaagttgccatgatttttcttggcttttattagcatgtgttaaaatcatattatccaaacactaccagaagaacatgtattgttctgaataaagtgcttaaag

SEQ ID NO: 119552 - DNA, 466 bp, Homo Sapiens
tagagaaacctggcaggtggtccaggaatgagagtgtcacaaaataatcactcaacacaagggccacagacctggagattcttcccagccatccctcactcctgccccaggacacaacccatgcaggcccacattccataggaagaggcaggtcccacagtgtctgtggctagaccttaacactgagcagagatgcccgggaagatggcacttcctatgctcgttcccaagtgctctgctcatctgccatgcaggtcaggaccataccccgagtttgtgaggcacccacctctcatactcaccacctcatatgaccacctatcatacccacctctcctatgacccttgcaattgtcccagtgaggtgggaagagcctggactagccccattttgcacacagggaaactaaggacacactcggaccgaatgtaatacacccgtgtcatgcgcttgctgtgccctgag

SEQ ID NO: 119553 - DNA, 348 bp, Homo Sapiens
acaattattaagccaaatttatttcaccccctttttaaaggtactcctaagcggggaacaatgcaccaagacactcctgctccatggcatctttagttcaggcaacctggcagggactgtgcttctcccctcctgcctcaaagaggcaacttttaattgtagagatctgcaaagtgctcattgtccttaggttgtctgttatcactcaaatgcccaaattctgtttttgactgacccaggctcactctgtgtgaacagttttaataccaccctcaacgtgggataaggttagctgttagcagcaaaattaagcagatgctttctaggaatattcctagggaagatggt

SEQ ID NO: 119554 - DNA, 979 bp, Homo Sapiens
  misc_feature (429)..(714): n is a, c, g, or t
caaaaatatagataacatttattcacttgctcaattcactcaaagcagtattcacaaaaactcagtaagttggccacattaatttatgctctaatactaccaattctaaccattctaacatgctaagcctccaaagctcagtggaataaaacaaagttttatcttgttcaaggttagcagtcccttgtggatatttctggtcatccaggaaaggaatcaagctcaggcctggattccacaaagtcattcatccaccttccgctaatgacttcaaagtccttcctgaggtcatttcctagcctatgagttgcagagttgcaaatgggaaaagagccggaagaagcacacctgggaggttttgatggtttcttctgaaatgcatgagaaacatcactttttcatgcatctctccctcgtgccgaattcttnnnnnnnnnnnnnnnnnnnnnnnnnnnnnnnnnnnnnnnnnnnnnnnnnnnnnnnnnnnnnnnnnnnnnnnnnnnnnnnnnnnnnnnnnnnnnnnnnnnnnnnnnnnnnnnnnnnnnnnnnnnnnnnnnnnnnnnnnnnnnnnnnnnnnnnnnnnnnnnnnnnnnnnnnnnnnnnnnnnnnnnnnnnnnnnnnnnnnnnnnnnnnnnnnnnnnnnnnnnnnnnnnnnnnnnnnnnnnnnnnnnnnnnnnnnnnnnnnnnnnnnnnnnnnnnnnnnnnnnnnnnnnnaccgcttcgccggtcgttcgggtgggggaggggtatagctcatccaggcggtatacggtatcacagacacgggatacgcaggaagacatgtgggcaaaagcaccaaaggcagaacgtaaaagcgggttgctggggtttccaaaggccggccctccacaggacaaaatcagctaattaaaggggggaaccgacggatataaaacaagggtccctgggagtcccccggggtcccgttcgactgcgttagggacttcgcttttctctg

SEQ ID NO: 119555 - DNA, 750 bp, Homo Sapiens
tggctaggtactgaggctgggttttgaatctggcacgaggctgagctacgccgtgggccacttcctcaacgacctgtgcgctgtcatgtggttcacctacctgctgctctacctgcactcgtgtgcgcgcctacatgctcccgctgtgcgctggtggctgctgctgctgctgggccaggtggcctgactgggctagtgcacacctgctctgtggtgctactgatgtgcctgacctgctgcctgccatgcttgctgcgccctgctactggccctgctgcaatggcctggcacctggtctggcacctgtctgctgtcctgctgtccttccccttcatcttcagcccctgccttgggctagtgtgtggtgctggccactgccctgagtgggcttgccctcctctactactgtgccctgttcatctgtgatcttccagtttgtgctgggcctccacacatgatctcccacctcagcctcatccctggagctctgtcaccaactgaccatgatgaatggtggatgctcactggcactcagtgtatgctgtcaccgtgagttggccaacaatcacctgtctacggctgccgcctggctcctgcttgcaccttgcagggggctcgtcgcgggtggatgcccacccaagacatcagcatcagcgaccagctggggggccagtgacgtgccctgtgttcctggaacctgtccctgctggtggtgggtgtcggcgccgtgtctcaactgtattcaccttg

SEQ ID NO: 119556 - DNA, 534 bp, Homo Sapiens
gcggccgcctcgcggctaccctgcttgccggtcccgagcggcagccccggggtggcgatggggtcgcgccgaggcagcggaggttctgcgggcgactggaggttggcagtgggcgggagaaagaggaaggcaggcgcggctgggcctcggcctctggcgccgcggtacccaaagacttcgccgccgagaactgcgggtgcactgcctcagggaagaagttgagaattttgccaggtcatctctgccagggcacagttcatcactgtgtgtttagtgtgtttcggtgaagctctccaagtgtgttgaatcagcgtgcctagcctcaagggtgcatcgtgaaaactgaaaccaaaggaatgatacaggcctgctttgtgtgtgtcttcccactttaagcttgttttcagtacaaatactcttgctttaaacctgattggactgtggcgagcggacatctgttcaaaggaggggccgagaccacagtacttctgaagggggcttgataatgtggaaacattttaagttttctctccg

SEQ ID NO: 119557 - DNA, 462 bp, Homo Sapiens
tttttttagaaaaaaatatcacacatttgaggcaggaaaatagggtctggaggaagggaacctaaggccatttcacgctgacttccctaggactaaactgaaggcaaaaccctaactttccacccctaagtaacataaggaccagaggctactccctttgcaaacctcccaccttttctgtgtagcagatgggaaattggctgttcccaaccaatcagactgattgcgggcccagtctttgcacagaagtgcaactttgtaacttcaccttagcctctgattggttgctttttgcaaccaatcaaatgtttgcacaggagagtgtcctatgtaactctacttcagcctctgattggttgctttccacaaccaatcagaccaattgcaggccaccacttcatttacgtggggtgagcatgaagtggccaatgggaaacctgtagagggtatttggaccccaga

SEQ ID NO: 119558 - DNA, 441 bp, Homo Sapiens
gttgctccacagatatttattgaatgaatacgaaggataaacacacgctaagtttgaaatgagaaatcctaagtttcaatagcaatcattgtcttcaatgttcactcattttgtagcttaattttcacagccattacaaaatacattaagtaaaaaggcaaacaatgagaaccccagatgtgaaagggggctctggggagcagaagtgtcatttcccagttctgcttgtgagccacccgtgcttgctacacaggctgagtttcagaccctgctttctaatgagcacaacaaaaagctccaatgtcacaatctactatgcagtttcaaagtcttcgacaattataattgttacgtggtctaattcctgaacgtatttaccccagttttataatgaatcagaatgagaaaagtaaacattggctataatcaactcatacctgt

SEQ ID NO: 119559 - DNA, 413 bp, Homo Sapiens
  misc_feature (24)..(24): n is a, c, g, or t
  misc_feature (169)..(169): n is a, c, g, or t
  misc_feature (257)..(311): n is a, c, g, or t
  misc_feature (386)..(386): n is a, c, g, or t
  misc_feature (396)..(396): n is a, c, g, or t
gactgtctttggtacaagtgtgangtgaggaggggaggtagtgaaggatgcaggagacttgtccatgatctctggcctgagctcctggaggagattgacaggaatttcatcctttgtttcccagtgtttttatcttgaagaatttgggaagttcatcacctagaaggtngctttgagctggatctagggttggaagtggaatctcagctcaggggagagggtgactgcacgctgcaggagtgctttatgtgtcaggnnnnnnnnnnnnnnnnnnnnnnnnnnnnnnnnnnnnnnnnnnnnnnnnnnnnnnnataaaaatctccaattgtgaggcctgttcttgggaaaagccagccacttttcatgccagctgggcctttgttttngggggatttnaggagattgacagtgtt

SEQ ID NO: 119560 - DNA, 421 bp, Homo Sapiens
  misc_feature (93)..(130): n is a, c, g, or t
  misc_feature (144)..(145): n is a, c, g, or t
  misc_feature (154)..(154): n is a, c, g, or t
  misc_feature (165)..(165): n is a, c, g, or t
  misc_feature (192)..(192): n is a, c, g, or t
  misc_feature (199)..(199): n is a, c, g, or t
  misc_feature (205)..(205): n is a, c, g, or t
  misc_feature (217)..(217): n is a, c, g, or t
ccggcgctctttcgagccggttaacgtcgtgattgaattttcacatcagacctgtgaagacagcccacgtgcaggcggcacgcggtgcccatnnnnnnnnnnnnnnnnnnnnnnnnnnnnnnnnnnnnnntcttaacccctctnnaaccacctnccttttaacangtggtgattttgtctcaaaacaaacanaaacccntgttgngtaaaaattgantttaaggactggatgggaagcttcgtgtgccggtggagctgggccttctgaaaattttgggtttgccgcctggcacgccctgtgagctgagtgaggccgggactctctacaccttccggacccgggctgctttctctgcccaaacgtggagatgggattcttgccggaaccttcttctggtgggagcctccattccaaaaagga

SEQ ID NO: 119561 - DNA, 424 bp, Homo Sapiens
ggcaaatgggaaacttggggtggagagagcatacttattgggctgtgaaggcatacggatgtacatgttttaagagcttatctcagatttaaatagccaaaggaagacctcattgccttccaggtgaaggtgcaaagtcatacatattaatgacctgacagttaacattctgttgtttattattgcctttctccaccttagagagccataaataactctctggtgaagtgatttgctataatgggggtgaggacgtggggagacttctctggtcattacactgctatttatttctagaactcactatcagtgagcagtgccagagtgttttctcttttgacctagaggtttcacatcattagcaaggagggaaaagtctccccatctccttacaactgtgtgctaagtaagtaacttggccaag

SEQ ID NO: 119562 - DNA, 323 bp, Homo Sapiens
  misc_feature (96)..(96): n is a, c, g, or t
  misc_feature (264)..(278): n is a, c, g, or t
cgggtttgcctacaggtagattagattaattattactatgtaatgcaagtacagttgggggaaagcttaggtagatatattttttttaaaaggtgnctgcctttttggatttataagaaaatgcctgtcagtcgtgatagaacagagttttcctcatatgagtaagaggaagggactttcactttcaagtggaacagccatcactatcaagatcagctcatggaaggagtaaagaaaatatctcaaaatgagacaaactgaagnnnnnnnnnnnnnnnaatgacttaagtttttgtgctcttgcaagactatacaaaactatt

SEQ ID NO: 119563 - DNA, 425 bp, Homo Sapiens
tttttgaagtctctcaacatttcatttttaatttttctaatagtacattctttaaaagaagttaacgacttcaattccaaatataaggattaaataatgcaatgaaaagctgtcattttcagtgaagctattgcctaattaccctggaaaaaagtattcttatgactgaactgatgcaaaaatcccttagaaaagcttcatttgttgcctgtaaagagtcttcttaaggtcacttttacttctagactgcccccttgtttccagtgaaagagttttgcttggtaatggcttgtggttccacagtgttttgtgtatgaaaagcgtagactaagagatactactgaagtcgctcaaattgtagattctgccatgaaaggaagtcccaacactgtaacatttccccttaatcttcagcaagacacatg

SEQ ID NO: 119564 - DNA, 537 bp, Homo Sapiens
acttagtagacttatgccattgaatgatgtgaatataaacagaatacaatagatgctttctattaaggttttattaatggttttgacatgatttcccctgatatttgaccttcaaaattagtacaaattattttagatatgaactcaatcctaaaaatggaaaactgattttcggattaagcaaaagttaaccacaaattaatattaatggagccaactggataaggcttcaatcagctcacattagcagtgaactttgggattggaaagcattggatttaatggtaaacaaagcatttagttgagtacttactaatgggcaaaaaatgaggtttaattacatttgctgattatattaaaatgggaaagtggtgagaaatgaagaaggtattgtgctgggttttagcaaaaatgaaattctaggtgtgggagacaggtaatttaaactaatattgattgggattctgtctcagtgagttgatattcaggagcttgttttatgtagtttgttctaaaggagtcatttttcctcgtgcc

SEQ ID NO: 119565 - DNA, 561 bp, Homo Sapiens
ggcttttaaagcatttaataagtcaaaatcaaataaaagtgatttttaaaaagaataaatttacatacggtacataagcaagacagctgaaggtttctaaaatagaaacctggtgcatatggccccaaaacaccacatgctttgattacactcaggaagcatgagttgcctatttgggtgagaaaatcccatgttacagtgcgatcactgggcacgttttggagtaattccagccactgctatgtaagtgtttttaattcaggggtgtcttctacgttttcatcttctgaatatcttgtgacggtgcaggtttgagcaaaactggcatgaaatgagagccccctactggtttggcttcagtctaggtccaccatccctctcgatctggcatcttggagattaatttaaaaggcaagctcaccacaatgtaagcctatggtctggccaaccttgcttttgggaactgtgacaccaaagcccccaggactatctgcctctccaggagccagatagaatgacatgcctttttcctaattgtccacattccacccccctcgtgcc

SEQ ID NO: 119566 - DNA, 975 bp, Homo Sapiens
  misc_feature (160)..(171): n is a, c, g, or t
  misc_feature (207)..(913): n is a, c, g, or t
actcttcaattctggaatttggttgccgaagactctaaaggagagactcactcagtaattcagtgactttagaagcaagctgagtatctcattctaaaatgacactgatttacactgttgagaatggttaagtacgtggggtaccttgcagcaaaggacnnnnnnnnnnnngcctacagccgcgaccgccctcgtgccgaattcttnnnnnnnnnnnnnnnnnnnnnnnnnnnnnnnnnnnnnnnnnnnnnnnnnnnnnnnnnnnnnnnnnnnnnnnnnnnnnnnnnnnnnnnnnnnnnnnnnnnnnnnnnnnnnnnnnnnnnnnnnnnnnnnnnnnnnnnnnnnnnnnnnnnnnnnnnnnnnnnnnnnnnnnnnnnnnnnnnnnnnnnnnnnnnnnnnnnnnnnnnnnnnnnnnnnnnnnnnnnnnnnnnnnnnnnnnnnnnnnnnnnnnnnnnnnnnnnnnnnnnnnnnnnnnnnnnnnnnnnnnnnnnnnnnnnnnnnnnnnnnnnnnnnnnnnnnnnnnnnnnnnnnnnnnnnnnnnnnnnnnnnnnnnnnnnnnnnnnnnnnnnnnnnnnnnnnnnnnnnnnnnnnnnnnnnnnnnnnnnnnnnnnnnnnnnnnnnnnnnnnnnnnnnnnnnnnnnnnnnnnnnnnnnnnnnnnnnnnnnnnnnnnnnnnnnnnnnnnnnnnnnnnnnnnnnnnnnnnnnnnnnnnnnnnnnnnnnnnnnnnnnnnnnnnnnnnnnnnnnnnnnnnnnnnnnnnnnnnnnnnnnnnnnnnnnnnnnnnnnnnnnnnnnnnnnnnnnnnnnnnnnnnnnnnnnnnnnnnnnnnnnnnnnnnnnnnnnnnnnnnnnnnnnnnnnnnnnnnnnnnnnnnnnnnnnnnnnnnnnnnnnnnnnnnnnnnnnnnnnnnnnnnnncccccgttagccgacgctgcgcctatcgggtacatcgtcttgatcacccgggtagaacgatt

SEQ ID NO: 119567 - DNA, 588 bp, Homo Sapiens
ccctggatttggcttttattaatacaatataccaagtggagttttaacaattttagaaaaatgtaaaagtgcaactagcatctctatactatgctgtacaggaccacaatgtaaacacagccttaacaaaccaaagcacttcttttcataggacagtattttccttatagtgggattacaattgaacaaaaaatatttacatcttatgcagatgcctgtaagttcagagtaacaggatgagcagctttcctttactacacctgtcaaagagtagatcccactgaaaaagaaaacctcaaatttacctcttaatttaatagattaaaagatggaccccaaaccacaaattggttcccataccactcctcaactaccatgcaccagaaggaaaataaaatgacttattcacaaagtatttctcactactggaattatgtgctagtactgccagtggcactggaagtgtttaggcaggttaatgctgagtaatatgtttaggtggtgcatgtattctaattcagagttttgcccatattaagataaacttcctgtacctattgacactgaataacagagatccctcgtgcc

SEQ ID NO: 119568 - DNA, 500 bp, Homo Sapiens
  misc_feature (239)..(317): n is a, c, g, or t
ttttaggtatgttaatttaaaacttttatttgtaaaaaaatttaaatatgtatttgaacagatttgtttaaccattattctccttggcaatgttttataaaaagcacaaggtttctctttctccactttccatgtgggtattacaaaatgtttcaggaaatattagatgtaatataaagcaaaatgatgaatggttatttttaacattccaagtcctttacatattattttacagtgcnnnnnnnnnnnnnnnnnnnnnnnnnnnnnnnnnnnnnnnnnnnnnnnnnnnnnnnnnnnnnnnnnnnnnnnnnnnnnnnctaaaatctatttgcaaagaataaatgtatattaatgaatactaatatatttgcatgaaaatacagacttcatttaacttaatttgttcattatatcttaattaaaagaaatctggaaatataaaagaatgggggtattgaagttgcattctgagctatgatagagataagcatctaagaatt

SEQ ID NO: 119569 - DNA, 333 bp, Homo Sapiens
ttaaggcaggtctggtttggacgactttgttttgtctcccagtattgaaggcttttactctggacttgaatcctcgcctttggtttttgttcagaggaaagcgttcctctcccctgcgcaggatcgctctgtttctcagtaaacatgacgagggggtttagcactttttaagtacatataagctggtgactctagaagggtacagatttggagaatgcctgcgccggtcctattcttttttcctggggtttctggattttagtcttttaagtggatcctcccgtcggattactagaatcctgcgctcactgcatgcacacagtttcaattaaa

SEQ ID NO: 119570 - DNA, 734 bp, Homo Sapiens
  misc_feature (159)..(361): n is a, c, g, or t
  misc_feature (679)..(679): n is a, c, g, or t
  misc_feature (690)..(690): n is a, c, g, or t
  misc_feature (719)..(719): n is a, c, g, or t
ggatcttatgatttcctacaaaaaccagagtaggctgagctatggagccagttttagttttcttgacccaggcgtaaacaatatgcaaccatctagaactgacatgaaatgatctgtagcactttagaacttgaagatctcttggaaatcatctaattnnnnnnnnnnnnnnnnnnnnnnnnnnnnnnnnnnnnnnnnnnnnnnnnnnnnnnnnnnnnnnnnnnnnnnnnnnnnnnnnnnnnnnnnnnnnnnnnnnnnnnnnnnnnnnnnnnnnnnnnnnnnnnnnnnnnnnnnnnnnnnnnnnnnnnnnnnnnnnnnnnnnnnnnnnnnnnnnnnnnnnnnnnnnnnnnnnnnnnnnnnnatttactccaaactcttgattgcacaggtgagataaatgagaaccagaaaagtaaagtgatttgcttggggtgatccagcttagcatcaaaatcaggaccagaatctgggcctcctgactcctagtgccatgtatttgcatcttgaactggacttccttcccttctctgcaattgcaacctgagaagcccaggttaggtccaatcatcattgctttttgtctgtgccctcctatcctacatcagggaaagatatgcttcaccgaagcacctgggctctttcatttcattttggacagttgcaggagtttgttatttanaagctgcatanataatgagcagacacagtcagccctgttntagcatggctaaacc

SEQ ID NO: 119571 - DNA, 403 bp, Homo Sapiens
gggcttatgacagcagtttattagagagaggactgaattgaaaagcatgaattgatctatatccacaatcaggttacataaaacatccaactcccactgagcctgccagcagcaaatctcgggccttccccttgcaagggcagagtgtaccttagtaatcatgctaagatgagcagagcatggggcttcccagagacaggatacacatcaaatctgaatgcacttcattctgaagaaacagagcccagcctcagctgagtcacgcactccgatgcaaactccttctcccgaatttgccagtcaactcaatccatcctcccccagtgaagagaatgtgaggaggggagaagagggacgatgactcaggttgggtttcctcagaaacagactcagacctcgtgcc

SEQ ID NO: 119572 - DNA, 176 bp, Homo Sapiens
atctgcacatactaagttgcttttattaatccagaacggcatgctacagatactgtacagcatgaacatttattcattacaaaaatggcttccaaaccattaaaaatgaacttggaataagagcataaaacggaacagtaacatcacaactgttaggaaacattcaaagtattcac

SEQ ID NO: 119573 - DNA, 291 bp, Homo Sapiens
  misc_feature (222)..(239): n is a, c, g, or t
caaggggagaatgaagccattttatttaggggaatgttaaaacaaagccatatacaatctgtaacaaatacaatacaattgtttgttccctagtcctgaataattacagtatatacaaaatctgtaaggcactggttcccccaaaagaacaaatgagtcttcttgtgaaacagacaacgaaacccctatattgccaacttttctccaaaaaatatggcattnnnnnnnnnnnnnnnnnnacaagaggaatcacaattgctaaattaagtcacttctgatgcccctcgtgcc

SEQ ID NO: 119574 - DNA, 341 bp, Homo Sapiens
  misc_feature (63)..(95): n is a, c, g, or t
ggaaaaaacatgttttgggggccctttttttggtttaaaaacgtaagttccaaattaaccatnnnnnnnnnnnnnnnnnnnnnnnnnnnnnnnnncacaaacccctttgaaattaaacagacttttttgtaaatggttttttacattaaaacttcttcccaacccccaaagaccccccttttctacaaatttggggggaatttcggttccccgttttatctaatattaaaaaatcaacatttggcccgcggttaaaaagacaaccttaaagtttttaaatttctttccaccaaacccggaaaagaaaaccccccttttccaaaactttaaagcaataaaaa

SEQ ID NO: 119575 - DNA, 145 bp, Homo Sapiens
gcaaataagaatatatttcagtgtcttcttgtttactagctttgtttctattaatggcagttctccaaaatcttcaagagctacactttgggaactttccatttattgtatactttaattaaaggtttccaactgattttaaatt

SEQ ID NO: 119576 - DNA, 217 bp, Homo Sapiens
gaattataaaaattttatttaccatcatcattgcccagctgtacatctgctgcatacgctgcctgtctgtagtcagtgtgtgaaattgtaacctgctaagggcatttcagacaacagtttcacagacactttaaattagaggcagcaggatgtgatatgttagtagcactcatatgtattctgaggagtgtttccaagggcatgtcctatcactgag

SEQ ID NO: 119577 - DNA, 634 bp, Homo Sapiens
  misc_feature (453)..(454): n is a, c, g, or t
  misc_feature (459)..(548): n is a, c, g, or t
  misc_feature (556)..(556): n is a, c, g, or t
  misc_feature (574)..(574): n is a, c, g, or t
  misc_feature (577)..(577): n is a, c, g, or t
  misc_feature (579)..(579): n is a, c, g, or t
  misc_feature (585)..(585): n is a, c, g, or t
aataaataaataataatttgtgtatgtgatgactgactctagtcattatggaaaataacttttggcagtttagttcctacttgttaacaattcctctttttaagagaggtactacatttgatttctcaatttctcagtttgttttcaatacaaacagcaaccactgaaatgcagaaaatggtaatcaagtgtgatgtttctataaaaaataattgagattcacatgtaatagaccctttagctttaatgagcagacatgagaatggtttatgatcttaagttggtaacataggaatatgtatttgtcaattttagttcacaaacatatccataaagaatgtttacacatgggcagtatcaaagcatataaaatattttctatggaagtaattgcatcttttatgctagggaacaaagtagcaataaatgttcatttttggatggcaaaaaacnnaaacnnnnnnnnnnnnnnnnnnnnnnnnnnnnnnnnnnnnnnnnnnnnnnnnnnnnnnnnnnnnnnnnnnnnnnnnnnnnnnnnnnnnnnnnnnagtagacnccgaacagcaacccaaanagncncccggnggggtggtgggcgccgccgcggccccaaaaaaattttttaaagggtgtc

SEQ ID NO: 119578 - DNA, 463 bp, Homo Sapiens
  misc_feature (112)..(189): n is a, c, g, or t
  misc_feature (197)..(366): n is a, c, g, or t
gaattaatagaccatccttgggatagtggtatagtaactggaagagaacatgcatggggcttctggagtactggtgatgttccaactcttaatttcatactagtttttgcannnnnnnnnnnnnnnnnnnnnnnnnnnnnnnnnnnnnnnnnnnnnnnnnnnnnnnnnnnnnnnnnnnnnnnnnnnnnntttaccannnnnnnnnnnnnnnnnnnnnnnnnnnnnnnnnnnnnnnnnnnnnnnnnnnnnnnnnnnnnnnnnnnnnnnnnnnnnnnnnnnnnnnnnnnnnnnnnnnnnnnnnnnnnnnnnnnnnnnnnnnnnnnnnnnnnnnnnnnnnnnnnnnnnnnnnnnnnnnnnnnnnnnnnncagcctctatatctaaaggtgaatatgcacatattctatgaaccagtaattccaccccattacatacccatcacaaatgtacacatgcgtgttctca

SEQ ID NO: 119579 - DNA, 430 bp, Homo Sapiens
  misc_feature (296)..(362): n is a, c, g, or t
caaaaattgatttgattctttcttaggaaaatatacattattattaatactctcatgctacaaaggttttctggttaagctgcagccatcatcattcctaaaaatgaaacattggagacatttgtcaagatactcagtcttcaaacagaaataaaagtagataaaaaaggagttaacataatcagtatagagctattattgtctggtggtgaggacatgaactctggagctggaagtcttggatttggttttgaattttattctgctacttattagctcattggccctgaacaaannnnnnnnnnnnnnnnnnnnnnnnnnnnnnnnnnnnnnnnnnnnnnnnnnnnnnnnnnnnnnnnnnnctgaacttagaacaaataatagctattatttgtaaatggttattttatgtagataacccaggagaagt

SEQ ID NO: 119580 - DNA, 408 bp, Homo Sapiens
  misc_feature (342)..(358): n is a, c, g, or t
  misc_feature (362)..(362): n is a, c, g, or t
atggaggatgtggtctgtgaaatggctgatttgaaacatgaaggaggctgcttatgggatgggttattctgggaagcaagcaagtgcgagggcaccaaaaggtatgaagggccttggagtactgggctttcttatggctgcgaaaaaggatgagttggaatgaaatgagcagcttatgaaaccaggaagacaggttattgtggaggagtgacttgctaagctctatcaaatgagcaatgagcagtgaggaaacaggggaaagatgaaatcatggctgcttttggaaagataagtggactaccatgcaccatggaaaatggaaaggtggagggttgttgttgnnnnnnnnnnnnnnnnncacntatgacagagagagaaagaagagggaatatgaatggcatgggaaat

SEQ ID NO: 119581 - DNA, 286 bp, Homo Sapiens
aattcacaatggaagtttattgcaaggatacacacaaatgttgatgtggaagggtcctcccaccagcagcacagtatcacaggtcccatcctcctatcttctggaagttaagaagttcaaacctgttttacttgcatttatatttcccaaggacagagtgccaccctgtgggtaaggtcctagtcagcaacttttaccttcctaacaaacttttctgttcaagagatagcagctaaagggggcaaaaaacatgattggaaccacttttctcaataagaaactttgt

SEQ ID NO: 119582 - DNA, 412 bp, Homo Sapiens
ttttttgattattttgtttcacacctaaacaaatgtttatcttgccatagtgattgaaccataggctgaattgtaaaagctgatgtttgggagtctagctaaagaaaactaagttaataggtttaaagaagcaagagctggaagggtcttctcctggaaggtgagatattggtctgtggggtgtccaagggagagaatccagtcatgggttcttagcttctctttctggttggaccagtaaagcctcttcctcatccctcttttctgctcatcactagagacaaaactaaaaaccatggcttcagtctgctaaaagccgagtggtgatgctgaagggagacacagccttggatatgcgaggacgatgcagtgctggacaaaaggcaggtatctcaaaagcctggggagccaa

SEQ ID NO: 119583 - DNA, 184 bp, Homo Sapiens; identical to SEQ ID NO: 80613

SEQ ID NO: 119584 - DNA, 628 bp, Homo Sapiens; identical to SEQ ID NO: 80620

SEQ ID NO: 119585 - DNA, 387 bp, Homo Sapiens
atggagccaacatgttgttgttctctcagaggcagtggaagcctgtcagactttctgtgagaagtggcatttattactgtctggtagattcctatttctgtataaaaagaagaaaaacatgtgaatacgatacaggaccaggccccacatcctgataacatgcagtgcctcttcaccagccatgccttttgcctcaccctttctgttgctatgttctctatcctgcgttggacaaagagtgtcaggcgaggttttctaggcatctccatcaaaatgagaaggaaaaacctccatctctcagcacttattaacctaaaagataaagttgcactctctacttttcttaggtggggattacatgagccccaccagtcatcacggacacat

SEQ ID NO: 119586 - DNA, 377 bp, Homo Sapiens
aacaaaaacatttaatatttatctacttacatacagtaattaagaatgaatagtttaaacagattattgcatttacatagcattttcctgttttcaaaaaccatttccatatttagtactcaggaaacatggtaaacagatattaccgttcccatactatgggttaaaaaactgagatttagagatttaatttgccaaattgcattatgagaggaaatttaagtggagggatgattcctctacttctacatggaaataaagcaattagttggatgttccagagcaaaagaaaagcctcagacttctttatgggctgaaaggagacagaacatccataaactcatgctgtcttcaaaagcagtatttgagcttttgaa

SEQ ID NO: 119587 - DNA, 497 bp, Homo Sapiens
tttttcattctttataaattttatttaaaacaaaaggaactctaaacaaatttttgactatcgttaatgatatgttgctgaaatgtttggaggtgaagagtactgatgtctgtagttgacagtgcattaaaaaataagacgtgcattaaaaataatatgaatggatggatggatgactagatatgtaggtaaaacaaatatagcaaatgtttattgtagaatctgagtagcaggcatgtgggtgttcttcaacttttctgtatgctggaaatttttcataatacaatgtcttgagagaaagaaggtcagagaagaacttttatttctgatgccttcatttggggatattattttctgagcttcagtgtaatgtttcctgcttctgtatttgccagctgactccagccatctaacttccccggtaaaggtgctcgcttatccagtaagacggacagacgtctatggtagatccacgtttcatttatcccaactcactg

SEQ ID NO: 119588 - DNA, 614 bp, Homo Sapiens; identical to SEQ ID NO: 80684
